(19) United States
(12) Patent Application Publication
(10) Pub. No.: US 2024/0026002 A1
(43) Pub. Date: Jan. 25, 2024

(54) BISPECIFIC IMMUNOMODULATORY ANTIBODIES THAT BIND COSTIMULATORY AND CHECKPOINT RECEPTORS

(71) Applicant: Xencor, Inc., Pasadena, CA (US)

(72) Inventors: Matthew J. Bernett, Monrovia, CA (US); Gregory Moore, Azusa, CA (US); John Desjarlais, Pasadena, CA (US); Michael Hedvat, Encino, CA (US); Christine Bonzon, Los Angeles, CA (US)

(21) Appl. No.: 18/452,395

(22) Filed: Aug. 18, 2023

Related U.S. Application Data
(63) Continuation of application No. 17/233,062, filed on Apr. 16, 2021.
Application No. 17/233,062 is a continuation of application No. 16/184,929, filed on Nov. 8, 2018, now Pat. No. 10,981,992.
(60) Provisional application No. 62/583,431, filed on Nov. 8, 2017.
(60) Provisional application No. 62/614,271, filed on Jan. 5, 2018.
(60) Provisional application No. 62/640,468, filed on Mar. 8, 2018.
(60) Provisional application No. 62/683,554, filed on Jun. 11, 2018.
(60) Provisional application No. 62/724,502, filed on Aug. 29, 2018.

(51) Int. Cl. C07K 16/28; A61P 35/00; A61P 37/06

(52) U.S. Cl. CPC C07K 16/2818; A61P 35/00; A61P 37/06; C07K 16/2803; C07K 16/2827; C07K 2317/55; C07K 2317/622; C07K 2317/64; C07K 2317/76; C07K 2317/52; C07K 2317/33; C07K 2317/31; A61K 2039/507

(57) ABSTRACT

The present invention is directed to bispecific, heterodimeric immunomodulatory antibodies.

### PRIORITY CLAIM

[0001] This application is a continuation of U.S. patent application Ser. No. 17/233,062, filed Apr. 16, 2021, which is a continuation of U.S. patent application Ser. No. 16/184,929, filed Nov. 8, 2018 which claims priority to United States Patent Application Nos. 62/583,431, filed Nov. 8, 2017; 62/614,271, filed Jan. 5, 2018; 62/640,468, filed Mar. 8, 2018; 62/683,554, filed Jun. 11, 2018 and 62/724,502; filed Aug. 29, 2018, all of which are expressly incorporated herein by reference in their entirety, with particular reference to the figures, legends, and claims therein

### SEQUENCE LISTING

[0002] The instant application contains a Sequence Listing which has been submitted electronically in XML file format and is hereby incorporated by reference in its entirety. Said XML copy, created on Aug. 17, 2023, is named 067461-5216-US02.xml and is 53,101,354 bytes in size.

### BACKGROUND OF THE INVENTION

[0003] Tumor-reactive T cells lose their cytotoxic ability over time due to up-regulation of inhibitory immune checkpoints such as PD-1 and CTLA-4. Two parallel therapeutic strategies are being pursued for de-repressing tumor-reactive T cells so that they can continue to kill tumor cells.

[0004] The first approach is immune immunomodulatory blockade by treating with antagonistic monoclonal antibodies that bind to either the immunomodulatory itself (PD-1, CTLA-4, etc.) or its ligand (PD-L1, PD-L2, CD80, CD86, etc.), thus removing the inhibitory signals holding back tumor-reactive T cells from tumor cell killing. Immunomodulatory receptors such as CTLA-1, PD-1 (programmed cell death 1), TIM-3 (T cell immunoglobulin and mucin domain 3), LAG-3 (lymphocyte-activation gene 3), TIGIT (T cell immunoreceptor with Ig and ITIM domains), and others, inhibit the activation, proliferation, and/or effector activities of T cells and other cell types. Guided by the hypothesis that immunomodulatory receptors suppress the endogenous T cell response against tumor cells, preclinical and clinical studies of anti-CTLA4 and anti-PD1 antibodies, including nivolumab, pembrolizumab, ipilimumab, and tremelimumab, have indeed demonstrated that immunomodulatory blockade results in impressive anti-tumor responses, stimulating endogenous T cells to attack tumor cells, leading to long-term cancer remissions in a fraction of patients with a variety of malignancies. Unfortunately, only a subset of patients responds these therapies, with response rates generally ranging from 10 to 30% and sometimes higher for each monotherapy, depending on the indication and other factors.

[0005] The second approach for de-repressing tumor-reactive T cells is T cell costimulation by treating with agonistic antibodies that bind to costimulatory proteins such as ICOS, thus adding a positive signal to overcome the negative signaling of the immune checkpoints.

[0006] Accordingly, the invention is directed to bispecific antibodies that bind to costimulatory receptors (e.g. ICOS, GITR, OX40, 4-1BB) as well as checkpoint receptors (e.g. PD-1, PD-L1, CTLA-4, LAG-3, TIM-3, BTLA and TIGIT.

### SUMMARY OF THE INVENTION

[0007] Accordingly, in one aspect, the invention provides bispecific antibodies that monovalently binds a human costimulatory receptor and monovalently binds a human checkpoint receptor for use in activating T cells for the treatment of cancer.

[0008] In some aspect is, the costimulatory receptor is selected from the group consisting of ICOS, GITR, OX40 and 4-1BB.

[0009] In additional aspects, the checkpoint receptor is selected from the group consisting of PD-1, PD-L1, CTLA-4, LAG-3, TIGIT and TIM-3.

[0010] In further aspects, the antibody binds an antigen pair selected from: ICOS and PD-1, ICOS and CTLA-4, ICOS and LAG-3, ICOS and TIM-3, ICOS and PD-L1, ICOS and BTLA, ICOS and TIGIT, GITR and TIGIT, GITR and PD-1, GITR and CTLA-4, GITR and LAG-3, GITR and TIM-3, GITR and PD-L1, GITR and BTLA, OX40 and PD-1, OX40 and TIGIT, OX40 and CTLA-4, IC OX40 OS and LAG-3, OX40 and TIM-3, OX40 and PD-L1, OX40 and BTLA, 4-1BB and PD-1, 4-1BB and CTLA-4, 4-1BB and LAG-3, 4-1BB and TIM-3, 4-1BB and PD-L1, TIGIT and 4-1BB and 4-1BB and BTLA.

[0011] In additional aspects, the bispecific antibody has a format selected from those outlined in FIG. 2.

[0012] In further aspects, the invention provides heterodimeric antibodies comprising: a) a first heavy chain comprising a first Fc domain, an optional domain linker and a first antigen binding domain comprising an scFv that binds a first antigen; b) a second heavy chain comprising a heavy chain comprising a heavy chain constant domain comprising a second Fc domain, a hinge domain, a CH1 domain and a variable heavy domain; and c) a light chain comprising a variable light domain and a light chain constant domain; wherein said variable heavy domain and said variable light domain form a second antigen binding domain that binds a second antigen, wherein one of said first and second antigen binding domains binds human ICOS and the other binds human PD-1.

[0013] In an additional aspect, the invention provides heterodimeric bispecific antibodies comprising: a) a first heavy chain comprising: i) a first variant Fc domain; and ii) a single chain Fv region (scFv) that binds a first antigen, wherein said scFv region comprises a first variable heavy chain, a variable light chain and a charged scFv linker, wherein said charged scFv linker covalently attaches said first variable heavy chain and said variable light chain; and b) a second heavy chain comprising a VH-CH1-hinge-CH2-CH3 monomer, wherein VH is a second variable heavy chain and CH2-CH3 is a second variant Fc domain; and c) a light chain; wherein said second variant Fc domain comprises amino acid substitutions N208D/Q295E/N384D/Q418E/N241D, wherein said first and second variant Fc domains each comprise amino acid substitutions E233P/L234V/L235A/G236del/S267K; and wherein said first variant Fc domain comprises amino acid substitutions S364K/E357Q and second variant Fc domain comprises amino acid substitutions L368D/K370S, wherein one of said first and second antigen binding domains binds human ICOS and the other binds human PD-1, and wherein numbering is according to the EU index as in Kabat.

[0014] In some aspects the heterodimeric antibodies have first and second variant Fc domains that each comprise M428L/N434S.

[0015] In an additional aspect, the invention provides heterodimeric antibodies comprising: a) a first heavy chain comprising: i) a first variant Fc domain; and ii) a single chain Fv region (scFv) that binds a first antigen, wherein said scFv region comprises a first variable heavy chain, a variable light chain and a charged scFv linker, wherein said charged scFv linker covalently attaches said first variable heavy chain and said variable light chain; and b) a second heavy chain comprising a VH-CH1-hinge-CH2-CH3 monomer, wherein VH is a second variable heavy chain and CH2-CH3 is a second variant Fc domain; and c) a light chain; wherein said first and second variant Fc domains comprises a set of heterodimerization variants selected from the group consisting of L368D/K370S S364K/E357Q; L368D/K370S:S364K; L368E/K370S:S364K; T411E/K360E/Q362E:D401K; and T366S/L368A/Y407V:T366W, and wherein one of said first and second antigen binding domains binds human ICOS and the other binds human PD-1, and wherein numbering is according to the EU index as in Kabat.

[0016] In a further aspect, the invention provides nucleic acid compositions comprising nucleic acids that encode the heterodimeric antibodies of the invention, expression vector compositions comprising the nucleic acids, and host cells comprising the expression vector compositions.

[0017] In an additional aspect, the invention provides heterodimeric antibodies for use in the activation of T cells for the treatment of cancer.

### BRIEF DESCRIPTION OF THE DRAWINGS

[0018] FIG. 1 presents expression data (RNAseq V2 RSEM) of PD-1 and T cell costimulatory receptors for bladder, breast, colon, head & neck, kidney, lung-adeno, lung squamous, ovarian, pancreatic, prostate, and melanoma cancer compiled from The Cancer Genome Atlas (TCGA). The square of the Pearson correlation coefficient was calculated for PD-1 against T cell costimulatory receptors.

[0019] FIG. 2A to 2N depict several formats for the bispecific antibodies of the present invention. The first is the “bottle opener” format, with a first and a second anti-antigen binding domain. Additionally, mAb-Fv, mAb-scFv, Central-scFv, Central-Fv, one armed central-scFv, one scFv-mAb, scFv-mAb dual scFv format are all shown. FIG. 2J depicts the “central-scFv2” format, with two Fab-scFv arms, wherein the Fabs bind a first antigen and the scFvs bind a second antigen. FIG. 2K depicts the bispecific mAb format, with a first Fab arm binding a first antigen and a second Fab arm binding a second antigen. FIG. 2L depicts the DVD-IgG format (see, e.g., U.S. Pat. No. 7,612,181, hereby expressly incorporated by reference and as discussed below). FIG. 2M depicts the Trident format (see, e.g., WO 2015/184203, hereby expressly incorporated by reference and as discussed below). For all of the scFv domains depicted, they can be either N- to C-terminus variable heavy-(optional linker)-variable light, or the opposite. In addition, for the one armed scFv-mAb, the scFv can be attached either to the N-terminus of a heavy chain monomer or to the N-terminus of the light chain.

[0020] FIGS. 3A and 3B depicts the sequences of XENP23104, a bottle opener format with the ICOS as the Fab side ([ICOS]_H0.66_L0) and the PD-1 as the scFv (1G6_L1.94_H1.279), and includes the M428L/434S variant to extend serum half life. The CDRs are underlined, the scFv linker is double underlined (in the sequences, the scFv linker is a positively charged scFv (GKPGS)4 linker (SEQ ID NO: 26209), although as will be appreciated by those in the art, this linker can be replaced by other linkers, including uncharged or negatively charged linkers, some of which are depicted in FIG. 8), and the slashes indicate the border(s) of the variable domains. In addition, the naming convention illustrates the orientation of the scFv from N- to C-terminus; some of the sequences herein are oriented as VH-scFv linker-VL (from N- to C-terminus), while some are oriented as VL-scFv linker-VH (from N- to C-terminus), although as will be appreciated by those in the art, these sequences may also be used in the opposition orientation from their depiction herein. As noted herein and is true for every sequence herein containing CDRs, the exact identification of the CDR locations may be slightly different depending on the numbering used as is shown in Table 1, and thus included herein are not only the CDRs that are underlined but also CDRs included within the VH and VL domains using other numbering systems.

[0021] FIG. 4A to 4F depict useful pairs of heterodimerization variant sets (including skew and pI variants). On FIGS. 4C and F, there are variants for which there are no corresponding “monomer 2” variants; these are pI variants which can be used alone on either monomer, or included on the Fab side of a bottle opener, for example, and an appropriate charged scFv linker can be used on the second monomer that utilizes a scFv as the second antigen binding domain. Suitable charged linkers are shown in FIG. 8.

[0022] FIG. 5 depict a list of isosteric variant antibody constant regions and their respective substitutions. pI_(−) indicates lower pI variants, while pI_(+) indicates higher pI variants. These can be optionally and independently combined with other heterodimerization variants of the invention (and other variant types as well, as outlined herein).

[0023] FIG. 6 depict useful ablation variants that ablate FcγR binding (sometimes referred to as “knock outs” or “KO” variants). Generally, ablation variants are found on both monomers, although in some cases they may be on only one monomer.

[0024] FIGS. 7A and 7B show two particularly useful embodiments of the invention. The “non-Fv” components of this embodiment is shown in FIG. 9A, although the other formats of FIG. 9 can be used as well.

[0025] FIGS. 8A and 8B depict a number of charged scFv linkers that find use in increasing or decreasing the pI of heterodimeric antibodies that utilize one or more scFv as a component. The (+H) positive linker finds particular use herein. A single prior art scFv linker with single charge is references as “Whitlow”, from Whitlow et al., Protein Engineering 6(8):989-995 (1993). It should be noted that this linker was used for reducing aggregation and enhancing proteolytic stability in scFvs.

[0026] FIG. 9A to 9D shows the sequences of several useful bottle opener format backbones based on human IgG1, without the Fv sequences (e.g. the scFv and the vh and vl for the Fab side). Bottle opener backbone 1 is based on human IgG1 (356E/358M allotype), and includes the S364K/E357Q:L368D/K370S skew variants, the N208D/Q295E/N384D/Q418E/N421D pI variants on the Fab side and the E233P/L234V/L235A/G236del/S267K ablation variants on both chains. Bottle opener backbone 2 is based on human IgG1 (356E/358M allotype), and includes different skew variants, the N208D/Q295E/N384D/Q418E/N421D pI variants on the Fab side and the E233P/L234V/L235A/G236del/S267K ablation variants on both chains. Bottle opener backbone 3 is based on human IgG1 (356E/358M allotype), and includes different skew variants, the N208D/Q295E/N384D/Q418E/N421D pI variants on the Fab side and the E233P/L234V/L235A/G236del/S267K ablation variants on both chains. Bottle opener backbone 4 is based on human IgG1 (356E/358M allotype), and includes different skew variants, the N208D/Q295E/N384D/Q418E/N421D pI variants on the Fab side and the E233P/L234V/L235A/G236del/S267K ablation variants on both chains. Bottle opener backbone 5 is based on human IgG1 (356D/358L allotype), and includes the S364K/E357Q L368D/K370S skew variants, the N208D/Q295E/N384D/Q418E/N421D pI variants on the Fab side and the E233P/L234V/L235A/G236del/S267K ablation variants on both chains. Bottle opener backbone 6 is based on human IgG1 (356E/358M allotype), and includes the S364K/E357Q: L368D/K370S skew variants, N208D/Q295E/N384D/Q418E/N421D pI variants on the Fab side and the E233P/L234V/L235A/G236del/S267K ablation variants on both chains, as well as an N297A variant on both chains. Bottle opener backbone 7 is identical to 6 except the mutation is N297S. Alternative formats for bottle opener backbones 6 and 7 can exclude the ablation variants E233P/L234V/L235A/G236del/S267K in both chains. Backbone 8 is based on human IgG4, and includes the S364K/E357Q:L368D/K370S skew variants, the N208D/Q295E/N384D/Q418E/N421D pI variants on the Fab side and the E233P/L234V/L235A/G236del/S267K ablation variants on both chains, as well as a S228P (EU numbering, this is S241P in Kabat) variant on both chains that ablates Fab arm exchange as is known in the art. Alternative formats for bottle opener backbone 8 can exclude the ablation variants E233P/L234V/L235A/G236del/S267K in both chains Backbone 9 is based on human IgG2, and includes the S364K/E357Q:L368D/K370S skew variants, the N208D/Q295E/N384D/Q418E/N421D pI variants on the Fab side. Backbone 10 is based on human IgG2, and includes the S364K/E357Q:L368D/K370S skew variants, the N208D/Q295E/N384D/Q418E/N421D pI variants on the Fab side as well as a S267K variant on both chains.

[0027] As will be appreciated by those in the art and outlined below, these sequences can be used with any vh and vl pairs outlined herein, with one monomer including a scFv (optionally including a charged scFv linker) and the other monomer including the Fab sequences (e.g. a vh attached to the “Fab side heavy chain” and a vl attached to the “constant light chain”). That is, any Fv sequences outlined herein for anti-CTLA-4, anti-PD-1, anti-LAG-3, anti-TIM-3, anti-TIGIT and anti-BTLA, whether as scFv (again, optionally with charged scFv linkers) or as Fabs, can be incorporated into these FIG. 37 backbones in any combination. The constant light chain depicted in FIG. 9A can be used for all of the constructs in the figure, although the kappa constant light chain can also be substituted.

[0028] It should be noted that these bottle opener backbones find use in the Central-scFv format of FIG. 1F, where an additional, second Fab (vh-CH1 and vl-constant light) with the same antigen binding as the first Fab is added to the N-terminus of the scFv on the “bottle opener side”.

[0029] Included within each of these backbones are sequences that are 90, 95, 98 and 99% identical (as defined herein) to the recited sequences, and/or contain from 1, 2, 3, 4, 5, 6, 7, 8, 9 or 10 additional amino acid substitutions (as compared to the “parent” of the Figure, which, as will be appreciated by those in the art, already contain a number of amino acid modifications as compared to the parental human IgG1 (or IgG2 or IgG4, depending on the backbone). That is, the recited backbones may contain additional amino acid modifications (generally amino acid substitutions) in addition to the skew, pI and ablation variants contained within the backbones of this figure.

[0030] FIG. 10A to 10E depicts the sequences for a select number of anti-PD-1 antibodies. It is important to note that these sequences were generated based on human IgG1, with an ablation variant (E233P/L234V/L235A/G236del/S267K, “IgG1_PVA_/S267K”) which is depicted in FIG. 6A. The CDRs are underlined. As noted herein and is true for every sequence herein containing CDRs, the exact identification of the CDR locations may be slightly different depending on the numbering used as is shown in Table 1, and thus included herein are not only the CDRs that are underlined but also CDRs included within the VH and VL domains using other numbering systems.

[0031] FIG. 11A to 11E depict a select number of PD-1 ABDs, with additional anti-PD-1 ABDs being listed as SEQ 1-2392, 3125-3144, 4697-7594 and 4697-21810. The CDRs are underlined, the scFv linker is double underlines (in the sequences, the scFv linker is a positively charged scFv (GKPGS)4 linker (SEQ ID NO: 26209), although as will be appreciated by those in the art, this linker can be replaced by other linkers, including uncharged or negatively charged linkers, some of which are depicted in FIG. 8), and the slashes indicate the border(s) of the variable domains. In addition, the naming convention illustrates the orientation of the scFv from N- to C-terminus; some of the sequences in this Figure are oriented as VH-scFv linker-VL (from N- to C-terminus), while some are oriented as VL-scFv linker-VH (from N- to C-terminus), although as will be appreciated by those in the art, these sequences may also be used in the opposition orientation from their depiction herein. As noted herein and is true for every sequence herein containing CDRs, the exact identification of the CDR locations may be slightly different depending on the numbering used as is shown in Table 1, and thus included herein are not only the CDRs that are underlined but also CDRs included within the VH and VL domains using other numbering systems. Furthermore, as for all the sequences in the Figures, these VH and VL sequences can be used either in a scFv format or in a Fab format.

[0032] FIG. 12A to 12PP depict a select number of CTLA-4 ABDs, with additional anti-CTLA-4 ABDs being listed as SEQ ID NO:2393-2414 and 3737-3816. The CDRs are underlined, the scFv linker is double underlines (in the sequences, the scFv linker is a positively charged scFv (GKPGS)4 linker (SEQ ID NO: 26209), although as will be appreciated by those in the art, this linker can be replaced by other linkers, including uncharged or negatively charged linkers, some of which are depicted in FIG. 8), and the slashes indicate the border(s) of the variable domains. In addition, the naming convention illustrates the orientation of the scFv from N- to C-terminus; some of the sequences in this Figure are oriented as VH-scFv linker-VL (from N- to C-terminus), while some are oriented as VL-scFv linker-VH (from N- to C-terminus), although as will be appreciated by those in the art, these sequences may also be used in the opposition orientation from their depiction herein. As noted herein and is true for every sequence herein containing CDRs, the exact identification of the CDR locations may be slightly different depending on the numbering used as is shown in Table 1, and thus included herein are not only the CDRs that are underlined but also CDRs included within the VH and VL domains using other numbering systems. Furthermore, as for all the sequences in the Figures, these VH and VL sequences can be used either in a scFv format or in a Fab format.

[0033] FIG. 13A to 13N depict a select number of LAG-3 ABDs, with additional anti-LAG-3 ABDs being listed as SEQ ID NO:2415-2604 and 3817-3960. The CDRs are underlined, the scFv linker is double underlines (in the sequences, the scFv linker is a positively charged scFv (GKPGS)4 linker (SEQ ID NO: 26209), although as will be appreciated by those in the art, this linker can be replaced by other linkers, including uncharged or negatively charged linkers, some of which are depicted in FIG. 8), and the slashes indicate the border(s) of the variable domains>In addition, the naming convention illustrates the orientation of the scFv from N- to C-terminus; some of the sequences in this Figure are oriented as VH-scFv linker-VL (from N- to C-terminus), while some are oriented as VL-scFv linker-VH (from N- to C-terminus), although as will be appreciated by those in the art, these sequences may also be used in the opposition orientation from their depiction herein. As noted herein and is true for every sequence herein containing CDRs, the exact identification of the CDR locations may be slightly different depending on the numbering used as is shown in Table 1, and thus included herein are not only the CDRs that are underlined but also CDRs included within the VH and VL domains using other numbering systems. Furthermore, as for all the sequences in the Figures, these VH and VL sequences can be used either in a scFv format or in a Fab format.

[0034] FIG. 14A to 14I depicts the sequences for a select number of anti-TIM-3 antibodies. It is important to note that these sequences were generated based on human IgG1 backbone, with an ablation variant (E233P/L234V/L235A/G236del/S267K, “IgG1_PVA_/S267K”) although other formats can be used as well. The CDRs are underlined. As noted herein and is true for every sequence herein containing CDRs, the exact identification of the CDR locations may be slightly different depending on the numbering used as is shown in Table 1, and thus included herein are not only the CDRs that are underlined but also CDRs included within the VH and VL domains using other numbering systems.

[0035] FIG. 15A to 15C depicts the sequences for a select number of anti-PD-L1 antibodies. It is important to note that these sequences were generated based on human IgG1 backbone, with an ablation variant (E233P/L234V/L235A/G236del/S267K, “IgG1_PVA_/S267K”) as outlined herein, although other formats can be used as well. The CDRs are underlined. As noted herein and is true for every sequence herein containing CDRs, the exact identification of the CDR locations may be slightly different depending on the numbering used as is shown in Table 1, and thus included herein are not only the CDRs that are underlined but also CDRs included within the VH and VL domains using other numbering systems.

[0036] FIG. 16 depicts the sequences for a prototype anti-4-1BB antibody. It is important to note that these sequences were generated based on human IgG1 backbone, with an ablation variant (E233P/L234V/L235A/G236del/S267K, “IgG1_PVA_/S267K”), although the other formats can be used as well. The CDRs are underlined. As noted herein and is true for every sequence herein containing CDRs, the exact identification of the CDR locations may be slightly different depending on the numbering used as is shown in Table 1, and thus included herein are not only the CDRs that are underlined but also CDRs included within the VH and VL domains using other numbering systems.

[0037] FIG. 17 depicts the sequences for a prototype anti-OX40 antibody. It is important to note that these sequences were generated based on human IgG1 backbone, with an ablation variant (E233P/L234V/L235A/G236del/S267K, “IgG1_PVA_/S267K”), although other formats can be used as well. The CDRs are underlined. As noted herein and is true for every sequence herein containing CDRs, the exact identification of the CDR locations may be slightly different depending on the numbering used as is shown in Table 1, and thus included herein are not only the CDRs that are underlined but also CDRs included within the VH and VL domains using other numbering systems.

[0038] FIG. 18 depicts the sequences for a prototype anti-GITR antibody. It is important to note that these sequences were generated based on human IgG1 backbone, with an ablation variant (E233P/L234V/L235A/G236del/S267K, “IgG1_PVA_/S267K”), although other formats can be used as well. The CDRs are underlined. As noted herein and is true for every sequence herein containing CDRs, the exact identification of the CDR locations may be slightly different depending on the numbering used as is shown in Table 1, and thus included herein are not only the CDRs that are underlined but also CDRs included within the VH and VL domains using other numbering systems.

[0039] FIG. 19A to 19G depicts the sequences for prototype anti-ICOS antibodies. It is important to note that these sequences were generated based on human IgG1 backbone, with an ablation variant (E233P/L234V/L235A/G236del/S267K, “IgG1_PVA_/S267K”), although other formats can be used as well. The CDRs are underlined. As noted herein and is true for every sequence herein containing CDRs, the exact identification of the CDR locations may be slightly different depending on the numbering used as is shown in Table X, and thus included herein are not only the CDRs that are underlined but also CDRs included within the VH and VL domains using other numbering systems.

[0040] FIG. 20A to 20G depicts sequences for exemplary anti-ICOS Fabs. The CDRs are underlined and slashes (/) indicate the border(s) of the variable regions. As noted herein and is true for every sequence herein containing CDRs, the exact identification of the CDR locations may be slightly different depending on the numbering used as is shown in Table X, and thus included herein are not only the CDRs that are underlined but also CDRs included within the VH and VL domains using other numbering systems. Furthermore, as for all the sequences in the Figures, these VH and VL sequences can be used either in a scFv format or in a Fab format. It is important to note that these sequences were generated using six-histidine (His6 or HHHHHH) (SEQ ID NO: 28666) C-terminal tags at the C-terminus of the heavy chains, which have been removed.

[0041] FIG. 21A to 21B depicts melting temperatures (Tm) and changes in melting temperature from the parental Fab (XENP22050) as determined by DSF of variant anti-ICOS Fabs engineered for stability.

[0042] FIG. 22A to 22C depicts equilibrium dissociation constants (KD), association rates (ka), and dissociation rates (kd) of variant anti-ICOS Fabs for murine Fc fusions of human ICOS captured on AMC biosensors as determined by Octet.

[0043] FIG. 23 depicts equilibrium dissociation constants (KD), association rates (ka), and dissociation rates (kd) of variant anti-ICOS Fabs for biotinylated IgG1 Fc fusions of human ICOS captured on SA biosensors as determined by Octet.

[0044] FIG. 24A to 24M depicts sequences for exemplary anti-ICOS scFvs. The CDRs are underlined, the scFv linker is double underline (in the sequences, the scFv linker is a positively charged scFv (GKPGS)4 linker (SEQ ID NO: 26209), although as will be appreciated by those in the art, this linker can be replaced by other linkers, including uncharged or negatively charged linkers, some of which are depicted in Figure X), and slashes (/) indicate the border(s) of the variable regions. The naming convention illustrates the orientation of the scFv from N- to C-terminus; some of the sequences in this Figure are oriented as VH-scFv linker-VL (from N- to C-terminus, see FIG. 24), while some are oriented as VL-scFv linker-VH (from N- to C-terminus, see FIG. 24B), although as will be appreciated by those in the art, these sequences may also be used in the opposition orientation from their depiction herein. As noted herein and is true for every sequence herein containing CDRs, the exact identification of the CDR locations may be slightly different depending on the numbering used as is shown in Table X, and thus included herein are not only the CDRs that are underlined but also CDRs included within the VH and VL domains using other numbering systems. Furthermore, as for all the sequences in the Figures, these VH and VL sequences can be used either in a scFv format or in a Fab format. It is important to note that these sequences were generated using polyhistidine (His6 or HHHHHH) (SEQ ID NO: 28666) C-terminal tags at the C-terminus of the heavy chains, which have been removed.

[0045] FIG. 25 depicts melting temperatures (Tm) and changes in melting temperature from the parental scFv (XENP24352; oriented as VH-scFv linker-VL from N- to C-terminus) as determined by DSF of variant anti-ICOS scFvs engineered for stability.

[0046] FIG. 26A to 26D depicts the amino acid sequences of prototype anti-costim×anti-checkpoint antibodies in the bottle-opener format (Fab-scFv-Fc). The antibodies are named using the Fab variable region first and the scFv variable region second, separated by a dash, followed by the chain designation (Fab-Fc heavy chain, scFv-Fc heavy chain or light chain). CDRs are underlined and slashes indicate the border(s) of the variable regions. The scFv domain has different orientations (N- to C-terminus) of either VH-scFv linker-VL or VL-scFv linker-VH as indicated, although this can be reversed. In addition, each sequence outlined herein can include or exclude the M428L/N434S variants in one or preferably both Fc domains, which results in longer half-life in serum.

[0047] FIG. 27 depicts induction of cytokine secretion by prototype costim/checkpoint bottle-openers in an SEB-stimulated PBMC assay.

[0048] FIG. 28 depicts induction of IL-2 secretion in naive (non-SEB stimulated) and SEB-stimulated PBMCs following treatment with the indicated test articles.

[0049] FIG. 29 depicts a schematic associated with the benefit of a costim×checkpoint blockade bispecific antibody, showing that because tumor TTLs co-express immune checkpoint receptors and costimulatory receptors, a bispecific antibody increases specificity, enhancing anti-tumor activity and avoiding peripheral toxicity.

[0050] FIG. 30 depicts that double-positive cells are selectively occupied by exemplary anti-ICOS×anti-PD-1 antibody (XENP20896) as compared to one-arm anti-PD-1 antibody (XENP20111) and one-arm anti-ICOS antibody (XENP20266).

[0051] FIG. 31A to 31B shows the receptor occupancy of anti-ICOS×anti-PD-1 bispecific antibody (XENP20896), one-arm anti-ICOS antibody (XENP20266) and one-arm anti-PD-1 antibody (XENP20111) on A) PD-1 and ICOS double-positive T cells and B) PD-1 and ICOS double-negative T cells after SEB stimulation of human PBMCs.

[0052] FIG. 32A to 32D depicts the amino acid sequences of exemplary anti-ICOS×anti-PD-1 antibodies in the bottle-opener format (Fab-scFv-Fc). The antibodies are named using the Fab variable region first and the scFv variable region second, separated by a dash, followed by the chain designation (Fab-Fc heavy chain, scFv-Fc heavy chain or light chain). CDRs are underlined and slashes indicate the border(s) of the variable regions. The scFv domain has different orientations (N- to C-terminus) of either VH-scFv linker-VL or VL-scFv linker-VH as indicated, although this can be reversed. In addition, each sequence outlined herein can include or exclude the M428L/N434S variants in one or preferably both Fc domains, which results in longer half-life in serum.

[0053] FIG. 33A to 33C depicts the amino acid sequences of exemplary anti-ICOS×anti-PD-1 antibodies in the bottle-opener format (Fab-scFv-Fc) which include the M428L/N434S variants in one or preferably both Fc domains, which results in longer half-life in serum. The antibodies are named using the Fab variable region first and the scFv variable region second, separated by a dash, followed by the chain designation (Fab-Fc heavy chain, scFv-Fc heavy chain or light chain). CDRs are underlined and slashes indicate the border(s) of the variable regions. The scFv domain has different orientations (N- to C-terminus) of either VH-scFv linker-VL or VL-scFv linker-VH as indicated, although this can be reversed.

[0054] FIG. 34A to 34C depicts equilibrium dissociation constants (KD), association rates (ka), and dissociation rates (kd) of variant anti-ICOS×anti-PD-1 bispecific antibodies for murine Fc fusion of human ICOS captured on AMC biosensors as determined by Octet.

[0055] FIG. 35 depicts equilibrium dissociation constants (KD), association rates (ka), and dissociation rates (kd) of variant anti-ICOS×anti-PD-1 bispecific antibodies for biotinylated IgG1 Fc fusions of human and ICOS captured on SA/SAX biosensors as determined by Octet.

[0056] FIGS. 36A and 36B depicts cell surface binding of variant anti-ICOS×anti-PD-1 bispecific to human T cells in SEB-stimulated PBMC assays in two separate experiments depicted in A) and B).

[0057] FIG. 37 shows the receptor occupancy of variant anti-ICOS×anti-PD-1 bispecific antibodies, one-arm anti-ICOS antibodies and one-arm anti-PD-1 antibody (XENP20111) on PD-1 and ICOS double-positive T cells after SEB stimulation of human PBMCs.

[0058] FIGS. 38A and 38B show that variant anti-ICOS×anti-PD-1 bispecific antibodies promote A) TL-2 and B) IFNγ secretion from SEB stimulated PBMCs.

[0059] FIGS. 39A and 39B show that variant anti-ICOS×anti-PD-1 bispecific antibodies promote A) TL-2 and B) IFNγ secretion from SEB-stimulated PBMCs.

[0060] FIGS. 40A and 40B depicts the concentration of IFNγ in mice on Day A) 7 and B) 11 after engraftment with human PBMCs and treatment with the indicated test articles.

[0061] FIGS. 41A and 41B depicts CD45+ cell counts in mice as determined by flow cytometry on Day A) 11 and B) 14 after engraftment with human PBMCs and treatment with the indicated test articles.

[0062] FIGS. 42A and 42B depicts A) CD8+ T cell and B) CD4+ T cell counts in mice as determined by flow cytometry on Day 14 after engraftment with human PBMCs and treatment with the indicated test articles (**p≤0.01).

[0063] FIG. 43 depicts the change in body weight in mice by Day 14 after engraftment with human PBMCs and treatment with the indicated test articles (**p≤0.01).

[0064] FIGS. 44A and 44B depicts the concentration of IFNγ in mice on Day A) 7 and B) 14 after engraftment with human PBMCs and treatment with the indicated test articles.

[0065] FIG. 45 depicts CD45+ cell counts in mice as determined by flow cytometry on Day 14 after engraftment with human PBMCs and treatment with the indicated test articles.

[0066] FIG. 46A to 46C depicts A) CD8+ T cell and B) CD4+ T cell counts in mice as determined by flow cytometry on Day 14 after engraftment with human PBMCs and treatment with the indicated test articles.”

[0067] FIGS. 47A and 47B depicts the change in body weight in mice by Day 12 and 15 after engraftment with human PBMCs and treatment with the indicated test articles.

[0068] FIG. 48A to 48D depicts the amino acid sequences of exemplary anti-ICOS×anti-PD-1 antibodies in the bottle-opener format (Fab-scFv-Fc) with alternative ICOS ABDs. The antibodies are named using the Fab variable region first and the scFv variable region second, separated by a dash, followed by the chain designation (Fab-Fc heavy chain, scFv-Fc heavy chain or light chain). CDRs are underlined and slashes indicate the border(s) of the variable regions. The scFv domain has different orientations (N- to C-terminus) of either VH-scFv linker-VL or VL-scFv linker-VH as indicated, although this can be reversed. In addition, each sequence outlined herein can include or exclude the M428L/N434S variants in one or preferably both Fc domains, which results in longer half-life in serum.

[0069] FIG. 49 depict cytokine release assay for IL-2 after SEB-stimulation of human PBMCs and treatment with alternative anti-ICOS×anti-PD-1 bispecific antibodies.

[0070] FIG. 50 depict cytokine release assay for IL-2 (as fold induction over bivalent anti-RSV mAb) after SEB-stimulation of human PBMCs and treatment with alternative anti-ICOS×anti-PD-1 bispecific antibodies.

[0071] FIG. 51 depicts AKT phosphorylation in SEB-stimulated purified CD3+ T cells after treatment with anti-ICOS×anti-PD-1 bispecific antibodies.

[0072] FIG. 52 depicts fold induction of A) IL-17A, B) IL17F, C) IL-22, D) IL-10, E) IL-9, and F) IFNγ gene expression by the indicated test articles over induction by bivalent anti-RSV as determined by NanoString.

[0073] FIG. 53A to 53F depict mean fold induction in expression of selected immune response genes by indicated test articles over treatment with bivalent anti-RSV mAb as determined by NanoString. The shading intensity corresponds to the magnitude of the fold change.

[0074] FIG. 54 depicts CD45+ cell counts in mice as determined by flow cytometry on Day 14 after engraftment with human PBMCs and treatment with the indicated test articles.

[0075] FIGS. 55A to 55D, similar to FIG. 9 and FIG. 75, depicts the sequences of the “backbone” portion (e.g. without the Fvs) of a number of additional formats, including the Central scFv of FIG. 2F, the Central-scFv2 format of FIG. 2J, the bispecific mAb of FIG. 2K, the DVD-Ig of FIG. 2L and the Trident format of FIG. 2M. In FIG. 2L, the DVD-Ig® linkers are shown with double underlining, with other linkers found in WO2007/024715, hereby incorporated by reference in its entirety and in particular for those sequences. In the Trident format, other Trident linkers and coil-coil sequences are shown in WO 2015/184203, hereby incorporated by reference in its entirety and in particular for those sequences. As will be appreciated by those in the art, bolded domains (e.g. “VH1”, VH2-scFv linker-VL2”, etc.) are separated with slashes “/”, and may include optional domain linkers as needed. All of these backbones utilize the kappa constant region for the light chain, although the lambda chain can also be used. As for FIG. 9 and FIG. 75, these backbones can be combined with any vh and vl domains as outlined herein.

[0076] FIGS. 56A and 56B depicts the amino acid sequence of illustrative anti-PD-1×anti-ICOS antibodies in the bottle-opener format (Fab-scFv-Fc). The antibodies are named using the Fab variable region first and the scFv variable region second, separated by a dash, followed by the chain designation (Fab-Fc heavy chain, scFv-Fc heavy chain or light chain). CDRs are underlined and slashes indicate the border(s) of the variable regions. The scFv domain has different orientations (N- to C-terminus) of either VH-scFv linker-VL or VL-scFv linker-VH as indicated, although this can be reversed. In addition, each sequence outlined herein can include or exclude the M428L/N434S variants in one or preferably both Fc domains, which results in longer half-life in serum.

[0077] FIG. 57A to 57C depicts the amino acid sequence of illustrative anti-PD-1×anti-ICOS antibodies in the central-scFv format. The antibodies are named using the first Fab-Fc variable region first and the Fab-scFv-Fc variable region second, separated by a dash, followed by the chain designation (Fab-Fc heavy chain, Fab-scFv-Fc heavy chain or light chain). CDRs are underlined and slashes indicate the border(s) of the variable regions. The scFv domain has different orientations (N- to C-terminus) of either VH-scFv linker-VL or VL-scFv linker-VH as indicated, although this can be reversed. In addition, each sequence outlined herein can include or exclude the M428L/N434S variants in one or preferably both Fc domains, which results in longer half-life in serum.

[0078] FIG. 58 depicts the amino acid sequence of illustrative anti-PD-1×anti-ICOS antibodies in the central-scFv2 format. The antibodies are named using the Fab variable region first and the scFv variable region second, followed by the chain designation (heavy chain or light chain). CDRs are underlined and slashes indicate the border(s) of the variable regions. The scFv domain has different orientations (N- to C-terminus) of either VH-scFv linker-VL or VL-scFv linker-VH as indicated, although this can be reversed. In addition, each sequence outlined herein can include or exclude the M428L/N434S variants in one or preferably both Fc domains, which results in longer half-life in serum.

[0079] FIG. 59 depicts the amino acid sequence of an illustrative anti-PD-1×anti-ICOS antibody in the bispecific mAb format. The antibodies are named using the first Fab variable region for a first antigen and the second Fab variable region for a second antigen, separated by a dash, followed by the chain designation (Heavy Chain 1 or Light Chain 1 for the first antigen and Heavy Chain 2 or Light Chain 2 for the second antigen). CDRs are underlined and slashes indicate the border(s) of the variable regions. Each sequence outlined herein can include or exclude the M428L/N434S variants in one or preferably both Fc domains, which results in longer half-life in serum.

[0080] FIG. 60 depicts the amino acid sequence of an illustrative anti-PD-1×anti-ICOS antibody in the DVD-IgG format. The antibodies are named using the first variable region for a first antigen and the second Fab variable region for a second antigen, followed by the chain designation (Heavy Chain or Light Chain). CDRs are underlined and slashes indicate the border(s) of the variable regions. Each sequence outlined herein can include or exclude the M428L/N434S variants in one or preferably both Fc domains, which results in longer half-life in serum.

[0081] FIGS. 61A and 61B depicts the amino acid sequence of an illustrative anti-PD-1×anti-ICOS antibody in the Trident format. The antibodies are named using the VL and VH of a first antigen which comprises a DART and the Fab variable region for a second antigen, separated by a dash, followed by the chain designation (Heavy Chain or Light Chain). CDRs are underlined and slashes indicate the border(s) of the variable regions. Each sequence outlined herein can include or exclude the M428L/N434S variants in one or preferably both Fc domains, which results in longer half-life in serum.

[0082] FIG. 62 depicts induction of cytokine secretion (IL-2) by alternative format costim×checkpoint blockade bispecific antibodies in an SEB-stimulated PBMC assay.

[0083] FIG. 63 depicts the amino acid sequences of an illustrative anti-ICOS×anti-CTLA-4 antibody in the bottle-opener format (Fab-scFv-Fc). The antibodies are named using the Fab variable region first and the scFv variable region second, separated by a dash, followed by the chain designation (Fab-Fc heavy chain, scFv-Fc heavy chain or light chain). CDRs are underlined and slashes indicate the border(s) of the variable regions. The scFv domain has different orientations (N- to C-terminus) of either VH-scFv linker-VL or VL-scFv linker-VH as indicated, although this can be reversed. In addition, each sequence outlined herein can include or exclude the M428L/N434S variants in one or preferably both Fc domains, which results in longer half-life in serum.

[0084] FIGS. 64A and 64B depicts the amino acid sequence of illustrative anti-LAG-3×anti-ICOS antibodies in the bispecific mAb format. The antibodies are named using the first Fab variable region for a first antigen and the second Fab variable region for a second antigen, separated by a dash, followed by the chain designation (Heavy Chain 1 or Light Chain 1 for the first antigen and Heavy Chain 2 or Light Chain 2 for the second antigen). CDRs are underlined and slashes indicate the border(s) of the variable regions. Each sequence outlined herein can include or exclude the M428L/N434S variants in one or preferably both Fc domains, which results in longer half-life in serum.

[0085] FIG. 65 depicts the amino acid sequence of an illustrative anti-TIM-3×anti-ICOS antibody in the bispecific mAb format. The antibodies are named using the first Fab variable region for a first antigen and the second Fab variable region for a second antigen, separated by a dash, followed by the chain designation (Heavy Chain 1 or Light Chain 1 for the first antigen and Heavy Chain 2 or Light Chain 2 for the second antigen). CDRs are underlined and slashes indicate the border(s) of the variable regions. Each sequence outlined herein can include or exclude the M428L/N434S variants in one or preferably both Fc domains, which results in longer half-life in serum.

[0086] FIG. 66A to 66C depicts the amino acid sequences of anti-ICOS×anti-PD-L1 antibodies in the bottle-opener format (Fab-scFv-Fc) and central-scFv2 format. The bottle-openers are named using the Fab variable region first and the scFv variable region second, separated by a dash, followed by the chain designation (Fab-Fc heavy chain, scFv-Fc heavy chain or light chain). Central-scFv2s are named using the Fab variable region first and the scFv variable region second, followed by the chain designation (heavy chain or light chain). CDRs are underlined and slashes indicate the border(s) of the variable regions. CDRs are underlined and slashes indicate the border(s) of the variable regions. The scFv domain has different orientations (N- to C-terminus) of either VH-scFv linker-VL or VL-scFv linker-VH as indicated, although this can be reversed. In addition, each sequence outlined herein can include or exclude the M428L/N434S variants in one or preferably both Fc domains, which results in longer half-life in serum.

[0087] FIG. 67 depicts induction of cytokine secretion (IL-2) by additional costim×checkpoint blockade bispecific antibodies in an SEB-stimulated PBMC assay.

[0088] FIG. 68A to 68G depict amino acid sequences for exemplary one-arm anti-ICOS Fab-Fc antibodies. CDRs are underlined and slashes indicate the border(s) of variable regions. These are referred to as “one-arm” or “one armed” formats as one amino acid chain is only an Fc domain, with the other side being an anti-ICOS Fab side. The Fc domain contains the S364K/E357Q skew variants, as well as the pI(−)_Isosteric_A variants depicted in Figure X. The Fab Fc domain contains the L368D/K370S skew variants as well as the pI ISO(+RR) variants depicted in Figure X. Both Fc domains include the ablation variants (E233P/L234V/L235A/G236del/S267K).

[0089] FIG. 69 depicts equilibrium dissociation constants (KD), association rates (ka), and dissociation rates (kd) of variant one-arm anti-ICOS Fab-Fc antibodies for murine Fc fusions of human ICOS captured on AMC biosensors as determined by Octet.

[0090] FIG. 70 depicts AKT phosphorylation in SEB-stimulated purified CD3+ T cells after treatment with bivalent and monovalent anti-PD-1 antibodies and anti-ICOS×anti-PD-1 bispecific antibodies.

[0091] FIG. 71 depicts AKT phosphorylation in purified CD3+ T cells after treatment with monovalent anti-ICOS Fab-Fc antibodies with alternative anti-ICOS ABDs.

[0092] FIG. 72A to 72C depict some prototype bispecific antibodies (OX40×PD-1, GITR×PD-1, 4-1BB×PD-1, CTLA-4×ICOS).

[0093] FIG. 73A to 73H depict some prototype mAbs (4-1BB, OX40, GITR, ICOS, PD-L1 and PD-1), the Fvs of which can be used in combination with the other Fvs of the invention and in any format (bottle opener, mAb-Fv, mAb-scFv, central-scFv, bispecific mAb, central-Fv, one armed central-scFv, one armed scFv-mAb, dual scFv, DVD-Ig or Trident). Some additional ICOS×PD-L1 bottle opener sequences are shown as well.

[0094] FIG. 74A to 74F depict additional PD-1×ICOS bottle openers, in some cases with the PD-1 Fv being in the Fab format and the ICOS Fv in a scFv format and in other cases reversed.

[0095] FIG. 75A to 75D shows the sequences of a mAb-scFv backbone of use in the invention, to which the Fv sequences of the invention are added. mAb-scFv backbone 1 is based on human IgG1 (356E/358M allotype), and includes the S364K/E357Q:L368D/K370S skew variants, the N208D/Q295E/N384D/Q418E/N421D pI variants on the Fab side and the E233P/L234V/L235A/G236del/S267K ablation variants on both chains. Backbone 2 is based on human IgG1 (356D/358L allotype), and includes the S364K/E357Q L368D/K370S skew variants, the N208D/Q295E/N384D/Q418E/N421D pI variants on the Fab side and the E233P/L234V/L235A/G236del/S267K ablation variants on both chains. Backbone 3 is based on human IgG1 (356E/358M allotype), and includes the S364K/E357Q:L368D/K370S skew variants, N208D/Q295E/N384D/Q418E/N421D pI variants on the Fab side and the E233P/L234V/L235A/G236del/S267K ablation variants on both chains, as well as an N297A variant on both chains. Backbone 4 is identical to 3 except the mutation is N297S. Alternative formats for mAb-scFv backbones 3 and 4 can exclude the ablation variants E233P/L234V/L235A/G236del/S267K in both chains. Backbone 5 is based on human IgG4, and includes the S364K/E357Q:L368D/K370S skew variants, the N208D/Q295E/N384D/Q418E/N421D pI variants on the Fab side and the E233P/L234V/L235A/G236del/S267K ablation variants on both chains, as well as a S228P (EU numbering, this is S241P in Kabat) variant on both chains that ablates Fab arm exchange as is known in the art Backbone 6 is based on human IgG2, and includes the S364K/E357Q L368D/K370S skew variants, the N208D/Q295E/N384D/Q418E/N421D pI variants on the Fab side. Backbone 7 is based on human IgG2, and includes the S364K/E357Q:L368D/K370S skew variants, the N208D/Q295E/N384D/Q418E/N421D pI variants on the Fab side as well as a S267K variant on both chains.

[0096] As will be appreciated by those in the art and outlined below, these sequences can be used with any vh and vl pairs outlined herein, with one monomer including both a Fab and an scFv (optionally including a charged scFv linker) and the other monomer including the Fab sequence (e.g. a vh attached to the “Fab side heavy chain” and a vl attached to the “constant light chain”). That is, any Fv sequences outlined herein for anti-CTLA-4, anti-PD-1, anti-LAG-3, anti-TIM-3, anti-TIGIT, anti-BTLA, anti-ICOS, anti-GITR, anti-OX40 and anti-4-1BB, whether as scFv (again, optionally with charged scFv linkers) or as Fabs, can be incorporated into this FIG. 75 backbone in any combination. The monomer 1 side is the Fab-scFv pI negative side, and includes the heterodimerization variants L368D/K370S, the isosteric pI variants N208D/Q295E/N384D/Q418E/N421D, the ablation variants E233P/L234V/L235A/G236del/S267K, (all relative to IgG1). The monomer 2 side is the scFv pI positive side, and includes the heterodimerization variants 364K/E357Q. However, other skew variant pairs can be substituted, particularly [S364K/E357Q:L368D/K370S]; [L368D/K370S:S364K]; [L368E/K370S:S364K]; [T411T/E360E/Q362E:D401K]; [L368D/K370S:S364K/E357L], [K370S:S364K/E357Q], [T366S/L368A/Y407V:T366W] and [T366S/L368A/Y407V/Y394C:T366W/S354C].

[0097] The constant light chain depicted in FIG. 75A can be used for all of the constructs in the figure, although the kappa constant light chain can also be substituted.

[0098] It should be noted that these mAb-scFv backbones find use in the both the mAb-Fv format of FIG. 1H (where one monomer comprises a vl at the C-terminus and the other a vh at the C-terminus) as well as the scFv-mAb format (with a scFv domain added to the C-terminus of one of the monomers).

[0099] Included within each of these backbones are sequences that are 90, 95, 98 and 99% identical (as defined herein) to the recited sequences, and/or contain from 1, 2, 3, 4, 5, 6, 7, 8, 9 or 10 additional amino acid substitutions (as compared to the “parent” of the Figure, which, as will be appreciated by those in the art, already contain a number of amino acid modifications as compared to the parental human IgG1 (or IgG2 or IgG4, depending on the backbone). That is, the recited backbones may contain additional amino acid modifications (generally amino acid substitutions) in addition to the skew, pI and ablation variants contained within the backbones of this figure.

[0100] FIG. 76A to 76F depict a number of prior art sequences for Fvs that bind human PD-1 as vh and vl sequences. As will be appreciated by those in the art, any of these Fvs can be combined with an Fv that binds a costimulatory receptor (e.g. ICOS, GITR, OX40 or 4-1BB, including the Fv sequences contained herein) and in any format (bottle opener, mAb-Fv, mAb-scFv, central-scFv, bispecific mAb, central-Fv, one armed central-scFv, one armed scFv-mAb, dual scFv, DVD-Ig or Trident). In particular they can be combined with ICOS]_HOL0 and [ICOS]H0.66_L0 ABDs.

[0101] FIGS. 77A and 77B depict a number of prior art sequences for Fvs that bind human ICOS as vh and vl sequences. As will be appreciated by those in the art, any of these Fvs can be combined with an Fv that binds a checkpoint receptor (e.g. PD-1, PD-L1, CTLA-4, TIM-3, LAG-3, TIGIT and BTLA, including the Fv sequences contained herein) and in any format (bottle opener, mAb-Fv, mAb-scFv, central-scFv, bispecific mAb, central-Fv, one armed central-scFv, one armed scFv-mAb, dual scFv, DVD-Ig or Trident). In particular they can be combined with PD-1 ABDs having the identifiers 1G6_H1.279_L1.194; 1G6_H1.280_L1.224; 1G6_L1.194_H1.279; 1G6_L1.210_H1.288; and 2E9_H1L1.

[0102] FIG. 78A to 78J depict a number of prior art sequences for Fvs that bind human PD-L1 as vh and vl sequences. As will be appreciated by those in the art, any of these Fvs can be combined with an Fv that binds a costimulatory receptor (e.g. ICOS, GITR, OX40 or 4-1BB, including the Fv sequences contained herein) and in any format (bottle opener, mAb-Fv, mAb-scFv, central-scFv, bispecific mAb, central-Fv, one armed central-scFv, one armed scFv-mAb, dual scFv, DVD-Ig or Trident). In particular they can be combined with ICOS]_HOL0 and [ICOS]H0.66_L0 ABDs.

[0103] FIGS. 79A and 79B depict a number of prior art sequences for Fvs that bind human CTLA-4 as vh and vl sequences. As will be appreciated by those in the art, any of these Fvs can be combined with an Fv that binds a costimulatory receptor (e.g. ICOS, GITR, OX40 or 4-1BB, including the Fv sequences contained herein) and in any format (bottle opener, mAb-Fv, mAb-scFv, central-scFv, bispecific mAb, central-Fv, one armed central-scFv, one armed scFv-mAb, dual scFv, DVD-Ig or Trident). In particular they can be combined with ICOS]_HOL0 and [ICOS]H0.66_L0 ABDs.

[0104] FIG. 80A to 80C depict a number of prior art sequences for Fvs that bind human LAG-3 as vh and vl sequences. As will be appreciated by those in the art, any of these Fvs can be combined with an Fv that binds a costimulatory receptor (e.g. ICOS, GITR, OX40 or 4-1BB, including the Fv sequences contained herein) and in any format (bottle opener, mAb-Fv, mAb-scFv, central-scFv, bispecific mAb, central-Fv, one armed central-scFv, one armed scFv-mAb, dual scFv, DVD-Ig or Trident). In particular they can be combined with ICOS]_HOL0 and [ICOS]H0.66_L0 ABDs.

[0105] FIG. 81A to 81C depict a number of prior art sequences for Fvs that bind human TIM-3 as vh and vl sequences. As will be appreciated by those in the art, any of these Fvs can be combined with an Fv that binds a costimulatory receptor (e.g. ICOS, GITR, OX40 or 4-1BB, including the Fv sequences contained herein) and in any format (bottle opener, mAb-Fv, mAb-scFv, central-scFv, bispecific mAb, central-Fv, one armed central-scFv, one armed scFv-mAb, dual scFv, DVD-Ig or Trident). In particular they can be combined with ICOS]_HOL0 and [ICOS]H0.66_L0 ABDs.

[0106] FIG. 82 depict a number of prior art sequences for Fvs that bind human BTLA as vh and vl sequences. As will be appreciated by those in the art, any of these Fvs can be combined with an Fv that binds a costimulatory receptor (e.g. ICOS, GITR, OX40 or 4-1BB, including the Fv sequences contained herein) and in any format (bottle opener, mAb-Fv, mAb-scFv, central-scFv, bispecific mAb, central-Fv, one armed central-scFv, one armed scFv-mAb, dual scFv, DVD-Ig or Trident). In particular they can be combined with ICOS]_HOL0 and [ICOS]H0.66_L0 ABDs.

[0107] FIG. 83A to 83D depict a number of prior art sequences for Fvs that bind human TIGIT as vh and vl sequences. As will be appreciated by those in the art, any of these Fvs can be combined with an Fv that binds a costimulatory receptor (e.g. ICOS, GITR, OX40 or 4-1BB, including the Fv sequences contained herein) and in any format (bottle opener, mAb-Fv, mAb-scFv, central-scFv, bispecific mAb, central-Fv, one armed central-scFv, one armed scFv-mAb, dual scFv, DVD-Ig or Trident). In particular they can be combined with ICOS]_HOL0 and [ICOS]H0.66_L0 ABDs.

[0108] FIG. 84A to 84C depict a number of BTLA ABDs, with additional anti-BTLA ABDs being listed as SEQ ID NO: 3705-3736. The CDRs are underlined, the scFv linker is double underlined (in the sequences, the scFv linker is a positively charged scFv (GKPGS)4 linker (SEQ ID NO: 26209), although as will be appreciated by those in the art, this linker can be replaced by other linkers, including uncharged or negatively charged linkers, some of which are depicted in FIG. 8), and the slashes indicate the border(s) of the variable domains. As above, the naming convention illustrates the orientation of the scFv from N- to C-terminus; in the sequences listed in this figure, they are all oriented as vh-scFv linker-vl (from N- to C-terminus), although these sequences may also be used in the opposite orientation, (from N- to C-terminus) vl-linker-vh. As noted herein and is true for every sequence herein containing CDRs, the exact identification of the CDR locations may be slightly different depending on the numbering used as is shown in Table 1, and thus included herein are not only the CDRs that are underlined but also CDRs included within the vh and vl domains using other numbering systems. Furthermore, as for all the sequences in the Figures, these vh and vl sequences can be used either in a scFv format or in a Fab format.

[0109] FIG. 85 is a matrix of possible combinations of the costim and checkpoint ABDs, with all possible combinations possible. An “A” in the box means that the PD-1 ABD is 1G6_L1.194_H1.279. A “B” in the box means that the ICOS ABD is [ICOS]H.066_L0. A “C” in the box means that the PD-1 is the scFv in the pair. A “D” in the box means the CTLA-4 ABD is a Fab and is [CTLA-4]_H3_L0.22. An “E” in the box means that the CTLA-4 ABD is a scFv and is [CTLA-4]_H3.23_L0.22. An “F” in the box means that the LAG-3 ABD is 7G8_H3.30_L1.34. A “G” in the box means that the BTLA ABD is 9C6_H1.1_L1. An “H” in the box means that combination is a bottle opener. An “I” in the box means the combination is Central-scFv format.

[0110] FIG. 86 depicts two more ICOS×PD-1 bottle openers.

[0111] FIGS. 87A and 87B depicts that monovalent engagement of PD-1 and ICOS enables avid targeting of double positive T cells; receptor occupancy of PD1 and ICOS on human CD3+ T cells stimulated with SEB. Scatterplots are shown for 3 ug/mL concentration.

[0112] FIG. 88 depicts that XmAb23104 exhibits a multi-gene expression signature consistent with ICOS co-stimulation. SEB-stimulated human PBMCs (multiple healthy donors). RNA analyzed on a NanoString platform as described herein using the nCountrer PanCancer Immune Profiling Panel.

[0113] FIG. 89 shows the PD1×CTLA4 bispecific antibody is highly active in a mouse model for checkpoint blockade.

[0114] FIG. 90 depicts binding of the indicated test articles to SEB-stimulated CD3+ T cells from 3 separate PBMC donors (A-C).

[0115] FIG. 91 depicts checkpoint receptor occupancy by the indicated test articles as indicated by percentage of populations of SEB-stimulated CD3+ T cells with unoccupied PD-1 and/or ICOS receptors as shown by staining.

[0116] FIG. 92 shows the amount of unoccupied A) PD-1 and B) ICOS receptors on CD3+ICOS+PD-1+ SEB-stimulated T cells following treatment with the indicated test articles.

[0117] FIG. 93 depicts fold change (x-axis) in expression of immune-related genes by SEB-stimulated T cells following treatment with A) XmAb23104, B) anti-PD-1 mAb (XENP19686), C) anti-ICOS mAb (XENP16435), and D) anti-PD-1 mAb (XENP19686) in combination with anti-ICOS mAb (XENP16435) over treatment with negative control anti-RSV mAb (XENP15074).

[0118] FIG. 94 depicts tumor burden (as indicated by mean tumor volume as determined by caliper measurements) in NSG mice engrafted with pp65-expressing MCF-7 cells followed by engraftment with huPBMCs following treatment with XmAb23104. Triangles below the X-axis indicate dosing days.

[0119] FIG. 95 depicts tumor burden (as indicated by mean tumor volume as determined by caliper measurements) in NSG mice engrafted with pp65-expressing MDA-MB-231 cells followed by engraftment with huPBMCs following treatment with XmAb23104. Triangles below the X-axis indicate dosing days.

[0120] FIG. 96 depicts the amino acid sequences of a monovalent anti-ICOS Fab-Fc fusion based on the anti-ICOS arm from XmAb23104 with M428L/N434S Xtend Fc. CDRs are underlined and slashes indicate the border(s) of the variable regions.

[0121] FIG. 97 depicts the sequences for A) human PD-L1 and B) human PD-L2 fused to murine IgG2aa Fc region. Slashes (/) indicate the border between the PD-1 ligand and the murine IgG2aa Fc-region.

[0122] FIGS. 98A and B depicts binding of A) PD-L1 and B) PD-L2 to PD-1+ICOS+ cells following treatment with the indicated test articles.

[0123] FIG. 99 depicts the sequence for human ICOSL fused to human IgG1 Fc region with E233P/L234V/L235A/G236del/S267K substitutions. Slashes (/) indicate the border between the PD-1 ligand and the human IgG1 Fc-region.

[0124] FIG. 100 depicts binding of ICOSL to PD-1+ICOS+ cells following treatment with the indicated test articles.

[0125] FIG. 101A to 101D depicts binding of XmAb23104 to CD3+ T cells in SEB-stimulated PBMCs from 4 cynomolgus monkeys.

[0126] FIGS. 102A and 102B depicts fold induction of A) IFNγ and B) IL-2 over bivalent anti-RSV mAb by the indicated test articles in an SEB-stimulated PBMC assay.

[0127] FIG. 103 depicts IL-2 induction by XENP15074, XENP16432, and XmAb23104 in an SEB-stimulated PBMC assay.

[0128] FIG. 104 depicts the amino acid sequences of a monovalent anti-PD-1 scFv-Fc fusion based on the anti-PD-1 arm from XmAb23104 with M428L/N424S Xtend Fc. CDRs are underlined and slashes indicate the border(s) of the variable regions.

[0129] FIG. 105 depicts fold induction of IFNγ over bivalent anti-RSV mAb by the indicated test articles in an MLR assay.

[0130] FIGS. 106A and 106B depicts IFNγ induction by XmAb23104 or a combination of XENP20111 and XENP24901 (at equimolar PD-1 and ICOS binding concentrations relative to XmAb23104) in SEB-stimulated PBMCs from 2 separate donors.

[0131] FIGS. 107A and 107B depicts IL-2 induction by XmAb23104 or a combination of XENP20111 and XENP24901 (at equimolar PD-1 and ICOS binding concentrations relative to XmAb23104) in SEB-stimulated PBMCs from 2 separate donors.

[0132] FIG. 108 depicts the amino acid sequences of a bivalent anti-CTLA-4 mAb based on ipilimumab and human IgG1 Fc region with E233P/L234V/L235A/G236del/S267K substitutions. CDRs are underlined and slashes indicate the border(s) of the variable regions.

[0133] FIGS. 109A and 109B depict fold induction of A) IFNγ and B) IL-2 over bivalent anti-RSV mAb by XmAb23104 alone, XENP16433 (anti-CTLA-4 mAb based on ipilimumab), or XmAb23104 in combination with XENP16433 in an SEB-stimulated PBMC assay.

[0134] FIG. 110 depicts fold change in IL-2 secretion in MLR reactions incubated with either XENP16432 or XmAb23104 (in comparison to incubation with isotype control anti-RSV mAb).

[0135] FIG. 111 depicts CD45+ cell counts on Day 8 in huPBMC-engrafted NSG mice dosed with XENP16432 or XmAb23104, and show that XmAb23104 induces greater leukocyte expansion than αPD-1 (XENP16432) alone.

[0136] FIG. 112 depicts change in body weight over time in huPBMC-engrafted NSG mice dosed with XENP16432 or XmAb23104, and show that XmAb23104 enhanced GVHD in comparison to αPD-1 (XENP16432) alone.

[0137] FIG. 113 depicts CD45+ cell counts on Day 21 in pp65-MCF7 and huPBMC-engrafted NSG mice dosed with XENP16432 or XmAb23104, and show that XmAb23104 induces greater leukocyte expansion than αPD-1 (XENP16432) alone.

[0138] FIG. 114 depicts tumor volume on Day 21 in pp65-MCF7 and huPBMC-engrafted NSG mice dosed with XENP16432 or XmAb23104.

[0139] FIG. 115 depicts tumor volume on Day 38 in pp65-MCF7 and huPBMC-engrafted NSG mice dosed with XENP16432 or XmAb23104, and show that XmAb23104 enhances allogeneic anti-tumor response over αPD-1 (XENP16432) alone. p-value was determined using an unpaired t test.

[0140] FIG. 116 depicts tumor volume over time (post-huPBMC engraftment) in pp65-MCF7 and huPBMC-engrafted NSG mice dosed with XENP16432 or XmAb23104.

[0141] FIG. 117 depicts the sequences of XENP20053, a bottle opener format with the αCTLA-4 as the Fab side ([αCTLA-4]_H3L0.22) and the PD-1 as the scFv (1G6_L1.94_H1.279). The CDRs are underlined, the scFv linker is double underlined (in the sequences, the scFv linker is a positively charged scFv (GKPGS)4 linker (SEQ ID NO: 26209), although as will be appreciated by those in the art, this linker can be replaced by other linkers, including uncharged or negatively charged linkers, some of which are depicted in FIG. 8), and the slashes indicate the border(s) of the variable domains. As noted herein and is true for every sequence herein containing CDRs, the exact identification of the CRD locations may be slightly different depending on the numbering used as is shown in Table 1, and thus included herein are not only the CDRs that are underlined but also CDRs included within the VH and VL domains using other numbering systems.

[0142] FIG. 118 depicts CD45+ cell counts in NSG mice on Day 14 after engraftment with human PBMCs and treatment with the indicated test articles.

[0143] FIG. 119A to 119J depicts the release of A) IFNγ, B) IL-1ß, C) IL-2, D) IL-4, E) IL-8, F) IL-6, G) IL-10, H) IL-12p70, I) IL-13, and J) TNFα from human PBMCs treated with PBS, plate-bound XmAb23104, soluble XmAb23104, and plate-bound anti-CD3 antibody (OKT3).

[0144] FIG. 120 depicts the sequences for XENP29154, which is in-house produced TGN1412.

[0145] FIG. 121A to 121J depicts the release of A) IFNγ, B) IL-1ß, C) IL-2, D) IL-4, E) IL-8, F) IL-10, G) IL-12p70, H) TNF, I) IL-6, and J) IL-13 from human PBMCs treated with air-dried XmAb23104, air-dried XENP15074 (isotype control), air-dried XENP29154 (positive control), and air-dried anti-CD3 mAb (OKT3; positive control).

[0146] FIGS. 122A and 122B depicts sensorgrams showing binding of XmAb23104 to A) human PD-1 and B) cynomolgus PD-1.

[0147] FIGS. 123A and 123B depict sensorgrams showing binding of XmAb23104 to A) human ICOS and B) cynomolgus ICOS.

[0148] FIG. 124 depicts the equilibrium dissociation constants (K_{D}), association rates (kₐ), and dissociation rates (k_{d}) for binding of XmAb23104 to human and cynomolgus PD-1 and ICOS.

[0149] FIG. 125 depicts sensorgrams from competition binding experiments of PD-1 and ligands PD-L1 and PD-L2 with and without XmAb23104 pre-incubation.

[0150] FIG. 126A to 126C depicts blocking of A) soluble PD-L1, B) soluble PD-L2, and C) soluble ICOSL to cell surface-expressed PD-1 and ICOS on PD-1⁺ICOS⁺ HEK 293T cells.

[0151] FIG. 127 depicts sensorgrams showing binding of XmAb23104 (solid line) and human IgG comparator (an anti-CD19 antibody with a native IgG1 constant region; dotted line) to A) human FcγRI, B) human FcγRIIb, C) human FcγRIIA (131H), D) human FcγRIIA (131R), E) human FcγRIIIA (158V), and F) human FcγRIIIA (158F).

[0152] FIG. 128 depicts sensorgrams showing binding of XmAb23104 (solid line) and human IgG comparator (an anti-CD19 antibody with a native IgG1 constant region; dotted line) to A) cynomolgus FcγRI, B) cynomolgus FcγRIIA, C) cynomolgus FcγRIIb, and D) cynomolgus RcγRIIIA.

[0153] FIG. 129 depicts sensorgrams showing binding of XmAb23104 (solid line) and human IgG comparator (an anti-CD19 antibody with a native IgG1 constant region; dotted line) to A) murine FcγRI, B) murine FcγRIIb, C) murine FcγRIII, and D) murine FcγRIV.

[0154] FIG. 130 depicts equilibrium dissociation constants (K_{D}) for binding of XmAb23104 and XENP20896 to human, cynomolgus, and mouse FcRn at pH 6.0.

[0155] FIG. 131 depicts sensorgrams showing binding of XmAb23104 and XENP20896 to human, cynomolgus, and mouse FcRn (1000, 500, 250, and 125 nM) at pH 6.0.

[0156] FIG. 132 depicts in-tandem BLI experiment showing biosensors loaded with ICOS and dipped into XmAb23104 or buffer followed by a final dip into PD-1 antigen.

[0157] FIG. 133 depicts dose-dependent promotion of IL-2 secretion from SEB-stimulated human PBMCs (from 19 different donors) by XmAb23104.

[0158] FIG. 134 depicts dose-dependent promotion of IFNγ secretion from SEB-stimulated human PBMCs (from 19 different donors) by XmAb23104.

[0159] FIG. 135 depicts dose-dependent promotion of IFNγ secretion from SEB-stimulated cynomolgus PBMCs (from 10 different donors) by XmAb23104.

[0160] FIG. 136 depicts tumor volume over time (post-huPBMC engraftment) in pp65-MCF7 and huPBMC-engrafted NSG mice dosed with XENP16432 or indicated concentrations of XmAb23104.

[0161] FIGS. 137A and 137B depict human CD45 cell counts on A) Day 14 and B) Day 21 in pp65-MCF7 and huPBMC-engrafted NSG mice dosed with XENP16432 or indicated concentrations of XmAb23104. *denotes P≤0.05, unpaired Student t test, XmAb23104 or anti-PD-1 XENP16432-treated groups compared to PBS-treated group. † denotes P<0.05, unpaired Student t test, XmAb23104-treated groups compared to XENP16432-treated group. Data were log transformed prior to statistical analysis.

[0162] FIG. 138 depicts the sequences for JTX-2011, produced in-house as XENP23058.

[0163] FIG. 139 depicts the sequences for XENP23057, an anti-ICOS mAb based on JTX-2011 with E233P/L234V/L235A/G236del/S267K ablation variants.

[0164] FIG. 140A to 140D depicts A) human CD45+ cell, B) human CD3+ T cell, C) human CD4+ T cell, and D) human CD8+ T cell counts in huPBMC-engrafted NSG mice on Day 21 after dosing with the indicated test articles.

### DETAILED DESCRIPTION OF THE INVENTION

### I. Nomenclature

[0165] The bispecific antibodies of the invention are listed in several different formats. Each polypeptide is given a unique “XENP” number, although as will be appreciated in the art, a longer sequence might contain a shorter one. For example, the heavy chain of the scFv side monomer of a bottle opener format for a given sequence will have a first XENP number, while the scFv domain will have a different XENP number. Some molecules have three polypeptides, so the XENP number, with the components, is used as a name. Thus, the molecule XENP, which is in bottle opener format, comprises three sequences, generally referred to as “XENP23104-HC-Fab”, XENP23104 HC-scFv” and “XENP23104 LC” or equivalents, although one of skill in the art would be able to identify these easily through sequence alignment. These XENP numbers are in the sequence listing as well as identifiers, and used in the Figures. In addition, one molecule, comprising the three components, gives rise to multiple sequence identifiers. For example, the listing of the Fab monomer has the full length sequence, the variable heavy sequence and the three CDRs of the variable heavy sequence; the light chain has a full length sequence, a variable light sequence and the three CDRs of the variable light sequence; and the scFv-Fc domain has a full length sequence, an scFv sequence, a variable light sequence, 3 light CDRs, a scFv linker, a variable heavy sequence and 3 heavy CDRs; note that all molecules herein with a scFv domain use a single charged scFv linker (+H), although others can be used. In addition, the naming nomenclature of particular variable domains uses a “Hx.xx_Ly.yy” type of format, with the numbers being unique identifiers to particular variable chain sequences. Thus, the variable domain of the scFv side of XENP23104 (which binds PD-1) is “1G6_L1.194_H1.279”, which indicates that the variable heavy domain H1.279 was combined with the light domain L1.194. In the case that these sequences are used as scFvs, the designation “1G6_L1.194_H1.279”, indicates that the variable heavy domain H1.279 was combined with the light domain L1.194 and is in vl-linker-vh orientation, from N- to C-terminus. This molecule with the identical sequences of the heavy and light variable domains but in the reverse order would be named “1G6_H1.279_L1.194”. Similarly, different constructs may “mix and match” the heavy and light chains as will be evident from the sequence listing and the Figures.

### II. Incorporation of Materials

### A. Figures and Legends

[0166] Specifically incorporated by reference are the Figures, Legends and Sequences from U.S. Ser. No. 62/479,723 and the Figures, Legends and Sequences from U.S. Ser. No. 15/623,314. In addition, the claims from U.S. Ser. No. 62/479,723 are additionally specifically incorporated.

### B. Sequences

[0167] Target Antigens: The sequence of human PD-1 (sp|Q15116) is SEQ ID NO: 26226. The sequence of human PD-1, extracellular domain (sp|Q15116|21-170) is SEQ ID NO: 26227. The sequence of Macaca fascicularis PD-1 (tr|B0LAJ3) is SEQ ID NO: 26228. The sequence of Macaca fascicularis PD-1, extracellular domain (predicted) (tr|B0LAJ3|21-170) is SEQ ID NO: 26229. The sequence of human CTLA-4 (sp|P16410) is SEQ ID NO: 26230. The sequence of human CTLA-4, extracellular domain (sp|P16410136-161) is SEQ ID NO: 26231. The sequence of Macaca fascicularis CTLA-4 (tr|G7PL88) is SEQ ID NO: 26232. The sequence of Macaca fascicularis CTLA-4, extracellular domain (predicted) (tr|G7PL88) is SEQ ID NO: 26233. The sequence of human LAG-3 (sp|P18627) is SEQ ID NO: 26234. The sequence of human LAG-3, extracellular domain (sp|P18627|29-450) is SEQ ID NO: 26235. The sequence of Macaca fascicularis LAG-3 (predicted) (gi|544467815|ref|XP_005570011.1) is SEQ ID NO: 26236. The sequence of Macaca fascicularis LAG-3, extracellular domain (predicted) (gi|544467815|ref|XP_005570011.1|29-450) is SEQ ID NO: 26237. The sequence of human TIM-3 (sp|Q8TDQ0) is SEQ ID NO: 26238. The sequence of human TIM-3, extracellular domain (sp|Q8TDQ0122-202) is SEQ ID NO: 26239. The sequence of Macaca fascicularis TIM-3 (predicted) (gi|355750365|gb|EHH54703.1) is SEQ ID NO: 26240. The sequence of Macaca fascicularis TIM-3, extracellular domain (predicted) (gi|355750365|gb|EHH54703.1|22-203) is SEQ ID NO: 26241. The sequence of human PD-L1 (sp|Q9NZQ7) is SEQ ID NO: 26242. The sequence of human PD-L1, extracellular domain (sp|Q9NZQ7|19-238) is SEQ ID NO: 26243. The sequence of Macaca fascicularis PD-L1 (predicted) (gb|XP_005581836.1) is SEQ ID NO: 26244. The sequence of Macaca fascicularis PD-L1, extracellular domain (predicted) (gb|XP_005581836.1119-238) is SEQ ID NO: 26245. The sequence of human ICOS (sp|Q9Y6W8) is SEQ ID NO: 26246. The sequence of human ICOS, extracellular domain (sp|Q9Y6W8|21-140) is SEQ ID NO: 26247. The sequence of Macaca fascicularis ICOS (gi|544477053|ref|XP_005574075.1) is SEQ ID NO: 26248. The sequence of Macaca fascicularis ICOS, extracellular domain (predicted) (gi|544477053|ref|XP_005574075.1|21-140) is SEQ ID NO: 26249. The sequence of human GITR (sp|Q9Y5U5) is SEQ ID NO: 26250. The sequence of human GITR, extracellular domain (sp|Q9Y5U5|26-162) is SEQ ID NO: 26251. The sequence of Macaca fascicularis GITR (predicted) (ref|XP_005545180.1) is SEQ ID NO: 26252. The sequence of Macaca fascicularis GITR, extracellular domain (predicted) (ref|XP_005545180.1|26-162) is SEQ ID NO: 26253. The sequence of human OX40 (sp|P43489) is SEQ ID NO: 26254. The sequence of human OX40, extracellular domain (sp|P43489|29-214) is SEQ ID NO: 26255. The sequence of Macaca fascicularis OX40 (predicted) (ref|XP_005545179.1) is SEQ ID NO: 26256. The sequence of Macaca fascicularis OX40, extracellular domain (predicted) (ref|XP_005545179.1|29-214) is SEQ ID NO: 26257. The sequence of human 4-1BB (sp|Q07011) is SEQ ID NO: 26258. The sequence of human 4-1BB, extracellular domain (sp|Q07011|24-186) is SEQ ID NO: 26259. The sequence of Macaca fascicularis 4-1BB (predicted) (ref|XP_005544945.1) is SEQ ID NO: 26260. The sequence of Macaca fascicularis 4-1BB, extracellular domain (predicted) (ref|XP_005544945.1|24-186) is SEQ ID NO: 26261.

[0168] ICOS binding domains: In addition the sequences shown in FIG. 19, FIG. 20 and FIG. 24, SEQ ID NO:27869-28086 contain a number of ICOS Fab sequences (heavy chain VH1-CH1 and light chain VL1-CL) as indicated in the naming nomenclature. Reference for the CDRs and for the junction between the variable junctions is shown in FIG. 40 of U.S. Ser. No. 62/479,723 (hereby incorporated by reference as well as the Legend), although from the SEQ listing one of skill in the art will be able to ascertain the CDRs (see Table 1 for numbering and/or through sequence alignment) as well as for the junctions (e.g. heavy chain CH1 generally starts with the sequence “ASTK . . . ” (SEQ ID NO: 30380) and light chain constant domain generally starts with “RTVA . . . ” (SEQ ID NO: 30381). SEQ ID NO:28087-28269 show the three sequences for “one armed mAb” (FIG. 2N; Fab-Fc, Fc only and light chain) as shown in the naming nomenclature. Reference for the CDRs and for the junction between the variable junctions is shown in FIG. 41 of U.S. Ser. No. 62/479,723 (hereby incorporated by reference as well as the Legend), although from the SEQ listing one of skill in the art will be able to ascertain the CDRs (see Table 1 for numbering and/or through sequence alignment) as well as for the junctions (e.g. heavy chain CH1 generally starts with the sequence “ASTK . . . ” (SEQ ID NO: 30380) and light chain constant domain generally starts with “RTVA . . . ” (SEQ ID NO: 30381). Additional one armed ICOS molecules are shown in FIG. 68. SEQ ID NO:28549-28556 show some control antibodies (HC and LC) from which the Fvs can be used as ICOS ABDs as well; reference for the CDRs and for the junction between the variable junctions is shown in FIG. 44 of U.S. Ser. No. 62/479,723 (hereby incorporated by reference as well as the Legend), although from the SEQ listing one of skill in the art will be able to ascertain the CDRs (see Table 1 for numbering and/or through sequence alignment) as well as for the junctions (e.g. heavy chain CH1 generally starts with the sequence “ASTK . . . ” (SEQ ID NO: 30380) and light chain constant domain generally starts with “RTVA . . . ” (SEQ ID NO: 30381). SEQ ID NO:28557-28665 show some ICOS scFvs that find use in combination in the invention; reference for the CDRs and for the junction between the variable junctions is shown in FIG. 45 of U.S. Ser. No. 62/479,723 (hereby incorporated by reference as well as the Legend), although from the SEQ listing one of skill in the art will be able to ascertain the CDRs (see Table 1 for numbering and/or through sequence alignment) as well as for the junctions, as the scFvs utilize the charged linker (GKPGS)₄ between (SEQ ID NO: 26209) the vh and vl domains. Thus, suitable ICOS ABDs for use in combination with ABDs for checkpoint receptors are shown in FIG. 19, FIG. 20, FIG. 24, FIG. 68 and FIG. 77 as well as SEQ ID NO: 27869-28086, 28087-28269, 27193-27335, 28549-28556 and 28557-28665, and [ICOS]_H0.66_L0 and [ICOS]_H0_L0.

[0169] In addition, suitable ICOS×PD-1 bottle opener sequences include those in FIG. 3 as well as those in SEQ ID NO:28270-28548, which correspond to the sequences depicted in FIGS. 42 and 43 of U.S. Ser. No. 62/479,723 (both of which are hereby incorporated by reference as well as the Legends and sequences therein), again using these figures to show CDRs, junctions, etc.

### III. Overview

[0170] Therapeutic antibodies directed against immune immunomodulatory inhibitors such as PD-1 are showing great promise in limited circumstances in the clinic for the treatment of cancer. Cancer can be considered as an inability of the patient to recognize and eliminate cancerous cells. In many instances, these transformed (e.g. cancerous) cells counteract immunosurveillance. There are natural control mechanisms that limit T-cell activation in the body to prevent unrestrained T-cell activity, which can be exploited by cancerous cells to evade or suppress the immune response. Restoring the capacity of immune effector cells-especially T cells-to recognize and eliminate cancer is the goal of immunotherapy. The field of immuno-oncology, sometimes referred to as “immunotherapy” is rapidly evolving, with several recent approvals of T cell checkpoint inhibitory antibodies such as Yervoy, Keytruda and Opdivo. These antibodies are generally referred to as “checkpoint inhibitors” because they block normally negative regulators of T cell immunity. It is generally understood that a variety of immunomodulatory signals, both costimulatory and coinhibitory, can be used to orchestrate an optimal antigen-specific immune response.

[0171] Checkpoint inhibitor monoclonal antibodies bind to immunomodulatory inhibitor proteins such as PD-1, which under normal circumstances prevent or suppress activation of cytotoxic T cells (CTLs). By inhibiting the immunomodulatory protein, for example through the use of antibodies that bind these proteins, an increased T cell response against tumors can be achieved. That is, these cancer immunomodulatory proteins suppress the immune response; when the proteins are blocked, for example using antibodies to the immunomodulatory protein, the immune system is activated, leading to immune stimulation, resulting in treatment of conditions such as cancer and infectious disease. Antibodies to either the PD-1 protein or its binding partner, PD-L1, leads to T cell activation.

[0172] Another area of current interest for harnessing the patient's immune system to fight disease involves the co-stimulation of T cells using agonistic antibodies that bind to co-stimulatory proteins such as ICOS (Inducible T cell Co-Stimulator, also referred to as CD278) which adds a positive signal to overcome the negative signaling of the immune checkpoint proteins on the T-cells. ICOS is a type I transmembrane protein comprising an extracellular (Ig) V-like domain, and serves as the receptor for the B7h co-stimulatory molecule.

[0173] Recent work shows that some tumor infiltrating lymphocytes (TILs) co-express PD-1 and ICOS (see Gros, J. Clinical Invest. 124(5):2246 (2014)).

[0174] Bispecific antibodies, which can bind two different targets simultaneously, offer the potential to improve the selectivity of targeting TILs vs peripheral T cells, while also reducing cost of therapy. The bivalent interaction of an antibody with two targets on a cell surface should—in some cases—lead to a higher binding avidity relative to a monovalent interaction with one target at a time. Because of this, normal bivalent antibodies tend to have high avidity for their target on a cell surface. With bispecific antibodies, the potential exists to create higher selectivity for cells that simultaneously express two different targets, utilizing the higher avidity afforded by simultaneous binding to both targets.

[0175] Accordingly, the present invention provides bispecific immunomodulatory antibodies, that bind to cells expressing the two antigens and methods of activating T cells and/or NK cells to treat diseases such as cancer and infectious diseases, and other conditions where increased immune activity results in treatment.

[0176] Thus, the invention is directed, in some instances, to solving the issue of toxicity and expense of administering multiple antibodies by providing bispecific antibodies that bind to two different immunomodulatory molecules (one a checkpoint receptor and the other a costimulatory receptor) on a single cell and advantageously requiring administration of only one therapeutic substance.

[0177] Bispecific antibodies offer the opportunity to combine immune immunomodulatory blockade with costimulation in one molecule. However, it is not obvious what combination of immune immunomodulatory plus costimulatory protein or what binding stoichiometry (monovalent+monovalent, monovalent+bivalent, etc.) would be efficacious. Here we identify bispecific antibodies that binding monovalently to a costimulatory protein (such as ICOS) and monovalent binding to a checkpoint receptor (such as PD-1) that are capable of inducing robust T cell activation.

[0178] Surprisingly, while conventional wisdom states that monovalent antibodies do not result in agonism, the present work shows the unexpected results of agonism of the ICOS receptor with the monovalent bispecific antibodies of the invention. See Merchant et al., PNAS Jul. 23 2013 E2987-E2996, “[w]hile initial screening of bivalent antibodies produced agonists of MET, engineering them into monovalent antibodies produces antagonists instead.” This positive result with only monovalent binding to ICOS is unexpected because it is thought that at least bivalent binding to a costimulatory protein is necessary to provide the required level of receptor clustering on the cell surface for triggering signaling. As shown by Fos et al., J. Immunol. 2008:1969-1977, ICOS ligation induces AKT phosphorylation. The studies here in use AKT phosphorylation as an indicator of ICOS agonism, and this effect is seen for both “one armed ICOS” (see Example 5A(a)) and for bispecific antibodies that bind ICOS monovalently. As shown in Example 7 and in FIG. 70, the one-arm XENP20266 that only binds ICOS monovalently promotes more AKT phosphorylation than XENP16435, which binds ICOS bivalently (e.g. as a traditional mAb).

[0179] Accordingly, the present invention is directed to novel constructs to provide heterodimeric, bispecific antibodies that allow binding to a checkpoint receptor as well as human ICOS.

[0180] Note that generally these bispecific antibodies are named “anti-PD-1×anti-ICOS”, or generally simplistically or for ease (and thus interchangeably) as “PD-1×ICOS”, etc. for each pair.

[0181] The heterodimeric bispecific immunomodulatory antibodies of the invention are useful to treat a variety of types of cancers. As will be appreciated by those in the art, in contrast to traditional monoclonal antibodies that bind to tumor antigens, or to the newer classes of bispecific antibodies that bind, for example, CD3 and tumor antigens (such as described in U.S. Ser. No. 15/141,350, for example), immunomodulatory antibodies are used to increase the immune response but are not generally tumor specific in their action. That is, the bispecific immunomodulatory antibodies of the invention inhibit the suppression of the immune system, generally leading to T cell activation, which in turn leads to greater immune response to cancerous cells and thus treatment.

[0182] As discussed below, there are a variety of ways that T cell activation can be measured. Functional effects of the bispecific immunomodulatory antibodies on NK and T-cells can be assessed in vitro (and in some cases in vivo, as described more fully below) by measuring changes in the following parameters: proliferation, cytokine release and cell-surface makers. For NK cells, increases in cell proliferation, cytotoxicity (ability to kill target cells as measured by increases in CD107a, granzyme, and perforin expression, or by directly measuring target cells killing), cytokine production (e.g. IFN-7 and TNF), and cell surface receptor expression (e.g. CD25) is indicative of immune modulation, e.g. enhanced killing of cancer cells. For T-cells, increases in proliferation, increases in expression of cell surface markers of activation (e.g. CD25, CD69, CD137, and PD1), cytotoxicity (ability to kill target cells), and cytokine production (e.g. IL-2, IL-4, IL-6, IFN, TNF-a, IL-10, IL-17A) are indicative of immune modulation, e.g. enhanced killing of cancer cells. Accordingly, assessment of treatment can be done using assays that evaluate one or more of the following: (i) increases in immune response, (ii) increases in activation of αβ and/or γδ T cells, (iii) increases in cytotoxic T cell activity, (iv) increases in NK and/or NKT cell activity, (v) alleviation of αβ and/or γδ T-cell suppression, (vi) increases in pro-inflammatory cytokine secretion, (vii) increases in IL-2 secretion; (viii) increases in interferon-γ production, (ix) increases in Th1 response, (x) decreases in Th2 response, (xi) decreases or eliminates cell number and/or activity of at least one of regulatory T cells, (xii) increases in IL-2 secretion.

[0183] Thus, in some embodiments the invention provides the use of bispecific immunomodulatory antibodies to perform one or more of the following in a subject in need thereof: (a) upregulating pro-inflammatory cytokines; (b) increasing T-cell proliferation and/or expansion; (c) increasing interferon-γ or TNF-α production by T-cells; (d) increasing IL-2 secretion; (e) stimulating antibody responses; (f) inhibiting cancer cell growth; (g) promoting antigenic specific T cell immunity; (h) promoting CD4+ and/or CD8+ T cell activation; (i) alleviating T-cell suppression; (j) promoting NK cell activity; (k) promoting apoptosis or lysis of cancer cells; and/or (l) cytotoxic or cytostatic effect on cancer cells.

[0184] Accordingly, the present invention provides bispecific immunomodulatory antibodies. There are a number of formats that can be used in the present invention, as generally shown in FIG. 2, many of which are heterodimeric (although not all, as DVD-Ig, for example).

[0185] The heterodimeric antibodies constructs are based on the self-assembling nature of the two Fc domains of the heavy chains of antibodies, e.g. two “monomers” that assemble into a “dimer”. Heterodimeric antibodies are made by altering the amino acid sequence of each monomer as more fully discussed below. Thus, the present invention is generally directed to the creation of heterodimeric antibodies, which can co-engage two antigens in several ways, relying on amino acid variants in the constant regions that are different on each chain to promote heterodimeric formation and/or allow for ease of purification of heterodimers over the homodimers.

[0186] Thus, the present invention provides bispecific immunomodulatory antibodies. An ongoing problem in antibody technologies is the desire for “bispecific” antibodies that bind to two (or more) different antigens simultaneously, in general thus allowing the different antigens to be brought into proximity and resulting in new functionalities and new therapies. In general, these antibodies are made by including genes for each heavy and light chain into the host cells (generally, in the present invention, genes for two heavy chain monomers and a light chain as outlined herein). This generally results in the formation of the desired heterodimer (A-B), as well as the two homodimers (A-A and B-B). However, a major obstacle in the formation of bispecific antibodies is the difficulty in purifying the heterodimeric antibodies away from the homodimeric antibodies and/or biasing the formation of the heterodimer over the formation of the homodimers.

[0187] To solve this issue, there are a number of mechanisms that can be used to generate the heterodimers of the present invention. In addition, as will be appreciated by those in the art, these mechanisms can be combined to ensure high heterodimerization. Thus, amino acid variants that lead to the production of heterodimeric antibodies are referred to as “heterodimerization variants”. As discussed below, heterodimerization variants can include steric variants (e.g. the “knobs and holes” or “skew” variants described below and the “charge pairs” variants described below) as well as “pI variants”, which allows purification of homodimers away from heterodimers.

[0188] One mechanism is generally referred to in the art as “knobs and holes” (“KIH”) or sometimes herein as “skew” variants, referring to amino acid engineering that creates steric influences to favor heterodimeric formation and disfavor homodimeric formation can also optionally be used; this is sometimes referred to as “knobs and holes”; as described in Ridgway et al., Protein Engineering 9(7):617 (1996); Atwell et al., J. Mol. Biol. 1997 270:26; U.S. Pat. No. 8,216,805, US 2012/0149876, all of which are hereby incorporated by reference in their entirety. The Figures identify a number of “monomer A-monomer B” pairs that include “knobs and holes” amino acid substitutions. In addition, as described in Merchant et al., Nature Biotech. 16:677 (1998), these “knobs and hole” mutations can be combined with disulfide bonds to skew formation to heterodimerization. Of use in the present invention are T366S/L368A/Y407V paired with T366W, as well as this variant with a bridging disulfide, T366S/L368A/Y407V/Y349C paired with T366W/S354C, particularly in combination with other heterodimerization variants including pI variants as outlined below.

[0189] An additional mechanism that finds use in the generation of heterodimeric antibodies is sometimes referred to as “electrostatic steering” or “charge pairs” as described in Gunasekaran et al., J. Biol. Chem. 285(25):19637 (2010), hereby incorporated by reference in its entirety. This is sometimes referred to herein as “charge pairs”. In this embodiment, electrostatics are used to skew the formation towards heterodimerization. As those in the art will appreciate, these may also have an effect on pI, and thus on purification, and thus could in some cases also be considered pI variants. However, as these were generated to force heterodimerization and were not used as purification tools, they are classified as “steric variants”. These include, but are not limited to, D221E/P228E/L368E paired with D221R/P228R/K409R (e.g. these are “monomer corresponding sets) and C220E/P228E/368E paired with C220R/E224R/P228R/K409R and others shown in the Figures.

[0190] In the present invention, in some embodiments, pI variants are used to alter the pI of one or both of the monomers and thus allowing the isoelectric purification of A-A, A-B and B-B dimeric proteins.

[0191] In the present invention, there are several basic mechanisms that can lead to ease of purifying heterodimeric proteins; one relies on the use of pI variants, such that each monomer has a different pI, thus allowing the isoelectric purification of A-A, A-B and B-B dimeric proteins. Alternatively, some scaffold formats, such as the “triple F” or “bottle opener” format, also allows separation on the basis of size. As is further outlined below, it is also possible to “skew” the formation of heterodimers over homodimers. Thus, a combination of steric heterodimerization variants and pI or charge pair variants find particular use in the invention. Additionally, as more fully outlined below, scaffolds that utilize scFv(s) such as the Triple F format can include charged scFv linkers (either positive or negative), that give a further pI boost for purification purposes. As will be appreciated by those in the art, some Triple F formats are useful with just charged scFv linkers and no additional pI adjustments, although the invention does provide the use of skew variants with charged scFv linkers as well (and combinations of Fc, FcRn and KO variants discussed herein).

[0192] In the present invention that utilizes pI as a separation mechanism to allow the purification of heterodimeric proteins, amino acid variants can be introduced into one or both of the monomer polypeptides; that is, the pI of one of the monomers (referred to herein for simplicity as “monomer A”) can be engineered away from monomer B, or both monomer A and B change be changed, with the pI of monomer A increasing and the pI of monomer B decreasing. As is outlined more fully below, the pI changes of either or both monomers can be done by removing or adding a charged residue (e.g. a neutral amino acid is replaced by a positively or negatively charged amino acid residue, e.g. glycine to glutamic acid), changing a charged residue from positive or negative to the opposite charge (aspartic acid to lysine) or changing a charged residue to a neutral residue (e.g. loss of a charge; lysine to serine). A number of these variants are shown in the Figures. In addition, suitable pI variants for use in the creation of heterodimeric antibodies herein are those that are isotypic, e.g. importing pI variants from different IgG isotypes such that pI is changed without introducing significant immunogenicity; see FIG. 29 from US Publication No. 20140288275, hereby incorporated by reference in its entirety.

[0193] Accordingly, in this embodiment of the present invention provides for creating a sufficient change in pI in at least one of the monomers such that heterodimers can be separated from homodimers. As will be appreciated by those in the art, and as discussed further below, this can be done by using a “wild type” heavy chain constant region and a variant region that has been engineered to either increase or decrease its pI (wt A-+B or wt A-−B), or by increasing one region and decreasing the other region (A+-B− or A-B+).

[0194] Thus, in general, a component of some embodiments of the present invention are amino acid variants in the constant regions of antibodies that are directed to altering the isoelectric point (pI) of at least one, if not both, of the monomers of a dimeric protein to form “pI heterodimers” (when the protein is an antibody, these are referred to as “pI antibodies”) by incorporating amino acid substitutions (“pI variants” or “pI substitutions”) into one or both of the monomers. As shown herein, the separation of the heterodimers from the two homodimers can be accomplished if the pIs of the two monomers differ by as little as 0.1 pH unit, with 0.2, 0.3, 0.4 and 0.5 or greater all finding use in the present invention.

[0195] As will be appreciated by those in the art, the number of pI variants to be included on each or both monomer(s) to get good separation will depend in part on the starting pI of the scFv and Fab of interest. That is, to determine which monomer to engineer or in which “direction” (e.g. more positive or more negative), the Fv sequences of the two target antigens are calculated and a decision is made from there. As is known in the art, different Fvs will have different starting pIs which are exploited in the present invention. In general, as outlined herein, the pIs are engineered to result in a total pI difference of each monomer of at least about 0.1 logs, with 0.2 to 0.5 being preferred as outlined herein. Furthermore, as will be appreciated by those in the art and outlined herein, in some cases (depending on the format) heterodimers can be separated from homodimers on the basis of size (e.g. Molecular weight). For example, as shown in some embodiments of FIG. 2, some formats result in homodimers and heterodimers with different sizes (e.g. for bottle openers, one homodimer is a “dual scFv” format, one homodimer is a standard antibody, and the heterodimer has one Fab and one scFv).

[0196] In the case where pI variants are used to achieve purified heterodimers over homodimers, by using the constant region(s) of the heavy chain(s), a more modular approach to designing and purifying multispecific proteins, including antibodies, is provided. Thus, in some embodiments, heterodimerization variants (including skew and purification heterodimerization variants) are not included in the variable regions, such that each individual antibody must be engineered. In addition, in some embodiments, the possibility of immunogenicity resulting from the pI variants is significantly reduced by importing pI variants from different IgG isotypes such that pI is changed without introducing significant immunogenicity. Thus, an additional problem to be solved is the elucidation of low pI constant domains with high human sequence content, e.g. the minimization or avoidance of non-human residues at any particular position.

[0197] A side benefit that can occur with this pI engineering is also the extension of serum half-life and increased FcRn binding. That is, as described in U.S. Ser. No. 13/194,904 (incorporated by reference in its entirety), lowering the pI of antibody constant domains (including those found in antibodies and Fc fusions) can lead to longer serum retention in vivo. These pI variants for increased serum half life also facilitate pI changes for purification.

[0198] In addition, it should be noted that the pI variants of the heterodimerization variants give an additional benefit for the analytics and quality control process of bispecific antibodies, as the ability to either eliminate, minimize and distinguish when homodimers are present is significant. Similarly, the ability to reliably test the reproducibility of the heterodimeric protein production is important.

[0199] First and second antigens of the invention are herein referred to as antigen-1 and antigen-2 respectively, with one being a costimulatory receptor and one being a checkpoint receptor. One heterodimeric scaffold that finds particular use in the present invention is the “triple f” or “bottle opener” scaffold format. In this embodiment, one heavy chain of the antibody contains an single chain fv (“scfv”, as defined below) and the other heavy chain is a “regular” fab format, comprising a variable heavy chain and a light chain. This structure is sometimes referred to herein as “triple f” format (scfv-fab-fc) or the “bottle-opener” format, due to a rough visual similarity to a bottle-opener (see FIG. 2). The two chains are brought together by the use of amino acid variants in the constant regions (e.g. the Fe domain and/or the hinge region) that promote the formation of heterodimeric antibodies as is described more fully below.

[0200] There are several distinct advantages to the present “triple F” format. As is known in the art, antibody analogs relying on two scFv constructs often have stability and aggregation problems, which can be alleviated in the present invention by the addition of a “regular” heavy and light chain pairing. In addition, as opposed to formats that rely on two heavy chains and two light chains, there is no issue with the incorrect pairing of heavy and light chains (e.g. heavy 1 pairing with light 2, etc.)

[0201] Furthermore, as outlined herein, additional amino acid variants may be introduced into the bispecific antibodies of the invention, to add additional functionalities. For example, amino acid changes within the Fc region can be added (either to one monomer or both) to facilitate increased ADCC or CDC (e.g. altered binding to Fcγ receptors) as well as to increase binding to FcRn and/or increase serum half-life of the resulting molecules. As is further described herein and as will be appreciated by those in the art, any and all of the variants outlined herein can be optionally and independently combined with other variants.

[0202] Similarly, another category of functional variants are “Fcγ ablation variants” or “Fc knock out (FcKO or KO) variants. In these embodiments, for some therapeutic applications, it is desirable to reduce or remove the normal binding of the Fc domain to one or more or all of the Fcγ receptors (e.g. FcγRI, FcγRIIa, FcγRIIb, FcγRIIIa, etc.) to avoid additional mechanisms of action. That is, for example, it is generally desirable to ablate FcγRIIIa binding to eliminate or significantly reduce ADCC activity. Suitable ablation variants are shown in FIG. 6.

### IV. Definitions

[0203] In order that the application may be more completely understood, several definitions are set forth below. Such definitions are meant to encompass grammatical equivalents.

[0204] By “ablation” herein is meant a decrease or removal of activity. Thus for example, “ablating FcγR binding” means the Fc region amino acid variant has less than 50% starting binding as compared to an Fc region not containing the specific variant, with less than 70-80-90-95-98% loss of activity being preferred, and in general, with the activity being below the level of detectable binding in a Biacore assay. Of particular use in the ablation of FcγR binding are those shown in FIG. 6.

[0205] By “ADCC” or “antibody dependent cell-mediated cytotoxicity” as used herein is meant the cell-mediated reaction wherein nonspecific cytotoxic cells that express FcγRs recognize bound antibody on a target cell and subsequently cause lysis of the target cell. ADCC is correlated with binding to FcγRIIIa; increased binding to FcγRIIIa leads to an increase in ADCC activity. As is discussed herein, many embodiments of the invention ablate ADCC activity entirely.

[0206] By “ADCP” or antibody dependent cell-mediated phagocytosis as used herein is meant the cell-mediated reaction wherein nonspecific cytotoxic cells that express FcγRs recognize bound antibody on a target cell and subsequently cause phagocytosis of the target cell.

[0207] By “antigen binding domain” or “ABD” herein is meant a set of six Complementary Determining Regions (CDRs) that, when present as part of a polypeptide sequence, specifically binds a target antigen as discussed herein. Thus, a “immunomodulatoryantigen binding domain” binds a target immunomodulatoryantigen as outlined herein. As is known in the art, these CDRs are generally present as a first set of variable heavy CDRs (vhCDRs or V_{H}CDRs) and a second set of variable light CDRs (vlCDRs or V_{L}CDRs), each comprising three CDRs: vhCDR1, vhCDR2, vhCDR3 for the heavy chain and vlCDR1, vlCDR2 and vlCDR3 for the light. The CDRs are present in the variable heavy and variable light domains, respectively, and together form an Fv region. Thus, in some cases, the six CDRs of the antigen binding domain are contributed by a variable heavy and variable light chain. In a “Fab” format, the set of 6 CDRs are contributed by two different polypeptide sequences, the variable heavy domain (vh or V_{H}; containing the vhCDR1, vhCDR2 and vhCDR3) and the variable light domain (vl or V_{L}; containing the vlCDR1, vlCDR2 and vlCDR3), with the C-terminus of the vh domain being attached to the N-terminus of the CH1 domain of the heavy chain and the C-terminus of the vl domain being attached to the N-terminus of the constant light domain (and thus forming the light chain). In a scFv format, the vh and vl domains are covalently attached, generally through the use of a linker as outlined herein, into a single polypeptide sequence, which can be either (starting from the N-terminus) vh-linker-vl or vl-linker-vh, with the former being generally preferred (including optional domain linkers on each side, depending on the format used.

[0208] By “modification” herein is meant an amino acid substitution, insertion, and/or deletion in a polypeptide sequence or an alteration to a moiety chemically linked to a protein. For example, a modification may be an altered carbohydrate or PEG structure attached to a protein. By “amino acid modification” herein is meant an amino acid substitution, insertion, and/or deletion in a polypeptide sequence. For clarity, unless otherwise noted, the amino acid modification is always to an amino acid coded for by DNA, e.g. the 20 amino acids that have codons in DNA and RNA.

[0209] By “amino acid substitution” or “substitution” herein is meant the replacement of an amino acid at a particular position in a parent polypeptide sequence with a different amino acid. In particular, in some embodiments, the substitution is to an amino acid that is not naturally occurring at the particular position, either not naturally occurring within the organism or in any organism. For example, the substitution E272Y refers to a variant polypeptide, in this case an Fc variant, in which the glutamic acid at position 272 is replaced with tyrosine. For clarity, a protein which has been engineered to change the nucleic acid coding sequence but not change the starting amino acid (for example exchanging CGG (encoding arginine) to CGA (still encoding arginine) to increase host organism expression levels) is not an “amino acid substitution”; that is, despite the creation of a new gene encoding the same protein, if the protein has the same amino acid at the particular position that it started with, it is not an amino acid substitution.

[0210] By “amino acid insertion” or “insertion” as used herein is meant the addition of an amino acid sequence at a particular position in a parent polypeptide sequence. For example, −233E or 233E designates an insertion of glutamic acid after position 233 and before position 234. Additionally, −233ADE or A233ADE designates an insertion of AlaAspGlu after position 233 and before position 234.

[0211] By “amino acid deletion” or “deletion” as used herein is meant the removal of an amino acid sequence at a particular position in a parent polypeptide sequence. For example, E233- or E233#, E233( ) or E233del designates a deletion of glutamic acid at position 233. Additionally, EDA233- or EDA233# designates a deletion of the sequence GluAspAla that begins at position 233.

[0212] By “variant protein” or “protein variant”, or “variant” as used herein is meant a protein that differs from that of a parent protein by virtue of at least one amino acid modification. Protein variant may refer to the protein itself, a composition comprising the protein, or the amino sequence that encodes it. Preferably, the protein variant has at least one amino acid modification compared to the parent protein, e.g. from about one to about seventy amino acid modifications, and preferably from about one to about five amino acid modifications compared to the parent. As described below, in some embodiments the parent polypeptide, for example an Fc parent polypeptide, is a human wild type sequence, such as the Fc region from IgG1, IgG2, IgG3 or IgG4, although human sequences with variants can also serve as “parent polypeptides”, for example the IgG1/2 hybrid can be included. The protein variant sequence herein will preferably possess at least about 80% identity with a parent protein sequence, and most preferably at least about 90% identity, more preferably at least about 95-98-99% identity. Variant protein can refer to the variant protein itself, compositions comprising the protein variant, or the DNA sequence that encodes it.

[0213] Accordingly, by “antibody variant” or “variant antibody” as used herein is meant an antibody that differs from a parent antibody by virtue of at least one amino acid modification, “IgG variant” or “variant IgG” as used herein is meant an antibody that differs from a parent IgG (again, in many cases, from a human IgG sequence) by virtue of at least one amino acid modification, and “immunoglobulin variant” or “variant immunoglobulin” as used herein is meant an immunoglobulin sequence that differs from that of a parent immunoglobulin sequence by virtue of at least one amino acid modification. “Fc variant” or “variant Fc” as used herein is meant a protein comprising an amino acid modification in an Fc domain. The Fc variants of the present invention are defined according to the amino acid modifications that compose them. Thus, for example, N434S or 434S is an Fc variant with the substitution serine at position 434 relative to the parent Fc polypeptide, wherein the numbering is according to the EU index. Likewise, M428L/N434S defines an Fc variant with the substitutions M428L and N434S relative to the parent Fc polypeptide. The identity of the WT amino acid may be unspecified, in which case the aforementioned variant is referred to as 428L/434S. It is noted that the order in which substitutions are provided is arbitrary, that is to say that, for example, 428L/434S is the same Fc variant as M428L/N434S, and so on. For all positions discussed in the present invention that relate to antibodies, unless otherwise noted, amino acid position numbering is according to the EU index. The EU index or EU index as in Kabat or EU numbering scheme refers to the numbering of the EU antibody (Edelman et al., 1969, Proc Natl Acad Sci USA 63:78-85, hereby entirely incorporated by reference.) The modification can be an addition, deletion, or substitution. Substitutions can include naturally occurring amino acids and, in some cases, synthetic amino acids. Examples include U.S. Pat. No. 6,586,207; WO 98/48032; WO 03/073238; US2004-0214988A1; WO 05/35727A2; WO 05/74524A2; J. W. Chin et al., (2002), Journal of the American Chemical Society 124:9026-9027; J. W. Chin, & P. G. Schultz, (2002), ChemBioChem 11:1135-1137; J. W. Chin, et al., (2002), PICAS United States of America 99:11020-11024; and, L. Wang, & P. G. Schultz, (2002), Chem. 1-10, all entirely incorporated by reference.

[0214] As used herein, “protein” herein is meant at least two covalently attached amino acids, which includes proteins, polypeptides, oligopeptides and peptides. The peptidyl group may comprise naturally occurring amino acids and peptide bonds, or synthetic peptidomimetic structures, i.e. “analogs”, such as peptoids (see Simon et al., PNAS USA 89(20):9367 (1992), entirely incorporated by reference). The amino acids may either be naturally occurring or synthetic (e.g. not an amino acid that is coded for by DNA); as will be appreciated by those in the art. For example, homo-phenylalanine, citrulline, ornithine and noreleucine are considered synthetic amino acids for the purposes of the invention, and both D- and L-(R or S) configured amino acids may be utilized. The variants of the present invention may comprise modifications that include the use of synthetic amino acids incorporated using, for example, the technologies developed by Schultz and colleagues, including but not limited to methods described by Cropp & Shultz, 2004, Trends Genet. 20(12):625-30, Anderson et al., 2004, Proc Natl Acad Sci USA 101 (2):7566-71, Zhang et al., 2003, 303(5656):371-3, and Chin et al., 2003, Science 301(5635):964-7, all entirely incorporated by reference. In addition, polypeptides may include synthetic derivatization of one or more side chains or termini, glycosylation, PEGylation, circular permutation, cyclization, linkers to other molecules, fusion to proteins or protein domains, and addition of peptide tags or labels.

[0215] By “residue” as used herein is meant a position in a protein and its associated amino acid identity. For example, Asparagine 297 (also referred to as Asn297 or N297) is a residue at position 297 in the human antibody IgG1.

[0216] By “Fab” or “Fab region” as used herein is meant the polypeptide that comprises the VH, CH1, VL, and CL immunoglobulin domains. Fab may refer to this region in isolation, or this region in the context of a full length antibody, antibody fragment or Fab fusion protein.

[0217] By “Fv” or “Fv fragment” or “Fv region” as used herein is meant a polypeptide that comprises the VL and VH domains of a single ABD. As will be appreciated by those in the art, these generally are made up of two chains, or can be combined (generally with a linker as discussed herein) to form an scFv. In some cases, for example in the “central-Fv” and “DVD-Ig” formats, an “extra” vh and vl domain is added that serves as a scFv but where the vh and vl domains are not linked using a scFv linker between them.

[0218] By “single chain Fv” or “scFv” herein is meant a variable heavy domain covalently attached to a variable light domain, generally using a scFv linker as discussed herein, to form a scFv or scFv domain. A scFv domain can be in either orientation from N- to C-terminus (vh-linker-vl or vl-linker-vh).

[0219] By “IgG subclass modification” or “isotype modification” as used herein is meant an amino acid modification that converts one amino acid of one IgG isotype to the corresponding amino acid in a different, aligned IgG isotype. For example, because IgG1 comprises a tyrosine and IgG2 a phenylalanine at EU position 296, a F296Y substitution in IgG2 is considered an IgG subclass modification.

[0220] By “non-naturally occurring modification” as used herein is meant an amino acid modification that is not isotypic. For example, because none of the IgGs comprise a serine at position 434, the substitution 434S in IgG1, IgG2, IgG3, or IgG4 (or hybrids thereof) is considered a non-naturally occurring modification.

[0221] By “amino acid” and “amino acid identity” as used herein is meant one of the 20 naturally occurring amino acids that are coded for by DNA and RNA.

[0222] By “effector function” as used herein is meant a biochemical event that results from the interaction of an antibody Fc region with an Fc receptor or ligand. Effector functions include but are not limited to ADCC, ADCP, and CDC.

[0223] By “IgG Fc ligand” as used herein is meant a molecule, preferably a polypeptide, from any organism that binds to the Fc region of an IgG antibody to form an Fc/Fc ligand complex. Fc ligands include but are not limited to FcγRIs, FcγRIIs, FcγRIIIs, FcRn, C1q, C3, mannan binding lectin, mannose receptor, staphylococcal protein A, streptococcal protein G, and viral FcγR. Fc ligands also include Fc receptor homologs (FcRH), which are a family of Fc receptors that are homologous to the FcγRs (Davis et al., 2002, Immunological Reviews 190:123-136, entirely incorporated by reference). Fc ligands may include undiscovered molecules that bind Fc. Particular IgG Fc ligands are FcRn and Fc gamma receptors. By “Fc ligand” as used herein is meant a molecule, preferably a polypeptide, from any organism that binds to the Fc region of an antibody to form an Fc/Fc ligand complex.

[0224] By “Fc gamma receptor”, “FcγR” or “FcgammaR” as used herein is meant any member of the family of proteins that bind the IgG antibody Fc region and is encoded by an FcγR gene. In humans this family includes but is not limited to FcγRI (CD64), including isoforms FcγRIa, FcγRIb, and FcγRIc; FcγRII (CD32), including isoforms FcγRIIa (including allotypes H131 and R131), FcγRIIb (including FcγRIIb-1 and FcγRIIb-2), and FcγRIIc; and FcγRIII (CD16), including isoforms FcγRIIIa (including allotypes V158 and F158) and FcγRIIIb (including allotypes FcγRIIb-NA1 and FcγRIIb-NA2) (Jefferis et al., 2002, Immunol Lett 82:57-65, entirely incorporated by reference), as well as any undiscovered human FcγRs or FcγR isoforms or allotypes. An FcγR may be from any organism, including but not limited to humans, mice, rats, rabbits, and monkeys. Mouse FcγRs include but are not limited to FcγRI (CD64), FcγRII (CD32), FcγRIII (CD16), and FcγRIII-2 (CD16-2), as well as any undiscovered mouse FcγRs or FcγR isoforms or allotypes.

[0225] By “FcRn” or “neonatal Fc Receptor” as used herein is meant a protein that binds the IgG antibody Fc region and is encoded at least in part by an FcRn gene. The FcRn may be from any organism, including but not limited to humans, mice, rats, rabbits, and monkeys. As is known in the art, the functional FcRn protein comprises two polypeptides, often referred to as the heavy chain and light chain. The light chain is beta-2-microglobulin and the heavy chain is encoded by the FcRn gene. Unless otherwise noted herein, FcRn or an FcRn protein refers to the complex of FcRn heavy chain with beta-2-microglobulin. A variety of FcRn variants used to increase binding to the FcRn receptor, and in some cases, to increase serum half-life, are shown in the Figure Legend of FIG. 83.

[0226] By “parent polypeptide” as used herein is meant a starting polypeptide that is subsequently modified to generate a variant. The parent polypeptide may be a naturally occurring polypeptide, or a variant or engineered version of a naturally occurring polypeptide. Parent polypeptide may refer to the polypeptide itself, compositions that comprise the parent polypeptide, or the amino acid sequence that encodes it. Accordingly, by “parent immunoglobulin” as used herein is meant an unmodified immunoglobulin polypeptide that is modified to generate a variant, and by “parent antibody” as used herein is meant an unmodified antibody that is modified to generate a variant antibody. It should be noted that “parent antibody” includes known commercial, recombinantly produced antibodies as outlined below.

[0227] By “Fc” or “Fc region” or “Fc domain” as used herein is meant the polypeptide comprising the constant region of an antibody excluding the first constant region immunoglobulin domain and in some cases, part of the hinge. Thus Fc refers to the last two constant region immunoglobulin domains of IgA, IgD, and IgG, the last three constant region immunoglobulin domains of IgE and IgM, and the flexible hinge N-terminal to these domains. For IgA and IgM, Fc may include the J chain. For IgG, the Fc domain comprises immunoglobulin domains C72 and C73 (C72 and C73) and the lower hinge region between C71 (C71) and C72 (C72). Although the boundaries of the Fc region may vary, the human IgG heavy chain Fc region is usually defined to include residues C226 or P230 to its carboxyl-terminus, wherein the numbering is according to the EU index as in Kabat. In some embodiments, as is more fully described below, amino acid modifications are made to the Fc region, for example to alter binding to one or more FcγR receptors or to the FcRn receptor.

[0228] By “heavy constant region” herein is meant the CH1-hinge-CH2-CH3 portion of an antibody.

[0229] By “Fc fusion protein” or “immunoadhesin” herein is meant a protein comprising an Fc region, generally linked (optionally through a linker moiety, as described herein) to a different protein, such as a binding moiety to a target protein, as described herein. In some cases, one monomer of the heterodimeric antibody comprises an antibody heavy chain (either including an scFv or further including a light chain) and the other monomer is a Fc fusion, comprising a variant Fc domain and a ligand. In some embodiments, these “half antibody-half fusion proteins” are referred to as “Fusionbodies”.

[0230] By “position” as used herein is meant a location in the sequence of a protein. Positions may be numbered sequentially, or according to an established format, for example the EU index for antibody numbering.

[0231] By “target antigen” as used herein is meant the molecule that is bound specifically by the variable region of a given antibody. A target antigen may be a protein, carbohydrate, lipid, or other chemical compound. Suitable target antigens are described below.

[0232] By “strandedness” in the context of the monomers of the heterodimeric antibodies of the invention herein is meant that, similar to the two strands of DNA that “match”, heterodimerization variants are incorporated into each monomer so as to preserve the ability to “match” to form heterodimers. For example, if some pI variants are engineered into monomer A (e.g. making the pI higher) then steric variants that are “charge pairs” that can be utilized as well do not interfere with the pI variants, e.g. the charge variants that make a pI higher are put on the same “strand” or “monomer” to preserve both functionalities. Similarly, for “skew” variants that come in pairs of a set as more fully outlined below, the skilled artisan will consider pI in deciding into which strand or monomer that incorporates one set of the pair will go, such that pI separation is maximized using the pI of the skews as well.

[0233] By “target cell” as used herein is meant a cell that expresses a target antigen.

[0234] By “variable region” as used herein is meant the region of an immunoglobulin that comprises one or more Ig domains substantially encoded by any of the V.kappa., V.lamda., and/or VH genes that make up the kappa, lambda, and heavy chain immunoglobulin genetic loci respectively.

[0235] By “wild type or WT” herein is meant an amino acid sequence or a nucleotide sequence that is found in nature, including allelic variations. A WT protein has an amino acid sequence or a nucleotide sequence that has not been intentionally modified.

[0236] The antibodies of the present invention are generally isolated or recombinant. “Isolated,” when used to describe the various polypeptides disclosed herein, means a polypeptide that has been identified and separated and/or recovered from a cell or cell culture from which it was expressed. Ordinarily, an isolated polypeptide will be prepared by at least one purification step. An “isolated antibody,” refers to an antibody which is substantially free of other antibodies having different antigenic specificities. “Recombinant” means the antibodies are generated using recombinant nucleic acid techniques in exogeneous host cells.

[0237] “Percent (%) amino acid sequence identity” with respect to a protein sequence is defined as the percentage of amino acid residues in a candidate sequence that are identical with the amino acid residues in the specific (parental) sequence, after aligning the sequences and introducing gaps, if necessary, to achieve the maximum percent sequence identity, and not considering any conservative substitutions as part of the sequence identity. Alignment for purposes of determining percent amino acid sequence identity can be achieved in various ways that are within the skill in the art, for instance, using publicly available computer software such as BLAST, BLAST-2, ALIGN or Megalign (DNASTAR) software. Those skilled in the art can determine appropriate parameters for measuring alignment, including any algorithms needed to achieve maximal alignment over the full length of the sequences being compared. One particular program is the ALIGN-2 program outlined at paragraphs [0279] to [0280] of US Pub. No. 20160244525, hereby incorporated by reference.

[0238] The degree of identity between an amino acid sequence of the present invention (“invention sequence”) and the parental amino acid sequence is calculated as the number of exact matches in an alignment of the two sequences, divided by the length of the “invention sequence,” or the length of the parental sequence, whichever is the shortest. The result is expressed in percent identity.

[0239] In some embodiments, two or more amino acid sequences are at least 50%, 60%, 70%, 80%, or 90% identical. In some embodiments, two or more amino acid sequences are at least 95%, 97%, 98%, 99%, or even 100% identical.

[0240] “Specific binding” or “specifically binds to” or is “specific for” a particular antigen or an epitope means binding that is measurably different from a non-specific interaction. Specific binding can be measured, for example, by determining binding of a molecule compared to binding of a control molecule, which generally is a molecule of similar structure that does not have binding activity. For example, specific binding can be determined by competition with a control molecule that is similar to the target.

[0241] Specific binding for a particular antigen or an epitope can be exhibited, for example, by an antibody having a KD for an antigen or epitope of at least about 10⁻⁴ M, at least about 10⁻⁵ M, at least about 10⁻⁶ M, at least about 10⁻⁷ M, at least about 10⁻⁸ M, at least about 10⁻⁹ M, alternatively at least about 10⁻¹⁰ M, at least about 10⁻¹¹ M, at least about 10⁻¹² M, or greater, where KD refers to a dissociation rate of a particular antibody-antigen interaction. Typically, an antibody that specifically binds an antigen will have a KD that is 20-, 50-, 100-, 500-, 1000-, 5,000-, 10,000- or more times greater for a control molecule relative to the antigen or epitope.

[0242] Also, specific binding for a particular antigen or an epitope can be exhibited, for example, by an antibody having a KA or Ka for an antigen or epitope of at least 20-, 50-, 100-, 500-, 1000-, 5,000-, 10,000- or more times greater for the epitope relative to a control, where KA or Ka refers to an association rate of a particular antibody-antigen interaction. Binding affinity is generally measured using a Biacore assay.

### V. Antibodies

[0243] The present invention relates to the generation of bispecific immunomodulatory antibodies that bind two different immunomodulatory antigens as discussed herein. As is discussed below, the term “antibody” is used generally. Antibodies that find use in the present invention can take on a number of formats as described herein.

[0244] Traditional antibody structural units typically comprise a tetramer. Each tetramer is typically composed of two identical pairs of polypeptide chains, each pair having one “light” (typically having a molecular weight of about 25 kDa) and one “heavy” chain (typically having a molecular weight of about 50-70 kDa). Human light chains are classified as kappa and lambda light chains. The present invention is directed to bispecific antibodies that generally are based on the IgG class, which has several subclasses, including, but not limited to IgG1, IgG2, IgG3, and IgG4. In general, IgG1, IgG2 and IgG4 are used more frequently than IgG3. It should be noted that IgG1 has different allotypes with polymorphisms at 356 (D or E) and 358 (L or M). The sequences depicted herein use the 356D/358M allotype, however the other allotype is included herein. That is, any sequence inclusive of an IgG1 Fc domain included herein can have 356E/358L replacing the 356D/358M allotype.

[0245] In addition, many of the sequences herein have at least one of the cysteines at position 220 replaced by a serine; generally, this is the on the “scFv monomer” side for most of the sequences depicted herein, although it can also be on the “Fab monomer” side, or both, to reduce disulfide formation. Specifically included within the sequences herein are one or both of these cysteines replaced (C220S).

[0246] Thus, “isotype” as used herein is meant any of the subclasses of immunoglobulins defined by the chemical and antigenic characteristics of their constant regions. It should be understood that therapeutic antibodies can also comprise hybrids of isotypes and/or subclasses. For example, as shown in US Publication 2009/0163699, incorporated by reference, the present invention covers pI engineering of IgG1/G2 hybrids.

[0247] The amino-terminal portion of each chain includes a variable region of about 100 to 110 or more amino acids primarily responsible for antigen recognition, generally referred to in the art and herein as the “Fv domain” or “Fv region”. In the variable region, three loops are gathered for each of the V domains of the heavy chain and light chain to form an antigen-binding site. Each of the loops is referred to as a complementarity-determining region (hereinafter referred to as a “CDR”), in which the variation in the amino acid sequence is most significant. “Variable” refers to the fact that certain segments of the variable region differ extensively in sequence among antibodies. Variability within the variable region is not evenly distributed. Instead, the V regions consist of relatively invariant stretches called framework regions (FRs) of 15-30 amino acids separated by shorter regions of extreme variability called “hypervariable regions” that are each 9-15 amino acids long or longer.

[0248] Each VH and VL is composed of three hypervariable regions (“complementary determining regions,” “CDRs”) and four FRs, arranged from amino-terminus to carboxy-terminus in the following order: FR1-CDR1-FR2-CDR2-FR3-CDR3-FR4.

[0249] The hypervariable region generally encompasses amino acid residues from about amino acid residues 24-34 (LCDR1; “L” denotes light chain), 50-56 (LCDR2) and 89-97 (LCDR3) in the light chain variable region and around about 31-35B (HCDR1; “H” denotes heavy chain), 50-65 (HCDR2), and 95-102 (HCDR3) in the heavy chain variable region; Kabat et al., SEQUENCES OF PROTEINS OF IMMUNOLOGICAL INTEREST, 5th Ed. Public Health Service, National Institutes of Health, Bethesda, Md. (1991) and/or those residues forming a hypervariable loop (e.g. residues 26-32 (LCDR1), 50-52 (LCDR2) and 91-96 (LCDR3) in the light chain variable region and 26-32 (HCDR1), 53-55 (HCDR2) and 96-101 (HCDR3) in the heavy chain variable region; Chothia and Lesk (1987) J. Mol. Biol. 196:901-917. Specific CDRs of the invention are described below.

[0250] As will be appreciated by those in the art, the exact numbering and placement of the CDRs can be different among different numbering systems. However, it should be understood that the disclosure of a variable heavy and/or variable light sequence includes the disclosure of the associated (inherent) CDRs. Accordingly, the disclosure of each variable heavy region is a disclosure of the vhCDRs (e.g. vhCDR1, vhCDR2 and vhCDR3) and the disclosure of each variable light region is a disclosure of the vlCDRs (e.g. vlCDR1, vlCDR2 and vlCDR3).

[0251] A useful comparison of CDR numbering is as below, see Lafranc et al., Dev. Comp. Immunol. 27(1):55-77 (2003):

TABLE 1

| | Kabat + | | | | | | |
|---|---|---|---|---|---|---|---|
| | Chothia | IMGT | Kabat | AbM | Chothia | Contact | Xencor |
| vhCDR1 | 26-35 | 27-38 | 31-35 | 26-35 | 26-32 | 30-35 | 27-35 |
| vhCDR2 | 50-65 | 56-65 | 50-65 | 50-58 | 52-56 | 47-58 | 54-61 |
| vhCDR3 | 95-102 | 105-117 | 95-102 | 95-102 | 95-102 | 93-101 | 103-116 |
| vlCDR1 | 24-34 | 27-38 | 24-34 | 24-34 | 24-34 | 30-36 | 27-38 |
| vlCDR2 | 50-56 | 56-65 | 50-56 | 50-56 | 50-56 | 46-55 | 56-62 |
| vlCDR3 | 89-97 | 105-117 | 89-97 | 89-97 | 89-97 | 89-96 | 97-105 |

[0252] Throughout the present specification, the Kabat numbering system is generally used when referring to a residue in the variable domain (approximately, residues 1-107 of the light chain variable region and residues 1-113 of the heavy chain variable region) and the EU numbering system for Fc regions (e.g, Kabat et al., supra (1991)).

[0253] The present invention provides a large number of different CDR sets. In this case, a “full CDR set” comprises the three variable light and three variable heavy CDRs, e.g. a vlCDR1, vlCDR2, vlCDR3, vhCDR1, vhCDR2 and vhCDR3. These can be part of a larger variable light or variable heavy domain, respectfully. In addition, as more fully outlined herein, the variable heavy and variable light domains can be on separate polypeptide chains, when a heavy and light chain is used (for example when Fabs are used), or on a single polypeptide chain in the case of scFv sequences.

[0254] The CDRs contribute to the formation of the antigen-binding, or more specifically, epitope binding site of antibodies. “Epitope” refers to a determinant that interacts with a specific antigen binding site in the variable region of an antibody molecule known as a paratope. Epitopes are groupings of molecules such as amino acids or sugar side chains and usually have specific structural characteristics, as well as specific charge characteristics. A single antigen may have more than one epitope.

[0255] The epitope may comprise amino acid residues directly involved in the binding (also called immunodominant component of the epitope) and other amino acid residues, which are not directly involved in the binding, such as amino acid residues which are effectively blocked by the specifically antigen binding peptide; in other words, the amino acid residue is within the footprint of the specifically antigen binding peptide.

[0256] Epitopes may be either conformational or linear. A conformational epitope is produced by spatially juxtaposed amino acids from different segments of the linear polypeptide chain. A linear epitope is one produced by adjacent amino acid residues in a polypeptide chain. Conformational and nonconformational epitopes may be distinguished in that the binding to the former but not the latter is lost in the presence of denaturing solvents.

[0257] An epitope typically includes at least 3, and more usually, at least 5 or 8-10 amino acids in a unique spatial conformation. Antibodies that recognize the same epitope can be verified in a simple immunoassay showing the ability of one antibody to block the binding of another antibody to a target antigen, for example “binning.” As outlined below, the invention not only includes the enumerated antigen binding domains and antibodies herein, but those that compete for binding with the epitopes bound by the enumerated antigen binding domains.

[0258] The carboxy-terminal portion of each chain defines a constant region primarily responsible for effector function. Kabat et al. collected numerous primary sequences of the variable regions of heavy chains and light chains. Based on the degree of conservation of the sequences, they classified individual primary sequences into the CDR and the framework and made a list thereof (see SEQUENCES OF IMMUNOLOGICAL INTEREST, 5th edition, NIH publication, No. 91-3242, E.A. Kabat et al., entirely incorporated by reference).

[0259] In the IgG subclass of immunoglobulins, there are several immunoglobulin domains in the heavy chain. By “immunoglobulin (Ig) domain” herein is meant a region of an immunoglobulin having a distinct tertiary structure. Of interest in the present invention are the heavy chain domains, including, the constant heavy (CH) domains and the hinge domains. In the context of IgG antibodies, the IgG isotypes each have three CH regions. Accordingly, “CH” domains in the context of IgG are as follows: “CH1” refers to positions 118-220 according to the EU index as in Kabat. “CH2” refers to positions 237-340 according to the EU index as in Kabat, and “CH3” refers to positions 341-447 according to the EU index as in Kabat. As shown herein and described below, the pI variants can be in one or more of the CH regions, as well as the hinge region, discussed below.

[0260] Another type of Ig domain of the heavy chain is the hinge region. By “hinge” or “hinge region” or “antibody hinge region” or “immunoglobulin hinge region” herein is meant the flexible polypeptide comprising the amino acids between the first and second constant domains of an antibody. Structurally, the IgG CH1 domain ends at EU position 220, and the IgG CH2 domain begins at residue EU position 237. Thus for IgG the antibody hinge is herein defined to include positions 221 (D221 in IgG1) to 236 (G236 in IgG1), wherein the numbering is according to the EU index as in Kabat. In some embodiments, for example in the context of an Fc region, the lower hinge is included, with the “lower hinge” generally referring to positions 226 or 230. As noted herein, pI variants can be made in the hinge region as well.

[0261] The light chain generally comprises two domains, the variable light domain (containing the light chain CDRs and together with the variable heavy domains forming the Fv region), and a constant light chain region (often referred to as CL or Cκ).

[0262] Another region of interest for additional substitutions, outlined below, is the Fc region.

[0263] Thus, the present invention provides different antibody domains. As described herein and known in the art, the heterodimeric antibodies of the invention comprise different domains within the heavy and light chains, which can be overlapping as well. These domains include, but are not limited to, the Fc domain, the CH1 domain, the CH2 domain, the CH3 domain, the hinge domain, the heavy constant domain (CH1-hinge-Fc domain or CH1-hinge-CH2-CH3), the variable heavy domain, the variable light domain, the light constant domain, Fab domains and scFv domains.

[0264] Thus, the “Fc domain” includes the —CH2-CH3 domain, and optionally a hinge domain. In the embodiments herein, when a scFv is attached to an Fc domain, it is the C-terminus of the scFv construct that is attached to all or part of the hinge of the Fc domain; for example, it is generally attached to the sequence EPKS which is the beginning of the hinge. The heavy chain comprises a variable heavy domain and a constant domain, which includes a CH1-optional hinge-Fc domain comprising a CH2-CH3. The light chain comprises a variable light chain and the light constant domain. A scFv comprises a variable heavy chain, an scFv linker, and a variable light domain. In most of the constructs and sequences outlined herein, C-terminus of the variable light chain is attached to the N-terminus of the scFv linker, the C-terminus of which is attached to the N-terminus of a variable heavy chain (N-vh-linker-vl-C) although that can be switched (N-vl-linker-vh-C). Some embodiments of the invention comprise at least one scFv domain, which, while not naturally occurring, generally includes a variable heavy domain and a variable light domain, linked together by a scFv linker. As outlined herein, while the scFv domain is generally from N- to C-terminus oriented as vh-scFv linker-vl, this can be reversed for any of the scFv domains (or those constructed using vh and vl sequences from Fabs), to vl-scFv linker-vh, with optional linkers at one or both ends depending on the format (see generally FIG. 2).

[0265] As shown herein, there are a number of suitable scFv linkers that can be used, including traditional peptide bonds, generated by recombinant techniques. The linker peptide may predominantly include the following amino acid residues: Gly, Ser, Ala, or Thr. The linker peptide should have a length that is adequate to link two molecules in such a way that they assume the correct conformation relative to one another so that they retain the desired activity. In one embodiment, the linker is from about 1 to 50 amino acids in length, preferably about 1 to 30 amino acids in length. In one embodiment, linkers of 1 to 20 amino acids in length may be used, with from about 5 to about 10 amino acids finding use in some embodiments. Useful linkers include glycine-serine polymers, including for example (GS)n, (GSGGS)n (SEQ ID NO: 30382), (GGGGS)n (SEQ ID NO: 30383), and (GGGS)n (SEQ ID NO: 30384, where n is an integer of at least one (and generally from 3 to 4), glycine-alanine polymers, alanine-serine polymers, and other flexible linkers. Alternatively, a variety of nonproteinaceous polymers, including but not limited to polyethylene glycol (PEG), polypropylene glycol, polyoxyalkylenes, or copolymers of polyethylene glycol and polypropylene glycol, may find use as linkers, that is may find use as linkers.

[0266] Other linker sequences may include any sequence of any length of CL/CH1 domain but not all residues of CL/CH1 domain; for example the first 5-12 amino acid residues of the CL/CH1 domains. Linkers can be derived from immunoglobulin light chain, for example Cκ or Cλ. Linkers can be derived from immunoglobulin heavy chains of any isotype, including for example Cγ1, Cγ2, Cγ3, Cγ4, Cα1, Cα2, Cδ, Cϵ, and Cμ. Linker sequences may also be derived from other proteins such as Ig-like proteins (e.g. TCR, FcR, KIR), hinge region-derived sequences, and other natural sequences from other proteins.

[0267] In some embodiments, the linker is a “domain linker”, used to link any two domains as outlined herein together. While any suitable linker can be used, many embodiments utilize a glycine-serine polymer, including for example (GS)n, (GSGGS)n (SEQ ID NO: 30382), (GGGGS)n (SEQ ID NO: 30383), and (GGGS)n (SEQ ID NO: 30384), where n is an integer of at least one (and generally from 3 to 4 to 5) as well as any peptide sequence that allows for recombinant attachment of the two domains with sufficient length and flexibility to allow each domain to retain its biological function. In some cases, and with attention being paid to “strandedness”, as outlined below, charged domain linkers, as used in some embodiments of scFv linkers can be used.

[0268] In some embodiments, the scFv linker is a charged scFv linker, a number of which are shown in FIG. 8. Accordingly, the present invention further provides charged scFv linkers, to facilitate the separation in pI between a first and a second monomer. That is, by incorporating a charged scFv linker, either positive or negative (or both, in the case of scaffolds that use scFvs on different monomers), this allows the monomer comprising the charged linker to alter the pI without making further changes in the Fc domains. These charged linkers can be substituted into any scFv containing standard linkers. Again, as will be appreciated by those in the art, charged scFv linkers are used on the correct “strand” or monomer, according to the desired changes in pI. For example, as discussed herein, to make triple F format heterodimeric antibody, the original pI of the Fv region for each of the desired antigen binding domains are calculated, and one is chosen to make an scFv, and depending on the pI, either positive or negative linkers are chosen.

[0269] Charged domain linkers can also be used to increase the pI separation of the monomers of the invention as well, and thus those included in FIG. 8 can be used in any embodiment herein where a linker is utilized.

[0270] In one embodiment, the antibody is an antibody fragment, as long as it contains at least one constant domain which can be engineered to produce heterodimers, such as pI engineering. Other antibody fragments that can be used include fragments that contain one or more of the CH1, CH2, CH3, hinge and CL domains of the invention that have been pI engineered. In particular, the formats depicted in FIG. 1 are antibodies, usually referred to as “heterodimeric antibodies”, meaning that the protein has at least two associated Fc sequences self-assembled into a heterodimeric Fc domain and at least two Fv regions, whether as Fabs or as scFvs.

[0271] A. Chimeric and Humanized Antibodies

[0272] In some embodiments, the antibodies herein can be derived from a mixture from different species, e.g. a chimeric antibody and/or a humanized antibody. In general, both “chimeric antibodies” and “humanized antibodies” refer to antibodies that combine regions from more than one species. For example, “chimeric antibodies” traditionally comprise variable region(s) from a mouse (or rat, in some cases) and the constant region(s) from a human. “Humanized antibodies” generally refer to non-human antibodies that have had the variable-domain framework regions swapped for sequences found in human antibodies. Generally, in a humanized antibody, the entire antibody, except the CDRs, is encoded by a polynucleotide of human origin or is identical to such an antibody except within its CDRs. The CDRs, some or all of which are encoded by nucleic acids originating in a non-human organism, are grafted into the beta-sheet framework of a human antibody variable region to create an antibody, the specificity of which is determined by the engrafted CDRs. The creation of such antibodies is described in, e.g., WO 92/11018, Jones, 1986, Nature 321:522-525, Verhoeyen et al., 1988, Science 239:1534-1536, all entirely incorporated by reference. “Backmutation” of selected acceptor framework residues to the corresponding donor residues is often required to regain affinity that is lost in the initial grafted construct (U.S. Pat. Nos. 5,530,101; 5,585,089; 5,693,761; 5,693,762; 6,180,370; 5,859,205; 5,821,337; 6,054,297; 6,407,213, all entirely incorporated by reference). The humanized antibody optimally also will comprise at least a portion of an immunoglobulin constant region, typically that of a human immunoglobulin, and thus will typically comprise a human Fc region. Humanized antibodies can also be generated using mice with a genetically engineered immune system. Roque et al., 2004, Biotechnol. Prog. 20:639-654, entirely incorporated by reference. A variety of techniques and methods for humanizing and reshaping non-human antibodies are well known in the art (See Tsurushita & Vasquez, 2004, Humanization of Monoclonal Antibodies, Molecular Biology of B Cells, 533-545, Elsevier Science (USA), and references cited therein, all entirely incorporated by reference). Humanization methods include but are not limited to methods described in Jones et al., 1986, Nature 321:522-525; Riechmann et al., 1988; Nature 332:323-329; Verhoeyen et al., 1988, Science, 239:1534-1536; Queen et al., 1989, Proc Natl Acad Sci, USA 86:10029-33; He et al., 1998, J. Immunol. 160: 1029-1035; Carter et al., 1992, Proc Natl Acad Sci USA 89:4285-9, Presta et al., 1997, Cancer Res. 57(20):4593-9; Gorman et al., 1991, Proc. Natl. Acad. Sci. USA 88:4181-4185; O'Connor et al., 1998, Protein Eng 11:321-8, all entirely incorporated by reference. Humanization or other methods of reducing the immunogenicity of nonhuman antibody variable regions may include resurfacing methods, as described for example in Roguska et al., 1994, Proc. Natl. Acad. Sci. USA 91:969-973, entirely incorporated by reference.

[0273] In certain embodiments, the antibodies of the invention comprise a heavy chain variable region from a particular germline heavy chain immunoglobulin gene and/or a light chain variable region from a particular germline light chain immunoglobulin gene. For example, such antibodies may comprise or consist of a human antibody comprising heavy or light chain variable regions that are “the product of” or “derived from” a particular germline sequence. A human antibody that is “the product of” or “derived from” a human germline immunoglobulin sequence can be identified as such by comparing the amino acid sequence of the human antibody to the amino acid sequences of human germline immunoglobulins and selecting the human germline immunoglobulin sequence that is closest in sequence (i.e., greatest % identity) to the sequence of the human antibody. A human antibody that is “the product of” or “derived from” a particular human germline immunoglobulin sequence may contain amino acid differences as compared to the germline sequence, due to, for example, naturally-occurring somatic mutations or intentional introduction of site-directed mutation. However, a humanized antibody typically is at least 90% identical in amino acids sequence to an amino acid sequence encoded by a human germline immunoglobulin gene and contains amino acid residues that identify the antibody as being derived from human sequences when compared to the germline immunoglobulin amino acid sequences of other species (e.g., murine germline sequences). In certain cases, a humanized antibody may be at least 95, 96, 97, 98 or 99%, or even at least 96%, 97%, 98%, or 99% identical in amino acid sequence to the amino acid sequence encoded by the germline immunoglobulin gene. Typically, a humanized antibody derived from a particular human germline sequence will display no more than 10-20 amino acid differences from the amino acid sequence encoded by the human germline immunoglobulin gene (prior to the introduction of any skew, pI and ablation variants herein; that is, the number of variants is generally low, prior to the introduction of the variants of the invention). In certain cases, the humanized antibody may display no more than 5, or even no more than 4, 3, 2, or 1 amino acid difference from the amino acid sequence encoded by the germline immunoglobulin gene (again, prior to the introduction of any skew, pI and ablation variants herein; that is, the number of variants is generally low, prior to the introduction of the variants of the invention).

[0274] In one embodiment, the parent antibody has been affinity matured, as is known in the art. Structure-based methods may be employed for humanization and affinity maturation, for example as described in U.S. Ser. No. 11/004,590. Selection based methods may be employed to humanize and/or affinity mature antibody variable regions, including but not limited to methods described in Wu et al., 1999, J. Mol. Biol. 294:151-162; Baca et al., 1997, J. Biol. Chem. 272(16):10678-10684; Rosok et al., 1996, J. Biol. Chem. 271(37): 22611-22618; Rader et al., 1998, Proc. Natl. Acad. Sci. USA 95: 8910-8915; Krauss et al., 2003, Protein Engineering 16(10):753-759, all entirely incorporated by reference. Other humanization methods may involve the grafting of only parts of the CDRs, including but not limited to methods described in U.S. Ser. No. 09/810,510; Tan et al., 2002, J. Immunol. 169:1119-1125; De Pascalis et al., 2002, J. Immunol. 169:3076-3084, all entirely incorporated by reference.

### VI. Heterodimeric Antibodies

[0275] Accordingly, in some embodiments the present invention provides heterodimeric immunomodulatory antibodies that rely on the use of two different heavy chain variant Fc sequences, that will self-assemble to form heterodimeric Fc domains and heterodimeric antibodies.

[0276] The present invention is directed to novel constructs to provide heterodimeric antibodies that allow binding to more than one immunomodulatory antigen or ligand, e.g. to allow for bispecific binding. The heterodimeric antibody constructs are based on the self-assembling nature of the two Fc domains of the heavy chains of antibodies, e.g. two “monomers” that assemble into a “dimer”. Heterodimeric antibodies are made by altering the amino acid sequence of each monomer as more fully discussed below. Thus, the present invention is generally directed to the creation of heterodimeric immunomodulatory antibodies which can co-engage antigens in several ways, relying on amino acid variants in the constant regions that are different on each chain to promote heterodimeric formation and/or allow for ease of purification of heterodimers over the homodimers.

[0277] Thus, the present invention provides bispecific antibodies. An ongoing problem in antibody technologies is the desire for “bispecific” antibodies that bind to two different antigens simultaneously, in general thus allowing the different antigens to be brought into proximity and resulting in new functionalities and new therapies. In general, these antibodies are made by including genes for each heavy and light chain into the host cells. This generally results in the formation of the desired heterodimer (A-B), as well as the two homodimers (A-A and B-B (not including the light chain heterodimeric issues)). However, a major obstacle in the formation of bispecific antibodies is the difficulty in purifying the heterodimeric antibodies away from the homodimeric antibodies and/or biasing the formation of the heterodimer over the formation of the homodimers.

[0278] There are a number of mechanisms that can be used to generate the heterodimers of the present invention. In addition, as will be appreciated by those in the art, these mechanisms can be combined to ensure high heterodimerization. Thus, amino acid variants that lead to the production of heterodimers are referred to as “heterodimerization variants”. As discussed below, heterodimerization variants can include steric variants (e.g. the “knobs and holes” or “skew” variants described below and the “charge pairs” variants described below) as well as “pI variants”, which allows purification of homodimers away from heterodimers. As is generally described in WO2014/145806, hereby incorporated by reference in its entirety and specifically as below for the discussion of “heterodimerization variants”, useful mechanisms for heterodimerization include “knobs and holes” (“KIH”; sometimes herein as “skew” variants (see discussion in WO2014/145806), “electrostatic steering” or “charge pairs” as described in WO2014/145806, pI variants as described in WO2014/145806, and general additional Fc variants as outlined in WO2014/145806 and below.

[0279] In the present invention, there are several basic mechanisms that can lead to ease of purifying heterodimeric antibodies; one relies on the use of pI variants, such that each monomer has a different pI, thus allowing the isoelectric purification of A-A, A-B and B-B dimeric proteins. Alternatively, some scaffold formats, such as the “triple F” format, also allows separation on the basis of size. As is further outlined below, it is also possible to “skew” the formation of heterodimers over homodimers. Thus, a combination of steric heterodimerization variants and pI or charge pair variants find particular use in the invention.

[0280] In general, embodiments of particular use in the present invention rely on sets of variants that include skew variants, that encourage heterodimerization formation over homodimerization formation, coupled with pI variants, which increase the pI difference between the two monomers.

[0281] Additionally, as more fully outlined below, depending on the format of the heterodimer antibody, pI variants can be either contained within the constant and/or Fc domains of a monomer, or charged linkers, either domain linkers or scFv linkers, can be used. That is, scaffolds that utilize scFv(s) such as the Triple F format can include charged scFv linkers (either positive or negative), that give a further pI boost for purification purposes. As will be appreciated by those in the art, some Triple F formats are useful with just charged scFv linkers and no additional pI adjustments, although the invention does provide pI variants that are on one or both of the monomers, and/or charged domain linkers as well. In addition, additional amino acid engineering for alternative functionalities may also confer pI changes, such as Fc, FcRn and KO variants.

[0282] In the present invention that utilizes pI as a separation mechanism to allow the purification of heterodimeric proteins, amino acid variants can be introduced into one or both of the monomer polypeptides; that is, the pI of one of the monomers (referred to herein for simplicity as “monomer A”) can be engineered away from monomer B, or both monomer A and B change be changed, with the pI of monomer A increasing and the pI of monomer B decreasing. As discussed, the pI changes of either or both monomers can be done by removing or adding a charged residue (e.g. a neutral amino acid is replaced by a positively or negatively charged amino acid residue, e.g. glycine to glutamic acid), changing a charged residue from positive or negative to the opposite charge (e.g. aspartic acid to lysine) or changing a charged residue to a neutral residue (e.g. loss of a charge; lysine to serine.). A number of these variants are shown in the Figures.

[0283] Accordingly, this embodiment of the present invention provides for creating a sufficient change in pI in at least one of the monomers such that heterodimers can be separated from homodimers. As will be appreciated by those in the art, and as discussed further below, this can be done by using a “wild type” heavy chain constant region and a variant region that has been engineered to either increase or decrease its pI (wt A-+B or wt A-−B), or by increasing one region and decreasing the other region (A+-B− or A-B+).

[0284] Thus, in general, a component of some embodiments of the present invention are amino acid variants in the constant regions of antibodies that are directed to altering the isoelectric point (pI) of at least one, if not both, of the monomers of a dimeric protein to form “pI antibodies” by incorporating amino acid substitutions (“pI variants” or “pI substitutions”) into one or both of the monomers. As shown herein, the separation of the heterodimers from the two homodimers can be accomplished if the pIs of the two monomers differ by as little as 0.1 pH unit, with 0.2, 0.3, 0.4 and 0.5 or greater all finding use in the present invention.

[0285] As will be appreciated by those in the art, the number of pI variants to be included on each or both monomer(s) to get good separation will depend in part on the starting pI of the components, for example in the triple F format, the starting pI of the scFv and Fab of interest. That is, to determine which monomer to engineer or in which “direction” (e.g. more positive or more negative), the Fv sequences of the two target antigens are calculated and a decision is made from there. As is known in the art, different Fvs will have different starting pIs which are exploited in the present invention. In general, as outlined herein, the pIs are engineered to result in a total pI difference of each monomer of at least about 0.1 logs, with 0.2 to 0.5 being preferred as outlined herein. Furthermore, as will be appreciated by those in the art and outlined herein, in some embodiments, heterodimers can be separated from homodimers on the basis of size. As shown in FIG. 2, for example, several of the formats allow separation of heterodimers and homodimers on the basis of size.

[0286] A. Heterodimerization Variants

[0287] The present invention provides heterodimeric proteins, including heterodimeric antibodies in a variety of formats, which utilize heterodimeric variants to allow for heterodimeric formation and/or purification away from homodimers. A number of heterodimerization variants are shown in FIG. 4.

[0288] There are a number of suitable pairs of sets of heterodimerization skew variants. These variants come in “pairs” of “sets”. That is, one set of the pair is incorporated into the first monomer and the other set of the pair is incorporated into the second monomer. It should be noted that these sets do not necessarily behave as “knobs in holes” variants, with a one-to-one correspondence between a residue on one monomer and a residue on the other; that is, these pairs of sets form an interface between the two monomers that encourages heterodimer formation and discourages homodimer formation, allowing the percentage of heterodimers that spontaneously form under biological conditions to be over 90%, rather than the expected 50% (25% homodimer A/A:50% heterodimer A/B25% homodimer B/B).

[0289] B. Steric Variants

[0290] In some embodiments, the formation of heterodimers can be facilitated by the addition of steric variants. That is, by changing amino acids in each heavy chain, different heavy chains are more likely to associate to form the heterodimeric structure than to form homodimers with the same Fc amino acid sequences. Suitable steric variants are included in in the Figures.

[0291] One mechanism is generally referred to in the art as “knobs and holes”, referring to amino acid engineering that creates steric influences to favor heterodimeric formation and disfavor homodimeric formation can also optionally be used; this is sometimes referred to as “knobs and holes”, as described in U.S. Ser. No. 61/596,846, Ridgway et al., Protein Engineering 9(7):617 (1996); Atwell et al., J. Mol. Biol. 1997 270:26; U.S. Pat. No. 8,216,805, all of which are hereby incorporated by reference in their entirety. The Figures identify a number of “monomer A-monomer B” pairs that rely on “knobs and holes”. In addition, as described in Merchant et al., Nature Biotech. 16:677 (1998), these “knobs and hole” mutations can be combined with disulfide bonds to skew formation to heterodimerization.

[0292] An additional mechanism that finds use in the generation of heterodimers is sometimes referred to as “electrostatic steering” as described in Gunasekaran et al., J. Biol. Chem. 285(25):19637 (2010), hereby incorporated by reference in its entirety. This is sometimes referred to herein as “charge pairs”. In this embodiment, electrostatics are used to skew the formation towards heterodimerization. As those in the art will appreciate, these may also have have an effect on pI, and thus on purification, and thus could in some cases also be considered pI variants. However, as these were generated to force heterodimerization and were not used as purification tools, they are classified as “steric variants”. These include, but are not limited to, D221E/P228E/L368E paired with D221R/P228R/K409R (e.g. these are “monomer corresponding sets) and C220E/P228E/368E paired with C220R/E224R/P228R/K409R.

[0293] Additional monomer A and monomer B variants that can be combined with other variants, optionally and independently in any amount, such as pI variants outlined herein or other steric variants that are shown in FIG. 37 of US 2012/0149876, the figure and legend and SEQ ID NOs of which are incorporated expressly by reference herein.

[0294] In some embodiments, the steric variants outlined herein can be optionally and independently incorporated with any pI variant (or other variants such as Fc variants, FcRn variants, etc.) into one or both monomers, and can be independently and optionally included or excluded from the proteins of the invention.

[0295] A list of suitable skew variants is found in FIG. 4 showing some pairs of particular utility in many embodiments. Of particular use in many embodiments are the pairs of sets including, but not limited to, S364K/E357Q:L368D/K370S; L368D/K370S:S364K; L368E/K370S:S364K; T411T/E360E/Q362E:D401K; L368D/K370S:S364K/E357L, K370S:S364K/E357Q and T366S/L368A/Y407V:T366W (optionally including a bridging disulfide, T366S/L368A/Y407V/Y349C:T366W/S354C). In terms of nomenclature, the pair “S364K/E357Q:L368D/K370S” means that one of the monomers has the double variant set S364K/E357Q and the other has the double variant set L368D/K370S; as above, the “strandedness” of these pairs depends on the starting pI.

[0296] C. pI (Isoelectric Point) Variants for Heterodimers

[0297] In general, as will be appreciated by those in the art, there are two general categories of pI variants: those that increase the pI of the protein (basic changes) and those that decrease the pI of the protein (acidic changes). As described herein, all combinations of these variants can be done: one monomer may be wild type, or a variant that does not display a significantly different pI from wild-type, and the other can be either more basic or more acidic. Alternatively, each monomer is changed, one to more basic and one to more acidic.

[0298] Preferred combinations of pI variants are shown in FIG. 5. As outlined herein and shown in the figures, these changes are shown relative to IgG1, but all isotypes can be altered this way, as well as isotype hybrids. In the case where the heavy chain constant domain is from IgG2-4, R133E and R133Q can also be used.

[0299] In one embodiment, for example in the bottle opener format, a preferred combination of pI variants has one monomer (the negative Fab side) comprising 208D/295E/384D/418E/421D variants (N208D/Q295E/N384D/Q418E/N421D when relative to human IgG1) and a second monomer (the positive scFv side) comprising a positively charged scFv linker, including (GKPGS)₄ (SEQ ID NO: 26209). However, as will be appreciated by those in the art, the first monomer includes a CH1 domain, including position 208. Accordingly, in constructs that do not include a CH1 domain (for example for heterodimeric Fc fusion proteins that do not utilize a CH1 domain on one of the domains, for example in a dual scFv format), a preferred negative pI variant Fc set includes 295E/384D/418E/421D variants (Q295E/N384D/Q418E/N421D when relative to human IgG1).

[0300] Accordingly, in some embodiments, one monomer has a set of substitutions from FIG. 5 and the other monomer has a charged linker (either in the form of a charged scFv linker because that monomer comprises an scFv or a charged domain linker, as the format dictates).

[0301] 1. Isotypic Variants

[0302] In addition, many embodiments of the invention rely on the “importation” of pI amino acids at particular positions from one IgG isotype into another, thus reducing or eliminating the possibility of unwanted immunogenicity being introduced into the variants. A number of these are shown in FIG. 21 of US Publ. 2014/0370013, hereby incorporated by reference. That is, IgG1 is a common isotype for therapeutic antibodies for a variety of reasons, including high effector function. However, the heavy constant region of IgG1 has a higher pI than that of IgG2 (8.10 versus 7.31). By introducing IgG2 residues at particular positions into the IgG1 backbone, the pI of the resulting monomer is lowered (or increased) and additionally exhibits longer serum half-life. For example, IgG1 has a glycine (pI 5.97) at position 137, and IgG2 has a glutamic acid (pI 3.22); importing the glutamic acid will affect the pI of the resulting protein. As is described below, a number of amino acid substitutions are generally required to significant affect the pI of the variant antibody. However, it should be noted as discussed below that even changes in IgG2 molecules allow for increased serum half-life.

[0303] In other embodiments, non-isotypic amino acid changes are made, either to reduce the overall charge state of the resulting protein (e.g. by changing a higher pI amino acid to a lower pI amino acid), or to allow accommodations in structure for stability, etc. as is more further described below.

[0304] In addition, by pI engineering both the heavy and light constant domains, significant changes in each monomer of the heterodimer can be seen. As discussed herein, having the pIs of the two monomers differ by at least 0.5 can allow separation by ion exchange chromatography or isoelectric focusing, or other methods sensitive to isoelectric point.

[0305] D. Calculating pI

[0306] The pI of each monomer can depend on the pI of the variant heavy chain constant domain and the pI of the total monomer, including the variant heavy chain constant domain and the fusion partner. Thus, in some embodiments, the change in pI is calculated on the basis of the variant heavy chain constant domain, using the chart in the FIG. 19 of US Pub. 2014/0370013. As discussed herein, which monomer to engineer is generally decided by the inherent pI of the Fv and scaffold regions. Alternatively, the pI of each monomer can be compared.

[0307] E. pI Variants that Also Confer Better FcRn In Vivo Binding

[0308] In the case where the pI variant decreases the pI of the monomer, they can have the added benefit of improving serum retention in vivo.

[0309] Although still under examination, Fc regions are believed to have longer half-lives in vivo, because binding to FcRn at pH 6 in an endosome sequesters the Fc (Ghetie and Ward, 1997 Immunol Today. 18(12): 592-598, entirely incorporated by reference). The endosomal compartment then recycles the Fc to the cell surface. Once the compartment opens to the extracellular space, the higher pH, ˜7.4, induces the release of Fc back into the blood. In mice, Dall' Acqua et al. showed that Fc mutants with increased FcRn binding at pH 6 and pH 7.4 actually had reduced serum concentrations and the same half life as wild-type Fc (Dall' Acqua et al. 2002, J. Immunol. 169:5171-5180, entirely incorporated by reference). The increased affinity of Fc for FcRn at pH 7.4 is thought to forbid the release of the Fc back into the blood. Therefore, the Fc mutations that will increase Fc's half-life in vivo will ideally increase FcRn binding at the lower pH while still allowing release of Fc at higher pH. The amino acid histidine changes its charge state in the pH range of 6.0 to 7.4. Therefore, it is not surprising to find His residues at important positions in the Fc/FcRn complex.

[0310] Recently it has been suggested that antibodies with variable regions that have lower isoelectric points may also have longer serum half-lives (Igawa et al., 2010 PEDS. 23(5): 385-392, entirely incorporated by reference). However, the mechanism of this is still poorly understood. Moreover, variable regions differ from antibody to antibody. Constant region variants with reduced pI and extended half-life would provide a more modular approach to improving the pharmacokinetic properties of antibodies, as described herein.

[0311] F. Additional Fc Variants for Additional Functionality

[0312] In addition to pI amino acid variants, there are a number of useful Fc amino acid modification that can be made for a variety of reasons, including, but not limited to, altering binding to one or more FcγR receptors, altered binding to FcRn receptors, etc.

[0313] Accordingly, the proteins of the invention can include amino acid modifications, including the heterodimerization variants outlined herein, which includes the pI variants and steric variants. Each set of variants can be independently and optionally included or excluded from any particular heterodimeric protein.

[0314] G. FcγR Variants

[0315] Accordingly, there are a number of useful Fc substitutions that can be made to alter binding to one or more of the FcγR receptors. Substitutions that result in increased binding as well as decreased binding can be useful. For example, it is known that increased binding to FcγRIIIa results in increased ADCC (antibody dependent cell-mediated cytotoxicity; the cell-mediated reaction wherein nonspecific cytotoxic cells that express FcγRs recognize bound antibody on a target cell and subsequently cause lysis of the target cell). Similarly, decreased binding to FcγRIIb (an inhibitory receptor) can be beneficial as well in some circumstances. Amino acid substitutions that find use in the present invention include those listed in U.S. Ser. No. 11/124,620 (particularly FIG. 41), Ser. Nos. 11/174,287, 11/396,495, 11/538,406, all of which are expressly incorporated herein by reference in their entirety and specifically for the variants disclosed therein. Particular variants that find use include, but are not limited to, 236A, 239D, 239E, 332E, 332D, 239D/332E, 267D, 267E, 328F, 267E/328F, 236A/332E, 239D/332E/330Y, 239D, 332E/330L, 243A, 243L, 264A, 264V and 299T.

[0316] In addition, there are additional Fc substitutions that find use in increased binding to the FcRn receptor and increased serum half life, as specifically disclosed in U.S. Ser. No. 12/341,769, hereby incorporated by reference in its entirety, including, but not limited to, 434S, 434A, 428L, 308F, 259I, 428L/434S, 259I/308F, 436I/428L, 436I or V/434S, 436V/428L and 259I/308F/428L.

[0317] H. Ablation Variants

[0318] Similarly, another category of functional variants are “FcγR ablation variants” or “Fc knock out (FcKO or KO)” variants. In these embodiments, for some therapeutic applications, it is desirable to reduce or remove the normal binding of the Fc domain to one or more or all of the Fcγ receptors (e.g. FcγRI, FcγRIIa, FcγRIIb, FcγRIIIa, etc.) to avoid additional mechanisms of action. That is, for example, in many embodiments, particularly in the use of bispecific immunomodulatory antibodies desirable to ablate FcγRIIIa binding to eliminate or significantly reduce ADCC activity such that one of the Fc domains comprises one or more Fcγ receptor ablation variants. These ablation variants are depicted in FIG. 6, and each can be independently and optionally included or excluded, with preferred aspects utilizing ablation variants selected from the group consisting of G236R/L328R, E233P/L234V/L235A/G236del/S239K, E233P/L234V/L235A/G236del/S267K, E233P/L234V/L235A/G236del/S239K/A327G, E233P/L234V/L235A/G236del/S267K/A327G and E233P/L234V/L235A/G236del. It should be noted that the ablation variants referenced herein ablate FcγR binding but generally not FcRn binding.

[0319] I. Combination of Heterodimeric and Fc Variants

[0320] As will be appreciated by those in the art, all of the recited heterodimerization variants (including skew and/or pI variants) can be optionally and independently combined in any way, as long as they retain their “strandedness” or “monomer partition”. In addition, all of these variants can be combined into any of the heterodimerization formats.

[0321] In the case of pI variants, while embodiments finding particular use are shown in the Figures, other combinations can be generated, following the basic rule of altering the pI difference between two monomers to facilitate purification.

[0322] In addition, any of the heterodimerization variants, skew and pI, are also independently and optionally combined with Fc ablation variants, Fc variants, FcRn variants, as generally outlined herein.

### VII. Useful Formats of the Invention

[0323] As will be appreciated by those in the art and discussed more fully below, the bispecific heterodimeric antibodies of the present invention can take on a wide variety of configurations, as are generally depicted in FIG. 2. Some figures depict “single ended” configurations, where there is one type of specificity on one “arm” of the molecule and a different specificity on the other “arm”. Other figures depict “dual ended” configurations, where there is at least one type of specificity at the “top” of the molecule and one or more different specificities at the “bottom” of the molecule. Thus, the present invention is directed to novel immunoglobulin compositions that co-engage a different first and a second antigen.

[0324] As will be appreciated by those in the art, the heterodimeric formats (see FIG. 2) of the invention can have different valencies as well as be bispecific. That is, antibodies of the invention can be bivalent and bispecific, wherein a checkpoint target is bound by one ABD and the costimulatory target is bound by a second ABD (see for example the bottle opener format which is heterodimeric) or the bispecific mAb which is homodimeric). The heterodimeric antibodies can also be trivalent and bispecific, wherein the first antigen is bound by two ABDs and the second antigen by a second ABD (see for example the Central-scFv format and the trident format). The heterodimeric antibodies can also be bispecific and tetravalent (such as the Central scFv2 format and the DVD-Ig format).

[0325] Again, with the exception of the DVD-Ig format and the central-scFv2 format, the antibodies are generally formatted such that the co-stimulatory target is bound monovalently.

[0326] A. Bottle Opener Format

[0327] One heterodimeric scaffold that finds particular use in the present invention is the “triple F” or “bottle opener” scaffold format. In this embodiment, one heavy chain of the antibody contains a single chain Fv (“scFv”, as defined below) and the other heavy chain is a “regular” Fab format, comprising a variable heavy chain and a light chain. This structure is sometimes referred to herein as “triple F” format (scFv-Fab-Fc) or the “bottle-opener” format, due to a rough visual similarity to a bottle-opener. The two chains are brought together by the use of amino acid variants in the constant regions (e.g. the Fc domain, the CH1 domain and/or the hinge region) that promote the formation of heterodimeric antibodies as is described more fully below.

[0328] There are several distinct advantages to the present “triple F” format. As is known in the art, antibody analogs relying on two scFv constructs often have stability and aggregation problems, which can be alleviated in the present invention by the addition of a “regular” heavy and light chain pairing. In addition, as opposed to formats that rely on two heavy chains and two light chains, there is no issue with the incorrect pairing of heavy and light chains (e.g. heavy 1 pairing with light 2, etc.).

[0329] Many of the embodiments outlined herein rely in general on the bottle opener format that comprises a first monomer comprising an scFv, comprising a variable heavy and a variable light domain, covalently attached using an scFv linker (charged, in many but not all instances), where the scFv is covalently attached to the N-terminus of a first Fc domain usually through a domain linker (which, as outlined herein can either be un-charged or charged and can be exogeneous or endogeneous (e.g. all or part of the native hinge domain). The second monomer of the bottle opener format is a heavy chain, and the composition further comprises a light chain.

[0330] In addition, the Fe domains of the bottle opener format generally comprise skew variants (e.g. a set of amino acid substitutions as shown in FIG. 4, with particularly useful skew variants being selected from the group consisting of S364K/E357Q:L368D/K370S; L368D/K370S:S364K; L368E/K370S:S364K; T411T/E360E/Q362E:D401K; L368D/K370S:S364K/E357L, K370S:S364K/E357Q, T366S/L368A/Y407V:T366W and T366S/L368A/Y407V/Y349C:T366W/S354C), optionally ablation variants (including those shown in FIG. 6), optionally charged scFv linkers (including those shown in FIG. 8) and the heavy chain comprises pI variants (including those shown in FIG. 5).

[0331] In some embodiments, the bottle opener format includes skew variants, pI variants, and ablation variants. Accordingly, some embodiments include bottle opener formats that comprise: a) a first monomer (the “scFv monomer”) that comprises a charged scFv linker (with the +H sequence of FIG. 8 being preferred in some embodiments), the skew variants S364K/E357Q, the ablation variants E233P/L234V/L235A/G236del/S267K, and an Fv that binds to one target as outlined herein; b) a second monomer (the “Fab monomer”) that comprises the skew variants L368D/K370S, the pI variants N208D/Q295E/N384D/Q418E/N421D, the ablation variants E233P/L234V/L235A/G236del/S267K, and a variable heavy domain that, with the variable light domain, makes up an Fv that binds to a second target as outlined herein; and c) a light chain. In this particular embodiment, suitable monomer Fv pairs include (Fabs listed first, scFvs second) ICOS×PD-1, ICOS×PD-L1, ICOS×CTLA-4, ICOS×LAG-3, ICOS×TIM-3, ICOS×BTLA, ICOS×TIGIT, TIGIT×ICOS, PD-1×ICOS, PD-L1×ICOS, CTLA-4×ICOS, LAG-3×ICOS, TIM-3×ICOS, BTLA×ICOS, OX40×TIGIT, OX40×PD-1, OX40×PD-L1, OX40×CTLA-4, OX40×LAG-3, OX40×TIM-3, OX40×BTLA, TIGIT×OX40, PD-1×OX40, PD-L1×OX40, CTLA-4×OX40, LAG-3×OX40, TIM-3×OX40, BTLA×OX40, GITR×TIGIT, GITR×PD-1, GITR×PD-L1, GITR×CTLA-4, GITR×LAG-3, GITR×TIM-3, GITR×BTLA, TIGIT×GITR, PD-1×GITR, PD-L1×GITR, CTLA-4×GITR, LAG-3×GITR, TIM-3×GITR, BTLA×GITR, 4-1BB×TIGIT, 4-1BB×PD-1, 4-1BB×PD-L1, 4-1BB×CTLA-4, 4-1BB×LAG-3, 4-1BB×TIM-3, 4-1BB×BTLA, TIGIT×4-1BB, PD-1×4-1BB, PD-L1×4-1BB, CTLA-4×4-1BB, LAG-3×4-1BB, TIM-3×4-1BB and BTLA×4-1BB.

[0332] Accordingly, some embodiments include bottle opener formats that comprise: a) a first monomer (the “scFv monomer”) that comprises a charged scFv linker (with the +H sequence of FIG. 8 being preferred in some embodiments), the skew variants S364K/E357Q, the ablation variants E233P/L234V/L235A/G236del/S267K, and an Fv that binds to one target as outlined herein; b) a second monomer (the “Fab monomer”) that comprises the skew variants L368D/K370S, the pI variants N208D/Q295E/N384D/Q418E/N421D, the ablation variants E233P/L234V/L235A/G236del/S267K, and a variable heavy domain that, with the variable light domain, makes up an Fv that binds to a second target as outlined herein; and c) a light chain. In some particular embodiments with these variants in this format:
[0333] (1) the format comprises a Fab ABD binds to ICOS that has the ABD of [ICOS] H0.66_L0;
[0334] (2) the format comprises an ICOS ABD of H0.66_L0 combined with the scFv ABD comprising the ABD 1G6_L1.194_H1.279 that binds to PD-1;
[0335] (3) the format comprises an ICOS ABD of H0.66_L0 combined with the scFv comprising the ABD H3.23_L0.129 that binds to CTLA-4;
[0336] (4) the format comprises an ICOS ABD of H0.66_L0 is combined with the ABD 7G8_H.303_L1.34 that binds to LAG-3;
[0337] (5) the format comprises a scFv comprising the ABD 1G6_L1.194_H1.279 that binds to PD-1 and the Fab binds to GITR;
[0338] (6) the format comprises a scFv comprising the ABD 1G6_L1.194_H1.279 that binds to PD-1 and the Fab binds to OX40;
[0339] (7) the format comprises a scFv comprising the ABD 1G6_L1.194_H1.279 that binds to PD-1 and the Fab binds to ICOS;
[0340] 8) the format comprises a scFv comprising the ABD 1G6_L1.194_H1.279 that binds to PD-1 and the Fab binds to 4-1BB; and
[0341] (9) the format comprises the ABD of H0.66_L0 that binds to ICOS and an ABD that binds to PD-L1.

[0342] In some embodiments, the bottle opener format includes skew variants, pI variants, ablation variants and FcRn variants. Accordingly, some embodiments include bottle opener formats that comprise: a) a first monomer (the “scFv monomer”) that comprises a charged scFv linker (with the +H sequence of FIG. 8 being preferred in some embodiments), the skew variants S364K/E357Q, the ablation variants E233P/L234V/L235A/G236del/S267K, the FcRn variants M428L/N434S and an Fv that binds to a first receptor (either a costimulatory or checkpoint receptor) as outlined herein; b) a second monomer (the “Fab monomer”) that comprises the skew variants L368D/K370S, the pI variants N208D/Q295E/N384D/Q418E/N421D, the ablation variants E233P/L234V/L235A/G236del/S267K, the FcRn variants M428L/N434S and a variable heavy domain that, with the variable light domain, makes up an Fv that binds to a second receptor as outlined herein (the other of the costimulatory or checkpoint receptor); and c) a light chain. In some particular embodiments with these variants in this format:
[0343] (1) the format comprises a Fab ABD binds to ICOS that has the ABD of [ICOS] H0.66_L0;
[0344] (2) the format comprises an ICOS ABD of H0.66_L0 combined with the scFv ABD comprising the ABD 1G6_L1.194_H1.279 that binds to PD-1;
[0345] (3) the format comprises an ICOS ABD of H0.66_L0 combined with the scFv comprising the ABD H3.23_L0.129 that binds to CTLA-4;
[0346] (4) the format comprises an ICOS ABD of H0.66_L0 is combined with the ABD 7G8_H.303_L1.34 that binds to LAG-3;
[0347] (5) the format comprises a scFv comprising the ABD 1G6_L1.194_H1.279 that binds to PD-1 and the Fab binds to GITR;
[0348] (6) the format comprises a scFv comprising the ABD 1G6_L1.194_H1.279 that binds to PD-1 and the Fab binds to OX40;
[0349] (7) the format comprises a scFv comprising the ABD 1G6_L1.194_H1.279 that binds to PD-1 and the Fab binds to ICOS;
[0350] 8) the format comprises a scFv comprising the ABD 1G6_L1.194_H1.279 that binds to PD-1 and the Fab binds to 4-1BB; and
[0351] (9) the format comprises the ABD of H0.66_L0 that binds to ICOS and an ABD that binds to PD-L1.

[0352] Specifically, FIG. 9 shows some bottle opener “backbone” sequences that are missing the Fv sequences that can be used in the present invention. That is, Fv sequences for the scFv portion and the Fab portion can be used from any combination of ICOS and PD-1, ICOS and CTLA-4, ICOS and LAG-3, ICOS and TIM-3, ICOS and PD-L1, ICOS and BTLA, ICOS and TIGIT, GITR and TIGIT, GITR and PD-1, GITR and CTLA-4, GITR and LAG-3, GITR and TIM-3, GITR and PD-L1, GITR and BTLA, OX40 and PD-1, OX40 and TIGIT, OX40 and CTLA-4, IC OX40 OS and LAG-3, OX40 and TIM-3, OX40 and PD-L1, OX40 and BTLA, 4-1BB and PD-1, 4-1BB and CTLA-4, 4-1BB and LAG-3, 4-1BB and TIM-3, 4-1BB and PD-L1, TIGIT and 4-1BB and 4-1BB and BTLA, in combination with any or all of backbones 1 to 10, with backbone 1 of particular use in these combinations.

[0353] For bottle opener backbone 1 from FIG. 9 (optionally including the 428L/434S variants) specific Fv combinations of use in the present invention include ICOS and PD-1, ICOS and PD-L1 and ICOS and CTLA-4.

[0354] For bottle opener backbone 1 from FIG. 9 (optionally including the 428L/434S variants) specific ABDs that bind human ICOS include, but are not limited to, [ICOS]_H0L0 and [ICOS]H0.66_L0 and and those shown in FIG. 19, FIG. 20, FIG. 24, FIG. 68 and FIG. 77 as well as SEQ ID NO: 27869-28086, 28087-28269, 27193-27335, 28549-28556 and 28557-28665.

[0355] For bottle opener backbone 1 from FIG. 9 (optionally including the 428L/434S variants), specific ABDs that bind human GITR include, but are not limited to, those in FIG. 18, FIG. 72 and FIG. 73 and those listed in SEQ ID NO:26282-26290.

[0356] For bottle opener backbone 1 from FIG. 9 (optionally including the 428L/434S variants), specific ABDs that bind OX40 include, but are not limited to, FIG. 17, FIG. 72 and FIG. 73 and those listed in SEQ ID NO: 26272-26281.

[0357] For bottle opener backbone 1 from FIG. 9 (optionally including the 428L/434S variants), specific ABDs that bind human 4-1BB include, but are not limited to, FIG. 16, FIG. 72 and FIG. 73 and SEQ ID NO: 26262-2671.

[0358] For bottle opener backbone 1 from FIG. 9 (optionally including the 428L/434S variants), specific ABDs that bind human PD-L1 include, but are not limited to, FIG. 15, FIG. 73 and FIG. 78 and SEQ ID NO: 3961-4432.

[0359] Specific bottle opener embodiments are outlined below.

[0360] B. mAb-Fv Format

[0361] One heterodimeric scaffold that finds particular use in the present invention is the mAb-Fv format. In this embodiment, the format relies on the use of a C-terminal attachment of an “extra” variable heavy domain to one monomer and the C-terminal attachment of an “extra” variable light domain to the other monomer, thus forming a third antigen binding domain (i.e. an “extra” Fv domain), wherein the Fab portions of the two monomers bind one checkpoint target and the “extra” Fv domain binds a costimulatory target.

[0362] In this embodiment, the first monomer comprises a first heavy chain, comprising a first variable heavy domain and a first constant heavy domain comprising a first Fc domain, with a first variable light domain covalently attached to the C-terminus of the first Fc domain using a domain linker (vh1-CH1-hinge-CH2-CH3-[optional linker]-vl2). The second monomer comprises a second variable heavy domain, a second constant heavy domain comprising a second Fc domain, and a third variable heavy domain covalently attached to the C-terminus of the second Fc domain using a domain linker (vh1-CH1-hinge-CH2-CH3-[optional linker]-vh2. This embodiment further utilizes a common light chain comprising a variable light domain and a constant light domain, which associates with the heavy chains to form two identical Fabs that include two identical Fvs. The two C-terminally attached variable domains make up the “extra” third Fv. As for many of the embodiments herein, these constructs include skew variants, pI variants, ablation variants, additional Fc variants, etc. as desired and described herein. In this embodiment, suitable Fv pairs include (Fabs listed first, “extra” Fv listed second) ICOS×PD-1, ICOS×PD-L1, ICOS×CTLA-4, ICOS×LAG-3, ICOS×TIM-3, ICOS×BTLA, ICOS×TIGIT, TIGIT×ICOS, PD-1×ICOS, PD-L1×ICOS, CTLA-4×ICOS, LAG-3×ICOS, TIM-3×ICOS, BTLA×ICOS, OX40×TIGIT, OX40×PD-1, OX40×PD-L1, OX40×CTLA-4, OX40×LAG-3, OX40×TIM-3, OX40×BTLA, TIGIT×OX40, PD-1×OX40, PD-L1×OX40, CTLA-4×OX40, LAG-3×OX40, TIM-3×OX40, BTLA×OX40, GITR×TIGIT, GITR×PD-1, GITR×PD-L1, GITR×CTLA-4, GITR×LAG-3, GITR×TIM-3, GITR×BTLA, TIGIT×GITR, PD-1×GITR, PD-L1×GITR, CTLA-4×GITR, LAG-3×GITR, TIM-3×GITR, BTLA×GITR, 4-1BB×TIGIT, 4-1BB×PD-1, 4-1BB×PD-L1, 4-1BB×CTLA-4, 4-1BB×LAG-3, 4-1BB×TIM-3, 4-1BB×BTLA, TIGIT×4-1BB, PD-1×4-1BB, PD-L1×4-1BB, CTLA-4×4-1BB, LAG-3×4-1BB, TIM-3×4-1BB and BTLA×4-1BB.

[0363] The ABD sequences for these combinations can be as disclosed in the sequence listing or as shown in the Figures.

[0364] In addition, the Fc domains of the mAb-Fv format comprise skew variants (e.g. a set of amino acid substitutions as shown in FIG. 4, with particularly useful skew variants being selected from the group consisting of S364K/E357Q:L368D/K370S; L368D/K370S:S364K; L368E/K370S:S364K; T411T/E360E/Q362E:D401K; L368D/K370S:S364K/E357L, K370S:S364K/E357Q, T366S/L368A/Y407V:T366W and T366S/L368A/Y407V/Y349C:T366W/S354C), optionally ablation variants (including those shown in FIG. 6), optionally charged scFv linkers (including those shown in FIG. 8) and the heavy chain comprises pI variants (including those shown in FIG. 5).

[0365] In some embodiments, the mAb-Fv format includes skew variants, pI variants, and ablation variants. Accordingly, some embodiments include mAb-Fv formats that comprise: a) a first monomer that comprises the skew variants S364K/E357Q, the ablation variants E233P/L234V/L235A/G236del/S267K, and a first variable heavy domain that, with the first variable light domain of the light chain, makes up an Fv that binds to a first checkpoint inhibitor, and a second variable heavy domain; b) a second monomer that comprises the skew variants L368D/K370S, the pI variants N208D/Q295E/N384D/Q418E/N421D, the ablation variants E233P/L234V/L235A/G236del/S267K, and a first variable heavy domain that, with the first variable light domain, makes up the Fv that binds to the first receptor (either a costimulatory receptor or a checkpoint receptor) as outlined herein, and a second variable light chain, that together with the second variable heavy chain forms an Fv (ABD) that binds a second receptor (e.g. the other of the costimulatory or checkpoint receptor; and c) a light chain comprising a first variable light domain and a constant light domain. Of particular use in some embodiments in this format, are (Fab-scFv order) ICOS×PD-1, PD-1×ICOS, PD-L1×ICOS, ICOS×PD-L1, GITR×PD-1, OX40×PD-1 and 4-1BB×PD-1. In some particular embodiments with these variants in this format:
[0366] (1) the format comprises a Fab ABD binds to ICOS that has the ABD of [ICOS] H0.66_L0;
[0367] (2) the format comprises an ICOS ABD of H0.66_L0 combined with the scFv ABD comprising the ABD 1G6_L1.194_H1.279 that binds to PD-1;
[0368] (3) the format comprises an ICOS ABD of H0.66_L0 combined with the scFv comprising the ABD H3.23_L0.129 that binds to CTLA-4;
[0369] (4) the format comprises an ICOS ABD of H0.66_L0 is combined with the ABD 7G8_H.303_L1.34 that binds to LAG-3;
[0370] (5) the format comprises a scFv comprising the ABD 1G6_L1.194_H1.279 that binds to PD-1 and the Fab binds to GITR;
[0371] (6) the format comprises a scFv comprising the ABD 1G6_L1.194_H1.279 that binds to PD-1 and the Fab binds to OX40;
[0372] (7) the format comprises a scFv comprising the ABD 1G6_L1.194_H1.279 that binds to PD-1 and the Fab binds to ICOS;
[0373] 8) the format comprises a scFv comprising the ABD 1G6_L1.194_H1.279 that binds to PD-1 and the Fab binds to 4-1BB; and
[0374] (9) the format comprises the ABD of H0.66_L0 that binds to ICOS and an ABD that binds to PD-L1.

[0375] In some embodiments, the mAb-Fv format includes skew variants, pI variants, ablation variants and FcRn variants. Accordingly, some embodiments include mAb-Fv formats that comprise: a) a first monomer that comprises the skew variants S364K/E357Q, the ablation variants E233P/L234V/L235A/G236del/S267K, the FcRn variants M428L/N434S and a first variable heavy domain that, with the first variable light domain of the light chain, makes up an Fv that binds to a first checkpoint inhibitor, and a second variable heavy domain; b) a second monomer that comprises the skew variants L368D/K370S, the pI variants N208D/Q295E/N384D/Q418E/N421D, the ablation variants E233P/L234V/L235A/G236del/S267K, the FcRn variants M428L/N434S and a first variable heavy domain that, with the first variable light domain, makes up the Fv that binds to the first checkpoint inhibitor as outlined herein, and a second variable light chain, that together with the second variable heavy chain forms an Fv (ABD) that binds a second checkpoint inhibitors; and c) a light chain comprising a first variable light domain and a constant light domain. Of particular use in some embodiments in this format, are (Fab-scFv order) ICOS×PD-1, ICOS×PD-L1, GITR×PD-1, OX40×PD-1 and 4-1BB×PD-1.

[0376] For mAb-Fv sequences that are similar to the mAb-scFv backbone 1 (optionally including M428L/N434S) from FIG. 75, specific ABDs that bind human ICOS are [ICOS]_H0L0 and [ICOS]_H0.66_L0, as well as those shown in FIG. 19, FIG. 20, FIG. 24, FIG. 68 and FIG. 77 as well as SEQ ID NO: 27869-28086, 28087-28269, 27193-27335, 28549-28556 and 28557-28665.

[0377] For mAb-Fv sequences that are similar to the mAb-scFv backbone 1 (optionally including M428L/N434S) from FIG. 75, specific ABDs that bind human PD-L1 are shown in FIG. 15, FIG. 73 and FIG. 78 and SEQ ID NO: 3961-4432.

[0378] For mAb-Fv sequences that are similar to the mAb-scFv backbone 1 (optionally including M428L/N434S) from FIG. 75, specific ABDs that bind human GITR are those in FIG. 18, FIG. 72 and FIG. 73 and those listed in SEQ ID NO:26282-26290.

[0379] For mAb-Fv sequences that are similar to the mAb-scFv backbone 1 (optionally including M428L/N434S) from FIG. 75, specific ABDs that bind human 4-1BB are those in FIG. 16, FIG. 72 and FIG. 73 and SEQ ID NO: 26262-2671.

[0380] For mAb-Fv sequences that are similar to the mAb-scFv backbone 1 (optionally including M428L/N434S) from FIG. 75, specific ABDs that bind human OX40 are those in FIG. 17, FIG. 72 and FIG. 73 and those listed in SEQ ID NO: 26272-26281.

[0381] For mAb-Fv sequences that are similar to the mAb-scFv backbone 1 (optionally including M428L/N434S) from FIG. 75, specific ABDs that bind human PD-L1 from FIG. 15, FIG. 73 and FIG. 78 and SEQ ID NO: 3961-4432.

[0382] C. Mab-Scfv

[0383] One heterodimeric scaffold that finds particular use in the present invention is the mAb-scFv format. In this embodiment, the format relies on the use of a C-terminal attachment of an scFv to one of the monomers, thus forming a third antigen binding domain, wherein the Fab portions of the two monomers bind one receptor target and the “extra” scFv domain binds the other receptor target (generally the monovalently bound costimulatory receptor).

[0384] In this embodiment, the first monomer comprises a first heavy chain (comprising a variable heavy domain and a constant domain), with a C-terminally covalently attached scFv comprising a scFv variable light domain, an scFv linker and a scFv variable heavy domain in either orientation (vh1-CH1-hinge-CH2-CH3-[optional linker]-vh2-scFv linker-vl2 or vh1-CH1-hinge-CH2-CH3-[optional linker]-vl2-scFv linker-vh2). This embodiment further utilizes a common light chain comprising a variable light domain and a constant light domain, which associates with the heavy chains to form two identical Fabs that bind one of the target receptors. As for many of the embodiments herein, these constructs include skew variants, pI variants, ablation variants, additional Fc variants, etc. as desired and described herein. In this embodiment, suitable Fv pairs include (Fabs listed first, scFvs second) ICOS×PD-1, ICOS×PD-L1, ICOS×CTLA-4, ICOS×LAG-3, ICOS×TIM-3, ICOS×BTLA, ICOS×TIGIT, TIGIT×ICOS, PD-1×ICOS, PD-L1×ICOS, CTLA-4×ICOS, LAG-3×ICOS, TIM-3×ICOS, BTLA×ICOS, OX40×TIGIT, OX40×PD-1, OX40×PD-L1, OX40×CTLA-4, OX40×LAG-3, OX40×TIM-3, OX40×BTLA, TIGIT×OX40, PD-1×OX40, PD-L1×OX40, CTLA-4×OX40, LAG-3×OX40, TIM-3×OX40, BTLA×OX40, GITR×TIGIT, GITR×PD-1, GITR×PD-L1, GITR×CTLA-4, GITR×LAG-3, GITR×TIM-3, GITR×BTLA, TIGIT×GITR, PD-1×GITR, PD-L1×GITR, CTLA-4×GITR, LAG-3×GITR, TIM-3×GITR, BTLA×GITR, 4-1BB×TIGIT, 4-1BB×PD-1, 4-1BB×PD-L1, 4-1BB×CTLA-4, 4-1BB×LAG-3, 4-1BB×TIM-3, 4-1BB×BTLA, TIGIT×4-1BB, PD-1×4-1BB, PD-L1×4-1BB, CTLA-4×4-1BB, LAG-3×4-1BB, TIM-3×4-1BB and BTLA×4-1BB.

[0385] The ABD sequences for these combinations can be as disclosed in the sequence listing or as shown in the Figures.

[0386] In addition, the Fc domains of the mAb-scFv format generally comprise skew variants (e.g. a set of amino acid substitutions as shown in FIG. 4, with particularly useful skew variants being selected from the group consisting of S364K/E357Q:L368D/K370S; L368D/K370S:S364K; L368E/K370S:S364K; T411T/E360E/Q362E:D401K; L368D/K370S:S364K/E357L, K370S:S364K/E357Q, T366S/L368A/Y407V:T366W and T366S/L368A/Y407V/Y349C:T366W/S354C), optionally ablation variants (including those shown in FIG. 6), optionally charged scFv linkers (including those shown in FIG. 8) and the heavy chain comprises pI variants (including those shown in FIG. 5).

[0387] In some embodiments, the mAb-scFv format includes skew variants, pI variants, and ablation variants. Accordingly, some embodiments include bottle opener formats that comprise: a) a first monomer that comprises the skew variants S364K/E357Q, the ablation variants E233P/L234V/L235A/G236del/S267K, and a first variable heavy domain that, with the first variable light domain of the light chain, makes up an Fv that binds to a first receptor, and a scFv that binds to the second receptor; b) a second monomer that comprises the skew variants L368D/K370S, the pI variants N208D/Q295E/N384D/Q418E/N421D, the ablation variants E233P/L234V/L235A/G236del/S267K, and a first variable heavy domain that, with the first variable light domain, makes up the Fv that binds to the first receptor as outlined herein; and c) a light chain comprising a first variable light domain and a constant light domain. In some particular embodiments with these variants in this format:
[0388] (1) the format comprises a Fab ABD binds to ICOS that has the ABD of [ICOS] H0.66_L0;
[0389] (2) the format comprises an ICOS ABD of H0.66_L0 combined with the scFv ABD comprising the ABD 1G6_L1.194_H1.279 that binds to PD-1;
[0390] (3) the format comprises an ICOS ABD of H0.66_L0 combined with the scFv comprising the ABD H3.23_L0.129 that binds to CTLA-4;
[0391] (4) the format comprises an ICOS ABD of H0.66_L0 is combined with the ABD 7G8_H.303_L1.34 that binds to LAG-3;
[0392] (5) the format comprises a scFv comprising the ABD 1G6_L1.194_H1.279 that binds to PD-1 and the Fab binds to GITR;
[0393] (6) the format comprises a scFv comprising the ABD 1G6_L1.194_H1.279 that binds to PD-1 and the Fab binds to OX40;
[0394] (7) the format comprises a scFv comprising the ABD 1G6_L1.194_H1.279 that binds to PD-1 and the Fab binds to ICOS;
[0395] 8) the format comprises a scFv comprising the ABD 1G6_L1.194_H1.279 that binds to PD-1 and the Fab binds to 4-1BB; and
[0396] (9) the format comprises the ABD of H0.66_L0 that binds to ICOS and an ABD that binds to PD-L1.

[0397] In some embodiments, the mAb-scFv format includes skew variants, pI variants, ablation variants and FcRn variants. Accordingly, some embodiments include mAb-scFv formats that comprise: a) a first monomer that comprises the skew variants S364K/E357Q, the ablation variants E233P/L234V/L235A/G236del/S267K, the FcRn variants M428L/N434S and a first variable heavy domain that, with the first variable light domain of the light chain, makes up an Fv that binds to a first receptor, and a scFv that binds to the second receptor; b) a second monomer that comprises the skew variants L368D/K370S, the pI variants N208D/Q295E/N384D/Q418E/N421D, the ablation variants E233P/L234V/L235A/G236del/S267K, the FcRn variants M428L/N434S and a first variable heavy domain that, with the first variable light domain, makes up the Fv that binds to the first checkpoint inhibitor as outlined herein, and c) a light chain comprising a first variable light domain and a constant light domain.

[0398] In mAb-scFv backbone 1 (optionally including M428L/N434S) from FIG. 75, specific ABDs that bind human ICOS are shown in FIG. 19, FIG. 20, FIG. 24, FIG. 68 and FIG. 77 as well as SEQ ID NO: 27869-28086, 28087-28269, 27193-27335, 28549-28556 and 28557-28665.

[0399] In mAb-scFv backbone 1 (optionally including M428L/N434S) from FIG. 75, specific ABDs that bind human GITR are those in FIG. 18, FIG. 72 and FIG. 73 and those listed in SEQ ID NO:26282-26290.

[0400] In mAb-scFv backbone 1 (optionally including M428L/N434S) from FIG. 75, specific ABDs that bind human 4-1BB include those in FIG. 16, FIG. 72 and FIG. 73 and SEQ ID NO: 26262-2671.

[0401] In mAb-scFv backbone 1 (optionally including M428L/N434S) from FIG. 75, specific ABDs that bind human OX-40 FIG. 17, FIG. 72 and FIG. 73 and those listed in SEQ ID NO: 26272-26281.

[0402] In mAb-scFv backbone 1 (optionally including M428L/N434S) from FIG. 75, specific ABDs that bind human PD-L1 include FIG. 15, FIG. 73 and FIG. 78 and SEQ ID NO: 3961-4432.

[0403] D. Central scFv

[0404] One heterodimeric scaffold that finds particular use in the present invention is the Central-scFv format. In this embodiment, the format relies on the use of an inserted scFv domain thus forming a third antigen binding domain, wherein the Fab portions of the two monomers bind one receptor target and the “extra” scFv domain binds another (again, generally the costimulatory receptor is bound monovalently). The scFv domain is inserted between the Fc domain and the CH1-Fv region of one of the monomers, thus providing a third antigen binding domain.

[0405] In this embodiment, one monomer comprises a first heavy chain comprising a first variable heavy domain, a CH1 domain (and optional hinge) and Fc domain, with a scFv comprising a scFv variable light domain, an scFv linker and a scFv variable heavy domain. The scFv is covalently attached between the C-terminus of the CH1 domain of the heavy constant domain and the N-terminus of the first Fc domain using optional domain linkers (vh1-CH1-[optional linker]-vh2-scFv linker-vl2-[optional linker including the hinge]-CH2-CH3, or the opposite orientation for the scFv, vh1-CH1-[optional linker]-vl2-scFv linker-vh2-[optional linker including the hinge]-CH2-CH3). In some embodiments, the optional linker is a hinge or fragment thereof. The other monomer is a standard Fab side (e.g. vh1-CH1-hinge-CH2-CH3). This embodiment further utilizes a common light chain comprising a variable light domain and a constant light domain, which associates with the heavy chains to form two identical Fabs that bind a checkpoint inhibitor. As for many of the embodiments herein, these constructs include skew variants, pI variants, ablation variants, additional Fc variants, etc. as desired and described herein. In this embodiment, suitable Fv pairs include (Fabs listed first, scFvs second) ICOS×PD-1, ICOS×PD-L1, ICOS×CTLA-4, ICOS×LAG-3, ICOS×TIM-3, ICOS×BTLA, ICOS×TIGIT, TIGIT×ICOS, PD-1×ICOS, PD-L1×ICOS, CTLA-4×ICOS, LAG-3×ICOS, TIM-3×ICOS, BTLA×ICOS, OX40×TIGIT, OX40×PD-1, OX40×PD-L1, OX40×CTLA-4, OX40×LAG-3, OX40×TIM-3, OX40×BTLA, TIGIT×OX40, PD-1×OX40, PD-L1×OX40, CTLA-4×OX40, LAG-3×OX40, TIM-3×OX40, BTLA×OX40, GITR×TIGIT, GITR×PD-1, GITR×PD-L1, GITR×CTLA-4, GITR×LAG-3, GITR×TIM-3, GITR×BTLA, TIGIT×GITR, PD-1×GITR, PD-L1×GITR, CTLA-4×GITR, LAG-3×GITR, TIM-3×GITR, BTLA×GITR, 4-1BB×TIGIT, 4-1BB×PD-1, 4-1BB×PD-L1, 4-1BB×CTLA-4, 4-1BB×LAG-3, 4-1BB×TIM-3, 4-1BB×BTLA, TIGIT×4-1BB, PD-1×4-1BB, PD-L1×4-1BB, CTLA-4×4-1BB, LAG-3×4-1BB, TIM-3×4-1BB and BTLA×4-1BB.

[0406] The ABD sequences for these combinations can be as disclosed in the sequence listing or as shown in the Figures.

[0407] In addition, the Fc domains of the central scFv format generally comprise skew variants (e.g. a set of amino acid substitutions as shown in FIG. 4, with particularly useful skew variants being selected from the group consisting of S364K/E357Q:L368D/K370S; L368D/K370S:S364K; L368E/K370S:S364K; T411T/E360E/Q362E:D401K; L368D/K370S:S364K/E357L, K370S:S364K/E357Q, T366S/L368A/Y407V:T366W and T366S/L368A/Y407V/Y349C:T366W/S354C), optionally ablation variants (including those shown in FIG. 6), optionally charged scFv linkers (including those shown in FIG. 8) and the heavy chain comprises pI variants (including those shown in FIG. 5).

[0408] In some embodiments, the central scFv format includes skew variants, pI variants, and ablation variants. Accordingly, some embodiments include central scFv formats that comprise: a) a first monomer that comprises the skew variants S364K/E357Q, the ablation variants E233P/L234V/L235A/G236del/S267K, and a first variable heavy domain that, with the first variable light domain of the light chain, makes up an Fv that binds to a first receptor; b) a second monomer that comprises the skew variants L368D/K370S, the pI variants N208D/Q295E/N384D/Q418E/N421D, the ablation variants E233P/L234V/L235A/G236del/S267K, and a first variable heavy domain that, with the first variable light domain, makes up the Fv that binds to the second receptor as outlined herein; and c) a light chain comprising a first variable light domain and a constant light domain. In some particular embodiments with these variants in this format:
[0409] (1) the format comprises a Fab ABD binds to ICOS that has the ABD of [ICOS] H0.66_L0;
[0410] (2) the format comprises an ICOS ABD of H0.66_L0 combined with the scFv ABD comprising the ABD 1G6_L1.194_H1.279 that binds to PD-1;
[0411] (3) the format comprises an ICOS ABD of H0.66_L0 combined with the scFv comprising the ABD H3.23_L0.129 that binds to CTLA-4;
[0412] (4) the format comprises an ICOS ABD of H0.66_L0 is combined with the ABD 7G8_H.303_L1.34 that binds to LAG-3;
[0413] (5) the format comprises a scFv comprising the ABD 1G6_L1.194_H1.279 that binds to PD-1 and the Fab binds to GITR;
[0414] (6) the format comprises a scFv comprising the ABD 1G6_L1.194_H1.279 that binds to PD-1 and the Fab binds to OX40;
[0415] (7) the format comprises a scFv comprising the ABD 1G6_L1.194_H1.279 that binds to PD-1 and the Fab binds to ICOS;
[0416] 8) the format comprises a scFv comprising the ABD 1G6_L1.194_H1.279 that binds to PD-1 and the Fab binds to 4-1BB; and
[0417] (9) the format comprises the ABD of H0.66_L0 that binds to ICOS and an ABD that binds to PD-L1.

[0418] In some embodiments, the central scFv format includes skew variants, pI variants, ablation variants and FcRn variants. Accordingly, some embodiments include central-scFv formats that comprise: a) a first monomer that comprises the skew variants S364K/E357Q, the ablation variants E233P/L234V/L235A/G236del/S267K, the FcRn variants M428L/N434S and a first variable heavy domain that, with the first variable light domain of the light chain, makes up an Fv that binds to a first receptor and an scFv domain that binds to a second receptor; b) a second monomer that comprises the skew variants L368D/K370S, the pI variants N208D/Q295E/N384D/Q418E/N421D, the ablation variants E233P/L234V/L235A/G236del/S267K, the FcRn variants M428L/N434S and a first variable heavy domain that, with the first variable light domain, makes up the Fv that binds to the first checkpoint inhibitor as outlined herein; and c) a light chain comprising a first variable light domain and a constant light domain. In this embodiment, suitable Fv pairs include (Fabs listed first, scFvs second) ICOS×PD-1, PD-1×ICOS, ICOS×PD-L1, PD-L1×ICOS, ICOS×CTLA-4 and CTLA-4×ICOS.

[0419] For central-scFv sequences that utilize the central-scFv sequences of FIGS. 55A-55D suitable Fvs that bind ICOS include, but are not limited to, shown in FIG. 19, FIG. 20, FIG. 24, FIG. 68 and FIG. 77 as well as SEQ ID NO: 27869-28086, 28087-28269, 27193-27335, 28549-28556 and 28557-28665.

[0420] For central-scFv sequences that utilize the central-scFv sequences of FIGS. 55A-55D suitable Fvs that bind PD-L1 include, but are not limited to, those shown in FIG. 15, FIG. 73 and FIG. 78 and SEQ ID NO: 3961-4432.

[0421] For central-scFv sequences that utilize the central-scFv sequences of FIGS. 55A-55D suitable Fvs that bind GITR include, but are not limited to, those in FIG. 18, FIG. 72 and FIG. 73 and those listed in SEQ ID NO:26282-26290.

[0422] For central-scFv sequences that utilize the central-scFv sequences of FIGS. 55A-55D suitable Fvs that bind OX40 include, but are not limited to, FIG. 17, FIG. 72 and FIG. 73 and those listed in SEQ ID NO: 26272-26281.

[0423] For central-scFv sequences that utilize the central-scFv sequences of FIGS. 55A-55D suitable Fvs that bind 4-1BB include, but are not limited to, FIG. 16, FIG. 72 and FIG. 73 and SEQ ID NO: 26262-2671.

[0424] E. Central-scFv2

[0425] One heterodimeric scaffold that finds particular use in the present invention is the Central-scFv2 format, which is bispecific and tetravalent. In this embodiment, the format relies on the use of two inserted scFv domains thus forming third and fourth antigen binding domains, wherein the Fab portions of the two monomers bind one receptor target and the “extra” scFv domains bind another. The scFv domain is inserted between the Fc domain and the CH1-Fv region of the monomers.

[0426] In this embodiment, both monomers comprise a first heavy chain comprising a first variable heavy domain, a CH1 domain (and optional hinge) and Fc domain, with a scFv comprising a scFv variable light domain, an scFv linker and a scFv variable heavy domain. The scFv is covalently attached between the C-terminus of the CH1 domain of the heavy constant domain and the N-terminus of the first Fc domain using optional domain linkers (vh1-CH1-[optional linker]-vh2-scFv linker-vl2-[optional linker including the hinge]-CH2-CH3, or the opposite orientation for the scFv, vh1-CH1-[optional linker]-vl2-scFv linker-vh2-[optional linker including the hinge]-CH2-CH3). In some embodiments, the optional linker is a hinge or fragment thereof. This embodiment further utilizes a common light chain comprising a variable light domain and a constant light domain, which associates with the heavy chains to form two identical Fabs that bind a receptor. As for many of the embodiments herein, these constructs include skew variants, pI variants, ablation variants, additional Fc variants, etc. as desired and described herein. In this embodiment, suitable Fv pairs include (Fabs listed first, scFvs second) ICOS×PD-1, ICOS×PD-L1, ICOS×CTLA-4, ICOS×LAG-3, ICOS×TIM-3, ICOS×BTLA, ICOS×TIGIT, TIGIT×ICOS, PD-1×ICOS, PD-L1×ICOS, CTLA-4×ICOS, LAG-3×ICOS, TIM-3×ICOS, BTLA×ICOS, OX40×TIGIT, OX40×PD-1, OX40×PD-L1, OX40×CTLA-4, OX40×LAG-3, OX40×TIM-3, OX40×BTLA, TIGIT×OX40, PD-1×OX40, PD-L1×OX40, CTLA-4×OX40, LAG-3×OX40, TIM-3×OX40, BTLA×OX40, GITR×TIGIT, GITR×PD-1, GITR×PD-L1, GITR×CTLA-4, GITR×LAG-3, GITR×TIM-3, GITR×BTLA, TIGIT×GITR, PD-1×GITR, PD-L1×GITR, CTLA-4×GITR, LAG-3×GITR, TIM-3×GITR, BTLA×GITR, 4-1BB×TIGIT, 4-1BB×PD-1, 4-1BB×PD-L1, 4-1BB×CTLA-4, 4-1BB×LAG-3, 4-1BB×TIM-3, 4-1BB×BTLA, TIGIT×4-1BB, PD-1×4-1BB, PD-L1×4-1BB, CTLA-4×4-1BB, LAG-3×4-1BB, TIM-3×4-1BB and BTLA×4-1BB.

[0427] The ABD sequences for these combinations can be as disclosed in the sequence listing or as shown in the Figures.

[0428] In addition, the Fe domains of the central scFv2 format generally comprise skew variants (e.g. a set of amino acid substitutions as shown in FIG. 4, with particularly useful skew variants being selected from the group consisting of S364K/E357Q:L368D/K370S; L368D/K370S:S364K; L368E/K370S:S364K; T411T/E360E/Q362E:D401K; L368D/K370S:S364K/E357L, K370S:S364K/E357Q, T366S/L368A/Y407V:T366W and T366S/L368A/Y407V/Y349C:T366W/S354C), optionally ablation variants (including those shown in FIG. 6), optionally charged scFv linkers (including those shown in FIG. 8) and the heavy chain comprises pI variants (including those shown in FIG. 5).

[0429] In some embodiments, the central scFv2 format includes skew variants, pI variants, and ablation variants. Accordingly, some embodiments include central scFv formats that comprise: a) a first monomer that comprises the skew variants S364K/E357Q, the ablation variants E233P/L234V/L235A/G236del/S267K, and a first variable heavy domain that, with the first variable light domain of the light chain, makes up an Fv that binds to a first receptor; b) a second monomer that comprises the skew variants L368D/K370S, the pI variants N208D/Q295E/N384D/Q418E/N421D, the ablation variants E233P/L234V/L235A/G236del/S267K, and a first variable heavy domain that, with the first variable light domain, makes up the Fv that binds to the second receptor as outlined herein; and c) a light chain comprising a first variable light domain and a constant light domain. In some particular embodiments with these variants in this format:
[0430] (1) the format comprises a Fab ABD binds to ICOS that has the ABD of [ICOS] H0.66_L0;
[0431] (2) the format comprises an ICOS ABD of H0.66_L0 combined with the scFv ABD comprising the ABD 1G6_L1.194_H1.279 that binds to PD-1;
[0432] (3) the format comprises an ICOS ABD of H0.66_L0 combined with the scFv comprising the ABD H3.23_L0.129 that binds to CTLA-4;
[0433] (4) the format comprises an ICOS ABD of H0.66_L0 is combined with the ABD 7G8_H.303_L1.34 that binds to LAG-3;
[0434] (5) the format comprises a scFv comprising the ABD 1G6_L1.194_H1.279 that binds to PD-1 and the Fab binds to GITR;
[0435] (6) the format comprises a scFv comprising the ABD 1G6_L1.194_H1.279 that binds to PD-1 and the Fab binds to OX40;
[0436] (7) the format comprises a scFv comprising the ABD 1G6_L1.194_H1.279 that binds to PD-1 and the Fab binds to ICOS;
[0437] 8) the format comprises a scFv comprising the ABD 1G6_L1.194_H1.279 that binds to PD-1 and the Fab binds to 4-1BB; and
[0438] (9) the format comprises the ABD of H0.66_L0 that binds to ICOS and an ABD that binds to PD-L1.

[0439] In some embodiments, the central scFv2 format includes skew variants, pI variants, ablation variants and FcRn variants. Accordingly, some embodiments include central-scFv formats that comprise: a) a first monomer that comprises the skew variants S364K/E357Q, the ablation variants E233P/L234V/L235A/G236del/S267K, the FcRn variants M428L/N434S and a first variable heavy domain that, with the first variable light domain of the light chain, makes up an Fv that binds to a first receptor and an scFv domain that binds to a second receptor; b) a second monomer that comprises the skew variants L368D/K370S, the pI variants N208D/Q295E/N384D/Q418E/N421D, the ablation variants E233P/L234V/L235A/G236del/S267K, the FcRn variants M428L/N434S and a first variable heavy domain that, with the first variable light domain, makes up the Fv that binds to the first checkpoint inhibitor as outlined herein; and c) a light chain comprising a first variable light domain and a constant light domain. In this embodiment, suitable Fv pairs include (Fabs listed first, scFvs second) ICOS×PD-1, PD-1×ICOS, ICOS×PD-L1, PD-L1×ICOS, ICOS×CTLA-4 and CTLA-4×ICOS.

[0440] For central-scFv2 sequences that utilize the central-scFv2 sequences of FIGS. 55A-55D suitable Fvs that bind ICOS include, but are not limited to, shown in FIG. 19, FIG. 20, FIG. 24, FIG. 68 and FIG. 77 as well as SEQ ID NO: 27869-28086, 28087-28269, 27193-27335, 28549-28556 and 28557-28665.

[0441] For central-scFv2 sequences that utilize the central-scFv2 sequences of FIGS. 55A-55D suitable Fvs that bind PD-L1 include, but are not limited to, those shown in FIG. 15, FIG. 73 and FIG. 78 and SEQ ID NO: 3961-4432.

[0442] For central-scFv2 sequences that utilize the central-scFv sequences of FIGS. 55A-55D suitable Fvs that bind GITR include, but are not limited to, those in FIG. 18, FIG. 72 and FIG. 73 and those listed in SEQ ID NO:26282-26290.

[0443] For central-scFv2 sequences that utilize the central-scFv sequences of FIGS. 55A-55D suitable Fvs that bind OX40 include, but are not limited to, FIG. 17, FIG. 72 and FIG. 73 and those listed in SEQ ID NO: 26272-26281.

[0444] For central-scFv2 sequences that utilize the central-scFv sequences of FIGS. 55A-55D suitable Fvs that bind 4-1BB include, but are not limited to, FIG. 16, FIG. 72 and FIG. 73 and SEQ ID NO: 26262-2671.

[0445] F. One Armed mAb

[0446] As noted above, surprisingly and unexpectedly, monovalent costimulatory antibodies comprising a single ABD to the target show efficacy in activating T cells.

[0447] Accordingly, in some embodiments, the invention provides monovalent, monospecific antibodies as shown in Figure FIG. 2N that comprise a heterodimeric Fc domain (for stability). In this embodiment, in this embodiment, one monomer comprises just an Fc domain, while the other monomer is a HC (VH1-CH1-hinge-CH2-CH3). This embodiment further utilizes a light chain comprising a variable light domain and a constant light domain, that associates with the heavy chain to form a Fab. As for many of the embodiments herein, these constructs include skew variants, pI variants, ablation variants, additional Fc variants, etc. as desired and described herein. In this embodiment, suitable ABDs bind a costimulatory receptor such as ICOS, GITR, OX40 or 4-1BB.

[0448] The ABD sequences for these combinations can be as disclosed in the sequence listing or as shown in the Figures.

[0449] In addition, the Fc domains of the comprise skew variants (e.g. a set of amino acid substitutions as shown in FIG. 4, with particularly useful skew variants being selected from the group consisting of S364K/E357Q:L368D/K370S; L368D/K370S:S364K; L368E/K370S:S364K; T411T/E360E/Q362E:D401K; L368D/K370S:S364K/E357L, K370S:S364K/E357Q, T366S/L368A/Y407V:T366W and T366S/L368A/Y407V/Y349C:T366W/S354C), optionally ablation variants (including those shown in FIG. 6), and the heavy chain comprises pI variants (including those shown in FIG. 5).

[0450] In some embodiments, the one armed scFv-mAb format includes skew variants, pI variants, and ablation variants. Accordingly, some embodiments include formats that comprise: a) a first (Fc) monomer that comprises the skew variants S364K/E357Q, the ablation variants E233P/L234V/L235A/G236del/S267K b) a second monomer that comprises the skew variants L368D/K370S, the pI variants Q295E/N384D/Q418E/N421D, the ablation variants E233P/L234V/L235A/G236del/S267K, and a first variable heavy domain that, with the first variable light domain, makes up the Fv that binds to the costimulatory receptor as outlined herein

[0451] In this format, specific ABDs that bind human ICOS include, but are not limited to, [ICOS]_H0L0 and [ICOS]H0.66_L0 and and those shown in FIG. 19, FIG. 20, FIG. 24, FIG. 68 and FIG. 77 as well as SEQ ID NO: 27869-28086, 28087-28269, 27193-27335, 28549-28556 and 28557-28665.

[0452] In this format, specific ABDs that bind human GITR include, but are not limited to, those in FIG. 18, FIG. 72 and FIG. 73 and those listed in SEQ ID NO:26282-26290.

[0453] In this format, specific ABDs that bind OX40 include, but are not limited to, FIG. 17, FIG. 72 and FIG. 73 and those listed in SEQ ID NO: 26272-26281.

[0454] In this format, specific ABDs that bind human 4-1BB include, but are not limited to, FIG. 16, FIG. 72 and FIG. 73 and SEQ ID NO: 26262-2671.

[0455] In this format, specific ABDs that bind human PD-L1 include, but are not limited to, FIG. 15, FIG. 73 and FIG. 78 and SEQ ID NO: 3961-4432.

[0456] Specific “one armed mAbs” are shown in the Figures and sequence listing.

[0457] G. Bispecific mAb

[0458] One heterodimeric scaffold that finds particular use in the present invention is the bispecific mAb format, which is bispecific and tetravalent. In this embodiment, the format relies on the generation of separate homodimeric antibodies which are then recombined. In this format, there is one HC-LC pair (VH1-CH1-hinge-CH2-CH3 and VL1-LC) and a second He-LC pair (VH2-CH1-hinge-CH2-CH3 and VL2-LC), e.g. two different heavy chains and two different light chains. Reference is made to Example 5I(d).

[0459] In this format, suitable pairs include ICOS and PD-1, ICOS and CTLA-4, ICOS and LAG-3, ICOS and TIM-3, ICOS and PD-L1, ICOS and BTLA, ICOS and TIGIT, GITR and TIGIT, GITR and PD-1, GITR and CTLA-4, GITR and LAG-3, GITR and TIM-3, GITR and PD-L1, GITR and BTLA, OX40 and PD-1, OX40 and TIGIT, OX40 and CTLA-4, IC OX40 OS and LAG-3, OX40 and TIM-3, OX40 and PD-L1, OX40 and BTLA, 4-1BB and PD-1, 4-1BB and CTLA-4, 4-1BB and LAG-3, 4-1BB and TIM-3, 4-1BB and PD-L1, TIGIT and 4-1BB and 4-1BB and BTLA.

[0460] In some particular embodiments with these variants in this format:
[0461] (1) the format comprises a Fab ABD binds to ICOS that has the ABD of [ICOS] H0.66_L0;
[0462] (2) the format comprises an ICOS ABD of H0.66_L0 combined with the ABD comprising the ABD 1G6_L1.194_H1.279 that binds to PD-1;
[0463] (3) the format comprises an ICOS ABD of H0.66_L0 combined with the ABD H3.23_L0.129 that binds to CTLA-4;
[0464] (4) the format comprises an ICOS ABD of H0.66_L0 is combined with the ABD 7G8_H.303_L1.34 that binds to LAG-3;
[0465] (5) the format comprises a scFv comprising the ABD 1G6_L1.194_H1.279 that binds to PD-1 and the Fab binds to GITR;
[0466] (6) the format comprises a scFv comprising the ABD 1G6_L1.194_H1.279 that binds to PD-1 and the Fab binds to OX40;
[0467] (7) the format comprises a scFv comprising the ABD 1G6_L1.194_H1.279 that binds to PD-1 and the Fab binds to ICOS;
[0468] 8) the format comprises a scFv comprising the ABD 1G6_L1.194_H1.279 that binds to PD-1 and the Fab binds to 4-1BB; and
[0469] (9) the format comprises the ABD of H0.66_L0 that binds to ICOS and an ABD that binds to PD-L1.

[0470] In this format, specific ABDs that bind human ICOS include, but are not limited to, [ICOS]_H0L0 and [ICOS]H0.66_L0 and and those shown in FIG. 19, FIG. 20, FIG. 24, FIG. 68 and FIG. 77 as well as SEQ ID NO: 27869-28086, 28087-28269, 27193-27335, 28549-28556 and 28557-28665.

[0471] In this format, specific ABDs that bind human GITR include, but are not limited to, those in FIG. 18, FIG. 72 and FIG. 73 and those listed in SEQ ID NO:26282-26290.

[0472] In this format, specific ABDs that bind OX40 include, but are not limited to, FIG. 17, FIG. 72 and FIG. 73 and those listed in SEQ ID NO: 26272-26281.

[0473] In this format, specific ABDs that bind human 4-1BB include, but are not limited to, FIG. 16, FIG. 72 and FIG. 73 and SEQ ID NO: 26262-2671.

[0474] In this format, specific ABDs that bind human PD-L1 include, but are not limited to, FIG. 15, FIG. 73 and FIG. 78 and SEQ ID NO: 3961-4432.

[0475] H. Central-Fv Format

[0476] One heterodimeric scaffold that finds particular use in the present invention is the Central-Fv format shown in FIG. 2. In this embodiment, the format relies on the use of an inserted Fv domain thus forming an “extra” third antigen binding domain, wherein the Fab portions of the two monomers bind one receptor and the “extra” central-Fv domain binds another (generally the costimulatory receptor). The Fv domain is inserted between the Fc domain and the CH1-Fv region of the monomers, thus providing a third antigen binding domain, wherein each monomer contains a component of the Fv (e.g. one monomer comprises a variable heavy domain and the other a variable light domain of the “extra” central Fv domain).

[0477] In this embodiment, one monomer comprises a first heavy chain comprising a first variable heavy domain, a CH1 domain, and Fc domain and an additional variable light domain. The additional variable light domain is covalently attached between the C-terminus of the CH1 domain of the heavy constant domain and the N-terminus of the first Fc domain using domain linkers (vh1-CH1-[optional linker]-vl2-hinge-CH2-CH3). The other monomer comprises a first heavy chain comprising a first variable heavy domain, a CH1 domain and Fc domain and an additional variable heavy domain (vh1-CH1-[optional linker]-vh2-hinge-CH2-CH3). The additional variable heavy domain domain is covalently attached between the C-terminus of the CH1 domain of the heavy constant domain and the N-terminus of the first Fc domain using domain linkers. This embodiment utilizes a common light chain comprising a variable light domain and a constant light domain, that associates with the heavy chains to form two identical Fabs that each bind a receptor. The additional variable heavy domain and additional variable light domain form an “extra” central Fv that binds a second receptor. As for many of the embodiments herein, these constructs include skew variants, pI variants, ablation variants, additional Fc variants, etc. as desired and described herein. In this embodiment, suitable Fv pairs include (Fabs listed first, “extra” central Fv second) ICOS×PD-1, ICOS×PD-L1, ICOS×CTLA-4, ICOS×LAG-3, ICOS×TIM-3, ICOS×BTLA, ICOS×TIGIT, TIGIT×ICOS, PD-1×ICOS, PD-L1×ICOS, CTLA-4×ICOS, LAG-3×ICOS, TIM-3×ICOS, BTLA×ICOS, OX40×TIGIT, OX40×PD-1, OX40×PD-L1, OX40×CTLA-4, OX40×LAG-3, OX40×TIM-3, OX40×BTLA, TIGIT×OX40, PD-1×OX40, PD-L1×OX40, CTLA-4×OX40, LAG-3×OX40, TIM-3×OX40, BTLA×OX40, GITR×TIGIT, GITR×PD-1, GITR×PD-L1, GITR×CTLA-4, GITR×LAG-3, GITR×TIM-3, GITR×BTLA, TIGIT×GITR, PD-1×GITR, PD-L1×GITR, CTLA-4×GITR, LAG-3×GITR, TIM-3×GITR, BTLA×GITR, 4-1BB×TIGIT, 4-1BB×PD-1, 4-1BB×PD-L1, 4-1BB×CTLA-4, 4-1BB×LAG-3, 4-1BB×TIM-3, 4-1BB×BTLA, TIGIT×4-1BB, PD-1×4-1BB, PD-L1×4-1BB, CTLA-4×4-1BB, LAG-3×4-1BB, TIM-3×4-1BB and BTLA×4-1BB.

[0478] The ABD sequences for these combinations can be as disclosed in the sequence listing or as shown in the Figures.

[0479] In addition, the Fc domains of the central-Fv format generally comprise skew variants (e.g. a set of amino acid substitutions as shown in FIG. 4, with particularly useful skew variants being selected from the group consisting of S364K/E357Q:L368D/K370S; L368D/K370S:S364K; L368E/K370S:S364K; T411T/E360E/Q362E:D401K; L368D/K370S:S364K/E357L, K370S:S364K/E357Q, T366S/L368A/Y407V:T366W and T366S/L368A/Y407V/Y349C:T366W/S354C), optionally ablation variants (including those shown in FIG. 6), optionally charged scFv linkers (including those shown in FIG. 8) and the heavy chain comprises pI variants (including those shown in FIG. 5).

[0480] In some embodiments, the central-Fv format includes skew variants, pI variants, and ablation variants. Accordingly, some embodiments include central scFv formats that comprise: a) a first monomer that comprises the skew variants S364K/E357Q, the ablation variants E233P/L234V/L235A/G236del/S267K, and a first variable heavy domain that, with the first variable light domain of the light chain, makes up an Fv that binds to a first receptor; b) a second monomer that comprises the skew variants L368D/K370S, the pI variants N208D/Q295E/N384D/Q418E/N421D, the ablation variants E233P/L234V/L235A/G236del/S267K, and a first variable heavy domain that, with the first variable light domain, makes up the Fv that binds to the second receptor as outlined herein; and c) a light chain comprising a first variable light domain and a constant light domain. In some particular embodiments with these variants in this format:
[0481] (1) the format comprises a Fab ABD binds to ICOS that has the ABD of [ICOS] H0.66_L0;
[0482] (2) the format comprises an ICOS ABD of H0.66_L0 combined with the scFv ABD comprising the ABD 1G6_L1.194_H1.279 that binds to PD-1;
[0483] (3) the format comprises an ICOS ABD of H0.66_L0 combined with the scFv comprising the ABD H3.23_L0.129 that binds to CTLA-4;
[0484] (4) the format comprises an ICOS ABD of H0.66_L0 is combined with the ABD 7G8_H.303_L1.34 that binds to LAG-3;
[0485] (5) the format comprises a scFv comprising the ABD 1G6_L1.194_H1.279 that binds to PD-1 and the Fab binds to GITR;
[0486] (6) the format comprises a scFv comprising the ABD 1G6_L1.194_H1.279 that binds to PD-1 and the Fab binds to OX40;
[0487] (7) the format comprises a scFv comprising the ABD 1G6_L1.194_H1.279 that binds to PD-1 and the Fab binds to ICOS;
[0488] 8) the format comprises a scFv comprising the ABD 1G6_L1.194_H1.279 that binds to PD-1 and the Fab binds to 4-1BB; and
[0489] (9) the format comprises the ABD of H0.66_L0 that binds to ICOS and an ABD that binds to PD-L1.

[0490] In some embodiments, the central-Fv format includes skew variants, pI variants, ablation variants and FcRn variants. Accordingly, some embodiments include central-scFv formats that comprise: a) a first monomer that comprises the skew variants S364K/E357Q, the ablation variants E233P/L234V/L235A/G236del/S267K, the FcRn variants M428L/N434S and a first variable heavy domain that, with the first variable light domain of the light chain, makes up an Fv that binds to a first receptor and an scFv domain that binds to a second receptor; b) a second monomer that comprises the skew variants L368D/K370S, the pI variants N208D/Q295E/N384D/Q418E/N421D, the ablation variants E233P/L234V/L235A/G236del/S267K, the FcRn variants M428L/N434S and a first variable heavy domain that, with the first variable light domain, makes up the Fv that binds to the first checkpoint inhibitor as outlined herein; and c) a light chain comprising a first variable light domain and a constant light domain. In this embodiment, suitable Fv pairs include (Fabs listed first, scFvs second) ICOS×PD-1, PD-1×ICOS, ICOS×PD-L1, PD-L1×ICOS, ICOS×CTLA-4 and CTLA-4×ICOS.

[0491] For central-Fv formats suitable Fvs that bind ICOS include, but are not limited to, shown in FIG. 19, FIG. 20, FIG. 24, FIG. 68 and FIG. 77 as well as SEQ ID NO: 27869-28086, 28087-28269, 27193-27335, 28549-28556 and 28557-28665.

[0492] For central-Fv formats suitable Fvs that bind PD-L1 include, but are not limited to, those shown in FIG. 15, FIG. 73 and FIG. 78 and SEQ ID NO: 3961-4432.

[0493] For central-Fv formats suitable Fvs that bind GITR include, but are not limited to, those in FIG. 18, FIG. 72 and FIG. 73 and those listed in SEQ ID NO:26282-26290.

[0494] For central-Fv formats suitable Fvs that bind OX40 include, but are not limited to, FIG. 17, FIG. 72 and FIG. 73 and those listed in SEQ ID NO: 26272-26281.

[0495] For central-Fv formats suitable Fvs that bind 4-1BB include, but are not limited to, FIG. 16, FIG. 72 and FIG. 73 and SEQ ID NO: 26262-2671.

[0496] For central-FV formats suitable Fvs that bind PD-L1 include, but are not limited to, those of FIG. 15, FIG. 73 and FIG. 78 and SEQ ID NO: 3961-4432.

[0497] I. One Armed Central-scFv

[0498] One heterodimeric scaffold that finds particular use in the present invention is the one armed central-scFv format shown in FIG. 1C. In this embodiment, one monomer comprises just an Fc domain, while the other monomer includes a Fab domain (a first antigen binding domain), a scFv domain (a second antigen binding domain) and an Fc domain, where the scFv domain is inserted between the Fc domain and the Fc domain. In this format, the Fab portion binds one receptor target and the scFv binds another.

[0499] In this embodiment, one monomer comprises a first heavy chain comprising a first variable heavy domain, a CH1 domain and Fc domain, with a scFv comprising a scFv variable light domain, an scFv linker and a scFv variable heavy domain. The scFv is covalently attached between the C-terminus of the CH1 domain of the heavy constant domain and the N-terminus of the first Fc domain using domain linkers, in either orientation, VH1-CH1-[optional domain linker]-VH2-scFv linker-VL2-[optional domain linker]-CH2-CH3 or VH1-CH1-[optional domain linker]-VL2-scFv linker-VH2-[optional domain linker]-CH2-CH3. The second monomer comprises an Fc domain (CH2-CH3). This embodiment further utilizes a light chain comprising a variable light domain and a constant light domain, that associates with the heavy chain to form a Fab. As for many of the embodiments herein, these constructs include skew variants, pI variants, ablation variants, additional Fc variants, etc. as desired and described herein. In this embodiment, suitable Fv pairs include (Fabs listed first, scFvs second) ICOS×PD-1, ICOS×PD-L1, ICOS×CTLA-4, ICOS×LAG-3, ICOS×TIM-3, ICOS×BTLA, ICOS×TIGIT, TIGIT×ICOS, PD-1×ICOS, PD-L1×ICOS, CTLA-4×ICOS, LAG-3×ICOS, TIM-3×ICOS, BTLA×ICOS, OX40×TIGIT, OX40×PD-1, OX40×PD-L1, OX40×CTLA-4, OX40×LAG-3, OX40×TIM-3, OX40×BTLA, TIGIT×OX40, PD-1×OX40, PD-L1×OX40, CTLA-4×OX40, LAG-3×OX40, TIM-3×OX40, BTLA×OX40, GITR×TIGIT, GITR×PD-1, GITR×PD-L1, GITR×CTLA-4, GITR×LAG-3, GITR×TIM-3, GITR×BTLA, TIGIT×GITR, PD-1×GITR, PD-L1×GITR, CTLA-4×GITR, LAG-3×GITR, TIM-3×GITR, BTLA×GITR, 4-1BB×TIGIT, 4-1BB×PD-1, 4-1BB×PD-L1, 4-1BB×CTLA-4, 4-1BB×LAG-3, 4-1BB×TIM-3, 4-1BB×BTLA, TIGIT×4-1BB, PD-1×4-1BB, PD-L1×4-1BB, CTLA-4×4-1BB, LAG-3×4-1BB, TIM-3×4-1BB and BTLA×4-1BB.

[0500] The ABD sequences for these combinations can be as disclosed in the sequence listing or as shown in the Figure.

[0501] In addition, the Fc domains of the one armed central-scFv format generally comprise skew variants (e.g. a set of amino acid substitutions as shown in FIG. 4, with particularly useful skew variants being selected from the group consisting of S364K/E357Q:L368D/K370S; L368D/K370S:S364K; L368E/K370S:S364K; T411T/E360E/Q362E:D401K; L368D/K370S:S364K/E357L, K370S:S364K/E357Q, T366S/L368A/Y407V:T366W and T366S/L368A/Y407V/Y349C:T366W/S354C), optionally ablation variants (including those shown in FIG. 6), optionally charged scFv linkers (including those shown in FIG. 8) and the heavy chain comprises pI variants (including those shown in FIG. 5).

[0502] In some embodiments, the one armed central-scFv format includes skew variants, pI variants, and ablation variants. Accordingly, some embodiments include formats that comprise: a) a first monomer that comprises the skew variants S364K/E357Q, the ablation variants E233P/L234V/L235A/G236del/S267K, and a variable heavy domain that, with the variable light domain of the light chain, makes up an Fv that binds to a first receptor, and a scFv that binds to the other receptor; b) a second monomer that comprises the skew variants L368D/K370S, the pI variants Q295E/N384D/Q418E/N421D, the ablation variants E233P/L234V/L235A/G236del/S267K, and c) a light chain comprising a first variable light domain and a constant light domain. In some particular embodiments with these variants in this format:
[0503] (1) the format comprises a Fab ABD binds to ICOS that has the ABD of [ICOS] H0.66_L0;
[0504] (2) the format comprises an ICOS ABD of H0.66_L0 combined with the scFv ABD comprising the ABD 1G6_L1.194_H1.279 that binds to PD-1;
[0505] (3) the format comprises an ICOS ABD of H0.66_L0 combined with the scFv comprising the ABD H3.23_L0.129 that binds to CTLA-4;
[0506] (4) the format comprises an ICOS ABD of H0.66_L0 is combined with the ABD 7G8_H.303_L1.34 that binds to LAG-3;
[0507] (5) the format comprises a scFv comprising the ABD 1G6_L1.194_H1.279 that binds to PD-1 and the Fab binds to GITR;
[0508] (6) the format comprises a scFv comprising the ABD 1G6_L1.194_H1.279 that binds to PD-1 and the Fab binds to OX40;
[0509] (7) the format comprises a scFv comprising the ABD 1G6_L1.194_H1.279 that binds to PD-1 and the Fab binds to ICOS;
[0510] 8) the format comprises a scFv comprising the ABD 1G6_L1.194_H1.279 that binds to PD-1 and the Fab binds to 4-1BB; and
[0511] (9) the format comprises the ABD of H0.66_L0 that binds to ICOS and an ABD that binds to PD-L1.

[0512] In some embodiments, the one armed central-scFv format includes skew variants, pI variants, ablation variants and FcRn variants. Accordingly, some embodiments include formats that comprise: a) a first monomer that comprises the skew variants S364K/E357Q, the ablation variants E233P/L234V/L235A/G236del/S267K, the FcRn variants M428L/N434S and a first variable heavy domain that, with the first variable light domain of the light chain, makes up an Fv that binds to a first receptor and a scFv domain that binds to a second receptor; b) a second monomer that comprises the skew variants L368D/K370S, the pI variants Q295E/N384D/Q418E/N421D, the ablation variants E233P/L234V/L235A/G236del/S267K, the FcRn variants M428L/N434S. and c) a light chain comprising a first variable light domain and a constant light domain.

[0513] In this format, specific ABDs that bind human ICOS include, but are not limited to, [ICOS]_H0L0 and [ICOS]H0.66_L0 and and those shown in FIG. 19, FIG. 20, FIG. 24, FIG. 68 and FIG. 77 as well as SEQ ID NO: 27869-28086, 28087-28269, 27193-27335, 28549-28556 and 28557-28665.

[0514] In this format, specific ABDs that bind human GITR include, but are not limited to, those in FIG. 18, FIG. 72 and FIG. 73 and those listed in SEQ ID NO:26282-26290.

[0515] In this format, specific ABDs that bind OX40 include, but are not limited to, FIG. 17, FIG. 72 and FIG. 73 and those listed in SEQ ID NO: 26272-26281.

[0516] In this format, specific ABDs that bind human 4-1BB include, but are not limited to, FIG. 16, FIG. 72 and FIG. 73 and SEQ ID NO: 26262-2671.

[0517] In this format, specific ABDs that bind human PD-L1 include, but are not limited to, FIG. 15, FIG. 73 and FIG. 78 and SEQ ID NO: 3961-4432.

[0518] J. One Armed scFv-mAb

[0519] One heterodimeric scaffold that finds particular use in the present invention is the one armed scFv-mAb format shown in FIG. 2D. In this embodiment, one monomer comprises just an Fc domain, while the other monomer uses a scFv domain attached at the N-terminus of the heavy chain, generally through the use of a linker: vh1-scFv linker-vl1-[optional domain linker]-VH2-CH1-hinge-CH2-CH3 or (in the opposite orientation) vl1-scFv linker-vh1-[optional domain linker]-VH2-CH1-hinge-CH2-CH3. In this format, either the Fab portion binds one receptor target and the scFv binds another. This embodiment further utilizes a light chain comprising a variable light domain and a constant light domain, that associates with the heavy chain to form a Fab. As for many of the embodiments herein, these constructs include skew variants, pI variants, ablation variants, additional Fc variants, etc. as desired and described herein. In this embodiment, suitable Fv pairs include (Fabs listed first, scFvs second) ICOS×PD-1, ICOS×PD-L1, ICOS×CTLA-4, ICOS×LAG-3, ICOS×TIM-3, ICOS×BTLA, ICOS×TIGIT, TIGIT×ICOS, PD-1×ICOS, PD-L1×ICOS, CTLA-4×ICOS, LAG-3×ICOS, TIM-3×ICOS, BTLA×ICOS, OX40×TIGIT, OX40×PD-1, OX40×PD-L1, OX40×CTLA-4, OX40×LAG-3, OX40×TIM-3, OX40×BTLA, TIGIT×OX40, PD-1×OX40, PD-L1×OX40, CTLA-4×OX40, LAG-3×OX40, TIM-3×OX40, BTLA×OX40, GITR×TIGIT, GITR×PD-1, GITR×PD-L1, GITR×CTLA-4, GITR×LAG-3, GITR×TIM-3, GITR×BTLA, TIGIT×GITR, PD-1×GITR, PD-L1×GITR, CTLA-4×GITR, LAG-3×GITR, TIM-3×GITR, BTLA×GITR, 4-1BB×TIGIT, 4-1BB×PD-1, 4-1BB×PD-L1, 4-1BB×CTLA-4, 4-1BB×LAG-3, 4-1BB×TIM-3, 4-1BB×BTLA, TIGIT×4-1BB, PD-1×4-1BB, PD-L1×4-1BB, CTLA-4×4-1BB, LAG-3×4-1BB, TIM-3×4-1BB and BTLA×4-1BB.

[0520] The ABD sequences for these combinations can be as disclosed in the sequence listing or as shown in the Figures.

[0521] In addition, the Fc domains of the comprise skew variants (e.g. a set of amino acid substitutions as shown in FIG. 4, with particularly useful skew variants being selected from the group consisting of S364K/E357Q:L368D/K370S; L368D/K370S:S364K; L368E/K370S:S364K; T411T/E360E/Q362E:D401K; L368D/K370S:S364K/E357L, K370S:S364K/E357Q, T366S/L368A/Y407V:T366W and T366S/L368A/Y407V/Y349C:T366W/S354C), optionally ablation variants (including those shown in FIG. 6), optionally charged scFv linkers (including those shown in FIG. 8) and the heavy chain comprises pI variants (including those shown in FIG. 5).

[0522] In some embodiments, the one armed scFv-mAb format includes skew variants, pI variants, and ablation variants. Accordingly, some embodiments include formats that comprise: a) a first monomer that comprises the skew variants S364K/E357Q, the ablation variants E233P/L234V/L235A/G236del/S267K, and a first variable heavy domain that, with the first variable light domain of the light chain, makes up an Fv that binds to a first checkpoint inhibitor, and a second variable heavy domain; b) a second monomer that comprises the skew variants L368D/K370S, the pI variants N208D/Q295E/N384D/Q418E/N421D, the ablation variants E233P/L234V/L235A/G236del/S267K, and a first variable heavy domain that, with the first variable light domain, makes up the Fv that binds to the first checkpoint inhibitor as outlined herein, and a second variable light chain, that together with the second variable heavy chain forms an Fv (ABD) that binds a second checkpoint inhibitors; and c) a light chain comprising a first variable light domain and a constant light domain. In some particular embodiments with these variants in this format:
[0523] (1) the format comprises a Fab ABD binds to ICOS that has the ABD of [ICOS] H0.66_L0;
[0524] (2) the format comprises an ICOS ABD of H0.66_L0 combined with the scFv ABD comprising the ABD 1G6_L1.194_H1.279 that binds to PD-1;
[0525] (3) the format comprises an ICOS ABD of H0.66_L0 combined with the scFv comprising the ABD H3.23_L0.129 that binds to CTLA-4;
[0526] (4) the format comprises an ICOS ABD of H0.66_L0 is combined with the ABD 7G8_H.303_L1.34 that binds to LAG-3;
[0527] (5) the format comprises a scFv comprising the ABD 1G6_L1.194_H1.279 that binds to PD-1 and the Fab binds to GITR;
[0528] (6) the format comprises a scFv comprising the ABD 1G6_L1.194_H1.279 that binds to PD-1 and the Fab binds to OX40;
[0529] (7) the format comprises a scFv comprising the ABD 1G6_L1.194_H1.279 that binds to PD-1 and the Fab binds to ICOS;
[0530] 8) the format comprises a scFv comprising the ABD 1G6_L1.194_H1.279 that binds to PD-1 and the Fab binds to 4-1BB; and
[0531] (9) the format comprises the ABD of H0.66_L0 that binds to ICOS and an ABD that binds to PD-L1.

[0532] In some embodiments, the one armed scFv-mAb format includes skew variants, pI variants, ablation variants and FcRn variants. Accordingly, some embodiments include bottle opener formats that comprise: a) a first monomer that comprises the skew variants S364K/E357Q, the ablation variants E233P/L234V/L235A/G236del/S267K, the FcRn variants M428L/N434S and a first variable heavy domain that, with the first variable light domain of the light chain, makes up an Fv that binds to a first checkpoint inhibitor, and a second variable heavy domain; b) a second monomer that comprises the skew variants L368D/K370S, the pI variants N208D/Q295E/N384D/Q418E/N421D, the ablation variants E233P/L234V/L235A/G236del/S267K, the FcRn variants M428L/N434S and a first variable heavy domain that, with the first variable light domain, makes up the Fv that binds to the first checkpoint inhibitor as outlined herein, and a second variable light chain, that together with the second variable heavy chain forms an Fv (ABD) that binds a second checkpoint inhibitors; and c) a light chain comprising a first variable light domain and a constant light domain.

[0533] In this format, specific ABDs that bind human ICOS include, but are not limited to, [ICOS]_H0L0 and [ICOS]H0.66_L0 and and those shown in FIG. 19, FIG. 20, FIG. 24, FIG. 68 and FIG. 77 as well as SEQ ID NO: 27869-28086, 28087-28269, 27193-27335, 28549-28556 and 28557-28665.

[0534] In this format, specific ABDs that bind human GITR include, but are not limited to, those in FIG. 18, FIG. 72 and FIG. 73 and those listed in SEQ ID NO:26282-26290.

[0535] In this format, specific ABDs that bind OX40 include, but are not limited to, FIG. 17, FIG. 72 and FIG. 73 and those listed in SEQ ID NO: 26272-26281.

[0536] In this format, specific ABDs that bind human 4-1BB include, but are not limited to, FIG. 16, FIG. 72 and FIG. 73 and SEQ ID NO: 26262-2671.

[0537] In this format, specific ABDs that bind human PD-L1 include, but are not limited to, FIG. 15, FIG. 73 and FIG. 78 and SEQ ID NO: 3961-4432.

[0538] K. scFv-mAb Format

[0539] One heterodimeric scaffold that finds particular use in the present invention is the mAb-scFv format shown in FIG. 2E. In this embodiment, the format relies on the use of a N-terminal attachment of a scFv to one of the monomers, thus forming a third antigen binding domain, wherein the Fab portions of the two monomers each bind one target and the “extra” scFv domain binds a different target.

[0540] In this embodiment, the first monomer comprises a first heavy chain (comprising a variable heavy domain and a constant domain), with a N-terminally covalently attached scFv comprising a scFv variable light domain, an scFv linker and a scFv variable heavy domain in either orientation ((vh1-scFv linker-vl1-[optional domain linker]-vh2-CH1-hinge-CH2-CH3) or (with the scFv in the opposite orientation) ((vl1-scFv linker-vh1-[optional domain linker]-vh2-CH1-hinge-CH2-CH3)). The second monomer comprises a heavy chain VH20CH1-hinge-CH2-CH3. This embodiment further utilizes a common light chain comprising a variable light domain and a constant light domain, that associates with the heavy chains to form two identical Fabs that bind one of the target antigens. As for many of the embodiments herein, these constructs include skew variants, pI variants, ablation variants, additional Fc variants, etc. as desired and described herein. In this embodiment, suitable Fv pairs include (Fabs listed first, scFvs second) ICOS×PD-1, ICOS×PD-L1, ICOS×CTLA-4, ICOS×LAG-3, ICOS×TIM-3, ICOS×BTLA, ICOS×TIGIT, TIGIT×ICOS, PD-1×ICOS, PD-L1×ICOS, CTLA-4×ICOS, LAG-3×ICOS, TIM-3×ICOS, BTLA×ICOS, OX40×TIGIT, OX40×PD-1, OX40×PD-L1, OX40×CTLA-4, OX40×LAG-3, OX40×TIM-3, OX40×BTLA, TIGIT×OX40, PD-1×OX40, PD-L1×OX40, CTLA-4×OX40, LAG-3×OX40, TIM-3×OX40, BTLA×OX40, GITR×TIGIT, GITR×PD-1, GITR×PD-L1, GITR×CTLA-4, GITR×LAG-3, GITR×TIM-3, GITR×BTLA, TIGIT×GITR, PD-1×GITR, PD-L1×GITR, CTLA-4×GITR, LAG-3×GITR, TIM-3×GITR, BTLA×GITR, 4-1BB×TIGIT, 4-1BB×PD-1, 4-1BB×PD-L1, 4-1BB×CTLA-4, 4-1BB×LAG-3, 4-1BB×TIM-3, 4-1BB×BTLA, TIGIT×4-1BB, PD-1×4-1BB, PD-L1×4-1BB, CTLA-4×4-1BB, LAG-3×4-1BB, TIM-3×4-1BB and BTLA×4-1BB.

[0541] The ABD sequences for these combinations can be as disclosed in the sequence listing or in the Figures.

[0542] In addition, the Fc domains of the scFv-mAb format comprise skew variants (e.g. a set of amino acid substitutions as shown in FIG. 4, with particularly useful skew variants being selected from the group consisting of S364K/E357Q:L368D/K370S; L368D/K370S:S364K; L368E/K370S:S364K; T411T/E360E/Q362E:D401K; L368D/K370S:S364K/E357L, K370S:S364K/E357Q, T366S/L368A/Y407V:T366W and T366S/L368A/Y407V/Y349C:T366W/S354C), optionally ablation variants (including those shown in FIG. 6), optionally charged scFv linkers (including those shown in FIG. 8) and the heavy chain comprises pI variants (including those shown in FIG. 5).

[0543] In some embodiments, the mAb-scFv format includes skew variants, pI variants, and ablation variants. Accordingly, some embodiments include bottle opener formats that comprise: a) a first monomer that comprises the skew variants S364K/E357Q, the ablation variants E233P/L234V/L235A/G236del/S267K, and a first variable heavy domain that, with the first variable light domain of the light chain, makes up an Fv that binds to a first checkpoint inhibitor, and a second variable heavy domain; b) a second monomer that comprises the skew variants L368D/K370S, the pI variants N208D/Q295E/N384D/Q418E/N421D, the ablation variants E233P/L234V/L235A/G236del/S267K, and a first variable heavy domain that, with the first variable light domain, makes up the Fv that binds to the first checkpoint inhibitor as outlined herein, and a second variable light chain, that together with the second variable heavy chain forms an Fv (ABD) that binds a second checkpoint inhibitors; and c) a light chain comprising a first variable light domain and a constant light domain. In some particular embodiments with these variants in this format:
[0544] (1) the format comprises a Fab ABD binds to ICOS that has the ABD of [ICOS] H0.66_L0;
[0545] (2) the format comprises an ICOS ABD of H0.66_L0 combined with the scFv ABD comprising the ABD 1G6_L1.194_H1.279 that binds to PD-1;
[0546] (3) the format comprises an ICOS ABD of H0.66_L0 combined with the scFv comprising the ABD H3.23_L0.129 that binds to CTLA-4;
[0547] (4) the format comprises an ICOS ABD of H0.66_L0 is combined with the ABD 7G8_H.303_L1.34 that binds to LAG-3;
[0548] (5) the format comprises a scFv comprising the ABD 1G6_L1.194_H1.279 that binds to PD-1 and the Fab binds to GITR;
[0549] (6) the format comprises a scFv comprising the ABD 1G6_L1.194_H1.279 that binds to PD-1 and the Fab binds to OX40;
[0550] (7) the format comprises a scFv comprising the ABD 1G6_L1.194_H1.279 that binds to PD-1 and the Fab binds to ICOS;
[0551] 8) the format comprises a scFv comprising the ABD 1G6_L1.194_H1.279 that binds to PD-1 and the Fab binds to 4-1BB; and
[0552] (9) the format comprises the ABD of H0.66_L0 that binds to ICOS and an ABD that binds to PD-L1.

[0553] In some embodiments, the mAb-scFv format includes skew variants, pI variants, ablation variants and FcRn variants. Accordingly, some embodiments include bottle opener formats that comprise: a) a first monomer that comprises the skew variants S364K/E357Q, the ablation variants E233P/L234V/L235A/G236del/S267K, the FcRn variants M428L/N434S and a first variable heavy domain that, with the first variable light domain of the light chain, makes up an Fv that binds to a first checkpoint inhibitor, and a second variable heavy domain; b) a second monomer that comprises the skew variants L368D/K370S, the pI variants N208D/Q295E/N384D/Q418E/N421D, the ablation variants E233P/L234V/L235A/G236del/S267K, the FcRn variants M428L/N434S and a first variable heavy domain that, with the first variable light domain, makes up the Fv that binds to the first checkpoint inhibitor as outlined herein, and a second variable light chain, that together with the second variable heavy chain forms an Fv (ABD) that binds a second checkpoint inhibitors; and c) a light chain comprising a first variable light domain and a constant light domain.

[0554] In this format, specific ABDs that bind human ICOS include, but are not limited to, [ICOS]_H0L0 and [ICOS]H0.66_L0 and and those shown in FIG. 19, FIG. 20, FIG. 24, FIG. 68 and FIG. 77 as well as SEQ ID NO: 27869-28086, 28087-28269, 27193-27335, 28549-28556 and 28557-28665.

[0555] In this format, specific ABDs that bind human GITR include, but are not limited to, those in FIG. 18, FIG. 72 and FIG. 73 and those listed in SEQ ID NO:26282-26290.

[0556] In this format, specific ABDs that bind OX40 include, but are not limited to, FIG. 17, FIG. 72 and FIG. 73 and those listed in SEQ ID NO: 26272-26281.

[0557] In this format, specific ABDs that bind human 4-1BB include, but are not limited to, FIG. 16, FIG. 72 and FIG. 73 and SEQ ID NO: 26262-2671.

[0558] In this format, specific ABDs that bind human PD-L1 include, but are not limited to, FIG. 15, FIG. 73 and FIG. 78 and SEQ ID NO: 3961-4432.

[0559] L. Dual scFv Formats

[0560] The present invention also provides dual scFv formats as are known in the art and shown in FIG. 2B. In this embodiment, the heterodimeric bispecific antibody is made up of two scFv-Fc monomers (both in either (vh-scFv linker-vl-[optional domain linker]-CH2-CH3) format or (vl-scFv linker-vh-[optional domain linker]-CH2-CH3) format, or with one monomer in one orientation and the other in the other orientation.

[0561] In this case, all ABDs are in the scFv format, with any combination of ICOS and PD-1, ICOS and CTLA-4, ICOS and LAG-3, ICOS and TIM-3, ICOS and PD-L1, ICOS and BTLA, GITR and PD-1, GITR and CTLA-4, GITR and LAG-3, GITR and TIM-3, GITR and PD-L1, GITR and BTLA, OX40 and PD-1, OX40 and CTLA-4, OX40 and LAG-3, OX40 and TIM-3, OX40 and PD-L1, OX40 and BTLA, 4-1BB and PD-1, 4-1BB and CTLA-4, 4-1BB and LAG-3, 4-1BB and TIM-3, 4-1BB and PD-L1 and 4-1BB and BTLA being useful. The ABD sequences for these combinations can be as disclosed in the sequence listing or as shown in the Figures.

[0562] In addition, the Fe domains of the dual scFv format comprise skew variants (e.g. a set of amino acid substitutions as shown in FIG. 4, with particularly useful skew variants being selected from the group consisting of S364K/E357Q:L368D/K370S; L368D/K370S:S364K; L368E/K370S:S364K; T411T/E360E/Q362E:D401K; L368D/K370S:S364K/E357L, K370S:S364K/E357Q, T366S/L368A/Y407V:T366W and T366S/L368A/Y407V/Y349C:T366W/S354C), optionally ablation variants (including those shown in FIG. 6), optionally charged scFv linkers (including those shown in FIG. 8) and the heavy chain comprises pI variants (including those shown in FIG. 5).

[0563] In some embodiments, the dual scFv format includes skew variants, pI variants, and ablation variants. Accordingly, some embodiments include formats that comprise: a) a first monomer that comprises the skew variants S364K/E357Q, the ablation variants E233P/L234V/L235A/G236del/S267K, and a scFv that binds a first receptor (VH1-scFv linker-VL1-[optional domain linker]-CH2-CH3 or VL1-scFv linker-VH1-[optional domain linker]-CH2-CH3) and b) a first monomer that comprises the skew variants L368D/K370S, the ablation variants E233P/L234V/L235A/G236del/S267K, and a scFv that binds a first receptor (VH1-scFv linker-VL1-[optional domain linker]-CH2-CH3 or VL1-scFv linker-VH1-[optional domain linker]-CH2-CH3). pI variants can be as outlined herein, but most common will be charged scFv linkers of opposite charge for each monomer. FcRn variants, particularly 428L/434S, can optionally be included. In some particular embodiments with these variants in this format:
[0564] (1) the format comprises a ABD binds to ICOS that has the ABD of [ICOS]H0.66_L0;
[0565] (2) the format comprises an ICOS ABD of H0.66_L0 combined with the ABD comprising the ABD 1G6_L1.194_H1.279 that binds to PD-1;
[0566] (3) the format comprises an ICOS ABD of H0.66_L0 combined with the ABD H3.23_L0.129 that binds to CTLA-4;
[0567] (4) the format comprises an ICOS ABD of H0.66_L0 is combined with the ABD 7G8_H.303_L1.34 that binds to LAG-3;
[0568] (5) the format comprises the ABD 1G6_L1.194_H1.279 that binds to PD-1 and an Fv binds to GITR;
[0569] (6) the format comprises the ABD 1G6_L1.194_H1.279 that binds to PD-1 and the Fv binds to OX40;
[0570] (7) the format comprises the ABD 1G6_L1.194_H1.279 that binds to PD-1 and the ABD binds to ICOS;
[0571] 8) the format comprises the ABD 1G6_L1.194_H1.279 that binds to PD-1 and an ABD binds to 4-1BB; and
[0572] (9) the format comprises the ABD of H0.66_L0 that binds to ICOS and an ABD that binds to PD-L1.

[0573] In this format, specific ABDs that bind human ICOS include, but are not limited to, [ICOS]_H0L0 and [ICOS]H0.66_L0 and and those shown in FIG. 19, FIG. 20, FIG. 24, FIG. 68 and FIG. 77 as well as SEQ ID NO: 27869-28086, 28087-28269, 27193-27335, 28549-28556 and 28557-28665.

[0574] In this format, specific ABDs that bind human GITR include, but are not limited to, those in FIG. 18, FIG. 72 and FIG. 73 and those listed in SEQ ID NO:26282-26290.

[0575] In this format, specific ABDs that bind OX40 include, but are not limited to, FIG. 17, FIG. 72 and FIG. 73 and those listed in SEQ ID NO: 26272-26281.

[0576] In this format, specific ABDs that bind human 4-1BB include, but are not limited to, FIG. 16, FIG. 72 and FIG. 73 and SEQ ID NO: 26262-2671.

[0577] In this format, specific ABDs that bind human PD-L1 include, but are not limited to, FIG. 15, FIG. 73 and FIG. 78 and SEQ ID NO: 3961-4432.

[0578] M. Non-Heterodimeric Bispecific Antibodies

[0579] As will be appreciated by those in the art, the Fv sequences outlined herein can also be used in both monospecific antibodies (e.g. “traditional monoclonal antibodies”) or non-heterodimeric bispecific formats (see FIGS. 2J, K and L).

[0580] In this format, specific ABDs that bind human ICOS include, but are not limited to, [ICOS]_H0L0 and [ICOS]H0.66_L0 and and those shown in FIG. 19, FIG. 20, FIG. 24, FIG. 68 and FIG. 77 as well as SEQ ID NO: 27869-28086, 28087-28269, 27193-27335, 28549-28556 and 28557-28665.

[0581] In this format, specific ABDs that bind human GITR include, but are not limited to, those in FIG. 18, FIG. 72 and FIG. 73 and those listed in SEQ ID NO:26282-26290.

[0582] In this format, specific ABDs that bind OX40 include, but are not limited to, FIG. 17, FIG. 72 and FIG. 73 and those listed in SEQ ID NO: 26272-26281.

[0583] In this format, specific ABDs that bind human 4-1BB include, but are not limited to, FIG. 16, FIG. 72 and FIG. 73 and SEQ ID NO: 26262-2671.

[0584] In this format, specific ABDs that bind human PD-L1 include, but are not limited to, FIG. 15, FIG. 73 and FIG. 78 and SEQ ID NO: 3961-4432.

[0585] Suitable non-heterodimeric bispecific formats are known in the art, and include a number of different formats as generally depicted in Spiess et al., Molecular Immunology (67):95-106 (2015) and Kontermann, mAbs 4:2, 182-197 (2012), both of which are expressly incorporated by reference and in particular for the figures, legends and citations to the formats therein.

[0586] N. DVD-Ig Format

[0587] In some embodiments, the bispecific antibody is in a “Dual Variable Domain-Ig” or “DVD-Ig™” format (see FIG. 2L) such as is generally described in U.S. Pat. No. 7,612,181, hereby expressly incorporated by reference in its entirety, and in particular for the Figures and Legends therein. In the DVD-Ig format, the antibody is tetravalent and bispecific, and comprises 4 chains: two homodimeric heavy chains and two identical light chains. The heavy chains each have a VH1-(optional linker)-VH2-CH1-hinge-CH2-CH3 structure and the two light chains each have a VL1-optional linker-VL2-CL structure, with VH1 and VL1 forming a first ABD and the VH2 and VL2 forming a second ABD, where the first and second ABDs bind a costimulatory and a checkpoint receptor. In this embodiment, suitable combinations include ICOS and PD-1, ICOS and CTLA-4, ICOS and LAG-3, ICOS and TIM-3, ICOS and PD-L1, ICOS and BTLA, GITR and PD-1, GITR and CTLA-4, GITR and LAG-3, GITR and TIM-3, GITR and PD-L1, GITR and BTLA, OX40 and PD-1, OX40 and CTLA-4, OX40 and LAG-3, OX40 and TIM-3, OX40 and PD-L1, OX40 and BTLA, 4-1BB and PD-1, 4-1BB and CTLA-4, 4-1BB and LAG-3, 4-1BB and TIM-3, 4-1BB and PD-L1 and 4-1BB and BTLA.

[0588] The DVD-Ig™ and Central-scFv2 are two formats that are bispecific and tetravalent, and thus do not bind a costimulatory receptor in a monovalent fashion. Exemplary DVD-Ig™ constructs are shown in FIG. 61.

[0589] In some particular embodiments with these variants in this format:
[0590] (1) the format comprises the ABD of [ICOS] H0.66_L0;
[0591] (2) the format comprises an ICOS ABD of H0.66_L0 combined with the ABD comprising the ABD 1G6_L1.194_H1.279 that binds to PD-1;
[0592] (3) the format comprises an ICOS ABD of H0.66_L0 combined with the ABD H3.23_L0.129 that binds to CTLA-4;
[0593] (4) the format comprises an ICOS ABD of H0.66_L0 is combined with the ABD 7G8_H.303_L1.34 that binds to LAG-3;
[0594] (5) the format comprises the ABD 1G6_L1.194_H1.279 that binds to PD-1 and an ABD that binds to GITR;
[0595] (6) the format comprises the ABD 1G6_L1.194_H1.279 that binds to PD-1 and and ABD that binds to OX40;
[0596] (7) the format comprises the ABD 1G6_L1.194_H1.279 that binds to PD-1 and an ABD that binds to ICOS;
[0597] 8) the format comprises the ABD 1G6_L1.194_H1.279 that binds to PD-1 and an ABD that binds to 4-1BB; and
[0598] (9) the format comprises the ABD of H0.66_L0 that binds to ICOS and an ABD that binds to PD-L1.

[0599] In this format, specific ABDs that bind human ICOS include, but are not limited to, [ICOS]_H0L0 and [ICOS]H0.66_L0 and and those shown in FIG. 19, FIG. 20, FIG. 24, FIG. 68 and FIG. 77 as well as SEQ ID NO: 27869-28086, 28087-28269, 27193-27335, 28549-28556 and 28557-28665.

[0600] In this format, specific ABDs that bind human GITR include, but are not limited to, those in FIG. 18, FIG. 72 and FIG. 73 and those listed in SEQ ID NO:26282-26290.

[0601] In this format, specific ABDs that bind OX40 include, but are not limited to, FIG. 17, FIG. 72 and FIG. 73 and those listed in SEQ ID NO: 26272-26281.

[0602] In this format, specific ABDs that bind human 4-1BB include, but are not limited to, FIG. 16, FIG. 72 and FIG. 73 and SEQ ID NO: 26262-2671.

[0603] In this format, specific ABDs that bind human PD-L1 include, but are not limited to, FIG. 15, FIG. 73 and FIG. 78 and SEQ ID NO: 3961-4432.

[0604] O. Trident Format

[0605] In some embodiments, the bispecific antibodies of the invention are in the “Trident” format as generally described in WO2015/184203, hereby expressly incorporated by reference in its entirety and in particular for the Figures, Legends, definitions and sequences of “Heterodimer-Promoting Domains” or “HPDs”, including “K-coil” and “E-coil” sequences. Tridents rely on using two different HPDs that associate to form a heterodimeric structure as a component of the structure, see FIG. 2M. In this embodiment, the Trident format include a “traditional” heavy and light chain (e.g. VH1-CH1-hinge-CH2-CH3 and VL1-CL), a third chain comprising a first “diabody-type binding domain” or “DART®”, VH2-(linker)-VL3-HPD1 and a fourth chain comprising a second DART®, VH3-(linker)-(linker)-VL2-HPD2. The VH1 and VL1 form a first ABD, the VH2 and VL2 form a second ABD, and the VH3 and VL3 form a third ABD. IN some cases, as is shown in FIG. 2M, the second and third ABDs bind the same antigen, in this instance generally the checkpoint receptor, e.g. bivalently, with the first ABD binding a costimulatory receptor monovalently. In this embodiment, suitable combinations include ICOS and PD-1, ICOS and CTLA-4, ICOS and LAG-3, ICOS and TIM-3, ICOS and PD-L1, ICOS and BTLA, GITR and PD-1, GITR and CTLA-4, GITR and LAG-3, GITR and TIM-3, GITR and PD-L1, GITR and BTLA, OX40 and PD-1, OX40 and CTLA-4, OX40 and LAG-3, OX40 and TIM-3, OX40 and PD-L1, OX40 and BTLA, 4-1BB and PD-1, 4-1BB and CTLA-4, 4-1BB and LAG-3, 4-1BB and TIM-3, 4-1BB and PD-L1 and 4-1BB and BTLA.

[0606] In some particular embodiments with these variants in this format:
[0607] (1) the format comprises a Fab ABD binds to ICOS that has the ABD of [ICOS] H0.66_L0;
[0608] (2) the format comprises an ICOS ABD of H0.66_L0 combined with the scFv ABD comprising the ABD 1G6_L1.194_H1.279 that binds to PD-1;
[0609] (3) the format comprises an ICOS ABD of H0.66_L0 combined with the scFv comprising the ABD H3.23_L0.129 that binds to CTLA-4;
[0610] (4) the format comprises an ICOS ABD of H0.66_L0 is combined with the ABD 7G8_H.303_L1.34 that binds to LAG-3;
[0611] (5) the format comprises a scFv comprising the ABD 1G6_L1.194_H1.279 that binds to PD-1 and the Fab binds to GITR;
[0612] (6) the format comprises a scFv comprising the ABD 1G6_L1.194_H1.279 that binds to PD-1 and the Fab binds to OX40;
[0613] (7) the format comprises a scFv comprising the ABD 1G6_L1.194_H1.279 that binds to PD-1 and the Fab binds to ICOS;
[0614] 8) the format comprises a scFv comprising the ABD 1G6_L1.194_H1.279 that binds to PD-1 and the Fab binds to 4-1BB; and
[0615] (9) the format comprises the ABD of H0.66_L0 that binds to ICOS and an ABD that binds to PD-L1.

[0616] In this format, specific ABDs that bind human ICOS include, but are not limited to, [ICOS]_H0L0 and [ICOS]H0.66_L0 and and those shown in FIG. 19, FIG. 20, FIG. 24, FIG. 68 and FIG. 77 as well as SEQ ID NO: 27869-28086, 28087-28269, 27193-27335, 28549-28556 and 28557-28665.

[0617] In this format, specific ABDs that bind human GITR include, but are not limited to, those in FIG. 18, FIG. 72 and FIG. 73 and those listed in SEQ ID NO:26282-26290.

[0618] In this format, specific ABDs that bind OX40 include, but are not limited to, FIG. 17, FIG. 72 and FIG. 73 and those listed in SEQ ID NO: 26272-26281.

[0619] In this format, specific ABDs that bind human 4-1BB include, but are not limited to, FIG. 16, FIG. 72 and FIG. 73 and SEQ ID NO: 26262-2671.

[0620] In this format, specific ABDs that bind human PD-L1 include, but are not limited to, FIG. 15, FIG. 73 and FIG. 78 and SEQ ID NO: 3961-4432.

[0621] P. Monospecific, Monoclonal Antibodies

[0622] As will be appreciated by those in the art, the novel Fv sequences outlined herein can also be used in both monospecific antibodies (e.g. “traditional monoclonal antibodies”) or non-heterodimeric bispecific formats. Accordingly, the present invention provides monoclonal (monospecific) antibodies comprising the 6 CDRs and/or the vh and vl sequences from the figures, generally with IgG1, IgG2, IgG3 or IgG4 constant regions, with IgG1, IgG2 and IgG4 (including IgG4 constant regions comprising a S228P amino acid substitution) finding particular use in some embodiments. That is, any sequence herein with a “H_L” designation can be linked to the constant region of a human IgG1 antibody.

### VIII. Antigen Binding Domains (ABDs) to Target Antigens

[0623] The bispecific antibodies of the invention have two different antigen binding domains (ABDs) that bind to two different target receptor antigens (“target pairs”), in either bivalent, bispecific formats or trivalent, bispecific formats as generally shown in FIG. 2.

[0624] The bispecific antibodies bind to a first target antigen comprising a checkpoint receptor and a second target antigen comprising a costimulatory receptor. Suitable checkpoint receptors as outlined herein include PD-1, PD-L1, LAG-3, TIM-3, CTLA-4, BTLA and TIGIT. Suitable costimulatory receptors as outlined herein include ICOS, GITR, OX40 and 4-1BB. As outlined

[0625] Suitable target checkpoint antigens include human (and sometimes cyno) PD-1, CTLA-4, TIM-3, LAG-3, TIGIT and BTLA (sequences in the sequence listing). Accordingly, suitable bispecific antibodies bind ICOS and PD-1, ICOS and CTLA-4, ICOS and LAG-3, ICOS and TIM-3, ICOS and PD-L1, ICOS and BTLA, ICOS and TIGIT, GITR and TIGIT, GITR and PD-1, GITR and CTLA-4, GITR and LAG-3, GITR and TIM-3, GITR and PD-L1, GITR and BTLA, OX40 and PD-1, OX40 and TIGIT, OX40 and CTLA-4, IC OX40 OS and LAG-3, OX40 and TIM-3, OX40 and PD-L1, OX40 and BTLA, 4-1BB and PD-1, 4-1BB and CTLA-4, 4-1BB and LAG-3, 4-1BB and TIM-3, 4-1BB and PD-L1, TIGIT and 4-1BB and 4-1BB and BTLA.

[0626] Note that generally these bispecific antibodies are named “anti-PD-1×anti-CTLA-4”, or generally simplistically or for ease (and thus interchangeably) as “PD-1×CTLA-4”, etc. for each pair. Note that unless specified herein, the order of the antigen list in the name does not confer structure; that is a PD-1×CTLA-4 bottle opener antibody can have the scFv bind to PD-1 or CTLA-4, although in some cases, the order specifies structure as indicated.

[0627] As is more fully outlined herein, these combinations of ABDs can be in a variety of formats, as outlined below, generally in combinations where one ABD is in a Fab format and the other is in an scFv format. As discussed herein and shown in FIG. 2, some formats use a single Fab and a single scFv (A, C and D), and some formats use two Fabs and a single scFv (E, F, G, H and I).

[0628] A. Antigen Binding Domains

[0629] As discussed herein, the bispecific checkpoint heterodimeric antibodies of the invention include two antigen binding domains (ABDs), each of which bind to a different checkpoint protein. As outlined herein, these heterodimeric antibodies can be bispecific and bivalent (each antigen is bound by a single ABD, for example, in the format depicted in FIG. 2A), bispecific and trivalent (one antigen is bound by a single ABD and the other is bound by two ABDs, for example as depicted in FIG. 2F, G, H, I or M), or bispecific and tetravalent (both antigens are bound by two ABDs, for example as depicted in FIGS. 2J and L).

[0630] In addition, in general, one of the ABDs comprises a scFv as outlined herein, in an orientation from N- to C-terminus of vh-scFv linker-vl or vl-scFv linker-vh. One or both of the other ABDs, according to the format, generally is a Fab, comprising a vh domain on one protein chain (generally as a component of a heavy chain) and a vl on another protein chain (generally as a component of a light chain). Note that the “trident” format uses DART®s, which are similar to scFvs except the orientation is different and in general the linkers can be slightly longer.

[0631] The invention provides a number of ABDs that bind to a number of different receptor proteins, as outlined below. As will be appreciated by those in the art, any set of 6 CDRs or vh and vl domains can be in the scFv format or in the Fab format, which is then added to the heavy and light constant domains, where the heavy constant domains comprise variants (including within the CH1 domain as well as the Fc domain). The scFv sequences contained in the sequence listing utilize a particular charged linker, but as outlined herein, uncharged or other charged linkers can be used, including those depicted in FIG. 8.

[0632] In addition, as discussed above, the numbering used in the Sequence Listing for the identification of the CDRs is Kabat, however, different numbering can be used, which will change the amino acid sequences of the CDRs as shown in Table 1.

[0633] For all of the variable heavy and light domains listed herein, further variants can be made. As outlined herein, in some embodiments the set of 6 CDRs can have from 0, 1, 2, 3, 4 or 5 amino acid modifications (with amino acid substitutions finding particular use), as well as changes in the framework regions of the variable heavy and light domains, as long as the frameworks (excluding the CDRs) retain at least about 80, 85 or 90% identity to a human germline sequence selected from those listed in FIG. 1 of U.S. Pat. No. 7,657,380, which Figure and Legend is incorporated by reference in its entirety herein. Thus, for example, the identical CDRs as described herein can be combined with different framework sequences from human germline sequences, as long as the framework regions retain at least 80, 85 or 90% identity to a human germline sequence selected from those listed in FIG. 1 of U.S. Pat. No. 7,657,380. Alternatively, the CDRs can have amino acid modifications (e.g. from 1, 2, 3, 4 or 5 amino acid modifications in the set of CDRs (that is, the CDRs can be modified as long as the total number of changes in the set of 6 CDRs is less than 6 amino acid modifications, with any combination of CDRs being changed; e.g. there may be one change in vlCDR1, two in vhCDR2, none in vhCDR3, etc.)), as well as having framework region changes, as long as the framework regions retain at least 80, 85 or 90% identity to a human germline sequence selected from those listed in FIG. 1 of U.S. Pat. No. 7,657,380.

[0634] B. PD-1 Antigen Binding Domains

[0635] In some embodiments, one of the ABDs binds PD-1. Suitable sets of 6 CDRs and/or vh and vl domains, as well as scFv sequences, are depicted in FIG. 3, FIG. 10, FIG. 11, FIG. 72, FIG. 73, FIG. 74, FIG. 76 and SEQ ID NO:1-2392, 3125-3144, 4697-7594 and 4697-21810, and include those sequences in the sequence listing with the identifiers 1G6_H1.279_L1.194; 1G6_H1.280_L1.224; 1G6_L1.194_H1.279; 1G6_L1.210_H1.288; and 2E9_H1L1.

[0636] As will be appreciated by those in the art, suitable anti-PD-1 ABDs can comprise a set of 6 CDRs as depicted in these sequences and Figures, either as they are underlined or, in the case where a different numbering scheme is used as described herein and as shown in Table 1, as the CDRs that are identified using other alignments within the vh and vl sequences of these sequences. Suitable ABDs can also include the entire vh and vl sequences as depicted in these sequences and Figures, used as scFvs or as Fabs. In many of the embodiments herein that contain an Fv to PD-1, it is the scFv monomer that binds PD-1. As discussed herein, the other of the target pair when PD-1 is one of the antigens is selected from ICOS (suitable sequences are shown in FIG. 19, FIG. 20, FIG. 24, FIG. 68 and FIG. 77 as well as SEQ ID NO: 27869-28086, 28087-28269, 27193-27335, 28549-28556 and 28557-28665 (which can be scFv sequences, CDR sequence sets or vh and vl sequences)), GITR, OX40 and 4-1BB.

[0637] Particularly useful ABDs that bind human PD-1 include, but are not limited to, 1G6_H1.279_L1.194, 1G6_H1.280_L1.224; 1G6_L1.194_H1.279, 1G6_L1.210_H1.288 and 2E9_H1L1.

[0638] Additionally useful vh and vl sequences that bind human PD-1 are shown in FIG. 76.

[0639] In addition to the parental CDR sets disclosed in the sequence listing that form an ABD to PD-1, the invention provides variant CDR sets. In one embodiment, a set of 6 CDRs can have 1, 2, 3, 4 or 5 amino acid changes from the parental CDRs, as long as the ABD is still able to bind to the target antigen, as measured by at least one of a Biacore, surface plasmon resonance (SPR) and/or BLI (biolayer interferometry, e.g. Octet assay) assay, with the latter finding particular use in many embodiments.

[0640] In addition to the parental variable heavy and variable light domains disclosed herein that form an ABD to PD-1, the invention provides variant vh and vl domains. In one embodiment, the variant vh and vl domains each can have from 1, 2, 3, 4, 5, 6, 7, 8, 9 or 10 amino acid changes from the parental vh and vl domain, as long as the ABD is still able to bind to the target antigen, as measured at least one of a Biacore, surface plasmon resonance (SPR) and/or BLI (biolayer interferometry, e.g. Octet assay) assay, with the latter finding particular use in many embodiments. In another embodiment, the variant vh and vl are at least 90, 95, 97, 98 or 99% identical to the respective parental vh or vl, as long as the ABD is still able to bind to the target antigen, as measured by at least one of a Biacore, surface plasmon resonance (SPR) and/or BLI (biolayer interferometry, e.g. Octet assay) assay, with the latter finding particular use in many embodiments.

[0641] Specific preferred embodiments include the 1G6_L1.194_H1.279 anti-PD-1 Fv, in a scFv format, included within any of the bottle opener format backbones of FIG. 9.

[0642] Specific preferred embodiments include the 1G6_L1.194_H1.279 anti-PD-1 Fv, in a scFv format, included within any of the format backbones of FIGS. 55A-55D.

[0643] Specific preferred embodiments include the 1G6_L1.194_H1.279 anti-PD-1 Fv, in a scFv format, included within any of the mAb-scFv format backbones of FIG. 75.

[0644] Other embodiments utilize any of the anti-PD-1 vh and vl domain pairs (either as scFvs or Fabs) as shown in FIG. 76 in any format shown in FIG. 2.

[0645] C. CTLA-4 Antigen Binding Domains

[0646] In some embodiments, one of the ABDs binds CTLA-4. Suitable sets of 6 CDRs and/or vh and vl domains, as well as scFv sequences, are depicted in SEQ ID NOs: 2393-2414 and 3737-3816, as well as sequences of particular interest in some embodiments are shown in FIG. 12 and FIG. 79 and also include those sequences in the sequence listing with the identifiers [CTLA-4]_H0.25_L0; [CTLA-4]_H0.26_L0; [CTLA-4]_H0.27_L0; [CTLA-4]_H0.29_L0; [CTLA-4]_H0.38_L0; [CTLA-4]_H0.39_L0; 0[CTLA-4]_H0.40_L0; [CTLA-4]_H0.70_L0; [CTLA-4]_H0_L0.22; [CTLA-4]_H2_L0; [CTLA-4]_H3.21_L0.124; [CTLA-4]_H3.21_L0.129; [CTLA-4]_H3.21_L0.132; [CTLA-4]_H3.23_L0.124; [CTLA-4]_H3.23_L0.129; [CTLA-4]_H3.23_L0.132; [CTLA-4]_H3.25_L0.124; [CTLA-4]_H3.25_L0.129; [CTLA-4]_H3.25_L0.132; [CTLA-4]_H3.4_L0.118; [CTLA-4]_H3.4_L0.119; [CTLA-4]_H3.4_L0.12; [CTLA-4]_H3.4_L0.121; [CTLA-4]_H3.4_L0.122; [CTLA-4]_H3.4_L0.123; [CTLA-4]_H3.4_L0.124; [CTLA-4]_H3.4_L0.125; [CTLA-4]_H3.4_L0.126; [CTLA-4]_H3.4_L0.127; [CTLA-4]_H3.4_L0.128; [CTLA-4]_H3.4_L0.129; [CTLA-4]_H3.4_L0.130; [CTLA-4]_H3.4_L0.131; [CTLA-4]_H3.4_L0.132; [CTLA-4]_H3.5_L2.1; [CTLA-4]_H3.5_L2.2; [CTLA-4]_H3.5_L2.3; [CTLA-4]_H3_L0; [CTLA-4]_H3_L0.22; [CTLA-4]_H3_L0.44; [CTLA-4]_H3_L0.67; and [CTLA-4]_H3_L0.74.

[0647] As will be appreciated by those in the art, suitable anti-CTLA-4 ABDs can comprise a set of 6 CDRs as depicted in these sequences and Figures, either as they are underlined or, in the case where a different numbering scheme is used as described herein and as shown in Table 1, as the CDRs that are identified using other alignments within the vh and vl sequences outlined herein. Suitable ABDs can also include the entire vh and vl sequences as depicted in these sequences and Figures, used as scFvs or as Fabs. In many of the embodiments herein that contain an Fv to CTLA-4, it is the scFv monomer that binds CTLA-4.

[0648] As discussed herein, the other of the target pair when CTLA-4 is one of the antigens is selected from ICOS (suitable sequences are shown in FIG. 19, FIG. 20, FIG. 24, FIG. 68 and FIG. 77 as well as SEQ ID NO: 27869-28086, 28087-28269, 27193-27335, 28549-28556 and 28557-28665, and those with the identifiers [ICOS]_H0.66_L0 and [ICOS]_H0L0), GITR, OX40 and 4-1BB.

[0649] In addition to the parental CDR sets disclosed in the sequence listing that form an ABD to CTLA-4, the invention provides variant CDR sets. In one embodiment, a set of 6 CDRs can have 1, 2, 3, 4 or 5 amino acid changes from the parental CDRs, as long as the ABD is still able to bind to the target antigen, as measured by at least one of a Biacore, surface plasmon resonance (SPR) and/or BLI (biolayer interferometry, e.g. Octet assay) assay, with the latter finding particular use in many embodiments.

[0650] In addition to the parental variable heavy and variable light domains disclosed herein that form an ABD to CTLA-4, the invention provides variant vh and vl domains. In one embodiment, the variant vh and vl domains each can have from 1, 2, 3, 4, 5, 6, 7, 8, 9 or 10 amino acid changes from the parental vh and vl domain, as long as the ABD is still able to bind to the target antigen, as measured by at least one of a Biacore, surface plasmon resonance (SPR) and/or BLI (biolayer interferometry, e.g. Octet assay) assay, with the latter finding particular use in many embodiments. In another embodiment, the variant vh and vl are at least 90, 95, 97, 98 or 99% identical to the respective parental vh or vl, as long as the ABD is still able to bind to the target antigen, as measured by at least one of a Biacore, surface plasmon resonance (SPR) and/or BLI (biolayer interferometry, e.g. Octet assay) assay, with the latter finding particular use in many embodiments.

[0651] D. TIM-3 Antigen Binding Domains

[0652] In some embodiments, one of the ABDs binds TIM-3. Suitable sets of 6 CDRs and/or vh and vl domains, as well as scFv sequences, are depicted in FIG. 14 and FIG. 81 and SEQ ID NO: 3345-3704, 4585-4696. ABD sequences of particular interest in some embodiments include those sequences in the sequence listing with the identifiers 1D10_H0L0; 1D12_H0L0; 3H3_H1_L2.1; 6C8_H0L0; 6D9_H0_1D12_L0; 7A9_H0L0; 7B11_H0L0; 7B11var_H0L0; and 7C2_H0L0.

[0653] As will be appreciated by those in the art, suitable anti-TIM-3 ABDs can comprise a set of 6 CDRs as depicted in these sequences and Figures, either as they are underlined or, in the case where a different numbering scheme is used as described herein and as shown in Table 1, as the CDRs that are identified using other alignments within the vh and vl sequences of those depicted herein. Suitable ABDs can also include the entire vh and vl sequences as depicted in these sequences and Figures, used as scFvs or as Fabs. In many of the embodiments herein that contain an Fv to TIM-3, it is the Fab monomer that binds TIM-3. As discussed herein, the other of the target pair when TIM-3 is one of the antigens is selected ICOS (suitable sequences are shown in FIG. 19, FIG. 20, FIG. 24, FIG. 68 and FIG. 77 as well as SEQ ID NO: 27869-28086, 28087-28269, 27193-27335, 28549-28556 and 28557-28665, and those with the identifiers [ICOS]_H0.66_L0 and [ICOS]_H0L0), GITR, OX40 and 4-1BB.

[0654] In addition to the parental CDR sets disclosed in the sequence listing that form an ABD to TIM-3, the invention provides variant CDR sets. In one embodiment, a set of 6 CDRs can have 1, 2, 3, 4 or 5 amino acid changes from the parental CDRs, as long as the ABD is still able to bind to the target antigen, as measured by at least one of a Biacore, surface plasmon resonance (SPR) and/or BLI (biolayer interferometry, e.g. Octet assay) assay, with the latter finding particular use in many embodiments.

[0655] In addition to the parental variable heavy and variable light domains disclosed herein that form an ABD to TIM-3, the invention provides variant vh and vl domains. In one embodiment, the variant vh and vl domains each can have from 1, 2, 3, 4, 5, 6, 7, 8, 9 or 10 amino acid changes from the parental vh and vl domain, as long as the ABD is still able to bind to the target antigen, as measured at least one of a Biacore, surface plasmon resonance (SPR) and/or BLI (biolayer interferometry, e.g. Octet assay) assay, with the latter finding particular use in many embodiments. In another embodiment, the variant vh and vl are at least 90, 95, 97, 98 or 99% identical to the respective parental vh or vl, as long as the ABD is still able to bind to the target antigen, as measured by at least one of a Biacore, surface plasmon resonance (SPR) and/or BLI (biolayer interferometry, e.g. Octet assay) assay, with the latter finding particular use in many embodiments.

[0656] LAG-3 Antigen Binding Domains

[0657] In some embodiments, one of the ABDs binds LAG-3. Suitable sets of 6 CDRs and/or vh and vl domains, as well as scFv sequences, are depicted in FIG. 13, FIG. 80 and in SEQ ID NO: 2415-2604, 3817-3960 also include those sequences in the sequence listing with the identifiers 2A11_H0L0; 2A11_H1.125_L2.113; 2A11_H1.144_L2.142; 2A11_H1_L2.122; 2A11_H1_L2.123; 2A11_H1_L2.124; 2A11_H1_L2.25; 2A11_H1_L2.47; 2A11_H1_L2.50; 2A11_H1_L2.91; 2A11_H1_L2.93; 2A11_H1_L2.97; 2A11_H1L1; 2A11_H1L2; 2A11_H2L2; 2A11_H3L1; 2A11_H3L2; 2A11_H4L1; 2A11_H4L2; 7G8_H0L0; 7G8_H1L1; 7G8_H3.18_L1.11; 7G8_H3.23_L1.11; 7G8_H3.28_L1; 7G8_H3.28_L1.11; 7G8_H3.28_L1.13; 7G8_H3.30_L1.34; 7G8_H3.30_L1.34; and 7G8_H3L1.

[0658] As will be appreciated by those in the art, suitable anti-LAG-3 ABDs can comprise a set of 6 CDRs as depicted in these sequences and Figures, either as they are underlined or, in the case where a different numbering scheme is used as described herein and as shown in Table 1, as the CDRs that are identified using other alignments within the vh and vl sequences of the sequences herein. Suitable ABDs can also include the entire vh and vl sequences as depicted in these sequences and Figures, used as scFvs or as Fabs. In many of the embodiments herein that contain an Fv to LAG-3, it is the Fab monomer that binds LAG-3. As discussed herein, the other of the target pair when LAG-3 is is one of the antigens is selected from ICOS (suitable sequences are shown in FIG. 19, FIG. 20, FIG. 24, FIG. 68 and FIG. 77 as well as SEQ ID NO: 27869-28086, 28087-28269, 27193-27335, 28549-28556 and 28557-28665, and those with the identifiers [ICOS]_H0.66_L0 and [ICOS]_H0L0), GITR, OX40 and 4-1BB.

[0659] In addition to the parental CDR sets disclosed in the sequence listing that form an ABD to LAG-3, the invention provides variant CDR sets. In one embodiment, a set of 6 CDRs can have 1, 2, 3, 4 or 5 amino acid changes from the parental CDRs, as long as the ABD is still able to bind to the target antigen, as measured by at least one of a Biacore, surface plasmon resonance (SPR) and/or BLI (biolayer interferometry, e.g. Octet assay) assay, with the latter finding particular use in many embodiments.

[0660] In addition to the parental variable heavy and variable light domains disclosed herein that form an ABD to LAG-3, the invention provides variant vh and vl domains. In one embodiment, the variant vh and vl domains each can have from 1, 2, 3, 4, 5, 6, 7, 8, 9 or 10 amino acid changes from the parental vh and vl domain, as long as the ABD is still able to bind to the target antigen, as measured by at least one of a Biacore, surface plasmon resonance (SPR) and/or BLI (biolayer interferometry, e.g. Octet assay) assay, with the latter finding particular use in many embodiments. In another embodiment, the variant vh and vl are at least 90, 95, 97, 98 or 99% identical to the respective parental vh or vl, as long as the ABD is still able to bind to the target antigen, as measured by at least one of a Biacore, surface plasmon resonance (SPR) and/or BLI (biolayer interferometry, e.g. Octet assay) assay, with the latter finding particular use in many embodiments.

[0661] E. BTLA Antigen Binding Domains

[0662] In some embodiments, one of the ABDs binds BTLA. Suitable sets of 6 CDRs and/or vh and vl domains, as well as scFv sequences, are depicted in FIG. 82, FIG. 84 and SEQ ID NO:3705-3736, and also include those sequences in the sequence listing with the identifiers 9C6_H0L0; 9C6_H1.1_L1; and 9C6_H.11_L1.

[0663] As will be appreciated by those in the art, suitable anti-BTLA ABDs can comprise a set of 6 CDRs as depicted in these sequences and Figures, either as they are underlined or, in the case where a different numbering scheme is used as described herein and as shown in Table 1, as the CDRs that are identified using other alignments within the vh and vl sequences depicted herein. Suitable ABDs can also include the entire vh and vl sequences as depicted in these sequences and Figures, used as scFvs or as Fabs. In many of the embodiments herein that contain an Fv to BTLA, it is the Fab monomer that binds BTLA. As discussed herein, the other of the target pair when BTLA is is one of the antigens is selected from ICOS (suitable sequences are shown in FIG. 19, FIG. 20, FIG. 24, FIG. 68 and FIG. 77 as well as SEQ ID NO: 27869-28086, 28087-28269, 27193-27335, 28549-28556 and 28557-28665, and those with the identifiers [ICOS]_H0.66_L0 and [ICOS]_H0L0), GITR, OX40 and 4-1BB.

[0664] In addition to the parental CDR sets disclosed in the sequence listing that form an ABD to BTLA, the invention provides variant CDR sets. In one embodiment, a set of 6 CDRs can have 1, 2, 3, 4 or 5 amino acid changes from the parental CDRs, as long as the ABD is still able to bind to the target antigen, as measured at least one of a Biacore, surface plasmon resonance (SPR) and/or BLI (biolayer interferometry, e.g. Octet assay) assay, with the latter finding particular use in many embodiments.

[0665] In addition to the parental variable heavy and variable light domains disclosed herein that form an ABD to BTLA, the invention provides variant vh and vl domains. In one embodiment, the variant vh and vl domains each can have from 1, 2, 3, 4, 5, 6, 7, 8, 9 or 10 amino acid changes from the parental vh and vl domain, as long as the ABD is still able to bind to the target antigen, as measured by at least one of a Biacore, surface plasmon resonance (SPR) and/or BLI (biolayer interferometry, e.g. Octet assay) assay, with the latter finding particular use in many embodiments. In another embodiment, the variant vh and vl are at least 90, 95, 97, 98 or 99% identical to the respective parental vh or vl, as long as the ABD is still able to bind to the target antigen, as measured by at least one of a Biacore, surface plasmon resonance (SPR) and/or BLI (biolayer interferometry, e.g. Octet assay) assay, with the latter finding particular use in many embodiments.

[0666] F. TIGIT Antigen Binding Domains

[0667] In some embodiments, one of the ABDs binds TIGIT. Suitable sets of 6 CDRs and/or vh and vl domains, as well as scFv sequences, are depicted in FIG. 8? And in SEQ ID NO:4433-4585.

[0668] As will be appreciated by those in the art, suitable anti-TIGIT ABDs can comprise a set of 6 CDRs as depicted in these sequences and Figures, either as they are underlined or, in the case where a different numbering scheme is used as described herein and as shown in Table 1, as the CDRs that are identified using other alignments within the vh and vl sequences depicted herein. Suitable ABDs can also include the entire vh and vl sequences as depicted in these sequences and Figures, used as scFvs or as Fabs. In many of the embodiments herein that contain an Fv to TIGIT, it is the Fab monomer that binds TIGIT. As discussed herein, the other of the target pair when TIGIT is is one of the antigens is selected ICOS (suitable sequences are shown in FIG. 19, FIG. 20, FIG. 24, FIG. 68 and FIG. 77 as well as SEQ ID NO: 27869-28086, 28087-28269, 27193-27335, 28549-28556 and 28557-28665, and those with the identifiers [ICOS]_H0.66_L0 and [ICOS]_H0L0), GITR, OX40 and 4-1BB.

[0669] G. PD-L1 Antigen Binding Domains

[0670] In some embodiments, one of the ABDs binds PD-L1. Suitable sets of 6 CDRs and/or vh and vl domains, as well as scFv sequences, are depicted in FIG. 15, FIG. 73 and FIG. 78, and in SEQ ID NO:3961-4432.

[0671] As will be appreciated by those in the art, suitable anti-TIGIT ABDs can comprise a set of 6 CDRs as depicted in these sequences and Figures, either as they are underlined or, in the case where a different numbering scheme is used as described herein and as shown in Table 1, as the CDRs that are identified using other alignments within the vh and vl sequences depicted herein. Suitable ABDs can also include the entire vh and vl sequences as depicted in these sequences and Figures, used as scFvs or as Fabs. In many of the embodiments herein that contain an Fv to TIGIT, it is the Fab monomer that binds TIGIT. As discussed herein, the other of the target pair when TIGIT is is one of the antigens is selected ICOS (suitable sequences are shown in FIG. 19, FIG. 20, FIG. 24, FIG. 68 and FIG. 77 as well as SEQ ID NO: 27869-28086, 28087-28269, 27193-27335, 28549-28556 and 28557-28665, and those with the identifiers [ICOS]_H0.66_L0 and [ICOS]_H0L0), GITR, OX40 and 4-1BB.

[0672] H. ICOS Antigen Binding Domains

[0673] In some embodiments, one of the ABDs binds ICOS. Suitable sets of 6 CDRs and/or vh and vl domains, as well as scFv sequences ICOS (suitable sequences are shown in FIG. 19, FIG. 20, FIG. 24, FIG. 68 and FIG. 77 as well as SEQ ID NO: 27869-28086, 28087-28269, 27193-27335, 28549-28556 and 28557-28665, and those with the identifiers [ICOS]_H0.66_L0 and [ICOS]_H0L0.

[0674] As will be appreciated by those in the art, suitable anti-ICOS ABDs can comprise a set of 6 CDRs as depicted in these sequences and Figures, either as they are underlined or, in the case where a different numbering scheme is used as described herein and as shown in Table 1, as the CDRs that are identified using other alignments within the sequences disclosed herein. Suitable ABDs can also include the entire vh and vl sequences as depicted in these sequences and Figures, used as scFvs or as Fabs. In many of the embodiments herein that contain an Fv to ICOS, it is the Fab monomer that binds ICOS. As discussed herein, the other of the target pair when ICOS is one of the antigens is selected from PD-1 are depicted in FIG. 3, FIG. 10, FIG. 11, FIG. 72, FIG. 73, FIG. 74, FIG. 76 and SEQ ID NO:1-2392, 3125-3144, 4697-7594 and 4697-21810, and include those sequences in the sequence listing with the identifiers 1G6_H1.279_L1.194; 1G6_H1.280_L1.224; 1G6_L1.194_H1.279; 1G6_L1.210_H1.288; and 2E9_H1L1 (which can be scFv sequences, CDR sequence sets or vh and vl sequences)), CTLA-4 (suitable sequences are depicted in FIGS. 12, 72 and 79, as well as SEQ ID NO:2393-2414 and 3737-3816 (which can be scFv sequences, CDR sequence sets or vh and vl sequences)), TIM-3 (suitable sequences are depicted in FIG. 14, FIG. 81 and SEQ ID NO: 3345-3704, 4585-4696 (which can be scFv sequences, CDR sequence sets or vh and vl sequences)), LAG-3 (suitable sequences are depicted in FIG. 13, FIG. 80 and SEQ ID NO:2415-2604, 3817-3960 (which can be scFv sequences, CDR sequence sets or vh and vl sequences)), BTLA (suitable sequences are depicted in FIGS. 82 and 84 and SEQ ID NO?3705-3736 (which can be scFv sequences, CDR sequence sets or vh and vl sequences)), and TIGIT (suitable sequences are depicted in Figure XX and SEQ ID NO:4433-4585 (which can be scFv sequences, CDR sequence sets or vh and vl sequences)).

[0675] In addition to the parental CDR sets disclosed in the sequence listing that form an ABD to ICOS, the invention provides variant CDR sets. In one embodiment, a set of 6 CDRs can have 1, 2, 3, 4 or 5 amino acid changes from the parental CDRs, as long as the ABD is still able to bind to the target antigen, as measured at least one of a Biacore, surface plasmon resonance (SPR) and/or BLI (biolayer interferometry, e.g. Octet assay) assay, with the latter finding particular use in many embodiments.

[0676] In addition to the parental variable heavy and variable light domains disclosed herein that form an ABD to ICOS, the invention provides variant vh and vl domains. In one embodiment, the variant vh and vl domains each can have from 1, 2, 3, 4, 5, 6, 7, 8, 9 or 10 amino acid changes from the parental vh and vl domain, as long as the ABD is still able to bind to the target antigen, as measured by at least one of a Biacore, surface plasmon resonance (SPR) and/or BLI (biolayer interferometry, e.g. Octet assay) assay, with the latter finding particular use in many embodiments. In another embodiment, the variant vh and vl are at least 90, 95, 97, 98 or 99% identical to the respective parental vh or vl, as long as the ABD is still able to bind to the target antigen, as measured by at least one of a Biacore, surface plasmon resonance (SPR) and/or BLI (biolayer interferometry, e.g. Octet assay) assay, with the latter finding particular use in many embodiments.

[0677] Specific preferred embodiments include the [ICOS]_H0.66_L0 anti-ICOS Fv, in a Fab format, included within any of the bottle opener format backbones of FIG. 9.

[0678] Specific preferred embodiments include the [ICOS]_H0_L0 anti-ICOS Fv, in a scFv format, included within any of the bottle opener format backbones of FIG. 9.

[0679] Specific preferred embodiments include the [ICOS]_H0.66_L0 anti-ICOS Fv, in a scFv format, included within any of the mAb-scFv format backbones of FIG. 75.

[0680] Specific preferred embodiments include the [ICOS]_H0.66_L0 anti-ICOS Fv, in a Fab format, included within any of the mAb-scFv format backbones of FIG. 75.

[0681] Specific preferred embodiments include the [ICOS]_H0.66_L0 anti-ICOS Fv, in a Fab format, included within any of the format backbones of FIGS. 55A-55D.

[0682] I. GITR Antigen Binding Domains

[0683] In some embodiments, one of the ABDs binds GITR. Suitable sets of 6 CDRs and/or vh and vl domains, as well as scFv sequences FITR (suitable sequences are shown in FIG. 18, FIG. 72 and FIG. 73, and in SEQ ID NO: 26282-26290.

[0684] As will be appreciated by those in the art, suitable anti-GITR ABDs can comprise a set of 6 CDRs as depicted in these sequences and Figures, either as they are underlined or, in the case where a different numbering scheme is used as described herein and as shown in Table 1, as the CDRs that are identified using other alignments within the sequences disclosed herein. Suitable ABDs can also include the entire vh and vl sequences as depicted in these sequences and Figures, used as scFvs or as Fabs. In many of the embodiments herein that contain an Fv to GITR, it is the Fab monomer that binds GITR. As discussed herein, the other of the target pair when GITR is one of the antigens is selected from PD-1 are depicted in FIG. 3, FIG. 10, FIG. 11, FIG. 72, FIG. 73, FIG. 74, FIG. 76 and SEQ ID NO:1-2392, 3125-3144, 4697-7594 and 4697-21810, and include those sequences in the sequence listing with the identifiers 1G6_H1.279_L1.194; 1G6_H1.280_L1.224; 1G6_L1.194_H1.279; 1G6_L1.210_H1.288; and 2E9_H1L1 (which can be scFv sequences, CDR sequence sets or vh and vl sequences)), CTLA-4 (suitable sequences are depicted in FIGS. 12, 72 and 79, as well as SEQ ID NO:2393-2414 and 3737-3816 (which can be scFv sequences, CDR sequence sets or vh and vl sequences)), TIM-3 (suitable sequences are depicted in FIG. 14, FIG. 81 and SEQ ID NO: 3345-3704, 4585-4696 (which can be scFv sequences, CDR sequence sets or vh and vl sequences)), LAG-3 (suitable sequences are depicted in FIG. 13, FIG. 80 and SEQ ID NO:2415-2604, 3817-3960 (which can be scFv sequences, CDR sequence sets or vh and vl sequences)), BTLA (suitable sequences are depicted in FIGS. 82 and 84 and SEQ ID NO?3705-3736 (which can be scFv sequences, CDR sequence sets or vh and vl sequences)), and TIGIT (suitable sequences are depicted in Figure XX and SEQ ID NO:4433-4585 (which can be scFv sequences, CDR sequence sets or vh and vl sequences)).

[0685] In addition to the parental CDR sets disclosed in the sequence listing that form an ABD to GITR, the invention provides variant CDR sets. In one embodiment, a set of 6 CDRs can have 1, 2, 3, 4 or 5 amino acid changes from the parental CDRs, as long as the ABD is still able to bind to the target antigen, as measured at least one of a Biacore, surface plasmon resonance (SPR) and/or BLI (biolayer interferometry, e.g. Octet assay) assay, with the latter finding particular use in many embodiments.

[0686] In addition to the parental variable heavy and variable light domains disclosed herein that form an ABD to GITR, the invention provides variant vh and vl domains. In one embodiment, the variant vh and vl domains each can have from 1, 2, 3, 4, 5, 6, 7, 8, 9 or 10 amino acid changes from the parental vh and vl domain, as long as the ABD is still able to bind to the target antigen, as measured by at least one of a Biacore, surface plasmon resonance (SPR) and/or BLI (biolayer interferometry, e.g. Octet assay) assay, with the latter finding particular use in many embodiments. In another embodiment, the variant vh and vl are at least 90, 95, 97, 98 or 99% identical to the respective parental vh or vl, as long as the ABD is still able to bind to the target antigen, as measured by at least one of a Biacore, surface plasmon resonance (SPR) and/or BLI (biolayer interferometry, e.g. Octet assay) assay, with the latter finding particular use in many embodiments.

[0687] J. OX40 Antigen Binding Domains

[0688] In some embodiments, one of the ABDs binds OX40. Suitable sets of 6 CDRs and/or vh and vl domains, as well as scFv sequences for OX40 are provided (suitable sequences are shown in FIG. 17, FIG. 72 and FIG. 73, and in SEQ ID NO: 26272-26281.

[0689] As will be appreciated by those in the art, suitable anti-OX40 ABDs can comprise a set of 6 CDRs as depicted in these sequences and Figures, either as they are underlined or, in the case where a different numbering scheme is used as described herein and as shown in Table 1, as the CDRs that are identified using other alignments within the sequences disclosed herein. Suitable ABDs can also include the entire vh and vl sequences as depicted in these sequences and Figures, used as scFvs or as Fabs. In many of the embodiments herein that contain an Fv to OX40, it is the Fab monomer that binds GITR. As discussed herein, the other of the target pair when OX40 is one of the antigens is selected from PD-1 are depicted in FIG. 3, FIG. 10, FIG. 11, FIG. 72, FIG. 73, FIG. 74, FIG. 76 and SEQ ID NO:1-2392, 3125-3144, 4697-7594 and 4697-21810, and include those sequences in the sequence listing with the identifiers 1G6_H1.279_L1.194; 1G6_H1.280_L1.224; 1G6_L1.194_H1.279; 1G6_L1.210_H1.288; and 2E9_H1L1 (which can be scFv sequences, CDR sequence sets or vh and vl sequences)), CTLA-4 (suitable sequences are depicted in FIGS. 12, 72 and 79, as well as SEQ ID NO:2393-2414 and 3737-3816 (which can be scFv sequences, CDR sequence sets or vh and vl sequences)), TIM-3 (suitable sequences are depicted in FIG. 14, FIG. 81 and SEQ ID NO: 3345-3704, 4585-4696 (which can be scFv sequences, CDR sequence sets or vh and vl sequences)), LAG-3 (suitable sequences are depicted in FIG. 13, FIG. 80 and SEQ ID NO:2415-2604, 3817-3960 (which can be scFv sequences, CDR sequence sets or vh and vl sequences)), BTLA (suitable sequences are depicted in FIGS. 82 and 84 and SEQ ID NO?3705-3736 (which can be scFv sequences, CDR sequence sets or vh and vl sequences)), and TIGIT (suitable sequences are depicted in Figure XX and SEQ ID NO. 4433-4585 (which can be scFv sequences, CDR sequence sets or vh and vl sequences)).

[0690] In addition to the parental CDR sets disclosed in the sequence listing that form an ABD to OX40, the invention provides variant CDR sets. In one embodiment, a set of 6 CDRs can have 1, 2, 3, 4 or 5 amino acid changes from the parental CDRs, as long as the ABD is still able to bind to the target antigen, as measured at least one of a Biacore, surface plasmon resonance (SPR) and/or BLI (biolayer interferometry, e.g. Octet assay) assay, with the latter finding particular use in many embodiments.

[0691] In addition to the parental variable heavy and variable light domains disclosed herein that form an ABD to OX40, the invention provides variant vh and vl domains. In one embodiment, the variant vh and vl domains each can have from 1, 2, 3, 4, 5, 6, 7, 8, 9 or 10 amino acid changes from the parental vh and vl domain, as long as the ABD is still able to bind to the target antigen, as measured by at least one of a Biacore, surface plasmon resonance (SPR) and/or BLI (biolayer interferometry, e.g. Octet assay) assay, with the latter finding particular use in many embodiments. In another embodiment, the variant vh and vl are at least 90, 95, 97, 98 or 99% identical to the respective parental vh or vl, as long as the ABD is still able to bind to the target antigen, as measured by at least one of a Biacore, surface plasmon resonance (SPR) and/or BLI (biolayer interferometry, e.g. Octet assay) assay, with the latter finding particular use in many embodiments.

[0692] K. 4-1BB Antigen Binding Domains

[0693] In some embodiments, one of the ABDs binds 4-1BB. Suitable sets of 6 CDRs and/or vh and vl domains, as well as scFv sequences 4-1BB (suitable sequences are shown in FIG. 16, FIG. 72 and FIG. 73, and in SEQ ID NO:26262-2671.

[0694] As will be appreciated by those in the art, suitable anti-4-1BB ABDs can comprise a set of 6 CDRs as depicted in these sequences and Figures, either as they are underlined or, in the case where a different numbering scheme is used as described herein and as shown in Table 1, as the CDRs that are identified using other alignments within the sequences disclosed herein. Suitable ABDs can also include the entire vh and vl sequences as depicted in these sequences and Figures, used as scFvs or as Fabs. In many of the embodiments herein that contain an Fv to 4-1BB, it is the Fab monomer that binds 4-1BB. As discussed herein, the other of the target pair when ICOS is one of the antigens is selected from PD-1 are depicted in FIG. 3, FIG. 10, FIG. 11, FIG. 72, FIG. 73, FIG. 74, FIG. 76 and SEQ ID NO:1-2392, 3125-3144, 4697-7594 and 4697-21810, and include those sequences in the sequence listing with the identifiers 1G6_H1.279_L1.194; 1G6_H1.280_L1.224; 1G6_L1.194_H1.279; 1G6_L1.210_H1.288; and 2E9_H1L1 (which can be scFv sequences, CDR sequence sets or vh and vl sequences)), CTLA-4 (suitable sequences are depicted in FIGS. 12, 72 and 79, as well as SEQ ID NO:2393-2414 and 3737-3816 (which can be scFv sequences, CDR sequence sets or vh and vl sequences)), TIM-3 (suitable sequences are depicted in FIG. 14, FIG. 81 and SEQ ID NO: 3345-3704, 4585-4696 (which can be scFv sequences, CDR sequence sets or vh and vl sequences)), LAG-3 (suitable sequences are depicted in FIG. 13, FIG. 80 and SEQ ID NO:2415-2604, 3817-3960 (which can be scFv sequences, CDR sequence sets or vh and vl sequences)), BTLA (suitable sequences are depicted in FIGS. 82 and 84 and SEQ ID NO?3705-3736 (which can be scFv sequences, CDR sequence sets or vh and vl sequences)), and TIGIT (suitable sequences are depicted in Figure XX and SEQ ID NO:4433-4585 (which can be scFv sequences, CDR sequence sets or vh and vl sequences)).

[0695] In addition to the parental CDR sets disclosed in the sequence listing that form an ABD to 4-1BB, the invention provides variant CDR sets. In one embodiment, a set of 6 CDRs can have 1, 2, 3, 4 or 5 amino acid changes from the parental CDRs, as long as the ABD is still able to bind to the target antigen, as measured at least one of a Biacore, surface plasmon resonance (SPR) and/or BLI (biolayer interferometry, e.g. Octet assay) assay, with the latter finding particular use in many embodiments.

[0696] In addition to the parental variable heavy and variable light domains disclosed herein that form an ABD to 4-11BB, the invention provides variant vh and vl domains. In one embodiment, the variant vh and vl domains each can have from 1, 2, 3, 4, 5, 6, 7, 8, 9 or 10 amino acid changes from the parental vh and vl domain, as long as the ABD is still able to bind to the target antigen, as measured by at least one of a Biacore, surface plasmon resonance (SPR) and/or BLI (biolayer interferometry, e.g. Octet assay) assay, with the latter finding particular use in many embodiments. In another embodiment, the variant vh and vl are at least 90, 95, 97, 98 or 99% identical to the respective parental vh or vl, as long as the ABD is still able to bind to the target antigen, as measured by at least one of a Biacore, surface plasmon resonance (SPR) and/or BLI (biolayer interferometry, e.g. Octet assay) assay, with the latter finding particular use in many embodiments.

[0697] L. Specific Bispecific Embodiments

[0698] The invention provides a number of particular bispecific antibodies as outlined below.

[0699] 1. ICOS×PD-1

[0700] The invention provides bispecific heterodimeric antibodies that bind ICOS and PD-1 each monovalently, and in some cases as outlined herein, both bivalently.

[0701] In one embodiment, the PD-1 ABD is 1G6_L1.194_H1.279 and the ICOS ABD is selected from sequences shown in FIG. 19, FIG. 20, FIG. 24, FIG. 68 and FIG. 77 as well as SEQ ID NO: 27869-28086, 28087-28269, 27193-27335, 28549-28556 and 28557-28665, and those with the identifiers [ICOS]_H0.66_L0 and [ICOS]_H0L0.

[0702] In one embodiment, the ICOS×PD-1 bispecific antibody is selected from XENP numbers 20261, 20730, 20896, 22432-22438, 22731-22748, 22878-22894, 22931-22932, 22950-22961, 23090-23093, 23295-23296, 23301, 23405, 23408, 23410 (all without 428L/434S, although they can have those substitutions); XENP numbers 22730, 22917-22928, 22935-22937, 22974-22979, 22995-22996, 23001, 23103, 23104 (all with 428L/434S, although they can not have those); XENP numbers 23411, 21828, 21829, 21830, 21831, 22348, 23059 (using prior art ICOS sequences); XENP numbers 18920, 24125, 24130 (additional bottle openers); XENP 23406, 23407, 24128 (ICOS×PD-1 central-scFv), XENP24123 (ICOS×PD-1 central-scFv2); XENP24134 (ICOS×PD-1 bispecific mAb) 24122 (ICOS×PD-1 DVD-Ig), XENP 24132, 24133 (ICOS×PD-1 Trident).

[0703] 2. ICOS×PD-L1

[0704] In this embodiment, the ICOS ABD is selected from sequences shown in FIG. 19, FIG. 20, FIG. 24, FIG. 68 and FIG. 77 as well as SEQ ID NO: 27869-28086, 28087-28269, 27193-27335, 28549-28556 and 28557-28665, and those with the identifiers [ICOS]_H0.66_L0 and [ICOS]_H0L0.

[0705] 3. ICOS×CTLA-4

[0706] In this embodiment, the ICOS ABD is selected from sequences shown in FIG. 19, FIG. 20, FIG. 24, FIG. 68 and FIG. 77 as well as SEQ ID NO: 27869-28086, 28087-28269, 27193-27335, 28549-28556 and 28557-28665, and those with the identifiers [ICOS]_H0.66_L0 and [ICOS]_H0L0.

[0707] In one embodiment, a bottle opener format with a Fab ICOS ABD of [ICOS]H0.66_L0 is paired with a scFv CTLA-4 ABD of [CTLA-4]_H3.32_L0.129, particularly in bottle opener backbone 1 from FIG. 9.

[0708] 4. ICOS×LAG-3

[0709] In this embodiment, the ICOS ABD is selected from sequences shown in FIG. 19, FIG. 20, FIG. 24, FIG. 68 and FIG. 77 as well as SEQ ID NO: 27869-28086, 28087-28269, 27193-27335, 28549-28556 and 28557-28665, and those with the identifiers [ICOS]_H0.66_L0 and [ICOS]_H0L0.

[0710] 5. ICOS×TIM-3

[0711] In this embodiment, the ICOS ABD is selected from sequences shown in FIG. 19, FIG. 20, FIG. 24, FIG. 68 and FIG. 77 as well as SEQ ID NO: 27869-28086, 28087-28269, 27193-27335, 28549-28556 and 28557-28665, and those with the identifiers [ICOS]_H0.66_L0 and [ICOS]_H0L0.

[0712] M. Homologous Antibodies

[0713] The invention further provides antibodies that share amino acid sequence identity with the antibodies outlined herein.

[0714] In one embodiment, bispecific antibodies are made that have amino acid variants in one or more of the CDRs of the Vh and Vl sequences outlined herein and in the Figures. In one embodiment, antibodies are provided that have 1, 2, 3, 4 or 5 amino acid differences in one or more of the CDRs of the vh and vl chains outlined herein. These amino acid variants can be in one CDR or spread out between more than one CDR. These amino acid variants can also be in one or both of the Fvs of the bispecific antibody; e.g. there can be 2 amino acid variants in CDRs on the ICOS Fv side (generally a Fab but can be a scFv as outlined herein) and one on the PD-1 side, etc.

[0715] Similarly, the invention provides for antibodies that have at least 95, 96, 97 98 or 99% amino acid identity to the sequences outlined herein, and particularly in the variable heavy and/or variable light domains. This sequence identity can also be on one Fv or both Fv of the bispecific antibodies. That is, bispecific antibodies are provided that are 95-99% identical to the variable heavy and/or variable light domains outlined in the figures.

### IX. Nucleic Acids of the Invention

[0716] The invention further provides nucleic acid compositions encoding the bispecific antibodies of the invention (or, in the case of “monospecific” antibodies, nucleic acids encoding those as well).

[0717] As will be appreciated by those in the art, the nucleic acid compositions will depend on the format and scaffold of the heterodimeric protein. Thus, for example, when the format requires three amino acid sequences, three nucleic acid sequences can be incorporated into one or more expression vectors for expression. Similarly, some formats (e.g. dual scFv formats such as disclosed in FIG. 2) only two nucleic acids are needed; again, they can be put into one or two expression vectors. Some formats need 4 amino acids (bispecific mAbs).

[0718] As is known in the art, the nucleic acids encoding the components of the invention can be incorporated into expression vectors as is known in the art, and depending on the host cells used to produce the heterodimeric antibodies of the invention. Generally, the nucleic acids are operably linked to any number of regulatory elements (promoters, origin of replication, selectable markers, ribosomal binding sites, inducers, etc.). The expression vectors can be extra-chromosomal or integrating vectors.

[0719] The nucleic acids and/or expression vectors of the invention are then transformed into any number of different types of host cells as is well known in the art, including mammalian, bacterial, yeast, insect and/or fungal cells, with mammalian cells (e.g. CHO cells), finding use in many embodiments.

[0720] In some embodiments, nucleic acids encoding each monomer and the optional nucleic acid encoding a light chain, as applicable depending on the format, are each contained within a single expression vector, generally under different or the same promoter controls. In embodiments of particular use in the present invention, each of these two or three nucleic acids are contained on a different expression vector. As shown herein and in 62/025,931, hereby incorporated by reference, different vector ratios can be used to drive heterodimer formation. That is, surprisingly, while the proteins comprise first monomer:second monomer:light chains (in the case of many of the embodiments herein that have three polypeptides comprising the heterodimeric antibody) in a 1:1:2 ratio, these are not the ratios that give the best results.

[0721] The heterodimeric antibodies of the invention are made by culturing host cells comprising the expression vector(s) as is well known in the art. Once produced, traditional antibody purification steps are done, including an ion exchange chromotography step. As discussed herein, having the pIs of the two monomers differ by at least 0.5 can allow separation by ion exchange chromatography or isoelectric focusing, or other methods sensitive to isoelectric point. That is, the inclusion of pI substitutions that alter the isoelectric point (pI) of each monomer so that such that each monomer has a different pI and the heterodimer also has a distinct pI, thus facilitating isoelectric purification of the “triple F” heterodimer (e.g., anionic exchange columns, cationic exchange columns). These substitutions also aid in the determination and monitoring of any contaminating dual scFv-Fc and mAb homodimers post-purification (e.g., IEF gels, cIEF, and analytical IEX columns).

### X. Biological and Biochemical Functionality of the Heterodimeric Immunomodulatory Antibodies

[0722] Generally the bispecific immunomodulatory antibodies of the invention are administered to patients with cancer, and efficacy is assessed, in a number of ways as described herein. Thus, while standard assays of efficacy can be run, such as cancer load, size of tumor, evaluation of presence or extent of metastasis, etc., immuno-oncology treatments can be assessed on the basis of immune status evaluations as well. This can be done in a number of ways, including both in vitro and in vivo assays. For example, evaluation of changes in immune status (e.g. presence of ICOS+CD4+ T cells following ipi treatment) along with “old fashioned” measurements such as tumor burden, size, invasiveness, LN involvement, metastasis, etc. can be done. Thus, any or all of the following can be evaluated: the inhibitory effects of PVRIG on CD4⁺ T cell activation or proliferation, CD8⁺ T (CTL) cell activation or proliferation, CD8⁺ T cell-mediated cytotoxic activity and/or CTL mediated cell depletion, NK cell activity and NK mediated cell depletion, the potentiating effects of PVRIG on Treg cell differentiation and proliferation and Treg- or myeloid derived suppressor cell (MDSC)-mediated immunosuppression or immune tolerance, and/or the effects of PVRIG on proinflammatory cytokine production by immune cells, e.g., IL-2, IFN-γ or TNF-α production by T or other immune cells.

[0723] In some embodiments, assessment of treatment is done by evaluating immune cell proliferation, using for example, CFSE dilution method, Ki67 intracellular staining of immune effector cells, and 3H-Thymidine incorporation method,

[0724] In some embodiments, assessment of treatment is done by evaluating the increase in gene expression or increased protein levels of activation-associated markers, including one or more of: CD25, CD69, CD137, ICOS, PD1, GITR, OX40, and cell degranulation measured by surface expression of CD107A.

[0725] In general, gene expression assays are done as is known in the art.

[0726] In general, protein expression measurements are also similarly done as is known in the art.

[0727] In some embodiments, assessment of treatment is done by assessing cytotoxic activity measured by target cell viability detection via estimating numerous cell parameters such as enzyme activity (including protease activity), cell membrane permeability, cell adherence, ATP production, co-enzyme production, and nucleotide uptake activity. Specific examples of these assays include, but are not limited to, Trypan Blue or PI staining, ⁵¹Cr or ³⁵S release method, LDH activity, MTT and/or WST assays, Calcein-AM assay, Luminescent based assay, and others.

[0728] In some embodiments, assessment of treatment is done by assessing T cell activity measured by cytokine production, measure either intracellularly in culture supernatant using cytokines including, but not limited to, IFNγ, TNFα, GM-CSF, IL2, IL6, IL4, IL5, IL10, IL13 using well known techniques.

[0729] Accordingly, assessment of treatment can be done using assays that evaluate one or more of the following: (i) increases in immune response, (ii) increases in activation of αβ and/or γδ T cells, (iii) increases in cytotoxic T cell activity, (iv) increases in NK and/or NKT cell activity, (v) alleviation of αβ and/or γδ T-cell suppression, (vi) increases in pro-inflammatory cytokine secretion, (vii) increases in IL-2 secretion; (viii) increases in interferon-γ production, (ix) increases in Th1 response, (x) decreases in Th2 response, (xi) decreases or eliminates cell number and/or activity of at least one of regulatory T cells (Tregs.

[0730] Assays to Measure Efficacy

[0731] In some embodiments, T cell activation is assessed using a Mixed Lymphocyte Reaction (MLR) assay as is known in the art. An increase in activity indicates immunostimulatory activity. Appropriate increases in activity are outlined below.

[0732] In one embodiment, the signaling pathway assay measures increases or decreases in immune response as measured for an example by phosphorylation or de-phosphorylation of different factors, or by measuring other post translational modifications. An increase in activity indicates immunostimulatory activity. Appropriate increases in activity are outlined below.

[0733] In one embodiment, the signaling pathway assay measures increases or decreases in activation of αβ and/or γδ T cells as measured for an example by cytokine secretion or by proliferation or by changes in expression of activation markers like for an example CD137, CD107a, PD1, etc. An increase in activity indicates immunostimulatory activity. Appropriate increases in activity are outlined below.

[0734] In one embodiment, the signaling pathway assay measures increases or decreases in cytotoxic T cell activity as measured for an example by direct killing of target cells like for an example cancer cells or by cytokine secretion or by proliferation or by changes in expression of activation markers like for an example CD137, CD107a, PD1, etc. An increase in activity indicates immunostimulatory activity. Appropriate increases in activity are outlined below.

[0735] In one embodiment, the signaling pathway assay measures increases or decreases in NK and/or NKT cell activity as measured for an example by direct killing of target cells like for an example cancer cells or by cytokine secretion or by changes in expression of activation markers like for an example CD107a, etc. An increase in activity indicates immunostimulatory activity. Appropriate increases in activity are outlined below.

[0736] In one embodiment, the signaling pathway assay measures increases or decreases in αβ and/or γδ T-cell suppression, as measured for an example by cytokine secretion or by proliferation or by changes in expression of activation markers like for an example CD137, CD107a, PD1, etc. An increase in activity indicates immunostimulatory activity. Appropriate increases in activity are outlined below.

[0737] In one embodiment, the signaling pathway assay measures increases or decreases in pro-inflammatory cytokine secretion as measured for example by ELISA or by Luminex or by Multiplex bead based methods or by intracellular staining and FACS analysis or by Alispot etc. An increase in activity indicates immunostimulatory activity. Appropriate increases in activity are outlined below.

[0738] In one embodiment, the signaling pathway assay measures increases or decreases in IL-2 secretion as measured for example by ELISA or by Luminex or by Multiplex bead based methods or by intracellular staining and FACS analysis or by Alispot etc. An increase in activity indicates immunostimulatory activity. Appropriate increases in activity are outlined below.

[0739] In one embodiment, the signaling pathway assay measures increases or decreases in interferon-γ production as measured for example by ELISA or by Luminex or by Multiplex bead based methods or by intracellular staining and FACS analysis or by Alispot etc. An increase in activity indicates immunostimulatory activity. Appropriate increases in activity are outlined below.

[0740] In one embodiment, the signaling pathway assay measures increases or decreases in Th1 response as measured for an example by cytokine secretion or by changes in expression of activation markers. An increase in activity indicates immunostimulatory activity. Appropriate increases in activity are outlined below.

[0741] In one embodiment, the signaling pathway assay measures increases or decreases in Th2 response as measured for an example by cytokine secretion or by changes in expression of activation markers. An increase in activity indicates immunostimulatory activity. Appropriate increases in activity are outlined below.

[0742] In one embodiment, the signaling pathway assay measures increases or decreases cell number and/or activity of at least one of regulatory T cells (Tregs), as measured for example by flow cytometry or by IHC. A decrease in response indicates immunostimulatory activity. Appropriate decreases are the same as for increases, outlined below.

[0743] In one embodiment, the signaling pathway assay measures increases or decreases in M2 macrophages cell numbers, as measured for example by flow cytometry or by IHC. A decrease in response indicates immunostimulatory activity. Appropriate decreases are the same as for increases, outlined below.

[0744] In one embodiment, the signaling pathway assay measures increases or decreases in M2 macrophage pro-tumorigenic activity, as measured for an example by cytokine secretion or by changes in expression of activation markers. A decrease in response indicates immunostimulatory activity. Appropriate decreases are the same as for increases, outlined below.

[0745] In one embodiment, the signaling pathway assay measures increases or decreases in N2 neutrophils increase, as measured for example by flow cytometry or by IHC. A decrease in response indicates immunostimulatory activity. Appropriate decreases are the same as for increases, outlined below.

[0746] In one embodiment, the signaling pathway assay measures increases or decreases in N2 neutrophils pro-tumorigenic activity, as measured for an example by cytokine secretion or by changes in expression of activation markers. A decrease in response indicates immunostimulatory activity. Appropriate decreases are the same as for increases, outlined below.

[0747] In one embodiment, the signaling pathway assay measures increases or decreases in inhibition of T cell activation, as measured for an example by cytokine secretion or by proliferation or by changes in expression of activation markers like for an example CD137, CD107a, PD1, etc. An increase in activity indicates immunostimulatory activity. Appropriate increases in activity are outlined below.

[0748] In one embodiment, the signaling pathway assay measures increases or decreases in inhibition of CTL activation as measured for an example by direct killing of target cells like for an example cancer cells or by cytokine secretion or by proliferation or by changes in expression of activation markers like for an example CD137, CD107a, PD1, etc. An increase in activity indicates immunostimulatory activity. Appropriate increases in activity are outlined below.

[0749] In one embodiment, the signaling pathway assay measures increases or decreases in αβ and/or γδ T cell exhaustion as measured for an example by changes in expression of activation markers. A decrease in response indicates immunostimulatory activity. Appropriate decreases are the same as for increases, outlined below.

[0750] In one embodiment, the signaling pathway assay measures increases or decreases αβ and/or γδ T cell response as measured for an example by cytokine secretion or by proliferation or by changes in expression of activation markers like for an example CD137, CD107a, PD1, etc. An increase in activity indicates immunostimulatory activity. Appropriate increases in activity are outlined below.

[0751] In one embodiment, the signaling pathway assay measures increases or decreases in stimulation of antigen-specific memory responses as measured for an example by cytokine secretion or by proliferation or by changes in expression of activation markers like for an example CD45RA, CCR7 etc. An increase in activity indicates immunostimulatory activity. Appropriate increases in activity are outlined below.

[0752] In one embodiment, the signaling pathway assay measures increases or decreases in apoptosis or lysis of cancer cells as measured for an example by cytotoxicity assays such as for an example MTT, Cr release, Calcine AM, or by flow cytometry based assays like for an example CFSE dilution or propidium iodide staining etc. An increase in activity indicates immunostimulatory activity. Appropriate increases in activity are outlined below.

[0753] In one embodiment, the signaling pathway assay measures increases or decreases in stimulation of cytotoxic or cytostatic effect on cancer cells. as measured for an example by cytotoxicity assays such as for an example MTT, Cr release, Calcine AM, or by flow cytometry based assays like for an example CFSE dilution or propidium iodide staining etc. An increase in activity indicates immunostimulatory activity. Appropriate increases in activity are outlined below.

[0754] In one embodiment, the signaling pathway assay measures increases or decreases direct killing of cancer cells as measured for an example by cytotoxicity assays such as for an example MTT, Cr release, Calcine AM, or by flow cytometry based assays like for an example CFSE dilution or propidium iodide staining etc. An increase in activity indicates immunostimulatory activity. Appropriate increases in activity are outlined below.

[0755] In one embodiment, the signaling pathway assay measures increases or decreases Th17 activity as measured for an example by cytokine secretion or by proliferation or by changes in expression of activation markers. An increase in activity indicates immunostimulatory activity. Appropriate increases in activity are outlined below.

[0756] In one embodiment, the signaling pathway assay measures increases or decreases in induction of complement dependent cytotoxicity and/or antibody dependent cell-mediated cytotoxicity, as measured for an example by cytotoxicity assays such as for an example MTT, Cr release, Calcine AM, or by flow cytometry based assays like for an example CFSE dilution or propidium iodide staining etc. An increase in activity indicates immunostimulatory activity. Appropriate increases in activity are outlined below.

[0757] In one embodiment, T cell activation is measured for an example by direct killing of target cells like for an example cancer cells or by cytokine secretion or by proliferation or by changes in expression of activation markers like for an example CD137, CD107a, PD1, etc. For T-cells, increases in proliferation, cell surface markers of activation (e.g. CD25, CD69, CD137, PD1), cytotoxicity (ability to kill target cells), and cytokine production (e.g. IL-2, IL-4, IL-6, IFNγ, TNF-α, IL-10, IL-17A) would be indicative of immune modulation that would be consistent with enhanced killing of cancer cells.

[0758] In one embodiment, NK cell activation is measured for example by direct killing of target cells like for an example cancer cells or by cytokine secretion or by changes in expression of activation markers like for an example CD107a, etc. For NK cells, increases in proliferation, cytotoxicity (ability to kill target cells and increases CD107a, granzyme, and perform expression), cytokine production (e.g. IFNγ and TNF), and cell surface receptor expression (e.g. CD25) would be indicative of immune modulation that would be consistent with enhanced killing of cancer cells.

[0759] In one embodiment, γδ T cell activation is measured for example by cytokine secretion or by proliferation or by changes in expression of activation markers.

[0760] In one embodiment, Th1 cell activation is measured for example by cytokine secretion or by changes in expression of activation markers.

[0761] Appropriate increases in activity or response (or decreases, as appropriate as outlined above), are increases of 10%, 20%, 30%, 40%, 50%, 60%, 70%, 80%, 90%, 95% or 98 to 99% percent over the signal in either a reference sample or in control samples, for example test samples that do not contain an anti-PVRIG antibody of the invention. Similarly, increases of at least one-, two-, three-, four- or five-fold as compared to reference or control samples show efficacy.

### XI. Treatments

[0762] Once made, the compositions of the invention find use in a number of oncology applications, by treating cancer, generally by inhibiting the suppression of T cell activation (e.g. T cells are no longer suppressed) with the binding of the bispecific immunomodulatory antibodies of the invention.

[0763] Accordingly, the heterodimeric compositions of the invention find use in the treatment of these cancers.

### XII. Antibody Compositions for In Vivo Administration

[0764] Formulations of the antibodies used in accordance with the present invention are prepared for storage by mixing an antibody having the desired degree of purity with optional pharmaceutically acceptable carriers, excipients or stabilizers (as generally outlined in Remington's Pharmaceutical Sciences 16th edition, Osol, A. Ed. [1980]), in the form of lyophilized formulations or aqueous solutions. Acceptable carriers, buffers, excipients, or stabilizers are nontoxic to recipients at the dosages and concentrations employed, and include buffers such as phosphate, citrate, and other organic acids; antioxidants including ascorbic acid and methionine; preservatives (such as octadecyldimethylbenzyl ammonium chloride; hexamethonium chloride; benzalkonium chloride, benzethonium chloride; phenol, butyl or benzyl alcohol; alkyl parabens such as methyl or propyl paraben; catechol; resorcinol; cyclohexanol; 3-pentanol; and m-cresol); low molecular weight (less than about 10 residues) polypeptides; proteins, such as serum albumin, gelatin, or immunoglobulins; hydrophilic polymers such as polyvinylpyrrolidone; amino acids such as glycine, glutamine, asparagine, histidine, arginine, or lysine; monosaccharides, disaccharides, and other carbohydrates including glucose, mannose, or dextrins; chelating agents such as EDTA; sugars such as sucrose, mannitol, trehalose or sorbitol; salt-forming counter-ions such as sodium; metal complexes (e.g. Zn-protein complexes); and/or non-ionic surfactants such as TWEEN™ PLURONICS™ or polyethylene glycol (PEG).

### Administrative Modalities

[0765] The antibodies and chemotherapeutic agents of the invention are administered to a subject, in accord with known methods, such as intravenous administration as a bolus or by continuous infusion over a period of time.

### Treatment Modalities

[0766] In the methods of the invention, therapy is used to provide a positive therapeutic response with respect to a disease or condition. By “positive therapeutic response” is intended an improvement in the disease or condition, and/or an improvement in the symptoms associated with the disease or condition. For example, a positive therapeutic response would refer to one or more of the following improvements in the disease: (1) a reduction in the number of neoplastic cells; (2) an increase in neoplastic cell death; (3) inhibition of neoplastic cell survival; (5) inhibition (i.e., slowing to some extent, preferably halting) of tumor growth; (6) an increased patient survival rate; and (7) some relief from one or more symptoms associated with the disease or condition.

[0767] Positive therapeutic responses in any given disease or condition can be determined by standardized response criteria specific to that disease or condition. Tumor response can be assessed for changes in tumor morphology (i.e., overall tumor burden, tumor size, and the like) using screening techniques such as magnetic resonance imaging (MRI) scan, x-radiographic imaging, computed tomographic (CT) scan, bone scan imaging, endoscopy, and tumor biopsy sampling including bone marrow aspiration (BMA) and counting of tumor cells in the circulation.

[0768] In addition to these positive therapeutic responses, the subject undergoing therapy may experience the beneficial effect of an improvement in the symptoms associated with the disease.

[0769] Treatment according to the present invention includes a “therapeutically effective amount” of the medicaments used. A “therapeutically effective amount” refers to an amount effective, at dosages and for periods of time necessary, to achieve a desired therapeutic result.

[0770] A therapeutically effective amount may vary according to factors such as the disease state, age, sex, and weight of the individual, and the ability of the medicaments to elicit a desired response in the individual. A therapeutically effective amount is also one in which any toxic or detrimental effects of the antibody or antibody portion are outweighed by the therapeutically beneficial effects.

[0771] A “therapeutically effective amount” for tumor therapy may also be measured by its ability to stabilize the progression of disease. The ability of a compound to inhibit cancer may be evaluated in an animal model system predictive of efficacy in human tumors.

[0772] Alternatively, this property of a composition may be evaluated by examining the ability of the compound to inhibit cell growth or to induce apoptosis by in vitro assays known to the skilled practitioner. A therapeutically effective amount of a therapeutic compound may decrease tumor size, or otherwise ameliorate symptoms in a subject. One of ordinary skill in the art would be able to determine such amounts based on such factors as the subject's size, the severity of the subject's symptoms, and the particular composition or route of administration selected.

[0773] Dosage regimens are adjusted to provide the optimum desired response (e.g., a therapeutic response). For example, a single bolus may be administered, several divided doses may be administered over time or the dose may be proportionally reduced or increased as indicated by the exigencies of the therapeutic situation. Parenteral compositions may be formulated in dosage unit form for ease of administration and uniformity of dosage. Dosage unit form as used herein refers to physically discrete units suited as unitary dosages for the subjects to be treated; each unit contains a predetermined quantity of active compound calculated to produce the desired therapeutic effect in association with the required pharmaceutical carrier.

[0774] The specification for the dosage unit forms of the present invention are dictated by and directly dependent on (a) the unique characteristics of the active compound and the particular therapeutic effect to be achieved, and (b) the limitations inherent in the art of compounding such an active compound for the treatment of sensitivity in individuals.

[0775] The efficient dosages and the dosage regimens for the bispecific antibodies used in the present invention depend on the disease or condition to be treated and may be determined by the persons skilled in the art.

[0776] An exemplary, non-limiting range for a therapeutically effective amount of an bispecific antibody used in the present invention is about 0.1-100 mg/kg.

[0777] All cited references are herein expressly incorporated by reference in their entirety.

[0778] Whereas particular embodiments of the invention have been described above for purposes of illustration, it will be appreciated by those skilled in the art that numerous variations of the details may be made without departing from the invention as described in the appended claims.

### XIII. Examples

[0779] Examples are provided below to illustrate the present invention. These examples are not meant to constrain the present invention to any particular application or theory of operation. For all constant region positions discussed in the present invention, numbering is according to the EU index as in Kabat (Kabat et al., 1991, Sequences of Proteins of Immunological Interest, 5th Ed., United States Public Health Service, National Institutes of Health, Bethesda, entirely incorporated by reference). Those skilled in the art of antibodies will appreciate that this convention consists of nonsequential numbering in specific regions of an immunoglobulin sequence, enabling a normalized reference to conserved positions in immunoglobulin families. Accordingly, the positions of any given immunoglobulin as defined by the EU index will not necessarily correspond to its sequential sequence.

[0780] General and specific scientific techniques are outlined in US Publications 2015/0307629, 2014/0288275 and WO2014/145806, all of which are expressly incorporated by reference in their entirety and particularly for the techniques outlined therein.

### A. Example 1: TILs from Multiple Cancer Types Co-Express PD-1 and T Cell Costimulatory Receptors

[0781] To investigate potential associations between PD-1 and various T cell costimulatory receptors, RNA sequencing data from The Cancer Genome Atlas project (TCGA) were used for analysis. V2 RSEM data were downloaded from FireBrowse (http://firebrowse.org/). Analysis was performed using R with custom routines. The correlation between the expression of PD-1 and eight costimulatory receptors is depicted in FIG. 1, along with calculated R2 values (square of the Pearson correlation coefficient). The data show that PD-1 and several costimulatory receptors were co-expressed in cancers including bladder, breast, colon, head & neck, kidney, lung-adeno, lung squamous, ovarian, pancreatic, prostate, and melanoma cancer. Notably, expression of ICOS on TILs correlates better with that of PD-1 than several other costims.

### B. Example 2: Immune Checkpoint Antigen Binding Domains

[0782] 1. 2A: Anti-PD-1 ABDs

[0783] Examples of antibodies which bind PD-1 were generated in bivalent IgG1 format with E233P/L234V/L235A/G236del/S267K substitutions, illustrative sequences for which are depicted in FIG. 10. DNA encoding the variable regions was generated by gene synthesis and was inserted into the mammalian expression vector pTT5 by the Gibson Assembly method. Heavy chain VH genes were inserted via Gibson Assembly into pTT5 encoding the human IgG1 constant region with the substitutions mentioned above. Light chains VL genes were inserted into pTT5 encoding the human C? constant region. DNA was transfected into HEK293E cells for expression. Additional PD-1 ABDs (including those derived from the above antibodies) were formatted as Fabs and scFvs for use in costim/checkpoint bispecific antibodies, illustrative sequences for which are depicted respectively in FIG. 11 and in the sequence listing.

[0784] 2. 2B: Anti-CTLA-4 ABDs

[0785] Antibodies which bind CTLA-4 were generated in bivalent IgG1 format with E233P/L234V/L235A/G236del/S267K substitutions. DNA encoding the variable regions was generated by gene synthesis and was inserted into the mammalian expression vector pTT5 by the Gibson Assembly method. Heavy chain VH genes were inserted via Gibson Assembly into pTT5 encoding the human IgG1 constant region with the substitutions mentioned above. Light chains VL genes were inserted into pTT5 encoding the human C? constant region. DNA was transfected into HEK293E cells for expression. Additional CTLA-4 ABDs (including those derived from the above antibodies) were formatted as scFvs for use in costim/checkpoint bispecific antibodies, illustrative sequences for which are depicted in FIG. 12 and in the sequence listing.

[0786] 3. 2C: Anti-LAG-3 ABDs

[0787] Examples of antibodies which bind LAG-3 were generated in bivalent IgG1 format with E233P/L234V/L235A/G236del/S267K substitutions. DNA encoding the variable regions was generated by gene synthesis and was inserted into the mammalian expression vector pTT5 by the Gibson Assembly method. Heavy chain VH genes were inserted via Gibson Assembly into pTT5 encoding the human IgG1 constant region with the substitutions mentioned above. Light chains VL genes were inserted into pTT5 encoding the human C? constant region. DNA was transfected into HEK293E cells for expression. Additional LAG-3 ABDs (including those derived from the above antibodies) were formatted as Fabs for use in costim/checkpoint bispecific antibodies, illustrative sequences for which are depicted in FIG. 13 and in the sequence listing.

[0788] 4. 2D: Anti-TIM-3 ABDs

[0789] Examples of antibodies which bind TIM-3 were generated in bivalent IgG1 format with E233P/L234V/L235A/G236del/S267K substitutions, exemplary sequences for which are depicted in FIG. 14. DNA encoding the variable regions was generated by gene synthesis and was inserted into the mammalian expression vector pTT5 by the Gibson Assembly method. Heavy chain VH genes were inserted via Gibson Assembly into pTT5 encoding the human IgG1 constant region with the substitutions mentioned above. Light chains VL genes were inserted into pTT5 encoding the human C? constant region. DNA was transfected into HEK293E cells for expression. The above antibodies were formatted as Fabs for use in costim/checkpoint bispecific antibodies.

[0790] 5. 2E: Anti-PD-L1 ABDs

[0791] Prototype antibodies which bind PD-L1 were generated in bivalent IgG1 format with E233P/L234V/L235A/G236del/S267K substitutions, exemplary sequences for which are depicted in FIG. 15. DNA encoding the variable regions was generated by gene synthesis and was inserted into the mammalian expression vector pTT5 by the Gibson Assembly method. Heavy chain VH genes were inserted via Gibson Assembly into pTT5 encoding the human IgG1 constant region with the substitutions mentioned above. Light chains VL genes were inserted into pTT5 encoding the human C? constant region. DNA was transfected into HEK293E cells for expression. The above antibodies were formatted as Fabs and scFvs for use in costim/checkpoint bispecific antibodies.

### C. Example 3: Costimulatory Receptor Antigen Binding Domains

[0792] Prototype costimulatory receptor antibodies which bind ICOS, GITR, OX40, and 4-1BB were generated in bivalent IgG1 format with E233P/L234V/L235A/G236del/S267K substitutions, sequences for which are depicted in FIGS. 16-19. DNA encoding the variable regions was generated by gene synthesis and was inserted into the mammalian expression vector pTT5 by the Gibson Assembly method. Heavy chain VH genes were inserted via Gibson Assembly into pTT5 encoding the human IgG1 constant region with the substitutions mentioned above. Light chains VL genes were inserted into pTT5 encoding the human C? constant region. DNA was transfected into HEK293E cells for expression. The above antibodies were formatted as Fabs or scFvs for use in costim/checkpoint bispecific antibodies.

### D. Example 4: Engineering Anti-ICOS ABD for Stability and Affinity

[0793] The parental variable region of an anti-ICOS antibody (XENP16435; depicted in FIG. 19) was engineered for use as a component in an ICOS×checkpoint bispecific antibody. A library of Fv variants engineered to have optimal affinity and stability was constructed by site-directed mutagenesis (QuikChange, Stratagene, Cedar Creek, Tx.) or additional gene synthesis and subcloning in Fab-His and scFv-His formats and produced as described below.

[0794] 1. 4A: Anti-ICOS Fabs

[0795] Amino acid sequences for variant anti-ICOS Fabs are listed in FIG. 20 (the polyhistidine (His6 (SEQ ID NO: 28666)) tags have been removed from the C-terminal of the Fab heavy chains). DNA encoding the two chains needed for Fab expression were generated by gene synthesis and were subcloned using standard molecular biology techniques into the expression vector pTT5. The Fab heavy chain included a C-terminal polyhistidine tag. DNA was transfected into HEK293E cells for expression and resulting proteins were purified from the supernatant using Ni-NTA chromatography. The resultant anti-ICOS Fabs were characterized for stability and affinity.

[0796] Differential Scanning Fluorimetry (DSF) experiments were performed using a Bio-Rad CFX Connect Real-Time PCR Detection System. Proteins were mixed with SYPRO Orange fluorescent dye and diluted to 0.2 mg/mL in PBS. The final concentration of SYPRO Orange was 10×. After an initial 10 minute incubation period at 25° C., proteins were heated from 25 to 95° C. using a heating rate of 1° C./min. A fluorescence measurement was taken every 30 seconds. Melting temperatures (Tm) were calculated using the instrument software. The results are shown in FIG. 21.

[0797] A series of affinity screens of the anti-ICOS Fabs to human ICOS were performed using Octet, a BioLayer Interferometry (BLI)-based method. Experimental steps for Octet generally included the following: Immobilization (capture of ligand or test article onto a biosensor); Association (dipping of ligand- or test article-coated biosensors into wells containing serial dilutions of the corresponding test article or ligand); and Dissociation (returning of biosensors to well containing buffer) in order to determine the monovalent affinity of the test articles. Specifically, anti-mouse Fc (AMC) biosensors were used to capture mouse IgG2a Fc fusion of ICOS and dipped into multiple concentrations of the test articles. The resulting equilibrium dissociation constants (KD), association rates (ka), and dissociation rates (kd) are presented in Figures FIG. 22 and FIG. 23. Binding affinities and kinetic rate constants were obtained by analyzing the processed data using a 1:1 binding model using ForteBio Octet Data Analysis software (ForteBio). The data from a two separate experiments are depicted in FIG. 22A-B. In a further experiment, streptavidin (SA) biosensors were used to capture ICOS-TEV-Fc-Avi and dipped into the test articles. The data are depicted in FIG. 23. A number of variant anti-ICOS Fabs including XENP22780, XENP22782, XENP22783, and XENP22784 had improved stability while maintaining affinity characteristics similar to a Fab comprising the parental variable regions (XENP22050).

[0798] 2. 4B: Anti-ICOS scFvs

[0799] Amino acid sequences for anti-ICOS scFvs are listed in FIG. 24 (the polyhistidine (His6 (SEQ ID NO: 28666)) tags have been removed from the C-terminal of the scFvs). DNA encoding the scFv was generated by gene synthesis and were subcloned using standard molecular biology techniques into the expression vector pTT5. The scFv included a C-terminal polyhistidine tag. DNA was transfected into HEK293E cells for expression and resulting proteins were purified from the supernatant using Ni-NTA chromatography. The resultant anti-ICOS scFvs were characterized for stability in DSF experiments as described above. The data is depicted in FIG. 25.

### E. Example 5: Anti-ICOS×Anti-PD-1 Bispecific Antibodies

[0800] 1. 5A: Prototype Costim/Checkpoint Bottle-Openers

[0801] Schematics for costim/checkpoint bispecific antibody in the bottle-opener format are depicted as FIG. 2A. Prototype bottle-openers with costimulatory receptor binding Fab arms based on prototype anti-GITR mAb (XENP16438), anti-OX40 mAb (XENP16437), anti-4-1BB mAb (XENP14410) and anti-ICOS mAb (XENP16435) and exemplary anti-PD-1 scFv (XENP19692) arm were produced to investigate their effect on cytokine secretion in an SEB-stimulated PBMC assay. Sequences are depicted in FIG. 26. DNA encoding the three chains needed for bottle-opener expression were generated by gene synthesis and were subcloned using standard molecular biology techniques into the expression vector pTT5. DNA transfected into HEK293E cells for expression and resulting proteins were purified using standard techniques.

### a. 5A(a): Prototype Anti-ICOS×Anti-PD-1 Bottle-Opener Enhances Cytokine Secretion

[0802] Staphylococcal Enterotoxin B (SEB) is a superantigen that causes T cell activation and proliferation in a manner similar to that achieved by activation via the T cell receptor (TCR). Stimulating human PBMC with SEB is a common method for assaying T cell activation and proliferation. PBMCs were simulated with 100 ng/mL SEB for 2 days. Cells were washed twice and restimulated with 100 ng/mL SEB in combination with 20 pg/mL of the indicated test articles. A first bivalent anti-PD-1 antibody based on nivolumab (XENP16432), a second bivalent anti-PD-1 mAb (XENP19686), and a bivalent anti-RSV mAb (XENP15074) were used as controls. 24 hours after treatment, supernatants were assayed for IL-2. The data depicted in FIG. 27 show that each of the costim/checkpoint bottle-openers enhanced cytokine secretion in comparison to the bivalent anti-RSV antibody. Surprisingly, induction of cytokine secretion by XENP22730 is vastly superior to cytokine secretion by bivalent anti-PD-1 antibody alone as well as the other prototype costim/checkpoint bottle-openers, indicating that addition of ICOS binding enhances cytokine production and that ICOS is a better PD-1 partner than other costimulatory receptors for a bispecific antibody.

[0803] In another experiment, PBMCs were stimulated with 0.01 μg/mL SEB for 3 days with 20 μg/mL of indicated test articles. As control, test articles were also incubated with naive (non-SEB stimulated) PBMCs. 3 days after treatment, supernatant was assessed for IL-2 secretion as an indicator of T cell activation (depicted in FIG. 28). The data show that neither the anti-PD-1 bivalent antibody nor the anti-ICOS×anti-PD-1 bottle-opener stimulate IL-2 secretion in naive cells. Further, the data show again that XENP20896 enhances IL-2 secretion more than the bivalent anti-PD-1 antibody alone does and that XENP20896 enhances IL-2 secretion more than combination of bivalents (XENP16432 and XENP16435) as well as combination of one-arms (XENP20111 and XENP20266) do.

[0804] Costimulatory receptors such as ICOS have previously been found to induce cytokine production only following crosslinking by bivalent antibodies or multimerized ligands (Viera et al. 2004; Sanmamed et al. 2015). In view of the crosslinking mechanisms, it is surprising that monovalent ICOS binding by a single arm in a costim×checkpoint blockade bispecific antibody was able to enhance cytokine production. Further, it is notable that the bispecific antibody was able to enhance cytokine secretion more than bivalent anti-PD-1 mAb in combination with bivalent anti-ICOS mAb (XENP16432+XENP16435).

### b. 5A(b): PD-1 and ICOS Double-Positive Cells are Selectively Occupied by Prototype Anti-ICOS×Anti-PD-1 Bottle-Opener

[0805] Selective targeting of tumor-reactive TILs co-expressing immune checkpoint receptors (e.g. PD-1) and costimulatory receptors as shown in Example 1 over non-tumor reactive T cells expressing immune checkpoint receptors or costimulatory receptors alone could enhance anti-tumor activity while avoiding peripheral toxicity (as depicted in FIG. 29).

[0806] An SEB-stimulated PBMC assay was used to investigate binding of anti-ICOS×anti-PD-1 bottle-opener to T cells. PBMCs were stimulated with 100 ng/mL SEB (staphylococcal enterotoxin B) for 3 days, after which the PBMCs were treated with the indicated test articles for 30 minutes at 4° C. PBMCs were then incubated with APC-labeled one-arm anti-ICOS antibody and FITC-labeled one-arm anti-PD-1 antibody for 30 minutes at 4° C. FIG. 30 and FIG. 31 shows receptor occupancy of a prototype anti-ICOS×anti-PD-1 bottle-opener (XENP20896), one-arm anti-ICOS antibody (XENP20266) and one-arm anti-PD-1 antibody (XENP20111).

[0807] The data show that double-positive cells (expressing both PD-1 and ICOS) are selectively occupied by the anti-ICOS×anti-PD-1 bottle-opener (XENP20896) as depicted in FIG. 30, indicating that monovalent ICOS and PD-1 binding is useful for selective targeting. Further, anti-ICOS×anti-PD-1 bottle-opener (e.g. XENP20896) binds more potently to double-positive cells than monovalent, monospecific one-arm anti-PD-1 and anti-ICOS as shown in FIG. 31A.

### c. 5A(c): Prototype Anti-ICOS×Anti-PD-1 Bottle-Opener Enhance Engraftment in a GVHD Mouse Study

[0808] The prototype anti-ICOS×anti-PD-1 bottle-opener was evaluated in a Graft-versus-Host Disease (GVHD) model conducted in NSG (NOD-SCID-gamma) immunodeficient mice. The mice were engrafted with human PBMCs. When NSG mice are injected with human PBMCs, they develop an autoimmune response against the human PBMCs. Treatment of NSG mice injected with human PBMCs with immune checkpoint antibodies (e.g. anti-PD-1) enhance engraftment. Thus, increased engraftment shows efficacy of the antibodies.

[0809] 10 million human PBMCs were engrafted into NSG mice via IV-OSP on Day 0 followed by dosing with the indicated test articles on Day 1, 8, 15, and 22. Human CD45+ cell counts were measured on Day 14 as an indicator of disease.

[0810] The data depicted in Figure A show that the anti-ICOS×anti-PD-1 bottle-opener enhance proliferation of CD45+ cells in human PBMC-engrafted NSG mice as compared to controls (PBS and PBS+PBMC). Further, enhancement is greater using antibodies of the invention than that seen with bivalent anti-PD-1 antibody.

[0811] 2. 5B: Production of Variant Anti-ICOS×Anti-PD-1 Bottle-Openers with Optimized Anti-ICOS Fab Arms

[0812] Variant anti-ICOS×anti-PD-1 bottle-openers comprising anti-ICOS Fabs engineered as described in Example 4A were produced as generally described above. Amino acid sequences for variant anti-ICOS×anti-PD-1 bottle-openers are listed in FIG. 32. Amino acid sequences for variant anti-ICOS×anti-PD-1 with FcRn pH 6.0 affinity enhancing substitutions are listed in FIG. 33.

[0813] The resultant anti-ICOS×anti-PD-1 bispecific antibodies were characterized for affinity to human and cynomolgus ICOS using Octet as generally described above. In a first set of experiments, AMC biosensors were used to capture mouse IgG2a Fc fusion of ICOS and dipped into multiple concentrations of the test articles (data depicted in FIG. 34). In further experiments, streptavidin (SA or SAX) biosensors were used to capture biotinylated human and cynomolgus IgG1 Fc fusions of human and cynomolgus ICOS and dipped into multiple concentrations of the test articles (data depicted in FIG. 35).

[0814] 3. 5C: T Cell Surface Binding of Variant Anti-ICOS×Anti-PD-1 Bottle-Openers

[0815] Binding of anti-ICOS×anti-PD-1 bispecifics to T cells was measured in an SEB-stimulated PBMC assay. Human PBMCs were stimulated with 100 ng/mL SEB for 3 days. PBMCs were then treated with the indicated test articles and incubated at 4° C. for 30 minutes. After treatment, cells were incubated with FITC-labeled anti-CD3 antibody and APC-labeled anti-human IgG Fc secondary antibody. MFI on CD3+ cells are depicted in FIG. 36A-B.

[0816] 4. 5D: Receptor Occupancy of Variant Anti-ICOS×Anti-PD-1 Bottle-Openers on T Cells

[0817] Receptor occupancy of variant anti-ICOS×anti-PD-1 bottle-openers on T cells was measured in an SEB-stimulated PBMC assay. PBMCs were stimulated with 100 ng/mL SEB (staphylococcal enterotoxin B) for 3 days, after which the PBMCs were treated with the indicated test articles for 30 minutes at 4° C. PBMCs were then incubated with APC-labeled one-arm anti-ICOS antibody and FITC-labeled one-arm anti-PD-1 antibody for 30 minutes at 4° C. FIG. 37 depicts the receptor occupancy of variant anti-ICOS×anti-PD-1 bispecific antibodies, corresponding one-arm anti-ICOS antibodies and one-arm anti-PD-1 antibody (XENP20111) on PD-1 and ICOS double-positive T cells. Consistent with the prototype antibodies investigated in Example 1A, each of the bottle-openers binds more potently to double-positive cells than monovalent, monospecific one-arm anti-PD-1 and one-arm anti-ICOS antibodies.

[0818] 5. 5E: In Vitro Activity of Variant Anti-ICOS×Anti-PD-1 Bottle-Openers in a Cytokine Release Assay

[0819] Human PBMCs were stimulated with 100 ng/mL SEB for 2 days. Cells were washed and stimulated again with 100 ng/mL SEB in combination with 20 μg/mL of indicated test articles. 24 hours after treatment, cells were assayed for TL-2 (FIG. 38A) and IFN? (FIG. 38B). The data show that anti-ICOS×anti-PD-1 bottle-openers stimulated significantly more cytokine release than bivalent anti-PD-1 antibody (XENP16432) alone, bivalent anti-ICOS antibody (XENP16435) alone, or bivalent anti-PD-1 antibody plus bivalent anti-ICOS antibody in combination.

[0820] In a further experiment, human PBMCs were stimulated with 100 ng/mL SEB for 2 days. Cells were washed and stimulated again with 100 ng/mL SEB in combination with 20 μg/mL of indicated test articles. 24 hours after treatment, cells were assayed for TL-2 (FIG. 39A) and IFN? (FIG. 39B).

[0821] 6. 5F: In Vivo Activity of Variant Anti-ICOS×Anti-PD-1 Bottle Openers in a GVHD Mouse Study

[0822] In a first study, 10 million human PBMCs were engrafted into NSG mice via IV-OSP on Day 0 followed by dosing with the indicated test articles on Day 1. IFN? levels and human CD45+, CD8+ T cell and CD4+ T cell counts were measured on Day 7, 11 and 14. FIGS. 40A-B respectively depicts IFN? levels on Day 7 and 11. FIGS. 41A-B respectively depict CD45+ cell counts on Day 11 and 14. FIGS. 42A-B respectively depict CD8+ T cell and CD4+ T cell counts on Day 14. FIG. 43 depicts the change in body weight in the mice by Day 14 resulting from exacerbation of GVHD due to T cell expansion and IFN? production.

[0823] In a further study with additional variant anti-ICOS×anti-PD-1 bottle-openers, 10 million human PBMCs were engrafted into NSG mice via IV-OSP on Day 0 followed by dosing with the indicated test articles at indicated concentrations on Day 1. IFNγ levels and human CD45+, CD8+ T cell and CD4+ T cell counts were measured on Day 7 and 14. FIG. 44A-B respectively depicts IFN? levels on Day 7 and 14. FIG. 45 depicts CD45+ cell count on Day 14. FIG. 46A-C respectively depict CD8+ T cell count, CD4+ T cell counts and CD8+/CD4+ratio on Day 14. Body weight of mice were also measured on Day 12 and 15 and depicted respectively in FIG. 47A-B as percentage of initial body weight.

[0824] The Figures show that the anti-ICOS×anti-PD-1 bottle-openers enhance engraftment (as indicated by the proliferation of CD45+ cells, CD8+ T cells and CD4+ T cells and decrease in body weight of mice). The observed activity is correlated to the in vitro potency of each variant. Further, a number of the bottle-openers including XENP20896, XENP22744, XENP23092, XENP22730, XENP23104, XENP22974, and XENP23411 enhance engraftment much more than the control bivalent anti-PD-1 antibody (XENP16432) does.

[0825] 7. 5G: Additional Anti-ICOS ABDs Work in Anti-ICOS×Anti-PD-1 Bottle Opener

[0826] Additional anti-ICOS×anti-PD-1 bottle-openers were produced comprising anti-ICOS Fabs based on other anti-ICOS ABDs described in Example 3 as generally described above. Sequences for the additional bottle-openers are depicted in FIG. 48.

[0827] In a first experiment, PBMCs were stimulated with 100 ng/mL SEB for 2 days. Cells were washed twice and restimulated with 100 ng/mL SEB in combination with 20 pg/mL of indicated test articles (PBS as control). 24 hours after treatment, supernatants were assayed for IL-2 concentration as depicted in FIG. 49. In a second experiment, PBMCs were stimulated with 10 ng/mL SEB and treated with 20 μg/mL of indicated test articles for 3 days (bivalent anti-PD-1 XENP16432 as control). Supernatants were collected and assays for IL-2. FIG. 50 depicts the fold induction in IL-2 over bivalent anti-RSV mAb.

[0828] Consistent with the data in Example 5A(a), XENP20896 stimulated secretion of IL-2. Notably, the additional bottle-openers comprising alternative anti-ICOS ABDs were also able to stimulate secretion of IL-2 demonstrating that the enhancement of cytokine secretion by an anti-ICOS×anti-PD-1 bottle-opener is not unique to ABDs derived from the parental anti-ICOS ABD described in Example 4.

[0829] 8. 5H: Clear ICOS Signature is Exhibited by Anti-ICOS×Anti-PD-1 Bottle-Openers

[0830] a. 5H(a): Anti-ICOS×Anti-PD-1 Bispecific Antibodies Induce AKT Phosphorylation

[0831] ICOS ligation induces AKT phosphorylation in activated T cells (Fos, C et al. 2008), and as such, AKT phosphorylation would be an indicator of ICOS agonism by anti-ICOS×anti-PD-1 bispecific antibodies of the invention.

[0832] Human PBMCs were stimulated with 100 ng/mL SEB for 2 days. Following stimulation, CD3+ cells were isolated by negative selection using EasySep™ Human T Cell Enrichment Kit (STEMCELL Technologies, Vancouver, Canada) and then treated with indicated test articles in combination with plate bound anti-CD3 antibody (OKT3; 500 ng/mL). Cells were lysed 30 minutes after treatment and assayed for total AKT and phosphorylated AKT (Ser473) by a multiplexed phosphoprotein assay on MULTI-SPOT 384-Well Spot plates (Meso Scale Discovery, Rockville, Md.). The data are depicted in FIG. 51 as percentage of AKT phosphorylated following treatment.

[0833] The data shows no increase in AKT phosphorylation following treatment with negative control bivalent anti-PD-1 mAb (XENP16432). Both bivalent anti-ICOS mAb alone (XENP16435) and XENP16435 in combination with XENP16432 increase AKT phosphorylation demonstrating ICOS ligation and agonism by XENP16435. Surprisingly, despite only monovalent engagement of ICOS, treatment with the anti-ICOS×anti-PD-1 bispecific antibodies induces more AKT phosphorylation than treatment with XENP16435 alone and XENP16435 in combination with XENP16432. The positive AKT phosphorylation data demonstrate a clear signature of ICOS activity with the bispecific antibodies despite monovalent engagement of ICOS.

[0834] b. 5H(b): Activated T Helper Cell-Associated Genes Upregulated by Anti-ICOS×Anti-PD-1 Bottle-Openers

[0835] Guedan et al. (2014) describes gene expression profiles for activated T helper cells (i.e. Th1, Th2, and Th17) and regulatory T cells (Tregs) following activation of ICOS signaling domain-based CAR-Ts. They found that genes related to activated T helper cells such as IL-17A, IL22, IFN?, TNF, and IL-13 were upregulated, while Treg-related genes such as TGF31, SMAD3 and FOXP3 were either unchanged or downregulated.

[0836] To investigate if engagement of T cells with anti-ICOS×anti-PD-1 bispecific antibodies of the invention led to a similar signature, we used Nanostring technology. PBMCs were stimulated with 100 ng/mL SEB for 2 days. Cells were washed 2 times and restimulated with 100 ng/mL SEB and treated with indicated test articles for 24 hours. RNA was extracted from cells and assayed by nCounter® PanCancer Immune Profiling Panel (NanoString Technologies, Seattle, Wash.) which assays 770 target genes covering immune response. FIG. 52 depicts mean fold induction in expression of a number of Th-related and Treg-related genes over bivalent anti-RSV antibody. FIGS. 53A-F respectively depict fold induction of IL-17A, IL-17F, IL-22, IL-10, IL-9 and IFN? gene expression by the indicated test articles over induction by bivalent anti-RSV mAb.

[0837] As depicted in FIGS. 52-53 and consistent with the observation by Gueden et al., Th-related genes associated with ICOS signaling such as IL-17A, IL-17F, IL-22, IL-9, and IFN? are upregulated following treatment with bivalent anti-ICOS mAb and combination of anti-ICOS and anti-PD-1 mAbs. Notably, expression of Th-related genes associated with ICOS signaling are further upregulated following treatment with an anti-ICOS×anti-PD-1 antibody, again indicating a clear ICOS costimulatory signature and dramatic synergy of anti-ICOS and anti-PD-1 engagement by a bispecific antibody.

[0838] 9. 5I: Alternative Format Anti-ICOS×Anti-PD-1 Bispecific Antibodies

[0839] Alternative format costim/checkpoint bispecific antibodies were produced to investigate whether the effect of anti-ICOS×anti-PD-1 bottle-openers was unique to the bottle-opener format or broadly applicable to anti-ICOS×anti-PD-1 bispecific antibodies.

[0840] a. 5I(a): Anti-PD-1×Anti-ICOS Bottle-Opener

[0841] Anti-PD-1×anti-ICOS bottle-openers with an anti-PD-1 Fab generated using DNA encoding anti-PD-1 mAbs (e.g. XENP16432 and XENP29120) as described in Example 2A and anti-ICOS scFvs as described in Example 4B. Bottle-openers were produced as generally described in Example 5A. Sequences for exemplary anti-PD-1×anti-ICOS bottle-openers are depicted in FIG. 56.

[0842] b. 5I(b): Central-scFv

[0843] Schematics for the central-scFv format are depicted as FIGS. 55A-55B. DNA encoding anti-ICOS Fab-Fc heavy chains was generated using DNA encoding anti-ICOS Fabs described in Example 4A by standard subcloning into the expression vector pTT5. DNA encoding anti-ICOS-anti-PD-1 Fab-scFv-Fc heavy chains was generated using DNA encoding anti-ICOS Fabs described in Example 4A and anti-PD-1 scFv described in Example 2A by a combination of gene synthesis and standard subcloning into the expression vector pTT5. DNA was transfected into HEK293E cells for expression. Sequences for exemplary anti-ICOS×anti-PD-1 central-scFv antibodies are depicted in FIG. 57.

[0844] c. 5I(c): Central-scFv2

[0845] A schematic for the central-scFv2 format is depicted as FIG. 55C. DNA encoding anti-ICOS-anti-PD-1 Fab-scFv-Fc heavy chains was generated using DNA encoding anti-ICOS Fabs described in Example 4A and anti-PD-1 scFv described in Example 2A by a combination of gene synthesis and standard subcloning into the expression vector pTT5. DNA was transfected into HEK293E cells for expression. Sequences for exemplary anti-ICOS×anti-PD-1 central-scFv2 antibodies are depicted in FIG. 58.

[0846] d. 5I(d): Bispecific mAb

[0847] A schematic for the bispecific mAb format is depicted as FIG. 2K. DNA encoding the anti-ICOS heavy and light chains were generated based on the DNA encoding the anti-ICOS Fabs described in Example, and DNA encoding anti-PD-1 heavy and light chains were generated based on the DNA encoding the anti-PD-1 mAbs described in Example 2A. Heavy chain VH genes were inserted via Gibson assembly into pTT5 encoding the human IgG1 constant region with E233P/L234V/L235A/G236del/S267K substitutions. Light chain VL genes were inserted into pTT5 encoding the human C? constant region.

[0848] DNA was transfected into HEK293E cells for expression as 2 separate antibodies which are separately expressed and purified by Protein A affinity (GE Healthcare). These antibodies contain heterodimerization-skewing substitutions in the CH3:CH3 interface. 2-Mercaptoethylamine-HCl (2-MEA) was used to induce controlled reduction of interchain disulfide bonds in the two parental IgGs. 2-MEA was then removed allowing the reoxidation of interchain disulfide bonds to occur enabling recombination of the HC-LC pairs (driven by the heterodimerization mutations). Finally, the trispecific antibodies were purified by cation exchange chromatography. Such methods are common in the art (see, for instance, Labrijn (2013) PNAS 110(13):5145-50 or Strop et al. (2012) J Mol Biol 420(3):204-19). Other methods of design and purification known in the art may be used facilitate bispecific mAb production, for instance, common light chain antibodies (Merchant (1998) Nat Biotechnol 16(7):677-81) or heterodimeric Fab domains (Lewis et al. (2014) Nat Biotechnol 32(2):191-8). Sequence for an exemplary anti-PD-1×anti-ICOS bispecific mAb is depicted in FIG. 59.

[0849] e. 5I(e): DVD-IgG

[0850] A schematic for the DVD-IgG format is depicted as FIGS. 55A-55D. DNA encoding anti-PD-1-anti-ICOS VH-VH-CH1-Fc heavy chains and VL-VL-C? light chains was generated using DNA encoding anti-ICOS Fabs described in Example 4A and anti-PD-1 scFv described in Example 2A by a combination of gene synthesis and standard subcloning into the expression vector pTT5. DNA was transfected into HEK293E cells for expression. Sequences for exemplary anti-ICOS×anti-PD-1 DVD-IgGs are depicted in FIG. 60.

[0851] f. 5I(f): Trident

[0852] A schematic for the Trident format is depicted as FIGS. 55A-55D. DNA encoding anti-PD-1 VL-VH-Fc heavy chains and VL-VH light chains was generated using DNA encoding anti-ICOS Fabs described in Example 4A and anti-PD-1 scFv described in Example 2A by a combination of gene synthesis and standard subcloning into the expression vector pTT5. DNA was transfected into HEK293E cells for expression. Sequences for exemplary anti-ICOS×anti-PD-1 Tridents are depicted in FIG. 61.

[0853] g. 5I(g): Alternative Format Anti-ICOS×Anti-PD-1 Bispecific Antibodies Enhance Cytokine Secretion

[0854] Human PBMCs were stimulated with 200 ng/mL SEB for 2 days. Cells were washed twice then re-stimulated with 100 ng/mL SEB and treated with the indicated concentrations of the indicated test articles. 24 hours after treatment, supernatants were assayed for IL-2. The data are depicted in FIG. 62 and show that each of the alternative format bispecific antibodies enhances TL-2 secretion in comparison to bivalent anti-RSV (XENP15074) control. Notably, the majority of these alternative format antibodies enhance TL-2 secretion in comparison to a bivalent anti-PD-1 antibody.

### F. Example 6: Costim/Checkpoint Bispecific Antibodies Targeting Different Immune Checkpoint Antigens

[0855] 1. 6A: Anti-CTLA-4×Anti-ICOS

[0856] Anti-CTLA-4×anti-ICOS bottle-openers were generated with an anti-ICOS Fab derived from XENP16435 and anti-CTLA-4 scFvs derived from ABDs described in Example 2B. Sequence for an exemplary anti-ICOS×anti-CTLA-4 bottle-opener is depicted in FIG. 63. Bispecific mAbs were produced as generally described in Example 5I(c).

[0857] 2. 6B: Anti-LAG-3×Anti-ICOS

[0858] Anti-LAG-3×anti-ICOS bispecific antibodies were generated with anti-LAG-3 Fabs derived from ABDs described in Example 2C and an anti-ICOS Fab derived from XENP16435. Sequences for exemplary anti-LAG-3×anti-ICOS bispecific antibodies are depicted in FIG. 64. Bispecific mAbs were produced as generally described in Example 5I(c).

[0859] 3. 6C: Anti-TIM-3×Anti-ICOS

[0860] Anti-TIM-3×anti-ICOS bispecific antibodies were generated with anti-TIM-3 Fabs derived from ABDs described in Example 2D and an anti-ICOS Fab derived from XENP16435. Sequence for an exemplary anti-TIM-3×anti-ICOS bispecific antibody is depicted in FIG. 65. Bispecific mAbs were produced as generally described in Example 5I(c).

[0861] 4. 6D: Anti-PD-L1×Anti-ICOS

[0862] Anti-PD-L1×anti-ICOS bottle-openers were generated with anti-PD-L1 Fabs derived from ABDs described in Example 2E and anti-ICOS scFvs as described in Example 4B. Sequences for exemplary anti-PD-L1×anti-ICOS bispecific antibodies are depicted in FIG. 66. The bottle-openers were produced as generally described in Example 5A.

[0863] 5. 6E: Additional Costim×Checkpoint Blockade Bispecific Antibodies Function to Enhance Cytokine Secretion

[0864] Human PBMCs were stimulated with 200 ng/mL SEB for 2 days. Cells were washed twice then restimulated with 100 ng/mL SEB and treated with the indicated concentrations of the indicated test articles (as described above). 24 hours after treatment, supernatants were assayed for IL-2. The data are depicted in FIG. 67 and show that each of the additional costim×checkpoint blockade bispecific antibodies enhance TL-2 secretion in comparison to bivalent anti-RSV (XENP15074) control. Notably, the majority of these alternative checkpoint blockade antibodies (but not all, e.g. TIM-3 blockade) enhance TL-2 secretion in comparison to a bivalent anti-PD-1 antibody (XENP16432).

### G. Example 7: Monovalent Ligation of ICOS is Superior to Bivalent Crosslinking

[0865] In Example 5A(a), it was surprisingly found that anti-ICOS×anti-PD-1 antibody worked to enhance cytokine secretion despite monovalent binding of ICOS which is contrary to the crosslinking of costimulatory receptors such as ICOS which was thought to be necessary for stimulation of cytokine production. In Example 5H(a), it was surprisingly found that anti-ICOS×anti-PD-1 antibodies enhanced AKT phosphorylation (a signature of ICOS agonism) over bivalent anti-ICOS mAbs. In this section, we further examine this trend in which monovalent binding of ICOS appears to be superior to bivalent binding of ICOS.

[0866] 1. 7A: Production of One-Arm Anti-ICOS Fab-Fc Antibodies

[0867] Amino acid sequences for illustrative one-arm anti-ICOS Fab-Fc antibodies are listed in FIG. 68. DNA encoding the three chains needed for antibody expression were generated by gene synthesis and were subcloned using standard molecular biology techniques into the expression vector pTT5. DNA was transfected into HEK293E cells for expression and resulting proteins were purified using standard techniques.

[0868] The resultant one-arm anti-ICOS Fab-Fc antibodies were characterized for affinity to human ICOS using Octet. Anti-mouse Fc (AMC) biosensors were used to capture mouse IgG2a Fc fusion of ICOS and dipped into multiple concentrations of the test articles. The resulting equilibrium dissociation constants (KD), association rates (ka), and dissociation rates (kd) are presented in FIG. 69. Binding affinities and kinetic rate constants were obtained by analyzing the processed data using a 1:1 binding model using ForteBio Octet Data Analysis software (ForteBio).

[0869] 2. 7B: Monovalent One-Arm Anti-ICOS Fab-Fc Antibodies Promote Greater AKT Activation in PBMCs than Bivalent Anti-ICOS Antibody

[0870] PBMCs were stimulated with 100 ng/mL SEB for 2 days. Following stimulation, CD3+ T cells were isolated by negative selection using EasySep™ Human T Cell Enrichment Kit (STEMCELL Technologies, Vancouver, Canada) and then treated with indicated test articles in combination with plate bound anti-CD3 antibody (OKT3; 500 ng/mL). Cells were lysed 30 minutes after treatment and assayed for total AKT and phosphorylated AKT (Ser473) by a multiplexed phosphoprotein assay on MULTI-SPOT 384-Well Spot plates (Meso Scale Discovery, Rockville, Md.). The data are depicted in FIG. 70 as percentage of AKT phosphorylated following treatment.

[0871] Consistent with Example X, the anti-ICOS×anti-PD-1 bispecific antibodies promoted significantly greater AKT activation than bivalent anti-ICOS antibody. Surprisingly, monovalent one-arm anti-ICOS Fab-Fc antibodies enhanced also promoted significantly greater AKT activation than bivalent anti-ICOS antibody to a level comparable to the bispecific antibodies.

[0872] 3. 7C: Monovalent Agonism of ICOS Works with Multiple Anti-ICOS ABDs

[0873] CD3+ T cells were isolated by negative selection using EasySep™ Human T Cell Enrichment Kit (STEMCELL Technologies, Vancouver, Canada) and then treated with indicated test articles in combination with plate bound anti-CD3 antibody (OKT3; 500 ng/mL). Cells were lysed 30 minutes after treatment and assayed for total AKT and phosphorylated AKT (Ser473) by a multiplexed phosphoprotein assay on MULTI-SPOT 384-Well Spot plates (Meso Scale Discovery, Rockville, Md.). The data is depicted in FIG. 74 and show that monovalent anti-ICOS Fab-Fc antibodies comprising various anti-ICOS ABDs were able to induce AKT phosphorylation.

### H. Example 8: Investigating In Vitro Binding by XmAb23104

[0874] 1. XmAb23104 Binding to SEB-Stimulated T Cells

[0875] Staphylococcal Enterotoxin B (SEB) is a superantigen that causes T cell activation and proliferation in a manner similar to that achieved by activation via the T cell receptor (TCR), including expression of checkpoint receptors such as PD-1. Accordingly, human PBMCs from 3 separate donors were stimulated with 100 ng/mL SEB for 3 days. Cells were then treated with the following test articles at the indicated concentrations for 30 minutes: XmAb23104; XENP20111, a one-armed scFv-Fc based on the anti-PD-1 arm from XmAb23104; and XENP24901, a one-armed Fab-Fc based on the anti-ICOS arm from XmAb23104. Following incubation, cells were washed and stained with anti-human-Fc-A647 and anti-CD3-FITC. Cells were washed two more times and assayed by FACS. MFI on CD3+ T cells indicating binding of the test articles are depicted in FIGS. 90A-D, respectively for each donor.

[0876] The data show that, in PBMCs from each of the donors, XmAb23104 binds more avidly to CD3⁺ T cells compared to one-armed controls XENP20111 and XENP24901, demonstrating that binding to human T cells is significantly better by bispecific antibody XmAb23104, where each arm monovalently binds a different antigen, than by monovalent, monospecific antibodies.

[0877] 2. Occupancy of PD-1 and ICOS on SEB-Stimulated T Cells by XmAb23104

[0878] Receptor occupancy by XmAb23104 was measured in an SEB-stimulated PBMC assay. Human PBMCs were stimulated with 500 ng/mL SEB for 3 days. Cells were then treated with the following test articles at indicated concentrations for 30 minutes: XmAb23104; XENP20111; XENP24901; XENP19686, a bivalent mAb based on the anti-PD-1 arm from XmAb23104; XENP16435, a bivalent mAb based on the parental clone from which the anti-ICOS arm of XmAb23104 was generated; and XENP15074, a bivalent anti-RSV mAb used as a control. Following incubations, cells were pelleted and stained with A488-conjugated XENP20111, A647-conjugated XENP24901, and BV510-conjugated anti-CD3 mAb. Cells were then washed two times and assayed by FACS. FIGS. 91A-D show receptor occupancy following treatment with the various test articles as depicted by percentage of various populations of CD3⁺ T cells with unoccupied PD-1 and/or ICOS receptors as indicated by staining. For example, occupancy of PD-1 receptors decreases the percentage of ICOS⁺PD-1⁺ and ICOS-PD-1⁺ populations and increases the percentage of ICOS⁺PD-1⁻ and ICOS-PD-1⁻ populations. FIGS. 92A-B respectively show the amount of unoccupied of PD-1 and ICOS receptors on ICOS⁺PD-1⁺CD3⁺ T cells following treatment with test articles as indicated by XENP20111 and XENP24901 binding.

### I. Example 9: XmAb23104 Exhibits a Multi-Gene Expression Signature Consistent with ICOS Costimulation

[0879] FIG. 93 depicts the fold change in expression of additional genes (as determined by Nanostring nCounter® in the experiment described in Example 5H(b)) between XmAb23104, anti-PD-1 mAb (XENP19686), anti-ICOS mAb (XENP16435), anti-PD-1 mAb (XENP19686) in combination with anti-ICOS mab (XENP16435), and negative control anti-RSV mAb (XENP15074).

### J. Example 10: XmAb23104 Enhances Anti-Tumor Responses in Mice

[0880] NOD SCID gamma (NSG) mice were engrafted intradermally with either 3×10⁶ pp65-expressing MCF-7 cells or 2×10⁶ pp65-expressing MDA-MB-231 cells in the rear flank on Day −14. On Day 0, mice were engrafted intraperitoneally with 5×10⁶ human PBMCs from a CMV⁺ donor that screened positive for T cell pp65 reactivity. Mice were treated weekly with XmAb23104 (control mice were dosed with PBS) for 4 weeks (or 4 total doses). Tumor volumes were monitored by caliper measurements and data are shown (days post 1^{st} dose) in FIGS. 94 and 95.

### K. Example 11: Further In Vitro Characterization of XmAb23104

[0881] 1. 11A: XmAb23104 Blocks PD-1 Binding by PD-L1 and PD-L2

[0882] HEK293T cells stably expressing ICOS (Crown Bioscience, Santa Clara, Calif.) were stably transfected with a pCMV6-AC-GFP vector encoding PD-1 (OriGene, Rockville, Md.). Cells were treated with the following test articles for 30 minutes at 4° C.: XmAb23104, XENP16432 (a bivalent anti-PD-1 mAb based on nivolumab), XENP20111 (a monovalent anti-PD-1 scFv-Fc fusion based on the anti-PD-1 arm from XmAb23104), and XENP24901 (a monovalent anti-ICOS Fab-Fc fusion based on the anti-ICOS arm from XmAb23104 with M428L/N434S Xtend Fc; sequence depicted in FIG. 1). Cells were washed and incubated with A647-conjugated PD-L1-Fc (1 μg/mL; sequence depicted in FIG. 2A) or A647-conjugated PD-L2-Fc (0.1 μg/mL; sequence depicted in FIG. 2B) for 30 minutes at 4° C. Cells were washed twice more and analyzed by flow cytometry. PD-L1 and PD-L2 binding (as indicated by A647 MFI on GFP+ cells) following treatment with the indicated test articles are depicted respectively in FIGS. 3A-B. The data show that XmAb23104, XENP16432, and XENP20111 blocked PD-L1 and PD-L2 binding to PD-1ICOS⁺ cells in a dose dependent manner, while XENP24901 did not block PD-L1 and PD-L2 binding.

[0883] 2. 11B: XmAb23104 Blocks ICOS Binding by ICOSL

[0884] HEK293T cells stably expressing ICOS (Crown Bioscience, Santa Clara, Calif.) were stably transfected with a pCMV6-AC-GFP vector encoding PD-1 (OriGene, Rockville, Md.). Cells were treated with the following test articles for 30 minutes at 4° C.: XmAb23104, XENP20111, and XENP24901. Cells were washed and incubated with A647-conjugated ICOSL-Fc (0.5 μg/mL; sequence depicted in FIG. 4) for 30 minutes at 4° C. Cells were washed twice more and analyzed by flow cytometry. ICOSL binding (as indicated by A647 MFI on GFP+cells) following treatment with the indicated test articles is depicted in FIG. 5. The data show that XmAb23104 and XENP24901 blocked ICOSL binding to PD-1⁺ICOS⁺ cells in a dose dependent manner, while XENP20111 did not block ICOSL binding.

[0885] 3. 11C: XmAb23104 Binds Cynomolgus T Cells

[0886] Towards preclinical studies, it is helpful to have antibodies that are cross-reactive for human and cynomolgus monkeys. Accordingly, we confirmed whether XmAb23104 (and its component arms) could bind cynomolgus T cells. PBMCs collected from 4 cynomolgus monkeys were stimulated with 100 ng/mL SEB for 3 days. Cells were then treated with the following test articles at the indicated concentrations: XmAb23104, XENP20111, and XENP24901. Following incubation, cells were washed and stained with anti-human-Fc-A647 and anti-CD3-FITC. Cells were washed two more times and assayed by FACS. MFI on CD3⁺ T cells indicating binding of the test articles are depicted in FIGS. 6A-D respectively for each animal. The data show that XmAb23104, as well as its component Fab and scFv arms as Fc-fusions, bound to CD3+ cells from cynomolgus monkeys.

[0887] 4. 11D: XmAb23104 Enhances IFNγ and IL-2 Secretion in an SEB-Stimulated PBMC Assay

[0888] Human PBMCs from 21 donors were stimulated with 100 ng/mL SEB for 2 days. Cells were washed two times and re-stimulated with 100 ng/mL SEB and 20 μg/mL of the following test articles for 24 hours: XENP16432, XENP16435 (a bivalent mAb based on the parental clone from which the anti-ICOS arm of XmAb23104 was generated), XENP20111, XENP24901, XENP16432 in combination with XENP16435, XENP20111 in combination with XENP24901, and XmAb23104 (as well as XENP15074 as control). Following incubation with the test articles, cell supernatants were collected and assayed for IFNγ and IL-2. Data depicting IFNγ secretion are depicted in FIG. 7A, and data depicting IL-2 secretion are depicted in FIGS. 7B and 8. The data show that XmAb23104 is superior at induction of IFNγ and IL-2 secretion in comparison to a bivalent anti-PD-1 mAb based on nivolumab.

[0889] 5. 11E: XmAb23104 Enhances IFNγ Secretion in an MLR Assay

[0890] The ability of XmAb23104 to enhance IFNγ secretion was investigated in a mixed-lymphocyte reaction (also known as a mixed-lymphocyte reaction or MLR). Mixing lymphocytes from unique donors induces allogeneic T cell activation and proliferation, and subsequently upregulation of checkpoint receptors such as PD-1. Human PBMCs from 11 unique donors were mixed to generate 22 unique MLR mixes (400,000 cells/donor in a total volume of 100 μL) and treated with 20 μg/mL of the following test articles for 5 days: XENP16432, XENP19686 (a bivalent anti-PD-1 mAb based on the anti-PD-1 arm from XmAb23104), XENP16435, XENP21622 (a monovalent anti-PD-1 scFv-Fc fusion based on the anti-PD-1 arm from XmAb23104 with M428L/N424S Xtend Fc; sequence depicted in FIG. 9), XENP20266 (a monovalent anti-ICOS Fab-Fc fusion based on the parental clone from which the anti-ICOS arm of XmAb23104 was generated), XENP16432 in combination with XENP16435, XENP21622 in combination with XENP20266, or XmAb23104 (and XENP15074 as control). Following incubation, cell supernatants were collected and assayed for IFNγ. Data depicting induction of IFNγ by indicated test articles over control anti-RSV mAb (XENP15074) are shown in FIG. 10. Consistent with Example 1D, the data show that XmAb23104 is superior at induction of IFNγ secretion in comparison to a bivalent anti-PD-1 mAb based on nivolumab.

[0891] 6. 11F: XmAb23104 Enhanced Cytokine Secretion is Dose-Dependent Manner

[0892] Human PBMCs from 2 donors were stimulated with 100 ng/mL SEB for 2 days. Cells were then washed two times and re-stimulated with 100 ng/mL SEB in combination with XmAb23104 or a combination of XENP20111 and XENP24901 (at equimolar PD-1 and ICOS binding concentrations relative to XmAb23104). 24 hours after treatment, cell supernatant was collected and assayed for IFNγ and IL-2, as depicted respectively in FIGS. 11-12.

### L. Example 12: XmAb23104 in Combination with Anti-CTLA-4 mAb

[0893] Next we investigated the effect of combining XmAb23104 with an additional checkpoint inhibitor. Human PBMCs from 22 donors were stimulated with 100 ng/mL SEB for 2 days. Cells were washed two times, and re-stimulated with 100 ng/mL SEB in combination with 20 μg/mL XmAb23104 alone, XENP16433 (a bivalent anti-CTLA-4 mAb based on ipilimumab; sequence depicted in FIG. 13), or XmAb23104 in combination with XENP16433 (and XENP15074 as a control). Cell supernatant was then collected and assayed for IFNγ and IL-2, as depicted respectively in FIGS. 14A-B. The data show that the combination of XmAb23104 with XENP16433 induced greater cytokine secretion than each antibody alone.

### M. Example 13: XmAb23104 Enhances Greater T Cell Activation In Vitro than αPD-1 Alone as Indicated by TL-2 Secretion

[0894] 21 unique MLR reactions were treated with 20 μg/mL of XmAb23104, XENP16432 (a bivalent mAb based on nivolumab with ablated effector function), or XENP15074 (a bivalent anti-RSV mAb as isotype control) for 6 days. Cell supernatants were collected and assayed on MULTI-SPOT 384-Well Spot plates (Meso Scale Discovery, Rockville, Md.) for TL-2 concentration. Data showing fold change in TL-2 secretion are depicted in FIG. 310, and show that XmAb23104 enhances greater T cell activation than anti-PD-1 mAb alone.

### N. Example 14: XmAb23104 Induces Greater Human Leukocyte Expansion and GVHD in huPBMC-Engrafted NSG Mice than αPD-1 Alone

[0895] NSG mice (10 per group) were engrafted via IV-OSP with 10×10⁶ human PBMCs on Day −1. On Days 0, 7, 14, and 21, mice were dosed with XmAb23104 or XENP16432. Mice were weighted on Days −2, 3, 6, 10, 13, 18, 21, 24, and 27, and blood was drawn on Days 8, 14, 21 and 28 to count leukocyte populations. and CD45+ cell counts on Day 8 are depicted in FIG. 111, and changes in body weight over time (as a percentage of initial body weight on Day −2) are depicted in FIG. 112. The data show that XmAb23104 induced greater leukocyte expansion and enhanced GVHD in huPBMC-engrafted NSG mice in comparison to αPD-1 alone.

### O. Example 15: XmAb23104 Enhances Allogeneic Anti-Tumor Response in NSG Mice

[0896] NSG mice (10 per group) were intradermally inoculated with 3×106 pp65-transduced MCF-7 cells on Day −14. Mice were then intraperitoneally injected with 5×106 pp65-reactive human PBMCs (or PBS for control) and treated with the indicated test articles on Day 0, and further treated with the indicated test articles on Days 7, 14, and 21. CD45+ cell counts on Day 21 post-huPBMC engraftment are depicted in FIG. 113. Tumor volume on Days 21 and 38 post-huPBMC engraftment are depicted in FIGS. 114 and 115. Tumor volume as a time course over the duration of the study are depicted in FIG. 116. The data show that XmAb23104 enhances allogeneic anti-tumor response in NSG mice. Notably, treatment with anti-PD-1×anti-ICOS bispecific XmAb23104 is more efficacious than PD-1 blockade alone (using a bivalent anti-PD-1 mAb).

### P. Example 16: Costim×Checkpoint Blockade Bispecific Antibodies are Highly Active In Vivo

[0897] Here we show an earlier GVHD study investigating prototype anti-PD-1×anti-ICOS XENP20896 and prototype dual checkpoint inhibitor bispecific antibody XENP20053 (blocking PD-1 and CTLA-4 checkpoint receptors; sequences for which are depicted in FIG. 117) in a GVHD study.

[0898] NSG mice (10 per group) were injected with PBMC on Day 0, and then treated with anti-PD-1 mAb, anti-PD-1 mAb in combination with anti-CTLA-4 mAb, anti-PD-1×anti-CTLA-4 bispecific XENP20053, or anti-PD-1×anti-ICOS bispecific XENP20896 on Days 1, 8, 15, 22, and 29. CD45+ cell counts on Day 14 post-huPBMC engraftment are depicted in FIG. 118. The data show that anti-PD-1×anti-ICOS bispecific XENP20896 is highly active in vivo, and enhances engraftment in comparison to anti-PD-1 blockade alone with an anti-PD-1 antibody, dual checkpoint blockade with anti-PD-1 and anti-CTLA-4 antibodies, as well as dual checkpoint blockade with an illustrative anti-PD-1×anti-CTLA-4 bispecific antibody.

### Q. Example 17: XmAb23104 does not Induce Cytokine Release in Naive T Cells and is not Superagonistic

[0899] PBMCs were thawed overnight and treated with 20 μg/mL of indicated soluble or plate bound test articles for 24 hours. Anti-CD3 antibody was clone OKT3. Cell supernatants were then collected and assayed with V-PLEX Proinflammatory Panel 1 Human Kit (Meso Scale, Rockville, Md.). Each point represents a unique human donor tested in technical singlet. Paired t tests were used to determine statistical significance (n.s. signifies a p-value>0.05). The data depicted in FIG. 119 show that XmAb23104 does not induce cytokine release (A: IFNγ; B: IL-1B; C: IL-2; D: IL-4; E: IL-8; F: IL-6; G: IL-10; H: IL-12p70; I: IL-13; J: TNFα) in naive T cells.

[0900] Superagonstic properties of XmAb23104 was also assessed by air-drying per the Stebbings protocol (Stebbings R. et al. 2007). Air-drying of test articles was achieved by drying in a SpeedVac™ for 2 hours at room temperature. Human PBMCs were treated for 24 hours with 10 μg of air-dried XmAb23104, and activity was compared to 10 μg of air-dried XENP15074 (anti-RSV negative isotype control), the superagonist TGN1412 (XENP29154; sequences for which are depicted in FIG. 120), or anti-CD3 (OKT3). TGN1412 did not possess any activity when bound to the assay plate using an aqueous adsorption method; however, air-dried TGN1412 (as well as anti-CD3 mAb) promoted IFNγ, IL-10, IL-2, IL-4, IL-6, IL-8, IL-10, IL-12p70, IL-13, and TNF cytokine secretion from unstimulated human PBMC. In comparison, the cytokine levels in PBMCs treated with air-dried XmAb23104 remained similar to the negative control of air-dried XENP15074 (data shown in FIG. 121).

### R. Example 18: Further Characterization of Binding by XmAb23104

[0901] 1. A: XmAb23104 Binds Human and Cynomolgus PD-1 and ICOS

[0902] Binding of XmAb23104 to human and cynomolgus PD-1 and ICOS was characterized using Octet, a BioLayer Interferometry (BLI)-based method. Binding affinities were obtained by analyzing the processed data globally using a 1:1 binding model. Octet sensorgrams are shown in FIG. 128 and FIG. 129. The resulting equilibrium dissociation constants (K_{D}), association rate constants (kₐ), and dissociation constants (k_{d}) are presented in FIG. 130. Affinities for both human and cynomolgus PD-1 were measured at approximately 2.8 and 5.8 nM respectively. Binding affinities for human and cyno ICOS were 2.9 and 2.6 nM respectively.

[0903] 2. B: XmAb23104 competes for binding with ligands of PD-1 and ICOS

[0904] Binding of PD-L1 and PD-L2 to PD-1 with and without XmAb23104 was characterized using Octet, a BioLayer Interferometry (BLI)-based method. Octet sensorgrams are shown in FIG. 132. In both cases, 100 nM PD-1 show a binding signal with their ligands (PDL1/PDL2). In the presence of excess XmAb23104, pre-incubated with PD-1 at room temperature for 1 hour prior to the experiment, there is no binding signal observed to any ligands due to the competition of XmAb23104 with PD-1 for its ligands PD-L1 and PD-L2.

[0905] In another experiment to investigate the competition of XmAb23104 with ICOS ligand (ICOSL) and well as with PD-1 ligands (PD-L1 and PD-L2), HEK 293T cells expressing PD-1 and ICOS were incubated with various concentrations of XmAb23104 for 30 minutes at 4° C. Following incubation, 1 μg/mL PD-L1-mFc-Alexa647, 0.1 μg/mL PD-L1-mFc-Alexa647, or 0.5 μg/mL ICOSL-mFc-Alex647 was added and incubated for 30 minutes at 4° C. Binding of soluble ligands was visualized with flow cytometry. Data are depicted in FIG. 119, and show that XmAb23104 blocked binding of soluble PD-L1 (EC₁₀ 1 ng/mL and EC₉₀ 7100 ng/mL) and PDL2 (EC₁₀ 3 ng/mL and EC₉₀ 5300 ng/mL) antigen binding to cell surface-expressed PD1 receptor antigen in a dose-dependent fashion, as well as binding of soluble ICOSL (EC₁₀ 20 ng/mL, EC₉₀ 600 ng/mL) to cell surface-expressed ICOS receptor in a dose-dependent fashion.

[0906] 3. C: XmAb23104 does not Bind FcγR

[0907] Binding of XmAb23104 to human, cynomolgus, and mouse FcγRs was characterized using Octet, a BioLayer Interferometry (BLI)-based method. A comparator antibody was also tested using similar methods: anti-CD19 antibody with a native IgG1 constant region. Octet sensorgrams are shown in the FIG. 127 to FIG. 129. While the expected binding patterns for a native human IgG1 antibody were observed for the comparator antibody, no binding for any of the FcγRs was detected for XmAb23104.

[0908] 4. D: XmAb23104 Binds Human, Cynomolgus, and Mouse FcRn at pH 6.0

[0909] Binding of XmAb23104 to human, cynomolgus, and mouse FcRn at pH 6.0 was characterized using Octet, a BioLayer Interferometry (BLI)-based method. A comparator antibody was also tested using similar methods: XENP20896, an anti-PD1×anti-ICOS bispecific antibody containing the same variable regions and engineered constant regions as XmAb23104 but lacking the amino acid substitutions XmAb23104 contains for enhancing FcRn binding. Binding affinities were obtained by analyzing the processed data globally using a 1:1 Langmuir model. Octet sensorgrams are shown in FIG. 131. The resulting equilibrium dissociation constants (K_{D}) are presented Figure. Affinities measured for XmAb23104 are tighter than those measured for the comparator, indicating that the Fc substitutions contained in XmAb23104 improve the affinity for FcRn at pH 6.0, the physiologically relevant pH for endosome trafficking.

[0910] 5. E: XmAb23104 Simultaneously Binds PD-1 and ICOS

[0911] Binding of XmAb23104 to both ICOS and PD1 antigens was tested using an in-tandem dip approach using BLI technology on the Octet HTX instrument. First, biosensors were loaded with ICOS, then dipped into either XmAb23104 or buffer as a control, and finally, into PD-1. FIG. 132 shows the binding sensorgrams which indicate that XmAb23104 binds to both antigens simultaneously. The XmAb23104 sensorgram continues to increase in signal during the final PD-1 antigen dip while the control sensorgram with no XmAb23104 loaded remains flat.

### S. Example 19: Further In Vitro Characterization of XmAb23104

[0912] 1. A: XmAb23104 Dose-Dependently Promoted IL-2 and IFNγ Secretion from SEB-Stimulated Human PBMC

[0913] IL-2 and IFNγ production was assessed in SEB-stimulated PBMC treated with soluble XmAb23104. Human PBMC (100,000) were cultured in RPMI1640 with 10% FBS and stimulated with 100 ng/mL SEB (48 hours or 96 hours; 37° C.). Logistical considerations necessitated two sets of pre-stimulation conditions; of note, 96 hours of pre-stimulation abrogates detection of IL-2. Following stimulation, cells were washed two times in warm culture medium and then cultured in medium containing the indicated amount of XmAb23104 plus 100 ng/mL SEB (18 hours; 37° C.). To evaluate cytokine release, culture supernatant was collected 18 hours after treatment, then assayed for IL-2 and IFNγ secretion by ELISA (MSD® format) per the manufacturer's instructions. Samples were assayed in technical singlet.

[0914] Soluble XmAb23104 promoted a dose-dependent increase in IL-2 and IFNγ in all 19 donors tested with variable maximum amounts of cytokine expression induced between donors varying approximately between 1 ng/mL to 10 ng/mL for IL-2 (FIG. 133) and from 5 ng/mL to 25 ng/mL for IFNγ (FIG. 134 The potency was derived from curve fits, with least-squares methods all providing acceptable curve fits from which the EC values were derived. The average potency of XmAb23104 to induce IL-2 release from SEB-stimulated PBMC is: EC₁₀ 44 ng/mL, EC₂₀ 79 ng/mL, EC₃₀ 125 ng/mL, EC₅₀ 273 ng/mL, EC₅₀ 1201 ng/mL, and EC₉₀ 3215 ng/mL. The average potency of XmAb23104 in stimulating IFNγ release from human SEB-stimulated PBMC is: EC₁₀ 21 ng/mL, EC₂₀ 34 ng/mL, EC₃₀ 48 ng/mL, EC₅₀ 81 ng/mL, EC₅₀ 206 ng/mL, and EC₉₀ 384 ng/mL.

[0915] 2. B: XmAb23104 Dose-Dependently Promotes IFNγ Secretion from SEB-Stimulated Cynomolgus PBMC

[0916] Because IFNγ release was the most sensitive cytokine induced by XmAb23104 in human PBMC, we also quantified IFNγ secretion from SEB-stimulated PBMC from 10 cynomolgus monkeys. Cynomolgus PBMC (400,000) were cultured in RPMI1640 with 10% FBS and stimulated with 100 ng/mL SEB. Following stimulation, cells were washed two times in warm culture medium and then cultured in medium containing the indicated amount of XmAb23104 plus 100 ng/mL SEB (18 hours; 37° C.). To evaluate cytokine release, culture supernatant was collected 18 hours after treatment and assayed for IFNγ secretion by ELISA (MSD® format) per the manufacturer's instructions. Samples were assayed in technical singlet, data for which are depicted in FIG. 135.

[0917] The potency of XmAb23104 was derived from the five out of 10 monkey PBMC that generated data that could be fit to a sigmoidal dose response curve. XmAb23104 stimulated IFNγ release from monkey PBMC with the following average effective potencies: EC₁₀ 32 ng/mL, EC₂₀ 45 ng/mL, EC₃₀ 56 ng/mL, EC₅₀ 81 ng/mL, EC₈₀ 155 ng/mL, and EC₉₀ 233 ng/mL. For comparison, the EC₅₀ for IFNγ release from SEB stimulated human PBMC was 81 ng/mL, which has similar potency to the monkey SEB stimulated PBMC.

### T. Example 20: XmAb23104 Anti-Tumor Response is Dose-Dependent

[0918] In the study described in Example 15 investigating the enhancement of allogeneic anti-tumor response in NSG mice by XmAb23104, treatment with additional concentrations of XmAb23104 was investigated. The data depicted in FIGS. 114-116 show treatment with 5.0 mg/kg of XmAb23104. In FIG. 136 and FIG. 137, we depict data additionally showing treatment with 0.3 mg/kg and 1.0 mg/kg of Xmab23104.

### U. Example 21: XmAb23104 Enhances Induction of Leukocyte Expansion in huPBMC-Engrafted NSG Mice in Comparison to Comparator Anti-ICOS mAb

[0919] Since JTX-2011 is being administered to patients in combination with nivolumab, the leukocyte expanding activity of XmAb23104 was compared to the activity of JTX-2011 alone (in-house produced as XENP23058; sequences depicted in FIG. 138) and in combination with XENP16432 (anti-PD-1 mAb based on nivolumab with E233P/L234V/L235A/G236del/S267K ablation variants) in a mouse GVHD study. We also investigated the leukocyte expanding activity of XENP23057 (anti-ICOS mAb based on JTX-2011 with E233P/L234V/L235A/G236del/S267K ablation variants; sequences depicted in FIG. 139) alone and in combination with XENP16432. NSG mice were engrafted with 5×10⁶ huPBMCs on Day −1, followed by dosing with the indicated test articles at indicated concentrations on Days 0, 7, 14, and 21. Mice were bled and whole blood analyzed to investigate the expansion of various human lymphocyte populations, data for which are depicted in FIG. 140 for Day 21.

[0920] Notably, the data show that JTX-2011 (XENP23058), alone and in combination with XENP16432, decreased human leukocytes in comparison to induction of leukocyte expansion by XENP16432 and XmAb23104. We reasoned that this is due to the WT IgG1 backbone of XENP23058 which induced depletion of ICOS positive cells by ADCC or CDC through binding of activating FcγR. Consistent with this reasoning, XENP23057 which has ablated FcγR binding, alone and in combination with XENP16432, induced expansion of human leukocytes.

The application's sequence listing, which the Patent Office published only in electronic form, follows.

SEQUENCE LISTING (30385 sequences)

SEQ ID NO: 1 - protein, 222 aa, synthetic construct
  REGION 1..222: note = Description of Artificial Sequence: Synthetic polypeptide
  REGION 1..222: note = XENP022721 1C11_H1L3_Fab Heavy Chain
QIQLVQSGAEVKKPGASVKVSCKASGYTFTHYGMNWVRQAPGQGLEWMGWINTYTGEPTYADKFQGRVTMTLDTSTSTAYMELSSLRSEDTAVYFCARDYYGSSPYWGQGTLVTVSSASTKGPSVFPLAPSSKSTSGGTAALGCLVKDYFPEPVTVSWNSGALTSGVHTFPAVLQSSGLYSLSSVVTVPSSSLGTQTYICNVNHKPSNTKVDKKVEPKSCGS

SEQ ID NO: 2 - protein, 117 aa, synthetic construct
  REGION 1..117: note = Description of Artificial Sequence: Synthetic polypeptide
  REGION 1..117: note = VH of XENP022721
QIQLVQSGAEVKKPGASVKVSCKASGYTFTHYGMNWVRQAPGQGLEWMGWINTYTGEPTYADKFQGRVTMTLDTSTSTAYMELSSLRSEDTAVYFCARDYYGSSPYWGQGTLVTVSS

SEQ ID NO: 3 - protein, 5 aa, synthetic construct
  REGION 1..5: note = Description of Artificial Sequence: Synthetic peptide
  REGION 1..5: note = XENP022721 vhCDR1
HYGMN

SEQ ID NO: 4 - protein, 17 aa, synthetic construct
  REGION 1..17: note = Description of Artificial Sequence: Synthetic peptide
  REGION 1..17: note = XENP022721 vhCDR2
WINTYTGEPTYADKFQG

SEQ ID NO: 5 - protein, 8 aa, synthetic construct
  REGION 1..8: note = Description of Artificial Sequence: Synthetic peptide
  REGION 1..8: note = XENP022721 vhCDR3
DYYGSSPY

SEQ ID NO: 6 - protein, 219 aa, synthetic construct
  REGION 1..219: note = Description of Artificial Sequence: Synthetic polypeptide
  REGION 1..219: note = XENP022721 1C11_H1L3_Fab Light Chain
DVLMTQSPDSLAVSLGERATINCKSSQSIVHSNGNTYLEWYQQKPGQSPKLLIYKVSNRFSGVPDRFSGSGSGTDFTLTISSLQAEDVAVYYCFQGSHVPNTFGGGTKVEIKRTVAAPSVFIFPPSDEQLKSGTASVVCLLNNFYPREAKVQWKVDNALQSGNSQESVTEQDSKDSTYSLSSTLTLSKADYEKHKVYACEVTHQGLSSPVTKSFNRGEC

SEQ ID NO: 7 - protein, 112 aa, synthetic construct
  REGION 1..112: note = Description of Artificial Sequence: Synthetic polypeptide
  REGION 1..112: note = VL of XENP022721
DVLMTQSPDSLAVSLGERATINCKSSQSIVHSNGNTYLEWYQQKPGQSPKLLIYKVSNRFSGVPDRFSGSGSGTDFTLTISSLQAEDVAVYYCFQGSHVPNTFGGGTKVEIK

SEQ ID NO: 8 - protein, 16 aa, synthetic construct
  REGION 1..16: note = Description of Artificial Sequence: Synthetic peptide
  REGION 1..16: note = XENP022721 vlCDR1
KSSQSIVHSNGNTYLE

SEQ ID NO: 9 - protein, 7 aa, synthetic construct
  REGION 1..7: note = Description of Artificial Sequence: Synthetic peptide
  REGION 1..7: note = XENP022721 vlCDR2
KVSNRFS

SEQ ID NO: 10 - protein, 9 aa, synthetic construct
  REGION 1..9: note = Description of Artificial Sequence: Synthetic peptide
  REGION 1..9: note = XENP022721 vlCDR3
FQGSHVPNT

SEQ ID NO: 11 - protein, 222 aa, synthetic construct
  REGION 1..222: note = Description of Artificial Sequence: Synthetic polypeptide
  REGION 1..222: note = XENP022722 1C11_H2L1_Fab Heavy Chain
EIQLLESGGGLVQPGGSLRLSCAASGYTFTHYGMNWVRQAPGKGLEWVSWINTYTGEPTYADSVKGRFTISLDTSKSTAYLQMNSLRAEDTAVYFCARDYYGSSPYWGQGTLVTVSSASTKGPSVFPLAPSSKSTSGGTAALGCLVKDYFPEPVTVSWNSGALTSGVHTFPAVLQSSGLYSLSSVVTVPSSSLGTQTYICNVNHKPSNTKVDKKVEPKSCGS

SEQ ID NO: 12 - protein, 117 aa, synthetic construct
  REGION 1..117: note = Description of Artificial Sequence: Synthetic polypeptide
  REGION 1..117: note = VH of XENP022722
EIQLLESGGGLVQPGGSLRLSCAASGYTFTHYGMNWVRQAPGKGLEWVSWINTYTGEPTYADSVKGRFTISLDTSKSTAYLQMNSLRAEDTAVYFCARDYYGSSPYWGQGTLVTVSS

SEQ ID NO: 13 - protein, 5 aa, synthetic construct
  REGION 1..5: note = Description of Artificial Sequence: Synthetic peptide
  REGION 1..5: note = XENP022722 vhCDR1
HYGMN

SEQ ID NO: 14 - protein, 17 aa, synthetic construct
  REGION 1..17: note = Description of Artificial Sequence: Synthetic peptide
  REGION 1..17: note = XENP022722 vhCDR2
WINTYTGEPTYADSVKG

SEQ ID NO: 15 - protein, 8 aa, synthetic construct
  REGION 1..8: note = Description of Artificial Sequence: Synthetic peptide
  REGION 1..8: note = XENP022722 vhCDR3
DYYGSSPY

SEQ ID NO: 16 - protein, 219 aa, synthetic construct
  REGION 1..219: note = Description of Artificial Sequence: Synthetic polypeptide
  REGION 1..219: note = XENP022722 1C11_H2L1_Fab Light Chain
DVLMTQSPLSLPVTPGEPASISCRSSQSIVHSNGNTYLEWYLQKPGQSPQLLIYKVSNRFSGVPDRFSGSGSGTDFTLKISRVEAEDVGVYYCFQGSHVPNTFGGGTKVEIKRTVAAPSVFIFPPSDEQLKSGTASVVCLLNNFYPREAKVQWKVDNALQSGNSQESVTEQDSKDSTYSLSSTLTLSKADYEKHKVYACEVTHQGLSSPVTKSFNRGEC

SEQ ID NO: 17 - protein, 112 aa, synthetic construct
  REGION 1..112: note = Description of Artificial Sequence: Synthetic polypeptide
  REGION 1..112: note = VL of XENP022722
DVLMTQSPLSLPVTPGEPASISCRSSQSIVHSNGNTYLEWYLQKPGQSPQLLIYKVSNRFSGVPDRFSGSGSGTDFTLKISRVEAEDVGVYYCFQGSHVPNTFGGGTKVEIK

SEQ ID NO: 18 - protein, 16 aa, synthetic construct
  REGION 1..16: note = Description of Artificial Sequence: Synthetic peptide
  REGION 1..16: note = XENP022722 vlCDR1
RSSQSIVHSNGNTYLE

SEQ ID NO: 19 - protein, 7 aa, synthetic construct
  REGION 1..7: note = Description of Artificial Sequence: Synthetic peptide
  REGION 1..7: note = XENP022722 vlCDR2
KVSNRFS

SEQ ID NO: 20 - protein, 9 aa, synthetic construct
  REGION 1..9: note = Description of Artificial Sequence: Synthetic peptide
  REGION 1..9: note = XENP022722 vlCDR3
FQGSHVPNT

SEQ ID NO: 21 - protein, 222 aa, synthetic construct; identical to SEQ ID NO: 11
  REGION 1..222: note = Description of Artificial Sequence: Synthetic polypeptide
  REGION 1..222: note = XENP022723 1C11_H2L2_Fab Heavy Chain

SEQ ID NO: 22 - protein, 117 aa, synthetic construct; identical to SEQ ID NO: 12
  REGION 1..117: note = Description of Artificial Sequence: Synthetic polypeptide
  REGION 1..117: note = VH of XENP022723

SEQ ID NO: 23 - protein, 5 aa, synthetic construct
  REGION 1..5: note = Description of Artificial Sequence: Synthetic peptide
  REGION 1..5: note = XENP022723 vhCDR1
HYGMN

SEQ ID NO: 24 - protein, 17 aa, synthetic construct
  REGION 1..17: note = Description of Artificial Sequence: Synthetic peptide
  REGION 1..17: note = XENP022723 vhCDR2
WINTYTGEPTYADSVKG

SEQ ID NO: 25 - protein, 8 aa, synthetic construct
  REGION 1..8: note = Description of Artificial Sequence: Synthetic peptide
  REGION 1..8: note = XENP022723 vhCDR3
DYYGSSPY

SEQ ID NO: 26 - protein, 219 aa, synthetic construct
  REGION 1..219: note = Description of Artificial Sequence: Synthetic polypeptide
  REGION 1..219: note = XENP022723 1C11_H2L2_Fab Light Chain
DVLMTQSPLSLPVTLGQPASISCRSSQSIVHSNGNTYLEWYQQRPGQSPRLLIYKVSNRFSGVPDRFSGSGSGTDFTLKISRVEAEDVGVYYCFQGSHVPNTFGGGTKVEIKRTVAAPSVFIFPPSDEQLKSGTASVVCLLNNFYPREAKVQWKVDNALQSGNSQESVTEQDSKDSTYSLSSTLTLSKADYEKHKVYACEVTHQGLSSPVTKSFNRGEC

SEQ ID NO: 27 - protein, 112 aa, synthetic construct
  REGION 1..112: note = Description of Artificial Sequence: Synthetic polypeptide
  REGION 1..112: note = VL of XENP022723
DVLMTQSPLSLPVTLGQPASISCRSSQSIVHSNGNTYLEWYQQRPGQSPRLLIYKVSNRFSGVPDRFSGSGSGTDFTLKISRVEAEDVGVYYCFQGSHVPNTFGGGTKVEIK

SEQ ID NO: 28 - protein, 16 aa, synthetic construct
  REGION 1..16: note = Description of Artificial Sequence: Synthetic peptide
  REGION 1..16: note = XENP022723 vlCDR1
RSSQSIVHSNGNTYLE

SEQ ID NO: 29 - protein, 7 aa, synthetic construct
  REGION 1..7: note = Description of Artificial Sequence: Synthetic peptide
  REGION 1..7: note = XENP022723 vlCDR2
KVSNRFS

SEQ ID NO: 30 - protein, 9 aa, synthetic construct
  REGION 1..9: note = Description of Artificial Sequence: Synthetic peptide
  REGION 1..9: note = XENP022723 vlCDR3
FQGSHVPNT

SEQ ID NO: 31 - protein, 222 aa, synthetic construct
  REGION 1..222: note = Description of Artificial Sequence: Synthetic polypeptide
  REGION 1..222: note = XENP022724 1C11_H3L3_Fab Heavy Chain
QIQLVQSGSELKKPGASVKVSCKASGYTFTHYGMNWVRQAPGQGLEWMGWINTYTGEPTYADGFTGRFVFSLDTSVSTAYLQISSLKAEDTAVYFCARDYYGSSPYWGQGTLVTVSSASTKGPSVFPLAPSSKSTSGGTAALGCLVKDYFPEPVTVSWNSGALTSGVHTFPAVLQSSGLYSLSSVVTVPSSSLGTQTYICNVNHKPSNTKVDKKVEPKSCGS

SEQ ID NO: 32 - protein, 117 aa, synthetic construct
  REGION 1..117: note = Description of Artificial Sequence: Synthetic polypeptide
  REGION 1..117: note = VH of XENP022724
QIQLVQSGSELKKPGASVKVSCKASGYTFTHYGMNWVRQAPGQGLEWMGWINTYTGEPTYADGFTGRFVFSLDTSVSTAYLQISSLKAEDTAVYFCARDYYGSSPYWGQGTLVTVSS

SEQ ID NO: 33 - protein, 5 aa, synthetic construct
  REGION 1..5: note = Description of Artificial Sequence: Synthetic peptide
  REGION 1..5: note = XENP022724 vhCDR1
HYGMN

SEQ ID NO: 34 - protein, 17 aa, synthetic construct
  REGION 1..17: note = Description of Artificial Sequence: Synthetic peptide
  REGION 1..17: note = XENP022724 vhCDR2
WINTYTGEPTYADGFTG

SEQ ID NO: 35 - protein, 8 aa, synthetic construct
  REGION 1..8: note = Description of Artificial Sequence: Synthetic peptide
  REGION 1..8: note = XENP022724 vhCDR3
DYYGSSPY

SEQ ID NO: 36 - protein, 219 aa, synthetic construct; identical to SEQ ID NO: 6
  REGION 1..219: note = Description of Artificial Sequence: Synthetic polypeptide
  REGION 1..219: note = XENP022724 1C11_H3L3_Fab Light Chain

SEQ ID NO: 37 - protein, 112 aa, synthetic construct; identical to SEQ ID NO: 7
  REGION 1..112: note = Description of Artificial Sequence: Synthetic polypeptide
  REGION 1..112: note = VL of XENP022724

SEQ ID NO: 38 - protein, 16 aa, synthetic construct
  REGION 1..16: note = Description of Artificial Sequence: Synthetic peptide
  REGION 1..16: note = XENP022724 vlCDR1
KSSQSIVHSNGNTYLE

SEQ ID NO: 39 - protein, 7 aa, synthetic construct
  REGION 1..7: note = Description of Artificial Sequence: Synthetic peptide
  REGION 1..7: note = XENP022724 vlCDR2
KVSNRFS

SEQ ID NO: 40 - protein, 9 aa, synthetic construct
  REGION 1..9: note = Description of Artificial Sequence: Synthetic peptide
  REGION 1..9: note = XENP022724 vlCDR3
FQGSHVPNT

SEQ ID NO: 41 - protein, 222 aa, synthetic construct
  REGION 1..222: note = Description of Artificial Sequence: Synthetic polypeptide
  REGION 1..222: note = XENP022725 1C11_H0L0_Fab Heavy Chain
QIQLVQSGPELKKPGETVKISCRASGYTFTHYGMNWVKQAPGKGLKWMGWINTYTGEPTYADDFKGRFAFSLETSASTAYLQINNLKNEDTATYFCARDYYGSSPYWGQGTTLTVSSASTKGPSVFPLAPSSKSTSGGTAALGCLVKDYFPEPVTVSWNSGALTSGVHTFPAVLQSSGLYSLSSVVTVPSSSLGTQTYICNVNHKPSNTKVDKKVEPKSCGS

SEQ ID NO: 42 - protein, 117 aa, synthetic construct
  REGION 1..117: note = Description of Artificial Sequence: Synthetic polypeptide
  REGION 1..117: note = VH of XENP022725
QIQLVQSGPELKKPGETVKISCRASGYTFTHYGMNWVKQAPGKGLKWMGWINTYTGEPTYADDFKGRFAFSLETSASTAYLQINNLKNEDTATYFCARDYYGSSPYWGQGTTLTVSS

SEQ ID NO: 43 - protein, 5 aa, synthetic construct
  REGION 1..5: note = Description of Artificial Sequence: Synthetic peptide
  REGION 1..5: note = XENP022725 vhCDR1
HYGMN

SEQ ID NO: 44 - protein, 17 aa, synthetic construct
  REGION 1..17: note = Description of Artificial Sequence: Synthetic peptide
  REGION 1..17: note = XENP022725 vhCDR2
WINTYTGEPTYADDFKG

SEQ ID NO: 45 - protein, 8 aa, synthetic construct
  REGION 1..8: note = Description of Artificial Sequence: Synthetic peptide
  REGION 1..8: note = XENP022725 vhCDR3
DYYGSSPY

SEQ ID NO: 46 - protein, 219 aa, synthetic construct
  REGION 1..219: note = Description of Artificial Sequence: Synthetic polypeptide
  REGION 1..219: note = XENP022725 1C11_H0L0_Fab Light Chain
DVLMTQTPLSLPVSLGDQASISCRSSQSIVHSNGNTYLEWYLQKPGQSPKLLIYKVSNRFSGVPDRFSGSGSGTDFTLKISRVEAEDLGVYYCFQGSHVPNTFGGGTKLEIKRTVAAPSVFIFPPSDEQLKSGTASVVCLLNNFYPREAKVQWKVDNALQSGNSQESVTEQDSKDSTYSLSSTLTLSKADYEKHKVYACEVTHQGLSSPVTKSFNRGEC

SEQ ID NO: 47 - protein, 112 aa, synthetic construct
  REGION 1..112: note = Description of Artificial Sequence: Synthetic polypeptide
  REGION 1..112: note = VL of XENP022725
DVLMTQTPLSLPVSLGDQASISCRSSQSIVHSNGNTYLEWYLQKPGQSPKLLIYKVSNRFSGVPDRFSGSGSGTDFTLKISRVEAEDLGVYYCFQGSHVPNTFGGGTKLEIK

SEQ ID NO: 48 - protein, 16 aa, synthetic construct
  REGION 1..16: note = Description of Artificial Sequence: Synthetic peptide
  REGION 1..16: note = XENP022725 vlCDR1
RSSQSIVHSNGNTYLE

SEQ ID NO: 49 - protein, 7 aa, synthetic construct
  REGION 1..7: note = Description of Artificial Sequence: Synthetic peptide
  REGION 1..7: note = XENP022725 vlCDR2
KVSNRFS

SEQ ID NO: 50 - protein, 9 aa, synthetic construct
  REGION 1..9: note = Description of Artificial Sequence: Synthetic peptide
  REGION 1..9: note = XENP022725 vlCDR3
FQGSHVPNT

SEQ ID NO: 51 - protein, 222 aa, synthetic construct; identical to SEQ ID NO: 31
  REGION 1..222: note = Description of Artificial Sequence: Synthetic polypeptide
  REGION 1..222: note = XENP022991 1C11_H3L1_Fab Heavy Chain

SEQ ID NO: 52 - protein, 117 aa, synthetic construct; identical to SEQ ID NO: 32
  REGION 1..117: note = Description of Artificial Sequence: Synthetic polypeptide
  REGION 1..117: note = VH of XENP022991

SEQ ID NO: 53 - protein, 5 aa, synthetic construct
  REGION 1..5: note = Description of Artificial Sequence: Synthetic peptide
  REGION 1..5: note = XENP022991 vhCDR1
HYGMN

SEQ ID NO: 54 - protein, 17 aa, synthetic construct
  REGION 1..17: note = Description of Artificial Sequence: Synthetic peptide
  REGION 1..17: note = XENP022991 vhCDR2
WINTYTGEPTYADGFTG

SEQ ID NO: 55 - protein, 8 aa, synthetic construct
  REGION 1..8: note = Description of Artificial Sequence: Synthetic peptide
  REGION 1..8: note = XENP022991 vhCDR3
DYYGSSPY

SEQ ID NO: 56 - protein, 219 aa, synthetic construct; identical to SEQ ID NO: 16
  REGION 1..219: note = Description of Artificial Sequence: Synthetic polypeptide
  REGION 1..219: note = XENP022991 1C11_H3L1_Fab Light Chain

SEQ ID NO: 57 - protein, 112 aa, synthetic construct; identical to SEQ ID NO: 17
  REGION 1..112: note = Description of Artificial Sequence: Synthetic polypeptide
  REGION 1..112: note = VL of XENP022991

SEQ ID NO: 58 - protein, 16 aa, synthetic construct
  REGION 1..16: note = Description of Artificial Sequence: Synthetic peptide
  REGION 1..16: note = XENP022991 vlCDR1
RSSQSIVHSNGNTYLE

SEQ ID NO: 59 - protein, 7 aa, synthetic construct
  REGION 1..7: note = Description of Artificial Sequence: Synthetic peptide
  REGION 1..7: note = XENP022991 vlCDR2
KVSNRFS

SEQ ID NO: 60 - protein, 9 aa, synthetic construct
  REGION 1..9: note = Description of Artificial Sequence: Synthetic peptide
  REGION 1..9: note = XENP022991 vlCDR3
FQGSHVPNT

SEQ ID NO: 61 - protein, 222 aa, synthetic construct; identical to SEQ ID NO: 31
  REGION 1..222: note = Description of Artificial Sequence: Synthetic polypeptide
  REGION 1..222: note = XENP022992 1C11_H3L2_Fab Heavy Chain

SEQ ID NO: 62 - protein, 117 aa, synthetic construct; identical to SEQ ID NO: 32
  REGION 1..117: note = Description of Artificial Sequence: Synthetic polypeptide
  REGION 1..117: note = VH of XENP022992

SEQ ID NO: 63 - protein, 5 aa, synthetic construct
  REGION 1..5: note = Description of Artificial Sequence: Synthetic peptide
  REGION 1..5: note = XENP022992 vhCDR1
HYGMN

SEQ ID NO: 64 - protein, 17 aa, synthetic construct
  REGION 1..17: note = Description of Artificial Sequence: Synthetic peptide
  REGION 1..17: note = XENP022992 vhCDR2
WINTYTGEPTYADGFTG

SEQ ID NO: 65 - protein, 8 aa, synthetic construct
  REGION 1..8: note = Description of Artificial Sequence: Synthetic peptide
  REGION 1..8: note = XENP022992 vhCDR3
DYYGSSPY

SEQ ID NO: 66 - protein, 219 aa, synthetic construct; identical to SEQ ID NO: 26
  REGION 1..219: note = Description of Artificial Sequence: Synthetic polypeptide
  REGION 1..219: note = XENP022992 1C11_H3L2_Fab Light Chain

SEQ ID NO: 67 - protein, 112 aa, synthetic construct; identical to SEQ ID NO: 27
  REGION 1..112: note = Description of Artificial Sequence: Synthetic polypeptide
  REGION 1..112: note = VL of XENP022992

SEQ ID NO: 68 - protein, 16 aa, synthetic construct
  REGION 1..16: note = Description of Artificial Sequence: Synthetic peptide
  REGION 1..16: note = XENP022992 vlCDR1
RSSQSIVHSNGNTYLE

SEQ ID NO: 69 - protein, 7 aa, synthetic construct
  REGION 1..7: note = Description of Artificial Sequence: Synthetic peptide
  REGION 1..7: note = XENP022992 vlCDR2
KVSNRFS

SEQ ID NO: 70 - protein, 9 aa, synthetic construct
  REGION 1..9: note = Description of Artificial Sequence: Synthetic peptide
  REGION 1..9: note = XENP022992 vlCDR3
FQGSHVPNT

SEQ ID NO: 71 - protein, 251 aa, synthetic construct
  REGION 1..251: note = Description of Artificial Sequence: Synthetic polypeptide
  REGION 1..251: note = XENP023574 1C11_L1H3_scFv
DVLMTQSPLSLPVTPGEPASISCRSSQSIVHSNGNTYLEWYLQKPGQSPQLLIYKVSNRFSGVPDRFSGSGSGTDFTLKISRVEAEDVGVYYCFQGSHVPNTFGGGTKVEIKGKPGSGKPGSGKPGSGKPGSQIQLVQSGSELKKPGASVKVSCKASGYTFTHYGMNWVRQAPGQGLEWMGWINTYTGEPTYADGFTGRFVFSLDTSVSTAYLQISSLKAEDTAVYFCARDYYGSSPYWGQGTLVTVSSGS

SEQ ID NO: 72 - protein, 112 aa, synthetic construct; identical to SEQ ID NO: 17
  REGION 1..112: note = Description of Artificial Sequence: Synthetic polypeptide
  REGION 1..112: note = VH of XENP023574

SEQ ID NO: 73 - protein, 119 aa, synthetic construct
  REGION 1..119: note = Description of Artificial Sequence: Synthetic polypeptide
  REGION 1..119: note = VL of XENP023574
QIQLVQSGSELKKPGASVKVSCKASGYTFTHYGMNWVRQAPGQGLEWMGWINTYTGEPTYADGFTGRFVFSLDTSVSTAYLQISSLKAEDTAVYFCARDYYGSSPYWGQGTLVTVSSGS

SEQ ID NO: 74 - protein, 16 aa, synthetic construct
  REGION 1..16: note = Description of Artificial Sequence: Synthetic peptide
  REGION 1..16: note = XENP023574 vhCDR1
RSSQSIVHSNGNTYLE

SEQ ID NO: 75 - protein, 7 aa, synthetic construct
  REGION 1..7: note = Description of Artificial Sequence: Synthetic peptide
  REGION 1..7: note = XENP023574 vhCDR2
KVSNRFS

SEQ ID NO: 76 - protein, 9 aa, synthetic construct
  REGION 1..9: note = Description of Artificial Sequence: Synthetic peptide
  REGION 1..9: note = XENP023574 vhCDR3
FQGSHVPNT

SEQ ID NO: 77 - protein, 5 aa, synthetic construct
  REGION 1..5: note = Description of Artificial Sequence: Synthetic peptide
  REGION 1..5: note = XENP023574 vlCDR1
HYGMN

SEQ ID NO: 78 - protein, 17 aa, synthetic construct
  REGION 1..17: note = Description of Artificial Sequence: Synthetic peptide
  REGION 1..17: note = XENP023574 vlCDR2
WINTYTGEPTYADGFTG

SEQ ID NO: 79 - protein, 8 aa, synthetic construct
  REGION 1..8: note = Description of Artificial Sequence: Synthetic peptide
  REGION 1..8: note = XENP023574 vlCDR3
DYYGSSPY

SEQ ID NO: 80 - protein, 251 aa, synthetic construct
  REGION 1..251: note = Description of Artificial Sequence: Synthetic polypeptide
  REGION 1..251: note = XENP023575 1C11_L2H3_scFv
DVLMTQSPLSLPVTLGQPASISCRSSQSIVHSNGNTYLEWYQQRPGQSPRLLIYKVSNRFSGVPDRFSGSGSGTDFTLKISRVEAEDVGVYYCFQGSHVPNTFGGGTKVEIKGKPGSGKPGSGKPGSGKPGSQIQLVQSGSELKKPGASVKVSCKASGYTFTHYGMNWVRQAPGQGLEWMGWINTYTGEPTYADGFTGRFVFSLDTSVSTAYLQISSLKAEDTAVYFCARDYYGSSPYWGQGTLVTVSSGS

SEQ ID NO: 81 - protein, 112 aa, synthetic construct; identical to SEQ ID NO: 27
  REGION 1..112: note = Description of Artificial Sequence: Synthetic polypeptide
  REGION 1..112: note = VH of XENP023575

SEQ ID NO: 82 - protein, 119 aa, synthetic construct; identical to SEQ ID NO: 73
  REGION 1..119: note = Description of Artificial Sequence: Synthetic polypeptide
  REGION 1..119: note = VL of XENP023575

SEQ ID NO: 83 - protein, 16 aa, synthetic construct
  REGION 1..16: note = Description of Artificial Sequence: Synthetic peptide
  REGION 1..16: note = XENP023575 vhCDR1
RSSQSIVHSNGNTYLE

SEQ ID NO: 84 - protein, 7 aa, synthetic construct
  REGION 1..7: note = Description of Artificial Sequence: Synthetic peptide
  REGION 1..7: note = XENP023575 vhCDR2
KVSNRFS

SEQ ID NO: 85 - protein, 9 aa, synthetic construct
  REGION 1..9: note = Description of Artificial Sequence: Synthetic peptide
  REGION 1..9: note = XENP023575 vhCDR3
FQGSHVPNT

SEQ ID NO: 86 - protein, 5 aa, synthetic construct
  REGION 1..5: note = Description of Artificial Sequence: Synthetic peptide
  REGION 1..5: note = XENP023575 vlCDR1
HYGMN

SEQ ID NO: 87 - protein, 17 aa, synthetic construct
  REGION 1..17: note = Description of Artificial Sequence: Synthetic peptide
  REGION 1..17: note = XENP023575 vlCDR2
WINTYTGEPTYADGFTG

SEQ ID NO: 88 - protein, 8 aa, synthetic construct
  REGION 1..8: note = Description of Artificial Sequence: Synthetic peptide
  REGION 1..8: note = XENP023575 vlCDR3
DYYGSSPY

SEQ ID NO: 89 - protein, 251 aa, synthetic construct
  REGION 1..251: note = Description of Artificial Sequence: Synthetic polypeptide
  REGION 1..251: note = XENP023576 1C11_L3H3_scFv
DVLMTQSPDSLAVSLGERATINCKSSQSIVHSNGNTYLEWYQQKPGQSPKLLIYKVSNRFSGVPDRFSGSGSGTDFTLTISSLQAEDVAVYYCFQGSHVPNTFGGGTKVEIKGKPGSGKPGSGKPGSGKPGSQIQLVQSGSELKKPGASVKVSCKASGYTFTHYGMNWVRQAPGQGLEWMGWINTYTGEPTYADGFTGRFVFSLDTSVSTAYLQISSLKAEDTAVYFCARDYYGSSPYWGQGTLVTVSSGS

SEQ ID NO: 90 - protein, 112 aa, synthetic construct; identical to SEQ ID NO: 7
  REGION 1..112: note = Description of Artificial Sequence: Synthetic polypeptide
  REGION 1..112: note = VH of XENP023576

SEQ ID NO: 91 - protein, 119 aa, synthetic construct; identical to SEQ ID NO: 73
  REGION 1..119: note = Description of Artificial Sequence: Synthetic polypeptide
  REGION 1..119: note = VL of XENP023576

SEQ ID NO: 92 - protein, 16 aa, synthetic construct
  REGION 1..16: note = Description of Artificial Sequence: Synthetic peptide
  REGION 1..16: note = XENP023576 vhCDR1
KSSQSIVHSNGNTYLE

SEQ ID NO: 93 - protein, 7 aa, synthetic construct
  REGION 1..7: note = Description of Artificial Sequence: Synthetic peptide
  REGION 1..7: note = XENP023576 vhCDR2
KVSNRFS

SEQ ID NO: 94 - protein, 9 aa, synthetic construct
  REGION 1..9: note = Description of Artificial Sequence: Synthetic peptide
  REGION 1..9: note = XENP023576 vhCDR3
FQGSHVPNT

SEQ ID NO: 95 - protein, 5 aa, synthetic construct
  REGION 1..5: note = Description of Artificial Sequence: Synthetic peptide
  REGION 1..5: note = XENP023576 vlCDR1
HYGMN

SEQ ID NO: 96 - protein, 17 aa, synthetic construct
  REGION 1..17: note = Description of Artificial Sequence: Synthetic peptide
  REGION 1..17: note = XENP023576 vlCDR2
WINTYTGEPTYADGFTG

SEQ ID NO: 97 - protein, 8 aa, synthetic construct
  REGION 1..8: note = Description of Artificial Sequence: Synthetic peptide
  REGION 1..8: note = XENP023576 vlCDR3
DYYGSSPY

SEQ ID NO: 98 - protein, 251 aa, synthetic construct
  REGION 1..251: note = Description of Artificial Sequence: Synthetic polypeptide
  REGION 1..251: note = XENP023577 1C11_H3_L3.1_scFv
QIQLVQSGSELKKPGASVKVSCKASGYTFTHYGMNWVRQAPGQGLEWMGWINTYTGEPTYADGFTGRFVFSLDTSVSTAYLQISSLKAEDTAVYFCARDYYGSSPYWGQGTLVTVSSGKPGSGKPGSGKPGSGKPGSDILMTQSPDSLAVSLGERATINCKSSQSIVHSNGNTYLEWYQQKPGQSPKLLIYKVSNRFSGVPDRFSGSGSGTDFTLTISSLQAEDVAVYYCFQGSHVPNTFGGGTKVEIKGS

SEQ ID NO: 99 - protein, 117 aa, synthetic construct; identical to SEQ ID NO: 32
  REGION 1..117: note = Description of Artificial Sequence: Synthetic polypeptide
  REGION 1..117: note = VH of XENP023577

SEQ ID NO: 100 - protein, 114 aa, synthetic construct
  REGION 1..114: note = Description of Artificial Sequence: Synthetic polypeptide
  REGION 1..114: note = VL of XENP023577
DILMTQSPDSLAVSLGERATINCKSSQSIVHSNGNTYLEWYQQKPGQSPKLLIYKVSNRFSGVPDRFSGSGSGTDFTLTISSLQAEDVAVYYCFQGSHVPNTFGGGTKVEIKGS

SEQ ID NO: 101 - protein, 5 aa, synthetic construct
  REGION 1..5: note = Description of Artificial Sequence: Synthetic peptide
  REGION 1..5: note = XENP023577 vhCDR1
HYGMN

SEQ ID NO: 102 - protein, 17 aa, synthetic construct
  REGION 1..17: note = Description of Artificial Sequence: Synthetic peptide
  REGION 1..17: note = XENP023577 vhCDR2
WINTYTGEPTYADGFTG

SEQ ID NO: 103 - protein, 8 aa, synthetic construct
  REGION 1..8: note = Description of Artificial Sequence: Synthetic peptide
  REGION 1..8: note = XENP023577 vhCDR3
DYYGSSPY

SEQ ID NO: 104 - protein, 16 aa, synthetic construct
  REGION 1..16: note = Description of Artificial Sequence: Synthetic peptide
  REGION 1..16: note = XENP023577 vlCDR1
KSSQSIVHSNGNTYLE

SEQ ID NO: 105 - protein, 7 aa, synthetic construct
  REGION 1..7: note = Description of Artificial Sequence: Synthetic peptide
  REGION 1..7: note = XENP023577 vlCDR2
KVSNRFS

SEQ ID NO: 106 - protein, 9 aa, synthetic construct
  REGION 1..9: note = Description of Artificial Sequence: Synthetic peptide
  REGION 1..9: note = XENP023577 vlCDR3
FQGSHVPNT

SEQ ID NO: 107 - protein, 251 aa, synthetic construct
  REGION 1..251: note = Description of Artificial Sequence: Synthetic polypeptide
  REGION 1..251: note = XENP023578 1C11_H3_L3.2_scFv
QIQLVQSGSELKKPGASVKVSCKASGYTFTHYGMNWVRQAPGQGLEWMGWINTYTGEPTYADGFTGRFVFSLDTSVSTAYLQISSLKAEDTAVYFCARDYYGSSPYWGQGTLVTVSSGKPGSGKPGSGKPGSGKPGSDLLMTQSPDSLAVSLGERATINCKSSQSIVHSNGNTYLEWYQQKPGQSPKLLIYKVSNRFSGVPDRFSGSGSGTDFTLTISSLQAEDVAVYYCFQGSHVPNTFGGGTKVEIKGS

SEQ ID NO: 108 - protein, 117 aa, synthetic construct; identical to SEQ ID NO: 32
  REGION 1..117: note = Description of Artificial Sequence: Synthetic polypeptide
  REGION 1..117: note = VH of XENP023578

SEQ ID NO: 109 - protein, 114 aa, synthetic construct
  REGION 1..114: note = Description of Artificial Sequence: Synthetic polypeptide
  REGION 1..114: note = VL of XENP023578
DLLMTQSPDSLAVSLGERATINCKSSQSIVHSNGNTYLEWYQQKPGQSPKLLIYKVSNRFSGVPDRFSGSGSGTDFTLTISSLQAEDVAVYYCFQGSHVPNTFGGGTKVEIKGS

SEQ ID NO: 110 - protein, 5 aa, synthetic construct
  REGION 1..5: note = Description of Artificial Sequence: Synthetic peptide
  REGION 1..5: note = XENP023578 vhCDR1
HYGMN

SEQ ID NO: 111 - protein, 17 aa, synthetic construct
  REGION 1..17: note = Description of Artificial Sequence: Synthetic peptide
  REGION 1..17: note = XENP023578 vhCDR2
WINTYTGEPTYADGFTG

SEQ ID NO: 112 - protein, 8 aa, synthetic construct
  REGION 1..8: note = Description of Artificial Sequence: Synthetic peptide
  REGION 1..8: note = XENP023578 vhCDR3
DYYGSSPY

SEQ ID NO: 113 - protein, 16 aa, synthetic construct
  REGION 1..16: note = Description of Artificial Sequence: Synthetic peptide
  REGION 1..16: note = XENP023578 vlCDR1
KSSQSIVHSNGNTYLE

SEQ ID NO: 114 - protein, 7 aa, synthetic construct
  REGION 1..7: note = Description of Artificial Sequence: Synthetic peptide
  REGION 1..7: note = XENP023578 vlCDR2
KVSNRFS

SEQ ID NO: 115 - protein, 9 aa, synthetic construct
  REGION 1..9: note = Description of Artificial Sequence: Synthetic peptide
  REGION 1..9: note = XENP023578 vlCDR3
FQGSHVPNT

SEQ ID NO: 116 - protein, 251 aa, synthetic construct
  REGION 1..251: note = Description of Artificial Sequence: Synthetic polypeptide
  REGION 1..251: note = XENP023579 1C11_H3_L3.3_scFv
QIQLVQSGSELKKPGASVKVSCKASGYTFTHYGMNWVRQAPGQGLEWMGWINTYTGEPTYADGFTGRFVFSLDTSVSTAYLQISSLKAEDTAVYFCARDYYGSSPYWGQGTLVTVSSGKPGSGKPGSGKPGSGKPGSDVVMTQSPDSLAVSLGERATINCKSSQSIVHSNGNTYLEWYQQKPGQSPKLLIYKVSNRFSGVPDRFSGSGSGTDFTLTISSLQAEDVAVYYCFQGSHVPNTFGGGTKVEIKGS

SEQ ID NO: 117 - protein, 117 aa, synthetic construct; identical to SEQ ID NO: 32
  REGION 1..117: note = Description of Artificial Sequence: Synthetic polypeptide
  REGION 1..117: note = VH of XENP023579

SEQ ID NO: 118 - protein, 114 aa, synthetic construct
  REGION 1..114: note = Description of Artificial Sequence: Synthetic polypeptide
  REGION 1..114: note = VL of XENP023579
DVVMTQSPDSLAVSLGERATINCKSSQSIVHSNGNTYLEWYQQKPGQSPKLLIYKVSNRFSGVPDRFSGSGSGTDFTLTISSLQAEDVAVYYCFQGSHVPNTFGGGTKVEIKGS

SEQ ID NO: 119 - protein, 5 aa, synthetic construct
  REGION 1..5: note = Description of Artificial Sequence: Synthetic peptide
  REGION 1..5: note = XENP023579 vhCDR1
HYGMN

SEQ ID NO: 120 - protein, 17 aa, synthetic construct
  REGION 1..17: note = Description of Artificial Sequence: Synthetic peptide
  REGION 1..17: note = XENP023579 vhCDR2
WINTYTGEPTYADGFTG

SEQ ID NO: 121 - protein, 8 aa, synthetic construct
  REGION 1..8: note = Description of Artificial Sequence: Synthetic peptide
  REGION 1..8: note = XENP023579 vhCDR3
DYYGSSPY

SEQ ID NO: 122 - protein, 16 aa, synthetic construct
  REGION 1..16: note = Description of Artificial Sequence: Synthetic peptide
  REGION 1..16: note = XENP023579 vlCDR1
KSSQSIVHSNGNTYLE

SEQ ID NO: 123 - protein, 7 aa, synthetic construct
  REGION 1..7: note = Description of Artificial Sequence: Synthetic peptide
  REGION 1..7: note = XENP023579 vlCDR2
KVSNRFS

SEQ ID NO: 124 - protein, 9 aa, synthetic construct
  REGION 1..9: note = Description of Artificial Sequence: Synthetic peptide
  REGION 1..9: note = XENP023579 vlCDR3
FQGSHVPNT

SEQ ID NO: 125 - protein, 251 aa, synthetic construct
  REGION 1..251: note = Description of Artificial Sequence: Synthetic polypeptide
  REGION 1..251: note = XENP023580 1C11_H3_L3.4_scFv
QIQLVQSGSELKKPGASVKVSCKASGYTFTHYGMNWVRQAPGQGLEWMGWINTYTGEPTYADGFTGRFVFSLDTSVSTAYLQISSLKAEDTAVYFCARDYYGSSPYWGQGTLVTVSSGKPGSGKPGSGKPGSGKPGSDVEMTQSPDSLAVSLGERATINCKSSQSIVHSNGNTYLEWYQQKPGQSPKLLIYKVSNRFSGVPDRFSGSGSGTDFTLTISSLQAEDVAVYYCFQGSHVPNTFGGGTKVEIKGS

SEQ ID NO: 126 - protein, 117 aa, synthetic construct; identical to SEQ ID NO: 32
  REGION 1..117: note = Description of Artificial Sequence: Synthetic polypeptide
  REGION 1..117: note = VH of XENP023580

SEQ ID NO: 127 - protein, 114 aa, synthetic construct
  REGION 1..114: note = Description of Artificial Sequence: Synthetic polypeptide
  REGION 1..114: note = VL of XENP023580
DVEMTQSPDSLAVSLGERATINCKSSQSIVHSNGNTYLEWYQQKPGQSPKLLIYKVSNRFSGVPDRFSGSGSGTDFTLTISSLQAEDVAVYYCFQGSHVPNTFGGGTKVEIKGS

SEQ ID NO: 128 - protein, 5 aa, synthetic construct
  REGION 1..5: note = Description of Artificial Sequence: Synthetic peptide
  REGION 1..5: note = XENP023580 vhCDR1
HYGMN

SEQ ID NO: 129 - protein, 17 aa, synthetic construct
  REGION 1..17: note = Description of Artificial Sequence: Synthetic peptide
  REGION 1..17: note = XENP023580 vhCDR2
WINTYTGEPTYADGFTG

SEQ ID NO: 130 - protein, 8 aa, synthetic construct
  REGION 1..8: note = Description of Artificial Sequence: Synthetic peptide
  REGION 1..8: note = XENP023580 vhCDR3
DYYGSSPY

SEQ ID NO: 131 - protein, 16 aa, synthetic construct
  REGION 1..16: note = Description of Artificial Sequence: Synthetic peptide
  REGION 1..16: note = XENP023580 vlCDR1
KSSQSIVHSNGNTYLE

SEQ ID NO: 132 - protein, 7 aa, synthetic construct
  REGION 1..7: note = Description of Artificial Sequence: Synthetic peptide
  REGION 1..7: note = XENP023580 vlCDR2
KVSNRFS

SEQ ID NO: 133 - protein, 9 aa, synthetic construct
  REGION 1..9: note = Description of Artificial Sequence: Synthetic peptide
  REGION 1..9: note = XENP023580 vlCDR3
FQGSHVPNT

SEQ ID NO: 134 - protein, 251 aa, synthetic construct
  REGION 1..251: note = Description of Artificial Sequence: Synthetic polypeptide
  REGION 1..251: note = XENP023581 1C11_H3_L3.5_scFv
QIQLVQSGSELKKPGASVKVSCKASGYTFTHYGMNWVRQAPGQGLEWMGWINTYTGEPTYADGFTGRFVFSLDTSVSTAYLQISSLKAEDTAVYFCARDYYGSSPYWGQGTLVTVSSGKPGSGKPGSGKPGSGKPGSDVQMTQSPDSLAVSLGERATINCKSSQSIVHSNGNTYLEWYQQKPGQSPKLLIYKVSNRFSGVPDRFSGSGSGTDFTLTISSLQAEDVAVYYCFQGSHVPNTFGGGTKVEIKGS

SEQ ID NO: 135 - protein, 117 aa, synthetic construct; identical to SEQ ID NO: 32
  REGION 1..117: note = Description of Artificial Sequence: Synthetic polypeptide
  REGION 1..117: note = VH of XENP023581

SEQ ID NO: 136 - protein, 114 aa, synthetic construct
  REGION 1..114: note = Description of Artificial Sequence: Synthetic polypeptide
  REGION 1..114: note = VL of XENP023581
DVQMTQSPDSLAVSLGERATINCKSSQSIVHSNGNTYLEWYQQKPGQSPKLLIYKVSNRFSGVPDRFSGSGSGTDFTLTISSLQAEDVAVYYCFQGSHVPNTFGGGTKVEIKGS

SEQ ID NO: 137 - protein, 5 aa, synthetic construct
  REGION 1..5: note = Description of Artificial Sequence: Synthetic peptide
  REGION 1..5: note = XENP023581 vhCDR1
HYGMN

SEQ ID NO: 138 - protein, 17 aa, synthetic construct
  REGION 1..17: note = Description of Artificial Sequence: Synthetic peptide
  REGION 1..17: note = XENP023581 vhCDR2
WINTYTGEPTYADGFTG

SEQ ID NO: 139 - protein, 8 aa, synthetic construct
  REGION 1..8: note = Description of Artificial Sequence: Synthetic peptide
  REGION 1..8: note = XENP023581 vhCDR3
DYYGSSPY

SEQ ID NO: 140 - protein, 16 aa, synthetic construct
  REGION 1..16: note = Description of Artificial Sequence: Synthetic peptide
  REGION 1..16: note = XENP023581 vlCDR1
KSSQSIVHSNGNTYLE

SEQ ID NO: 141 - protein, 7 aa, synthetic construct
  REGION 1..7: note = Description of Artificial Sequence: Synthetic peptide
  REGION 1..7: note = XENP023581 vlCDR2
KVSNRFS

SEQ ID NO: 142 - protein, 9 aa, synthetic construct
  REGION 1..9: note = Description of Artificial Sequence: Synthetic peptide
  REGION 1..9: note = XENP023581 vlCDR3
FQGSHVPNT

SEQ ID NO: 143 - protein, 251 aa, synthetic construct
  REGION 1..251: note = Description of Artificial Sequence: Synthetic polypeptide
  REGION 1..251: note = XENP023582 1C11_H3_L3.6_scFv
QIQLVQSGSELKKPGASVKVSCKASGYTFTHYGMNWVRQAPGQGLEWMGWINTYTGEPTYADGFTGRFVFSLDTSVSTAYLQISSLKAEDTAVYFCARDYYGSSPYWGQGTLVTVSSGKPGSGKPGSGKPGSGKPGSDVDMTQSPDSLAVSLGERATINCKSSQSIVHSNGNTYLEWYQQKPGQSPKLLIYKVSNRFSGVPDRFSGSGSGTDFTLTISSLQAEDVAVYYCFQGSHVPNTFGGGTKVEIKGS

SEQ ID NO: 144 - protein, 117 aa, synthetic construct; identical to SEQ ID NO: 32
  REGION 1..117: note = Description of Artificial Sequence: Synthetic polypeptide
  REGION 1..117: note = VH of XENP023582

SEQ ID NO: 145 - protein, 114 aa, synthetic construct
  REGION 1..114: note = Description of Artificial Sequence: Synthetic polypeptide
  REGION 1..114: note = VL of XENP023582
DVDMTQSPDSLAVSLGERATINCKSSQSIVHSNGNTYLEWYQQKPGQSPKLLIYKVSNRFSGVPDRFSGSGSGTDFTLTISSLQAEDVAVYYCFQGSHVPNTFGGGTKVEIKGS

SEQ ID NO: 146 - protein, 5 aa, synthetic construct
  REGION 1..5: note = Description of Artificial Sequence: Synthetic peptide
  REGION 1..5: note = XENP023582 vhCDR1
HYGMN

SEQ ID NO: 147 - protein, 17 aa, synthetic construct
  REGION 1..17: note = Description of Artificial Sequence: Synthetic peptide
  REGION 1..17: note = XENP023582 vhCDR2
WINTYTGEPTYADGFTG

SEQ ID NO: 148 - protein, 8 aa, synthetic construct
  REGION 1..8: note = Description of Artificial Sequence: Synthetic peptide
  REGION 1..8: note = XENP023582 vhCDR3
DYYGSSPY

SEQ ID NO: 149 - protein, 16 aa, synthetic construct
  REGION 1..16: note = Description of Artificial Sequence: Synthetic peptide
  REGION 1..16: note = XENP023582 vlCDR1
KSSQSIVHSNGNTYLE

SEQ ID NO: 150 - protein, 7 aa, synthetic construct
  REGION 1..7: note = Description of Artificial Sequence: Synthetic peptide
  REGION 1..7: note = XENP023582 vlCDR2
KVSNRFS

SEQ ID NO: 151 - protein, 9 aa, synthetic construct
  REGION 1..9: note = Description of Artificial Sequence: Synthetic peptide
  REGION 1..9: note = XENP023582 vlCDR3
FQGSHVPNT

SEQ ID NO: 152 - protein, 251 aa, synthetic construct
  REGION 1..251: note = Description of Artificial Sequence: Synthetic polypeptide
  REGION 1..251: note = XENP023583 1C11_H3_L3.7_scFv
QIQLVQSGSELKKPGASVKVSCKASGYTFTHYGMNWVRQAPGQGLEWMGWINTYTGEPTYADGFTGRFVFSLDTSVSTAYLQISSLKAEDTAVYFCARDYYGSSPYWGQGTLVTVSSGKPGSGKPGSGKPGSGKPGSDIQMTQSPDSLAVSLGERATINCKSSQSIVHSNGNTYLEWYQQKPGQSPKLLIYKVSNRFSGVPDRFSGSGSGTDFTLTISSLQAEDVAVYYCFQGSHVPNTFGGGTKVEIKGS

SEQ ID NO: 153 - protein, 117 aa, synthetic construct; identical to SEQ ID NO: 32
  REGION 1..117: note = Description of Artificial Sequence: Synthetic polypeptide
  REGION 1..117: note = VH of XENP023583

SEQ ID NO: 154 - protein, 114 aa, synthetic construct
  REGION 1..114: note = Description of Artificial Sequence: Synthetic polypeptide
  REGION 1..114: note = VL of XENP023583
DIQMTQSPDSLAVSLGERATINCKSSQSIVHSNGNTYLEWYQQKPGQSPKLLIYKVSNRFSGVPDRFSGSGSGTDFTLTISSLQAEDVAVYYCFQGSHVPNTFGGGTKVEIKGS

SEQ ID NO: 155 - protein, 5 aa, synthetic construct
  REGION 1..5: note = Description of Artificial Sequence: Synthetic peptide
  REGION 1..5: note = XENP023583 vhCDR1
HYGMN

SEQ ID NO: 156 - protein, 17 aa, synthetic construct
  REGION 1..17: note = Description of Artificial Sequence: Synthetic peptide
  REGION 1..17: note = XENP023583 vhCDR2
WINTYTGEPTYADGFTG

SEQ ID NO: 157 - protein, 8 aa, synthetic construct
  REGION 1..8: note = Description of Artificial Sequence: Synthetic peptide
  REGION 1..8: note = XENP023583 vhCDR3
DYYGSSPY

SEQ ID NO: 158 - protein, 16 aa, synthetic construct
  REGION 1..16: note = Description of Artificial Sequence: Synthetic peptide
  REGION 1..16: note = XENP023583 vlCDR1
KSSQSIVHSNGNTYLE

SEQ ID NO: 159 - protein, 7 aa, synthetic construct
  REGION 1..7: note = Description of Artificial Sequence: Synthetic peptide
  REGION 1..7: note = XENP023583 vlCDR2
KVSNRFS

SEQ ID NO: 160 - protein, 9 aa, synthetic construct
  REGION 1..9: note = Description of Artificial Sequence: Synthetic peptide
  REGION 1..9: note = XENP023583 vlCDR3
FQGSHVPNT

SEQ ID NO: 161 - protein, 251 aa, synthetic construct
  REGION 1..251: note = Description of Artificial Sequence: Synthetic polypeptide
  REGION 1..251: note = XENP023584 1C11_H3_L3.9_scFv
QIQLVQSGSELKKPGASVKVSCKASGYTFTHYGMNWVRQAPGQGLEWMGWINTYTGEPTYADGFTGRFVFSLDTSVSTAYLQISSLKAEDTAVYFCARDYYGSSPYWGQGTLVTVSSGKPGSGKPGSGKPGSGKPGSDVLMTQSPKSLAVSLGERATINCKSSQSIVHSNGNTYLEWYQQKPGQSPKLLIYKVSNRFSGVPDRFSGSGSGTDFTLTISSLQAEDVAVYYCFQGSHVPNTFGGGTKVEIKGS

SEQ ID NO: 162 - protein, 117 aa, synthetic construct; identical to SEQ ID NO: 32
  REGION 1..117: note = Description of Artificial Sequence: Synthetic polypeptide
  REGION 1..117: note = VH of XENP023584

SEQ ID NO: 163 - protein, 114 aa, synthetic construct
  REGION 1..114: note = Description of Artificial Sequence: Synthetic polypeptide
  REGION 1..114: note = VL of XENP023584
DVLMTQSPKSLAVSLGERATINCKSSQSIVHSNGNTYLEWYQQKPGQSPKLLIYKVSNRFSGVPDRFSGSGSGTDFTLTISSLQAEDVAVYYCFQGSHVPNTFGGGTKVEIKGS

SEQ ID NO: 164 - protein, 5 aa, synthetic construct
  REGION 1..5: note = Description of Artificial Sequence: Synthetic peptide
  REGION 1..5: note = XENP023584 vhCDR1
HYGMN

SEQ ID NO: 165 - protein, 17 aa, synthetic construct
  REGION 1..17: note = Description of Artificial Sequence: Synthetic peptide
  REGION 1..17: note = XENP023584 vhCDR2
WINTYTGEPTYADGFTG

SEQ ID NO: 166 - protein, 8 aa, synthetic construct
  REGION 1..8: note = Description of Artificial Sequence: Synthetic peptide
  REGION 1..8: note = XENP023584 vhCDR3
DYYGSSPY

SEQ ID NO: 167 - protein, 16 aa, synthetic construct
  REGION 1..16: note = Description of Artificial Sequence: Synthetic peptide
  REGION 1..16: note = XENP023584 vlCDR1
KSSQSIVHSNGNTYLE

SEQ ID NO: 168 - protein, 7 aa, synthetic construct
  REGION 1..7: note = Description of Artificial Sequence: Synthetic peptide
  REGION 1..7: note = XENP023584 vlCDR2
KVSNRFS

SEQ ID NO: 169 - protein, 9 aa, synthetic construct
  REGION 1..9: note = Description of Artificial Sequence: Synthetic peptide
  REGION 1..9: note = XENP023584 vlCDR3
FQGSHVPNT

SEQ ID NO: 170 - protein, 251 aa, synthetic construct
  REGION 1..251: note = Description of Artificial Sequence: Synthetic polypeptide
  REGION 1..251: note = XENP023585 1C11_H3_L3.10_scFv
QIQLVQSGSELKKPGASVKVSCKASGYTFTHYGMNWVRQAPGQGLEWMGWINTYTGEPTYADGFTGRFVFSLDTSVSTAYLQISSLKAEDTAVYFCARDYYGSSPYWGQGTLVTVSSGKPGSGKPGSGKPGSGKPGSDVLMTQSPLSLAVSLGERATINCKSSQSIVHSNGNTYLEWYQQKPGQSPKLLIYKVSNRFSGVPDRFSGSGSGTDFTLTISSLQAEDVAVYYCFQGSHVPNTFGGGTKVEIKGS

SEQ ID NO: 171 - protein, 117 aa, synthetic construct; identical to SEQ ID NO: 32
  REGION 1..117: note = Description of Artificial Sequence: Synthetic polypeptide
  REGION 1..117: note = VH of XENP023585

SEQ ID NO: 172 - protein, 114 aa, synthetic construct
  REGION 1..114: note = Description of Artificial Sequence: Synthetic polypeptide
  REGION 1..114: note = VL of XENP023585
DVLMTQSPLSLAVSLGERATINCKSSQSIVHSNGNTYLEWYQQKPGQSPKLLIYKVSNRFSGVPDRFSGSGSGTDFTLTISSLQAEDVAVYYCFQGSHVPNTFGGGTKVEIKGS

SEQ ID NO: 173 - protein, 5 aa, synthetic construct
  REGION 1..5: note = Description of Artificial Sequence: Synthetic peptide
  REGION 1..5: note = XENP023585 vhCDR1
HYGMN

SEQ ID NO: 174 - protein, 17 aa, synthetic construct
  REGION 1..17: note = Description of Artificial Sequence: Synthetic peptide
  REGION 1..17: note = XENP023585 vhCDR2
WINTYTGEPTYADGFTG

SEQ ID NO: 175 - protein, 8 aa, synthetic construct
  REGION 1..8: note = Description of Artificial Sequence: Synthetic peptide
  REGION 1..8: note = XENP023585 vhCDR3
DYYGSSPY

SEQ ID NO: 176 - protein, 16 aa, synthetic construct
  REGION 1..16: note = Description of Artificial Sequence: Synthetic peptide
  REGION 1..16: note = XENP023585 vlCDR1
KSSQSIVHSNGNTYLE

SEQ ID NO: 177 - protein, 7 aa, synthetic construct
  REGION 1..7: note = Description of Artificial Sequence: Synthetic peptide
  REGION 1..7: note = XENP023585 vlCDR2
KVSNRFS

SEQ ID NO: 178 - protein, 9 aa, synthetic construct
  REGION 1..9: note = Description of Artificial Sequence: Synthetic peptide
  REGION 1..9: note = XENP023585 vlCDR3
FQGSHVPNT

SEQ ID NO: 179 - protein, 251 aa, synthetic construct
  REGION 1..251: note = Description of Artificial Sequence: Synthetic polypeptide
  REGION 1..251: note = XENP023586 1C11_H3_L3.11_scFv
QIQLVQSGSELKKPGASVKVSCKASGYTFTHYGMNWVRQAPGQGLEWMGWINTYTGEPTYADGFTGRFVFSLDTSVSTAYLQISSLKAEDTAVYFCARDYYGSSPYWGQGTLVTVSSGKPGSGKPGSGKPGSGKPGSDVLMTQSPSSLAVSLGERATINCKSSQSIVHSNGNTYLEWYQQKPGQSPKLLIYKVSNRFSGVPDRFSGSGSGTDFTLTISSLQAEDVAVYYCFQGSHVPNTFGGGTKVEIKGS

SEQ ID NO: 180 - protein, 117 aa, synthetic construct; identical to SEQ ID NO: 32
  REGION 1..117: note = Description of Artificial Sequence: Synthetic polypeptide
  REGION 1..117: note = VH of XENP023586

SEQ ID NO: 181 - protein, 114 aa, synthetic construct
  REGION 1..114: note = Description of Artificial Sequence: Synthetic polypeptide
  REGION 1..114: note = VL of XENP023586
DVLMTQSPSSLAVSLGERATINCKSSQSIVHSNGNTYLEWYQQKPGQSPKLLIYKVSNRFSGVPDRFSGSGSGTDFTLTISSLQAEDVAVYYCFQGSHVPNTFGGGTKVEIKGS

SEQ ID NO: 182 - protein, 5 aa, synthetic construct
  REGION 1..5: note = Description of Artificial Sequence: Synthetic peptide
  REGION 1..5: note = XENP023586 vhCDR1
HYGMN

SEQ ID NO: 183 - protein, 17 aa, synthetic construct
  REGION 1..17: note = Description of Artificial Sequence: Synthetic peptide
  REGION 1..17: note = XENP023586 vhCDR2
WINTYTGEPTYADGFTG

SEQ ID NO: 184 - protein, 8 aa, synthetic construct
  REGION 1..8: note = Description of Artificial Sequence: Synthetic peptide
  REGION 1..8: note = XENP023586 vhCDR3
DYYGSSPY

SEQ ID NO: 185 - protein, 16 aa, synthetic construct
  REGION 1..16: note = Description of Artificial Sequence: Synthetic peptide
  REGION 1..16: note = XENP023586 vlCDR1
KSSQSIVHSNGNTYLE

SEQ ID NO: 186 - protein, 7 aa, synthetic construct
  REGION 1..7: note = Description of Artificial Sequence: Synthetic peptide
  REGION 1..7: note = XENP023586 vlCDR2
KVSNRFS

SEQ ID NO: 187 - protein, 9 aa, synthetic construct
  REGION 1..9: note = Description of Artificial Sequence: Synthetic peptide
  REGION 1..9: note = XENP023586 vlCDR3
FQGSHVPNT

SEQ ID NO: 188 - protein, 251 aa, synthetic construct
  REGION 1..251: note = Description of Artificial Sequence: Synthetic polypeptide
  REGION 1..251: note = XENP023587 1C11_H3_L3.12_scFv
QIQLVQSGSELKKPGASVKVSCKASGYTFTHYGMNWVRQAPGQGLEWMGWINTYTGEPTYADGFTGRFVFSLDTSVSTAYLQISSLKAEDTAVYFCARDYYGSSPYWGQGTLVTVSSGKPGSGKPGSGKPGSGKPGSDVLMTQSPGSLAVSLGERATINCKSSQSIVHSNGNTYLEWYQQKPGQSPKLLIYKVSNRFSGVPDRFSGSGSGTDFTLTISSLQAEDVAVYYCFQGSHVPNTFGGGTKVEIKGS

SEQ ID NO: 189 - protein, 117 aa, synthetic construct; identical to SEQ ID NO: 32
  REGION 1..117: note = Description of Artificial Sequence: Synthetic polypeptide
  REGION 1..117: note = VH of XENP023587

SEQ ID NO: 190 - protein, 114 aa, synthetic construct
  REGION 1..114: note = Description of Artificial Sequence: Synthetic polypeptide
  REGION 1..114: note = VL of XENP023587
DVLMTQSPGSLAVSLGERATINCKSSQSIVHSNGNTYLEWYQQKPGQSPKLLIYKVSNRFSGVPDRFSGSGSGTDFTLTISSLQAEDVAVYYCFQGSHVPNTFGGGTKVEIKGS

SEQ ID NO: 191 - protein, 5 aa, synthetic construct
  REGION 1..5: note = Description of Artificial Sequence: Synthetic peptide
  REGION 1..5: note = XENP023587 vhCDR1
HYGMN

SEQ ID NO: 192 - protein, 17 aa, synthetic construct
  REGION 1..17: note = Description of Artificial Sequence: Synthetic peptide
  REGION 1..17: note = XENP023587 vhCDR2
WINTYTGEPTYADGFTG

SEQ ID NO: 193 - protein, 8 aa, synthetic construct
  REGION 1..8: note = Description of Artificial Sequence: Synthetic peptide
  REGION 1..8: note = XENP023587 vhCDR3
DYYGSSPY

SEQ ID NO: 194 - protein, 16 aa, synthetic construct
  REGION 1..16: note = Description of Artificial Sequence: Synthetic peptide
  REGION 1..16: note = XENP023587 vlCDR1
KSSQSIVHSNGNTYLE

SEQ ID NO: 195 - protein, 7 aa, synthetic construct
  REGION 1..7: note = Description of Artificial Sequence: Synthetic peptide
  REGION 1..7: note = XENP023587 vlCDR2
KVSNRFS

SEQ ID NO: 196 - protein, 9 aa, synthetic construct
  REGION 1..9: note = Description of Artificial Sequence: Synthetic peptide
  REGION 1..9: note = XENP023587 vlCDR3
FQGSHVPNT

SEQ ID NO: 197 - protein, 251 aa, synthetic construct
  REGION 1..251: note = Description of Artificial Sequence: Synthetic polypeptide
  REGION 1..251: note = XENP023588 1C11_H3_L3.14_scFv
QIQLVQSGSELKKPGASVKVSCKASGYTFTHYGMNWVRQAPGQGLEWMGWINTYTGEPTYADGFTGRFVFSLDTSVSTAYLQISSLKAEDTAVYFCARDYYGSSPYWGQGTLVTVSSGKPGSGKPGSGKPGSGKPGSDVLMTQSPDSLPVSLGERATINCKSSQSIVHSNGNTYLEWYQQKPGQSPKLLIYKVSNRFSGVPDRFSGSGSGTDFTLTISSLQAEDVAVYYCFQGSHVPNTFGGGTKVEIKGS

SEQ ID NO: 198 - protein, 117 aa, synthetic construct; identical to SEQ ID NO: 32
  REGION 1..117: note = Description of Artificial Sequence: Synthetic polypeptide
  REGION 1..117: note = VH of XENP023588

SEQ ID NO: 199 - protein, 114 aa, synthetic construct
  REGION 1..114: note = Description of Artificial Sequence: Synthetic polypeptide
  REGION 1..114: note = VL of XENP023588
DVLMTQSPDSLPVSLGERATINCKSSQSIVHSNGNTYLEWYQQKPGQSPKLLIYKVSNRFSGVPDRFSGSGSGTDFTLTISSLQAEDVAVYYCFQGSHVPNTFGGGTKVEIKGS

SEQ ID NO: 200 - protein, 5 aa, synthetic construct
  REGION 1..5: note = Description of Artificial Sequence: Synthetic peptide
  REGION 1..5: note = XENP023588 vhCDR1
HYGMN

SEQ ID NO: 201 - protein, 17 aa, synthetic construct
  REGION 1..17: note = Description of Artificial Sequence: Synthetic peptide
  REGION 1..17: note = XENP023588 vhCDR2
WINTYTGEPTYADGFTG

SEQ ID NO: 202 - protein, 8 aa, synthetic construct
  REGION 1..8: note = Description of Artificial Sequence: Synthetic peptide
  REGION 1..8: note = XENP023588 vhCDR3
DYYGSSPY

SEQ ID NO: 203 - protein, 16 aa, synthetic construct
  REGION 1..16: note = Description of Artificial Sequence: Synthetic peptide
  REGION 1..16: note = XENP023588 vlCDR1
KSSQSIVHSNGNTYLE

SEQ ID NO: 204 - protein, 7 aa, synthetic construct
  REGION 1..7: note = Description of Artificial Sequence: Synthetic peptide
  REGION 1..7: note = XENP023588 vlCDR2
KVSNRFS

SEQ ID NO: 205 - protein, 9 aa, synthetic construct
  REGION 1..9: note = Description of Artificial Sequence: Synthetic peptide
  REGION 1..9: note = XENP023588 vlCDR3
FQGSHVPNT

SEQ ID NO: 206 - protein, 251 aa, synthetic construct
  REGION 1..251: note = Description of Artificial Sequence: Synthetic polypeptide
  REGION 1..251: note = XENP023589 1C11_H3_L3.15_scFv
QIQLVQSGSELKKPGASVKVSCKASGYTFTHYGMNWVRQAPGQGLEWMGWINTYTGEPTYADGFTGRFVFSLDTSVSTAYLQISSLKAEDTAVYFCARDYYGSSPYWGQGTLVTVSSGKPGSGKPGSGKPGSGKPGSDVLMTQSPDSLSVSLGERATINCKSSQSIVHSNGNTYLEWYQQKPGQSPKLLIYKVSNRFSGVPDRFSGSGSGTDFTLTISSLQAEDVAVYYCFQGSHVPNTFGGGTKVEIKGS

SEQ ID NO: 207 - protein, 117 aa, synthetic construct; identical to SEQ ID NO: 32
  REGION 1..117: note = Description of Artificial Sequence: Synthetic polypeptide
  REGION 1..117: note = VH of XENP023589

SEQ ID NO: 208 - protein, 114 aa, synthetic construct
  REGION 1..114: note = Description of Artificial Sequence: Synthetic polypeptide
  REGION 1..114: note = VL of XENP023589
DVLMTQSPDSLSVSLGERATINCKSSQSIVHSNGNTYLEWYQQKPGQSPKLLIYKVSNRFSGVPDRFSGSGSGTDFTLTISSLQAEDVAVYYCFQGSHVPNTFGGGTKVEIKGS

SEQ ID NO: 209 - protein, 5 aa, synthetic construct
  REGION 1..5: note = Description of Artificial Sequence: Synthetic peptide
  REGION 1..5: note = XENP023589 vhCDR1
HYGMN

SEQ ID NO: 210 - protein, 17 aa, synthetic construct
  REGION 1..17: note = Description of Artificial Sequence: Synthetic peptide
  REGION 1..17: note = XENP023589 vhCDR2
WINTYTGEPTYADGFTG

SEQ ID NO: 211 - protein, 8 aa, synthetic construct
  REGION 1..8: note = Description of Artificial Sequence: Synthetic peptide
  REGION 1..8: note = XENP023589 vhCDR3
DYYGSSPY

SEQ ID NO: 212 - protein, 16 aa, synthetic construct
  REGION 1..16: note = Description of Artificial Sequence: Synthetic peptide
  REGION 1..16: note = XENP023589 vlCDR1
KSSQSIVHSNGNTYLE

SEQ ID NO: 213 - protein, 7 aa, synthetic construct
  REGION 1..7: note = Description of Artificial Sequence: Synthetic peptide
  REGION 1..7: note = XENP023589 vlCDR2
KVSNRFS

SEQ ID NO: 214 - protein, 9 aa, synthetic construct
  REGION 1..9: note = Description of Artificial Sequence: Synthetic peptide
  REGION 1..9: note = XENP023589 vlCDR3
FQGSHVPNT

SEQ ID NO: 215 - protein, 251 aa, synthetic construct
  REGION 1..251: note = Description of Artificial Sequence: Synthetic polypeptide
  REGION 1..251: note = XENP023590 1C11_H3_L3.16_scFv
QIQLVQSGSELKKPGASVKVSCKASGYTFTHYGMNWVRQAPGQGLEWMGWINTYTGEPTYADGFTGRFVFSLDTSVSTAYLQISSLKAEDTAVYFCARDYYGSSPYWGQGTLVTVSSGKPGSGKPGSGKPGSGKPGSDVLMTQSPDSLTVSLGERATINCKSSQSIVHSNGNTYLEWYQQKPGQSPKLLIYKVSNRFSGVPDRFSGSGSGTDFTLTISSLQAEDVAVYYCFQGSHVPNTFGGGTKVEIKGS

SEQ ID NO: 216 - protein, 117 aa, synthetic construct; identical to SEQ ID NO: 32
  REGION 1..117: note = Description of Artificial Sequence: Synthetic polypeptide
  REGION 1..117: note = VH of XENP023590

SEQ ID NO: 217 - protein, 114 aa, synthetic construct
  REGION 1..114: note = Description of Artificial Sequence: Synthetic polypeptide
  REGION 1..114: note = VL of XENP023590
DVLMTQSPDSLTVSLGERATINCKSSQSIVHSNGNTYLEWYQQKPGQSPKLLIYKVSNRFSGVPDRFSGSGSGTDFTLTISSLQAEDVAVYYCFQGSHVPNTFGGGTKVEIKGS

SEQ ID NO: 218 - protein, 5 aa, synthetic construct
  REGION 1..5: note = Description of Artificial Sequence: Synthetic peptide
  REGION 1..5: note = XENP023590 vhCDR1
HYGMN

SEQ ID NO: 219 - protein, 17 aa, synthetic construct
  REGION 1..17: note = Description of Artificial Sequence: Synthetic peptide
  REGION 1..17: note = XENP023590 vhCDR2
WINTYTGEPTYADGFTG

SEQ ID NO: 220 - protein, 8 aa, synthetic construct
  REGION 1..8: note = Description of Artificial Sequence: Synthetic peptide
  REGION 1..8: note = XENP023590 vhCDR3
DYYGSSPY

SEQ ID NO: 221 - protein, 16 aa, synthetic construct
  REGION 1..16: note = Description of Artificial Sequence: Synthetic peptide
  REGION 1..16: note = XENP023590 vlCDR1
KSSQSIVHSNGNTYLE

SEQ ID NO: 222 - protein, 7 aa, synthetic construct
  REGION 1..7: note = Description of Artificial Sequence: Synthetic peptide
  REGION 1..7: note = XENP023590 vlCDR2
KVSNRFS

SEQ ID NO: 223 - protein, 9 aa, synthetic construct
  REGION 1..9: note = Description of Artificial Sequence: Synthetic peptide
  REGION 1..9: note = XENP023590 vlCDR3
FQGSHVPNT

SEQ ID NO: 224 - protein, 251 aa, synthetic construct
  REGION 1..251: note = Description of Artificial Sequence: Synthetic polypeptide
  REGION 1..251: note = XENP023591 1C11_H3_L3.17_scFv
QIQLVQSGSELKKPGASVKVSCKASGYTFTHYGMNWVRQAPGQGLEWMGWINTYTGEPTYADGFTGRFVFSLDTSVSTAYLQISSLKAEDTAVYFCARDYYGSSPYWGQGTLVTVSSGKPGSGKPGSGKPGSGKPGSDVLMTQSPDSLSASVGERATINCKSSQSIVHSNGNTYLEWYQQKPGQSPKLLIYKVSNRFSGVPDRFSGSGSGTDFTLTISSLQAEDVAVYYCFQGSHVPNTFGGGTKVEIKGS

SEQ ID NO: 225 - protein, 117 aa, synthetic construct; identical to SEQ ID NO: 32
  REGION 1..117: note = Description of Artificial Sequence: Synthetic polypeptide
  REGION 1..117: note = VH of XENP023591

SEQ ID NO: 226 - protein, 114 aa, synthetic construct
  REGION 1..114: note = Description of Artificial Sequence: Synthetic polypeptide
  REGION 1..114: note = VL of XENP023591
DVLMTQSPDSLSASVGERATINCKSSQSIVHSNGNTYLEWYQQKPGQSPKLLIYKVSNRFSGVPDRFSGSGSGTDFTLTISSLQAEDVAVYYCFQGSHVPNTFGGGTKVEIKGS

SEQ ID NO: 227 - protein, 5 aa, synthetic construct
  REGION 1..5: note = Description of Artificial Sequence: Synthetic peptide
  REGION 1..5: note = XENP023591 vhCDR1
HYGMN

SEQ ID NO: 228 - protein, 17 aa, synthetic construct
  REGION 1..17: note = Description of Artificial Sequence: Synthetic peptide
  REGION 1..17: note = XENP023591 vhCDR2
WINTYTGEPTYADGFTG

SEQ ID NO: 229 - protein, 8 aa, synthetic construct
  REGION 1..8: note = Description of Artificial Sequence: Synthetic peptide
  REGION 1..8: note = XENP023591 vhCDR3
DYYGSSPY

SEQ ID NO: 230 - protein, 16 aa, synthetic construct
  REGION 1..16: note = Description of Artificial Sequence: Synthetic peptide
  REGION 1..16: note = XENP023591 vlCDR1
KSSQSIVHSNGNTYLE

SEQ ID NO: 231 - protein, 7 aa, synthetic construct
  REGION 1..7: note = Description of Artificial Sequence: Synthetic peptide
  REGION 1..7: note = XENP023591 vlCDR2
KVSNRFS

SEQ ID NO: 232 - protein, 9 aa, synthetic construct
  REGION 1..9: note = Description of Artificial Sequence: Synthetic peptide
  REGION 1..9: note = XENP023591 vlCDR3
FQGSHVPNT

SEQ ID NO: 233 - protein, 251 aa, synthetic construct
  REGION 1..251: note = Description of Artificial Sequence: Synthetic polypeptide
  REGION 1..251: note = XENP023592 1C11_H3_L3.18_scFv
QIQLVQSGSELKKPGASVKVSCKASGYTFTHYGMNWVRQAPGQGLEWMGWINTYTGEPTYADGFTGRFVFSLDTSVSTAYLQISSLKAEDTAVYFCARDYYGSSPYWGQGTLVTVSSGKPGSGKPGSGKPGSGKPGSDVLMTQSPDSLSVSPGERATINCKSSQSIVHSNGNTYLEWYQQKPGQSPKLLIYKVSNRFSGVPDRFSGSGSGTDFTLTISSLQAEDVAVYYCFQGSHVPNTFGGGTKVEIKGS

SEQ ID NO: 234 - protein, 117 aa, synthetic construct; identical to SEQ ID NO: 32
  REGION 1..117: note = Description of Artificial Sequence: Synthetic polypeptide
  REGION 1..117: note = VH of XENP023592

SEQ ID NO: 235 - protein, 114 aa, synthetic construct
  REGION 1..114: note = Description of Artificial Sequence: Synthetic polypeptide
  REGION 1..114: note = VL of XENP023592
DVLMTQSPDSLSVSPGERATINCKSSQSIVHSNGNTYLEWYQQKPGQSPKLLIYKVSNRFSGVPDRFSGSGSGTDFTLTISSLQAEDVAVYYCFQGSHVPNTFGGGTKVEIKGS

SEQ ID NO: 236 - protein, 5 aa, synthetic construct
  REGION 1..5: note = Description of Artificial Sequence: Synthetic peptide
  REGION 1..5: note = XENP023592 vhCDR1
HYGMN

SEQ ID NO: 237 - protein, 17 aa, synthetic construct
  REGION 1..17: note = Description of Artificial Sequence: Synthetic peptide
  REGION 1..17: note = XENP023592 vhCDR2
WINTYTGEPTYADGFTG

SEQ ID NO: 238 - protein, 8 aa, synthetic construct
  REGION 1..8: note = Description of Artificial Sequence: Synthetic peptide
  REGION 1..8: note = XENP023592 vhCDR3
DYYGSSPY

SEQ ID NO: 239 - protein, 16 aa, synthetic construct
  REGION 1..16: note = Description of Artificial Sequence: Synthetic peptide
  REGION 1..16: note = XENP023592 vlCDR1
KSSQSIVHSNGNTYLE

SEQ ID NO: 240 - protein, 7 aa, synthetic construct
  REGION 1..7: note = Description of Artificial Sequence: Synthetic peptide
  REGION 1..7: note = XENP023592 vlCDR2
KVSNRFS

SEQ ID NO: 241 - protein, 9 aa, synthetic construct
  REGION 1..9: note = Description of Artificial Sequence: Synthetic peptide
  REGION 1..9: note = XENP023592 vlCDR3
FQGSHVPNT

SEQ ID NO: 242 - protein, 251 aa, synthetic construct
  REGION 1..251: note = Description of Artificial Sequence: Synthetic polypeptide
  REGION 1..251: note = XENP023593 1C11_H3_L3.19_scFv
QIQLVQSGSELKKPGASVKVSCKASGYTFTHYGMNWVRQAPGQGLEWMGWINTYTGEPTYADGFTGRFVFSLDTSVSTAYLQISSLKAEDTAVYFCARDYYGSSPYWGQGTLVTVSSGKPGSGKPGSGKPGSGKPGSDVLMTQSPDSLSLSPGERATINCKSSQSIVHSNGNTYLEWYQQKPGQSPKLLIYKVSNRFSGVPDRFSGSGSGTDFTLTISSLQAEDVAVYYCFQGSHVPNTFGGGTKVEIKGS

SEQ ID NO: 243 - protein, 117 aa, synthetic construct; identical to SEQ ID NO: 32
  REGION 1..117: note = Description of Artificial Sequence: Synthetic polypeptide
  REGION 1..117: note = VH of XENP023593

SEQ ID NO: 244 - protein, 114 aa, synthetic construct
  REGION 1..114: note = Description of Artificial Sequence: Synthetic polypeptide
  REGION 1..114: note = VL of XENP023593
DVLMTQSPDSLSLSPGERATINCKSSQSIVHSNGNTYLEWYQQKPGQSPKLLIYKVSNRFSGVPDRFSGSGSGTDFTLTISSLQAEDVAVYYCFQGSHVPNTFGGGTKVEIKGS

SEQ ID NO: 245 - protein, 5 aa, synthetic construct
  REGION 1..5: note = Description of Artificial Sequence: Synthetic peptide
  REGION 1..5: note = XENP023593 vhCDR1
HYGMN

SEQ ID NO: 246 - protein, 17 aa, synthetic construct
  REGION 1..17: note = Description of Artificial Sequence: Synthetic peptide
  REGION 1..17: note = XENP023593 vhCDR2
WINTYTGEPTYADGFTG

SEQ ID NO: 247 - protein, 8 aa, synthetic construct
  REGION 1..8: note = Description of Artificial Sequence: Synthetic peptide
  REGION 1..8: note = XENP023593 vhCDR3
DYYGSSPY

SEQ ID NO: 248 - protein, 16 aa, synthetic construct
  REGION 1..16: note = Description of Artificial Sequence: Synthetic peptide
  REGION 1..16: note = XENP023593 vlCDR1
KSSQSIVHSNGNTYLE

SEQ ID NO: 249 - protein, 7 aa, synthetic construct
  REGION 1..7: note = Description of Artificial Sequence: Synthetic peptide
  REGION 1..7: note = XENP023593 vlCDR2
KVSNRFS

SEQ ID NO: 250 - protein, 9 aa, synthetic construct
  REGION 1..9: note = Description of Artificial Sequence: Synthetic peptide
  REGION 1..9: note = XENP023593 vlCDR3
FQGSHVPNT

SEQ ID NO: 251 - protein, 251 aa, synthetic construct
  REGION 1..251: note = Description of Artificial Sequence: Synthetic polypeptide
  REGION 1..251: note = XENP023594 1C11_H3_L3.20_scFv
QIQLVQSGSELKKPGASVKVSCKASGYTFTHYGMNWVRQAPGQGLEWMGWINTYTGEPTYADGFTGRFVFSLDTSVSTAYLQISSLKAEDTAVYFCARDYYGSSPYWGQGTLVTVSSGKPGSGKPGSGKPGSGKPGSDVLMTQSPDSLAVSSGERATINCKSSQSIVHSNGNTYLEWYQQKPGQSPKLLIYKVSNRFSGVPDRFSGSGSGTDFTLTISSLQAEDVAVYYCFQGSHVPNTFGGGTKVEIKGS

SEQ ID NO: 252 - protein, 117 aa, synthetic construct; identical to SEQ ID NO: 32
  REGION 1..117: note = Description of Artificial Sequence: Synthetic polypeptide
  REGION 1..117: note = VH of XENP023594

SEQ ID NO: 253 - protein, 114 aa, synthetic construct
  REGION 1..114: note = Description of Artificial Sequence: Synthetic polypeptide
  REGION 1..114: note = VL of XENP023594
DVLMTQSPDSLAVSSGERATINCKSSQSIVHSNGNTYLEWYQQKPGQSPKLLIYKVSNRFSGVPDRFSGSGSGTDFTLTISSLQAEDVAVYYCFQGSHVPNTFGGGTKVEIKGS

SEQ ID NO: 254 - protein, 5 aa, synthetic construct
  REGION 1..5: note = Description of Artificial Sequence: Synthetic peptide
  REGION 1..5: note = XENP023594 vhCDR1
HYGMN

SEQ ID NO: 255 - protein, 17 aa, synthetic construct
  REGION 1..17: note = Description of Artificial Sequence: Synthetic peptide
  REGION 1..17: note = XENP023594 vhCDR2
WINTYTGEPTYADGFTG

SEQ ID NO: 256 - protein, 8 aa, synthetic construct
  REGION 1..8: note = Description of Artificial Sequence: Synthetic peptide
  REGION 1..8: note = XENP023594 vhCDR3
DYYGSSPY

SEQ ID NO: 257 - protein, 16 aa, synthetic construct
  REGION 1..16: note = Description of Artificial Sequence: Synthetic peptide
  REGION 1..16: note = XENP023594 vlCDR1
KSSQSIVHSNGNTYLE

SEQ ID NO: 258 - protein, 7 aa, synthetic construct
  REGION 1..7: note = Description of Artificial Sequence: Synthetic peptide
  REGION 1..7: note = XENP023594 vlCDR2
KVSNRFS

SEQ ID NO: 259 - protein, 9 aa, synthetic construct
  REGION 1..9: note = Description of Artificial Sequence: Synthetic peptide
  REGION 1..9: note = XENP023594 vlCDR3
FQGSHVPNT

SEQ ID NO: 260 - protein, 251 aa, synthetic construct
  REGION 1..251: note = Description of Artificial Sequence: Synthetic polypeptide
  REGION 1..251: note = XENP023595 1C11_H3_L3.21_scFv
QIQLVQSGSELKKPGASVKVSCKASGYTFTHYGMNWVRQAPGQGLEWMGWINTYTGEPTYADGFTGRFVFSLDTSVSTAYLQISSLKAEDTAVYFCARDYYGSSPYWGQGTLVTVSSGKPGSGKPGSGKPGSGKPGSDVLMTQSPDSLAVSTGERATINCKSSQSIVHSNGNTYLEWYQQKPGQSPKLLIYKVSNRFSGVPDRFSGSGSGTDFTLTISSLQAEDVAVYYCFQGSHVPNTFGGGTKVEIKGS

SEQ ID NO: 261 - protein, 117 aa, synthetic construct; identical to SEQ ID NO: 32
  REGION 1..117: note = Description of Artificial Sequence: Synthetic polypeptide
  REGION 1..117: note = VH of XENP023595

SEQ ID NO: 262 - protein, 114 aa, synthetic construct
  REGION 1..114: note = Description of Artificial Sequence: Synthetic polypeptide
  REGION 1..114: note = VL of XENP023595
DVLMTQSPDSLAVSTGERATINCKSSQSIVHSNGNTYLEWYQQKPGQSPKLLIYKVSNRFSGVPDRFSGSGSGTDFTLTISSLQAEDVAVYYCFQGSHVPNTFGGGTKVEIKGS

SEQ ID NO: 263 - protein, 5 aa, synthetic construct
  REGION 1..5: note = Description of Artificial Sequence: Synthetic peptide
  REGION 1..5: note = XENP023595 vhCDR1
HYGMN

SEQ ID NO: 264 - protein, 17 aa, synthetic construct
  REGION 1..17: note = Description of Artificial Sequence: Synthetic peptide
  REGION 1..17: note = XENP023595 vhCDR2
WINTYTGEPTYADGFTG

SEQ ID NO: 265 - protein, 8 aa, synthetic construct
  REGION 1..8: note = Description of Artificial Sequence: Synthetic peptide
  REGION 1..8: note = XENP023595 vhCDR3
DYYGSSPY

SEQ ID NO: 266 - protein, 16 aa, synthetic construct
  REGION 1..16: note = Description of Artificial Sequence: Synthetic peptide
  REGION 1..16: note = XENP023595 vlCDR1
KSSQSIVHSNGNTYLE

SEQ ID NO: 267 - protein, 7 aa, synthetic construct
  REGION 1..7: note = Description of Artificial Sequence: Synthetic peptide
  REGION 1..7: note = XENP023595 vlCDR2
KVSNRFS

SEQ ID NO: 268 - protein, 9 aa, synthetic construct
  REGION 1..9: note = Description of Artificial Sequence: Synthetic peptide
  REGION 1..9: note = XENP023595 vlCDR3
FQGSHVPNT

SEQ ID NO: 269 - protein, 251 aa, synthetic construct
  REGION 1..251: note = Description of Artificial Sequence: Synthetic polypeptide
  REGION 1..251: note = XENP023596 1C11_H3_L3.22_scFv
QIQLVQSGSELKKPGASVKVSCKASGYTFTHYGMNWVRQAPGQGLEWMGWINTYTGEPTYADGFTGRFVFSLDTSVSTAYLQISSLKAEDTAVYFCARDYYGSSPYWGQGTLVTVSSGKPGSGKPGSGKPGSGKPGSDVLMTQSPDSLAVSLGERITINCKSSQSIVHSNGNTYLEWYQQKPGQSPKLLIYKVSNRFSGVPDRFSGSGSGTDFTLTISSLQAEDVAVYYCFQGSHVPNTFGGGTKVEIKGS

SEQ ID NO: 270 - protein, 117 aa, synthetic construct; identical to SEQ ID NO: 32
  REGION 1..117: note = Description of Artificial Sequence: Synthetic polypeptide
  REGION 1..117: note = VH of XENP023596

SEQ ID NO: 271 - protein, 114 aa, synthetic construct
  REGION 1..114: note = Description of Artificial Sequence: Synthetic polypeptide
  REGION 1..114: note = VL of XENP023596
DVLMTQSPDSLAVSLGERITINCKSSQSIVHSNGNTYLEWYQQKPGQSPKLLIYKVSNRFSGVPDRFSGSGSGTDFTLTISSLQAEDVAVYYCFQGSHVPNTFGGGTKVEIKGS

SEQ ID NO: 272 - protein, 5 aa, synthetic construct
  REGION 1..5: note = Description of Artificial Sequence: Synthetic peptide
  REGION 1..5: note = XENP023596 vhCDR1
HYGMN

SEQ ID NO: 273 - protein, 17 aa, synthetic construct
  REGION 1..17: note = Description of Artificial Sequence: Synthetic peptide
  REGION 1..17: note = XENP023596 vhCDR2
WINTYTGEPTYADGFTG

SEQ ID NO: 274 - protein, 8 aa, synthetic construct
  REGION 1..8: note = Description of Artificial Sequence: Synthetic peptide
  REGION 1..8: note = XENP023596 vhCDR3
DYYGSSPY

SEQ ID NO: 275 - protein, 16 aa, synthetic construct
  REGION 1..16: note = Description of Artificial Sequence: Synthetic peptide
  REGION 1..16: note = XENP023596 vlCDR1
KSSQSIVHSNGNTYLE

SEQ ID NO: 276 - protein, 7 aa, synthetic construct
  REGION 1..7: note = Description of Artificial Sequence: Synthetic peptide
  REGION 1..7: note = XENP023596 vlCDR2
KVSNRFS

SEQ ID NO: 277 - protein, 9 aa, synthetic construct
  REGION 1..9: note = Description of Artificial Sequence: Synthetic peptide
  REGION 1..9: note = XENP023596 vlCDR3
FQGSHVPNT

SEQ ID NO: 278 - protein, 251 aa, synthetic construct
  REGION 1..251: note = Description of Artificial Sequence: Synthetic polypeptide
  REGION 1..251: note = XENP023601 1C11_H3_L3.23_scFv
QIQLVQSGSELKKPGASVKVSCKASGYTFTHYGMNWVRQAPGQGLEWMGWINTYTGEPTYADGFTGRFVFSLDTSVSTAYLQISSLKAEDTAVYFCARDYYGSSPYWGQGTLVTVSSGKPGSGKPGSGKPGSGKPGSDVLMTQSPDSLAVSLGERVTINCKSSQSIVHSNGNTYLEWYQQKPGQSPKLLIYKVSNRFSGVPDRFSGSGSGTDFTLTISSLQAEDVAVYYCFQGSHVPNTFGGGTKVEIKGS

SEQ ID NO: 279 - protein, 117 aa, synthetic construct; identical to SEQ ID NO: 32
  REGION 1..117: note = Description of Artificial Sequence: Synthetic polypeptide
  REGION 1..117: note = VH of XENP023601

SEQ ID NO: 280 - protein, 114 aa, synthetic construct
  REGION 1..114: note = Description of Artificial Sequence: Synthetic polypeptide
  REGION 1..114: note = VL of XENP023601
DVLMTQSPDSLAVSLGERVTINCKSSQSIVHSNGNTYLEWYQQKPGQSPKLLIYKVSNRFSGVPDRFSGSGSGTDFTLTISSLQAEDVAVYYCFQGSHVPNTFGGGTKVEIKGS

SEQ ID NO: 281 - protein, 5 aa, synthetic construct
  REGION 1..5: note = Description of Artificial Sequence: Synthetic peptide
  REGION 1..5: note = XENP023601 vhCDR1
HYGMN

SEQ ID NO: 282 - protein, 17 aa, synthetic construct
  REGION 1..17: note = Description of Artificial Sequence: Synthetic peptide
  REGION 1..17: note = XENP023601 vhCDR2
WINTYTGEPTYADGFTG

SEQ ID NO: 283 - protein, 8 aa, synthetic construct
  REGION 1..8: note = Description of Artificial Sequence: Synthetic peptide
  REGION 1..8: note = XENP023601 vhCDR3
DYYGSSPY

SEQ ID NO: 284 - protein, 16 aa, synthetic construct
  REGION 1..16: note = Description of Artificial Sequence: Synthetic peptide
  REGION 1..16: note = XENP023601 vlCDR1
KSSQSIVHSNGNTYLE

SEQ ID NO: 285 - protein, 7 aa, synthetic construct
  REGION 1..7: note = Description of Artificial Sequence: Synthetic peptide
  REGION 1..7: note = XENP023601 vlCDR2
KVSNRFS

SEQ ID NO: 286 - protein, 9 aa, synthetic construct
  REGION 1..9: note = Description of Artificial Sequence: Synthetic peptide
  REGION 1..9: note = XENP023601 vlCDR3
FQGSHVPNT

SEQ ID NO: 287 - protein, 251 aa, synthetic construct
  REGION 1..251: note = Description of Artificial Sequence: Synthetic polypeptide
  REGION 1..251: note = XENP023602 1C11_H3_L3.25_scFv
QIQLVQSGSELKKPGASVKVSCKASGYTFTHYGMNWVRQAPGQGLEWMGWINTYTGEPTYADGFTGRFVFSLDTSVSTAYLQISSLKAEDTAVYFCARDYYGSSPYWGQGTLVTVSSGKPGSGKPGSGKPGSGKPGSDVLMTQSPDSLAVSLGERATISCKSSQSIVHSNGNTYLEWYQQKPGQSPKLLIYKVSNRFSGVPDRFSGSGSGTDFTLTISSLQAEDVAVYYCFQGSHVPNTFGGGTKVEIKGS

SEQ ID NO: 288 - protein, 117 aa, synthetic construct; identical to SEQ ID NO: 32
  REGION 1..117: note = Description of Artificial Sequence: Synthetic polypeptide
  REGION 1..117: note = VH of XENP023602

SEQ ID NO: 289 - protein, 114 aa, synthetic construct
  REGION 1..114: note = Description of Artificial Sequence: Synthetic polypeptide
  REGION 1..114: note = VL of XENP023602
DVLMTQSPDSLAVSLGERATISCKSSQSIVHSNGNTYLEWYQQKPGQSPKLLIYKVSNRFSGVPDRFSGSGSGTDFTLTISSLQAEDVAVYYCFQGSHVPNTFGGGTKVEIKGS

SEQ ID NO: 290 - protein, 5 aa, synthetic construct
  REGION 1..5: note = Description of Artificial Sequence: Synthetic peptide
  REGION 1..5: note = XENP023602 vhCDR1
HYGMN

SEQ ID NO: 291 - protein, 17 aa, synthetic construct
  REGION 1..17: note = Description of Artificial Sequence: Synthetic peptide
  REGION 1..17: note = XENP023602 vhCDR2
WINTYTGEPTYADGFTG

SEQ ID NO: 292 - protein, 8 aa, synthetic construct
  REGION 1..8: note = Description of Artificial Sequence: Synthetic peptide
  REGION 1..8: note = XENP023602 vhCDR3
DYYGSSPY

SEQ ID NO: 293 - protein, 16 aa, synthetic construct
  REGION 1..16: note = Description of Artificial Sequence: Synthetic peptide
  REGION 1..16: note = XENP023602 vlCDR1
KSSQSIVHSNGNTYLE

SEQ ID NO: 294 - protein, 7 aa, synthetic construct
  REGION 1..7: note = Description of Artificial Sequence: Synthetic peptide
  REGION 1..7: note = XENP023602 vlCDR2
KVSNRFS

SEQ ID NO: 295 - protein, 9 aa, synthetic construct
  REGION 1..9: note = Description of Artificial Sequence: Synthetic peptide
  REGION 1..9: note = XENP023602 vlCDR3
FQGSHVPNT

SEQ ID NO: 296 - protein, 251 aa, synthetic construct
  REGION 1..251: note = Description of Artificial Sequence: Synthetic polypeptide
  REGION 1..251: note = XENP023603 1C11_H3_L3.26_scFv
QIQLVQSGSELKKPGASVKVSCKASGYTFTHYGMNWVRQAPGQGLEWMGWINTYTGEPTYADGFTGRFVFSLDTSVSTAYLQISSLKAEDTAVYFCARDYYGSSPYWGQGTLVTVSSGKPGSGKPGSGKPGSGKPGSDVLMTQSPDSLAVSLGERATITCKSSQSIVHSNGNTYLEWYQQKPGQSPKLLIYKVSNRFSGVPDRFSGSGSGTDFTLTISSLQAEDVAVYYCFQGSHVPNTFGGGTKVEIKGS

SEQ ID NO: 297 - protein, 117 aa, synthetic construct; identical to SEQ ID NO: 32
  REGION 1..117: note = Description of Artificial Sequence: Synthetic polypeptide
  REGION 1..117: note = VH of XENP023603

SEQ ID NO: 298 - protein, 114 aa, synthetic construct
  REGION 1..114: note = Description of Artificial Sequence: Synthetic polypeptide
  REGION 1..114: note = VL of XENP023603
DVLMTQSPDSLAVSLGERATITCKSSQSIVHSNGNTYLEWYQQKPGQSPKLLIYKVSNRFSGVPDRFSGSGSGTDFTLTISSLQAEDVAVYYCFQGSHVPNTFGGGTKVEIKGS

SEQ ID NO: 299 - protein, 5 aa, synthetic construct
  REGION 1..5: note = Description of Artificial Sequence: Synthetic peptide
  REGION 1..5: note = XENP023603 vhCDR1
HYGMN

SEQ ID NO: 300 - protein, 17 aa, synthetic construct
  REGION 1..17: note = Description of Artificial Sequence: Synthetic peptide
  REGION 1..17: note = XENP023603 vhCDR2
WINTYTGEPTYADGFTG

SEQ ID NO: 301 - protein, 8 aa, synthetic construct
  REGION 1..8: note = Description of Artificial Sequence: Synthetic peptide
  REGION 1..8: note = XENP023603 vhCDR3
DYYGSSPY

SEQ ID NO: 302 - protein, 16 aa, synthetic construct
  REGION 1..16: note = Description of Artificial Sequence: Synthetic peptide
  REGION 1..16: note = XENP023603 vlCDR1
KSSQSIVHSNGNTYLE

SEQ ID NO: 303 - protein, 7 aa, synthetic construct
  REGION 1..7: note = Description of Artificial Sequence: Synthetic peptide
  REGION 1..7: note = XENP023603 vlCDR2
KVSNRFS

SEQ ID NO: 304 - protein, 9 aa, synthetic construct
  REGION 1..9: note = Description of Artificial Sequence: Synthetic peptide
  REGION 1..9: note = XENP023603 vlCDR3
FQGSHVPNT

SEQ ID NO: 305 - protein, 251 aa, synthetic construct
  REGION 1..251: note = Description of Artificial Sequence: Synthetic polypeptide
  REGION 1..251: note = XENP023604 1C11_H3_L3.27_scFv
QIQLVQSGSELKKPGASVKVSCKASGYTFTHYGMNWVRQAPGQGLEWMGWINTYTGEPTYADGFTGRFVFSLDTSVSTAYLQISSLKAEDTAVYFCARDYYGSSPYWGQGTLVTVSSGKPGSGKPGSGKPGSGKPGSDVLMTQSPDSLAVSLGERATINCQSSQSIVHSNGNTYLEWYQQKPGQSPKLLIYKVSNRFSGVPDRFSGSGSGTDFTLTISSLQAEDVAVYYCFQGSHVPNTFGGGTKVEIKGS

SEQ ID NO: 306 - protein, 117 aa, synthetic construct; identical to SEQ ID NO: 32
  REGION 1..117: note = Description of Artificial Sequence: Synthetic polypeptide
  REGION 1..117: note = VH of XENP023604

SEQ ID NO: 307 - protein, 114 aa, synthetic construct
  REGION 1..114: note = Description of Artificial Sequence: Synthetic polypeptide
  REGION 1..114: note = VL of XENP023604
DVLMTQSPDSLAVSLGERATINCQSSQSIVHSNGNTYLEWYQQKPGQSPKLLIYKVSNRFSGVPDRFSGSGSGTDFTLTISSLQAEDVAVYYCFQGSHVPNTFGGGTKVEIKGS

SEQ ID NO: 308 - protein, 5 aa, synthetic construct
  REGION 1..5: note = Description of Artificial Sequence: Synthetic peptide
  REGION 1..5: note = XENP023604 vhCDR1
HYGMN

SEQ ID NO: 309 - protein, 17 aa, synthetic construct
  REGION 1..17: note = Description of Artificial Sequence: Synthetic peptide
  REGION 1..17: note = XENP023604 vhCDR2
WINTYTGEPTYADGFTG

SEQ ID NO: 310 - protein, 8 aa, synthetic construct
  REGION 1..8: note = Description of Artificial Sequence: Synthetic peptide
  REGION 1..8: note = XENP023604 vhCDR3
DYYGSSPY

SEQ ID NO: 311 - protein, 16 aa, synthetic construct
  REGION 1..16: note = Description of Artificial Sequence: Synthetic peptide
  REGION 1..16: note = XENP023604 vlCDR1
QSSQSIVHSNGNTYLE

SEQ ID NO: 312 - protein, 7 aa, synthetic construct
  REGION 1..7: note = Description of Artificial Sequence: Synthetic peptide
  REGION 1..7: note = XENP023604 vlCDR2
KVSNRFS

SEQ ID NO: 313 - protein, 9 aa, synthetic construct
  REGION 1..9: note = Description of Artificial Sequence: Synthetic peptide
  REGION 1..9: note = XENP023604 vlCDR3
FQGSHVPNT

SEQ ID NO: 314 - protein, 251 aa, synthetic construct
  REGION 1..251: note = Description of Artificial Sequence: Synthetic polypeptide
  REGION 1..251: note = XENP023605 1C11_H3_L3.28_scFv
QIQLVQSGSELKKPGASVKVSCKASGYTFTHYGMNWVRQAPGQGLEWMGWINTYTGEPTYADGFTGRFVFSLDTSVSTAYLQISSLKAEDTAVYFCARDYYGSSPYWGQGTLVTVSSGKPGSGKPGSGKPGSGKPGSDVLMTQSPDSLAVSLGERATINCRSSQSIVHSNGNTYLEWYQQKPGQSPKLLIYKVSNRFSGVPDRFSGSGSGTDFTLTISSLQAEDVAVYYCFQGSHVPNTFGGGTKVEIKGS

SEQ ID NO: 315 - protein, 117 aa, synthetic construct; identical to SEQ ID NO: 32
  REGION 1..117: note = Description of Artificial Sequence: Synthetic polypeptide
  REGION 1..117: note = VH of XENP023605

SEQ ID NO: 316 - protein, 114 aa, synthetic construct
  REGION 1..114: note = Description of Artificial Sequence: Synthetic polypeptide
  REGION 1..114: note = VL of XENP023605
DVLMTQSPDSLAVSLGERATINCRSSQSIVHSNGNTYLEWYQQKPGQSPKLLIYKVSNRFSGVPDRFSGSGSGTDFTLTISSLQAEDVAVYYCFQGSHVPNTFGGGTKVEIKGS

SEQ ID NO: 317 - protein, 5 aa, synthetic construct
  REGION 1..5: note = Description of Artificial Sequence: Synthetic peptide
  REGION 1..5: note = XENP023605 vhCDR1
HYGMN

SEQ ID NO: 318 - protein, 17 aa, synthetic construct
  REGION 1..17: note = Description of Artificial Sequence: Synthetic peptide
  REGION 1..17: note = XENP023605 vhCDR2
WINTYTGEPTYADGFTG

SEQ ID NO: 319 - protein, 8 aa, synthetic construct
  REGION 1..8: note = Description of Artificial Sequence: Synthetic peptide
  REGION 1..8: note = XENP023605 vhCDR3
DYYGSSPY

SEQ ID NO: 320 - protein, 16 aa, synthetic construct
  REGION 1..16: note = Description of Artificial Sequence: Synthetic peptide
  REGION 1..16: note = XENP023605 vlCDR1
RSSQSIVHSNGNTYLE

SEQ ID NO: 321 - protein, 7 aa, synthetic construct
  REGION 1..7: note = Description of Artificial Sequence: Synthetic peptide
  REGION 1..7: note = XENP023605 vlCDR2
KVSNRFS

SEQ ID NO: 322 - protein, 9 aa, synthetic construct
  REGION 1..9: note = Description of Artificial Sequence: Synthetic peptide
  REGION 1..9: note = XENP023605 vlCDR3
FQGSHVPNT

SEQ ID NO: 323 - protein, 251 aa, synthetic construct
  REGION 1..251: note = Description of Artificial Sequence: Synthetic polypeptide
  REGION 1..251: note = XENP023606 1C11_H3_L3.29_scFv
QIQLVQSGSELKKPGASVKVSCKASGYTFTHYGMNWVRQAPGQGLEWMGWINTYTGEPTYADGFTGRFVFSLDTSVSTAYLQISSLKAEDTAVYFCARDYYGSSPYWGQGTLVTVSSGKPGSGKPGSGKPGSGKPGSDVLMTQSPDSLAVSLGERATINCSSSQSIVHSNGNTYLEWYQQKPGQSPKLLIYKVSNRFSGVPDRFSGSGSGTDFTLTISSLQAEDVAVYYCFQGSHVPNTFGGGTKVEIKGS

SEQ ID NO: 324 - protein, 117 aa, synthetic construct; identical to SEQ ID NO: 32
  REGION 1..117: note = Description of Artificial Sequence: Synthetic polypeptide
  REGION 1..117: note = VH of XENP023606

SEQ ID NO: 325 - protein, 114 aa, synthetic construct
  REGION 1..114: note = Description of Artificial Sequence: Synthetic polypeptide
  REGION 1..114: note = VL of XENP023606
DVLMTQSPDSLAVSLGERATINCSSSQSIVHSNGNTYLEWYQQKPGQSPKLLIYKVSNRFSGVPDRFSGSGSGTDFTLTISSLQAEDVAVYYCFQGSHVPNTFGGGTKVEIKGS

SEQ ID NO: 326 - protein, 5 aa, synthetic construct
  REGION 1..5: note = Description of Artificial Sequence: Synthetic peptide
  REGION 1..5: note = XENP023606 vhCDR1
HYGMN

SEQ ID NO: 327 - protein, 17 aa, synthetic construct
  REGION 1..17: note = Description of Artificial Sequence: Synthetic peptide
  REGION 1..17: note = XENP023606 vhCDR2
WINTYTGEPTYADGFTG

SEQ ID NO: 328 - protein, 8 aa, synthetic construct
  REGION 1..8: note = Description of Artificial Sequence: Synthetic peptide
  REGION 1..8: note = XENP023606 vhCDR3
DYYGSSPY

SEQ ID NO: 329 - protein, 16 aa, synthetic construct
  REGION 1..16: note = Description of Artificial Sequence: Synthetic peptide
  REGION 1..16: note = XENP023606 vlCDR1
SSSQSIVHSNGNTYLE

SEQ ID NO: 330 - protein, 7 aa, synthetic construct
  REGION 1..7: note = Description of Artificial Sequence: Synthetic peptide
  REGION 1..7: note = XENP023606 vlCDR2
KVSNRFS

SEQ ID NO: 331 - protein, 9 aa, synthetic construct
  REGION 1..9: note = Description of Artificial Sequence: Synthetic peptide
  REGION 1..9: note = XENP023606 vlCDR3
FQGSHVPNT

SEQ ID NO: 332 - protein, 251 aa, synthetic construct
  REGION 1..251: note = Description of Artificial Sequence: Synthetic polypeptide
  REGION 1..251: note = XENP023607 1C11_H3_L3.30_scFv
QIQLVQSGSELKKPGASVKVSCKASGYTFTHYGMNWVRQAPGQGLEWMGWINTYTGEPTYADGFTGRFVFSLDTSVSTAYLQISSLKAEDTAVYFCARDYYGSSPYWGQGTLVTVSSGKPGSGKPGSGKPGSGKPGSDVLMTQSPDSLAVSLGERATINCTSSQSIVHSNGNTYLEWYQQKPGQSPKLLIYKVSNRFSGVPDRFSGSGSGTDFTLTISSLQAEDVAVYYCFQGSHVPNTFGGGTKVEIKGS

SEQ ID NO: 333 - protein, 117 aa, synthetic construct; identical to SEQ ID NO: 32
  REGION 1..117: note = Description of Artificial Sequence: Synthetic polypeptide
  REGION 1..117: note = VH of XENP023607

SEQ ID NO: 334 - protein, 114 aa, synthetic construct
  REGION 1..114: note = Description of Artificial Sequence: Synthetic polypeptide
  REGION 1..114: note = VL of XENP023607
DVLMTQSPDSLAVSLGERATINCTSSQSIVHSNGNTYLEWYQQKPGQSPKLLIYKVSNRFSGVPDRFSGSGSGTDFTLTISSLQAEDVAVYYCFQGSHVPNTFGGGTKVEIKGS

SEQ ID NO: 335 - protein, 5 aa, synthetic construct
  REGION 1..5: note = Description of Artificial Sequence: Synthetic peptide
  REGION 1..5: note = XENP023607 vhCDR1
HYGMN

SEQ ID NO: 336 - protein, 17 aa, synthetic construct
  REGION 1..17: note = Description of Artificial Sequence: Synthetic peptide
  REGION 1..17: note = XENP023607 vhCDR2
WINTYTGEPTYADGFTG

SEQ ID NO: 337 - protein, 8 aa, synthetic construct
  REGION 1..8: note = Description of Artificial Sequence: Synthetic peptide
  REGION 1..8: note = XENP023607 vhCDR3
DYYGSSPY

SEQ ID NO: 338 - protein, 16 aa, synthetic construct
  REGION 1..16: note = Description of Artificial Sequence: Synthetic peptide
  REGION 1..16: note = XENP023607 vlCDR1
TSSQSIVHSNGNTYLE

SEQ ID NO: 339 - protein, 7 aa, synthetic construct
  REGION 1..7: note = Description of Artificial Sequence: Synthetic peptide
  REGION 1..7: note = XENP023607 vlCDR2
KVSNRFS

SEQ ID NO: 340 - protein, 9 aa, synthetic construct
  REGION 1..9: note = Description of Artificial Sequence: Synthetic peptide
  REGION 1..9: note = XENP023607 vlCDR3
FQGSHVPNT

SEQ ID NO: 341 - protein, 251 aa, synthetic construct
  REGION 1..251: note = Description of Artificial Sequence: Synthetic polypeptide
  REGION 1..251: note = XENP023608 1C11_H3_L3.31_scFv
QIQLVQSGSELKKPGASVKVSCKASGYTFTHYGMNWVRQAPGQGLEWMGWINTYTGEPTYADGFTGRFVFSLDTSVSTAYLQISSLKAEDTAVYFCARDYYGSSPYWGQGTLVTVSSGKPGSGKPGSGKPGSGKPGSDVLMTQSPDSLAVSLGERATINCKTSQSIVHSNGNTYLEWYQQKPGQSPKLLIYKVSNRFSGVPDRFSGSGSGTDFTLTISSLQAEDVAVYYCFQGSHVPNTFGGGTKVEIKGS

SEQ ID NO: 342 - protein, 117 aa, synthetic construct; identical to SEQ ID NO: 32
  REGION 1..117: note = Description of Artificial Sequence: Synthetic polypeptide
  REGION 1..117: note = VH of XENP023608

SEQ ID NO: 343 - protein, 114 aa, synthetic construct
  REGION 1..114: note = Description of Artificial Sequence: Synthetic polypeptide
  REGION 1..114: note = VL of XENP023608
DVLMTQSPDSLAVSLGERATINCKTSQSIVHSNGNTYLEWYQQKPGQSPKLLIYKVSNRFSGVPDRFSGSGSGTDFTLTISSLQAEDVAVYYCFQGSHVPNTFGGGTKVEIKGS

SEQ ID NO: 344 - protein, 5 aa, synthetic construct
  REGION 1..5: note = Description of Artificial Sequence: Synthetic peptide
  REGION 1..5: note = XENP023608 vhCDR1
HYGMN

SEQ ID NO: 345 - protein, 17 aa, synthetic construct
  REGION 1..17: note = Description of Artificial Sequence: Synthetic peptide
  REGION 1..17: note = XENP023608 vhCDR2
WINTYTGEPTYADGFTG

SEQ ID NO: 346 - protein, 8 aa, synthetic construct
  REGION 1..8: note = Description of Artificial Sequence: Synthetic peptide
  REGION 1..8: note = XENP023608 vhCDR3
DYYGSSPY

SEQ ID NO: 347 - protein, 16 aa, synthetic construct
  REGION 1..16: note = Description of Artificial Sequence: Synthetic peptide
  REGION 1..16: note = XENP023608 vlCDR1
KTSQSIVHSNGNTYLE

SEQ ID NO: 348 - protein, 7 aa, synthetic construct
  REGION 1..7: note = Description of Artificial Sequence: Synthetic peptide
  REGION 1..7: note = XENP023608 vlCDR2
KVSNRFS

SEQ ID NO: 349 - protein, 9 aa, synthetic construct
  REGION 1..9: note = Description of Artificial Sequence: Synthetic peptide
  REGION 1..9: note = XENP023608 vlCDR3
FQGSHVPNT

SEQ ID NO: 350 - protein, 251 aa, synthetic construct
  REGION 1..251: note = Description of Artificial Sequence: Synthetic polypeptide
  REGION 1..251: note = XENP023609 1C11_H3_L3.32_scFv
QIQLVQSGSELKKPGASVKVSCKASGYTFTHYGMNWVRQAPGQGLEWMGWINTYTGEPTYADGFTGRFVFSLDTSVSTAYLQISSLKAEDTAVYFCARDYYGSSPYWGQGTLVTVSSGKPGSGKPGSGKPGSGKPGSDVLMTQSPDSLAVSLGERATINCKASQSIVHSNGNTYLEWYQQKPGQSPKLLIYKVSNRFSGVPDRFSGSGSGTDFTLTISSLQAEDVAVYYCFQGSHVPNTFGGGTKVEIKGS

SEQ ID NO: 351 - protein, 117 aa, synthetic construct; identical to SEQ ID NO: 32
  REGION 1..117: note = Description of Artificial Sequence: Synthetic polypeptide
  REGION 1..117: note = VH of XENP023609

SEQ ID NO: 352 - protein, 114 aa, synthetic construct
  REGION 1..114: note = Description of Artificial Sequence: Synthetic polypeptide
  REGION 1..114: note = VL of XENP023609
DVLMTQSPDSLAVSLGERATINCKASQSIVHSNGNTYLEWYQQKPGQSPKLLIYKVSNRFSGVPDRFSGSGSGTDFTLTISSLQAEDVAVYYCFQGSHVPNTFGGGTKVEIKGS

SEQ ID NO: 353 - protein, 5 aa, synthetic construct
  REGION 1..5: note = Description of Artificial Sequence: Synthetic peptide
  REGION 1..5: note = XENP023609 vhCDR1
HYGMN

SEQ ID NO: 354 - protein, 17 aa, synthetic construct
  REGION 1..17: note = Description of Artificial Sequence: Synthetic peptide
  REGION 1..17: note = XENP023609 vhCDR2
WINTYTGEPTYADGFTG

SEQ ID NO: 355 - protein, 8 aa, synthetic construct
  REGION 1..8: note = Description of Artificial Sequence: Synthetic peptide
  REGION 1..8: note = XENP023609 vhCDR3
DYYGSSPY

SEQ ID NO: 356 - protein, 16 aa, synthetic construct
  REGION 1..16: note = Description of Artificial Sequence: Synthetic peptide
  REGION 1..16: note = XENP023609 vlCDR1
KASQSIVHSNGNTYLE

SEQ ID NO: 357 - protein, 7 aa, synthetic construct
  REGION 1..7: note = Description of Artificial Sequence: Synthetic peptide
  REGION 1..7: note = XENP023609 vlCDR2
KVSNRFS

SEQ ID NO: 358 - protein, 9 aa, synthetic construct
  REGION 1..9: note = Description of Artificial Sequence: Synthetic peptide
  REGION 1..9: note = XENP023609 vlCDR3
FQGSHVPNT

SEQ ID NO: 359 - protein, 251 aa, synthetic construct
  REGION 1..251: note = Description of Artificial Sequence: Synthetic polypeptide
  REGION 1..251: note = XENP023610 1C11_H3_L3.34_scFv
QIQLVQSGSELKKPGASVKVSCKASGYTFTHYGMNWVRQAPGQGLEWMGWINTYTGEPTYADGFTGRFVFSLDTSVSTAYLQISSLKAEDTAVYFCARDYYGSSPYWGQGTLVTVSSGKPGSGKPGSGKPGSGKPGSDVLMTQSPDSLAVSLGERATINCKSSQSVVHSNGNTYLEWYQQKPGQSPKLLIYKVSNRFSGVPDRFSGSGSGTDFTLTISSLQAEDVAVYYCFQGSHVPNTFGGGTKVEIKGS

SEQ ID NO: 360 - protein, 117 aa, synthetic construct; identical to SEQ ID NO: 32
  REGION 1..117: note = Description of Artificial Sequence: Synthetic polypeptide
  REGION 1..117: note = VH of XENP023610

SEQ ID NO: 361 - protein, 114 aa, synthetic construct
  REGION 1..114: note = Description of Artificial Sequence: Synthetic polypeptide
  REGION 1..114: note = VL of XENP023610
DVLMTQSPDSLAVSLGERATINCKSSQSVVHSNGNTYLEWYQQKPGQSPKLLIYKVSNRFSGVPDRFSGSGSGTDFTLTISSLQAEDVAVYYCFQGSHVPNTFGGGTKVEIKGS

SEQ ID NO: 362 - protein, 5 aa, synthetic construct
  REGION 1..5: note = Description of Artificial Sequence: Synthetic peptide
  REGION 1..5: note = XENP023610 vhCDR1
HYGMN

SEQ ID NO: 363 - protein, 17 aa, synthetic construct
  REGION 1..17: note = Description of Artificial Sequence: Synthetic peptide
  REGION 1..17: note = XENP023610 vhCDR2
WINTYTGEPTYADGFTG

SEQ ID NO: 364 - protein, 8 aa, synthetic construct
  REGION 1..8: note = Description of Artificial Sequence: Synthetic peptide
  REGION 1..8: note = XENP023610 vhCDR3
DYYGSSPY

SEQ ID NO: 365 - protein, 16 aa, synthetic construct
  REGION 1..16: note = Description of Artificial Sequence: Synthetic peptide
  REGION 1..16: note = XENP023610 vlCDR1
KSSQSVVHSNGNTYLE

SEQ ID NO: 366 - protein, 7 aa, synthetic construct
  REGION 1..7: note = Description of Artificial Sequence: Synthetic peptide
  REGION 1..7: note = XENP023610 vlCDR2
KVSNRFS

SEQ ID NO: 367 - protein, 9 aa, synthetic construct
  REGION 1..9: note = Description of Artificial Sequence: Synthetic peptide
  REGION 1..9: note = XENP023610 vlCDR3
FQGSHVPNT

SEQ ID NO: 368 - protein, 251 aa, synthetic construct
  REGION 1..251: note = Description of Artificial Sequence: Synthetic polypeptide
  REGION 1..251: note = XENP023611 1C11_H3_L3.35_scFv
QIQLVQSGSELKKPGASVKVSCKASGYTFTHYGMNWVRQAPGQGLEWMGWINTYTGEPTYADGFTGRFVFSLDTSVSTAYLQISSLKAEDTAVYFCARDYYGSSPYWGQGTLVTVSSGKPGSGKPGSGKPGSGKPGSDVLMTQSPDSLAVSLGERATINCKSSQSAVHSNGNTYLEWYQQKPGQSPKLLIYKVSNRFSGVPDRFSGSGSGTDFTLTISSLQAEDVAVYYCFQGSHVPNTFGGGTKVEIKGS

SEQ ID NO: 369 - protein, 117 aa, synthetic construct; identical to SEQ ID NO: 32
  REGION 1..117: note = Description of Artificial Sequence: Synthetic polypeptide
  REGION 1..117: note = VH of XENP023611

SEQ ID NO: 370 - protein, 114 aa, synthetic construct
  REGION 1..114: note = Description of Artificial Sequence: Synthetic polypeptide
  REGION 1..114: note = VL of XENP023611
DVLMTQSPDSLAVSLGERATINCKSSQSAVHSNGNTYLEWYQQKPGQSPKLLIYKVSNRFSGVPDRFSGSGSGTDFTLTISSLQAEDVAVYYCFQGSHVPNTFGGGTKVEIKGS

SEQ ID NO: 371 - protein, 5 aa, synthetic construct
  REGION 1..5: note = Description of Artificial Sequence: Synthetic peptide
  REGION 1..5: note = XENP023611 vhCDR1
HYGMN

SEQ ID NO: 372 - protein, 17 aa, synthetic construct
  REGION 1..17: note = Description of Artificial Sequence: Synthetic peptide
  REGION 1..17: note = XENP023611 vhCDR2
WINTYTGEPTYADGFTG

SEQ ID NO: 373 - protein, 8 aa, synthetic construct
  REGION 1..8: note = Description of Artificial Sequence: Synthetic peptide
  REGION 1..8: note = XENP023611 vhCDR3
DYYGSSPY

SEQ ID NO: 374 - protein, 16 aa, synthetic construct
  REGION 1..16: note = Description of Artificial Sequence: Synthetic peptide
  REGION 1..16: note = XENP023611 vlCDR1
KSSQSAVHSNGNTYLE

SEQ ID NO: 375 - protein, 7 aa, synthetic construct
  REGION 1..7: note = Description of Artificial Sequence: Synthetic peptide
  REGION 1..7: note = XENP023611 vlCDR2
KVSNRFS

SEQ ID NO: 376 - protein, 9 aa, synthetic construct
  REGION 1..9: note = Description of Artificial Sequence: Synthetic peptide
  REGION 1..9: note = XENP023611 vlCDR3
FQGSHVPNT

SEQ ID NO: 377 - protein, 251 aa, synthetic construct
  REGION 1..251: note = Description of Artificial Sequence: Synthetic polypeptide
  REGION 1..251: note = XENP023612 1C11_H3_L3.36_scFv
QIQLVQSGSELKKPGASVKVSCKASGYTFTHYGMNWVRQAPGQGLEWMGWINTYTGEPTYADGFTGRFVFSLDTSVSTAYLQISSLKAEDTAVYFCARDYYGSSPYWGQGTLVTVSSGKPGSGKPGSGKPGSGKPGSDVLMTQSPDSLAVSLGERATINCKSSQSIVHSSNNTYLEWYQQKPGQSPKLLIYKVSNRFSGVPDRFSGSGSGTDFTLTISSLQAEDVAVYYCFQGSHVPNTFGGGTKVEIKGS

SEQ ID NO: 378 - protein, 117 aa, synthetic construct; identical to SEQ ID NO: 32
  REGION 1..117: note = Description of Artificial Sequence: Synthetic polypeptide
  REGION 1..117: note = VH of XENP023612

SEQ ID NO: 379 - protein, 114 aa, synthetic construct
  REGION 1..114: note = Description of Artificial Sequence: Synthetic polypeptide
  REGION 1..114: note = VL of XENP023612
DVLMTQSPDSLAVSLGERATINCKSSQSIVHSSNNTYLEWYQQKPGQSPKLLIYKVSNRFSGVPDRFSGSGSGTDFTLTISSLQAEDVAVYYCFQGSHVPNTFGGGTKVEIKGS

SEQ ID NO: 380 - protein, 5 aa, synthetic construct
  REGION 1..5: note = Description of Artificial Sequence: Synthetic peptide
  REGION 1..5: note = XENP023612 vhCDR1
HYGMN

SEQ ID NO: 381 - protein, 17 aa, synthetic construct
  REGION 1..17: note = Description of Artificial Sequence: Synthetic peptide
  REGION 1..17: note = XENP023612 vhCDR2
WINTYTGEPTYADGFTG

SEQ ID NO: 382 - protein, 8 aa, synthetic construct
  REGION 1..8: note = Description of Artificial Sequence: Synthetic peptide
  REGION 1..8: note = XENP023612 vhCDR3
DYYGSSPY

SEQ ID NO: 383 - protein, 16 aa, synthetic construct
  REGION 1..16: note = Description of Artificial Sequence: Synthetic peptide
  REGION 1..16: note = XENP023612 vlCDR1
KSSQSIVHSSNNTYLE

SEQ ID NO: 384 - protein, 7 aa, synthetic construct
  REGION 1..7: note = Description of Artificial Sequence: Synthetic peptide
  REGION 1..7: note = XENP023612 vlCDR2
KVSNRFS

SEQ ID NO: 385 - protein, 9 aa, synthetic construct
  REGION 1..9: note = Description of Artificial Sequence: Synthetic peptide
  REGION 1..9: note = XENP023612 vlCDR3
FQGSHVPNT

SEQ ID NO: 386 - protein, 251 aa, synthetic construct
  REGION 1..251: note = Description of Artificial Sequence: Synthetic polypeptide
  REGION 1..251: note = XENP023613 1C11_H3_L3.37_scFv
QIQLVQSGSELKKPGASVKVSCKASGYTFTHYGMNWVRQAPGQGLEWMGWINTYTGEPTYADGFTGRFVFSLDTSVSTAYLQISSLKAEDTAVYFCARDYYGSSPYWGQGTLVTVSSGKPGSGKPGSGKPGSGKPGSDVLMTQSPDSLAVSLGERATINCKSSQSIVHSNGNSYLEWYQQKPGQSPKLLIYKVSNRFSGVPDRFSGSGSGTDFTLTISSLQAEDVAVYYCFQGSHVPNTFGGGTKVEIKGS

SEQ ID NO: 387 - protein, 117 aa, synthetic construct; identical to SEQ ID NO: 32
  REGION 1..117: note = Description of Artificial Sequence: Synthetic polypeptide
  REGION 1..117: note = VH of XENP023613

SEQ ID NO: 388 - protein, 114 aa, synthetic construct
  REGION 1..114: note = Description of Artificial Sequence: Synthetic polypeptide
  REGION 1..114: note = VL of XENP023613
DVLMTQSPDSLAVSLGERATINCKSSQSIVHSNGNSYLEWYQQKPGQSPKLLIYKVSNRFSGVPDRFSGSGSGTDFTLTISSLQAEDVAVYYCFQGSHVPNTFGGGTKVEIKGS

SEQ ID NO: 389 - protein, 5 aa, synthetic construct
  REGION 1..5: note = Description of Artificial Sequence: Synthetic peptide
  REGION 1..5: note = XENP023613 vhCDR1
HYGMN

SEQ ID NO: 390 - protein, 17 aa, synthetic construct
  REGION 1..17: note = Description of Artificial Sequence: Synthetic peptide
  REGION 1..17: note = XENP023613 vhCDR2
WINTYTGEPTYADGFTG

SEQ ID NO: 391 - protein, 8 aa, synthetic construct
  REGION 1..8: note = Description of Artificial Sequence: Synthetic peptide
  REGION 1..8: note = XENP023613 vhCDR3
DYYGSSPY

SEQ ID NO: 392 - protein, 16 aa, synthetic construct
  REGION 1..16: note = Description of Artificial Sequence: Synthetic peptide
  REGION 1..16: note = XENP023613 vlCDR1
KSSQSIVHSNGNSYLE

SEQ ID NO: 393 - protein, 7 aa, synthetic construct
  REGION 1..7: note = Description of Artificial Sequence: Synthetic peptide
  REGION 1..7: note = XENP023613 vlCDR2
KVSNRFS

SEQ ID NO: 394 - protein, 9 aa, synthetic construct
  REGION 1..9: note = Description of Artificial Sequence: Synthetic peptide
  REGION 1..9: note = XENP023613 vlCDR3
FQGSHVPNT

SEQ ID NO: 395 - protein, 251 aa, synthetic construct
  REGION 1..251: note = Description of Artificial Sequence: Synthetic polypeptide
  REGION 1..251: note = XENP023614 1C11_H3_L3.38_scFv
QIQLVQSGSELKKPGASVKVSCKASGYTFTHYGMNWVRQAPGQGLEWMGWINTYTGEPTYADGFTGRFVFSLDTSVSTAYLQISSLKAEDTAVYFCARDYYGSSPYWGQGTLVTVSSGKPGSGKPGSGKPGSGKPGSDVLMTQSPDSLAVSLGERATINCKSSQSIVHSNGNNYLEWYQQKPGQSPKLLIYKVSNRFSGVPDRFSGSGSGTDFTLTISSLQAEDVAVYYCFQGSHVPNTFGGGTKVEIKGS

SEQ ID NO: 396 - protein, 117 aa, synthetic construct; identical to SEQ ID NO: 32
  REGION 1..117: note = Description of Artificial Sequence: Synthetic polypeptide
  REGION 1..117: note = VH of XENP023614

SEQ ID NO: 397 - protein, 114 aa, synthetic construct
  REGION 1..114: note = Description of Artificial Sequence: Synthetic polypeptide
  REGION 1..114: note = VL of XENP023614
DVLMTQSPDSLAVSLGERATINCKSSQSIVHSNGNNYLEWYQQKPGQSPKLLIYKVSNRFSGVPDRFSGSGSGTDFTLTISSLQAEDVAVYYCFQGSHVPNTFGGGTKVEIKGS

SEQ ID NO: 398 - protein, 5 aa, synthetic construct
  REGION 1..5: note = Description of Artificial Sequence: Synthetic peptide
  REGION 1..5: note = XENP023614 vhCDR1
HYGMN

SEQ ID NO: 399 - protein, 17 aa, synthetic construct
  REGION 1..17: note = Description of Artificial Sequence: Synthetic peptide
  REGION 1..17: note = XENP023614 vhCDR2
WINTYTGEPTYADGFTG

SEQ ID NO: 400 - protein, 8 aa, synthetic construct
  REGION 1..8: note = Description of Artificial Sequence: Synthetic peptide
  REGION 1..8: note = XENP023614 vhCDR3
DYYGSSPY

SEQ ID NO: 401 - protein, 16 aa, synthetic construct
  REGION 1..16: note = Description of Artificial Sequence: Synthetic peptide
  REGION 1..16: note = XENP023614 vlCDR1
KSSQSIVHSNGNNYLE

SEQ ID NO: 402 - protein, 7 aa, synthetic construct
  REGION 1..7: note = Description of Artificial Sequence: Synthetic peptide
  REGION 1..7: note = XENP023614 vlCDR2
KVSNRFS

SEQ ID NO: 403 - protein, 9 aa, synthetic construct
  REGION 1..9: note = Description of Artificial Sequence: Synthetic peptide
  REGION 1..9: note = XENP023614 vlCDR3
FQGSHVPNT

SEQ ID NO: 404 - protein, 251 aa, synthetic construct
  REGION 1..251: note = Description of Artificial Sequence: Synthetic polypeptide
  REGION 1..251: note = XENP023615 1C11_H3_L3.46_scFv
QIQLVQSGSELKKPGASVKVSCKASGYTFTHYGMNWVRQAPGQGLEWMGWINTYTGEPTYADGFTGRFVFSLDTSVSTAYLQISSLKAEDTAVYFCARDYYGSSPYWGQGTLVTVSSGKPGSGKPGSGKPGSGKPGSDVLMTQSPDSLAVSLGERATINCKSSQSIVHSNGNTYLEWYQQKPGQPPKLLIYKVSNRFSGVPDRFSGSGSGTDFTLTISSLQAEDVAVYYCFQGSHVPNTFGGGTKVEIKGS

SEQ ID NO: 405 - protein, 117 aa, synthetic construct; identical to SEQ ID NO: 32
  REGION 1..117: note = Description of Artificial Sequence: Synthetic polypeptide
  REGION 1..117: note = VH of XENP023615

SEQ ID NO: 406 - protein, 114 aa, synthetic construct
  REGION 1..114: note = Description of Artificial Sequence: Synthetic polypeptide
  REGION 1..114: note = VL of XENP023615
DVLMTQSPDSLAVSLGERATINCKSSQSIVHSNGNTYLEWYQQKPGQPPKLLIYKVSNRFSGVPDRFSGSGSGTDFTLTISSLQAEDVAVYYCFQGSHVPNTFGGGTKVEIKGS

SEQ ID NO: 407 - protein, 5 aa, synthetic construct
  REGION 1..5: note = Description of Artificial Sequence: Synthetic peptide
  REGION 1..5: note = XENP023615 vhCDR1
HYGMN

SEQ ID NO: 408 - protein, 17 aa, synthetic construct
  REGION 1..17: note = Description of Artificial Sequence: Synthetic peptide
  REGION 1..17: note = XENP023615 vhCDR2
WINTYTGEPTYADGFTG

SEQ ID NO: 409 - protein, 8 aa, synthetic construct
  REGION 1..8: note = Description of Artificial Sequence: Synthetic peptide
  REGION 1..8: note = XENP023615 vhCDR3
DYYGSSPY

SEQ ID NO: 410 - protein, 16 aa, synthetic construct
  REGION 1..16: note = Description of Artificial Sequence: Synthetic peptide
  REGION 1..16: note = XENP023615 vlCDR1
KSSQSIVHSNGNTYLE

SEQ ID NO: 411 - protein, 7 aa, synthetic construct
  REGION 1..7: note = Description of Artificial Sequence: Synthetic peptide
  REGION 1..7: note = XENP023615 vlCDR2
KVSNRFS

SEQ ID NO: 412 - protein, 9 aa, synthetic construct
  REGION 1..9: note = Description of Artificial Sequence: Synthetic peptide
  REGION 1..9: note = XENP023615 vlCDR3
FQGSHVPNT

SEQ ID NO: 413 - protein, 251 aa, synthetic construct
  REGION 1..251: note = Description of Artificial Sequence: Synthetic polypeptide
  REGION 1..251: note = XENP023616 1C11_H3_L3.47_scFv
QIQLVQSGSELKKPGASVKVSCKASGYTFTHYGMNWVRQAPGQGLEWMGWINTYTGEPTYADGFTGRFVFSLDTSVSTAYLQISSLKAEDTAVYFCARDYYGSSPYWGQGTLVTVSSGKPGSGKPGSGKPGSGKPGSDVLMTQSPDSLAVSLGERATINCKSSQSIVHSNGNTYLEWYQQKPGQAPKLLIYKVSNRFSGVPDRFSGSGSGTDFTLTISSLQAEDVAVYYCFQGSHVPNTFGGGTKVEIKGS

SEQ ID NO: 414 - protein, 117 aa, synthetic construct; identical to SEQ ID NO: 32
  REGION 1..117: note = Description of Artificial Sequence: Synthetic polypeptide
  REGION 1..117: note = VH of XENP023616

SEQ ID NO: 415 - protein, 114 aa, synthetic construct
  REGION 1..114: note = Description of Artificial Sequence: Synthetic polypeptide
  REGION 1..114: note = VL of XENP023616
DVLMTQSPDSLAVSLGERATINCKSSQSIVHSNGNTYLEWYQQKPGQAPKLLIYKVSNRFSGVPDRFSGSGSGTDFTLTISSLQAEDVAVYYCFQGSHVPNTFGGGTKVEIKGS

SEQ ID NO: 416 - protein, 5 aa, synthetic construct
  REGION 1..5: note = Description of Artificial Sequence: Synthetic peptide
  REGION 1..5: note = XENP023616 vhCDR1
HYGMN

SEQ ID NO: 417 - protein, 17 aa, synthetic construct
  REGION 1..17: note = Description of Artificial Sequence: Synthetic peptide
  REGION 1..17: note = XENP023616 vhCDR2
WINTYTGEPTYADGFTG

SEQ ID NO: 418 - protein, 8 aa, synthetic construct
  REGION 1..8: note = Description of Artificial Sequence: Synthetic peptide
  REGION 1..8: note = XENP023616 vhCDR3
DYYGSSPY

SEQ ID NO: 419 - protein, 16 aa, synthetic construct
  REGION 1..16: note = Description of Artificial Sequence: Synthetic peptide
  REGION 1..16: note = XENP023616 vlCDR1
KSSQSIVHSNGNTYLE

SEQ ID NO: 420 - protein, 7 aa, synthetic construct
  REGION 1..7: note = Description of Artificial Sequence: Synthetic peptide
  REGION 1..7: note = XENP023616 vlCDR2
KVSNRFS

SEQ ID NO: 421 - protein, 9 aa, synthetic construct
  REGION 1..9: note = Description of Artificial Sequence: Synthetic peptide
  REGION 1..9: note = XENP023616 vlCDR3
FQGSHVPNT

SEQ ID NO: 422 - protein, 251 aa, synthetic construct
  REGION 1..251: note = Description of Artificial Sequence: Synthetic polypeptide
  REGION 1..251: note = XENP023617 1C11_H3_L3.49_scFv
QIQLVQSGSELKKPGASVKVSCKASGYTFTHYGMNWVRQAPGQGLEWMGWINTYTGEPTYADGFTGRFVFSLDTSVSTAYLQISSLKAEDTAVYFCARDYYGSSPYWGQGTLVTVSSGKPGSGKPGSGKPGSGKPGSDVLMTQSPDSLAVSLGERATINCKSSQSIVHSNGNTYLEWYQQKPGQSPKLLIYGVSNRFSGVPDRFSGSGSGTDFTLTISSLQAEDVAVYYCFQGSHVPNTFGGGTKVEIKGS

SEQ ID NO: 423 - protein, 117 aa, synthetic construct; identical to SEQ ID NO: 32
  REGION 1..117: note = Description of Artificial Sequence: Synthetic polypeptide
  REGION 1..117: note = VH of XENP023617

SEQ ID NO: 424 - protein, 114 aa, synthetic construct
  REGION 1..114: note = Description of Artificial Sequence: Synthetic polypeptide
  REGION 1..114: note = VL of XENP023617
DVLMTQSPDSLAVSLGERATINCKSSQSIVHSNGNTYLEWYQQKPGQSPKLLIYGVSNRFSGVPDRFSGSGSGTDFTLTISSLQAEDVAVYYCFQGSHVPNTFGGGTKVEIKGS

SEQ ID NO: 425 - protein, 5 aa, synthetic construct
  REGION 1..5: note = Description of Artificial Sequence: Synthetic peptide
  REGION 1..5: note = XENP023617 vhCDR1
HYGMN

SEQ ID NO: 426 - protein, 17 aa, synthetic construct
  REGION 1..17: note = Description of Artificial Sequence: Synthetic peptide
  REGION 1..17: note = XENP023617 vhCDR2
WINTYTGEPTYADGFTG

SEQ ID NO: 427 - protein, 8 aa, synthetic construct
  REGION 1..8: note = Description of Artificial Sequence: Synthetic peptide
  REGION 1..8: note = XENP023617 vhCDR3
DYYGSSPY

SEQ ID NO: 428 - protein, 16 aa, synthetic construct
  REGION 1..16: note = Description of Artificial Sequence: Synthetic peptide
  REGION 1..16: note = XENP023617 vlCDR1
KSSQSIVHSNGNTYLE

SEQ ID NO: 429 - protein, 7 aa, synthetic construct
  REGION 1..7: note = Description of Artificial Sequence: Synthetic peptide
  REGION 1..7: note = XENP023617 vlCDR2
GVSNRFS

SEQ ID NO: 430 - protein, 9 aa, synthetic construct
  REGION 1..9: note = Description of Artificial Sequence: Synthetic peptide
  REGION 1..9: note = XENP023617 vlCDR3
FQGSHVPNT

SEQ ID NO: 431 - protein, 251 aa, synthetic construct
  REGION 1..251: note = Description of Artificial Sequence: Synthetic polypeptide
  REGION 1..251: note = XENP023618 1C11_H3_L3.50_scFv
QIQLVQSGSELKKPGASVKVSCKASGYTFTHYGMNWVRQAPGQGLEWMGWINTYTGEPTYADGFTGRFVFSLDTSVSTAYLQISSLKAEDTAVYFCARDYYGSSPYWGQGTLVTVSSGKPGSGKPGSGKPGSGKPGSDVLMTQSPDSLAVSLGERATINCKSSQSIVHSNGNTYLEWYQQKPGQSPKLLIYSVSNRFSGVPDRFSGSGSGTDFTLTISSLQAEDVAVYYCFQGSHVPNTFGGGTKVEIKGS

SEQ ID NO: 432 - protein, 117 aa, synthetic construct; identical to SEQ ID NO: 32
  REGION 1..117: note = Description of Artificial Sequence: Synthetic polypeptide
  REGION 1..117: note = VH of XENP023618

SEQ ID NO: 433 - protein, 114 aa, synthetic construct
  REGION 1..114: note = Description of Artificial Sequence: Synthetic polypeptide
  REGION 1..114: note = VL of XENP023618
DVLMTQSPDSLAVSLGERATINCKSSQSIVHSNGNTYLEWYQQKPGQSPKLLIYSVSNRFSGVPDRFSGSGSGTDFTLTISSLQAEDVAVYYCFQGSHVPNTFGGGTKVEIKGS

SEQ ID NO: 434 - protein, 5 aa, synthetic construct
  REGION 1..5: note = Description of Artificial Sequence: Synthetic peptide
  REGION 1..5: note = XENP023618 vhCDR1
HYGMN

SEQ ID NO: 435 - protein, 17 aa, synthetic construct
  REGION 1..17: note = Description of Artificial Sequence: Synthetic peptide
  REGION 1..17: note = XENP023618 vhCDR2
WINTYTGEPTYADGFTG

SEQ ID NO: 436 - protein, 8 aa, synthetic construct
  REGION 1..8: note = Description of Artificial Sequence: Synthetic peptide
  REGION 1..8: note = XENP023618 vhCDR3
DYYGSSPY

SEQ ID NO: 437 - protein, 16 aa, synthetic construct
  REGION 1..16: note = Description of Artificial Sequence: Synthetic peptide
  REGION 1..16: note = XENP023618 vlCDR1
KSSQSIVHSNGNTYLE

SEQ ID NO: 438 - protein, 7 aa, synthetic construct
  REGION 1..7: note = Description of Artificial Sequence: Synthetic peptide
  REGION 1..7: note = XENP023618 vlCDR2
SVSNRFS

SEQ ID NO: 439 - protein, 9 aa, synthetic construct
  REGION 1..9: note = Description of Artificial Sequence: Synthetic peptide
  REGION 1..9: note = XENP023618 vlCDR3
FQGSHVPNT

SEQ ID NO: 440 - protein, 251 aa, synthetic construct
  REGION 1..251: note = Description of Artificial Sequence: Synthetic polypeptide
  REGION 1..251: note = XENP023619 1C11_H3_L3.51_scFv
QIQLVQSGSELKKPGASVKVSCKASGYTFTHYGMNWVRQAPGQGLEWMGWINTYTGEPTYADGFTGRFVFSLDTSVSTAYLQISSLKAEDTAVYFCARDYYGSSPYWGQGTLVTVSSGKPGSGKPGSGKPGSGKPGSDVLMTQSPDSLAVSLGERATINCKSSQSIVHSNGNTYLEWYQQKPGQSPKLLIYKASNRFSGVPDRFSGSGSGTDFTLTISSLQAEDVAVYYCFQGSHVPNTFGGGTKVEIKGS

SEQ ID NO: 441 - protein, 117 aa, synthetic construct; identical to SEQ ID NO: 32
  REGION 1..117: note = Description of Artificial Sequence: Synthetic polypeptide
  REGION 1..117: note = VH of XENP023619

SEQ ID NO: 442 - protein, 114 aa, synthetic construct
  REGION 1..114: note = Description of Artificial Sequence: Synthetic polypeptide
  REGION 1..114: note = VL of XENP023619
DVLMTQSPDSLAVSLGERATINCKSSQSIVHSNGNTYLEWYQQKPGQSPKLLIYKASNRFSGVPDRFSGSGSGTDFTLTISSLQAEDVAVYYCFQGSHVPNTFGGGTKVEIKGS

SEQ ID NO: 443 - protein, 5 aa, synthetic construct
  REGION 1..5: note = Description of Artificial Sequence: Synthetic peptide
  REGION 1..5: note = XENP023619 vhCDR1
HYGMN

SEQ ID NO: 444 - protein, 17 aa, synthetic construct
  REGION 1..17: note = Description of Artificial Sequence: Synthetic peptide
  REGION 1..17: note = XENP023619 vhCDR2
WINTYTGEPTYADGFTG

SEQ ID NO: 445 - protein, 8 aa, synthetic construct
  REGION 1..8: note = Description of Artificial Sequence: Synthetic peptide
  REGION 1..8: note = XENP023619 vhCDR3
DYYGSSPY

SEQ ID NO: 446 - protein, 16 aa, synthetic construct
  REGION 1..16: note = Description of Artificial Sequence: Synthetic peptide
  REGION 1..16: note = XENP023619 vlCDR1
KSSQSIVHSNGNTYLE

SEQ ID NO: 447 - protein, 7 aa, synthetic construct
  REGION 1..7: note = Description of Artificial Sequence: Synthetic peptide
  REGION 1..7: note = XENP023619 vlCDR2
KASNRFS

SEQ ID NO: 448 - protein, 9 aa, synthetic construct
  REGION 1..9: note = Description of Artificial Sequence: Synthetic peptide
  REGION 1..9: note = XENP023619 vlCDR3
FQGSHVPNT

SEQ ID NO: 449 - protein, 251 aa, synthetic construct
  REGION 1..251: note = Description of Artificial Sequence: Synthetic polypeptide
  REGION 1..251: note = XENP023620 1C11_H3_L3.52_scFv
QIQLVQSGSELKKPGASVKVSCKASGYTFTHYGMNWVRQAPGQGLEWMGWINTYTGEPTYADGFTGRFVFSLDTSVSTAYLQISSLKAEDTAVYFCARDYYGSSPYWGQGTLVTVSSGKPGSGKPGSGKPGSGKPGSDVLMTQSPDSLAVSLGERATINCKSSQSIVHSNGNTYLEWYQQKPGQSPKLLIYKTSNRFSGVPDRFSGSGSGTDFTLTISSLQAEDVAVYYCFQGSHVPNTFGGGTKVEIKGS

SEQ ID NO: 450 - protein, 117 aa, synthetic construct; identical to SEQ ID NO: 32
  REGION 1..117: note = Description of Artificial Sequence: Synthetic polypeptide
  REGION 1..117: note = VH of XENP023620

SEQ ID NO: 451 - protein, 114 aa, synthetic construct
  REGION 1..114: note = Description of Artificial Sequence: Synthetic polypeptide
  REGION 1..114: note = VL of XENP023620
DVLMTQSPDSLAVSLGERATINCKSSQSIVHSNGNTYLEWYQQKPGQSPKLLIYKTSNRFSGVPDRFSGSGSGTDFTLTISSLQAEDVAVYYCFQGSHVPNTFGGGTKVEIKGS

SEQ ID NO: 452 - protein, 5 aa, synthetic construct
  REGION 1..5: note = Description of Artificial Sequence: Synthetic peptide
  REGION 1..5: note = XENP023620 vhCDR1
HYGMN

SEQ ID NO: 453 - protein, 17 aa, synthetic construct
  REGION 1..17: note = Description of Artificial Sequence: Synthetic peptide
  REGION 1..17: note = XENP023620 vhCDR2
WINTYTGEPTYADGFTG

SEQ ID NO: 454 - protein, 8 aa, synthetic construct
  REGION 1..8: note = Description of Artificial Sequence: Synthetic peptide
  REGION 1..8: note = XENP023620 vhCDR3
DYYGSSPY

SEQ ID NO: 455 - protein, 16 aa, synthetic construct
  REGION 1..16: note = Description of Artificial Sequence: Synthetic peptide
  REGION 1..16: note = XENP023620 vlCDR1
KSSQSIVHSNGNTYLE

SEQ ID NO: 456 - protein, 7 aa, synthetic construct
  REGION 1..7: note = Description of Artificial Sequence: Synthetic peptide
  REGION 1..7: note = XENP023620 vlCDR2
KTSNRFS

SEQ ID NO: 457 - protein, 9 aa, synthetic construct
  REGION 1..9: note = Description of Artificial Sequence: Synthetic peptide
  REGION 1..9: note = XENP023620 vlCDR3
FQGSHVPNT

SEQ ID NO: 458 - protein, 251 aa, synthetic construct
  REGION 1..251: note = Description of Artificial Sequence: Synthetic polypeptide
  REGION 1..251: note = XENP023621 1C11_H3_L3.53_scFv
QIQLVQSGSELKKPGASVKVSCKASGYTFTHYGMNWVRQAPGQGLEWMGWINTYTGEPTYADGFTGRFVFSLDTSVSTAYLQISSLKAEDTAVYFCARDYYGSSPYWGQGTLVTVSSGKPGSGKPGSGKPGSGKPGSDVLMTQSPDSLAVSLGERATINCKSSQSIVHSNGNTYLEWYQQKPGQSPKLLIYKGSNRFSGVPDRFSGSGSGTDFTLTISSLQAEDVAVYYCFQGSHVPNTFGGGTKVEIKGS

SEQ ID NO: 459 - protein, 117 aa, synthetic construct; identical to SEQ ID NO: 32
  REGION 1..117: note = Description of Artificial Sequence: Synthetic polypeptide
  REGION 1..117: note = VH of XENP023621

SEQ ID NO: 460 - protein, 114 aa, synthetic construct
  REGION 1..114: note = Description of Artificial Sequence: Synthetic polypeptide
  REGION 1..114: note = VL of XENP023621
DVLMTQSPDSLAVSLGERATINCKSSQSIVHSNGNTYLEWYQQKPGQSPKLLIYKGSNRFSGVPDRFSGSGSGTDFTLTISSLQAEDVAVYYCFQGSHVPNTFGGGTKVEIKGS

SEQ ID NO: 461 - protein, 5 aa, synthetic construct
  REGION 1..5: note = Description of Artificial Sequence: Synthetic peptide
  REGION 1..5: note = XENP023621 vhCDR1
HYGMN

SEQ ID NO: 462 - protein, 17 aa, synthetic construct
  REGION 1..17: note = Description of Artificial Sequence: Synthetic peptide
  REGION 1..17: note = XENP023621 vhCDR2
WINTYTGEPTYADGFTG

SEQ ID NO: 463 - protein, 8 aa, synthetic construct
  REGION 1..8: note = Description of Artificial Sequence: Synthetic peptide
  REGION 1..8: note = XENP023621 vhCDR3
DYYGSSPY

SEQ ID NO: 464 - protein, 16 aa, synthetic construct
  REGION 1..16: note = Description of Artificial Sequence: Synthetic peptide
  REGION 1..16: note = XENP023621 vlCDR1
KSSQSIVHSNGNTYLE

SEQ ID NO: 465 - protein, 7 aa, synthetic construct
  REGION 1..7: note = Description of Artificial Sequence: Synthetic peptide
  REGION 1..7: note = XENP023621 vlCDR2
KGSNRFS

SEQ ID NO: 466 - protein, 9 aa, synthetic construct
  REGION 1..9: note = Description of Artificial Sequence: Synthetic peptide
  REGION 1..9: note = XENP023621 vlCDR3
FQGSHVPNT

SEQ ID NO: 467 - protein, 251 aa, synthetic construct
  REGION 1..251: note = Description of Artificial Sequence: Synthetic polypeptide
  REGION 1..251: note = XENP023622 1C11_H3_L3.54_scFv
QIQLVQSGSELKKPGASVKVSCKASGYTFTHYGMNWVRQAPGQGLEWMGWINTYTGEPTYADGFTGRFVFSLDTSVSTAYLQISSLKAEDTAVYFCARDYYGSSPYWGQGTLVTVSSGKPGSGKPGSGKPGSGKPGSDVLMTQSPDSLAVSLGERATINCKSSQSIVHSNGNTYLEWYQQKPGQSPKLLIYKMSNRFSGVPDRFSGSGSGTDFTLTISSLQAEDVAVYYCFQGSHVPNTFGGGTKVEIKGS

SEQ ID NO: 468 - protein, 117 aa, synthetic construct; identical to SEQ ID NO: 32
  REGION 1..117: note = Description of Artificial Sequence: Synthetic polypeptide
  REGION 1..117: note = VH of XENP023622

SEQ ID NO: 469 - protein, 114 aa, synthetic construct
  REGION 1..114: note = Description of Artificial Sequence: Synthetic polypeptide
  REGION 1..114: note = VL of XENP023622
DVLMTQSPDSLAVSLGERATINCKSSQSIVHSNGNTYLEWYQQKPGQSPKLLIYKMSNRFSGVPDRFSGSGSGTDFTLTISSLQAEDVAVYYCFQGSHVPNTFGGGTKVEIKGS

SEQ ID NO: 470 - protein, 5 aa, synthetic construct
  REGION 1..5: note = Description of Artificial Sequence: Synthetic peptide
  REGION 1..5: note = XENP023622 vhCDR1
HYGMN

SEQ ID NO: 471 - protein, 17 aa, synthetic construct
  REGION 1..17: note = Description of Artificial Sequence: Synthetic peptide
  REGION 1..17: note = XENP023622 vhCDR2
WINTYTGEPTYADGFTG

SEQ ID NO: 472 - protein, 8 aa, synthetic construct
  REGION 1..8: note = Description of Artificial Sequence: Synthetic peptide
  REGION 1..8: note = XENP023622 vhCDR3
DYYGSSPY

SEQ ID NO: 473 - protein, 16 aa, synthetic construct
  REGION 1..16: note = Description of Artificial Sequence: Synthetic peptide
  REGION 1..16: note = XENP023622 vlCDR1
KSSQSIVHSNGNTYLE

SEQ ID NO: 474 - protein, 7 aa, synthetic construct
  REGION 1..7: note = Description of Artificial Sequence: Synthetic peptide
  REGION 1..7: note = XENP023622 vlCDR2
KMSNRFS

SEQ ID NO: 475 - protein, 9 aa, synthetic construct
  REGION 1..9: note = Description of Artificial Sequence: Synthetic peptide
  REGION 1..9: note = XENP023622 vlCDR3
FQGSHVPNT

SEQ ID NO: 476 - protein, 251 aa, synthetic construct
  REGION 1..251: note = Description of Artificial Sequence: Synthetic polypeptide
  REGION 1..251: note = XENP023623 1C11_H3_L3.56_scFv
QIQLVQSGSELKKPGASVKVSCKASGYTFTHYGMNWVRQAPGQGLEWMGWINTYTGEPTYADGFTGRFVFSLDTSVSTAYLQISSLKAEDTAVYFCARDYYGSSPYWGQGTLVTVSSGKPGSGKPGSGKPGSGKPGSDVLMTQSPDSLAVSLGERATINCKSSQSIVHSNGNTYLEWYQQKPGQSPKLLIYKVSNRASGVPDRFSGSGSGTDFTLTISSLQAEDVAVYYCFQGSHVPNTFGGGTKVEIKGS

SEQ ID NO: 477 - protein, 117 aa, synthetic construct; identical to SEQ ID NO: 32
  REGION 1..117: note = Description of Artificial Sequence: Synthetic polypeptide
  REGION 1..117: note = VH of XENP023623

SEQ ID NO: 478 - protein, 114 aa, synthetic construct
  REGION 1..114: note = Description of Artificial Sequence: Synthetic polypeptide
  REGION 1..114: note = VL of XENP023623
DVLMTQSPDSLAVSLGERATINCKSSQSIVHSNGNTYLEWYQQKPGQSPKLLIYKVSNRASGVPDRFSGSGSGTDFTLTISSLQAEDVAVYYCFQGSHVPNTFGGGTKVEIKGS

SEQ ID NO: 479 - protein, 5 aa, synthetic construct
  REGION 1..5: note = Description of Artificial Sequence: Synthetic peptide
  REGION 1..5: note = XENP023623 vhCDR1
HYGMN

SEQ ID NO: 480 - protein, 17 aa, synthetic construct
  REGION 1..17: note = Description of Artificial Sequence: Synthetic peptide
  REGION 1..17: note = XENP023623 vhCDR2
WINTYTGEPTYADGFTG

SEQ ID NO: 481 - protein, 8 aa, synthetic construct
  REGION 1..8: note = Description of Artificial Sequence: Synthetic peptide
  REGION 1..8: note = XENP023623 vhCDR3
DYYGSSPY

SEQ ID NO: 482 - protein, 16 aa, synthetic construct
  REGION 1..16: note = Description of Artificial Sequence: Synthetic peptide
  REGION 1..16: note = XENP023623 vlCDR1
KSSQSIVHSNGNTYLE

SEQ ID NO: 483 - protein, 7 aa, synthetic construct
  REGION 1..7: note = Description of Artificial Sequence: Synthetic peptide
  REGION 1..7: note = XENP023623 vlCDR2
KVSNRAS

SEQ ID NO: 484 - protein, 9 aa, synthetic construct
  REGION 1..9: note = Description of Artificial Sequence: Synthetic peptide
  REGION 1..9: note = XENP023623 vlCDR3
FQGSHVPNT

SEQ ID NO: 485 - protein, 251 aa, synthetic construct
  REGION 1..251: note = Description of Artificial Sequence: Synthetic polypeptide
  REGION 1..251: note = XENP023624 1C11_H3_L3.57_scFv
QIQLVQSGSELKKPGASVKVSCKASGYTFTHYGMNWVRQAPGQGLEWMGWINTYTGEPTYADGFTGRFVFSLDTSVSTAYLQISSLKAEDTAVYFCARDYYGSSPYWGQGTLVTVSSGKPGSGKPGSGKPGSGKPGSDVLMTQSPDSLAVSLGERATINCKSSQSIVHSNGNTYLEWYQQKPGQSPKLLIYKVSNRFTGVPDRFSGSGSGTDFTLTISSLQAEDVAVYYCFQGSHVPNTFGGGTKVEIKGS

SEQ ID NO: 486 - protein, 117 aa, synthetic construct; identical to SEQ ID NO: 32
  REGION 1..117: note = Description of Artificial Sequence: Synthetic polypeptide
  REGION 1..117: note = VH of XENP023624

SEQ ID NO: 487 - protein, 114 aa, synthetic construct
  REGION 1..114: note = Description of Artificial Sequence: Synthetic polypeptide
  REGION 1..114: note = VL of XENP023624
DVLMTQSPDSLAVSLGERATINCKSSQSIVHSNGNTYLEWYQQKPGQSPKLLIYKVSNRFTGVPDRFSGSGSGTDFTLTISSLQAEDVAVYYCFQGSHVPNTFGGGTKVEIKGS

SEQ ID NO: 488 - protein, 5 aa, synthetic construct
  REGION 1..5: note = Description of Artificial Sequence: Synthetic peptide
  REGION 1..5: note = XENP023624 vhCDR1
HYGMN

SEQ ID NO: 489 - protein, 17 aa, synthetic construct
  REGION 1..17: note = Description of Artificial Sequence: Synthetic peptide
  REGION 1..17: note = XENP023624 vhCDR2
WINTYTGEPTYADGFTG

SEQ ID NO: 490 - protein, 8 aa, synthetic construct
  REGION 1..8: note = Description of Artificial Sequence: Synthetic peptide
  REGION 1..8: note = XENP023624 vhCDR3
DYYGSSPY

SEQ ID NO: 491 - protein, 16 aa, synthetic construct
  REGION 1..16: note = Description of Artificial Sequence: Synthetic peptide
  REGION 1..16: note = XENP023624 vlCDR1
KSSQSIVHSNGNTYLE

SEQ ID NO: 492 - protein, 7 aa, synthetic construct
  REGION 1..7: note = Description of Artificial Sequence: Synthetic peptide
  REGION 1..7: note = XENP023624 vlCDR2
KVSNRFT

SEQ ID NO: 493 - protein, 9 aa, synthetic construct
  REGION 1..9: note = Description of Artificial Sequence: Synthetic peptide
  REGION 1..9: note = XENP023624 vlCDR3
FQGSHVPNT

SEQ ID NO: 494 - protein, 251 aa, synthetic construct
  REGION 1..251: note = Description of Artificial Sequence: Synthetic polypeptide
  REGION 1..251: note = XENP023625 1C11_H3_L3.58_scFv
QIQLVQSGSELKKPGASVKVSCKASGYTFTHYGMNWVRQAPGQGLEWMGWINTYTGEPTYADGFTGRFVFSLDTSVSTAYLQISSLKAEDTAVYFCARDYYGSSPYWGQGTLVTVSSGKPGSGKPGSGKPGSGKPGSDVLMTQSPDSLAVSLGERATINCKSSQSIVHSNGNTYLEWYQQKPGQSPKLLIYKVSNRFSGVPDRFSGSGSGTDFTLTISGLQAEDVAVYYCFQGSHVPNTFGGGTKVEIKGS

SEQ ID NO: 495 - protein, 117 aa, synthetic construct; identical to SEQ ID NO: 32
  REGION 1..117: note = Description of Artificial Sequence: Synthetic polypeptide
  REGION 1..117: note = VH of XENP023625

SEQ ID NO: 496 - protein, 114 aa, synthetic construct
  REGION 1..114: note = Description of Artificial Sequence: Synthetic polypeptide
  REGION 1..114: note = VL of XENP023625
DVLMTQSPDSLAVSLGERATINCKSSQSIVHSNGNTYLEWYQQKPGQSPKLLIYKVSNRFSGVPDRFSGSGSGTDFTLTISGLQAEDVAVYYCFQGSHVPNTFGGGTKVEIKGS

SEQ ID NO: 497 - protein, 5 aa, synthetic construct
  REGION 1..5: note = Description of Artificial Sequence: Synthetic peptide
  REGION 1..5: note = XENP023625 vhCDR1
HYGMN

SEQ ID NO: 498 - protein, 17 aa, synthetic construct
  REGION 1..17: note = Description of Artificial Sequence: Synthetic peptide
  REGION 1..17: note = XENP023625 vhCDR2
WINTYTGEPTYADGFTG

SEQ ID NO: 499 - protein, 8 aa, synthetic construct
  REGION 1..8: note = Description of Artificial Sequence: Synthetic peptide
  REGION 1..8: note = XENP023625 vhCDR3
DYYGSSPY

SEQ ID NO: 500 - protein, 16 aa, synthetic construct
  REGION 1..16: note = Description of Artificial Sequence: Synthetic peptide
  REGION 1..16: note = XENP023625 vlCDR1
KSSQSIVHSNGNTYLE

SEQ ID NO: 501 - protein, 7 aa, synthetic construct
  REGION 1..7: note = Description of Artificial Sequence: Synthetic peptide
  REGION 1..7: note = XENP023625 vlCDR2
KVSNRFS

SEQ ID NO: 502 - protein, 9 aa, synthetic construct
  REGION 1..9: note = Description of Artificial Sequence: Synthetic peptide
  REGION 1..9: note = XENP023625 vlCDR3
FQGSHVPNT

SEQ ID NO: 503 - protein, 251 aa, synthetic construct
  REGION 1..251: note = Description of Artificial Sequence: Synthetic polypeptide
  REGION 1..251: note = XENP023626 1C11_H3_L3.59_scFv
QIQLVQSGSELKKPGASVKVSCKASGYTFTHYGMNWVRQAPGQGLEWMGWINTYTGEPTYADGFTGRFVFSLDTSVSTAYLQISSLKAEDTAVYFCARDYYGSSPYWGQGTLVTVSSGKPGSGKPGSGKPGSGKPGSDVLMTQSPDSLAVSLGERATINCKSSQSIVHSNGNTYLEWYQQKPGQSPKLLIYKVSNRFSGVPDRFSGSGSGTDFTLTISRLQAEDVAVYYCFQGSHVPNTFGGGTKVEIKGS

SEQ ID NO: 504 - protein, 117 aa, synthetic construct; identical to SEQ ID NO: 32
  REGION 1..117: note = Description of Artificial Sequence: Synthetic polypeptide
  REGION 1..117: note = VH of XENP023626

SEQ ID NO: 505 - protein, 114 aa, synthetic construct
  REGION 1..114: note = Description of Artificial Sequence: Synthetic polypeptide
  REGION 1..114: note = VL of XENP023626
DVLMTQSPDSLAVSLGERATINCKSSQSIVHSNGNTYLEWYQQKPGQSPKLLIYKVSNRFSGVPDRFSGSGSGTDFTLTISRLQAEDVAVYYCFQGSHVPNTFGGGTKVEIKGS

SEQ ID NO: 506 - protein, 5 aa, synthetic construct
  REGION 1..5: note = Description of Artificial Sequence: Synthetic peptide
  REGION 1..5: note = XENP023626 vhCDR1
HYGMN

SEQ ID NO: 507 - protein, 17 aa, synthetic construct
  REGION 1..17: note = Description of Artificial Sequence: Synthetic peptide
  REGION 1..17: note = XENP023626 vhCDR2
WINTYTGEPTYADGFTG

SEQ ID NO: 508 - protein, 8 aa, synthetic construct
  REGION 1..8: note = Description of Artificial Sequence: Synthetic peptide
  REGION 1..8: note = XENP023626 vhCDR3
DYYGSSPY

SEQ ID NO: 509 - protein, 16 aa, synthetic construct
  REGION 1..16: note = Description of Artificial Sequence: Synthetic peptide
  REGION 1..16: note = XENP023626 vlCDR1
KSSQSIVHSNGNTYLE

SEQ ID NO: 510 - protein, 7 aa, synthetic construct
  REGION 1..7: note = Description of Artificial Sequence: Synthetic peptide
  REGION 1..7: note = XENP023626 vlCDR2
KVSNRFS

SEQ ID NO: 511 - protein, 9 aa, synthetic construct
  REGION 1..9: note = Description of Artificial Sequence: Synthetic peptide
  REGION 1..9: note = XENP023626 vlCDR3
FQGSHVPNT

SEQ ID NO: 512 - protein, 251 aa, synthetic construct
  REGION 1..251: note = Description of Artificial Sequence: Synthetic polypeptide
  REGION 1..251: note = XENP023627 1C11_H3_L3.60_scFv
QIQLVQSGSELKKPGASVKVSCKASGYTFTHYGMNWVRQAPGQGLEWMGWINTYTGEPTYADGFTGRFVFSLDTSVSTAYLQISSLKAEDTAVYFCARDYYGSSPYWGQGTLVTVSSGKPGSGKPGSGKPGSGKPGSDVLMTQSPDSLAVSLGERATINCKSSQSIVHSNGNTYLEWYQQKPGQSPKLLIYKVSNRFSGVPDRFSGSGSGTDFTLTISNLQAEDVAVYYCFQGSHVPNTFGGGTKVEIKGS

SEQ ID NO: 513 - protein, 117 aa, synthetic construct; identical to SEQ ID NO: 32
  REGION 1..117: note = Description of Artificial Sequence: Synthetic polypeptide
  REGION 1..117: note = VH of XENP023627

SEQ ID NO: 514 - protein, 114 aa, synthetic construct
  REGION 1..114: note = Description of Artificial Sequence: Synthetic polypeptide
  REGION 1..114: note = VL of XENP023627
DVLMTQSPDSLAVSLGERATINCKSSQSIVHSNGNTYLEWYQQKPGQSPKLLIYKVSNRFSGVPDRFSGSGSGTDFTLTISNLQAEDVAVYYCFQGSHVPNTFGGGTKVEIKGS

SEQ ID NO: 515 - protein, 5 aa, synthetic construct
  REGION 1..5: note = Description of Artificial Sequence: Synthetic peptide
  REGION 1..5: note = XENP023627 vhCDR1
HYGMN

SEQ ID NO: 516 - protein, 17 aa, synthetic construct
  REGION 1..17: note = Description of Artificial Sequence: Synthetic peptide
  REGION 1..17: note = XENP023627 vhCDR2
WINTYTGEPTYADGFTG

SEQ ID NO: 517 - protein, 8 aa, synthetic construct
  REGION 1..8: note = Description of Artificial Sequence: Synthetic peptide
  REGION 1..8: note = XENP023627 vhCDR3
DYYGSSPY

SEQ ID NO: 518 - protein, 16 aa, synthetic construct
  REGION 1..16: note = Description of Artificial Sequence: Synthetic peptide
  REGION 1..16: note = XENP023627 vlCDR1
KSSQSIVHSNGNTYLE

SEQ ID NO: 519 - protein, 7 aa, synthetic construct
  REGION 1..7: note = Description of Artificial Sequence: Synthetic peptide
  REGION 1..7: note = XENP023627 vlCDR2
KVSNRFS

SEQ ID NO: 520 - protein, 9 aa, synthetic construct
  REGION 1..9: note = Description of Artificial Sequence: Synthetic peptide
  REGION 1..9: note = XENP023627 vlCDR3
FQGSHVPNT

SEQ ID NO: 521 - protein, 251 aa, synthetic construct
  REGION 1..251: note = Description of Artificial Sequence: Synthetic polypeptide
  REGION 1..251: note = XENP023628 1C11_H3_L3.62_scFv
QIQLVQSGSELKKPGASVKVSCKASGYTFTHYGMNWVRQAPGQGLEWMGWINTYTGEPTYADGFTGRFVFSLDTSVSTAYLQISSLKAEDTAVYFCARDYYGSSPYWGQGTLVTVSSGKPGSGKPGSGKPGSGKPGSDVLMTQSPDSLAVSLGERATINCKSSQSIVHSNGNTYLEWYQQKPGQSPKLLIYKVSNRFSGVPDRFSGSGSGTDFTLTISSMQAEDVAVYYCFQGSHVPNTFGGGTKVEIKGS

SEQ ID NO: 522 - protein, 117 aa, synthetic construct; identical to SEQ ID NO: 32
  REGION 1..117: note = Description of Artificial Sequence: Synthetic polypeptide
  REGION 1..117: note = VH of XENP023628

SEQ ID NO: 523 - protein, 114 aa, synthetic construct
  REGION 1..114: note = Description of Artificial Sequence: Synthetic polypeptide
  REGION 1..114: note = VL of XENP023628
DVLMTQSPDSLAVSLGERATINCKSSQSIVHSNGNTYLEWYQQKPGQSPKLLIYKVSNRFSGVPDRFSGSGSGTDFTLTISSMQAEDVAVYYCFQGSHVPNTFGGGTKVEIKGS

SEQ ID NO: 524 - protein, 5 aa, synthetic construct
  REGION 1..5: note = Description of Artificial Sequence: Synthetic peptide
  REGION 1..5: note = XENP023628 vhCDR1
HYGMN

SEQ ID NO: 525 - protein, 17 aa, synthetic construct
  REGION 1..17: note = Description of Artificial Sequence: Synthetic peptide
  REGION 1..17: note = XENP023628 vhCDR2
WINTYTGEPTYADGFTG

SEQ ID NO: 526 - protein, 8 aa, synthetic construct
  REGION 1..8: note = Description of Artificial Sequence: Synthetic peptide
  REGION 1..8: note = XENP023628 vhCDR3
DYYGSSPY

SEQ ID NO: 527 - protein, 16 aa, synthetic construct
  REGION 1..16: note = Description of Artificial Sequence: Synthetic peptide
  REGION 1..16: note = XENP023628 vlCDR1
KSSQSIVHSNGNTYLE

SEQ ID NO: 528 - protein, 7 aa, synthetic construct
  REGION 1..7: note = Description of Artificial Sequence: Synthetic peptide
  REGION 1..7: note = XENP023628 vlCDR2
KVSNRFS

SEQ ID NO: 529 - protein, 9 aa, synthetic construct
  REGION 1..9: note = Description of Artificial Sequence: Synthetic peptide
  REGION 1..9: note = XENP023628 vlCDR3
FQGSHVPNT

SEQ ID NO: 530 - protein, 251 aa, synthetic construct
  REGION 1..251: note = Description of Artificial Sequence: Synthetic polypeptide
  REGION 1..251: note = XENP023629 1C11_H3_L3.63_scFv
QIQLVQSGSELKKPGASVKVSCKASGYTFTHYGMNWVRQAPGQGLEWMGWINTYTGEPTYADGFTGRFVFSLDTSVSTAYLQISSLKAEDTAVYFCARDYYGSSPYWGQGTLVTVSSGKPGSGKPGSGKPGSGKPGSDVLMTQSPDSLAVSLGERATINCKSSQSIVHSNGNTYLEWYQQKPGQSPKLLIYKVSNRFSGVPDRFSGSGSGTDFTLTISSVQAEDVAVYYCFQGSHVPNTFGGGTKVEIKGS

SEQ ID NO: 531 - protein, 117 aa, synthetic construct; identical to SEQ ID NO: 32
  REGION 1..117: note = Description of Artificial Sequence: Synthetic polypeptide
  REGION 1..117: note = VH of XENP023629

SEQ ID NO: 532 - protein, 114 aa, synthetic construct
  REGION 1..114: note = Description of Artificial Sequence: Synthetic polypeptide
  REGION 1..114: note = VL of XENP023629
DVLMTQSPDSLAVSLGERATINCKSSQSIVHSNGNTYLEWYQQKPGQSPKLLIYKVSNRFSGVPDRFSGSGSGTDFTLTISSVQAEDVAVYYCFQGSHVPNTFGGGTKVEIKGS

SEQ ID NO: 533 - protein, 5 aa, synthetic construct
  REGION 1..5: note = Description of Artificial Sequence: Synthetic peptide
  REGION 1..5: note = XENP023629 vhCDR1
HYGMN

SEQ ID NO: 534 - protein, 17 aa, synthetic construct
  REGION 1..17: note = Description of Artificial Sequence: Synthetic peptide
  REGION 1..17: note = XENP023629 vhCDR2
WINTYTGEPTYADGFTG

SEQ ID NO: 535 - protein, 8 aa, synthetic construct
  REGION 1..8: note = Description of Artificial Sequence: Synthetic peptide
  REGION 1..8: note = XENP023629 vhCDR3
DYYGSSPY

SEQ ID NO: 536 - protein, 16 aa, synthetic construct
  REGION 1..16: note = Description of Artificial Sequence: Synthetic peptide
  REGION 1..16: note = XENP023629 vlCDR1
KSSQSIVHSNGNTYLE

SEQ ID NO: 537 - protein, 7 aa, synthetic construct
  REGION 1..7: note = Description of Artificial Sequence: Synthetic peptide
  REGION 1..7: note = XENP023629 vlCDR2
KVSNRFS

SEQ ID NO: 538 - protein, 9 aa, synthetic construct
  REGION 1..9: note = Description of Artificial Sequence: Synthetic peptide
  REGION 1..9: note = XENP023629 vlCDR3
FQGSHVPNT

SEQ ID NO: 539 - protein, 251 aa, synthetic construct
  REGION 1..251: note = Description of Artificial Sequence: Synthetic polypeptide
  REGION 1..251: note = XENP023630 1C11_H3_L3.64_scFv
QIQLVQSGSELKKPGASVKVSCKASGYTFTHYGMNWVRQAPGQGLEWMGWINTYTGEPTYADGFTGRFVFSLDTSVSTAYLQISSLKAEDTAVYFCARDYYGSSPYWGQGTLVTVSSGKPGSGKPGSGKPGSGKPGSDVLMTQSPDSLAVSLGERATINCKSSQSIVHSNGNTYLEWYQQKPGQSPKLLIYKVSNRFSGVPDRFSGSGSGTDFTLTISSAQAEDVAVYYCFQGSHVPNTFGGGTKVEIKGS

SEQ ID NO: 540 - protein, 117 aa, synthetic construct; identical to SEQ ID NO: 32
  REGION 1..117: note = Description of Artificial Sequence: Synthetic polypeptide
  REGION 1..117: note = VH of XENP023630

SEQ ID NO: 541 - protein, 114 aa, synthetic construct
  REGION 1..114: note = Description of Artificial Sequence: Synthetic polypeptide
  REGION 1..114: note = VL of XENP023630
DVLMTQSPDSLAVSLGERATINCKSSQSIVHSNGNTYLEWYQQKPGQSPKLLIYKVSNRFSGVPDRFSGSGSGTDFTLTISSAQAEDVAVYYCFQGSHVPNTFGGGTKVEIKGS

SEQ ID NO: 542 - protein, 5 aa, synthetic construct
  REGION 1..5: note = Description of Artificial Sequence: Synthetic peptide
  REGION 1..5: note = XENP023630 vhCDR1
HYGMN

SEQ ID NO: 543 - protein, 17 aa, synthetic construct
  REGION 1..17: note = Description of Artificial Sequence: Synthetic peptide
  REGION 1..17: note = XENP023630 vhCDR2
WINTYTGEPTYADGFTG

SEQ ID NO: 544 - protein, 8 aa, synthetic construct
  REGION 1..8: note = Description of Artificial Sequence: Synthetic peptide
  REGION 1..8: note = XENP023630 vhCDR3
DYYGSSPY

SEQ ID NO: 545 - protein, 16 aa, synthetic construct
  REGION 1..16: note = Description of Artificial Sequence: Synthetic peptide
  REGION 1..16: note = XENP023630 vlCDR1
KSSQSIVHSNGNTYLE

SEQ ID NO: 546 - protein, 7 aa, synthetic construct
  REGION 1..7: note = Description of Artificial Sequence: Synthetic peptide
  REGION 1..7: note = XENP023630 vlCDR2
KVSNRFS

SEQ ID NO: 547 - protein, 9 aa, synthetic construct
  REGION 1..9: note = Description of Artificial Sequence: Synthetic peptide
  REGION 1..9: note = XENP023630 vlCDR3
FQGSHVPNT

SEQ ID NO: 548 - protein, 251 aa, synthetic construct
  REGION 1..251: note = Description of Artificial Sequence: Synthetic polypeptide
  REGION 1..251: note = XENP023631 1C11_H3_L3.65_scFv
QIQLVQSGSELKKPGASVKVSCKASGYTFTHYGMNWVRQAPGQGLEWMGWINTYTGEPTYADGFTGRFVFSLDTSVSTAYLQISSLKAEDTAVYFCARDYYGSSPYWGQGTLVTVSSGKPGSGKPGSGKPGSGKPGSDVLMTQSPDSLAVSLGERATINCKSSQSIVHSNGNTYLEWYQQKPGQSPKLLIYKVSNRFSGVPDRFSGSGSGTDFTLTISSLEAEDVAVYYCFQGSHVPNTFGGGTKVEIKGS

SEQ ID NO: 549 - protein, 117 aa, synthetic construct; identical to SEQ ID NO: 32
  REGION 1..117: note = Description of Artificial Sequence: Synthetic polypeptide
  REGION 1..117: note = VH of XENP023631

SEQ ID NO: 550 - protein, 114 aa, synthetic construct
  REGION 1..114: note = Description of Artificial Sequence: Synthetic polypeptide
  REGION 1..114: note = VL of XENP023631
DVLMTQSPDSLAVSLGERATINCKSSQSIVHSNGNTYLEWYQQKPGQSPKLLIYKVSNRFSGVPDRFSGSGSGTDFTLTISSLEAEDVAVYYCFQGSHVPNTFGGGTKVEIKGS

SEQ ID NO: 551 - protein, 5 aa, synthetic construct
  REGION 1..5: note = Description of Artificial Sequence: Synthetic peptide
  REGION 1..5: note = XENP023631 vhCDR1
HYGMN

SEQ ID NO: 552 - protein, 17 aa, synthetic construct
  REGION 1..17: note = Description of Artificial Sequence: Synthetic peptide
  REGION 1..17: note = XENP023631 vhCDR2
WINTYTGEPTYADGFTG

SEQ ID NO: 553 - protein, 8 aa, synthetic construct
  REGION 1..8: note = Description of Artificial Sequence: Synthetic peptide
  REGION 1..8: note = XENP023631 vhCDR3
DYYGSSPY

SEQ ID NO: 554 - protein, 16 aa, synthetic construct
  REGION 1..16: note = Description of Artificial Sequence: Synthetic peptide
  REGION 1..16: note = XENP023631 vlCDR1
KSSQSIVHSNGNTYLE

SEQ ID NO: 555 - protein, 7 aa, synthetic construct
  REGION 1..7: note = Description of Artificial Sequence: Synthetic peptide
  REGION 1..7: note = XENP023631 vlCDR2
KVSNRFS

SEQ ID NO: 556 - protein, 9 aa, synthetic construct
  REGION 1..9: note = Description of Artificial Sequence: Synthetic peptide
  REGION 1..9: note = XENP023631 vlCDR3
FQGSHVPNT

SEQ ID NO: 557 - protein, 251 aa, synthetic construct
  REGION 1..251: note = Description of Artificial Sequence: Synthetic polypeptide
  REGION 1..251: note = XENP023632 1C11_H3_L3.66_scFv
QIQLVQSGSELKKPGASVKVSCKASGYTFTHYGMNWVRQAPGQGLEWMGWINTYTGEPTYADGFTGRFVFSLDTSVSTAYLQISSLKAEDTAVYFCARDYYGSSPYWGQGTLVTVSSGKPGSGKPGSGKPGSGKPGSDVLMTQSPDSLAVSLGERATINCKSSQSIVHSNGNTYLEWYQQKPGQSPKLLIYKVSNRFSGVPDRFSGSGSGTDFTLTISSLQPEDVAVYYCFQGSHVPNTFGGGTKVEIKGS

SEQ ID NO: 558 - protein, 117 aa, synthetic construct; identical to SEQ ID NO: 32
  REGION 1..117: note = Description of Artificial Sequence: Synthetic polypeptide
  REGION 1..117: note = VH of XENP023632

SEQ ID NO: 559 - protein, 114 aa, synthetic construct
  REGION 1..114: note = Description of Artificial Sequence: Synthetic polypeptide
  REGION 1..114: note = VL of XENP023632
DVLMTQSPDSLAVSLGERATINCKSSQSIVHSNGNTYLEWYQQKPGQSPKLLIYKVSNRFSGVPDRFSGSGSGTDFTLTISSLQPEDVAVYYCFQGSHVPNTFGGGTKVEIKGS

SEQ ID NO: 560 - protein, 5 aa, synthetic construct
  REGION 1..5: note = Description of Artificial Sequence: Synthetic peptide
  REGION 1..5: note = XENP023632 vhCDR1
HYGMN

SEQ ID NO: 561 - protein, 17 aa, synthetic construct
  REGION 1..17: note = Description of Artificial Sequence: Synthetic peptide
  REGION 1..17: note = XENP023632 vhCDR2
WINTYTGEPTYADGFTG

SEQ ID NO: 562 - protein, 8 aa, synthetic construct
  REGION 1..8: note = Description of Artificial Sequence: Synthetic peptide
  REGION 1..8: note = XENP023632 vhCDR3
DYYGSSPY

SEQ ID NO: 563 - protein, 16 aa, synthetic construct
  REGION 1..16: note = Description of Artificial Sequence: Synthetic peptide
  REGION 1..16: note = XENP023632 vlCDR1
KSSQSIVHSNGNTYLE

SEQ ID NO: 564 - protein, 7 aa, synthetic construct
  REGION 1..7: note = Description of Artificial Sequence: Synthetic peptide
  REGION 1..7: note = XENP023632 vlCDR2
KVSNRFS

SEQ ID NO: 565 - protein, 9 aa, synthetic construct
  REGION 1..9: note = Description of Artificial Sequence: Synthetic peptide
  REGION 1..9: note = XENP023632 vlCDR3
FQGSHVPNT

SEQ ID NO: 566 - protein, 251 aa, synthetic construct
  REGION 1..251: note = Description of Artificial Sequence: Synthetic polypeptide
  REGION 1..251: note = XENP023633 1C11_H3_L3.69_scFv
QIQLVQSGSELKKPGASVKVSCKASGYTFTHYGMNWVRQAPGQGLEWMGWINTYTGEPTYADGFTGRFVFSLDTSVSTAYLQISSLKAEDTAVYFCARDYYGSSPYWGQGTLVTVSSGKPGSGKPGSGKPGSGKPGSDVLMTQSPDSLAVSLGERATINCKSSQSIVHSNGNTYLEWYQQKPGQSPKLLIYKVSNRFSGVPDRFSGSGSGTDFTLTISSLQAEDAAVYYCFQGSHVPNTFGGGTKVEIKGS

SEQ ID NO: 567 - protein, 117 aa, synthetic construct; identical to SEQ ID NO: 32
  REGION 1..117: note = Description of Artificial Sequence: Synthetic polypeptide
  REGION 1..117: note = VH of XENP023633

SEQ ID NO: 568 - protein, 114 aa, synthetic construct
  REGION 1..114: note = Description of Artificial Sequence: Synthetic polypeptide
  REGION 1..114: note = VL of XENP023633
DVLMTQSPDSLAVSLGERATINCKSSQSIVHSNGNTYLEWYQQKPGQSPKLLIYKVSNRFSGVPDRFSGSGSGTDFTLTISSLQAEDAAVYYCFQGSHVPNTFGGGTKVEIKGS

SEQ ID NO: 569 - protein, 5 aa, synthetic construct
  REGION 1..5: note = Description of Artificial Sequence: Synthetic peptide
  REGION 1..5: note = XENP023633 vhCDR1
HYGMN

SEQ ID NO: 570 - protein, 17 aa, synthetic construct
  REGION 1..17: note = Description of Artificial Sequence: Synthetic peptide
  REGION 1..17: note = XENP023633 vhCDR2
WINTYTGEPTYADGFTG

SEQ ID NO: 571 - protein, 8 aa, synthetic construct
  REGION 1..8: note = Description of Artificial Sequence: Synthetic peptide
  REGION 1..8: note = XENP023633 vhCDR3
DYYGSSPY

SEQ ID NO: 572 - protein, 16 aa, synthetic construct
  REGION 1..16: note = Description of Artificial Sequence: Synthetic peptide
  REGION 1..16: note = XENP023633 vlCDR1
KSSQSIVHSNGNTYLE

SEQ ID NO: 573 - protein, 7 aa, synthetic construct
  REGION 1..7: note = Description of Artificial Sequence: Synthetic peptide
  REGION 1..7: note = XENP023633 vlCDR2
KVSNRFS

SEQ ID NO: 574 - protein, 9 aa, synthetic construct
  REGION 1..9: note = Description of Artificial Sequence: Synthetic peptide
  REGION 1..9: note = XENP023633 vlCDR3
FQGSHVPNT

SEQ ID NO: 575 - protein, 251 aa, synthetic construct
  REGION 1..251: note = Description of Artificial Sequence: Synthetic polypeptide
  REGION 1..251: note = XENP023634 1C11_H3_L3.70_scFv
QIQLVQSGSELKKPGASVKVSCKASGYTFTHYGMNWVRQAPGQGLEWMGWINTYTGEPTYADGFTGRFVFSLDTSVSTAYLQISSLKAEDTAVYFCARDYYGSSPYWGQGTLVTVSSGKPGSGKPGSGKPGSGKPGSDVLMTQSPDSLAVSLGERATINCKSSQSIVHSNGNTYLEWYQQKPGQSPKLLIYKVSNRFSGVPDRFSGSGSGTDFTLTISSLQAEDFAVYYCFQGSHVPNTFGGGTKVEIKGS

SEQ ID NO: 576 - protein, 117 aa, synthetic construct; identical to SEQ ID NO: 32
  REGION 1..117: note = Description of Artificial Sequence: Synthetic polypeptide
  REGION 1..117: note = VH of XENP023634

SEQ ID NO: 577 - protein, 114 aa, synthetic construct
  REGION 1..114: note = Description of Artificial Sequence: Synthetic polypeptide
  REGION 1..114: note = VL of XENP023634
DVLMTQSPDSLAVSLGERATINCKSSQSIVHSNGNTYLEWYQQKPGQSPKLLIYKVSNRFSGVPDRFSGSGSGTDFTLTISSLQAEDFAVYYCFQGSHVPNTFGGGTKVEIKGS

SEQ ID NO: 578 - protein, 5 aa, synthetic construct
  REGION 1..5: note = Description of Artificial Sequence: Synthetic peptide
  REGION 1..5: note = XENP023634 vhCDR1
HYGMN

SEQ ID NO: 579 - protein, 17 aa, synthetic construct
  REGION 1..17: note = Description of Artificial Sequence: Synthetic peptide
  REGION 1..17: note = XENP023634 vhCDR2
WINTYTGEPTYADGFTG

SEQ ID NO: 580 - protein, 8 aa, synthetic construct
  REGION 1..8: note = Description of Artificial Sequence: Synthetic peptide
  REGION 1..8: note = XENP023634 vhCDR3
DYYGSSPY

SEQ ID NO: 581 - protein, 16 aa, synthetic construct
  REGION 1..16: note = Description of Artificial Sequence: Synthetic peptide
  REGION 1..16: note = XENP023634 vlCDR1
KSSQSIVHSNGNTYLE

SEQ ID NO: 582 - protein, 7 aa, synthetic construct
  REGION 1..7: note = Description of Artificial Sequence: Synthetic peptide
  REGION 1..7: note = XENP023634 vlCDR2
KVSNRFS

SEQ ID NO: 583 - protein, 9 aa, synthetic construct
  REGION 1..9: note = Description of Artificial Sequence: Synthetic peptide
  REGION 1..9: note = XENP023634 vlCDR3
FQGSHVPNT

SEQ ID NO: 584 - protein, 251 aa, synthetic construct
  REGION 1..251: note = Description of Artificial Sequence: Synthetic polypeptide
  REGION 1..251: note = XENP023635 1C11_H3_L3.72_scFv
QIQLVQSGSELKKPGASVKVSCKASGYTFTHYGMNWVRQAPGQGLEWMGWINTYTGEPTYADGFTGRFVFSLDTSVSTAYLQISSLKAEDTAVYFCARDYYGSSPYWGQGTLVTVSSGKPGSGKPGSGKPGSGKPGSDVLMTQSPDSLAVSLGERATINCKSSQSIVHSNGNTYLEWYQQKPGQSPKLLIYKVSNRFSGVPDRFSGSGSGTDFTLTISSLQAEDVADYYCFQGSHVPNTFGGGTKVEIKGS

SEQ ID NO: 585 - protein, 117 aa, synthetic construct; identical to SEQ ID NO: 32
  REGION 1..117: note = Description of Artificial Sequence: Synthetic polypeptide
  REGION 1..117: note = VH of XENP023635

SEQ ID NO: 586 - protein, 114 aa, synthetic construct
  REGION 1..114: note = Description of Artificial Sequence: Synthetic polypeptide
  REGION 1..114: note = VL of XENP023635
DVLMTQSPDSLAVSLGERATINCKSSQSIVHSNGNTYLEWYQQKPGQSPKLLIYKVSNRFSGVPDRFSGSGSGTDFTLTISSLQAEDVADYYCFQGSHVPNTFGGGTKVEIKGS

SEQ ID NO: 587 - protein, 5 aa, synthetic construct
  REGION 1..5: note = Description of Artificial Sequence: Synthetic peptide
  REGION 1..5: note = XENP023635 vhCDR1
HYGMN

SEQ ID NO: 588 - protein, 17 aa, synthetic construct
  REGION 1..17: note = Description of Artificial Sequence: Synthetic peptide
  REGION 1..17: note = XENP023635 vhCDR2
WINTYTGEPTYADGFTG

SEQ ID NO: 589 - protein, 8 aa, synthetic construct
  REGION 1..8: note = Description of Artificial Sequence: Synthetic peptide
  REGION 1..8: note = XENP023635 vhCDR3
DYYGSSPY

SEQ ID NO: 590 - protein, 16 aa, synthetic construct
  REGION 1..16: note = Description of Artificial Sequence: Synthetic peptide
  REGION 1..16: note = XENP023635 vlCDR1
KSSQSIVHSNGNTYLE

SEQ ID NO: 591 - protein, 7 aa, synthetic construct
  REGION 1..7: note = Description of Artificial Sequence: Synthetic peptide
  REGION 1..7: note = XENP023635 vlCDR2
KVSNRFS

SEQ ID NO: 592 - protein, 9 aa, synthetic construct
  REGION 1..9: note = Description of Artificial Sequence: Synthetic peptide
  REGION 1..9: note = XENP023635 vlCDR3
FQGSHVPNT

SEQ ID NO: 593 - protein, 251 aa, synthetic construct
  REGION 1..251: note = Description of Artificial Sequence: Synthetic polypeptide
  REGION 1..251: note = XENP023636 1C11_H3_L3.73_scFv
QIQLVQSGSELKKPGASVKVSCKASGYTFTHYGMNWVRQAPGQGLEWMGWINTYTGEPTYADGFTGRFVFSLDTSVSTAYLQISSLKAEDTAVYFCARDYYGSSPYWGQGTLVTVSSGKPGSGKPGSGKPGSGKPGSDVLMTQSPDSLAVSLGERATINCKSSQSIVHSNGNTYLEWYQQKPGQSPKLLIYKVSNRFSGVPDRFSGSGSGTDFTLTISSLQAEDVATYYCFQGSHVPNTFGGGTKVEIKGS

SEQ ID NO: 594 - protein, 117 aa, synthetic construct; identical to SEQ ID NO: 32
  REGION 1..117: note = Description of Artificial Sequence: Synthetic polypeptide
  REGION 1..117: note = VH of XENP023636

SEQ ID NO: 595 - protein, 114 aa, synthetic construct
  REGION 1..114: note = Description of Artificial Sequence: Synthetic polypeptide
  REGION 1..114: note = VL of XENP023636
DVLMTQSPDSLAVSLGERATINCKSSQSIVHSNGNTYLEWYQQKPGQSPKLLIYKVSNRFSGVPDRFSGSGSGTDFTLTISSLQAEDVATYYCFQGSHVPNTFGGGTKVEIKGS

SEQ ID NO: 596 - protein, 5 aa, synthetic construct
  REGION 1..5: note = Description of Artificial Sequence: Synthetic peptide
  REGION 1..5: note = XENP023636 vhCDR1
HYGMN

SEQ ID NO: 597 - protein, 17 aa, synthetic construct
  REGION 1..17: note = Description of Artificial Sequence: Synthetic peptide
  REGION 1..17: note = XENP023636 vhCDR2
WINTYTGEPTYADGFTG

SEQ ID NO: 598 - protein, 8 aa, synthetic construct
  REGION 1..8: note = Description of Artificial Sequence: Synthetic peptide
  REGION 1..8: note = XENP023636 vhCDR3
DYYGSSPY

SEQ ID NO: 599 - protein, 16 aa, synthetic construct
  REGION 1..16: note = Description of Artificial Sequence: Synthetic peptide
  REGION 1..16: note = XENP023636 vlCDR1
KSSQSIVHSNGNTYLE

SEQ ID NO: 600 - protein, 7 aa, synthetic construct
  REGION 1..7: note = Description of Artificial Sequence: Synthetic peptide
  REGION 1..7: note = XENP023636 vlCDR2
KVSNRFS

SEQ ID NO: 601 - protein, 9 aa, synthetic construct
  REGION 1..9: note = Description of Artificial Sequence: Synthetic peptide
  REGION 1..9: note = XENP023636 vlCDR3
FQGSHVPNT

SEQ ID NO: 602 - protein, 251 aa, synthetic construct
  REGION 1..251: note = Description of Artificial Sequence: Synthetic polypeptide
  REGION 1..251: note = XENP023637 1C11_H3_L3.75_scFv
QIQLVQSGSELKKPGASVKVSCKASGYTFTHYGMNWVRQAPGQGLEWMGWINTYTGEPTYADGFTGRFVFSLDTSVSTAYLQISSLKAEDTAVYFCARDYYGSSPYWGQGTLVTVSSGKPGSGKPGSGKPGSGKPGSDVLMTQSPDSLAVSLGERATINCKSSQSIVHSNGNTYLEWYQQKPGQSPKLLIYKVSNRFSGVPDRFSGSGSGTDFTLTISSLQAEDVAVYYCLQGSHVPNTFGGGTKVEIKGS

SEQ ID NO: 603 - protein, 117 aa, synthetic construct; identical to SEQ ID NO: 32
  REGION 1..117: note = Description of Artificial Sequence: Synthetic polypeptide
  REGION 1..117: note = VH of XENP023637

SEQ ID NO: 604 - protein, 114 aa, synthetic construct
  REGION 1..114: note = Description of Artificial Sequence: Synthetic polypeptide
  REGION 1..114: note = VL of XENP023637
DVLMTQSPDSLAVSLGERATINCKSSQSIVHSNGNTYLEWYQQKPGQSPKLLIYKVSNRFSGVPDRFSGSGSGTDFTLTISSLQAEDVAVYYCLQGSHVPNTFGGGTKVEIKGS

SEQ ID NO: 605 - protein, 5 aa, synthetic construct
  REGION 1..5: note = Description of Artificial Sequence: Synthetic peptide
  REGION 1..5: note = XENP023637 vhCDR1
HYGMN

SEQ ID NO: 606 - protein, 17 aa, synthetic construct
  REGION 1..17: note = Description of Artificial Sequence: Synthetic peptide
  REGION 1..17: note = XENP023637 vhCDR2
WINTYTGEPTYADGFTG

SEQ ID NO: 607 - protein, 8 aa, synthetic construct
  REGION 1..8: note = Description of Artificial Sequence: Synthetic peptide
  REGION 1..8: note = XENP023637 vhCDR3
DYYGSSPY

SEQ ID NO: 608 - protein, 16 aa, synthetic construct
  REGION 1..16: note = Description of Artificial Sequence: Synthetic peptide
  REGION 1..16: note = XENP023637 vlCDR1
KSSQSIVHSNGNTYLE

SEQ ID NO: 609 - protein, 7 aa, synthetic construct
  REGION 1..7: note = Description of Artificial Sequence: Synthetic peptide
  REGION 1..7: note = XENP023637 vlCDR2
KVSNRFS

SEQ ID NO: 610 - protein, 9 aa, synthetic construct
  REGION 1..9: note = Description of Artificial Sequence: Synthetic peptide
  REGION 1..9: note = XENP023637 vlCDR3
LQGSHVPNT

SEQ ID NO: 611 - protein, 251 aa, synthetic construct
  REGION 1..251: note = Description of Artificial Sequence: Synthetic polypeptide
  REGION 1..251: note = XENP023638 1C11_H3_L3.78_scFv
QIQLVQSGSELKKPGASVKVSCKASGYTFTHYGMNWVRQAPGQGLEWMGWINTYTGEPTYADGFTGRFVFSLDTSVSTAYLQISSLKAEDTAVYFCARDYYGSSPYWGQGTLVTVSSGKPGSGKPGSGKPGSGKPGSDVLMTQSPDSLAVSLGERATINCKSSQSIVHSNGNTYLEWYQQKPGQSPKLLIYKVSNRFSGVPDRFSGSGSGTDFTLTISSLQAEDVAVYYCFQGSHVGNTFGGGTKVEIKGS

SEQ ID NO: 612 - protein, 117 aa, synthetic construct; identical to SEQ ID NO: 32
  REGION 1..117: note = Description of Artificial Sequence: Synthetic polypeptide
  REGION 1..117: note = VH of XENP023638

SEQ ID NO: 613 - protein, 114 aa, synthetic construct
  REGION 1..114: note = Description of Artificial Sequence: Synthetic polypeptide
  REGION 1..114: note = VL of XENP023638
DVLMTQSPDSLAVSLGERATINCKSSQSIVHSNGNTYLEWYQQKPGQSPKLLIYKVSNRFSGVPDRFSGSGSGTDFTLTISSLQAEDVAVYYCFQGSHVGNTFGGGTKVEIKGS

SEQ ID NO: 614 - protein, 5 aa, synthetic construct
  REGION 1..5: note = Description of Artificial Sequence: Synthetic peptide
  REGION 1..5: note = XENP023638 vhCDR1
HYGMN

SEQ ID NO: 615 - protein, 17 aa, synthetic construct
  REGION 1..17: note = Description of Artificial Sequence: Synthetic peptide
  REGION 1..17: note = XENP023638 vhCDR2
WINTYTGEPTYADGFTG

SEQ ID NO: 616 - protein, 8 aa, synthetic construct
  REGION 1..8: note = Description of Artificial Sequence: Synthetic peptide
  REGION 1..8: note = XENP023638 vhCDR3
DYYGSSPY

SEQ ID NO: 617 - protein, 16 aa, synthetic construct
  REGION 1..16: note = Description of Artificial Sequence: Synthetic peptide
  REGION 1..16: note = XENP023638 vlCDR1
KSSQSIVHSNGNTYLE

SEQ ID NO: 618 - protein, 7 aa, synthetic construct
  REGION 1..7: note = Description of Artificial Sequence: Synthetic peptide
  REGION 1..7: note = XENP023638 vlCDR2
KVSNRFS

SEQ ID NO: 619 - protein, 9 aa, synthetic construct
  REGION 1..9: note = Description of Artificial Sequence: Synthetic peptide
  REGION 1..9: note = XENP023638 vlCDR3
FQGSHVGNT

SEQ ID NO: 620 - protein, 251 aa, synthetic construct
  REGION 1..251: note = Description of Artificial Sequence: Synthetic polypeptide
  REGION 1..251: note = XENP023639 1C11_H3_L3.79_scFv
QIQLVQSGSELKKPGASVKVSCKASGYTFTHYGMNWVRQAPGQGLEWMGWINTYTGEPTYADGFTGRFVFSLDTSVSTAYLQISSLKAEDTAVYFCARDYYGSSPYWGQGTLVTVSSGKPGSGKPGSGKPGSGKPGSDVLMTQSPDSLAVSLGERATINCKSSQSIVHSNGNTYLEWYQQKPGQSPKLLIYKVSNRFSGVPDRFSGSGSGTDFTLTISSLQAEDVAVYYCFQGSHVHNTFGGGTKVEIKGS

SEQ ID NO: 621 - protein, 117 aa, synthetic construct; identical to SEQ ID NO: 32
  REGION 1..117: note = Description of Artificial Sequence: Synthetic polypeptide
  REGION 1..117: note = VH of XENP023639

SEQ ID NO: 622 - protein, 114 aa, synthetic construct
  REGION 1..114: note = Description of Artificial Sequence: Synthetic polypeptide
  REGION 1..114: note = VL of XENP023639
DVLMTQSPDSLAVSLGERATINCKSSQSIVHSNGNTYLEWYQQKPGQSPKLLIYKVSNRFSGVPDRFSGSGSGTDFTLTISSLQAEDVAVYYCFQGSHVHNTFGGGTKVEIKGS

SEQ ID NO: 623 - protein, 5 aa, synthetic construct
  REGION 1..5: note = Description of Artificial Sequence: Synthetic peptide
  REGION 1..5: note = XENP023639 vhCDR1
HYGMN

SEQ ID NO: 624 - protein, 17 aa, synthetic construct
  REGION 1..17: note = Description of Artificial Sequence: Synthetic peptide
  REGION 1..17: note = XENP023639 vhCDR2
WINTYTGEPTYADGFTG

SEQ ID NO: 625 - protein, 8 aa, synthetic construct
  REGION 1..8: note = Description of Artificial Sequence: Synthetic peptide
  REGION 1..8: note = XENP023639 vhCDR3
DYYGSSPY

SEQ ID NO: 626 - protein, 16 aa, synthetic construct
  REGION 1..16: note = Description of Artificial Sequence: Synthetic peptide
  REGION 1..16: note = XENP023639 vlCDR1
KSSQSIVHSNGNTYLE

SEQ ID NO: 627 - protein, 7 aa, synthetic construct
  REGION 1..7: note = Description of Artificial Sequence: Synthetic peptide
  REGION 1..7: note = XENP023639 vlCDR2
KVSNRFS

SEQ ID NO: 628 - protein, 9 aa, synthetic construct
  REGION 1..9: note = Description of Artificial Sequence: Synthetic peptide
  REGION 1..9: note = XENP023639 vlCDR3
FQGSHVHNT

SEQ ID NO: 629 - protein, 251 aa, synthetic construct
  REGION 1..251: note = Description of Artificial Sequence: Synthetic polypeptide
  REGION 1..251: note = XENP023640 1C11_H3_L3.81_scFv
QIQLVQSGSELKKPGASVKVSCKASGYTFTHYGMNWVRQAPGQGLEWMGWINTYTGEPTYADGFTGRFVFSLDTSVSTAYLQISSLKAEDTAVYFCARDYYGSSPYWGQGTLVTVSSGKPGSGKPGSGKPGSGKPGSDVLMTQSPDSLAVSLGERATINCKSSQSIVHSNGNTYLEWYQQKPGQSPKLLIYKVSNRFSGVPDRFSGSGSGTDFTLTISSLQAEDVAVYYCFQGSHVPNTFGQGTKVEIKGS

SEQ ID NO: 630 - protein, 117 aa, synthetic construct; identical to SEQ ID NO: 32
  REGION 1..117: note = Description of Artificial Sequence: Synthetic polypeptide
  REGION 1..117: note = VH of XENP023640

SEQ ID NO: 631 - protein, 114 aa, synthetic construct
  REGION 1..114: note = Description of Artificial Sequence: Synthetic polypeptide
  REGION 1..114: note = VL of XENP023640
DVLMTQSPDSLAVSLGERATINCKSSQSIVHSNGNTYLEWYQQKPGQSPKLLIYKVSNRFSGVPDRFSGSGSGTDFTLTISSLQAEDVAVYYCFQGSHVPNTFGQGTKVEIKGS

SEQ ID NO: 632 - protein, 5 aa, synthetic construct
  REGION 1..5: note = Description of Artificial Sequence: Synthetic peptide
  REGION 1..5: note = XENP023640 vhCDR1
HYGMN

SEQ ID NO: 633 - protein, 17 aa, synthetic construct
  REGION 1..17: note = Description of Artificial Sequence: Synthetic peptide
  REGION 1..17: note = XENP023640 vhCDR2
WINTYTGEPTYADGFTG

SEQ ID NO: 634 - protein, 8 aa, synthetic construct
  REGION 1..8: note = Description of Artificial Sequence: Synthetic peptide
  REGION 1..8: note = XENP023640 vhCDR3
DYYGSSPY

SEQ ID NO: 635 - protein, 16 aa, synthetic construct
  REGION 1..16: note = Description of Artificial Sequence: Synthetic peptide
  REGION 1..16: note = XENP023640 vlCDR1
KSSQSIVHSNGNTYLE

SEQ ID NO: 636 - protein, 7 aa, synthetic construct
  REGION 1..7: note = Description of Artificial Sequence: Synthetic peptide
  REGION 1..7: note = XENP023640 vlCDR2
KVSNRFS

SEQ ID NO: 637 - protein, 9 aa, synthetic construct
  REGION 1..9: note = Description of Artificial Sequence: Synthetic peptide
  REGION 1..9: note = XENP023640 vlCDR3
FQGSHVPNT

SEQ ID NO: 638 - protein, 251 aa, synthetic construct
  REGION 1..251: note = Description of Artificial Sequence: Synthetic polypeptide
  REGION 1..251: note = XENP023641 1C11_H3_L3.82_scFv
QIQLVQSGSELKKPGASVKVSCKASGYTFTHYGMNWVRQAPGQGLEWMGWINTYTGEPTYADGFTGRFVFSLDTSVSTAYLQISSLKAEDTAVYFCARDYYGSSPYWGQGTLVTVSSGKPGSGKPGSGKPGSGKPGSDVLMTQSPDSLAVSLGERATINCKSSQSIVHSNGNTYLEWYQQKPGQSPKLLIYKVSNRFSGVPDRFSGSGSGTDFTLTISSLQAEDVAVYYCFQGSHVPNTFGGGTKLEIKGS

SEQ ID NO: 639 - protein, 117 aa, synthetic construct; identical to SEQ ID NO: 32
  REGION 1..117: note = Description of Artificial Sequence: Synthetic polypeptide
  REGION 1..117: note = VH of XENP023641

SEQ ID NO: 640 - protein, 114 aa, synthetic construct
  REGION 1..114: note = Description of Artificial Sequence: Synthetic polypeptide
  REGION 1..114: note = VL of XENP023641
DVLMTQSPDSLAVSLGERATINCKSSQSIVHSNGNTYLEWYQQKPGQSPKLLIYKVSNRFSGVPDRFSGSGSGTDFTLTISSLQAEDVAVYYCFQGSHVPNTFGGGTKLEIKGS

SEQ ID NO: 641 - protein, 5 aa, synthetic construct
  REGION 1..5: note = Description of Artificial Sequence: Synthetic peptide
  REGION 1..5: note = XENP023641 vhCDR1
HYGMN

SEQ ID NO: 642 - protein, 17 aa, synthetic construct
  REGION 1..17: note = Description of Artificial Sequence: Synthetic peptide
  REGION 1..17: note = XENP023641 vhCDR2
WINTYTGEPTYADGFTG

SEQ ID NO: 643 - protein, 8 aa, synthetic construct
  REGION 1..8: note = Description of Artificial Sequence: Synthetic peptide
  REGION 1..8: note = XENP023641 vhCDR3
DYYGSSPY

SEQ ID NO: 644 - protein, 16 aa, synthetic construct
  REGION 1..16: note = Description of Artificial Sequence: Synthetic peptide
  REGION 1..16: note = XENP023641 vlCDR1
KSSQSIVHSNGNTYLE

SEQ ID NO: 645 - protein, 7 aa, synthetic construct
  REGION 1..7: note = Description of Artificial Sequence: Synthetic peptide
  REGION 1..7: note = XENP023641 vlCDR2
KVSNRFS

SEQ ID NO: 646 - protein, 9 aa, synthetic construct
  REGION 1..9: note = Description of Artificial Sequence: Synthetic peptide
  REGION 1..9: note = XENP023641 vlCDR3
FQGSHVPNT

SEQ ID NO: 647 - protein, 251 aa, synthetic construct
  REGION 1..251: note = Description of Artificial Sequence: Synthetic polypeptide
  REGION 1..251: note = XENP023755 1C11_H3.1_L3_scFv
QVQLVQSGSELKKPGASVKVSCKASGYTFTHYGMNWVRQAPGQGLEWMGWINTYTGEPTYADGFTGRFVFSLDTSVSTAYLQISSLKAEDTAVYFCARDYYGSSPYWGQGTLVTVSSGKPGSGKPGSGKPGSGKPGSDVLMTQSPDSLAVSLGERATINCKSSQSIVHSNGNTYLEWYQQKPGQSPKLLIYKVSNRFSGVPDRFSGSGSGTDFTLTISSLQAEDVAVYYCFQGSHVPNTFGGGTKVEIKGS

SEQ ID NO: 648 - protein, 117 aa, synthetic construct
  REGION 1..117: note = Description of Artificial Sequence: Synthetic polypeptide
  REGION 1..117: note = VH of XENP023755
QVQLVQSGSELKKPGASVKVSCKASGYTFTHYGMNWVRQAPGQGLEWMGWINTYTGEPTYADGFTGRFVFSLDTSVSTAYLQISSLKAEDTAVYFCARDYYGSSPYWGQGTLVTVSS

SEQ ID NO: 649 - protein, 114 aa, synthetic construct
  REGION 1..114: note = Description of Artificial Sequence: Synthetic polypeptide
  REGION 1..114: note = VL of XENP023755
DVLMTQSPDSLAVSLGERATINCKSSQSIVHSNGNTYLEWYQQKPGQSPKLLIYKVSNRFSGVPDRFSGSGSGTDFTLTISSLQAEDVAVYYCFQGSHVPNTFGGGTKVEIKGS

SEQ ID NO: 650 - protein, 5 aa, synthetic construct
  REGION 1..5: note = Description of Artificial Sequence: Synthetic peptide
  REGION 1..5: note = XENP023755 vhCDR1
HYGMN

SEQ ID NO: 651 - protein, 17 aa, synthetic construct
  REGION 1..17: note = Description of Artificial Sequence: Synthetic peptide
  REGION 1..17: note = XENP023755 vhCDR2
WINTYTGEPTYADGFTG

SEQ ID NO: 652 - protein, 8 aa, synthetic construct
  REGION 1..8: note = Description of Artificial Sequence: Synthetic peptide
  REGION 1..8: note = XENP023755 vhCDR3
DYYGSSPY

SEQ ID NO: 653 - protein, 16 aa, synthetic construct
  REGION 1..16: note = Description of Artificial Sequence: Synthetic peptide
  REGION 1..16: note = XENP023755 vlCDR1
KSSQSIVHSNGNTYLE

SEQ ID NO: 654 - protein, 7 aa, synthetic construct
  REGION 1..7: note = Description of Artificial Sequence: Synthetic peptide
  REGION 1..7: note = XENP023755 vlCDR2
KVSNRFS

SEQ ID NO: 655 - protein, 9 aa, synthetic construct
  REGION 1..9: note = Description of Artificial Sequence: Synthetic peptide
  REGION 1..9: note = XENP023755 vlCDR3
FQGSHVPNT

SEQ ID NO: 656 - protein, 251 aa, synthetic construct
  REGION 1..251: note = Description of Artificial Sequence: Synthetic polypeptide
  REGION 1..251: note = XENP023756 1C11_H3.2_L3_scFv
QMQLVQSGSELKKPGASVKVSCKASGYTFTHYGMNWVRQAPGQGLEWMGWINTYTGEPTYADGFTGRFVFSLDTSVSTAYLQISSLKAEDTAVYFCARDYYGSSPYWGQGTLVTVSSGKPGSGKPGSGKPGSGKPGSDVLMTQSPDSLAVSLGERATINCKSSQSIVHSNGNTYLEWYQQKPGQSPKLLIYKVSNRFSGVPDRFSGSGSGTDFTLTISSLQAEDVAVYYCFQGSHVPNTFGGGTKVEIKGS

SEQ ID NO: 657 - protein, 117 aa, synthetic construct
  REGION 1..117: note = Description of Artificial Sequence: Synthetic polypeptide
  REGION 1..117: note = VH of XENP023756
QMQLVQSGSELKKPGASVKVSCKASGYTFTHYGMNWVRQAPGQGLEWMGWINTYTGEPTYADGFTGRFVFSLDTSVSTAYLQISSLKAEDTAVYFCARDYYGSSPYWGQGTLVTVSS

SEQ ID NO: 658 - protein, 114 aa, synthetic construct; identical to SEQ ID NO: 649
  REGION 1..114: note = Description of Artificial Sequence: Synthetic polypeptide
  REGION 1..114: note = VL of XENP023756

SEQ ID NO: 659 - protein, 5 aa, synthetic construct
  REGION 1..5: note = Description of Artificial Sequence: Synthetic peptide
  REGION 1..5: note = XENP023756 vhCDR1
HYGMN

SEQ ID NO: 660 - protein, 17 aa, synthetic construct
  REGION 1..17: note = Description of Artificial Sequence: Synthetic peptide
  REGION 1..17: note = XENP023756 vhCDR2
WINTYTGEPTYADGFTG

SEQ ID NO: 661 - protein, 8 aa, synthetic construct
  REGION 1..8: note = Description of Artificial Sequence: Synthetic peptide
  REGION 1..8: note = XENP023756 vhCDR3
DYYGSSPY

SEQ ID NO: 662 - protein, 16 aa, synthetic construct
  REGION 1..16: note = Description of Artificial Sequence: Synthetic peptide
  REGION 1..16: note = XENP023756 vlCDR1
KSSQSIVHSNGNTYLE

SEQ ID NO: 663 - protein, 7 aa, synthetic construct
  REGION 1..7: note = Description of Artificial Sequence: Synthetic peptide
  REGION 1..7: note = XENP023756 vlCDR2
KVSNRFS

SEQ ID NO: 664 - protein, 9 aa, synthetic construct
  REGION 1..9: note = Description of Artificial Sequence: Synthetic peptide
  REGION 1..9: note = XENP023756 vlCDR3
FQGSHVPNT

SEQ ID NO: 665 - protein, 251 aa, synthetic construct
  REGION 1..251: note = Description of Artificial Sequence: Synthetic polypeptide
  REGION 1..251: note = XENP023757 1C11_H3.4_L3_scFv
QIQLQQSGSELKKPGASVKVSCKASGYTFTHYGMNWVRQAPGQGLEWMGWINTYTGEPTYADGFTGRFVFSLDTSVSTAYLQISSLKAEDTAVYFCARDYYGSSPYWGQGTLVTVSSGKPGSGKPGSGKPGSGKPGSDVLMTQSPDSLAVSLGERATINCKSSQSIVHSNGNTYLEWYQQKPGQSPKLLIYKVSNRFSGVPDRFSGSGSGTDFTLTISSLQAEDVAVYYCFQGSHVPNTFGGGTKVEIKGS

SEQ ID NO: 666 - protein, 117 aa, synthetic construct
  REGION 1..117: note = Description of Artificial Sequence: Synthetic polypeptide
  REGION 1..117: note = VH of XENP023757
QIQLQQSGSELKKPGASVKVSCKASGYTFTHYGMNWVRQAPGQGLEWMGWINTYTGEPTYADGFTGRFVFSLDTSVSTAYLQISSLKAEDTAVYFCARDYYGSSPYWGQGTLVTVSS

SEQ ID NO: 667 - protein, 114 aa, synthetic construct; identical to SEQ ID NO: 649
  REGION 1..114: note = Description of Artificial Sequence: Synthetic polypeptide
  REGION 1..114: note = VL of XENP023757

SEQ ID NO: 668 - protein, 5 aa, synthetic construct
  REGION 1..5: note = Description of Artificial Sequence: Synthetic peptide
  REGION 1..5: note = XENP023757 vhCDR1
HYGMN

SEQ ID NO: 669 - protein, 17 aa, synthetic construct
  REGION 1..17: note = Description of Artificial Sequence: Synthetic peptide
  REGION 1..17: note = XENP023757 vhCDR2
WINTYTGEPTYADGFTG

SEQ ID NO: 670 - protein, 8 aa, synthetic construct
  REGION 1..8: note = Description of Artificial Sequence: Synthetic peptide
  REGION 1..8: note = XENP023757 vhCDR3
DYYGSSPY

SEQ ID NO: 671 - protein, 16 aa, synthetic construct
  REGION 1..16: note = Description of Artificial Sequence: Synthetic peptide
  REGION 1..16: note = XENP023757 vlCDR1
KSSQSIVHSNGNTYLE

SEQ ID NO: 672 - protein, 7 aa, synthetic construct
  REGION 1..7: note = Description of Artificial Sequence: Synthetic peptide
  REGION 1..7: note = XENP023757 vlCDR2
KVSNRFS

SEQ ID NO: 673 - protein, 9 aa, synthetic construct
  REGION 1..9: note = Description of Artificial Sequence: Synthetic peptide
  REGION 1..9: note = XENP023757 vlCDR3
FQGSHVPNT

SEQ ID NO: 674 - protein, 251 aa, synthetic construct
  REGION 1..251: note = Description of Artificial Sequence: Synthetic polypeptide
  REGION 1..251: note = XENP023758 1C11_H3.5_L3_scFv
QIQLVQSGAELKKPGASVKVSCKASGYTFTHYGMNWVRQAPGQGLEWMGWINTYTGEPTYADGFTGRFVFSLDTSVSTAYLQISSLKAEDTAVYFCARDYYGSSPYWGQGTLVTVSSGKPGSGKPGSGKPGSGKPGSDVLMTQSPDSLAVSLGERATINCKSSQSIVHSNGNTYLEWYQQKPGQSPKLLIYKVSNRFSGVPDRFSGSGSGTDFTLTISSLQAEDVAVYYCFQGSHVPNTFGGGTKVEIKGS

SEQ ID NO: 675 - protein, 117 aa, synthetic construct
  REGION 1..117: note = Description of Artificial Sequence: Synthetic polypeptide
  REGION 1..117: note = VH of XENP023758
QIQLVQSGAELKKPGASVKVSCKASGYTFTHYGMNWVRQAPGQGLEWMGWINTYTGEPTYADGFTGRFVFSLDTSVSTAYLQISSLKAEDTAVYFCARDYYGSSPYWGQGTLVTVSS

SEQ ID NO: 676 - protein, 114 aa, synthetic construct; identical to SEQ ID NO: 649
  REGION 1..114: note = Description of Artificial Sequence: Synthetic polypeptide
  REGION 1..114: note = VL of XENP023758

SEQ ID NO: 677 - protein, 5 aa, synthetic construct
  REGION 1..5: note = Description of Artificial Sequence: Synthetic peptide
  REGION 1..5: note = XENP023758 vhCDR1
HYGMN

SEQ ID NO: 678 - protein, 17 aa, synthetic construct
  REGION 1..17: note = Description of Artificial Sequence: Synthetic peptide
  REGION 1..17: note = XENP023758 vhCDR2
WINTYTGEPTYADGFTG

SEQ ID NO: 679 - protein, 8 aa, synthetic construct
  REGION 1..8: note = Description of Artificial Sequence: Synthetic peptide
  REGION 1..8: note = XENP023758 vhCDR3
DYYGSSPY

SEQ ID NO: 680 - protein, 16 aa, synthetic construct
  REGION 1..16: note = Description of Artificial Sequence: Synthetic peptide
  REGION 1..16: note = XENP023758 vlCDR1
KSSQSIVHSNGNTYLE

SEQ ID NO: 681 - protein, 7 aa, synthetic construct
  REGION 1..7: note = Description of Artificial Sequence: Synthetic peptide
  REGION 1..7: note = XENP023758 vlCDR2
KVSNRFS

SEQ ID NO: 682 - protein, 9 aa, synthetic construct
  REGION 1..9: note = Description of Artificial Sequence: Synthetic peptide
  REGION 1..9: note = XENP023758 vlCDR3
FQGSHVPNT

SEQ ID NO: 683 - protein, 251 aa, synthetic construct
  REGION 1..251: note = Description of Artificial Sequence: Synthetic polypeptide
  REGION 1..251: note = XENP023759 1C11_H3.6_L3_scFv
QIQLVQSGGELKKPGASVKVSCKASGYTFTHYGMNWVRQAPGQGLEWMGWINTYTGEPTYADGFTGRFVFSLDTSVSTAYLQISSLKAEDTAVYFCARDYYGSSPYWGQGTLVTVSSGKPGSGKPGSGKPGSGKPGSDVLMTQSPDSLAVSLGERATINCKSSQSIVHSNGNTYLEWYQQKPGQSPKLLIYKVSNRFSGVPDRFSGSGSGTDFTLTISSLQAEDVAVYYCFQGSHVPNTFGGGTKVEIKGS

SEQ ID NO: 684 - protein, 117 aa, synthetic construct
  REGION 1..117: note = Description of Artificial Sequence: Synthetic polypeptide
  REGION 1..117: note = VH of XENP023759
QIQLVQSGGELKKPGASVKVSCKASGYTFTHYGMNWVRQAPGQGLEWMGWINTYTGEPTYADGFTGRFVFSLDTSVSTAYLQISSLKAEDTAVYFCARDYYGSSPYWGQGTLVTVSS

SEQ ID NO: 685 - protein, 114 aa, synthetic construct; identical to SEQ ID NO: 649
  REGION 1..114: note = Description of Artificial Sequence: Synthetic polypeptide
  REGION 1..114: note = VL of XENP023759

SEQ ID NO: 686 - protein, 5 aa, synthetic construct
  REGION 1..5: note = Description of Artificial Sequence: Synthetic peptide
  REGION 1..5: note = XENP023759 vhCDR1
HYGMN

SEQ ID NO: 687 - protein, 17 aa, synthetic construct
  REGION 1..17: note = Description of Artificial Sequence: Synthetic peptide
  REGION 1..17: note = XENP023759 vhCDR2
WINTYTGEPTYADGFTG

SEQ ID NO: 688 - protein, 8 aa, synthetic construct
  REGION 1..8: note = Description of Artificial Sequence: Synthetic peptide
  REGION 1..8: note = XENP023759 vhCDR3
DYYGSSPY

SEQ ID NO: 689 - protein, 16 aa, synthetic construct
  REGION 1..16: note = Description of Artificial Sequence: Synthetic peptide
  REGION 1..16: note = XENP023759 vlCDR1
KSSQSIVHSNGNTYLE

SEQ ID NO: 690 - protein, 7 aa, synthetic construct
  REGION 1..7: note = Description of Artificial Sequence: Synthetic peptide
  REGION 1..7: note = XENP023759 vlCDR2
KVSNRFS

SEQ ID NO: 691 - protein, 9 aa, synthetic construct
  REGION 1..9: note = Description of Artificial Sequence: Synthetic peptide
  REGION 1..9: note = XENP023759 vlCDR3
FQGSHVPNT

SEQ ID NO: 692 - protein, 251 aa, synthetic construct
  REGION 1..251: note = Description of Artificial Sequence: Synthetic polypeptide
  REGION 1..251: note = XENP023760 1C11_H3.7_L3_scFv
QIQLVQSGPELKKPGASVKVSCKASGYTFTHYGMNWVRQAPGQGLEWMGWINTYTGEPTYADGFTGRFVFSLDTSVSTAYLQISSLKAEDTAVYFCARDYYGSSPYWGQGTLVTVSSGKPGSGKPGSGKPGSGKPGSDVLMTQSPDSLAVSLGERATINCKSSQSIVHSNGNTYLEWYQQKPGQSPKLLIYKVSNRFSGVPDRFSGSGSGTDFTLTISSLQAEDVAVYYCFQGSHVPNTFGGGTKVEIKGS

SEQ ID NO: 693 - protein, 117 aa, synthetic construct
  REGION 1..117: note = Description of Artificial Sequence: Synthetic polypeptide
  REGION 1..117: note = VH of XENP023760
QIQLVQSGPELKKPGASVKVSCKASGYTFTHYGMNWVRQAPGQGLEWMGWINTYTGEPTYADGFTGRFVFSLDTSVSTAYLQISSLKAEDTAVYFCARDYYGSSPYWGQGTLVTVSS

SEQ ID NO: 694 - protein, 114 aa, synthetic construct; identical to SEQ ID NO: 649
  REGION 1..114: note = Description of Artificial Sequence: Synthetic polypeptide
  REGION 1..114: note = VL of XENP023760

SEQ ID NO: 695 - protein, 5 aa, synthetic construct
  REGION 1..5: note = Description of Artificial Sequence: Synthetic peptide
  REGION 1..5: note = XENP023760 vhCDR1
HYGMN

SEQ ID NO: 696 - protein, 17 aa, synthetic construct
  REGION 1..17: note = Description of Artificial Sequence: Synthetic peptide
  REGION 1..17: note = XENP023760 vhCDR2
WINTYTGEPTYADGFTG

SEQ ID NO: 697 - protein, 8 aa, synthetic construct
  REGION 1..8: note = Description of Artificial Sequence: Synthetic peptide
  REGION 1..8: note = XENP023760 vhCDR3
DYYGSSPY

SEQ ID NO: 698 - protein, 16 aa, synthetic construct
  REGION 1..16: note = Description of Artificial Sequence: Synthetic peptide
  REGION 1..16: note = XENP023760 vlCDR1
KSSQSIVHSNGNTYLE

SEQ ID NO: 699 - protein, 7 aa, synthetic construct
  REGION 1..7: note = Description of Artificial Sequence: Synthetic peptide
  REGION 1..7: note = XENP023760 vlCDR2
KVSNRFS

SEQ ID NO: 700 - protein, 9 aa, synthetic construct
  REGION 1..9: note = Description of Artificial Sequence: Synthetic peptide
  REGION 1..9: note = XENP023760 vlCDR3
FQGSHVPNT

SEQ ID NO: 701 - protein, 251 aa, synthetic construct
  REGION 1..251: note = Description of Artificial Sequence: Synthetic polypeptide
  REGION 1..251: note = XENP023761 1C11_H3.8_L3_scFv
QIQLVQSGHELKKPGASVKVSCKASGYTFTHYGMNWVRQAPGQGLEWMGWINTYTGEPTYADGFTGRFVFSLDTSVSTAYLQISSLKAEDTAVYFCARDYYGSSPYWGQGTLVTVSSGKPGSGKPGSGKPGSGKPGSDVLMTQSPDSLAVSLGERATINCKSSQSIVHSNGNTYLEWYQQKPGQSPKLLIYKVSNRFSGVPDRFSGSGSGTDFTLTISSLQAEDVAVYYCFQGSHVPNTFGGGTKVEIKGS

SEQ ID NO: 702 - protein, 117 aa, synthetic construct
  REGION 1..117: note = Description of Artificial Sequence: Synthetic polypeptide
  REGION 1..117: note = VH of XENP023761
QIQLVQSGHELKKPGASVKVSCKASGYTFTHYGMNWVRQAPGQGLEWMGWINTYTGEPTYADGFTGRFVFSLDTSVSTAYLQISSLKAEDTAVYFCARDYYGSSPYWGQGTLVTVSS

SEQ ID NO: 703 - protein, 114 aa, synthetic construct; identical to SEQ ID NO: 649
  REGION 1..114: note = Description of Artificial Sequence: Synthetic polypeptide
  REGION 1..114: note = VL of XENP023761

SEQ ID NO: 704 - protein, 5 aa, synthetic construct
  REGION 1..5: note = Description of Artificial Sequence: Synthetic peptide
  REGION 1..5: note = XENP023761 vhCDR1
HYGMN

SEQ ID NO: 705 - protein, 17 aa, synthetic construct
  REGION 1..17: note = Description of Artificial Sequence: Synthetic peptide
  REGION 1..17: note = XENP023761 vhCDR2
WINTYTGEPTYADGFTG

SEQ ID NO: 706 - protein, 8 aa, synthetic construct
  REGION 1..8: note = Description of Artificial Sequence: Synthetic peptide
  REGION 1..8: note = XENP023761 vhCDR3
DYYGSSPY

SEQ ID NO: 707 - protein, 16 aa, synthetic construct
  REGION 1..16: note = Description of Artificial Sequence: Synthetic peptide
  REGION 1..16: note = XENP023761 vlCDR1
KSSQSIVHSNGNTYLE

SEQ ID NO: 708 - protein, 7 aa, synthetic construct
  REGION 1..7: note = Description of Artificial Sequence: Synthetic peptide
  REGION 1..7: note = XENP023761 vlCDR2
KVSNRFS

SEQ ID NO: 709 - protein, 9 aa, synthetic construct
  REGION 1..9: note = Description of Artificial Sequence: Synthetic peptide
  REGION 1..9: note = XENP023761 vlCDR3
FQGSHVPNT

SEQ ID NO: 710 - protein, 251 aa, synthetic construct
  REGION 1..251: note = Description of Artificial Sequence: Synthetic polypeptide
  REGION 1..251: note = XENP023762 1C11_H3.11_L3_scFv
QIQLVQSGSELKKPGASVKLSCKASGYTFTHYGMNWVRQAPGQGLEWMGWINTYTGEPTYADGFTGRFVFSLDTSVSTAYLQISSLKAEDTAVYFCARDYYGSSPYWGQGTLVTVSSGKPGSGKPGSGKPGSGKPGSDVLMTQSPDSLAVSLGERATINCKSSQSIVHSNGNTYLEWYQQKPGQSPKLLIYKVSNRFSGVPDRFSGSGSGTDFTLTISSLQAEDVAVYYCFQGSHVPNTFGGGTKVEIKGS

SEQ ID NO: 711 - protein, 117 aa, synthetic construct
  REGION 1..117: note = Description of Artificial Sequence: Synthetic polypeptide
  REGION 1..117: note = VH of XENP023762
QIQLVQSGSELKKPGASVKLSCKASGYTFTHYGMNWVRQAPGQGLEWMGWINTYTGEPTYADGFTGRFVFSLDTSVSTAYLQISSLKAEDTAVYFCARDYYGSSPYWGQGTLVTVSS

SEQ ID NO: 712 - protein, 114 aa, synthetic construct; identical to SEQ ID NO: 649
  REGION 1..114: note = Description of Artificial Sequence: Synthetic polypeptide
  REGION 1..114: note = VL of XENP023762

SEQ ID NO: 713 - protein, 5 aa, synthetic construct
  REGION 1..5: note = Description of Artificial Sequence: Synthetic peptide
  REGION 1..5: note = XENP023762 vhCDR1
HYGMN

SEQ ID NO: 714 - protein, 17 aa, synthetic construct
  REGION 1..17: note = Description of Artificial Sequence: Synthetic peptide
  REGION 1..17: note = XENP023762 vhCDR2
WINTYTGEPTYADGFTG

SEQ ID NO: 715 - protein, 8 aa, synthetic construct
  REGION 1..8: note = Description of Artificial Sequence: Synthetic peptide
  REGION 1..8: note = XENP023762 vhCDR3
DYYGSSPY

SEQ ID NO: 716 - protein, 16 aa, synthetic construct
  REGION 1..16: note = Description of Artificial Sequence: Synthetic peptide
  REGION 1..16: note = XENP023762 vlCDR1
KSSQSIVHSNGNTYLE

SEQ ID NO: 717 - protein, 7 aa, synthetic construct
  REGION 1..7: note = Description of Artificial Sequence: Synthetic peptide
  REGION 1..7: note = XENP023762 vlCDR2
KVSNRFS

SEQ ID NO: 718 - protein, 9 aa, synthetic construct
  REGION 1..9: note = Description of Artificial Sequence: Synthetic peptide
  REGION 1..9: note = XENP023762 vlCDR3
FQGSHVPNT

SEQ ID NO: 719 - protein, 251 aa, synthetic construct
  REGION 1..251: note = Description of Artificial Sequence: Synthetic polypeptide
  REGION 1..251: note = XENP023763 1C11_H3.12_L3_scFv
QIQLVQSGSELKKPGASVKMSCKASGYTFTHYGMNWVRQAPGQGLEWMGWINTYTGEPTYADGFTGRFVFSLDTSVSTAYLQISSLKAEDTAVYFCARDYYGSSPYWGQGTLVTVSSGKPGSGKPGSGKPGSGKPGSDVLMTQSPDSLAVSLGERATINCKSSQSIVHSNGNTYLEWYQQKPGQSPKLLIYKVSNRFSGVPDRFSGSGSGTDFTLTISSLQAEDVAVYYCFQGSHVPNTFGGGTKVEIKGS

SEQ ID NO: 720 - protein, 117 aa, synthetic construct
  REGION 1..117: note = Description of Artificial Sequence: Synthetic polypeptide
  REGION 1..117: note = VH of XENP023763
QIQLVQSGSELKKPGASVKMSCKASGYTFTHYGMNWVRQAPGQGLEWMGWINTYTGEPTYADGFTGRFVFSLDTSVSTAYLQISSLKAEDTAVYFCARDYYGSSPYWGQGTLVTVSS

SEQ ID NO: 721 - protein, 114 aa, synthetic construct; identical to SEQ ID NO: 649
  REGION 1..114: note = Description of Artificial Sequence: Synthetic polypeptide
  REGION 1..114: note = VL of XENP023763

SEQ ID NO: 722 - protein, 5 aa, synthetic construct
  REGION 1..5: note = Description of Artificial Sequence: Synthetic peptide
  REGION 1..5: note = XENP023763 vhCDR1
HYGMN

SEQ ID NO: 723 - protein, 17 aa, synthetic construct
  REGION 1..17: note = Description of Artificial Sequence: Synthetic peptide
  REGION 1..17: note = XENP023763 vhCDR2
WINTYTGEPTYADGFTG

SEQ ID NO: 724 - protein, 8 aa, synthetic construct
  REGION 1..8: note = Description of Artificial Sequence: Synthetic peptide
  REGION 1..8: note = XENP023763 vhCDR3
DYYGSSPY

SEQ ID NO: 725 - protein, 16 aa, synthetic construct
  REGION 1..16: note = Description of Artificial Sequence: Synthetic peptide
  REGION 1..16: note = XENP023763 vlCDR1
KSSQSIVHSNGNTYLE

SEQ ID NO: 726 - protein, 7 aa, synthetic construct
  REGION 1..7: note = Description of Artificial Sequence: Synthetic peptide
  REGION 1..7: note = XENP023763 vlCDR2
KVSNRFS

SEQ ID NO: 727 - protein, 9 aa, synthetic construct
  REGION 1..9: note = Description of Artificial Sequence: Synthetic peptide
  REGION 1..9: note = XENP023763 vlCDR3
FQGSHVPNT

SEQ ID NO: 728 - protein, 251 aa, synthetic construct
  REGION 1..251: note = Description of Artificial Sequence: Synthetic polypeptide
  REGION 1..251: note = XENP023764 1C11_H3.16_L3_scFv
QIQLVQSGSELKKPGASVKVSCKASGYTFTHYAMNWVRQAPGQGLEWMGWINTYTGEPTYADGFTGRFVFSLDTSVSTAYLQISSLKAEDTAVYFCARDYYGSSPYWGQGTLVTVSSGKPGSGKPGSGKPGSGKPGSDVLMTQSPDSLAVSLGERATINCKSSQSIVHSNGNTYLEWYQQKPGQSPKLLIYKVSNRFSGVPDRFSGSGSGTDFTLTISSLQAEDVAVYYCFQGSHVPNTFGGGTKVEIKGS

SEQ ID NO: 729 - protein, 117 aa, synthetic construct
  REGION 1..117: note = Description of Artificial Sequence: Synthetic polypeptide
  REGION 1..117: note = VH of XENP023764
QIQLVQSGSELKKPGASVKVSCKASGYTFTHYAMNWVRQAPGQGLEWMGWINTYTGEPTYADGFTGRFVFSLDTSVSTAYLQISSLKAEDTAVYFCARDYYGSSPYWGQGTLVTVSS

SEQ ID NO: 730 - protein, 114 aa, synthetic construct; identical to SEQ ID NO: 649
  REGION 1..114: note = Description of Artificial Sequence: Synthetic polypeptide
  REGION 1..114: note = VL of XENP023764

SEQ ID NO: 731 - protein, 5 aa, synthetic construct
  REGION 1..5: note = Description of Artificial Sequence: Synthetic peptide
  REGION 1..5: note = XENP023764 vhCDR1
HYAMN

SEQ ID NO: 732 - protein, 17 aa, synthetic construct
  REGION 1..17: note = Description of Artificial Sequence: Synthetic peptide
  REGION 1..17: note = XENP023764 vhCDR2
WINTYTGEPTYADGFTG

SEQ ID NO: 733 - protein, 8 aa, synthetic construct
  REGION 1..8: note = Description of Artificial Sequence: Synthetic peptide
  REGION 1..8: note = XENP023764 vhCDR3
DYYGSSPY

SEQ ID NO: 734 - protein, 16 aa, synthetic construct
  REGION 1..16: note = Description of Artificial Sequence: Synthetic peptide
  REGION 1..16: note = XENP023764 vlCDR1
KSSQSIVHSNGNTYLE

SEQ ID NO: 735 - protein, 7 aa, synthetic construct
  REGION 1..7: note = Description of Artificial Sequence: Synthetic peptide
  REGION 1..7: note = XENP023764 vlCDR2
KVSNRFS

SEQ ID NO: 736 - protein, 9 aa, synthetic construct
  REGION 1..9: note = Description of Artificial Sequence: Synthetic peptide
  REGION 1..9: note = XENP023764 vlCDR3
FQGSHVPNT

SEQ ID NO: 737 - protein, 251 aa, synthetic construct
  REGION 1..251: note = Description of Artificial Sequence: Synthetic polypeptide
  REGION 1..251: note = XENP023765 1C11_H3.18_L3_scFv
QIQLVQSGSELKKPGASVKVSCKASGYTFTHYGMNWVKQAPGQGLEWMGWINTYTGEPTYADGFTGRFVFSLDTSVSTAYLQISSLKAEDTAVYFCARDYYGSSPYWGQGTLVTVSSGKPGSGKPGSGKPGSGKPGSDVLMTQSPDSLAVSLGERATINCKSSQSIVHSNGNTYLEWYQQKPGQSPKLLIYKVSNRFSGVPDRFSGSGSGTDFTLTISSLQAEDVAVYYCFQGSHVPNTFGGGTKVEIKGS

SEQ ID NO: 738 - protein, 117 aa, synthetic construct
  REGION 1..117: note = Description of Artificial Sequence: Synthetic polypeptide
  REGION 1..117: note = VH of XENP023765
QIQLVQSGSELKKPGASVKVSCKASGYTFTHYGMNWVKQAPGQGLEWMGWINTYTGEPTYADGFTGRFVFSLDTSVSTAYLQISSLKAEDTAVYFCARDYYGSSPYWGQGTLVTVSS

SEQ ID NO: 739 - protein, 114 aa, synthetic construct; identical to SEQ ID NO: 649
  REGION 1..114: note = Description of Artificial Sequence: Synthetic polypeptide
  REGION 1..114: note = VL of XENP023765

SEQ ID NO: 740 - protein, 5 aa, synthetic construct
  REGION 1..5: note = Description of Artificial Sequence: Synthetic peptide
  REGION 1..5: note = XENP023765 vhCDR1
HYGMN

SEQ ID NO: 741 - protein, 17 aa, synthetic construct
  REGION 1..17: note = Description of Artificial Sequence: Synthetic peptide
  REGION 1..17: note = XENP023765 vhCDR2
WINTYTGEPTYADGFTG

SEQ ID NO: 742 - protein, 8 aa, synthetic construct
  REGION 1..8: note = Description of Artificial Sequence: Synthetic peptide
  REGION 1..8: note = XENP023765 vhCDR3
DYYGSSPY

SEQ ID NO: 743 - protein, 16 aa, synthetic construct
  REGION 1..16: note = Description of Artificial Sequence: Synthetic peptide
  REGION 1..16: note = XENP023765 vlCDR1
KSSQSIVHSNGNTYLE

SEQ ID NO: 744 - protein, 7 aa, synthetic construct
  REGION 1..7: note = Description of Artificial Sequence: Synthetic peptide
  REGION 1..7: note = XENP023765 vlCDR2
KVSNRFS

SEQ ID NO: 745 - protein, 9 aa, synthetic construct
  REGION 1..9: note = Description of Artificial Sequence: Synthetic peptide
  REGION 1..9: note = XENP023765 vlCDR3
FQGSHVPNT

SEQ ID NO: 746 - protein, 251 aa, synthetic construct
  REGION 1..251: note = Description of Artificial Sequence: Synthetic polypeptide
  REGION 1..251: note = XENP023766 1C11_H3.19_L3_scFv
QIQLVQSGSELKKPGASVKVSCKASGYTFTHYGMNWVRQAPGKGLEWMGWINTYTGEPTYADGFTGRFVFSLDTSVSTAYLQISSLKAEDTAVYFCARDYYGSSPYWGQGTLVTVSSGKPGSGKPGSGKPGSGKPGSDVLMTQSPDSLAVSLGERATINCKSSQSIVHSNGNTYLEWYQQKPGQSPKLLIYKVSNRFSGVPDRFSGSGSGTDFTLTISSLQAEDVAVYYCFQGSHVPNTFGGGTKVEIKGS

SEQ ID NO: 747 - protein, 117 aa, synthetic construct
  REGION 1..117: note = Description of Artificial Sequence: Synthetic polypeptide
  REGION 1..117: note = VH of XENP023766
QIQLVQSGSELKKPGASVKVSCKASGYTFTHYGMNWVRQAPGKGLEWMGWINTYTGEPTYADGFTGRFVFSLDTSVSTAYLQISSLKAEDTAVYFCARDYYGSSPYWGQGTLVTVSS

SEQ ID NO: 748 - protein, 114 aa, synthetic construct; identical to SEQ ID NO: 649
  REGION 1..114: note = Description of Artificial Sequence: Synthetic polypeptide
  REGION 1..114: note = VL of XENP023766

SEQ ID NO: 749 - protein, 5 aa, synthetic construct
  REGION 1..5: note = Description of Artificial Sequence: Synthetic peptide
  REGION 1..5: note = XENP023766 vhCDR1
HYGMN

SEQ ID NO: 750 - protein, 17 aa, synthetic construct
  REGION 1..17: note = Description of Artificial Sequence: Synthetic peptide
  REGION 1..17: note = XENP023766 vhCDR2
WINTYTGEPTYADGFTG

SEQ ID NO: 751 - protein, 8 aa, synthetic construct
  REGION 1..8: note = Description of Artificial Sequence: Synthetic peptide
  REGION 1..8: note = XENP023766 vhCDR3
DYYGSSPY

SEQ ID NO: 752 - protein, 16 aa, synthetic construct
  REGION 1..16: note = Description of Artificial Sequence: Synthetic peptide
  REGION 1..16: note = XENP023766 vlCDR1
KSSQSIVHSNGNTYLE

SEQ ID NO: 753 - protein, 7 aa, synthetic construct
  REGION 1..7: note = Description of Artificial Sequence: Synthetic peptide
  REGION 1..7: note = XENP023766 vlCDR2
KVSNRFS

SEQ ID NO: 754 - protein, 9 aa, synthetic construct
  REGION 1..9: note = Description of Artificial Sequence: Synthetic peptide
  REGION 1..9: note = XENP023766 vlCDR3
FQGSHVPNT

SEQ ID NO: 755 - protein, 251 aa, synthetic construct
  REGION 1..251: note = Description of Artificial Sequence: Synthetic polypeptide
  REGION 1..251: note = XENP023767 1C11_H3.20_L3_scFv
QIQLVQSGSELKKPGASVKVSCKASGYTFTHYGMNWVRQAPGRGLEWMGWINTYTGEPTYADGFTGRFVFSLDTSVSTAYLQISSLKAEDTAVYFCARDYYGSSPYWGQGTLVTVSSGKPGSGKPGSGKPGSGKPGSDVLMTQSPDSLAVSLGERATINCKSSQSIVHSNGNTYLEWYQQKPGQSPKLLIYKVSNRFSGVPDRFSGSGSGTDFTLTISSLQAEDVAVYYCFQGSHVPNTFGGGTKVEIKGS

SEQ ID NO: 756 - protein, 117 aa, synthetic construct
  REGION 1..117: note = Description of Artificial Sequence: Synthetic polypeptide
  REGION 1..117: note = VH of XENP023767
QIQLVQSGSELKKPGASVKVSCKASGYTFTHYGMNWVRQAPGRGLEWMGWINTYTGEPTYADGFTGRFVFSLDTSVSTAYLQISSLKAEDTAVYFCARDYYGSSPYWGQGTLVTVSS

SEQ ID NO: 757 - protein, 114 aa, synthetic construct; identical to SEQ ID NO: 649
  REGION 1..114: note = Description of Artificial Sequence: Synthetic polypeptide
  REGION 1..114: note = VL of XENP023767

SEQ ID NO: 758 - protein, 5 aa, synthetic construct
  REGION 1..5: note = Description of Artificial Sequence: Synthetic peptide
  REGION 1..5: note = XENP023767 vhCDR1
HYGMN

SEQ ID NO: 759 - protein, 17 aa, synthetic construct
  REGION 1..17: note = Description of Artificial Sequence: Synthetic peptide
  REGION 1..17: note = XENP023767 vhCDR2
WINTYTGEPTYADGFTG

SEQ ID NO: 760 - protein, 8 aa, synthetic construct
  REGION 1..8: note = Description of Artificial Sequence: Synthetic peptide
  REGION 1..8: note = XENP023767 vhCDR3
DYYGSSPY

SEQ ID NO: 761 - protein, 16 aa, synthetic construct
  REGION 1..16: note = Description of Artificial Sequence: Synthetic peptide
  REGION 1..16: note = XENP023767 vlCDR1
KSSQSIVHSNGNTYLE

SEQ ID NO: 762 - protein, 7 aa, synthetic construct
  REGION 1..7: note = Description of Artificial Sequence: Synthetic peptide
  REGION 1..7: note = XENP023767 vlCDR2
KVSNRFS

SEQ ID NO: 763 - protein, 9 aa, synthetic construct
  REGION 1..9: note = Description of Artificial Sequence: Synthetic peptide
  REGION 1..9: note = XENP023767 vlCDR3
FQGSHVPNT

SEQ ID NO: 764 - protein, 251 aa, synthetic construct
  REGION 1..251: note = Description of Artificial Sequence: Synthetic polypeptide
  REGION 1..251: note = XENP023768 1C11_H3.21_L3_scFv
QIQLVQSGSELKKPGASVKVSCKASGYTFTHYGMNWVRQAPGHGLEWMGWINTYTGEPTYADGFTGRFVFSLDTSVSTAYLQISSLKAEDTAVYFCARDYYGSSPYWGQGTLVTVSSGKPGSGKPGSGKPGSGKPGSDVLMTQSPDSLAVSLGERATINCKSSQSIVHSNGNTYLEWYQQKPGQSPKLLIYKVSNRFSGVPDRFSGSGSGTDFTLTISSLQAEDVAVYYCFQGSHVPNTFGGGTKVEIKGS

SEQ ID NO: 765 - protein, 117 aa, synthetic construct
  REGION 1..117: note = Description of Artificial Sequence: Synthetic polypeptide
  REGION 1..117: note = VH of XENP023768
QIQLVQSGSELKKPGASVKVSCKASGYTFTHYGMNWVRQAPGHGLEWMGWINTYTGEPTYADGFTGRFVFSLDTSVSTAYLQISSLKAEDTAVYFCARDYYGSSPYWGQGTLVTVSS

SEQ ID NO: 766 - protein, 114 aa, synthetic construct; identical to SEQ ID NO: 649
  REGION 1..114: note = Description of Artificial Sequence: Synthetic polypeptide
  REGION 1..114: note = VL of XENP023768

SEQ ID NO: 767 - protein, 5 aa, synthetic construct
  REGION 1..5: note = Description of Artificial Sequence: Synthetic peptide
  REGION 1..5: note = XENP023768 vhCDR1
HYGMN

SEQ ID NO: 768 - protein, 17 aa, synthetic construct
  REGION 1..17: note = Description of Artificial Sequence: Synthetic peptide
  REGION 1..17: note = XENP023768 vhCDR2
WINTYTGEPTYADGFTG

SEQ ID NO: 769 - protein, 8 aa, synthetic construct
  REGION 1..8: note = Description of Artificial Sequence: Synthetic peptide
  REGION 1..8: note = XENP023768 vhCDR3
DYYGSSPY

SEQ ID NO: 770 - protein, 16 aa, synthetic construct
  REGION 1..16: note = Description of Artificial Sequence: Synthetic peptide
  REGION 1..16: note = XENP023768 vlCDR1
KSSQSIVHSNGNTYLE

SEQ ID NO: 771 - protein, 7 aa, synthetic construct
  REGION 1..7: note = Description of Artificial Sequence: Synthetic peptide
  REGION 1..7: note = XENP023768 vlCDR2
KVSNRFS

SEQ ID NO: 772 - protein, 9 aa, synthetic construct
  REGION 1..9: note = Description of Artificial Sequence: Synthetic peptide
  REGION 1..9: note = XENP023768 vlCDR3
FQGSHVPNT

SEQ ID NO: 773 - protein, 251 aa, synthetic construct
  REGION 1..251: note = Description of Artificial Sequence: Synthetic polypeptide
  REGION 1..251: note = XENP023769 1C11_H3.22_L3_scFv
QIQLVQSGSELKKPGASVKVSCKASGYTFTHYGMNWVRQAPGEGLEWMGWINTYTGEPTYADGFTGRFVFSLDTSVSTAYLQISSLKAEDTAVYFCARDYYGSSPYWGQGTLVTVSSGKPGSGKPGSGKPGSGKPGSDVLMTQSPDSLAVSLGERATINCKSSQSIVHSNGNTYLEWYQQKPGQSPKLLIYKVSNRFSGVPDRFSGSGSGTDFTLTISSLQAEDVAVYYCFQGSHVPNTFGGGTKVEIKGS

SEQ ID NO: 774 - protein, 117 aa, synthetic construct
  REGION 1..117: note = Description of Artificial Sequence: Synthetic polypeptide
  REGION 1..117: note = VH of XENP023769
QIQLVQSGSELKKPGASVKVSCKASGYTFTHYGMNWVRQAPGEGLEWMGWINTYTGEPTYADGFTGRFVFSLDTSVSTAYLQISSLKAEDTAVYFCARDYYGSSPYWGQGTLVTVSS

SEQ ID NO: 775 - protein, 114 aa, synthetic construct; identical to SEQ ID NO: 649
  REGION 1..114: note = Description of Artificial Sequence: Synthetic polypeptide
  REGION 1..114: note = VL of XENP023769

SEQ ID NO: 776 - protein, 5 aa, synthetic construct
  REGION 1..5: note = Description of Artificial Sequence: Synthetic peptide
  REGION 1..5: note = XENP023769 vhCDR1
HYGMN

SEQ ID NO: 777 - protein, 17 aa, synthetic construct
  REGION 1..17: note = Description of Artificial Sequence: Synthetic peptide
  REGION 1..17: note = XENP023769 vhCDR2
WINTYTGEPTYADGFTG

SEQ ID NO: 778 - protein, 8 aa, synthetic construct
  REGION 1..8: note = Description of Artificial Sequence: Synthetic peptide
  REGION 1..8: note = XENP023769 vhCDR3
DYYGSSPY

SEQ ID NO: 779 - protein, 16 aa, synthetic construct
  REGION 1..16: note = Description of Artificial Sequence: Synthetic peptide
  REGION 1..16: note = XENP023769 vlCDR1
KSSQSIVHSNGNTYLE

SEQ ID NO: 780 - protein, 7 aa, synthetic construct
  REGION 1..7: note = Description of Artificial Sequence: Synthetic peptide
  REGION 1..7: note = XENP023769 vlCDR2
KVSNRFS

SEQ ID NO: 781 - protein, 9 aa, synthetic construct
  REGION 1..9: note = Description of Artificial Sequence: Synthetic peptide
  REGION 1..9: note = XENP023769 vlCDR3
FQGSHVPNT

SEQ ID NO: 782 - protein, 251 aa, synthetic construct
  REGION 1..251: note = Description of Artificial Sequence: Synthetic polypeptide
  REGION 1..251: note = XENP023770 1C11_H3.25_L3_scFv
QIQLVQSGSELKKPGASVKVSCKASGYTFTHYGMNWVRQAPGQGLEWMGWINTNTGEPTYADGFTGRFVFSLDTSVSTAYLQISSLKAEDTAVYFCARDYYGSSPYWGQGTLVTVSSGKPGSGKPGSGKPGSGKPGSDVLMTQSPDSLAVSLGERATINCKSSQSIVHSNGNTYLEWYQQKPGQSPKLLIYKVSNRFSGVPDRFSGSGSGTDFTLTISSLQAEDVAVYYCFQGSHVPNTFGGGTKVEIKGS

SEQ ID NO: 783 - protein, 117 aa, synthetic construct
  REGION 1..117: note = Description of Artificial Sequence: Synthetic polypeptide
  REGION 1..117: note = VH of XENP023770
QIQLVQSGSELKKPGASVKVSCKASGYTFTHYGMNWVRQAPGQGLEWMGWINTNTGEPTYADGFTGRFVFSLDTSVSTAYLQISSLKAEDTAVYFCARDYYGSSPYWGQGTLVTVSS

SEQ ID NO: 784 - protein, 114 aa, synthetic construct; identical to SEQ ID NO: 649
  REGION 1..114: note = Description of Artificial Sequence: Synthetic polypeptide
  REGION 1..114: note = VL of XENP023770

SEQ ID NO: 785 - protein, 5 aa, synthetic construct
  REGION 1..5: note = Description of Artificial Sequence: Synthetic peptide
  REGION 1..5: note = XENP023770 vhCDR1
HYGMN

SEQ ID NO: 786 - protein, 17 aa, synthetic construct
  REGION 1..17: note = Description of Artificial Sequence: Synthetic peptide
  REGION 1..17: note = XENP023770 vhCDR2
WINTNTGEPTYADGFTG

SEQ ID NO: 787 - protein, 8 aa, synthetic construct
  REGION 1..8: note = Description of Artificial Sequence: Synthetic peptide
  REGION 1..8: note = XENP023770 vhCDR3
DYYGSSPY

SEQ ID NO: 788 - protein, 16 aa, synthetic construct
  REGION 1..16: note = Description of Artificial Sequence: Synthetic peptide
  REGION 1..16: note = XENP023770 vlCDR1
KSSQSIVHSNGNTYLE

SEQ ID NO: 789 - protein, 7 aa, synthetic construct
  REGION 1..7: note = Description of Artificial Sequence: Synthetic peptide
  REGION 1..7: note = XENP023770 vlCDR2
KVSNRFS

SEQ ID NO: 790 - protein, 9 aa, synthetic construct
  REGION 1..9: note = Description of Artificial Sequence: Synthetic peptide
  REGION 1..9: note = XENP023770 vlCDR3
FQGSHVPNT

SEQ ID NO: 791 - protein, 251 aa, synthetic construct
  REGION 1..251: note = Description of Artificial Sequence: Synthetic polypeptide
  REGION 1..251: note = XENP023771 1C11_H3.26_L3_scFv
QIQLVQSGSELKKPGASVKVSCKASGYTFTHYGMNWVRQAPGQGLEWMGWINTYTGHPTYADGFTGRFVFSLDTSVSTAYLQISSLKAEDTAVYFCARDYYGSSPYWGQGTLVTVSSGKPGSGKPGSGKPGSGKPGSDVLMTQSPDSLAVSLGERATINCKSSQSIVHSNGNTYLEWYQQKPGQSPKLLIYKVSNRFSGVPDRFSGSGSGTDFTLTISSLQAEDVAVYYCFQGSHVPNTFGGGTKVEIKGS

SEQ ID NO: 792 - protein, 117 aa, synthetic construct
  REGION 1..117: note = Description of Artificial Sequence: Synthetic polypeptide
  REGION 1..117: note = VH of XENP023771
QIQLVQSGSELKKPGASVKVSCKASGYTFTHYGMNWVRQAPGQGLEWMGWINTYTGHPTYADGFTGRFVFSLDTSVSTAYLQISSLKAEDTAVYFCARDYYGSSPYWGQGTLVTVSS

SEQ ID NO: 793 - protein, 114 aa, synthetic construct; identical to SEQ ID NO: 649
  REGION 1..114: note = Description of Artificial Sequence: Synthetic polypeptide
  REGION 1..114: note = VL of XENP023771

SEQ ID NO: 794 - protein, 5 aa, synthetic construct
  REGION 1..5: note = Description of Artificial Sequence: Synthetic peptide
  REGION 1..5: note = XENP023771 vhCDR1
HYGMN

SEQ ID NO: 795 - protein, 17 aa, synthetic construct
  REGION 1..17: note = Description of Artificial Sequence: Synthetic peptide
  REGION 1..17: note = XENP023771 vhCDR2
WINTYTGHPTYADGFTG

SEQ ID NO: 796 - protein, 8 aa, synthetic construct
  REGION 1..8: note = Description of Artificial Sequence: Synthetic peptide
  REGION 1..8: note = XENP023771 vhCDR3
DYYGSSPY

SEQ ID NO: 797 - protein, 16 aa, synthetic construct
  REGION 1..16: note = Description of Artificial Sequence: Synthetic peptide
  REGION 1..16: note = XENP023771 vlCDR1
KSSQSIVHSNGNTYLE

SEQ ID NO: 798 - protein, 7 aa, synthetic construct
  REGION 1..7: note = Description of Artificial Sequence: Synthetic peptide
  REGION 1..7: note = XENP023771 vlCDR2
KVSNRFS

SEQ ID NO: 799 - protein, 9 aa, synthetic construct
  REGION 1..9: note = Description of Artificial Sequence: Synthetic peptide
  REGION 1..9: note = XENP023771 vlCDR3
FQGSHVPNT

SEQ ID NO: 800 - protein, 251 aa, synthetic construct
  REGION 1..251: note = Description of Artificial Sequence: Synthetic polypeptide
  REGION 1..251: note = XENP023772 1C11_H3.30_L3_scFv
QIQLVQSGSELKKPGASVKVSCKASGYTFTHYGMNWVRQAPGQGLEWMGWINTYTGEPEYADGFTGRFVFSLDTSVSTAYLQISSLKAEDTAVYFCARDYYGSSPYWGQGTLVTVSSGKPGSGKPGSGKPGSGKPGSDVLMTQSPDSLAVSLGERATINCKSSQSIVHSNGNTYLEWYQQKPGQSPKLLIYKVSNRFSGVPDRFSGSGSGTDFTLTISSLQAEDVAVYYCFQGSHVPNTFGGGTKVEIKGS

SEQ ID NO: 801 - protein, 117 aa, synthetic construct
  REGION 1..117: note = Description of Artificial Sequence: Synthetic polypeptide
  REGION 1..117: note = VH of XENP023772
QIQLVQSGSELKKPGASVKVSCKASGYTFTHYGMNWVRQAPGQGLEWMGWINTYTGEPEYADGFTGRFVFSLDTSVSTAYLQISSLKAEDTAVYFCARDYYGSSPYWGQGTLVTVSS

SEQ ID NO: 802 - protein, 114 aa, synthetic construct; identical to SEQ ID NO: 649
  REGION 1..114: note = Description of Artificial Sequence: Synthetic polypeptide
  REGION 1..114: note = VL of XENP023772

SEQ ID NO: 803 - protein, 5 aa, synthetic construct
  REGION 1..5: note = Description of Artificial Sequence: Synthetic peptide
  REGION 1..5: note = XENP023772 vhCDR1
HYGMN

SEQ ID NO: 804 - protein, 17 aa, synthetic construct
  REGION 1..17: note = Description of Artificial Sequence: Synthetic peptide
  REGION 1..17: note = XENP023772 vhCDR2
WINTYTGEPEYADGFTG

SEQ ID NO: 805 - protein, 8 aa, synthetic construct
  REGION 1..8: note = Description of Artificial Sequence: Synthetic peptide
  REGION 1..8: note = XENP023772 vhCDR3
DYYGSSPY

SEQ ID NO: 806 - protein, 16 aa, synthetic construct
  REGION 1..16: note = Description of Artificial Sequence: Synthetic peptide
  REGION 1..16: note = XENP023772 vlCDR1
KSSQSIVHSNGNTYLE

SEQ ID NO: 807 - protein, 7 aa, synthetic construct
  REGION 1..7: note = Description of Artificial Sequence: Synthetic peptide
  REGION 1..7: note = XENP023772 vlCDR2
KVSNRFS

SEQ ID NO: 808 - protein, 9 aa, synthetic construct
  REGION 1..9: note = Description of Artificial Sequence: Synthetic peptide
  REGION 1..9: note = XENP023772 vlCDR3
FQGSHVPNT

SEQ ID NO: 809 - protein, 251 aa, synthetic construct
  REGION 1..251: note = Description of Artificial Sequence: Synthetic polypeptide
  REGION 1..251: note = XENP023773 1C11_H3.32_L3_scFv
QIQLVQSGSELKKPGASVKVSCKASGYTFTHYGMNWVRQAPGQGLEWMGWINTYTGEPTYNDGFTGRFVFSLDTSVSTAYLQISSLKAEDTAVYFCARDYYGSSPYWGQGTLVTVSSGKPGSGKPGSGKPGSGKPGSDVLMTQSPDSLAVSLGERATINCKSSQSIVHSNGNTYLEWYQQKPGQSPKLLIYKVSNRFSGVPDRFSGSGSGTDFTLTISSLQAEDVAVYYCFQGSHVPNTFGGGTKVEIKGS

SEQ ID NO: 810 - protein, 117 aa, synthetic construct
  REGION 1..117: note = Description of Artificial Sequence: Synthetic polypeptide
  REGION 1..117: note = VH of XENP023773
QIQLVQSGSELKKPGASVKVSCKASGYTFTHYGMNWVRQAPGQGLEWMGWINTYTGEPTYNDGFTGRFVFSLDTSVSTAYLQISSLKAEDTAVYFCARDYYGSSPYWGQGTLVTVSS

SEQ ID NO: 811 - protein, 114 aa, synthetic construct; identical to SEQ ID NO: 649
  REGION 1..114: note = Description of Artificial Sequence: Synthetic polypeptide
  REGION 1..114: note = VL of XENP023773

SEQ ID NO: 812 - protein, 5 aa, synthetic construct
  REGION 1..5: note = Description of Artificial Sequence: Synthetic peptide
  REGION 1..5: note = XENP023773 vhCDR1
HYGMN

SEQ ID NO: 813 - protein, 17 aa, synthetic construct
  REGION 1..17: note = Description of Artificial Sequence: Synthetic peptide
  REGION 1..17: note = XENP023773 vhCDR2
WINTYTGEPTYNDGFTG

SEQ ID NO: 814 - protein, 8 aa, synthetic construct
  REGION 1..8: note = Description of Artificial Sequence: Synthetic peptide
  REGION 1..8: note = XENP023773 vhCDR3
DYYGSSPY

SEQ ID NO: 815 - protein, 16 aa, synthetic construct
  REGION 1..16: note = Description of Artificial Sequence: Synthetic peptide
  REGION 1..16: note = XENP023773 vlCDR1
KSSQSIVHSNGNTYLE

SEQ ID NO: 816 - protein, 7 aa, synthetic construct
  REGION 1..7: note = Description of Artificial Sequence: Synthetic peptide
  REGION 1..7: note = XENP023773 vlCDR2
KVSNRFS

SEQ ID NO: 817 - protein, 9 aa, synthetic construct
  REGION 1..9: note = Description of Artificial Sequence: Synthetic peptide
  REGION 1..9: note = XENP023773 vlCDR3
FQGSHVPNT

SEQ ID NO: 818 - protein, 251 aa, synthetic construct
  REGION 1..251: note = Description of Artificial Sequence: Synthetic polypeptide
  REGION 1..251: note = XENP023774 1C11_H3.33_L3_scFv
QIQLVQSGSELKKPGASVKVSCKASGYTFTHYGMNWVRQAPGQGLEWMGWINTYTGEPTYAQGFTGRFVFSLDTSVSTAYLQISSLKAEDTAVYFCARDYYGSSPYWGQGTLVTVSSGKPGSGKPGSGKPGSGKPGSDVLMTQSPDSLAVSLGERATINCKSSQSIVHSNGNTYLEWYQQKPGQSPKLLIYKVSNRFSGVPDRFSGSGSGTDFTLTISSLQAEDVAVYYCFQGSHVPNTFGGGTKVEIKGS

SEQ ID NO: 819 - protein, 117 aa, synthetic construct
  REGION 1..117: note = Description of Artificial Sequence: Synthetic polypeptide
  REGION 1..117: note = VH of XENP023774
QIQLVQSGSELKKPGASVKVSCKASGYTFTHYGMNWVRQAPGQGLEWMGWINTYTGEPTYAQGFTGRFVFSLDTSVSTAYLQISSLKAEDTAVYFCARDYYGSSPYWGQGTLVTVSS

SEQ ID NO: 820 - protein, 114 aa, synthetic construct; identical to SEQ ID NO: 649
  REGION 1..114: note = Description of Artificial Sequence: Synthetic polypeptide
  REGION 1..114: note = VL of XENP023774

SEQ ID NO: 821 - protein, 5 aa, synthetic construct
  REGION 1..5: note = Description of Artificial Sequence: Synthetic peptide
  REGION 1..5: note = XENP023774 vhCDR1
HYGMN

SEQ ID NO: 822 - protein, 17 aa, synthetic construct
  REGION 1..17: note = Description of Artificial Sequence: Synthetic peptide
  REGION 1..17: note = XENP023774 vhCDR2
WINTYTGEPTYAQGFTG

SEQ ID NO: 823 - protein, 8 aa, synthetic construct
  REGION 1..8: note = Description of Artificial Sequence: Synthetic peptide
  REGION 1..8: note = XENP023774 vhCDR3
DYYGSSPY

SEQ ID NO: 824 - protein, 16 aa, synthetic construct
  REGION 1..16: note = Description of Artificial Sequence: Synthetic peptide
  REGION 1..16: note = XENP023774 vlCDR1
KSSQSIVHSNGNTYLE

SEQ ID NO: 825 - protein, 7 aa, synthetic construct
  REGION 1..7: note = Description of Artificial Sequence: Synthetic peptide
  REGION 1..7: note = XENP023774 vlCDR2
KVSNRFS

SEQ ID NO: 826 - protein, 9 aa, synthetic construct
  REGION 1..9: note = Description of Artificial Sequence: Synthetic peptide
  REGION 1..9: note = XENP023774 vlCDR3
FQGSHVPNT

SEQ ID NO: 827 - protein, 251 aa, synthetic construct
  REGION 1..251: note = Description of Artificial Sequence: Synthetic polypeptide
  REGION 1..251: note = XENP023775 1C11_H3.34_L3_scFv
QIQLVQSGSELKKPGASVKVSCKASGYTFTHYGMNWVRQAPGQGLEWMGWINTYTGEPTYAEGFTGRFVFSLDTSVSTAYLQISSLKAEDTAVYFCARDYYGSSPYWGQGTLVTVSSGKPGSGKPGSGKPGSGKPGSDVLMTQSPDSLAVSLGERATINCKSSQSIVHSNGNTYLEWYQQKPGQSPKLLIYKVSNRFSGVPDRFSGSGSGTDFTLTISSLQAEDVAVYYCFQGSHVPNTFGGGTKVEIKGS

SEQ ID NO: 828 - protein, 117 aa, synthetic construct
  REGION 1..117: note = Description of Artificial Sequence: Synthetic polypeptide
  REGION 1..117: note = VH of XENP023775
QIQLVQSGSELKKPGASVKVSCKASGYTFTHYGMNWVRQAPGQGLEWMGWINTYTGEPTYAEGFTGRFVFSLDTSVSTAYLQISSLKAEDTAVYFCARDYYGSSPYWGQGTLVTVSS

SEQ ID NO: 829 - protein, 114 aa, synthetic construct; identical to SEQ ID NO: 649
  REGION 1..114: note = Description of Artificial Sequence: Synthetic polypeptide
  REGION 1..114: note = VL of XENP023775

SEQ ID NO: 830 - protein, 5 aa, synthetic construct
  REGION 1..5: note = Description of Artificial Sequence: Synthetic peptide
  REGION 1..5: note = XENP023775 vhCDR1
HYGMN

SEQ ID NO: 831 - protein, 17 aa, synthetic construct
  REGION 1..17: note = Description of Artificial Sequence: Synthetic peptide
  REGION 1..17: note = XENP023775 vhCDR2
WINTYTGEPTYAEGFTG

SEQ ID NO: 832 - protein, 8 aa, synthetic construct
  REGION 1..8: note = Description of Artificial Sequence: Synthetic peptide
  REGION 1..8: note = XENP023775 vhCDR3
DYYGSSPY

SEQ ID NO: 833 - protein, 16 aa, synthetic construct
  REGION 1..16: note = Description of Artificial Sequence: Synthetic peptide
  REGION 1..16: note = XENP023775 vlCDR1
KSSQSIVHSNGNTYLE

SEQ ID NO: 834 - protein, 7 aa, synthetic construct
  REGION 1..7: note = Description of Artificial Sequence: Synthetic peptide
  REGION 1..7: note = XENP023775 vlCDR2
KVSNRFS

SEQ ID NO: 835 - protein, 9 aa, synthetic construct
  REGION 1..9: note = Description of Artificial Sequence: Synthetic peptide
  REGION 1..9: note = XENP023775 vlCDR3
FQGSHVPNT

SEQ ID NO: 836 - protein, 251 aa, synthetic construct
  REGION 1..251: note = Description of Artificial Sequence: Synthetic polypeptide
  REGION 1..251: note = XENP023776 1C11_H3.35_L3_scFv
QIQLVQSGSELKKPGASVKVSCKASGYTFTHYGMNWVRQAPGQGLEWMGWINTYTGEPTYADKFTGRFVFSLDTSVSTAYLQISSLKAEDTAVYFCARDYYGSSPYWGQGTLVTVSSGKPGSGKPGSGKPGSGKPGSDVLMTQSPDSLAVSLGERATINCKSSQSIVHSNGNTYLEWYQQKPGQSPKLLIYKVSNRFSGVPDRFSGSGSGTDFTLTISSLQAEDVAVYYCFQGSHVPNTFGGGTKVEIKGS

SEQ ID NO: 837 - protein, 117 aa, synthetic construct
  REGION 1..117: note = Description of Artificial Sequence: Synthetic polypeptide
  REGION 1..117: note = VH of XENP023776
QIQLVQSGSELKKPGASVKVSCKASGYTFTHYGMNWVRQAPGQGLEWMGWINTYTGEPTYADKFTGRFVFSLDTSVSTAYLQISSLKAEDTAVYFCARDYYGSSPYWGQGTLVTVSS

SEQ ID NO: 838 - protein, 114 aa, synthetic construct; identical to SEQ ID NO: 649
  REGION 1..114: note = Description of Artificial Sequence: Synthetic polypeptide
  REGION 1..114: note = VL of XENP023776

SEQ ID NO: 839 - protein, 5 aa, synthetic construct
  REGION 1..5: note = Description of Artificial Sequence: Synthetic peptide
  REGION 1..5: note = XENP023776 vhCDR1
HYGMN

SEQ ID NO: 840 - protein, 17 aa, synthetic construct
  REGION 1..17: note = Description of Artificial Sequence: Synthetic peptide
  REGION 1..17: note = XENP023776 vhCDR2
WINTYTGEPTYADKFTG

SEQ ID NO: 841 - protein, 8 aa, synthetic construct
  REGION 1..8: note = Description of Artificial Sequence: Synthetic peptide
  REGION 1..8: note = XENP023776 vhCDR3
DYYGSSPY

SEQ ID NO: 842 - protein, 16 aa, synthetic construct
  REGION 1..16: note = Description of Artificial Sequence: Synthetic peptide
  REGION 1..16: note = XENP023776 vlCDR1
KSSQSIVHSNGNTYLE

SEQ ID NO: 843 - protein, 7 aa, synthetic construct
  REGION 1..7: note = Description of Artificial Sequence: Synthetic peptide
  REGION 1..7: note = XENP023776 vlCDR2
KVSNRFS

SEQ ID NO: 844 - protein, 9 aa, synthetic construct
  REGION 1..9: note = Description of Artificial Sequence: Synthetic peptide
  REGION 1..9: note = XENP023776 vlCDR3
FQGSHVPNT

SEQ ID NO: 845 - protein, 251 aa, synthetic construct
  REGION 1..251: note = Description of Artificial Sequence: Synthetic polypeptide
  REGION 1..251: note = XENP023777 1C11_H3.38_L3_scFv
QIQLVQSGSELKKPGASVKVSCKASGYTFTHYGMNWVRQAPGQGLEWMGWINTYTGEPTYADGITGRFVFSLDTSVSTAYLQISSLKAEDTAVYFCARDYYGSSPYWGQGTLVTVSSGKPGSGKPGSGKPGSGKPGSDVLMTQSPDSLAVSLGERATINCKSSQSIVHSNGNTYLEWYQQKPGQSPKLLIYKVSNRFSGVPDRFSGSGSGTDFTLTISSLQAEDVAVYYCFQGSHVPNTFGGGTKVEIKGS

SEQ ID NO: 846 - protein, 117 aa, synthetic construct
  REGION 1..117: note = Description of Artificial Sequence: Synthetic polypeptide
  REGION 1..117: note = VH of XENP023777
QIQLVQSGSELKKPGASVKVSCKASGYTFTHYGMNWVRQAPGQGLEWMGWINTYTGEPTYADGITGRFVFSLDTSVSTAYLQISSLKAEDTAVYFCARDYYGSSPYWGQGTLVTVSS

SEQ ID NO: 847 - protein, 114 aa, synthetic construct; identical to SEQ ID NO: 649
  REGION 1..114: note = Description of Artificial Sequence: Synthetic polypeptide
  REGION 1..114: note = VL of XENP023777

SEQ ID NO: 848 - protein, 5 aa, synthetic construct
  REGION 1..5: note = Description of Artificial Sequence: Synthetic peptide
  REGION 1..5: note = XENP023777 vhCDR1
HYGMN

SEQ ID NO: 849 - protein, 17 aa, synthetic construct
  REGION 1..17: note = Description of Artificial Sequence: Synthetic peptide
  REGION 1..17: note = XENP023777 vhCDR2
WINTYTGEPTYADGITG

SEQ ID NO: 850 - protein, 8 aa, synthetic construct
  REGION 1..8: note = Description of Artificial Sequence: Synthetic peptide
  REGION 1..8: note = XENP023777 vhCDR3
DYYGSSPY

SEQ ID NO: 851 - protein, 16 aa, synthetic construct
  REGION 1..16: note = Description of Artificial Sequence: Synthetic peptide
  REGION 1..16: note = XENP023777 vlCDR1
KSSQSIVHSNGNTYLE

SEQ ID NO: 852 - protein, 7 aa, synthetic construct
  REGION 1..7: note = Description of Artificial Sequence: Synthetic peptide
  REGION 1..7: note = XENP023777 vlCDR2
KVSNRFS

SEQ ID NO: 853 - protein, 9 aa, synthetic construct
  REGION 1..9: note = Description of Artificial Sequence: Synthetic peptide
  REGION 1..9: note = XENP023777 vlCDR3
FQGSHVPNT

SEQ ID NO: 854 - protein, 251 aa, synthetic construct
  REGION 1..251: note = Description of Artificial Sequence: Synthetic polypeptide
  REGION 1..251: note = XENP023778 1C11_H3.39_L3_scFv
QIQLVQSGSELKKPGASVKVSCKASGYTFTHYGMNWVRQAPGQGLEWMGWINTYTGEPTYADGLTGRFVFSLDTSVSTAYLQISSLKAEDTAVYFCARDYYGSSPYWGQGTLVTVSSGKPGSGKPGSGKPGSGKPGSDVLMTQSPDSLAVSLGERATINCKSSQSIVHSNGNTYLEWYQQKPGQSPKLLIYKVSNRFSGVPDRFSGSGSGTDFTLTISSLQAEDVAVYYCFQGSHVPNTFGGGTKVEIKGS

SEQ ID NO: 855 - protein, 117 aa, synthetic construct
  REGION 1..117: note = Description of Artificial Sequence: Synthetic polypeptide
  REGION 1..117: note = VH of XENP023778
QIQLVQSGSELKKPGASVKVSCKASGYTFTHYGMNWVRQAPGQGLEWMGWINTYTGEPTYADGLTGRFVFSLDTSVSTAYLQISSLKAEDTAVYFCARDYYGSSPYWGQGTLVTVSS

SEQ ID NO: 856 - protein, 114 aa, synthetic construct; identical to SEQ ID NO: 649
  REGION 1..114: note = Description of Artificial Sequence: Synthetic polypeptide
  REGION 1..114: note = VL of XENP023778

SEQ ID NO: 857 - protein, 5 aa, synthetic construct
  REGION 1..5: note = Description of Artificial Sequence: Synthetic peptide
  REGION 1..5: note = XENP023778 vhCDR1
HYGMN

SEQ ID NO: 858 - protein, 17 aa, synthetic construct
  REGION 1..17: note = Description of Artificial Sequence: Synthetic peptide
  REGION 1..17: note = XENP023778 vhCDR2
WINTYTGEPTYADGLTG

SEQ ID NO: 859 - protein, 8 aa, synthetic construct
  REGION 1..8: note = Description of Artificial Sequence: Synthetic peptide
  REGION 1..8: note = XENP023778 vhCDR3
DYYGSSPY

SEQ ID NO: 860 - protein, 16 aa, synthetic construct
  REGION 1..16: note = Description of Artificial Sequence: Synthetic peptide
  REGION 1..16: note = XENP023778 vlCDR1
KSSQSIVHSNGNTYLE

SEQ ID NO: 861 - protein, 7 aa, synthetic construct
  REGION 1..7: note = Description of Artificial Sequence: Synthetic peptide
  REGION 1..7: note = XENP023778 vlCDR2
KVSNRFS

SEQ ID NO: 862 - protein, 9 aa, synthetic construct
  REGION 1..9: note = Description of Artificial Sequence: Synthetic peptide
  REGION 1..9: note = XENP023778 vlCDR3
FQGSHVPNT

SEQ ID NO: 863 - protein, 251 aa, synthetic construct
  REGION 1..251: note = Description of Artificial Sequence: Synthetic polypeptide
  REGION 1..251: note = XENP023779 1C11_H3.41_L3_scFv
QIQLVQSGSELKKPGASVKVSCKASGYTFTHYGMNWVRQAPGQGLEWMGWINTYTGEPTYADGFKGRFVFSLDTSVSTAYLQISSLKAEDTAVYFCARDYYGSSPYWGQGTLVTVSSGKPGSGKPGSGKPGSGKPGSDVLMTQSPDSLAVSLGERATINCKSSQSIVHSNGNTYLEWYQQKPGQSPKLLIYKVSNRFSGVPDRFSGSGSGTDFTLTISSLQAEDVAVYYCFQGSHVPNTFGGGTKVEIKGS

SEQ ID NO: 864 - protein, 117 aa, synthetic construct
  REGION 1..117: note = Description of Artificial Sequence: Synthetic polypeptide
  REGION 1..117: note = VH of XENP023779
QIQLVQSGSELKKPGASVKVSCKASGYTFTHYGMNWVRQAPGQGLEWMGWINTYTGEPTYADGFKGRFVFSLDTSVSTAYLQISSLKAEDTAVYFCARDYYGSSPYWGQGTLVTVSS

SEQ ID NO: 865 - protein, 114 aa, synthetic construct; identical to SEQ ID NO: 649
  REGION 1..114: note = Description of Artificial Sequence: Synthetic polypeptide
  REGION 1..114: note = VL of XENP023779

SEQ ID NO: 866 - protein, 5 aa, synthetic construct
  REGION 1..5: note = Description of Artificial Sequence: Synthetic peptide
  REGION 1..5: note = XENP023779 vhCDR1
HYGMN

SEQ ID NO: 867 - protein, 17 aa, synthetic construct
  REGION 1..17: note = Description of Artificial Sequence: Synthetic peptide
  REGION 1..17: note = XENP023779 vhCDR2
WINTYTGEPTYADGFKG

SEQ ID NO: 868 - protein, 8 aa, synthetic construct
  REGION 1..8: note = Description of Artificial Sequence: Synthetic peptide
  REGION 1..8: note = XENP023779 vhCDR3
DYYGSSPY

SEQ ID NO: 869 - protein, 16 aa, synthetic construct
  REGION 1..16: note = Description of Artificial Sequence: Synthetic peptide
  REGION 1..16: note = XENP023779 vlCDR1
KSSQSIVHSNGNTYLE

SEQ ID NO: 870 - protein, 7 aa, synthetic construct
  REGION 1..7: note = Description of Artificial Sequence: Synthetic peptide
  REGION 1..7: note = XENP023779 vlCDR2
KVSNRFS

SEQ ID NO: 871 - protein, 9 aa, synthetic construct
  REGION 1..9: note = Description of Artificial Sequence: Synthetic peptide
  REGION 1..9: note = XENP023779 vlCDR3
FQGSHVPNT

SEQ ID NO: 872 - protein, 251 aa, synthetic construct
  REGION 1..251: note = Description of Artificial Sequence: Synthetic polypeptide
  REGION 1..251: note = XENP023780 1C11_H3.42_L3_scFv
QIQLVQSGSELKKPGASVKVSCKASGYTFTHYGMNWVRQAPGQGLEWMGWINTYTGEPTYADGFQGRFVFSLDTSVSTAYLQISSLKAEDTAVYFCARDYYGSSPYWGQGTLVTVSSGKPGSGKPGSGKPGSGKPGSDVLMTQSPDSLAVSLGERATINCKSSQSIVHSNGNTYLEWYQQKPGQSPKLLIYKVSNRFSGVPDRFSGSGSGTDFTLTISSLQAEDVAVYYCFQGSHVPNTFGGGTKVEIKGS

SEQ ID NO: 873 - protein, 117 aa, synthetic construct
  REGION 1..117: note = Description of Artificial Sequence: Synthetic polypeptide
  REGION 1..117: note = VH of XENP023780
QIQLVQSGSELKKPGASVKVSCKASGYTFTHYGMNWVRQAPGQGLEWMGWINTYTGEPTYADGFQGRFVFSLDTSVSTAYLQISSLKAEDTAVYFCARDYYGSSPYWGQGTLVTVSS

SEQ ID NO: 874 - protein, 114 aa, synthetic construct; identical to SEQ ID NO: 649
  REGION 1..114: note = Description of Artificial Sequence: Synthetic polypeptide
  REGION 1..114: note = VL of XENP023780

SEQ ID NO: 875 - protein, 5 aa, synthetic construct
  REGION 1..5: note = Description of Artificial Sequence: Synthetic peptide
  REGION 1..5: note = XENP023780 vhCDR1
HYGMN

SEQ ID NO: 876 - protein, 17 aa, synthetic construct
  REGION 1..17: note = Description of Artificial Sequence: Synthetic peptide
  REGION 1..17: note = XENP023780 vhCDR2
WINTYTGEPTYADGFQG

SEQ ID NO: 877 - protein, 8 aa, synthetic construct
  REGION 1..8: note = Description of Artificial Sequence: Synthetic peptide
  REGION 1..8: note = XENP023780 vhCDR3
DYYGSSPY

SEQ ID NO: 878 - protein, 16 aa, synthetic construct
  REGION 1..16: note = Description of Artificial Sequence: Synthetic peptide
  REGION 1..16: note = XENP023780 vlCDR1
KSSQSIVHSNGNTYLE

SEQ ID NO: 879 - protein, 7 aa, synthetic construct
  REGION 1..7: note = Description of Artificial Sequence: Synthetic peptide
  REGION 1..7: note = XENP023780 vlCDR2
KVSNRFS

SEQ ID NO: 880 - protein, 9 aa, synthetic construct
  REGION 1..9: note = Description of Artificial Sequence: Synthetic peptide
  REGION 1..9: note = XENP023780 vlCDR3
FQGSHVPNT

SEQ ID NO: 881 - protein, 251 aa, synthetic construct
  REGION 1..251: note = Description of Artificial Sequence: Synthetic polypeptide
  REGION 1..251: note = XENP023781 1C11_H3.43_L3_scFv
QIQLVQSGSELKKPGASVKVSCKASGYTFTHYGMNWVRQAPGQGLEWMGWINTYTGEPTYADGFTGRVVFSLDTSVSTAYLQISSLKAEDTAVYFCARDYYGSSPYWGQGTLVTVSSGKPGSGKPGSGKPGSGKPGSDVLMTQSPDSLAVSLGERATINCKSSQSIVHSNGNTYLEWYQQKPGQSPKLLIYKVSNRFSGVPDRFSGSGSGTDFTLTISSLQAEDVAVYYCFQGSHVPNTFGGGTKVEIKGS

SEQ ID NO: 882 - protein, 117 aa, synthetic construct
  REGION 1..117: note = Description of Artificial Sequence: Synthetic polypeptide
  REGION 1..117: note = VH of XENP023781
QIQLVQSGSELKKPGASVKVSCKASGYTFTHYGMNWVRQAPGQGLEWMGWINTYTGEPTYADGFTGRVVFSLDTSVSTAYLQISSLKAEDTAVYFCARDYYGSSPYWGQGTLVTVSS

SEQ ID NO: 883 - protein, 114 aa, synthetic construct; identical to SEQ ID NO: 649
  REGION 1..114: note = Description of Artificial Sequence: Synthetic polypeptide
  REGION 1..114: note = VL of XENP023781

SEQ ID NO: 884 - protein, 5 aa, synthetic construct
  REGION 1..5: note = Description of Artificial Sequence: Synthetic peptide
  REGION 1..5: note = XENP023781 vhCDR1
HYGMN

SEQ ID NO: 885 - protein, 17 aa, synthetic construct
  REGION 1..17: note = Description of Artificial Sequence: Synthetic peptide
  REGION 1..17: note = XENP023781 vhCDR2
WINTYTGEPTYADGFTG

SEQ ID NO: 886 - protein, 8 aa, synthetic construct
  REGION 1..8: note = Description of Artificial Sequence: Synthetic peptide
  REGION 1..8: note = XENP023781 vhCDR3
DYYGSSPY

SEQ ID NO: 887 - protein, 16 aa, synthetic construct
  REGION 1..16: note = Description of Artificial Sequence: Synthetic peptide
  REGION 1..16: note = XENP023781 vlCDR1
KSSQSIVHSNGNTYLE

SEQ ID NO: 888 - protein, 7 aa, synthetic construct
  REGION 1..7: note = Description of Artificial Sequence: Synthetic peptide
  REGION 1..7: note = XENP023781 vlCDR2
KVSNRFS

SEQ ID NO: 889 - protein, 9 aa, synthetic construct
  REGION 1..9: note = Description of Artificial Sequence: Synthetic peptide
  REGION 1..9: note = XENP023781 vlCDR3
FQGSHVPNT

SEQ ID NO: 890 - protein, 251 aa, synthetic construct
  REGION 1..251: note = Description of Artificial Sequence: Synthetic polypeptide
  REGION 1..251: note = XENP023782 1C11_H3.44_L3_scFv
QIQLVQSGSELKKPGASVKVSCKASGYTFTHYGMNWVRQAPGQGLEWMGWINTYTGEPTYADGFTGRFIFSLDTSVSTAYLQISSLKAEDTAVYFCARDYYGSSPYWGQGTLVTVSSGKPGSGKPGSGKPGSGKPGSDVLMTQSPDSLAVSLGERATINCKSSQSIVHSNGNTYLEWYQQKPGQSPKLLIYKVSNRFSGVPDRFSGSGSGTDFTLTISSLQAEDVAVYYCFQGSHVPNTFGGGTKVEIKGS

SEQ ID NO: 891 - protein, 117 aa, synthetic construct
  REGION 1..117: note = Description of Artificial Sequence: Synthetic polypeptide
  REGION 1..117: note = VH of XENP023782
QIQLVQSGSELKKPGASVKVSCKASGYTFTHYGMNWVRQAPGQGLEWMGWINTYTGEPTYADGFTGRFIFSLDTSVSTAYLQISSLKAEDTAVYFCARDYYGSSPYWGQGTLVTVSS

SEQ ID NO: 892 - protein, 114 aa, synthetic construct; identical to SEQ ID NO: 649
  REGION 1..114: note = Description of Artificial Sequence: Synthetic polypeptide
  REGION 1..114: note = VL of XENP023782

SEQ ID NO: 893 - protein, 5 aa, synthetic construct
  REGION 1..5: note = Description of Artificial Sequence: Synthetic peptide
  REGION 1..5: note = XENP023782 vhCDR1
HYGMN

SEQ ID NO: 894 - protein, 17 aa, synthetic construct
  REGION 1..17: note = Description of Artificial Sequence: Synthetic peptide
  REGION 1..17: note = XENP023782 vhCDR2
WINTYTGEPTYADGFTG

SEQ ID NO: 895 - protein, 8 aa, synthetic construct
  REGION 1..8: note = Description of Artificial Sequence: Synthetic peptide
  REGION 1..8: note = XENP023782 vhCDR3
DYYGSSPY

SEQ ID NO: 896 - protein, 16 aa, synthetic construct
  REGION 1..16: note = Description of Artificial Sequence: Synthetic peptide
  REGION 1..16: note = XENP023782 vlCDR1
KSSQSIVHSNGNTYLE

SEQ ID NO: 897 - protein, 7 aa, synthetic construct
  REGION 1..7: note = Description of Artificial Sequence: Synthetic peptide
  REGION 1..7: note = XENP023782 vlCDR2
KVSNRFS

SEQ ID NO: 898 - protein, 9 aa, synthetic construct
  REGION 1..9: note = Description of Artificial Sequence: Synthetic peptide
  REGION 1..9: note = XENP023782 vlCDR3
FQGSHVPNT

SEQ ID NO: 899 - protein, 251 aa, synthetic construct
  REGION 1..251: note = Description of Artificial Sequence: Synthetic polypeptide
  REGION 1..251: note = XENP023783 1C11_H3.45_L3_scFv
QIQLVQSGSELKKPGASVKVSCKASGYTFTHYGMNWVRQAPGQGLEWMGWINTYTGEPTYADGFTGRFSFSLDTSVSTAYLQISSLKAEDTAVYFCARDYYGSSPYWGQGTLVTVSSGKPGSGKPGSGKPGSGKPGSDVLMTQSPDSLAVSLGERATINCKSSQSIVHSNGNTYLEWYQQKPGQSPKLLIYKVSNRFSGVPDRFSGSGSGTDFTLTISSLQAEDVAVYYCFQGSHVPNTFGGGTKVEIKGS

SEQ ID NO: 900 - protein, 117 aa, synthetic construct
  REGION 1..117: note = Description of Artificial Sequence: Synthetic polypeptide
  REGION 1..117: note = VH of XENP023783
QIQLVQSGSELKKPGASVKVSCKASGYTFTHYGMNWVRQAPGQGLEWMGWINTYTGEPTYADGFTGRFSFSLDTSVSTAYLQISSLKAEDTAVYFCARDYYGSSPYWGQGTLVTVSS

SEQ ID NO: 901 - protein, 114 aa, synthetic construct; identical to SEQ ID NO: 649
  REGION 1..114: note = Description of Artificial Sequence: Synthetic polypeptide
  REGION 1..114: note = VL of XENP023783

SEQ ID NO: 902 - protein, 5 aa, synthetic construct
  REGION 1..5: note = Description of Artificial Sequence: Synthetic peptide
  REGION 1..5: note = XENP023783 vhCDR1
HYGMN

SEQ ID NO: 903 - protein, 17 aa, synthetic construct
  REGION 1..17: note = Description of Artificial Sequence: Synthetic peptide
  REGION 1..17: note = XENP023783 vhCDR2
WINTYTGEPTYADGFTG

SEQ ID NO: 904 - protein, 8 aa, synthetic construct
  REGION 1..8: note = Description of Artificial Sequence: Synthetic peptide
  REGION 1..8: note = XENP023783 vhCDR3
DYYGSSPY

SEQ ID NO: 905 - protein, 16 aa, synthetic construct
  REGION 1..16: note = Description of Artificial Sequence: Synthetic peptide
  REGION 1..16: note = XENP023783 vlCDR1
KSSQSIVHSNGNTYLE

SEQ ID NO: 906 - protein, 7 aa, synthetic construct
  REGION 1..7: note = Description of Artificial Sequence: Synthetic peptide
  REGION 1..7: note = XENP023783 vlCDR2
KVSNRFS

SEQ ID NO: 907 - protein, 9 aa, synthetic construct
  REGION 1..9: note = Description of Artificial Sequence: Synthetic peptide
  REGION 1..9: note = XENP023783 vlCDR3
FQGSHVPNT

SEQ ID NO: 908 - protein, 251 aa, synthetic construct
  REGION 1..251: note = Description of Artificial Sequence: Synthetic polypeptide
  REGION 1..251: note = XENP023784 1C11_H3.46_L3_scFv
QIQLVQSGSELKKPGASVKVSCKASGYTFTHYGMNWVRQAPGQGLEWMGWINTYTGEPTYADGFTGRFTFSLDTSVSTAYLQISSLKAEDTAVYFCARDYYGSSPYWGQGTLVTVSSGKPGSGKPGSGKPGSGKPGSDVLMTQSPDSLAVSLGERATINCKSSQSIVHSNGNTYLEWYQQKPGQSPKLLIYKVSNRFSGVPDRFSGSGSGTDFTLTISSLQAEDVAVYYCFQGSHVPNTFGGGTKVEIKGS

SEQ ID NO: 909 - protein, 117 aa, synthetic construct
  REGION 1..117: note = Description of Artificial Sequence: Synthetic polypeptide
  REGION 1..117: note = VH of XENP023784
QIQLVQSGSELKKPGASVKVSCKASGYTFTHYGMNWVRQAPGQGLEWMGWINTYTGEPTYADGFTGRFTFSLDTSVSTAYLQISSLKAEDTAVYFCARDYYGSSPYWGQGTLVTVSS

SEQ ID NO: 910 - protein, 114 aa, synthetic construct; identical to SEQ ID NO: 649
  REGION 1..114: note = Description of Artificial Sequence: Synthetic polypeptide
  REGION 1..114: note = VL of XENP023784

SEQ ID NO: 911 - protein, 5 aa, synthetic construct
  REGION 1..5: note = Description of Artificial Sequence: Synthetic peptide
  REGION 1..5: note = XENP023784 vhCDR1
HYGMN

SEQ ID NO: 912 - protein, 17 aa, synthetic construct
  REGION 1..17: note = Description of Artificial Sequence: Synthetic peptide
  REGION 1..17: note = XENP023784 vhCDR2
WINTYTGEPTYADGFTG

SEQ ID NO: 913 - protein, 8 aa, synthetic construct
  REGION 1..8: note = Description of Artificial Sequence: Synthetic peptide
  REGION 1..8: note = XENP023784 vhCDR3
DYYGSSPY

SEQ ID NO: 914 - protein, 16 aa, synthetic construct
  REGION 1..16: note = Description of Artificial Sequence: Synthetic peptide
  REGION 1..16: note = XENP023784 vlCDR1
KSSQSIVHSNGNTYLE

SEQ ID NO: 915 - protein, 7 aa, synthetic construct
  REGION 1..7: note = Description of Artificial Sequence: Synthetic peptide
  REGION 1..7: note = XENP023784 vlCDR2
KVSNRFS

SEQ ID NO: 916 - protein, 9 aa, synthetic construct
  REGION 1..9: note = Description of Artificial Sequence: Synthetic peptide
  REGION 1..9: note = XENP023784 vlCDR3
FQGSHVPNT

SEQ ID NO: 917 - protein, 251 aa, synthetic construct
  REGION 1..251: note = Description of Artificial Sequence: Synthetic polypeptide
  REGION 1..251: note = XENP023785 1C11_H3.49_L3_scFv
QIQLVQSGSELKKPGASVKVSCKASGYTFTHYGMNWVRQAPGQGLEWMGWINTYTGEPTYADGFTGRFVMSLDTSVSTAYLQISSLKAEDTAVYFCARDYYGSSPYWGQGTLVTVSSGKPGSGKPGSGKPGSGKPGSDVLMTQSPDSLAVSLGERATINCKSSQSIVHSNGNTYLEWYQQKPGQSPKLLIYKVSNRFSGVPDRFSGSGSGTDFTLTISSLQAEDVAVYYCFQGSHVPNTFGGGTKVEIKGS

SEQ ID NO: 918 - protein, 117 aa, synthetic construct
  REGION 1..117: note = Description of Artificial Sequence: Synthetic polypeptide
  REGION 1..117: note = VH of XENP023785
QIQLVQSGSELKKPGASVKVSCKASGYTFTHYGMNWVRQAPGQGLEWMGWINTYTGEPTYADGFTGRFVMSLDTSVSTAYLQISSLKAEDTAVYFCARDYYGSSPYWGQGTLVTVSS

SEQ ID NO: 919 - protein, 114 aa, synthetic construct; identical to SEQ ID NO: 649
  REGION 1..114: note = Description of Artificial Sequence: Synthetic polypeptide
  REGION 1..114: note = VL of XENP023785

SEQ ID NO: 920 - protein, 5 aa, synthetic construct
  REGION 1..5: note = Description of Artificial Sequence: Synthetic peptide
  REGION 1..5: note = XENP023785 vhCDR1
HYGMN

SEQ ID NO: 921 - protein, 17 aa, synthetic construct
  REGION 1..17: note = Description of Artificial Sequence: Synthetic peptide
  REGION 1..17: note = XENP023785 vhCDR2
WINTYTGEPTYADGFTG

SEQ ID NO: 922 - protein, 8 aa, synthetic construct
  REGION 1..8: note = Description of Artificial Sequence: Synthetic peptide
  REGION 1..8: note = XENP023785 vhCDR3
DYYGSSPY

SEQ ID NO: 923 - protein, 16 aa, synthetic construct
  REGION 1..16: note = Description of Artificial Sequence: Synthetic peptide
  REGION 1..16: note = XENP023785 vlCDR1
KSSQSIVHSNGNTYLE

SEQ ID NO: 924 - protein, 7 aa, synthetic construct
  REGION 1..7: note = Description of Artificial Sequence: Synthetic peptide
  REGION 1..7: note = XENP023785 vlCDR2
KVSNRFS

SEQ ID NO: 925 - protein, 9 aa, synthetic construct
  REGION 1..9: note = Description of Artificial Sequence: Synthetic peptide
  REGION 1..9: note = XENP023785 vlCDR3
FQGSHVPNT

SEQ ID NO: 926 - protein, 251 aa, synthetic construct
  REGION 1..251: note = Description of Artificial Sequence: Synthetic polypeptide
  REGION 1..251: note = XENP023786 1C11_H3.50_L3_scFv
QIQLVQSGSELKKPGASVKVSCKASGYTFTHYGMNWVRQAPGQGLEWMGWINTYTGEPTYADGFTGRFVFSADTSVSTAYLQISSLKAEDTAVYFCARDYYGSSPYWGQGTLVTVSSGKPGSGKPGSGKPGSGKPGSDVLMTQSPDSLAVSLGERATINCKSSQSIVHSNGNTYLEWYQQKPGQSPKLLIYKVSNRFSGVPDRFSGSGSGTDFTLTISSLQAEDVAVYYCFQGSHVPNTFGGGTKVEIKGS

SEQ ID NO: 927 - protein, 117 aa, synthetic construct
  REGION 1..117: note = Description of Artificial Sequence: Synthetic polypeptide
  REGION 1..117: note = VH of XENP023786
QIQLVQSGSELKKPGASVKVSCKASGYTFTHYGMNWVRQAPGQGLEWMGWINTYTGEPTYADGFTGRFVFSADTSVSTAYLQISSLKAEDTAVYFCARDYYGSSPYWGQGTLVTVSS

SEQ ID NO: 928 - protein, 114 aa, synthetic construct; identical to SEQ ID NO: 649
  REGION 1..114: note = Description of Artificial Sequence: Synthetic polypeptide
  REGION 1..114: note = VL of XENP023786

SEQ ID NO: 929 - protein, 5 aa, synthetic construct
  REGION 1..5: note = Description of Artificial Sequence: Synthetic peptide
  REGION 1..5: note = XENP023786 vhCDR1
HYGMN

SEQ ID NO: 930 - protein, 17 aa, synthetic construct
  REGION 1..17: note = Description of Artificial Sequence: Synthetic peptide
  REGION 1..17: note = XENP023786 vhCDR2
WINTYTGEPTYADGFTG

SEQ ID NO: 931 - protein, 8 aa, synthetic construct
  REGION 1..8: note = Description of Artificial Sequence: Synthetic peptide
  REGION 1..8: note = XENP023786 vhCDR3
DYYGSSPY

SEQ ID NO: 932 - protein, 16 aa, synthetic construct
  REGION 1..16: note = Description of Artificial Sequence: Synthetic peptide
  REGION 1..16: note = XENP023786 vlCDR1
KSSQSIVHSNGNTYLE

SEQ ID NO: 933 - protein, 7 aa, synthetic construct
  REGION 1..7: note = Description of Artificial Sequence: Synthetic peptide
  REGION 1..7: note = XENP023786 vlCDR2
KVSNRFS

SEQ ID NO: 934 - protein, 9 aa, synthetic construct
  REGION 1..9: note = Description of Artificial Sequence: Synthetic peptide
  REGION 1..9: note = XENP023786 vlCDR3
FQGSHVPNT

SEQ ID NO: 935 - protein, 251 aa, synthetic construct
  REGION 1..251: note = Description of Artificial Sequence: Synthetic polypeptide
  REGION 1..251: note = XENP023787 1C11_H3.51_L3_scFv
QIQLVQSGSELKKPGASVKVSCKASGYTFTHYGMNWVRQAPGQGLEWMGWINTYTGEPTYADGFTGRFVFSVDTSVSTAYLQISSLKAEDTAVYFCARDYYGSSPYWGQGTLVTVSSGKPGSGKPGSGKPGSGKPGSDVLMTQSPDSLAVSLGERATINCKSSQSIVHSNGNTYLEWYQQKPGQSPKLLIYKVSNRFSGVPDRFSGSGSGTDFTLTISSLQAEDVAVYYCFQGSHVPNTFGGGTKVEIKGS

SEQ ID NO: 936 - protein, 117 aa, synthetic construct
  REGION 1..117: note = Description of Artificial Sequence: Synthetic polypeptide
  REGION 1..117: note = VH of XENP023787
QIQLVQSGSELKKPGASVKVSCKASGYTFTHYGMNWVRQAPGQGLEWMGWINTYTGEPTYADGFTGRFVFSVDTSVSTAYLQISSLKAEDTAVYFCARDYYGSSPYWGQGTLVTVSS

SEQ ID NO: 937 - protein, 114 aa, synthetic construct; identical to SEQ ID NO: 649
  REGION 1..114: note = Description of Artificial Sequence: Synthetic polypeptide
  REGION 1..114: note = VL of XENP023787

SEQ ID NO: 938 - protein, 5 aa, synthetic construct
  REGION 1..5: note = Description of Artificial Sequence: Synthetic peptide
  REGION 1..5: note = XENP023787 vhCDR1
HYGMN

SEQ ID NO: 939 - protein, 17 aa, synthetic construct
  REGION 1..17: note = Description of Artificial Sequence: Synthetic peptide
  REGION 1..17: note = XENP023787 vhCDR2
WINTYTGEPTYADGFTG

SEQ ID NO: 940 - protein, 8 aa, synthetic construct
  REGION 1..8: note = Description of Artificial Sequence: Synthetic peptide
  REGION 1..8: note = XENP023787 vhCDR3
DYYGSSPY

SEQ ID NO: 941 - protein, 16 aa, synthetic construct
  REGION 1..16: note = Description of Artificial Sequence: Synthetic peptide
  REGION 1..16: note = XENP023787 vlCDR1
KSSQSIVHSNGNTYLE

SEQ ID NO: 942 - protein, 7 aa, synthetic construct
  REGION 1..7: note = Description of Artificial Sequence: Synthetic peptide
  REGION 1..7: note = XENP023787 vlCDR2
KVSNRFS

SEQ ID NO: 943 - protein, 9 aa, synthetic construct
  REGION 1..9: note = Description of Artificial Sequence: Synthetic peptide
  REGION 1..9: note = XENP023787 vlCDR3
FQGSHVPNT

SEQ ID NO: 944 - protein, 251 aa, synthetic construct
  REGION 1..251: note = Description of Artificial Sequence: Synthetic polypeptide
  REGION 1..251: note = XENP023788 1C11_H3.54_L3_scFv
QIQLVQSGSELKKPGASVKVSCKASGYTFTHYGMNWVRQAPGQGLEWMGWINTYTGEPTYADGFTGRVTMTADTSVSTAYLQISSLKAEDTAVYFCARDYYGSSPYWGQGTLVTVSSGKPGSGKPGSGKPGSGKPGSDVLMTQSPDSLAVSLGERATINCKSSQSIVHSNGNTYLEWYQQKPGQSPKLLIYKVSNRFSGVPDRFSGSGSGTDFTLTISSLQAEDVAVYYCFQGSHVPNTFGGGTKVEIKGS

SEQ ID NO: 945 - protein, 117 aa, synthetic construct
  REGION 1..117: note = Description of Artificial Sequence: Synthetic polypeptide
  REGION 1..117: note = VH of XENP023788
QIQLVQSGSELKKPGASVKVSCKASGYTFTHYGMNWVRQAPGQGLEWMGWINTYTGEPTYADGFTGRVTMTADTSVSTAYLQISSLKAEDTAVYFCARDYYGSSPYWGQGTLVTVSS

SEQ ID NO: 946 - protein, 114 aa, synthetic construct; identical to SEQ ID NO: 649
  REGION 1..114: note = Description of Artificial Sequence: Synthetic polypeptide
  REGION 1..114: note = VL of XENP023788

SEQ ID NO: 947 - protein, 5 aa, synthetic construct
  REGION 1..5: note = Description of Artificial Sequence: Synthetic peptide
  REGION 1..5: note = XENP023788 vhCDR1
HYGMN

SEQ ID NO: 948 - protein, 17 aa, synthetic construct
  REGION 1..17: note = Description of Artificial Sequence: Synthetic peptide
  REGION 1..17: note = XENP023788 vhCDR2
WINTYTGEPTYADGFTG

SEQ ID NO: 949 - protein, 8 aa, synthetic construct
  REGION 1..8: note = Description of Artificial Sequence: Synthetic peptide
  REGION 1..8: note = XENP023788 vhCDR3
DYYGSSPY

SEQ ID NO: 950 - protein, 16 aa, synthetic construct
  REGION 1..16: note = Description of Artificial Sequence: Synthetic peptide
  REGION 1..16: note = XENP023788 vlCDR1
KSSQSIVHSNGNTYLE

SEQ ID NO: 951 - protein, 7 aa, synthetic construct
  REGION 1..7: note = Description of Artificial Sequence: Synthetic peptide
  REGION 1..7: note = XENP023788 vlCDR2
KVSNRFS

SEQ ID NO: 952 - protein, 9 aa, synthetic construct
  REGION 1..9: note = Description of Artificial Sequence: Synthetic peptide
  REGION 1..9: note = XENP023788 vlCDR3
FQGSHVPNT

SEQ ID NO: 953 - protein, 251 aa, synthetic construct
  REGION 1..251: note = Description of Artificial Sequence: Synthetic polypeptide
  REGION 1..251: note = XENP023789 1C11_H3.55_L3_scFv
QIQLVQSGSELKKPGASVKVSCKASGYTFTHYGMNWVRQAPGQGLEWMGWINTYTGEPTYADGFTGRFVFSLDKSVSTAYLQISSLKAEDTAVYFCARDYYGSSPYWGQGTLVTVSSGKPGSGKPGSGKPGSGKPGSDVLMTQSPDSLAVSLGERATINCKSSQSIVHSNGNTYLEWYQQKPGQSPKLLIYKVSNRFSGVPDRFSGSGSGTDFTLTISSLQAEDVAVYYCFQGSHVPNTFGGGTKVEIKGS

SEQ ID NO: 954 - protein, 117 aa, synthetic construct
  REGION 1..117: note = Description of Artificial Sequence: Synthetic polypeptide
  REGION 1..117: note = VH of XENP023789
QIQLVQSGSELKKPGASVKVSCKASGYTFTHYGMNWVRQAPGQGLEWMGWINTYTGEPTYADGFTGRFVFSLDKSVSTAYLQISSLKAEDTAVYFCARDYYGSSPYWGQGTLVTVSS

SEQ ID NO: 955 - protein, 114 aa, synthetic construct; identical to SEQ ID NO: 649
  REGION 1..114: note = Description of Artificial Sequence: Synthetic polypeptide
  REGION 1..114: note = VL of XENP023789

SEQ ID NO: 956 - protein, 5 aa, synthetic construct
  REGION 1..5: note = Description of Artificial Sequence: Synthetic peptide
  REGION 1..5: note = XENP023789 vhCDR1
HYGMN

SEQ ID NO: 957 - protein, 17 aa, synthetic construct
  REGION 1..17: note = Description of Artificial Sequence: Synthetic peptide
  REGION 1..17: note = XENP023789 vhCDR2
WINTYTGEPTYADGFTG

SEQ ID NO: 958 - protein, 8 aa, synthetic construct
  REGION 1..8: note = Description of Artificial Sequence: Synthetic peptide
  REGION 1..8: note = XENP023789 vhCDR3
DYYGSSPY

SEQ ID NO: 959 - protein, 16 aa, synthetic construct
  REGION 1..16: note = Description of Artificial Sequence: Synthetic peptide
  REGION 1..16: note = XENP023789 vlCDR1
KSSQSIVHSNGNTYLE

SEQ ID NO: 960 - protein, 7 aa, synthetic construct
  REGION 1..7: note = Description of Artificial Sequence: Synthetic peptide
  REGION 1..7: note = XENP023789 vlCDR2
KVSNRFS

SEQ ID NO: 961 - protein, 9 aa, synthetic construct
  REGION 1..9: note = Description of Artificial Sequence: Synthetic peptide
  REGION 1..9: note = XENP023789 vlCDR3
FQGSHVPNT

SEQ ID NO: 962 - protein, 251 aa, synthetic construct
  REGION 1..251: note = Description of Artificial Sequence: Synthetic polypeptide
  REGION 1..251: note = XENP023790 1C11_H3.56_L3_scFv
QIQLVQSGSELKKPGASVKVSCKASGYTFTHYGMNWVRQAPGQGLEWMGWINTYTGEPTYADGFTGRFVFSLDTSASTAYLQISSLKAEDTAVYFCARDYYGSSPYWGQGTLVTVSSGKPGSGKPGSGKPGSGKPGSDVLMTQSPDSLAVSLGERATINCKSSQSIVHSNGNTYLEWYQQKPGQSPKLLIYKVSNRFSGVPDRFSGSGSGTDFTLTISSLQAEDVAVYYCFQGSHVPNTFGGGTKVEIKGS

SEQ ID NO: 963 - protein, 117 aa, synthetic construct
  REGION 1..117: note = Description of Artificial Sequence: Synthetic polypeptide
  REGION 1..117: note = VH of XENP023790
QIQLVQSGSELKKPGASVKVSCKASGYTFTHYGMNWVRQAPGQGLEWMGWINTYTGEPTYADGFTGRFVFSLDTSASTAYLQISSLKAEDTAVYFCARDYYGSSPYWGQGTLVTVSS

SEQ ID NO: 964 - protein, 114 aa, synthetic construct; identical to SEQ ID NO: 649
  REGION 1..114: note = Description of Artificial Sequence: Synthetic polypeptide
  REGION 1..114: note = VL of XENP023790

SEQ ID NO: 965 - protein, 5 aa, synthetic construct
  REGION 1..5: note = Description of Artificial Sequence: Synthetic peptide
  REGION 1..5: note = XENP023790 vhCDR1
HYGMN

SEQ ID NO: 966 - protein, 17 aa, synthetic construct
  REGION 1..17: note = Description of Artificial Sequence: Synthetic peptide
  REGION 1..17: note = XENP023790 vhCDR2
WINTYTGEPTYADGFTG

SEQ ID NO: 967 - protein, 8 aa, synthetic construct
  REGION 1..8: note = Description of Artificial Sequence: Synthetic peptide
  REGION 1..8: note = XENP023790 vhCDR3
DYYGSSPY

SEQ ID NO: 968 - protein, 16 aa, synthetic construct
  REGION 1..16: note = Description of Artificial Sequence: Synthetic peptide
  REGION 1..16: note = XENP023790 vlCDR1
KSSQSIVHSNGNTYLE

SEQ ID NO: 969 - protein, 7 aa, synthetic construct
  REGION 1..7: note = Description of Artificial Sequence: Synthetic peptide
  REGION 1..7: note = XENP023790 vlCDR2
KVSNRFS

SEQ ID NO: 970 - protein, 9 aa, synthetic construct
  REGION 1..9: note = Description of Artificial Sequence: Synthetic peptide
  REGION 1..9: note = XENP023790 vlCDR3
FQGSHVPNT

SEQ ID NO: 971 - protein, 251 aa, synthetic construct
  REGION 1..251: note = Description of Artificial Sequence: Synthetic polypeptide
  REGION 1..251: note = XENP023791 1C11_H3.57_L3_scFv
QIQLVQSGSELKKPGASVKVSCKASGYTFTHYGMNWVRQAPGQGLEWMGWINTYTGEPTYADGFTGRFVFSLDTSISTAYLQISSLKAEDTAVYFCARDYYGSSPYWGQGTLVTVSSGKPGSGKPGSGKPGSGKPGSDVLMTQSPDSLAVSLGERATINCKSSQSIVHSNGNTYLEWYQQKPGQSPKLLIYKVSNRFSGVPDRFSGSGSGTDFTLTISSLQAEDVAVYYCFQGSHVPNTFGGGTKVEIKGS

SEQ ID NO: 972 - protein, 117 aa, synthetic construct
  REGION 1..117: note = Description of Artificial Sequence: Synthetic polypeptide
  REGION 1..117: note = VH of XENP023791
QIQLVQSGSELKKPGASVKVSCKASGYTFTHYGMNWVRQAPGQGLEWMGWINTYTGEPTYADGFTGRFVFSLDTSISTAYLQISSLKAEDTAVYFCARDYYGSSPYWGQGTLVTVSS

SEQ ID NO: 973 - protein, 114 aa, synthetic construct; identical to SEQ ID NO: 649
  REGION 1..114: note = Description of Artificial Sequence: Synthetic polypeptide
  REGION 1..114: note = VL of XENP023791

SEQ ID NO: 974 - protein, 5 aa, synthetic construct
  REGION 1..5: note = Description of Artificial Sequence: Synthetic peptide
  REGION 1..5: note = XENP023791 vhCDR1
HYGMN

SEQ ID NO: 975 - protein, 17 aa, synthetic construct
  REGION 1..17: note = Description of Artificial Sequence: Synthetic peptide
  REGION 1..17: note = XENP023791 vhCDR2
WINTYTGEPTYADGFTG

SEQ ID NO: 976 - protein, 8 aa, synthetic construct
  REGION 1..8: note = Description of Artificial Sequence: Synthetic peptide
  REGION 1..8: note = XENP023791 vhCDR3
DYYGSSPY

SEQ ID NO: 977 - protein, 16 aa, synthetic construct
  REGION 1..16: note = Description of Artificial Sequence: Synthetic peptide
  REGION 1..16: note = XENP023791 vlCDR1
KSSQSIVHSNGNTYLE

SEQ ID NO: 978 - protein, 7 aa, synthetic construct
  REGION 1..7: note = Description of Artificial Sequence: Synthetic peptide
  REGION 1..7: note = XENP023791 vlCDR2
KVSNRFS

SEQ ID NO: 979 - protein, 9 aa, synthetic construct
  REGION 1..9: note = Description of Artificial Sequence: Synthetic peptide
  REGION 1..9: note = XENP023791 vlCDR3
FQGSHVPNT

SEQ ID NO: 980 - protein, 251 aa, synthetic construct
  REGION 1..251: note = Description of Artificial Sequence: Synthetic polypeptide
  REGION 1..251: note = XENP023792 1C11_H3.58_L3_scFv
QIQLVQSGSELKKPGASVKVSCKASGYTFTHYGMNWVRQAPGQGLEWMGWINTYTGEPTYADGFTGRFVFSLDTSKSTAYLQISSLKAEDTAVYFCARDYYGSSPYWGQGTLVTVSSGKPGSGKPGSGKPGSGKPGSDVLMTQSPDSLAVSLGERATINCKSSQSIVHSNGNTYLEWYQQKPGQSPKLLIYKVSNRFSGVPDRFSGSGSGTDFTLTISSLQAEDVAVYYCFQGSHVPNTFGGGTKVEIKGS

SEQ ID NO: 981 - protein, 117 aa, synthetic construct
  REGION 1..117: note = Description of Artificial Sequence: Synthetic polypeptide
  REGION 1..117: note = VH of XENP023792
QIQLVQSGSELKKPGASVKVSCKASGYTFTHYGMNWVRQAPGQGLEWMGWINTYTGEPTYADGFTGRFVFSLDTSKSTAYLQISSLKAEDTAVYFCARDYYGSSPYWGQGTLVTVSS

SEQ ID NO: 982 - protein, 114 aa, synthetic construct; identical to SEQ ID NO: 649
  REGION 1..114: note = Description of Artificial Sequence: Synthetic polypeptide
  REGION 1..114: note = VL of XENP023792

SEQ ID NO: 983 - protein, 5 aa, synthetic construct
  REGION 1..5: note = Description of Artificial Sequence: Synthetic peptide
  REGION 1..5: note = XENP023792 vhCDR1
HYGMN

SEQ ID NO: 984 - protein, 17 aa, synthetic construct
  REGION 1..17: note = Description of Artificial Sequence: Synthetic peptide
  REGION 1..17: note = XENP023792 vhCDR2
WINTYTGEPTYADGFTG

SEQ ID NO: 985 - protein, 8 aa, synthetic construct
  REGION 1..8: note = Description of Artificial Sequence: Synthetic peptide
  REGION 1..8: note = XENP023792 vhCDR3
DYYGSSPY

SEQ ID NO: 986 - protein, 16 aa, synthetic construct
  REGION 1..16: note = Description of Artificial Sequence: Synthetic peptide
  REGION 1..16: note = XENP023792 vlCDR1
KSSQSIVHSNGNTYLE

SEQ ID NO: 987 - protein, 7 aa, synthetic construct
  REGION 1..7: note = Description of Artificial Sequence: Synthetic peptide
  REGION 1..7: note = XENP023792 vlCDR2
KVSNRFS

SEQ ID NO: 988 - protein, 9 aa, synthetic construct
  REGION 1..9: note = Description of Artificial Sequence: Synthetic peptide
  REGION 1..9: note = XENP023792 vlCDR3
FQGSHVPNT

SEQ ID NO: 989 - protein, 251 aa, synthetic construct
  REGION 1..251: note = Description of Artificial Sequence: Synthetic polypeptide
  REGION 1..251: note = XENP023793 1C11_H3.59_L3_scFv
QIQLVQSGSELKKPGASVKVSCKASGYTFTHYGMNWVRQAPGQGLEWMGWINTYTGEPTYADGFTGRFVFSLDTSQSTAYLQISSLKAEDTAVYFCARDYYGSSPYWGQGTLVTVSSGKPGSGKPGSGKPGSGKPGSDVLMTQSPDSLAVSLGERATINCKSSQSIVHSNGNTYLEWYQQKPGQSPKLLIYKVSNRFSGVPDRFSGSGSGTDFTLTISSLQAEDVAVYYCFQGSHVPNTFGGGTKVEIKGS

SEQ ID NO: 990 - protein, 117 aa, synthetic construct
  REGION 1..117: note = Description of Artificial Sequence: Synthetic polypeptide
  REGION 1..117: note = VH of XENP023793
QIQLVQSGSELKKPGASVKVSCKASGYTFTHYGMNWVRQAPGQGLEWMGWINTYTGEPTYADGFTGRFVFSLDTSQSTAYLQISSLKAEDTAVYFCARDYYGSSPYWGQGTLVTVSS

SEQ ID NO: 991 - protein, 114 aa, synthetic construct; identical to SEQ ID NO: 649
  REGION 1..114: note = Description of Artificial Sequence: Synthetic polypeptide
  REGION 1..114: note = VL of XENP023793

SEQ ID NO: 992 - protein, 5 aa, synthetic construct
  REGION 1..5: note = Description of Artificial Sequence: Synthetic peptide
  REGION 1..5: note = XENP023793 vhCDR1
HYGMN

SEQ ID NO: 993 - protein, 17 aa, synthetic construct
  REGION 1..17: note = Description of Artificial Sequence: Synthetic peptide
  REGION 1..17: note = XENP023793 vhCDR2
WINTYTGEPTYADGFTG

SEQ ID NO: 994 - protein, 8 aa, synthetic construct
  REGION 1..8: note = Description of Artificial Sequence: Synthetic peptide
  REGION 1..8: note = XENP023793 vhCDR3
DYYGSSPY

SEQ ID NO: 995 - protein, 16 aa, synthetic construct
  REGION 1..16: note = Description of Artificial Sequence: Synthetic peptide
  REGION 1..16: note = XENP023793 vlCDR1
KSSQSIVHSNGNTYLE

SEQ ID NO: 996 - protein, 7 aa, synthetic construct
  REGION 1..7: note = Description of Artificial Sequence: Synthetic peptide
  REGION 1..7: note = XENP023793 vlCDR2
KVSNRFS

SEQ ID NO: 997 - protein, 9 aa, synthetic construct
  REGION 1..9: note = Description of Artificial Sequence: Synthetic peptide
  REGION 1..9: note = XENP023793 vlCDR3
FQGSHVPNT

SEQ ID NO: 998 - protein, 251 aa, synthetic construct
  REGION 1..251: note = Description of Artificial Sequence: Synthetic polypeptide
  REGION 1..251: note = XENP023794 1C11_H3.60_L3_scFv
QIQLVQSGSELKKPGASVKVSCKASGYTFTHYGMNWVRQAPGQGLEWMGWINTYTGEPTYADGFTGRFVFSLDTSTSTAYLQISSLKAEDTAVYFCARDYYGSSPYWGQGTLVTVSSGKPGSGKPGSGKPGSGKPGSDVLMTQSPDSLAVSLGERATINCKSSQSIVHSNGNTYLEWYQQKPGQSPKLLIYKVSNRFSGVPDRFSGSGSGTDFTLTISSLQAEDVAVYYCFQGSHVPNTFGGGTKVEIKGS

SEQ ID NO: 999 - protein, 117 aa, synthetic construct
  REGION 1..117: note = Description of Artificial Sequence: Synthetic polypeptide
  REGION 1..117: note = VH of XENP023794
QIQLVQSGSELKKPGASVKVSCKASGYTFTHYGMNWVRQAPGQGLEWMGWINTYTGEPTYADGFTGRFVFSLDTSTSTAYLQISSLKAEDTAVYFCARDYYGSSPYWGQGTLVTVSS

SEQ ID NO: 1000 - protein, 114 aa, synthetic construct; identical to SEQ ID NO: 649
  REGION 1..114: note = Description of Artificial Sequence: Synthetic polypeptide
  REGION 1..114: note = VL of XENP023794

SEQ ID NO: 1001 - protein, 5 aa, synthetic construct
  REGION 1..5: note = Description of Artificial Sequence: Synthetic peptide
  REGION 1..5: note = XENP023794 vhCDR1
HYGMN

SEQ ID NO: 1002 - protein, 17 aa, synthetic construct
  REGION 1..17: note = Description of Artificial Sequence: Synthetic peptide
  REGION 1..17: note = XENP023794 vhCDR2
WINTYTGEPTYADGFTG

SEQ ID NO: 1003 - protein, 8 aa, synthetic construct
  REGION 1..8: note = Description of Artificial Sequence: Synthetic peptide
  REGION 1..8: note = XENP023794 vhCDR3
DYYGSSPY

SEQ ID NO: 1004 - protein, 16 aa, synthetic construct
  REGION 1..16: note = Description of Artificial Sequence: Synthetic peptide
  REGION 1..16: note = XENP023794 vlCDR1
KSSQSIVHSNGNTYLE

SEQ ID NO: 1005 - protein, 7 aa, synthetic construct
  REGION 1..7: note = Description of Artificial Sequence: Synthetic peptide
  REGION 1..7: note = XENP023794 vlCDR2
KVSNRFS

SEQ ID NO: 1006 - protein, 9 aa, synthetic construct
  REGION 1..9: note = Description of Artificial Sequence: Synthetic peptide
  REGION 1..9: note = XENP023794 vlCDR3
FQGSHVPNT

SEQ ID NO: 1007 - protein, 251 aa, synthetic construct
  REGION 1..251: note = Description of Artificial Sequence: Synthetic polypeptide
  REGION 1..251: note = XENP023795 1C11_H3.61_L3_scFv
QIQLVQSGSELKKPGASVKVSCKASGYTFTHYGMNWVRQAPGQGLEWMGWINTYTGEPTYADGFTGRFVFSLDTSSSTAYLQISSLKAEDTAVYFCARDYYGSSPYWGQGTLVTVSSGKPGSGKPGSGKPGSGKPGSDVLMTQSPDSLAVSLGERATINCKSSQSIVHSNGNTYLEWYQQKPGQSPKLLIYKVSNRFSGVPDRFSGSGSGTDFTLTISSLQAEDVAVYYCFQGSHVPNTFGGGTKVEIKGS

SEQ ID NO: 1008 - protein, 117 aa, synthetic construct
  REGION 1..117: note = Description of Artificial Sequence: Synthetic polypeptide
  REGION 1..117: note = VH of XENP023795
QIQLVQSGSELKKPGASVKVSCKASGYTFTHYGMNWVRQAPGQGLEWMGWINTYTGEPTYADGFTGRFVFSLDTSSSTAYLQISSLKAEDTAVYFCARDYYGSSPYWGQGTLVTVSS

SEQ ID NO: 1009 - protein, 114 aa, synthetic construct; identical to SEQ ID NO: 649
  REGION 1..114: note = Description of Artificial Sequence: Synthetic polypeptide
  REGION 1..114: note = VL of XENP023795

SEQ ID NO: 1010 - protein, 5 aa, synthetic construct
  REGION 1..5: note = Description of Artificial Sequence: Synthetic peptide
  REGION 1..5: note = XENP023795 vhCDR1
HYGMN

SEQ ID NO: 1011 - protein, 17 aa, synthetic construct
  REGION 1..17: note = Description of Artificial Sequence: Synthetic peptide
  REGION 1..17: note = XENP023795 vhCDR2
WINTYTGEPTYADGFTG

SEQ ID NO: 1012 - protein, 8 aa, synthetic construct
  REGION 1..8: note = Description of Artificial Sequence: Synthetic peptide
  REGION 1..8: note = XENP023795 vhCDR3
DYYGSSPY

SEQ ID NO: 1013 - protein, 16 aa, synthetic construct
  REGION 1..16: note = Description of Artificial Sequence: Synthetic peptide
  REGION 1..16: note = XENP023795 vlCDR1
KSSQSIVHSNGNTYLE

SEQ ID NO: 1014 - protein, 7 aa, synthetic construct
  REGION 1..7: note = Description of Artificial Sequence: Synthetic peptide
  REGION 1..7: note = XENP023795 vlCDR2
KVSNRFS

SEQ ID NO: 1015 - protein, 9 aa, synthetic construct
  REGION 1..9: note = Description of Artificial Sequence: Synthetic peptide
  REGION 1..9: note = XENP023795 vlCDR3
FQGSHVPNT

SEQ ID NO: 1016 - protein, 251 aa, synthetic construct
  REGION 1..251: note = Description of Artificial Sequence: Synthetic polypeptide
  REGION 1..251: note = XENP023796 1C11_H3.62_L3_scFv
QIQLVQSGSELKKPGASVKVSCKASGYTFTHYGMNWVRQAPGQGLEWMGWINTYTGEPTYADGFTGRFVFSLDTSVSTIYLQISSLKAEDTAVYFCARDYYGSSPYWGQGTLVTVSSGKPGSGKPGSGKPGSGKPGSDVLMTQSPDSLAVSLGERATINCKSSQSIVHSNGNTYLEWYQQKPGQSPKLLIYKVSNRFSGVPDRFSGSGSGTDFTLTISSLQAEDVAVYYCFQGSHVPNTFGGGTKVEIKGS

SEQ ID NO: 1017 - protein, 117 aa, synthetic construct
  REGION 1..117: note = Description of Artificial Sequence: Synthetic polypeptide
  REGION 1..117: note = VH of XENP023796
QIQLVQSGSELKKPGASVKVSCKASGYTFTHYGMNWVRQAPGQGLEWMGWINTYTGEPTYADGFTGRFVFSLDTSVSTIYLQISSLKAEDTAVYFCARDYYGSSPYWGQGTLVTVSS

SEQ ID NO: 1018 - protein, 114 aa, synthetic construct; identical to SEQ ID NO: 649
  REGION 1..114: note = Description of Artificial Sequence: Synthetic polypeptide
  REGION 1..114: note = VL of XENP023796

SEQ ID NO: 1019 - protein, 5 aa, synthetic construct
  REGION 1..5: note = Description of Artificial Sequence: Synthetic peptide
  REGION 1..5: note = XENP023796 vhCDR1
HYGMN

SEQ ID NO: 1020 - protein, 17 aa, synthetic construct
  REGION 1..17: note = Description of Artificial Sequence: Synthetic peptide
  REGION 1..17: note = XENP023796 vhCDR2
WINTYTGEPTYADGFTG

SEQ ID NO: 1021 - protein, 8 aa, synthetic construct
  REGION 1..8: note = Description of Artificial Sequence: Synthetic peptide
  REGION 1..8: note = XENP023796 vhCDR3
DYYGSSPY

SEQ ID NO: 1022 - protein, 16 aa, synthetic construct
  REGION 1..16: note = Description of Artificial Sequence: Synthetic peptide
  REGION 1..16: note = XENP023796 vlCDR1
KSSQSIVHSNGNTYLE

SEQ ID NO: 1023 - protein, 7 aa, synthetic construct
  REGION 1..7: note = Description of Artificial Sequence: Synthetic peptide
  REGION 1..7: note = XENP023796 vlCDR2
KVSNRFS

SEQ ID NO: 1024 - protein, 9 aa, synthetic construct
  REGION 1..9: note = Description of Artificial Sequence: Synthetic peptide
  REGION 1..9: note = XENP023796 vlCDR3
FQGSHVPNT

SEQ ID NO: 1025 - protein, 251 aa, synthetic construct
  REGION 1..251: note = Description of Artificial Sequence: Synthetic polypeptide
  REGION 1..251: note = XENP023801 1C11_H3.64_L3_scFv
QIQLVQSGSELKKPGASVKVSCKASGYTFTHYGMNWVRQAPGQGLEWMGWINTYTGEPTYADGFTGRFVFSLDTSVSTVYLQISSLKAEDTAVYFCARDYYGSSPYWGQGTLVTVSSGKPGSGKPGSGKPGSGKPGSDVLMTQSPDSLAVSLGERATINCKSSQSIVHSNGNTYLEWYQQKPGQSPKLLIYKVSNRFSGVPDRFSGSGSGTDFTLTISSLQAEDVAVYYCFQGSHVPNTFGGGTKVEIKGS

SEQ ID NO: 1026 - protein, 117 aa, synthetic construct
  REGION 1..117: note = Description of Artificial Sequence: Synthetic polypeptide
  REGION 1..117: note = VH of XENP023801
QIQLVQSGSELKKPGASVKVSCKASGYTFTHYGMNWVRQAPGQGLEWMGWINTYTGEPTYADGFTGRFVFSLDTSVSTVYLQISSLKAEDTAVYFCARDYYGSSPYWGQGTLVTVSS

SEQ ID NO: 1027 - protein, 114 aa, synthetic construct; identical to SEQ ID NO: 649
  REGION 1..114: note = Description of Artificial Sequence: Synthetic polypeptide
  REGION 1..114: note = VL of XENP023801

SEQ ID NO: 1028 - protein, 5 aa, synthetic construct
  REGION 1..5: note = Description of Artificial Sequence: Synthetic peptide
  REGION 1..5: note = XENP023801 vhCDR1
HYGMN

SEQ ID NO: 1029 - protein, 17 aa, synthetic construct
  REGION 1..17: note = Description of Artificial Sequence: Synthetic peptide
  REGION 1..17: note = XENP023801 vhCDR2
WINTYTGEPTYADGFTG

SEQ ID NO: 1030 - protein, 8 aa, synthetic construct
  REGION 1..8: note = Description of Artificial Sequence: Synthetic peptide
  REGION 1..8: note = XENP023801 vhCDR3
DYYGSSPY

SEQ ID NO: 1031 - protein, 16 aa, synthetic construct
  REGION 1..16: note = Description of Artificial Sequence: Synthetic peptide
  REGION 1..16: note = XENP023801 vlCDR1
KSSQSIVHSNGNTYLE

SEQ ID NO: 1032 - protein, 7 aa, synthetic construct
  REGION 1..7: note = Description of Artificial Sequence: Synthetic peptide
  REGION 1..7: note = XENP023801 vlCDR2
KVSNRFS

SEQ ID NO: 1033 - protein, 9 aa, synthetic construct
  REGION 1..9: note = Description of Artificial Sequence: Synthetic peptide
  REGION 1..9: note = XENP023801 vlCDR3
FQGSHVPNT

SEQ ID NO: 1034 - protein, 251 aa, synthetic construct
  REGION 1..251: note = Description of Artificial Sequence: Synthetic polypeptide
  REGION 1..251: note = XENP023802 1C11_H3.65_L3_scFv
QIQLVQSGSELKKPGASVKVSCKASGYTFTHYGMNWVRQAPGQGLEWMGWINTYTGEPTYADGFTGRFVFSLDTSVSTAYMQISSLKAEDTAVYFCARDYYGSSPYWGQGTLVTVSSGKPGSGKPGSGKPGSGKPGSDVLMTQSPDSLAVSLGERATINCKSSQSIVHSNGNTYLEWYQQKPGQSPKLLIYKVSNRFSGVPDRFSGSGSGTDFTLTISSLQAEDVAVYYCFQGSHVPNTFGGGTKVEIKGS

SEQ ID NO: 1035 - protein, 117 aa, synthetic construct
  REGION 1..117: note = Description of Artificial Sequence: Synthetic polypeptide
  REGION 1..117: note = VH of XENP023802
QIQLVQSGSELKKPGASVKVSCKASGYTFTHYGMNWVRQAPGQGLEWMGWINTYTGEPTYADGFTGRFVFSLDTSVSTAYMQISSLKAEDTAVYFCARDYYGSSPYWGQGTLVTVSS

SEQ ID NO: 1036 - protein, 114 aa, synthetic construct; identical to SEQ ID NO: 649
  REGION 1..114: note = Description of Artificial Sequence: Synthetic polypeptide
  REGION 1..114: note = VL of XENP023802

SEQ ID NO: 1037 - protein, 5 aa, synthetic construct
  REGION 1..5: note = Description of Artificial Sequence: Synthetic peptide
  REGION 1..5: note = XENP023802 vhCDR1
HYGMN

SEQ ID NO: 1038 - protein, 17 aa, synthetic construct
  REGION 1..17: note = Description of Artificial Sequence: Synthetic peptide
  REGION 1..17: note = XENP023802 vhCDR2
WINTYTGEPTYADGFTG

SEQ ID NO: 1039 - protein, 8 aa, synthetic construct
  REGION 1..8: note = Description of Artificial Sequence: Synthetic peptide
  REGION 1..8: note = XENP023802 vhCDR3
DYYGSSPY

SEQ ID NO: 1040 - protein, 16 aa, synthetic construct
  REGION 1..16: note = Description of Artificial Sequence: Synthetic peptide
  REGION 1..16: note = XENP023802 vlCDR1
KSSQSIVHSNGNTYLE

SEQ ID NO: 1041 - protein, 7 aa, synthetic construct
  REGION 1..7: note = Description of Artificial Sequence: Synthetic peptide
  REGION 1..7: note = XENP023802 vlCDR2
KVSNRFS

SEQ ID NO: 1042 - protein, 9 aa, synthetic construct
  REGION 1..9: note = Description of Artificial Sequence: Synthetic peptide
  REGION 1..9: note = XENP023802 vlCDR3
FQGSHVPNT

SEQ ID NO: 1043 - protein, 251 aa, synthetic construct
  REGION 1..251: note = Description of Artificial Sequence: Synthetic polypeptide
  REGION 1..251: note = XENP023803 1C11_H3.66_L3_scFv
QIQLVQSGSELKKPGASVKVSCKASGYTFTHYGMNWVRQAPGQGLEWMGWINTYTGEPTYADGFTGRFVFSLDTSVSTAYMELSSLKAEDTAVYFCARDYYGSSPYWGQGTLVTVSSGKPGSGKPGSGKPGSGKPGSDVLMTQSPDSLAVSLGERATINCKSSQSIVHSNGNTYLEWYQQKPGQSPKLLIYKVSNRFSGVPDRFSGSGSGTDFTLTISSLQAEDVAVYYCFQGSHVPNTFGGGTKVEIKGS

SEQ ID NO: 1044 - protein, 117 aa, synthetic construct
  REGION 1..117: note = Description of Artificial Sequence: Synthetic polypeptide
  REGION 1..117: note = VH of XENP023803
QIQLVQSGSELKKPGASVKVSCKASGYTFTHYGMNWVRQAPGQGLEWMGWINTYTGEPTYADGFTGRFVFSLDTSVSTAYMELSSLKAEDTAVYFCARDYYGSSPYWGQGTLVTVSS

SEQ ID NO: 1045 - protein, 114 aa, synthetic construct; identical to SEQ ID NO: 649
  REGION 1..114: note = Description of Artificial Sequence: Synthetic polypeptide
  REGION 1..114: note = VL of XENP023803

SEQ ID NO: 1046 - protein, 5 aa, synthetic construct
  REGION 1..5: note = Description of Artificial Sequence: Synthetic peptide
  REGION 1..5: note = XENP023803 vhCDR1
HYGMN

SEQ ID NO: 1047 - protein, 17 aa, synthetic construct
  REGION 1..17: note = Description of Artificial Sequence: Synthetic peptide
  REGION 1..17: note = XENP023803 vhCDR2
WINTYTGEPTYADGFTG

SEQ ID NO: 1048 - protein, 8 aa, synthetic construct
  REGION 1..8: note = Description of Artificial Sequence: Synthetic peptide
  REGION 1..8: note = XENP023803 vhCDR3
DYYGSSPY

SEQ ID NO: 1049 - protein, 16 aa, synthetic construct
  REGION 1..16: note = Description of Artificial Sequence: Synthetic peptide
  REGION 1..16: note = XENP023803 vlCDR1
KSSQSIVHSNGNTYLE

SEQ ID NO: 1050 - protein, 7 aa, synthetic construct
  REGION 1..7: note = Description of Artificial Sequence: Synthetic peptide
  REGION 1..7: note = XENP023803 vlCDR2
KVSNRFS

SEQ ID NO: 1051 - protein, 9 aa, synthetic construct
  REGION 1..9: note = Description of Artificial Sequence: Synthetic peptide
  REGION 1..9: note = XENP023803 vlCDR3
FQGSHVPNT

SEQ ID NO: 1052 - protein, 251 aa, synthetic construct
  REGION 1..251: note = Description of Artificial Sequence: Synthetic polypeptide
  REGION 1..251: note = XENP023804 1C11_H3.67_L3_scFv
QIQLVQSGSELKKPGASVKVSCKASGYTFTHYGMNWVRQAPGQGLEWMGWINTYTGEPTYADGFTGRFVFSLDTSVSTAYLQLSSLKAEDTAVYFCARDYYGSSPYWGQGTLVTVSSGKPGSGKPGSGKPGSGKPGSDVLMTQSPDSLAVSLGERATINCKSSQSIVHSNGNTYLEWYQQKPGQSPKLLIYKVSNRFSGVPDRFSGSGSGTDFTLTISSLQAEDVAVYYCFQGSHVPNTFGGGTKVEIKGS

SEQ ID NO: 1053 - protein, 117 aa, synthetic construct
  REGION 1..117: note = Description of Artificial Sequence: Synthetic polypeptide
  REGION 1..117: note = VH of XENP023804
QIQLVQSGSELKKPGASVKVSCKASGYTFTHYGMNWVRQAPGQGLEWMGWINTYTGEPTYADGFTGRFVFSLDTSVSTAYLQLSSLKAEDTAVYFCARDYYGSSPYWGQGTLVTVSS

SEQ ID NO: 1054 - protein, 114 aa, synthetic construct; identical to SEQ ID NO: 649
  REGION 1..114: note = Description of Artificial Sequence: Synthetic polypeptide
  REGION 1..114: note = VL of XENP023804

SEQ ID NO: 1055 - protein, 5 aa, synthetic construct
  REGION 1..5: note = Description of Artificial Sequence: Synthetic peptide
  REGION 1..5: note = XENP023804 vhCDR1
HYGMN

SEQ ID NO: 1056 - protein, 17 aa, synthetic construct
  REGION 1..17: note = Description of Artificial Sequence: Synthetic peptide
  REGION 1..17: note = XENP023804 vhCDR2
WINTYTGEPTYADGFTG

SEQ ID NO: 1057 - protein, 8 aa, synthetic construct
  REGION 1..8: note = Description of Artificial Sequence: Synthetic peptide
  REGION 1..8: note = XENP023804 vhCDR3
DYYGSSPY

SEQ ID NO: 1058 - protein, 16 aa, synthetic construct
  REGION 1..16: note = Description of Artificial Sequence: Synthetic peptide
  REGION 1..16: note = XENP023804 vlCDR1
KSSQSIVHSNGNTYLE

SEQ ID NO: 1059 - protein, 7 aa, synthetic construct
  REGION 1..7: note = Description of Artificial Sequence: Synthetic peptide
  REGION 1..7: note = XENP023804 vlCDR2
KVSNRFS

SEQ ID NO: 1060 - protein, 9 aa, synthetic construct
  REGION 1..9: note = Description of Artificial Sequence: Synthetic peptide
  REGION 1..9: note = XENP023804 vlCDR3
FQGSHVPNT

SEQ ID NO: 1061 - protein, 251 aa, synthetic construct
  REGION 1..251: note = Description of Artificial Sequence: Synthetic polypeptide
  REGION 1..251: note = XENP023805 1C11_H3.68_L3_scFv
QIQLVQSGSELKKPGASVKVSCKASGYTFTHYGMNWVRQAPGQGLEWMGWINTYTGEPTYADGFTGRFVFSLDTSVSTAYLQMSSLKAEDTAVYFCARDYYGSSPYWGQGTLVTVSSGKPGSGKPGSGKPGSGKPGSDVLMTQSPDSLAVSLGERATINCKSSQSIVHSNGNTYLEWYQQKPGQSPKLLIYKVSNRFSGVPDRFSGSGSGTDFTLTISSLQAEDVAVYYCFQGSHVPNTFGGGTKVEIKGS

SEQ ID NO: 1062 - protein, 117 aa, synthetic construct
  REGION 1..117: note = Description of Artificial Sequence: Synthetic polypeptide
  REGION 1..117: note = VH of XENP023805
QIQLVQSGSELKKPGASVKVSCKASGYTFTHYGMNWVRQAPGQGLEWMGWINTYTGEPTYADGFTGRFVFSLDTSVSTAYLQMSSLKAEDTAVYFCARDYYGSSPYWGQGTLVTVSS

SEQ ID NO: 1063 - protein, 114 aa, synthetic construct; identical to SEQ ID NO: 649
  REGION 1..114: note = Description of Artificial Sequence: Synthetic polypeptide
  REGION 1..114: note = VL of XENP023805

SEQ ID NO: 1064 - protein, 5 aa, synthetic construct
  REGION 1..5: note = Description of Artificial Sequence: Synthetic peptide
  REGION 1..5: note = XENP023805 vhCDR1
HYGMN

SEQ ID NO: 1065 - protein, 17 aa, synthetic construct
  REGION 1..17: note = Description of Artificial Sequence: Synthetic peptide
  REGION 1..17: note = XENP023805 vhCDR2
WINTYTGEPTYADGFTG

SEQ ID NO: 1066 - protein, 8 aa, synthetic construct
  REGION 1..8: note = Description of Artificial Sequence: Synthetic peptide
  REGION 1..8: note = XENP023805 vhCDR3
DYYGSSPY

SEQ ID NO: 1067 - protein, 16 aa, synthetic construct
  REGION 1..16: note = Description of Artificial Sequence: Synthetic peptide
  REGION 1..16: note = XENP023805 vlCDR1
KSSQSIVHSNGNTYLE

SEQ ID NO: 1068 - protein, 7 aa, synthetic construct
  REGION 1..7: note = Description of Artificial Sequence: Synthetic peptide
  REGION 1..7: note = XENP023805 vlCDR2
KVSNRFS

SEQ ID NO: 1069 - protein, 9 aa, synthetic construct
  REGION 1..9: note = Description of Artificial Sequence: Synthetic peptide
  REGION 1..9: note = XENP023805 vlCDR3
FQGSHVPNT

SEQ ID NO: 1070 - protein, 251 aa, synthetic construct
  REGION 1..251: note = Description of Artificial Sequence: Synthetic polypeptide
  REGION 1..251: note = XENP023806 1C11_H3.69_L3_scFv
QIQLVQSGSELKKPGASVKVSCKASGYTFTHYGMNWVRQAPGQGLEWMGWINTYTGEPTYADGFTGRFVFSLDTSVSTAYLQWSSLKAEDTAVYFCARDYYGSSPYWGQGTLVTVSSGKPGSGKPGSGKPGSGKPGSDVLMTQSPDSLAVSLGERATINCKSSQSIVHSNGNTYLEWYQQKPGQSPKLLIYKVSNRFSGVPDRFSGSGSGTDFTLTISSLQAEDVAVYYCFQGSHVPNTFGGGTKVEIKGS

SEQ ID NO: 1071 - protein, 117 aa, synthetic construct
  REGION 1..117: note = Description of Artificial Sequence: Synthetic polypeptide
  REGION 1..117: note = VH of XENP023806
QIQLVQSGSELKKPGASVKVSCKASGYTFTHYGMNWVRQAPGQGLEWMGWINTYTGEPTYADGFTGRFVFSLDTSVSTAYLQWSSLKAEDTAVYFCARDYYGSSPYWGQGTLVTVSS

SEQ ID NO: 1072 - protein, 114 aa, synthetic construct; identical to SEQ ID NO: 649
  REGION 1..114: note = Description of Artificial Sequence: Synthetic polypeptide
  REGION 1..114: note = VL of XENP023806

SEQ ID NO: 1073 - protein, 5 aa, synthetic construct
  REGION 1..5: note = Description of Artificial Sequence: Synthetic peptide
  REGION 1..5: note = XENP023806 vhCDR1
HYGMN

SEQ ID NO: 1074 - protein, 17 aa, synthetic construct
  REGION 1..17: note = Description of Artificial Sequence: Synthetic peptide
  REGION 1..17: note = XENP023806 vhCDR2
WINTYTGEPTYADGFTG

SEQ ID NO: 1075 - protein, 8 aa, synthetic construct
  REGION 1..8: note = Description of Artificial Sequence: Synthetic peptide
  REGION 1..8: note = XENP023806 vhCDR3
DYYGSSPY

SEQ ID NO: 1076 - protein, 16 aa, synthetic construct
  REGION 1..16: note = Description of Artificial Sequence: Synthetic peptide
  REGION 1..16: note = XENP023806 vlCDR1
KSSQSIVHSNGNTYLE

SEQ ID NO: 1077 - protein, 7 aa, synthetic construct
  REGION 1..7: note = Description of Artificial Sequence: Synthetic peptide
  REGION 1..7: note = XENP023806 vlCDR2
KVSNRFS

SEQ ID NO: 1078 - protein, 9 aa, synthetic construct
  REGION 1..9: note = Description of Artificial Sequence: Synthetic peptide
  REGION 1..9: note = XENP023806 vlCDR3
FQGSHVPNT

SEQ ID NO: 1079 - protein, 251 aa, synthetic construct
  REGION 1..251: note = Description of Artificial Sequence: Synthetic polypeptide
  REGION 1..251: note = XENP023807 1C11_H3.70_L3_scFv
QIQLVQSGSELKKPGASVKVSCKASGYTFTHYGMNWVRQAPGQGLEWMGWINTYTGEPTYADGFTGRFVFSLDTSVSTAYLQVSSLKAEDTAVYFCARDYYGSSPYWGQGTLVTVSSGKPGSGKPGSGKPGSGKPGSDVLMTQSPDSLAVSLGERATINCKSSQSIVHSNGNTYLEWYQQKPGQSPKLLIYKVSNRFSGVPDRFSGSGSGTDFTLTISSLQAEDVAVYYCFQGSHVPNTFGGGTKVEIKGS

SEQ ID NO: 1080 - protein, 117 aa, synthetic construct
  REGION 1..117: note = Description of Artificial Sequence: Synthetic polypeptide
  REGION 1..117: note = VH of XENP023807
QIQLVQSGSELKKPGASVKVSCKASGYTFTHYGMNWVRQAPGQGLEWMGWINTYTGEPTYADGFTGRFVFSLDTSVSTAYLQVSSLKAEDTAVYFCARDYYGSSPYWGQGTLVTVSS

SEQ ID NO: 1081 - protein, 114 aa, synthetic construct; identical to SEQ ID NO: 649
  REGION 1..114: note = Description of Artificial Sequence: Synthetic polypeptide
  REGION 1..114: note = VL of XENP023807

SEQ ID NO: 1082 - protein, 5 aa, synthetic construct
  REGION 1..5: note = Description of Artificial Sequence: Synthetic peptide
  REGION 1..5: note = XENP023807 vhCDR1
HYGMN

SEQ ID NO: 1083 - protein, 17 aa, synthetic construct
  REGION 1..17: note = Description of Artificial Sequence: Synthetic peptide
  REGION 1..17: note = XENP023807 vhCDR2
WINTYTGEPTYADGFTG

SEQ ID NO: 1084 - protein, 8 aa, synthetic construct
  REGION 1..8: note = Description of Artificial Sequence: Synthetic peptide
  REGION 1..8: note = XENP023807 vhCDR3
DYYGSSPY

SEQ ID NO: 1085 - protein, 16 aa, synthetic construct
  REGION 1..16: note = Description of Artificial Sequence: Synthetic peptide
  REGION 1..16: note = XENP023807 vlCDR1
KSSQSIVHSNGNTYLE

SEQ ID NO: 1086 - protein, 7 aa, synthetic construct
  REGION 1..7: note = Description of Artificial Sequence: Synthetic peptide
  REGION 1..7: note = XENP023807 vlCDR2
KVSNRFS

SEQ ID NO: 1087 - protein, 9 aa, synthetic construct
  REGION 1..9: note = Description of Artificial Sequence: Synthetic peptide
  REGION 1..9: note = XENP023807 vlCDR3
FQGSHVPNT

SEQ ID NO: 1088 - protein, 251 aa, synthetic construct
  REGION 1..251: note = Description of Artificial Sequence: Synthetic polypeptide
  REGION 1..251: note = XENP023808 1C11_H3.71_L3_scFv
QIQLVQSGSELKKPGASVKVSCKASGYTFTHYGMNWVRQAPGQGLEWMGWINTYTGEPTYADGFTGRFVFSLDTSVSTAYLQISSLRAEDTAVYFCARDYYGSSPYWGQGTLVTVSSGKPGSGKPGSGKPGSGKPGSDVLMTQSPDSLAVSLGERATINCKSSQSIVHSNGNTYLEWYQQKPGQSPKLLIYKVSNRFSGVPDRFSGSGSGTDFTLTISSLQAEDVAVYYCFQGSHVPNTFGGGTKVEIKGS

SEQ ID NO: 1089 - protein, 117 aa, synthetic construct
  REGION 1..117: note = Description of Artificial Sequence: Synthetic polypeptide
  REGION 1..117: note = VH of XENP023808
QIQLVQSGSELKKPGASVKVSCKASGYTFTHYGMNWVRQAPGQGLEWMGWINTYTGEPTYADGFTGRFVFSLDTSVSTAYLQISSLRAEDTAVYFCARDYYGSSPYWGQGTLVTVSS

SEQ ID NO: 1090 - protein, 114 aa, synthetic construct; identical to SEQ ID NO: 649
  REGION 1..114: note = Description of Artificial Sequence: Synthetic polypeptide
  REGION 1..114: note = VL of XENP023808

SEQ ID NO: 1091 - protein, 5 aa, synthetic construct
  REGION 1..5: note = Description of Artificial Sequence: Synthetic peptide
  REGION 1..5: note = XENP023808 vhCDR1
HYGMN

SEQ ID NO: 1092 - protein, 17 aa, synthetic construct
  REGION 1..17: note = Description of Artificial Sequence: Synthetic peptide
  REGION 1..17: note = XENP023808 vhCDR2
WINTYTGEPTYADGFTG

SEQ ID NO: 1093 - protein, 8 aa, synthetic construct
  REGION 1..8: note = Description of Artificial Sequence: Synthetic peptide
  REGION 1..8: note = XENP023808 vhCDR3
DYYGSSPY

SEQ ID NO: 1094 - protein, 16 aa, synthetic construct
  REGION 1..16: note = Description of Artificial Sequence: Synthetic peptide
  REGION 1..16: note = XENP023808 vlCDR1
KSSQSIVHSNGNTYLE

SEQ ID NO: 1095 - protein, 7 aa, synthetic construct
  REGION 1..7: note = Description of Artificial Sequence: Synthetic peptide
  REGION 1..7: note = XENP023808 vlCDR2
KVSNRFS

SEQ ID NO: 1096 - protein, 9 aa, synthetic construct
  REGION 1..9: note = Description of Artificial Sequence: Synthetic peptide
  REGION 1..9: note = XENP023808 vlCDR3
FQGSHVPNT

SEQ ID NO: 1097 - protein, 251 aa, synthetic construct
  REGION 1..251: note = Description of Artificial Sequence: Synthetic polypeptide
  REGION 1..251: note = XENP023809 1C11_H3.72_L3_scFv
QIQLVQSGSELKKPGASVKVSCKASGYTFTHYGMNWVRQAPGQGLEWMGWINTYTGEPTYADGFTGRFVFSLDTSVSTAYLQISSLTAEDTAVYFCARDYYGSSPYWGQGTLVTVSSGKPGSGKPGSGKPGSGKPGSDVLMTQSPDSLAVSLGERATINCKSSQSIVHSNGNTYLEWYQQKPGQSPKLLIYKVSNRFSGVPDRFSGSGSGTDFTLTISSLQAEDVAVYYCFQGSHVPNTFGGGTKVEIKGS

SEQ ID NO: 1098 - protein, 117 aa, synthetic construct
  REGION 1..117: note = Description of Artificial Sequence: Synthetic polypeptide
  REGION 1..117: note = VH of XENP023809
QIQLVQSGSELKKPGASVKVSCKASGYTFTHYGMNWVRQAPGQGLEWMGWINTYTGEPTYADGFTGRFVFSLDTSVSTAYLQISSLTAEDTAVYFCARDYYGSSPYWGQGTLVTVSS

SEQ ID NO: 1099 - protein, 114 aa, synthetic construct; identical to SEQ ID NO: 649
  REGION 1..114: note = Description of Artificial Sequence: Synthetic polypeptide
  REGION 1..114: note = VL of XENP023809

SEQ ID NO: 1100 - protein, 5 aa, synthetic construct
  REGION 1..5: note = Description of Artificial Sequence: Synthetic peptide
  REGION 1..5: note = XENP023809 vhCDR1
HYGMN

SEQ ID NO: 1101 - protein, 17 aa, synthetic construct
  REGION 1..17: note = Description of Artificial Sequence: Synthetic peptide
  REGION 1..17: note = XENP023809 vhCDR2
WINTYTGEPTYADGFTG

SEQ ID NO: 1102 - protein, 8 aa, synthetic construct
  REGION 1..8: note = Description of Artificial Sequence: Synthetic peptide
  REGION 1..8: note = XENP023809 vhCDR3
DYYGSSPY

SEQ ID NO: 1103 - protein, 16 aa, synthetic construct
  REGION 1..16: note = Description of Artificial Sequence: Synthetic peptide
  REGION 1..16: note = XENP023809 vlCDR1
KSSQSIVHSNGNTYLE

SEQ ID NO: 1104 - protein, 7 aa, synthetic construct
  REGION 1..7: note = Description of Artificial Sequence: Synthetic peptide
  REGION 1..7: note = XENP023809 vlCDR2
KVSNRFS

SEQ ID NO: 1105 - protein, 9 aa, synthetic construct
  REGION 1..9: note = Description of Artificial Sequence: Synthetic peptide
  REGION 1..9: note = XENP023809 vlCDR3
FQGSHVPNT

SEQ ID NO: 1106 - protein, 251 aa, synthetic construct
  REGION 1..251: note = Description of Artificial Sequence: Synthetic polypeptide
  REGION 1..251: note = XENP023810 1C11_H3.73_L3_scFv
QIQLVQSGSELKKPGASVKVSCKASGYTFTHYGMNWVRQAPGQGLEWMGWINTYTGEPTYADGFTGRFVFSLDTSVSTAYLQISSLRSEDTAVYFCARDYYGSSPYWGQGTLVTVSSGKPGSGKPGSGKPGSGKPGSDVLMTQSPDSLAVSLGERATINCKSSQSIVHSNGNTYLEWYQQKPGQSPKLLIYKVSNRFSGVPDRFSGSGSGTDFTLTISSLQAEDVAVYYCFQGSHVPNTFGGGTKVEIKGS

SEQ ID NO: 1107 - protein, 117 aa, synthetic construct
  REGION 1..117: note = Description of Artificial Sequence: Synthetic polypeptide
  REGION 1..117: note = VH of XENP023810
QIQLVQSGSELKKPGASVKVSCKASGYTFTHYGMNWVRQAPGQGLEWMGWINTYTGEPTYADGFTGRFVFSLDTSVSTAYLQISSLRSEDTAVYFCARDYYGSSPYWGQGTLVTVSS

SEQ ID NO: 1108 - protein, 114 aa, synthetic construct; identical to SEQ ID NO: 649
  REGION 1..114: note = Description of Artificial Sequence: Synthetic polypeptide
  REGION 1..114: note = VL of XENP023810

SEQ ID NO: 1109 - protein, 5 aa, synthetic construct
  REGION 1..5: note = Description of Artificial Sequence: Synthetic peptide
  REGION 1..5: note = XENP023810 vhCDR1
HYGMN

SEQ ID NO: 1110 - protein, 17 aa, synthetic construct
  REGION 1..17: note = Description of Artificial Sequence: Synthetic peptide
  REGION 1..17: note = XENP023810 vhCDR2
WINTYTGEPTYADGFTG

SEQ ID NO: 1111 - protein, 8 aa, synthetic construct
  REGION 1..8: note = Description of Artificial Sequence: Synthetic peptide
  REGION 1..8: note = XENP023810 vhCDR3
DYYGSSPY

SEQ ID NO: 1112 - protein, 16 aa, synthetic construct
  REGION 1..16: note = Description of Artificial Sequence: Synthetic peptide
  REGION 1..16: note = XENP023810 vlCDR1
KSSQSIVHSNGNTYLE

SEQ ID NO: 1113 - protein, 7 aa, synthetic construct
  REGION 1..7: note = Description of Artificial Sequence: Synthetic peptide
  REGION 1..7: note = XENP023810 vlCDR2
KVSNRFS

SEQ ID NO: 1114 - protein, 9 aa, synthetic construct
  REGION 1..9: note = Description of Artificial Sequence: Synthetic peptide
  REGION 1..9: note = XENP023810 vlCDR3
FQGSHVPNT

SEQ ID NO: 1115 - protein, 251 aa, synthetic construct
  REGION 1..251: note = Description of Artificial Sequence: Synthetic polypeptide
  REGION 1..251: note = XENP023811 1C11_H3.74_L3_scFv
QIQLVQSGSELKKPGASVKVSCKASGYTFTHYGMNWVRQAPGQGLEWMGWINTYTGEPTYADGFTGRFVFSLDTSVSTAYLQISSLKAEDTAVYYCARDYYGSSPYWGQGTLVTVSSGKPGSGKPGSGKPGSGKPGSDVLMTQSPDSLAVSLGERATINCKSSQSIVHSNGNTYLEWYQQKPGQSPKLLIYKVSNRFSGVPDRFSGSGSGTDFTLTISSLQAEDVAVYYCFQGSHVPNTFGGGTKVEIKGS

SEQ ID NO: 1116 - protein, 117 aa, synthetic construct
  REGION 1..117: note = Description of Artificial Sequence: Synthetic polypeptide
  REGION 1..117: note = VH of XENP023811
QIQLVQSGSELKKPGASVKVSCKASGYTFTHYGMNWVRQAPGQGLEWMGWINTYTGEPTYADGFTGRFVFSLDTSVSTAYLQISSLKAEDTAVYYCARDYYGSSPYWGQGTLVTVSS

SEQ ID NO: 1117 - protein, 114 aa, synthetic construct; identical to SEQ ID NO: 649
  REGION 1..114: note = Description of Artificial Sequence: Synthetic polypeptide
  REGION 1..114: note = VL of XENP023811

SEQ ID NO: 1118 - protein, 5 aa, synthetic construct
  REGION 1..5: note = Description of Artificial Sequence: Synthetic peptide
  REGION 1..5: note = XENP023811 vhCDR1
HYGMN

SEQ ID NO: 1119 - protein, 17 aa, synthetic construct
  REGION 1..17: note = Description of Artificial Sequence: Synthetic peptide
  REGION 1..17: note = XENP023811 vhCDR2
WINTYTGEPTYADGFTG

SEQ ID NO: 1120 - protein, 8 aa, synthetic construct
  REGION 1..8: note = Description of Artificial Sequence: Synthetic peptide
  REGION 1..8: note = XENP023811 vhCDR3
DYYGSSPY

SEQ ID NO: 1121 - protein, 16 aa, synthetic construct
  REGION 1..16: note = Description of Artificial Sequence: Synthetic peptide
  REGION 1..16: note = XENP023811 vlCDR1
KSSQSIVHSNGNTYLE

SEQ ID NO: 1122 - protein, 7 aa, synthetic construct
  REGION 1..7: note = Description of Artificial Sequence: Synthetic peptide
  REGION 1..7: note = XENP023811 vlCDR2
KVSNRFS

SEQ ID NO: 1123 - protein, 9 aa, synthetic construct
  REGION 1..9: note = Description of Artificial Sequence: Synthetic peptide
  REGION 1..9: note = XENP023811 vlCDR3
FQGSHVPNT

SEQ ID NO: 1124 - protein, 251 aa, synthetic construct
  REGION 1..251: note = Description of Artificial Sequence: Synthetic polypeptide
  REGION 1..251: note = XENP023812 1C11_H3.75_L3_scFv
QIQLVQSGSELKKPGASVKVSCKASGYTFTHYGMNWVRQAPGQGLEWMGWINTYTGEPTYADGFTGRFVFSLDTSVSTAYLQISSLKAEDTAVYFCTRDYYGSSPYWGQGTLVTVSSGKPGSGKPGSGKPGSGKPGSDVLMTQSPDSLAVSLGERATINCKSSQSIVHSNGNTYLEWYQQKPGQSPKLLIYKVSNRFSGVPDRFSGSGSGTDFTLTISSLQAEDVAVYYCFQGSHVPNTFGGGTKVEIKGS

SEQ ID NO: 1125 - protein, 117 aa, synthetic construct
  REGION 1..117: note = Description of Artificial Sequence: Synthetic polypeptide
  REGION 1..117: note = VH of XENP023812
QIQLVQSGSELKKPGASVKVSCKASGYTFTHYGMNWVRQAPGQGLEWMGWINTYTGEPTYADGFTGRFVFSLDTSVSTAYLQISSLKAEDTAVYFCTRDYYGSSPYWGQGTLVTVSS

SEQ ID NO: 1126 - protein, 114 aa, synthetic construct; identical to SEQ ID NO: 649
  REGION 1..114: note = Description of Artificial Sequence: Synthetic polypeptide
  REGION 1..114: note = VL of XENP023812

SEQ ID NO: 1127 - protein, 5 aa, synthetic construct
  REGION 1..5: note = Description of Artificial Sequence: Synthetic peptide
  REGION 1..5: note = XENP023812 vhCDR1
HYGMN

SEQ ID NO: 1128 - protein, 17 aa, synthetic construct
  REGION 1..17: note = Description of Artificial Sequence: Synthetic peptide
  REGION 1..17: note = XENP023812 vhCDR2
WINTYTGEPTYADGFTG

SEQ ID NO: 1129 - protein, 8 aa, synthetic construct
  REGION 1..8: note = Description of Artificial Sequence: Synthetic peptide
  REGION 1..8: note = XENP023812 vhCDR3
DYYGSSPY

SEQ ID NO: 1130 - protein, 16 aa, synthetic construct
  REGION 1..16: note = Description of Artificial Sequence: Synthetic peptide
  REGION 1..16: note = XENP023812 vlCDR1
KSSQSIVHSNGNTYLE

SEQ ID NO: 1131 - protein, 7 aa, synthetic construct
  REGION 1..7: note = Description of Artificial Sequence: Synthetic peptide
  REGION 1..7: note = XENP023812 vlCDR2
KVSNRFS

SEQ ID NO: 1132 - protein, 9 aa, synthetic construct
  REGION 1..9: note = Description of Artificial Sequence: Synthetic peptide
  REGION 1..9: note = XENP023812 vlCDR3
FQGSHVPNT

SEQ ID NO: 1133 - protein, 251 aa, synthetic construct
  REGION 1..251: note = Description of Artificial Sequence: Synthetic polypeptide
  REGION 1..251: note = XENP024191 1C11_H3_L3.84_scFv
QIQLVQSGSELKKPGASVKVSCKASGYTFTHYGMNWVRQAPGQGLEWMGWINTYTGEPTYADGFTGRFVFSLDTSVSTAYLQISSLKAEDTAVYFCARDYYGSSPYWGQGTLVTVSSGKPGSGKPGSGKPGSGKPGSDVVMTQSPDSLAVSLGERATINCKASQSIVHSNGNTYLEWYQQKPGQPPKLLIYKVSNRFSGVPDRFSGSGSGTDFTLTISSLQAEDVAVYYCFQGSHVPNTFGGGTKVEIKGS

SEQ ID NO: 1134 - protein, 117 aa, synthetic construct; identical to SEQ ID NO: 32
  REGION 1..117: note = Description of Artificial Sequence: Synthetic polypeptide
  REGION 1..117: note = VH of XENP024191

SEQ ID NO: 1135 - protein, 114 aa, synthetic construct
  REGION 1..114: note = Description of Artificial Sequence: Synthetic polypeptide
  REGION 1..114: note = VL of XENP024191
DVVMTQSPDSLAVSLGERATINCKASQSIVHSNGNTYLEWYQQKPGQPPKLLIYKVSNRFSGVPDRFSGSGSGTDFTLTISSLQAEDVAVYYCFQGSHVPNTFGGGTKVEIKGS

SEQ ID NO: 1136 - protein, 5 aa, synthetic construct
  REGION 1..5: note = Description of Artificial Sequence: Synthetic peptide
  REGION 1..5: note = XENP024191 vhCDR1
HYGMN

SEQ ID NO: 1137 - protein, 17 aa, synthetic construct
  REGION 1..17: note = Description of Artificial Sequence: Synthetic peptide
  REGION 1..17: note = XENP024191 vhCDR2
WINTYTGEPTYADGFTG

SEQ ID NO: 1138 - protein, 8 aa, synthetic construct
  REGION 1..8: note = Description of Artificial Sequence: Synthetic peptide
  REGION 1..8: note = XENP024191 vhCDR3
DYYGSSPY

SEQ ID NO: 1139 - protein, 16 aa, synthetic construct
  REGION 1..16: note = Description of Artificial Sequence: Synthetic peptide
  REGION 1..16: note = XENP024191 vlCDR1
KASQSIVHSNGNTYLE

SEQ ID NO: 1140 - protein, 7 aa, synthetic construct
  REGION 1..7: note = Description of Artificial Sequence: Synthetic peptide
  REGION 1..7: note = XENP024191 vlCDR2
KVSNRFS

SEQ ID NO: 1141 - protein, 9 aa, synthetic construct
  REGION 1..9: note = Description of Artificial Sequence: Synthetic peptide
  REGION 1..9: note = XENP024191 vlCDR3
FQGSHVPNT

SEQ ID NO: 1142 - protein, 251 aa, synthetic construct
  REGION 1..251: note = Description of Artificial Sequence: Synthetic polypeptide
  REGION 1..251: note = XENP024192 1C11_H3_L3.102_scFv
QIQLVQSGSELKKPGASVKVSCKASGYTFTHYGMNWVRQAPGQGLEWMGWINTYTGEPTYADGFTGRFVFSLDTSVSTAYLQISSLKAEDTAVYFCARDYYGSSPYWGQGTLVTVSSGKPGSGKPGSGKPGSGKPGSDVLMTQSPDSLAVSVGERATINCKSSQSIVHSNGNTYLEWYQQKPGQSPKLLIYKVSNRFSGVPDRFSGSGSGTDFTLTISSLQAEDVAVYYCFQGSHVPNTFGGGTKVEIKGS

SEQ ID NO: 1143 - protein, 117 aa, synthetic construct; identical to SEQ ID NO: 32
  REGION 1..117: note = Description of Artificial Sequence: Synthetic polypeptide
  REGION 1..117: note = VH of XENP024192

SEQ ID NO: 1144 - protein, 114 aa, synthetic construct
  REGION 1..114: note = Description of Artificial Sequence: Synthetic polypeptide
  REGION 1..114: note = VL of XENP024192
DVLMTQSPDSLAVSVGERATINCKSSQSIVHSNGNTYLEWYQQKPGQSPKLLIYKVSNRFSGVPDRFSGSGSGTDFTLTISSLQAEDVAVYYCFQGSHVPNTFGGGTKVEIKGS

SEQ ID NO: 1145 - protein, 5 aa, synthetic construct
  REGION 1..5: note = Description of Artificial Sequence: Synthetic peptide
  REGION 1..5: note = XENP024192 vhCDR1
HYGMN

SEQ ID NO: 1146 - protein, 17 aa, synthetic construct
  REGION 1..17: note = Description of Artificial Sequence: Synthetic peptide
  REGION 1..17: note = XENP024192 vhCDR2
WINTYTGEPTYADGFTG

SEQ ID NO: 1147 - protein, 8 aa, synthetic construct
  REGION 1..8: note = Description of Artificial Sequence: Synthetic peptide
  REGION 1..8: note = XENP024192 vhCDR3
DYYGSSPY

SEQ ID NO: 1148 - protein, 16 aa, synthetic construct
  REGION 1..16: note = Description of Artificial Sequence: Synthetic peptide
  REGION 1..16: note = XENP024192 vlCDR1
KSSQSIVHSNGNTYLE

SEQ ID NO: 1149 - protein, 7 aa, synthetic construct
  REGION 1..7: note = Description of Artificial Sequence: Synthetic peptide
  REGION 1..7: note = XENP024192 vlCDR2
KVSNRFS

SEQ ID NO: 1150 - protein, 9 aa, synthetic construct
  REGION 1..9: note = Description of Artificial Sequence: Synthetic peptide
  REGION 1..9: note = XENP024192 vlCDR3
FQGSHVPNT

SEQ ID NO: 1151 - protein, 251 aa, synthetic construct
  REGION 1..251: note = Description of Artificial Sequence: Synthetic polypeptide
  REGION 1..251: note = XENP024193 1C11_H3_L3.103_scFv
QIQLVQSGSELKKPGASVKVSCKASGYTFTHYGMNWVRQAPGQGLEWMGWINTYTGEPTYADGFTGRFVFSLDTSVSTAYLQISSLKAEDTAVYFCARDYYGSSPYWGQGTLVTVSSGKPGSGKPGSGKPGSGKPGSDVLMTQSPDSLAVSPGERATINCKSSQSIVHSNGNTYLEWYQQKPGQSPKLLIYKVSNRFSGVPDRFSGSGSGTDFTLTISSLQAEDVAVYYCFQGSHVPNTFGGGTKVEIKGS

SEQ ID NO: 1152 - protein, 117 aa, synthetic construct; identical to SEQ ID NO: 32
  REGION 1..117: note = Description of Artificial Sequence: Synthetic polypeptide
  REGION 1..117: note = VH of XENP024193

SEQ ID NO: 1153 - protein, 114 aa, synthetic construct
  REGION 1..114: note = Description of Artificial Sequence: Synthetic polypeptide
  REGION 1..114: note = VL of XENP024193
DVLMTQSPDSLAVSPGERATINCKSSQSIVHSNGNTYLEWYQQKPGQSPKLLIYKVSNRFSGVPDRFSGSGSGTDFTLTISSLQAEDVAVYYCFQGSHVPNTFGGGTKVEIKGS

SEQ ID NO: 1154 - protein, 5 aa, synthetic construct
  REGION 1..5: note = Description of Artificial Sequence: Synthetic peptide
  REGION 1..5: note = XENP024193 vhCDR1
HYGMN

SEQ ID NO: 1155 - protein, 17 aa, synthetic construct
  REGION 1..17: note = Description of Artificial Sequence: Synthetic peptide
  REGION 1..17: note = XENP024193 vhCDR2
WINTYTGEPTYADGFTG

SEQ ID NO: 1156 - protein, 8 aa, synthetic construct
  REGION 1..8: note = Description of Artificial Sequence: Synthetic peptide
  REGION 1..8: note = XENP024193 vhCDR3
DYYGSSPY

SEQ ID NO: 1157 - protein, 16 aa, synthetic construct
  REGION 1..16: note = Description of Artificial Sequence: Synthetic peptide
  REGION 1..16: note = XENP024193 vlCDR1
KSSQSIVHSNGNTYLE

SEQ ID NO: 1158 - protein, 7 aa, synthetic construct
  REGION 1..7: note = Description of Artificial Sequence: Synthetic peptide
  REGION 1..7: note = XENP024193 vlCDR2
KVSNRFS

SEQ ID NO: 1159 - protein, 9 aa, synthetic construct
  REGION 1..9: note = Description of Artificial Sequence: Synthetic peptide
  REGION 1..9: note = XENP024193 vlCDR3
FQGSHVPNT

SEQ ID NO: 1160 - protein, 251 aa, synthetic construct; identical to SEQ ID NO: 233
  REGION 1..251: note = Description of Artificial Sequence: Synthetic polypeptide
  REGION 1..251: note = XENP024194 1C11_H3_L3.104_scFv

SEQ ID NO: 1161 - protein, 117 aa, synthetic construct; identical to SEQ ID NO: 32
  REGION 1..117: note = Description of Artificial Sequence: Synthetic polypeptide
  REGION 1..117: note = VH of XENP024194

SEQ ID NO: 1162 - protein, 114 aa, synthetic construct; identical to SEQ ID NO: 235
  REGION 1..114: note = Description of Artificial Sequence: Synthetic polypeptide
  REGION 1..114: note = VL of XENP024194

SEQ ID NO: 1163 - protein, 5 aa, synthetic construct
  REGION 1..5: note = Description of Artificial Sequence: Synthetic peptide
  REGION 1..5: note = XENP024194 vhCDR1
HYGMN

SEQ ID NO: 1164 - protein, 17 aa, synthetic construct
  REGION 1..17: note = Description of Artificial Sequence: Synthetic peptide
  REGION 1..17: note = XENP024194 vhCDR2
WINTYTGEPTYADGFTG

SEQ ID NO: 1165 - protein, 8 aa, synthetic construct
  REGION 1..8: note = Description of Artificial Sequence: Synthetic peptide
  REGION 1..8: note = XENP024194 vhCDR3
DYYGSSPY

SEQ ID NO: 1166 - protein, 16 aa, synthetic construct
  REGION 1..16: note = Description of Artificial Sequence: Synthetic peptide
  REGION 1..16: note = XENP024194 vlCDR1
KSSQSIVHSNGNTYLE

SEQ ID NO: 1167 - protein, 7 aa, synthetic construct
  REGION 1..7: note = Description of Artificial Sequence: Synthetic peptide
  REGION 1..7: note = XENP024194 vlCDR2
KVSNRFS

SEQ ID NO: 1168 - protein, 9 aa, synthetic construct
  REGION 1..9: note = Description of Artificial Sequence: Synthetic peptide
  REGION 1..9: note = XENP024194 vlCDR3
FQGSHVPNT

SEQ ID NO: 1169 - protein, 251 aa, synthetic construct
  REGION 1..251: note = Description of Artificial Sequence: Synthetic polypeptide
  REGION 1..251: note = XENP024195 1C11_H3_L3.111_scFv
QIQLVQSGSELKKPGASVKVSCKASGYTFTHYGMNWVRQAPGQGLEWMGWINTYTGEPTYADGFTGRFVFSLDTSVSTAYLQISSLKAEDTAVYFCARDYYGSSPYWGQGTLVTVSSGKPGSGKPGSGKPGSGKPGSDVLMTQSPDSLAVSLGERATINCKSSQGIVHSNGNTYLEWYQQKPGQSPKLLIYKVSNRFSGVPDRFSGSGSGTDFTLTISSLQAEDVAVYYCFQGSHVPNTFGGGTKVEIKGS

SEQ ID NO: 1170 - protein, 117 aa, synthetic construct; identical to SEQ ID NO: 32
  REGION 1..117: note = Description of Artificial Sequence: Synthetic polypeptide
  REGION 1..117: note = VH of XENP024195

SEQ ID NO: 1171 - protein, 114 aa, synthetic construct
  REGION 1..114: note = Description of Artificial Sequence: Synthetic polypeptide
  REGION 1..114: note = VL of XENP024195
DVLMTQSPDSLAVSLGERATINCKSSQGIVHSNGNTYLEWYQQKPGQSPKLLIYKVSNRFSGVPDRFSGSGSGTDFTLTISSLQAEDVAVYYCFQGSHVPNTFGGGTKVEIKGS

SEQ ID NO: 1172 - protein, 5 aa, synthetic construct
  REGION 1..5: note = Description of Artificial Sequence: Synthetic peptide
  REGION 1..5: note = XENP024195 vhCDR1
HYGMN

SEQ ID NO: 1173 - protein, 17 aa, synthetic construct
  REGION 1..17: note = Description of Artificial Sequence: Synthetic peptide
  REGION 1..17: note = XENP024195 vhCDR2
WINTYTGEPTYADGFTG

SEQ ID NO: 1174 - protein, 8 aa, synthetic construct
  REGION 1..8: note = Description of Artificial Sequence: Synthetic peptide
  REGION 1..8: note = XENP024195 vhCDR3
DYYGSSPY

SEQ ID NO: 1175 - protein, 16 aa, synthetic construct
  REGION 1..16: note = Description of Artificial Sequence: Synthetic peptide
  REGION 1..16: note = XENP024195 vlCDR1
KSSQGIVHSNGNTYLE

SEQ ID NO: 1176 - protein, 7 aa, synthetic construct
  REGION 1..7: note = Description of Artificial Sequence: Synthetic peptide
  REGION 1..7: note = XENP024195 vlCDR2
KVSNRFS

SEQ ID NO: 1177 - protein, 9 aa, synthetic construct
  REGION 1..9: note = Description of Artificial Sequence: Synthetic peptide
  REGION 1..9: note = XENP024195 vlCDR3
FQGSHVPNT

SEQ ID NO: 1178 - protein, 251 aa, synthetic construct
  REGION 1..251: note = Description of Artificial Sequence: Synthetic polypeptide
  REGION 1..251: note = XENP024196 1C11_H3_L3.112_scFv
QIQLVQSGSELKKPGASVKVSCKASGYTFTHYGMNWVRQAPGQGLEWMGWINTYTGEPTYADGFTGRFVFSLDTSVSTAYLQISSLKAEDTAVYFCARDYYGSSPYWGQGTLVTVSSGKPGSGKPGSGKPGSGKPGSDVLMTQSPDSLAVSLGERATINCKSSQSVLHSNGNTYLEWYQQKPGQSPKLLIYKVSNRFSGVPDRFSGSGSGTDFTLTISSLQAEDVAVYYCFQGSHVPNTFGGGTKVEIKGS

SEQ ID NO: 1179 - protein, 117 aa, synthetic construct; identical to SEQ ID NO: 32
  REGION 1..117: note = Description of Artificial Sequence: Synthetic polypeptide
  REGION 1..117: note = VH of XENP024196

SEQ ID NO: 1180 - protein, 114 aa, synthetic construct
  REGION 1..114: note = Description of Artificial Sequence: Synthetic polypeptide
  REGION 1..114: note = VL of XENP024196
DVLMTQSPDSLAVSLGERATINCKSSQSVLHSNGNTYLEWYQQKPGQSPKLLIYKVSNRFSGVPDRFSGSGSGTDFTLTISSLQAEDVAVYYCFQGSHVPNTFGGGTKVEIKGS

SEQ ID NO: 1181 - protein, 5 aa, synthetic construct
  REGION 1..5: note = Description of Artificial Sequence: Synthetic peptide
  REGION 1..5: note = XENP024196 vhCDR1
HYGMN

SEQ ID NO: 1182 - protein, 17 aa, synthetic construct
  REGION 1..17: note = Description of Artificial Sequence: Synthetic peptide
  REGION 1..17: note = XENP024196 vhCDR2
WINTYTGEPTYADGFTG

SEQ ID NO: 1183 - protein, 8 aa, synthetic construct
  REGION 1..8: note = Description of Artificial Sequence: Synthetic peptide
  REGION 1..8: note = XENP024196 vhCDR3
DYYGSSPY

SEQ ID NO: 1184 - protein, 16 aa, synthetic construct
  REGION 1..16: note = Description of Artificial Sequence: Synthetic peptide
  REGION 1..16: note = XENP024196 vlCDR1
KSSQSVLHSNGNTYLE

SEQ ID NO: 1185 - protein, 7 aa, synthetic construct
  REGION 1..7: note = Description of Artificial Sequence: Synthetic peptide
  REGION 1..7: note = XENP024196 vlCDR2
KVSNRFS

SEQ ID NO: 1186 - protein, 9 aa, synthetic construct
  REGION 1..9: note = Description of Artificial Sequence: Synthetic peptide
  REGION 1..9: note = XENP024196 vlCDR3
FQGSHVPNT

SEQ ID NO: 1187 - protein, 251 aa, synthetic construct
  REGION 1..251: note = Description of Artificial Sequence: Synthetic polypeptide
  REGION 1..251: note = XENP024201 1C11_H3_L3.113_scFv
QIQLVQSGSELKKPGASVKVSCKASGYTFTHYGMNWVRQAPGQGLEWMGWINTYTGEPTYADGFTGRFVFSLDTSVSTAYLQISSLKAEDTAVYFCARDYYGSSPYWGQGTLVTVSSGKPGSGKPGSGKPGSGKPGSDVLMTQSPDSLAVSLGERATINCKSSQSIVHSNGNTYLEWYQQKPGKSPKLLIYKVSNRFSGVPDRFSGSGSGTDFTLTISSLQAEDVAVYYCFQGSHVPNTFGGGTKVEIKGS

SEQ ID NO: 1188 - protein, 117 aa, synthetic construct; identical to SEQ ID NO: 32
  REGION 1..117: note = Description of Artificial Sequence: Synthetic polypeptide
  REGION 1..117: note = VH of XENP024201

SEQ ID NO: 1189 - protein, 114 aa, synthetic construct
  REGION 1..114: note = Description of Artificial Sequence: Synthetic polypeptide
  REGION 1..114: note = VL of XENP024201
DVLMTQSPDSLAVSLGERATINCKSSQSIVHSNGNTYLEWYQQKPGKSPKLLIYKVSNRFSGVPDRFSGSGSGTDFTLTISSLQAEDVAVYYCFQGSHVPNTFGGGTKVEIKGS

SEQ ID NO: 1190 - protein, 5 aa, synthetic construct
  REGION 1..5: note = Description of Artificial Sequence: Synthetic peptide
  REGION 1..5: note = XENP024201 vhCDR1
HYGMN

SEQ ID NO: 1191 - protein, 17 aa, synthetic construct
  REGION 1..17: note = Description of Artificial Sequence: Synthetic peptide
  REGION 1..17: note = XENP024201 vhCDR2
WINTYTGEPTYADGFTG

SEQ ID NO: 1192 - protein, 8 aa, synthetic construct
  REGION 1..8: note = Description of Artificial Sequence: Synthetic peptide
  REGION 1..8: note = XENP024201 vhCDR3
DYYGSSPY

SEQ ID NO: 1193 - protein, 16 aa, synthetic construct
  REGION 1..16: note = Description of Artificial Sequence: Synthetic peptide
  REGION 1..16: note = XENP024201 vlCDR1
KSSQSIVHSNGNTYLE

SEQ ID NO: 1194 - protein, 7 aa, synthetic construct
  REGION 1..7: note = Description of Artificial Sequence: Synthetic peptide
  REGION 1..7: note = XENP024201 vlCDR2
KVSNRFS

SEQ ID NO: 1195 - protein, 9 aa, synthetic construct
  REGION 1..9: note = Description of Artificial Sequence: Synthetic peptide
  REGION 1..9: note = XENP024201 vlCDR3
FQGSHVPNT

SEQ ID NO: 1196 - protein, 251 aa, synthetic construct
  REGION 1..251: note = Description of Artificial Sequence: Synthetic polypeptide
  REGION 1..251: note = XENP024202 1C11_H3_L3.115_scFv
QIQLVQSGSELKKPGASVKVSCKASGYTFTHYGMNWVRQAPGQGLEWMGWINTYTGEPTYADGFTGRFVFSLDTSVSTAYLQISSLKAEDTAVYFCARDYYGSSPYWGQGTLVTVSSGKPGSGKPGSGKPGSGKPGSDVLMTQSPDSLAVSLGERATINCKSSQSIVHSNGNTYLEWYQQKPGKVPKLLIYKVSNRFSGVPDRFSGSGSGTDFTLTISSLQAEDVAVYYCFQGSHVPNTFGGGTKVEIKGS

SEQ ID NO: 1197 - protein, 117 aa, synthetic construct; identical to SEQ ID NO: 32
  REGION 1..117: note = Description of Artificial Sequence: Synthetic polypeptide
  REGION 1..117: note = VH of XENP024202

SEQ ID NO: 1198 - protein, 114 aa, synthetic construct
  REGION 1..114: note = Description of Artificial Sequence: Synthetic polypeptide
  REGION 1..114: note = VL of XENP024202
DVLMTQSPDSLAVSLGERATINCKSSQSIVHSNGNTYLEWYQQKPGKVPKLLIYKVSNRFSGVPDRFSGSGSGTDFTLTISSLQAEDVAVYYCFQGSHVPNTFGGGTKVEIKGS

SEQ ID NO: 1199 - protein, 5 aa, synthetic construct
  REGION 1..5: note = Description of Artificial Sequence: Synthetic peptide
  REGION 1..5: note = XENP024202 vhCDR1
HYGMN

SEQ ID NO: 1200 - protein, 17 aa, synthetic construct
  REGION 1..17: note = Description of Artificial Sequence: Synthetic peptide
  REGION 1..17: note = XENP024202 vhCDR2
WINTYTGEPTYADGFTG

SEQ ID NO: 1201 - protein, 8 aa, synthetic construct
  REGION 1..8: note = Description of Artificial Sequence: Synthetic peptide
  REGION 1..8: note = XENP024202 vhCDR3
DYYGSSPY

SEQ ID NO: 1202 - protein, 16 aa, synthetic construct
  REGION 1..16: note = Description of Artificial Sequence: Synthetic peptide
  REGION 1..16: note = XENP024202 vlCDR1
KSSQSIVHSNGNTYLE

SEQ ID NO: 1203 - protein, 7 aa, synthetic construct
  REGION 1..7: note = Description of Artificial Sequence: Synthetic peptide
  REGION 1..7: note = XENP024202 vlCDR2
KVSNRFS

SEQ ID NO: 1204 - protein, 9 aa, synthetic construct
  REGION 1..9: note = Description of Artificial Sequence: Synthetic peptide
  REGION 1..9: note = XENP024202 vlCDR3
FQGSHVPNT

SEQ ID NO: 1205 - protein, 251 aa, synthetic construct
  REGION 1..251: note = Description of Artificial Sequence: Synthetic polypeptide
  REGION 1..251: note = XENP024203 1C11_H3_L3.118_scFv
QIQLVQSGSELKKPGASVKVSCKASGYTFTHYGMNWVRQAPGQGLEWMGWINTYTGEPTYADGFTGRFVFSLDTSVSTAYLQISSLKAEDTAVYFCARDYYGSSPYWGQGTLVTVSSGKPGSGKPGSGKPGSGKPGSDVLMTQSPDSLAVSLGERATINCKSSQSIVHSNGNTYLEWYQQKPGQSPKLLIYKVSSRFSGVPDRFSGSGSGTDFTLTISSLQAEDVAVYYCFQGSHVPNTFGGGTKVEIKGS

SEQ ID NO: 1206 - protein, 117 aa, synthetic construct; identical to SEQ ID NO: 32
  REGION 1..117: note = Description of Artificial Sequence: Synthetic polypeptide
  REGION 1..117: note = VH of XENP024203

SEQ ID NO: 1207 - protein, 114 aa, synthetic construct
  REGION 1..114: note = Description of Artificial Sequence: Synthetic polypeptide
  REGION 1..114: note = VL of XENP024203
DVLMTQSPDSLAVSLGERATINCKSSQSIVHSNGNTYLEWYQQKPGQSPKLLIYKVSSRFSGVPDRFSGSGSGTDFTLTISSLQAEDVAVYYCFQGSHVPNTFGGGTKVEIKGS

SEQ ID NO: 1208 - protein, 5 aa, synthetic construct
  REGION 1..5: note = Description of Artificial Sequence: Synthetic peptide
  REGION 1..5: note = XENP024203 vhCDR1
HYGMN

SEQ ID NO: 1209 - protein, 17 aa, synthetic construct
  REGION 1..17: note = Description of Artificial Sequence: Synthetic peptide
  REGION 1..17: note = XENP024203 vhCDR2
WINTYTGEPTYADGFTG

SEQ ID NO: 1210 - protein, 8 aa, synthetic construct
  REGION 1..8: note = Description of Artificial Sequence: Synthetic peptide
  REGION 1..8: note = XENP024203 vhCDR3
DYYGSSPY

SEQ ID NO: 1211 - protein, 16 aa, synthetic construct
  REGION 1..16: note = Description of Artificial Sequence: Synthetic peptide
  REGION 1..16: note = XENP024203 vlCDR1
KSSQSIVHSNGNTYLE

SEQ ID NO: 1212 - protein, 7 aa, synthetic construct
  REGION 1..7: note = Description of Artificial Sequence: Synthetic peptide
  REGION 1..7: note = XENP024203 vlCDR2
KVSSRFS

SEQ ID NO: 1213 - protein, 9 aa, synthetic construct
  REGION 1..9: note = Description of Artificial Sequence: Synthetic peptide
  REGION 1..9: note = XENP024203 vlCDR3
FQGSHVPNT

SEQ ID NO: 1214 - protein, 251 aa, synthetic construct
  REGION 1..251: note = Description of Artificial Sequence: Synthetic polypeptide
  REGION 1..251: note = XENP024204 1C11_H3_L3.119_scFv
QIQLVQSGSELKKPGASVKVSCKASGYTFTHYGMNWVRQAPGQGLEWMGWINTYTGEPTYADGFTGRFVFSLDTSVSTAYLQISSLKAEDTAVYFCARDYYGSSPYWGQGTLVTVSSGKPGSGKPGSGKPGSGKPGSDVLMTQSPDSLAVSLGERATINCKSSQSIVHSNGNTYLEWYQQKPGQSPKLLIYKVSNLFSGVPDRFSGSGSGTDFTLTISSLQAEDVAVYYCFQGSHVPNTFGGGTKVEIKGS

SEQ ID NO: 1215 - protein, 117 aa, synthetic construct; identical to SEQ ID NO: 32
  REGION 1..117: note = Description of Artificial Sequence: Synthetic polypeptide
  REGION 1..117: note = VH of XENP024204

SEQ ID NO: 1216 - protein, 114 aa, synthetic construct
  REGION 1..114: note = Description of Artificial Sequence: Synthetic polypeptide
  REGION 1..114: note = VL of XENP024204
DVLMTQSPDSLAVSLGERATINCKSSQSIVHSNGNTYLEWYQQKPGQSPKLLIYKVSNLFSGVPDRFSGSGSGTDFTLTISSLQAEDVAVYYCFQGSHVPNTFGGGTKVEIKGS

SEQ ID NO: 1217 - protein, 5 aa, synthetic construct
  REGION 1..5: note = Description of Artificial Sequence: Synthetic peptide
  REGION 1..5: note = XENP024204 vhCDR1
HYGMN

SEQ ID NO: 1218 - protein, 17 aa, synthetic construct
  REGION 1..17: note = Description of Artificial Sequence: Synthetic peptide
  REGION 1..17: note = XENP024204 vhCDR2
WINTYTGEPTYADGFTG

SEQ ID NO: 1219 - protein, 8 aa, synthetic construct
  REGION 1..8: note = Description of Artificial Sequence: Synthetic peptide
  REGION 1..8: note = XENP024204 vhCDR3
DYYGSSPY

SEQ ID NO: 1220 - protein, 16 aa, synthetic construct
  REGION 1..16: note = Description of Artificial Sequence: Synthetic peptide
  REGION 1..16: note = XENP024204 vlCDR1
KSSQSIVHSNGNTYLE

SEQ ID NO: 1221 - protein, 7 aa, synthetic construct
  REGION 1..7: note = Description of Artificial Sequence: Synthetic peptide
  REGION 1..7: note = XENP024204 vlCDR2
KVSNLFS

SEQ ID NO: 1222 - protein, 9 aa, synthetic construct
  REGION 1..9: note = Description of Artificial Sequence: Synthetic peptide
  REGION 1..9: note = XENP024204 vlCDR3
FQGSHVPNT

SEQ ID NO: 1223 - protein, 251 aa, synthetic construct
  REGION 1..251: note = Description of Artificial Sequence: Synthetic polypeptide
  REGION 1..251: note = XENP024205 1C11_H3_L3.120_scFv
QIQLVQSGSELKKPGASVKVSCKASGYTFTHYGMNWVRQAPGQGLEWMGWINTYTGEPTYADGFTGRFVFSLDTSVSTAYLQISSLKAEDTAVYFCARDYYGSSPYWGQGTLVTVSSGKPGSGKPGSGKPGSGKPGSDVLMTQSPDSLAVSLGERATINCKSSQSIVHSNGNTYLEWYQQKPGQSPKLLIYKVSNRESGVPDRFSGSGSGTDFTLTISSLQAEDVAVYYCFQGSHVPNTFGGGTKVEIKGS

SEQ ID NO: 1224 - protein, 117 aa, synthetic construct; identical to SEQ ID NO: 32
  REGION 1..117: note = Description of Artificial Sequence: Synthetic polypeptide
  REGION 1..117: note = VH of XENP024205

SEQ ID NO: 1225 - protein, 114 aa, synthetic construct
  REGION 1..114: note = Description of Artificial Sequence: Synthetic polypeptide
  REGION 1..114: note = VL of XENP024205
DVLMTQSPDSLAVSLGERATINCKSSQSIVHSNGNTYLEWYQQKPGQSPKLLIYKVSNRESGVPDRFSGSGSGTDFTLTISSLQAEDVAVYYCFQGSHVPNTFGGGTKVEIKGS

SEQ ID NO: 1226 - protein, 5 aa, synthetic construct
  REGION 1..5: note = Description of Artificial Sequence: Synthetic peptide
  REGION 1..5: note = XENP024205 vhCDR1
HYGMN

SEQ ID NO: 1227 - protein, 17 aa, synthetic construct
  REGION 1..17: note = Description of Artificial Sequence: Synthetic peptide
  REGION 1..17: note = XENP024205 vhCDR2
WINTYTGEPTYADGFTG

SEQ ID NO: 1228 - protein, 8 aa, synthetic construct
  REGION 1..8: note = Description of Artificial Sequence: Synthetic peptide
  REGION 1..8: note = XENP024205 vhCDR3
DYYGSSPY

SEQ ID NO: 1229 - protein, 16 aa, synthetic construct
  REGION 1..16: note = Description of Artificial Sequence: Synthetic peptide
  REGION 1..16: note = XENP024205 vlCDR1
KSSQSIVHSNGNTYLE

SEQ ID NO: 1230 - protein, 7 aa, synthetic construct
  REGION 1..7: note = Description of Artificial Sequence: Synthetic peptide
  REGION 1..7: note = XENP024205 vlCDR2
KVSNRES

SEQ ID NO: 1231 - protein, 9 aa, synthetic construct
  REGION 1..9: note = Description of Artificial Sequence: Synthetic peptide
  REGION 1..9: note = XENP024205 vlCDR3
FQGSHVPNT

SEQ ID NO: 1232 - protein, 251 aa, synthetic construct
  REGION 1..251: note = Description of Artificial Sequence: Synthetic polypeptide
  REGION 1..251: note = XENP024206 1C11_H3_L3.121_scFv
QIQLVQSGSELKKPGASVKVSCKASGYTFTHYGMNWVRQAPGQGLEWMGWINTYTGEPTYADGFTGRFVFSLDTSVSTAYLQISSLKAEDTAVYFCARDYYGSSPYWGQGTLVTVSSGKPGSGKPGSGKPGSGKPGSDVLMTQSPDSLAVSLGERATINCKSSQSIVHSNGNTYLEWYQQKPGQSPKLLIYKVSNRQSGVPDRFSGSGSGTDFTLTISSLQAEDVAVYYCFQGSHVPNTFGGGTKVEIKGS

SEQ ID NO: 1233 - protein, 117 aa, synthetic construct; identical to SEQ ID NO: 32
  REGION 1..117: note = Description of Artificial Sequence: Synthetic polypeptide
  REGION 1..117: note = VH of XENP024206

SEQ ID NO: 1234 - protein, 114 aa, synthetic construct
  REGION 1..114: note = Description of Artificial Sequence: Synthetic polypeptide
  REGION 1..114: note = VL of XENP024206
DVLMTQSPDSLAVSLGERATINCKSSQSIVHSNGNTYLEWYQQKPGQSPKLLIYKVSNRQSGVPDRFSGSGSGTDFTLTISSLQAEDVAVYYCFQGSHVPNTFGGGTKVEIKGS

SEQ ID NO: 1235 - protein, 5 aa, synthetic construct
  REGION 1..5: note = Description of Artificial Sequence: Synthetic peptide
  REGION 1..5: note = XENP024206 vhCDR1
HYGMN

SEQ ID NO: 1236 - protein, 17 aa, synthetic construct
  REGION 1..17: note = Description of Artificial Sequence: Synthetic peptide
  REGION 1..17: note = XENP024206 vhCDR2
WINTYTGEPTYADGFTG

SEQ ID NO: 1237 - protein, 8 aa, synthetic construct
  REGION 1..8: note = Description of Artificial Sequence: Synthetic peptide
  REGION 1..8: note = XENP024206 vhCDR3
DYYGSSPY

SEQ ID NO: 1238 - protein, 16 aa, synthetic construct
  REGION 1..16: note = Description of Artificial Sequence: Synthetic peptide
  REGION 1..16: note = XENP024206 vlCDR1
KSSQSIVHSNGNTYLE

SEQ ID NO: 1239 - protein, 7 aa, synthetic construct
  REGION 1..7: note = Description of Artificial Sequence: Synthetic peptide
  REGION 1..7: note = XENP024206 vlCDR2
KVSNRQS

SEQ ID NO: 1240 - protein, 9 aa, synthetic construct
  REGION 1..9: note = Description of Artificial Sequence: Synthetic peptide
  REGION 1..9: note = XENP024206 vlCDR3
FQGSHVPNT

SEQ ID NO: 1241 - protein, 251 aa, synthetic construct
  REGION 1..251: note = Description of Artificial Sequence: Synthetic polypeptide
  REGION 1..251: note = XENP024207 1C11_H3_L3.122_scFv
QIQLVQSGSELKKPGASVKVSCKASGYTFTHYGMNWVRQAPGQGLEWMGWINTYTGEPTYADGFTGRFVFSLDTSVSTAYLQISSLKAEDTAVYFCARDYYGSSPYWGQGTLVTVSSGKPGSGKPGSGKPGSGKPGSDVLMTQSPDSLAVSLGERATINCKSSQSIVHSNGNTYLEWYQQKPGQSPKLLIYKVSNRFSGIPDRFSGSGSGTDFTLTISSLQAEDVAVYYCFQGSHVPNTFGGGTKVEIKGS

SEQ ID NO: 1242 - protein, 117 aa, synthetic construct; identical to SEQ ID NO: 32
  REGION 1..117: note = Description of Artificial Sequence: Synthetic polypeptide
  REGION 1..117: note = VH of XENP024207

SEQ ID NO: 1243 - protein, 114 aa, synthetic construct
  REGION 1..114: note = Description of Artificial Sequence: Synthetic polypeptide
  REGION 1..114: note = VL of XENP024207
DVLMTQSPDSLAVSLGERATINCKSSQSIVHSNGNTYLEWYQQKPGQSPKLLIYKVSNRFSGIPDRFSGSGSGTDFTLTISSLQAEDVAVYYCFQGSHVPNTFGGGTKVEIKGS

SEQ ID NO: 1244 - protein, 5 aa, synthetic construct
  REGION 1..5: note = Description of Artificial Sequence: Synthetic peptide
  REGION 1..5: note = XENP024207 vhCDR1
HYGMN

SEQ ID NO: 1245 - protein, 17 aa, synthetic construct
  REGION 1..17: note = Description of Artificial Sequence: Synthetic peptide
  REGION 1..17: note = XENP024207 vhCDR2
WINTYTGEPTYADGFTG

SEQ ID NO: 1246 - protein, 8 aa, synthetic construct
  REGION 1..8: note = Description of Artificial Sequence: Synthetic peptide
  REGION 1..8: note = XENP024207 vhCDR3
DYYGSSPY

SEQ ID NO: 1247 - protein, 16 aa, synthetic construct
  REGION 1..16: note = Description of Artificial Sequence: Synthetic peptide
  REGION 1..16: note = XENP024207 vlCDR1
KSSQSIVHSNGNTYLE

SEQ ID NO: 1248 - protein, 7 aa, synthetic construct
  REGION 1..7: note = Description of Artificial Sequence: Synthetic peptide
  REGION 1..7: note = XENP024207 vlCDR2
KVSNRFS

SEQ ID NO: 1249 - protein, 9 aa, synthetic construct
  REGION 1..9: note = Description of Artificial Sequence: Synthetic peptide
  REGION 1..9: note = XENP024207 vlCDR3
FQGSHVPNT

SEQ ID NO: 1250 - protein, 251 aa, synthetic construct
  REGION 1..251: note = Description of Artificial Sequence: Synthetic polypeptide
  REGION 1..251: note = XENP024208 1C11_H3_L3.124_scFv
QIQLVQSGSELKKPGASVKVSCKASGYTFTHYGMNWVRQAPGQGLEWMGWINTYTGEPTYADGFTGRFVFSLDTSVSTAYLQISSLKAEDTAVYFCARDYYGSSPYWGQGTLVTVSSGKPGSGKPGSGKPGSGKPGSDVLMTQSPDSLAVSLGERATINCKSSQSIVHSNGNTYLEWYQQKPGQSPKLLIYKVSNRFSGVPARFSGSGSGTDFTLTISSLQAEDVAVYYCFQGSHVPNTFGGGTKVEIKGS

SEQ ID NO: 1251 - protein, 117 aa, synthetic construct; identical to SEQ ID NO: 32
  REGION 1..117: note = Description of Artificial Sequence: Synthetic polypeptide
  REGION 1..117: note = VH of XENP024208

SEQ ID NO: 1252 - protein, 114 aa, synthetic construct
  REGION 1..114: note = Description of Artificial Sequence: Synthetic polypeptide
  REGION 1..114: note = VL of XENP024208
DVLMTQSPDSLAVSLGERATINCKSSQSIVHSNGNTYLEWYQQKPGQSPKLLIYKVSNRFSGVPARFSGSGSGTDFTLTISSLQAEDVAVYYCFQGSHVPNTFGGGTKVEIKGS

SEQ ID NO: 1253 - protein, 5 aa, synthetic construct
  REGION 1..5: note = Description of Artificial Sequence: Synthetic peptide
  REGION 1..5: note = XENP024208 vhCDR1
HYGMN

SEQ ID NO: 1254 - protein, 17 aa, synthetic construct
  REGION 1..17: note = Description of Artificial Sequence: Synthetic peptide
  REGION 1..17: note = XENP024208 vhCDR2
WINTYTGEPTYADGFTG

SEQ ID NO: 1255 - protein, 8 aa, synthetic construct
  REGION 1..8: note = Description of Artificial Sequence: Synthetic peptide
  REGION 1..8: note = XENP024208 vhCDR3
DYYGSSPY

SEQ ID NO: 1256 - protein, 16 aa, synthetic construct
  REGION 1..16: note = Description of Artificial Sequence: Synthetic peptide
  REGION 1..16: note = XENP024208 vlCDR1
KSSQSIVHSNGNTYLE

SEQ ID NO: 1257 - protein, 7 aa, synthetic construct
  REGION 1..7: note = Description of Artificial Sequence: Synthetic peptide
  REGION 1..7: note = XENP024208 vlCDR2
KVSNRFS

SEQ ID NO: 1258 - protein, 9 aa, synthetic construct
  REGION 1..9: note = Description of Artificial Sequence: Synthetic peptide
  REGION 1..9: note = XENP024208 vlCDR3
FQGSHVPNT

SEQ ID NO: 1259 - protein, 251 aa, synthetic construct
  REGION 1..251: note = Description of Artificial Sequence: Synthetic polypeptide
  REGION 1..251: note = XENP024209 1C11_H3_L3.125_scFv
QIQLVQSGSELKKPGASVKVSCKASGYTFTHYGMNWVRQAPGQGLEWMGWINTYTGEPTYADGFTGRFVFSLDTSVSTAYLQISSLKAEDTAVYFCARDYYGSSPYWGQGTLVTVSSGKPGSGKPGSGKPGSGKPGSDVLMTQSPDSLAVSLGERATINCKSSQSIVHSNGNTYLEWYQQKPGQSPKLLIYKVSNRFSGVPDRFSGSGSGTDFTLTISSVEAEDVAVYYCFQGSHVPNTFGGGTKVEIKGS

SEQ ID NO: 1260 - protein, 117 aa, synthetic construct; identical to SEQ ID NO: 32
  REGION 1..117: note = Description of Artificial Sequence: Synthetic polypeptide
  REGION 1..117: note = VH of XENP024209

SEQ ID NO: 1261 - protein, 114 aa, synthetic construct
  REGION 1..114: note = Description of Artificial Sequence: Synthetic polypeptide
  REGION 1..114: note = VL of XENP024209
DVLMTQSPDSLAVSLGERATINCKSSQSIVHSNGNTYLEWYQQKPGQSPKLLIYKVSNRFSGVPDRFSGSGSGTDFTLTISSVEAEDVAVYYCFQGSHVPNTFGGGTKVEIKGS

SEQ ID NO: 1262 - protein, 5 aa, synthetic construct
  REGION 1..5: note = Description of Artificial Sequence: Synthetic peptide
  REGION 1..5: note = XENP024209 vhCDR1
HYGMN

SEQ ID NO: 1263 - protein, 17 aa, synthetic construct
  REGION 1..17: note = Description of Artificial Sequence: Synthetic peptide
  REGION 1..17: note = XENP024209 vhCDR2
WINTYTGEPTYADGFTG

SEQ ID NO: 1264 - protein, 8 aa, synthetic construct
  REGION 1..8: note = Description of Artificial Sequence: Synthetic peptide
  REGION 1..8: note = XENP024209 vhCDR3
DYYGSSPY

SEQ ID NO: 1265 - protein, 16 aa, synthetic construct
  REGION 1..16: note = Description of Artificial Sequence: Synthetic peptide
  REGION 1..16: note = XENP024209 vlCDR1
KSSQSIVHSNGNTYLE

SEQ ID NO: 1266 - protein, 7 aa, synthetic construct
  REGION 1..7: note = Description of Artificial Sequence: Synthetic peptide
  REGION 1..7: note = XENP024209 vlCDR2
KVSNRFS

SEQ ID NO: 1267 - protein, 9 aa, synthetic construct
  REGION 1..9: note = Description of Artificial Sequence: Synthetic peptide
  REGION 1..9: note = XENP024209 vlCDR3
FQGSHVPNT

SEQ ID NO: 1268 - protein, 251 aa, synthetic construct
  REGION 1..251: note = Description of Artificial Sequence: Synthetic polypeptide
  REGION 1..251: note = XENP024210 1C11_H3_L3.132_scFv
QIQLVQSGSELKKPGASVKVSCKASGYTFTHYGMNWVRQAPGQGLEWMGWINTYTGEPTYADGFTGRFVFSLDTSVSTAYLQISSLKAEDTAVYFCARDYYGSSPYWGQGTLVTVSSGKPGSGKPGSGKPGSGKPGSDVLMTQSPDSLAVSLGERATINCKSSQSIVHSNGNTYLEWYQQKPGQSPKLLIYKVSNRFSGVPDRFSGSGSGTDFTLTISSLQAEDVAVYYCFQGSHVPNTFGPGTKVEIKGS

SEQ ID NO: 1269 - protein, 117 aa, synthetic construct; identical to SEQ ID NO: 32
  REGION 1..117: note = Description of Artificial Sequence: Synthetic polypeptide
  REGION 1..117: note = VH of XENP024210

SEQ ID NO: 1270 - protein, 114 aa, synthetic construct
  REGION 1..114: note = Description of Artificial Sequence: Synthetic polypeptide
  REGION 1..114: note = VL of XENP024210
DVLMTQSPDSLAVSLGERATINCKSSQSIVHSNGNTYLEWYQQKPGQSPKLLIYKVSNRFSGVPDRFSGSGSGTDFTLTISSLQAEDVAVYYCFQGSHVPNTFGPGTKVEIKGS

SEQ ID NO: 1271 - protein, 5 aa, synthetic construct
  REGION 1..5: note = Description of Artificial Sequence: Synthetic peptide
  REGION 1..5: note = XENP024210 vhCDR1
HYGMN

SEQ ID NO: 1272 - protein, 17 aa, synthetic construct
  REGION 1..17: note = Description of Artificial Sequence: Synthetic peptide
  REGION 1..17: note = XENP024210 vhCDR2
WINTYTGEPTYADGFTG

SEQ ID NO: 1273 - protein, 8 aa, synthetic construct
  REGION 1..8: note = Description of Artificial Sequence: Synthetic peptide
  REGION 1..8: note = XENP024210 vhCDR3
DYYGSSPY

SEQ ID NO: 1274 - protein, 16 aa, synthetic construct
  REGION 1..16: note = Description of Artificial Sequence: Synthetic peptide
  REGION 1..16: note = XENP024210 vlCDR1
KSSQSIVHSNGNTYLE

SEQ ID NO: 1275 - protein, 7 aa, synthetic construct
  REGION 1..7: note = Description of Artificial Sequence: Synthetic peptide
  REGION 1..7: note = XENP024210 vlCDR2
KVSNRFS

SEQ ID NO: 1276 - protein, 9 aa, synthetic construct
  REGION 1..9: note = Description of Artificial Sequence: Synthetic peptide
  REGION 1..9: note = XENP024210 vlCDR3
FQGSHVPNT

SEQ ID NO: 1277 - protein, 251 aa, synthetic construct
  REGION 1..251: note = Description of Artificial Sequence: Synthetic polypeptide
  REGION 1..251: note = XENP024211 1C11_H3.78_L3_scFv
QIQLVQSGPELKKPGASVKVSCKASGYTFTHYGMNWVRQAPGQGLEWMGWINTNTGEPTYADGFTGRFVFSVDTSQSTAYLQISSLKAEDTAVYFCARDYYGSSPYWGQGTLVTVSSGKPGSGKPGSGKPGSGKPGSDVLMTQSPDSLAVSLGERATINCKSSQSIVHSNGNTYLEWYQQKPGQSPKLLIYKVSNRFSGVPDRFSGSGSGTDFTLTISSLQAEDVAVYYCFQGSHVPNTFGGGTKVEIKGS

SEQ ID NO: 1278 - protein, 117 aa, synthetic construct
  REGION 1..117: note = Description of Artificial Sequence: Synthetic polypeptide
  REGION 1..117: note = VH of XENP024211
QIQLVQSGPELKKPGASVKVSCKASGYTFTHYGMNWVRQAPGQGLEWMGWINTNTGEPTYADGFTGRFVFSVDTSQSTAYLQISSLKAEDTAVYFCARDYYGSSPYWGQGTLVTVSS

SEQ ID NO: 1279 - protein, 114 aa, synthetic construct; identical to SEQ ID NO: 649
  REGION 1..114: note = Description of Artificial Sequence: Synthetic polypeptide
  REGION 1..114: note = VL of XENP024211

SEQ ID NO: 1280 - protein, 5 aa, synthetic construct
  REGION 1..5: note = Description of Artificial Sequence: Synthetic peptide
  REGION 1..5: note = XENP024211 vhCDR1
HYGMN

SEQ ID NO: 1281 - protein, 17 aa, synthetic construct
  REGION 1..17: note = Description of Artificial Sequence: Synthetic peptide
  REGION 1..17: note = XENP024211 vhCDR2
WINTNTGEPTYADGFTG

SEQ ID NO: 1282 - protein, 8 aa, synthetic construct
  REGION 1..8: note = Description of Artificial Sequence: Synthetic peptide
  REGION 1..8: note = XENP024211 vhCDR3
DYYGSSPY

SEQ ID NO: 1283 - protein, 16 aa, synthetic construct
  REGION 1..16: note = Description of Artificial Sequence: Synthetic peptide
  REGION 1..16: note = XENP024211 vlCDR1
KSSQSIVHSNGNTYLE

SEQ ID NO: 1284 - protein, 7 aa, synthetic construct
  REGION 1..7: note = Description of Artificial Sequence: Synthetic peptide
  REGION 1..7: note = XENP024211 vlCDR2
KVSNRFS

SEQ ID NO: 1285 - protein, 9 aa, synthetic construct
  REGION 1..9: note = Description of Artificial Sequence: Synthetic peptide
  REGION 1..9: note = XENP024211 vlCDR3
FQGSHVPNT

SEQ ID NO: 1286 - protein, 251 aa, synthetic construct
  REGION 1..251: note = Description of Artificial Sequence: Synthetic polypeptide
  REGION 1..251: note = XENP024212 1C11_H3.80_L3_scFv
QIQLVQSGSELKKPGASVKVSCKASGYTFTHYGMNWVRQAPGQGLEWMGWINTNTGEPTYADGFTGRFVFSVDTSQSTAYLQISSLKAEDTAVYYCARDYYGSSPYWGQGTLVTVSSGKPGSGKPGSGKPGSGKPGSDVLMTQSPDSLAVSLGERATINCKSSQSIVHSNGNTYLEWYQQKPGQSPKLLIYKVSNRFSGVPDRFSGSGSGTDFTLTISSLQAEDVAVYYCFQGSHVPNTFGGGTKVEIKGS

SEQ ID NO: 1287 - protein, 117 aa, synthetic construct
  REGION 1..117: note = Description of Artificial Sequence: Synthetic polypeptide
  REGION 1..117: note = VH of XENP024212
QIQLVQSGSELKKPGASVKVSCKASGYTFTHYGMNWVRQAPGQGLEWMGWINTNTGEPTYADGFTGRFVFSVDTSQSTAYLQISSLKAEDTAVYYCARDYYGSSPYWGQGTLVTVSS

SEQ ID NO: 1288 - protein, 114 aa, synthetic construct; identical to SEQ ID NO: 649
  REGION 1..114: note = Description of Artificial Sequence: Synthetic polypeptide
  REGION 1..114: note = VL of XENP024212

SEQ ID NO: 1289 - protein, 5 aa, synthetic construct
  REGION 1..5: note = Description of Artificial Sequence: Synthetic peptide
  REGION 1..5: note = XENP024212 vhCDR1
HYGMN

SEQ ID NO: 1290 - protein, 17 aa, synthetic construct
  REGION 1..17: note = Description of Artificial Sequence: Synthetic peptide
  REGION 1..17: note = XENP024212 vhCDR2
WINTNTGEPTYADGFTG

SEQ ID NO: 1291 - protein, 8 aa, synthetic construct
  REGION 1..8: note = Description of Artificial Sequence: Synthetic peptide
  REGION 1..8: note = XENP024212 vhCDR3
DYYGSSPY

SEQ ID NO: 1292 - protein, 16 aa, synthetic construct
  REGION 1..16: note = Description of Artificial Sequence: Synthetic peptide
  REGION 1..16: note = XENP024212 vlCDR1
KSSQSIVHSNGNTYLE

SEQ ID NO: 1293 - protein, 7 aa, synthetic construct
  REGION 1..7: note = Description of Artificial Sequence: Synthetic peptide
  REGION 1..7: note = XENP024212 vlCDR2
KVSNRFS

SEQ ID NO: 1294 - protein, 9 aa, synthetic construct
  REGION 1..9: note = Description of Artificial Sequence: Synthetic peptide
  REGION 1..9: note = XENP024212 vlCDR3
FQGSHVPNT

SEQ ID NO: 1295 - protein, 251 aa, synthetic construct
  REGION 1..251: note = Description of Artificial Sequence: Synthetic polypeptide
  REGION 1..251: note = XENP024213 1C11_H3.81_L3_scFv
QIQLVQSGSELKKPGASVKVSCKASGYTFTHYGMNWVRQAPGQGLEWMGWINTYTGEPTYADKFKGRFVFSLDTSVSTAYLQISSLKAEDTAVYFCARDYYGSSPYWGQGTLVTVSSGKPGSGKPGSGKPGSGKPGSDVLMTQSPDSLAVSLGERATINCKSSQSIVHSNGNTYLEWYQQKPGQSPKLLIYKVSNRFSGVPDRFSGSGSGTDFTLTISSLQAEDVAVYYCFQGSHVPNTFGGGTKVEIKGS

SEQ ID NO: 1296 - protein, 117 aa, synthetic construct
  REGION 1..117: note = Description of Artificial Sequence: Synthetic polypeptide
  REGION 1..117: note = VH of XENP024213
QIQLVQSGSELKKPGASVKVSCKASGYTFTHYGMNWVRQAPGQGLEWMGWINTYTGEPTYADKFKGRFVFSLDTSVSTAYLQISSLKAEDTAVYFCARDYYGSSPYWGQGTLVTVSS

SEQ ID NO: 1297 - protein, 114 aa, synthetic construct; identical to SEQ ID NO: 649
  REGION 1..114: note = Description of Artificial Sequence: Synthetic polypeptide
  REGION 1..114: note = VL of XENP024213

SEQ ID NO: 1298 - protein, 5 aa, synthetic construct
  REGION 1..5: note = Description of Artificial Sequence: Synthetic peptide
  REGION 1..5: note = XENP024213 vhCDR1
HYGMN

SEQ ID NO: 1299 - protein, 17 aa, synthetic construct
  REGION 1..17: note = Description of Artificial Sequence: Synthetic peptide
  REGION 1..17: note = XENP024213 vhCDR2
WINTYTGEPTYADKFKG

SEQ ID NO: 1300 - protein, 8 aa, synthetic construct
  REGION 1..8: note = Description of Artificial Sequence: Synthetic peptide
  REGION 1..8: note = XENP024213 vhCDR3
DYYGSSPY

SEQ ID NO: 1301 - protein, 16 aa, synthetic construct
  REGION 1..16: note = Description of Artificial Sequence: Synthetic peptide
  REGION 1..16: note = XENP024213 vlCDR1
KSSQSIVHSNGNTYLE

SEQ ID NO: 1302 - protein, 7 aa, synthetic construct
  REGION 1..7: note = Description of Artificial Sequence: Synthetic peptide
  REGION 1..7: note = XENP024213 vlCDR2
KVSNRFS

SEQ ID NO: 1303 - protein, 9 aa, synthetic construct
  REGION 1..9: note = Description of Artificial Sequence: Synthetic peptide
  REGION 1..9: note = XENP024213 vlCDR3
FQGSHVPNT

SEQ ID NO: 1304 - protein, 251 aa, synthetic construct
  REGION 1..251: note = Description of Artificial Sequence: Synthetic polypeptide
  REGION 1..251: note = XENP024214 1C11_H3.82_L3_scFv
QIQLVQSGSELKKPGASVKVSCKASGYTFTHYGMNWVRQAPGQGLEWMGWINTYTGEPTYADKFQGRFVFSLDTSVSTAYLQISSLKAEDTAVYFCARDYYGSSPYWGQGTLVTVSSGKPGSGKPGSGKPGSGKPGSDVLMTQSPDSLAVSLGERATINCKSSQSIVHSNGNTYLEWYQQKPGQSPKLLIYKVSNRFSGVPDRFSGSGSGTDFTLTISSLQAEDVAVYYCFQGSHVPNTFGGGTKVEIKGS

SEQ ID NO: 1305 - protein, 117 aa, synthetic construct
  REGION 1..117: note = Description of Artificial Sequence: Synthetic polypeptide
  REGION 1..117: note = VH of XENP024214
QIQLVQSGSELKKPGASVKVSCKASGYTFTHYGMNWVRQAPGQGLEWMGWINTYTGEPTYADKFQGRFVFSLDTSVSTAYLQISSLKAEDTAVYFCARDYYGSSPYWGQGTLVTVSS

SEQ ID NO: 1306 - protein, 114 aa, synthetic construct; identical to SEQ ID NO: 649
  REGION 1..114: note = Description of Artificial Sequence: Synthetic polypeptide
  REGION 1..114: note = VL of XENP024214

SEQ ID NO: 1307 - protein, 5 aa, synthetic construct
  REGION 1..5: note = Description of Artificial Sequence: Synthetic peptide
  REGION 1..5: note = XENP024214 vhCDR1
HYGMN

SEQ ID NO: 1308 - protein, 17 aa, synthetic construct
  REGION 1..17: note = Description of Artificial Sequence: Synthetic peptide
  REGION 1..17: note = XENP024214 vhCDR2
WINTYTGEPTYADKFQG

SEQ ID NO: 1309 - protein, 8 aa, synthetic construct
  REGION 1..8: note = Description of Artificial Sequence: Synthetic peptide
  REGION 1..8: note = XENP024214 vhCDR3
DYYGSSPY

SEQ ID NO: 1310 - protein, 16 aa, synthetic construct
  REGION 1..16: note = Description of Artificial Sequence: Synthetic peptide
  REGION 1..16: note = XENP024214 vlCDR1
KSSQSIVHSNGNTYLE

SEQ ID NO: 1311 - protein, 7 aa, synthetic construct
  REGION 1..7: note = Description of Artificial Sequence: Synthetic peptide
  REGION 1..7: note = XENP024214 vlCDR2
KVSNRFS

SEQ ID NO: 1312 - protein, 9 aa, synthetic construct
  REGION 1..9: note = Description of Artificial Sequence: Synthetic peptide
  REGION 1..9: note = XENP024214 vlCDR3
FQGSHVPNT

SEQ ID NO: 1313 - protein, 251 aa, synthetic construct
  REGION 1..251: note = Description of Artificial Sequence: Synthetic polypeptide
  REGION 1..251: note = XENP024215 1C11_H3.83_L3_scFv
QIQLVQSGSELKKPGASVKVSCKASGYTFTHYGMNWVRQAPGQGLEWMGWINTNTGEPTYADGFTGRFVFSVDTSQSTAYLQISSLKAEDTAVYFCARDYYGSSPYWGQGTLVTVSSGKPGSGKPGSGKPGSGKPGSDVLMTQSPDSLAVSLGERATINCKSSQSIVHSNGNTYLEWYQQKPGQSPKLLIYKVSNRFSGVPDRFSGSGSGTDFTLTISSLQAEDVAVYYCFQGSHVPNTFGGGTKVEIKGS

SEQ ID NO: 1314 - protein, 117 aa, synthetic construct
  REGION 1..117: note = Description of Artificial Sequence: Synthetic polypeptide
  REGION 1..117: note = VH of XENP024215
QIQLVQSGSELKKPGASVKVSCKASGYTFTHYGMNWVRQAPGQGLEWMGWINTNTGEPTYADGFTGRFVFSVDTSQSTAYLQISSLKAEDTAVYFCARDYYGSSPYWGQGTLVTVSS

SEQ ID NO: 1315 - protein, 114 aa, synthetic construct; identical to SEQ ID NO: 649
  REGION 1..114: note = Description of Artificial Sequence: Synthetic polypeptide
  REGION 1..114: note = VL of XENP024215

SEQ ID NO: 1316 - protein, 5 aa, synthetic construct
  REGION 1..5: note = Description of Artificial Sequence: Synthetic peptide
  REGION 1..5: note = XENP024215 vhCDR1
HYGMN

SEQ ID NO: 1317 - protein, 17 aa, synthetic construct
  REGION 1..17: note = Description of Artificial Sequence: Synthetic peptide
  REGION 1..17: note = XENP024215 vhCDR2
WINTNTGEPTYADGFTG

SEQ ID NO: 1318 - protein, 8 aa, synthetic construct
  REGION 1..8: note = Description of Artificial Sequence: Synthetic peptide
  REGION 1..8: note = XENP024215 vhCDR3
DYYGSSPY

SEQ ID NO: 1319 - protein, 16 aa, synthetic construct
  REGION 1..16: note = Description of Artificial Sequence: Synthetic peptide
  REGION 1..16: note = XENP024215 vlCDR1
KSSQSIVHSNGNTYLE

SEQ ID NO: 1320 - protein, 7 aa, synthetic construct
  REGION 1..7: note = Description of Artificial Sequence: Synthetic peptide
  REGION 1..7: note = XENP024215 vlCDR2
KVSNRFS

SEQ ID NO: 1321 - protein, 9 aa, synthetic construct
  REGION 1..9: note = Description of Artificial Sequence: Synthetic peptide
  REGION 1..9: note = XENP024215 vlCDR3
FQGSHVPNT

SEQ ID NO: 1322 - protein, 251 aa, synthetic construct
  REGION 1..251: note = Description of Artificial Sequence: Synthetic polypeptide
  REGION 1..251: note = XENP024216 1C11_H3.84_L3_scFv
QIQLVQSGSELKKPGASVKVSCKASGYTFTHYGMNWVRQAPGQGLEWMGWINTYTGEPTYADKFKGRFVFSLDTSQSTAYLQISSLKAEDTAVYFCARDYYGSSPYWGQGTLVTVSSGKPGSGKPGSGKPGSGKPGSDVLMTQSPDSLAVSLGERATINCKSSQSIVHSNGNTYLEWYQQKPGQSPKLLIYKVSNRFSGVPDRFSGSGSGTDFTLTISSLQAEDVAVYYCFQGSHVPNTFGGGTKVEIKGS

SEQ ID NO: 1323 - protein, 117 aa, synthetic construct
  REGION 1..117: note = Description of Artificial Sequence: Synthetic polypeptide
  REGION 1..117: note = VH of XENP024216
QIQLVQSGSELKKPGASVKVSCKASGYTFTHYGMNWVRQAPGQGLEWMGWINTYTGEPTYADKFKGRFVFSLDTSQSTAYLQISSLKAEDTAVYFCARDYYGSSPYWGQGTLVTVSS

SEQ ID NO: 1324 - protein, 114 aa, synthetic construct; identical to SEQ ID NO: 649
  REGION 1..114: note = Description of Artificial Sequence: Synthetic polypeptide
  REGION 1..114: note = VL of XENP024216

SEQ ID NO: 1325 - protein, 5 aa, synthetic construct
  REGION 1..5: note = Description of Artificial Sequence: Synthetic peptide
  REGION 1..5: note = XENP024216 vhCDR1
HYGMN

SEQ ID NO: 1326 - protein, 17 aa, synthetic construct
  REGION 1..17: note = Description of Artificial Sequence: Synthetic peptide
  REGION 1..17: note = XENP024216 vhCDR2
WINTYTGEPTYADKFKG

SEQ ID NO: 1327 - protein, 8 aa, synthetic construct
  REGION 1..8: note = Description of Artificial Sequence: Synthetic peptide
  REGION 1..8: note = XENP024216 vhCDR3
DYYGSSPY

SEQ ID NO: 1328 - protein, 16 aa, synthetic construct
  REGION 1..16: note = Description of Artificial Sequence: Synthetic peptide
  REGION 1..16: note = XENP024216 vlCDR1
KSSQSIVHSNGNTYLE

SEQ ID NO: 1329 - protein, 7 aa, synthetic construct
  REGION 1..7: note = Description of Artificial Sequence: Synthetic peptide
  REGION 1..7: note = XENP024216 vlCDR2
KVSNRFS

SEQ ID NO: 1330 - protein, 9 aa, synthetic construct
  REGION 1..9: note = Description of Artificial Sequence: Synthetic peptide
  REGION 1..9: note = XENP024216 vlCDR3
FQGSHVPNT

SEQ ID NO: 1331 - protein, 251 aa, synthetic construct
  REGION 1..251: note = Description of Artificial Sequence: Synthetic polypeptide
  REGION 1..251: note = XENP024217 1C11_H3.85_L3_scFv
QIQLVQSGSELKKPGASVKVSCKASGYTFTHYGMNWVRQAPGQGLEWMGWINTYTGEPTYADKFQGRFVFSLDTSQSTAYLQISSLKAEDTAVYFCARDYYGSSPYWGQGTLVTVSSGKPGSGKPGSGKPGSGKPGSDVLMTQSPDSLAVSLGERATINCKSSQSIVHSNGNTYLEWYQQKPGQSPKLLIYKVSNRFSGVPDRFSGSGSGTDFTLTISSLQAEDVAVYYCFQGSHVPNTFGGGTKVEIKGS

SEQ ID NO: 1332 - protein, 117 aa, synthetic construct
  REGION 1..117: note = Description of Artificial Sequence: Synthetic polypeptide
  REGION 1..117: note = VH of XENP024217
QIQLVQSGSELKKPGASVKVSCKASGYTFTHYGMNWVRQAPGQGLEWMGWINTYTGEPTYADKFQGRFVFSLDTSQSTAYLQISSLKAEDTAVYFCARDYYGSSPYWGQGTLVTVSS

SEQ ID NO: 1333 - protein, 114 aa, synthetic construct; identical to SEQ ID NO: 649
  REGION 1..114: note = Description of Artificial Sequence: Synthetic polypeptide
  REGION 1..114: note = VL of XENP024217

SEQ ID NO: 1334 - protein, 5 aa, synthetic construct
  REGION 1..5: note = Description of Artificial Sequence: Synthetic peptide
  REGION 1..5: note = XENP024217 vhCDR1
HYGMN

SEQ ID NO: 1335 - protein, 17 aa, synthetic construct
  REGION 1..17: note = Description of Artificial Sequence: Synthetic peptide
  REGION 1..17: note = XENP024217 vhCDR2
WINTYTGEPTYADKFQG

SEQ ID NO: 1336 - protein, 8 aa, synthetic construct
  REGION 1..8: note = Description of Artificial Sequence: Synthetic peptide
  REGION 1..8: note = XENP024217 vhCDR3
DYYGSSPY

SEQ ID NO: 1337 - protein, 16 aa, synthetic construct
  REGION 1..16: note = Description of Artificial Sequence: Synthetic peptide
  REGION 1..16: note = XENP024217 vlCDR1
KSSQSIVHSNGNTYLE

SEQ ID NO: 1338 - protein, 7 aa, synthetic construct
  REGION 1..7: note = Description of Artificial Sequence: Synthetic peptide
  REGION 1..7: note = XENP024217 vlCDR2
KVSNRFS

SEQ ID NO: 1339 - protein, 9 aa, synthetic construct
  REGION 1..9: note = Description of Artificial Sequence: Synthetic peptide
  REGION 1..9: note = XENP024217 vlCDR3
FQGSHVPNT

SEQ ID NO: 1340 - protein, 251 aa, synthetic construct
  REGION 1..251: note = Description of Artificial Sequence: Synthetic polypeptide
  REGION 1..251: note = XENP024218 1C11_H3.86_L3_scFv
EIQLVQSGSELKKPGASVKVSCKASGYTFTHYGMNWVRQAPGQGLEWMGWINTYTGEPTYADGFTGRFVFSLDTSVSTAYLQISSLKAEDTAVYFCARDYYGSSPYWGQGTLVTVSSGKPGSGKPGSGKPGSGKPGSDVLMTQSPDSLAVSLGERATINCKSSQSIVHSNGNTYLEWYQQKPGQSPKLLIYKVSNRFSGVPDRFSGSGSGTDFTLTISSLQAEDVAVYYCFQGSHVPNTFGGGTKVEIKGS

SEQ ID NO: 1341 - protein, 117 aa, synthetic construct
  REGION 1..117: note = Description of Artificial Sequence: Synthetic polypeptide
  REGION 1..117: note = VH of XENP024218
EIQLVQSGSELKKPGASVKVSCKASGYTFTHYGMNWVRQAPGQGLEWMGWINTYTGEPTYADGFTGRFVFSLDTSVSTAYLQISSLKAEDTAVYFCARDYYGSSPYWGQGTLVTVSS

SEQ ID NO: 1342 - protein, 114 aa, synthetic construct; identical to SEQ ID NO: 649
  REGION 1..114: note = Description of Artificial Sequence: Synthetic polypeptide
  REGION 1..114: note = VL of XENP024218

SEQ ID NO: 1343 - protein, 5 aa, synthetic construct
  REGION 1..5: note = Description of Artificial Sequence: Synthetic peptide
  REGION 1..5: note = XENP024218 vhCDR1
HYGMN

SEQ ID NO: 1344 - protein, 17 aa, synthetic construct
  REGION 1..17: note = Description of Artificial Sequence: Synthetic peptide
  REGION 1..17: note = XENP024218 vhCDR2
WINTYTGEPTYADGFTG

SEQ ID NO: 1345 - protein, 8 aa, synthetic construct
  REGION 1..8: note = Description of Artificial Sequence: Synthetic peptide
  REGION 1..8: note = XENP024218 vhCDR3
DYYGSSPY

SEQ ID NO: 1346 - protein, 16 aa, synthetic construct
  REGION 1..16: note = Description of Artificial Sequence: Synthetic peptide
  REGION 1..16: note = XENP024218 vlCDR1
KSSQSIVHSNGNTYLE

SEQ ID NO: 1347 - protein, 7 aa, synthetic construct
  REGION 1..7: note = Description of Artificial Sequence: Synthetic peptide
  REGION 1..7: note = XENP024218 vlCDR2
KVSNRFS

SEQ ID NO: 1348 - protein, 9 aa, synthetic construct
  REGION 1..9: note = Description of Artificial Sequence: Synthetic peptide
  REGION 1..9: note = XENP024218 vlCDR3
FQGSHVPNT

SEQ ID NO: 1349 - protein, 251 aa, synthetic construct
  REGION 1..251: note = Description of Artificial Sequence: Synthetic polypeptide
  REGION 1..251: note = XENP024219 1C11_H3.88_L3_scFv
QIQLVESGSELKKPGASVKVSCKASGYTFTHYGMNWVRQAPGQGLEWMGWINTYTGEPTYADGFTGRFVFSLDTSVSTAYLQISSLKAEDTAVYFCARDYYGSSPYWGQGTLVTVSSGKPGSGKPGSGKPGSGKPGSDVLMTQSPDSLAVSLGERATINCKSSQSIVHSNGNTYLEWYQQKPGQSPKLLIYKVSNRFSGVPDRFSGSGSGTDFTLTISSLQAEDVAVYYCFQGSHVPNTFGGGTKVEIKGS

SEQ ID NO: 1350 - protein, 117 aa, synthetic construct
  REGION 1..117: note = Description of Artificial Sequence: Synthetic polypeptide
  REGION 1..117: note = VH of XENP024219
QIQLVESGSELKKPGASVKVSCKASGYTFTHYGMNWVRQAPGQGLEWMGWINTYTGEPTYADGFTGRFVFSLDTSVSTAYLQISSLKAEDTAVYFCARDYYGSSPYWGQGTLVTVSS

SEQ ID NO: 1351 - protein, 114 aa, synthetic construct; identical to SEQ ID NO: 649
  REGION 1..114: note = Description of Artificial Sequence: Synthetic polypeptide
  REGION 1..114: note = VL of XENP024219

SEQ ID NO: 1352 - protein, 5 aa, synthetic construct
  REGION 1..5: note = Description of Artificial Sequence: Synthetic peptide
  REGION 1..5: note = XENP024219 vhCDR1
HYGMN

SEQ ID NO: 1353 - protein, 17 aa, synthetic construct
  REGION 1..17: note = Description of Artificial Sequence: Synthetic peptide
  REGION 1..17: note = XENP024219 vhCDR2
WINTYTGEPTYADGFTG

SEQ ID NO: 1354 - protein, 8 aa, synthetic construct
  REGION 1..8: note = Description of Artificial Sequence: Synthetic peptide
  REGION 1..8: note = XENP024219 vhCDR3
DYYGSSPY

SEQ ID NO: 1355 - protein, 16 aa, synthetic construct
  REGION 1..16: note = Description of Artificial Sequence: Synthetic peptide
  REGION 1..16: note = XENP024219 vlCDR1
KSSQSIVHSNGNTYLE

SEQ ID NO: 1356 - protein, 7 aa, synthetic construct
  REGION 1..7: note = Description of Artificial Sequence: Synthetic peptide
  REGION 1..7: note = XENP024219 vlCDR2
KVSNRFS

SEQ ID NO: 1357 - protein, 9 aa, synthetic construct
  REGION 1..9: note = Description of Artificial Sequence: Synthetic peptide
  REGION 1..9: note = XENP024219 vlCDR3
FQGSHVPNT

SEQ ID NO: 1358 - protein, 251 aa, synthetic construct
  REGION 1..251: note = Description of Artificial Sequence: Synthetic polypeptide
  REGION 1..251: note = XENP024220 1C11_H3.89_L3_scFv
QIQLVQSGSGLKKPGASVKVSCKASGYTFTHYGMNWVRQAPGQGLEWMGWINTYTGEPTYADGFTGRFVFSLDTSVSTAYLQISSLKAEDTAVYFCARDYYGSSPYWGQGTLVTVSSGKPGSGKPGSGKPGSGKPGSDVLMTQSPDSLAVSLGERATINCKSSQSIVHSNGNTYLEWYQQKPGQSPKLLIYKVSNRFSGVPDRFSGSGSGTDFTLTISSLQAEDVAVYYCFQGSHVPNTFGGGTKVEIKGS

SEQ ID NO: 1359 - protein, 117 aa, synthetic construct
  REGION 1..117: note = Description of Artificial Sequence: Synthetic polypeptide
  REGION 1..117: note = VH of XENP024220
QIQLVQSGSGLKKPGASVKVSCKASGYTFTHYGMNWVRQAPGQGLEWMGWINTYTGEPTYADGFTGRFVFSLDTSVSTAYLQISSLKAEDTAVYFCARDYYGSSPYWGQGTLVTVSS

SEQ ID NO: 1360 - protein, 114 aa, synthetic construct; identical to SEQ ID NO: 649
  REGION 1..114: note = Description of Artificial Sequence: Synthetic polypeptide
  REGION 1..114: note = VL of XENP024220

SEQ ID NO: 1361 - protein, 5 aa, synthetic construct
  REGION 1..5: note = Description of Artificial Sequence: Synthetic peptide
  REGION 1..5: note = XENP024220 vhCDR1
HYGMN

SEQ ID NO: 1362 - protein, 17 aa, synthetic construct
  REGION 1..17: note = Description of Artificial Sequence: Synthetic peptide
  REGION 1..17: note = XENP024220 vhCDR2
WINTYTGEPTYADGFTG

SEQ ID NO: 1363 - protein, 8 aa, synthetic construct
  REGION 1..8: note = Description of Artificial Sequence: Synthetic peptide
  REGION 1..8: note = XENP024220 vhCDR3
DYYGSSPY

SEQ ID NO: 1364 - protein, 16 aa, synthetic construct
  REGION 1..16: note = Description of Artificial Sequence: Synthetic peptide
  REGION 1..16: note = XENP024220 vlCDR1
KSSQSIVHSNGNTYLE

SEQ ID NO: 1365 - protein, 7 aa, synthetic construct
  REGION 1..7: note = Description of Artificial Sequence: Synthetic peptide
  REGION 1..7: note = XENP024220 vlCDR2
KVSNRFS

SEQ ID NO: 1366 - protein, 9 aa, synthetic construct
  REGION 1..9: note = Description of Artificial Sequence: Synthetic peptide
  REGION 1..9: note = XENP024220 vlCDR3
FQGSHVPNT

SEQ ID NO: 1367 - protein, 251 aa, synthetic construct
  REGION 1..251: note = Description of Artificial Sequence: Synthetic polypeptide
  REGION 1..251: note = XENP024221 1C11_H3.90_L3_scFv
QIQLVQSGSVLKKPGASVKVSCKASGYTFTHYGMNWVRQAPGQGLEWMGWINTYTGEPTYADGFTGRFVFSLDTSVSTAYLQISSLKAEDTAVYFCARDYYGSSPYWGQGTLVTVSSGKPGSGKPGSGKPGSGKPGSDVLMTQSPDSLAVSLGERATINCKSSQSIVHSNGNTYLEWYQQKPGQSPKLLIYKVSNRFSGVPDRFSGSGSGTDFTLTISSLQAEDVAVYYCFQGSHVPNTFGGGTKVEIKGS

SEQ ID NO: 1368 - protein, 117 aa, synthetic construct
  REGION 1..117: note = Description of Artificial Sequence: Synthetic polypeptide
  REGION 1..117: note = VH of XENP024221
QIQLVQSGSVLKKPGASVKVSCKASGYTFTHYGMNWVRQAPGQGLEWMGWINTYTGEPTYADGFTGRFVFSLDTSVSTAYLQISSLKAEDTAVYFCARDYYGSSPYWGQGTLVTVSS

SEQ ID NO: 1369 - protein, 114 aa, synthetic construct; identical to SEQ ID NO: 649
  REGION 1..114: note = Description of Artificial Sequence: Synthetic polypeptide
  REGION 1..114: note = VL of XENP024221

SEQ ID NO: 1370 - protein, 5 aa, synthetic construct
  REGION 1..5: note = Description of Artificial Sequence: Synthetic peptide
  REGION 1..5: note = XENP024221 vhCDR1
HYGMN

SEQ ID NO: 1371 - protein, 17 aa, synthetic construct
  REGION 1..17: note = Description of Artificial Sequence: Synthetic peptide
  REGION 1..17: note = XENP024221 vhCDR2
WINTYTGEPTYADGFTG

SEQ ID NO: 1372 - protein, 8 aa, synthetic construct
  REGION 1..8: note = Description of Artificial Sequence: Synthetic peptide
  REGION 1..8: note = XENP024221 vhCDR3
DYYGSSPY

SEQ ID NO: 1373 - protein, 16 aa, synthetic construct
  REGION 1..16: note = Description of Artificial Sequence: Synthetic peptide
  REGION 1..16: note = XENP024221 vlCDR1
KSSQSIVHSNGNTYLE

SEQ ID NO: 1374 - protein, 7 aa, synthetic construct
  REGION 1..7: note = Description of Artificial Sequence: Synthetic peptide
  REGION 1..7: note = XENP024221 vlCDR2
KVSNRFS

SEQ ID NO: 1375 - protein, 9 aa, synthetic construct
  REGION 1..9: note = Description of Artificial Sequence: Synthetic peptide
  REGION 1..9: note = XENP024221 vlCDR3
FQGSHVPNT

SEQ ID NO: 1376 - protein, 251 aa, synthetic construct
  REGION 1..251: note = Description of Artificial Sequence: Synthetic polypeptide
  REGION 1..251: note = XENP024222 1C11_H3.91_L3_scFv
QIQLVQSGSELVKPGASVKVSCKASGYTFTHYGMNWVRQAPGQGLEWMGWINTYTGEPTYADGFTGRFVFSLDTSVSTAYLQISSLKAEDTAVYFCARDYYGSSPYWGQGTLVTVSSGKPGSGKPGSGKPGSGKPGSDVLMTQSPDSLAVSLGERATINCKSSQSIVHSNGNTYLEWYQQKPGQSPKLLIYKVSNRFSGVPDRFSGSGSGTDFTLTISSLQAEDVAVYYCFQGSHVPNTFGGGTKVEIKGS

SEQ ID NO: 1377 - protein, 117 aa, synthetic construct
  REGION 1..117: note = Description of Artificial Sequence: Synthetic polypeptide
  REGION 1..117: note = VH of XENP024222
QIQLVQSGSELVKPGASVKVSCKASGYTFTHYGMNWVRQAPGQGLEWMGWINTYTGEPTYADGFTGRFVFSLDTSVSTAYLQISSLKAEDTAVYFCARDYYGSSPYWGQGTLVTVSS

SEQ ID NO: 1378 - protein, 114 aa, synthetic construct; identical to SEQ ID NO: 649
  REGION 1..114: note = Description of Artificial Sequence: Synthetic polypeptide
  REGION 1..114: note = VL of XENP024222

SEQ ID NO: 1379 - protein, 5 aa, synthetic construct
  REGION 1..5: note = Description of Artificial Sequence: Synthetic peptide
  REGION 1..5: note = XENP024222 vhCDR1
HYGMN

SEQ ID NO: 1380 - protein, 17 aa, synthetic construct
  REGION 1..17: note = Description of Artificial Sequence: Synthetic peptide
  REGION 1..17: note = XENP024222 vhCDR2
WINTYTGEPTYADGFTG

SEQ ID NO: 1381 - protein, 8 aa, synthetic construct
  REGION 1..8: note = Description of Artificial Sequence: Synthetic peptide
  REGION 1..8: note = XENP024222 vhCDR3
DYYGSSPY

SEQ ID NO: 1382 - protein, 16 aa, synthetic construct
  REGION 1..16: note = Description of Artificial Sequence: Synthetic peptide
  REGION 1..16: note = XENP024222 vlCDR1
KSSQSIVHSNGNTYLE

SEQ ID NO: 1383 - protein, 7 aa, synthetic construct
  REGION 1..7: note = Description of Artificial Sequence: Synthetic peptide
  REGION 1..7: note = XENP024222 vlCDR2
KVSNRFS

SEQ ID NO: 1384 - protein, 9 aa, synthetic construct
  REGION 1..9: note = Description of Artificial Sequence: Synthetic peptide
  REGION 1..9: note = XENP024222 vlCDR3
FQGSHVPNT

SEQ ID NO: 1385 - protein, 251 aa, synthetic construct
  REGION 1..251: note = Description of Artificial Sequence: Synthetic polypeptide
  REGION 1..251: note = XENP024223 1C11_H3.92_L3_scFv
QIQLVQSGSELKQPGASVKVSCKASGYTFTHYGMNWVRQAPGQGLEWMGWINTYTGEPTYADGFTGRFVFSLDTSVSTAYLQISSLKAEDTAVYFCARDYYGSSPYWGQGTLVTVSSGKPGSGKPGSGKPGSGKPGSDVLMTQSPDSLAVSLGERATINCKSSQSIVHSNGNTYLEWYQQKPGQSPKLLIYKVSNRFSGVPDRFSGSGSGTDFTLTISSLQAEDVAVYYCFQGSHVPNTFGGGTKVEIKGS

SEQ ID NO: 1386 - protein, 117 aa, synthetic construct
  REGION 1..117: note = Description of Artificial Sequence: Synthetic polypeptide
  REGION 1..117: note = VH of XENP024223
QIQLVQSGSELKQPGASVKVSCKASGYTFTHYGMNWVRQAPGQGLEWMGWINTYTGEPTYADGFTGRFVFSLDTSVSTAYLQISSLKAEDTAVYFCARDYYGSSPYWGQGTLVTVSS

SEQ ID NO: 1387 - protein, 114 aa, synthetic construct; identical to SEQ ID NO: 649
  REGION 1..114: note = Description of Artificial Sequence: Synthetic polypeptide
  REGION 1..114: note = VL of XENP024223

SEQ ID NO: 1388 - protein, 5 aa, synthetic construct
  REGION 1..5: note = Description of Artificial Sequence: Synthetic peptide
  REGION 1..5: note = XENP024223 vhCDR1
HYGMN

SEQ ID NO: 1389 - protein, 17 aa, synthetic construct
  REGION 1..17: note = Description of Artificial Sequence: Synthetic peptide
  REGION 1..17: note = XENP024223 vhCDR2
WINTYTGEPTYADGFTG

SEQ ID NO: 1390 - protein, 8 aa, synthetic construct
  REGION 1..8: note = Description of Artificial Sequence: Synthetic peptide
  REGION 1..8: note = XENP024223 vhCDR3
DYYGSSPY

SEQ ID NO: 1391 - protein, 16 aa, synthetic construct
  REGION 1..16: note = Description of Artificial Sequence: Synthetic peptide
  REGION 1..16: note = XENP024223 vlCDR1
KSSQSIVHSNGNTYLE

SEQ ID NO: 1392 - protein, 7 aa, synthetic construct
  REGION 1..7: note = Description of Artificial Sequence: Synthetic peptide
  REGION 1..7: note = XENP024223 vlCDR2
KVSNRFS

SEQ ID NO: 1393 - protein, 9 aa, synthetic construct
  REGION 1..9: note = Description of Artificial Sequence: Synthetic peptide
  REGION 1..9: note = XENP024223 vlCDR3
FQGSHVPNT

SEQ ID NO: 1394 - protein, 251 aa, synthetic construct
  REGION 1..251: note = Description of Artificial Sequence: Synthetic polypeptide
  REGION 1..251: note = XENP024224 1C11_H3.93_L3_scFv
QIQLVQSGSELKKPSASVKVSCKASGYTFTHYGMNWVRQAPGQGLEWMGWINTYTGEPTYADGFTGRFVFSLDTSVSTAYLQISSLKAEDTAVYFCARDYYGSSPYWGQGTLVTVSSGKPGSGKPGSGKPGSGKPGSDVLMTQSPDSLAVSLGERATINCKSSQSIVHSNGNTYLEWYQQKPGQSPKLLIYKVSNRFSGVPDRFSGSGSGTDFTLTISSLQAEDVAVYYCFQGSHVPNTFGGGTKVEIKGS

SEQ ID NO: 1395 - protein, 117 aa, synthetic construct
  REGION 1..117: note = Description of Artificial Sequence: Synthetic polypeptide
  REGION 1..117: note = VH of XENP024224
QIQLVQSGSELKKPSASVKVSCKASGYTFTHYGMNWVRQAPGQGLEWMGWINTYTGEPTYADGFTGRFVFSLDTSVSTAYLQISSLKAEDTAVYFCARDYYGSSPYWGQGTLVTVSS

SEQ ID NO: 1396 - protein, 114 aa, synthetic construct; identical to SEQ ID NO: 649
  REGION 1..114: note = Description of Artificial Sequence: Synthetic polypeptide
  REGION 1..114: note = VL of XENP024224

SEQ ID NO: 1397 - protein, 5 aa, synthetic construct
  REGION 1..5: note = Description of Artificial Sequence: Synthetic peptide
  REGION 1..5: note = XENP024224 vhCDR1
HYGMN

SEQ ID NO: 1398 - protein, 17 aa, synthetic construct
  REGION 1..17: note = Description of Artificial Sequence: Synthetic peptide
  REGION 1..17: note = XENP024224 vhCDR2
WINTYTGEPTYADGFTG

SEQ ID NO: 1399 - protein, 8 aa, synthetic construct
  REGION 1..8: note = Description of Artificial Sequence: Synthetic peptide
  REGION 1..8: note = XENP024224 vhCDR3
DYYGSSPY

SEQ ID NO: 1400 - protein, 16 aa, synthetic construct
  REGION 1..16: note = Description of Artificial Sequence: Synthetic peptide
  REGION 1..16: note = XENP024224 vlCDR1
KSSQSIVHSNGNTYLE

SEQ ID NO: 1401 - protein, 7 aa, synthetic construct
  REGION 1..7: note = Description of Artificial Sequence: Synthetic peptide
  REGION 1..7: note = XENP024224 vlCDR2
KVSNRFS

SEQ ID NO: 1402 - protein, 9 aa, synthetic construct
  REGION 1..9: note = Description of Artificial Sequence: Synthetic peptide
  REGION 1..9: note = XENP024224 vlCDR3
FQGSHVPNT

SEQ ID NO: 1403 - protein, 251 aa, synthetic construct
  REGION 1..251: note = Description of Artificial Sequence: Synthetic polypeptide
  REGION 1..251: note = XENP024225 1C11_H3.94_L3_scFv
QIQLVQSGSELKKPTASVKVSCKASGYTFTHYGMNWVRQAPGQGLEWMGWINTYTGEPTYADGFTGRFVFSLDTSVSTAYLQISSLKAEDTAVYFCARDYYGSSPYWGQGTLVTVSSGKPGSGKPGSGKPGSGKPGSDVLMTQSPDSLAVSLGERATINCKSSQSIVHSNGNTYLEWYQQKPGQSPKLLIYKVSNRFSGVPDRFSGSGSGTDFTLTISSLQAEDVAVYYCFQGSHVPNTFGGGTKVEIKGS

SEQ ID NO: 1404 - protein, 117 aa, synthetic construct
  REGION 1..117: note = Description of Artificial Sequence: Synthetic polypeptide
  REGION 1..117: note = VH of XENP024225
QIQLVQSGSELKKPTASVKVSCKASGYTFTHYGMNWVRQAPGQGLEWMGWINTYTGEPTYADGFTGRFVFSLDTSVSTAYLQISSLKAEDTAVYFCARDYYGSSPYWGQGTLVTVSS

SEQ ID NO: 1405 - protein, 114 aa, synthetic construct; identical to SEQ ID NO: 649
  REGION 1..114: note = Description of Artificial Sequence: Synthetic polypeptide
  REGION 1..114: note = VL of XENP024225

SEQ ID NO: 1406 - protein, 5 aa, synthetic construct
  REGION 1..5: note = Description of Artificial Sequence: Synthetic peptide
  REGION 1..5: note = XENP024225 vhCDR1
HYGMN

SEQ ID NO: 1407 - protein, 17 aa, synthetic construct
  REGION 1..17: note = Description of Artificial Sequence: Synthetic peptide
  REGION 1..17: note = XENP024225 vhCDR2
WINTYTGEPTYADGFTG

SEQ ID NO: 1408 - protein, 8 aa, synthetic construct
  REGION 1..8: note = Description of Artificial Sequence: Synthetic peptide
  REGION 1..8: note = XENP024225 vhCDR3
DYYGSSPY

SEQ ID NO: 1409 - protein, 16 aa, synthetic construct
  REGION 1..16: note = Description of Artificial Sequence: Synthetic peptide
  REGION 1..16: note = XENP024225 vlCDR1
KSSQSIVHSNGNTYLE

SEQ ID NO: 1410 - protein, 7 aa, synthetic construct
  REGION 1..7: note = Description of Artificial Sequence: Synthetic peptide
  REGION 1..7: note = XENP024225 vlCDR2
KVSNRFS

SEQ ID NO: 1411 - protein, 9 aa, synthetic construct
  REGION 1..9: note = Description of Artificial Sequence: Synthetic peptide
  REGION 1..9: note = XENP024225 vlCDR3
FQGSHVPNT

SEQ ID NO: 1412 - protein, 251 aa, synthetic construct
  REGION 1..251: note = Description of Artificial Sequence: Synthetic polypeptide
  REGION 1..251: note = XENP024226 1C11_H3.95_L3_scFv
QIQLVQSGSELKKPGGSVKVSCKASGYTFTHYGMNWVRQAPGQGLEWMGWINTYTGEPTYADGFTGRFVFSLDTSVSTAYLQISSLKAEDTAVYFCARDYYGSSPYWGQGTLVTVSSGKPGSGKPGSGKPGSGKPGSDVLMTQSPDSLAVSLGERATINCKSSQSIVHSNGNTYLEWYQQKPGQSPKLLIYKVSNRFSGVPDRFSGSGSGTDFTLTISSLQAEDVAVYYCFQGSHVPNTFGGGTKVEIKGS

SEQ ID NO: 1413 - protein, 117 aa, synthetic construct
  REGION 1..117: note = Description of Artificial Sequence: Synthetic polypeptide
  REGION 1..117: note = VH of XENP024226
QIQLVQSGSELKKPGGSVKVSCKASGYTFTHYGMNWVRQAPGQGLEWMGWINTYTGEPTYADGFTGRFVFSLDTSVSTAYLQISSLKAEDTAVYFCARDYYGSSPYWGQGTLVTVSS

SEQ ID NO: 1414 - protein, 114 aa, synthetic construct; identical to SEQ ID NO: 649
  REGION 1..114: note = Description of Artificial Sequence: Synthetic polypeptide
  REGION 1..114: note = VL of XENP024226

SEQ ID NO: 1415 - protein, 5 aa, synthetic construct
  REGION 1..5: note = Description of Artificial Sequence: Synthetic peptide
  REGION 1..5: note = XENP024226 vhCDR1
HYGMN

SEQ ID NO: 1416 - protein, 17 aa, synthetic construct
  REGION 1..17: note = Description of Artificial Sequence: Synthetic peptide
  REGION 1..17: note = XENP024226 vhCDR2
WINTYTGEPTYADGFTG

SEQ ID NO: 1417 - protein, 8 aa, synthetic construct
  REGION 1..8: note = Description of Artificial Sequence: Synthetic peptide
  REGION 1..8: note = XENP024226 vhCDR3
DYYGSSPY

SEQ ID NO: 1418 - protein, 16 aa, synthetic construct
  REGION 1..16: note = Description of Artificial Sequence: Synthetic peptide
  REGION 1..16: note = XENP024226 vlCDR1
KSSQSIVHSNGNTYLE

SEQ ID NO: 1419 - protein, 7 aa, synthetic construct
  REGION 1..7: note = Description of Artificial Sequence: Synthetic peptide
  REGION 1..7: note = XENP024226 vlCDR2
KVSNRFS

SEQ ID NO: 1420 - protein, 9 aa, synthetic construct
  REGION 1..9: note = Description of Artificial Sequence: Synthetic peptide
  REGION 1..9: note = XENP024226 vlCDR3
FQGSHVPNT

SEQ ID NO: 1421 - protein, 251 aa, synthetic construct
  REGION 1..251: note = Description of Artificial Sequence: Synthetic polypeptide
  REGION 1..251: note = XENP024227 1C11_H3.96_L3_scFv
QIQLVQSGSELKKPGQSVKVSCKASGYTFTHYGMNWVRQAPGQGLEWMGWINTYTGEPTYADGFTGRFVFSLDTSVSTAYLQISSLKAEDTAVYFCARDYYGSSPYWGQGTLVTVSSGKPGSGKPGSGKPGSGKPGSDVLMTQSPDSLAVSLGERATINCKSSQSIVHSNGNTYLEWYQQKPGQSPKLLIYKVSNRFSGVPDRFSGSGSGTDFTLTISSLQAEDVAVYYCFQGSHVPNTFGGGTKVEIKGS

SEQ ID NO: 1422 - protein, 117 aa, synthetic construct
  REGION 1..117: note = Description of Artificial Sequence: Synthetic polypeptide
  REGION 1..117: note = VH of XENP024227
QIQLVQSGSELKKPGQSVKVSCKASGYTFTHYGMNWVRQAPGQGLEWMGWINTYTGEPTYADGFTGRFVFSLDTSVSTAYLQISSLKAEDTAVYFCARDYYGSSPYWGQGTLVTVSS

SEQ ID NO: 1423 - protein, 114 aa, synthetic construct; identical to SEQ ID NO: 649
  REGION 1..114: note = Description of Artificial Sequence: Synthetic polypeptide
  REGION 1..114: note = VL of XENP024227

SEQ ID NO: 1424 - protein, 5 aa, synthetic construct
  REGION 1..5: note = Description of Artificial Sequence: Synthetic peptide
  REGION 1..5: note = XENP024227 vhCDR1
HYGMN

SEQ ID NO: 1425 - protein, 17 aa, synthetic construct
  REGION 1..17: note = Description of Artificial Sequence: Synthetic peptide
  REGION 1..17: note = XENP024227 vhCDR2
WINTYTGEPTYADGFTG

SEQ ID NO: 1426 - protein, 8 aa, synthetic construct
  REGION 1..8: note = Description of Artificial Sequence: Synthetic peptide
  REGION 1..8: note = XENP024227 vhCDR3
DYYGSSPY

SEQ ID NO: 1427 - protein, 16 aa, synthetic construct
  REGION 1..16: note = Description of Artificial Sequence: Synthetic peptide
  REGION 1..16: note = XENP024227 vlCDR1
KSSQSIVHSNGNTYLE

SEQ ID NO: 1428 - protein, 7 aa, synthetic construct
  REGION 1..7: note = Description of Artificial Sequence: Synthetic peptide
  REGION 1..7: note = XENP024227 vlCDR2
KVSNRFS

SEQ ID NO: 1429 - protein, 9 aa, synthetic construct
  REGION 1..9: note = Description of Artificial Sequence: Synthetic peptide
  REGION 1..9: note = XENP024227 vlCDR3
FQGSHVPNT

SEQ ID NO: 1430 - protein, 251 aa, synthetic construct
  REGION 1..251: note = Description of Artificial Sequence: Synthetic polypeptide
  REGION 1..251: note = XENP024228 1C11_H3.97_L3_scFv
QIQLVQSGSELKKPGESVKVSCKASGYTFTHYGMNWVRQAPGQGLEWMGWINTYTGEPTYADGFTGRFVFSLDTSVSTAYLQISSLKAEDTAVYFCARDYYGSSPYWGQGTLVTVSSGKPGSGKPGSGKPGSGKPGSDVLMTQSPDSLAVSLGERATINCKSSQSIVHSNGNTYLEWYQQKPGQSPKLLIYKVSNRFSGVPDRFSGSGSGTDFTLTISSLQAEDVAVYYCFQGSHVPNTFGGGTKVEIKGS

SEQ ID NO: 1431 - protein, 117 aa, synthetic construct
  REGION 1..117: note = Description of Artificial Sequence: Synthetic polypeptide
  REGION 1..117: note = VH of XENP024228
QIQLVQSGSELKKPGESVKVSCKASGYTFTHYGMNWVRQAPGQGLEWMGWINTYTGEPTYADGFTGRFVFSLDTSVSTAYLQISSLKAEDTAVYFCARDYYGSSPYWGQGTLVTVSS

SEQ ID NO: 1432 - protein, 114 aa, synthetic construct; identical to SEQ ID NO: 649
  REGION 1..114: note = Description of Artificial Sequence: Synthetic polypeptide
  REGION 1..114: note = VL of XENP024228

SEQ ID NO: 1433 - protein, 5 aa, synthetic construct
  REGION 1..5: note = Description of Artificial Sequence: Synthetic peptide
  REGION 1..5: note = XENP024228 vhCDR1
HYGMN

SEQ ID NO: 1434 - protein, 17 aa, synthetic construct
  REGION 1..17: note = Description of Artificial Sequence: Synthetic peptide
  REGION 1..17: note = XENP024228 vhCDR2
WINTYTGEPTYADGFTG

SEQ ID NO: 1435 - protein, 8 aa, synthetic construct
  REGION 1..8: note = Description of Artificial Sequence: Synthetic peptide
  REGION 1..8: note = XENP024228 vhCDR3
DYYGSSPY

SEQ ID NO: 1436 - protein, 16 aa, synthetic construct
  REGION 1..16: note = Description of Artificial Sequence: Synthetic peptide
  REGION 1..16: note = XENP024228 vlCDR1
KSSQSIVHSNGNTYLE

SEQ ID NO: 1437 - protein, 7 aa, synthetic construct
  REGION 1..7: note = Description of Artificial Sequence: Synthetic peptide
  REGION 1..7: note = XENP024228 vlCDR2
KVSNRFS

SEQ ID NO: 1438 - protein, 9 aa, synthetic construct
  REGION 1..9: note = Description of Artificial Sequence: Synthetic peptide
  REGION 1..9: note = XENP024228 vlCDR3
FQGSHVPNT

SEQ ID NO: 1439 - protein, 251 aa, synthetic construct
  REGION 1..251: note = Description of Artificial Sequence: Synthetic polypeptide
  REGION 1..251: note = XENP024229 1C11_H3.98_L3_scFv
QIQLVQSGSELKKPGRSVKVSCKASGYTFTHYGMNWVRQAPGQGLEWMGWINTYTGEPTYADGFTGRFVFSLDTSVSTAYLQISSLKAEDTAVYFCARDYYGSSPYWGQGTLVTVSSGKPGSGKPGSGKPGSGKPGSDVLMTQSPDSLAVSLGERATINCKSSQSIVHSNGNTYLEWYQQKPGQSPKLLIYKVSNRFSGVPDRFSGSGSGTDFTLTISSLQAEDVAVYYCFQGSHVPNTFGGGTKVEIKGS

SEQ ID NO: 1440 - protein, 117 aa, synthetic construct
  REGION 1..117: note = Description of Artificial Sequence: Synthetic polypeptide
  REGION 1..117: note = VH of XENP024229
QIQLVQSGSELKKPGRSVKVSCKASGYTFTHYGMNWVRQAPGQGLEWMGWINTYTGEPTYADGFTGRFVFSLDTSVSTAYLQISSLKAEDTAVYFCARDYYGSSPYWGQGTLVTVSS

SEQ ID NO: 1441 - protein, 114 aa, synthetic construct; identical to SEQ ID NO: 649
  REGION 1..114: note = Description of Artificial Sequence: Synthetic polypeptide
  REGION 1..114: note = VL of XENP024229

SEQ ID NO: 1442 - protein, 5 aa, synthetic construct
  REGION 1..5: note = Description of Artificial Sequence: Synthetic peptide
  REGION 1..5: note = XENP024229 vhCDR1
HYGMN

SEQ ID NO: 1443 - protein, 17 aa, synthetic construct
  REGION 1..17: note = Description of Artificial Sequence: Synthetic peptide
  REGION 1..17: note = XENP024229 vhCDR2
WINTYTGEPTYADGFTG

SEQ ID NO: 1444 - protein, 8 aa, synthetic construct
  REGION 1..8: note = Description of Artificial Sequence: Synthetic peptide
  REGION 1..8: note = XENP024229 vhCDR3
DYYGSSPY

SEQ ID NO: 1445 - protein, 16 aa, synthetic construct
  REGION 1..16: note = Description of Artificial Sequence: Synthetic peptide
  REGION 1..16: note = XENP024229 vlCDR1
KSSQSIVHSNGNTYLE

SEQ ID NO: 1446 - protein, 7 aa, synthetic construct
  REGION 1..7: note = Description of Artificial Sequence: Synthetic peptide
  REGION 1..7: note = XENP024229 vlCDR2
KVSNRFS

SEQ ID NO: 1447 - protein, 9 aa, synthetic construct
  REGION 1..9: note = Description of Artificial Sequence: Synthetic peptide
  REGION 1..9: note = XENP024229 vlCDR3
FQGSHVPNT

SEQ ID NO: 1448 - protein, 251 aa, synthetic construct
  REGION 1..251: note = Description of Artificial Sequence: Synthetic polypeptide
  REGION 1..251: note = XENP024230 1C11_H3.99_L3_scFv
QIQLVQSGSELKKPGATVKVSCKASGYTFTHYGMNWVRQAPGQGLEWMGWINTYTGEPTYADGFTGRFVFSLDTSVSTAYLQISSLKAEDTAVYFCARDYYGSSPYWGQGTLVTVSSGKPGSGKPGSGKPGSGKPGSDVLMTQSPDSLAVSLGERATINCKSSQSIVHSNGNTYLEWYQQKPGQSPKLLIYKVSNRFSGVPDRFSGSGSGTDFTLTISSLQAEDVAVYYCFQGSHVPNTFGGGTKVEIKGS

SEQ ID NO: 1449 - protein, 117 aa, synthetic construct
  REGION 1..117: note = Description of Artificial Sequence: Synthetic polypeptide
  REGION 1..117: note = VH of XENP024230
QIQLVQSGSELKKPGATVKVSCKASGYTFTHYGMNWVRQAPGQGLEWMGWINTYTGEPTYADGFTGRFVFSLDTSVSTAYLQISSLKAEDTAVYFCARDYYGSSPYWGQGTLVTVSS

SEQ ID NO: 1450 - protein, 114 aa, synthetic construct; identical to SEQ ID NO: 649
  REGION 1..114: note = Description of Artificial Sequence: Synthetic polypeptide
  REGION 1..114: note = VL of XENP024230

SEQ ID NO: 1451 - protein, 5 aa, synthetic construct
  REGION 1..5: note = Description of Artificial Sequence: Synthetic peptide
  REGION 1..5: note = XENP024230 vhCDR1
HYGMN

SEQ ID NO: 1452 - protein, 17 aa, synthetic construct
  REGION 1..17: note = Description of Artificial Sequence: Synthetic peptide
  REGION 1..17: note = XENP024230 vhCDR2
WINTYTGEPTYADGFTG

SEQ ID NO: 1453 - protein, 8 aa, synthetic construct
  REGION 1..8: note = Description of Artificial Sequence: Synthetic peptide
  REGION 1..8: note = XENP024230 vhCDR3
DYYGSSPY

SEQ ID NO: 1454 - protein, 16 aa, synthetic construct
  REGION 1..16: note = Description of Artificial Sequence: Synthetic peptide
  REGION 1..16: note = XENP024230 vlCDR1
KSSQSIVHSNGNTYLE

SEQ ID NO: 1455 - protein, 7 aa, synthetic construct
  REGION 1..7: note = Description of Artificial Sequence: Synthetic peptide
  REGION 1..7: note = XENP024230 vlCDR2
KVSNRFS

SEQ ID NO: 1456 - protein, 9 aa, synthetic construct
  REGION 1..9: note = Description of Artificial Sequence: Synthetic peptide
  REGION 1..9: note = XENP024230 vlCDR3
FQGSHVPNT

SEQ ID NO: 1457 - protein, 251 aa, synthetic construct
  REGION 1..251: note = Description of Artificial Sequence: Synthetic polypeptide
  REGION 1..251: note = XENP024231 1C11_H3.100_L3_scFv
QIQLVQSGSELKKPGASLKVSCKASGYTFTHYGMNWVRQAPGQGLEWMGWINTYTGEPTYADGFTGRFVFSLDTSVSTAYLQISSLKAEDTAVYFCARDYYGSSPYWGQGTLVTVSSGKPGSGKPGSGKPGSGKPGSDVLMTQSPDSLAVSLGERATINCKSSQSIVHSNGNTYLEWYQQKPGQSPKLLIYKVSNRFSGVPDRFSGSGSGTDFTLTISSLQAEDVAVYYCFQGSHVPNTFGGGTKVEIKGS

SEQ ID NO: 1458 - protein, 117 aa, synthetic construct
  REGION 1..117: note = Description of Artificial Sequence: Synthetic polypeptide
  REGION 1..117: note = VH of XENP024231
QIQLVQSGSELKKPGASLKVSCKASGYTFTHYGMNWVRQAPGQGLEWMGWINTYTGEPTYADGFTGRFVFSLDTSVSTAYLQISSLKAEDTAVYFCARDYYGSSPYWGQGTLVTVSS

SEQ ID NO: 1459 - protein, 114 aa, synthetic construct; identical to SEQ ID NO: 649
  REGION 1..114: note = Description of Artificial Sequence: Synthetic polypeptide
  REGION 1..114: note = VL of XENP024231

SEQ ID NO: 1460 - protein, 5 aa, synthetic construct
  REGION 1..5: note = Description of Artificial Sequence: Synthetic peptide
  REGION 1..5: note = XENP024231 vhCDR1
HYGMN

SEQ ID NO: 1461 - protein, 17 aa, synthetic construct
  REGION 1..17: note = Description of Artificial Sequence: Synthetic peptide
  REGION 1..17: note = XENP024231 vhCDR2
WINTYTGEPTYADGFTG

SEQ ID NO: 1462 - protein, 8 aa, synthetic construct
  REGION 1..8: note = Description of Artificial Sequence: Synthetic peptide
  REGION 1..8: note = XENP024231 vhCDR3
DYYGSSPY

SEQ ID NO: 1463 - protein, 16 aa, synthetic construct
  REGION 1..16: note = Description of Artificial Sequence: Synthetic peptide
  REGION 1..16: note = XENP024231 vlCDR1
KSSQSIVHSNGNTYLE

SEQ ID NO: 1464 - protein, 7 aa, synthetic construct
  REGION 1..7: note = Description of Artificial Sequence: Synthetic peptide
  REGION 1..7: note = XENP024231 vlCDR2
KVSNRFS

SEQ ID NO: 1465 - protein, 9 aa, synthetic construct
  REGION 1..9: note = Description of Artificial Sequence: Synthetic peptide
  REGION 1..9: note = XENP024231 vlCDR3
FQGSHVPNT

SEQ ID NO: 1466 - protein, 251 aa, synthetic construct
  REGION 1..251: note = Description of Artificial Sequence: Synthetic polypeptide
  REGION 1..251: note = XENP024232 1C11_H3.101_L3_scFv
QIQLVQSGSELKKPGASVRVSCKASGYTFTHYGMNWVRQAPGQGLEWMGWINTYTGEPTYADGFTGRFVFSLDTSVSTAYLQISSLKAEDTAVYFCARDYYGSSPYWGQGTLVTVSSGKPGSGKPGSGKPGSGKPGSDVLMTQSPDSLAVSLGERATINCKSSQSIVHSNGNTYLEWYQQKPGQSPKLLIYKVSNRFSGVPDRFSGSGSGTDFTLTISSLQAEDVAVYYCFQGSHVPNTFGGGTKVEIKGS

SEQ ID NO: 1467 - protein, 117 aa, synthetic construct
  REGION 1..117: note = Description of Artificial Sequence: Synthetic polypeptide
  REGION 1..117: note = VH of XENP024232
QIQLVQSGSELKKPGASVRVSCKASGYTFTHYGMNWVRQAPGQGLEWMGWINTYTGEPTYADGFTGRFVFSLDTSVSTAYLQISSLKAEDTAVYFCARDYYGSSPYWGQGTLVTVSS

SEQ ID NO: 1468 - protein, 114 aa, synthetic construct; identical to SEQ ID NO: 649
  REGION 1..114: note = Description of Artificial Sequence: Synthetic polypeptide
  REGION 1..114: note = VL of XENP024232

SEQ ID NO: 1469 - protein, 5 aa, synthetic construct
  REGION 1..5: note = Description of Artificial Sequence: Synthetic peptide
  REGION 1..5: note = XENP024232 vhCDR1
HYGMN

SEQ ID NO: 1470 - protein, 17 aa, synthetic construct
  REGION 1..17: note = Description of Artificial Sequence: Synthetic peptide
  REGION 1..17: note = XENP024232 vhCDR2
WINTYTGEPTYADGFTG

SEQ ID NO: 1471 - protein, 8 aa, synthetic construct
  REGION 1..8: note = Description of Artificial Sequence: Synthetic peptide
  REGION 1..8: note = XENP024232 vhCDR3
DYYGSSPY

SEQ ID NO: 1472 - protein, 16 aa, synthetic construct
  REGION 1..16: note = Description of Artificial Sequence: Synthetic peptide
  REGION 1..16: note = XENP024232 vlCDR1
KSSQSIVHSNGNTYLE

SEQ ID NO: 1473 - protein, 7 aa, synthetic construct
  REGION 1..7: note = Description of Artificial Sequence: Synthetic peptide
  REGION 1..7: note = XENP024232 vlCDR2
KVSNRFS

SEQ ID NO: 1474 - protein, 9 aa, synthetic construct
  REGION 1..9: note = Description of Artificial Sequence: Synthetic peptide
  REGION 1..9: note = XENP024232 vlCDR3
FQGSHVPNT

SEQ ID NO: 1475 - protein, 251 aa, synthetic construct
  REGION 1..251: note = Description of Artificial Sequence: Synthetic polypeptide
  REGION 1..251: note = XENP024233 1C11_H3.102_L3_scFv
QIQLVQSGSELKKPGASVSVSCKASGYTFTHYGMNWVRQAPGQGLEWMGWINTYTGEPTYADGFTGRFVFSLDTSVSTAYLQISSLKAEDTAVYFCARDYYGSSPYWGQGTLVTVSSGKPGSGKPGSGKPGSGKPGSDVLMTQSPDSLAVSLGERATINCKSSQSIVHSNGNTYLEWYQQKPGQSPKLLIYKVSNRFSGVPDRFSGSGSGTDFTLTISSLQAEDVAVYYCFQGSHVPNTFGGGTKVEIKGS

SEQ ID NO: 1476 - protein, 117 aa, synthetic construct
  REGION 1..117: note = Description of Artificial Sequence: Synthetic polypeptide
  REGION 1..117: note = VH of XENP024233
QIQLVQSGSELKKPGASVSVSCKASGYTFTHYGMNWVRQAPGQGLEWMGWINTYTGEPTYADGFTGRFVFSLDTSVSTAYLQISSLKAEDTAVYFCARDYYGSSPYWGQGTLVTVSS

SEQ ID NO: 1477 - protein, 114 aa, synthetic construct; identical to SEQ ID NO: 649
  REGION 1..114: note = Description of Artificial Sequence: Synthetic polypeptide
  REGION 1..114: note = VL of XENP024233

SEQ ID NO: 1478 - protein, 5 aa, synthetic construct
  REGION 1..5: note = Description of Artificial Sequence: Synthetic peptide
  REGION 1..5: note = XENP024233 vhCDR1
HYGMN

SEQ ID NO: 1479 - protein, 17 aa, synthetic construct
  REGION 1..17: note = Description of Artificial Sequence: Synthetic peptide
  REGION 1..17: note = XENP024233 vhCDR2
WINTYTGEPTYADGFTG

SEQ ID NO: 1480 - protein, 8 aa, synthetic construct
  REGION 1..8: note = Description of Artificial Sequence: Synthetic peptide
  REGION 1..8: note = XENP024233 vhCDR3
DYYGSSPY

SEQ ID NO: 1481 - protein, 16 aa, synthetic construct
  REGION 1..16: note = Description of Artificial Sequence: Synthetic peptide
  REGION 1..16: note = XENP024233 vlCDR1
KSSQSIVHSNGNTYLE

SEQ ID NO: 1482 - protein, 7 aa, synthetic construct
  REGION 1..7: note = Description of Artificial Sequence: Synthetic peptide
  REGION 1..7: note = XENP024233 vlCDR2
KVSNRFS

SEQ ID NO: 1483 - protein, 9 aa, synthetic construct
  REGION 1..9: note = Description of Artificial Sequence: Synthetic peptide
  REGION 1..9: note = XENP024233 vlCDR3
FQGSHVPNT

SEQ ID NO: 1484 - protein, 251 aa, synthetic construct
  REGION 1..251: note = Description of Artificial Sequence: Synthetic polypeptide
  REGION 1..251: note = XENP024234 1C11_H3.103_L3_scFv
QIQLVQSGSELKKPGASVKVTCKASGYTFTHYGMNWVRQAPGQGLEWMGWINTYTGEPTYADGFTGRFVFSLDTSVSTAYLQISSLKAEDTAVYFCARDYYGSSPYWGQGTLVTVSSGKPGSGKPGSGKPGSGKPGSDVLMTQSPDSLAVSLGERATINCKSSQSIVHSNGNTYLEWYQQKPGQSPKLLIYKVSNRFSGVPDRFSGSGSGTDFTLTISSLQAEDVAVYYCFQGSHVPNTFGGGTKVEIKGS

SEQ ID NO: 1485 - protein, 117 aa, synthetic construct
  REGION 1..117: note = Description of Artificial Sequence: Synthetic polypeptide
  REGION 1..117: note = VH of XENP024234
QIQLVQSGSELKKPGASVKVTCKASGYTFTHYGMNWVRQAPGQGLEWMGWINTYTGEPTYADGFTGRFVFSLDTSVSTAYLQISSLKAEDTAVYFCARDYYGSSPYWGQGTLVTVSS

SEQ ID NO: 1486 - protein, 114 aa, synthetic construct; identical to SEQ ID NO: 649
  REGION 1..114: note = Description of Artificial Sequence: Synthetic polypeptide
  REGION 1..114: note = VL of XENP024234

SEQ ID NO: 1487 - protein, 5 aa, synthetic construct
  REGION 1..5: note = Description of Artificial Sequence: Synthetic peptide
  REGION 1..5: note = XENP024234 vhCDR1
HYGMN

SEQ ID NO: 1488 - protein, 17 aa, synthetic construct
  REGION 1..17: note = Description of Artificial Sequence: Synthetic peptide
  REGION 1..17: note = XENP024234 vhCDR2
WINTYTGEPTYADGFTG

SEQ ID NO: 1489 - protein, 8 aa, synthetic construct
  REGION 1..8: note = Description of Artificial Sequence: Synthetic peptide
  REGION 1..8: note = XENP024234 vhCDR3
DYYGSSPY

SEQ ID NO: 1490 - protein, 16 aa, synthetic construct
  REGION 1..16: note = Description of Artificial Sequence: Synthetic peptide
  REGION 1..16: note = XENP024234 vlCDR1
KSSQSIVHSNGNTYLE

SEQ ID NO: 1491 - protein, 7 aa, synthetic construct
  REGION 1..7: note = Description of Artificial Sequence: Synthetic peptide
  REGION 1..7: note = XENP024234 vlCDR2
KVSNRFS

SEQ ID NO: 1492 - protein, 9 aa, synthetic construct
  REGION 1..9: note = Description of Artificial Sequence: Synthetic peptide
  REGION 1..9: note = XENP024234 vlCDR3
FQGSHVPNT

SEQ ID NO: 1493 - protein, 251 aa, synthetic construct
  REGION 1..251: note = Description of Artificial Sequence: Synthetic polypeptide
  REGION 1..251: note = XENP024235 1C11_H3.104_L3_scFv
QIQLVQSGSELKKPGASVKVSCAASGYTFTHYGMNWVRQAPGQGLEWMGWINTYTGEPTYADGFTGRFVFSLDTSVSTAYLQISSLKAEDTAVYFCARDYYGSSPYWGQGTLVTVSSGKPGSGKPGSGKPGSGKPGSDVLMTQSPDSLAVSLGERATINCKSSQSIVHSNGNTYLEWYQQKPGQSPKLLIYKVSNRFSGVPDRFSGSGSGTDFTLTISSLQAEDVAVYYCFQGSHVPNTFGGGTKVEIKGS

SEQ ID NO: 1494 - protein, 117 aa, synthetic construct
  REGION 1..117: note = Description of Artificial Sequence: Synthetic polypeptide
  REGION 1..117: note = VH of XENP024235
QIQLVQSGSELKKPGASVKVSCAASGYTFTHYGMNWVRQAPGQGLEWMGWINTYTGEPTYADGFTGRFVFSLDTSVSTAYLQISSLKAEDTAVYFCARDYYGSSPYWGQGTLVTVSS

SEQ ID NO: 1495 - protein, 114 aa, synthetic construct; identical to SEQ ID NO: 649
  REGION 1..114: note = Description of Artificial Sequence: Synthetic polypeptide
  REGION 1..114: note = VL of XENP024235

SEQ ID NO: 1496 - protein, 5 aa, synthetic construct
  REGION 1..5: note = Description of Artificial Sequence: Synthetic peptide
  REGION 1..5: note = XENP024235 vhCDR1
HYGMN

SEQ ID NO: 1497 - protein, 17 aa, synthetic construct
  REGION 1..17: note = Description of Artificial Sequence: Synthetic peptide
  REGION 1..17: note = XENP024235 vhCDR2
WINTYTGEPTYADGFTG

SEQ ID NO: 1498 - protein, 8 aa, synthetic construct
  REGION 1..8: note = Description of Artificial Sequence: Synthetic peptide
  REGION 1..8: note = XENP024235 vhCDR3
DYYGSSPY

SEQ ID NO: 1499 - protein, 16 aa, synthetic construct
  REGION 1..16: note = Description of Artificial Sequence: Synthetic peptide
  REGION 1..16: note = XENP024235 vlCDR1
KSSQSIVHSNGNTYLE

SEQ ID NO: 1500 - protein, 7 aa, synthetic construct
  REGION 1..7: note = Description of Artificial Sequence: Synthetic peptide
  REGION 1..7: note = XENP024235 vlCDR2
KVSNRFS

SEQ ID NO: 1501 - protein, 9 aa, synthetic construct
  REGION 1..9: note = Description of Artificial Sequence: Synthetic peptide
  REGION 1..9: note = XENP024235 vlCDR3
FQGSHVPNT

SEQ ID NO: 1502 - protein, 251 aa, synthetic construct
  REGION 1..251: note = Description of Artificial Sequence: Synthetic polypeptide
  REGION 1..251: note = XENP024236 1C11_H3.105_L3_scFv
QIQLVQSGSELKKPGASVKVSCTASGYTFTHYGMNWVRQAPGQGLEWMGWINTYTGEPTYADGFTGRFVFSLDTSVSTAYLQISSLKAEDTAVYFCARDYYGSSPYWGQGTLVTVSSGKPGSGKPGSGKPGSGKPGSDVLMTQSPDSLAVSLGERATINCKSSQSIVHSNGNTYLEWYQQKPGQSPKLLIYKVSNRFSGVPDRFSGSGSGTDFTLTISSLQAEDVAVYYCFQGSHVPNTFGGGTKVEIKGS

SEQ ID NO: 1503 - protein, 117 aa, synthetic construct
  REGION 1..117: note = Description of Artificial Sequence: Synthetic polypeptide
  REGION 1..117: note = VH of XENP024236
QIQLVQSGSELKKPGASVKVSCTASGYTFTHYGMNWVRQAPGQGLEWMGWINTYTGEPTYADGFTGRFVFSLDTSVSTAYLQISSLKAEDTAVYFCARDYYGSSPYWGQGTLVTVSS

SEQ ID NO: 1504 - protein, 114 aa, synthetic construct; identical to SEQ ID NO: 649
  REGION 1..114: note = Description of Artificial Sequence: Synthetic polypeptide
  REGION 1..114: note = VL of XENP024236

SEQ ID NO: 1505 - protein, 5 aa, synthetic construct
  REGION 1..5: note = Description of Artificial Sequence: Synthetic peptide
  REGION 1..5: note = XENP024236 vhCDR1
HYGMN

SEQ ID NO: 1506 - protein, 17 aa, synthetic construct
  REGION 1..17: note = Description of Artificial Sequence: Synthetic peptide
  REGION 1..17: note = XENP024236 vhCDR2
WINTYTGEPTYADGFTG

SEQ ID NO: 1507 - protein, 8 aa, synthetic construct
  REGION 1..8: note = Description of Artificial Sequence: Synthetic peptide
  REGION 1..8: note = XENP024236 vhCDR3
DYYGSSPY

SEQ ID NO: 1508 - protein, 16 aa, synthetic construct
  REGION 1..16: note = Description of Artificial Sequence: Synthetic peptide
  REGION 1..16: note = XENP024236 vlCDR1
KSSQSIVHSNGNTYLE

SEQ ID NO: 1509 - protein, 7 aa, synthetic construct
  REGION 1..7: note = Description of Artificial Sequence: Synthetic peptide
  REGION 1..7: note = XENP024236 vlCDR2
KVSNRFS

SEQ ID NO: 1510 - protein, 9 aa, synthetic construct
  REGION 1..9: note = Description of Artificial Sequence: Synthetic peptide
  REGION 1..9: note = XENP024236 vlCDR3
FQGSHVPNT

SEQ ID NO: 1511 - protein, 251 aa, synthetic construct
  REGION 1..251: note = Description of Artificial Sequence: Synthetic polypeptide
  REGION 1..251: note = XENP024237 1C11_H3.106_L3_scFv
QIQLVQSGSELKKPGASVKVSCKVSGYTFTHYGMNWVRQAPGQGLEWMGWINTYTGEPTYADGFTGRFVFSLDTSVSTAYLQISSLKAEDTAVYFCARDYYGSSPYWGQGTLVTVSSGKPGSGKPGSGKPGSGKPGSDVLMTQSPDSLAVSLGERATINCKSSQSIVHSNGNTYLEWYQQKPGQSPKLLIYKVSNRFSGVPDRFSGSGSGTDFTLTISSLQAEDVAVYYCFQGSHVPNTFGGGTKVEIKGS

SEQ ID NO: 1512 - protein, 117 aa, synthetic construct
  REGION 1..117: note = Description of Artificial Sequence: Synthetic polypeptide
  REGION 1..117: note = VH of XENP024237
QIQLVQSGSELKKPGASVKVSCKVSGYTFTHYGMNWVRQAPGQGLEWMGWINTYTGEPTYADGFTGRFVFSLDTSVSTAYLQISSLKAEDTAVYFCARDYYGSSPYWGQGTLVTVSS

SEQ ID NO: 1513 - protein, 114 aa, synthetic construct; identical to SEQ ID NO: 649
  REGION 1..114: note = Description of Artificial Sequence: Synthetic polypeptide
  REGION 1..114: note = VL of XENP024237

SEQ ID NO: 1514 - protein, 5 aa, synthetic construct
  REGION 1..5: note = Description of Artificial Sequence: Synthetic peptide
  REGION 1..5: note = XENP024237 vhCDR1
HYGMN

SEQ ID NO: 1515 - protein, 17 aa, synthetic construct
  REGION 1..17: note = Description of Artificial Sequence: Synthetic peptide
  REGION 1..17: note = XENP024237 vhCDR2
WINTYTGEPTYADGFTG

SEQ ID NO: 1516 - protein, 8 aa, synthetic construct
  REGION 1..8: note = Description of Artificial Sequence: Synthetic peptide
  REGION 1..8: note = XENP024237 vhCDR3
DYYGSSPY

SEQ ID NO: 1517 - protein, 16 aa, synthetic construct
  REGION 1..16: note = Description of Artificial Sequence: Synthetic peptide
  REGION 1..16: note = XENP024237 vlCDR1
KSSQSIVHSNGNTYLE

SEQ ID NO: 1518 - protein, 7 aa, synthetic construct
  REGION 1..7: note = Description of Artificial Sequence: Synthetic peptide
  REGION 1..7: note = XENP024237 vlCDR2
KVSNRFS

SEQ ID NO: 1519 - protein, 9 aa, synthetic construct
  REGION 1..9: note = Description of Artificial Sequence: Synthetic peptide
  REGION 1..9: note = XENP024237 vlCDR3
FQGSHVPNT

SEQ ID NO: 1520 - protein, 251 aa, synthetic construct
  REGION 1..251: note = Description of Artificial Sequence: Synthetic polypeptide
  REGION 1..251: note = XENP024238 1C11_H3.107_L3_scFv
QIQLVQSGSELKKPGASVKVSCKGSGYTFTHYGMNWVRQAPGQGLEWMGWINTYTGEPTYADGFTGRFVFSLDTSVSTAYLQISSLKAEDTAVYFCARDYYGSSPYWGQGTLVTVSSGKPGSGKPGSGKPGSGKPGSDVLMTQSPDSLAVSLGERATINCKSSQSIVHSNGNTYLEWYQQKPGQSPKLLIYKVSNRFSGVPDRFSGSGSGTDFTLTISSLQAEDVAVYYCFQGSHVPNTFGGGTKVEIKGS

SEQ ID NO: 1521 - protein, 117 aa, synthetic construct
  REGION 1..117: note = Description of Artificial Sequence: Synthetic polypeptide
  REGION 1..117: note = VH of XENP024238
QIQLVQSGSELKKPGASVKVSCKGSGYTFTHYGMNWVRQAPGQGLEWMGWINTYTGEPTYADGFTGRFVFSLDTSVSTAYLQISSLKAEDTAVYFCARDYYGSSPYWGQGTLVTVSS

SEQ ID NO: 1522 - protein, 114 aa, synthetic construct; identical to SEQ ID NO: 649
  REGION 1..114: note = Description of Artificial Sequence: Synthetic polypeptide
  REGION 1..114: note = VL of XENP024238

SEQ ID NO: 1523 - protein, 5 aa, synthetic construct
  REGION 1..5: note = Description of Artificial Sequence: Synthetic peptide
  REGION 1..5: note = XENP024238 vhCDR1
HYGMN

SEQ ID NO: 1524 - protein, 17 aa, synthetic construct
  REGION 1..17: note = Description of Artificial Sequence: Synthetic peptide
  REGION 1..17: note = XENP024238 vhCDR2
WINTYTGEPTYADGFTG

SEQ ID NO: 1525 - protein, 8 aa, synthetic construct
  REGION 1..8: note = Description of Artificial Sequence: Synthetic peptide
  REGION 1..8: note = XENP024238 vhCDR3
DYYGSSPY

SEQ ID NO: 1526 - protein, 16 aa, synthetic construct
  REGION 1..16: note = Description of Artificial Sequence: Synthetic peptide
  REGION 1..16: note = XENP024238 vlCDR1
KSSQSIVHSNGNTYLE

SEQ ID NO: 1527 - protein, 7 aa, synthetic construct
  REGION 1..7: note = Description of Artificial Sequence: Synthetic peptide
  REGION 1..7: note = XENP024238 vlCDR2
KVSNRFS

SEQ ID NO: 1528 - protein, 9 aa, synthetic construct
  REGION 1..9: note = Description of Artificial Sequence: Synthetic peptide
  REGION 1..9: note = XENP024238 vlCDR3
FQGSHVPNT

SEQ ID NO: 1529 - protein, 251 aa, synthetic construct
  REGION 1..251: note = Description of Artificial Sequence: Synthetic polypeptide
  REGION 1..251: note = XENP024239 1C11_H3.109_L3_scFv
QIQLVQSGSELKKPGASVKVSCKASGFTFTHYGMNWVRQAPGQGLEWMGWINTYTGEPTYADGFTGRFVFSLDTSVSTAYLQISSLKAEDTAVYFCARDYYGSSPYWGQGTLVTVSSGKPGSGKPGSGKPGSGKPGSDVLMTQSPDSLAVSLGERATINCKSSQSIVHSNGNTYLEWYQQKPGQSPKLLIYKVSNRFSGVPDRFSGSGSGTDFTLTISSLQAEDVAVYYCFQGSHVPNTFGGGTKVEIKGS

SEQ ID NO: 1530 - protein, 117 aa, synthetic construct
  REGION 1..117: note = Description of Artificial Sequence: Synthetic polypeptide
  REGION 1..117: note = VH of XENP024239
QIQLVQSGSELKKPGASVKVSCKASGFTFTHYGMNWVRQAPGQGLEWMGWINTYTGEPTYADGFTGRFVFSLDTSVSTAYLQISSLKAEDTAVYFCARDYYGSSPYWGQGTLVTVSS

SEQ ID NO: 1531 - protein, 114 aa, synthetic construct; identical to SEQ ID NO: 649
  REGION 1..114: note = Description of Artificial Sequence: Synthetic polypeptide
  REGION 1..114: note = VL of XENP024239

SEQ ID NO: 1532 - protein, 5 aa, synthetic construct
  REGION 1..5: note = Description of Artificial Sequence: Synthetic peptide
  REGION 1..5: note = XENP024239 vhCDR1
HYGMN

SEQ ID NO: 1533 - protein, 17 aa, synthetic construct
  REGION 1..17: note = Description of Artificial Sequence: Synthetic peptide
  REGION 1..17: note = XENP024239 vhCDR2
WINTYTGEPTYADGFTG

SEQ ID NO: 1534 - protein, 8 aa, synthetic construct
  REGION 1..8: note = Description of Artificial Sequence: Synthetic peptide
  REGION 1..8: note = XENP024239 vhCDR3
DYYGSSPY

SEQ ID NO: 1535 - protein, 16 aa, synthetic construct
  REGION 1..16: note = Description of Artificial Sequence: Synthetic peptide
  REGION 1..16: note = XENP024239 vlCDR1
KSSQSIVHSNGNTYLE

SEQ ID NO: 1536 - protein, 7 aa, synthetic construct
  REGION 1..7: note = Description of Artificial Sequence: Synthetic peptide
  REGION 1..7: note = XENP024239 vlCDR2
KVSNRFS

SEQ ID NO: 1537 - protein, 9 aa, synthetic construct
  REGION 1..9: note = Description of Artificial Sequence: Synthetic peptide
  REGION 1..9: note = XENP024239 vlCDR3
FQGSHVPNT

SEQ ID NO: 1538 - protein, 251 aa, synthetic construct
  REGION 1..251: note = Description of Artificial Sequence: Synthetic polypeptide
  REGION 1..251: note = XENP024240 1C11_H3.110_L3_scFv
QIQLVQSGSELKKPGASVKVSCKASGGTFTHYGMNWVRQAPGQGLEWMGWINTYTGEPTYADGFTGRFVFSLDTSVSTAYLQISSLKAEDTAVYFCARDYYGSSPYWGQGTLVTVSSGKPGSGKPGSGKPGSGKPGSDVLMTQSPDSLAVSLGERATINCKSSQSIVHSNGNTYLEWYQQKPGQSPKLLIYKVSNRFSGVPDRFSGSGSGTDFTLTISSLQAEDVAVYYCFQGSHVPNTFGGGTKVEIKGS

SEQ ID NO: 1539 - protein, 117 aa, synthetic construct
  REGION 1..117: note = Description of Artificial Sequence: Synthetic polypeptide
  REGION 1..117: note = VH of XENP024240
QIQLVQSGSELKKPGASVKVSCKASGGTFTHYGMNWVRQAPGQGLEWMGWINTYTGEPTYADGFTGRFVFSLDTSVSTAYLQISSLKAEDTAVYFCARDYYGSSPYWGQGTLVTVSS

SEQ ID NO: 1540 - protein, 114 aa, synthetic construct; identical to SEQ ID NO: 649
  REGION 1..114: note = Description of Artificial Sequence: Synthetic polypeptide
  REGION 1..114: note = VL of XENP024240

SEQ ID NO: 1541 - protein, 5 aa, synthetic construct
  REGION 1..5: note = Description of Artificial Sequence: Synthetic peptide
  REGION 1..5: note = XENP024240 vhCDR1
HYGMN

SEQ ID NO: 1542 - protein, 17 aa, synthetic construct
  REGION 1..17: note = Description of Artificial Sequence: Synthetic peptide
  REGION 1..17: note = XENP024240 vhCDR2
WINTYTGEPTYADGFTG

SEQ ID NO: 1543 - protein, 8 aa, synthetic construct
  REGION 1..8: note = Description of Artificial Sequence: Synthetic peptide
  REGION 1..8: note = XENP024240 vhCDR3
DYYGSSPY

SEQ ID NO: 1544 - protein, 16 aa, synthetic construct
  REGION 1..16: note = Description of Artificial Sequence: Synthetic peptide
  REGION 1..16: note = XENP024240 vlCDR1
KSSQSIVHSNGNTYLE

SEQ ID NO: 1545 - protein, 7 aa, synthetic construct
  REGION 1..7: note = Description of Artificial Sequence: Synthetic peptide
  REGION 1..7: note = XENP024240 vlCDR2
KVSNRFS

SEQ ID NO: 1546 - protein, 9 aa, synthetic construct
  REGION 1..9: note = Description of Artificial Sequence: Synthetic peptide
  REGION 1..9: note = XENP024240 vlCDR3
FQGSHVPNT

SEQ ID NO: 1547 - protein, 251 aa, synthetic construct
  REGION 1..251: note = Description of Artificial Sequence: Synthetic polypeptide
  REGION 1..251: note = XENP024241 1C11_H3.111_L3_scFv
QIQLVQSGSELKKPGASVKVSCKASGYSFTHYGMNWVRQAPGQGLEWMGWINTYTGEPTYADGFTGRFVFSLDTSVSTAYLQISSLKAEDTAVYFCARDYYGSSPYWGQGTLVTVSSGKPGSGKPGSGKPGSGKPGSDVLMTQSPDSLAVSLGERATINCKSSQSIVHSNGNTYLEWYQQKPGQSPKLLIYKVSNRFSGVPDRFSGSGSGTDFTLTISSLQAEDVAVYYCFQGSHVPNTFGGGTKVEIKGS

SEQ ID NO: 1548 - protein, 117 aa, synthetic construct
  REGION 1..117: note = Description of Artificial Sequence: Synthetic polypeptide
  REGION 1..117: note = VH of XENP024241
QIQLVQSGSELKKPGASVKVSCKASGYSFTHYGMNWVRQAPGQGLEWMGWINTYTGEPTYADGFTGRFVFSLDTSVSTAYLQISSLKAEDTAVYFCARDYYGSSPYWGQGTLVTVSS

SEQ ID NO: 1549 - protein, 114 aa, synthetic construct; identical to SEQ ID NO: 649
  REGION 1..114: note = Description of Artificial Sequence: Synthetic polypeptide
  REGION 1..114: note = VL of XENP024241

SEQ ID NO: 1550 - protein, 5 aa, synthetic construct
  REGION 1..5: note = Description of Artificial Sequence: Synthetic peptide
  REGION 1..5: note = XENP024241 vhCDR1
HYGMN

SEQ ID NO: 1551 - protein, 17 aa, synthetic construct
  REGION 1..17: note = Description of Artificial Sequence: Synthetic peptide
  REGION 1..17: note = XENP024241 vhCDR2
WINTYTGEPTYADGFTG

SEQ ID NO: 1552 - protein, 8 aa, synthetic construct
  REGION 1..8: note = Description of Artificial Sequence: Synthetic peptide
  REGION 1..8: note = XENP024241 vhCDR3
DYYGSSPY

SEQ ID NO: 1553 - protein, 16 aa, synthetic construct
  REGION 1..16: note = Description of Artificial Sequence: Synthetic peptide
  REGION 1..16: note = XENP024241 vlCDR1
KSSQSIVHSNGNTYLE

SEQ ID NO: 1554 - protein, 7 aa, synthetic construct
  REGION 1..7: note = Description of Artificial Sequence: Synthetic peptide
  REGION 1..7: note = XENP024241 vlCDR2
KVSNRFS

SEQ ID NO: 1555 - protein, 9 aa, synthetic construct
  REGION 1..9: note = Description of Artificial Sequence: Synthetic peptide
  REGION 1..9: note = XENP024241 vlCDR3
FQGSHVPNT

SEQ ID NO: 1556 - protein, 251 aa, synthetic construct
  REGION 1..251: note = Description of Artificial Sequence: Synthetic polypeptide
  REGION 1..251: note = XENP024242 1C11_H3.113_L3_scFv
QIQLVQSGSELKKPGASVKVSCKASGYTITHYGMNWVRQAPGQGLEWMGWINTYTGEPTYADGFTGRFVFSLDTSVSTAYLQISSLKAEDTAVYFCARDYYGSSPYWGQGTLVTVSSGKPGSGKPGSGKPGSGKPGSDVLMTQSPDSLAVSLGERATINCKSSQSIVHSNGNTYLEWYQQKPGQSPKLLIYKVSNRFSGVPDRFSGSGSGTDFTLTISSLQAEDVAVYYCFQGSHVPNTFGGGTKVEIKGS

SEQ ID NO: 1557 - protein, 117 aa, synthetic construct
  REGION 1..117: note = Description of Artificial Sequence: Synthetic polypeptide
  REGION 1..117: note = VH of XENP024242
QIQLVQSGSELKKPGASVKVSCKASGYTITHYGMNWVRQAPGQGLEWMGWINTYTGEPTYADGFTGRFVFSLDTSVSTAYLQISSLKAEDTAVYFCARDYYGSSPYWGQGTLVTVSS

SEQ ID NO: 1558 - protein, 114 aa, synthetic construct; identical to SEQ ID NO: 649
  REGION 1..114: note = Description of Artificial Sequence: Synthetic polypeptide
  REGION 1..114: note = VL of XENP024242

SEQ ID NO: 1559 - protein, 5 aa, synthetic construct
  REGION 1..5: note = Description of Artificial Sequence: Synthetic peptide
  REGION 1..5: note = XENP024242 vhCDR1
HYGMN

SEQ ID NO: 1560 - protein, 17 aa, synthetic construct
  REGION 1..17: note = Description of Artificial Sequence: Synthetic peptide
  REGION 1..17: note = XENP024242 vhCDR2
WINTYTGEPTYADGFTG

SEQ ID NO: 1561 - protein, 8 aa, synthetic construct
  REGION 1..8: note = Description of Artificial Sequence: Synthetic peptide
  REGION 1..8: note = XENP024242 vhCDR3
DYYGSSPY

SEQ ID NO: 1562 - protein, 16 aa, synthetic construct
  REGION 1..16: note = Description of Artificial Sequence: Synthetic peptide
  REGION 1..16: note = XENP024242 vlCDR1
KSSQSIVHSNGNTYLE

SEQ ID NO: 1563 - protein, 7 aa, synthetic construct
  REGION 1..7: note = Description of Artificial Sequence: Synthetic peptide
  REGION 1..7: note = XENP024242 vlCDR2
KVSNRFS

SEQ ID NO: 1564 - protein, 9 aa, synthetic construct
  REGION 1..9: note = Description of Artificial Sequence: Synthetic peptide
  REGION 1..9: note = XENP024242 vlCDR3
FQGSHVPNT

SEQ ID NO: 1565 - protein, 251 aa, synthetic construct
  REGION 1..251: note = Description of Artificial Sequence: Synthetic polypeptide
  REGION 1..251: note = XENP024243 1C11_H3.114_L3_scFv
QIQLVQSGSELKKPGASVKVSCKASGYTVTHYGMNWVRQAPGQGLEWMGWINTYTGEPTYADGFTGRFVFSLDTSVSTAYLQISSLKAEDTAVYFCARDYYGSSPYWGQGTLVTVSSGKPGSGKPGSGKPGSGKPGSDVLMTQSPDSLAVSLGERATINCKSSQSIVHSNGNTYLEWYQQKPGQSPKLLIYKVSNRFSGVPDRFSGSGSGTDFTLTISSLQAEDVAVYYCFQGSHVPNTFGGGTKVEIKGS

SEQ ID NO: 1566 - protein, 117 aa, synthetic construct
  REGION 1..117: note = Description of Artificial Sequence: Synthetic polypeptide
  REGION 1..117: note = VH of XENP024243
QIQLVQSGSELKKPGASVKVSCKASGYTVTHYGMNWVRQAPGQGLEWMGWINTYTGEPTYADGFTGRFVFSLDTSVSTAYLQISSLKAEDTAVYFCARDYYGSSPYWGQGTLVTVSS

SEQ ID NO: 1567 - protein, 114 aa, synthetic construct; identical to SEQ ID NO: 649
  REGION 1..114: note = Description of Artificial Sequence: Synthetic polypeptide
  REGION 1..114: note = VL of XENP024243

SEQ ID NO: 1568 - protein, 5 aa, synthetic construct
  REGION 1..5: note = Description of Artificial Sequence: Synthetic peptide
  REGION 1..5: note = XENP024243 vhCDR1
HYGMN

SEQ ID NO: 1569 - protein, 17 aa, synthetic construct
  REGION 1..17: note = Description of Artificial Sequence: Synthetic peptide
  REGION 1..17: note = XENP024243 vhCDR2
WINTYTGEPTYADGFTG

SEQ ID NO: 1570 - protein, 8 aa, synthetic construct
  REGION 1..8: note = Description of Artificial Sequence: Synthetic peptide
  REGION 1..8: note = XENP024243 vhCDR3
DYYGSSPY

SEQ ID NO: 1571 - protein, 16 aa, synthetic construct
  REGION 1..16: note = Description of Artificial Sequence: Synthetic peptide
  REGION 1..16: note = XENP024243 vlCDR1
KSSQSIVHSNGNTYLE

SEQ ID NO: 1572 - protein, 7 aa, synthetic construct
  REGION 1..7: note = Description of Artificial Sequence: Synthetic peptide
  REGION 1..7: note = XENP024243 vlCDR2
KVSNRFS

SEQ ID NO: 1573 - protein, 9 aa, synthetic construct
  REGION 1..9: note = Description of Artificial Sequence: Synthetic peptide
  REGION 1..9: note = XENP024243 vlCDR3
FQGSHVPNT

SEQ ID NO: 1574 - protein, 251 aa, synthetic construct
  REGION 1..251: note = Description of Artificial Sequence: Synthetic polypeptide
  REGION 1..251: note = XENP024244 1C11_H3.115_L3_scFv
QIQLVQSGSELKKPGASVKVSCKASGYTFSHYGMNWVRQAPGQGLEWMGWINTYTGEPTYADGFTGRFVFSLDTSVSTAYLQISSLKAEDTAVYFCARDYYGSSPYWGQGTLVTVSSGKPGSGKPGSGKPGSGKPGSDVLMTQSPDSLAVSLGERATINCKSSQSIVHSNGNTYLEWYQQKPGQSPKLLIYKVSNRFSGVPDRFSGSGSGTDFTLTISSLQAEDVAVYYCFQGSHVPNTFGGGTKVEIKGS

SEQ ID NO: 1575 - protein, 117 aa, synthetic construct
  REGION 1..117: note = Description of Artificial Sequence: Synthetic polypeptide
  REGION 1..117: note = VH of XENP024244
QIQLVQSGSELKKPGASVKVSCKASGYTFSHYGMNWVRQAPGQGLEWMGWINTYTGEPTYADGFTGRFVFSLDTSVSTAYLQISSLKAEDTAVYFCARDYYGSSPYWGQGTLVTVSS

SEQ ID NO: 1576 - protein, 114 aa, synthetic construct; identical to SEQ ID NO: 649
  REGION 1..114: note = Description of Artificial Sequence: Synthetic polypeptide
  REGION 1..114: note = VL of XENP024244

SEQ ID NO: 1577 - protein, 5 aa, synthetic construct
  REGION 1..5: note = Description of Artificial Sequence: Synthetic peptide
  REGION 1..5: note = XENP024244 vhCDR1
HYGMN

SEQ ID NO: 1578 - protein, 17 aa, synthetic construct
  REGION 1..17: note = Description of Artificial Sequence: Synthetic peptide
  REGION 1..17: note = XENP024244 vhCDR2
WINTYTGEPTYADGFTG

SEQ ID NO: 1579 - protein, 8 aa, synthetic construct
  REGION 1..8: note = Description of Artificial Sequence: Synthetic peptide
  REGION 1..8: note = XENP024244 vhCDR3
DYYGSSPY

SEQ ID NO: 1580 - protein, 16 aa, synthetic construct
  REGION 1..16: note = Description of Artificial Sequence: Synthetic peptide
  REGION 1..16: note = XENP024244 vlCDR1
KSSQSIVHSNGNTYLE

SEQ ID NO: 1581 - protein, 7 aa, synthetic construct
  REGION 1..7: note = Description of Artificial Sequence: Synthetic peptide
  REGION 1..7: note = XENP024244 vlCDR2
KVSNRFS

SEQ ID NO: 1582 - protein, 9 aa, synthetic construct
  REGION 1..9: note = Description of Artificial Sequence: Synthetic peptide
  REGION 1..9: note = XENP024244 vlCDR3
FQGSHVPNT

SEQ ID NO: 1583 - protein, 251 aa, synthetic construct
  REGION 1..251: note = Description of Artificial Sequence: Synthetic polypeptide
  REGION 1..251: note = XENP024245 1C11_H3.116_L3_scFv
QIQLVQSGSELKKPGASVKVSCKASGYTFDHYGMNWVRQAPGQGLEWMGWINTYTGEPTYADGFTGRFVFSLDTSVSTAYLQISSLKAEDTAVYFCARDYYGSSPYWGQGTLVTVSSGKPGSGKPGSGKPGSGKPGSDVLMTQSPDSLAVSLGERATINCKSSQSIVHSNGNTYLEWYQQKPGQSPKLLIYKVSNRFSGVPDRFSGSGSGTDFTLTISSLQAEDVAVYYCFQGSHVPNTFGGGTKVEIKGS

SEQ ID NO: 1584 - protein, 117 aa, synthetic construct
  REGION 1..117: note = Description of Artificial Sequence: Synthetic polypeptide
  REGION 1..117: note = VH of XENP024245
QIQLVQSGSELKKPGASVKVSCKASGYTFDHYGMNWVRQAPGQGLEWMGWINTYTGEPTYADGFTGRFVFSLDTSVSTAYLQISSLKAEDTAVYFCARDYYGSSPYWGQGTLVTVSS

SEQ ID NO: 1585 - protein, 114 aa, synthetic construct; identical to SEQ ID NO: 649
  REGION 1..114: note = Description of Artificial Sequence: Synthetic polypeptide
  REGION 1..114: note = VL of XENP024245

SEQ ID NO: 1586 - protein, 5 aa, synthetic construct
  REGION 1..5: note = Description of Artificial Sequence: Synthetic peptide
  REGION 1..5: note = XENP024245 vhCDR1
HYGMN

SEQ ID NO: 1587 - protein, 17 aa, synthetic construct
  REGION 1..17: note = Description of Artificial Sequence: Synthetic peptide
  REGION 1..17: note = XENP024245 vhCDR2
WINTYTGEPTYADGFTG

SEQ ID NO: 1588 - protein, 8 aa, synthetic construct
  REGION 1..8: note = Description of Artificial Sequence: Synthetic peptide
  REGION 1..8: note = XENP024245 vhCDR3
DYYGSSPY

SEQ ID NO: 1589 - protein, 16 aa, synthetic construct
  REGION 1..16: note = Description of Artificial Sequence: Synthetic peptide
  REGION 1..16: note = XENP024245 vlCDR1
KSSQSIVHSNGNTYLE

SEQ ID NO: 1590 - protein, 7 aa, synthetic construct
  REGION 1..7: note = Description of Artificial Sequence: Synthetic peptide
  REGION 1..7: note = XENP024245 vlCDR2
KVSNRFS

SEQ ID NO: 1591 - protein, 9 aa, synthetic construct
  REGION 1..9: note = Description of Artificial Sequence: Synthetic peptide
  REGION 1..9: note = XENP024245 vlCDR3
FQGSHVPNT

SEQ ID NO: 1592 - protein, 251 aa, synthetic construct
  REGION 1..251: note = Description of Artificial Sequence: Synthetic polypeptide
  REGION 1..251: note = XENP024246 1C11_H3.117_L3_scFv
QIQLVQSGSELKKPGASVKVSCKASGYTFGHYGMNWVRQAPGQGLEWMGWINTYTGEPTYADGFTGRFVFSLDTSVSTAYLQISSLKAEDTAVYFCARDYYGSSPYWGQGTLVTVSSGKPGSGKPGSGKPGSGKPGSDVLMTQSPDSLAVSLGERATINCKSSQSIVHSNGNTYLEWYQQKPGQSPKLLIYKVSNRFSGVPDRFSGSGSGTDFTLTISSLQAEDVAVYYCFQGSHVPNTFGGGTKVEIKGS

SEQ ID NO: 1593 - protein, 117 aa, synthetic construct
  REGION 1..117: note = Description of Artificial Sequence: Synthetic polypeptide
  REGION 1..117: note = VH of XENP024246
QIQLVQSGSELKKPGASVKVSCKASGYTFGHYGMNWVRQAPGQGLEWMGWINTYTGEPTYADGFTGRFVFSLDTSVSTAYLQISSLKAEDTAVYFCARDYYGSSPYWGQGTLVTVSS

SEQ ID NO: 1594 - protein, 114 aa, synthetic construct; identical to SEQ ID NO: 649
  REGION 1..114: note = Description of Artificial Sequence: Synthetic polypeptide
  REGION 1..114: note = VL of XENP024246

SEQ ID NO: 1595 - protein, 5 aa, synthetic construct
  REGION 1..5: note = Description of Artificial Sequence: Synthetic peptide
  REGION 1..5: note = XENP024246 vhCDR1
HYGMN

SEQ ID NO: 1596 - protein, 17 aa, synthetic construct
  REGION 1..17: note = Description of Artificial Sequence: Synthetic peptide
  REGION 1..17: note = XENP024246 vhCDR2
WINTYTGEPTYADGFTG

SEQ ID NO: 1597 - protein, 8 aa, synthetic construct
  REGION 1..8: note = Description of Artificial Sequence: Synthetic peptide
  REGION 1..8: note = XENP024246 vhCDR3
DYYGSSPY

SEQ ID NO: 1598 - protein, 16 aa, synthetic construct
  REGION 1..16: note = Description of Artificial Sequence: Synthetic peptide
  REGION 1..16: note = XENP024246 vlCDR1
KSSQSIVHSNGNTYLE

SEQ ID NO: 1599 - protein, 7 aa, synthetic construct
  REGION 1..7: note = Description of Artificial Sequence: Synthetic peptide
  REGION 1..7: note = XENP024246 vlCDR2
KVSNRFS

SEQ ID NO: 1600 - protein, 9 aa, synthetic construct
  REGION 1..9: note = Description of Artificial Sequence: Synthetic peptide
  REGION 1..9: note = XENP024246 vlCDR3
FQGSHVPNT

SEQ ID NO: 1601 - protein, 251 aa, synthetic construct
  REGION 1..251: note = Description of Artificial Sequence: Synthetic polypeptide
  REGION 1..251: note = XENP024247 1C11_H3.120_L3_scFv
QIQLVQSGSELKKPGASVKVSCKASGYTFTHYGINWVRQAPGQGLEWMGWINTYTGEPTYADGFTGRFVFSLDTSVSTAYLQISSLKAEDTAVYFCARDYYGSSPYWGQGTLVTVSSGKPGSGKPGSGKPGSGKPGSDVLMTQSPDSLAVSLGERATINCKSSQSIVHSNGNTYLEWYQQKPGQSPKLLIYKVSNRFSGVPDRFSGSGSGTDFTLTISSLQAEDVAVYYCFQGSHVPNTFGGGTKVEIKGS

SEQ ID NO: 1602 - protein, 117 aa, synthetic construct
  REGION 1..117: note = Description of Artificial Sequence: Synthetic polypeptide
  REGION 1..117: note = VH of XENP024247
QIQLVQSGSELKKPGASVKVSCKASGYTFTHYGINWVRQAPGQGLEWMGWINTYTGEPTYADGFTGRFVFSLDTSVSTAYLQISSLKAEDTAVYFCARDYYGSSPYWGQGTLVTVSS

SEQ ID NO: 1603 - protein, 114 aa, synthetic construct; identical to SEQ ID NO: 649
  REGION 1..114: note = Description of Artificial Sequence: Synthetic polypeptide
  REGION 1..114: note = VL of XENP024247

SEQ ID NO: 1604 - protein, 5 aa, synthetic construct
  REGION 1..5: note = Description of Artificial Sequence: Synthetic peptide
  REGION 1..5: note = XENP024247 vhCDR1
HYGIN

SEQ ID NO: 1605 - protein, 17 aa, synthetic construct
  REGION 1..17: note = Description of Artificial Sequence: Synthetic peptide
  REGION 1..17: note = XENP024247 vhCDR2
WINTYTGEPTYADGFTG

SEQ ID NO: 1606 - protein, 8 aa, synthetic construct
  REGION 1..8: note = Description of Artificial Sequence: Synthetic peptide
  REGION 1..8: note = XENP024247 vhCDR3
DYYGSSPY

SEQ ID NO: 1607 - protein, 16 aa, synthetic construct
  REGION 1..16: note = Description of Artificial Sequence: Synthetic peptide
  REGION 1..16: note = XENP024247 vlCDR1
KSSQSIVHSNGNTYLE

SEQ ID NO: 1608 - protein, 7 aa, synthetic construct
  REGION 1..7: note = Description of Artificial Sequence: Synthetic peptide
  REGION 1..7: note = XENP024247 vlCDR2
KVSNRFS

SEQ ID NO: 1609 - protein, 9 aa, synthetic construct
  REGION 1..9: note = Description of Artificial Sequence: Synthetic peptide
  REGION 1..9: note = XENP024247 vlCDR3
FQGSHVPNT

SEQ ID NO: 1610 - protein, 251 aa, synthetic construct
  REGION 1..251: note = Description of Artificial Sequence: Synthetic polypeptide
  REGION 1..251: note = XENP024248 1C11_H3.121_L3_scFv
QIQLVQSGSELKKPGASVKVSCKASGYTFTHYGVNWVRQAPGQGLEWMGWINTYTGEPTYADGFTGRFVFSLDTSVSTAYLQISSLKAEDTAVYFCARDYYGSSPYWGQGTLVTVSSGKPGSGKPGSGKPGSGKPGSDVLMTQSPDSLAVSLGERATINCKSSQSIVHSNGNTYLEWYQQKPGQSPKLLIYKVSNRFSGVPDRFSGSGSGTDFTLTISSLQAEDVAVYYCFQGSHVPNTFGGGTKVEIKGS

SEQ ID NO: 1611 - protein, 117 aa, synthetic construct
  REGION 1..117: note = Description of Artificial Sequence: Synthetic polypeptide
  REGION 1..117: note = VH of XENP024248
QIQLVQSGSELKKPGASVKVSCKASGYTFTHYGVNWVRQAPGQGLEWMGWINTYTGEPTYADGFTGRFVFSLDTSVSTAYLQISSLKAEDTAVYFCARDYYGSSPYWGQGTLVTVSS

SEQ ID NO: 1612 - protein, 114 aa, synthetic construct; identical to SEQ ID NO: 649
  REGION 1..114: note = Description of Artificial Sequence: Synthetic polypeptide
  REGION 1..114: note = VL of XENP024248

SEQ ID NO: 1613 - protein, 5 aa, synthetic construct
  REGION 1..5: note = Description of Artificial Sequence: Synthetic peptide
  REGION 1..5: note = XENP024248 vhCDR1
HYGVN

SEQ ID NO: 1614 - protein, 17 aa, synthetic construct
  REGION 1..17: note = Description of Artificial Sequence: Synthetic peptide
  REGION 1..17: note = XENP024248 vhCDR2
WINTYTGEPTYADGFTG

SEQ ID NO: 1615 - protein, 8 aa, synthetic construct
  REGION 1..8: note = Description of Artificial Sequence: Synthetic peptide
  REGION 1..8: note = XENP024248 vhCDR3
DYYGSSPY

SEQ ID NO: 1616 - protein, 16 aa, synthetic construct
  REGION 1..16: note = Description of Artificial Sequence: Synthetic peptide
  REGION 1..16: note = XENP024248 vlCDR1
KSSQSIVHSNGNTYLE

SEQ ID NO: 1617 - protein, 7 aa, synthetic construct
  REGION 1..7: note = Description of Artificial Sequence: Synthetic peptide
  REGION 1..7: note = XENP024248 vlCDR2
KVSNRFS

SEQ ID NO: 1618 - protein, 9 aa, synthetic construct
  REGION 1..9: note = Description of Artificial Sequence: Synthetic peptide
  REGION 1..9: note = XENP024248 vlCDR3
FQGSHVPNT

SEQ ID NO: 1619 - protein, 251 aa, synthetic construct
  REGION 1..251: note = Description of Artificial Sequence: Synthetic polypeptide
  REGION 1..251: note = XENP024249 1C11_H3.123_L3_scFv
QIQLVQSGSELKKPGASVKVSCKASGYTFTHYGMNWIRQAPGQGLEWMGWINTYTGEPTYADGFTGRFVFSLDTSVSTAYLQISSLKAEDTAVYFCARDYYGSSPYWGQGTLVTVSSGKPGSGKPGSGKPGSGKPGSDVLMTQSPDSLAVSLGERATINCKSSQSIVHSNGNTYLEWYQQKPGQSPKLLIYKVSNRFSGVPDRFSGSGSGTDFTLTISSLQAEDVAVYYCFQGSHVPNTFGGGTKVEIKGS

SEQ ID NO: 1620 - protein, 117 aa, synthetic construct
  REGION 1..117: note = Description of Artificial Sequence: Synthetic polypeptide
  REGION 1..117: note = VH of XENP024249
QIQLVQSGSELKKPGASVKVSCKASGYTFTHYGMNWIRQAPGQGLEWMGWINTYTGEPTYADGFTGRFVFSLDTSVSTAYLQISSLKAEDTAVYFCARDYYGSSPYWGQGTLVTVSS

SEQ ID NO: 1621 - protein, 114 aa, synthetic construct; identical to SEQ ID NO: 649
  REGION 1..114: note = Description of Artificial Sequence: Synthetic polypeptide
  REGION 1..114: note = VL of XENP024249

SEQ ID NO: 1622 - protein, 5 aa, synthetic construct
  REGION 1..5: note = Description of Artificial Sequence: Synthetic peptide
  REGION 1..5: note = XENP024249 vhCDR1
HYGMN

SEQ ID NO: 1623 - protein, 17 aa, synthetic construct
  REGION 1..17: note = Description of Artificial Sequence: Synthetic peptide
  REGION 1..17: note = XENP024249 vhCDR2
WINTYTGEPTYADGFTG

SEQ ID NO: 1624 - protein, 8 aa, synthetic construct
  REGION 1..8: note = Description of Artificial Sequence: Synthetic peptide
  REGION 1..8: note = XENP024249 vhCDR3
DYYGSSPY

SEQ ID NO: 1625 - protein, 16 aa, synthetic construct
  REGION 1..16: note = Description of Artificial Sequence: Synthetic peptide
  REGION 1..16: note = XENP024249 vlCDR1
KSSQSIVHSNGNTYLE

SEQ ID NO: 1626 - protein, 7 aa, synthetic construct
  REGION 1..7: note = Description of Artificial Sequence: Synthetic peptide
  REGION 1..7: note = XENP024249 vlCDR2
KVSNRFS

SEQ ID NO: 1627 - protein, 9 aa, synthetic construct
  REGION 1..9: note = Description of Artificial Sequence: Synthetic peptide
  REGION 1..9: note = XENP024249 vlCDR3
FQGSHVPNT

SEQ ID NO: 1628 - protein, 251 aa, synthetic construct
  REGION 1..251: note = Description of Artificial Sequence: Synthetic polypeptide
  REGION 1..251: note = XENP024250 1C11_H3.125_L3_scFv
QIQLVQSGSELKKPGASVKVSCKASGYTFTHYGMNWVRQPPGQGLEWMGWINTYTGEPTYADGFTGRFVFSLDTSVSTAYLQISSLKAEDTAVYFCARDYYGSSPYWGQGTLVTVSSGKPGSGKPGSGKPGSGKPGSDVLMTQSPDSLAVSLGERATINCKSSQSIVHSNGNTYLEWYQQKPGQSPKLLIYKVSNRFSGVPDRFSGSGSGTDFTLTISSLQAEDVAVYYCFQGSHVPNTFGGGTKVEIKGS

SEQ ID NO: 1629 - protein, 117 aa, synthetic construct
  REGION 1..117: note = Description of Artificial Sequence: Synthetic polypeptide
  REGION 1..117: note = VH of XENP024250
QIQLVQSGSELKKPGASVKVSCKASGYTFTHYGMNWVRQPPGQGLEWMGWINTYTGEPTYADGFTGRFVFSLDTSVSTAYLQISSLKAEDTAVYFCARDYYGSSPYWGQGTLVTVSS

SEQ ID NO: 1630 - protein, 114 aa, synthetic construct; identical to SEQ ID NO: 649
  REGION 1..114: note = Description of Artificial Sequence: Synthetic polypeptide
  REGION 1..114: note = VL of XENP024250

SEQ ID NO: 1631 - protein, 5 aa, synthetic construct
  REGION 1..5: note = Description of Artificial Sequence: Synthetic peptide
  REGION 1..5: note = XENP024250 vhCDR1
HYGMN

SEQ ID NO: 1632 - protein, 17 aa, synthetic construct
  REGION 1..17: note = Description of Artificial Sequence: Synthetic peptide
  REGION 1..17: note = XENP024250 vhCDR2
WINTYTGEPTYADGFTG

SEQ ID NO: 1633 - protein, 8 aa, synthetic construct
  REGION 1..8: note = Description of Artificial Sequence: Synthetic peptide
  REGION 1..8: note = XENP024250 vhCDR3
DYYGSSPY

SEQ ID NO: 1634 - protein, 16 aa, synthetic construct
  REGION 1..16: note = Description of Artificial Sequence: Synthetic peptide
  REGION 1..16: note = XENP024250 vlCDR1
KSSQSIVHSNGNTYLE

SEQ ID NO: 1635 - protein, 7 aa, synthetic construct
  REGION 1..7: note = Description of Artificial Sequence: Synthetic peptide
  REGION 1..7: note = XENP024250 vlCDR2
KVSNRFS

SEQ ID NO: 1636 - protein, 9 aa, synthetic construct
  REGION 1..9: note = Description of Artificial Sequence: Synthetic peptide
  REGION 1..9: note = XENP024250 vlCDR3
FQGSHVPNT

SEQ ID NO: 1637 - protein, 251 aa, synthetic construct
  REGION 1..251: note = Description of Artificial Sequence: Synthetic polypeptide
  REGION 1..251: note = XENP024251 1C11_H3.126_L3_scFv
QIQLVQSGSELKKPGASVKVSCKASGYTFTHYGMNWVRQATGQGLEWMGWINTYTGEPTYADGFTGRFVFSLDTSVSTAYLQISSLKAEDTAVYFCARDYYGSSPYWGQGTLVTVSSGKPGSGKPGSGKPGSGKPGSDVLMTQSPDSLAVSLGERATINCKSSQSIVHSNGNTYLEWYQQKPGQSPKLLIYKVSNRFSGVPDRFSGSGSGTDFTLTISSLQAEDVAVYYCFQGSHVPNTFGGGTKVEIKGS

SEQ ID NO: 1638 - protein, 117 aa, synthetic construct
  REGION 1..117: note = Description of Artificial Sequence: Synthetic polypeptide
  REGION 1..117: note = VH of XENP024251
QIQLVQSGSELKKPGASVKVSCKASGYTFTHYGMNWVRQATGQGLEWMGWINTYTGEPTYADGFTGRFVFSLDTSVSTAYLQISSLKAEDTAVYFCARDYYGSSPYWGQGTLVTVSS

SEQ ID NO: 1639 - protein, 114 aa, synthetic construct; identical to SEQ ID NO: 649
  REGION 1..114: note = Description of Artificial Sequence: Synthetic polypeptide
  REGION 1..114: note = VL of XENP024251

SEQ ID NO: 1640 - protein, 5 aa, synthetic construct
  REGION 1..5: note = Description of Artificial Sequence: Synthetic peptide
  REGION 1..5: note = XENP024251 vhCDR1
HYGMN

SEQ ID NO: 1641 - protein, 17 aa, synthetic construct
  REGION 1..17: note = Description of Artificial Sequence: Synthetic peptide
  REGION 1..17: note = XENP024251 vhCDR2
WINTYTGEPTYADGFTG

SEQ ID NO: 1642 - protein, 8 aa, synthetic construct
  REGION 1..8: note = Description of Artificial Sequence: Synthetic peptide
  REGION 1..8: note = XENP024251 vhCDR3
DYYGSSPY

SEQ ID NO: 1643 - protein, 16 aa, synthetic construct
  REGION 1..16: note = Description of Artificial Sequence: Synthetic peptide
  REGION 1..16: note = XENP024251 vlCDR1
KSSQSIVHSNGNTYLE

SEQ ID NO: 1644 - protein, 7 aa, synthetic construct
  REGION 1..7: note = Description of Artificial Sequence: Synthetic peptide
  REGION 1..7: note = XENP024251 vlCDR2
KVSNRFS

SEQ ID NO: 1645 - protein, 9 aa, synthetic construct
  REGION 1..9: note = Description of Artificial Sequence: Synthetic peptide
  REGION 1..9: note = XENP024251 vlCDR3
FQGSHVPNT

SEQ ID NO: 1646 - protein, 251 aa, synthetic construct
  REGION 1..251: note = Description of Artificial Sequence: Synthetic polypeptide
  REGION 1..251: note = XENP024252 1C11_H3.127_L3_scFv
QIQLVQSGSELKKPGASVKVSCKASGYTFTHYGMNWVRQAPGQALEWMGWINTYTGEPTYADGFTGRFVFSLDTSVSTAYLQISSLKAEDTAVYFCARDYYGSSPYWGQGTLVTVSSGKPGSGKPGSGKPGSGKPGSDVLMTQSPDSLAVSLGERATINCKSSQSIVHSNGNTYLEWYQQKPGQSPKLLIYKVSNRFSGVPDRFSGSGSGTDFTLTISSLQAEDVAVYYCFQGSHVPNTFGGGTKVEIKGS

SEQ ID NO: 1647 - protein, 117 aa, synthetic construct
  REGION 1..117: note = Description of Artificial Sequence: Synthetic polypeptide
  REGION 1..117: note = VH of XENP024252
QIQLVQSGSELKKPGASVKVSCKASGYTFTHYGMNWVRQAPGQALEWMGWINTYTGEPTYADGFTGRFVFSLDTSVSTAYLQISSLKAEDTAVYFCARDYYGSSPYWGQGTLVTVSS

SEQ ID NO: 1648 - protein, 114 aa, synthetic construct; identical to SEQ ID NO: 649
  REGION 1..114: note = Description of Artificial Sequence: Synthetic polypeptide
  REGION 1..114: note = VL of XENP024252

SEQ ID NO: 1649 - protein, 5 aa, synthetic construct
  REGION 1..5: note = Description of Artificial Sequence: Synthetic peptide
  REGION 1..5: note = XENP024252 vhCDR1
HYGMN

SEQ ID NO: 1650 - protein, 17 aa, synthetic construct
  REGION 1..17: note = Description of Artificial Sequence: Synthetic peptide
  REGION 1..17: note = XENP024252 vhCDR2
WINTYTGEPTYADGFTG

SEQ ID NO: 1651 - protein, 8 aa, synthetic construct
  REGION 1..8: note = Description of Artificial Sequence: Synthetic peptide
  REGION 1..8: note = XENP024252 vhCDR3
DYYGSSPY

SEQ ID NO: 1652 - protein, 16 aa, synthetic construct
  REGION 1..16: note = Description of Artificial Sequence: Synthetic peptide
  REGION 1..16: note = XENP024252 vlCDR1
KSSQSIVHSNGNTYLE

SEQ ID NO: 1653 - protein, 7 aa, synthetic construct
  REGION 1..7: note = Description of Artificial Sequence: Synthetic peptide
  REGION 1..7: note = XENP024252 vlCDR2
KVSNRFS

SEQ ID NO: 1654 - protein, 9 aa, synthetic construct
  REGION 1..9: note = Description of Artificial Sequence: Synthetic peptide
  REGION 1..9: note = XENP024252 vlCDR3
FQGSHVPNT

SEQ ID NO: 1655 - protein, 251 aa, synthetic construct
  REGION 1..251: note = Description of Artificial Sequence: Synthetic polypeptide
  REGION 1..251: note = XENP024253 1C11_H3.128_L3_scFv
QIQLVQSGSELKKPGASVKVSCKASGYTFTHYGMNWVRQAPGQGLEWVGWINTYTGEPTYADGFTGRFVFSLDTSVSTAYLQISSLKAEDTAVYFCARDYYGSSPYWGQGTLVTVSSGKPGSGKPGSGKPGSGKPGSDVLMTQSPDSLAVSLGERATINCKSSQSIVHSNGNTYLEWYQQKPGQSPKLLIYKVSNRFSGVPDRFSGSGSGTDFTLTISSLQAEDVAVYYCFQGSHVPNTFGGGTKVEIKGS

SEQ ID NO: 1656 - protein, 117 aa, synthetic construct
  REGION 1..117: note = Description of Artificial Sequence: Synthetic polypeptide
  REGION 1..117: note = VH of XENP024253
QIQLVQSGSELKKPGASVKVSCKASGYTFTHYGMNWVRQAPGQGLEWVGWINTYTGEPTYADGFTGRFVFSLDTSVSTAYLQISSLKAEDTAVYFCARDYYGSSPYWGQGTLVTVSS

SEQ ID NO: 1657 - protein, 114 aa, synthetic construct; identical to SEQ ID NO: 649
  REGION 1..114: note = Description of Artificial Sequence: Synthetic polypeptide
  REGION 1..114: note = VL of XENP024253

SEQ ID NO: 1658 - protein, 5 aa, synthetic construct
  REGION 1..5: note = Description of Artificial Sequence: Synthetic peptide
  REGION 1..5: note = XENP024253 vhCDR1
HYGMN

SEQ ID NO: 1659 - protein, 17 aa, synthetic construct
  REGION 1..17: note = Description of Artificial Sequence: Synthetic peptide
  REGION 1..17: note = XENP024253 vhCDR2
WINTYTGEPTYADGFTG

SEQ ID NO: 1660 - protein, 8 aa, synthetic construct
  REGION 1..8: note = Description of Artificial Sequence: Synthetic peptide
  REGION 1..8: note = XENP024253 vhCDR3
DYYGSSPY

SEQ ID NO: 1661 - protein, 16 aa, synthetic construct
  REGION 1..16: note = Description of Artificial Sequence: Synthetic peptide
  REGION 1..16: note = XENP024253 vlCDR1
KSSQSIVHSNGNTYLE

SEQ ID NO: 1662 - protein, 7 aa, synthetic construct
  REGION 1..7: note = Description of Artificial Sequence: Synthetic peptide
  REGION 1..7: note = XENP024253 vlCDR2
KVSNRFS

SEQ ID NO: 1663 - protein, 9 aa, synthetic construct
  REGION 1..9: note = Description of Artificial Sequence: Synthetic peptide
  REGION 1..9: note = XENP024253 vlCDR3
FQGSHVPNT

SEQ ID NO: 1664 - protein, 251 aa, synthetic construct
  REGION 1..251: note = Description of Artificial Sequence: Synthetic polypeptide
  REGION 1..251: note = XENP024254 1C11_H3.129_L3_scFv
QIQLVQSGSELKKPGASVKVSCKASGYTFTHYGMNWVRQAPGQGLEWIGWINTYTGEPTYADGFTGRFVFSLDTSVSTAYLQISSLKAEDTAVYFCARDYYGSSPYWGQGTLVTVSSGKPGSGKPGSGKPGSGKPGSDVLMTQSPDSLAVSLGERATINCKSSQSIVHSNGNTYLEWYQQKPGQSPKLLIYKVSNRFSGVPDRFSGSGSGTDFTLTISSLQAEDVAVYYCFQGSHVPNTFGGGTKVEIKGS

SEQ ID NO: 1665 - protein, 117 aa, synthetic construct
  REGION 1..117: note = Description of Artificial Sequence: Synthetic polypeptide
  REGION 1..117: note = VH of XENP024254
QIQLVQSGSELKKPGASVKVSCKASGYTFTHYGMNWVRQAPGQGLEWIGWINTYTGEPTYADGFTGRFVFSLDTSVSTAYLQISSLKAEDTAVYFCARDYYGSSPYWGQGTLVTVSS

SEQ ID NO: 1666 - protein, 114 aa, synthetic construct; identical to SEQ ID NO: 649
  REGION 1..114: note = Description of Artificial Sequence: Synthetic polypeptide
  REGION 1..114: note = VL of XENP024254

SEQ ID NO: 1667 - protein, 5 aa, synthetic construct
  REGION 1..5: note = Description of Artificial Sequence: Synthetic peptide
  REGION 1..5: note = XENP024254 vhCDR1
HYGMN

SEQ ID NO: 1668 - protein, 17 aa, synthetic construct
  REGION 1..17: note = Description of Artificial Sequence: Synthetic peptide
  REGION 1..17: note = XENP024254 vhCDR2
WINTYTGEPTYADGFTG

SEQ ID NO: 1669 - protein, 8 aa, synthetic construct
  REGION 1..8: note = Description of Artificial Sequence: Synthetic peptide
  REGION 1..8: note = XENP024254 vhCDR3
DYYGSSPY

SEQ ID NO: 1670 - protein, 16 aa, synthetic construct
  REGION 1..16: note = Description of Artificial Sequence: Synthetic peptide
  REGION 1..16: note = XENP024254 vlCDR1
KSSQSIVHSNGNTYLE

SEQ ID NO: 1671 - protein, 7 aa, synthetic construct
  REGION 1..7: note = Description of Artificial Sequence: Synthetic peptide
  REGION 1..7: note = XENP024254 vlCDR2
KVSNRFS

SEQ ID NO: 1672 - protein, 9 aa, synthetic construct
  REGION 1..9: note = Description of Artificial Sequence: Synthetic peptide
  REGION 1..9: note = XENP024254 vlCDR3
FQGSHVPNT

SEQ ID NO: 1673 - protein, 251 aa, synthetic construct
  REGION 1..251: note = Description of Artificial Sequence: Synthetic polypeptide
  REGION 1..251: note = XENP024255 1C11_H3.130_L3_scFv
QIQLVQSGSELKKPGASVKVSCKASGYTFTHYGMNWVRQAPGQGLEWMSWINTYTGEPTYADGFTGRFVFSLDTSVSTAYLQISSLKAEDTAVYFCARDYYGSSPYWGQGTLVTVSSGKPGSGKPGSGKPGSGKPGSDVLMTQSPDSLAVSLGERATINCKSSQSIVHSNGNTYLEWYQQKPGQSPKLLIYKVSNRFSGVPDRFSGSGSGTDFTLTISSLQAEDVAVYYCFQGSHVPNTFGGGTKVEIKGS

SEQ ID NO: 1674 - protein, 117 aa, synthetic construct
  REGION 1..117: note = Description of Artificial Sequence: Synthetic polypeptide
  REGION 1..117: note = VH of XENP024255
QIQLVQSGSELKKPGASVKVSCKASGYTFTHYGMNWVRQAPGQGLEWMSWINTYTGEPTYADGFTGRFVFSLDTSVSTAYLQISSLKAEDTAVYFCARDYYGSSPYWGQGTLVTVSS

SEQ ID NO: 1675 - protein, 114 aa, synthetic construct; identical to SEQ ID NO: 649
  REGION 1..114: note = Description of Artificial Sequence: Synthetic polypeptide
  REGION 1..114: note = VL of XENP024255

SEQ ID NO: 1676 - protein, 5 aa, synthetic construct
  REGION 1..5: note = Description of Artificial Sequence: Synthetic peptide
  REGION 1..5: note = XENP024255 vhCDR1
HYGMN

SEQ ID NO: 1677 - protein, 17 aa, synthetic construct
  REGION 1..17: note = Description of Artificial Sequence: Synthetic peptide
  REGION 1..17: note = XENP024255 vhCDR2
WINTYTGEPTYADGFTG

SEQ ID NO: 1678 - protein, 8 aa, synthetic construct
  REGION 1..8: note = Description of Artificial Sequence: Synthetic peptide
  REGION 1..8: note = XENP024255 vhCDR3
DYYGSSPY

SEQ ID NO: 1679 - protein, 16 aa, synthetic construct
  REGION 1..16: note = Description of Artificial Sequence: Synthetic peptide
  REGION 1..16: note = XENP024255 vlCDR1
KSSQSIVHSNGNTYLE

SEQ ID NO: 1680 - protein, 7 aa, synthetic construct
  REGION 1..7: note = Description of Artificial Sequence: Synthetic peptide
  REGION 1..7: note = XENP024255 vlCDR2
KVSNRFS

SEQ ID NO: 1681 - protein, 9 aa, synthetic construct
  REGION 1..9: note = Description of Artificial Sequence: Synthetic peptide
  REGION 1..9: note = XENP024255 vlCDR3
FQGSHVPNT

SEQ ID NO: 1682 - protein, 251 aa, synthetic construct
  REGION 1..251: note = Description of Artificial Sequence: Synthetic polypeptide
  REGION 1..251: note = XENP024256 1C11_H3.134_L3_scFv
QIQLVQSGSELKKPGASVKVSCKASGYTFTHYGMNWVRQAPGQGLEWMGWINTKTGEPTYADGFTGRFVFSLDTSVSTAYLQISSLKAEDTAVYFCARDYYGSSPYWGQGTLVTVSSGKPGSGKPGSGKPGSGKPGSDVLMTQSPDSLAVSLGERATINCKSSQSIVHSNGNTYLEWYQQKPGQSPKLLIYKVSNRFSGVPDRFSGSGSGTDFTLTISSLQAEDVAVYYCFQGSHVPNTFGGGTKVEIKGS

SEQ ID NO: 1683 - protein, 117 aa, synthetic construct
  REGION 1..117: note = Description of Artificial Sequence: Synthetic polypeptide
  REGION 1..117: note = VH of XENP024256
QIQLVQSGSELKKPGASVKVSCKASGYTFTHYGMNWVRQAPGQGLEWMGWINTKTGEPTYADGFTGRFVFSLDTSVSTAYLQISSLKAEDTAVYFCARDYYGSSPYWGQGTLVTVSS

SEQ ID NO: 1684 - protein, 114 aa, synthetic construct; identical to SEQ ID NO: 649
  REGION 1..114: note = Description of Artificial Sequence: Synthetic polypeptide
  REGION 1..114: note = VL of XENP024256

SEQ ID NO: 1685 - protein, 5 aa, synthetic construct
  REGION 1..5: note = Description of Artificial Sequence: Synthetic peptide
  REGION 1..5: note = XENP024256 vhCDR1
HYGMN

SEQ ID NO: 1686 - protein, 17 aa, synthetic construct
  REGION 1..17: note = Description of Artificial Sequence: Synthetic peptide
  REGION 1..17: note = XENP024256 vhCDR2
WINTKTGEPTYADGFTG

SEQ ID NO: 1687 - protein, 8 aa, synthetic construct
  REGION 1..8: note = Description of Artificial Sequence: Synthetic peptide
  REGION 1..8: note = XENP024256 vhCDR3
DYYGSSPY

SEQ ID NO: 1688 - protein, 16 aa, synthetic construct
  REGION 1..16: note = Description of Artificial Sequence: Synthetic peptide
  REGION 1..16: note = XENP024256 vlCDR1
KSSQSIVHSNGNTYLE

SEQ ID NO: 1689 - protein, 7 aa, synthetic construct
  REGION 1..7: note = Description of Artificial Sequence: Synthetic peptide
  REGION 1..7: note = XENP024256 vlCDR2
KVSNRFS

SEQ ID NO: 1690 - protein, 9 aa, synthetic construct
  REGION 1..9: note = Description of Artificial Sequence: Synthetic peptide
  REGION 1..9: note = XENP024256 vlCDR3
FQGSHVPNT

SEQ ID NO: 1691 - protein, 251 aa, synthetic construct
  REGION 1..251: note = Description of Artificial Sequence: Synthetic polypeptide
  REGION 1..251: note = XENP024257 1C11_H3.135_L3_scFv
QIQLVQSGSELKKPGASVKVSCKASGYTFTHYGMNWVRQAPGQGLEWMGWINTYTSEPTYADGFTGRFVFSLDTSVSTAYLQISSLKAEDTAVYFCARDYYGSSPYWGQGTLVTVSSGKPGSGKPGSGKPGSGKPGSDVLMTQSPDSLAVSLGERATINCKSSQSIVHSNGNTYLEWYQQKPGQSPKLLIYKVSNRFSGVPDRFSGSGSGTDFTLTISSLQAEDVAVYYCFQGSHVPNTFGGGTKVEIKGS

SEQ ID NO: 1692 - protein, 117 aa, synthetic construct
  REGION 1..117: note = Description of Artificial Sequence: Synthetic polypeptide
  REGION 1..117: note = VH of XENP024257
QIQLVQSGSELKKPGASVKVSCKASGYTFTHYGMNWVRQAPGQGLEWMGWINTYTSEPTYADGFTGRFVFSLDTSVSTAYLQISSLKAEDTAVYFCARDYYGSSPYWGQGTLVTVSS

SEQ ID NO: 1693 - protein, 114 aa, synthetic construct; identical to SEQ ID NO: 649
  REGION 1..114: note = Description of Artificial Sequence: Synthetic polypeptide
  REGION 1..114: note = VL of XENP024257

SEQ ID NO: 1694 - protein, 5 aa, synthetic construct
  REGION 1..5: note = Description of Artificial Sequence: Synthetic peptide
  REGION 1..5: note = XENP024257 vhCDR1
HYGMN

SEQ ID NO: 1695 - protein, 17 aa, synthetic construct
  REGION 1..17: note = Description of Artificial Sequence: Synthetic peptide
  REGION 1..17: note = XENP024257 vhCDR2
WINTYTSEPTYADGFTG

SEQ ID NO: 1696 - protein, 8 aa, synthetic construct
  REGION 1..8: note = Description of Artificial Sequence: Synthetic peptide
  REGION 1..8: note = XENP024257 vhCDR3
DYYGSSPY

SEQ ID NO: 1697 - protein, 16 aa, synthetic construct
  REGION 1..16: note = Description of Artificial Sequence: Synthetic peptide
  REGION 1..16: note = XENP024257 vlCDR1
KSSQSIVHSNGNTYLE

SEQ ID NO: 1698 - protein, 7 aa, synthetic construct
  REGION 1..7: note = Description of Artificial Sequence: Synthetic peptide
  REGION 1..7: note = XENP024257 vlCDR2
KVSNRFS

SEQ ID NO: 1699 - protein, 9 aa, synthetic construct
  REGION 1..9: note = Description of Artificial Sequence: Synthetic peptide
  REGION 1..9: note = XENP024257 vlCDR3
FQGSHVPNT

SEQ ID NO: 1700 - protein, 251 aa, synthetic construct
  REGION 1..251: note = Description of Artificial Sequence: Synthetic polypeptide
  REGION 1..251: note = XENP024258 1C11_H3.136_L3_scFv
QIQLVQSGSELKKPGASVKVSCKASGYTFTHYGMNWVRQAPGQGLEWMGWINTYTGSPTYADGFTGRFVFSLDTSVSTAYLQISSLKAEDTAVYFCARDYYGSSPYWGQGTLVTVSSGKPGSGKPGSGKPGSGKPGSDVLMTQSPDSLAVSLGERATINCKSSQSIVHSNGNTYLEWYQQKPGQSPKLLIYKVSNRFSGVPDRFSGSGSGTDFTLTISSLQAEDVAVYYCFQGSHVPNTFGGGTKVEIKGS

SEQ ID NO: 1701 - protein, 117 aa, synthetic construct
  REGION 1..117: note = Description of Artificial Sequence: Synthetic polypeptide
  REGION 1..117: note = VH of XENP024258
QIQLVQSGSELKKPGASVKVSCKASGYTFTHYGMNWVRQAPGQGLEWMGWINTYTGSPTYADGFTGRFVFSLDTSVSTAYLQISSLKAEDTAVYFCARDYYGSSPYWGQGTLVTVSS

SEQ ID NO: 1702 - protein, 114 aa, synthetic construct; identical to SEQ ID NO: 649
  REGION 1..114: note = Description of Artificial Sequence: Synthetic polypeptide
  REGION 1..114: note = VL of XENP024258

SEQ ID NO: 1703 - protein, 5 aa, synthetic construct
  REGION 1..5: note = Description of Artificial Sequence: Synthetic peptide
  REGION 1..5: note = XENP024258 vhCDR1
HYGMN

SEQ ID NO: 1704 - protein, 17 aa, synthetic construct
  REGION 1..17: note = Description of Artificial Sequence: Synthetic peptide
  REGION 1..17: note = XENP024258 vhCDR2
WINTYTGSPTYADGFTG

SEQ ID NO: 1705 - protein, 8 aa, synthetic construct
  REGION 1..8: note = Description of Artificial Sequence: Synthetic peptide
  REGION 1..8: note = XENP024258 vhCDR3
DYYGSSPY

SEQ ID NO: 1706 - protein, 16 aa, synthetic construct
  REGION 1..16: note = Description of Artificial Sequence: Synthetic peptide
  REGION 1..16: note = XENP024258 vlCDR1
KSSQSIVHSNGNTYLE

SEQ ID NO: 1707 - protein, 7 aa, synthetic construct
  REGION 1..7: note = Description of Artificial Sequence: Synthetic peptide
  REGION 1..7: note = XENP024258 vlCDR2
KVSNRFS

SEQ ID NO: 1708 - protein, 9 aa, synthetic construct
  REGION 1..9: note = Description of Artificial Sequence: Synthetic peptide
  REGION 1..9: note = XENP024258 vlCDR3
FQGSHVPNT

SEQ ID NO: 1709 - protein, 251 aa, synthetic construct
  REGION 1..251: note = Description of Artificial Sequence: Synthetic polypeptide
  REGION 1..251: note = XENP024259 1C11_H3.137_L3_scFv
QIQLVQSGSELKKPGASVKVSCKASGYTFTHYGMNWVRQAPGQGLEWMGWINTYTGNPTYADGFTGRFVFSLDTSVSTAYLQISSLKAEDTAVYFCARDYYGSSPYWGQGTLVTVSSGKPGSGKPGSGKPGSGKPGSDVLMTQSPDSLAVSLGERATINCKSSQSIVHSNGNTYLEWYQQKPGQSPKLLIYKVSNRFSGVPDRFSGSGSGTDFTLTISSLQAEDVAVYYCFQGSHVPNTFGGGTKVEIKGS

SEQ ID NO: 1710 - protein, 117 aa, synthetic construct
  REGION 1..117: note = Description of Artificial Sequence: Synthetic polypeptide
  REGION 1..117: note = VH of XENP024259
QIQLVQSGSELKKPGASVKVSCKASGYTFTHYGMNWVRQAPGQGLEWMGWINTYTGNPTYADGFTGRFVFSLDTSVSTAYLQISSLKAEDTAVYFCARDYYGSSPYWGQGTLVTVSS

SEQ ID NO: 1711 - protein, 114 aa, synthetic construct; identical to SEQ ID NO: 649
  REGION 1..114: note = Description of Artificial Sequence: Synthetic polypeptide
  REGION 1..114: note = VL of XENP024259

SEQ ID NO: 1712 - protein, 5 aa, synthetic construct
  REGION 1..5: note = Description of Artificial Sequence: Synthetic peptide
  REGION 1..5: note = XENP024259 vhCDR1
HYGMN

SEQ ID NO: 1713 - protein, 17 aa, synthetic construct
  REGION 1..17: note = Description of Artificial Sequence: Synthetic peptide
  REGION 1..17: note = XENP024259 vhCDR2
WINTYTGNPTYADGFTG

SEQ ID NO: 1714 - protein, 8 aa, synthetic construct
  REGION 1..8: note = Description of Artificial Sequence: Synthetic peptide
  REGION 1..8: note = XENP024259 vhCDR3
DYYGSSPY

SEQ ID NO: 1715 - protein, 16 aa, synthetic construct
  REGION 1..16: note = Description of Artificial Sequence: Synthetic peptide
  REGION 1..16: note = XENP024259 vlCDR1
KSSQSIVHSNGNTYLE

SEQ ID NO: 1716 - protein, 7 aa, synthetic construct
  REGION 1..7: note = Description of Artificial Sequence: Synthetic peptide
  REGION 1..7: note = XENP024259 vlCDR2
KVSNRFS

SEQ ID NO: 1717 - protein, 9 aa, synthetic construct
  REGION 1..9: note = Description of Artificial Sequence: Synthetic peptide
  REGION 1..9: note = XENP024259 vlCDR3
FQGSHVPNT

SEQ ID NO: 1718 - protein, 251 aa, synthetic construct
  REGION 1..251: note = Description of Artificial Sequence: Synthetic polypeptide
  REGION 1..251: note = XENP024260 1C11_H3.138_L3_scFv
QIQLVQSGSELKKPGASVKVSCKASGYTFTHYGMNWVRQAPGQGLEWMGWINTYTGDPTYADGFTGRFVFSLDTSVSTAYLQISSLKAEDTAVYFCARDYYGSSPYWGQGTLVTVSSGKPGSGKPGSGKPGSGKPGSDVLMTQSPDSLAVSLGERATINCKSSQSIVHSNGNTYLEWYQQKPGQSPKLLIYKVSNRFSGVPDRFSGSGSGTDFTLTISSLQAEDVAVYYCFQGSHVPNTFGGGTKVEIKGS

SEQ ID NO: 1719 - protein, 117 aa, synthetic construct
  REGION 1..117: note = Description of Artificial Sequence: Synthetic polypeptide
  REGION 1..117: note = VH of XENP024260
QIQLVQSGSELKKPGASVKVSCKASGYTFTHYGMNWVRQAPGQGLEWMGWINTYTGDPTYADGFTGRFVFSLDTSVSTAYLQISSLKAEDTAVYFCARDYYGSSPYWGQGTLVTVSS

SEQ ID NO: 1720 - protein, 114 aa, synthetic construct; identical to SEQ ID NO: 649
  REGION 1..114: note = Description of Artificial Sequence: Synthetic polypeptide
  REGION 1..114: note = VL of XENP024260

SEQ ID NO: 1721 - protein, 5 aa, synthetic construct
  REGION 1..5: note = Description of Artificial Sequence: Synthetic peptide
  REGION 1..5: note = XENP024260 vhCDR1
HYGMN

SEQ ID NO: 1722 - protein, 17 aa, synthetic construct
  REGION 1..17: note = Description of Artificial Sequence: Synthetic peptide
  REGION 1..17: note = XENP024260 vhCDR2
WINTYTGDPTYADGFTG

SEQ ID NO: 1723 - protein, 8 aa, synthetic construct
  REGION 1..8: note = Description of Artificial Sequence: Synthetic peptide
  REGION 1..8: note = XENP024260 vhCDR3
DYYGSSPY

SEQ ID NO: 1724 - protein, 16 aa, synthetic construct
  REGION 1..16: note = Description of Artificial Sequence: Synthetic peptide
  REGION 1..16: note = XENP024260 vlCDR1
KSSQSIVHSNGNTYLE

SEQ ID NO: 1725 - protein, 7 aa, synthetic construct
  REGION 1..7: note = Description of Artificial Sequence: Synthetic peptide
  REGION 1..7: note = XENP024260 vlCDR2
KVSNRFS

SEQ ID NO: 1726 - protein, 9 aa, synthetic construct
  REGION 1..9: note = Description of Artificial Sequence: Synthetic peptide
  REGION 1..9: note = XENP024260 vlCDR3
FQGSHVPNT

SEQ ID NO: 1727 - protein, 251 aa, synthetic construct
  REGION 1..251: note = Description of Artificial Sequence: Synthetic polypeptide
  REGION 1..251: note = XENP024261 1C11_H3.139_L3_scFv
QIQLVQSGSELKKPGASVKVSCKASGYTFTHYGMNWVRQAPGQGLEWMGWINTYTGTPTYADGFTGRFVFSLDTSVSTAYLQISSLKAEDTAVYFCARDYYGSSPYWGQGTLVTVSSGKPGSGKPGSGKPGSGKPGSDVLMTQSPDSLAVSLGERATINCKSSQSIVHSNGNTYLEWYQQKPGQSPKLLIYKVSNRFSGVPDRFSGSGSGTDFTLTISSLQAEDVAVYYCFQGSHVPNTFGGGTKVEIKGS

SEQ ID NO: 1728 - protein, 117 aa, synthetic construct
  REGION 1..117: note = Description of Artificial Sequence: Synthetic polypeptide
  REGION 1..117: note = VH of XENP024261
QIQLVQSGSELKKPGASVKVSCKASGYTFTHYGMNWVRQAPGQGLEWMGWINTYTGTPTYADGFTGRFVFSLDTSVSTAYLQISSLKAEDTAVYFCARDYYGSSPYWGQGTLVTVSS

SEQ ID NO: 1729 - protein, 114 aa, synthetic construct; identical to SEQ ID NO: 649
  REGION 1..114: note = Description of Artificial Sequence: Synthetic polypeptide
  REGION 1..114: note = VL of XENP024261

SEQ ID NO: 1730 - protein, 5 aa, synthetic construct
  REGION 1..5: note = Description of Artificial Sequence: Synthetic peptide
  REGION 1..5: note = XENP024261 vhCDR1
HYGMN

SEQ ID NO: 1731 - protein, 17 aa, synthetic construct
  REGION 1..17: note = Description of Artificial Sequence: Synthetic peptide
  REGION 1..17: note = XENP024261 vhCDR2
WINTYTGTPTYADGFTG

SEQ ID NO: 1732 - protein, 8 aa, synthetic construct
  REGION 1..8: note = Description of Artificial Sequence: Synthetic peptide
  REGION 1..8: note = XENP024261 vhCDR3
DYYGSSPY

SEQ ID NO: 1733 - protein, 16 aa, synthetic construct
  REGION 1..16: note = Description of Artificial Sequence: Synthetic peptide
  REGION 1..16: note = XENP024261 vlCDR1
KSSQSIVHSNGNTYLE

SEQ ID NO: 1734 - protein, 7 aa, synthetic construct
  REGION 1..7: note = Description of Artificial Sequence: Synthetic peptide
  REGION 1..7: note = XENP024261 vlCDR2
KVSNRFS

SEQ ID NO: 1735 - protein, 9 aa, synthetic construct
  REGION 1..9: note = Description of Artificial Sequence: Synthetic peptide
  REGION 1..9: note = XENP024261 vlCDR3
FQGSHVPNT

SEQ ID NO: 1736 - protein, 251 aa, synthetic construct
  REGION 1..251: note = Description of Artificial Sequence: Synthetic polypeptide
  REGION 1..251: note = XENP024262 1C11_H3.140_L3_scFv
QIQLVQSGSELKKPGASVKVSCKASGYTFTHYGMNWVRQAPGQGLEWMGWINTYTGYPTYADGFTGRFVFSLDTSVSTAYLQISSLKAEDTAVYFCARDYYGSSPYWGQGTLVTVSSGKPGSGKPGSGKPGSGKPGSDVLMTQSPDSLAVSLGERATINCKSSQSIVHSNGNTYLEWYQQKPGQSPKLLIYKVSNRFSGVPDRFSGSGSGTDFTLTISSLQAEDVAVYYCFQGSHVPNTFGGGTKVEIKGS

SEQ ID NO: 1737 - protein, 117 aa, synthetic construct
  REGION 1..117: note = Description of Artificial Sequence: Synthetic polypeptide
  REGION 1..117: note = VH of XENP024262
QIQLVQSGSELKKPGASVKVSCKASGYTFTHYGMNWVRQAPGQGLEWMGWINTYTGYPTYADGFTGRFVFSLDTSVSTAYLQISSLKAEDTAVYFCARDYYGSSPYWGQGTLVTVSS

SEQ ID NO: 1738 - protein, 114 aa, synthetic construct; identical to SEQ ID NO: 649
  REGION 1..114: note = Description of Artificial Sequence: Synthetic polypeptide
  REGION 1..114: note = VL of XENP024262

SEQ ID NO: 1739 - protein, 5 aa, synthetic construct
  REGION 1..5: note = Description of Artificial Sequence: Synthetic peptide
  REGION 1..5: note = XENP024262 vhCDR1
HYGMN

SEQ ID NO: 1740 - protein, 17 aa, synthetic construct
  REGION 1..17: note = Description of Artificial Sequence: Synthetic peptide
  REGION 1..17: note = XENP024262 vhCDR2
WINTYTGYPTYADGFTG

SEQ ID NO: 1741 - protein, 8 aa, synthetic construct
  REGION 1..8: note = Description of Artificial Sequence: Synthetic peptide
  REGION 1..8: note = XENP024262 vhCDR3
DYYGSSPY

SEQ ID NO: 1742 - protein, 16 aa, synthetic construct
  REGION 1..16: note = Description of Artificial Sequence: Synthetic peptide
  REGION 1..16: note = XENP024262 vlCDR1
KSSQSIVHSNGNTYLE

SEQ ID NO: 1743 - protein, 7 aa, synthetic construct
  REGION 1..7: note = Description of Artificial Sequence: Synthetic peptide
  REGION 1..7: note = XENP024262 vlCDR2
KVSNRFS

SEQ ID NO: 1744 - protein, 9 aa, synthetic construct
  REGION 1..9: note = Description of Artificial Sequence: Synthetic peptide
  REGION 1..9: note = XENP024262 vlCDR3
FQGSHVPNT

SEQ ID NO: 1745 - protein, 251 aa, synthetic construct
  REGION 1..251: note = Description of Artificial Sequence: Synthetic polypeptide
  REGION 1..251: note = XENP024263 1C11_H3.143_L3_scFv
QIQLVQSGSELKKPGASVKVSCKASGYTFTHYGMNWVRQAPGQGLEWMGWINTYTGEPYYADGFTGRFVFSLDTSVSTAYLQISSLKAEDTAVYFCARDYYGSSPYWGQGTLVTVSSGKPGSGKPGSGKPGSGKPGSDVLMTQSPDSLAVSLGERATINCKSSQSIVHSNGNTYLEWYQQKPGQSPKLLIYKVSNRFSGVPDRFSGSGSGTDFTLTISSLQAEDVAVYYCFQGSHVPNTFGGGTKVEIKGS

SEQ ID NO: 1746 - protein, 117 aa, synthetic construct
  REGION 1..117: note = Description of Artificial Sequence: Synthetic polypeptide
  REGION 1..117: note = VH of XENP024263
QIQLVQSGSELKKPGASVKVSCKASGYTFTHYGMNWVRQAPGQGLEWMGWINTYTGEPYYADGFTGRFVFSLDTSVSTAYLQISSLKAEDTAVYFCARDYYGSSPYWGQGTLVTVSS

SEQ ID NO: 1747 - protein, 114 aa, synthetic construct; identical to SEQ ID NO: 649
  REGION 1..114: note = Description of Artificial Sequence: Synthetic polypeptide
  REGION 1..114: note = VL of XENP024263

SEQ ID NO: 1748 - protein, 5 aa, synthetic construct
  REGION 1..5: note = Description of Artificial Sequence: Synthetic peptide
  REGION 1..5: note = XENP024263 vhCDR1
HYGMN

SEQ ID NO: 1749 - protein, 17 aa, synthetic construct
  REGION 1..17: note = Description of Artificial Sequence: Synthetic peptide
  REGION 1..17: note = XENP024263 vhCDR2
WINTYTGEPYYADGFTG

SEQ ID NO: 1750 - protein, 8 aa, synthetic construct
  REGION 1..8: note = Description of Artificial Sequence: Synthetic peptide
  REGION 1..8: note = XENP024263 vhCDR3
DYYGSSPY

SEQ ID NO: 1751 - protein, 16 aa, synthetic construct
  REGION 1..16: note = Description of Artificial Sequence: Synthetic peptide
  REGION 1..16: note = XENP024263 vlCDR1
KSSQSIVHSNGNTYLE

SEQ ID NO: 1752 - protein, 7 aa, synthetic construct
  REGION 1..7: note = Description of Artificial Sequence: Synthetic peptide
  REGION 1..7: note = XENP024263 vlCDR2
KVSNRFS

SEQ ID NO: 1753 - protein, 9 aa, synthetic construct
  REGION 1..9: note = Description of Artificial Sequence: Synthetic peptide
  REGION 1..9: note = XENP024263 vlCDR3
FQGSHVPNT

SEQ ID NO: 1754 - protein, 251 aa, synthetic construct
  REGION 1..251: note = Description of Artificial Sequence: Synthetic polypeptide
  REGION 1..251: note = XENP024264 1C11_H3.144_L3_scFv
QIQLVQSGSELKKPGASVKVSCKASGYTFTHYGMNWVRQAPGQGLEWMGWINTYTGEPNYADGFTGRFVFSLDTSVSTAYLQISSLKAEDTAVYFCARDYYGSSPYWGQGTLVTVSSGKPGSGKPGSGKPGSGKPGSDVLMTQSPDSLAVSLGERATINCKSSQSIVHSNGNTYLEWYQQKPGQSPKLLIYKVSNRFSGVPDRFSGSGSGTDFTLTISSLQAEDVAVYYCFQGSHVPNTFGGGTKVEIKGS

SEQ ID NO: 1755 - protein, 117 aa, synthetic construct
  REGION 1..117: note = Description of Artificial Sequence: Synthetic polypeptide
  REGION 1..117: note = VH of XENP024264
QIQLVQSGSELKKPGASVKVSCKASGYTFTHYGMNWVRQAPGQGLEWMGWINTYTGEPNYADGFTGRFVFSLDTSVSTAYLQISSLKAEDTAVYFCARDYYGSSPYWGQGTLVTVSS

SEQ ID NO: 1756 - protein, 114 aa, synthetic construct; identical to SEQ ID NO: 649
  REGION 1..114: note = Description of Artificial Sequence: Synthetic polypeptide
  REGION 1..114: note = VL of XENP024264

SEQ ID NO: 1757 - protein, 5 aa, synthetic construct
  REGION 1..5: note = Description of Artificial Sequence: Synthetic peptide
  REGION 1..5: note = XENP024264 vhCDR1
HYGMN

SEQ ID NO: 1758 - protein, 17 aa, synthetic construct
  REGION 1..17: note = Description of Artificial Sequence: Synthetic peptide
  REGION 1..17: note = XENP024264 vhCDR2
WINTYTGEPNYADGFTG

SEQ ID NO: 1759 - protein, 8 aa, synthetic construct
  REGION 1..8: note = Description of Artificial Sequence: Synthetic peptide
  REGION 1..8: note = XENP024264 vhCDR3
DYYGSSPY

SEQ ID NO: 1760 - protein, 16 aa, synthetic construct
  REGION 1..16: note = Description of Artificial Sequence: Synthetic peptide
  REGION 1..16: note = XENP024264 vlCDR1
KSSQSIVHSNGNTYLE

SEQ ID NO: 1761 - protein, 7 aa, synthetic construct
  REGION 1..7: note = Description of Artificial Sequence: Synthetic peptide
  REGION 1..7: note = XENP024264 vlCDR2
KVSNRFS

SEQ ID NO: 1762 - protein, 9 aa, synthetic construct
  REGION 1..9: note = Description of Artificial Sequence: Synthetic peptide
  REGION 1..9: note = XENP024264 vlCDR3
FQGSHVPNT

SEQ ID NO: 1763 - protein, 251 aa, synthetic construct
  REGION 1..251: note = Description of Artificial Sequence: Synthetic polypeptide
  REGION 1..251: note = XENP024265 1C11_H3.145_L3_scFv
QIQLVQSGSELKKPGASVKVSCKASGYTFTHYGMNWVRQAPGQGLEWMGWINTYTGEPTYSDGFTGRFVFSLDTSVSTAYLQISSLKAEDTAVYFCARDYYGSSPYWGQGTLVTVSSGKPGSGKPGSGKPGSGKPGSDVLMTQSPDSLAVSLGERATINCKSSQSIVHSNGNTYLEWYQQKPGQSPKLLIYKVSNRFSGVPDRFSGSGSGTDFTLTISSLQAEDVAVYYCFQGSHVPNTFGGGTKVEIKGS

SEQ ID NO: 1764 - protein, 117 aa, synthetic construct
  REGION 1..117: note = Description of Artificial Sequence: Synthetic polypeptide
  REGION 1..117: note = VH of XENP024265
QIQLVQSGSELKKPGASVKVSCKASGYTFTHYGMNWVRQAPGQGLEWMGWINTYTGEPTYSDGFTGRFVFSLDTSVSTAYLQISSLKAEDTAVYFCARDYYGSSPYWGQGTLVTVSS

SEQ ID NO: 1765 - protein, 114 aa, synthetic construct; identical to SEQ ID NO: 649
  REGION 1..114: note = Description of Artificial Sequence: Synthetic polypeptide
  REGION 1..114: note = VL of XENP024265

SEQ ID NO: 1766 - protein, 5 aa, synthetic construct
  REGION 1..5: note = Description of Artificial Sequence: Synthetic peptide
  REGION 1..5: note = XENP024265 vhCDR1
HYGMN

SEQ ID NO: 1767 - protein, 17 aa, synthetic construct
  REGION 1..17: note = Description of Artificial Sequence: Synthetic peptide
  REGION 1..17: note = XENP024265 vhCDR2
WINTYTGEPTYSDGFTG

SEQ ID NO: 1768 - protein, 8 aa, synthetic construct
  REGION 1..8: note = Description of Artificial Sequence: Synthetic peptide
  REGION 1..8: note = XENP024265 vhCDR3
DYYGSSPY

SEQ ID NO: 1769 - protein, 16 aa, synthetic construct
  REGION 1..16: note = Description of Artificial Sequence: Synthetic peptide
  REGION 1..16: note = XENP024265 vlCDR1
KSSQSIVHSNGNTYLE

SEQ ID NO: 1770 - protein, 7 aa, synthetic construct
  REGION 1..7: note = Description of Artificial Sequence: Synthetic peptide
  REGION 1..7: note = XENP024265 vlCDR2
KVSNRFS

SEQ ID NO: 1771 - protein, 9 aa, synthetic construct
  REGION 1..9: note = Description of Artificial Sequence: Synthetic peptide
  REGION 1..9: note = XENP024265 vlCDR3
FQGSHVPNT

SEQ ID NO: 1772 - protein, 251 aa, synthetic construct
  REGION 1..251: note = Description of Artificial Sequence: Synthetic polypeptide
  REGION 1..251: note = XENP024266 1C11_H3.146_L3_scFv
QIQLVQSGSELKKPGASVKVSCKASGYTFTHYGMNWVRQAPGQGLEWMGWINTYTGEPTYAPGFTGRFVFSLDTSVSTAYLQISSLKAEDTAVYFCARDYYGSSPYWGQGTLVTVSSGKPGSGKPGSGKPGSGKPGSDVLMTQSPDSLAVSLGERATINCKSSQSIVHSNGNTYLEWYQQKPGQSPKLLIYKVSNRFSGVPDRFSGSGSGTDFTLTISSLQAEDVAVYYCFQGSHVPNTFGGGTKVEIKGS

SEQ ID NO: 1773 - protein, 117 aa, synthetic construct
  REGION 1..117: note = Description of Artificial Sequence: Synthetic polypeptide
  REGION 1..117: note = VH of XENP024266
QIQLVQSGSELKKPGASVKVSCKASGYTFTHYGMNWVRQAPGQGLEWMGWINTYTGEPTYAPGFTGRFVFSLDTSVSTAYLQISSLKAEDTAVYFCARDYYGSSPYWGQGTLVTVSS

SEQ ID NO: 1774 - protein, 114 aa, synthetic construct; identical to SEQ ID NO: 649
  REGION 1..114: note = Description of Artificial Sequence: Synthetic polypeptide
  REGION 1..114: note = VL of XENP024266

SEQ ID NO: 1775 - protein, 5 aa, synthetic construct
  REGION 1..5: note = Description of Artificial Sequence: Synthetic peptide
  REGION 1..5: note = XENP024266 vhCDR1
HYGMN

SEQ ID NO: 1776 - protein, 17 aa, synthetic construct
  REGION 1..17: note = Description of Artificial Sequence: Synthetic peptide
  REGION 1..17: note = XENP024266 vhCDR2
WINTYTGEPTYAPGFTG

SEQ ID NO: 1777 - protein, 8 aa, synthetic construct
  REGION 1..8: note = Description of Artificial Sequence: Synthetic peptide
  REGION 1..8: note = XENP024266 vhCDR3
DYYGSSPY

SEQ ID NO: 1778 - protein, 16 aa, synthetic construct
  REGION 1..16: note = Description of Artificial Sequence: Synthetic peptide
  REGION 1..16: note = XENP024266 vlCDR1
KSSQSIVHSNGNTYLE

SEQ ID NO: 1779 - protein, 7 aa, synthetic construct
  REGION 1..7: note = Description of Artificial Sequence: Synthetic peptide
  REGION 1..7: note = XENP024266 vlCDR2
KVSNRFS

SEQ ID NO: 1780 - protein, 9 aa, synthetic construct
  REGION 1..9: note = Description of Artificial Sequence: Synthetic peptide
  REGION 1..9: note = XENP024266 vlCDR3
FQGSHVPNT

SEQ ID NO: 1781 - protein, 251 aa, synthetic construct
  REGION 1..251: note = Description of Artificial Sequence: Synthetic polypeptide
  REGION 1..251: note = XENP024267 1C11_H3.147_L3_scFv
QIQLVQSGSELKKPGASVKVSCKASGYTFTHYGMNWVRQAPGQGLEWMGWINTYTGEPTYATGFTGRFVFSLDTSVSTAYLQISSLKAEDTAVYFCARDYYGSSPYWGQGTLVTVSSGKPGSGKPGSGKPGSGKPGSDVLMTQSPDSLAVSLGERATINCKSSQSIVHSNGNTYLEWYQQKPGQSPKLLIYKVSNRFSGVPDRFSGSGSGTDFTLTISSLQAEDVAVYYCFQGSHVPNTFGGGTKVEIKGS

SEQ ID NO: 1782 - protein, 117 aa, synthetic construct
  REGION 1..117: note = Description of Artificial Sequence: Synthetic polypeptide
  REGION 1..117: note = VH of XENP024267
QIQLVQSGSELKKPGASVKVSCKASGYTFTHYGMNWVRQAPGQGLEWMGWINTYTGEPTYATGFTGRFVFSLDTSVSTAYLQISSLKAEDTAVYFCARDYYGSSPYWGQGTLVTVSS

SEQ ID NO: 1783 - protein, 114 aa, synthetic construct; identical to SEQ ID NO: 649
  REGION 1..114: note = Description of Artificial Sequence: Synthetic polypeptide
  REGION 1..114: note = VL of XENP024267

SEQ ID NO: 1784 - protein, 5 aa, synthetic construct
  REGION 1..5: note = Description of Artificial Sequence: Synthetic peptide
  REGION 1..5: note = XENP024267 vhCDR1
HYGMN

SEQ ID NO: 1785 - protein, 17 aa, synthetic construct
  REGION 1..17: note = Description of Artificial Sequence: Synthetic peptide
  REGION 1..17: note = XENP024267 vhCDR2
WINTYTGEPTYATGFTG

SEQ ID NO: 1786 - protein, 8 aa, synthetic construct
  REGION 1..8: note = Description of Artificial Sequence: Synthetic peptide
  REGION 1..8: note = XENP024267 vhCDR3
DYYGSSPY

SEQ ID NO: 1787 - protein, 16 aa, synthetic construct
  REGION 1..16: note = Description of Artificial Sequence: Synthetic peptide
  REGION 1..16: note = XENP024267 vlCDR1
KSSQSIVHSNGNTYLE

SEQ ID NO: 1788 - protein, 7 aa, synthetic construct
  REGION 1..7: note = Description of Artificial Sequence: Synthetic peptide
  REGION 1..7: note = XENP024267 vlCDR2
KVSNRFS

SEQ ID NO: 1789 - protein, 9 aa, synthetic construct
  REGION 1..9: note = Description of Artificial Sequence: Synthetic peptide
  REGION 1..9: note = XENP024267 vlCDR3
FQGSHVPNT

SEQ ID NO: 1790 - protein, 251 aa, synthetic construct
  REGION 1..251: note = Description of Artificial Sequence: Synthetic polypeptide
  REGION 1..251: note = XENP024268 1C11_H3.148_L3_scFv
QIQLVQSGSELKKPGASVKVSCKASGYTFTHYGMNWVRQAPGQGLEWMGWINTYTGEPTYAQKFTGRFVFSLDTSVSTAYLQISSLKAEDTAVYFCARDYYGSSPYWGQGTLVTVSSGKPGSGKPGSGKPGSGKPGSDVLMTQSPDSLAVSLGERATINCKSSQSIVHSNGNTYLEWYQQKPGQSPKLLIYKVSNRFSGVPDRFSGSGSGTDFTLTISSLQAEDVAVYYCFQGSHVPNTFGGGTKVEIKGS

SEQ ID NO: 1791 - protein, 117 aa, synthetic construct
  REGION 1..117: note = Description of Artificial Sequence: Synthetic polypeptide
  REGION 1..117: note = VH of XENP024268
QIQLVQSGSELKKPGASVKVSCKASGYTFTHYGMNWVRQAPGQGLEWMGWINTYTGEPTYAQKFTGRFVFSLDTSVSTAYLQISSLKAEDTAVYFCARDYYGSSPYWGQGTLVTVSS

SEQ ID NO: 1792 - protein, 114 aa, synthetic construct; identical to SEQ ID NO: 649
  REGION 1..114: note = Description of Artificial Sequence: Synthetic polypeptide
  REGION 1..114: note = VL of XENP024268

SEQ ID NO: 1793 - protein, 5 aa, synthetic construct
  REGION 1..5: note = Description of Artificial Sequence: Synthetic peptide
  REGION 1..5: note = XENP024268 vhCDR1
HYGMN

SEQ ID NO: 1794 - protein, 17 aa, synthetic construct
  REGION 1..17: note = Description of Artificial Sequence: Synthetic peptide
  REGION 1..17: note = XENP024268 vhCDR2
WINTYTGEPTYAQKFTG

SEQ ID NO: 1795 - protein, 8 aa, synthetic construct
  REGION 1..8: note = Description of Artificial Sequence: Synthetic peptide
  REGION 1..8: note = XENP024268 vhCDR3
DYYGSSPY

SEQ ID NO: 1796 - protein, 16 aa, synthetic construct
  REGION 1..16: note = Description of Artificial Sequence: Synthetic peptide
  REGION 1..16: note = XENP024268 vlCDR1
KSSQSIVHSNGNTYLE

SEQ ID NO: 1797 - protein, 7 aa, synthetic construct
  REGION 1..7: note = Description of Artificial Sequence: Synthetic peptide
  REGION 1..7: note = XENP024268 vlCDR2
KVSNRFS

SEQ ID NO: 1798 - protein, 9 aa, synthetic construct
  REGION 1..9: note = Description of Artificial Sequence: Synthetic peptide
  REGION 1..9: note = XENP024268 vlCDR3
FQGSHVPNT

SEQ ID NO: 1799 - protein, 251 aa, synthetic construct
  REGION 1..251: note = Description of Artificial Sequence: Synthetic polypeptide
  REGION 1..251: note = XENP024269 1C11_H3.149_L3_scFv
QIQLVQSGSELKKPGASVKVSCKASGYTFTHYGMNWVRQAPGQGLEWMGWINTYTGEPTYADGFTDRFVFSLDTSVSTAYLQISSLKAEDTAVYFCARDYYGSSPYWGQGTLVTVSSGKPGSGKPGSGKPGSGKPGSDVLMTQSPDSLAVSLGERATINCKSSQSIVHSNGNTYLEWYQQKPGQSPKLLIYKVSNRFSGVPDRFSGSGSGTDFTLTISSLQAEDVAVYYCFQGSHVPNTFGGGTKVEIKGS

SEQ ID NO: 1800 - protein, 117 aa, synthetic construct
  REGION 1..117: note = Description of Artificial Sequence: Synthetic polypeptide
  REGION 1..117: note = VH of XENP024269
QIQLVQSGSELKKPGASVKVSCKASGYTFTHYGMNWVRQAPGQGLEWMGWINTYTGEPTYADGFTDRFVFSLDTSVSTAYLQISSLKAEDTAVYFCARDYYGSSPYWGQGTLVTVSS

SEQ ID NO: 1801 - protein, 114 aa, synthetic construct; identical to SEQ ID NO: 649
  REGION 1..114: note = Description of Artificial Sequence: Synthetic polypeptide
  REGION 1..114: note = VL of XENP024269

SEQ ID NO: 1802 - protein, 5 aa, synthetic construct
  REGION 1..5: note = Description of Artificial Sequence: Synthetic peptide
  REGION 1..5: note = XENP024269 vhCDR1
HYGMN

SEQ ID NO: 1803 - protein, 17 aa, synthetic construct
  REGION 1..17: note = Description of Artificial Sequence: Synthetic peptide
  REGION 1..17: note = XENP024269 vhCDR2
WINTYTGEPTYADGFTD

SEQ ID NO: 1804 - protein, 8 aa, synthetic construct
  REGION 1..8: note = Description of Artificial Sequence: Synthetic peptide
  REGION 1..8: note = XENP024269 vhCDR3
DYYGSSPY

SEQ ID NO: 1805 - protein, 16 aa, synthetic construct
  REGION 1..16: note = Description of Artificial Sequence: Synthetic peptide
  REGION 1..16: note = XENP024269 vlCDR1
KSSQSIVHSNGNTYLE

SEQ ID NO: 1806 - protein, 7 aa, synthetic construct
  REGION 1..7: note = Description of Artificial Sequence: Synthetic peptide
  REGION 1..7: note = XENP024269 vlCDR2
KVSNRFS

SEQ ID NO: 1807 - protein, 9 aa, synthetic construct
  REGION 1..9: note = Description of Artificial Sequence: Synthetic peptide
  REGION 1..9: note = XENP024269 vlCDR3
FQGSHVPNT

SEQ ID NO: 1808 - protein, 251 aa, synthetic construct
  REGION 1..251: note = Description of Artificial Sequence: Synthetic polypeptide
  REGION 1..251: note = XENP024270 1C11_H3.150_L3_scFv
QIQLVQSGSELKKPGASVKVSCKASGYTFTHYGMNWVRQAPGQGLEWMGWINTYTGEPTYADGFTERFVFSLDTSVSTAYLQISSLKAEDTAVYFCARDYYGSSPYWGQGTLVTVSSGKPGSGKPGSGKPGSGKPGSDVLMTQSPDSLAVSLGERATINCKSSQSIVHSNGNTYLEWYQQKPGQSPKLLIYKVSNRFSGVPDRFSGSGSGTDFTLTISSLQAEDVAVYYCFQGSHVPNTFGGGTKVEIKGS

SEQ ID NO: 1809 - protein, 117 aa, synthetic construct
  REGION 1..117: note = Description of Artificial Sequence: Synthetic polypeptide
  REGION 1..117: note = VH of XENP024270
QIQLVQSGSELKKPGASVKVSCKASGYTFTHYGMNWVRQAPGQGLEWMGWINTYTGEPTYADGFTERFVFSLDTSVSTAYLQISSLKAEDTAVYFCARDYYGSSPYWGQGTLVTVSS

SEQ ID NO: 1810 - protein, 114 aa, synthetic construct; identical to SEQ ID NO: 649
  REGION 1..114: note = Description of Artificial Sequence: Synthetic polypeptide
  REGION 1..114: note = VL of XENP024270

SEQ ID NO: 1811 - protein, 5 aa, synthetic construct
  REGION 1..5: note = Description of Artificial Sequence: Synthetic peptide
  REGION 1..5: note = XENP024270 vhCDR1
HYGMN

SEQ ID NO: 1812 - protein, 17 aa, synthetic construct
  REGION 1..17: note = Description of Artificial Sequence: Synthetic peptide
  REGION 1..17: note = XENP024270 vhCDR2
WINTYTGEPTYADGFTE

SEQ ID NO: 1813 - protein, 8 aa, synthetic construct
  REGION 1..8: note = Description of Artificial Sequence: Synthetic peptide
  REGION 1..8: note = XENP024270 vhCDR3
DYYGSSPY

SEQ ID NO: 1814 - protein, 16 aa, synthetic construct
  REGION 1..16: note = Description of Artificial Sequence: Synthetic peptide
  REGION 1..16: note = XENP024270 vlCDR1
KSSQSIVHSNGNTYLE

SEQ ID NO: 1815 - protein, 7 aa, synthetic construct
  REGION 1..7: note = Description of Artificial Sequence: Synthetic peptide
  REGION 1..7: note = XENP024270 vlCDR2
KVSNRFS

SEQ ID NO: 1816 - protein, 9 aa, synthetic construct
  REGION 1..9: note = Description of Artificial Sequence: Synthetic peptide
  REGION 1..9: note = XENP024270 vlCDR3
FQGSHVPNT

SEQ ID NO: 1817 - protein, 251 aa, synthetic construct
  REGION 1..251: note = Description of Artificial Sequence: Synthetic polypeptide
  REGION 1..251: note = XENP024271 1C11_H3.151_L3_scFv
QIQLVQSGSELKKPGASVKVSCKASGYTFTHYGMNWVRQAPGQGLEWMGWINTYTGEPTYADGFTSRFVFSLDTSVSTAYLQISSLKAEDTAVYFCARDYYGSSPYWGQGTLVTVSSGKPGSGKPGSGKPGSGKPGSDVLMTQSPDSLAVSLGERATINCKSSQSIVHSNGNTYLEWYQQKPGQSPKLLIYKVSNRFSGVPDRFSGSGSGTDFTLTISSLQAEDVAVYYCFQGSHVPNTFGGGTKVEIKGS

SEQ ID NO: 1818 - protein, 117 aa, synthetic construct
  REGION 1..117: note = Description of Artificial Sequence: Synthetic polypeptide
  REGION 1..117: note = VH of XENP024271
QIQLVQSGSELKKPGASVKVSCKASGYTFTHYGMNWVRQAPGQGLEWMGWINTYTGEPTYADGFTSRFVFSLDTSVSTAYLQISSLKAEDTAVYFCARDYYGSSPYWGQGTLVTVSS

SEQ ID NO: 1819 - protein, 114 aa, synthetic construct; identical to SEQ ID NO: 649
  REGION 1..114: note = Description of Artificial Sequence: Synthetic polypeptide
  REGION 1..114: note = VL of XENP024271

SEQ ID NO: 1820 - protein, 5 aa, synthetic construct
  REGION 1..5: note = Description of Artificial Sequence: Synthetic peptide
  REGION 1..5: note = XENP024271 vhCDR1
HYGMN

SEQ ID NO: 1821 - protein, 17 aa, synthetic construct
  REGION 1..17: note = Description of Artificial Sequence: Synthetic peptide
  REGION 1..17: note = XENP024271 vhCDR2
WINTYTGEPTYADGFTS

SEQ ID NO: 1822 - protein, 8 aa, synthetic construct
  REGION 1..8: note = Description of Artificial Sequence: Synthetic peptide
  REGION 1..8: note = XENP024271 vhCDR3
DYYGSSPY

SEQ ID NO: 1823 - protein, 16 aa, synthetic construct
  REGION 1..16: note = Description of Artificial Sequence: Synthetic peptide
  REGION 1..16: note = XENP024271 vlCDR1
KSSQSIVHSNGNTYLE

SEQ ID NO: 1824 - protein, 7 aa, synthetic construct
  REGION 1..7: note = Description of Artificial Sequence: Synthetic peptide
  REGION 1..7: note = XENP024271 vlCDR2
KVSNRFS

SEQ ID NO: 1825 - protein, 9 aa, synthetic construct
  REGION 1..9: note = Description of Artificial Sequence: Synthetic peptide
  REGION 1..9: note = XENP024271 vlCDR3
FQGSHVPNT

SEQ ID NO: 1826 - protein, 251 aa, synthetic construct
  REGION 1..251: note = Description of Artificial Sequence: Synthetic polypeptide
  REGION 1..251: note = XENP024272 1C11_H3.152_L3_scFv
QIQLVQSGSELKKPGASVKVSCKASGYTFTHYGMNWVRQAPGQGLEWMGWINTYTGEPTYADGFTGRFVFTLDTSVSTAYLQISSLKAEDTAVYFCARDYYGSSPYWGQGTLVTVSSGKPGSGKPGSGKPGSGKPGSDVLMTQSPDSLAVSLGERATINCKSSQSIVHSNGNTYLEWYQQKPGQSPKLLIYKVSNRFSGVPDRFSGSGSGTDFTLTISSLQAEDVAVYYCFQGSHVPNTFGGGTKVEIKGS

SEQ ID NO: 1827 - protein, 117 aa, synthetic construct
  REGION 1..117: note = Description of Artificial Sequence: Synthetic polypeptide
  REGION 1..117: note = VH of XENP024272
QIQLVQSGSELKKPGASVKVSCKASGYTFTHYGMNWVRQAPGQGLEWMGWINTYTGEPTYADGFTGRFVFTLDTSVSTAYLQISSLKAEDTAVYFCARDYYGSSPYWGQGTLVTVSS

SEQ ID NO: 1828 - protein, 114 aa, synthetic construct; identical to SEQ ID NO: 649
  REGION 1..114: note = Description of Artificial Sequence: Synthetic polypeptide
  REGION 1..114: note = VL of XENP024272

SEQ ID NO: 1829 - protein, 5 aa, synthetic construct
  REGION 1..5: note = Description of Artificial Sequence: Synthetic peptide
  REGION 1..5: note = XENP024272 vhCDR1
HYGMN

SEQ ID NO: 1830 - protein, 17 aa, synthetic construct
  REGION 1..17: note = Description of Artificial Sequence: Synthetic peptide
  REGION 1..17: note = XENP024272 vhCDR2
WINTYTGEPTYADGFTG

SEQ ID NO: 1831 - protein, 8 aa, synthetic construct
  REGION 1..8: note = Description of Artificial Sequence: Synthetic peptide
  REGION 1..8: note = XENP024272 vhCDR3
DYYGSSPY

SEQ ID NO: 1832 - protein, 16 aa, synthetic construct
  REGION 1..16: note = Description of Artificial Sequence: Synthetic peptide
  REGION 1..16: note = XENP024272 vlCDR1
KSSQSIVHSNGNTYLE

SEQ ID NO: 1833 - protein, 7 aa, synthetic construct
  REGION 1..7: note = Description of Artificial Sequence: Synthetic peptide
  REGION 1..7: note = XENP024272 vlCDR2
KVSNRFS

SEQ ID NO: 1834 - protein, 9 aa, synthetic construct
  REGION 1..9: note = Description of Artificial Sequence: Synthetic peptide
  REGION 1..9: note = XENP024272 vlCDR3
FQGSHVPNT

SEQ ID NO: 1835 - protein, 251 aa, synthetic construct
  REGION 1..251: note = Description of Artificial Sequence: Synthetic polypeptide
  REGION 1..251: note = XENP024273 1C11_H3.153_L3_scFv
QIQLVQSGSELKKPGASVKVSCKASGYTFTHYGMNWVRQAPGQGLEWMGWINTYTGEPTYADGFTGRFVFSTDTSVSTAYLQISSLKAEDTAVYFCARDYYGSSPYWGQGTLVTVSSGKPGSGKPGSGKPGSGKPGSDVLMTQSPDSLAVSLGERATINCKSSQSIVHSNGNTYLEWYQQKPGQSPKLLIYKVSNRFSGVPDRFSGSGSGTDFTLTISSLQAEDVAVYYCFQGSHVPNTFGGGTKVEIKGS

SEQ ID NO: 1836 - protein, 117 aa, synthetic construct
  REGION 1..117: note = Description of Artificial Sequence: Synthetic polypeptide
  REGION 1..117: note = VH of XENP024273
QIQLVQSGSELKKPGASVKVSCKASGYTFTHYGMNWVRQAPGQGLEWMGWINTYTGEPTYADGFTGRFVFSTDTSVSTAYLQISSLKAEDTAVYFCARDYYGSSPYWGQGTLVTVSS

SEQ ID NO: 1837 - protein, 114 aa, synthetic construct; identical to SEQ ID NO: 649
  REGION 1..114: note = Description of Artificial Sequence: Synthetic polypeptide
  REGION 1..114: note = VL of XENP024273

SEQ ID NO: 1838 - protein, 5 aa, synthetic construct
  REGION 1..5: note = Description of Artificial Sequence: Synthetic peptide
  REGION 1..5: note = XENP024273 vhCDR1
HYGMN

SEQ ID NO: 1839 - protein, 17 aa, synthetic construct
  REGION 1..17: note = Description of Artificial Sequence: Synthetic peptide
  REGION 1..17: note = XENP024273 vhCDR2
WINTYTGEPTYADGFTG

SEQ ID NO: 1840 - protein, 8 aa, synthetic construct
  REGION 1..8: note = Description of Artificial Sequence: Synthetic peptide
  REGION 1..8: note = XENP024273 vhCDR3
DYYGSSPY

SEQ ID NO: 1841 - protein, 16 aa, synthetic construct
  REGION 1..16: note = Description of Artificial Sequence: Synthetic peptide
  REGION 1..16: note = XENP024273 vlCDR1
KSSQSIVHSNGNTYLE

SEQ ID NO: 1842 - protein, 7 aa, synthetic construct
  REGION 1..7: note = Description of Artificial Sequence: Synthetic peptide
  REGION 1..7: note = XENP024273 vlCDR2
KVSNRFS

SEQ ID NO: 1843 - protein, 9 aa, synthetic construct
  REGION 1..9: note = Description of Artificial Sequence: Synthetic peptide
  REGION 1..9: note = XENP024273 vlCDR3
FQGSHVPNT

SEQ ID NO: 1844 - protein, 251 aa, synthetic construct
  REGION 1..251: note = Description of Artificial Sequence: Synthetic polypeptide
  REGION 1..251: note = XENP024274 1C11_H3.154_L3_scFv
QIQLVQSGSELKKPGASVKVSCKASGYTFTHYGMNWVRQAPGQGLEWMGWINTYTGEPTYADGFTGRFVFSIDTSVSTAYLQISSLKAEDTAVYFCARDYYGSSPYWGQGTLVTVSSGKPGSGKPGSGKPGSGKPGSDVLMTQSPDSLAVSLGERATINCKSSQSIVHSNGNTYLEWYQQKPGQSPKLLIYKVSNRFSGVPDRFSGSGSGTDFTLTISSLQAEDVAVYYCFQGSHVPNTFGGGTKVEIKGS

SEQ ID NO: 1845 - protein, 117 aa, synthetic construct
  REGION 1..117: note = Description of Artificial Sequence: Synthetic polypeptide
  REGION 1..117: note = VH of XENP024274
QIQLVQSGSELKKPGASVKVSCKASGYTFTHYGMNWVRQAPGQGLEWMGWINTYTGEPTYADGFTGRFVFSIDTSVSTAYLQISSLKAEDTAVYFCARDYYGSSPYWGQGTLVTVSS

SEQ ID NO: 1846 - protein, 114 aa, synthetic construct; identical to SEQ ID NO: 649
  REGION 1..114: note = Description of Artificial Sequence: Synthetic polypeptide
  REGION 1..114: note = VL of XENP024274

SEQ ID NO: 1847 - protein, 5 aa, synthetic construct
  REGION 1..5: note = Description of Artificial Sequence: Synthetic peptide
  REGION 1..5: note = XENP024274 vhCDR1
HYGMN

SEQ ID NO: 1848 - protein, 17 aa, synthetic construct
  REGION 1..17: note = Description of Artificial Sequence: Synthetic peptide
  REGION 1..17: note = XENP024274 vhCDR2
WINTYTGEPTYADGFTG

SEQ ID NO: 1849 - protein, 8 aa, synthetic construct
  REGION 1..8: note = Description of Artificial Sequence: Synthetic peptide
  REGION 1..8: note = XENP024274 vhCDR3
DYYGSSPY

SEQ ID NO: 1850 - protein, 16 aa, synthetic construct
  REGION 1..16: note = Description of Artificial Sequence: Synthetic peptide
  REGION 1..16: note = XENP024274 vlCDR1
KSSQSIVHSNGNTYLE

SEQ ID NO: 1851 - protein, 7 aa, synthetic construct
  REGION 1..7: note = Description of Artificial Sequence: Synthetic peptide
  REGION 1..7: note = XENP024274 vlCDR2
KVSNRFS

SEQ ID NO: 1852 - protein, 9 aa, synthetic construct
  REGION 1..9: note = Description of Artificial Sequence: Synthetic peptide
  REGION 1..9: note = XENP024274 vlCDR3
FQGSHVPNT

SEQ ID NO: 1853 - protein, 251 aa, synthetic construct
  REGION 1..251: note = Description of Artificial Sequence: Synthetic polypeptide
  REGION 1..251: note = XENP024275 1C11_H3.155_L3_scFv
QIQLVQSGSELKKPGASVKVSCKASGYTFTHYGMNWVRQAPGQGLEWMGWINTYTGEPTYADGFTGRFVFSLDNSVSTAYLQISSLKAEDTAVYFCARDYYGSSPYWGQGTLVTVSSGKPGSGKPGSGKPGSGKPGSDVLMTQSPDSLAVSLGERATINCKSSQSIVHSNGNTYLEWYQQKPGQSPKLLIYKVSNRFSGVPDRFSGSGSGTDFTLTISSLQAEDVAVYYCFQGSHVPNTFGGGTKVEIKGS

SEQ ID NO: 1854 - protein, 117 aa, synthetic construct
  REGION 1..117: note = Description of Artificial Sequence: Synthetic polypeptide
  REGION 1..117: note = VH of XENP024275
QIQLVQSGSELKKPGASVKVSCKASGYTFTHYGMNWVRQAPGQGLEWMGWINTYTGEPTYADGFTGRFVFSLDNSVSTAYLQISSLKAEDTAVYFCARDYYGSSPYWGQGTLVTVSS

SEQ ID NO: 1855 - protein, 114 aa, synthetic construct; identical to SEQ ID NO: 649
  REGION 1..114: note = Description of Artificial Sequence: Synthetic polypeptide
  REGION 1..114: note = VL of XENP024275

SEQ ID NO: 1856 - protein, 5 aa, synthetic construct
  REGION 1..5: note = Description of Artificial Sequence: Synthetic peptide
  REGION 1..5: note = XENP024275 vhCDR1
HYGMN

SEQ ID NO: 1857 - protein, 17 aa, synthetic construct
  REGION 1..17: note = Description of Artificial Sequence: Synthetic peptide
  REGION 1..17: note = XENP024275 vhCDR2
WINTYTGEPTYADGFTG

SEQ ID NO: 1858 - protein, 8 aa, synthetic construct
  REGION 1..8: note = Description of Artificial Sequence: Synthetic peptide
  REGION 1..8: note = XENP024275 vhCDR3
DYYGSSPY

SEQ ID NO: 1859 - protein, 16 aa, synthetic construct
  REGION 1..16: note = Description of Artificial Sequence: Synthetic peptide
  REGION 1..16: note = XENP024275 vlCDR1
KSSQSIVHSNGNTYLE

SEQ ID NO: 1860 - protein, 7 aa, synthetic construct
  REGION 1..7: note = Description of Artificial Sequence: Synthetic peptide
  REGION 1..7: note = XENP024275 vlCDR2
KVSNRFS

SEQ ID NO: 1861 - protein, 9 aa, synthetic construct
  REGION 1..9: note = Description of Artificial Sequence: Synthetic peptide
  REGION 1..9: note = XENP024275 vlCDR3
FQGSHVPNT

SEQ ID NO: 1862 - protein, 251 aa, synthetic construct
  REGION 1..251: note = Description of Artificial Sequence: Synthetic polypeptide
  REGION 1..251: note = XENP024276 1C11_H3.156_L3_scFv
QIQLVQSGSELKKPGASVKVSCKASGYTFTHYGMNWVRQAPGQGLEWMGWINTYTGEPTYADGFTGRFVFSLDRSVSTAYLQISSLKAEDTAVYFCARDYYGSSPYWGQGTLVTVSSGKPGSGKPGSGKPGSGKPGSDVLMTQSPDSLAVSLGERATINCKSSQSIVHSNGNTYLEWYQQKPGQSPKLLIYKVSNRFSGVPDRFSGSGSGTDFTLTISSLQAEDVAVYYCFQGSHVPNTFGGGTKVEIKGS

SEQ ID NO: 1863 - protein, 117 aa, synthetic construct
  REGION 1..117: note = Description of Artificial Sequence: Synthetic polypeptide
  REGION 1..117: note = VH of XENP024276
QIQLVQSGSELKKPGASVKVSCKASGYTFTHYGMNWVRQAPGQGLEWMGWINTYTGEPTYADGFTGRFVFSLDRSVSTAYLQISSLKAEDTAVYFCARDYYGSSPYWGQGTLVTVSS

SEQ ID NO: 1864 - protein, 114 aa, synthetic construct; identical to SEQ ID NO: 649
  REGION 1..114: note = Description of Artificial Sequence: Synthetic polypeptide
  REGION 1..114: note = VL of XENP024276

SEQ ID NO: 1865 - protein, 5 aa, synthetic construct
  REGION 1..5: note = Description of Artificial Sequence: Synthetic peptide
  REGION 1..5: note = XENP024276 vhCDR1
HYGMN

SEQ ID NO: 1866 - protein, 17 aa, synthetic construct
  REGION 1..17: note = Description of Artificial Sequence: Synthetic peptide
  REGION 1..17: note = XENP024276 vhCDR2
WINTYTGEPTYADGFTG

SEQ ID NO: 1867 - protein, 8 aa, synthetic construct
  REGION 1..8: note = Description of Artificial Sequence: Synthetic peptide
  REGION 1..8: note = XENP024276 vhCDR3
DYYGSSPY

SEQ ID NO: 1868 - protein, 16 aa, synthetic construct
  REGION 1..16: note = Description of Artificial Sequence: Synthetic peptide
  REGION 1..16: note = XENP024276 vlCDR1
KSSQSIVHSNGNTYLE

SEQ ID NO: 1869 - protein, 7 aa, synthetic construct
  REGION 1..7: note = Description of Artificial Sequence: Synthetic peptide
  REGION 1..7: note = XENP024276 vlCDR2
KVSNRFS

SEQ ID NO: 1870 - protein, 9 aa, synthetic construct
  REGION 1..9: note = Description of Artificial Sequence: Synthetic peptide
  REGION 1..9: note = XENP024276 vlCDR3
FQGSHVPNT

SEQ ID NO: 1871 - protein, 251 aa, synthetic construct
  REGION 1..251: note = Description of Artificial Sequence: Synthetic polypeptide
  REGION 1..251: note = XENP024277 1C11_H3.157_L3_scFv
QIQLVQSGSELKKPGASVKVSCKASGYTFTHYGMNWVRQAPGQGLEWMGWINTYTGEPTYADGFTGRFVFSLDTAVSTAYLQISSLKAEDTAVYFCARDYYGSSPYWGQGTLVTVSSGKPGSGKPGSGKPGSGKPGSDVLMTQSPDSLAVSLGERATINCKSSQSIVHSNGNTYLEWYQQKPGQSPKLLIYKVSNRFSGVPDRFSGSGSGTDFTLTISSLQAEDVAVYYCFQGSHVPNTFGGGTKVEIKGS

SEQ ID NO: 1872 - protein, 117 aa, synthetic construct
  REGION 1..117: note = Description of Artificial Sequence: Synthetic polypeptide
  REGION 1..117: note = VH of XENP024277
QIQLVQSGSELKKPGASVKVSCKASGYTFTHYGMNWVRQAPGQGLEWMGWINTYTGEPTYADGFTGRFVFSLDTAVSTAYLQISSLKAEDTAVYFCARDYYGSSPYWGQGTLVTVSS

SEQ ID NO: 1873 - protein, 114 aa, synthetic construct; identical to SEQ ID NO: 649
  REGION 1..114: note = Description of Artificial Sequence: Synthetic polypeptide
  REGION 1..114: note = VL of XENP024277

SEQ ID NO: 1874 - protein, 5 aa, synthetic construct
  REGION 1..5: note = Description of Artificial Sequence: Synthetic peptide
  REGION 1..5: note = XENP024277 vhCDR1
HYGMN

SEQ ID NO: 1875 - protein, 17 aa, synthetic construct
  REGION 1..17: note = Description of Artificial Sequence: Synthetic peptide
  REGION 1..17: note = XENP024277 vhCDR2
WINTYTGEPTYADGFTG

SEQ ID NO: 1876 - protein, 8 aa, synthetic construct
  REGION 1..8: note = Description of Artificial Sequence: Synthetic peptide
  REGION 1..8: note = XENP024277 vhCDR3
DYYGSSPY

SEQ ID NO: 1877 - protein, 16 aa, synthetic construct
  REGION 1..16: note = Description of Artificial Sequence: Synthetic peptide
  REGION 1..16: note = XENP024277 vlCDR1
KSSQSIVHSNGNTYLE

SEQ ID NO: 1878 - protein, 7 aa, synthetic construct
  REGION 1..7: note = Description of Artificial Sequence: Synthetic peptide
  REGION 1..7: note = XENP024277 vlCDR2
KVSNRFS

SEQ ID NO: 1879 - protein, 9 aa, synthetic construct
  REGION 1..9: note = Description of Artificial Sequence: Synthetic peptide
  REGION 1..9: note = XENP024277 vlCDR3
FQGSHVPNT

SEQ ID NO: 1880 - protein, 251 aa, synthetic construct
  REGION 1..251: note = Description of Artificial Sequence: Synthetic polypeptide
  REGION 1..251: note = XENP024278 1C11_H3.158_L3_scFv
QIQLVQSGSELKKPGASVKVSCKASGYTFTHYGMNWVRQAPGQGLEWMGWINTYTGEPTYADGFTGRFVFSLDTSVNTAYLQISSLKAEDTAVYFCARDYYGSSPYWGQGTLVTVSSGKPGSGKPGSGKPGSGKPGSDVLMTQSPDSLAVSLGERATINCKSSQSIVHSNGNTYLEWYQQKPGQSPKLLIYKVSNRFSGVPDRFSGSGSGTDFTLTISSLQAEDVAVYYCFQGSHVPNTFGGGTKVEIKGS

SEQ ID NO: 1881 - protein, 117 aa, synthetic construct
  REGION 1..117: note = Description of Artificial Sequence: Synthetic polypeptide
  REGION 1..117: note = VH of XENP024278
QIQLVQSGSELKKPGASVKVSCKASGYTFTHYGMNWVRQAPGQGLEWMGWINTYTGEPTYADGFTGRFVFSLDTSVNTAYLQISSLKAEDTAVYFCARDYYGSSPYWGQGTLVTVSS

SEQ ID NO: 1882 - protein, 114 aa, synthetic construct; identical to SEQ ID NO: 649
  REGION 1..114: note = Description of Artificial Sequence: Synthetic polypeptide
  REGION 1..114: note = VL of XENP024278

SEQ ID NO: 1883 - protein, 5 aa, synthetic construct
  REGION 1..5: note = Description of Artificial Sequence: Synthetic peptide
  REGION 1..5: note = XENP024278 vhCDR1
HYGMN

SEQ ID NO: 1884 - protein, 17 aa, synthetic construct
  REGION 1..17: note = Description of Artificial Sequence: Synthetic peptide
  REGION 1..17: note = XENP024278 vhCDR2
WINTYTGEPTYADGFTG

SEQ ID NO: 1885 - protein, 8 aa, synthetic construct
  REGION 1..8: note = Description of Artificial Sequence: Synthetic peptide
  REGION 1..8: note = XENP024278 vhCDR3
DYYGSSPY

SEQ ID NO: 1886 - protein, 16 aa, synthetic construct
  REGION 1..16: note = Description of Artificial Sequence: Synthetic peptide
  REGION 1..16: note = XENP024278 vlCDR1
KSSQSIVHSNGNTYLE

SEQ ID NO: 1887 - protein, 7 aa, synthetic construct
  REGION 1..7: note = Description of Artificial Sequence: Synthetic peptide
  REGION 1..7: note = XENP024278 vlCDR2
KVSNRFS

SEQ ID NO: 1888 - protein, 9 aa, synthetic construct
  REGION 1..9: note = Description of Artificial Sequence: Synthetic peptide
  REGION 1..9: note = XENP024278 vlCDR3
FQGSHVPNT

SEQ ID NO: 1889 - protein, 251 aa, synthetic construct
  REGION 1..251: note = Description of Artificial Sequence: Synthetic polypeptide
  REGION 1..251: note = XENP024279 1C11_H3.159_L3_scFv
QIQLVQSGSELKKPGASVKVSCKASGYTFTHYGMNWVRQAPGQGLEWMGWINTYTGEPTYADGFTGRFVFSLDTSVDTAYLQISSLKAEDTAVYFCARDYYGSSPYWGQGTLVTVSSGKPGSGKPGSGKPGSGKPGSDVLMTQSPDSLAVSLGERATINCKSSQSIVHSNGNTYLEWYQQKPGQSPKLLIYKVSNRFSGVPDRFSGSGSGTDFTLTISSLQAEDVAVYYCFQGSHVPNTFGGGTKVEIKGS

SEQ ID NO: 1890 - protein, 117 aa, synthetic construct
  REGION 1..117: note = Description of Artificial Sequence: Synthetic polypeptide
  REGION 1..117: note = VH of XENP024279
QIQLVQSGSELKKPGASVKVSCKASGYTFTHYGMNWVRQAPGQGLEWMGWINTYTGEPTYADGFTGRFVFSLDTSVDTAYLQISSLKAEDTAVYFCARDYYGSSPYWGQGTLVTVSS

SEQ ID NO: 1891 - protein, 114 aa, synthetic construct; identical to SEQ ID NO: 649
  REGION 1..114: note = Description of Artificial Sequence: Synthetic polypeptide
  REGION 1..114: note = VL of XENP024279

SEQ ID NO: 1892 - protein, 5 aa, synthetic construct
  REGION 1..5: note = Description of Artificial Sequence: Synthetic peptide
  REGION 1..5: note = XENP024279 vhCDR1
HYGMN

SEQ ID NO: 1893 - protein, 17 aa, synthetic construct
  REGION 1..17: note = Description of Artificial Sequence: Synthetic peptide
  REGION 1..17: note = XENP024279 vhCDR2
WINTYTGEPTYADGFTG

SEQ ID NO: 1894 - protein, 8 aa, synthetic construct
  REGION 1..8: note = Description of Artificial Sequence: Synthetic peptide
  REGION 1..8: note = XENP024279 vhCDR3
DYYGSSPY

SEQ ID NO: 1895 - protein, 16 aa, synthetic construct
  REGION 1..16: note = Description of Artificial Sequence: Synthetic peptide
  REGION 1..16: note = XENP024279 vlCDR1
KSSQSIVHSNGNTYLE

SEQ ID NO: 1896 - protein, 7 aa, synthetic construct
  REGION 1..7: note = Description of Artificial Sequence: Synthetic peptide
  REGION 1..7: note = XENP024279 vlCDR2
KVSNRFS

SEQ ID NO: 1897 - protein, 9 aa, synthetic construct
  REGION 1..9: note = Description of Artificial Sequence: Synthetic peptide
  REGION 1..9: note = XENP024279 vlCDR3
FQGSHVPNT

SEQ ID NO: 1898 - protein, 251 aa, synthetic construct
  REGION 1..251: note = Description of Artificial Sequence: Synthetic polypeptide
  REGION 1..251: note = XENP024280 1C11_H3.160_L3_scFv
QIQLVQSGSELKKPGASVKVSCKASGYTFTHYGMNWVRQAPGQGLEWMGWINTYTGEPTYADGFTGRFVFSLDTSVSQAYLQISSLKAEDTAVYFCARDYYGSSPYWGQGTLVTVSSGKPGSGKPGSGKPGSGKPGSDVLMTQSPDSLAVSLGERATINCKSSQSIVHSNGNTYLEWYQQKPGQSPKLLIYKVSNRFSGVPDRFSGSGSGTDFTLTISSLQAEDVAVYYCFQGSHVPNTFGGGTKVEIKGS

SEQ ID NO: 1899 - protein, 117 aa, synthetic construct
  REGION 1..117: note = Description of Artificial Sequence: Synthetic polypeptide
  REGION 1..117: note = VH of XENP024280
QIQLVQSGSELKKPGASVKVSCKASGYTFTHYGMNWVRQAPGQGLEWMGWINTYTGEPTYADGFTGRFVFSLDTSVSQAYLQISSLKAEDTAVYFCARDYYGSSPYWGQGTLVTVSS

SEQ ID NO: 1900 - protein, 114 aa, synthetic construct; identical to SEQ ID NO: 649
  REGION 1..114: note = Description of Artificial Sequence: Synthetic polypeptide
  REGION 1..114: note = VL of XENP024280

SEQ ID NO: 1901 - protein, 5 aa, synthetic construct
  REGION 1..5: note = Description of Artificial Sequence: Synthetic peptide
  REGION 1..5: note = XENP024280 vhCDR1
HYGMN

SEQ ID NO: 1902 - protein, 17 aa, synthetic construct
  REGION 1..17: note = Description of Artificial Sequence: Synthetic peptide
  REGION 1..17: note = XENP024280 vhCDR2
WINTYTGEPTYADGFTG

SEQ ID NO: 1903 - protein, 8 aa, synthetic construct
  REGION 1..8: note = Description of Artificial Sequence: Synthetic peptide
  REGION 1..8: note = XENP024280 vhCDR3
DYYGSSPY

SEQ ID NO: 1904 - protein, 16 aa, synthetic construct
  REGION 1..16: note = Description of Artificial Sequence: Synthetic peptide
  REGION 1..16: note = XENP024280 vlCDR1
KSSQSIVHSNGNTYLE

SEQ ID NO: 1905 - protein, 7 aa, synthetic construct
  REGION 1..7: note = Description of Artificial Sequence: Synthetic peptide
  REGION 1..7: note = XENP024280 vlCDR2
KVSNRFS

SEQ ID NO: 1906 - protein, 9 aa, synthetic construct
  REGION 1..9: note = Description of Artificial Sequence: Synthetic peptide
  REGION 1..9: note = XENP024280 vlCDR3
FQGSHVPNT

SEQ ID NO: 1907 - protein, 251 aa, synthetic construct
  REGION 1..251: note = Description of Artificial Sequence: Synthetic polypeptide
  REGION 1..251: note = XENP024281 1C11_H3.161_L3_scFv
QIQLVQSGSELKKPGASVKVSCKASGYTFTHYGMNWVRQAPGQGLEWMGWINTYTGEPTYADGFTGRFVFSLDTSVSSAYLQISSLKAEDTAVYFCARDYYGSSPYWGQGTLVTVSSGKPGSGKPGSGKPGSGKPGSDVLMTQSPDSLAVSLGERATINCKSSQSIVHSNGNTYLEWYQQKPGQSPKLLIYKVSNRFSGVPDRFSGSGSGTDFTLTISSLQAEDVAVYYCFQGSHVPNTFGGGTKVEIKGS

SEQ ID NO: 1908 - protein, 117 aa, synthetic construct
  REGION 1..117: note = Description of Artificial Sequence: Synthetic polypeptide
  REGION 1..117: note = VH of XENP024281
QIQLVQSGSELKKPGASVKVSCKASGYTFTHYGMNWVRQAPGQGLEWMGWINTYTGEPTYADGFTGRFVFSLDTSVSSAYLQISSLKAEDTAVYFCARDYYGSSPYWGQGTLVTVSS

SEQ ID NO: 1909 - protein, 114 aa, synthetic construct; identical to SEQ ID NO: 649
  REGION 1..114: note = Description of Artificial Sequence: Synthetic polypeptide
  REGION 1..114: note = VL of XENP024281

SEQ ID NO: 1910 - protein, 5 aa, synthetic construct
  REGION 1..5: note = Description of Artificial Sequence: Synthetic peptide
  REGION 1..5: note = XENP024281 vhCDR1
HYGMN

SEQ ID NO: 1911 - protein, 17 aa, synthetic construct
  REGION 1..17: note = Description of Artificial Sequence: Synthetic peptide
  REGION 1..17: note = XENP024281 vhCDR2
WINTYTGEPTYADGFTG

SEQ ID NO: 1912 - protein, 8 aa, synthetic construct
  REGION 1..8: note = Description of Artificial Sequence: Synthetic peptide
  REGION 1..8: note = XENP024281 vhCDR3
DYYGSSPY

SEQ ID NO: 1913 - protein, 16 aa, synthetic construct
  REGION 1..16: note = Description of Artificial Sequence: Synthetic peptide
  REGION 1..16: note = XENP024281 vlCDR1
KSSQSIVHSNGNTYLE

SEQ ID NO: 1914 - protein, 7 aa, synthetic construct
  REGION 1..7: note = Description of Artificial Sequence: Synthetic peptide
  REGION 1..7: note = XENP024281 vlCDR2
KVSNRFS

SEQ ID NO: 1915 - protein, 9 aa, synthetic construct
  REGION 1..9: note = Description of Artificial Sequence: Synthetic peptide
  REGION 1..9: note = XENP024281 vlCDR3
FQGSHVPNT

SEQ ID NO: 1916 - protein, 251 aa, synthetic construct
  REGION 1..251: note = Description of Artificial Sequence: Synthetic polypeptide
  REGION 1..251: note = XENP024282 1C11_H3.162_L3_scFv
QIQLVQSGSELKKPGASVKVSCKASGYTFTHYGMNWVRQAPGQGLEWMGWINTYTGEPTYADGFTGRFVFSLDTSVSTLYLQISSLKAEDTAVYFCARDYYGSSPYWGQGTLVTVSSGKPGSGKPGSGKPGSGKPGSDVLMTQSPDSLAVSLGERATINCKSSQSIVHSNGNTYLEWYQQKPGQSPKLLIYKVSNRFSGVPDRFSGSGSGTDFTLTISSLQAEDVAVYYCFQGSHVPNTFGGGTKVEIKGS

SEQ ID NO: 1917 - protein, 117 aa, synthetic construct
  REGION 1..117: note = Description of Artificial Sequence: Synthetic polypeptide
  REGION 1..117: note = VH of XENP024282
QIQLVQSGSELKKPGASVKVSCKASGYTFTHYGMNWVRQAPGQGLEWMGWINTYTGEPTYADGFTGRFVFSLDTSVSTLYLQISSLKAEDTAVYFCARDYYGSSPYWGQGTLVTVSS

SEQ ID NO: 1918 - protein, 114 aa, synthetic construct; identical to SEQ ID NO: 649
  REGION 1..114: note = Description of Artificial Sequence: Synthetic polypeptide
  REGION 1..114: note = VL of XENP024282

SEQ ID NO: 1919 - protein, 5 aa, synthetic construct
  REGION 1..5: note = Description of Artificial Sequence: Synthetic peptide
  REGION 1..5: note = XENP024282 vhCDR1
HYGMN

SEQ ID NO: 1920 - protein, 17 aa, synthetic construct
  REGION 1..17: note = Description of Artificial Sequence: Synthetic peptide
  REGION 1..17: note = XENP024282 vhCDR2
WINTYTGEPTYADGFTG

SEQ ID NO: 1921 - protein, 8 aa, synthetic construct
  REGION 1..8: note = Description of Artificial Sequence: Synthetic peptide
  REGION 1..8: note = XENP024282 vhCDR3
DYYGSSPY

SEQ ID NO: 1922 - protein, 16 aa, synthetic construct
  REGION 1..16: note = Description of Artificial Sequence: Synthetic peptide
  REGION 1..16: note = XENP024282 vlCDR1
KSSQSIVHSNGNTYLE

SEQ ID NO: 1923 - protein, 7 aa, synthetic construct
  REGION 1..7: note = Description of Artificial Sequence: Synthetic peptide
  REGION 1..7: note = XENP024282 vlCDR2
KVSNRFS

SEQ ID NO: 1924 - protein, 9 aa, synthetic construct
  REGION 1..9: note = Description of Artificial Sequence: Synthetic peptide
  REGION 1..9: note = XENP024282 vlCDR3
FQGSHVPNT

SEQ ID NO: 1925 - protein, 251 aa, synthetic construct
  REGION 1..251: note = Description of Artificial Sequence: Synthetic polypeptide
  REGION 1..251: note = XENP024283 1C11_H3.164_L3_scFv
QIQLVQSGSELKKPGASVKVSCKASGYTFTHYGMNWVRQAPGQGLEWMGWINTYTGEPTYADGFTGRFVFSLDTSVSTAVLQISSLKAEDTAVYFCARDYYGSSPYWGQGTLVTVSSGKPGSGKPGSGKPGSGKPGSDVLMTQSPDSLAVSLGERATINCKSSQSIVHSNGNTYLEWYQQKPGQSPKLLIYKVSNRFSGVPDRFSGSGSGTDFTLTISSLQAEDVAVYYCFQGSHVPNTFGGGTKVEIKGS

SEQ ID NO: 1926 - protein, 117 aa, synthetic construct
  REGION 1..117: note = Description of Artificial Sequence: Synthetic polypeptide
  REGION 1..117: note = VH of XENP024283
QIQLVQSGSELKKPGASVKVSCKASGYTFTHYGMNWVRQAPGQGLEWMGWINTYTGEPTYADGFTGRFVFSLDTSVSTAVLQISSLKAEDTAVYFCARDYYGSSPYWGQGTLVTVSS

SEQ ID NO: 1927 - protein, 114 aa, synthetic construct; identical to SEQ ID NO: 649
  REGION 1..114: note = Description of Artificial Sequence: Synthetic polypeptide
  REGION 1..114: note = VL of XENP024283

SEQ ID NO: 1928 - protein, 5 aa, synthetic construct
  REGION 1..5: note = Description of Artificial Sequence: Synthetic peptide
  REGION 1..5: note = XENP024283 vhCDR1
HYGMN

SEQ ID NO: 1929 - protein, 17 aa, synthetic construct
  REGION 1..17: note = Description of Artificial Sequence: Synthetic peptide
  REGION 1..17: note = XENP024283 vhCDR2
WINTYTGEPTYADGFTG

SEQ ID NO: 1930 - protein, 8 aa, synthetic construct
  REGION 1..8: note = Description of Artificial Sequence: Synthetic peptide
  REGION 1..8: note = XENP024283 vhCDR3
DYYGSSPY

SEQ ID NO: 1931 - protein, 16 aa, synthetic construct
  REGION 1..16: note = Description of Artificial Sequence: Synthetic peptide
  REGION 1..16: note = XENP024283 vlCDR1
KSSQSIVHSNGNTYLE

SEQ ID NO: 1932 - protein, 7 aa, synthetic construct
  REGION 1..7: note = Description of Artificial Sequence: Synthetic peptide
  REGION 1..7: note = XENP024283 vlCDR2
KVSNRFS

SEQ ID NO: 1933 - protein, 9 aa, synthetic construct
  REGION 1..9: note = Description of Artificial Sequence: Synthetic peptide
  REGION 1..9: note = XENP024283 vlCDR3
FQGSHVPNT

SEQ ID NO: 1934 - protein, 251 aa, synthetic construct
  REGION 1..251: note = Description of Artificial Sequence: Synthetic polypeptide
  REGION 1..251: note = XENP024284 1C11_H3.165_L3_scFv
QIQLVQSGSELKKPGASVKVSCKASGYTFTHYGMNWVRQAPGQGLEWMGWINTYTGEPTYADGFTGRFVFSLDTSVSTASLQISSLKAEDTAVYFCARDYYGSSPYWGQGTLVTVSSGKPGSGKPGSGKPGSGKPGSDVLMTQSPDSLAVSLGERATINCKSSQSIVHSNGNTYLEWYQQKPGQSPKLLIYKVSNRFSGVPDRFSGSGSGTDFTLTISSLQAEDVAVYYCFQGSHVPNTFGGGTKVEIKGS

SEQ ID NO: 1935 - protein, 117 aa, synthetic construct
  REGION 1..117: note = Description of Artificial Sequence: Synthetic polypeptide
  REGION 1..117: note = VH of XENP024284
QIQLVQSGSELKKPGASVKVSCKASGYTFTHYGMNWVRQAPGQGLEWMGWINTYTGEPTYADGFTGRFVFSLDTSVSTASLQISSLKAEDTAVYFCARDYYGSSPYWGQGTLVTVSS

SEQ ID NO: 1936 - protein, 114 aa, synthetic construct; identical to SEQ ID NO: 649
  REGION 1..114: note = Description of Artificial Sequence: Synthetic polypeptide
  REGION 1..114: note = VL of XENP024284

SEQ ID NO: 1937 - protein, 5 aa, synthetic construct
  REGION 1..5: note = Description of Artificial Sequence: Synthetic peptide
  REGION 1..5: note = XENP024284 vhCDR1
HYGMN

SEQ ID NO: 1938 - protein, 17 aa, synthetic construct
  REGION 1..17: note = Description of Artificial Sequence: Synthetic peptide
  REGION 1..17: note = XENP024284 vhCDR2
WINTYTGEPTYADGFTG

SEQ ID NO: 1939 - protein, 8 aa, synthetic construct
  REGION 1..8: note = Description of Artificial Sequence: Synthetic peptide
  REGION 1..8: note = XENP024284 vhCDR3
DYYGSSPY

SEQ ID NO: 1940 - protein, 16 aa, synthetic construct
  REGION 1..16: note = Description of Artificial Sequence: Synthetic peptide
  REGION 1..16: note = XENP024284 vlCDR1
KSSQSIVHSNGNTYLE

SEQ ID NO: 1941 - protein, 7 aa, synthetic construct
  REGION 1..7: note = Description of Artificial Sequence: Synthetic peptide
  REGION 1..7: note = XENP024284 vlCDR2
KVSNRFS

SEQ ID NO: 1942 - protein, 9 aa, synthetic construct
  REGION 1..9: note = Description of Artificial Sequence: Synthetic peptide
  REGION 1..9: note = XENP024284 vlCDR3
FQGSHVPNT

SEQ ID NO: 1943 - protein, 251 aa, synthetic construct
  REGION 1..251: note = Description of Artificial Sequence: Synthetic polypeptide
  REGION 1..251: note = XENP024285 1C11_H3.166_L3_scFv
QIQLVQSGSELKKPGASVKVSCKASGYTFTHYGMNWVRQAPGQGLEWMGWINTYTGEPTYADGFTGRFVFSLDTSVSTAYLEISSLKAEDTAVYFCARDYYGSSPYWGQGTLVTVSSGKPGSGKPGSGKPGSGKPGSDVLMTQSPDSLAVSLGERATINCKSSQSIVHSNGNTYLEWYQQKPGQSPKLLIYKVSNRFSGVPDRFSGSGSGTDFTLTISSLQAEDVAVYYCFQGSHVPNTFGGGTKVEIKGS

SEQ ID NO: 1944 - protein, 117 aa, synthetic construct
  REGION 1..117: note = Description of Artificial Sequence: Synthetic polypeptide
  REGION 1..117: note = VH of XENP024285
QIQLVQSGSELKKPGASVKVSCKASGYTFTHYGMNWVRQAPGQGLEWMGWINTYTGEPTYADGFTGRFVFSLDTSVSTAYLEISSLKAEDTAVYFCARDYYGSSPYWGQGTLVTVSS

SEQ ID NO: 1945 - protein, 114 aa, synthetic construct; identical to SEQ ID NO: 649
  REGION 1..114: note = Description of Artificial Sequence: Synthetic polypeptide
  REGION 1..114: note = VL of XENP024285

SEQ ID NO: 1946 - protein, 5 aa, synthetic construct
  REGION 1..5: note = Description of Artificial Sequence: Synthetic peptide
  REGION 1..5: note = XENP024285 vhCDR1
HYGMN

SEQ ID NO: 1947 - protein, 17 aa, synthetic construct
  REGION 1..17: note = Description of Artificial Sequence: Synthetic peptide
  REGION 1..17: note = XENP024285 vhCDR2
WINTYTGEPTYADGFTG

SEQ ID NO: 1948 - protein, 8 aa, synthetic construct
  REGION 1..8: note = Description of Artificial Sequence: Synthetic peptide
  REGION 1..8: note = XENP024285 vhCDR3
DYYGSSPY

SEQ ID NO: 1949 - protein, 16 aa, synthetic construct
  REGION 1..16: note = Description of Artificial Sequence: Synthetic peptide
  REGION 1..16: note = XENP024285 vlCDR1
KSSQSIVHSNGNTYLE

SEQ ID NO: 1950 - protein, 7 aa, synthetic construct
  REGION 1..7: note = Description of Artificial Sequence: Synthetic peptide
  REGION 1..7: note = XENP024285 vlCDR2
KVSNRFS

SEQ ID NO: 1951 - protein, 9 aa, synthetic construct
  REGION 1..9: note = Description of Artificial Sequence: Synthetic peptide
  REGION 1..9: note = XENP024285 vlCDR3
FQGSHVPNT

SEQ ID NO: 1952 - protein, 251 aa, synthetic construct
  REGION 1..251: note = Description of Artificial Sequence: Synthetic polypeptide
  REGION 1..251: note = XENP024286 1C11_H3.167_L3_scFv
QIQLVQSGSELKKPGASVKVSCKASGYTFTHYGMNWVRQAPGQGLEWMGWINTYTGEPTYADGFTGRFVFSLDTSVSTAYLKISSLKAEDTAVYFCARDYYGSSPYWGQGTLVTVSSGKPGSGKPGSGKPGSGKPGSDVLMTQSPDSLAVSLGERATINCKSSQSIVHSNGNTYLEWYQQKPGQSPKLLIYKVSNRFSGVPDRFSGSGSGTDFTLTISSLQAEDVAVYYCFQGSHVPNTFGGGTKVEIKGS

SEQ ID NO: 1953 - protein, 117 aa, synthetic construct
  REGION 1..117: note = Description of Artificial Sequence: Synthetic polypeptide
  REGION 1..117: note = VH of XENP024286
QIQLVQSGSELKKPGASVKVSCKASGYTFTHYGMNWVRQAPGQGLEWMGWINTYTGEPTYADGFTGRFVFSLDTSVSTAYLKISSLKAEDTAVYFCARDYYGSSPYWGQGTLVTVSS

SEQ ID NO: 1954 - protein, 114 aa, synthetic construct; identical to SEQ ID NO: 649
  REGION 1..114: note = Description of Artificial Sequence: Synthetic polypeptide
  REGION 1..114: note = VL of XENP024286

SEQ ID NO: 1955 - protein, 5 aa, synthetic construct
  REGION 1..5: note = Description of Artificial Sequence: Synthetic peptide
  REGION 1..5: note = XENP024286 vhCDR1
HYGMN

SEQ ID NO: 1956 - protein, 17 aa, synthetic construct
  REGION 1..17: note = Description of Artificial Sequence: Synthetic peptide
  REGION 1..17: note = XENP024286 vhCDR2
WINTYTGEPTYADGFTG

SEQ ID NO: 1957 - protein, 8 aa, synthetic construct
  REGION 1..8: note = Description of Artificial Sequence: Synthetic peptide
  REGION 1..8: note = XENP024286 vhCDR3
DYYGSSPY

SEQ ID NO: 1958 - protein, 16 aa, synthetic construct
  REGION 1..16: note = Description of Artificial Sequence: Synthetic peptide
  REGION 1..16: note = XENP024286 vlCDR1
KSSQSIVHSNGNTYLE

SEQ ID NO: 1959 - protein, 7 aa, synthetic construct
  REGION 1..7: note = Description of Artificial Sequence: Synthetic peptide
  REGION 1..7: note = XENP024286 vlCDR2
KVSNRFS

SEQ ID NO: 1960 - protein, 9 aa, synthetic construct
  REGION 1..9: note = Description of Artificial Sequence: Synthetic peptide
  REGION 1..9: note = XENP024286 vlCDR3
FQGSHVPNT

SEQ ID NO: 1961 - protein, 251 aa, synthetic construct
  REGION 1..251: note = Description of Artificial Sequence: Synthetic polypeptide
  REGION 1..251: note = XENP024287 1C11_H3.168_L3_scFv
QIQLVQSGSELKKPGASVKVSCKASGYTFTHYGMNWVRQAPGQGLEWMGWINTYTGEPTYADGFTGRFVFSLDTSVSTAYLQINSLKAEDTAVYFCARDYYGSSPYWGQGTLVTVSSGKPGSGKPGSGKPGSGKPGSDVLMTQSPDSLAVSLGERATINCKSSQSIVHSNGNTYLEWYQQKPGQSPKLLIYKVSNRFSGVPDRFSGSGSGTDFTLTISSLQAEDVAVYYCFQGSHVPNTFGGGTKVEIKGS

SEQ ID NO: 1962 - protein, 117 aa, synthetic construct
  REGION 1..117: note = Description of Artificial Sequence: Synthetic polypeptide
  REGION 1..117: note = VH of XENP024287
QIQLVQSGSELKKPGASVKVSCKASGYTFTHYGMNWVRQAPGQGLEWMGWINTYTGEPTYADGFTGRFVFSLDTSVSTAYLQINSLKAEDTAVYFCARDYYGSSPYWGQGTLVTVSS

SEQ ID NO: 1963 - protein, 114 aa, synthetic construct; identical to SEQ ID NO: 649
  REGION 1..114: note = Description of Artificial Sequence: Synthetic polypeptide
  REGION 1..114: note = VL of XENP024287

SEQ ID NO: 1964 - protein, 5 aa, synthetic construct
  REGION 1..5: note = Description of Artificial Sequence: Synthetic peptide
  REGION 1..5: note = XENP024287 vhCDR1
HYGMN

SEQ ID NO: 1965 - protein, 17 aa, synthetic construct
  REGION 1..17: note = Description of Artificial Sequence: Synthetic peptide
  REGION 1..17: note = XENP024287 vhCDR2
WINTYTGEPTYADGFTG

SEQ ID NO: 1966 - protein, 8 aa, synthetic construct
  REGION 1..8: note = Description of Artificial Sequence: Synthetic peptide
  REGION 1..8: note = XENP024287 vhCDR3
DYYGSSPY

SEQ ID NO: 1967 - protein, 16 aa, synthetic construct
  REGION 1..16: note = Description of Artificial Sequence: Synthetic peptide
  REGION 1..16: note = XENP024287 vlCDR1
KSSQSIVHSNGNTYLE

SEQ ID NO: 1968 - protein, 7 aa, synthetic construct
  REGION 1..7: note = Description of Artificial Sequence: Synthetic peptide
  REGION 1..7: note = XENP024287 vlCDR2
KVSNRFS

SEQ ID NO: 1969 - protein, 9 aa, synthetic construct
  REGION 1..9: note = Description of Artificial Sequence: Synthetic peptide
  REGION 1..9: note = XENP024287 vlCDR3
FQGSHVPNT

SEQ ID NO: 1970 - protein, 251 aa, synthetic construct
  REGION 1..251: note = Description of Artificial Sequence: Synthetic polypeptide
  REGION 1..251: note = XENP024288 1C11_H3.169_L3_scFv
QIQLVQSGSELKKPGASVKVSCKASGYTFTHYGMNWVRQAPGQGLEWMGWINTYTGEPTYADGFTGRFVFSLDTSVSTAYLQISSVKAEDTAVYFCARDYYGSSPYWGQGTLVTVSSGKPGSGKPGSGKPGSGKPGSDVLMTQSPDSLAVSLGERATINCKSSQSIVHSNGNTYLEWYQQKPGQSPKLLIYKVSNRFSGVPDRFSGSGSGTDFTLTISSLQAEDVAVYYCFQGSHVPNTFGGGTKVEIKGS

SEQ ID NO: 1971 - protein, 117 aa, synthetic construct
  REGION 1..117: note = Description of Artificial Sequence: Synthetic polypeptide
  REGION 1..117: note = VH of XENP024288
QIQLVQSGSELKKPGASVKVSCKASGYTFTHYGMNWVRQAPGQGLEWMGWINTYTGEPTYADGFTGRFVFSLDTSVSTAYLQISSVKAEDTAVYFCARDYYGSSPYWGQGTLVTVSS

SEQ ID NO: 1972 - protein, 114 aa, synthetic construct; identical to SEQ ID NO: 649
  REGION 1..114: note = Description of Artificial Sequence: Synthetic polypeptide
  REGION 1..114: note = VL of XENP024288

SEQ ID NO: 1973 - protein, 5 aa, synthetic construct
  REGION 1..5: note = Description of Artificial Sequence: Synthetic peptide
  REGION 1..5: note = XENP024288 vhCDR1
HYGMN

SEQ ID NO: 1974 - protein, 17 aa, synthetic construct
  REGION 1..17: note = Description of Artificial Sequence: Synthetic peptide
  REGION 1..17: note = XENP024288 vhCDR2
WINTYTGEPTYADGFTG

SEQ ID NO: 1975 - protein, 8 aa, synthetic construct
  REGION 1..8: note = Description of Artificial Sequence: Synthetic peptide
  REGION 1..8: note = XENP024288 vhCDR3
DYYGSSPY

SEQ ID NO: 1976 - protein, 16 aa, synthetic construct
  REGION 1..16: note = Description of Artificial Sequence: Synthetic peptide
  REGION 1..16: note = XENP024288 vlCDR1
KSSQSIVHSNGNTYLE

SEQ ID NO: 1977 - protein, 7 aa, synthetic construct
  REGION 1..7: note = Description of Artificial Sequence: Synthetic peptide
  REGION 1..7: note = XENP024288 vlCDR2
KVSNRFS

SEQ ID NO: 1978 - protein, 9 aa, synthetic construct
  REGION 1..9: note = Description of Artificial Sequence: Synthetic peptide
  REGION 1..9: note = XENP024288 vlCDR3
FQGSHVPNT

SEQ ID NO: 1979 - protein, 251 aa, synthetic construct
  REGION 1..251: note = Description of Artificial Sequence: Synthetic polypeptide
  REGION 1..251: note = XENP024289 1C11_H3.170_L3_scFv
QIQLVQSGSELKKPGASVKVSCKASGYTFTHYGMNWVRQAPGQGLEWMGWINTYTGEPTYADGFTGRFVFSLDTSVSTAYLQISSMKAEDTAVYFCARDYYGSSPYWGQGTLVTVSSGKPGSGKPGSGKPGSGKPGSDVLMTQSPDSLAVSLGERATINCKSSQSIVHSNGNTYLEWYQQKPGQSPKLLIYKVSNRFSGVPDRFSGSGSGTDFTLTISSLQAEDVAVYYCFQGSHVPNTFGGGTKVEIKGS

SEQ ID NO: 1980 - protein, 117 aa, synthetic construct
  REGION 1..117: note = Description of Artificial Sequence: Synthetic polypeptide
  REGION 1..117: note = VH of XENP024289
QIQLVQSGSELKKPGASVKVSCKASGYTFTHYGMNWVRQAPGQGLEWMGWINTYTGEPTYADGFTGRFVFSLDTSVSTAYLQISSMKAEDTAVYFCARDYYGSSPYWGQGTLVTVSS

SEQ ID NO: 1981 - protein, 114 aa, synthetic construct; identical to SEQ ID NO: 649
  REGION 1..114: note = Description of Artificial Sequence: Synthetic polypeptide
  REGION 1..114: note = VL of XENP024289

SEQ ID NO: 1982 - protein, 5 aa, synthetic construct
  REGION 1..5: note = Description of Artificial Sequence: Synthetic peptide
  REGION 1..5: note = XENP024289 vhCDR1
HYGMN

SEQ ID NO: 1983 - protein, 17 aa, synthetic construct
  REGION 1..17: note = Description of Artificial Sequence: Synthetic peptide
  REGION 1..17: note = XENP024289 vhCDR2
WINTYTGEPTYADGFTG

SEQ ID NO: 1984 - protein, 8 aa, synthetic construct
  REGION 1..8: note = Description of Artificial Sequence: Synthetic peptide
  REGION 1..8: note = XENP024289 vhCDR3
DYYGSSPY

SEQ ID NO: 1985 - protein, 16 aa, synthetic construct
  REGION 1..16: note = Description of Artificial Sequence: Synthetic peptide
  REGION 1..16: note = XENP024289 vlCDR1
KSSQSIVHSNGNTYLE

SEQ ID NO: 1986 - protein, 7 aa, synthetic construct
  REGION 1..7: note = Description of Artificial Sequence: Synthetic peptide
  REGION 1..7: note = XENP024289 vlCDR2
KVSNRFS

SEQ ID NO: 1987 - protein, 9 aa, synthetic construct
  REGION 1..9: note = Description of Artificial Sequence: Synthetic peptide
  REGION 1..9: note = XENP024289 vlCDR3
FQGSHVPNT

SEQ ID NO: 1988 - protein, 251 aa, synthetic construct
  REGION 1..251: note = Description of Artificial Sequence: Synthetic polypeptide
  REGION 1..251: note = XENP024290 1C11_H3.171_L3_scFv
QIQLVQSGSELKKPGASVKVSCKASGYTFTHYGMNWVRQAPGQGLEWMGWINTYTGEPTYADGFTGRFVFSLDTSVSTAYLQISSLKSEDTAVYFCARDYYGSSPYWGQGTLVTVSSGKPGSGKPGSGKPGSGKPGSDVLMTQSPDSLAVSLGERATINCKSSQSIVHSNGNTYLEWYQQKPGQSPKLLIYKVSNRFSGVPDRFSGSGSGTDFTLTISSLQAEDVAVYYCFQGSHVPNTFGGGTKVEIKGS

SEQ ID NO: 1989 - protein, 117 aa, synthetic construct
  REGION 1..117: note = Description of Artificial Sequence: Synthetic polypeptide
  REGION 1..117: note = VH of XENP024290
QIQLVQSGSELKKPGASVKVSCKASGYTFTHYGMNWVRQAPGQGLEWMGWINTYTGEPTYADGFTGRFVFSLDTSVSTAYLQISSLKSEDTAVYFCARDYYGSSPYWGQGTLVTVSS

SEQ ID NO: 1990 - protein, 114 aa, synthetic construct; identical to SEQ ID NO: 649
  REGION 1..114: note = Description of Artificial Sequence: Synthetic polypeptide
  REGION 1..114: note = VL of XENP024290

SEQ ID NO: 1991 - protein, 5 aa, synthetic construct
  REGION 1..5: note = Description of Artificial Sequence: Synthetic peptide
  REGION 1..5: note = XENP024290 vhCDR1
HYGMN

SEQ ID NO: 1992 - protein, 17 aa, synthetic construct
  REGION 1..17: note = Description of Artificial Sequence: Synthetic peptide
  REGION 1..17: note = XENP024290 vhCDR2
WINTYTGEPTYADGFTG

SEQ ID NO: 1993 - protein, 8 aa, synthetic construct
  REGION 1..8: note = Description of Artificial Sequence: Synthetic peptide
  REGION 1..8: note = XENP024290 vhCDR3
DYYGSSPY

SEQ ID NO: 1994 - protein, 16 aa, synthetic construct
  REGION 1..16: note = Description of Artificial Sequence: Synthetic peptide
  REGION 1..16: note = XENP024290 vlCDR1
KSSQSIVHSNGNTYLE

SEQ ID NO: 1995 - protein, 7 aa, synthetic construct
  REGION 1..7: note = Description of Artificial Sequence: Synthetic peptide
  REGION 1..7: note = XENP024290 vlCDR2
KVSNRFS

SEQ ID NO: 1996 - protein, 9 aa, synthetic construct
  REGION 1..9: note = Description of Artificial Sequence: Synthetic peptide
  REGION 1..9: note = XENP024290 vlCDR3
FQGSHVPNT

SEQ ID NO: 1997 - protein, 251 aa, synthetic construct
  REGION 1..251: note = Description of Artificial Sequence: Synthetic polypeptide
  REGION 1..251: note = XENP024291 1C11_H3.172_L3_scFv
QIQLVQSGSELKKPGASVKVSCKASGYTFTHYGMNWVRQAPGQGLEWMGWINTYTGEPTYADGFTGRFVFSLDTSVSTAYLQISSLKPEDTAVYFCARDYYGSSPYWGQGTLVTVSSGKPGSGKPGSGKPGSGKPGSDVLMTQSPDSLAVSLGERATINCKSSQSIVHSNGNTYLEWYQQKPGQSPKLLIYKVSNRFSGVPDRFSGSGSGTDFTLTISSLQAEDVAVYYCFQGSHVPNTFGGGTKVEIKGS

SEQ ID NO: 1998 - protein, 117 aa, synthetic construct
  REGION 1..117: note = Description of Artificial Sequence: Synthetic polypeptide
  REGION 1..117: note = VH of XENP024291
QIQLVQSGSELKKPGASVKVSCKASGYTFTHYGMNWVRQAPGQGLEWMGWINTYTGEPTYADGFTGRFVFSLDTSVSTAYLQISSLKPEDTAVYFCARDYYGSSPYWGQGTLVTVSS

SEQ ID NO: 1999 - protein, 114 aa, synthetic construct; identical to SEQ ID NO: 649
  REGION 1..114: note = Description of Artificial Sequence: Synthetic polypeptide
  REGION 1..114: note = VL of XENP024291

SEQ ID NO: 2000 - protein, 5 aa, synthetic construct
  REGION 1..5: note = Description of Artificial Sequence: Synthetic peptide
  REGION 1..5: note = XENP024291 vhCDR1
HYGMN

SEQ ID NO: 2001 - protein, 17 aa, synthetic construct
  REGION 1..17: note = Description of Artificial Sequence: Synthetic peptide
  REGION 1..17: note = XENP024291 vhCDR2
WINTYTGEPTYADGFTG

SEQ ID NO: 2002 - protein, 8 aa, synthetic construct
  REGION 1..8: note = Description of Artificial Sequence: Synthetic peptide
  REGION 1..8: note = XENP024291 vhCDR3
DYYGSSPY

SEQ ID NO: 2003 - protein, 16 aa, synthetic construct
  REGION 1..16: note = Description of Artificial Sequence: Synthetic peptide
  REGION 1..16: note = XENP024291 vlCDR1
KSSQSIVHSNGNTYLE

SEQ ID NO: 2004 - protein, 7 aa, synthetic construct
  REGION 1..7: note = Description of Artificial Sequence: Synthetic peptide
  REGION 1..7: note = XENP024291 vlCDR2
KVSNRFS

SEQ ID NO: 2005 - protein, 9 aa, synthetic construct
  REGION 1..9: note = Description of Artificial Sequence: Synthetic peptide
  REGION 1..9: note = XENP024291 vlCDR3
FQGSHVPNT

SEQ ID NO: 2006 - protein, 251 aa, synthetic construct
  REGION 1..251: note = Description of Artificial Sequence: Synthetic polypeptide
  REGION 1..251: note = XENP024292 1C11_H3.173_L3_scFv
QIQLVQSGSELKKPGASVKVSCKASGYTFTHYGMNWVRQAPGQGLEWMGWINTYTGEPTYADGFTGRFVFSLDTSVSTAYLQISSLKADDTAVYFCARDYYGSSPYWGQGTLVTVSSGKPGSGKPGSGKPGSGKPGSDVLMTQSPDSLAVSLGERATINCKSSQSIVHSNGNTYLEWYQQKPGQSPKLLIYKVSNRFSGVPDRFSGSGSGTDFTLTISSLQAEDVAVYYCFQGSHVPNTFGGGTKVEIKGS

SEQ ID NO: 2007 - protein, 117 aa, synthetic construct
  REGION 1..117: note = Description of Artificial Sequence: Synthetic polypeptide
  REGION 1..117: note = VH of XENP024292
QIQLVQSGSELKKPGASVKVSCKASGYTFTHYGMNWVRQAPGQGLEWMGWINTYTGEPTYADGFTGRFVFSLDTSVSTAYLQISSLKADDTAVYFCARDYYGSSPYWGQGTLVTVSS

SEQ ID NO: 2008 - protein, 114 aa, synthetic construct; identical to SEQ ID NO: 649
  REGION 1..114: note = Description of Artificial Sequence: Synthetic polypeptide
  REGION 1..114: note = VL of XENP024292

SEQ ID NO: 2009 - protein, 5 aa, synthetic construct
  REGION 1..5: note = Description of Artificial Sequence: Synthetic peptide
  REGION 1..5: note = XENP024292 vhCDR1
HYGMN

SEQ ID NO: 2010 - protein, 17 aa, synthetic construct
  REGION 1..17: note = Description of Artificial Sequence: Synthetic peptide
  REGION 1..17: note = XENP024292 vhCDR2
WINTYTGEPTYADGFTG

SEQ ID NO: 2011 - protein, 8 aa, synthetic construct
  REGION 1..8: note = Description of Artificial Sequence: Synthetic peptide
  REGION 1..8: note = XENP024292 vhCDR3
DYYGSSPY

SEQ ID NO: 2012 - protein, 16 aa, synthetic construct
  REGION 1..16: note = Description of Artificial Sequence: Synthetic peptide
  REGION 1..16: note = XENP024292 vlCDR1
KSSQSIVHSNGNTYLE

SEQ ID NO: 2013 - protein, 7 aa, synthetic construct
  REGION 1..7: note = Description of Artificial Sequence: Synthetic peptide
  REGION 1..7: note = XENP024292 vlCDR2
KVSNRFS

SEQ ID NO: 2014 - protein, 9 aa, synthetic construct
  REGION 1..9: note = Description of Artificial Sequence: Synthetic peptide
  REGION 1..9: note = XENP024292 vlCDR3
FQGSHVPNT

SEQ ID NO: 2015 - protein, 251 aa, synthetic construct
  REGION 1..251: note = Description of Artificial Sequence: Synthetic polypeptide
  REGION 1..251: note = XENP024293 1C11_H3.174_L3_scFv
QIQLVQSGSELKKPGASVKVSCKASGYTFTHYGMNWVRQAPGQGLEWMGWINTYTGEPTYADGFTGRFVFSLDTSVSTAYLQISSLKAADTAVYFCARDYYGSSPYWGQGTLVTVSSGKPGSGKPGSGKPGSGKPGSDVLMTQSPDSLAVSLGERATINCKSSQSIVHSNGNTYLEWYQQKPGQSPKLLIYKVSNRFSGVPDRFSGSGSGTDFTLTISSLQAEDVAVYYCFQGSHVPNTFGGGTKVEIKGS

SEQ ID NO: 2016 - protein, 117 aa, synthetic construct
  REGION 1..117: note = Description of Artificial Sequence: Synthetic polypeptide
  REGION 1..117: note = VH of XENP024293
QIQLVQSGSELKKPGASVKVSCKASGYTFTHYGMNWVRQAPGQGLEWMGWINTYTGEPTYADGFTGRFVFSLDTSVSTAYLQISSLKAADTAVYFCARDYYGSSPYWGQGTLVTVSS

SEQ ID NO: 2017 - protein, 114 aa, synthetic construct; identical to SEQ ID NO: 649
  REGION 1..114: note = Description of Artificial Sequence: Synthetic polypeptide
  REGION 1..114: note = VL of XENP024293

SEQ ID NO: 2018 - protein, 5 aa, synthetic construct
  REGION 1..5: note = Description of Artificial Sequence: Synthetic peptide
  REGION 1..5: note = XENP024293 vhCDR1
HYGMN

SEQ ID NO: 2019 - protein, 17 aa, synthetic construct
  REGION 1..17: note = Description of Artificial Sequence: Synthetic peptide
  REGION 1..17: note = XENP024293 vhCDR2
WINTYTGEPTYADGFTG

SEQ ID NO: 2020 - protein, 8 aa, synthetic construct
  REGION 1..8: note = Description of Artificial Sequence: Synthetic peptide
  REGION 1..8: note = XENP024293 vhCDR3
DYYGSSPY

SEQ ID NO: 2021 - protein, 16 aa, synthetic construct
  REGION 1..16: note = Description of Artificial Sequence: Synthetic peptide
  REGION 1..16: note = XENP024293 vlCDR1
KSSQSIVHSNGNTYLE

SEQ ID NO: 2022 - protein, 7 aa, synthetic construct
  REGION 1..7: note = Description of Artificial Sequence: Synthetic peptide
  REGION 1..7: note = XENP024293 vlCDR2
KVSNRFS

SEQ ID NO: 2023 - protein, 9 aa, synthetic construct
  REGION 1..9: note = Description of Artificial Sequence: Synthetic peptide
  REGION 1..9: note = XENP024293 vlCDR3
FQGSHVPNT

SEQ ID NO: 2024 - protein, 251 aa, synthetic construct
  REGION 1..251: note = Description of Artificial Sequence: Synthetic polypeptide
  REGION 1..251: note = XENP024372 1C11_H3_L3.86_scFv
QIQLVQSGSELKKPGASVKVSCKASGYTFTHYGMNWVRQAPGQGLEWMGWINTYTGEPTYADGFTGRFVFSLDTSVSTAYLQISSLKAEDTAVYFCARDYYGSSPYWGQGTLVTVSSGKPGSGKPGSGKPGSGKPGSDVLMTQSPDSLAVSLGERATINCKSSQSIVHSNGNTYLEWYQQKPGQSPKLLIYKVSNRFTGVPDRFSGSGSGTDFTLTISSVQAEDVATYYCFQGSHVPNTFGQGTKVEIKGS

SEQ ID NO: 2025 - protein, 117 aa, synthetic construct; identical to SEQ ID NO: 32
  REGION 1..117: note = Description of Artificial Sequence: Synthetic polypeptide
  REGION 1..117: note = VH of XENP024372

SEQ ID NO: 2026 - protein, 114 aa, synthetic construct
  REGION 1..114: note = Description of Artificial Sequence: Synthetic polypeptide
  REGION 1..114: note = VL of XENP024372
DVLMTQSPDSLAVSLGERATINCKSSQSIVHSNGNTYLEWYQQKPGQSPKLLIYKVSNRFTGVPDRFSGSGSGTDFTLTISSVQAEDVATYYCFQGSHVPNTFGQGTKVEIKGS

SEQ ID NO: 2027 - protein, 5 aa, synthetic construct
  REGION 1..5: note = Description of Artificial Sequence: Synthetic peptide
  REGION 1..5: note = XENP024372 vhCDR1
HYGMN

SEQ ID NO: 2028 - protein, 17 aa, synthetic construct
  REGION 1..17: note = Description of Artificial Sequence: Synthetic peptide
  REGION 1..17: note = XENP024372 vhCDR2
WINTYTGEPTYADGFTG

SEQ ID NO: 2029 - protein, 8 aa, synthetic construct
  REGION 1..8: note = Description of Artificial Sequence: Synthetic peptide
  REGION 1..8: note = XENP024372 vhCDR3
DYYGSSPY

SEQ ID NO: 2030 - protein, 16 aa, synthetic construct
  REGION 1..16: note = Description of Artificial Sequence: Synthetic peptide
  REGION 1..16: note = XENP024372 vlCDR1
KSSQSIVHSNGNTYLE

SEQ ID NO: 2031 - protein, 7 aa, synthetic construct
  REGION 1..7: note = Description of Artificial Sequence: Synthetic peptide
  REGION 1..7: note = XENP024372 vlCDR2
KVSNRFT

SEQ ID NO: 2032 - protein, 9 aa, synthetic construct
  REGION 1..9: note = Description of Artificial Sequence: Synthetic peptide
  REGION 1..9: note = XENP024372 vlCDR3
FQGSHVPNT

SEQ ID NO: 2033 - protein, 251 aa, synthetic construct
  REGION 1..251: note = Description of Artificial Sequence: Synthetic polypeptide
  REGION 1..251: note = XENP024373 1C11_H3_L3.87_scFv
QIQLVQSGSELKKPGASVKVSCKASGYTFTHYGMNWVRQAPGQGLEWMGWINTYTGEPTYADGFTGRFVFSLDTSVSTAYLQISSLKAEDTAVYFCARDYYGSSPYWGQGTLVTVSSGKPGSGKPGSGKPGSGKPGSDVVMTQSPDSLAVSLGERVTINCKASQSIVHSNGNTYLEWYQQKPGQPPKLLIYKVSNRFSGVPDRFSGSGSGTDFTLTISSLQAEDVAVYYCFQGSHVPNTFGGGTKVEIKGS

SEQ ID NO: 2034 - protein, 117 aa, synthetic construct; identical to SEQ ID NO: 32
  REGION 1..117: note = Description of Artificial Sequence: Synthetic polypeptide
  REGION 1..117: note = VH of XENP024373

SEQ ID NO: 2035 - protein, 114 aa, synthetic construct
  REGION 1..114: note = Description of Artificial Sequence: Synthetic polypeptide
  REGION 1..114: note = VL of XENP024373
DVVMTQSPDSLAVSLGERVTINCKASQSIVHSNGNTYLEWYQQKPGQPPKLLIYKVSNRFSGVPDRFSGSGSGTDFTLTISSLQAEDVAVYYCFQGSHVPNTFGGGTKVEIKGS

SEQ ID NO: 2036 - protein, 5 aa, synthetic construct
  REGION 1..5: note = Description of Artificial Sequence: Synthetic peptide
  REGION 1..5: note = XENP024373 vhCDR1
HYGMN

SEQ ID NO: 2037 - protein, 17 aa, synthetic construct
  REGION 1..17: note = Description of Artificial Sequence: Synthetic peptide
  REGION 1..17: note = XENP024373 vhCDR2
WINTYTGEPTYADGFTG

SEQ ID NO: 2038 - protein, 8 aa, synthetic construct
  REGION 1..8: note = Description of Artificial Sequence: Synthetic peptide
  REGION 1..8: note = XENP024373 vhCDR3
DYYGSSPY

SEQ ID NO: 2039 - protein, 16 aa, synthetic construct
  REGION 1..16: note = Description of Artificial Sequence: Synthetic peptide
  REGION 1..16: note = XENP024373 vlCDR1
KASQSIVHSNGNTYLE

SEQ ID NO: 2040 - protein, 7 aa, synthetic construct
  REGION 1..7: note = Description of Artificial Sequence: Synthetic peptide
  REGION 1..7: note = XENP024373 vlCDR2
KVSNRFS

SEQ ID NO: 2041 - protein, 9 aa, synthetic construct
  REGION 1..9: note = Description of Artificial Sequence: Synthetic peptide
  REGION 1..9: note = XENP024373 vlCDR3
FQGSHVPNT

SEQ ID NO: 2042 - protein, 251 aa, synthetic construct
  REGION 1..251: note = Description of Artificial Sequence: Synthetic polypeptide
  REGION 1..251: note = XENP024374 1C11_H3_L3.90_scFv
QIQLVQSGSELKKPGASVKVSCKASGYTFTHYGMNWVRQAPGQGLEWMGWINTYTGEPTYADGFTGRFVFSLDTSVSTAYLQISSLKAEDTAVYFCARDYYGSSPYWGQGTLVTVSSGKPGSGKPGSGKPGSGKPGSDVVMTQSPDSLAVSLGERATINCKASQSIVHSNGNTYLEWYQQKPGQPPKLLIYKVSNRFSGVPDRFSGSGSGTDFTLTISSVQAEDAATYYCFQGSHVPNTFGQGTKVEIKGS

SEQ ID NO: 2043 - protein, 117 aa, synthetic construct; identical to SEQ ID NO: 32
  REGION 1..117: note = Description of Artificial Sequence: Synthetic polypeptide
  REGION 1..117: note = VH of XENP024374

SEQ ID NO: 2044 - protein, 114 aa, synthetic construct
  REGION 1..114: note = Description of Artificial Sequence: Synthetic polypeptide
  REGION 1..114: note = VL of XENP024374
DVVMTQSPDSLAVSLGERATINCKASQSIVHSNGNTYLEWYQQKPGQPPKLLIYKVSNRFSGVPDRFSGSGSGTDFTLTISSVQAEDAATYYCFQGSHVPNTFGQGTKVEIKGS

SEQ ID NO: 2045 - protein, 5 aa, synthetic construct
  REGION 1..5: note = Description of Artificial Sequence: Synthetic peptide
  REGION 1..5: note = XENP024374 vhCDR1
HYGMN

SEQ ID NO: 2046 - protein, 17 aa, synthetic construct
  REGION 1..17: note = Description of Artificial Sequence: Synthetic peptide
  REGION 1..17: note = XENP024374 vhCDR2
WINTYTGEPTYADGFTG

SEQ ID NO: 2047 - protein, 8 aa, synthetic construct
  REGION 1..8: note = Description of Artificial Sequence: Synthetic peptide
  REGION 1..8: note = XENP024374 vhCDR3
DYYGSSPY

SEQ ID NO: 2048 - protein, 16 aa, synthetic construct
  REGION 1..16: note = Description of Artificial Sequence: Synthetic peptide
  REGION 1..16: note = XENP024374 vlCDR1
KASQSIVHSNGNTYLE

SEQ ID NO: 2049 - protein, 7 aa, synthetic construct
  REGION 1..7: note = Description of Artificial Sequence: Synthetic peptide
  REGION 1..7: note = XENP024374 vlCDR2
KVSNRFS

SEQ ID NO: 2050 - protein, 9 aa, synthetic construct
  REGION 1..9: note = Description of Artificial Sequence: Synthetic peptide
  REGION 1..9: note = XENP024374 vlCDR3
FQGSHVPNT

SEQ ID NO: 2051 - protein, 251 aa, synthetic construct
  REGION 1..251: note = Description of Artificial Sequence: Synthetic polypeptide
  REGION 1..251: note = XENP024375 1C11_H3_L3.92_scFv
QIQLVQSGSELKKPGASVKVSCKASGYTFTHYGMNWVRQAPGQGLEWMGWINTYTGEPTYADGFTGRFVFSLDTSVSTAYLQISSLKAEDTAVYFCARDYYGSSPYWGQGTLVTVSSGKPGSGKPGSGKPGSGKPGSDIVMTQSPDSLAVSLGERVTINCKASQSIVHSNGNTYLEWYQQKPGQPPKLLIYKVSNRFTGVPDRFSGSGSGTDFTLTISSLQAEDVAVYYCFQGSHVPNTFGGGTKVEIKGS

SEQ ID NO: 2052 - protein, 117 aa, synthetic construct; identical to SEQ ID NO: 32
  REGION 1..117: note = Description of Artificial Sequence: Synthetic polypeptide
  REGION 1..117: note = VH of XENP024375

SEQ ID NO: 2053 - protein, 114 aa, synthetic construct
  REGION 1..114: note = Description of Artificial Sequence: Synthetic polypeptide
  REGION 1..114: note = VL of XENP024375
DIVMTQSPDSLAVSLGERVTINCKASQSIVHSNGNTYLEWYQQKPGQPPKLLIYKVSNRFTGVPDRFSGSGSGTDFTLTISSLQAEDVAVYYCFQGSHVPNTFGGGTKVEIKGS

SEQ ID NO: 2054 - protein, 5 aa, synthetic construct
  REGION 1..5: note = Description of Artificial Sequence: Synthetic peptide
  REGION 1..5: note = XENP024375 vhCDR1
HYGMN

SEQ ID NO: 2055 - protein, 17 aa, synthetic construct
  REGION 1..17: note = Description of Artificial Sequence: Synthetic peptide
  REGION 1..17: note = XENP024375 vhCDR2
WINTYTGEPTYADGFTG

SEQ ID NO: 2056 - protein, 8 aa, synthetic construct
  REGION 1..8: note = Description of Artificial Sequence: Synthetic peptide
  REGION 1..8: note = XENP024375 vhCDR3
DYYGSSPY

SEQ ID NO: 2057 - protein, 16 aa, synthetic construct
  REGION 1..16: note = Description of Artificial Sequence: Synthetic peptide
  REGION 1..16: note = XENP024375 vlCDR1
KASQSIVHSNGNTYLE

SEQ ID NO: 2058 - protein, 7 aa, synthetic construct
  REGION 1..7: note = Description of Artificial Sequence: Synthetic peptide
  REGION 1..7: note = XENP024375 vlCDR2
KVSNRFT

SEQ ID NO: 2059 - protein, 9 aa, synthetic construct
  REGION 1..9: note = Description of Artificial Sequence: Synthetic peptide
  REGION 1..9: note = XENP024375 vlCDR3
FQGSHVPNT

SEQ ID NO: 2060 - protein, 251 aa, synthetic construct
  REGION 1..251: note = Description of Artificial Sequence: Synthetic polypeptide
  REGION 1..251: note = XENP024376 1C11_H3_L3.94_scFv
QIQLVQSGSELKKPGASVKVSCKASGYTFTHYGMNWVRQAPGQGLEWMGWINTYTGEPTYADGFTGRFVFSLDTSVSTAYLQISSLKAEDTAVYFCARDYYGSSPYWGQGTLVTVSSGKPGSGKPGSGKPGSGKPGSDILMTQSPDSLAVSLGERATINCKSSQSIVHSNGNTYLEWYQQKPGQSPKLLIYKVSNRFTGVPDRFSGSGSGTDFTLTISSVQAEDAATYYCFQGSHVPNTFGQGTKVEIKGS

SEQ ID NO: 2061 - protein, 117 aa, synthetic construct; identical to SEQ ID NO: 32
  REGION 1..117: note = Description of Artificial Sequence: Synthetic polypeptide
  REGION 1..117: note = VH of XENP024376

SEQ ID NO: 2062 - protein, 114 aa, synthetic construct
  REGION 1..114: note = Description of Artificial Sequence: Synthetic polypeptide
  REGION 1..114: note = VL of XENP024376
DILMTQSPDSLAVSLGERATINCKSSQSIVHSNGNTYLEWYQQKPGQSPKLLIYKVSNRFTGVPDRFSGSGSGTDFTLTISSVQAEDAATYYCFQGSHVPNTFGQGTKVEIKGS

SEQ ID NO: 2063 - protein, 5 aa, synthetic construct
  REGION 1..5: note = Description of Artificial Sequence: Synthetic peptide
  REGION 1..5: note = XENP024376 vhCDR1
HYGMN

SEQ ID NO: 2064 - protein, 17 aa, synthetic construct
  REGION 1..17: note = Description of Artificial Sequence: Synthetic peptide
  REGION 1..17: note = XENP024376 vhCDR2
WINTYTGEPTYADGFTG

SEQ ID NO: 2065 - protein, 8 aa, synthetic construct
  REGION 1..8: note = Description of Artificial Sequence: Synthetic peptide
  REGION 1..8: note = XENP024376 vhCDR3
DYYGSSPY

SEQ ID NO: 2066 - protein, 16 aa, synthetic construct
  REGION 1..16: note = Description of Artificial Sequence: Synthetic peptide
  REGION 1..16: note = XENP024376 vlCDR1
KSSQSIVHSNGNTYLE

SEQ ID NO: 2067 - protein, 7 aa, synthetic construct
  REGION 1..7: note = Description of Artificial Sequence: Synthetic peptide
  REGION 1..7: note = XENP024376 vlCDR2
KVSNRFT

SEQ ID NO: 2068 - protein, 9 aa, synthetic construct
  REGION 1..9: note = Description of Artificial Sequence: Synthetic peptide
  REGION 1..9: note = XENP024376 vlCDR3
FQGSHVPNT

SEQ ID NO: 2069 - protein, 251 aa, synthetic construct
  REGION 1..251: note = Description of Artificial Sequence: Synthetic polypeptide
  REGION 1..251: note = XENP024377 1C11_H3_L3.96_scFv
QIQLVQSGSELKKPGASVKVSCKASGYTFTHYGMNWVRQAPGQGLEWMGWINTYTGEPTYADGFTGRFVFSLDTSVSTAYLQISSLKAEDTAVYFCARDYYGSSPYWGQGTLVTVSSGKPGSGKPGSGKPGSGKPGSDIVMTQSPDSLAVSLGERATINCKASQSIVHSNGNTYLEWYQQKPGQPPKLLIYKVSNRFTGVPDRFSGSGSGTDFTLTISSVQAEDAATYYCFQGSHVPNTFGQGTKVEIKGS

SEQ ID NO: 2070 - protein, 117 aa, synthetic construct; identical to SEQ ID NO: 32
  REGION 1..117: note = Description of Artificial Sequence: Synthetic polypeptide
  REGION 1..117: note = VH of XENP024377

SEQ ID NO: 2071 - protein, 114 aa, synthetic construct
  REGION 1..114: note = Description of Artificial Sequence: Synthetic polypeptide
  REGION 1..114: note = VL of XENP024377
DIVMTQSPDSLAVSLGERATINCKASQSIVHSNGNTYLEWYQQKPGQPPKLLIYKVSNRFTGVPDRFSGSGSGTDFTLTISSVQAEDAATYYCFQGSHVPNTFGQGTKVEIKGS

SEQ ID NO: 2072 - protein, 5 aa, synthetic construct
  REGION 1..5: note = Description of Artificial Sequence: Synthetic peptide
  REGION 1..5: note = XENP024377 vhCDR1
HYGMN

SEQ ID NO: 2073 - protein, 17 aa, synthetic construct
  REGION 1..17: note = Description of Artificial Sequence: Synthetic peptide
  REGION 1..17: note = XENP024377 vhCDR2
WINTYTGEPTYADGFTG

SEQ ID NO: 2074 - protein, 8 aa, synthetic construct
  REGION 1..8: note = Description of Artificial Sequence: Synthetic peptide
  REGION 1..8: note = XENP024377 vhCDR3
DYYGSSPY

SEQ ID NO: 2075 - protein, 16 aa, synthetic construct
  REGION 1..16: note = Description of Artificial Sequence: Synthetic peptide
  REGION 1..16: note = XENP024377 vlCDR1
KASQSIVHSNGNTYLE

SEQ ID NO: 2076 - protein, 7 aa, synthetic construct
  REGION 1..7: note = Description of Artificial Sequence: Synthetic peptide
  REGION 1..7: note = XENP024377 vlCDR2
KVSNRFT

SEQ ID NO: 2077 - protein, 9 aa, synthetic construct
  REGION 1..9: note = Description of Artificial Sequence: Synthetic peptide
  REGION 1..9: note = XENP024377 vlCDR3
FQGSHVPNT

SEQ ID NO: 2078 - protein, 251 aa, synthetic construct
  REGION 1..251: note = Description of Artificial Sequence: Synthetic polypeptide
  REGION 1..251: note = XENP024378 1C11_H3_L3.105_scFv
QIQLVQSGSELKKPGASVKVSCKASGYTFTHYGMNWVRQAPGQGLEWMGWINTYTGEPTYADGFTGRFVFSLDTSVSTAYLQISSLKAEDTAVYFCARDYYGSSPYWGQGTLVTVSSGKPGSGKPGSGKPGSGKPGSDVLMTQSPDSLPVTPGEPATINCKSSQSIVHSNGNTYLEWYQQKPGQSPKLLIYKVSNRFSGVPDRFSGSGSGTDFTLTISSLQAEDVAVYYCFQGSHVPNTFGGGTKVEIKGS

SEQ ID NO: 2079 - protein, 117 aa, synthetic construct; identical to SEQ ID NO: 32
  REGION 1..117: note = Description of Artificial Sequence: Synthetic polypeptide
  REGION 1..117: note = VH of XENP024378

SEQ ID NO: 2080 - protein, 114 aa, synthetic construct
  REGION 1..114: note = Description of Artificial Sequence: Synthetic polypeptide
  REGION 1..114: note = VL of XENP024378
DVLMTQSPDSLPVTPGEPATINCKSSQSIVHSNGNTYLEWYQQKPGQSPKLLIYKVSNRFSGVPDRFSGSGSGTDFTLTISSLQAEDVAVYYCFQGSHVPNTFGGGTKVEIKGS

SEQ ID NO: 2081 - protein, 5 aa, synthetic construct
  REGION 1..5: note = Description of Artificial Sequence: Synthetic peptide
  REGION 1..5: note = XENP024378 vhCDR1
HYGMN

SEQ ID NO: 2082 - protein, 17 aa, synthetic construct
  REGION 1..17: note = Description of Artificial Sequence: Synthetic peptide
  REGION 1..17: note = XENP024378 vhCDR2
WINTYTGEPTYADGFTG

SEQ ID NO: 2083 - protein, 8 aa, synthetic construct
  REGION 1..8: note = Description of Artificial Sequence: Synthetic peptide
  REGION 1..8: note = XENP024378 vhCDR3
DYYGSSPY

SEQ ID NO: 2084 - protein, 16 aa, synthetic construct
  REGION 1..16: note = Description of Artificial Sequence: Synthetic peptide
  REGION 1..16: note = XENP024378 vlCDR1
KSSQSIVHSNGNTYLE

SEQ ID NO: 2085 - protein, 7 aa, synthetic construct
  REGION 1..7: note = Description of Artificial Sequence: Synthetic peptide
  REGION 1..7: note = XENP024378 vlCDR2
KVSNRFS

SEQ ID NO: 2086 - protein, 9 aa, synthetic construct
  REGION 1..9: note = Description of Artificial Sequence: Synthetic peptide
  REGION 1..9: note = XENP024378 vlCDR3
FQGSHVPNT

SEQ ID NO: 2087 - protein, 251 aa, synthetic construct
  REGION 1..251: note = Description of Artificial Sequence: Synthetic polypeptide
  REGION 1..251: note = XENP024379 1C11_H3_L3.129_scFv
QIQLVQSGSELKKPGASVKVSCKASGYTFTHYGMNWVRQAPGQGLEWMGWINTYTGEPTYADGFTGRFVFSLDTSVSTAYLQISSLKAEDTAVYFCARDYYGSSPYWGQGTLVTVSSGKPGSGKPGSGKPGSGKPGSDVLMTQSPDSLAVSLGERATINCKSSQSIVHSNGNTYLEWYQQKPGQSPKLLIYKVSNRFSGVPDRFSGSGSGTDFTLTINSLQAEDAATYYCHQGSHVPNTFGGGTKVEIKGS

SEQ ID NO: 2088 - protein, 117 aa, synthetic construct; identical to SEQ ID NO: 32
  REGION 1..117: note = Description of Artificial Sequence: Synthetic polypeptide
  REGION 1..117: note = VH of XENP024379

SEQ ID NO: 2089 - protein, 114 aa, synthetic construct
  REGION 1..114: note = Description of Artificial Sequence: Synthetic polypeptide
  REGION 1..114: note = VL of XENP024379
DVLMTQSPDSLAVSLGERATINCKSSQSIVHSNGNTYLEWYQQKPGQSPKLLIYKVSNRFSGVPDRFSGSGSGTDFTLTINSLQAEDAATYYCHQGSHVPNTFGGGTKVEIKGS

SEQ ID NO: 2090 - protein, 5 aa, synthetic construct
  REGION 1..5: note = Description of Artificial Sequence: Synthetic peptide
  REGION 1..5: note = XENP024379 vhCDR1
HYGMN

SEQ ID NO: 2091 - protein, 17 aa, synthetic construct
  REGION 1..17: note = Description of Artificial Sequence: Synthetic peptide
  REGION 1..17: note = XENP024379 vhCDR2
WINTYTGEPTYADGFTG

SEQ ID NO: 2092 - protein, 8 aa, synthetic construct
  REGION 1..8: note = Description of Artificial Sequence: Synthetic peptide
  REGION 1..8: note = XENP024379 vhCDR3
DYYGSSPY

SEQ ID NO: 2093 - protein, 16 aa, synthetic construct
  REGION 1..16: note = Description of Artificial Sequence: Synthetic peptide
  REGION 1..16: note = XENP024379 vlCDR1
KSSQSIVHSNGNTYLE

SEQ ID NO: 2094 - protein, 7 aa, synthetic construct
  REGION 1..7: note = Description of Artificial Sequence: Synthetic peptide
  REGION 1..7: note = XENP024379 vlCDR2
KVSNRFS

SEQ ID NO: 2095 - protein, 9 aa, synthetic construct
  REGION 1..9: note = Description of Artificial Sequence: Synthetic peptide
  REGION 1..9: note = XENP024379 vlCDR3
HQGSHVPNT

SEQ ID NO: 2096 - protein, 251 aa, synthetic construct
  REGION 1..251: note = Description of Artificial Sequence: Synthetic polypeptide
  REGION 1..251: note = XENP024380 1C11_H3.176_L3.92_scFv
QIQLVQSGPELKKPGASVKVSCKASGYTFTHYGMNWVKQAPGQGLEWMGWINTNTGEPTYADKFTGRVVFSLDTSQSTIYLQISSLKAEDTAVYYCARDYYGSSPYWGQGTLVTVSSGKPGSGKPGSGKPGSGKPGSDIVMTQSPDSLAVSLGERVTINCKASQSIVHSNGNTYLEWYQQKPGQPPKLLIYKVSNRFTGVPDRFSGSGSGTDFTLTISSLQAEDVAVYYCFQGSHVPNTFGGGTKVEIKGS

SEQ ID NO: 2097 - protein, 117 aa, synthetic construct
  REGION 1..117: note = Description of Artificial Sequence: Synthetic polypeptide
  REGION 1..117: note = VH of XENP024380
QIQLVQSGPELKKPGASVKVSCKASGYTFTHYGMNWVKQAPGQGLEWMGWINTNTGEPTYADKFTGRVVFSLDTSQSTIYLQISSLKAEDTAVYYCARDYYGSSPYWGQGTLVTVSS

SEQ ID NO: 2098 - protein, 114 aa, synthetic construct; identical to SEQ ID NO: 2053
  REGION 1..114: note = Description of Artificial Sequence: Synthetic polypeptide
  REGION 1..114: note = VL of XENP024380

SEQ ID NO: 2099 - protein, 5 aa, synthetic construct
  REGION 1..5: note = Description of Artificial Sequence: Synthetic peptide
  REGION 1..5: note = XENP024380 vhCDR1
HYGMN

SEQ ID NO: 2100 - protein, 17 aa, synthetic construct
  REGION 1..17: note = Description of Artificial Sequence: Synthetic peptide
  REGION 1..17: note = XENP024380 vhCDR2
WINTNTGEPTYADKFTG

SEQ ID NO: 2101 - protein, 8 aa, synthetic construct
  REGION 1..8: note = Description of Artificial Sequence: Synthetic peptide
  REGION 1..8: note = XENP024380 vhCDR3
DYYGSSPY

SEQ ID NO: 2102 - protein, 16 aa, synthetic construct
  REGION 1..16: note = Description of Artificial Sequence: Synthetic peptide
  REGION 1..16: note = XENP024380 vlCDR1
KASQSIVHSNGNTYLE

SEQ ID NO: 2103 - protein, 7 aa, synthetic construct
  REGION 1..7: note = Description of Artificial Sequence: Synthetic peptide
  REGION 1..7: note = XENP024380 vlCDR2
KVSNRFT

SEQ ID NO: 2104 - protein, 9 aa, synthetic construct
  REGION 1..9: note = Description of Artificial Sequence: Synthetic peptide
  REGION 1..9: note = XENP024380 vlCDR3
FQGSHVPNT

SEQ ID NO: 2105 - protein, 251 aa, synthetic construct
  REGION 1..251: note = Description of Artificial Sequence: Synthetic polypeptide
  REGION 1..251: note = XENP024381 1C11_H3.176_L3.94_scFv
QIQLVQSGPELKKPGASVKVSCKASGYTFTHYGMNWVKQAPGQGLEWMGWINTNTGEPTYADKFTGRVVFSLDTSQSTIYLQISSLKAEDTAVYYCARDYYGSSPYWGQGTLVTVSSGKPGSGKPGSGKPGSGKPGSDILMTQSPDSLAVSLGERATINCKSSQSIVHSNGNTYLEWYQQKPGQSPKLLIYKVSNRFTGVPDRFSGSGSGTDFTLTISSVQAEDAATYYCFQGSHVPNTFGQGTKVEIKGS

SEQ ID NO: 2106 - protein, 117 aa, synthetic construct; identical to SEQ ID NO: 2097
  REGION 1..117: note = Description of Artificial Sequence: Synthetic polypeptide
  REGION 1..117: note = VH of XENP024381

SEQ ID NO: 2107 - protein, 114 aa, synthetic construct; identical to SEQ ID NO: 2062
  REGION 1..114: note = Description of Artificial Sequence: Synthetic polypeptide
  REGION 1..114: note = VL of XENP024381

SEQ ID NO: 2108 - protein, 5 aa, synthetic construct
  REGION 1..5: note = Description of Artificial Sequence: Synthetic peptide
  REGION 1..5: note = XENP024381 vhCDR1
HYGMN

SEQ ID NO: 2109 - protein, 17 aa, synthetic construct
  REGION 1..17: note = Description of Artificial Sequence: Synthetic peptide
  REGION 1..17: note = XENP024381 vhCDR2
WINTNTGEPTYADKFTG

SEQ ID NO: 2110 - protein, 8 aa, synthetic construct
  REGION 1..8: note = Description of Artificial Sequence: Synthetic peptide
  REGION 1..8: note = XENP024381 vhCDR3
DYYGSSPY

SEQ ID NO: 2111 - protein, 16 aa, synthetic construct
  REGION 1..16: note = Description of Artificial Sequence: Synthetic peptide
  REGION 1..16: note = XENP024381 vlCDR1
KSSQSIVHSNGNTYLE

SEQ ID NO: 2112 - protein, 7 aa, synthetic construct
  REGION 1..7: note = Description of Artificial Sequence: Synthetic peptide
  REGION 1..7: note = XENP024381 vlCDR2
KVSNRFT

SEQ ID NO: 2113 - protein, 9 aa, synthetic construct
  REGION 1..9: note = Description of Artificial Sequence: Synthetic peptide
  REGION 1..9: note = XENP024381 vlCDR3
FQGSHVPNT

SEQ ID NO: 2114 - protein, 251 aa, synthetic construct
  REGION 1..251: note = Description of Artificial Sequence: Synthetic polypeptide
  REGION 1..251: note = XENP024382 1C11_H3.176_L3.96_scFv
QIQLVQSGPELKKPGASVKVSCKASGYTFTHYGMNWVKQAPGQGLEWMGWINTNTGEPTYADKFTGRVVFSLDTSQSTIYLQISSLKAEDTAVYYCARDYYGSSPYWGQGTLVTVSSGKPGSGKPGSGKPGSGKPGSDIVMTQSPDSLAVSLGERATINCKASQSIVHSNGNTYLEWYQQKPGQPPKLLIYKVSNRFTGVPDRFSGSGSGTDFTLTISSVQAEDAATYYCFQGSHVPNTFGQGTKVEIKGS

SEQ ID NO: 2115 - protein, 117 aa, synthetic construct; identical to SEQ ID NO: 2097
  REGION 1..117: note = Description of Artificial Sequence: Synthetic polypeptide
  REGION 1..117: note = VH of XENP024382

SEQ ID NO: 2116 - protein, 114 aa, synthetic construct; identical to SEQ ID NO: 2071
  REGION 1..114: note = Description of Artificial Sequence: Synthetic polypeptide
  REGION 1..114: note = VL of XENP024382

SEQ ID NO: 2117 - protein, 5 aa, synthetic construct
  REGION 1..5: note = Description of Artificial Sequence: Synthetic peptide
  REGION 1..5: note = XENP024382 vhCDR1
HYGMN

SEQ ID NO: 2118 - protein, 17 aa, synthetic construct
  REGION 1..17: note = Description of Artificial Sequence: Synthetic peptide
  REGION 1..17: note = XENP024382 vhCDR2
WINTNTGEPTYADKFTG

SEQ ID NO: 2119 - protein, 8 aa, synthetic construct
  REGION 1..8: note = Description of Artificial Sequence: Synthetic peptide
  REGION 1..8: note = XENP024382 vhCDR3
DYYGSSPY

SEQ ID NO: 2120 - protein, 16 aa, synthetic construct
  REGION 1..16: note = Description of Artificial Sequence: Synthetic peptide
  REGION 1..16: note = XENP024382 vlCDR1
KASQSIVHSNGNTYLE

SEQ ID NO: 2121 - protein, 7 aa, synthetic construct
  REGION 1..7: note = Description of Artificial Sequence: Synthetic peptide
  REGION 1..7: note = XENP024382 vlCDR2
KVSNRFT

SEQ ID NO: 2122 - protein, 9 aa, synthetic construct
  REGION 1..9: note = Description of Artificial Sequence: Synthetic peptide
  REGION 1..9: note = XENP024382 vlCDR3
FQGSHVPNT

SEQ ID NO: 2123 - protein, 251 aa, synthetic construct
  REGION 1..251: note = Description of Artificial Sequence: Synthetic polypeptide
  REGION 1..251: note = XENP024414 1C11_H3_L3.133_scFv
QIQLVQSGSELKKPGASVKVSCKASGYTFTHYGMNWVRQAPGQGLEWMGWINTYTGEPTYADGFTGRFVFSLDTSVSTAYLQISSLKAEDTAVYFCARDYYGSSPYWGQGTLVTVSSGKPGSGKPGSGKPGSGKPGSDVVMTQSPDSLAVSLGERVTINCKASQSIVHSNGNTYLEWYQQKPGQPPKLLIYKVSNRFSGVPDRFSGSGSGTDFTLTISSVQAEDAATYYCFQGSHVPNTFGQGTKVEIKGS

SEQ ID NO: 2124 - protein, 117 aa, synthetic construct; identical to SEQ ID NO: 32
  REGION 1..117: note = Description of Artificial Sequence: Synthetic polypeptide
  REGION 1..117: note = VH of XENP024414

SEQ ID NO: 2125 - protein, 114 aa, synthetic construct
  REGION 1..114: note = Description of Artificial Sequence: Synthetic polypeptide
  REGION 1..114: note = VL of XENP024414
DVVMTQSPDSLAVSLGERVTINCKASQSIVHSNGNTYLEWYQQKPGQPPKLLIYKVSNRFSGVPDRFSGSGSGTDFTLTISSVQAEDAATYYCFQGSHVPNTFGQGTKVEIKGS

SEQ ID NO: 2126 - protein, 5 aa, synthetic construct
  REGION 1..5: note = Description of Artificial Sequence: Synthetic peptide
  REGION 1..5: note = XENP024414 vhCDR1
HYGMN

SEQ ID NO: 2127 - protein, 17 aa, synthetic construct
  REGION 1..17: note = Description of Artificial Sequence: Synthetic peptide
  REGION 1..17: note = XENP024414 vhCDR2
WINTYTGEPTYADGFTG

SEQ ID NO: 2128 - protein, 8 aa, synthetic construct
  REGION 1..8: note = Description of Artificial Sequence: Synthetic peptide
  REGION 1..8: note = XENP024414 vhCDR3
DYYGSSPY

SEQ ID NO: 2129 - protein, 16 aa, synthetic construct
  REGION 1..16: note = Description of Artificial Sequence: Synthetic peptide
  REGION 1..16: note = XENP024414 vlCDR1
KASQSIVHSNGNTYLE

SEQ ID NO: 2130 - protein, 7 aa, synthetic construct
  REGION 1..7: note = Description of Artificial Sequence: Synthetic peptide
  REGION 1..7: note = XENP024414 vlCDR2
KVSNRFS

SEQ ID NO: 2131 - protein, 9 aa, synthetic construct
  REGION 1..9: note = Description of Artificial Sequence: Synthetic peptide
  REGION 1..9: note = XENP024414 vlCDR3
FQGSHVPNT

SEQ ID NO: 2132 - protein, 251 aa, synthetic construct
  REGION 1..251: note = Description of Artificial Sequence: Synthetic polypeptide
  REGION 1..251: note = XENP024415 1C11_H3_L3.134_scFv
QIQLVQSGSELKKPGASVKVSCKASGYTFTHYGMNWVRQAPGQGLEWMGWINTYTGEPTYADGFTGRFVFSLDTSVSTAYLQISSLKAEDTAVYFCARDYYGSSPYWGQGTLVTVSSGKPGSGKPGSGKPGSGKPGSDVVMTQSPDSLAVSLGERVTINCKASQSIVHSNGNTYLEWYQQKPGQPPKLLIYKVSNRFSGVPDRFSGSGSGTDFTLTISSVEAEDAATYYCFQGSHVPNTFGQGTKVEIKGS

SEQ ID NO: 2133 - protein, 117 aa, synthetic construct; identical to SEQ ID NO: 32
  REGION 1..117: note = Description of Artificial Sequence: Synthetic polypeptide
  REGION 1..117: note = VH of XENP024415

SEQ ID NO: 2134 - protein, 114 aa, synthetic construct
  REGION 1..114: note = Description of Artificial Sequence: Synthetic polypeptide
  REGION 1..114: note = VL of XENP024415
DVVMTQSPDSLAVSLGERVTINCKASQSIVHSNGNTYLEWYQQKPGQPPKLLIYKVSNRFSGVPDRFSGSGSGTDFTLTISSVEAEDAATYYCFQGSHVPNTFGQGTKVEIKGS

SEQ ID NO: 2135 - protein, 5 aa, synthetic construct
  REGION 1..5: note = Description of Artificial Sequence: Synthetic peptide
  REGION 1..5: note = XENP024415 vhCDR1
HYGMN

SEQ ID NO: 2136 - protein, 17 aa, synthetic construct
  REGION 1..17: note = Description of Artificial Sequence: Synthetic peptide
  REGION 1..17: note = XENP024415 vhCDR2
WINTYTGEPTYADGFTG

SEQ ID NO: 2137 - protein, 8 aa, synthetic construct
  REGION 1..8: note = Description of Artificial Sequence: Synthetic peptide
  REGION 1..8: note = XENP024415 vhCDR3
DYYGSSPY

SEQ ID NO: 2138 - protein, 16 aa, synthetic construct
  REGION 1..16: note = Description of Artificial Sequence: Synthetic peptide
  REGION 1..16: note = XENP024415 vlCDR1
KASQSIVHSNGNTYLE

SEQ ID NO: 2139 - protein, 7 aa, synthetic construct
  REGION 1..7: note = Description of Artificial Sequence: Synthetic peptide
  REGION 1..7: note = XENP024415 vlCDR2
KVSNRFS

SEQ ID NO: 2140 - protein, 9 aa, synthetic construct
  REGION 1..9: note = Description of Artificial Sequence: Synthetic peptide
  REGION 1..9: note = XENP024415 vlCDR3
FQGSHVPNT

SEQ ID NO: 2141 - protein, 251 aa, synthetic construct
  REGION 1..251: note = Description of Artificial Sequence: Synthetic polypeptide
  REGION 1..251: note = XENP024416 1C11_H3_L3.135_scFv
QIQLVQSGSELKKPGASVKVSCKASGYTFTHYGMNWVRQAPGQGLEWMGWINTYTGEPTYADGFTGRFVFSLDTSVSTAYLQISSLKAEDTAVYFCARDYYGSSPYWGQGTLVTVSSGKPGSGKPGSGKPGSGKPGSDVVMTQSPDSLAVSLGERVTINCKASQSIVHSNGNTYLEWYQQKPGQPPKLLIYKVSNRFSGVPDRFSGSGSGTDFTLTISSMQAEDAATYYCFQGSHVPNTFGQGTKVEIKGS

SEQ ID NO: 2142 - protein, 117 aa, synthetic construct; identical to SEQ ID NO: 32
  REGION 1..117: note = Description of Artificial Sequence: Synthetic polypeptide
  REGION 1..117: note = VH of XENP024416

SEQ ID NO: 2143 - protein, 114 aa, synthetic construct
  REGION 1..114: note = Description of Artificial Sequence: Synthetic polypeptide
  REGION 1..114: note = VL of XENP024416
DVVMTQSPDSLAVSLGERVTINCKASQSIVHSNGNTYLEWYQQKPGQPPKLLIYKVSNRFSGVPDRFSGSGSGTDFTLTISSMQAEDAATYYCFQGSHVPNTFGQGTKVEIKGS

SEQ ID NO: 2144 - protein, 5 aa, synthetic construct
  REGION 1..5: note = Description of Artificial Sequence: Synthetic peptide
  REGION 1..5: note = XENP024416 vhCDR1
HYGMN

SEQ ID NO: 2145 - protein, 17 aa, synthetic construct
  REGION 1..17: note = Description of Artificial Sequence: Synthetic peptide
  REGION 1..17: note = XENP024416 vhCDR2
WINTYTGEPTYADGFTG

SEQ ID NO: 2146 - protein, 8 aa, synthetic construct
  REGION 1..8: note = Description of Artificial Sequence: Synthetic peptide
  REGION 1..8: note = XENP024416 vhCDR3
DYYGSSPY

SEQ ID NO: 2147 - protein, 16 aa, synthetic construct
  REGION 1..16: note = Description of Artificial Sequence: Synthetic peptide
  REGION 1..16: note = XENP024416 vlCDR1
KASQSIVHSNGNTYLE

SEQ ID NO: 2148 - protein, 7 aa, synthetic construct
  REGION 1..7: note = Description of Artificial Sequence: Synthetic peptide
  REGION 1..7: note = XENP024416 vlCDR2
KVSNRFS

SEQ ID NO: 2149 - protein, 9 aa, synthetic construct
  REGION 1..9: note = Description of Artificial Sequence: Synthetic peptide
  REGION 1..9: note = XENP024416 vlCDR3
FQGSHVPNT

SEQ ID NO: 2150 - protein, 251 aa, synthetic construct
  REGION 1..251: note = Description of Artificial Sequence: Synthetic polypeptide
  REGION 1..251: note = XENP024417 1C11_H3_L3.136_scFv
QIQLVQSGSELKKPGASVKVSCKASGYTFTHYGMNWVRQAPGQGLEWMGWINTYTGEPTYADGFTGRFVFSLDTSVSTAYLQISSLKAEDTAVYFCARDYYGSSPYWGQGTLVTVSSGKPGSGKPGSGKPGSGKPGSDVVMTQSPDSLAVSLGERITINCKASQSIVHSNGNTYLEWYQQKPGQPPKLLIYKVSNRFSGVPDRFSGSGSGTDFTLTISSMQAEDAATYYCFQGSHVPNTFGQGTKVEIKGS

SEQ ID NO: 2151 - protein, 117 aa, synthetic construct; identical to SEQ ID NO: 32
  REGION 1..117: note = Description of Artificial Sequence: Synthetic polypeptide
  REGION 1..117: note = VH of XENP024417

SEQ ID NO: 2152 - protein, 114 aa, synthetic construct
  REGION 1..114: note = Description of Artificial Sequence: Synthetic polypeptide
  REGION 1..114: note = VL of XENP024417
DVVMTQSPDSLAVSLGERITINCKASQSIVHSNGNTYLEWYQQKPGQPPKLLIYKVSNRFSGVPDRFSGSGSGTDFTLTISSMQAEDAATYYCFQGSHVPNTFGQGTKVEIKGS

SEQ ID NO: 2153 - protein, 5 aa, synthetic construct
  REGION 1..5: note = Description of Artificial Sequence: Synthetic peptide
  REGION 1..5: note = XENP024417 vhCDR1
HYGMN

SEQ ID NO: 2154 - protein, 17 aa, synthetic construct
  REGION 1..17: note = Description of Artificial Sequence: Synthetic peptide
  REGION 1..17: note = XENP024417 vhCDR2
WINTYTGEPTYADGFTG

SEQ ID NO: 2155 - protein, 8 aa, synthetic construct
  REGION 1..8: note = Description of Artificial Sequence: Synthetic peptide
  REGION 1..8: note = XENP024417 vhCDR3
DYYGSSPY

SEQ ID NO: 2156 - protein, 16 aa, synthetic construct
  REGION 1..16: note = Description of Artificial Sequence: Synthetic peptide
  REGION 1..16: note = XENP024417 vlCDR1
KASQSIVHSNGNTYLE

SEQ ID NO: 2157 - protein, 7 aa, synthetic construct
  REGION 1..7: note = Description of Artificial Sequence: Synthetic peptide
  REGION 1..7: note = XENP024417 vlCDR2
KVSNRFS

SEQ ID NO: 2158 - protein, 9 aa, synthetic construct
  REGION 1..9: note = Description of Artificial Sequence: Synthetic peptide
  REGION 1..9: note = XENP024417 vlCDR3
FQGSHVPNT

SEQ ID NO: 2159 - protein, 251 aa, synthetic construct
  REGION 1..251: note = Description of Artificial Sequence: Synthetic polypeptide
  REGION 1..251: note = XENP024418 1C11_H3_L3.137_scFv
QIQLVQSGSELKKPGASVKVSCKASGYTFTHYGMNWVRQAPGQGLEWMGWINTYTGEPTYADGFTGRFVFSLDTSVSTAYLQISSLKAEDTAVYFCARDYYGSSPYWGQGTLVTVSSGKPGSGKPGSGKPGSGKPGSDVVMTQSPDSLAVSLGERITINCKASQSIVHSNGNTYLEWYQQKPGQPPKLLIYKVSNRFSGVPDRFSGSGSGTDFTLTISSVQAEDAATYYCFQGSHVPNTFGQGTKVEIKGS

SEQ ID NO: 2160 - protein, 117 aa, synthetic construct; identical to SEQ ID NO: 32
  REGION 1..117: note = Description of Artificial Sequence: Synthetic polypeptide
  REGION 1..117: note = VH of XENP024418

SEQ ID NO: 2161 - protein, 114 aa, synthetic construct
  REGION 1..114: note = Description of Artificial Sequence: Synthetic polypeptide
  REGION 1..114: note = VL of XENP024418
DVVMTQSPDSLAVSLGERITINCKASQSIVHSNGNTYLEWYQQKPGQPPKLLIYKVSNRFSGVPDRFSGSGSGTDFTLTISSVQAEDAATYYCFQGSHVPNTFGQGTKVEIKGS

SEQ ID NO: 2162 - protein, 5 aa, synthetic construct
  REGION 1..5: note = Description of Artificial Sequence: Synthetic peptide
  REGION 1..5: note = XENP024418 vhCDR1
HYGMN

SEQ ID NO: 2163 - protein, 17 aa, synthetic construct
  REGION 1..17: note = Description of Artificial Sequence: Synthetic peptide
  REGION 1..17: note = XENP024418 vhCDR2
WINTYTGEPTYADGFTG

SEQ ID NO: 2164 - protein, 8 aa, synthetic construct
  REGION 1..8: note = Description of Artificial Sequence: Synthetic peptide
  REGION 1..8: note = XENP024418 vhCDR3
DYYGSSPY

SEQ ID NO: 2165 - protein, 16 aa, synthetic construct
  REGION 1..16: note = Description of Artificial Sequence: Synthetic peptide
  REGION 1..16: note = XENP024418 vlCDR1
KASQSIVHSNGNTYLE

SEQ ID NO: 2166 - protein, 7 aa, synthetic construct
  REGION 1..7: note = Description of Artificial Sequence: Synthetic peptide
  REGION 1..7: note = XENP024418 vlCDR2
KVSNRFS

SEQ ID NO: 2167 - protein, 9 aa, synthetic construct
  REGION 1..9: note = Description of Artificial Sequence: Synthetic peptide
  REGION 1..9: note = XENP024418 vlCDR3
FQGSHVPNT

SEQ ID NO: 2168 - protein, 251 aa, synthetic construct
  REGION 1..251: note = Description of Artificial Sequence: Synthetic polypeptide
  REGION 1..251: note = XENP024419 1C11_H3_L3.138_scFv
QIQLVQSGSELKKPGASVKVSCKASGYTFTHYGMNWVRQAPGQGLEWMGWINTYTGEPTYADGFTGRFVFSLDTSVSTAYLQISSLKAEDTAVYFCARDYYGSSPYWGQGTLVTVSSGKPGSGKPGSGKPGSGKPGSDVVMTQSPDSLAVSLGERITINCKASQSIVHSNGNTYLEWYQQKPGQPPKLLIYKVSNRFSGVPDRFSGSGSGTDFTLTISSVEAEDAATYYCFQGSHVPNTFGQGTKVEIKGS

SEQ ID NO: 2169 - protein, 117 aa, synthetic construct; identical to SEQ ID NO: 32
  REGION 1..117: note = Description of Artificial Sequence: Synthetic polypeptide
  REGION 1..117: note = VH of XENP024419

SEQ ID NO: 2170 - protein, 114 aa, synthetic construct
  REGION 1..114: note = Description of Artificial Sequence: Synthetic polypeptide
  REGION 1..114: note = VL of XENP024419
DVVMTQSPDSLAVSLGERITINCKASQSIVHSNGNTYLEWYQQKPGQPPKLLIYKVSNRFSGVPDRFSGSGSGTDFTLTISSVEAEDAATYYCFQGSHVPNTFGQGTKVEIKGS

SEQ ID NO: 2171 - protein, 5 aa, synthetic construct
  REGION 1..5: note = Description of Artificial Sequence: Synthetic peptide
  REGION 1..5: note = XENP024419 vhCDR1
HYGMN

SEQ ID NO: 2172 - protein, 17 aa, synthetic construct
  REGION 1..17: note = Description of Artificial Sequence: Synthetic peptide
  REGION 1..17: note = XENP024419 vhCDR2
WINTYTGEPTYADGFTG

SEQ ID NO: 2173 - protein, 8 aa, synthetic construct
  REGION 1..8: note = Description of Artificial Sequence: Synthetic peptide
  REGION 1..8: note = XENP024419 vhCDR3
DYYGSSPY

SEQ ID NO: 2174 - protein, 16 aa, synthetic construct
  REGION 1..16: note = Description of Artificial Sequence: Synthetic peptide
  REGION 1..16: note = XENP024419 vlCDR1
KASQSIVHSNGNTYLE

SEQ ID NO: 2175 - protein, 7 aa, synthetic construct
  REGION 1..7: note = Description of Artificial Sequence: Synthetic peptide
  REGION 1..7: note = XENP024419 vlCDR2
KVSNRFS

SEQ ID NO: 2176 - protein, 9 aa, synthetic construct
  REGION 1..9: note = Description of Artificial Sequence: Synthetic peptide
  REGION 1..9: note = XENP024419 vlCDR3
FQGSHVPNT

SEQ ID NO: 2177 - protein, 251 aa, synthetic construct
  REGION 1..251: note = Description of Artificial Sequence: Synthetic polypeptide
  REGION 1..251: note = XENP024420 1C11_H3_L3.139_scFv
QIQLVQSGSELKKPGASVKVSCKASGYTFTHYGMNWVRQAPGQGLEWMGWINTYTGEPTYADGFTGRFVFSLDTSVSTAYLQISSLKAEDTAVYFCARDYYGSSPYWGQGTLVTVSSGKPGSGKPGSGKPGSGKPGSDVVMTQSPDSLAVSLGERATINCKASQSIVHSNGNTYLEWYQQKPGQPPKLLIYKVSNRFSGIPDRFSGSGSGTDFTLTISSVQAEDAATYYCFQGSHVPNTFGQGTKVEIKGS

SEQ ID NO: 2178 - protein, 117 aa, synthetic construct; identical to SEQ ID NO: 32
  REGION 1..117: note = Description of Artificial Sequence: Synthetic polypeptide
  REGION 1..117: note = VH of XENP024420

SEQ ID NO: 2179 - protein, 114 aa, synthetic construct
  REGION 1..114: note = Description of Artificial Sequence: Synthetic polypeptide
  REGION 1..114: note = VL of XENP024420
DVVMTQSPDSLAVSLGERATINCKASQSIVHSNGNTYLEWYQQKPGQPPKLLIYKVSNRFSGIPDRFSGSGSGTDFTLTISSVQAEDAATYYCFQGSHVPNTFGQGTKVEIKGS

SEQ ID NO: 2180 - protein, 5 aa, synthetic construct
  REGION 1..5: note = Description of Artificial Sequence: Synthetic peptide
  REGION 1..5: note = XENP024420 vhCDR1
HYGMN

SEQ ID NO: 2181 - protein, 17 aa, synthetic construct
  REGION 1..17: note = Description of Artificial Sequence: Synthetic peptide
  REGION 1..17: note = XENP024420 vhCDR2
WINTYTGEPTYADGFTG

SEQ ID NO: 2182 - protein, 8 aa, synthetic construct
  REGION 1..8: note = Description of Artificial Sequence: Synthetic peptide
  REGION 1..8: note = XENP024420 vhCDR3
DYYGSSPY

SEQ ID NO: 2183 - protein, 16 aa, synthetic construct
  REGION 1..16: note = Description of Artificial Sequence: Synthetic peptide
  REGION 1..16: note = XENP024420 vlCDR1
KASQSIVHSNGNTYLE

SEQ ID NO: 2184 - protein, 7 aa, synthetic construct
  REGION 1..7: note = Description of Artificial Sequence: Synthetic peptide
  REGION 1..7: note = XENP024420 vlCDR2
KVSNRFS

SEQ ID NO: 2185 - protein, 9 aa, synthetic construct
  REGION 1..9: note = Description of Artificial Sequence: Synthetic peptide
  REGION 1..9: note = XENP024420 vlCDR3
FQGSHVPNT

SEQ ID NO: 2186 - protein, 251 aa, synthetic construct
  REGION 1..251: note = Description of Artificial Sequence: Synthetic polypeptide
  REGION 1..251: note = XENP024421 1C11_H3_L3.140_scFv
QIQLVQSGSELKKPGASVKVSCKASGYTFTHYGMNWVRQAPGQGLEWMGWINTYTGEPTYADGFTGRFVFSLDTSVSTAYLQISSLKAEDTAVYFCARDYYGSSPYWGQGTLVTVSSGKPGSGKPGSGKPGSGKPGSDIVMTQSPDSLAVSLGERATINCKASQSIVHSNGNTYLEWYQQKPGQSPKLLIYKVSNRFSGVPDRFSGSGSGTDFTLTISSVEAEDVATYYCFQGSHVPNTFGQGTKVEIKGS

SEQ ID NO: 2187 - protein, 117 aa, synthetic construct; identical to SEQ ID NO: 32
  REGION 1..117: note = Description of Artificial Sequence: Synthetic polypeptide
  REGION 1..117: note = VH of XENP024421

SEQ ID NO: 2188 - protein, 114 aa, synthetic construct
  REGION 1..114: note = Description of Artificial Sequence: Synthetic polypeptide
  REGION 1..114: note = VL of XENP024421
DIVMTQSPDSLAVSLGERATINCKASQSIVHSNGNTYLEWYQQKPGQSPKLLIYKVSNRFSGVPDRFSGSGSGTDFTLTISSVEAEDVATYYCFQGSHVPNTFGQGTKVEIKGS

SEQ ID NO: 2189 - protein, 5 aa, synthetic construct
  REGION 1..5: note = Description of Artificial Sequence: Synthetic peptide
  REGION 1..5: note = XENP024421 vhCDR1
HYGMN

SEQ ID NO: 2190 - protein, 17 aa, synthetic construct
  REGION 1..17: note = Description of Artificial Sequence: Synthetic peptide
  REGION 1..17: note = XENP024421 vhCDR2
WINTYTGEPTYADGFTG

SEQ ID NO: 2191 - protein, 8 aa, synthetic construct
  REGION 1..8: note = Description of Artificial Sequence: Synthetic peptide
  REGION 1..8: note = XENP024421 vhCDR3
DYYGSSPY

SEQ ID NO: 2192 - protein, 16 aa, synthetic construct
  REGION 1..16: note = Description of Artificial Sequence: Synthetic peptide
  REGION 1..16: note = XENP024421 vlCDR1
KASQSIVHSNGNTYLE

SEQ ID NO: 2193 - protein, 7 aa, synthetic construct
  REGION 1..7: note = Description of Artificial Sequence: Synthetic peptide
  REGION 1..7: note = XENP024421 vlCDR2
KVSNRFS

SEQ ID NO: 2194 - protein, 9 aa, synthetic construct
  REGION 1..9: note = Description of Artificial Sequence: Synthetic peptide
  REGION 1..9: note = XENP024421 vlCDR3
FQGSHVPNT

SEQ ID NO: 2195 - protein, 251 aa, synthetic construct
  REGION 1..251: note = Description of Artificial Sequence: Synthetic polypeptide
  REGION 1..251: note = XENP024422 1C11_H3_L3.141_scFv
QIQLVQSGSELKKPGASVKVSCKASGYTFTHYGMNWVRQAPGQGLEWMGWINTYTGEPTYADGFTGRFVFSLDTSVSTAYLQISSLKAEDTAVYFCARDYYGSSPYWGQGTLVTVSSGKPGSGKPGSGKPGSGKPGSDIVMTQSPDSLAVSLGERATINCKASQSIVHSNGNTYLEWYQQKPGQPPKLLIYKVSNRFSGVPDRFSGSGSGTDFTLTISSVEAEDVATYYCFQGSHVPNTFGQGTKVEIKGS

SEQ ID NO: 2196 - protein, 117 aa, synthetic construct; identical to SEQ ID NO: 32
  REGION 1..117: note = Description of Artificial Sequence: Synthetic polypeptide
  REGION 1..117: note = VH of XENP024422

SEQ ID NO: 2197 - protein, 114 aa, synthetic construct
  REGION 1..114: note = Description of Artificial Sequence: Synthetic polypeptide
  REGION 1..114: note = VL of XENP024422
DIVMTQSPDSLAVSLGERATINCKASQSIVHSNGNTYLEWYQQKPGQPPKLLIYKVSNRFSGVPDRFSGSGSGTDFTLTISSVEAEDVATYYCFQGSHVPNTFGQGTKVEIKGS

SEQ ID NO: 2198 - protein, 5 aa, synthetic construct
  REGION 1..5: note = Description of Artificial Sequence: Synthetic peptide
  REGION 1..5: note = XENP024422 vhCDR1
HYGMN

SEQ ID NO: 2199 - protein, 17 aa, synthetic construct
  REGION 1..17: note = Description of Artificial Sequence: Synthetic peptide
  REGION 1..17: note = XENP024422 vhCDR2
WINTYTGEPTYADGFTG

SEQ ID NO: 2200 - protein, 8 aa, synthetic construct
  REGION 1..8: note = Description of Artificial Sequence: Synthetic peptide
  REGION 1..8: note = XENP024422 vhCDR3
DYYGSSPY

SEQ ID NO: 2201 - protein, 16 aa, synthetic construct
  REGION 1..16: note = Description of Artificial Sequence: Synthetic peptide
  REGION 1..16: note = XENP024422 vlCDR1
KASQSIVHSNGNTYLE

SEQ ID NO: 2202 - protein, 7 aa, synthetic construct
  REGION 1..7: note = Description of Artificial Sequence: Synthetic peptide
  REGION 1..7: note = XENP024422 vlCDR2
KVSNRFS

SEQ ID NO: 2203 - protein, 9 aa, synthetic construct
  REGION 1..9: note = Description of Artificial Sequence: Synthetic peptide
  REGION 1..9: note = XENP024422 vlCDR3
FQGSHVPNT

SEQ ID NO: 2204 - protein, 251 aa, synthetic construct
  REGION 1..251: note = Description of Artificial Sequence: Synthetic polypeptide
  REGION 1..251: note = XENP024423 1C11_H3_L3.142_scFv
QIQLVQSGSELKKPGASVKVSCKASGYTFTHYGMNWVRQAPGQGLEWMGWINTYTGEPTYADGFTGRFVFSLDTSVSTAYLQISSLKAEDTAVYFCARDYYGSSPYWGQGTLVTVSSGKPGSGKPGSGKPGSGKPGSDIVMTQSPDSLAVSLGERATINCKASQSIVHSNGNTYLEWYQQKPGQAPKLLIYKVSNRFSGVPDRFSGSGSGTDFTLTISSVEAEDVATYYCFQGSHVPNTFGQGTKVEIKGS

SEQ ID NO: 2205 - protein, 117 aa, synthetic construct; identical to SEQ ID NO: 32
  REGION 1..117: note = Description of Artificial Sequence: Synthetic polypeptide
  REGION 1..117: note = VH of XENP024423

SEQ ID NO: 2206 - protein, 114 aa, synthetic construct
  REGION 1..114: note = Description of Artificial Sequence: Synthetic polypeptide
  REGION 1..114: note = VL of XENP024423
DIVMTQSPDSLAVSLGERATINCKASQSIVHSNGNTYLEWYQQKPGQAPKLLIYKVSNRFSGVPDRFSGSGSGTDFTLTISSVEAEDVATYYCFQGSHVPNTFGQGTKVEIKGS

SEQ ID NO: 2207 - protein, 5 aa, synthetic construct
  REGION 1..5: note = Description of Artificial Sequence: Synthetic peptide
  REGION 1..5: note = XENP024423 vhCDR1
HYGMN

SEQ ID NO: 2208 - protein, 17 aa, synthetic construct
  REGION 1..17: note = Description of Artificial Sequence: Synthetic peptide
  REGION 1..17: note = XENP024423 vhCDR2
WINTYTGEPTYADGFTG

SEQ ID NO: 2209 - protein, 8 aa, synthetic construct
  REGION 1..8: note = Description of Artificial Sequence: Synthetic peptide
  REGION 1..8: note = XENP024423 vhCDR3
DYYGSSPY

SEQ ID NO: 2210 - protein, 16 aa, synthetic construct
  REGION 1..16: note = Description of Artificial Sequence: Synthetic peptide
  REGION 1..16: note = XENP024423 vlCDR1
KASQSIVHSNGNTYLE

SEQ ID NO: 2211 - protein, 7 aa, synthetic construct
  REGION 1..7: note = Description of Artificial Sequence: Synthetic peptide
  REGION 1..7: note = XENP024423 vlCDR2
KVSNRFS

SEQ ID NO: 2212 - protein, 9 aa, synthetic construct
  REGION 1..9: note = Description of Artificial Sequence: Synthetic peptide
  REGION 1..9: note = XENP024423 vlCDR3
FQGSHVPNT

SEQ ID NO: 2213 - protein, 251 aa, synthetic construct
  REGION 1..251: note = Description of Artificial Sequence: Synthetic polypeptide
  REGION 1..251: note = XENP024424 1C11_H3.176_L3_scFv
QIQLVQSGSELKKPGASVKVSCKASGYTFTHYGMNWVRQAPGQGLEWMGWINTYTGEPTYAPGFKGRFVFSLDTSVSTAYLQISSLKAEDTAVYFCARDYYGSSPYWGQGTLVTVSSGKPGSGKPGSGKPGSGKPGSDVLMTQSPDSLAVSLGERATINCKSSQSIVHSNGNTYLEWYQQKPGQSPKLLIYKVSNRFSGVPDRFSGSGSGTDFTLTISSLQAEDVAVYYCFQGSHVPNTFGGGTKVEIKGS

SEQ ID NO: 2214 - protein, 117 aa, synthetic construct
  REGION 1..117: note = Description of Artificial Sequence: Synthetic polypeptide
  REGION 1..117: note = VH of XENP024424
QIQLVQSGSELKKPGASVKVSCKASGYTFTHYGMNWVRQAPGQGLEWMGWINTYTGEPTYAPGFKGRFVFSLDTSVSTAYLQISSLKAEDTAVYFCARDYYGSSPYWGQGTLVTVSS

SEQ ID NO: 2215 - protein, 114 aa, synthetic construct; identical to SEQ ID NO: 649
  REGION 1..114: note = Description of Artificial Sequence: Synthetic polypeptide
  REGION 1..114: note = VL of XENP024424

SEQ ID NO: 2216 - protein, 5 aa, synthetic construct
  REGION 1..5: note = Description of Artificial Sequence: Synthetic peptide
  REGION 1..5: note = XENP024424 vhCDR1
HYGMN

SEQ ID NO: 2217 - protein, 17 aa, synthetic construct
  REGION 1..17: note = Description of Artificial Sequence: Synthetic peptide
  REGION 1..17: note = XENP024424 vhCDR2
WINTYTGEPTYAPGFKG

SEQ ID NO: 2218 - protein, 8 aa, synthetic construct
  REGION 1..8: note = Description of Artificial Sequence: Synthetic peptide
  REGION 1..8: note = XENP024424 vhCDR3
DYYGSSPY

SEQ ID NO: 2219 - protein, 16 aa, synthetic construct
  REGION 1..16: note = Description of Artificial Sequence: Synthetic peptide
  REGION 1..16: note = XENP024424 vlCDR1
KSSQSIVHSNGNTYLE

SEQ ID NO: 2220 - protein, 7 aa, synthetic construct
  REGION 1..7: note = Description of Artificial Sequence: Synthetic peptide
  REGION 1..7: note = XENP024424 vlCDR2
KVSNRFS

SEQ ID NO: 2221 - protein, 9 aa, synthetic construct
  REGION 1..9: note = Description of Artificial Sequence: Synthetic peptide
  REGION 1..9: note = XENP024424 vlCDR3
FQGSHVPNT

SEQ ID NO: 2222 - protein, 251 aa, synthetic construct
  REGION 1..251: note = Description of Artificial Sequence: Synthetic polypeptide
  REGION 1..251: note = XENP024425 1C11_H3.177_L3_scFv
QIQLVQSGSELKKPGASVKVSCKASGYTFTHYGMNWVRQAPGQGLEWMGWINTYTGEPTYAPKFTGRFVFSLDTSVSTAYLQISSLKAEDTAVYFCARDYYGSSPYWGQGTLVTVSSGKPGSGKPGSGKPGSGKPGSDVLMTQSPDSLAVSLGERATINCKSSQSIVHSNGNTYLEWYQQKPGQSPKLLIYKVSNRFSGVPDRFSGSGSGTDFTLTISSLQAEDVAVYYCFQGSHVPNTFGGGTKVEIKGS

SEQ ID NO: 2223 - protein, 117 aa, synthetic construct
  REGION 1..117: note = Description of Artificial Sequence: Synthetic polypeptide
  REGION 1..117: note = VH of XENP024425
QIQLVQSGSELKKPGASVKVSCKASGYTFTHYGMNWVRQAPGQGLEWMGWINTYTGEPTYAPKFTGRFVFSLDTSVSTAYLQISSLKAEDTAVYFCARDYYGSSPYWGQGTLVTVSS

SEQ ID NO: 2224 - protein, 114 aa, synthetic construct; identical to SEQ ID NO: 649
  REGION 1..114: note = Description of Artificial Sequence: Synthetic polypeptide
  REGION 1..114: note = VL of XENP024425

SEQ ID NO: 2225 - protein, 5 aa, synthetic construct
  REGION 1..5: note = Description of Artificial Sequence: Synthetic peptide
  REGION 1..5: note = XENP024425 vhCDR1
HYGMN

SEQ ID NO: 2226 - protein, 17 aa, synthetic construct
  REGION 1..17: note = Description of Artificial Sequence: Synthetic peptide
  REGION 1..17: note = XENP024425 vhCDR2
WINTYTGEPTYAPKFTG

SEQ ID NO: 2227 - protein, 8 aa, synthetic construct
  REGION 1..8: note = Description of Artificial Sequence: Synthetic peptide
  REGION 1..8: note = XENP024425 vhCDR3
DYYGSSPY

SEQ ID NO: 2228 - protein, 16 aa, synthetic construct
  REGION 1..16: note = Description of Artificial Sequence: Synthetic peptide
  REGION 1..16: note = XENP024425 vlCDR1
KSSQSIVHSNGNTYLE

SEQ ID NO: 2229 - protein, 7 aa, synthetic construct
  REGION 1..7: note = Description of Artificial Sequence: Synthetic peptide
  REGION 1..7: note = XENP024425 vlCDR2
KVSNRFS

SEQ ID NO: 2230 - protein, 9 aa, synthetic construct
  REGION 1..9: note = Description of Artificial Sequence: Synthetic peptide
  REGION 1..9: note = XENP024425 vlCDR3
FQGSHVPNT

SEQ ID NO: 2231 - protein, 251 aa, synthetic construct
  REGION 1..251: note = Description of Artificial Sequence: Synthetic polypeptide
  REGION 1..251: note = XENP024426 1C11_H3.178_L3_scFv
QIQLVQSGSELKKPGASVKVSCKASGYTFTHYGMNWVRQAPGQGLEWMGWINTYTGEPTYAPGFKERFVFSLDTSVSTAYLQISSLKAEDTAVYFCARDYYGSSPYWGQGTLVTVSSGKPGSGKPGSGKPGSGKPGSDVLMTQSPDSLAVSLGERATINCKSSQSIVHSNGNTYLEWYQQKPGQSPKLLIYKVSNRFSGVPDRFSGSGSGTDFTLTISSLQAEDVAVYYCFQGSHVPNTFGGGTKVEIKGS

SEQ ID NO: 2232 - protein, 117 aa, synthetic construct
  REGION 1..117: note = Description of Artificial Sequence: Synthetic polypeptide
  REGION 1..117: note = VH of XENP024426
QIQLVQSGSELKKPGASVKVSCKASGYTFTHYGMNWVRQAPGQGLEWMGWINTYTGEPTYAPGFKERFVFSLDTSVSTAYLQISSLKAEDTAVYFCARDYYGSSPYWGQGTLVTVSS

SEQ ID NO: 2233 - protein, 114 aa, synthetic construct; identical to SEQ ID NO: 649
  REGION 1..114: note = Description of Artificial Sequence: Synthetic polypeptide
  REGION 1..114: note = VL of XENP024426

SEQ ID NO: 2234 - protein, 5 aa, synthetic construct
  REGION 1..5: note = Description of Artificial Sequence: Synthetic peptide
  REGION 1..5: note = XENP024426 vhCDR1
HYGMN

SEQ ID NO: 2235 - protein, 17 aa, synthetic construct
  REGION 1..17: note = Description of Artificial Sequence: Synthetic peptide
  REGION 1..17: note = XENP024426 vhCDR2
WINTYTGEPTYAPGFKE

SEQ ID NO: 2236 - protein, 8 aa, synthetic construct
  REGION 1..8: note = Description of Artificial Sequence: Synthetic peptide
  REGION 1..8: note = XENP024426 vhCDR3
DYYGSSPY

SEQ ID NO: 2237 - protein, 16 aa, synthetic construct
  REGION 1..16: note = Description of Artificial Sequence: Synthetic peptide
  REGION 1..16: note = XENP024426 vlCDR1
KSSQSIVHSNGNTYLE

SEQ ID NO: 2238 - protein, 7 aa, synthetic construct
  REGION 1..7: note = Description of Artificial Sequence: Synthetic peptide
  REGION 1..7: note = XENP024426 vlCDR2
KVSNRFS

SEQ ID NO: 2239 - protein, 9 aa, synthetic construct
  REGION 1..9: note = Description of Artificial Sequence: Synthetic peptide
  REGION 1..9: note = XENP024426 vlCDR3
FQGSHVPNT

SEQ ID NO: 2240 - protein, 251 aa, synthetic construct
  REGION 1..251: note = Description of Artificial Sequence: Synthetic polypeptide
  REGION 1..251: note = XENP024427 1C11_H3.179_L3_scFv
QIQLVQSGSELKKPGASVKVSCKASGYTFTHYGMNWVRQAPGQGLEWMGWINTYTGEPTYAPKFTERFVFSLDTSVSTAYLQISSLKAEDTAVYFCARDYYGSSPYWGQGTLVTVSSGKPGSGKPGSGKPGSGKPGSDVLMTQSPDSLAVSLGERATINCKSSQSIVHSNGNTYLEWYQQKPGQSPKLLIYKVSNRFSGVPDRFSGSGSGTDFTLTISSLQAEDVAVYYCFQGSHVPNTFGGGTKVEIKGS

SEQ ID NO: 2241 - protein, 117 aa, synthetic construct
  REGION 1..117: note = Description of Artificial Sequence: Synthetic polypeptide
  REGION 1..117: note = VH of XENP024427
QIQLVQSGSELKKPGASVKVSCKASGYTFTHYGMNWVRQAPGQGLEWMGWINTYTGEPTYAPKFTERFVFSLDTSVSTAYLQISSLKAEDTAVYFCARDYYGSSPYWGQGTLVTVSS

SEQ ID NO: 2242 - protein, 114 aa, synthetic construct; identical to SEQ ID NO: 649
  REGION 1..114: note = Description of Artificial Sequence: Synthetic polypeptide
  REGION 1..114: note = VL of XENP024427

SEQ ID NO: 2243 - protein, 5 aa, synthetic construct
  REGION 1..5: note = Description of Artificial Sequence: Synthetic peptide
  REGION 1..5: note = XENP024427 vhCDR1
HYGMN

SEQ ID NO: 2244 - protein, 17 aa, synthetic construct
  REGION 1..17: note = Description of Artificial Sequence: Synthetic peptide
  REGION 1..17: note = XENP024427 vhCDR2
WINTYTGEPTYAPKFTE

SEQ ID NO: 2245 - protein, 8 aa, synthetic construct
  REGION 1..8: note = Description of Artificial Sequence: Synthetic peptide
  REGION 1..8: note = XENP024427 vhCDR3
DYYGSSPY

SEQ ID NO: 2246 - protein, 16 aa, synthetic construct
  REGION 1..16: note = Description of Artificial Sequence: Synthetic peptide
  REGION 1..16: note = XENP024427 vlCDR1
KSSQSIVHSNGNTYLE

SEQ ID NO: 2247 - protein, 7 aa, synthetic construct
  REGION 1..7: note = Description of Artificial Sequence: Synthetic peptide
  REGION 1..7: note = XENP024427 vlCDR2
KVSNRFS

SEQ ID NO: 2248 - protein, 9 aa, synthetic construct
  REGION 1..9: note = Description of Artificial Sequence: Synthetic peptide
  REGION 1..9: note = XENP024427 vlCDR3
FQGSHVPNT

SEQ ID NO: 2249 - protein, 251 aa, synthetic construct
  REGION 1..251: note = Description of Artificial Sequence: Synthetic polypeptide
  REGION 1..251: note = XENP024428 1C11_H3.180_L3_scFv
QIQLVQSGSELKKPGASVKVSCKASGYTFTHYGINWVRQAPGQGLEWMGWINTYTGEPTYADGFTGRFVFSVDTSVSTAYLQISSLKAEDTAVYFCARDYYGSSPYWGQGTLVTVSSGKPGSGKPGSGKPGSGKPGSDVLMTQSPDSLAVSLGERATINCKSSQSIVHSNGNTYLEWYQQKPGQSPKLLIYKVSNRFSGVPDRFSGSGSGTDFTLTISSLQAEDVAVYYCFQGSHVPNTFGGGTKVEIKGS

SEQ ID NO: 2250 - protein, 117 aa, synthetic construct
  REGION 1..117: note = Description of Artificial Sequence: Synthetic polypeptide
  REGION 1..117: note = VH of XENP024428
QIQLVQSGSELKKPGASVKVSCKASGYTFTHYGINWVRQAPGQGLEWMGWINTYTGEPTYADGFTGRFVFSVDTSVSTAYLQISSLKAEDTAVYFCARDYYGSSPYWGQGTLVTVSS

SEQ ID NO: 2251 - protein, 114 aa, synthetic construct; identical to SEQ ID NO: 649
  REGION 1..114: note = Description of Artificial Sequence: Synthetic polypeptide
  REGION 1..114: note = VL of XENP024428

SEQ ID NO: 2252 - protein, 5 aa, synthetic construct
  REGION 1..5: note = Description of Artificial Sequence: Synthetic peptide
  REGION 1..5: note = XENP024428 vhCDR1
HYGIN

SEQ ID NO: 2253 - protein, 17 aa, synthetic construct
  REGION 1..17: note = Description of Artificial Sequence: Synthetic peptide
  REGION 1..17: note = XENP024428 vhCDR2
WINTYTGEPTYADGFTG

SEQ ID NO: 2254 - protein, 8 aa, synthetic construct
  REGION 1..8: note = Description of Artificial Sequence: Synthetic peptide
  REGION 1..8: note = XENP024428 vhCDR3
DYYGSSPY

SEQ ID NO: 2255 - protein, 16 aa, synthetic construct
  REGION 1..16: note = Description of Artificial Sequence: Synthetic peptide
  REGION 1..16: note = XENP024428 vlCDR1
KSSQSIVHSNGNTYLE

SEQ ID NO: 2256 - protein, 7 aa, synthetic construct
  REGION 1..7: note = Description of Artificial Sequence: Synthetic peptide
  REGION 1..7: note = XENP024428 vlCDR2
KVSNRFS

SEQ ID NO: 2257 - protein, 9 aa, synthetic construct
  REGION 1..9: note = Description of Artificial Sequence: Synthetic peptide
  REGION 1..9: note = XENP024428 vlCDR3
FQGSHVPNT

SEQ ID NO: 2258 - protein, 251 aa, synthetic construct
  REGION 1..251: note = Description of Artificial Sequence: Synthetic polypeptide
  REGION 1..251: note = XENP024429 1C11_H3.181_L3_scFv
QIQLVQSGSELKKPGASVKVSCKASGYTFTHYGINWVRQAPGQGLEWMGWINTYTGEPTYADGFTGRFVFSIDTSVSTAYLQISSLKAEDTAVYFCARDYYGSSPYWGQGTLVTVSSGKPGSGKPGSGKPGSGKPGSDVLMTQSPDSLAVSLGERATINCKSSQSIVHSNGNTYLEWYQQKPGQSPKLLIYKVSNRFSGVPDRFSGSGSGTDFTLTISSLQAEDVAVYYCFQGSHVPNTFGGGTKVEIKGS

SEQ ID NO: 2259 - protein, 117 aa, synthetic construct
  REGION 1..117: note = Description of Artificial Sequence: Synthetic polypeptide
  REGION 1..117: note = VH of XENP024429
QIQLVQSGSELKKPGASVKVSCKASGYTFTHYGINWVRQAPGQGLEWMGWINTYTGEPTYADGFTGRFVFSIDTSVSTAYLQISSLKAEDTAVYFCARDYYGSSPYWGQGTLVTVSS

SEQ ID NO: 2260 - protein, 114 aa, synthetic construct; identical to SEQ ID NO: 649
  REGION 1..114: note = Description of Artificial Sequence: Synthetic polypeptide
  REGION 1..114: note = VL of XENP024429

SEQ ID NO: 2261 - protein, 5 aa, synthetic construct
  REGION 1..5: note = Description of Artificial Sequence: Synthetic peptide
  REGION 1..5: note = XENP024429 vhCDR1
HYGIN

SEQ ID NO: 2262 - protein, 17 aa, synthetic construct
  REGION 1..17: note = Description of Artificial Sequence: Synthetic peptide
  REGION 1..17: note = XENP024429 vhCDR2
WINTYTGEPTYADGFTG

SEQ ID NO: 2263 - protein, 8 aa, synthetic construct
  REGION 1..8: note = Description of Artificial Sequence: Synthetic peptide
  REGION 1..8: note = XENP024429 vhCDR3
DYYGSSPY

SEQ ID NO: 2264 - protein, 16 aa, synthetic construct
  REGION 1..16: note = Description of Artificial Sequence: Synthetic peptide
  REGION 1..16: note = XENP024429 vlCDR1
KSSQSIVHSNGNTYLE

SEQ ID NO: 2265 - protein, 7 aa, synthetic construct
  REGION 1..7: note = Description of Artificial Sequence: Synthetic peptide
  REGION 1..7: note = XENP024429 vlCDR2
KVSNRFS

SEQ ID NO: 2266 - protein, 9 aa, synthetic construct
  REGION 1..9: note = Description of Artificial Sequence: Synthetic peptide
  REGION 1..9: note = XENP024429 vlCDR3
FQGSHVPNT

SEQ ID NO: 2267 - protein, 251 aa, synthetic construct
  REGION 1..251: note = Description of Artificial Sequence: Synthetic polypeptide
  REGION 1..251: note = XENP024430 1C11_H3.182_L3_scFv
QIQLVQSGSELVKPGESVKVSCKASGYTFTHYGMNWVRQAPGQGLEWMGWINTYTGEPTYADGFTGRFVFSLDTSVSTAYLQISSLKAEDTAVYFCARDYYGSSPYWGQGTLVTVSSGKPGSGKPGSGKPGSGKPGSDVLMTQSPDSLAVSLGERATINCKSSQSIVHSNGNTYLEWYQQKPGQSPKLLIYKVSNRFSGVPDRFSGSGSGTDFTLTISSLQAEDVAVYYCFQGSHVPNTFGGGTKVEIKGS

SEQ ID NO: 2268 - protein, 117 aa, synthetic construct
  REGION 1..117: note = Description of Artificial Sequence: Synthetic polypeptide
  REGION 1..117: note = VH of XENP024430
QIQLVQSGSELVKPGESVKVSCKASGYTFTHYGMNWVRQAPGQGLEWMGWINTYTGEPTYADGFTGRFVFSLDTSVSTAYLQISSLKAEDTAVYFCARDYYGSSPYWGQGTLVTVSS

SEQ ID NO: 2269 - protein, 114 aa, synthetic construct; identical to SEQ ID NO: 649
  REGION 1..114: note = Description of Artificial Sequence: Synthetic polypeptide
  REGION 1..114: note = VL of XENP024430

SEQ ID NO: 2270 - protein, 5 aa, synthetic construct
  REGION 1..5: note = Description of Artificial Sequence: Synthetic peptide
  REGION 1..5: note = XENP024430 vhCDR1
HYGMN

SEQ ID NO: 2271 - protein, 17 aa, synthetic construct
  REGION 1..17: note = Description of Artificial Sequence: Synthetic peptide
  REGION 1..17: note = XENP024430 vhCDR2
WINTYTGEPTYADGFTG

SEQ ID NO: 2272 - protein, 8 aa, synthetic construct
  REGION 1..8: note = Description of Artificial Sequence: Synthetic peptide
  REGION 1..8: note = XENP024430 vhCDR3
DYYGSSPY

SEQ ID NO: 2273 - protein, 16 aa, synthetic construct
  REGION 1..16: note = Description of Artificial Sequence: Synthetic peptide
  REGION 1..16: note = XENP024430 vlCDR1
KSSQSIVHSNGNTYLE

SEQ ID NO: 2274 - protein, 7 aa, synthetic construct
  REGION 1..7: note = Description of Artificial Sequence: Synthetic peptide
  REGION 1..7: note = XENP024430 vlCDR2
KVSNRFS

SEQ ID NO: 2275 - protein, 9 aa, synthetic construct
  REGION 1..9: note = Description of Artificial Sequence: Synthetic peptide
  REGION 1..9: note = XENP024430 vlCDR3
FQGSHVPNT

SEQ ID NO: 2276 - protein, 251 aa, synthetic construct
  REGION 1..251: note = Description of Artificial Sequence: Synthetic polypeptide
  REGION 1..251: note = XENP024431 1C11_H3.183_L3_scFv
QIQLVQSGSVLKKPGESVKVSCKASGYTFTHYGMNWVRQAPGQGLEWMGWINTYTGEPTYADGFTGRFVFSLDTSVSTAYLQISSLKAEDTAVYFCARDYYGSSPYWGQGTLVTVSSGKPGSGKPGSGKPGSGKPGSDVLMTQSPDSLAVSLGERATINCKSSQSIVHSNGNTYLEWYQQKPGQSPKLLIYKVSNRFSGVPDRFSGSGSGTDFTLTISSLQAEDVAVYYCFQGSHVPNTFGGGTKVEIKGS

SEQ ID NO: 2277 - protein, 117 aa, synthetic construct
  REGION 1..117: note = Description of Artificial Sequence: Synthetic polypeptide
  REGION 1..117: note = VH of XENP024431
QIQLVQSGSVLKKPGESVKVSCKASGYTFTHYGMNWVRQAPGQGLEWMGWINTYTGEPTYADGFTGRFVFSLDTSVSTAYLQISSLKAEDTAVYFCARDYYGSSPYWGQGTLVTVSS

SEQ ID NO: 2278 - protein, 114 aa, synthetic construct; identical to SEQ ID NO: 649
  REGION 1..114: note = Description of Artificial Sequence: Synthetic polypeptide
  REGION 1..114: note = VL of XENP024431

SEQ ID NO: 2279 - protein, 5 aa, synthetic construct
  REGION 1..5: note = Description of Artificial Sequence: Synthetic peptide
  REGION 1..5: note = XENP024431 vhCDR1
HYGMN

SEQ ID NO: 2280 - protein, 17 aa, synthetic construct
  REGION 1..17: note = Description of Artificial Sequence: Synthetic peptide
  REGION 1..17: note = XENP024431 vhCDR2
WINTYTGEPTYADGFTG

SEQ ID NO: 2281 - protein, 8 aa, synthetic construct
  REGION 1..8: note = Description of Artificial Sequence: Synthetic peptide
  REGION 1..8: note = XENP024431 vhCDR3
DYYGSSPY

SEQ ID NO: 2282 - protein, 16 aa, synthetic construct
  REGION 1..16: note = Description of Artificial Sequence: Synthetic peptide
  REGION 1..16: note = XENP024431 vlCDR1
KSSQSIVHSNGNTYLE

SEQ ID NO: 2283 - protein, 7 aa, synthetic construct
  REGION 1..7: note = Description of Artificial Sequence: Synthetic peptide
  REGION 1..7: note = XENP024431 vlCDR2
KVSNRFS

SEQ ID NO: 2284 - protein, 9 aa, synthetic construct
  REGION 1..9: note = Description of Artificial Sequence: Synthetic peptide
  REGION 1..9: note = XENP024431 vlCDR3
FQGSHVPNT

SEQ ID NO: 2285 - protein, 251 aa, synthetic construct
  REGION 1..251: note = Description of Artificial Sequence: Synthetic polypeptide
  REGION 1..251: note = XENP024432 1C11_H3.184_L3_scFv
QIQLVQSGSVLVKPGESVKVSCKASGYTFTHYGMNWVRQAPGQGLEWMGWINTYTGEPTYADGFTGRFVFSLDTSVSTAYLQISSLKAEDTAVYFCARDYYGSSPYWGQGTLVTVSSGKPGSGKPGSGKPGSGKPGSDVLMTQSPDSLAVSLGERATINCKSSQSIVHSNGNTYLEWYQQKPGQSPKLLIYKVSNRFSGVPDRFSGSGSGTDFTLTISSLQAEDVAVYYCFQGSHVPNTFGGGTKVEIKGS

SEQ ID NO: 2286 - protein, 117 aa, synthetic construct
  REGION 1..117: note = Description of Artificial Sequence: Synthetic polypeptide
  REGION 1..117: note = VH of XENP024432
QIQLVQSGSVLVKPGESVKVSCKASGYTFTHYGMNWVRQAPGQGLEWMGWINTYTGEPTYADGFTGRFVFSLDTSVSTAYLQISSLKAEDTAVYFCARDYYGSSPYWGQGTLVTVSS

SEQ ID NO: 2287 - protein, 114 aa, synthetic construct; identical to SEQ ID NO: 649
  REGION 1..114: note = Description of Artificial Sequence: Synthetic polypeptide
  REGION 1..114: note = VL of XENP024432

SEQ ID NO: 2288 - protein, 5 aa, synthetic construct
  REGION 1..5: note = Description of Artificial Sequence: Synthetic peptide
  REGION 1..5: note = XENP024432 vhCDR1
HYGMN

SEQ ID NO: 2289 - protein, 17 aa, synthetic construct
  REGION 1..17: note = Description of Artificial Sequence: Synthetic peptide
  REGION 1..17: note = XENP024432 vhCDR2
WINTYTGEPTYADGFTG

SEQ ID NO: 2290 - protein, 8 aa, synthetic construct
  REGION 1..8: note = Description of Artificial Sequence: Synthetic peptide
  REGION 1..8: note = XENP024432 vhCDR3
DYYGSSPY

SEQ ID NO: 2291 - protein, 16 aa, synthetic construct
  REGION 1..16: note = Description of Artificial Sequence: Synthetic peptide
  REGION 1..16: note = XENP024432 vlCDR1
KSSQSIVHSNGNTYLE

SEQ ID NO: 2292 - protein, 7 aa, synthetic construct
  REGION 1..7: note = Description of Artificial Sequence: Synthetic peptide
  REGION 1..7: note = XENP024432 vlCDR2
KVSNRFS

SEQ ID NO: 2293 - protein, 9 aa, synthetic construct
  REGION 1..9: note = Description of Artificial Sequence: Synthetic peptide
  REGION 1..9: note = XENP024432 vlCDR3
FQGSHVPNT

SEQ ID NO: 2294 - protein, 251 aa, synthetic construct
  REGION 1..251: note = Description of Artificial Sequence: Synthetic polypeptide
  REGION 1..251: note = XENP024433 1C11_H3.185_L3_scFv
EVQLVQSGSELVKPGESVKVSCKASGYTFTHYGINWVRQPPGQGLEWIGWINTYTGEPYYAPKFTERFVFSLDTSQDTAYLQINSLKAEDTAVYYCARDYYGSSPYWGQGTLVTVSSGKPGSGKPGSGKPGSGKPGSDVLMTQSPDSLAVSLGERATINCKSSQSIVHSNGNTYLEWYQQKPGQSPKLLIYKVSNRFSGVPDRFSGSGSGTDFTLTISSLQAEDVAVYYCFQGSHVPNTFGGGTKVEIKGS

SEQ ID NO: 2295 - protein, 117 aa, synthetic construct
  REGION 1..117: note = Description of Artificial Sequence: Synthetic polypeptide
  REGION 1..117: note = VH of XENP024433
EVQLVQSGSELVKPGESVKVSCKASGYTFTHYGINWVRQPPGQGLEWIGWINTYTGEPYYAPKFTERFVFSLDTSQDTAYLQINSLKAEDTAVYYCARDYYGSSPYWGQGTLVTVSS

SEQ ID NO: 2296 - protein, 114 aa, synthetic construct; identical to SEQ ID NO: 649
  REGION 1..114: note = Description of Artificial Sequence: Synthetic polypeptide
  REGION 1..114: note = VL of XENP024433

SEQ ID NO: 2297 - protein, 5 aa, synthetic construct
  REGION 1..5: note = Description of Artificial Sequence: Synthetic peptide
  REGION 1..5: note = XENP024433 vhCDR1
HYGIN

SEQ ID NO: 2298 - protein, 17 aa, synthetic construct
  REGION 1..17: note = Description of Artificial Sequence: Synthetic peptide
  REGION 1..17: note = XENP024433 vhCDR2
WINTYTGEPYYAPKFTE

SEQ ID NO: 2299 - protein, 8 aa, synthetic construct
  REGION 1..8: note = Description of Artificial Sequence: Synthetic peptide
  REGION 1..8: note = XENP024433 vhCDR3
DYYGSSPY

SEQ ID NO: 2300 - protein, 16 aa, synthetic construct
  REGION 1..16: note = Description of Artificial Sequence: Synthetic peptide
  REGION 1..16: note = XENP024433 vlCDR1
KSSQSIVHSNGNTYLE

SEQ ID NO: 2301 - protein, 7 aa, synthetic construct
  REGION 1..7: note = Description of Artificial Sequence: Synthetic peptide
  REGION 1..7: note = XENP024433 vlCDR2
KVSNRFS

SEQ ID NO: 2302 - protein, 9 aa, synthetic construct
  REGION 1..9: note = Description of Artificial Sequence: Synthetic peptide
  REGION 1..9: note = XENP024433 vlCDR3
FQGSHVPNT

SEQ ID NO: 2303 - protein, 251 aa, synthetic construct
  REGION 1..251: note = Description of Artificial Sequence: Synthetic polypeptide
  REGION 1..251: note = XENP024434 1C11_H3.186_L3_scFv
EVQLVQSGSELVKPGESVKVSCKASGYTFTHYGINWVRQPPGQGLEWMGWINTYTGEPYYAPGFTERFVFSLDTSVDTAYLQINSLKAEDTAVYYCARDYYGSSPYWGQGTLVTVSSGKPGSGKPGSGKPGSGKPGSDVLMTQSPDSLAVSLGERATINCKSSQSIVHSNGNTYLEWYQQKPGQSPKLLIYKVSNRFSGVPDRFSGSGSGTDFTLTISSLQAEDVAVYYCFQGSHVPNTFGGGTKVEIKGS

SEQ ID NO: 2304 - protein, 117 aa, synthetic construct
  REGION 1..117: note = Description of Artificial Sequence: Synthetic polypeptide
  REGION 1..117: note = VH of XENP024434
EVQLVQSGSELVKPGESVKVSCKASGYTFTHYGINWVRQPPGQGLEWMGWINTYTGEPYYAPGFTERFVFSLDTSVDTAYLQINSLKAEDTAVYYCARDYYGSSPYWGQGTLVTVSS

SEQ ID NO: 2305 - protein, 114 aa, synthetic construct; identical to SEQ ID NO: 649
  REGION 1..114: note = Description of Artificial Sequence: Synthetic polypeptide
  REGION 1..114: note = VL of XENP024434

SEQ ID NO: 2306 - protein, 5 aa, synthetic construct
  REGION 1..5: note = Description of Artificial Sequence: Synthetic peptide
  REGION 1..5: note = XENP024434 vhCDR1
HYGIN

SEQ ID NO: 2307 - protein, 17 aa, synthetic construct
  REGION 1..17: note = Description of Artificial Sequence: Synthetic peptide
  REGION 1..17: note = XENP024434 vhCDR2
WINTYTGEPYYAPGFTE

SEQ ID NO: 2308 - protein, 8 aa, synthetic construct
  REGION 1..8: note = Description of Artificial Sequence: Synthetic peptide
  REGION 1..8: note = XENP024434 vhCDR3
DYYGSSPY

SEQ ID NO: 2309 - protein, 16 aa, synthetic construct
  REGION 1..16: note = Description of Artificial Sequence: Synthetic peptide
  REGION 1..16: note = XENP024434 vlCDR1
KSSQSIVHSNGNTYLE

SEQ ID NO: 2310 - protein, 7 aa, synthetic construct
  REGION 1..7: note = Description of Artificial Sequence: Synthetic peptide
  REGION 1..7: note = XENP024434 vlCDR2
KVSNRFS

SEQ ID NO: 2311 - protein, 9 aa, synthetic construct
  REGION 1..9: note = Description of Artificial Sequence: Synthetic peptide
  REGION 1..9: note = XENP024434 vlCDR3
FQGSHVPNT

SEQ ID NO: 2312 - protein, 251 aa, synthetic construct
  REGION 1..251: note = Description of Artificial Sequence: Synthetic polypeptide
  REGION 1..251: note = XENP024435 1C11_H3.187_L3_scFv
QVQLVQSGSELVKPGESVKVSCKASGYTFTHYGINWVRQPPGQGLEWMGWINTYTGEPYYAPGFTERFVFSLDTSQSTAYLQINSLKAEDTAVYYCARDYYGSSPYWGQGTLVTVSSGKPGSGKPGSGKPGSGKPGSDVLMTQSPDSLAVSLGERATINCKSSQSIVHSNGNTYLEWYQQKPGQSPKLLIYKVSNRFSGVPDRFSGSGSGTDFTLTISSLQAEDVAVYYCFQGSHVPNTFGGGTKVEIKGS

SEQ ID NO: 2313 - protein, 117 aa, synthetic construct
  REGION 1..117: note = Description of Artificial Sequence: Synthetic polypeptide
  REGION 1..117: note = VH of XENP024435
QVQLVQSGSELVKPGESVKVSCKASGYTFTHYGINWVRQPPGQGLEWMGWINTYTGEPYYAPGFTERFVFSLDTSQSTAYLQINSLKAEDTAVYYCARDYYGSSPYWGQGTLVTVSS

SEQ ID NO: 2314 - protein, 114 aa, synthetic construct; identical to SEQ ID NO: 649
  REGION 1..114: note = Description of Artificial Sequence: Synthetic polypeptide
  REGION 1..114: note = VL of XENP024435

SEQ ID NO: 2315 - protein, 5 aa, synthetic construct
  REGION 1..5: note = Description of Artificial Sequence: Synthetic peptide
  REGION 1..5: note = XENP024435 vhCDR1
HYGIN

SEQ ID NO: 2316 - protein, 17 aa, synthetic construct
  REGION 1..17: note = Description of Artificial Sequence: Synthetic peptide
  REGION 1..17: note = XENP024435 vhCDR2
WINTYTGEPYYAPGFTE

SEQ ID NO: 2317 - protein, 8 aa, synthetic construct
  REGION 1..8: note = Description of Artificial Sequence: Synthetic peptide
  REGION 1..8: note = XENP024435 vhCDR3
DYYGSSPY

SEQ ID NO: 2318 - protein, 16 aa, synthetic construct
  REGION 1..16: note = Description of Artificial Sequence: Synthetic peptide
  REGION 1..16: note = XENP024435 vlCDR1
KSSQSIVHSNGNTYLE

SEQ ID NO: 2319 - protein, 7 aa, synthetic construct
  REGION 1..7: note = Description of Artificial Sequence: Synthetic peptide
  REGION 1..7: note = XENP024435 vlCDR2
KVSNRFS

SEQ ID NO: 2320 - protein, 9 aa, synthetic construct
  REGION 1..9: note = Description of Artificial Sequence: Synthetic peptide
  REGION 1..9: note = XENP024435 vlCDR3
FQGSHVPNT

SEQ ID NO: 2321 - protein, 251 aa, synthetic construct
  REGION 1..251: note = Description of Artificial Sequence: Synthetic polypeptide
  REGION 1..251: note = XENP024436 1C11_H3.188_L3_scFv
QVQLVQSGSELKKPGESVKVSCKASGYTFTHYGINWVRQPPGQGLEWIGWINTYTGEPYYAPGFTGRFVFSLDTSQSTAYLQINSLKAEDTAVYYCARDYYGSSPYWGQGTLVTVSSGKPGSGKPGSGKPGSGKPGSDVLMTQSPDSLAVSLGERATINCKSSQSIVHSNGNTYLEWYQQKPGQSPKLLIYKVSNRFSGVPDRFSGSGSGTDFTLTISSLQAEDVAVYYCFQGSHVPNTFGGGTKVEIKGS

SEQ ID NO: 2322 - protein, 117 aa, synthetic construct
  REGION 1..117: note = Description of Artificial Sequence: Synthetic polypeptide
  REGION 1..117: note = VH of XENP024436
QVQLVQSGSELKKPGESVKVSCKASGYTFTHYGINWVRQPPGQGLEWIGWINTYTGEPYYAPGFTGRFVFSLDTSQSTAYLQINSLKAEDTAVYYCARDYYGSSPYWGQGTLVTVSS

SEQ ID NO: 2323 - protein, 114 aa, synthetic construct; identical to SEQ ID NO: 649
  REGION 1..114: note = Description of Artificial Sequence: Synthetic polypeptide
  REGION 1..114: note = VL of XENP024436

SEQ ID NO: 2324 - protein, 5 aa, synthetic construct
  REGION 1..5: note = Description of Artificial Sequence: Synthetic peptide
  REGION 1..5: note = XENP024436 vhCDR1
HYGIN

SEQ ID NO: 2325 - protein, 17 aa, synthetic construct
  REGION 1..17: note = Description of Artificial Sequence: Synthetic peptide
  REGION 1..17: note = XENP024436 vhCDR2
WINTYTGEPYYAPGFTG

SEQ ID NO: 2326 - protein, 8 aa, synthetic construct
  REGION 1..8: note = Description of Artificial Sequence: Synthetic peptide
  REGION 1..8: note = XENP024436 vhCDR3
DYYGSSPY

SEQ ID NO: 2327 - protein, 16 aa, synthetic construct
  REGION 1..16: note = Description of Artificial Sequence: Synthetic peptide
  REGION 1..16: note = XENP024436 vlCDR1
KSSQSIVHSNGNTYLE

SEQ ID NO: 2328 - protein, 7 aa, synthetic construct
  REGION 1..7: note = Description of Artificial Sequence: Synthetic peptide
  REGION 1..7: note = XENP024436 vlCDR2
KVSNRFS

SEQ ID NO: 2329 - protein, 9 aa, synthetic construct
  REGION 1..9: note = Description of Artificial Sequence: Synthetic peptide
  REGION 1..9: note = XENP024436 vlCDR3
FQGSHVPNT

SEQ ID NO: 2330 - protein, 251 aa, synthetic construct
  REGION 1..251: note = Description of Artificial Sequence: Synthetic polypeptide
  REGION 1..251: note = XENP024437 1C11_H3.189_L3_scFv
QVQLVQSGSELKKPGASVKVSCKASGYTFTHYGINWVRQPPGQGLEWIGWINTYTGEPYYAPKFTGRFVFSLDTSVSTAYLQINSLKAEDTAVYYCARDYYGSSPYWGQGTLVTVSSGKPGSGKPGSGKPGSGKPGSDVLMTQSPDSLAVSLGERATINCKSSQSIVHSNGNTYLEWYQQKPGQSPKLLIYKVSNRFSGVPDRFSGSGSGTDFTLTISSLQAEDVAVYYCFQGSHVPNTFGGGTKVEIKGS

SEQ ID NO: 2331 - protein, 117 aa, synthetic construct
  REGION 1..117: note = Description of Artificial Sequence: Synthetic polypeptide
  REGION 1..117: note = VH of XENP024437
QVQLVQSGSELKKPGASVKVSCKASGYTFTHYGINWVRQPPGQGLEWIGWINTYTGEPYYAPKFTGRFVFSLDTSVSTAYLQINSLKAEDTAVYYCARDYYGSSPYWGQGTLVTVSS

SEQ ID NO: 2332 - protein, 114 aa, synthetic construct; identical to SEQ ID NO: 649
  REGION 1..114: note = Description of Artificial Sequence: Synthetic polypeptide
  REGION 1..114: note = VL of XENP024437

SEQ ID NO: 2333 - protein, 5 aa, synthetic construct
  REGION 1..5: note = Description of Artificial Sequence: Synthetic peptide
  REGION 1..5: note = XENP024437 vhCDR1
HYGIN

SEQ ID NO: 2334 - protein, 17 aa, synthetic construct
  REGION 1..17: note = Description of Artificial Sequence: Synthetic peptide
  REGION 1..17: note = XENP024437 vhCDR2
WINTYTGEPYYAPKFTG

SEQ ID NO: 2335 - protein, 8 aa, synthetic construct
  REGION 1..8: note = Description of Artificial Sequence: Synthetic peptide
  REGION 1..8: note = XENP024437 vhCDR3
DYYGSSPY

SEQ ID NO: 2336 - protein, 16 aa, synthetic construct
  REGION 1..16: note = Description of Artificial Sequence: Synthetic peptide
  REGION 1..16: note = XENP024437 vlCDR1
KSSQSIVHSNGNTYLE

SEQ ID NO: 2337 - protein, 7 aa, synthetic construct
  REGION 1..7: note = Description of Artificial Sequence: Synthetic peptide
  REGION 1..7: note = XENP024437 vlCDR2
KVSNRFS

SEQ ID NO: 2338 - protein, 9 aa, synthetic construct
  REGION 1..9: note = Description of Artificial Sequence: Synthetic peptide
  REGION 1..9: note = XENP024437 vlCDR3
FQGSHVPNT

SEQ ID NO: 2339 - protein, 251 aa, synthetic construct
  REGION 1..251: note = Description of Artificial Sequence: Synthetic polypeptide
  REGION 1..251: note = XENP024438 1C11_H3.190_L3_scFv
QVQLVQSGSVLKKPGGSVKVSCKASGYTFTHYGINWVRQPPGQGLEWIGWINTYTGEPYYAPGFTGRFVFSLDTSQSTAYLQINSLKAEDTAVYYCARDYYGSSPYWGQGTLVTVSSGKPGSGKPGSGKPGSGKPGSDVLMTQSPDSLAVSLGERATINCKSSQSIVHSNGNTYLEWYQQKPGQSPKLLIYKVSNRFSGVPDRFSGSGSGTDFTLTISSLQAEDVAVYYCFQGSHVPNTFGGGTKVEIKGS

SEQ ID NO: 2340 - protein, 117 aa, synthetic construct
  REGION 1..117: note = Description of Artificial Sequence: Synthetic polypeptide
  REGION 1..117: note = VH of XENP024438
QVQLVQSGSVLKKPGGSVKVSCKASGYTFTHYGINWVRQPPGQGLEWIGWINTYTGEPYYAPGFTGRFVFSLDTSQSTAYLQINSLKAEDTAVYYCARDYYGSSPYWGQGTLVTVSS

SEQ ID NO: 2341 - protein, 114 aa, synthetic construct; identical to SEQ ID NO: 649
  REGION 1..114: note = Description of Artificial Sequence: Synthetic polypeptide
  REGION 1..114: note = VL of XENP024438

SEQ ID NO: 2342 - protein, 5 aa, synthetic construct
  REGION 1..5: note = Description of Artificial Sequence: Synthetic peptide
  REGION 1..5: note = XENP024438 vhCDR1
HYGIN

SEQ ID NO: 2343 - protein, 17 aa, synthetic construct
  REGION 1..17: note = Description of Artificial Sequence: Synthetic peptide
  REGION 1..17: note = XENP024438 vhCDR2
WINTYTGEPYYAPGFTG

SEQ ID NO: 2344 - protein, 8 aa, synthetic construct
  REGION 1..8: note = Description of Artificial Sequence: Synthetic peptide
  REGION 1..8: note = XENP024438 vhCDR3
DYYGSSPY

SEQ ID NO: 2345 - protein, 16 aa, synthetic construct
  REGION 1..16: note = Description of Artificial Sequence: Synthetic peptide
  REGION 1..16: note = XENP024438 vlCDR1
KSSQSIVHSNGNTYLE

SEQ ID NO: 2346 - protein, 7 aa, synthetic construct
  REGION 1..7: note = Description of Artificial Sequence: Synthetic peptide
  REGION 1..7: note = XENP024438 vlCDR2
KVSNRFS

SEQ ID NO: 2347 - protein, 9 aa, synthetic construct
  REGION 1..9: note = Description of Artificial Sequence: Synthetic peptide
  REGION 1..9: note = XENP024438 vlCDR3
FQGSHVPNT

SEQ ID NO: 2348 - protein, 251 aa, synthetic construct
  REGION 1..251: note = Description of Artificial Sequence: Synthetic polypeptide
  REGION 1..251: note = XENP024439 1C11_H3.191_L3_scFv
QVQLVQSGSELVKPGESVKVSCKASGYTFTHYGMNWVRQAPGQGLEWMGWINTYTGEPTYAPGFTGRFVFSLDTSQSTAYLQINSLKAEDTAVYFCARDYYGSSPYWGQGTLVTVSSGKPGSGKPGSGKPGSGKPGSDVLMTQSPDSLAVSLGERATINCKSSQSIVHSNGNTYLEWYQQKPGQSPKLLIYKVSNRFSGVPDRFSGSGSGTDFTLTISSLQAEDVAVYYCFQGSHVPNTFGGGTKVEIKGS

SEQ ID NO: 2349 - protein, 117 aa, synthetic construct
  REGION 1..117: note = Description of Artificial Sequence: Synthetic polypeptide
  REGION 1..117: note = VH of XENP024439
QVQLVQSGSELVKPGESVKVSCKASGYTFTHYGMNWVRQAPGQGLEWMGWINTYTGEPTYAPGFTGRFVFSLDTSQSTAYLQINSLKAEDTAVYFCARDYYGSSPYWGQGTLVTVSS

SEQ ID NO: 2350 - protein, 114 aa, synthetic construct; identical to SEQ ID NO: 649
  REGION 1..114: note = Description of Artificial Sequence: Synthetic polypeptide
  REGION 1..114: note = VL of XENP024439

SEQ ID NO: 2351 - protein, 5 aa, synthetic construct
  REGION 1..5: note = Description of Artificial Sequence: Synthetic peptide
  REGION 1..5: note = XENP024439 vhCDR1
HYGMN

SEQ ID NO: 2352 - protein, 17 aa, synthetic construct
  REGION 1..17: note = Description of Artificial Sequence: Synthetic peptide
  REGION 1..17: note = XENP024439 vhCDR2
WINTYTGEPTYAPGFTG

SEQ ID NO: 2353 - protein, 8 aa, synthetic construct
  REGION 1..8: note = Description of Artificial Sequence: Synthetic peptide
  REGION 1..8: note = XENP024439 vhCDR3
DYYGSSPY

SEQ ID NO: 2354 - protein, 16 aa, synthetic construct
  REGION 1..16: note = Description of Artificial Sequence: Synthetic peptide
  REGION 1..16: note = XENP024439 vlCDR1
KSSQSIVHSNGNTYLE

SEQ ID NO: 2355 - protein, 7 aa, synthetic construct
  REGION 1..7: note = Description of Artificial Sequence: Synthetic peptide
  REGION 1..7: note = XENP024439 vlCDR2
KVSNRFS

SEQ ID NO: 2356 - protein, 9 aa, synthetic construct
  REGION 1..9: note = Description of Artificial Sequence: Synthetic peptide
  REGION 1..9: note = XENP024439 vlCDR3
FQGSHVPNT

SEQ ID NO: 2357 - protein, 251 aa, synthetic construct
  REGION 1..251: note = Description of Artificial Sequence: Synthetic polypeptide
  REGION 1..251: note = XENP024440 1C11_H3.192_L3_scFv
EVQLVQSGSVLKKPGESVKVSCKASGYTFTHYGINWVRQAPGQGLEWMGWINTYTGEPTYADGFTERFVFSLDTSVSTAYLQISSLKAEDTAVYFCARDYYGSSPYWGQGTLVTVSSGKPGSGKPGSGKPGSGKPGSDVLMTQSPDSLAVSLGERATINCKSSQSIVHSNGNTYLEWYQQKPGQSPKLLIYKVSNRFSGVPDRFSGSGSGTDFTLTISSLQAEDVAVYYCFQGSHVPNTFGGGTKVEIKGS

SEQ ID NO: 2358 - protein, 117 aa, synthetic construct
  REGION 1..117: note = Description of Artificial Sequence: Synthetic polypeptide
  REGION 1..117: note = VH of XENP024440
EVQLVQSGSVLKKPGESVKVSCKASGYTFTHYGINWVRQAPGQGLEWMGWINTYTGEPTYADGFTERFVFSLDTSVSTAYLQISSLKAEDTAVYFCARDYYGSSPYWGQGTLVTVSS

SEQ ID NO: 2359 - protein, 114 aa, synthetic construct; identical to SEQ ID NO: 649
  REGION 1..114: note = Description of Artificial Sequence: Synthetic polypeptide
  REGION 1..114: note = VL of XENP024440

SEQ ID NO: 2360 - protein, 5 aa, synthetic construct
  REGION 1..5: note = Description of Artificial Sequence: Synthetic peptide
  REGION 1..5: note = XENP024440 vhCDR1
HYGIN

SEQ ID NO: 2361 - protein, 17 aa, synthetic construct
  REGION 1..17: note = Description of Artificial Sequence: Synthetic peptide
  REGION 1..17: note = XENP024440 vhCDR2
WINTYTGEPTYADGFTE

SEQ ID NO: 2362 - protein, 8 aa, synthetic construct
  REGION 1..8: note = Description of Artificial Sequence: Synthetic peptide
  REGION 1..8: note = XENP024440 vhCDR3
DYYGSSPY

SEQ ID NO: 2363 - protein, 16 aa, synthetic construct
  REGION 1..16: note = Description of Artificial Sequence: Synthetic peptide
  REGION 1..16: note = XENP024440 vlCDR1
KSSQSIVHSNGNTYLE

SEQ ID NO: 2364 - protein, 7 aa, synthetic construct
  REGION 1..7: note = Description of Artificial Sequence: Synthetic peptide
  REGION 1..7: note = XENP024440 vlCDR2
KVSNRFS

SEQ ID NO: 2365 - protein, 9 aa, synthetic construct
  REGION 1..9: note = Description of Artificial Sequence: Synthetic peptide
  REGION 1..9: note = XENP024440 vlCDR3
FQGSHVPNT

SEQ ID NO: 2366 - protein, 251 aa, synthetic construct
  REGION 1..251: note = Description of Artificial Sequence: Synthetic polypeptide
  REGION 1..251: note = XENP024441 1C11_H3.193_L3_scFv
QIQLVQSGSELKKPGASVKVSCKASGYTFTHYGMNWVRQPPGQGLEWIGWINTYTGEPTYAPGFTERFVFSLDTSQSTAYLQINSLKAEDTAVYYCARDYYGSSPYWGQGTLVTVSSGKPGSGKPGSGKPGSGKPGSDVLMTQSPDSLAVSLGERATINCKSSQSIVHSNGNTYLEWYQQKPGQSPKLLIYKVSNRFSGVPDRFSGSGSGTDFTLTISSLQAEDVAVYYCFQGSHVPNTFGGGTKVEIKGS

SEQ ID NO: 2367 - protein, 117 aa, synthetic construct
  REGION 1..117: note = Description of Artificial Sequence: Synthetic polypeptide
  REGION 1..117: note = VH of XENP024441
QIQLVQSGSELKKPGASVKVSCKASGYTFTHYGMNWVRQPPGQGLEWIGWINTYTGEPTYAPGFTERFVFSLDTSQSTAYLQINSLKAEDTAVYYCARDYYGSSPYWGQGTLVTVSS

SEQ ID NO: 2368 - protein, 114 aa, synthetic construct; identical to SEQ ID NO: 649
  REGION 1..114: note = Description of Artificial Sequence: Synthetic polypeptide
  REGION 1..114: note = VL of XENP024441

SEQ ID NO: 2369 - protein, 5 aa, synthetic construct
  REGION 1..5: note = Description of Artificial Sequence: Synthetic peptide
  REGION 1..5: note = XENP024441 vhCDR1
HYGMN

SEQ ID NO: 2370 - protein, 17 aa, synthetic construct
  REGION 1..17: note = Description of Artificial Sequence: Synthetic peptide
  REGION 1..17: note = XENP024441 vhCDR2
WINTYTGEPTYAPGFTE

SEQ ID NO: 2371 - protein, 8 aa, synthetic construct
  REGION 1..8: note = Description of Artificial Sequence: Synthetic peptide
  REGION 1..8: note = XENP024441 vhCDR3
DYYGSSPY

SEQ ID NO: 2372 - protein, 16 aa, synthetic construct
  REGION 1..16: note = Description of Artificial Sequence: Synthetic peptide
  REGION 1..16: note = XENP024441 vlCDR1
KSSQSIVHSNGNTYLE

SEQ ID NO: 2373 - protein, 7 aa, synthetic construct
  REGION 1..7: note = Description of Artificial Sequence: Synthetic peptide
  REGION 1..7: note = XENP024441 vlCDR2
KVSNRFS

SEQ ID NO: 2374 - protein, 9 aa, synthetic construct
  REGION 1..9: note = Description of Artificial Sequence: Synthetic peptide
  REGION 1..9: note = XENP024441 vlCDR3
FQGSHVPNT

SEQ ID NO: 2375 - protein, 251 aa, synthetic construct
  REGION 1..251: note = Description of Artificial Sequence: Synthetic polypeptide
  REGION 1..251: note = XENP024442 1C11_H3.194_L3_scFv
EIQLVQSGSVLKKPGASVKVSCKASGYTFTHYGINWVRQAPGQGLEWIGWINTYTGEPTYADGFTGRFVFSLDTSVSTAYLQISSLKAEDTAVYFCARDYYGSSPYWGQGTLVTVSSGKPGSGKPGSGKPGSGKPGSDVLMTQSPDSLAVSLGERATINCKSSQSIVHSNGNTYLEWYQQKPGQSPKLLIYKVSNRFSGVPDRFSGSGSGTDFTLTISSLQAEDVAVYYCFQGSHVPNTFGGGTKVEIKGS

SEQ ID NO: 2376 - protein, 117 aa, synthetic construct
  REGION 1..117: note = Description of Artificial Sequence: Synthetic polypeptide
  REGION 1..117: note = VH of XENP024442
EIQLVQSGSVLKKPGASVKVSCKASGYTFTHYGINWVRQAPGQGLEWIGWINTYTGEPTYADGFTGRFVFSLDTSVSTAYLQISSLKAEDTAVYFCARDYYGSSPYWGQGTLVTVSS

SEQ ID NO: 2377 - protein, 114 aa, synthetic construct; identical to SEQ ID NO: 649
  REGION 1..114: note = Description of Artificial Sequence: Synthetic polypeptide
  REGION 1..114: note = VL of XENP024442

SEQ ID NO: 2378 - protein, 5 aa, synthetic construct
  REGION 1..5: note = Description of Artificial Sequence: Synthetic peptide
  REGION 1..5: note = XENP024442 vhCDR1
HYGIN

SEQ ID NO: 2379 - protein, 17 aa, synthetic construct
  REGION 1..17: note = Description of Artificial Sequence: Synthetic peptide
  REGION 1..17: note = XENP024442 vhCDR2
WINTYTGEPTYADGFTG

SEQ ID NO: 2380 - protein, 8 aa, synthetic construct
  REGION 1..8: note = Description of Artificial Sequence: Synthetic peptide
  REGION 1..8: note = XENP024442 vhCDR3
DYYGSSPY

SEQ ID NO: 2381 - protein, 16 aa, synthetic construct
  REGION 1..16: note = Description of Artificial Sequence: Synthetic peptide
  REGION 1..16: note = XENP024442 vlCDR1
KSSQSIVHSNGNTYLE

SEQ ID NO: 2382 - protein, 7 aa, synthetic construct
  REGION 1..7: note = Description of Artificial Sequence: Synthetic peptide
  REGION 1..7: note = XENP024442 vlCDR2
KVSNRFS

SEQ ID NO: 2383 - protein, 9 aa, synthetic construct
  REGION 1..9: note = Description of Artificial Sequence: Synthetic peptide
  REGION 1..9: note = XENP024442 vlCDR3
FQGSHVPNT

SEQ ID NO: 2384 - protein, 251 aa, synthetic construct
  REGION 1..251: note = Description of Artificial Sequence: Synthetic polypeptide
  REGION 1..251: note = XENP024443 1C11_H3.195_L3_scFv
QIQLVQSGSELKKPGASVKVSCKASGYTFTHYGMNWVRQPPGQGLEWMGWINTYTGEPYYADGFTGRFVFSLDTSVDTAYLQINSLKAEDTAVYFCARDYYGSSPYWGQGTLVTVSSGKPGSGKPGSGKPGSGKPGSDVLMTQSPDSLAVSLGERATINCKSSQSIVHSNGNTYLEWYQQKPGQSPKLLIYKVSNRFSGVPDRFSGSGSGTDFTLTISSLQAEDVAVYYCFQGSHVPNTFGGGTKVEIKGS

SEQ ID NO: 2385 - protein, 117 aa, synthetic construct
  REGION 1..117: note = Description of Artificial Sequence: Synthetic polypeptide
  REGION 1..117: note = VH of XENP024443
QIQLVQSGSELKKPGASVKVSCKASGYTFTHYGMNWVRQPPGQGLEWMGWINTYTGEPYYADGFTGRFVFSLDTSVDTAYLQINSLKAEDTAVYFCARDYYGSSPYWGQGTLVTVSS

SEQ ID NO: 2386 - protein, 114 aa, synthetic construct; identical to SEQ ID NO: 649
  REGION 1..114: note = Description of Artificial Sequence: Synthetic polypeptide
  REGION 1..114: note = VL of XENP024443

SEQ ID NO: 2387 - protein, 5 aa, synthetic construct
  REGION 1..5: note = Description of Artificial Sequence: Synthetic peptide
  REGION 1..5: note = XENP024443 vhCDR1
HYGMN

SEQ ID NO: 2388 - protein, 17 aa, synthetic construct
  REGION 1..17: note = Description of Artificial Sequence: Synthetic peptide
  REGION 1..17: note = XENP024443 vhCDR2
WINTYTGEPYYADGFTG

SEQ ID NO: 2389 - protein, 8 aa, synthetic construct
  REGION 1..8: note = Description of Artificial Sequence: Synthetic peptide
  REGION 1..8: note = XENP024443 vhCDR3
DYYGSSPY

SEQ ID NO: 2390 - protein, 16 aa, synthetic construct
  REGION 1..16: note = Description of Artificial Sequence: Synthetic peptide
  REGION 1..16: note = XENP024443 vlCDR1
KSSQSIVHSNGNTYLE

SEQ ID NO: 2391 - protein, 7 aa, synthetic construct
  REGION 1..7: note = Description of Artificial Sequence: Synthetic peptide
  REGION 1..7: note = XENP024443 vlCDR2
KVSNRFS

SEQ ID NO: 2392 - protein, 9 aa, synthetic construct
  REGION 1..9: note = Description of Artificial Sequence: Synthetic peptide
  REGION 1..9: note = XENP024443 vlCDR3
FQGSHVPNT

SEQ ID NO: 2393 - protein, 231 aa, synthetic construct
  REGION 1..231: note = Description of Artificial Sequence: Synthetic polypeptide
  REGION 1..231: note = XENP022835 empty-[CTLA-4]_H3.23_L0.129_scFv Empty-Fc Heavy Chain
EPKSSDKTHTCPPCPAPPVAGPSVFLFPPKPKDTLMISRTPEVTCVVVDVKHEDPEVKFNWYVDGVEVHNAKTKPREEEYNSTYRVVSVLTVLHQDWLNGKEYKCKVSNKALPAPIEKTISKAKGQPREPQVYTLPPSREEMTKNQVSLTCDVSGFYPSDIAVEWESDGQPENNYKTTPPVLDSDGSFFLYSKLTVDKSRWEQGDVFSCSVMHEALHNHYTQKSLSLSPGK

SEQ ID NO: 2394 - protein, 477 aa, synthetic construct
  REGION 1..477: note = Description of Artificial Sequence: Synthetic polypeptide
  REGION 1..477: note = XENP022835 empty-[CTLA-4]_H3.23_L0.129_scFv scFv-Fc Heavy Chain
EVQLVESGGGLVKPGGSLRLSCAASGFTFSSYTMHWVRQAPGKGLEWVSFISYDGNYKYYADSVKGRFTISRDNAKNSLYLQMNSLRAEDTAVYYCARGGHLGPFDLWGQGTMVTVSSGKPGSGKPGSGKPGSGKPGSEIVLTQSPATLSLSPGERATLSCRASQSVGSSYLAWYQQKPGQAPRLLIYGASSRATGIPDRFSGSGSGTDFTLTISRLEPEDFAVYYCQQYGSSPWTFGQGTKVEIKEPKSSDKTHTCPPCPAPPVAGPSVFLFPPKPKDTLMISRTPEVTCVVVDVKHEDPEVKFNWYVDGVEVHNAKTKPREEQYNSTYRVVSVLTVLHQDWLNGKEYKCKVSNKALPAPIEKTISKAKGQPREPQVYTLPPSREQMTKNQVKLTCLVKGFYPSDIAVEWESNGQPENNYKTTPPVLDSDGSFFLYSKLTVDKSRWQQGNVFSCSVMHEALHNHYTQKSLSLSPGK

SEQ ID NO: 2395 - protein, 118 aa, synthetic construct
  REGION 1..118: note = Description of Artificial Sequence: Synthetic polypeptide
  REGION 1..118: note = VH of XENP022835
EVQLVESGGGLVKPGGSLRLSCAASGFTFSSYTMHWVRQAPGKGLEWVSFISYDGNYKYYADSVKGRFTISRDNAKNSLYLQMNSLRAEDTAVYYCARGGHLGPFDLWGQGTMVTVSS

SEQ ID NO: 2396 - protein, 108 aa, synthetic construct
  REGION 1..108: note = Description of Artificial Sequence: Synthetic polypeptide
  REGION 1..108: note = VL of XENP022835
EIVLTQSPATLSLSPGERATLSCRASQSVGSSYLAWYQQKPGQAPRLLIYGASSRATGIPDRFSGSGSGTDFTLTISRLEPEDFAVYYCQQYGSSPWTFGQGTKVEIK

SEQ ID NO: 2397 - protein, 231 aa, synthetic construct
  REGION 1..231: note = Description of Artificial Sequence: Synthetic polypeptide
  REGION 1..231: note = Fc chain of XENP022835
EPKSSDKTHTCPPCPAPPVAGPSVFLFPPKPKDTLMISRTPEVTCVVVDVKHEDPEVKFNWYVDGVEVHNAKTKPREEQYNSTYRVVSVLTVLHQDWLNGKEYKCKVSNKALPAPIEKTISKAKGQPREPQVYTLPPSREQMTKNQVKLTCLVKGFYPSDIAVEWESNGQPENNYKTTPPVLDSDGSFFLYSKLTVDKSRWQQGNVFSCSVMHEALHNHYTQKSLSLSPGK

SEQ ID NO: 2398 - protein, 5 aa, synthetic construct
  REGION 1..5: note = Description of Artificial Sequence: Synthetic peptide
  REGION 1..5: note = XENP022835 vhCDR1
SYTMH

SEQ ID NO: 2399 - protein, 17 aa, synthetic construct
  REGION 1..17: note = Description of Artificial Sequence: Synthetic peptide
  REGION 1..17: note = XENP022835 vhCDR2
FISYDGNYKYYADSVKG

SEQ ID NO: 2400 - protein, 9 aa, synthetic construct
  REGION 1..9: note = Description of Artificial Sequence: Synthetic peptide
  REGION 1..9: note = XENP022835 vhCDR3
GGHLGPFDL

SEQ ID NO: 2401 - protein, 12 aa, synthetic construct
  REGION 1..12: note = Description of Artificial Sequence: Synthetic peptide
  REGION 1..12: note = XENP022835 vlCDR1
RASQSVGSSYLA

SEQ ID NO: 2402 - protein, 7 aa, synthetic construct
  REGION 1..7: note = Description of Artificial Sequence: Synthetic peptide
  REGION 1..7: note = XENP022835 vlCDR2
GASSRAT

SEQ ID NO: 2403 - protein, 9 aa, synthetic construct
  REGION 1..9: note = Description of Artificial Sequence: Synthetic peptide
  REGION 1..9: note = XENP022835 vlCDR3
QQYGSSPWT

SEQ ID NO: 2404 - protein, 447 aa, synthetic construct
  REGION 1..447: note = Description of Artificial Sequence: Synthetic polypeptide
  REGION 1..447: note = XENP023552 [CTLA-4]_H3_L0.22_Fab-empty_Fc(216)_IgG1 Fab-Fc Heavy Chain
EVQLVESGGGLVKPGGSLRLSCAASGFTFSSYTMHWVRQAPGKGLEWVSFISYDGNNKYYADSVKGRFTISRDNAKNSLYLQMNSLRAEDTAVYYCARTGWLGPFDYWGQGTLVTVSSASTKGPSVFPLAPSSKSTSGGTAALGCLVKDYFPEPVTVSWNSGALTSGVHTFPAVLQSSGLYSLSSVVTVPSSSLGTQTYICNVNHKPSDTKVDKKVEPKSCDKTHTCPPCPAPPVAGPSVFLFPPKPKDTLMISRTPEVTCVVVDVKHEDPEVKFNWYVDGVEVHNAKTKPREEEYNSTYRVVSVLTVLHQDWLNGKEYKCKVSNKALPAPIEKTISKAKGQPREPQVYTLPPSREEMTKNQVSLTCDVSGFYPSDIAVEWESDGQPENNYKTTPPVLDSDGSFFLYSKLTVDKSRWEQGDVFSCSVLHEALHSHYTQKSLSLSPGK

SEQ ID NO: 2405 - protein, 118 aa, synthetic construct
  REGION 1..118: note = Description of Artificial Sequence: Synthetic polypeptide
  REGION 1..118: note = VH of XENP023552
EVQLVESGGGLVKPGGSLRLSCAASGFTFSSYTMHWVRQAPGKGLEWVSFISYDGNNKYYADSVKGRFTISRDNAKNSLYLQMNSLRAEDTAVYYCARTGWLGPFDYWGQGTLVTVSS

SEQ ID NO: 2406 - protein, 5 aa, synthetic construct
  REGION 1..5: note = Description of Artificial Sequence: Synthetic peptide
  REGION 1..5: note = XENP023552 vhCDR1
SYTMH

SEQ ID NO: 2407 - protein, 17 aa, synthetic construct
  REGION 1..17: note = Description of Artificial Sequence: Synthetic peptide
  REGION 1..17: note = XENP023552 vhCDR2
FISYDGNNKYYADSVKG

SEQ ID NO: 2408 - protein, 9 aa, synthetic construct
  REGION 1..9: note = Description of Artificial Sequence: Synthetic peptide
  REGION 1..9: note = XENP023552 vhCDR3
TGWLGPFDY

SEQ ID NO: 2409 - protein, 231 aa, synthetic construct
  REGION 1..231: note = Description of Artificial Sequence: Synthetic polypeptide
  REGION 1..231: note = XENP023552 [CTLA-4]_H3_L0.22_Fab-empty_Fc(216)_IgG1 Empty-Fc Heavy Chain
EPKSSDKTHTCPPCPAPPVAGPSVFLFPPKPKDTLMISRTPEVTCVVVDVKHEDPEVKFNWYVDGVEVHNAKTKPREEQYNSTYRVVSVLTVLHQDWLNGKEYKCKVSNKALPAPIEKTISKAKGQPREPQVYTLPPSREQMTKNQVKLTCLVKGFYPSDIAVEWESNGQPENNYKTTPPVLDSDGSFFLYSKLTVDKSRWQQGNVFSCSVLHEALHSHYTQKSLSLSPGK

SEQ ID NO: 2410 - protein, 215 aa, synthetic construct
  REGION 1..215: note = Description of Artificial Sequence: Synthetic polypeptide
  REGION 1..215: note = XENP023552 [CTLA-4]_H3_L0.22_Fab-empty_Fc(216)_IgG1 Light Chain
EIVLTQSPGTLSLSPGERATLSCRASQSVSSSYLAWYQQKPGQAPRLLIYGAFSRATGIPDRFSGSGSGTDFTLTISRLEPEDFAVYYCQQYGSSPWTFGQGTKVEIKRTVAAPSVFIFPPSDEQLKSGTASVVCLLNNFYPREAKVQWKVDNALQSGNSQESVTEQDSKDSTYSLSSTLTLSKADYEKHKVYACEVTHQGLSSPVTKSFNRGEC

SEQ ID NO: 2411 - protein, 108 aa, synthetic construct
  REGION 1..108: note = Description of Artificial Sequence: Synthetic polypeptide
  REGION 1..108: note = VL of XENP023552
EIVLTQSPGTLSLSPGERATLSCRASQSVSSSYLAWYQQKPGQAPRLLIYGAFSRATGIPDRFSGSGSGTDFTLTISRLEPEDFAVYYCQQYGSSPWTFGQGTKVEIK

SEQ ID NO: 2412 - protein, 12 aa, synthetic construct
  REGION 1..12: note = Description of Artificial Sequence: Synthetic peptide
  REGION 1..12: note = XENP023552 vlCDR1
RASQSVSSSYLA

SEQ ID NO: 2413 - protein, 7 aa, synthetic construct
  REGION 1..7: note = Description of Artificial Sequence: Synthetic peptide
  REGION 1..7: note = XENP023552 vlCDR2
GAFSRAT

SEQ ID NO: 2414 - protein, 9 aa, synthetic construct
  REGION 1..9: note = Description of Artificial Sequence: Synthetic peptide
  REGION 1..9: note = XENP023552 vlCDR3
QQYGSSPWT

SEQ ID NO: 2415 - protein, 226 aa, synthetic construct
  REGION 1..226: note = Description of Artificial Sequence: Synthetic polypeptide
  REGION 1..226: note = XENP023041 7G8_H3.66_L1.34_Fab Heavy Chain
EVQLVESGGGLVQPGGSLRLSCAASGFTFDEAWMSWVRQAPGKGLEWVAEISTKANNHATYYAESVKGRFTISRDDSKSSVYLQMNSLRAEDTAVYYCTRLATWDWYFDVWGQGTTVTVSSASTKGPSVFPLAPSSKSTSGGTAALGCLVKDYFPEPVTVSWNSGALTSGVHTFPAVLQSSGLYSLSSVVTVPSSSLGTQTYICNVNHKPSNTKVDKKVEPKSCGS

SEQ ID NO: 2416 - protein, 121 aa, synthetic construct
  REGION 1..121: note = Description of Artificial Sequence: Synthetic polypeptide
  REGION 1..121: note = VH of XENP023041
EVQLVESGGGLVQPGGSLRLSCAASGFTFDEAWMSWVRQAPGKGLEWVAEISTKANNHATYYAESVKGRFTISRDDSKSSVYLQMNSLRAEDTAVYYCTRLATWDWYFDVWGQGTTVTVSS

SEQ ID NO: 2417 - protein, 5 aa, synthetic construct
  REGION 1..5: note = Description of Artificial Sequence: Synthetic peptide
  REGION 1..5: note = XENP023041 vhCDR1
EAWMS

SEQ ID NO: 2418 - protein, 19 aa, synthetic construct
  REGION 1..19: note = Description of Artificial Sequence: Synthetic peptide
  REGION 1..19: note = XENP023041 vhCDR2
EISTKANNHATYYAESVKG

SEQ ID NO: 2419 - protein, 10 aa, synthetic construct
  REGION 1..10: note = Description of Artificial Sequence: Synthetic peptide
  REGION 1..10: note = XENP023041 vhCDR3
LATWDWYFDV

SEQ ID NO: 2420 - protein, 218 aa, synthetic construct
  REGION 1..218: note = Description of Artificial Sequence: Synthetic polypeptide
  REGION 1..218: note = XENP023041 7G8_H3.66_L1.34_Fab Light Chain
DIVLTQSPSSLSASVGDRVTITCRASQSVDYDGDSYMNWYQQKPGKPPKLLIYAASELESGIPARFSGSGSGTDFTLTISSLQPEDFATYYCQQSNEDPFTFGSGTKLEIKRTVAAPSVFIFPPSDEQLKSGTASVVCLLNNFYPREAKVQWKVDNALQSGNSQESVTEQDSKDSTYSLSSTLTLSKADYEKHKVYACEVTHQGLSSPVTKSFNRGEC

SEQ ID NO: 2421 - protein, 111 aa, synthetic construct
  REGION 1..111: note = Description of Artificial Sequence: Synthetic polypeptide
  REGION 1..111: note = VL of XENP023041
DIVLTQSPSSLSASVGDRVTITCRASQSVDYDGDSYMNWYQQKPGKPPKLLIYAASELESGIPARFSGSGSGTDFTLTISSLQPEDFATYYCQQSNEDPFTFGSGTKLEIK

SEQ ID NO: 2422 - protein, 15 aa, synthetic construct
  REGION 1..15: note = Description of Artificial Sequence: Synthetic peptide
  REGION 1..15: note = XENP023041 vlCDR1
RASQSVDYDGDSYMN

SEQ ID NO: 2423 - protein, 7 aa, synthetic construct
  REGION 1..7: note = Description of Artificial Sequence: Synthetic peptide
  REGION 1..7: note = XENP023041 vlCDR2
AASELES

SEQ ID NO: 2424 - protein, 9 aa, synthetic construct
  REGION 1..9: note = Description of Artificial Sequence: Synthetic peptide
  REGION 1..9: note = XENP023041 vlCDR3
QQSNEDPFT

SEQ ID NO: 2425 - protein, 226 aa, synthetic construct
  REGION 1..226: note = Description of Artificial Sequence: Synthetic polypeptide
  REGION 1..226: note = XENP023042 7G8_H3.67_L1.34_Fab Heavy Chain
EVQLVESGGGLVQPGGSLRLSCAASGFTFDDTWMSWVRQAPGKGLEWVAEISTKANNHATYYAESVKGRFTISRDDSKSSVYLQMNSLRAEDTAVYYCTRLATWDWYFDVWGQGTTVTVSSASTKGPSVFPLAPSSKSTSGGTAALGCLVKDYFPEPVTVSWNSGALTSGVHTFPAVLQSSGLYSLSSVVTVPSSSLGTQTYICNVNHKPSNTKVDKKVEPKSCGS

SEQ ID NO: 2426 - protein, 121 aa, synthetic construct
  REGION 1..121: note = Description of Artificial Sequence: Synthetic polypeptide
  REGION 1..121: note = VH of XENP023042
EVQLVESGGGLVQPGGSLRLSCAASGFTFDDTWMSWVRQAPGKGLEWVAEISTKANNHATYYAESVKGRFTISRDDSKSSVYLQMNSLRAEDTAVYYCTRLATWDWYFDVWGQGTTVTVSS

SEQ ID NO: 2427 - protein, 5 aa, synthetic construct
  REGION 1..5: note = Description of Artificial Sequence: Synthetic peptide
  REGION 1..5: note = XENP023042 vhCDR1
DTWMS

SEQ ID NO: 2428 - protein, 19 aa, synthetic construct
  REGION 1..19: note = Description of Artificial Sequence: Synthetic peptide
  REGION 1..19: note = XENP023042 vhCDR2
EISTKANNHATYYAESVKG

SEQ ID NO: 2429 - protein, 10 aa, synthetic construct
  REGION 1..10: note = Description of Artificial Sequence: Synthetic peptide
  REGION 1..10: note = XENP023042 vhCDR3
LATWDWYFDV

SEQ ID NO: 2430 - protein, 218 aa, synthetic construct; identical to SEQ ID NO: 2420
  REGION 1..218: note = Description of Artificial Sequence: Synthetic polypeptide
  REGION 1..218: note = XENP023042 7G8_H3.67_L1.34_Fab Light Chain

SEQ ID NO: 2431 - protein, 111 aa, synthetic construct; identical to SEQ ID NO: 2421
  REGION 1..111: note = Description of Artificial Sequence: Synthetic polypeptide
  REGION 1..111: note = VL of XENP023042

SEQ ID NO: 2432 - protein, 15 aa, synthetic construct
  REGION 1..15: note = Description of Artificial Sequence: Synthetic peptide
  REGION 1..15: note = XENP023042 vlCDR1
RASQSVDYDGDSYMN

SEQ ID NO: 2433 - protein, 7 aa, synthetic construct
  REGION 1..7: note = Description of Artificial Sequence: Synthetic peptide
  REGION 1..7: note = XENP023042 vlCDR2
AASELES

SEQ ID NO: 2434 - protein, 9 aa, synthetic construct
  REGION 1..9: note = Description of Artificial Sequence: Synthetic peptide
  REGION 1..9: note = XENP023042 vlCDR3
QQSNEDPFT

SEQ ID NO: 2435 - protein, 226 aa, synthetic construct
  REGION 1..226: note = Description of Artificial Sequence: Synthetic polypeptide
  REGION 1..226: note = XENP023043 7G8_H3.68_L1.34_Fab Heavy Chain
EVQLVESGGGLVQPGGSLRLSCAASGFTFDDKWMSWVRQAPGKGLEWVAEISTKANNHATYYAESVKGRFTISRDDSKSSVYLQMNSLRAEDTAVYYCTRLATWDWYFDVWGQGTTVTVSSASTKGPSVFPLAPSSKSTSGGTAALGCLVKDYFPEPVTVSWNSGALTSGVHTFPAVLQSSGLYSLSSVVTVPSSSLGTQTYICNVNHKPSNTKVDKKVEPKSCGS

SEQ ID NO: 2436 - protein, 121 aa, synthetic construct
  REGION 1..121: note = Description of Artificial Sequence: Synthetic polypeptide
  REGION 1..121: note = VH of XENP023043
EVQLVESGGGLVQPGGSLRLSCAASGFTFDDKWMSWVRQAPGKGLEWVAEISTKANNHATYYAESVKGRFTISRDDSKSSVYLQMNSLRAEDTAVYYCTRLATWDWYFDVWGQGTTVTVSS

SEQ ID NO: 2437 - protein, 5 aa, synthetic construct
  REGION 1..5: note = Description of Artificial Sequence: Synthetic peptide
  REGION 1..5: note = XENP023043 vhCDR1
DKWMS

SEQ ID NO: 2438 - protein, 19 aa, synthetic construct
  REGION 1..19: note = Description of Artificial Sequence: Synthetic peptide
  REGION 1..19: note = XENP023043 vhCDR2
EISTKANNHATYYAESVKG

SEQ ID NO: 2439 - protein, 10 aa, synthetic construct
  REGION 1..10: note = Description of Artificial Sequence: Synthetic peptide
  REGION 1..10: note = XENP023043 vhCDR3
LATWDWYFDV

SEQ ID NO: 2440 - protein, 218 aa, synthetic construct; identical to SEQ ID NO: 2420
  REGION 1..218: note = Description of Artificial Sequence: Synthetic polypeptide
  REGION 1..218: note = XENP023043 7G8_H3.68_L1.34_Fab Light Chain

SEQ ID NO: 2441 - protein, 111 aa, synthetic construct; identical to SEQ ID NO: 2421
  REGION 1..111: note = Description of Artificial Sequence: Synthetic polypeptide
  REGION 1..111: note = VL of XENP023043

SEQ ID NO: 2442 - protein, 15 aa, synthetic construct
  REGION 1..15: note = Description of Artificial Sequence: Synthetic peptide
  REGION 1..15: note = XENP023043 vlCDR1
RASQSVDYDGDSYMN

SEQ ID NO: 2443 - protein, 7 aa, synthetic construct
  REGION 1..7: note = Description of Artificial Sequence: Synthetic peptide
  REGION 1..7: note = XENP023043 vlCDR2
AASELES

SEQ ID NO: 2444 - protein, 9 aa, synthetic construct
  REGION 1..9: note = Description of Artificial Sequence: Synthetic peptide
  REGION 1..9: note = XENP023043 vlCDR3
QQSNEDPFT

SEQ ID NO: 2445 - protein, 226 aa, synthetic construct
  REGION 1..226: note = Description of Artificial Sequence: Synthetic polypeptide
  REGION 1..226: note = XENP023044 7G8_H3.69_L1.34_Fab Heavy Chain
EVQLVESGGGLVQPGGSLRLSCAASGFTFDDAFMSWVRQAPGKGLEWVAEISTKANNHATYYAESVKGRFTISRDDSKSSVYLQMNSLRAEDTAVYYCTRLATWDWYFDVWGQGTTVTVSSASTKGPSVFPLAPSSKSTSGGTAALGCLVKDYFPEPVTVSWNSGALTSGVHTFPAVLQSSGLYSLSSVVTVPSSSLGTQTYICNVNHKPSNTKVDKKVEPKSCGS

SEQ ID NO: 2446 - protein, 121 aa, synthetic construct
  REGION 1..121: note = Description of Artificial Sequence: Synthetic polypeptide
  REGION 1..121: note = VH of XENP023044
EVQLVESGGGLVQPGGSLRLSCAASGFTFDDAFMSWVRQAPGKGLEWVAEISTKANNHATYYAESVKGRFTISRDDSKSSVYLQMNSLRAEDTAVYYCTRLATWDWYFDVWGQGTTVTVSS

SEQ ID NO: 2447 - protein, 5 aa, synthetic construct
  REGION 1..5: note = Description of Artificial Sequence: Synthetic peptide
  REGION 1..5: note = XENP023044 vhCDR1
DAFMS

SEQ ID NO: 2448 - protein, 19 aa, synthetic construct
  REGION 1..19: note = Description of Artificial Sequence: Synthetic peptide
  REGION 1..19: note = XENP023044 vhCDR2
EISTKANNHATYYAESVKG

SEQ ID NO: 2449 - protein, 10 aa, synthetic construct
  REGION 1..10: note = Description of Artificial Sequence: Synthetic peptide
  REGION 1..10: note = XENP023044 vhCDR3
LATWDWYFDV

SEQ ID NO: 2450 - protein, 218 aa, synthetic construct; identical to SEQ ID NO: 2420
  REGION 1..218: note = Description of Artificial Sequence: Synthetic polypeptide
  REGION 1..218: note = XENP023044 7G8_H3.69_L1.34_Fab Light Chain

SEQ ID NO: 2451 - protein, 111 aa, synthetic construct; identical to SEQ ID NO: 2421
  REGION 1..111: note = Description of Artificial Sequence: Synthetic polypeptide
  REGION 1..111: note = VL of XENP023044

SEQ ID NO: 2452 - protein, 15 aa, synthetic construct
  REGION 1..15: note = Description of Artificial Sequence: Synthetic peptide
  REGION 1..15: note = XENP023044 vlCDR1
RASQSVDYDGDSYMN

SEQ ID NO: 2453 - protein, 7 aa, synthetic construct
  REGION 1..7: note = Description of Artificial Sequence: Synthetic peptide
  REGION 1..7: note = XENP023044 vlCDR2
AASELES

SEQ ID NO: 2454 - protein, 9 aa, synthetic construct
  REGION 1..9: note = Description of Artificial Sequence: Synthetic peptide
  REGION 1..9: note = XENP023044 vlCDR3
QQSNEDPFT

SEQ ID NO: 2455 - protein, 226 aa, synthetic construct
  REGION 1..226: note = Description of Artificial Sequence: Synthetic polypeptide
  REGION 1..226: note = XENP023045 7G8_H3.70_L1.34_Fab Heavy Chain
EVQLVESGGGLVQPGGSLRLSCAASGFTFDDAYMSWVRQAPGKGLEWVAEISTKANNHATYYAESVKGRFTISRDDSKSSVYLQMNSLRAEDTAVYYCTRLATWDWYFDVWGQGTTVTVSSASTKGPSVFPLAPSSKSTSGGTAALGCLVKDYFPEPVTVSWNSGALTSGVHTFPAVLQSSGLYSLSSVVTVPSSSLGTQTYICNVNHKPSNTKVDKKVEPKSCGS

SEQ ID NO: 2456 - protein, 121 aa, synthetic construct
  REGION 1..121: note = Description of Artificial Sequence: Synthetic polypeptide
  REGION 1..121: note = VH of XENP023045
EVQLVESGGGLVQPGGSLRLSCAASGFTFDDAYMSWVRQAPGKGLEWVAEISTKANNHATYYAESVKGRFTISRDDSKSSVYLQMNSLRAEDTAVYYCTRLATWDWYFDVWGQGTTVTVSS

SEQ ID NO: 2457 - protein, 5 aa, synthetic construct
  REGION 1..5: note = Description of Artificial Sequence: Synthetic peptide
  REGION 1..5: note = XENP023045 vhCDR1
DAYMS

SEQ ID NO: 2458 - protein, 19 aa, synthetic construct
  REGION 1..19: note = Description of Artificial Sequence: Synthetic peptide
  REGION 1..19: note = XENP023045 vhCDR2
EISTKANNHATYYAESVKG

SEQ ID NO: 2459 - protein, 10 aa, synthetic construct
  REGION 1..10: note = Description of Artificial Sequence: Synthetic peptide
  REGION 1..10: note = XENP023045 vhCDR3
LATWDWYFDV

SEQ ID NO: 2460 - protein, 218 aa, synthetic construct; identical to SEQ ID NO: 2420
  REGION 1..218: note = Description of Artificial Sequence: Synthetic polypeptide
  REGION 1..218: note = XENP023045 7G8_H3.70_L1.34_Fab Light Chain

SEQ ID NO: 2461 - protein, 111 aa, synthetic construct; identical to SEQ ID NO: 2421
  REGION 1..111: note = Description of Artificial Sequence: Synthetic polypeptide
  REGION 1..111: note = VL of XENP023045

SEQ ID NO: 2462 - protein, 15 aa, synthetic construct
  REGION 1..15: note = Description of Artificial Sequence: Synthetic peptide
  REGION 1..15: note = XENP023045 vlCDR1
RASQSVDYDGDSYMN

SEQ ID NO: 2463 - protein, 7 aa, synthetic construct
  REGION 1..7: note = Description of Artificial Sequence: Synthetic peptide
  REGION 1..7: note = XENP023045 vlCDR2
AASELES

SEQ ID NO: 2464 - protein, 9 aa, synthetic construct
  REGION 1..9: note = Description of Artificial Sequence: Synthetic peptide
  REGION 1..9: note = XENP023045 vlCDR3
QQSNEDPFT

SEQ ID NO: 2465 - protein, 226 aa, synthetic construct
  REGION 1..226: note = Description of Artificial Sequence: Synthetic polypeptide
  REGION 1..226: note = XENP023046 7G8_H3.71_L1.34_Fab Heavy Chain
EVQLVESGGGLVQPGGSLRLSCAASGFTFDDAWMSWVRQAPGKGLEWVAEISTKAYNHATYYAESVKGRFTISRDDSKSSVYLQMNSLRAEDTAVYYCTRLATWDWYFDVWGQGTTVTVSSASTKGPSVFPLAPSSKSTSGGTAALGCLVKDYFPEPVTVSWNSGALTSGVHTFPAVLQSSGLYSLSSVVTVPSSSLGTQTYICNVNHKPSNTKVDKKVEPKSCGS

SEQ ID NO: 2466 - protein, 121 aa, synthetic construct
  REGION 1..121: note = Description of Artificial Sequence: Synthetic polypeptide
  REGION 1..121: note = VH of XENP023046
EVQLVESGGGLVQPGGSLRLSCAASGFTFDDAWMSWVRQAPGKGLEWVAEISTKAYNHATYYAESVKGRFTISRDDSKSSVYLQMNSLRAEDTAVYYCTRLATWDWYFDVWGQGTTVTVSS

SEQ ID NO: 2467 - protein, 5 aa, synthetic construct
  REGION 1..5: note = Description of Artificial Sequence: Synthetic peptide
  REGION 1..5: note = XENP023046 vhCDR1
DAWMS

SEQ ID NO: 2468 - protein, 19 aa, synthetic construct
  REGION 1..19: note = Description of Artificial Sequence: Synthetic peptide
  REGION 1..19: note = XENP023046 vhCDR2
EISTKAYNHATYYAESVKG

SEQ ID NO: 2469 - protein, 10 aa, synthetic construct
  REGION 1..10: note = Description of Artificial Sequence: Synthetic peptide
  REGION 1..10: note = XENP023046 vhCDR3
LATWDWYFDV

SEQ ID NO: 2470 - protein, 218 aa, synthetic construct; identical to SEQ ID NO: 2420
  REGION 1..218: note = Description of Artificial Sequence: Synthetic polypeptide
  REGION 1..218: note = XENP023046 7G8_H3.71_L1.34_Fab Light Chain

SEQ ID NO: 2471 - protein, 111 aa, synthetic construct; identical to SEQ ID NO: 2421
  REGION 1..111: note = Description of Artificial Sequence: Synthetic polypeptide
  REGION 1..111: note = VL of XENP023046

SEQ ID NO: 2472 - protein, 15 aa, synthetic construct
  REGION 1..15: note = Description of Artificial Sequence: Synthetic peptide
  REGION 1..15: note = XENP023046 vlCDR1
RASQSVDYDGDSYMN

SEQ ID NO: 2473 - protein, 7 aa, synthetic construct
  REGION 1..7: note = Description of Artificial Sequence: Synthetic peptide
  REGION 1..7: note = XENP023046 vlCDR2
AASELES

SEQ ID NO: 2474 - protein, 9 aa, synthetic construct
  REGION 1..9: note = Description of Artificial Sequence: Synthetic peptide
  REGION 1..9: note = XENP023046 vlCDR3
QQSNEDPFT

SEQ ID NO: 2475 - protein, 226 aa, synthetic construct
  REGION 1..226: note = Description of Artificial Sequence: Synthetic polypeptide
  REGION 1..226: note = XENP023047 7G8_H3.72_L1.34_Fab Heavy Chain
EVQLVESGGGLVQPGGSLRLSCAASGFTFDDAWMSWVRQAPGKGLEWVAEISTKANNHATYYAESVKGRFTISRDDSKSSVYLQMNSLRAEDTAVYYCTRLATFDWYFDVWGQGTTVTVSSASTKGPSVFPLAPSSKSTSGGTAALGCLVKDYFPEPVTVSWNSGALTSGVHTFPAVLQSSGLYSLSSVVTVPSSSLGTQTYICNVNHKPSNTKVDKKVEPKSCGS

SEQ ID NO: 2476 - protein, 121 aa, synthetic construct
  REGION 1..121: note = Description of Artificial Sequence: Synthetic polypeptide
  REGION 1..121: note = VH of XENP023047
EVQLVESGGGLVQPGGSLRLSCAASGFTFDDAWMSWVRQAPGKGLEWVAEISTKANNHATYYAESVKGRFTISRDDSKSSVYLQMNSLRAEDTAVYYCTRLATFDWYFDVWGQGTTVTVSS

SEQ ID NO: 2477 - protein, 5 aa, synthetic construct
  REGION 1..5: note = Description of Artificial Sequence: Synthetic peptide
  REGION 1..5: note = XENP023047 vhCDR1
DAWMS

SEQ ID NO: 2478 - protein, 19 aa, synthetic construct
  REGION 1..19: note = Description of Artificial Sequence: Synthetic peptide
  REGION 1..19: note = XENP023047 vhCDR2
EISTKANNHATYYAESVKG

SEQ ID NO: 2479 - protein, 10 aa, synthetic construct
  REGION 1..10: note = Description of Artificial Sequence: Synthetic peptide
  REGION 1..10: note = XENP023047 vhCDR3
LATFDWYFDV

SEQ ID NO: 2480 - protein, 218 aa, synthetic construct; identical to SEQ ID NO: 2420
  REGION 1..218: note = Description of Artificial Sequence: Synthetic polypeptide
  REGION 1..218: note = XENP023047 7G8_H3.72_L1.34_Fab Light Chain

SEQ ID NO: 2481 - protein, 111 aa, synthetic construct; identical to SEQ ID NO: 2421
  REGION 1..111: note = Description of Artificial Sequence: Synthetic polypeptide
  REGION 1..111: note = VL of XENP023047

SEQ ID NO: 2482 - protein, 15 aa, synthetic construct
  REGION 1..15: note = Description of Artificial Sequence: Synthetic peptide
  REGION 1..15: note = XENP023047 vlCDR1
RASQSVDYDGDSYMN

SEQ ID NO: 2483 - protein, 7 aa, synthetic construct
  REGION 1..7: note = Description of Artificial Sequence: Synthetic peptide
  REGION 1..7: note = XENP023047 vlCDR2
AASELES

SEQ ID NO: 2484 - protein, 9 aa, synthetic construct
  REGION 1..9: note = Description of Artificial Sequence: Synthetic peptide
  REGION 1..9: note = XENP023047 vlCDR3
QQSNEDPFT

SEQ ID NO: 2485 - protein, 226 aa, synthetic construct
  REGION 1..226: note = Description of Artificial Sequence: Synthetic polypeptide
  REGION 1..226: note = XENP023048 7G8_H3.73_L1.34_Fab Heavy Chain
EVQLVESGGGLVQPGGSLRLSCAASGFTFDDAWMSWVRQAPGKGLEWVAEISTKANNHATYYAESVKGRFTISRDDSKSSVYLQMNSLRAEDTAVYYCTRLATYDWYFDVWGQGTTVTVSSASTKGPSVFPLAPSSKSTSGGTAALGCLVKDYFPEPVTVSWNSGALTSGVHTFPAVLQSSGLYSLSSVVTVPSSSLGTQTYICNVNHKPSNTKVDKKVEPKSCGS

SEQ ID NO: 2486 - protein, 121 aa, synthetic construct
  REGION 1..121: note = Description of Artificial Sequence: Synthetic polypeptide
  REGION 1..121: note = VH of XENP023048
EVQLVESGGGLVQPGGSLRLSCAASGFTFDDAWMSWVRQAPGKGLEWVAEISTKANNHATYYAESVKGRFTISRDDSKSSVYLQMNSLRAEDTAVYYCTRLATYDWYFDVWGQGTTVTVSS

SEQ ID NO: 2487 - protein, 5 aa, synthetic construct
  REGION 1..5: note = Description of Artificial Sequence: Synthetic peptide
  REGION 1..5: note = XENP023048 vhCDR1
DAWMS

SEQ ID NO: 2488 - protein, 19 aa, synthetic construct
  REGION 1..19: note = Description of Artificial Sequence: Synthetic peptide
  REGION 1..19: note = XENP023048 vhCDR2
EISTKANNHATYYAESVKG

SEQ ID NO: 2489 - protein, 10 aa, synthetic construct
  REGION 1..10: note = Description of Artificial Sequence: Synthetic peptide
  REGION 1..10: note = XENP023048 vhCDR3
LATYDWYFDV

SEQ ID NO: 2490 - protein, 218 aa, synthetic construct; identical to SEQ ID NO: 2420
  REGION 1..218: note = Description of Artificial Sequence: Synthetic polypeptide
  REGION 1..218: note = XENP023048 7G8_H3.73_L1.34_Fab Light Chain

SEQ ID NO: 2491 - protein, 111 aa, synthetic construct; identical to SEQ ID NO: 2421
  REGION 1..111: note = Description of Artificial Sequence: Synthetic polypeptide
  REGION 1..111: note = VL of XENP023048

SEQ ID NO: 2492 - protein, 15 aa, synthetic construct
  REGION 1..15: note = Description of Artificial Sequence: Synthetic peptide
  REGION 1..15: note = XENP023048 vlCDR1
RASQSVDYDGDSYMN

SEQ ID NO: 2493 - protein, 7 aa, synthetic construct
  REGION 1..7: note = Description of Artificial Sequence: Synthetic peptide
  REGION 1..7: note = XENP023048 vlCDR2
AASELES

SEQ ID NO: 2494 - protein, 9 aa, synthetic construct
  REGION 1..9: note = Description of Artificial Sequence: Synthetic peptide
  REGION 1..9: note = XENP023048 vlCDR3
QQSNEDPFT

SEQ ID NO: 2495 - protein, 226 aa, synthetic construct
  REGION 1..226: note = Description of Artificial Sequence: Synthetic polypeptide
  REGION 1..226: note = XENP023049 7G8_H3.74_L1.34_Fab Heavy Chain
EVQLVESGGGLVQPGGSLRLSCAASGFTFDDAWMSWVRQAPGKGLEWVAEISTKANNHATYYAESVKGRFTISRDDSKSSVYLQMNSLRAEDTAVYYCTRLATWDFYFDVWGQGTTVTVSSASTKGPSVFPLAPSSKSTSGGTAALGCLVKDYFPEPVTVSWNSGALTSGVHTFPAVLQSSGLYSLSSVVTVPSSSLGTQTYICNVNHKPSNTKVDKKVEPKSCGS

SEQ ID NO: 2496 - protein, 121 aa, synthetic construct
  REGION 1..121: note = Description of Artificial Sequence: Synthetic polypeptide
  REGION 1..121: note = VH of XENP023049
EVQLVESGGGLVQPGGSLRLSCAASGFTFDDAWMSWVRQAPGKGLEWVAEISTKANNHATYYAESVKGRFTISRDDSKSSVYLQMNSLRAEDTAVYYCTRLATWDFYFDVWGQGTTVTVSS

SEQ ID NO: 2497 - protein, 5 aa, synthetic construct
  REGION 1..5: note = Description of Artificial Sequence: Synthetic peptide
  REGION 1..5: note = XENP023049 vhCDR1
DAWMS

SEQ ID NO: 2498 - protein, 19 aa, synthetic construct
  REGION 1..19: note = Description of Artificial Sequence: Synthetic peptide
  REGION 1..19: note = XENP023049 vhCDR2
EISTKANNHATYYAESVKG

SEQ ID NO: 2499 - protein, 10 aa, synthetic construct
  REGION 1..10: note = Description of Artificial Sequence: Synthetic peptide
  REGION 1..10: note = XENP023049 vhCDR3
LATWDFYFDV

SEQ ID NO: 2500 - protein, 218 aa, synthetic construct; identical to SEQ ID NO: 2420
  REGION 1..218: note = Description of Artificial Sequence: Synthetic polypeptide
  REGION 1..218: note = XENP023049 7G8_H3.74_L1.34_Fab Light Chain

SEQ ID NO: 2501 - protein, 111 aa, synthetic construct; identical to SEQ ID NO: 2421
  REGION 1..111: note = Description of Artificial Sequence: Synthetic polypeptide
  REGION 1..111: note = VL of XENP023049

SEQ ID NO: 2502 - protein, 15 aa, synthetic construct
  REGION 1..15: note = Description of Artificial Sequence: Synthetic peptide
  REGION 1..15: note = XENP023049 vlCDR1
RASQSVDYDGDSYMN

SEQ ID NO: 2503 - protein, 7 aa, synthetic construct
  REGION 1..7: note = Description of Artificial Sequence: Synthetic peptide
  REGION 1..7: note = XENP023049 vlCDR2
AASELES

SEQ ID NO: 2504 - protein, 9 aa, synthetic construct
  REGION 1..9: note = Description of Artificial Sequence: Synthetic peptide
  REGION 1..9: note = XENP023049 vlCDR3
QQSNEDPFT

SEQ ID NO: 2505 - protein, 226 aa, synthetic construct
  REGION 1..226: note = Description of Artificial Sequence: Synthetic polypeptide
  REGION 1..226: note = XENP023050 7G8_H3.75_L1.34_Fab Heavy Chain
EVQLVESGGGLVQPGGSLRLSCAASGFTFDDAWMSWVRQAPGKGLEWVAEISTKANNHATYYAESVKGRFTISRDDSKSSVYLQMNSLRAEDTAVYYCTRLATWDYYFDVWGQGTTVTVSSASTKGPSVFPLAPSSKSTSGGTAALGCLVKDYFPEPVTVSWNSGALTSGVHTFPAVLQSSGLYSLSSVVTVPSSSLGTQTYICNVNHKPSNTKVDKKVEPKSCGS

SEQ ID NO: 2506 - protein, 121 aa, synthetic construct
  REGION 1..121: note = Description of Artificial Sequence: Synthetic polypeptide
  REGION 1..121: note = VH of XENP023050
EVQLVESGGGLVQPGGSLRLSCAASGFTFDDAWMSWVRQAPGKGLEWVAEISTKANNHATYYAESVKGRFTISRDDSKSSVYLQMNSLRAEDTAVYYCTRLATWDYYFDVWGQGTTVTVSS

SEQ ID NO: 2507 - protein, 5 aa, synthetic construct
  REGION 1..5: note = Description of Artificial Sequence: Synthetic peptide
  REGION 1..5: note = XENP023050 vhCDR1
DAWMS

SEQ ID NO: 2508 - protein, 19 aa, synthetic construct
  REGION 1..19: note = Description of Artificial Sequence: Synthetic peptide
  REGION 1..19: note = XENP023050 vhCDR2
EISTKANNHATYYAESVKG

SEQ ID NO: 2509 - protein, 10 aa, synthetic construct
  REGION 1..10: note = Description of Artificial Sequence: Synthetic peptide
  REGION 1..10: note = XENP023050 vhCDR3
LATWDYYFDV

SEQ ID NO: 2510 - protein, 218 aa, synthetic construct; identical to SEQ ID NO: 2420
  REGION 1..218: note = Description of Artificial Sequence: Synthetic polypeptide
  REGION 1..218: note = XENP023050 7G8_H3.75_L1.34_Fab Light Chain

SEQ ID NO: 2511 - protein, 111 aa, synthetic construct; identical to SEQ ID NO: 2421
  REGION 1..111: note = Description of Artificial Sequence: Synthetic polypeptide
  REGION 1..111: note = VL of XENP023050

SEQ ID NO: 2512 - protein, 15 aa, synthetic construct
  REGION 1..15: note = Description of Artificial Sequence: Synthetic peptide
  REGION 1..15: note = XENP023050 vlCDR1
RASQSVDYDGDSYMN

SEQ ID NO: 2513 - protein, 7 aa, synthetic construct
  REGION 1..7: note = Description of Artificial Sequence: Synthetic peptide
  REGION 1..7: note = XENP023050 vlCDR2
AASELES

SEQ ID NO: 2514 - protein, 9 aa, synthetic construct
  REGION 1..9: note = Description of Artificial Sequence: Synthetic peptide
  REGION 1..9: note = XENP023050 vlCDR3
QQSNEDPFT

SEQ ID NO: 2515 - protein, 226 aa, synthetic construct
  REGION 1..226: note = Description of Artificial Sequence: Synthetic polypeptide
  REGION 1..226: note = XENP023051 7G8_H3.30_L1.38_Fab Heavy Chain
EVQLVESGGGLVQPGGSLRLSCAASGFTFDDAWMSWVRQAPGKGLEWVAEISTKANNHATYYAESVKGRFTISRDDSKSSVYLQMNSLRAEDTAVYYCTRLATWDWYFDVWGQGTTVTVSSASTKGPSVFPLAPSSKSTSGGTAALGCLVKDYFPEPVTVSWNSGALTSGVHTFPAVLQSSGLYSLSSVVTVPSSSLGTQTYICNVNHKPSNTKVDKKVEPKSCGS

SEQ ID NO: 2516 - protein, 121 aa, synthetic construct
  REGION 1..121: note = Description of Artificial Sequence: Synthetic polypeptide
  REGION 1..121: note = VH of XENP023051
EVQLVESGGGLVQPGGSLRLSCAASGFTFDDAWMSWVRQAPGKGLEWVAEISTKANNHATYYAESVKGRFTISRDDSKSSVYLQMNSLRAEDTAVYYCTRLATWDWYFDVWGQGTTVTVSS

SEQ ID NO: 2517 - protein, 5 aa, synthetic construct
  REGION 1..5: note = Description of Artificial Sequence: Synthetic peptide
  REGION 1..5: note = XENP023051 vhCDR1
DAWMS

SEQ ID NO: 2518 - protein, 19 aa, synthetic construct
  REGION 1..19: note = Description of Artificial Sequence: Synthetic peptide
  REGION 1..19: note = XENP023051 vhCDR2
EISTKANNHATYYAESVKG

SEQ ID NO: 2519 - protein, 10 aa, synthetic construct
  REGION 1..10: note = Description of Artificial Sequence: Synthetic peptide
  REGION 1..10: note = XENP023051 vhCDR3
LATWDWYFDV

SEQ ID NO: 2520 - protein, 218 aa, synthetic construct
  REGION 1..218: note = Description of Artificial Sequence: Synthetic polypeptide
  REGION 1..218: note = XENP023051 7G8_H3.30_L1.38_Fab Light Chain
DIVLTQSPSSLSASVGDRVTITCRASQSVDYEGDSYMNWYQQKPGKPPKLLIYAASELESGIPARFSGSGSGTDFTLTISSLQPEDFATYYCQQSNEDPFTFGSGTKLEIKRTVAAPSVFIFPPSDEQLKSGTASVVCLLNNFYPREAKVQWKVDNALQSGNSQESVTEQDSKDSTYSLSSTLTLSKADYEKHKVYACEVTHQGLSSPVTKSFNRGEC

SEQ ID NO: 2521 - protein, 111 aa, synthetic construct
  REGION 1..111: note = Description of Artificial Sequence: Synthetic polypeptide
  REGION 1..111: note = VL of XENP023051
DIVLTQSPSSLSASVGDRVTITCRASQSVDYEGDSYMNWYQQKPGKPPKLLIYAASELESGIPARFSGSGSGTDFTLTISSLQPEDFATYYCQQSNEDPFTFGSGTKLEIK

SEQ ID NO: 2522 - protein, 15 aa, synthetic construct
  REGION 1..15: note = Description of Artificial Sequence: Synthetic peptide
  REGION 1..15: note = XENP023051 vlCDR1
RASQSVDYEGDSYMN

SEQ ID NO: 2523 - protein, 7 aa, synthetic construct
  REGION 1..7: note = Description of Artificial Sequence: Synthetic peptide
  REGION 1..7: note = XENP023051 vlCDR2
AASELES

SEQ ID NO: 2524 - protein, 9 aa, synthetic construct
  REGION 1..9: note = Description of Artificial Sequence: Synthetic peptide
  REGION 1..9: note = XENP023051 vlCDR3
QQSNEDPFT

SEQ ID NO: 2525 - protein, 226 aa, synthetic construct; identical to SEQ ID NO: 2515
  REGION 1..226: note = Description of Artificial Sequence: Synthetic polypeptide
  REGION 1..226: note = XENP023052 7G8_H3.30_L1.39_Fab Heavy Chain

SEQ ID NO: 2526 - protein, 121 aa, synthetic construct; identical to SEQ ID NO: 2516
  REGION 1..121: note = Description of Artificial Sequence: Synthetic polypeptide
  REGION 1..121: note = VH of XENP023052

SEQ ID NO: 2527 - protein, 5 aa, synthetic construct
  REGION 1..5: note = Description of Artificial Sequence: Synthetic peptide
  REGION 1..5: note = XENP023052 vhCDR1
DAWMS

SEQ ID NO: 2528 - protein, 19 aa, synthetic construct
  REGION 1..19: note = Description of Artificial Sequence: Synthetic peptide
  REGION 1..19: note = XENP023052 vhCDR2
EISTKANNHATYYAESVKG

SEQ ID NO: 2529 - protein, 10 aa, synthetic construct
  REGION 1..10: note = Description of Artificial Sequence: Synthetic peptide
  REGION 1..10: note = XENP023052 vhCDR3
LATWDWYFDV

SEQ ID NO: 2530 - protein, 218 aa, synthetic construct
  REGION 1..218: note = Description of Artificial Sequence: Synthetic polypeptide
  REGION 1..218: note = XENP023052 7G8_H3.30_L1.39_Fab Light Chain
DIVLTQSPSSLSASVGDRVTITCRASQSVDYYGDSYMNWYQQKPGKPPKLLIYAASELESGIPARFSGSGSGTDFTLTISSLQPEDFATYYCQQSNEDPFTFGSGTKLEIKRTVAAPSVFIFPPSDEQLKSGTASVVCLLNNFYPREAKVQWKVDNALQSGNSQESVTEQDSKDSTYSLSSTLTLSKADYEKHKVYACEVTHQGLSSPVTKSFNRGEC

SEQ ID NO: 2531 - protein, 111 aa, synthetic construct
  REGION 1..111: note = Description of Artificial Sequence: Synthetic polypeptide
  REGION 1..111: note = VL of XENP023052
DIVLTQSPSSLSASVGDRVTITCRASQSVDYYGDSYMNWYQQKPGKPPKLLIYAASELESGIPARFSGSGSGTDFTLTISSLQPEDFATYYCQQSNEDPFTFGSGTKLEIK

SEQ ID NO: 2532 - protein, 15 aa, synthetic construct
  REGION 1..15: note = Description of Artificial Sequence: Synthetic peptide
  REGION 1..15: note = XENP023052 vlCDR1
RASQSVDYYGDSYMN

SEQ ID NO: 2533 - protein, 7 aa, synthetic construct
  REGION 1..7: note = Description of Artificial Sequence: Synthetic peptide
  REGION 1..7: note = XENP023052 vlCDR2
AASELES

SEQ ID NO: 2534 - protein, 9 aa, synthetic construct
  REGION 1..9: note = Description of Artificial Sequence: Synthetic peptide
  REGION 1..9: note = XENP023052 vlCDR3
QQSNEDPFT

SEQ ID NO: 2535 - protein, 226 aa, synthetic construct; identical to SEQ ID NO: 2515
  REGION 1..226: note = Description of Artificial Sequence: Synthetic polypeptide
  REGION 1..226: note = XENP023053 7G8_H3.30_L1.40_Fab Heavy Chain

SEQ ID NO: 2536 - protein, 121 aa, synthetic construct; identical to SEQ ID NO: 2516
  REGION 1..121: note = Description of Artificial Sequence: Synthetic polypeptide
  REGION 1..121: note = VH of XENP023053

SEQ ID NO: 2537 - protein, 5 aa, synthetic construct
  REGION 1..5: note = Description of Artificial Sequence: Synthetic peptide
  REGION 1..5: note = XENP023053 vhCDR1
DAWMS

SEQ ID NO: 2538 - protein, 19 aa, synthetic construct
  REGION 1..19: note = Description of Artificial Sequence: Synthetic peptide
  REGION 1..19: note = XENP023053 vhCDR2
EISTKANNHATYYAESVKG

SEQ ID NO: 2539 - protein, 10 aa, synthetic construct
  REGION 1..10: note = Description of Artificial Sequence: Synthetic peptide
  REGION 1..10: note = XENP023053 vhCDR3
LATWDWYFDV

SEQ ID NO: 2540 - protein, 218 aa, synthetic construct
  REGION 1..218: note = Description of Artificial Sequence: Synthetic polypeptide
  REGION 1..218: note = XENP023053 7G8_H3.30_L1.40_Fab Light Chain
DIVLTQSPSSLSASVGDRVTITCRASQSVDYDADSYMNWYQQKPGKPPKLLIYAASELESGIPARFSGSGSGTDFTLTISSLQPEDFATYYCQQSNEDPFTFGSGTKLEIKRTVAAPSVFIFPPSDEQLKSGTASVVCLLNNFYPREAKVQWKVDNALQSGNSQESVTEQDSKDSTYSLSSTLTLSKADYEKHKVYACEVTHQGLSSPVTKSFNRGEC

SEQ ID NO: 2541 - protein, 111 aa, synthetic construct
  REGION 1..111: note = Description of Artificial Sequence: Synthetic polypeptide
  REGION 1..111: note = VL of XENP023053
DIVLTQSPSSLSASVGDRVTITCRASQSVDYDADSYMNWYQQKPGKPPKLLIYAASELESGIPARFSGSGSGTDFTLTISSLQPEDFATYYCQQSNEDPFTFGSGTKLEIK

SEQ ID NO: 2542 - protein, 15 aa, synthetic construct
  REGION 1..15: note = Description of Artificial Sequence: Synthetic peptide
  REGION 1..15: note = XENP023053 vlCDR1
RASQSVDYDADSYMN

SEQ ID NO: 2543 - protein, 7 aa, synthetic construct
  REGION 1..7: note = Description of Artificial Sequence: Synthetic peptide
  REGION 1..7: note = XENP023053 vlCDR2
AASELES

SEQ ID NO: 2544 - protein, 9 aa, synthetic construct
  REGION 1..9: note = Description of Artificial Sequence: Synthetic peptide
  REGION 1..9: note = XENP023053 vlCDR3
QQSNEDPFT

SEQ ID NO: 2545 - protein, 226 aa, synthetic construct; identical to SEQ ID NO: 2515
  REGION 1..226: note = Description of Artificial Sequence: Synthetic polypeptide
  REGION 1..226: note = XENP023054 7G8_H3.30_L1.41_Fab Heavy Chain

SEQ ID NO: 2546 - protein, 121 aa, synthetic construct; identical to SEQ ID NO: 2516
  REGION 1..121: note = Description of Artificial Sequence: Synthetic polypeptide
  REGION 1..121: note = VH of XENP023054

SEQ ID NO: 2547 - protein, 5 aa, synthetic construct
  REGION 1..5: note = Description of Artificial Sequence: Synthetic peptide
  REGION 1..5: note = XENP023054 vhCDR1
DAWMS

SEQ ID NO: 2548 - protein, 19 aa, synthetic construct
  REGION 1..19: note = Description of Artificial Sequence: Synthetic peptide
  REGION 1..19: note = XENP023054 vhCDR2
EISTKANNHATYYAESVKG

SEQ ID NO: 2549 - protein, 10 aa, synthetic construct
  REGION 1..10: note = Description of Artificial Sequence: Synthetic peptide
  REGION 1..10: note = XENP023054 vhCDR3
LATWDWYFDV

SEQ ID NO: 2550 - protein, 218 aa, synthetic construct
  REGION 1..218: note = Description of Artificial Sequence: Synthetic polypeptide
  REGION 1..218: note = XENP023054 7G8_H3.30_L1.41_Fab Light Chain
DIVLTQSPSSLSASVGDRVTITCRASQSVDYDQDSYMNWYQQKPGKPPKLLIYAASELESGIPARFSGSGSGTDFTLTISSLQPEDFATYYCQQSNEDPFTFGSGTKLEIKRTVAAPSVFIFPPSDEQLKSGTASVVCLLNNFYPREAKVQWKVDNALQSGNSQESVTEQDSKDSTYSLSSTLTLSKADYEKHKVYACEVTHQGLSSPVTKSFNRGEC

SEQ ID NO: 2551 - protein, 111 aa, synthetic construct
  REGION 1..111: note = Description of Artificial Sequence: Synthetic polypeptide
  REGION 1..111: note = VL of XENP023054
DIVLTQSPSSLSASVGDRVTITCRASQSVDYDQDSYMNWYQQKPGKPPKLLIYAASELESGIPARFSGSGSGTDFTLTISSLQPEDFATYYCQQSNEDPFTFGSGTKLEIK

SEQ ID NO: 2552 - protein, 15 aa, synthetic construct
  REGION 1..15: note = Description of Artificial Sequence: Synthetic peptide
  REGION 1..15: note = XENP023054 vlCDR1
RASQSVDYDQDSYMN

SEQ ID NO: 2553 - protein, 7 aa, synthetic construct
  REGION 1..7: note = Description of Artificial Sequence: Synthetic peptide
  REGION 1..7: note = XENP023054 vlCDR2
AASELES

SEQ ID NO: 2554 - protein, 9 aa, synthetic construct
  REGION 1..9: note = Description of Artificial Sequence: Synthetic peptide
  REGION 1..9: note = XENP023054 vlCDR3
QQSNEDPFT

SEQ ID NO: 2555 - protein, 226 aa, synthetic construct; identical to SEQ ID NO: 2515
  REGION 1..226: note = Description of Artificial Sequence: Synthetic polypeptide
  REGION 1..226: note = XENP023055 7G8_H3.30_L1.42_Fab Heavy Chain

SEQ ID NO: 2556 - protein, 121 aa, synthetic construct; identical to SEQ ID NO: 2516
  REGION 1..121: note = Description of Artificial Sequence: Synthetic polypeptide
  REGION 1..121: note = VH of XENP023055

SEQ ID NO: 2557 - protein, 5 aa, synthetic construct
  REGION 1..5: note = Description of Artificial Sequence: Synthetic peptide
  REGION 1..5: note = XENP023055 vhCDR1
DAWMS

SEQ ID NO: 2558 - protein, 19 aa, synthetic construct
  REGION 1..19: note = Description of Artificial Sequence: Synthetic peptide
  REGION 1..19: note = XENP023055 vhCDR2
EISTKANNHATYYAESVKG

SEQ ID NO: 2559 - protein, 10 aa, synthetic construct
  REGION 1..10: note = Description of Artificial Sequence: Synthetic peptide
  REGION 1..10: note = XENP023055 vhCDR3
LATWDWYFDV

SEQ ID NO: 2560 - protein, 218 aa, synthetic construct
  REGION 1..218: note = Description of Artificial Sequence: Synthetic polypeptide
  REGION 1..218: note = XENP023055 7G8_H3.30_L1.42_Fab Light Chain
DIVLTQSPSSLSASVGDRVTITCRASQSVDYDDDSYMNWYQQKPGKPPKLLIYAASELESGIPARFSGSGSGTDFTLTISSLQPEDFATYYCQQSNEDPFTFGSGTKLEIKRTVAAPSVFIFPPSDEQLKSGTASVVCLLNNFYPREAKVQWKVDNALQSGNSQESVTEQDSKDSTYSLSSTLTLSKADYEKHKVYACEVTHQGLSSPVTKSFNRGEC

SEQ ID NO: 2561 - protein, 111 aa, synthetic construct
  REGION 1..111: note = Description of Artificial Sequence: Synthetic polypeptide
  REGION 1..111: note = VL of XENP023055
DIVLTQSPSSLSASVGDRVTITCRASQSVDYDDDSYMNWYQQKPGKPPKLLIYAASELESGIPARFSGSGSGTDFTLTISSLQPEDFATYYCQQSNEDPFTFGSGTKLEIK

SEQ ID NO: 2562 - protein, 15 aa, synthetic construct
  REGION 1..15: note = Description of Artificial Sequence: Synthetic peptide
  REGION 1..15: note = XENP023055 vlCDR1
RASQSVDYDDDSYMN

SEQ ID NO: 2563 - protein, 7 aa, synthetic construct
  REGION 1..7: note = Description of Artificial Sequence: Synthetic peptide
  REGION 1..7: note = XENP023055 vlCDR2
AASELES

SEQ ID NO: 2564 - protein, 9 aa, synthetic construct
  REGION 1..9: note = Description of Artificial Sequence: Synthetic peptide
  REGION 1..9: note = XENP023055 vlCDR3
QQSNEDPFT

SEQ ID NO: 2565 - protein, 226 aa, synthetic construct; identical to SEQ ID NO: 2515
  REGION 1..226: note = Description of Artificial Sequence: Synthetic polypeptide
  REGION 1..226: note = XENP023056 7G8_H3.30_L1.43_Fab Heavy Chain

SEQ ID NO: 2566 - protein, 121 aa, synthetic construct; identical to SEQ ID NO: 2516
  REGION 1..121: note = Description of Artificial Sequence: Synthetic polypeptide
  REGION 1..121: note = VH of XENP023056

SEQ ID NO: 2567 - protein, 5 aa, synthetic construct
  REGION 1..5: note = Description of Artificial Sequence: Synthetic peptide
  REGION 1..5: note = XENP023056 vhCDR1
DAWMS

SEQ ID NO: 2568 - protein, 19 aa, synthetic construct
  REGION 1..19: note = Description of Artificial Sequence: Synthetic peptide
  REGION 1..19: note = XENP023056 vhCDR2
EISTKANNHATYYAESVKG

SEQ ID NO: 2569 - protein, 10 aa, synthetic construct
  REGION 1..10: note = Description of Artificial Sequence: Synthetic peptide
  REGION 1..10: note = XENP023056 vhCDR3
LATWDWYFDV

SEQ ID NO: 2570 - protein, 218 aa, synthetic construct
  REGION 1..218: note = Description of Artificial Sequence: Synthetic polypeptide
  REGION 1..218: note = XENP023056 7G8_H3.30_L1.43_Fab Light Chain
DIVLTQSPSSLSASVGDRVTITCRASQSVDYDYDSYMNWYQQKPGKPPKLLIYAASELESGIPARFSGSGSGTDFTLTISSLQPEDFATYYCQQSNEDPFTFGSGTKLEIKRTVAAPSVFIFPPSDEQLKSGTASVVCLLNNFYPREAKVQWKVDNALQSGNSQESVTEQDSKDSTYSLSSTLTLSKADYEKHKVYACEVTHQGLSSPVTKSFNRGEC

SEQ ID NO: 2571 - protein, 111 aa, synthetic construct
  REGION 1..111: note = Description of Artificial Sequence: Synthetic polypeptide
  REGION 1..111: note = VL of XENP023056
DIVLTQSPSSLSASVGDRVTITCRASQSVDYDYDSYMNWYQQKPGKPPKLLIYAASELESGIPARFSGSGSGTDFTLTISSLQPEDFATYYCQQSNEDPFTFGSGTKLEIK

SEQ ID NO: 2572 - protein, 15 aa, synthetic construct
  REGION 1..15: note = Description of Artificial Sequence: Synthetic peptide
  REGION 1..15: note = XENP023056 vlCDR1
RASQSVDYDYDSYMN

SEQ ID NO: 2573 - protein, 7 aa, synthetic construct
  REGION 1..7: note = Description of Artificial Sequence: Synthetic peptide
  REGION 1..7: note = XENP023056 vlCDR2
AASELES

SEQ ID NO: 2574 - protein, 9 aa, synthetic construct
  REGION 1..9: note = Description of Artificial Sequence: Synthetic peptide
  REGION 1..9: note = XENP023056 vlCDR3
QQSNEDPFT

SEQ ID NO: 2575 - protein, 226 aa, synthetic construct; identical to SEQ ID NO: 2415
  REGION 1..226: note = Description of Artificial Sequence: Synthetic polypeptide
  REGION 1..226: note = XENP023220 7G8_H3.66_L1.39_Fab Heavy Chain

SEQ ID NO: 2576 - protein, 121 aa, synthetic construct; identical to SEQ ID NO: 2416
  REGION 1..121: note = Description of Artificial Sequence: Synthetic polypeptide
  REGION 1..121: note = VH of XENP023220

SEQ ID NO: 2577 - protein, 5 aa, synthetic construct
  REGION 1..5: note = Description of Artificial Sequence: Synthetic peptide
  REGION 1..5: note = XENP023220 vhCDR1
EAWMS

SEQ ID NO: 2578 - protein, 19 aa, synthetic construct
  REGION 1..19: note = Description of Artificial Sequence: Synthetic peptide
  REGION 1..19: note = XENP023220 vhCDR2
EISTKANNHATYYAESVKG

SEQ ID NO: 2579 - protein, 10 aa, synthetic construct
  REGION 1..10: note = Description of Artificial Sequence: Synthetic peptide
  REGION 1..10: note = XENP023220 vhCDR3
LATWDWYFDV

SEQ ID NO: 2580 - protein, 218 aa, synthetic construct; identical to SEQ ID NO: 2530
  REGION 1..218: note = Description of Artificial Sequence: Synthetic polypeptide
  REGION 1..218: note = XENP023220 7G8_H3.66_L1.39_Fab Light Chain

SEQ ID NO: 2581 - protein, 111 aa, synthetic construct; identical to SEQ ID NO: 2531
  REGION 1..111: note = Description of Artificial Sequence: Synthetic polypeptide
  REGION 1..111: note = VL of XENP023220

SEQ ID NO: 2582 - protein, 15 aa, synthetic construct
  REGION 1..15: note = Description of Artificial Sequence: Synthetic peptide
  REGION 1..15: note = XENP023220 vlCDR1
RASQSVDYYGDSYMN

SEQ ID NO: 2583 - protein, 7 aa, synthetic construct
  REGION 1..7: note = Description of Artificial Sequence: Synthetic peptide
  REGION 1..7: note = XENP023220 vlCDR2
AASELES

SEQ ID NO: 2584 - protein, 9 aa, synthetic construct
  REGION 1..9: note = Description of Artificial Sequence: Synthetic peptide
  REGION 1..9: note = XENP023220 vlCDR3
QQSNEDPFT

SEQ ID NO: 2585 - protein, 226 aa, synthetic construct; identical to SEQ ID NO: 2425
  REGION 1..226: note = Description of Artificial Sequence: Synthetic polypeptide
  REGION 1..226: note = XENP023221 7G8_H3.67_L1.39_Fab Heavy Chain

SEQ ID NO: 2586 - protein, 121 aa, synthetic construct; identical to SEQ ID NO: 2426
  REGION 1..121: note = Description of Artificial Sequence: Synthetic polypeptide
  REGION 1..121: note = VH of XENP023221

SEQ ID NO: 2587 - protein, 5 aa, synthetic construct
  REGION 1..5: note = Description of Artificial Sequence: Synthetic peptide
  REGION 1..5: note = XENP023221 vhCDR1
DTWMS

SEQ ID NO: 2588 - protein, 19 aa, synthetic construct
  REGION 1..19: note = Description of Artificial Sequence: Synthetic peptide
  REGION 1..19: note = XENP023221 vhCDR2
EISTKANNHATYYAESVKG

SEQ ID NO: 2589 - protein, 10 aa, synthetic construct
  REGION 1..10: note = Description of Artificial Sequence: Synthetic peptide
  REGION 1..10: note = XENP023221 vhCDR3
LATWDWYFDV

SEQ ID NO: 2590 - protein, 218 aa, synthetic construct; identical to SEQ ID NO: 2530
  REGION 1..218: note = Description of Artificial Sequence: Synthetic polypeptide
  REGION 1..218: note = XENP023221 7G8_H3.67_L1.39_Fab Light Chain

SEQ ID NO: 2591 - protein, 111 aa, synthetic construct; identical to SEQ ID NO: 2531
  REGION 1..111: note = Description of Artificial Sequence: Synthetic polypeptide
  REGION 1..111: note = VL of XENP023221

SEQ ID NO: 2592 - protein, 15 aa, synthetic construct
  REGION 1..15: note = Description of Artificial Sequence: Synthetic peptide
  REGION 1..15: note = XENP023221 vlCDR1
RASQSVDYYGDSYMN

SEQ ID NO: 2593 - protein, 7 aa, synthetic construct
  REGION 1..7: note = Description of Artificial Sequence: Synthetic peptide
  REGION 1..7: note = XENP023221 vlCDR2
AASELES

SEQ ID NO: 2594 - protein, 9 aa, synthetic construct
  REGION 1..9: note = Description of Artificial Sequence: Synthetic peptide
  REGION 1..9: note = XENP023221 vlCDR3
QQSNEDPFT

SEQ ID NO: 2595 - protein, 226 aa, synthetic construct; identical to SEQ ID NO: 2465
  REGION 1..226: note = Description of Artificial Sequence: Synthetic polypeptide
  REGION 1..226: note = XENP023222 7G8_H3.71_L1.39_Fab Heavy Chain

SEQ ID NO: 2596 - protein, 121 aa, synthetic construct; identical to SEQ ID NO: 2466
  REGION 1..121: note = Description of Artificial Sequence: Synthetic polypeptide
  REGION 1..121: note = VH of XENP023222

SEQ ID NO: 2597 - protein, 5 aa, synthetic construct
  REGION 1..5: note = Description of Artificial Sequence: Synthetic peptide
  REGION 1..5: note = XENP023222 vhCDR1
DAWMS

SEQ ID NO: 2598 - protein, 19 aa, synthetic construct
  REGION 1..19: note = Description of Artificial Sequence: Synthetic peptide
  REGION 1..19: note = XENP023222 vhCDR2
EISTKAYNHATYYAESVKG

SEQ ID NO: 2599 - protein, 10 aa, synthetic construct
  REGION 1..10: note = Description of Artificial Sequence: Synthetic peptide
  REGION 1..10: note = XENP023222 vhCDR3
LATWDWYFDV

SEQ ID NO: 2600 - protein, 218 aa, synthetic construct; identical to SEQ ID NO: 2530
  REGION 1..218: note = Description of Artificial Sequence: Synthetic polypeptide
  REGION 1..218: note = XENP023222 7G8_H3.71_L1.39_Fab Light Chain

SEQ ID NO: 2601 - protein, 111 aa, synthetic construct; identical to SEQ ID NO: 2531
  REGION 1..111: note = Description of Artificial Sequence: Synthetic polypeptide
  REGION 1..111: note = VL of XENP023222

SEQ ID NO: 2602 - protein, 15 aa, synthetic construct
  REGION 1..15: note = Description of Artificial Sequence: Synthetic peptide
  REGION 1..15: note = XENP023222 vlCDR1
RASQSVDYYGDSYMN

SEQ ID NO: 2603 - protein, 7 aa, synthetic construct
  REGION 1..7: note = Description of Artificial Sequence: Synthetic peptide
  REGION 1..7: note = XENP023222 vlCDR2
AASELES

SEQ ID NO: 2604 - protein, 9 aa, synthetic construct
  REGION 1..9: note = Description of Artificial Sequence: Synthetic peptide
  REGION 1..9: note = XENP023222 vlCDR3
QQSNEDPFT

SEQ ID NO: 2605 - protein, 450 aa, synthetic construct
  REGION 1..450: note = Description of Artificial Sequence: Synthetic polypeptide
  REGION 1..450: note = XENP022841 7G8_H3.30_L1.34_Fab-[CTLA-4]_H3.23_L0.129_scFv Fab -Fc Heavy Chain
EVQLVESGGGLVQPGGSLRLSCAASGFTFDDAWMSWVRQAPGKGLEWVAEISTKANNHATYYAESVKGRFTISRDDSKSSVYLQMNSLRAEDTAVYYCTRLATWDWYFDVWGQGTTVTVSSASTKGPSVFPLAPSSKSTSGGTAALGCLVKDYFPEPVTVSWNSGALTSGVHTFPAVLQSSGLYSLSSVVTVPSSSLGTQTYICNVNHKPSDTKVDKKVEPKSCDKTHTCPPCPAPPVAGPSVFLFPPKPKDTLMISRTPEVTCVVVDVKHEDPEVKFNWYVDGVEVHNAKTKPREEEYNSTYRVVSVLTVLHQDWLNGKEYKCKVSNKALPAPIEKTISKAKGQPREPQVYTLPPSREEMTKNQVSLTCDVSGFYPSDIAVEWESDGQPENNYKTTPPVLDSDGSFFLYSKLTVDKSRWEQGDVFSCSVLHEALHSHYTQKSLSLSPGK

SEQ ID NO: 2606 - protein, 121 aa, synthetic construct; identical to SEQ ID NO: 2516
  REGION 1..121: note = Description of Artificial Sequence: Synthetic polypeptide
  REGION 1..121: note = VH of XENP022841

SEQ ID NO: 2607 - protein, 5 aa, synthetic construct
  REGION 1..5: note = Description of Artificial Sequence: Synthetic peptide
  REGION 1..5: note = XENP022841 vhCDR1
DAWMS

SEQ ID NO: 2608 - protein, 19 aa, synthetic construct
  REGION 1..19: note = Description of Artificial Sequence: Synthetic peptide
  REGION 1..19: note = XENP022841 vhCDR2
EISTKANNHATYYAESVKG

SEQ ID NO: 2609 - protein, 10 aa, synthetic construct
  REGION 1..10: note = Description of Artificial Sequence: Synthetic peptide
  REGION 1..10: note = XENP022841 vhCDR3
LATWDWYFDV

SEQ ID NO: 2610 - protein, 477 aa, synthetic construct
  REGION 1..477: note = Description of Artificial Sequence: Synthetic polypeptide
  REGION 1..477: note = XENP022841 7G8_H3.30_L1.34_Fab-[CTLA-4]_H3.23_L0.129_scFv scFv-Fc Heavy Chain
EVQLVESGGGLVKPGGSLRLSCAASGFTFSSYTMHWVRQAPGKGLEWVSFISYDGNYKYYADSVKGRFTISRDNAKNSLYLQMNSLRAEDTAVYYCARGGHLGPFDLWGQGTMVTVSSGKPGSGKPGSGKPGSGKPGSEIVLTQSPATLSLSPGERATLSCRASQSVGSSYLAWYQQKPGQAPRLLIYGASSRATGIPDRFSGSGSGTDFTLTISRLEPEDFAVYYCQQYGSSPWTFGQGTKVEIKEPKSSDKTHTCPPCPAPPVAGPSVFLFPPKPKDTLMISRTPEVTCVVVDVKHEDPEVKFNWYVDGVEVHNAKTKPREEQYNSTYRVVSVLTVLHQDWLNGKEYKCKVSNKALPAPIEKTISKAKGQPREPQVYTLPPSREQMTKNQVKLTCLVKGFYPSDIAVEWESNGQPENNYKTTPPVLDSDGSFFLYSKLTVDKSRWQQGNVFSCSVLHEALHSHYTQKSLSLSPGK

SEQ ID NO: 2611 - protein, 118 aa, synthetic construct; identical to SEQ ID NO: 2395
  REGION 1..118: note = Description of Artificial Sequence: Synthetic polypeptide
  REGION 1..118: note = VH of XENP022841

SEQ ID NO: 2612 - protein, 108 aa, synthetic construct; identical to SEQ ID NO: 2396
  REGION 1..108: note = Description of Artificial Sequence: Synthetic polypeptide
  REGION 1..108: note = VL of XENP022841

SEQ ID NO: 2613 - protein, 231 aa, synthetic construct; identical to SEQ ID NO: 2409
  REGION 1..231: note = Description of Artificial Sequence: Synthetic polypeptide
  REGION 1..231: note = Fc chain of XENP022841

SEQ ID NO: 2614 - protein, 5 aa, synthetic construct
  REGION 1..5: note = Description of Artificial Sequence: Synthetic peptide
  REGION 1..5: note = XENP022841 vhCDR1
SYTMH

SEQ ID NO: 2615 - protein, 17 aa, synthetic construct
  REGION 1..17: note = Description of Artificial Sequence: Synthetic peptide
  REGION 1..17: note = XENP022841 vhCDR2
FISYDGNYKYYADSVKG

SEQ ID NO: 2616 - protein, 9 aa, synthetic construct
  REGION 1..9: note = Description of Artificial Sequence: Synthetic peptide
  REGION 1..9: note = XENP022841 vhCDR3
GGHLGPFDL

SEQ ID NO: 2617 - protein, 12 aa, synthetic construct
  REGION 1..12: note = Description of Artificial Sequence: Synthetic peptide
  REGION 1..12: note = XENP022841 vlCDR1
RASQSVGSSYLA

SEQ ID NO: 2618 - protein, 7 aa, synthetic construct
  REGION 1..7: note = Description of Artificial Sequence: Synthetic peptide
  REGION 1..7: note = XENP022841 vlCDR2
GASSRAT

SEQ ID NO: 2619 - protein, 9 aa, synthetic construct
  REGION 1..9: note = Description of Artificial Sequence: Synthetic peptide
  REGION 1..9: note = XENP022841 vlCDR3
QQYGSSPWT

SEQ ID NO: 2620 - protein, 218 aa, synthetic construct; identical to SEQ ID NO: 2420
  REGION 1..218: note = Description of Artificial Sequence: Synthetic polypeptide
  REGION 1..218: note = XENP022841 7G8_H3.30_L1.34_Fab-[CTLA-4]_H3.23_L0.129_scFv Light Chain

SEQ ID NO: 2621 - protein, 111 aa, synthetic construct; identical to SEQ ID NO: 2421
  REGION 1..111: note = Description of Artificial Sequence: Synthetic polypeptide
  REGION 1..111: note = VL of XENP022841

SEQ ID NO: 2622 - protein, 15 aa, synthetic construct
  REGION 1..15: note = Description of Artificial Sequence: Synthetic peptide
  REGION 1..15: note = XENP022841 vlCDR1
RASQSVDYDGDSYMN

SEQ ID NO: 2623 - protein, 7 aa, synthetic construct
  REGION 1..7: note = Description of Artificial Sequence: Synthetic peptide
  REGION 1..7: note = XENP022841 vlCDR2
AASELES

SEQ ID NO: 2624 - protein, 9 aa, synthetic construct
  REGION 1..9: note = Description of Artificial Sequence: Synthetic peptide
  REGION 1..9: note = XENP022841 vlCDR3
QQSNEDPFT

SEQ ID NO: 2625 - protein, 450 aa, synthetic construct; identical to SEQ ID NO: 2605
  REGION 1..450: note = Description of Artificial Sequence: Synthetic polypeptide
  REGION 1..450: note = XENP022842 7G8_H3.30_L1.36_Fab-[CTLA-4]_H3.23_L0.129_scFv Fab-Fc Heavy Chain

SEQ ID NO: 2626 - protein, 121 aa, synthetic construct; identical to SEQ ID NO: 2516
  REGION 1..121: note = Description of Artificial Sequence: Synthetic polypeptide
  REGION 1..121: note = VH of XENP022842

SEQ ID NO: 2627 - protein, 5 aa, synthetic construct
  REGION 1..5: note = Description of Artificial Sequence: Synthetic peptide
  REGION 1..5: note = XENP022842 vhCDR1
DAWMS

SEQ ID NO: 2628 - protein, 19 aa, synthetic construct
  REGION 1..19: note = Description of Artificial Sequence: Synthetic peptide
  REGION 1..19: note = XENP022842 vhCDR2
EISTKANNHATYYAESVKG

SEQ ID NO: 2629 - protein, 10 aa, synthetic construct
  REGION 1..10: note = Description of Artificial Sequence: Synthetic peptide
  REGION 1..10: note = XENP022842 vhCDR3
LATWDWYFDV

SEQ ID NO: 2630 - protein, 477 aa, synthetic construct; identical to SEQ ID NO: 2610
  REGION 1..477: note = Description of Artificial Sequence: Synthetic polypeptide
  REGION 1..477: note = XENP022842 7G8_H3.30_L1.36_Fab-[CTLA-4]_H3.23_L0.129_scFv sc Fv-Fc Heavy Chain

SEQ ID NO: 2631 - protein, 118 aa, synthetic construct; identical to SEQ ID NO: 2395
  REGION 1..118: note = Description of Artificial Sequence: Synthetic polypeptide
  REGION 1..118: note = VH of XENP022842

SEQ ID NO: 2632 - protein, 108 aa, synthetic construct; identical to SEQ ID NO: 2396
  REGION 1..108: note = Description of Artificial Sequence: Synthetic polypeptide
  REGION 1..108: note = VL of XENP022842

SEQ ID NO: 2633 - protein, 231 aa, synthetic construct; identical to SEQ ID NO: 2409
  REGION 1..231: note = Description of Artificial Sequence: Synthetic polypeptide
  REGION 1..231: note = Fc chain of XENP022842

SEQ ID NO: 2634 - protein, 5 aa, synthetic construct
  REGION 1..5: note = Description of Artificial Sequence: Synthetic peptide
  REGION 1..5: note = XENP022842 vhCDR1
SYTMH

SEQ ID NO: 2635 - protein, 17 aa, synthetic construct
  REGION 1..17: note = Description of Artificial Sequence: Synthetic peptide
  REGION 1..17: note = XENP022842 vhCDR2
FISYDGNYKYYADSVKG

SEQ ID NO: 2636 - protein, 9 aa, synthetic construct
  REGION 1..9: note = Description of Artificial Sequence: Synthetic peptide
  REGION 1..9: note = XENP022842 vhCDR3
GGHLGPFDL

SEQ ID NO: 2637 - protein, 12 aa, synthetic construct
  REGION 1..12: note = Description of Artificial Sequence: Synthetic peptide
  REGION 1..12: note = XENP022842 vlCDR1
RASQSVGSSYLA

SEQ ID NO: 2638 - protein, 7 aa, synthetic construct
  REGION 1..7: note = Description of Artificial Sequence: Synthetic peptide
  REGION 1..7: note = XENP022842 vlCDR2
GASSRAT

SEQ ID NO: 2639 - protein, 9 aa, synthetic construct
  REGION 1..9: note = Description of Artificial Sequence: Synthetic peptide
  REGION 1..9: note = XENP022842 vlCDR3
QQYGSSPWT

SEQ ID NO: 2640 - protein, 218 aa, synthetic construct
  REGION 1..218: note = Description of Artificial Sequence: Synthetic polypeptide
  REGION 1..218: note = XENP022842 7G8_H3.30_L1.36_Fab-[CTLA-4]_H3.23_L0.129_scFv Light Chain
DIVLTQSPSSLSASVGDRVTITCRASQSVDHDGDSYMNWYQQKPGKPPKLLIYAASELESGIPARFSGSGSGTDFTLTISSLQPEDFATYYCQQSNEDPFTFGSGTKLEIKRTVAAPSVFIFPPSDEQLKSGTASVVCLLNNFYPREAKVQWKVDNALQSGNSQESVTEQDSKDSTYSLSSTLTLSKADYEKHKVYACEVTHQGLSSPVTKSFNRGEC

SEQ ID NO: 2641 - protein, 111 aa, synthetic construct
  REGION 1..111: note = Description of Artificial Sequence: Synthetic polypeptide
  REGION 1..111: note = VL of XENP022842
DIVLTQSPSSLSASVGDRVTITCRASQSVDHDGDSYMNWYQQKPGKPPKLLIYAASELESGIPARFSGSGSGTDFTLTISSLQPEDFATYYCQQSNEDPFTFGSGTKLEIK

SEQ ID NO: 2642 - protein, 15 aa, synthetic construct
  REGION 1..15: note = Description of Artificial Sequence: Synthetic peptide
  REGION 1..15: note = XENP022842 vlCDR1
RASQSVDHDGDSYMN

SEQ ID NO: 2643 - protein, 7 aa, synthetic construct
  REGION 1..7: note = Description of Artificial Sequence: Synthetic peptide
  REGION 1..7: note = XENP022842 vlCDR2
AASELES

SEQ ID NO: 2644 - protein, 9 aa, synthetic construct
  REGION 1..9: note = Description of Artificial Sequence: Synthetic peptide
  REGION 1..9: note = XENP022842 vlCDR3
QQSNEDPFT

SEQ ID NO: 2645 - protein, 447 aa, synthetic construct
  REGION 1..447: note = Description of Artificial Sequence: Synthetic polypeptide
  REGION 1..447: note = XENP022843 2A11_H1.144_L2.142_Fab-[CTLA-4]_H3.23_L0.129_scFv Fab-Fc Heavy Chain
EVQLVQSGAEVKKPGATVKISCKASGFNIKDYFMHWVQQAPGKGLEWMGWIDPELGDTEYAPKFQGRVTITADTSTNTAYMELSSLRSEDTAVYYCYARGVYQALDYWGQGTLVTVSSASTKGPSVFPLAPSSKSTSGGTAALGCLVKDYFPEPVTVSWNSGALTSGVHTFPAVLQSSGLYSLSSVVTVPSSSLGTQTYICNVNHKPSDTKVDKKVEPKSCDKTHTCPPCPAPPVAGPSVFLFPPKPKDTLMISRTPEVTCVVVDVKHEDPEVKFNWYVDGVEVHNAKTKPREEEYNSTYRVVSVLTVLHQDWLNGKEYKCKVSNKALPAPIEKTISKAKGQPREPQVYTLPPSREEMTKNQVSLTCDVSGFYPSDIAVEWESDGQPENNYKTTPPVLDSDGSFFLYSKLTVDKSRWEQGDVFSCSVLHEALHSHYTQKSLSLSPGK

SEQ ID NO: 2646 - protein, 118 aa, synthetic construct
  REGION 1..118: note = Description of Artificial Sequence: Synthetic polypeptide
  REGION 1..118: note = VH of XENP022843
EVQLVQSGAEVKKPGATVKISCKASGFNIKDYFMHWVQQAPGKGLEWMGWIDPELGDTEYAPKFQGRVTITADTSTNTAYMELSSLRSEDTAVYYCYARGVYQALDYWGQGTLVTVSS

SEQ ID NO: 2647 - protein, 5 aa, synthetic construct
  REGION 1..5: note = Description of Artificial Sequence: Synthetic peptide
  REGION 1..5: note = XENP022843 vhCDR1
DYFMH

SEQ ID NO: 2648 - protein, 17 aa, synthetic construct
  REGION 1..17: note = Description of Artificial Sequence: Synthetic peptide
  REGION 1..17: note = XENP022843 vhCDR2
WIDPELGDTEYAPKFQG

SEQ ID NO: 2649 - protein, 9 aa, synthetic construct
  REGION 1..9: note = Description of Artificial Sequence: Synthetic peptide
  REGION 1..9: note = XENP022843 vhCDR3
RGVYQALDY

SEQ ID NO: 2650 - protein, 477 aa, synthetic construct; identical to SEQ ID NO: 2610
  REGION 1..477: note = Description of Artificial Sequence: Synthetic polypeptide
  REGION 1..477: note = XENP022843 2A11_H1.144_L2.142_Fab-[CTLA-4]_H3.23_L0.129_scFv scFv-Fc Heavy Chain

SEQ ID NO: 2651 - protein, 118 aa, synthetic construct; identical to SEQ ID NO: 2395
  REGION 1..118: note = Description of Artificial Sequence: Synthetic polypeptide
  REGION 1..118: note = VH of XENP022843

SEQ ID NO: 2652 - protein, 108 aa, synthetic construct; identical to SEQ ID NO: 2396
  REGION 1..108: note = Description of Artificial Sequence: Synthetic polypeptide
  REGION 1..108: note = VL of XENP022843

SEQ ID NO: 2653 - protein, 231 aa, synthetic construct; identical to SEQ ID NO: 2409
  REGION 1..231: note = Description of Artificial Sequence: Synthetic polypeptide
  REGION 1..231: note = Fc chain of XENP022843

SEQ ID NO: 2654 - protein, 5 aa, synthetic construct
  REGION 1..5: note = Description of Artificial Sequence: Synthetic peptide
  REGION 1..5: note = XENP022843 vhCDR1
SYTMH

SEQ ID NO: 2655 - protein, 17 aa, synthetic construct
  REGION 1..17: note = Description of Artificial Sequence: Synthetic peptide
  REGION 1..17: note = XENP022843 vhCDR2
FISYDGNYKYYADSVKG

SEQ ID NO: 2656 - protein, 9 aa, synthetic construct
  REGION 1..9: note = Description of Artificial Sequence: Synthetic peptide
  REGION 1..9: note = XENP022843 vhCDR3
GGHLGPFDL

SEQ ID NO: 2657 - protein, 12 aa, synthetic construct
  REGION 1..12: note = Description of Artificial Sequence: Synthetic peptide
  REGION 1..12: note = XENP022843 vlCDR1
RASQSVGSSYLA

SEQ ID NO: 2658 - protein, 7 aa, synthetic construct
  REGION 1..7: note = Description of Artificial Sequence: Synthetic peptide
  REGION 1..7: note = XENP022843 vlCDR2
GASSRAT

SEQ ID NO: 2659 - protein, 9 aa, synthetic construct
  REGION 1..9: note = Description of Artificial Sequence: Synthetic peptide
  REGION 1..9: note = XENP022843 vlCDR3
QQYGSSPWT

SEQ ID NO: 2660 - protein, 214 aa, synthetic construct
  REGION 1..214: note = Description of Artificial Sequence: Synthetic polypeptide
  REGION 1..214: note = XENP022843 2A11_H1.144_L2.142_Fab-[CTLA-4]_H3.23_L0.129_scFv Light Chain
DIQMTQSPAFLSVTPGEKVTITCQASQDIGNYLNWFQQKPGQTVKLLIYFTSYLHSGVPSRFSGSGSGTDYTFTISSLEAEDAATYFCQQGNTLPYTFGGGTKVEIKRTVAAPSVFIFPPSDEQLKSGTASVVCLLNNFYPREAKVQWKVDNALQSGNSQESVTEQDSKDSTYSLSSTLTLSKADYEKHKVYACEVTHQGLSSPVTKSFNRGEC

SEQ ID NO: 2661 - protein, 107 aa, synthetic construct
  REGION 1..107: note = Description of Artificial Sequence: Synthetic polypeptide
  REGION 1..107: note = VL of XENP022843
DIQMTQSPAFLSVTPGEKVTITCQASQDIGNYLNWFQQKPGQTVKLLIYFTSYLHSGVPSRFSGSGSGTDYTFTISSLEAEDAATYFCQQGNTLPYTFGGGTKVEIK

SEQ ID NO: 2662 - protein, 11 aa, synthetic construct
  REGION 1..11: note = Description of Artificial Sequence: Synthetic peptide
  REGION 1..11: note = XENP022843 vlCDR1
QASQDIGNYLN

SEQ ID NO: 2663 - protein, 7 aa, synthetic construct
  REGION 1..7: note = Description of Artificial Sequence: Synthetic peptide
  REGION 1..7: note = XENP022843 vlCDR2
FTSYLHS

SEQ ID NO: 2664 - protein, 9 aa, synthetic construct
  REGION 1..9: note = Description of Artificial Sequence: Synthetic peptide
  REGION 1..9: note = XENP022843 vlCDR3
QQGNTLPYT

SEQ ID NO: 2665 - protein, 447 aa, synthetic construct; identical to SEQ ID NO: 2645
  REGION 1..447: note = Description of Artificial Sequence: Synthetic polypeptide
  REGION 1..447: note = XENP022844 2A11_H1.144_L2.113_Fab-[CTLA-4]_H3.23_L0.129_scFv Fab-Fc Heavy Chain

SEQ ID NO: 2666 - protein, 118 aa, synthetic construct; identical to SEQ ID NO: 2646
  REGION 1..118: note = Description of Artificial Sequence: Synthetic polypeptide
  REGION 1..118: note = VH of XENP022844

SEQ ID NO: 2667 - protein, 5 aa, synthetic construct
  REGION 1..5: note = Description of Artificial Sequence: Synthetic peptide
  REGION 1..5: note = XENP022844 vhCDR1
DYFMH

SEQ ID NO: 2668 - protein, 17 aa, synthetic construct
  REGION 1..17: note = Description of Artificial Sequence: Synthetic peptide
  REGION 1..17: note = XENP022844 vhCDR2
WIDPELGDTEYAPKFQG

SEQ ID NO: 2669 - protein, 9 aa, synthetic construct
  REGION 1..9: note = Description of Artificial Sequence: Synthetic peptide
  REGION 1..9: note = XENP022844 vhCDR3
RGVYQALDY

SEQ ID NO: 2670 - protein, 477 aa, synthetic construct; identical to SEQ ID NO: 2610
  REGION 1..477: note = Description of Artificial Sequence: Synthetic polypeptide
  REGION 1..477: note = XENP022844 2A11_H1.144_L2.113_Fab-[CTLA-4]_H3.23_L0.129_scFv scFv-Fc Heavy Chain

SEQ ID NO: 2671 - protein, 118 aa, synthetic construct; identical to SEQ ID NO: 2395
  REGION 1..118: note = Description of Artificial Sequence: Synthetic polypeptide
  REGION 1..118: note = VH of XENP022844

SEQ ID NO: 2672 - protein, 108 aa, synthetic construct; identical to SEQ ID NO: 2396
  REGION 1..108: note = Description of Artificial Sequence: Synthetic polypeptide
  REGION 1..108: note = VL of XENP022844

SEQ ID NO: 2673 - protein, 231 aa, synthetic construct; identical to SEQ ID NO: 2409
  REGION 1..231: note = Description of Artificial Sequence: Synthetic polypeptide
  REGION 1..231: note = Fc chain of XENP022844

SEQ ID NO: 2674 - protein, 5 aa, synthetic construct
  REGION 1..5: note = Description of Artificial Sequence: Synthetic peptide
  REGION 1..5: note = XENP022844 vhCDR1
SYTMH

SEQ ID NO: 2675 - protein, 17 aa, synthetic construct
  REGION 1..17: note = Description of Artificial Sequence: Synthetic peptide
  REGION 1..17: note = XENP022844 vhCDR2
FISYDGNYKYYADSVKG

SEQ ID NO: 2676 - protein, 9 aa, synthetic construct
  REGION 1..9: note = Description of Artificial Sequence: Synthetic peptide
  REGION 1..9: note = XENP022844 vhCDR3
GGHLGPFDL

SEQ ID NO: 2677 - protein, 12 aa, synthetic construct
  REGION 1..12: note = Description of Artificial Sequence: Synthetic peptide
  REGION 1..12: note = XENP022844 vlCDR1
RASQSVGSSYLA

SEQ ID NO: 2678 - protein, 7 aa, synthetic construct
  REGION 1..7: note = Description of Artificial Sequence: Synthetic peptide
  REGION 1..7: note = XENP022844 vlCDR2
GASSRAT

SEQ ID NO: 2679 - protein, 9 aa, synthetic construct
  REGION 1..9: note = Description of Artificial Sequence: Synthetic peptide
  REGION 1..9: note = XENP022844 vlCDR3
QQYGSSPWT

SEQ ID NO: 2680 - protein, 214 aa, synthetic construct
  REGION 1..214: note = Description of Artificial Sequence: Synthetic polypeptide
  REGION 1..214: note = XENP022844 2A11_H1.144_L2.113_Fab-[CTLA-4]_H3.23_L0.129_scFv Light Chain
DIQMTQSPAFLSVTPGEKVTITCQASQDIGNYLNWFQQKPDQTVKLLIYFTSYLHSGVPSRFSGSGSGTDYTFTISSLEAEDAATYFCQQGNTLPYTFGGGTKVEIKRTVAAPSVFIFPPSDEQLKSGTASVVCLLNNFYPREAKVQWKVDNALQSGNSQESVTEQDSKDSTYSLSSTLTLSKADYEKHKVYACEVTHQGLSSPVTKSFNRGEC

SEQ ID NO: 2681 - protein, 107 aa, synthetic construct
  REGION 1..107: note = Description of Artificial Sequence: Synthetic polypeptide
  REGION 1..107: note = VL of XENP022844
DIQMTQSPAFLSVTPGEKVTITCQASQDIGNYLNWFQQKPDQTVKLLIYFTSYLHSGVPSRFSGSGSGTDYTFTISSLEAEDAATYFCQQGNTLPYTFGGGTKVEIK

SEQ ID NO: 2682 - protein, 11 aa, synthetic construct
  REGION 1..11: note = Description of Artificial Sequence: Synthetic peptide
  REGION 1..11: note = XENP022844 vlCDR1
QASQDIGNYLN

SEQ ID NO: 2683 - protein, 7 aa, synthetic construct
  REGION 1..7: note = Description of Artificial Sequence: Synthetic peptide
  REGION 1..7: note = XENP022844 vlCDR2
FTSYLHS

SEQ ID NO: 2684 - protein, 9 aa, synthetic construct
  REGION 1..9: note = Description of Artificial Sequence: Synthetic peptide
  REGION 1..9: note = XENP022844 vlCDR3
QQGNTLPYT

SEQ ID NO: 2685 - protein, 447 aa, synthetic construct
  REGION 1..447: note = Description of Artificial Sequence: Synthetic polypeptide
  REGION 1..447: note = XENP022845 2A11_H1_L2.113_Fab-[CTLA-4]_H3.23_L0.129_scFv Fab -Fc Heavy Chain
EVQLVQSGAEVKKPGATVKISCKASGFNIKDYYMHWVQQAPGKGLEWMGWIDPENGDTEYAPKFQGRVTITADTSTNTAYMELSSLRSEDTAVYYCYARGVRQALDYWGQGTLVTVSSASTKGPSVFPLAPSSKSTSGGTAALGCLVKDYFPEPVTVSWNSGALTSGVHTFPAVLQSSGLYSLSSVVTVPSSSLGTQTYICNVNHKPSDTKVDKKVEPKSCDKTHTCPPCPAPPVAGPSVFLFPPKPKDTLMISRTPEVTCVVVDVKHEDPEVKFNWYVDGVEVHNAKTKPREEEYNSTYRVVSVLTVLHQDWLNGKEYKCKVSNKALPAPIEKTISKAKGQPREPQVYTLPPSREEMTKNQVSLTCDVSGFYPSDIAVEWESDGQPENNYKTTPPVLDSDGSFFLYSKLTVDKSRWEQGDVFSCSVLHEALHSHYTQKSLSLSPGK

SEQ ID NO: 2686 - protein, 118 aa, synthetic construct
  REGION 1..118: note = Description of Artificial Sequence: Synthetic polypeptide
  REGION 1..118: note = VH of XENP022845
EVQLVQSGAEVKKPGATVKISCKASGFNIKDYYMHWVQQAPGKGLEWMGWIDPENGDTEYAPKFQGRVTITADTSTNTAYMELSSLRSEDTAVYYCYARGVRQALDYWGQGTLVTVSS

SEQ ID NO: 2687 - protein, 5 aa, synthetic construct
  REGION 1..5: note = Description of Artificial Sequence: Synthetic peptide
  REGION 1..5: note = XENP022845 vhCDR1
DYYMH

SEQ ID NO: 2688 - protein, 17 aa, synthetic construct
  REGION 1..17: note = Description of Artificial Sequence: Synthetic peptide
  REGION 1..17: note = XENP022845 vhCDR2
WIDPENGDTEYAPKFQG

SEQ ID NO: 2689 - protein, 9 aa, synthetic construct
  REGION 1..9: note = Description of Artificial Sequence: Synthetic peptide
  REGION 1..9: note = XENP022845 vhCDR3
RGVRQALDY

SEQ ID NO: 2690 - protein, 477 aa, synthetic construct; identical to SEQ ID NO: 2610
  REGION 1..477: note = Description of Artificial Sequence: Synthetic polypeptide
  REGION 1..477: note = XENP022845 2A11_H1_L2.113_Fab-[CTLA-4]_H3.23_L0.129_scFv scFv -Fc Heavy Chain

SEQ ID NO: 2691 - protein, 118 aa, synthetic construct; identical to SEQ ID NO: 2395
  REGION 1..118: note = Description of Artificial Sequence: Synthetic polypeptide
  REGION 1..118: note = VH of XENP022845

SEQ ID NO: 2692 - protein, 108 aa, synthetic construct; identical to SEQ ID NO: 2396
  REGION 1..108: note = Description of Artificial Sequence: Synthetic polypeptide
  REGION 1..108: note = VL of XENP022845

SEQ ID NO: 2693 - protein, 231 aa, synthetic construct; identical to SEQ ID NO: 2409
  REGION 1..231: note = Description of Artificial Sequence: Synthetic polypeptide
  REGION 1..231: note = Fc chain of XENP022845

SEQ ID NO: 2694 - protein, 5 aa, synthetic construct
  REGION 1..5: note = Description of Artificial Sequence: Synthetic peptide
  REGION 1..5: note = XENP022845 vhCDR1
SYTMH

SEQ ID NO: 2695 - protein, 17 aa, synthetic construct
  REGION 1..17: note = Description of Artificial Sequence: Synthetic peptide
  REGION 1..17: note = XENP022845 vhCDR2
FISYDGNYKYYADSVKG

SEQ ID NO: 2696 - protein, 9 aa, synthetic construct
  REGION 1..9: note = Description of Artificial Sequence: Synthetic peptide
  REGION 1..9: note = XENP022845 vhCDR3
GGHLGPFDL

SEQ ID NO: 2697 - protein, 12 aa, synthetic construct
  REGION 1..12: note = Description of Artificial Sequence: Synthetic peptide
  REGION 1..12: note = XENP022845 vlCDR1
RASQSVGSSYLA

SEQ ID NO: 2698 - protein, 7 aa, synthetic construct
  REGION 1..7: note = Description of Artificial Sequence: Synthetic peptide
  REGION 1..7: note = XENP022845 vlCDR2
GASSRAT

SEQ ID NO: 2699 - protein, 9 aa, synthetic construct
  REGION 1..9: note = Description of Artificial Sequence: Synthetic peptide
  REGION 1..9: note = XENP022845 vlCDR3
QQYGSSPWT

SEQ ID NO: 2700 - protein, 214 aa, synthetic construct; identical to SEQ ID NO: 2680
  REGION 1..214: note = Description of Artificial Sequence: Synthetic polypeptide
  REGION 1..214: note = XENP022845 2A11_H1_L2.113_Fab-[CTLA-4]_H3.23_L0.129_scFv Light Chain

SEQ ID NO: 2701 - protein, 107 aa, synthetic construct; identical to SEQ ID NO: 2681
  REGION 1..107: note = Description of Artificial Sequence: Synthetic polypeptide
  REGION 1..107: note = VL of XENP022845

SEQ ID NO: 2702 - protein, 11 aa, synthetic construct
  REGION 1..11: note = Description of Artificial Sequence: Synthetic peptide
  REGION 1..11: note = XENP022845 vlCDR1
QASQDIGNYLN

SEQ ID NO: 2703 - protein, 7 aa, synthetic construct
  REGION 1..7: note = Description of Artificial Sequence: Synthetic peptide
  REGION 1..7: note = XENP022845 vlCDR2
FTSYLHS

SEQ ID NO: 2704 - protein, 9 aa, synthetic construct
  REGION 1..9: note = Description of Artificial Sequence: Synthetic peptide
  REGION 1..9: note = XENP022845 vlCDR3
QQGNTLPYT

SEQ ID NO: 2705 - protein, 447 aa, synthetic construct
  REGION 1..447: note = Description of Artificial Sequence: Synthetic polypeptide
  REGION 1..447: note = XENP022846 2A11_H1.125_L2.126_Fab-[CTLA-4]_H3.23_L0.129_scFv Fab-Fc Heavy Chain
EVQLVQSGAEVKKPGATVKISCKASGFNIKHYFMHWVQQAPGKGLEWMGWIDPYLGDTEYAPKFQGRVTITADTSTNTAYMELSSLRSEDTAVYYCYARGVYQALDYWGQGTLVTVSSASTKGPSVFPLAPSSKSTSGGTAALGCLVKDYFPEPVTVSWNSGALTSGVHTFPAVLQSSGLYSLSSVVTVPSSSLGTQTYICNVNHKPSDTKVDKKVEPKSCDKTHTCPPCPAPPVAGPSVFLFPPKPKDTLMISRTPEVTCVVVDVKHEDPEVKFNWYVDGVEVHNAKTKPREEEYNSTYRVVSVLTVLHQDWLNGKEYKCKVSNKALPAPIEKTISKAKGQPREPQVYTLPPSREEMTKNQVSLTCDVSGFYPSDIAVEWESDGQPENNYKTTPPVLDSDGSFFLYSKLTVDKSRWEQGDVFSCSVLHEALHSHYTQKSLSLSPGK

SEQ ID NO: 2706 - protein, 118 aa, synthetic construct
  REGION 1..118: note = Description of Artificial Sequence: Synthetic polypeptide
  REGION 1..118: note = VH of XENP022846
EVQLVQSGAEVKKPGATVKISCKASGFNIKHYFMHWVQQAPGKGLEWMGWIDPYLGDTEYAPKFQGRVTITADTSTNTAYMELSSLRSEDTAVYYCYARGVYQALDYWGQGTLVTVSS

SEQ ID NO: 2707 - protein, 5 aa, synthetic construct
  REGION 1..5: note = Description of Artificial Sequence: Synthetic peptide
  REGION 1..5: note = XENP022846 vhCDR1
HYFMH

SEQ ID NO: 2708 - protein, 17 aa, synthetic construct
  REGION 1..17: note = Description of Artificial Sequence: Synthetic peptide
  REGION 1..17: note = XENP022846 vhCDR2
WIDPYLGDTEYAPKFQG

SEQ ID NO: 2709 - protein, 9 aa, synthetic construct
  REGION 1..9: note = Description of Artificial Sequence: Synthetic peptide
  REGION 1..9: note = XENP022846 vhCDR3
RGVYQALDY

SEQ ID NO: 2710 - protein, 477 aa, synthetic construct; identical to SEQ ID NO: 2610
  REGION 1..477: note = Description of Artificial Sequence: Synthetic polypeptide
  REGION 1..477: note = XENP022846 2A11_H1.125_L2.126_Fab-[CTLA-4]_H3.23_L0.129_scFv scFv-Fc Heavy Chain

SEQ ID NO: 2711 - protein, 118 aa, synthetic construct; identical to SEQ ID NO: 2395
  REGION 1..118: note = Description of Artificial Sequence: Synthetic polypeptide
  REGION 1..118: note = VH of XENP022846

SEQ ID NO: 2712 - protein, 108 aa, synthetic construct; identical to SEQ ID NO: 2396
  REGION 1..108: note = Description of Artificial Sequence: Synthetic polypeptide
  REGION 1..108: note = VL of XENP022846

SEQ ID NO: 2713 - protein, 231 aa, synthetic construct; identical to SEQ ID NO: 2409
  REGION 1..231: note = Description of Artificial Sequence: Synthetic polypeptide
  REGION 1..231: note = Fc chain of XENP022846

SEQ ID NO: 2714 - protein, 5 aa, synthetic construct
  REGION 1..5: note = Description of Artificial Sequence: Synthetic peptide
  REGION 1..5: note = XENP022846 vhCDR1
SYTMH

SEQ ID NO: 2715 - protein, 17 aa, synthetic construct
  REGION 1..17: note = Description of Artificial Sequence: Synthetic peptide
  REGION 1..17: note = XENP022846 vhCDR2
FISYDGNYKYYADSVKG

SEQ ID NO: 2716 - protein, 9 aa, synthetic construct
  REGION 1..9: note = Description of Artificial Sequence: Synthetic peptide
  REGION 1..9: note = XENP022846 vhCDR3
GGHLGPFDL

SEQ ID NO: 2717 - protein, 12 aa, synthetic construct
  REGION 1..12: note = Description of Artificial Sequence: Synthetic peptide
  REGION 1..12: note = XENP022846 vlCDR1
RASQSVGSSYLA

SEQ ID NO: 2718 - protein, 7 aa, synthetic construct
  REGION 1..7: note = Description of Artificial Sequence: Synthetic peptide
  REGION 1..7: note = XENP022846 vlCDR2
GASSRAT

SEQ ID NO: 2719 - protein, 9 aa, synthetic construct
  REGION 1..9: note = Description of Artificial Sequence: Synthetic peptide
  REGION 1..9: note = XENP022846 vlCDR3
QQYGSSPWT

SEQ ID NO: 2720 - protein, 214 aa, synthetic construct
  REGION 1..214: note = Description of Artificial Sequence: Synthetic polypeptide
  REGION 1..214: note = XENP022846 2A11_H1.125_L2.126_Fab-[CTLA-4]_H3.23_L0.129_scFv Light Chain
DIQMTQSPAFLSVTPGEKVTITCQASQDIGNYLNWFQQKPDQTVKLLIYFTSYLHSGVPSRFSGSGSGTDYTFTISSLEAEDAATYFCQEGNTLPYTFGGGTKVEIKRTVAAPSVFIFPPSDEQLKSGTASVVCLLNNFYPREAKVQWKVDNALQSGNSQESVTEQDSKDSTYSLSSTLTLSKADYEKHKVYACEVTHQGLSSPVTKSFNRGEC

SEQ ID NO: 2721 - protein, 107 aa, synthetic construct
  REGION 1..107: note = Description of Artificial Sequence: Synthetic polypeptide
  REGION 1..107: note = VL of XENP022846
DIQMTQSPAFLSVTPGEKVTITCQASQDIGNYLNWFQQKPDQTVKLLIYFTSYLHSGVPSRFSGSGSGTDYTFTISSLEAEDAATYFCQEGNTLPYTFGGGTKVEIK

SEQ ID NO: 2722 - protein, 11 aa, synthetic construct
  REGION 1..11: note = Description of Artificial Sequence: Synthetic peptide
  REGION 1..11: note = XENP022846 vlCDR1
QASQDIGNYLN

SEQ ID NO: 2723 - protein, 7 aa, synthetic construct
  REGION 1..7: note = Description of Artificial Sequence: Synthetic peptide
  REGION 1..7: note = XENP022846 vlCDR2
FTSYLHS

SEQ ID NO: 2724 - protein, 9 aa, synthetic construct
  REGION 1..9: note = Description of Artificial Sequence: Synthetic peptide
  REGION 1..9: note = XENP022846 vlCDR3
QEGNTLPYT

SEQ ID NO: 2725 - protein, 450 aa, synthetic construct
  REGION 1..450: note = Description of Artificial Sequence: Synthetic polypeptide
  REGION 1..450: note = XENP023223 7G8_H3.66_L1.34_Fab-[CTLA-4]_H3.23_L0.129_scFv Fab -Fc Heavy Chain
EVQLVESGGGLVQPGGSLRLSCAASGFTFDEAWMSWVRQAPGKGLEWVAEISTKANNHATYYAESVKGRFTISRDDSKSSVYLQMNSLRAEDTAVYYCTRLATWDWYFDVWGQGTTVTVSSASTKGPSVFPLAPSSKSTSGGTAALGCLVKDYFPEPVTVSWNSGALTSGVHTFPAVLQSSGLYSLSSVVTVPSSSLGTQTYICNVNHKPSDTKVDKKVEPKSCDKTHTCPPCPAPPVAGPSVFLFPPKPKDTLMISRTPEVTCVVVDVKHEDPEVKFNWYVDGVEVHNAKTKPREEEYNSTYRVVSVLTVLHQDWLNGKEYKCKVSNKALPAPIEKTISKAKGQPREPQVYTLPPSREEMTKNQVSLTCDVSGFYPSDIAVEWESDGQPENNYKTTPPVLDSDGSFFLYSKLTVDKSRWEQGDVFSCSVMHEALHNHYTQKSLSLSPGK

SEQ ID NO: 2726 - protein, 121 aa, synthetic construct; identical to SEQ ID NO: 2416
  REGION 1..121: note = Description of Artificial Sequence: Synthetic polypeptide
  REGION 1..121: note = VH of XENP023223

SEQ ID NO: 2727 - protein, 5 aa, synthetic construct
  REGION 1..5: note = Description of Artificial Sequence: Synthetic peptide
  REGION 1..5: note = XENP023223 vhCDR1
EAWMS

SEQ ID NO: 2728 - protein, 19 aa, synthetic construct
  REGION 1..19: note = Description of Artificial Sequence: Synthetic peptide
  REGION 1..19: note = XENP023223 vhCDR2
EISTKANNHATYYAESVKG

SEQ ID NO: 2729 - protein, 10 aa, synthetic construct
  REGION 1..10: note = Description of Artificial Sequence: Synthetic peptide
  REGION 1..10: note = XENP023223 vhCDR3
LATWDWYFDV

SEQ ID NO: 2730 - protein, 477 aa, synthetic construct; identical to SEQ ID NO: 2394
  REGION 1..477: note = Description of Artificial Sequence: Synthetic polypeptide
  REGION 1..477: note = XENP023223 7G8_H3.66_L1.34_Fab-[CTLA-4]_H3.23_L0.129_scFv scFv -Fc Heavy Chain

SEQ ID NO: 2731 - protein, 118 aa, synthetic construct; identical to SEQ ID NO: 2395
  REGION 1..118: note = Description of Artificial Sequence: Synthetic polypeptide
  REGION 1..118: note = VH of XENP023223

SEQ ID NO: 2732 - protein, 108 aa, synthetic construct; identical to SEQ ID NO: 2396
  REGION 1..108: note = Description of Artificial Sequence: Synthetic polypeptide
  REGION 1..108: note = VL of XENP023223

SEQ ID NO: 2733 - protein, 231 aa, synthetic construct; identical to SEQ ID NO: 2397
  REGION 1..231: note = Description of Artificial Sequence: Synthetic polypeptide
  REGION 1..231: note = Fc chain of XENP023223

SEQ ID NO: 2734 - protein, 5 aa, synthetic construct
  REGION 1..5: note = Description of Artificial Sequence: Synthetic peptide
  REGION 1..5: note = XENP023223 vhCDR1
SYTMH

SEQ ID NO: 2735 - protein, 17 aa, synthetic construct
  REGION 1..17: note = Description of Artificial Sequence: Synthetic peptide
  REGION 1..17: note = XENP023223 vhCDR2
FISYDGNYKYYADSVKG

SEQ ID NO: 2736 - protein, 9 aa, synthetic construct
  REGION 1..9: note = Description of Artificial Sequence: Synthetic peptide
  REGION 1..9: note = XENP023223 vhCDR3
GGHLGPFDL

SEQ ID NO: 2737 - protein, 12 aa, synthetic construct
  REGION 1..12: note = Description of Artificial Sequence: Synthetic peptide
  REGION 1..12: note = XENP023223 vlCDR1
RASQSVGSSYLA

SEQ ID NO: 2738 - protein, 7 aa, synthetic construct
  REGION 1..7: note = Description of Artificial Sequence: Synthetic peptide
  REGION 1..7: note = XENP023223 vlCDR2
GASSRAT

SEQ ID NO: 2739 - protein, 9 aa, synthetic construct
  REGION 1..9: note = Description of Artificial Sequence: Synthetic peptide
  REGION 1..9: note = XENP023223 vlCDR3
QQYGSSPWT

SEQ ID NO: 2740 - protein, 218 aa, synthetic construct; identical to SEQ ID NO: 2420
  REGION 1..218: note = Description of Artificial Sequence: Synthetic polypeptide
  REGION 1..218: note = XENP023223 7G8_H3.66_L1.34_Fab-[CTLA-4]_H3.23_L0.129_scFv Light Chain

SEQ ID NO: 2741 - protein, 111 aa, synthetic construct; identical to SEQ ID NO: 2421
  REGION 1..111: note = Description of Artificial Sequence: Synthetic polypeptide
  REGION 1..111: note = VL of XENP023223

SEQ ID NO: 2742 - protein, 15 aa, synthetic construct
  REGION 1..15: note = Description of Artificial Sequence: Synthetic peptide
  REGION 1..15: note = XENP023223 vlCDR1
RASQSVDYDGDSYMN

SEQ ID NO: 2743 - protein, 7 aa, synthetic construct
  REGION 1..7: note = Description of Artificial Sequence: Synthetic peptide
  REGION 1..7: note = XENP023223 vlCDR2
AASELES

SEQ ID NO: 2744 - protein, 9 aa, synthetic construct
  REGION 1..9: note = Description of Artificial Sequence: Synthetic peptide
  REGION 1..9: note = XENP023223 vlCDR3
QQSNEDPFT

SEQ ID NO: 2745 - protein, 450 aa, synthetic construct
  REGION 1..450: note = Description of Artificial Sequence: Synthetic polypeptide
  REGION 1..450: note = XENP023224 7G8_H3.67_L1.34_Fab-[CTLA-4]_H3.23_L0.129_scFv Fab -Fc Heavy Chain
EVQLVESGGGLVQPGGSLRLSCAASGFTFDDTWMSWVRQAPGKGLEWVAEISTKANNHATYYAESVKGRFTISRDDSKSSVYLQMNSLRAEDTAVYYCTRLATWDWYFDVWGQGTTVTVSSASTKGPSVFPLAPSSKSTSGGTAALGCLVKDYFPEPVTVSWNSGALTSGVHTFPAVLQSSGLYSLSSVVTVPSSSLGTQTYICNVNHKPSDTKVDKKVEPKSCDKTHTCPPCPAPPVAGPSVFLFPPKPKDTLMISRTPEVTCVVVDVKHEDPEVKFNWYVDGVEVHNAKTKPREEEYNSTYRVVSVLTVLHQDWLNGKEYKCKVSNKALPAPIEKTISKAKGQPREPQVYTLPPSREEMTKNQVSLTCDVSGFYPSDIAVEWESDGQPENNYKTTPPVLDSDGSFFLYSKLTVDKSRWEQGDVFSCSVMHEALHNHYTQKSLSLSPGK

SEQ ID NO: 2746 - protein, 121 aa, synthetic construct; identical to SEQ ID NO: 2426
  REGION 1..121: note = Description of Artificial Sequence: Synthetic polypeptide
  REGION 1..121: note = VH of XENP023224

SEQ ID NO: 2747 - protein, 5 aa, synthetic construct
  REGION 1..5: note = Description of Artificial Sequence: Synthetic peptide
  REGION 1..5: note = XENP023224 vhCDR1
DTWMS

SEQ ID NO: 2748 - protein, 19 aa, synthetic construct
  REGION 1..19: note = Description of Artificial Sequence: Synthetic peptide
  REGION 1..19: note = XENP023224 vhCDR2
EISTKANNHATYYAESVKG

SEQ ID NO: 2749 - protein, 10 aa, synthetic construct
  REGION 1..10: note = Description of Artificial Sequence: Synthetic peptide
  REGION 1..10: note = XENP023224 vhCDR3
LATWDWYFDV

SEQ ID NO: 2750 - protein, 477 aa, synthetic construct; identical to SEQ ID NO: 2394
  REGION 1..477: note = Description of Artificial Sequence: Synthetic polypeptide
  REGION 1..477: note = XENP023224 7G8_H3.67_L1.34_Fab-[CTLA-4]_H3.23_L0.129_scFv scFv -Fc Heavy Chain

SEQ ID NO: 2751 - protein, 118 aa, synthetic construct; identical to SEQ ID NO: 2395
  REGION 1..118: note = Description of Artificial Sequence: Synthetic polypeptide
  REGION 1..118: note = VH of XENP023224

SEQ ID NO: 2752 - protein, 108 aa, synthetic construct; identical to SEQ ID NO: 2396
  REGION 1..108: note = Description of Artificial Sequence: Synthetic polypeptide
  REGION 1..108: note = VL of XENP023224

SEQ ID NO: 2753 - protein, 231 aa, synthetic construct; identical to SEQ ID NO: 2397
  REGION 1..231: note = Description of Artificial Sequence: Synthetic polypeptide
  REGION 1..231: note = Fc chain of XENP023224

SEQ ID NO: 2754 - protein, 5 aa, synthetic construct
  REGION 1..5: note = Description of Artificial Sequence: Synthetic peptide
  REGION 1..5: note = XENP023224 vhCDR1
SYTMH

SEQ ID NO: 2755 - protein, 17 aa, synthetic construct
  REGION 1..17: note = Description of Artificial Sequence: Synthetic peptide
  REGION 1..17: note = XENP023224 vhCDR2
FISYDGNYKYYADSVKG

SEQ ID NO: 2756 - protein, 9 aa, synthetic construct
  REGION 1..9: note = Description of Artificial Sequence: Synthetic peptide
  REGION 1..9: note = XENP023224 vhCDR3
GGHLGPFDL

SEQ ID NO: 2757 - protein, 12 aa, synthetic construct
  REGION 1..12: note = Description of Artificial Sequence: Synthetic peptide
  REGION 1..12: note = XENP023224 vlCDR1
RASQSVGSSYLA

SEQ ID NO: 2758 - protein, 7 aa, synthetic construct
  REGION 1..7: note = Description of Artificial Sequence: Synthetic peptide
  REGION 1..7: note = XENP023224 vlCDR2
GASSRAT

SEQ ID NO: 2759 - protein, 9 aa, synthetic construct
  REGION 1..9: note = Description of Artificial Sequence: Synthetic peptide
  REGION 1..9: note = XENP023224 vlCDR3
QQYGSSPWT

SEQ ID NO: 2760 - protein, 218 aa, synthetic construct; identical to SEQ ID NO: 2420
  REGION 1..218: note = Description of Artificial Sequence: Synthetic polypeptide
  REGION 1..218: note = XENP023224 7G8_H3.67_L1.34_Fab-[CTLA-4]_H3.23_L0.129_scFv Light Chain

SEQ ID NO: 2761 - protein, 111 aa, synthetic construct; identical to SEQ ID NO: 2421
  REGION 1..111: note = Description of Artificial Sequence: Synthetic polypeptide
  REGION 1..111: note = VL of XENP023224

SEQ ID NO: 2762 - protein, 15 aa, synthetic construct
  REGION 1..15: note = Description of Artificial Sequence: Synthetic peptide
  REGION 1..15: note = XENP023224 vlCDR1
RASQSVDYDGDSYMN

SEQ ID NO: 2763 - protein, 7 aa, synthetic construct
  REGION 1..7: note = Description of Artificial Sequence: Synthetic peptide
  REGION 1..7: note = XENP023224 vlCDR2
AASELES

SEQ ID NO: 2764 - protein, 9 aa, synthetic construct
  REGION 1..9: note = Description of Artificial Sequence: Synthetic peptide
  REGION 1..9: note = XENP023224 vlCDR3
QQSNEDPFT

SEQ ID NO: 2765 - protein, 450 aa, synthetic construct
  REGION 1..450: note = Description of Artificial Sequence: Synthetic polypeptide
  REGION 1..450: note = XENP023225 7G8_H3.71_L1.34_Fab-[CTLA-4]_H3.23_L0.129_scFv Fab-Fc Heavy Chain
EVQLVESGGGLVQPGGSLRLSCAASGFTFDDAWMSWVRQAPGKGLEWVAEISTKAYNHATYYAESVKGRFTISRDDSKSSVYLQMNSLRAEDTAVYYCTRLATWDWYFDVWGQGTTVTVSSASTKGPSVFPLAPSSKSTSGGTAALGCLVKDYFPEPVTVSWNSGALTSGVHTFPAVLQSSGLYSLSSVVTVPSSSLGTQTYICNVNHKPSDTKVDKKVEPKSCDKTHTCPPCPAPPVAGPSVFLFPPKPKDTLMISRTPEVTCVVVDVKHEDPEVKFNWYVDGVEVHNAKTKPREEEYNSTYRVVSVLTVLHQDWLNGKEYKCKVSNKALPAPIEKTISKAKGQPREPQVYTLPPSREEMTKNQVSLTCDVSGFYPSDIAVEWESDGQPENNYKTTPPVLDSDGSFFLYSKLTVDKSRWEQGDVFSCSVMHEALHNHYTQKSLSLSPGK

SEQ ID NO: 2766 - protein, 121 aa, synthetic construct; identical to SEQ ID NO: 2466
  REGION 1..121: note = Description of Artificial Sequence: Synthetic polypeptide
  REGION 1..121: note = VH of XENP023225

SEQ ID NO: 2767 - protein, 5 aa, synthetic construct
  REGION 1..5: note = Description of Artificial Sequence: Synthetic peptide
  REGION 1..5: note = XENP023225 vhCDR1
DAWMS

SEQ ID NO: 2768 - protein, 19 aa, synthetic construct
  REGION 1..19: note = Description of Artificial Sequence: Synthetic peptide
  REGION 1..19: note = XENP023225 vhCDR2
EISTKAYNHATYYAESVKG

SEQ ID NO: 2769 - protein, 10 aa, synthetic construct
  REGION 1..10: note = Description of Artificial Sequence: Synthetic peptide
  REGION 1..10: note = XENP023225 vhCDR3
LATWDWYFDV

SEQ ID NO: 2770 - protein, 477 aa, synthetic construct; identical to SEQ ID NO: 2394
  REGION 1..477: note = Description of Artificial Sequence: Synthetic polypeptide
  REGION 1..477: note = XENP023225 7G8_H3.71_L1.34_Fab-[CTLA-4]_H3.23_L0.129_scFv scFv -Fc Heavy Chain

SEQ ID NO: 2771 - protein, 118 aa, synthetic construct; identical to SEQ ID NO: 2395
  REGION 1..118: note = Description of Artificial Sequence: Synthetic polypeptide
  REGION 1..118: note = VH of XENP023225

SEQ ID NO: 2772 - protein, 108 aa, synthetic construct; identical to SEQ ID NO: 2396
  REGION 1..108: note = Description of Artificial Sequence: Synthetic polypeptide
  REGION 1..108: note = VL of XENP023225

SEQ ID NO: 2773 - protein, 231 aa, synthetic construct; identical to SEQ ID NO: 2397
  REGION 1..231: note = Description of Artificial Sequence: Synthetic polypeptide
  REGION 1..231: note = Fc chain of XENP023225

SEQ ID NO: 2774 - protein, 5 aa, synthetic construct
  REGION 1..5: note = Description of Artificial Sequence: Synthetic peptide
  REGION 1..5: note = XENP023225 vhCDR1
SYTMH

SEQ ID NO: 2775 - protein, 17 aa, synthetic construct
  REGION 1..17: note = Description of Artificial Sequence: Synthetic peptide
  REGION 1..17: note = XENP023225 vhCDR2
FISYDGNYKYYADSVKG

SEQ ID NO: 2776 - protein, 9 aa, synthetic construct
  REGION 1..9: note = Description of Artificial Sequence: Synthetic peptide
  REGION 1..9: note = XENP023225 vhCDR3
GGHLGPFDL

SEQ ID NO: 2777 - protein, 12 aa, synthetic construct
  REGION 1..12: note = Description of Artificial Sequence: Synthetic peptide
  REGION 1..12: note = XENP023225 vlCDR1
RASQSVGSSYLA

SEQ ID NO: 2778 - protein, 7 aa, synthetic construct
  REGION 1..7: note = Description of Artificial Sequence: Synthetic peptide
  REGION 1..7: note = XENP023225 vlCDR2
GASSRAT

SEQ ID NO: 2779 - protein, 9 aa, synthetic construct
  REGION 1..9: note = Description of Artificial Sequence: Synthetic peptide
  REGION 1..9: note = XENP023225 vlCDR3
QQYGSSPWT

SEQ ID NO: 2780 - protein, 218 aa, synthetic construct; identical to SEQ ID NO: 2420
  REGION 1..218: note = Description of Artificial Sequence: Synthetic polypeptide
  REGION 1..218: note = XENP023225 7G8_H3.71_L1.34_Fab-[CTLA-4]_H3.23_L0.129_scFv Light Chain

SEQ ID NO: 2781 - protein, 111 aa, synthetic construct; identical to SEQ ID NO: 2421
  REGION 1..111: note = Description of Artificial Sequence: Synthetic polypeptide
  REGION 1..111: note = VL of XENP023225

SEQ ID NO: 2782 - protein, 15 aa, synthetic construct
  REGION 1..15: note = Description of Artificial Sequence: Synthetic peptide
  REGION 1..15: note = XENP023225 vlCDR1
RASQSVDYDGDSYMN

SEQ ID NO: 2783 - protein, 7 aa, synthetic construct
  REGION 1..7: note = Description of Artificial Sequence: Synthetic peptide
  REGION 1..7: note = XENP023225 vlCDR2
AASELES

SEQ ID NO: 2784 - protein, 9 aa, synthetic construct
  REGION 1..9: note = Description of Artificial Sequence: Synthetic peptide
  REGION 1..9: note = XENP023225 vlCDR3
QQSNEDPFT

SEQ ID NO: 2785 - protein, 450 aa, synthetic construct
  REGION 1..450: note = Description of Artificial Sequence: Synthetic polypeptide
  REGION 1..450: note = XENP023226 7G8_H3.30_L1.39_Fab-[CTLA-4]_H3.23_L0.129_scFv Fab- Fc Heavy Chain
EVQLVESGGGLVQPGGSLRLSCAASGFTFDDAWMSWVRQAPGKGLEWVAEISTKANNHATYYAESVKGRFTISRDDSKSSVYLQMNSLRAEDTAVYYCTRLATWDWYFDVWGQGTTVTVSSASTKGPSVFPLAPSSKSTSGGTAALGCLVKDYFPEPVTVSWNSGALTSGVHTFPAVLQSSGLYSLSSVVTVPSSSLGTQTYICNVNHKPSDTKVDKKVEPKSCDKTHTCPPCPAPPVAGPSVFLFPPKPKDTLMISRTPEVTCVVVDVKHEDPEVKFNWYVDGVEVHNAKTKPREEEYNSTYRVVSVLTVLHQDWLNGKEYKCKVSNKALPAPIEKTISKAKGQPREPQVYTLPPSREEMTKNQVSLTCDVSGFYPSDIAVEWESDGQPENNYKTTPPVLDSDGSFFLYSKLTVDKSRWEQGDVFSCSVMHEALHNHYTQKSLSLSPGK

SEQ ID NO: 2786 - protein, 121 aa, synthetic construct; identical to SEQ ID NO: 2516
  REGION 1..121: note = Description of Artificial Sequence: Synthetic polypeptide
  REGION 1..121: note = VH of XENP023226

SEQ ID NO: 2787 - protein, 5 aa, synthetic construct
  REGION 1..5: note = Description of Artificial Sequence: Synthetic peptide
  REGION 1..5: note = XENP023226 vhCDR1
DAWMS

SEQ ID NO: 2788 - protein, 19 aa, synthetic construct
  REGION 1..19: note = Description of Artificial Sequence: Synthetic peptide
  REGION 1..19: note = XENP023226 vhCDR2
EISTKANNHATYYAESVKG

SEQ ID NO: 2789 - protein, 10 aa, synthetic construct
  REGION 1..10: note = Description of Artificial Sequence: Synthetic peptide
  REGION 1..10: note = XENP023226 vhCDR3
LATWDWYFDV

SEQ ID NO: 2790 - protein, 477 aa, synthetic construct; identical to SEQ ID NO: 2394
  REGION 1..477: note = Description of Artificial Sequence: Synthetic polypeptide
  REGION 1..477: note = XENP023226 7G8_H3.30_L1.39_Fab-[CTLA-4]_H3.23_L0.129_scFv scFv -Fc Heavy Chain

SEQ ID NO: 2791 - protein, 118 aa, synthetic construct; identical to SEQ ID NO: 2395
  REGION 1..118: note = Description of Artificial Sequence: Synthetic polypeptide
  REGION 1..118: note = VH of XENP023226

SEQ ID NO: 2792 - protein, 108 aa, synthetic construct; identical to SEQ ID NO: 2396
  REGION 1..108: note = Description of Artificial Sequence: Synthetic polypeptide
  REGION 1..108: note = VL of XENP023226

SEQ ID NO: 2793 - protein, 231 aa, synthetic construct; identical to SEQ ID NO: 2397
  REGION 1..231: note = Description of Artificial Sequence: Synthetic polypeptide
  REGION 1..231: note = Fc chain of XENP023226

SEQ ID NO: 2794 - protein, 5 aa, synthetic construct
  REGION 1..5: note = Description of Artificial Sequence: Synthetic peptide
  REGION 1..5: note = XENP023226 vhCDR1
SYTMH

SEQ ID NO: 2795 - protein, 17 aa, synthetic construct
  REGION 1..17: note = Description of Artificial Sequence: Synthetic peptide
  REGION 1..17: note = XENP023226 vhCDR2
FISYDGNYKYYADSVKG

SEQ ID NO: 2796 - protein, 9 aa, synthetic construct
  REGION 1..9: note = Description of Artificial Sequence: Synthetic peptide
  REGION 1..9: note = XENP023226 vhCDR3
GGHLGPFDL

SEQ ID NO: 2797 - protein, 12 aa, synthetic construct
  REGION 1..12: note = Description of Artificial Sequence: Synthetic peptide
  REGION 1..12: note = XENP023226 vlCDR1
RASQSVGSSYLA

SEQ ID NO: 2798 - protein, 7 aa, synthetic construct
  REGION 1..7: note = Description of Artificial Sequence: Synthetic peptide
  REGION 1..7: note = XENP023226 vlCDR2
GASSRAT

SEQ ID NO: 2799 - protein, 9 aa, synthetic construct
  REGION 1..9: note = Description of Artificial Sequence: Synthetic peptide
  REGION 1..9: note = XENP023226 vlCDR3
QQYGSSPWT

SEQ ID NO: 2800 - protein, 218 aa, synthetic construct; identical to SEQ ID NO: 2530
  REGION 1..218: note = Description of Artificial Sequence: Synthetic polypeptide
  REGION 1..218: note = XENP023226 7G8_H3.30_L1.39_Fab-[CTLA-4]_H3.23_L0.129_scFv Light Chain

SEQ ID NO: 2801 - protein, 111 aa, synthetic construct; identical to SEQ ID NO: 2531
  REGION 1..111: note = Description of Artificial Sequence: Synthetic polypeptide
  REGION 1..111: note = VL of XENP023226

SEQ ID NO: 2802 - protein, 15 aa, synthetic construct
  REGION 1..15: note = Description of Artificial Sequence: Synthetic peptide
  REGION 1..15: note = XENP023226 vlCDR1
RASQSVDYYGDSYMN

SEQ ID NO: 2803 - protein, 7 aa, synthetic construct
  REGION 1..7: note = Description of Artificial Sequence: Synthetic peptide
  REGION 1..7: note = XENP023226 vlCDR2
AASELES

SEQ ID NO: 2804 - protein, 9 aa, synthetic construct
  REGION 1..9: note = Description of Artificial Sequence: Synthetic peptide
  REGION 1..9: note = XENP023226 vlCDR3
QQSNEDPFT

SEQ ID NO: 2805 - protein, 450 aa, synthetic construct; identical to SEQ ID NO: 2725
  REGION 1..450: note = Description of Artificial Sequence: Synthetic polypeptide
  REGION 1..450: note = XENP023227 7G8_H3.66_L1.39_Fab-[CTLA-4]_H3.23_L0.129_scFv Fab -Fc Heavy Chain

SEQ ID NO: 2806 - protein, 121 aa, synthetic construct; identical to SEQ ID NO: 2416
  REGION 1..121: note = Description of Artificial Sequence: Synthetic polypeptide
  REGION 1..121: note = VH of XENP023227

SEQ ID NO: 2807 - protein, 5 aa, synthetic construct
  REGION 1..5: note = Description of Artificial Sequence: Synthetic peptide
  REGION 1..5: note = XENP023227 vhCDR1
EAWMS

SEQ ID NO: 2808 - protein, 19 aa, synthetic construct
  REGION 1..19: note = Description of Artificial Sequence: Synthetic peptide
  REGION 1..19: note = XENP023227 vhCDR2
EISTKANNHATYYAESVKG

SEQ ID NO: 2809 - protein, 10 aa, synthetic construct
  REGION 1..10: note = Description of Artificial Sequence: Synthetic peptide
  REGION 1..10: note = XENP023227 vhCDR3
LATWDWYFDV

SEQ ID NO: 2810 - protein, 477 aa, synthetic construct; identical to SEQ ID NO: 2394
  REGION 1..477: note = Description of Artificial Sequence: Synthetic polypeptide
  REGION 1..477: note = XENP023227 7G8_H3.66_L1.39_Fab-[CTLA-4]_H3.23_L0.129_scFv scFv -Fc Heavy Chain

SEQ ID NO: 2811 - protein, 118 aa, synthetic construct; identical to SEQ ID NO: 2395
  REGION 1..118: note = Description of Artificial Sequence: Synthetic polypeptide
  REGION 1..118: note = VH of XENP023227

SEQ ID NO: 2812 - protein, 108 aa, synthetic construct; identical to SEQ ID NO: 2396
  REGION 1..108: note = Description of Artificial Sequence: Synthetic polypeptide
  REGION 1..108: note = VL of XENP023227

SEQ ID NO: 2813 - protein, 231 aa, synthetic construct; identical to SEQ ID NO: 2397
  REGION 1..231: note = Description of Artificial Sequence: Synthetic polypeptide
  REGION 1..231: note = Fc chain of XENP023227

SEQ ID NO: 2814 - protein, 5 aa, synthetic construct
  REGION 1..5: note = Description of Artificial Sequence: Synthetic peptide
  REGION 1..5: note = XENP023227 vhCDR1
SYTMH

SEQ ID NO: 2815 - protein, 17 aa, synthetic construct
  REGION 1..17: note = Description of Artificial Sequence: Synthetic peptide
  REGION 1..17: note = XENP023227 vhCDR2
FISYDGNYKYYADSVKG

SEQ ID NO: 2816 - protein, 9 aa, synthetic construct
  REGION 1..9: note = Description of Artificial Sequence: Synthetic peptide
  REGION 1..9: note = XENP023227 vhCDR3
GGHLGPFDL

SEQ ID NO: 2817 - protein, 12 aa, synthetic construct
  REGION 1..12: note = Description of Artificial Sequence: Synthetic peptide
  REGION 1..12: note = XENP023227 vlCDR1
RASQSVGSSYLA

SEQ ID NO: 2818 - protein, 7 aa, synthetic construct
  REGION 1..7: note = Description of Artificial Sequence: Synthetic peptide
  REGION 1..7: note = XENP023227 vlCDR2
GASSRAT

SEQ ID NO: 2819 - protein, 9 aa, synthetic construct
  REGION 1..9: note = Description of Artificial Sequence: Synthetic peptide
  REGION 1..9: note = XENP023227 vlCDR3
QQYGSSPWT

SEQ ID NO: 2820 - protein, 218 aa, synthetic construct; identical to SEQ ID NO: 2530
  REGION 1..218: note = Description of Artificial Sequence: Synthetic polypeptide
  REGION 1..218: note = XENP023227 7G8_H3.66_L1.39_Fab-[CTLA-4]_H3.23_L0.129_scFv Light Chain

SEQ ID NO: 2821 - protein, 111 aa, synthetic construct; identical to SEQ ID NO: 2531
  REGION 1..111: note = Description of Artificial Sequence: Synthetic polypeptide
  REGION 1..111: note = VL of XENP023227

SEQ ID NO: 2822 - protein, 15 aa, synthetic construct
  REGION 1..15: note = Description of Artificial Sequence: Synthetic peptide
  REGION 1..15: note = XENP023227 vlCDR1
RASQSVDYYGDSYMN

SEQ ID NO: 2823 - protein, 7 aa, synthetic construct
  REGION 1..7: note = Description of Artificial Sequence: Synthetic peptide
  REGION 1..7: note = XENP023227 vlCDR2
AASELES

SEQ ID NO: 2824 - protein, 9 aa, synthetic construct
  REGION 1..9: note = Description of Artificial Sequence: Synthetic peptide
  REGION 1..9: note = XENP023227 vlCDR3
QQSNEDPFT

SEQ ID NO: 2825 - protein, 450 aa, synthetic construct; identical to SEQ ID NO: 2745
  REGION 1..450: note = Description of Artificial Sequence: Synthetic polypeptide
  REGION 1..450: note = XENP023228 7G8_H3.67_L1.39_Fab-[CTLA-4]_H3.23_L0.129_scFv Fab- Fc Heavy Chain

SEQ ID NO: 2826 - protein, 121 aa, synthetic construct; identical to SEQ ID NO: 2426
  REGION 1..121: note = Description of Artificial Sequence: Synthetic polypeptide
  REGION 1..121: note = VH of XENP023228

SEQ ID NO: 2827 - protein, 5 aa, synthetic construct
  REGION 1..5: note = Description of Artificial Sequence: Synthetic peptide
  REGION 1..5: note = XENP023228 vhCDR1
DTWMS

SEQ ID NO: 2828 - protein, 19 aa, synthetic construct
  REGION 1..19: note = Description of Artificial Sequence: Synthetic peptide
  REGION 1..19: note = XENP023228 vhCDR2
EISTKANNHATYYAESVKG

SEQ ID NO: 2829 - protein, 10 aa, synthetic construct
  REGION 1..10: note = Description of Artificial Sequence: Synthetic peptide
  REGION 1..10: note = XENP023228 vhCDR3
LATWDWYFDV

SEQ ID NO: 2830 - protein, 477 aa, synthetic construct; identical to SEQ ID NO: 2394
  REGION 1..477: note = Description of Artificial Sequence: Synthetic polypeptide
  REGION 1..477: note = XENP023228 7G8_H3.67_L1.39_Fab-[CTLA-4]_H3.23_L0.129_scFv scFv -Fc Heavy Chain

SEQ ID NO: 2831 - protein, 118 aa, synthetic construct; identical to SEQ ID NO: 2395
  REGION 1..118: note = Description of Artificial Sequence: Synthetic polypeptide
  REGION 1..118: note = VH of XENP023228

SEQ ID NO: 2832 - protein, 108 aa, synthetic construct; identical to SEQ ID NO: 2396
  REGION 1..108: note = Description of Artificial Sequence: Synthetic polypeptide
  REGION 1..108: note = VL of XENP023228

SEQ ID NO: 2833 - protein, 231 aa, synthetic construct; identical to SEQ ID NO: 2397
  REGION 1..231: note = Description of Artificial Sequence: Synthetic polypeptide
  REGION 1..231: note = Fc chain of XENP023228

SEQ ID NO: 2834 - protein, 5 aa, synthetic construct
  REGION 1..5: note = Description of Artificial Sequence: Synthetic peptide
  REGION 1..5: note = XENP023228 vhCDR1
SYTMH

SEQ ID NO: 2835 - protein, 17 aa, synthetic construct
  REGION 1..17: note = Description of Artificial Sequence: Synthetic peptide
  REGION 1..17: note = XENP023228 vhCDR2
FISYDGNYKYYADSVKG

SEQ ID NO: 2836 - protein, 9 aa, synthetic construct
  REGION 1..9: note = Description of Artificial Sequence: Synthetic peptide
  REGION 1..9: note = XENP023228 vhCDR3
GGHLGPFDL

SEQ ID NO: 2837 - protein, 12 aa, synthetic construct
  REGION 1..12: note = Description of Artificial Sequence: Synthetic peptide
  REGION 1..12: note = XENP023228 vlCDR1
RASQSVGSSYLA

SEQ ID NO: 2838 - protein, 7 aa, synthetic construct
  REGION 1..7: note = Description of Artificial Sequence: Synthetic peptide
  REGION 1..7: note = XENP023228 vlCDR2
GASSRAT

SEQ ID NO: 2839 - protein, 9 aa, synthetic construct
  REGION 1..9: note = Description of Artificial Sequence: Synthetic peptide
  REGION 1..9: note = XENP023228 vlCDR3
QQYGSSPWT

SEQ ID NO: 2840 - protein, 218 aa, synthetic construct; identical to SEQ ID NO: 2530
  REGION 1..218: note = Description of Artificial Sequence: Synthetic polypeptide
  REGION 1..218: note = XENP023228 7G8_H3.67_L1.39_Fab-[CTLA-4]_H3.23_L0.129_scFv Light Chain

SEQ ID NO: 2841 - protein, 111 aa, synthetic construct; identical to SEQ ID NO: 2531
  REGION 1..111: note = Description of Artificial Sequence: Synthetic polypeptide
  REGION 1..111: note = VL of XENP023228

SEQ ID NO: 2842 - protein, 15 aa, synthetic construct
  REGION 1..15: note = Description of Artificial Sequence: Synthetic peptide
  REGION 1..15: note = XENP023228 vlCDR1
RASQSVDYYGDSYMN

SEQ ID NO: 2843 - protein, 7 aa, synthetic construct
  REGION 1..7: note = Description of Artificial Sequence: Synthetic peptide
  REGION 1..7: note = XENP023228 vlCDR2
AASELES

SEQ ID NO: 2844 - protein, 9 aa, synthetic construct
  REGION 1..9: note = Description of Artificial Sequence: Synthetic peptide
  REGION 1..9: note = XENP023228 vlCDR3
QQSNEDPFT

SEQ ID NO: 2845 - protein, 450 aa, synthetic construct; identical to SEQ ID NO: 2765
  REGION 1..450: note = Description of Artificial Sequence: Synthetic polypeptide
  REGION 1..450: note = XENP023229 7G8_H3.71_L1.39_Fab-[CTLA-4]_H3.23_L0.129_scFv Fab -Fc Heavy Chain

SEQ ID NO: 2846 - protein, 121 aa, synthetic construct; identical to SEQ ID NO: 2466
  REGION 1..121: note = Description of Artificial Sequence: Synthetic polypeptide
  REGION 1..121: note = VH of XENP023229

SEQ ID NO: 2847 - protein, 5 aa, synthetic construct
  REGION 1..5: note = Description of Artificial Sequence: Synthetic peptide
  REGION 1..5: note = XENP023229 vhCDR1
DAWMS

SEQ ID NO: 2848 - protein, 19 aa, synthetic construct
  REGION 1..19: note = Description of Artificial Sequence: Synthetic peptide
  REGION 1..19: note = XENP023229 vhCDR2
EISTKAYNHATYYAESVKG

SEQ ID NO: 2849 - protein, 10 aa, synthetic construct
  REGION 1..10: note = Description of Artificial Sequence: Synthetic peptide
  REGION 1..10: note = XENP023229 vhCDR3
LATWDWYFDV

SEQ ID NO: 2850 - protein, 477 aa, synthetic construct; identical to SEQ ID NO: 2394
  REGION 1..477: note = Description of Artificial Sequence: Synthetic polypeptide
  REGION 1..477: note = XENP023229 7G8_H3.71_L1.39_Fab-[CTLA-4]_H3.23_L0.129_scFv scFv -Fc Heavy Chain

SEQ ID NO: 2851 - protein, 118 aa, synthetic construct; identical to SEQ ID NO: 2395
  REGION 1..118: note = Description of Artificial Sequence: Synthetic polypeptide
  REGION 1..118: note = VH of XENP023229

SEQ ID NO: 2852 - protein, 108 aa, synthetic construct; identical to SEQ ID NO: 2396
  REGION 1..108: note = Description of Artificial Sequence: Synthetic polypeptide
  REGION 1..108: note = VL of XENP023229

SEQ ID NO: 2853 - protein, 231 aa, synthetic construct; identical to SEQ ID NO: 2397
  REGION 1..231: note = Description of Artificial Sequence: Synthetic polypeptide
  REGION 1..231: note = Fc chain of XENP023229

SEQ ID NO: 2854 - protein, 5 aa, synthetic construct
  REGION 1..5: note = Description of Artificial Sequence: Synthetic peptide
  REGION 1..5: note = XENP023229 vhCDR1
SYTMH

SEQ ID NO: 2855 - protein, 17 aa, synthetic construct
  REGION 1..17: note = Description of Artificial Sequence: Synthetic peptide
  REGION 1..17: note = XENP023229 vhCDR2
FISYDGNYKYYADSVKG

SEQ ID NO: 2856 - protein, 9 aa, synthetic construct
  REGION 1..9: note = Description of Artificial Sequence: Synthetic peptide
  REGION 1..9: note = XENP023229 vhCDR3
GGHLGPFDL

SEQ ID NO: 2857 - protein, 12 aa, synthetic construct
  REGION 1..12: note = Description of Artificial Sequence: Synthetic peptide
  REGION 1..12: note = XENP023229 vlCDR1
RASQSVGSSYLA

SEQ ID NO: 2858 - protein, 7 aa, synthetic construct
  REGION 1..7: note = Description of Artificial Sequence: Synthetic peptide
  REGION 1..7: note = XENP023229 vlCDR2
GASSRAT

SEQ ID NO: 2859 - protein, 9 aa, synthetic construct
  REGION 1..9: note = Description of Artificial Sequence: Synthetic peptide
  REGION 1..9: note = XENP023229 vlCDR3
QQYGSSPWT

SEQ ID NO: 2860 - protein, 218 aa, synthetic construct; identical to SEQ ID NO: 2530
  REGION 1..218: note = Description of Artificial Sequence: Synthetic polypeptide
  REGION 1..218: note = XENP023229 7G8_H3.71_L1.39_Fab-[CTLA-4]_H3.23_L0.129_scFv Light Chain

SEQ ID NO: 2861 - protein, 111 aa, synthetic construct; identical to SEQ ID NO: 2531
  REGION 1..111: note = Description of Artificial Sequence: Synthetic polypeptide
  REGION 1..111: note = VL of XENP023229

SEQ ID NO: 2862 - protein, 15 aa, synthetic construct
  REGION 1..15: note = Description of Artificial Sequence: Synthetic peptide
  REGION 1..15: note = XENP023229 vlCDR1
RASQSVDYYGDSYMN

SEQ ID NO: 2863 - protein, 7 aa, synthetic construct
  REGION 1..7: note = Description of Artificial Sequence: Synthetic peptide
  REGION 1..7: note = XENP023229 vlCDR2
AASELES

SEQ ID NO: 2864 - protein, 9 aa, synthetic construct
  REGION 1..9: note = Description of Artificial Sequence: Synthetic peptide
  REGION 1..9: note = XENP023229 vlCDR3
QQSNEDPFT

SEQ ID NO: 2865 - protein, 447 aa, synthetic construct
  REGION 1..447: note = Description of Artificial Sequence: Synthetic polypeptide
  REGION 1..447: note = XENP022718 2A11_H1.144_L2_Fab-1G6_L1.194_H1.279_scFv Fab-Fc Heavy Chain
EVQLVQSGAEVKKPGATVKISCKASGFNIKDYFMHWVQQAPGKGLEWMGWIDPELGDTEYAPKFQGRVTITADTSTNTAYMELSSLRSEDTAVYYCYARGVYQALDYWGQGTLVTVSSASTKGPSVFPLAPSSKSTSGGTAALGCLVKDYFPEPVTVSWNSGALTSGVHTFPAVLQSSGLYSLSSVVTVPSSSLGTQTYICNVNHKPSDTKVDKKVEPKSCDKTHTCPPCPAPPVAGPSVFLFPPKPKDTLMISRTPEVTCVVVDVKHEDPEVKFNWYVDGVEVHNAKTKPREEEYNSTYRVVSVLTVLHQDWLNGKEYKCKVSNKALPAPIEKTISKAKGQPREPQVYTLPPSREEMTKNQVSLTCDVSGFYPSDIAVEWESDGQPENNYKTTPPVLDSDGSFFLYSKLTVDKSRWEQGDVFSCSVMHEALHNHYTQKSLSLSPGK

SEQ ID NO: 2866 - protein, 118 aa, synthetic construct; identical to SEQ ID NO: 2646
  REGION 1..118: note = Description of Artificial Sequence: Synthetic polypeptide
  REGION 1..118: note = VH of XENP022718

SEQ ID NO: 2867 - protein, 5 aa, synthetic construct
  REGION 1..5: note = Description of Artificial Sequence: Synthetic peptide
  REGION 1..5: note = XENP022718 vhCDR1
DYFMH

SEQ ID NO: 2868 - protein, 17 aa, synthetic construct
  REGION 1..17: note = Description of Artificial Sequence: Synthetic peptide
  REGION 1..17: note = XENP022718 vhCDR2
WIDPELGDTEYAPKFQG

SEQ ID NO: 2869 - protein, 9 aa, synthetic construct
  REGION 1..9: note = Description of Artificial Sequence: Synthetic peptide
  REGION 1..9: note = XENP022718 vhCDR3
RGVYQALDY

SEQ ID NO: 2870 - protein, 480 aa, synthetic construct
  REGION 1..480: note = Description of Artificial Sequence: Synthetic polypeptide
  REGION 1..480: note = XENP022718 2A11_H1.144_L2_Fab-1G6_L1.194_H1.279_scFv scFv-Fc Heavy Chain
EIVLTQSPATLSASPGERVTLTCRASQSVGNDVAWYQQKPGQAPRLLINYASHRYTGVPDRFTGSGYGTEFTLTISSVQSEDFGVYYCQQDFSSPRTFGGGTKVEIKGKPGSGKPGSGKPGSGKPGSEVQLVESGGGLVKPGGSLRLSCVASGFTFSNYWMNWVRQAPGKGLEWVAEIRLYSNNYATHYAESVKGRFTISRDDSKSTLYLQMNNLKTEDTGVYYCTRYYGNYGGYFDVWGRGTLVTVSSEPKSSDKTHTCPPCPAPPVAGPSVFLFPPKPKDTLMISRTPEVTCVVVDVKHEDPEVKFNWYVDGVEVHNAKTKPREEQYNSTYRVVSVLTVLHQDWLNGKEYKCKVSNKALPAPIEKTISKAKGQPREPQVYTLPPSREQMTKNQVKLTCLVKGFYPSDIAVEWESNGQPENNYKTTPPVLDSDGSFFLYSKLTVDKSRWQQGNVFSCSVMHEALHNHYTQKSLSLSPGK

SEQ ID NO: 2871 - protein, 107 aa, synthetic construct
  REGION 1..107: note = Description of Artificial Sequence: Synthetic polypeptide
  REGION 1..107: note = VH of XENP022718
EIVLTQSPATLSASPGERVTLTCRASQSVGNDVAWYQQKPGQAPRLLINYASHRYTGVPDRFTGSGYGTEFTLTISSVQSEDFGVYYCQQDFSSPRTFGGGTKVEIK

SEQ ID NO: 2872 - protein, 122 aa, synthetic construct
  REGION 1..122: note = Description of Artificial Sequence: Synthetic polypeptide
  REGION 1..122: note = VL of XENP022718
EVQLVESGGGLVKPGGSLRLSCVASGFTFSNYWMNWVRQAPGKGLEWVAEIRLYSNNYATHYAESVKGRFTISRDDSKSTLYLQMNNLKTEDTGVYYCTRYYGNYGGYFDVWGRGTLVTVSS

SEQ ID NO: 2873 - protein, 231 aa, synthetic construct; identical to SEQ ID NO: 2397
  REGION 1..231: note = Description of Artificial Sequence: Synthetic polypeptide
  REGION 1..231: note = Fc chain of XENP022718

SEQ ID NO: 2874 - protein, 11 aa, synthetic construct
  REGION 1..11: note = Description of Artificial Sequence: Synthetic peptide
  REGION 1..11: note = XENP022718 vhCDR1
RASQSVGNDVA

SEQ ID NO: 2875 - protein, 7 aa, synthetic construct
  REGION 1..7: note = Description of Artificial Sequence: Synthetic peptide
  REGION 1..7: note = XENP022718 vhCDR2
YASHRYT

SEQ ID NO: 2876 - protein, 9 aa, synthetic construct
  REGION 1..9: note = Description of Artificial Sequence: Synthetic peptide
  REGION 1..9: note = XENP022718 vhCDR3
QQDFSSPRT

SEQ ID NO: 2877 - protein, 5 aa, synthetic construct
  REGION 1..5: note = Description of Artificial Sequence: Synthetic peptide
  REGION 1..5: note = XENP022718 vlCDR1
NYWMN

SEQ ID NO: 2878 - protein, 19 aa, synthetic construct
  REGION 1..19: note = Description of Artificial Sequence: Synthetic peptide
  REGION 1..19: note = XENP022718 vlCDR2
EIRLYSNNYATHYAESVKG

SEQ ID NO: 2879 - protein, 11 aa, synthetic construct
  REGION 1..11: note = Description of Artificial Sequence: Synthetic peptide
  REGION 1..11: note = XENP022718 vlCDR3
YYGNYGGYFDV

SEQ ID NO: 2880 - protein, 214 aa, synthetic construct
  REGION 1..214: note = Description of Artificial Sequence: Synthetic polypeptide
  REGION 1..214: note = XENP022718 2A11_H1.144_L2_Fab-1G6_L1.194_H1.279_scFv Light Chain
DIQMTQSPAFLSVTPGEKVTITCQASQDIGNYLNWFQQKPDQTVKLLIYYTSRLHSGVPSRFSGSGSGTDYTFTISSLEAEDAATYFCQQGNTLPYTFGGGTKVEIKRTVAAPSVFIFPPSDEQLKSGTASVVCLLNNFYPREAKVQWKVDNALQSGNSQESVTEQDSKDSTYSLSSTLTLSKADYEKHKVYACEVTHQGLSSPVTKSFNRGEC

SEQ ID NO: 2881 - protein, 107 aa, synthetic construct
  REGION 1..107: note = Description of Artificial Sequence: Synthetic polypeptide
  REGION 1..107: note = VL of XENP022718
DIQMTQSPAFLSVTPGEKVTITCQASQDIGNYLNWFQQKPDQTVKLLIYYTSRLHSGVPSRFSGSGSGTDYTFTISSLEAEDAATYFCQQGNTLPYTFGGGTKVEIK

SEQ ID NO: 2882 - protein, 11 aa, synthetic construct
  REGION 1..11: note = Description of Artificial Sequence: Synthetic peptide
  REGION 1..11: note = XENP022718 vlCDR1
QASQDIGNYLN

SEQ ID NO: 2883 - protein, 7 aa, synthetic construct
  REGION 1..7: note = Description of Artificial Sequence: Synthetic peptide
  REGION 1..7: note = XENP022718 vlCDR2
YTSRLHS

SEQ ID NO: 2884 - protein, 9 aa, synthetic construct
  REGION 1..9: note = Description of Artificial Sequence: Synthetic peptide
  REGION 1..9: note = XENP022718 vlCDR3
QQGNTLPYT

SEQ ID NO: 2885 - protein, 447 aa, synthetic construct
  REGION 1..447: note = Description of Artificial Sequence: Synthetic polypeptide
  REGION 1..447: note = XENP022719 2A11_H1_L2.50_Fab-1G6_L1.194_H1.279_scFv Fab-Fc Heavy Chain
EVQLVQSGAEVKKPGATVKISCKASGFNIKDYYMHWVQQAPGKGLEWMGWIDPENGDTEYAPKFQGRVTITADTSTNTAYMELSSLRSEDTAVYYCYARGVRQALDYWGQGTLVTVSSASTKGPSVFPLAPSSKSTSGGTAALGCLVKDYFPEPVTVSWNSGALTSGVHTFPAVLQSSGLYSLSSVVTVPSSSLGTQTYICNVNHKPSDTKVDKKVEPKSCDKTHTCPPCPAPPVAGPSVFLFPPKPKDTLMISRTPEVTCVVVDVKHEDPEVKFNWYVDGVEVHNAKTKPREEEYNSTYRVVSVLTVLHQDWLNGKEYKCKVSNKALPAPIEKTISKAKGQPREPQVYTLPPSREEMTKNQVSLTCDVSGFYPSDIAVEWESDGQPENNYKTTPPVLDSDGSFFLYSKLTVDKSRWEQGDVFSCSVMHEALHNHYTQKSLSLSPGK

SEQ ID NO: 2886 - protein, 118 aa, synthetic construct; identical to SEQ ID NO: 2686
  REGION 1..118: note = Description of Artificial Sequence: Synthetic polypeptide
  REGION 1..118: note = VH of XENP022719

SEQ ID NO: 2887 - protein, 5 aa, synthetic construct
  REGION 1..5: note = Description of Artificial Sequence: Synthetic peptide
  REGION 1..5: note = XENP022719 vhCDR1
DYYMH

SEQ ID NO: 2888 - protein, 17 aa, synthetic construct
  REGION 1..17: note = Description of Artificial Sequence: Synthetic peptide
  REGION 1..17: note = XENP022719 vhCDR2
WIDPENGDTEYAPKFQG

SEQ ID NO: 2889 - protein, 9 aa, synthetic construct
  REGION 1..9: note = Description of Artificial Sequence: Synthetic peptide
  REGION 1..9: note = XENP022719 vhCDR3
RGVRQALDY

SEQ ID NO: 2890 - protein, 480 aa, synthetic construct; identical to SEQ ID NO: 2870
  REGION 1..480: note = Description of Artificial Sequence: Synthetic polypeptide
  REGION 1..480: note = XENP022719 2A11_H1_L2.50_Fab-1G6_L1.194_H1.279_scFv scFv-Fc Heavy Chain

SEQ ID NO: 2891 - protein, 107 aa, synthetic construct; identical to SEQ ID NO: 2871
  REGION 1..107: note = Description of Artificial Sequence: Synthetic polypeptide
  REGION 1..107: note = VH of XENP022719

SEQ ID NO: 2892 - protein, 122 aa, synthetic construct; identical to SEQ ID NO: 2872
  REGION 1..122: note = Description of Artificial Sequence: Synthetic polypeptide
  REGION 1..122: note = VL of XENP022719

SEQ ID NO: 2893 - protein, 231 aa, synthetic construct; identical to SEQ ID NO: 2397
  REGION 1..231: note = Description of Artificial Sequence: Synthetic polypeptide
  REGION 1..231: note = Fc chain of XENP022719

SEQ ID NO: 2894 - protein, 11 aa, synthetic construct
  REGION 1..11: note = Description of Artificial Sequence: Synthetic peptide
  REGION 1..11: note = XENP022719 vhCDR1
RASQSVGNDVA

SEQ ID NO: 2895 - protein, 7 aa, synthetic construct
  REGION 1..7: note = Description of Artificial Sequence: Synthetic peptide
  REGION 1..7: note = XENP022719 vhCDR2
YASHRYT

SEQ ID NO: 2896 - protein, 9 aa, synthetic construct
  REGION 1..9: note = Description of Artificial Sequence: Synthetic peptide
  REGION 1..9: note = XENP022719 vhCDR3
QQDFSSPRT

SEQ ID NO: 2897 - protein, 5 aa, synthetic construct
  REGION 1..5: note = Description of Artificial Sequence: Synthetic peptide
  REGION 1..5: note = XENP022719 vlCDR1
NYWMN

SEQ ID NO: 2898 - protein, 19 aa, synthetic construct
  REGION 1..19: note = Description of Artificial Sequence: Synthetic peptide
  REGION 1..19: note = XENP022719 vlCDR2
EIRLYSNNYATHYAESVKG

SEQ ID NO: 2899 - protein, 11 aa, synthetic construct
  REGION 1..11: note = Description of Artificial Sequence: Synthetic peptide
  REGION 1..11: note = XENP022719 vlCDR3
YYGNYGGYFDV

SEQ ID NO: 2900 - protein, 214 aa, synthetic construct
  REGION 1..214: note = Description of Artificial Sequence: Synthetic polypeptide
  REGION 1..214: note = XENP022719 2A11_H1_L2.50_Fab-1G6_L1.194_H1.279_scFv Light Chain
DIQMTQSPAFLSVTPGEKVTITCQASQDIGNYLNWFQQKPDQTVKLLIYYTSYLHSGVPSRFSGSGSGTDYTFTISSLEAEDAATYFCQQGNTLPYTFGGGTKVEIKRTVAAPSVFIFPPSDEQLKSGTASVVCLLNNFYPREAKVQWKVDNALQSGNSQESVTEQDSKDSTYSLSSTLTLSKADYEKHKVYACEVTHQGLSSPVTKSFNRGEC

SEQ ID NO: 2901 - protein, 107 aa, synthetic construct
  REGION 1..107: note = Description of Artificial Sequence: Synthetic polypeptide
  REGION 1..107: note = VL of XENP022719
DIQMTQSPAFLSVTPGEKVTITCQASQDIGNYLNWFQQKPDQTVKLLIYYTSYLHSGVPSRFSGSGSGTDYTFTISSLEAEDAATYFCQQGNTLPYTFGGGTKVEIK

SEQ ID NO: 2902 - protein, 11 aa, synthetic construct
  REGION 1..11: note = Description of Artificial Sequence: Synthetic peptide
  REGION 1..11: note = XENP022719 vlCDR1
QASQDIGNYLN

SEQ ID NO: 2903 - protein, 7 aa, synthetic construct
  REGION 1..7: note = Description of Artificial Sequence: Synthetic peptide
  REGION 1..7: note = XENP022719 vlCDR2
YTSYLHS

SEQ ID NO: 2904 - protein, 9 aa, synthetic construct
  REGION 1..9: note = Description of Artificial Sequence: Synthetic peptide
  REGION 1..9: note = XENP022719 vlCDR3
QQGNTLPYT

SEQ ID NO: 2905 - protein, 447 aa, synthetic construct; identical to SEQ ID NO: 2885
  REGION 1..447: note = Description of Artificial Sequence: Synthetic polypeptide
  REGION 1..447: note = XENP022720 2A11_H1_L2.113_Fab-1G6_L1.194_H1.279_scFv Fab-Fc Heavy Chain

SEQ ID NO: 2906 - protein, 118 aa, synthetic construct; identical to SEQ ID NO: 2686
  REGION 1..118: note = Description of Artificial Sequence: Synthetic polypeptide
  REGION 1..118: note = VH of XENP022720

SEQ ID NO: 2907 - protein, 5 aa, synthetic construct
  REGION 1..5: note = Description of Artificial Sequence: Synthetic peptide
  REGION 1..5: note = XENP022720 vhCDR1
DYYMH

SEQ ID NO: 2908 - protein, 17 aa, synthetic construct
  REGION 1..17: note = Description of Artificial Sequence: Synthetic peptide
  REGION 1..17: note = XENP022720 vhCDR2
WIDPENGDTEYAPKFQG

SEQ ID NO: 2909 - protein, 9 aa, synthetic construct
  REGION 1..9: note = Description of Artificial Sequence: Synthetic peptide
  REGION 1..9: note = XENP022720 vhCDR3
RGVRQALDY

SEQ ID NO: 2910 - protein, 480 aa, synthetic construct; identical to SEQ ID NO: 2870
  REGION 1..480: note = Description of Artificial Sequence: Synthetic polypeptide
  REGION 1..480: note = XENP022720 2A11_H1_L2.113_Fab-1G6_L1.194_H1.279_scFv scFv-Fc Heavy Chain

SEQ ID NO: 2911 - protein, 107 aa, synthetic construct; identical to SEQ ID NO: 2871
  REGION 1..107: note = Description of Artificial Sequence: Synthetic polypeptide
  REGION 1..107: note = VH of XENP022720

SEQ ID NO: 2912 - protein, 122 aa, synthetic construct; identical to SEQ ID NO: 2872
  REGION 1..122: note = Description of Artificial Sequence: Synthetic polypeptide
  REGION 1..122: note = VL of XENP022720

SEQ ID NO: 2913 - protein, 231 aa, synthetic construct; identical to SEQ ID NO: 2397
  REGION 1..231: note = Description of Artificial Sequence: Synthetic polypeptide
  REGION 1..231: note = Fc chain of XENP022720

SEQ ID NO: 2914 - protein, 11 aa, synthetic construct
  REGION 1..11: note = Description of Artificial Sequence: Synthetic peptide
  REGION 1..11: note = XENP022720 vhCDR1
RASQSVGNDVA

SEQ ID NO: 2915 - protein, 7 aa, synthetic construct
  REGION 1..7: note = Description of Artificial Sequence: Synthetic peptide
  REGION 1..7: note = XENP022720 vhCDR2
YASHRYT

SEQ ID NO: 2916 - protein, 9 aa, synthetic construct
  REGION 1..9: note = Description of Artificial Sequence: Synthetic peptide
  REGION 1..9: note = XENP022720 vhCDR3
QQDFSSPRT

SEQ ID NO: 2917 - protein, 5 aa, synthetic construct
  REGION 1..5: note = Description of Artificial Sequence: Synthetic peptide
  REGION 1..5: note = XENP022720 vlCDR1
NYWMN

SEQ ID NO: 2918 - protein, 19 aa, synthetic construct
  REGION 1..19: note = Description of Artificial Sequence: Synthetic peptide
  REGION 1..19: note = XENP022720 vlCDR2
EIRLYSNNYATHYAESVKG

SEQ ID NO: 2919 - protein, 11 aa, synthetic construct
  REGION 1..11: note = Description of Artificial Sequence: Synthetic peptide
  REGION 1..11: note = XENP022720 vlCDR3
YYGNYGGYFDV

SEQ ID NO: 2920 - protein, 214 aa, synthetic construct; identical to SEQ ID NO: 2680
  REGION 1..214: note = Description of Artificial Sequence: Synthetic polypeptide
  REGION 1..214: note = XENP022720 2A11_H1_L2.113_Fab-1G6_L1.194_H1.279_scFv Light Chain

SEQ ID NO: 2921 - protein, 107 aa, synthetic construct; identical to SEQ ID NO: 2681
  REGION 1..107: note = Description of Artificial Sequence: Synthetic polypeptide
  REGION 1..107: note = VL of XENP022720

SEQ ID NO: 2922 - protein, 11 aa, synthetic construct
  REGION 1..11: note = Description of Artificial Sequence: Synthetic peptide
  REGION 1..11: note = XENP022720 vlCDR1
QASQDIGNYLN

SEQ ID NO: 2923 - protein, 7 aa, synthetic construct
  REGION 1..7: note = Description of Artificial Sequence: Synthetic peptide
  REGION 1..7: note = XENP022720 vlCDR2
FTSYLHS

SEQ ID NO: 2924 - protein, 9 aa, synthetic construct
  REGION 1..9: note = Description of Artificial Sequence: Synthetic peptide
  REGION 1..9: note = XENP022720 vlCDR3
QQGNTLPYT

SEQ ID NO: 2925 - protein, 450 aa, synthetic construct; identical to SEQ ID NO: 2605
  REGION 1..450: note = Description of Artificial Sequence: Synthetic polypeptide
  REGION 1..450: note = XENP022847 7G8_H3.30_L1.34_Fab-1G6_L1.194_H1.279_scFv Fab-Fc Heavy Chain

SEQ ID NO: 2926 - protein, 121 aa, synthetic construct; identical to SEQ ID NO: 2516
  REGION 1..121: note = Description of Artificial Sequence: Synthetic polypeptide
  REGION 1..121: note = VH of XENP022847

SEQ ID NO: 2927 - protein, 5 aa, synthetic construct
  REGION 1..5: note = Description of Artificial Sequence: Synthetic peptide
  REGION 1..5: note = XENP022847 vhCDR1
DAWMS

SEQ ID NO: 2928 - protein, 19 aa, synthetic construct
  REGION 1..19: note = Description of Artificial Sequence: Synthetic peptide
  REGION 1..19: note = XENP022847 vhCDR2
EISTKANNHATYYAESVKG

SEQ ID NO: 2929 - protein, 10 aa, synthetic construct
  REGION 1..10: note = Description of Artificial Sequence: Synthetic peptide
  REGION 1..10: note = XENP022847 vhCDR3
LATWDWYFDV

SEQ ID NO: 2930 - protein, 480 aa, synthetic construct
  REGION 1..480: note = Description of Artificial Sequence: Synthetic polypeptide
  REGION 1..480: note = XENP022847 7G8_H3.30_L1.34_Fab-1G6_L1.194_H1.279_scFv scFv-Fc Heavy Chain
EIVLTQSPATLSASPGERVTLTCRASQSVGNDVAWYQQKPGQAPRLLINYASHRYTGVPDRFTGSGYGTEFTLTISSVQSEDFGVYYCQQDFSSPRTFGGGTKVEIKGKPGSGKPGSGKPGSGKPGSEVQLVESGGGLVKPGGSLRLSCVASGFTFSNYWMNWVRQAPGKGLEWVAEIRLYSNNYATHYAESVKGRFTISRDDSKSTLYLQMNNLKTEDTGVYYCTRYYGNYGGYFDVWGRGTLVTVSSEPKSSDKTHTCPPCPAPPVAGPSVFLFPPKPKDTLMISRTPEVTCVVVDVKHEDPEVKFNWYVDGVEVHNAKTKPREEQYNSTYRVVSVLTVLHQDWLNGKEYKCKVSNKALPAPIEKTISKAKGQPREPQVYTLPPSREQMTKNQVKLTCLVKGFYPSDIAVEWESNGQPENNYKTTPPVLDSDGSFFLYSKLTVDKSRWQQGNVFSCSVLHEALHSHYTQKSLSLSPGK

SEQ ID NO: 2931 - protein, 107 aa, synthetic construct; identical to SEQ ID NO: 2871
  REGION 1..107: note = Description of Artificial Sequence: Synthetic polypeptide
  REGION 1..107: note = VH of XENP022847

SEQ ID NO: 2932 - protein, 122 aa, synthetic construct; identical to SEQ ID NO: 2872
  REGION 1..122: note = Description of Artificial Sequence: Synthetic polypeptide
  REGION 1..122: note = VL of XENP022847

SEQ ID NO: 2933 - protein, 231 aa, synthetic construct; identical to SEQ ID NO: 2409
  REGION 1..231: note = Description of Artificial Sequence: Synthetic polypeptide
  REGION 1..231: note = Fc chain of XENP022847

SEQ ID NO: 2934 - protein, 11 aa, synthetic construct
  REGION 1..11: note = Description of Artificial Sequence: Synthetic peptide
  REGION 1..11: note = XENP022847 vhCDR1
RASQSVGNDVA

SEQ ID NO: 2935 - protein, 7 aa, synthetic construct
  REGION 1..7: note = Description of Artificial Sequence: Synthetic peptide
  REGION 1..7: note = XENP022847 vhCDR2
YASHRYT

SEQ ID NO: 2936 - protein, 9 aa, synthetic construct
  REGION 1..9: note = Description of Artificial Sequence: Synthetic peptide
  REGION 1..9: note = XENP022847 vhCDR3
QQDFSSPRT

SEQ ID NO: 2937 - protein, 5 aa, synthetic construct
  REGION 1..5: note = Description of Artificial Sequence: Synthetic peptide
  REGION 1..5: note = XENP022847 vlCDR1
NYWMN

SEQ ID NO: 2938 - protein, 19 aa, synthetic construct
  REGION 1..19: note = Description of Artificial Sequence: Synthetic peptide
  REGION 1..19: note = XENP022847 vlCDR2
EIRLYSNNYATHYAESVKG

SEQ ID NO: 2939 - protein, 11 aa, synthetic construct
  REGION 1..11: note = Description of Artificial Sequence: Synthetic peptide
  REGION 1..11: note = XENP022847 vlCDR3
YYGNYGGYFDV

SEQ ID NO: 2940 - protein, 218 aa, synthetic construct; identical to SEQ ID NO: 2420
  REGION 1..218: note = Description of Artificial Sequence: Synthetic polypeptide
  REGION 1..218: note = XENP022847 7G8_H3.30_L1.34_Fab-1G6_L1.194_H1.279_scFv Light Chain

SEQ ID NO: 2941 - protein, 111 aa, synthetic construct; identical to SEQ ID NO: 2421
  REGION 1..111: note = Description of Artificial Sequence: Synthetic polypeptide
  REGION 1..111: note = VL of XENP022847

SEQ ID NO: 2942 - protein, 15 aa, synthetic construct
  REGION 1..15: note = Description of Artificial Sequence: Synthetic peptide
  REGION 1..15: note = XENP022847 vlCDR1
RASQSVDYDGDSYMN

SEQ ID NO: 2943 - protein, 7 aa, synthetic construct
  REGION 1..7: note = Description of Artificial Sequence: Synthetic peptide
  REGION 1..7: note = XENP022847 vlCDR2
AASELES

SEQ ID NO: 2944 - protein, 9 aa, synthetic construct
  REGION 1..9: note = Description of Artificial Sequence: Synthetic peptide
  REGION 1..9: note = XENP022847 vlCDR3
QQSNEDPFT

SEQ ID NO: 2945 - protein, 450 aa, synthetic construct; identical to SEQ ID NO: 2605
  REGION 1..450: note = Description of Artificial Sequence: Synthetic polypeptide
  REGION 1..450: note = XENP022848 7G8_H3.30_L1.36_Fab-1G6_L1.194_H1.279_scFv Fab-Fc Heavy Chain

SEQ ID NO: 2946 - protein, 121 aa, synthetic construct; identical to SEQ ID NO: 2516
  REGION 1..121: note = Description of Artificial Sequence: Synthetic polypeptide
  REGION 1..121: note = VH of XENP022848

SEQ ID NO: 2947 - protein, 5 aa, synthetic construct
  REGION 1..5: note = Description of Artificial Sequence: Synthetic peptide
  REGION 1..5: note = XENP022848 vhCDR1
DAWMS

SEQ ID NO: 2948 - protein, 19 aa, synthetic construct
  REGION 1..19: note = Description of Artificial Sequence: Synthetic peptide
  REGION 1..19: note = XENP022848 vhCDR2
EISTKANNHATYYAESVKG

SEQ ID NO: 2949 - protein, 10 aa, synthetic construct
  REGION 1..10: note = Description of Artificial Sequence: Synthetic peptide
  REGION 1..10: note = XENP022848 vhCDR3
LATWDWYFDV

SEQ ID NO: 2950 - protein, 480 aa, synthetic construct; identical to SEQ ID NO: 2930
  REGION 1..480: note = Description of Artificial Sequence: Synthetic polypeptide
  REGION 1..480: note = XENP022848 7G8_H3.30_L1.36_Fab-1G6_L1.194_H1.279_scFv scFv-Fc Heavy Chain

SEQ ID NO: 2951 - protein, 107 aa, synthetic construct; identical to SEQ ID NO: 2871
  REGION 1..107: note = Description of Artificial Sequence: Synthetic polypeptide
  REGION 1..107: note = VH of XENP022848

SEQ ID NO: 2952 - protein, 122 aa, synthetic construct; identical to SEQ ID NO: 2872
  REGION 1..122: note = Description of Artificial Sequence: Synthetic polypeptide
  REGION 1..122: note = VL of XENP022848

SEQ ID NO: 2953 - protein, 231 aa, synthetic construct; identical to SEQ ID NO: 2409
  REGION 1..231: note = Description of Artificial Sequence: Synthetic polypeptide
  REGION 1..231: note = Fc chain of XENP022848

SEQ ID NO: 2954 - protein, 11 aa, synthetic construct
  REGION 1..11: note = Description of Artificial Sequence: Synthetic peptide
  REGION 1..11: note = XENP022848 vhCDR1
RASQSVGNDVA

SEQ ID NO: 2955 - protein, 7 aa, synthetic construct
  REGION 1..7: note = Description of Artificial Sequence: Synthetic peptide
  REGION 1..7: note = XENP022848 vhCDR2
YASHRYT

SEQ ID NO: 2956 - protein, 9 aa, synthetic construct
  REGION 1..9: note = Description of Artificial Sequence: Synthetic peptide
  REGION 1..9: note = XENP022848 vhCDR3
QQDFSSPRT

SEQ ID NO: 2957 - protein, 5 aa, synthetic construct
  REGION 1..5: note = Description of Artificial Sequence: Synthetic peptide
  REGION 1..5: note = XENP022848 vlCDR1
NYWMN

SEQ ID NO: 2958 - protein, 19 aa, synthetic construct
  REGION 1..19: note = Description of Artificial Sequence: Synthetic peptide
  REGION 1..19: note = XENP022848 vlCDR2
EIRLYSNNYATHYAESVKG

SEQ ID NO: 2959 - protein, 11 aa, synthetic construct
  REGION 1..11: note = Description of Artificial Sequence: Synthetic peptide
  REGION 1..11: note = XENP022848 vlCDR3
YYGNYGGYFDV

SEQ ID NO: 2960 - protein, 218 aa, synthetic construct; identical to SEQ ID NO: 2640
  REGION 1..218: note = Description of Artificial Sequence: Synthetic polypeptide
  REGION 1..218: note = XENP022848 7G8_H3.30_L1.36_Fab-1G6_L1.194_H1.279_scFv Light Chain

SEQ ID NO: 2961 - protein, 111 aa, synthetic construct; identical to SEQ ID NO: 2641
  REGION 1..111: note = Description of Artificial Sequence: Synthetic polypeptide
  REGION 1..111: note = VL of XENP022848

SEQ ID NO: 2962 - protein, 15 aa, synthetic construct
  REGION 1..15: note = Description of Artificial Sequence: Synthetic peptide
  REGION 1..15: note = XENP022848 vlCDR1
RASQSVDHDGDSYMN

SEQ ID NO: 2963 - protein, 7 aa, synthetic construct
  REGION 1..7: note = Description of Artificial Sequence: Synthetic peptide
  REGION 1..7: note = XENP022848 vlCDR2
AASELES

SEQ ID NO: 2964 - protein, 9 aa, synthetic construct
  REGION 1..9: note = Description of Artificial Sequence: Synthetic peptide
  REGION 1..9: note = XENP022848 vlCDR3
QQSNEDPFT

SEQ ID NO: 2965 - protein, 447 aa, synthetic construct; identical to SEQ ID NO: 2645
  REGION 1..447: note = Description of Artificial Sequence: Synthetic polypeptide
  REGION 1..447: note = XENP022849 2A11_H1.144_L2.142_Fab-1G6_L1.194_H1.279_scFv Fab-Fc Heavy Chain

SEQ ID NO: 2966 - protein, 118 aa, synthetic construct; identical to SEQ ID NO: 2646
  REGION 1..118: note = Description of Artificial Sequence: Synthetic polypeptide
  REGION 1..118: note = VH of XENP022849

SEQ ID NO: 2967 - protein, 5 aa, synthetic construct
  REGION 1..5: note = Description of Artificial Sequence: Synthetic peptide
  REGION 1..5: note = XENP022849 vhCDR1
DYFMH

SEQ ID NO: 2968 - protein, 17 aa, synthetic construct
  REGION 1..17: note = Description of Artificial Sequence: Synthetic peptide
  REGION 1..17: note = XENP022849 vhCDR2
WIDPELGDTEYAPKFQG

SEQ ID NO: 2969 - protein, 9 aa, synthetic construct
  REGION 1..9: note = Description of Artificial Sequence: Synthetic peptide
  REGION 1..9: note = XENP022849 vhCDR3
RGVYQALDY

SEQ ID NO: 2970 - protein, 480 aa, synthetic construct; identical to SEQ ID NO: 2930
  REGION 1..480: note = Description of Artificial Sequence: Synthetic polypeptide
  REGION 1..480: note = XENP022849 2A11_H1.144_L2.142_Fab-1G6_L1.194_H1.279_scFv scFv-Fc Heavy Chain

SEQ ID NO: 2971 - protein, 107 aa, synthetic construct; identical to SEQ ID NO: 2871
  REGION 1..107: note = Description of Artificial Sequence: Synthetic polypeptide
  REGION 1..107: note = VH of XENP022849

SEQ ID NO: 2972 - protein, 122 aa, synthetic construct; identical to SEQ ID NO: 2872
  REGION 1..122: note = Description of Artificial Sequence: Synthetic polypeptide
  REGION 1..122: note = VL of XENP022849

SEQ ID NO: 2973 - protein, 231 aa, synthetic construct; identical to SEQ ID NO: 2409
  REGION 1..231: note = Description of Artificial Sequence: Synthetic polypeptide
  REGION 1..231: note = Fc chain of XENP022849

SEQ ID NO: 2974 - protein, 11 aa, synthetic construct
  REGION 1..11: note = Description of Artificial Sequence: Synthetic peptide
  REGION 1..11: note = XENP022849 vhCDR1
RASQSVGNDVA

SEQ ID NO: 2975 - protein, 7 aa, synthetic construct
  REGION 1..7: note = Description of Artificial Sequence: Synthetic peptide
  REGION 1..7: note = XENP022849 vhCDR2
YASHRYT

SEQ ID NO: 2976 - protein, 9 aa, synthetic construct
  REGION 1..9: note = Description of Artificial Sequence: Synthetic peptide
  REGION 1..9: note = XENP022849 vhCDR3
QQDFSSPRT

SEQ ID NO: 2977 - protein, 5 aa, synthetic construct
  REGION 1..5: note = Description of Artificial Sequence: Synthetic peptide
  REGION 1..5: note = XENP022849 vlCDR1
NYWMN

SEQ ID NO: 2978 - protein, 19 aa, synthetic construct
  REGION 1..19: note = Description of Artificial Sequence: Synthetic peptide
  REGION 1..19: note = XENP022849 vlCDR2
EIRLYSNNYATHYAESVKG

SEQ ID NO: 2979 - protein, 11 aa, synthetic construct
  REGION 1..11: note = Description of Artificial Sequence: Synthetic peptide
  REGION 1..11: note = XENP022849 vlCDR3
YYGNYGGYFDV

SEQ ID NO: 2980 - protein, 214 aa, synthetic construct; identical to SEQ ID NO: 2660
  REGION 1..214: note = Description of Artificial Sequence: Synthetic polypeptide
  REGION 1..214: note = XENP022849 2A11_H1.144_L2.142_Fab-1G6_L1.194_H1.279_scFv Light Chain

SEQ ID NO: 2981 - protein, 107 aa, synthetic construct; identical to SEQ ID NO: 2661
  REGION 1..107: note = Description of Artificial Sequence: Synthetic polypeptide
  REGION 1..107: note = VL of XENP022849

SEQ ID NO: 2982 - protein, 11 aa, synthetic construct
  REGION 1..11: note = Description of Artificial Sequence: Synthetic peptide
  REGION 1..11: note = XENP022849 vlCDR1
QASQDIGNYLN

SEQ ID NO: 2983 - protein, 7 aa, synthetic construct
  REGION 1..7: note = Description of Artificial Sequence: Synthetic peptide
  REGION 1..7: note = XENP022849 vlCDR2
FTSYLHS

SEQ ID NO: 2984 - protein, 9 aa, synthetic construct
  REGION 1..9: note = Description of Artificial Sequence: Synthetic peptide
  REGION 1..9: note = XENP022849 vlCDR3
QQGNTLPYT

SEQ ID NO: 2985 - protein, 447 aa, synthetic construct; identical to SEQ ID NO: 2645
  REGION 1..447: note = Description of Artificial Sequence: Synthetic polypeptide
  REGION 1..447: note = XENP022850 2A11_H1.144_L2.113_Fab-1G6_L1.194_H1.279_scFv Fab -Fc Heavy Chain

SEQ ID NO: 2986 - protein, 118 aa, synthetic construct; identical to SEQ ID NO: 2646
  REGION 1..118: note = Description of Artificial Sequence: Synthetic polypeptide
  REGION 1..118: note = VH of XENP022850

SEQ ID NO: 2987 - protein, 5 aa, synthetic construct
  REGION 1..5: note = Description of Artificial Sequence: Synthetic peptide
  REGION 1..5: note = XENP022850 vhCDR1
DYFMH

SEQ ID NO: 2988 - protein, 17 aa, synthetic construct
  REGION 1..17: note = Description of Artificial Sequence: Synthetic peptide
  REGION 1..17: note = XENP022850 vhCDR2
WIDPELGDTEYAPKFQG

SEQ ID NO: 2989 - protein, 9 aa, synthetic construct
  REGION 1..9: note = Description of Artificial Sequence: Synthetic peptide
  REGION 1..9: note = XENP022850 vhCDR3
RGVYQALDY

SEQ ID NO: 2990 - protein, 480 aa, synthetic construct; identical to SEQ ID NO: 2930
  REGION 1..480: note = Description of Artificial Sequence: Synthetic polypeptide
  REGION 1..480: note = XENP022850 2A11_H1.144_L2.113_Fab-1G6_L1.194_H1.279_scFv scFv -Fc Heavy Chain

SEQ ID NO: 2991 - protein, 107 aa, synthetic construct; identical to SEQ ID NO: 2871
  REGION 1..107: note = Description of Artificial Sequence: Synthetic polypeptide
  REGION 1..107: note = VH of XENP022850

SEQ ID NO: 2992 - protein, 122 aa, synthetic construct; identical to SEQ ID NO: 2872
  REGION 1..122: note = Description of Artificial Sequence: Synthetic polypeptide
  REGION 1..122: note = VL of XENP022850

SEQ ID NO: 2993 - protein, 231 aa, synthetic construct; identical to SEQ ID NO: 2409
  REGION 1..231: note = Description of Artificial Sequence: Synthetic polypeptide
  REGION 1..231: note = Fc chain of XENP022850

SEQ ID NO: 2994 - protein, 11 aa, synthetic construct
  REGION 1..11: note = Description of Artificial Sequence: Synthetic peptide
  REGION 1..11: note = XENP022850 vhCDR1
RASQSVGNDVA

SEQ ID NO: 2995 - protein, 7 aa, synthetic construct
  REGION 1..7: note = Description of Artificial Sequence: Synthetic peptide
  REGION 1..7: note = XENP022850 vhCDR2
YASHRYT

SEQ ID NO: 2996 - protein, 9 aa, synthetic construct
  REGION 1..9: note = Description of Artificial Sequence: Synthetic peptide
  REGION 1..9: note = XENP022850 vhCDR3
QQDFSSPRT

SEQ ID NO: 2997 - protein, 5 aa, synthetic construct
  REGION 1..5: note = Description of Artificial Sequence: Synthetic peptide
  REGION 1..5: note = XENP022850 vlCDR1
NYWMN

SEQ ID NO: 2998 - protein, 19 aa, synthetic construct
  REGION 1..19: note = Description of Artificial Sequence: Synthetic peptide
  REGION 1..19: note = XENP022850 vlCDR2
EIRLYSNNYATHYAESVKG

SEQ ID NO: 2999 - protein, 11 aa, synthetic construct
  REGION 1..11: note = Description of Artificial Sequence: Synthetic peptide
  REGION 1..11: note = XENP022850 vlCDR3
YYGNYGGYFDV

SEQ ID NO: 3000 - protein, 214 aa, synthetic construct; identical to SEQ ID NO: 2680
  REGION 1..214: note = Description of Artificial Sequence: Synthetic polypeptide
  REGION 1..214: note = XENP022850 2A11_H1.144_L2.113_Fab-1G6_L1.194_H1.279_scFv Light Chain

SEQ ID NO: 3001 - protein, 107 aa, synthetic construct; identical to SEQ ID NO: 2681
  REGION 1..107: note = Description of Artificial Sequence: Synthetic polypeptide
  REGION 1..107: note = VL of XENP022850

SEQ ID NO: 3002 - protein, 11 aa, synthetic construct
  REGION 1..11: note = Description of Artificial Sequence: Synthetic peptide
  REGION 1..11: note = XENP022850 vlCDR1
QASQDIGNYLN

SEQ ID NO: 3003 - protein, 7 aa, synthetic construct
  REGION 1..7: note = Description of Artificial Sequence: Synthetic peptide
  REGION 1..7: note = XENP022850 vlCDR2
FTSYLHS

SEQ ID NO: 3004 - protein, 9 aa, synthetic construct
  REGION 1..9: note = Description of Artificial Sequence: Synthetic peptide
  REGION 1..9: note = XENP022850 vlCDR3
QQGNTLPYT

SEQ ID NO: 3005 - protein, 447 aa, synthetic construct; identical to SEQ ID NO: 2705
  REGION 1..447: note = Description of Artificial Sequence: Synthetic polypeptide
  REGION 1..447: note = XENP022851 2A11_H1.125_L2.126_Fab-1G6_L1.194_H1.279_scFv Fab-Fc Heavy Chain

SEQ ID NO: 3006 - protein, 118 aa, synthetic construct; identical to SEQ ID NO: 2706
  REGION 1..118: note = Description of Artificial Sequence: Synthetic polypeptide
  REGION 1..118: note = VH of XENP022851

SEQ ID NO: 3007 - protein, 5 aa, synthetic construct
  REGION 1..5: note = Description of Artificial Sequence: Synthetic peptide
  REGION 1..5: note = XENP022851 vhCDR1
HYFMH

SEQ ID NO: 3008 - protein, 17 aa, synthetic construct
  REGION 1..17: note = Description of Artificial Sequence: Synthetic peptide
  REGION 1..17: note = XENP022851 vhCDR2
WIDPYLGDTEYAPKFQG

SEQ ID NO: 3009 - protein, 9 aa, synthetic construct
  REGION 1..9: note = Description of Artificial Sequence: Synthetic peptide
  REGION 1..9: note = XENP022851 vhCDR3
RGVYQALDY

SEQ ID NO: 3010 - protein, 480 aa, synthetic construct; identical to SEQ ID NO: 2930
  REGION 1..480: note = Description of Artificial Sequence: Synthetic polypeptide
  REGION 1..480: note = XENP022851 2A11_H1.125_L2.126_Fab-1G6_L1.194_H1.279_scFv scFv-Fc Heavy Chain

SEQ ID NO: 3011 - protein, 107 aa, synthetic construct; identical to SEQ ID NO: 2871
  REGION 1..107: note = Description of Artificial Sequence: Synthetic polypeptide
  REGION 1..107: note = VH of XENP022851

SEQ ID NO: 3012 - protein, 122 aa, synthetic construct; identical to SEQ ID NO: 2872
  REGION 1..122: note = Description of Artificial Sequence: Synthetic polypeptide
  REGION 1..122: note = VL of XENP022851

SEQ ID NO: 3013 - protein, 231 aa, synthetic construct; identical to SEQ ID NO: 2409
  REGION 1..231: note = Description of Artificial Sequence: Synthetic polypeptide
  REGION 1..231: note = Fc chain of XENP022851

SEQ ID NO: 3014 - protein, 11 aa, synthetic construct
  REGION 1..11: note = Description of Artificial Sequence: Synthetic peptide
  REGION 1..11: note = XENP022851 vhCDR1
RASQSVGNDVA

SEQ ID NO: 3015 - protein, 7 aa, synthetic construct
  REGION 1..7: note = Description of Artificial Sequence: Synthetic peptide
  REGION 1..7: note = XENP022851 vhCDR2
YASHRYT

SEQ ID NO: 3016 - protein, 9 aa, synthetic construct
  REGION 1..9: note = Description of Artificial Sequence: Synthetic peptide
  REGION 1..9: note = XENP022851 vhCDR3
QQDFSSPRT

SEQ ID NO: 3017 - protein, 5 aa, synthetic construct
  REGION 1..5: note = Description of Artificial Sequence: Synthetic peptide
  REGION 1..5: note = XENP022851 vlCDR1
NYWMN

SEQ ID NO: 3018 - protein, 19 aa, synthetic construct
  REGION 1..19: note = Description of Artificial Sequence: Synthetic peptide
  REGION 1..19: note = XENP022851 vlCDR2
EIRLYSNNYATHYAESVKG

SEQ ID NO: 3019 - protein, 11 aa, synthetic construct
  REGION 1..11: note = Description of Artificial Sequence: Synthetic peptide
  REGION 1..11: note = XENP022851 vlCDR3
YYGNYGGYFDV

SEQ ID NO: 3020 - protein, 214 aa, synthetic construct; identical to SEQ ID NO: 2720
  REGION 1..214: note = Description of Artificial Sequence: Synthetic polypeptide
  REGION 1..214: note = XENP022851 2A11_H1.125_L2.126_Fab-1G6_L1.194_H1.279_scFv Light Chain

SEQ ID NO: 3021 - protein, 107 aa, synthetic construct; identical to SEQ ID NO: 2721
  REGION 1..107: note = Description of Artificial Sequence: Synthetic polypeptide
  REGION 1..107: note = VL of XENP022851

SEQ ID NO: 3022 - protein, 11 aa, synthetic construct
  REGION 1..11: note = Description of Artificial Sequence: Synthetic peptide
  REGION 1..11: note = XENP022851 vlCDR1
QASQDIGNYLN

SEQ ID NO: 3023 - protein, 7 aa, synthetic construct
  REGION 1..7: note = Description of Artificial Sequence: Synthetic peptide
  REGION 1..7: note = XENP022851 vlCDR2
FTSYLHS

SEQ ID NO: 3024 - protein, 9 aa, synthetic construct
  REGION 1..9: note = Description of Artificial Sequence: Synthetic peptide
  REGION 1..9: note = XENP022851 vlCDR3
QEGNTLPYT

SEQ ID NO: 3025 - protein, 447 aa, synthetic construct; identical to SEQ ID NO: 2685
  REGION 1..447: note = Description of Artificial Sequence: Synthetic polypeptide
  REGION 1..447: note = XENP022852 2A11_H1_L2.113_Fab-1G6_L1.194_H1.279_scFv Fab-Fc Heavy Chain

SEQ ID NO: 3026 - protein, 118 aa, synthetic construct; identical to SEQ ID NO: 2686
  REGION 1..118: note = Description of Artificial Sequence: Synthetic polypeptide
  REGION 1..118: note = VH of XENP022852

SEQ ID NO: 3027 - protein, 5 aa, synthetic construct
  REGION 1..5: note = Description of Artificial Sequence: Synthetic peptide
  REGION 1..5: note = XENP022852 vhCDR1
DYYMH

SEQ ID NO: 3028 - protein, 17 aa, synthetic construct
  REGION 1..17: note = Description of Artificial Sequence: Synthetic peptide
  REGION 1..17: note = XENP022852 vhCDR2
WIDPENGDTEYAPKFQG

SEQ ID NO: 3029 - protein, 9 aa, synthetic construct
  REGION 1..9: note = Description of Artificial Sequence: Synthetic peptide
  REGION 1..9: note = XENP022852 vhCDR3
RGVRQALDY

SEQ ID NO: 3030 - protein, 480 aa, synthetic construct; identical to SEQ ID NO: 2930
  REGION 1..480: note = Description of Artificial Sequence: Synthetic polypeptide
  REGION 1..480: note = XENP022852 2A11_H1_L2.113_Fab-1G6_L1.194_H1.279_scFv scFv-Fc Heavy Chain

SEQ ID NO: 3031 - protein, 107 aa, synthetic construct; identical to SEQ ID NO: 2871
  REGION 1..107: note = Description of Artificial Sequence: Synthetic polypeptide
  REGION 1..107: note = VH of XENP022852

SEQ ID NO: 3032 - protein, 122 aa, synthetic construct; identical to SEQ ID NO: 2872
  REGION 1..122: note = Description of Artificial Sequence: Synthetic polypeptide
  REGION 1..122: note = VL of XENP022852

SEQ ID NO: 3033 - protein, 231 aa, synthetic construct; identical to SEQ ID NO: 2409
  REGION 1..231: note = Description of Artificial Sequence: Synthetic polypeptide
  REGION 1..231: note = Fc chain of XENP022852

SEQ ID NO: 3034 - protein, 11 aa, synthetic construct
  REGION 1..11: note = Description of Artificial Sequence: Synthetic peptide
  REGION 1..11: note = XENP022852 vhCDR1
RASQSVGNDVA

SEQ ID NO: 3035 - protein, 7 aa, synthetic construct
  REGION 1..7: note = Description of Artificial Sequence: Synthetic peptide
  REGION 1..7: note = XENP022852 vhCDR2
YASHRYT

SEQ ID NO: 3036 - protein, 9 aa, synthetic construct
  REGION 1..9: note = Description of Artificial Sequence: Synthetic peptide
  REGION 1..9: note = XENP022852 vhCDR3
QQDFSSPRT

SEQ ID NO: 3037 - protein, 5 aa, synthetic construct
  REGION 1..5: note = Description of Artificial Sequence: Synthetic peptide
  REGION 1..5: note = XENP022852 vlCDR1
NYWMN

SEQ ID NO: 3038 - protein, 19 aa, synthetic construct
  REGION 1..19: note = Description of Artificial Sequence: Synthetic peptide
  REGION 1..19: note = XENP022852 vlCDR2
EIRLYSNNYATHYAESVKG

SEQ ID NO: 3039 - protein, 11 aa, synthetic construct
  REGION 1..11: note = Description of Artificial Sequence: Synthetic peptide
  REGION 1..11: note = XENP022852 vlCDR3
YYGNYGGYFDV

SEQ ID NO: 3040 - protein, 214 aa, synthetic construct; identical to SEQ ID NO: 2680
  REGION 1..214: note = Description of Artificial Sequence: Synthetic polypeptide
  REGION 1..214: note = XENP022852 2A11_H1_L2.113_Fab-1G6_L1.194_H1.279_scFv Light Chain

SEQ ID NO: 3041 - protein, 107 aa, synthetic construct; identical to SEQ ID NO: 2681
  REGION 1..107: note = Description of Artificial Sequence: Synthetic polypeptide
  REGION 1..107: note = VL of XENP022852

SEQ ID NO: 3042 - protein, 11 aa, synthetic construct
  REGION 1..11: note = Description of Artificial Sequence: Synthetic peptide
  REGION 1..11: note = XENP022852 vlCDR1
QASQDIGNYLN

SEQ ID NO: 3043 - protein, 7 aa, synthetic construct
  REGION 1..7: note = Description of Artificial Sequence: Synthetic peptide
  REGION 1..7: note = XENP022852 vlCDR2
FTSYLHS

SEQ ID NO: 3044 - protein, 9 aa, synthetic construct
  REGION 1..9: note = Description of Artificial Sequence: Synthetic peptide
  REGION 1..9: note = XENP022852 vlCDR3
QQGNTLPYT

SEQ ID NO: 3045 - protein, 447 aa, synthetic construct; identical to SEQ ID NO: 2885
  REGION 1..447: note = Description of Artificial Sequence: Synthetic polypeptide
  REGION 1..447: note = XENP023349 2A11_H1L2_Fab-1C11_H3L3_scFv Fab-Fc Heavy Chain

SEQ ID NO: 3046 - protein, 118 aa, synthetic construct; identical to SEQ ID NO: 2686
  REGION 1..118: note = Description of Artificial Sequence: Synthetic polypeptide
  REGION 1..118: note = VH of XENP023349

SEQ ID NO: 3047 - protein, 5 aa, synthetic construct
  REGION 1..5: note = Description of Artificial Sequence: Synthetic peptide
  REGION 1..5: note = XENP023349 vhCDR1
DYYMH

SEQ ID NO: 3048 - protein, 17 aa, synthetic construct
  REGION 1..17: note = Description of Artificial Sequence: Synthetic peptide
  REGION 1..17: note = XENP023349 vhCDR2
WIDPENGDTEYAPKFQG

SEQ ID NO: 3049 - protein, 9 aa, synthetic construct
  REGION 1..9: note = Description of Artificial Sequence: Synthetic peptide
  REGION 1..9: note = XENP023349 vhCDR3
RGVRQALDY

SEQ ID NO: 3050 - protein, 480 aa, synthetic construct
  REGION 1..480: note = Description of Artificial Sequence: Synthetic polypeptide
  REGION 1..480: note = XENP023349 2A11_H1L2_Fab-1C11_H3L3_scFv scFv-Fc Heavy Chain
QIQLVQSGSELKKPGASVKVSCKASGYTFTHYGMNWVRQAPGQGLEWMGWINTYTGEPTYADGFTGRFVFSLDTSVSTAYLQISSLKAEDTAVYFCARDYYGSSPYWGQGTLVTVSSGKPGSGKPGSGKPGSGKPGSDVLMTQSPDSLAVSLGERATINCKSSQSIVHSNGNTYLEWYQQKPGQSPKLLIYKVSNRFSGVPDRFSGSGSGTDFTLTISSLQAEDVAVYYCFQGSHVPNTFGGGTKVEIKEPKSSDKTHTCPPCPAPPVAGPSVFLFPPKPKDTLMISRTPEVTCVVVDVKHEDPEVKFNWYVDGVEVHNAKTKPREEQYNSTYRVVSVLTVLHQDWLNGKEYKCKVSNKALPAPIEKTISKAKGQPREPQVYTLPPSREQMTKNQVKLTCLVKGFYPSDIAVEWESNGQPENNYKTTPPVLDSDGSFFLYSKLTVDKSRWQQGNVFSCSVMHEALHNHYTQKSLSLSPGK

SEQ ID NO: 3051 - protein, 117 aa, synthetic construct; identical to SEQ ID NO: 32
  REGION 1..117: note = Description of Artificial Sequence: Synthetic polypeptide
  REGION 1..117: note = VH of XENP023349

SEQ ID NO: 3052 - protein, 112 aa, synthetic construct; identical to SEQ ID NO: 7
  REGION 1..112: note = Description of Artificial Sequence: Synthetic polypeptide
  REGION 1..112: note = VL of XENP023349

SEQ ID NO: 3053 - protein, 231 aa, synthetic construct; identical to SEQ ID NO: 2397
  REGION 1..231: note = Description of Artificial Sequence: Synthetic polypeptide
  REGION 1..231: note = Fc chain of XENP023349

SEQ ID NO: 3054 - protein, 5 aa, synthetic construct
  REGION 1..5: note = Description of Artificial Sequence: Synthetic peptide
  REGION 1..5: note = XENP023349 vhCDR1
HYGMN

SEQ ID NO: 3055 - protein, 17 aa, synthetic construct
  REGION 1..17: note = Description of Artificial Sequence: Synthetic peptide
  REGION 1..17: note = XENP023349 vhCDR2
WINTYTGEPTYADGFTG

SEQ ID NO: 3056 - protein, 8 aa, synthetic construct
  REGION 1..8: note = Description of Artificial Sequence: Synthetic peptide
  REGION 1..8: note = XENP023349 vhCDR3
DYYGSSPY

SEQ ID NO: 3057 - protein, 16 aa, synthetic construct
  REGION 1..16: note = Description of Artificial Sequence: Synthetic peptide
  REGION 1..16: note = XENP023349 vlCDR1
KSSQSIVHSNGNTYLE

SEQ ID NO: 3058 - protein, 7 aa, synthetic construct
  REGION 1..7: note = Description of Artificial Sequence: Synthetic peptide
  REGION 1..7: note = XENP023349 vlCDR2
KVSNRFS

SEQ ID NO: 3059 - protein, 9 aa, synthetic construct
  REGION 1..9: note = Description of Artificial Sequence: Synthetic peptide
  REGION 1..9: note = XENP023349 vlCDR3
FQGSHVPNT

SEQ ID NO: 3060 - protein, 214 aa, synthetic construct; identical to SEQ ID NO: 2880
  REGION 1..214: note = Description of Artificial Sequence: Synthetic polypeptide
  REGION 1..214: note = XENP023349 2A11_H1L2_Fab-1C11_H3L3_scFv Light Chain

SEQ ID NO: 3061 - protein, 107 aa, synthetic construct; identical to SEQ ID NO: 2881
  REGION 1..107: note = Description of Artificial Sequence: Synthetic polypeptide
  REGION 1..107: note = VL of XENP023349

SEQ ID NO: 3062 - protein, 11 aa, synthetic construct
  REGION 1..11: note = Description of Artificial Sequence: Synthetic peptide
  REGION 1..11: note = XENP023349 vlCDR1
QASQDIGNYLN

SEQ ID NO: 3063 - protein, 7 aa, synthetic construct
  REGION 1..7: note = Description of Artificial Sequence: Synthetic peptide
  REGION 1..7: note = XENP023349 vlCDR2
YTSRLHS

SEQ ID NO: 3064 - protein, 9 aa, synthetic construct
  REGION 1..9: note = Description of Artificial Sequence: Synthetic peptide
  REGION 1..9: note = XENP023349 vlCDR3
QQGNTLPYT

SEQ ID NO: 3065 - protein, 447 aa, synthetic construct; identical to SEQ ID NO: 2865
  REGION 1..447: note = Description of Artificial Sequence: Synthetic polypeptide
  REGION 1..447: note = XENP023350 2A11_H1.144_L2.142_Fab-1C11_H3L3_scFv Fab-Fc Heavy Chain

SEQ ID NO: 3066 - protein, 118 aa, synthetic construct; identical to SEQ ID NO: 2646
  REGION 1..118: note = Description of Artificial Sequence: Synthetic polypeptide
  REGION 1..118: note = VH of XENP023350

SEQ ID NO: 3067 - protein, 5 aa, synthetic construct
  REGION 1..5: note = Description of Artificial Sequence: Synthetic peptide
  REGION 1..5: note = XENP023350 vhCDR1
DYFMH

SEQ ID NO: 3068 - protein, 17 aa, synthetic construct
  REGION 1..17: note = Description of Artificial Sequence: Synthetic peptide
  REGION 1..17: note = XENP023350 vhCDR2
WIDPELGDTEYAPKFQG

SEQ ID NO: 3069 - protein, 9 aa, synthetic construct
  REGION 1..9: note = Description of Artificial Sequence: Synthetic peptide
  REGION 1..9: note = XENP023350 vhCDR3
RGVYQALDY

SEQ ID NO: 3070 - protein, 480 aa, synthetic construct; identical to SEQ ID NO: 3050
  REGION 1..480: note = Description of Artificial Sequence: Synthetic polypeptide
  REGION 1..480: note = XENP023350 2A11_H1.144_L2.142_Fab-1C11_H3L3_scFv scFv-Fc Heavy Chain

SEQ ID NO: 3071 - protein, 117 aa, synthetic construct; identical to SEQ ID NO: 32
  REGION 1..117: note = Description of Artificial Sequence: Synthetic polypeptide
  REGION 1..117: note = VH of XENP023350

SEQ ID NO: 3072 - protein, 112 aa, synthetic construct; identical to SEQ ID NO: 7
  REGION 1..112: note = Description of Artificial Sequence: Synthetic polypeptide
  REGION 1..112: note = VL of XENP023350

SEQ ID NO: 3073 - protein, 231 aa, synthetic construct; identical to SEQ ID NO: 2397
  REGION 1..231: note = Description of Artificial Sequence: Synthetic polypeptide
  REGION 1..231: note = Fc chain of XENP023350

SEQ ID NO: 3074 - protein, 5 aa, synthetic construct
  REGION 1..5: note = Description of Artificial Sequence: Synthetic peptide
  REGION 1..5: note = XENP023350 vhCDR1
HYGMN

SEQ ID NO: 3075 - protein, 17 aa, synthetic construct
  REGION 1..17: note = Description of Artificial Sequence: Synthetic peptide
  REGION 1..17: note = XENP023350 vhCDR2
WINTYTGEPTYADGFTG

SEQ ID NO: 3076 - protein, 8 aa, synthetic construct
  REGION 1..8: note = Description of Artificial Sequence: Synthetic peptide
  REGION 1..8: note = XENP023350 vhCDR3
DYYGSSPY

SEQ ID NO: 3077 - protein, 16 aa, synthetic construct
  REGION 1..16: note = Description of Artificial Sequence: Synthetic peptide
  REGION 1..16: note = XENP023350 vlCDR1
KSSQSIVHSNGNTYLE

SEQ ID NO: 3078 - protein, 7 aa, synthetic construct
  REGION 1..7: note = Description of Artificial Sequence: Synthetic peptide
  REGION 1..7: note = XENP023350 vlCDR2
KVSNRFS

SEQ ID NO: 3079 - protein, 9 aa, synthetic construct
  REGION 1..9: note = Description of Artificial Sequence: Synthetic peptide
  REGION 1..9: note = XENP023350 vlCDR3
FQGSHVPNT

SEQ ID NO: 3080 - protein, 214 aa, synthetic construct; identical to SEQ ID NO: 2660
  REGION 1..214: note = Description of Artificial Sequence: Synthetic polypeptide
  REGION 1..214: note = XENP023350 2A11_H1.144_L2.142_Fab-1C11_H3L3_scFv Light Chain

SEQ ID NO: 3081 - protein, 107 aa, synthetic construct; identical to SEQ ID NO: 2661
  REGION 1..107: note = Description of Artificial Sequence: Synthetic polypeptide
  REGION 1..107: note = VL of XENP023350

SEQ ID NO: 3082 - protein, 11 aa, synthetic construct
  REGION 1..11: note = Description of Artificial Sequence: Synthetic peptide
  REGION 1..11: note = XENP023350 vlCDR1
QASQDIGNYLN

SEQ ID NO: 3083 - protein, 7 aa, synthetic construct
  REGION 1..7: note = Description of Artificial Sequence: Synthetic peptide
  REGION 1..7: note = XENP023350 vlCDR2
FTSYLHS

SEQ ID NO: 3084 - protein, 9 aa, synthetic construct
  REGION 1..9: note = Description of Artificial Sequence: Synthetic peptide
  REGION 1..9: note = XENP023350 vlCDR3
QQGNTLPYT

SEQ ID NO: 3085 - protein, 447 aa, synthetic construct; identical to SEQ ID NO: 2885
  REGION 1..447: note = Description of Artificial Sequence: Synthetic polypeptide
  REGION 1..447: note = XENP023351 2A11_H1L2_Fab-2E9_H1L1_scFv Fab-Fc Heavy Chain

SEQ ID NO: 3086 - protein, 118 aa, synthetic construct; identical to SEQ ID NO: 2686
  REGION 1..118: note = Description of Artificial Sequence: Synthetic polypeptide
  REGION 1..118: note = VH of XENP023351

SEQ ID NO: 3087 - protein, 5 aa, synthetic construct
  REGION 1..5: note = Description of Artificial Sequence: Synthetic peptide
  REGION 1..5: note = XENP023351 vhCDR1
DYYMH

SEQ ID NO: 3088 - protein, 17 aa, synthetic construct
  REGION 1..17: note = Description of Artificial Sequence: Synthetic peptide
  REGION 1..17: note = XENP023351 vhCDR2
WIDPENGDTEYAPKFQG

SEQ ID NO: 3089 - protein, 9 aa, synthetic construct
  REGION 1..9: note = Description of Artificial Sequence: Synthetic peptide
  REGION 1..9: note = XENP023351 vhCDR3
RGVRQALDY

SEQ ID NO: 3090 - protein, 478 aa, synthetic construct
  REGION 1..478: note = Description of Artificial Sequence: Synthetic polypeptide
  REGION 1..478: note = XENP023351 2A11_H1L2_Fab-2E9_H1L1_scFv scFv-Fc Heavy Chain
QVQLVQSGAEVKKPGASVKVSCKASGYAFTNYWLGWVRQAPGQGLEWMGNFYPGSSNTYYNEKFQGRVTMTADKSISTAYMELSRLRSDDTAVYFCARHYGTNYRYFDVWGAGTLVTVSSGKPGSGKPGSGKPGSGKPGSDIVLTQSPGTLSLSPGERATLSCRASQSVSNDVAWYQQKPGQSPRLLIYYASNRYTGVPDRFTGSGYGTDFTLTISRLEPEDFAVYFCQQDYSSPYTFGGGTKVEIKEPKSSDKTHTCPPCPAPPVAGPSVFLFPPKPKDTLMISRTPEVTCVVVDVKHEDPEVKFNWYVDGVEVHNAKTKPREEQYNSTYRVVSVLTVLHQDWLNGKEYKCKVSNKALPAPIEKTISKAKGQPREPQVYTLPPSREQMTKNQVKLTCLVKGFYPSDIAVEWESNGQPENNYKTTPPVLDSDGSFFLYSKLTVDKSRWQQGNVFSCSVMHEALHNHYTQKSLSLSPGK

SEQ ID NO: 3091 - protein, 120 aa, synthetic construct
  REGION 1..120: note = Description of Artificial Sequence: Synthetic polypeptide
  REGION 1..120: note = VH of XENP023351
QVQLVQSGAEVKKPGASVKVSCKASGYAFTNYWLGWVRQAPGQGLEWMGNFYPGSSNTYYNEKFQGRVTMTADKSISTAYMELSRLRSDDTAVYFCARHYGTNYRYFDVWGAGTLVTVSS

SEQ ID NO: 3092 - protein, 107 aa, synthetic construct
  REGION 1..107: note = Description of Artificial Sequence: Synthetic polypeptide
  REGION 1..107: note = VL of XENP023351
DIVLTQSPGTLSLSPGERATLSCRASQSVSNDVAWYQQKPGQSPRLLIYYASNRYTGVPDRFTGSGYGTDFTLTISRLEPEDFAVYFCQQDYSSPYTFGGGTKVEIK

SEQ ID NO: 3093 - protein, 231 aa, synthetic construct; identical to SEQ ID NO: 2397
  REGION 1..231: note = Description of Artificial Sequence: Synthetic polypeptide
  REGION 1..231: note = Fc chain of XENP023351

SEQ ID NO: 3094 - protein, 5 aa, synthetic construct
  REGION 1..5: note = Description of Artificial Sequence: Synthetic peptide
  REGION 1..5: note = XENP023351 vhCDR1
NYWLG

SEQ ID NO: 3095 - protein, 17 aa, synthetic construct
  REGION 1..17: note = Description of Artificial Sequence: Synthetic peptide
  REGION 1..17: note = XENP023351 vhCDR2
NFYPGSSNTYYNEKFQG

SEQ ID NO: 3096 - protein, 11 aa, synthetic construct
  REGION 1..11: note = Description of Artificial Sequence: Synthetic peptide
  REGION 1..11: note = XENP023351 vhCDR3
HYGTNYRYFDV

SEQ ID NO: 3097 - protein, 11 aa, synthetic construct
  REGION 1..11: note = Description of Artificial Sequence: Synthetic peptide
  REGION 1..11: note = XENP023351 vlCDR1
RASQSVSNDVA

SEQ ID NO: 3098 - protein, 7 aa, synthetic construct
  REGION 1..7: note = Description of Artificial Sequence: Synthetic peptide
  REGION 1..7: note = XENP023351 vlCDR2
YASNRYT

SEQ ID NO: 3099 - protein, 9 aa, synthetic construct
  REGION 1..9: note = Description of Artificial Sequence: Synthetic peptide
  REGION 1..9: note = XENP023351 vlCDR3
QQDYSSPYT

SEQ ID NO: 3100 - protein, 214 aa, synthetic construct; identical to SEQ ID NO: 2880
  REGION 1..214: note = Description of Artificial Sequence: Synthetic polypeptide
  REGION 1..214: note = XENP023351 2A11_H1L2_Fab-2E9_H1L1_scFv Light Chain

SEQ ID NO: 3101 - protein, 107 aa, synthetic construct; identical to SEQ ID NO: 2881
  REGION 1..107: note = Description of Artificial Sequence: Synthetic polypeptide
  REGION 1..107: note = VL of XENP023351

SEQ ID NO: 3102 - protein, 11 aa, synthetic construct
  REGION 1..11: note = Description of Artificial Sequence: Synthetic peptide
  REGION 1..11: note = XENP023351 vlCDR1
QASQDIGNYLN

SEQ ID NO: 3103 - protein, 7 aa, synthetic construct
  REGION 1..7: note = Description of Artificial Sequence: Synthetic peptide
  REGION 1..7: note = XENP023351 vlCDR2
YTSRLHS

SEQ ID NO: 3104 - protein, 9 aa, synthetic construct
  REGION 1..9: note = Description of Artificial Sequence: Synthetic peptide
  REGION 1..9: note = XENP023351 vlCDR3
QQGNTLPYT

SEQ ID NO: 3105 - protein, 447 aa, synthetic construct; identical to SEQ ID NO: 2865
  REGION 1..447: note = Description of Artificial Sequence: Synthetic polypeptide
  REGION 1..447: note = XENP023352 2A11_H1.144_L2.142_Fab-2E9_H1L1_scFv Fab-Fc Heavy Chain

SEQ ID NO: 3106 - protein, 118 aa, synthetic construct; identical to SEQ ID NO: 2646
  REGION 1..118: note = Description of Artificial Sequence: Synthetic polypeptide
  REGION 1..118: note = VH of XENP023352

SEQ ID NO: 3107 - protein, 5 aa, synthetic construct
  REGION 1..5: note = Description of Artificial Sequence: Synthetic peptide
  REGION 1..5: note = XENP023352 vhCDR1
DYFMH

SEQ ID NO: 3108 - protein, 17 aa, synthetic construct
  REGION 1..17: note = Description of Artificial Sequence: Synthetic peptide
  REGION 1..17: note = XENP023352 vhCDR2
WIDPELGDTEYAPKFQG

SEQ ID NO: 3109 - protein, 9 aa, synthetic construct
  REGION 1..9: note = Description of Artificial Sequence: Synthetic peptide
  REGION 1..9: note = XENP023352 vhCDR3
RGVYQALDY

SEQ ID NO: 3110 - protein, 458 aa, synthetic construct
  REGION 1..458: note = Description of Artificial Sequence: Synthetic polypeptide
  REGION 1..458: note = XENP023352 2A11_H1.144_L2.142_Fab-2E9_H1L1_scFv scFv-Fc Heavy Chain
QVQLVQSGAEVKKPGASVKVSCKASGYAFTNYWLGWVRQAPGQGLEWMGNFYPGSSNTYYNEKFQGRVTMTADKSISTAYMELSRLRSDDTAVYFCARHYGTNYRYFDVWGAGTLVTVSSDIVLTQSPGTLSLSPGERATLSCRASQSVSNDVAWYQQKPGQSPRLLIYYASNRYTGVPDRFTGSGYGTDFTLTISRLEPEDFAVYFCQQDYSSPYTFGGGTKVEIKEPKSSDKTHTCPPCPAPPVAGPSVFLFPPKPKDTLMISRTPEVTCVVVDVKHEDPEVKFNWYVDGVEVHNAKTKPREEQYNSTYRVVSVLTVLHQDWLNGKEYKCKVSNKALPAPIEKTISKAKGQPREPQVYTLPPSREQMTKNQVKLTCLVKGFYPSDIAVEWESNGQPENNYKTTPPVLDSDGSFFLYSKLTVDKSRWQQGNVFSCSVMHEALHNHYTQKSLSLSPGK

SEQ ID NO: 3111 - protein, 120 aa, synthetic construct; identical to SEQ ID NO: 3091
  REGION 1..120: note = Description of Artificial Sequence: Synthetic polypeptide
  REGION 1..120: note = VH of XENP023352

SEQ ID NO: 3112 - protein, 107 aa, synthetic construct; identical to SEQ ID NO: 3092
  REGION 1..107: note = Description of Artificial Sequence: Synthetic polypeptide
  REGION 1..107: note = VL of XENP023352

SEQ ID NO: 3113 - protein, 231 aa, synthetic construct; identical to SEQ ID NO: 2397
  REGION 1..231: note = Description of Artificial Sequence: Synthetic polypeptide
  REGION 1..231: note = Fc chain of XENP023352

SEQ ID NO: 3114 - protein, 5 aa, synthetic construct
  REGION 1..5: note = Description of Artificial Sequence: Synthetic peptide
  REGION 1..5: note = XENP023352 vhCDR1
NYWLG

SEQ ID NO: 3115 - protein, 17 aa, synthetic construct
  REGION 1..17: note = Description of Artificial Sequence: Synthetic peptide
  REGION 1..17: note = XENP023352 vhCDR2
NFYPGSSNTYYNEKFQG

SEQ ID NO: 3116 - protein, 11 aa, synthetic construct
  REGION 1..11: note = Description of Artificial Sequence: Synthetic peptide
  REGION 1..11: note = XENP023352 vhCDR3
HYGTNYRYFDV

SEQ ID NO: 3117 - protein, 11 aa, synthetic construct
  REGION 1..11: note = Description of Artificial Sequence: Synthetic peptide
  REGION 1..11: note = XENP023352 vlCDR1
RASQSVSNDVA

SEQ ID NO: 3118 - protein, 7 aa, synthetic construct
  REGION 1..7: note = Description of Artificial Sequence: Synthetic peptide
  REGION 1..7: note = XENP023352 vlCDR2
YASNRYT

SEQ ID NO: 3119 - protein, 9 aa, synthetic construct
  REGION 1..9: note = Description of Artificial Sequence: Synthetic peptide
  REGION 1..9: note = XENP023352 vlCDR3
QQDYSSPYT

SEQ ID NO: 3120 - protein, 214 aa, synthetic construct; identical to SEQ ID NO: 2660
  REGION 1..214: note = Description of Artificial Sequence: Synthetic polypeptide
  REGION 1..214: note = XENP023352 2A11_H1.144_L2.142_Fab-2E9_H1L1_scFv Light Chain

SEQ ID NO: 3121 - protein, 107 aa, synthetic construct; identical to SEQ ID NO: 2661
  REGION 1..107: note = Description of Artificial Sequence: Synthetic polypeptide
  REGION 1..107: note = VL of XENP023352

SEQ ID NO: 3122 - protein, 11 aa, synthetic construct
  REGION 1..11: note = Description of Artificial Sequence: Synthetic peptide
  REGION 1..11: note = XENP023352 vlCDR1
QASQDIGNYLN

SEQ ID NO: 3123 - protein, 7 aa, synthetic construct
  REGION 1..7: note = Description of Artificial Sequence: Synthetic peptide
  REGION 1..7: note = XENP023352 vlCDR2
FTSYLHS

SEQ ID NO: 3124 - protein, 9 aa, synthetic construct
  REGION 1..9: note = Description of Artificial Sequence: Synthetic peptide
  REGION 1..9: note = XENP023352 vlCDR3
QQGNTLPYT

SEQ ID NO: 3125 - protein, 446 aa, synthetic construct
  REGION 1..446: note = Description of Artificial Sequence: Synthetic polypeptide
  REGION 1..446: note = XENP022856 1C11_H3L3_IgG1_PVA_/S267K/M428L/N434S Heavy Chain
QIQLVQSGSELKKPGASVKVSCKASGYTFTHYGMNWVRQAPGQGLEWMGWINTYTGEPTYADGFTGRFVFSLDTSVSTAYLQISSLKAEDTAVYFCARDYYGSSPYWGQGTLVTVSSASTKGPSVFPLAPSSKSTSGGTAALGCLVKDYFPEPVTVSWNSGALTSGVHTFPAVLQSSGLYSLSSVVTVPSSSLGTQTYICNVNHKPSNTKVDKKVEPKSCDKTHTCPPCPAPPVAGPSVFLFPPKPKDTLMISRTPEVTCVVVDVKHEDPEVKFNWYVDGVEVHNAKTKPREEQYNSTYRVVSVLTVLHQDWLNGKEYKCKVSNKALPAPIEKTISKAKGQPREPQVYTLPPSREEMTKNQVSLTCLVKGFYPSDIAVEWESNGQPENNYKTTPPVLDSDGSFFLYSKLTVDKSRWQQGNVFSCSVLHEALHSHYTQKSLSLSPGK

SEQ ID NO: 3126 - protein, 117 aa, synthetic construct; identical to SEQ ID NO: 32
  REGION 1..117: note = Description of Artificial Sequence: Synthetic polypeptide
  REGION 1..117: note = VH of XENP022856

SEQ ID NO: 3127 - protein, 5 aa, synthetic construct
  REGION 1..5: note = Description of Artificial Sequence: Synthetic peptide
  REGION 1..5: note = XENP022856 vhCDR1
HYGMN

SEQ ID NO: 3128 - protein, 17 aa, synthetic construct
  REGION 1..17: note = Description of Artificial Sequence: Synthetic peptide
  REGION 1..17: note = XENP022856 vhCDR2
WINTYTGEPTYADGFTG

SEQ ID NO: 3129 - protein, 8 aa, synthetic construct
  REGION 1..8: note = Description of Artificial Sequence: Synthetic peptide
  REGION 1..8: note = XENP022856 vhCDR3
DYYGSSPY

SEQ ID NO: 3130 - protein, 219 aa, synthetic construct; identical to SEQ ID NO: 6
  REGION 1..219: note = Description of Artificial Sequence: Synthetic polypeptide
  REGION 1..219: note = XENP022856 1C11_H3L3_IgG1_PVA_/S267K/M428L/N434S Light Chain

SEQ ID NO: 3131 - protein, 112 aa, synthetic construct; identical to SEQ ID NO: 7
  REGION 1..112: note = Description of Artificial Sequence: Synthetic polypeptide
  REGION 1..112: note = VL of XENP022856

SEQ ID NO: 3132 - protein, 16 aa, synthetic construct
  REGION 1..16: note = Description of Artificial Sequence: Synthetic peptide
  REGION 1..16: note = XENP022856 vlCDR1
KSSQSIVHSNGNTYLE

SEQ ID NO: 3133 - protein, 7 aa, synthetic construct
  REGION 1..7: note = Description of Artificial Sequence: Synthetic peptide
  REGION 1..7: note = XENP022856 vlCDR2
KVSNRFS

SEQ ID NO: 3134 - protein, 9 aa, synthetic construct
  REGION 1..9: note = Description of Artificial Sequence: Synthetic peptide
  REGION 1..9: note = XENP022856 vlCDR3
FQGSHVPNT

SEQ ID NO: 3135 - protein, 449 aa, synthetic construct
  REGION 1..449: note = Description of Artificial Sequence: Synthetic polypeptide
  REGION 1..449: note = XENP022857 2E9_H1L1_IgG1_PVA_/S267K/M428L/N434S Heavy Chain
QVQLVQSGAEVKKPGASVKVSCKASGYAFTNYWLGWVRQAPGQGLEWMGNFYPGSSNTYYNEKFQGRVTMTADKSISTAYMELSRLRSDDTAVYFCARHYGTNYRYFDVWGAGTLVTVSSASTKGPSVFPLAPSSKSTSGGTAALGCLVKDYFPEPVTVSWNSGALTSGVHTFPAVLQSSGLYSLSSVVTVPSSSLGTQTYICNVNHKPSNTKVDKKVEPKSCDKTHTCPPCPAPPVAGPSVFLFPPKPKDTLMISRTPEVTCVVVDVKHEDPEVKFNWYVDGVEVHNAKTKPREEQYNSTYRVVSVLTVLHQDWLNGKEYKCKVSNKALPAPIEKTISKAKGQPREPQVYTLPPSREEMTKNQVSLTCLVKGFYPSDIAVEWESNGQPENNYKTTPPVLDSDGSFFLYSKLTVDKSRWQQGNVFSCSVLHEALHSHYTQKSLSLSPGK

SEQ ID NO: 3136 - protein, 120 aa, synthetic construct; identical to SEQ ID NO: 3091
  REGION 1..120: note = Description of Artificial Sequence: Synthetic polypeptide
  REGION 1..120: note = VH of XENP022857

SEQ ID NO: 3137 - protein, 5 aa, synthetic construct
  REGION 1..5: note = Description of Artificial Sequence: Synthetic peptide
  REGION 1..5: note = XENP022857 vhCDR1
NYWLG

SEQ ID NO: 3138 - protein, 17 aa, synthetic construct
  REGION 1..17: note = Description of Artificial Sequence: Synthetic peptide
  REGION 1..17: note = XENP022857 vhCDR2
NFYPGSSNTYYNEKFQG

SEQ ID NO: 3139 - protein, 11 aa, synthetic construct
  REGION 1..11: note = Description of Artificial Sequence: Synthetic peptide
  REGION 1..11: note = XENP022857 vhCDR3
HYGTNYRYFDV

SEQ ID NO: 3140 - protein, 214 aa, synthetic construct
  REGION 1..214: note = Description of Artificial Sequence: Synthetic polypeptide
  REGION 1..214: note = XENP022857 2E9_H1L1_IgG1_PVA_/S267K/M428L/N434S Light Chain
DIVLTQSPGTLSLSPGERATLSCRASQSVSNDVAWYQQKPGQSPRLLIYYASNRYTGVPDRFTGSGYGTDFTLTISRLEPEDFAVYFCQQDYSSPYTFGGGTKVEIKRTVAAPSVFIFPPSDEQLKSGTASVVCLLNNFYPREAKVQWKVDNALQSGNSQESVTEQDSKDSTYSLSSTLTLSKADYEKHKVYACEVTHQGLSSPVTKSFNRGEC

SEQ ID NO: 3141 - protein, 107 aa, synthetic construct; identical to SEQ ID NO: 3092
  REGION 1..107: note = Description of Artificial Sequence: Synthetic polypeptide
  REGION 1..107: note = VL of XENP022857

SEQ ID NO: 3142 - protein, 11 aa, synthetic construct
  REGION 1..11: note = Description of Artificial Sequence: Synthetic peptide
  REGION 1..11: note = XENP022857 vlCDR1
RASQSVSNDVA

SEQ ID NO: 3143 - protein, 7 aa, synthetic construct
  REGION 1..7: note = Description of Artificial Sequence: Synthetic peptide
  REGION 1..7: note = XENP022857 vlCDR2
YASNRYT

SEQ ID NO: 3144 - protein, 9 aa, synthetic construct
  REGION 1..9: note = Description of Artificial Sequence: Synthetic peptide
  REGION 1..9: note = XENP022857 vlCDR3
QQDYSSPYT

SEQ ID NO: 3145 - protein, 447 aa, synthetic construct
  REGION 1..447: note = Description of Artificial Sequence: Synthetic polypeptide
  REGION 1..447: note = XENP022858 9C6_H1.1_L1_Fab-1G6_L1.194_H1.279_scFv Fab-Fc Heavy Chain
QVQLKESGAEVKKPGASVKVSCKVSGFSLTGYGVNWVRQAPGQGLEWMGMIWIDGSTDYNSKFQGRVTMTKDNSKSTVYMELSSLRSEDTAVYYCARDRPDGRAMDYWGQGTMVTVSSASTKGPSVFPLAPSSKSTSGGTAALGCLVKDYFPEPVTVSWNSGALTSGVHTFPAVLQSSGLYSLSSVVTVPSSSLGTQTYICNVNHKPSDTKVDKKVEPKSCDKTHTCPPCPAPPVAGPSVFLFPPKPKDTLMISRTPEVTCVVVDVKHEDPEVKFNWYVDGVEVHNAKTKPREEEYNSTYRVVSVLTVLHQDWLNGKEYKCKVSNKALPAPIEKTISKAKGQPREPQVYTLPPSREEMTKNQVSLTCDVSGFYPSDIAVEWESDGQPENNYKTTPPVLDSDGSFFLYSKLTVDKSRWEQGDVFSCSVLHEALHSHYTQKSLSLSPGK

SEQ ID NO: 3146 - protein, 118 aa, synthetic construct
  REGION 1..118: note = Description of Artificial Sequence: Synthetic polypeptide
  REGION 1..118: note = VH of XENP022858
QVQLKESGAEVKKPGASVKVSCKVSGFSLTGYGVNWVRQAPGQGLEWMGMIWIDGSTDYNSKFQGRVTMTKDNSKSTVYMELSSLRSEDTAVYYCARDRPDGRAMDYWGQGTMVTVSS

SEQ ID NO: 3147 - protein, 5 aa, synthetic construct
  REGION 1..5: note = Description of Artificial Sequence: Synthetic peptide
  REGION 1..5: note = XENP022858 vhCDR1
GYGVN

SEQ ID NO: 3148 - protein, 16 aa, synthetic construct
  REGION 1..16: note = Description of Artificial Sequence: Synthetic peptide
  REGION 1..16: note = XENP022858 vhCDR2
MIWIDGSTDYNSKFQG

SEQ ID NO: 3149 - protein, 10 aa, synthetic construct
  REGION 1..10: note = Description of Artificial Sequence: Synthetic peptide
  REGION 1..10: note = XENP022858 vhCDR3
DRPDGRAMDY

SEQ ID NO: 3150 - protein, 480 aa, synthetic construct; identical to SEQ ID NO: 2930
  REGION 1..480: note = Description of Artificial Sequence: Synthetic polypeptide
  REGION 1..480: note = XENP022858 9C6_H1.1_L1_Fab-1G6_L1.194_H1.279_scFv scFv-Fc Heavy Chain

SEQ ID NO: 3151 - protein, 107 aa, synthetic construct; identical to SEQ ID NO: 2871
  REGION 1..107: note = Description of Artificial Sequence: Synthetic polypeptide
  REGION 1..107: note = VH of XENP022858

SEQ ID NO: 3152 - protein, 122 aa, synthetic construct; identical to SEQ ID NO: 2872
  REGION 1..122: note = Description of Artificial Sequence: Synthetic polypeptide
  REGION 1..122: note = VL of XENP022858

SEQ ID NO: 3153 - protein, 231 aa, synthetic construct; identical to SEQ ID NO: 2409
  REGION 1..231: note = Description of Artificial Sequence: Synthetic polypeptide
  REGION 1..231: note = Fc chain of XENP022858

SEQ ID NO: 3154 - protein, 11 aa, synthetic construct
  REGION 1..11: note = Description of Artificial Sequence: Synthetic peptide
  REGION 1..11: note = XENP022858 vhCDR1
RASQSVGNDVA

SEQ ID NO: 3155 - protein, 7 aa, synthetic construct
  REGION 1..7: note = Description of Artificial Sequence: Synthetic peptide
  REGION 1..7: note = XENP022858 vhCDR2
YASHRYT

SEQ ID NO: 3156 - protein, 9 aa, synthetic construct
  REGION 1..9: note = Description of Artificial Sequence: Synthetic peptide
  REGION 1..9: note = XENP022858 vhCDR3
QQDFSSPRT

SEQ ID NO: 3157 - protein, 5 aa, synthetic construct
  REGION 1..5: note = Description of Artificial Sequence: Synthetic peptide
  REGION 1..5: note = XENP022858 vlCDR1
NYWMN

SEQ ID NO: 3158 - protein, 19 aa, synthetic construct
  REGION 1..19: note = Description of Artificial Sequence: Synthetic peptide
  REGION 1..19: note = XENP022858 vlCDR2
EIRLYSNNYATHYAESVKG

SEQ ID NO: 3159 - protein, 11 aa, synthetic construct
  REGION 1..11: note = Description of Artificial Sequence: Synthetic peptide
  REGION 1..11: note = XENP022858 vlCDR3
YYGNYGGYFDV

SEQ ID NO: 3160 - protein, 213 aa, synthetic construct
  REGION 1..213: note = Description of Artificial Sequence: Synthetic polypeptide
  REGION 1..213: note = XENP022858 9C6_H1.1_L1_Fab-1G6_L1.194_H1.279_scFv Light Chain
SIVMTQSPDSLAVSLGERATINCKASQSVSNDVAWYQQKPGQSPKLLIYYASNRYTGVPDRFTGSGYGTDFTLTISSLQAEDVAVYFCQQDYSSPTFGGGTKLEIKRTVAAPSVFIFPPSDEQLKSGTASVVCLLNNFYPREAKVQWKVDNALQSGNSQESVTEQDSKDSTYSLSSTLTLSKADYEKHKVYACEVTHQGLSSPVTKSFNRGEC

SEQ ID NO: 3161 - protein, 106 aa, synthetic construct
  REGION 1..106: note = Description of Artificial Sequence: Synthetic polypeptide
  REGION 1..106: note = VL of XENP022858
SIVMTQSPDSLAVSLGERATINCKASQSVSNDVAWYQQKPGQSPKLLIYYASNRYTGVPDRFTGSGYGTDFTLTISSLQAEDVAVYFCQQDYSSPTFGGGTKLEIK

SEQ ID NO: 3162 - protein, 11 aa, synthetic construct
  REGION 1..11: note = Description of Artificial Sequence: Synthetic peptide
  REGION 1..11: note = XENP022858 vlCDR1
KASQSVSNDVA

SEQ ID NO: 3163 - protein, 7 aa, synthetic construct
  REGION 1..7: note = Description of Artificial Sequence: Synthetic peptide
  REGION 1..7: note = XENP022858 vlCDR2
YASNRYT

SEQ ID NO: 3164 - protein, 8 aa, synthetic construct
  REGION 1..8: note = Description of Artificial Sequence: Synthetic peptide
  REGION 1..8: note = XENP022858 vlCDR3
QQDYSSPT

SEQ ID NO: 3165 - protein, 446 aa, synthetic construct
  REGION 1..446: note = Description of Artificial Sequence: Synthetic polypeptide
  REGION 1..446: note = XENP022726 1C11_H1L3_Fab-[CTLA-4]_H3.23_L0.129_scFv Fab-Fc Heavy Chain
QIQLVQSGAEVKKPGASVKVSCKASGYTFTHYGMNWVRQAPGQGLEWMGWINTYTGEPTYADKFQGRVTMTLDTSTSTAYMELSSLRSEDTAVYFCARDYYGSSPYWGQGTLVTVSSASTKGPSVFPLAPSSKSTSGGTAALGCLVKDYFPEPVTVSWNSGALTSGVHTFPAVLQSSGLYSLSSVVTVPSSSLGTQTYICNVNHKPSDTKVDKKVEPKSCDKTHTCPPCPAPPVAGPSVFLFPPKPKDTLMISRTPEVTCVVVDVKHEDPEVKFNWYVDGVEVHNAKTKPREEEYNSTYRVVSVLTVLHQDWLNGKEYKCKVSNKALPAPIEKTISKAKGQPREPQVYTLPPSREEMTKNQVSLTCDVSGFYPSDIAVEWESDGQPENNYKTTPPVLDSDGSFFLYSKLTVDKSRWEQGDVFSCSVMHEALHNHYTQKSLSLSPGK

SEQ ID NO: 3166 - protein, 117 aa, synthetic construct; identical to SEQ ID NO: 2
  REGION 1..117: note = Description of Artificial Sequence: Synthetic polypeptide
  REGION 1..117: note = VH of XENP022726

SEQ ID NO: 3167 - protein, 5 aa, synthetic construct
  REGION 1..5: note = Description of Artificial Sequence: Synthetic peptide
  REGION 1..5: note = XENP022726 vhCDR1
HYGMN

SEQ ID NO: 3168 - protein, 17 aa, synthetic construct
  REGION 1..17: note = Description of Artificial Sequence: Synthetic peptide
  REGION 1..17: note = XENP022726 vhCDR2
WINTYTGEPTYADKFQG

SEQ ID NO: 3169 - protein, 8 aa, synthetic construct
  REGION 1..8: note = Description of Artificial Sequence: Synthetic peptide
  REGION 1..8: note = XENP022726 vhCDR3
DYYGSSPY

SEQ ID NO: 3170 - protein, 477 aa, synthetic construct; identical to SEQ ID NO: 2394
  REGION 1..477: note = Description of Artificial Sequence: Synthetic polypeptide
  REGION 1..477: note = XENP022726 1C11_H1L3_Fab-[CTLA-4]_H3.23_L0.129_scFv scFv-Fc Heavy Chain

SEQ ID NO: 3171 - protein, 118 aa, synthetic construct; identical to SEQ ID NO: 2395
  REGION 1..118: note = Description of Artificial Sequence: Synthetic polypeptide
  REGION 1..118: note = VH of XENP022726

SEQ ID NO: 3172 - protein, 108 aa, synthetic construct; identical to SEQ ID NO: 2396
  REGION 1..108: note = Description of Artificial Sequence: Synthetic polypeptide
  REGION 1..108: note = VL of XENP022726

SEQ ID NO: 3173 - protein, 231 aa, synthetic construct; identical to SEQ ID NO: 2397
  REGION 1..231: note = Description of Artificial Sequence: Synthetic polypeptide
  REGION 1..231: note = Fc chain of XENP022726

SEQ ID NO: 3174 - protein, 5 aa, synthetic construct
  REGION 1..5: note = Description of Artificial Sequence: Synthetic peptide
  REGION 1..5: note = XENP022726 vhCDR1
SYTMH

SEQ ID NO: 3175 - protein, 17 aa, synthetic construct
  REGION 1..17: note = Description of Artificial Sequence: Synthetic peptide
  REGION 1..17: note = XENP022726 vhCDR2
FISYDGNYKYYADSVKG

SEQ ID NO: 3176 - protein, 9 aa, synthetic construct
  REGION 1..9: note = Description of Artificial Sequence: Synthetic peptide
  REGION 1..9: note = XENP022726 vhCDR3
GGHLGPFDL

SEQ ID NO: 3177 - protein, 12 aa, synthetic construct
  REGION 1..12: note = Description of Artificial Sequence: Synthetic peptide
  REGION 1..12: note = XENP022726 vlCDR1
RASQSVGSSYLA

SEQ ID NO: 3178 - protein, 7 aa, synthetic construct
  REGION 1..7: note = Description of Artificial Sequence: Synthetic peptide
  REGION 1..7: note = XENP022726 vlCDR2
GASSRAT

SEQ ID NO: 3179 - protein, 9 aa, synthetic construct
  REGION 1..9: note = Description of Artificial Sequence: Synthetic peptide
  REGION 1..9: note = XENP022726 vlCDR3
QQYGSSPWT

SEQ ID NO: 3180 - protein, 219 aa, synthetic construct; identical to SEQ ID NO: 6
  REGION 1..219: note = Description of Artificial Sequence: Synthetic polypeptide
  REGION 1..219: note = XENP022726 1C11_H1L3_Fab-[CTLA-4]_H3.23_L0.129_scFv Light Chain

SEQ ID NO: 3181 - protein, 112 aa, synthetic construct; identical to SEQ ID NO: 7
  REGION 1..112: note = Description of Artificial Sequence: Synthetic polypeptide
  REGION 1..112: note = VL of XENP022726

SEQ ID NO: 3182 - protein, 16 aa, synthetic construct
  REGION 1..16: note = Description of Artificial Sequence: Synthetic peptide
  REGION 1..16: note = XENP022726 vlCDR1
KSSQSIVHSNGNTYLE

SEQ ID NO: 3183 - protein, 7 aa, synthetic construct
  REGION 1..7: note = Description of Artificial Sequence: Synthetic peptide
  REGION 1..7: note = XENP022726 vlCDR2
KVSNRFS

SEQ ID NO: 3184 - protein, 9 aa, synthetic construct
  REGION 1..9: note = Description of Artificial Sequence: Synthetic peptide
  REGION 1..9: note = XENP022726 vlCDR3
FQGSHVPNT

SEQ ID NO: 3185 - protein, 446 aa, synthetic construct
  REGION 1..446: note = Description of Artificial Sequence: Synthetic polypeptide
  REGION 1..446: note = XENP022727 1C11_H2L1_Fab-[CTLA-4]_H3.23_L0.129_scFv Fab-Fc Heavy Chain
EIQLLESGGGLVQPGGSLRLSCAASGYTFTHYGMNWVRQAPGKGLEWVSWINTYTGEPTYADSVKGRFTISLDTSKSTAYLQMNSLRAEDTAVYFCARDYYGSSPYWGQGTLVTVSSASTKGPSVFPLAPSSKSTSGGTAALGCLVKDYFPEPVTVSWNSGALTSGVHTFPAVLQSSGLYSLSSVVTVPSSSLGTQTYICNVNHKPSDTKVDKKVEPKSCDKTHTCPPCPAPPVAGPSVFLFPPKPKDTLMISRTPEVTCVVVDVKHEDPEVKFNWYVDGVEVHNAKTKPREEEYNSTYRVVSVLTVLHQDWLNGKEYKCKVSNKALPAPIEKTISKAKGQPREPQVYTLPPSREEMTKNQVSLTCDVSGFYPSDIAVEWESDGQPENNYKTTPPVLDSDGSFFLYSKLTVDKSRWEQGDVFSCSVMHEALHNHYTQKSLSLSPGK

SEQ ID NO: 3186 - protein, 117 aa, synthetic construct; identical to SEQ ID NO: 12
  REGION 1..117: note = Description of Artificial Sequence: Synthetic polypeptide
  REGION 1..117: note = VH of XENP022727

SEQ ID NO: 3187 - protein, 5 aa, synthetic construct
  REGION 1..5: note = Description of Artificial Sequence: Synthetic peptide
  REGION 1..5: note = XENP022727 vhCDR1
HYGMN

SEQ ID NO: 3188 - protein, 17 aa, synthetic construct
  REGION 1..17: note = Description of Artificial Sequence: Synthetic peptide
  REGION 1..17: note = XENP022727 vhCDR2
WINTYTGEPTYADSVKG

SEQ ID NO: 3189 - protein, 8 aa, synthetic construct
  REGION 1..8: note = Description of Artificial Sequence: Synthetic peptide
  REGION 1..8: note = XENP022727 vhCDR3
DYYGSSPY

SEQ ID NO: 3190 - protein, 477 aa, synthetic construct; identical to SEQ ID NO: 2394
  REGION 1..477: note = Description of Artificial Sequence: Synthetic polypeptide
  REGION 1..477: note = XENP022727 1C11_H2L1_Fab-[CTLA-4]_H3.23_L0.129_scFv scFv-Fc Heavy Chain

SEQ ID NO: 3191 - protein, 118 aa, synthetic construct; identical to SEQ ID NO: 2395
  REGION 1..118: note = Description of Artificial Sequence: Synthetic polypeptide
  REGION 1..118: note = VH of XENP022727

SEQ ID NO: 3192 - protein, 108 aa, synthetic construct; identical to SEQ ID NO: 2396
  REGION 1..108: note = Description of Artificial Sequence: Synthetic polypeptide
  REGION 1..108: note = VL of XENP022727

SEQ ID NO: 3193 - protein, 231 aa, synthetic construct; identical to SEQ ID NO: 2397
  REGION 1..231: note = Description of Artificial Sequence: Synthetic polypeptide
  REGION 1..231: note = Fc chain of XENP022727

SEQ ID NO: 3194 - protein, 5 aa, synthetic construct
  REGION 1..5: note = Description of Artificial Sequence: Synthetic peptide
  REGION 1..5: note = XENP022727 vhCDR1
SYTMH

SEQ ID NO: 3195 - protein, 17 aa, synthetic construct
  REGION 1..17: note = Description of Artificial Sequence: Synthetic peptide
  REGION 1..17: note = XENP022727 vhCDR2
FISYDGNYKYYADSVKG

SEQ ID NO: 3196 - protein, 9 aa, synthetic construct
  REGION 1..9: note = Description of Artificial Sequence: Synthetic peptide
  REGION 1..9: note = XENP022727 vhCDR3
GGHLGPFDL

SEQ ID NO: 3197 - protein, 12 aa, synthetic construct
  REGION 1..12: note = Description of Artificial Sequence: Synthetic peptide
  REGION 1..12: note = XENP022727 vlCDR1
RASQSVGSSYLA

SEQ ID NO: 3198 - protein, 7 aa, synthetic construct
  REGION 1..7: note = Description of Artificial Sequence: Synthetic peptide
  REGION 1..7: note = XENP022727 vlCDR2
GASSRAT

SEQ ID NO: 3199 - protein, 9 aa, synthetic construct
  REGION 1..9: note = Description of Artificial Sequence: Synthetic peptide
  REGION 1..9: note = XENP022727 vlCDR3
QQYGSSPWT

SEQ ID NO: 3200 - protein, 219 aa, synthetic construct; identical to SEQ ID NO: 16
  REGION 1..219: note = Description of Artificial Sequence: Synthetic polypeptide
  REGION 1..219: note = XENP022727 1C11_H2L1_Fab-[CTLA-4]_H3.23_L0.129_scFv Light Chain

SEQ ID NO: 3201 - protein, 112 aa, synthetic construct; identical to SEQ ID NO: 17
  REGION 1..112: note = Description of Artificial Sequence: Synthetic polypeptide
  REGION 1..112: note = VL of XENP022727

SEQ ID NO: 3202 - protein, 16 aa, synthetic construct
  REGION 1..16: note = Description of Artificial Sequence: Synthetic peptide
  REGION 1..16: note = XENP022727 vlCDR1
RSSQSIVHSNGNTYLE

SEQ ID NO: 3203 - protein, 7 aa, synthetic construct
  REGION 1..7: note = Description of Artificial Sequence: Synthetic peptide
  REGION 1..7: note = XENP022727 vlCDR2
KVSNRFS

SEQ ID NO: 3204 - protein, 9 aa, synthetic construct
  REGION 1..9: note = Description of Artificial Sequence: Synthetic peptide
  REGION 1..9: note = XENP022727 vlCDR3
FQGSHVPNT

SEQ ID NO: 3205 - protein, 446 aa, synthetic construct; identical to SEQ ID NO: 3185
  REGION 1..446: note = Description of Artificial Sequence: Synthetic polypeptide
  REGION 1..446: note = XENP022728 1C11_H2L2_Fab-[CTLA-4]_H3.23_L0.129_scFv Fab-Fc Heavy Chain

SEQ ID NO: 3206 - protein, 117 aa, synthetic construct; identical to SEQ ID NO: 12
  REGION 1..117: note = Description of Artificial Sequence: Synthetic polypeptide
  REGION 1..117: note = VH of XENP022728

SEQ ID NO: 3207 - protein, 5 aa, synthetic construct
  REGION 1..5: note = Description of Artificial Sequence: Synthetic peptide
  REGION 1..5: note = XENP022728 vhCDR1
HYGMN

SEQ ID NO: 3208 - protein, 17 aa, synthetic construct
  REGION 1..17: note = Description of Artificial Sequence: Synthetic peptide
  REGION 1..17: note = XENP022728 vhCDR2
WINTYTGEPTYADSVKG

SEQ ID NO: 3209 - protein, 8 aa, synthetic construct
  REGION 1..8: note = Description of Artificial Sequence: Synthetic peptide
  REGION 1..8: note = XENP022728 vhCDR3
DYYGSSPY

SEQ ID NO: 3210 - protein, 477 aa, synthetic construct; identical to SEQ ID NO: 2394
  REGION 1..477: note = Description of Artificial Sequence: Synthetic polypeptide
  REGION 1..477: note = XENP022728 1C11_H2L2_Fab-[CTLA-4]_H3.23_L0.129_scFv scFv-Fc Heavy Chain

SEQ ID NO: 3211 - protein, 118 aa, synthetic construct; identical to SEQ ID NO: 2395
  REGION 1..118: note = Description of Artificial Sequence: Synthetic polypeptide
  REGION 1..118: note = VH of XENP022728

SEQ ID NO: 3212 - protein, 108 aa, synthetic construct; identical to SEQ ID NO: 2396
  REGION 1..108: note = Description of Artificial Sequence: Synthetic polypeptide
  REGION 1..108: note = VL of XENP022728

SEQ ID NO: 3213 - protein, 231 aa, synthetic construct; identical to SEQ ID NO: 2397
  REGION 1..231: note = Description of Artificial Sequence: Synthetic polypeptide
  REGION 1..231: note = Fc chain of XENP022728

SEQ ID NO: 3214 - protein, 5 aa, synthetic construct
  REGION 1..5: note = Description of Artificial Sequence: Synthetic peptide
  REGION 1..5: note = XENP022728 vhCDR1
SYTMH

SEQ ID NO: 3215 - protein, 17 aa, synthetic construct
  REGION 1..17: note = Description of Artificial Sequence: Synthetic peptide
  REGION 1..17: note = XENP022728 vhCDR2
FISYDGNYKYYADSVKG

SEQ ID NO: 3216 - protein, 9 aa, synthetic construct
  REGION 1..9: note = Description of Artificial Sequence: Synthetic peptide
  REGION 1..9: note = XENP022728 vhCDR3
GGHLGPFDL

SEQ ID NO: 3217 - protein, 12 aa, synthetic construct
  REGION 1..12: note = Description of Artificial Sequence: Synthetic peptide
  REGION 1..12: note = XENP022728 vlCDR1
RASQSVGSSYLA

SEQ ID NO: 3218 - protein, 7 aa, synthetic construct
  REGION 1..7: note = Description of Artificial Sequence: Synthetic peptide
  REGION 1..7: note = XENP022728 vlCDR2
GASSRAT

SEQ ID NO: 3219 - protein, 9 aa, synthetic construct
  REGION 1..9: note = Description of Artificial Sequence: Synthetic peptide
  REGION 1..9: note = XENP022728 vlCDR3
QQYGSSPWT

SEQ ID NO: 3220 - protein, 219 aa, synthetic construct; identical to SEQ ID NO: 26
  REGION 1..219: note = Description of Artificial Sequence: Synthetic polypeptide
  REGION 1..219: note = XENP022728 1C11_H2L2_Fab-[CTLA-4]_H3.23_L0.129_scFv Light Chain

SEQ ID NO: 3221 - protein, 112 aa, synthetic construct; identical to SEQ ID NO: 27
  REGION 1..112: note = Description of Artificial Sequence: Synthetic polypeptide
  REGION 1..112: note = VL of XENP022728

SEQ ID NO: 3222 - protein, 16 aa, synthetic construct
  REGION 1..16: note = Description of Artificial Sequence: Synthetic peptide
  REGION 1..16: note = XENP022728 vlCDR1
RSSQSIVHSNGNTYLE

SEQ ID NO: 3223 - protein, 7 aa, synthetic construct
  REGION 1..7: note = Description of Artificial Sequence: Synthetic peptide
  REGION 1..7: note = XENP022728 vlCDR2
KVSNRFS

SEQ ID NO: 3224 - protein, 9 aa, synthetic construct
  REGION 1..9: note = Description of Artificial Sequence: Synthetic peptide
  REGION 1..9: note = XENP022728 vlCDR3
FQGSHVPNT

SEQ ID NO: 3225 - protein, 446 aa, synthetic construct
  REGION 1..446: note = Description of Artificial Sequence: Synthetic polypeptide
  REGION 1..446: note = XENP022729 1C11_H3L3_Fab-[CTLA-4]_H3.23_L0.129_scFv Fab-Fc Heavy Chain
QIQLVQSGSELKKPGASVKVSCKASGYTFTHYGMNWVRQAPGQGLEWMGWINTYTGEPTYADGFTGRFVFSLDTSVSTAYLQISSLKAEDTAVYFCARDYYGSSPYWGQGTLVTVSSASTKGPSVFPLAPSSKSTSGGTAALGCLVKDYFPEPVTVSWNSGALTSGVHTFPAVLQSSGLYSLSSVVTVPSSSLGTQTYICNVNHKPSDTKVDKKVEPKSCDKTHTCPPCPAPPVAGPSVFLFPPKPKDTLMISRTPEVTCVVVDVKHEDPEVKFNWYVDGVEVHNAKTKPREEEYNSTYRVVSVLTVLHQDWLNGKEYKCKVSNKALPAPIEKTISKAKGQPREPQVYTLPPSREEMTKNQVSLTCDVSGFYPSDIAVEWESDGQPENNYKTTPPVLDSDGSFFLYSKLTVDKSRWEQGDVFSCSVMHEALHNHYTQKSLSLSPGK

SEQ ID NO: 3226 - protein, 117 aa, synthetic construct; identical to SEQ ID NO: 32
  REGION 1..117: note = Description of Artificial Sequence: Synthetic polypeptide
  REGION 1..117: note = VH of XENP022729

SEQ ID NO: 3227 - protein, 5 aa, synthetic construct
  REGION 1..5: note = Description of Artificial Sequence: Synthetic peptide
  REGION 1..5: note = XENP022729 vhCDR1
HYGMN

SEQ ID NO: 3228 - protein, 17 aa, synthetic construct
  REGION 1..17: note = Description of Artificial Sequence: Synthetic peptide
  REGION 1..17: note = XENP022729 vhCDR2
WINTYTGEPTYADGFTG

SEQ ID NO: 3229 - protein, 8 aa, synthetic construct
  REGION 1..8: note = Description of Artificial Sequence: Synthetic peptide
  REGION 1..8: note = XENP022729 vhCDR3
DYYGSSPY

SEQ ID NO: 3230 - protein, 477 aa, synthetic construct; identical to SEQ ID NO: 2394
  REGION 1..477: note = Description of Artificial Sequence: Synthetic polypeptide
  REGION 1..477: note = XENP022729 1C11_H3L3_Fab-[CTLA-4]_H3.23_L0.129_scFv scFv-Fc Heavy Chain

SEQ ID NO: 3231 - protein, 118 aa, synthetic construct; identical to SEQ ID NO: 2395
  REGION 1..118: note = Description of Artificial Sequence: Synthetic polypeptide
  REGION 1..118: note = VH of XENP022729

SEQ ID NO: 3232 - protein, 108 aa, synthetic construct; identical to SEQ ID NO: 2396
  REGION 1..108: note = Description of Artificial Sequence: Synthetic polypeptide
  REGION 1..108: note = VL of XENP022729

SEQ ID NO: 3233 - protein, 231 aa, synthetic construct; identical to SEQ ID NO: 2397
  REGION 1..231: note = Description of Artificial Sequence: Synthetic polypeptide
  REGION 1..231: note = Fc chain of XENP022729

SEQ ID NO: 3234 - protein, 5 aa, synthetic construct
  REGION 1..5: note = Description of Artificial Sequence: Synthetic peptide
  REGION 1..5: note = XENP022729 vhCDR1
SYTMH

SEQ ID NO: 3235 - protein, 17 aa, synthetic construct
  REGION 1..17: note = Description of Artificial Sequence: Synthetic peptide
  REGION 1..17: note = XENP022729 vhCDR2
FISYDGNYKYYADSVKG

SEQ ID NO: 3236 - protein, 9 aa, synthetic construct
  REGION 1..9: note = Description of Artificial Sequence: Synthetic peptide
  REGION 1..9: note = XENP022729 vhCDR3
GGHLGPFDL

SEQ ID NO: 3237 - protein, 12 aa, synthetic construct
  REGION 1..12: note = Description of Artificial Sequence: Synthetic peptide
  REGION 1..12: note = XENP022729 vlCDR1
RASQSVGSSYLA

SEQ ID NO: 3238 - protein, 7 aa, synthetic construct
  REGION 1..7: note = Description of Artificial Sequence: Synthetic peptide
  REGION 1..7: note = XENP022729 vlCDR2
GASSRAT

SEQ ID NO: 3239 - protein, 9 aa, synthetic construct
  REGION 1..9: note = Description of Artificial Sequence: Synthetic peptide
  REGION 1..9: note = XENP022729 vlCDR3
QQYGSSPWT

SEQ ID NO: 3240 - protein, 219 aa, synthetic construct; identical to SEQ ID NO: 6
  REGION 1..219: note = Description of Artificial Sequence: Synthetic polypeptide
  REGION 1..219: note = XENP022729 1C11_H3L3_Fab-[CTLA-4]_H3.23_L0.129_scFv Light Chain

SEQ ID NO: 3241 - protein, 112 aa, synthetic construct; identical to SEQ ID NO: 7
  REGION 1..112: note = Description of Artificial Sequence: Synthetic polypeptide
  REGION 1..112: note = VL of XENP022729

SEQ ID NO: 3242 - protein, 16 aa, synthetic construct
  REGION 1..16: note = Description of Artificial Sequence: Synthetic peptide
  REGION 1..16: note = XENP022729 vlCDR1
KSSQSIVHSNGNTYLE

SEQ ID NO: 3243 - protein, 7 aa, synthetic construct
  REGION 1..7: note = Description of Artificial Sequence: Synthetic peptide
  REGION 1..7: note = XENP022729 vlCDR2
KVSNRFS

SEQ ID NO: 3244 - protein, 9 aa, synthetic construct
  REGION 1..9: note = Description of Artificial Sequence: Synthetic peptide
  REGION 1..9: note = XENP022729 vlCDR3
FQGSHVPNT

SEQ ID NO: 3245 - protein, 449 aa, synthetic construct
  REGION 1..449: note = Description of Artificial Sequence: Synthetic polypeptide
  REGION 1..449: note = XENP022836 2E9_H1L1_Fab-[CTLA-4]_H3.23_L0.129_scFv HC-Fab
QVQLVQSGAEVKKPGASVKVSCKASGYAFTNYWLGWVRQAPGQGLEWMGNFYPGSSNTYYNEKFQGRVTMTADKSISTAYMELSRLRSDDTAVYFCARHYGTNYRYFDVWGAGTLVTVSSASTKGPSVFPLAPSSKSTSGGTAALGCLVKDYFPEPVTVSWNSGALTSGVHTFPAVLQSSGLYSLSSVVTVPSSSLGTQTYICNVNHKPSDTKVDKKVEPKSCDKTHTCPPCPAPPVAGPSVFLFPPKPKDTLMISRTPEVTCVVVDVKHEDPEVKFNWYVDGVEVHNAKTKPREEEYNSTYRVVSVLTVLHQDWLNGKEYKCKVSNKALPAPIEKTISKAKGQPREPQVYTLPPSREEMTKNQVSLTCDVSGFYPSDIAVEWESDGQPENNYKTTPPVLDSDGSFFLYSKLTVDKSRWEQGDVFSCSVMHEALHNHYTQKSLSLSPGK

SEQ ID NO: 3246 - protein, 120 aa, synthetic construct; identical to SEQ ID NO: 3091
  REGION 1..120: note = Description of Artificial Sequence: Synthetic polypeptide
  REGION 1..120: note = VH of XENP022836

SEQ ID NO: 3247 - protein, 5 aa, synthetic construct
  REGION 1..5: note = Description of Artificial Sequence: Synthetic peptide
  REGION 1..5: note = XENP022836 vhCDR1
NYWLG

SEQ ID NO: 3248 - protein, 17 aa, synthetic construct
  REGION 1..17: note = Description of Artificial Sequence: Synthetic peptide
  REGION 1..17: note = XENP022836 vhCDR2
NFYPGSSNTYYNEKFQG

SEQ ID NO: 3249 - protein, 11 aa, synthetic construct
  REGION 1..11: note = Description of Artificial Sequence: Synthetic peptide
  REGION 1..11: note = XENP022836 vhCDR3
HYGTNYRYFDV

SEQ ID NO: 3250 - protein, 477 aa, synthetic construct; identical to SEQ ID NO: 2394
  REGION 1..477: note = Description of Artificial Sequence: Synthetic polypeptide
  REGION 1..477: note = XENP022836 2E9_H1L1_Fab-[CTLA-4]_H3.23_L0.129_scFv HC-scFV

SEQ ID NO: 3251 - protein, 118 aa, synthetic construct; identical to SEQ ID NO: 2395
  REGION 1..118: note = Description of Artificial Sequence: Synthetic polypeptide
  REGION 1..118: note = VH of XENP022836

SEQ ID NO: 3252 - protein, 108 aa, synthetic construct; identical to SEQ ID NO: 2396
  REGION 1..108: note = Description of Artificial Sequence: Synthetic polypeptide
  REGION 1..108: note = VL of XENP022836

SEQ ID NO: 3253 - protein, 231 aa, synthetic construct; identical to SEQ ID NO: 2397
  REGION 1..231: note = Description of Artificial Sequence: Synthetic polypeptide
  REGION 1..231: note = Fc chain of XENP022836

SEQ ID NO: 3254 - protein, 5 aa, synthetic construct
  REGION 1..5: note = Description of Artificial Sequence: Synthetic peptide
  REGION 1..5: note = XENP022836 vhCDR1
SYTMH

SEQ ID NO: 3255 - protein, 17 aa, synthetic construct
  REGION 1..17: note = Description of Artificial Sequence: Synthetic peptide
  REGION 1..17: note = XENP022836 vhCDR2
FISYDGNYKYYADSVKG

SEQ ID NO: 3256 - protein, 9 aa, synthetic construct
  REGION 1..9: note = Description of Artificial Sequence: Synthetic peptide
  REGION 1..9: note = XENP022836 vhCDR3
GGHLGPFDL

SEQ ID NO: 3257 - protein, 12 aa, synthetic construct
  REGION 1..12: note = Description of Artificial Sequence: Synthetic peptide
  REGION 1..12: note = XENP022836 vlCDR1
RASQSVGSSYLA

SEQ ID NO: 3258 - protein, 7 aa, synthetic construct
  REGION 1..7: note = Description of Artificial Sequence: Synthetic peptide
  REGION 1..7: note = XENP022836 vlCDR2
GASSRAT

SEQ ID NO: 3259 - protein, 9 aa, synthetic construct
  REGION 1..9: note = Description of Artificial Sequence: Synthetic peptide
  REGION 1..9: note = XENP022836 vlCDR3
QQYGSSPWT

SEQ ID NO: 3260 - protein, 214 aa, synthetic construct; identical to SEQ ID NO: 3140
  REGION 1..214: note = Description of Artificial Sequence: Synthetic polypeptide
  REGION 1..214: note = XENP022836 2E9_H1L1_Fab-[CTLA-4]_H3.23_L0.129_scFv Light Chain

SEQ ID NO: 3261 - protein, 107 aa, synthetic construct; identical to SEQ ID NO: 3092
  REGION 1..107: note = Description of Artificial Sequence: Synthetic polypeptide
  REGION 1..107: note = VL of XENP022836

SEQ ID NO: 3262 - protein, 11 aa, synthetic construct
  REGION 1..11: note = Description of Artificial Sequence: Synthetic peptide
  REGION 1..11: note = XENP022836 vlCDR1
RASQSVSNDVA

SEQ ID NO: 3263 - protein, 7 aa, synthetic construct
  REGION 1..7: note = Description of Artificial Sequence: Synthetic peptide
  REGION 1..7: note = XENP022836 vlCDR2
YASNRYT

SEQ ID NO: 3264 - protein, 9 aa, synthetic construct
  REGION 1..9: note = Description of Artificial Sequence: Synthetic peptide
  REGION 1..9: note = XENP022836 vlCDR3
QQDYSSPYT

SEQ ID NO: 3265 - protein, 446 aa, synthetic construct
  REGION 1..446: note = Description of Artificial Sequence: Synthetic polypeptide
  REGION 1..446: note = XENP022854 1C11_H3L3_Fab-[CTLA-4]_H3.23_L0.129_[CTLA-4]_scFv Fab-Fc Heavy Chain
QIQLVQSGSELKKPGASVKVSCKASGYTFTHYGMNWVRQAPGQGLEWMGWINTYTGEPTYADGFTGRFVFSLDTSVSTAYLQISSLKAEDTAVYFCARDYYGSSPYWGQGTLVTVSSASTKGPSVFPLAPSSKSTSGGTAALGCLVKDYFPEPVTVSWNSGALTSGVHTFPAVLQSSGLYSLSSVVTVPSSSLGTQTYICNVNHKPSDTKVDKKVEPKSCDKTHTCPPCPAPPVAGPSVFLFPPKPKDTLMISRTPEVTCVVVDVKHEDPEVKFNWYVDGVEVHNAKTKPREEEYNSTYRVVSVLTVLHQDWLNGKEYKCKVSNKALPAPIEKTISKAKGQPREPQVYTLPPSREEMTKNQVSLTCDVSGFYPSDIAVEWESDGQPENNYKTTPPVLDSDGSFFLYSKLTVDKSRWEQGDVFSCSVLHEALHSHYTQKSLSLSPGK

SEQ ID NO: 3266 - protein, 117 aa, synthetic construct; identical to SEQ ID NO: 32
  REGION 1..117: note = Description of Artificial Sequence: Synthetic polypeptide
  REGION 1..117: note = VH of XENP022854

SEQ ID NO: 3267 - protein, 5 aa, synthetic construct
  REGION 1..5: note = Description of Artificial Sequence: Synthetic peptide
  REGION 1..5: note = XENP022854 vhCDR1
HYGMN

SEQ ID NO: 3268 - protein, 17 aa, synthetic construct
  REGION 1..17: note = Description of Artificial Sequence: Synthetic peptide
  REGION 1..17: note = XENP022854 vhCDR2
WINTYTGEPTYADGFTG

SEQ ID NO: 3269 - protein, 8 aa, synthetic construct
  REGION 1..8: note = Description of Artificial Sequence: Synthetic peptide
  REGION 1..8: note = XENP022854 vhCDR3
DYYGSSPY

SEQ ID NO: 3270 - protein, 477 aa, synthetic construct; identical to SEQ ID NO: 2610
  REGION 1..477: note = Description of Artificial Sequence: Synthetic polypeptide
  REGION 1..477: note = XENP022854 1C11_H3L3_Fab-[CTLA-4]_H3.23_L0.129_[CTLA-4]_scFv scFv-Fc Heavy Chain

SEQ ID NO: 3271 - protein, 118 aa, synthetic construct; identical to SEQ ID NO: 2395
  REGION 1..118: note = Description of Artificial Sequence: Synthetic polypeptide
  REGION 1..118: note = VH of XENP022854

SEQ ID NO: 3272 - protein, 108 aa, synthetic construct; identical to SEQ ID NO: 2396
  REGION 1..108: note = Description of Artificial Sequence: Synthetic polypeptide
  REGION 1..108: note = VL of XENP022854

SEQ ID NO: 3273 - protein, 231 aa, synthetic construct; identical to SEQ ID NO: 2409
  REGION 1..231: note = Description of Artificial Sequence: Synthetic polypeptide
  REGION 1..231: note = Fc chain of XENP022854

SEQ ID NO: 3274 - protein, 5 aa, synthetic construct
  REGION 1..5: note = Description of Artificial Sequence: Synthetic peptide
  REGION 1..5: note = XENP022854 vhCDR1
SYTMH

SEQ ID NO: 3275 - protein, 17 aa, synthetic construct
  REGION 1..17: note = Description of Artificial Sequence: Synthetic peptide
  REGION 1..17: note = XENP022854 vhCDR2
FISYDGNYKYYADSVKG

SEQ ID NO: 3276 - protein, 9 aa, synthetic construct
  REGION 1..9: note = Description of Artificial Sequence: Synthetic peptide
  REGION 1..9: note = XENP022854 vhCDR3
GGHLGPFDL

SEQ ID NO: 3277 - protein, 12 aa, synthetic construct
  REGION 1..12: note = Description of Artificial Sequence: Synthetic peptide
  REGION 1..12: note = XENP022854 vlCDR1
RASQSVGSSYLA

SEQ ID NO: 3278 - protein, 7 aa, synthetic construct
  REGION 1..7: note = Description of Artificial Sequence: Synthetic peptide
  REGION 1..7: note = XENP022854 vlCDR2
GASSRAT

SEQ ID NO: 3279 - protein, 9 aa, synthetic construct
  REGION 1..9: note = Description of Artificial Sequence: Synthetic peptide
  REGION 1..9: note = XENP022854 vlCDR3
QQYGSSPWT

SEQ ID NO: 3280 - protein, 219 aa, synthetic construct; identical to SEQ ID NO: 6
  REGION 1..219: note = Description of Artificial Sequence: Synthetic polypeptide
  REGION 1..219: note = XENP022854 1C11_H3L3_Fab-[CTLA-4]_H3.23_L0.129_[CTLA-4]_scFv Light Chain

SEQ ID NO: 3281 - protein, 112 aa, synthetic construct; identical to SEQ ID NO: 7
  REGION 1..112: note = Description of Artificial Sequence: Synthetic polypeptide
  REGION 1..112: note = VL of XENP022854

SEQ ID NO: 3282 - protein, 16 aa, synthetic construct
  REGION 1..16: note = Description of Artificial Sequence: Synthetic peptide
  REGION 1..16: note = XENP022854 vlCDR1
KSSQSIVHSNGNTYLE

SEQ ID NO: 3283 - protein, 7 aa, synthetic construct
  REGION 1..7: note = Description of Artificial Sequence: Synthetic peptide
  REGION 1..7: note = XENP022854 vlCDR2
KVSNRFS

SEQ ID NO: 3284 - protein, 9 aa, synthetic construct
  REGION 1..9: note = Description of Artificial Sequence: Synthetic peptide
  REGION 1..9: note = XENP022854 vlCDR3
FQGSHVPNT

SEQ ID NO: 3285 - protein, 449 aa, synthetic construct
  REGION 1..449: note = Description of Artificial Sequence: Synthetic polypeptide
  REGION 1..449: note = XENP022855 2E9_H1L1_Fab-[CTLA-4]_H3.23_L0.129_[CTLA-4]_scFv Fab-Fc Heavy Chain
QVQLVQSGAEVKKPGASVKVSCKASGYAFTNYWLGWVRQAPGQGLEWMGNFYPGSSNTYYNEKFQGRVTMTADKSISTAYMELSRLRSDDTAVYFCARHYGTNYRYFDVWGAGTLVTVSSASTKGPSVFPLAPSSKSTSGGTAALGCLVKDYFPEPVTVSWNSGALTSGVHTFPAVLQSSGLYSLSSVVTVPSSSLGTQTYICNVNHKPSDTKVDKKVEPKSCDKTHTCPPCPAPPVAGPSVFLFPPKPKDTLMISRTPEVTCVVVDVKHEDPEVKFNWYVDGVEVHNAKTKPREEEYNSTYRVVSVLTVLHQDWLNGKEYKCKVSNKALPAPIEKTISKAKGQPREPQVYTLPPSREEMTKNQVSLTCDVSGFYPSDIAVEWESDGQPENNYKTTPPVLDSDGSFFLYSKLTVDKSRWEQGDVFSCSVLHEALHSHYTQKSLSLSPGK

SEQ ID NO: 3286 - protein, 120 aa, synthetic construct; identical to SEQ ID NO: 3091
  REGION 1..120: note = Description of Artificial Sequence: Synthetic polypeptide
  REGION 1..120: note = VH of XENP022855

SEQ ID NO: 3287 - protein, 5 aa, synthetic construct
  REGION 1..5: note = Description of Artificial Sequence: Synthetic peptide
  REGION 1..5: note = XENP022855 vhCDR1
NYWLG

SEQ ID NO: 3288 - protein, 17 aa, synthetic construct
  REGION 1..17: note = Description of Artificial Sequence: Synthetic peptide
  REGION 1..17: note = XENP022855 vhCDR2
NFYPGSSNTYYNEKFQG

SEQ ID NO: 3289 - protein, 11 aa, synthetic construct
  REGION 1..11: note = Description of Artificial Sequence: Synthetic peptide
  REGION 1..11: note = XENP022855 vhCDR3
HYGTNYRYFDV

SEQ ID NO: 3290 - protein, 477 aa, synthetic construct; identical to SEQ ID NO: 2610
  REGION 1..477: note = Description of Artificial Sequence: Synthetic polypeptide
  REGION 1..477: note = XENP022855 2E9_H1L1_Fab-[CTLA-4]_H3.23_L0.129_[CTLA-4]_scFv scFv-Fc Heavy Chain

SEQ ID NO: 3291 - protein, 118 aa, synthetic construct; identical to SEQ ID NO: 2395
  REGION 1..118: note = Description of Artificial Sequence: Synthetic polypeptide
  REGION 1..118: note = VH of XENP022855

SEQ ID NO: 3292 - protein, 108 aa, synthetic construct; identical to SEQ ID NO: 2396
  REGION 1..108: note = Description of Artificial Sequence: Synthetic polypeptide
  REGION 1..108: note = VL of XENP022855

SEQ ID NO: 3293 - protein, 231 aa, synthetic construct; identical to SEQ ID NO: 2409
  REGION 1..231: note = Description of Artificial Sequence: Synthetic polypeptide
  REGION 1..231: note = Fc chain of XENP022855

SEQ ID NO: 3294 - protein, 5 aa, synthetic construct
  REGION 1..5: note = Description of Artificial Sequence: Synthetic peptide
  REGION 1..5: note = XENP022855 vhCDR1
SYTMH

SEQ ID NO: 3295 - protein, 17 aa, synthetic construct
  REGION 1..17: note = Description of Artificial Sequence: Synthetic peptide
  REGION 1..17: note = XENP022855 vhCDR2
FISYDGNYKYYADSVKG

SEQ ID NO: 3296 - protein, 9 aa, synthetic construct
  REGION 1..9: note = Description of Artificial Sequence: Synthetic peptide
  REGION 1..9: note = XENP022855 vhCDR3
GGHLGPFDL

SEQ ID NO: 3297 - protein, 12 aa, synthetic construct
  REGION 1..12: note = Description of Artificial Sequence: Synthetic peptide
  REGION 1..12: note = XENP022855 vlCDR1
RASQSVGSSYLA

SEQ ID NO: 3298 - protein, 7 aa, synthetic construct
  REGION 1..7: note = Description of Artificial Sequence: Synthetic peptide
  REGION 1..7: note = XENP022855 vlCDR2
GASSRAT

SEQ ID NO: 3299 - protein, 9 aa, synthetic construct
  REGION 1..9: note = Description of Artificial Sequence: Synthetic peptide
  REGION 1..9: note = XENP022855 vlCDR3
QQYGSSPWT

SEQ ID NO: 3300 - protein, 214 aa, synthetic construct; identical to SEQ ID NO: 3140
  REGION 1..214: note = Description of Artificial Sequence: Synthetic polypeptide
  REGION 1..214: note = XENP022855 2E9_H1L1_Fab-[CTLA-4]_H3.23_L0.129_[CTLA-4]_scFv Light Chain

SEQ ID NO: 3301 - protein, 107 aa, synthetic construct; identical to SEQ ID NO: 3092
  REGION 1..107: note = Description of Artificial Sequence: Synthetic polypeptide
  REGION 1..107: note = VL of XENP022855

SEQ ID NO: 3302 - protein, 11 aa, synthetic construct
  REGION 1..11: note = Description of Artificial Sequence: Synthetic peptide
  REGION 1..11: note = XENP022855 vlCDR1
RASQSVSNDVA

SEQ ID NO: 3303 - protein, 7 aa, synthetic construct
  REGION 1..7: note = Description of Artificial Sequence: Synthetic peptide
  REGION 1..7: note = XENP022855 vlCDR2
YASNRYT

SEQ ID NO: 3304 - protein, 9 aa, synthetic construct
  REGION 1..9: note = Description of Artificial Sequence: Synthetic peptide
  REGION 1..9: note = XENP022855 vlCDR3
QQDYSSPYT

SEQ ID NO: 3305 - protein, 446 aa, synthetic construct; identical to SEQ ID NO: 3225
  REGION 1..446: note = Description of Artificial Sequence: Synthetic polypeptide
  REGION 1..446: note = XENP022993 1C11_H3L1_Fab-[CTLA-4]_H3.23_L0.129_scFv Fab-Fc Heavy Chain

SEQ ID NO: 3306 - protein, 117 aa, synthetic construct; identical to SEQ ID NO: 32
  REGION 1..117: note = Description of Artificial Sequence: Synthetic polypeptide
  REGION 1..117: note = VH of XENP022993

SEQ ID NO: 3307 - protein, 5 aa, synthetic construct
  REGION 1..5: note = Description of Artificial Sequence: Synthetic peptide
  REGION 1..5: note = XENP022993 vhCDR1
HYGMN

SEQ ID NO: 3308 - protein, 17 aa, synthetic construct
  REGION 1..17: note = Description of Artificial Sequence: Synthetic peptide
  REGION 1..17: note = XENP022993 vhCDR2
WINTYTGEPTYADGFTG

SEQ ID NO: 3309 - protein, 8 aa, synthetic construct
  REGION 1..8: note = Description of Artificial Sequence: Synthetic peptide
  REGION 1..8: note = XENP022993 vhCDR3
DYYGSSPY

SEQ ID NO: 3310 - protein, 477 aa, synthetic construct; identical to SEQ ID NO: 2394
  REGION 1..477: note = Description of Artificial Sequence: Synthetic polypeptide
  REGION 1..477: note = XENP022993 1C11_H3L1_Fab-[CTLA-4]_H3.23_L0.129_scFv scFv-Fc Heavy Chain

SEQ ID NO: 3311 - protein, 118 aa, synthetic construct; identical to SEQ ID NO: 2395
  REGION 1..118: note = Description of Artificial Sequence: Synthetic polypeptide
  REGION 1..118: note = VH of XENP022993

SEQ ID NO: 3312 - protein, 108 aa, synthetic construct; identical to SEQ ID NO: 2396
  REGION 1..108: note = Description of Artificial Sequence: Synthetic polypeptide
  REGION 1..108: note = VL of XENP022993

SEQ ID NO: 3313 - protein, 231 aa, synthetic construct; identical to SEQ ID NO: 2397
  REGION 1..231: note = Description of Artificial Sequence: Synthetic polypeptide
  REGION 1..231: note = Fc chain of XENP022993

SEQ ID NO: 3314 - protein, 5 aa, synthetic construct
  REGION 1..5: note = Description of Artificial Sequence: Synthetic peptide
  REGION 1..5: note = XENP022993 vhCDR1
SYTMH

SEQ ID NO: 3315 - protein, 17 aa, synthetic construct
  REGION 1..17: note = Description of Artificial Sequence: Synthetic peptide
  REGION 1..17: note = XENP022993 vhCDR2
FISYDGNYKYYADSVKG

SEQ ID NO: 3316 - protein, 9 aa, synthetic construct
  REGION 1..9: note = Description of Artificial Sequence: Synthetic peptide
  REGION 1..9: note = XENP022993 vhCDR3
GGHLGPFDL

SEQ ID NO: 3317 - protein, 12 aa, synthetic construct
  REGION 1..12: note = Description of Artificial Sequence: Synthetic peptide
  REGION 1..12: note = XENP022993 vlCDR1
RASQSVGSSYLA

SEQ ID NO: 3318 - protein, 7 aa, synthetic construct
  REGION 1..7: note = Description of Artificial Sequence: Synthetic peptide
  REGION 1..7: note = XENP022993 vlCDR2
GASSRAT

SEQ ID NO: 3319 - protein, 9 aa, synthetic construct
  REGION 1..9: note = Description of Artificial Sequence: Synthetic peptide
  REGION 1..9: note = XENP022993 vlCDR3
QQYGSSPWT

SEQ ID NO: 3320 - protein, 219 aa, synthetic construct; identical to SEQ ID NO: 16
  REGION 1..219: note = Description of Artificial Sequence: Synthetic polypeptide
  REGION 1..219: note = XENP022993 1C11_H3L1_Fab-[CTLA-4]_H3.23_L0.129_scFv Light Chain

SEQ ID NO: 3321 - protein, 112 aa, synthetic construct; identical to SEQ ID NO: 17
  REGION 1..112: note = Description of Artificial Sequence: Synthetic polypeptide
  REGION 1..112: note = VL of XENP022993

SEQ ID NO: 3322 - protein, 16 aa, synthetic construct
  REGION 1..16: note = Description of Artificial Sequence: Synthetic peptide
  REGION 1..16: note = XENP022993 vlCDR1
RSSQSIVHSNGNTYLE

SEQ ID NO: 3323 - protein, 7 aa, synthetic construct
  REGION 1..7: note = Description of Artificial Sequence: Synthetic peptide
  REGION 1..7: note = XENP022993 vlCDR2
KVSNRFS

SEQ ID NO: 3324 - protein, 9 aa, synthetic construct
  REGION 1..9: note = Description of Artificial Sequence: Synthetic peptide
  REGION 1..9: note = XENP022993 vlCDR3
FQGSHVPNT

SEQ ID NO: 3325 - protein, 446 aa, synthetic construct; identical to SEQ ID NO: 3225
  REGION 1..446: note = Description of Artificial Sequence: Synthetic polypeptide
  REGION 1..446: note = XENP022994 1C11_H3L2_Fab-[CTLA-4]_H3.23_L0.129_scFv Fab-Fc Heavy Chain

SEQ ID NO: 3326 - protein, 117 aa, synthetic construct; identical to SEQ ID NO: 32
  REGION 1..117: note = Description of Artificial Sequence: Synthetic polypeptide
  REGION 1..117: note = VH of XENP022994

SEQ ID NO: 3327 - protein, 5 aa, synthetic construct
  REGION 1..5: note = Description of Artificial Sequence: Synthetic peptide
  REGION 1..5: note = XENP022994 vhCDR1
HYGMN

SEQ ID NO: 3328 - protein, 17 aa, synthetic construct
  REGION 1..17: note = Description of Artificial Sequence: Synthetic peptide
  REGION 1..17: note = XENP022994 vhCDR2
WINTYTGEPTYADGFTG

SEQ ID NO: 3329 - protein, 8 aa, synthetic construct
  REGION 1..8: note = Description of Artificial Sequence: Synthetic peptide
  REGION 1..8: note = XENP022994 vhCDR3
DYYGSSPY

SEQ ID NO: 3330 - protein, 477 aa, synthetic construct; identical to SEQ ID NO: 2394
  REGION 1..477: note = Description of Artificial Sequence: Synthetic polypeptide
  REGION 1..477: note = XENP022994 1C11_H3L2_Fab-[CTLA-4]_H3.23_L0.129_scFv scFv-Fc Heavy Chain

SEQ ID NO: 3331 - protein, 118 aa, synthetic construct; identical to SEQ ID NO: 2395
  REGION 1..118: note = Description of Artificial Sequence: Synthetic polypeptide
  REGION 1..118: note = VH of XENP022994

SEQ ID NO: 3332 - protein, 108 aa, synthetic construct; identical to SEQ ID NO: 2396
  REGION 1..108: note = Description of Artificial Sequence: Synthetic polypeptide
  REGION 1..108: note = VL of XENP022994

SEQ ID NO: 3333 - protein, 231 aa, synthetic construct; identical to SEQ ID NO: 2397
  REGION 1..231: note = Description of Artificial Sequence: Synthetic polypeptide
  REGION 1..231: note = Fc chain of XENP022994

SEQ ID NO: 3334 - protein, 5 aa, synthetic construct
  REGION 1..5: note = Description of Artificial Sequence: Synthetic peptide
  REGION 1..5: note = XENP022994 vhCDR1
SYTMH

SEQ ID NO: 3335 - protein, 17 aa, synthetic construct
  REGION 1..17: note = Description of Artificial Sequence: Synthetic peptide
  REGION 1..17: note = XENP022994 vhCDR2
FISYDGNYKYYADSVKG

SEQ ID NO: 3336 - protein, 9 aa, synthetic construct
  REGION 1..9: note = Description of Artificial Sequence: Synthetic peptide
  REGION 1..9: note = XENP022994 vhCDR3
GGHLGPFDL

SEQ ID NO: 3337 - protein, 12 aa, synthetic construct
  REGION 1..12: note = Description of Artificial Sequence: Synthetic peptide
  REGION 1..12: note = XENP022994 vlCDR1
RASQSVGSSYLA

SEQ ID NO: 3338 - protein, 7 aa, synthetic construct
  REGION 1..7: note = Description of Artificial Sequence: Synthetic peptide
  REGION 1..7: note = XENP022994 vlCDR2
GASSRAT

SEQ ID NO: 3339 - protein, 9 aa, synthetic construct
  REGION 1..9: note = Description of Artificial Sequence: Synthetic peptide
  REGION 1..9: note = XENP022994 vlCDR3
QQYGSSPWT

SEQ ID NO: 3340 - protein, 219 aa, synthetic construct; identical to SEQ ID NO: 26
  REGION 1..219: note = Description of Artificial Sequence: Synthetic polypeptide
  REGION 1..219: note = XENP022994 1C11_H3L2_Fab-[CTLA-4]_H3.23_L0.129_scFv Light Chain

SEQ ID NO: 3341 - protein, 112 aa, synthetic construct; identical to SEQ ID NO: 27
  REGION 1..112: note = Description of Artificial Sequence: Synthetic polypeptide
  REGION 1..112: note = VL of XENP022994

SEQ ID NO: 3342 - protein, 16 aa, synthetic construct
  REGION 1..16: note = Description of Artificial Sequence: Synthetic peptide
  REGION 1..16: note = XENP022994 vlCDR1
RSSQSIVHSNGNTYLE

SEQ ID NO: 3343 - protein, 7 aa, synthetic construct
  REGION 1..7: note = Description of Artificial Sequence: Synthetic peptide
  REGION 1..7: note = XENP022994 vlCDR2
KVSNRFS

SEQ ID NO: 3344 - protein, 9 aa, synthetic construct
  REGION 1..9: note = Description of Artificial Sequence: Synthetic peptide
  REGION 1..9: note = XENP022994 vlCDR3
FQGSHVPNT

SEQ ID NO: 3345 - protein, 446 aa, synthetic construct
  REGION 1..446: note = Description of Artificial Sequence: Synthetic polypeptide
  REGION 1..446: note = XENP020850 1D12_H1L1_IgG1_PVA_/S267K Heavy Chain
QVQLVQSGAEVKKPGASVKVSCKASGYTFTSYTMHWVRQAPGQGLEWMGYLIPSSGYTDYNQKFQGRVTMTADKSTSTAYMELSSLRSEDTAVYYCARGDSVYFDYWGQGTLVTVSSASTKGPSVFPLAPSSKSTSGGTAALGCLVKDYFPEPVTVSWNSGALTSGVHTFPAVLQSSGLYSLSSVVTVPSSSLGTQTYICNVNHKPSNTKVDKKVEPKSCDKTHTCPPCPAPPVAGPSVFLFPPKPKDTLMISRTPEVTCVVVDVKHEDPEVKFNWYVDGVEVHNAKTKPREEQYNSTYRVVSVLTVLHQDWLNGKEYKCKVSNKALPAPIEKTISKAKGQPREPQVYTLPPSREEMTKNQVSLTCLVKGFYPSDIAVEWESNGQPENNYKTTPPVLDSDGSFFLYSKLTVDKSRWQQGNVFSCSVMHEALHNHYTQKSLSLSPGK

SEQ ID NO: 3346 - protein, 117 aa, synthetic construct
  REGION 1..117: note = Description of Artificial Sequence: Synthetic polypeptide
  REGION 1..117: note = VH of XENP020850
QVQLVQSGAEVKKPGASVKVSCKASGYTFTSYTMHWVRQAPGQGLEWMGYLIPSSGYTDYNQKFQGRVTMTADKSTSTAYMELSSLRSEDTAVYYCARGDSVYFDYWGQGTLVTVSS

SEQ ID NO: 3347 - protein, 5 aa, synthetic construct
  REGION 1..5: note = Description of Artificial Sequence: Synthetic peptide
  REGION 1..5: note = XENP020850 vhCDR1
SYTMH

SEQ ID NO: 3348 - protein, 17 aa, synthetic construct
  REGION 1..17: note = Description of Artificial Sequence: Synthetic peptide
  REGION 1..17: note = XENP020850 vhCDR2
YLIPSSGYTDYNQKFQG

SEQ ID NO: 3349 - protein, 8 aa, synthetic construct
  REGION 1..8: note = Description of Artificial Sequence: Synthetic peptide
  REGION 1..8: note = XENP020850 vhCDR3
GDSVYFDY

SEQ ID NO: 3350 - protein, 218 aa, synthetic construct
  REGION 1..218: note = Description of Artificial Sequence: Synthetic polypeptide
  REGION 1..218: note = XENP020850 1D12_H1L1_IgG1_PVA_/S267K Light Chain
DIVLTQSPATLSLSPGERATLSCRASESVEYYGTSLMQWYQQKPGQPPRLLIYAASNVESGVPARFSGSGSGTDFTLTISSLEPEDFAVYFCQQSRKVPWTFGGGTKVEIKRTVAAPSVFIFPPSDEQLKSGTASVVCLLNNFYPREAKVQWKVDNALQSGNSQESVTEQDSKDSTYSLSSTLTLSKADYEKHKVYACEVTHQGLSSPVTKSFNRGEC

SEQ ID NO: 3351 - protein, 111 aa, synthetic construct
  REGION 1..111: note = Description of Artificial Sequence: Synthetic polypeptide
  REGION 1..111: note = VL of XENP020850
DIVLTQSPATLSLSPGERATLSCRASESVEYYGTSLMQWYQQKPGQPPRLLIYAASNVESGVPARFSGSGSGTDFTLTISSLEPEDFAVYFCQQSRKVPWTFGGGTKVEIK

SEQ ID NO: 3352 - protein, 15 aa, synthetic construct
  REGION 1..15: note = Description of Artificial Sequence: Synthetic peptide
  REGION 1..15: note = XENP020850 vlCDR1
RASESVEYYGTSLMQ

SEQ ID NO: 3353 - protein, 7 aa, synthetic construct
  REGION 1..7: note = Description of Artificial Sequence: Synthetic peptide
  REGION 1..7: note = XENP020850 vlCDR2
AASNVES

SEQ ID NO: 3354 - protein, 9 aa, synthetic construct
  REGION 1..9: note = Description of Artificial Sequence: Synthetic peptide
  REGION 1..9: note = XENP020850 vlCDR3
QQSRKVPWT

SEQ ID NO: 3355 - protein, 446 aa, synthetic construct; identical to SEQ ID NO: 3345
  REGION 1..446: note = Description of Artificial Sequence: Synthetic polypeptide
  REGION 1..446: note = XENP020851 1D12_H1L2_IgG1_PVA_/S267K Heavy Chain

SEQ ID NO: 3356 - protein, 117 aa, synthetic construct; identical to SEQ ID NO: 3346
  REGION 1..117: note = Description of Artificial Sequence: Synthetic polypeptide
  REGION 1..117: note = VH of XENP020851

SEQ ID NO: 3357 - protein, 5 aa, synthetic construct
  REGION 1..5: note = Description of Artificial Sequence: Synthetic peptide
  REGION 1..5: note = XENP020851 vhCDR1
SYTMH

SEQ ID NO: 3358 - protein, 17 aa, synthetic construct
  REGION 1..17: note = Description of Artificial Sequence: Synthetic peptide
  REGION 1..17: note = XENP020851 vhCDR2
YLIPSSGYTDYNQKFQG

SEQ ID NO: 3359 - protein, 8 aa, synthetic construct
  REGION 1..8: note = Description of Artificial Sequence: Synthetic peptide
  REGION 1..8: note = XENP020851 vhCDR3
GDSVYFDY

SEQ ID NO: 3360 - protein, 218 aa, synthetic construct
  REGION 1..218: note = Description of Artificial Sequence: Synthetic polypeptide
  REGION 1..218: note = XENP020851 1D12_H1L2_IgG1_PVA_/S267K Light Chain
DIVLTQSPDSLAVSLGERATINCKASESVEYYGTSLMQWYQQKPGQPPKLLIYAASNVESGVPARFSGSGSGTDFTLTISSLQAEDVAVYFCQQSRKVPWTFGGGTKVEIKRTVAAPSVFIFPPSDEQLKSGTASVVCLLNNFYPREAKVQWKVDNALQSGNSQESVTEQDSKDSTYSLSSTLTLSKADYEKHKVYACEVTHQGLSSPVTKSFNRGEC

SEQ ID NO: 3361 - protein, 111 aa, synthetic construct
  REGION 1..111: note = Description of Artificial Sequence: Synthetic polypeptide
  REGION 1..111: note = VL of XENP020851
DIVLTQSPDSLAVSLGERATINCKASESVEYYGTSLMQWYQQKPGQPPKLLIYAASNVESGVPARFSGSGSGTDFTLTISSLQAEDVAVYFCQQSRKVPWTFGGGTKVEIK

SEQ ID NO: 3362 - protein, 15 aa, synthetic construct
  REGION 1..15: note = Description of Artificial Sequence: Synthetic peptide
  REGION 1..15: note = XENP020851 vlCDR1
KASESVEYYGTSLMQ

SEQ ID NO: 3363 - protein, 7 aa, synthetic construct
  REGION 1..7: note = Description of Artificial Sequence: Synthetic peptide
  REGION 1..7: note = XENP020851 vlCDR2
AASNVES

SEQ ID NO: 3364 - protein, 9 aa, synthetic construct
  REGION 1..9: note = Description of Artificial Sequence: Synthetic peptide
  REGION 1..9: note = XENP020851 vlCDR3
QQSRKVPWT

SEQ ID NO: 3365 - protein, 446 aa, synthetic construct
  REGION 1..446: note = Description of Artificial Sequence: Synthetic polypeptide
  REGION 1..446: note = XENP020853 3H3_H1L1_IgG1_PVA_/S267K Heavy Chain
QVTLKESGPVLVKPTETLTLTCTVSGFSLNGYGVNWVRQPPGKGLEWLAMIWGDGSTDYNSALKSRLTISKDNSKSQVVLTMTNMDPVDTATYYCARSYYTSDEDYWGQGTLVTVSSASTKGPSVFPLAPSSKSTSGGTAALGCLVKDYFPEPVTVSWNSGALTSGVHTFPAVLQSSGLYSLSSVVTVPSSSLGTQTYICNVNHKPSNTKVDKKVEPKSCDKTHTCPPCPAPPVAGPSVFLFPPKPKDTLMISRTPEVTCVVVDVKHEDPEVKFNWYVDGVEVHNAKTKPREEQYNSTYRVVSVLTVLHQDWLNGKEYKCKVSNKALPAPIEKTISKAKGQPREPQVYTLPPSREEMTKNQVSLTCLVKGFYPSDIAVEWESNGQPENNYKTTPPVLDSDGSFFLYSKLTVDKSRWQQGNVFSCSVMHEALHNHYTQKSLSLSPGK

SEQ ID NO: 3366 - protein, 117 aa, synthetic construct
  REGION 1..117: note = Description of Artificial Sequence: Synthetic polypeptide
  REGION 1..117: note = VH of XENP020853
QVTLKESGPVLVKPTETLTLTCTVSGFSLNGYGVNWVRQPPGKGLEWLAMIWGDGSTDYNSALKSRLTISKDNSKSQVVLTMTNMDPVDTATYYCARSYYTSDEDYWGQGTLVTVSS

SEQ ID NO: 3367 - protein, 5 aa, synthetic construct
  REGION 1..5: note = Description of Artificial Sequence: Synthetic peptide
  REGION 1..5: note = XENP020853 vhCDR1
GYGVN

SEQ ID NO: 3368 - protein, 16 aa, synthetic construct
  REGION 1..16: note = Description of Artificial Sequence: Synthetic peptide
  REGION 1..16: note = XENP020853 vhCDR2
MIWGDGSTDYNSALKS

SEQ ID NO: 3369 - protein, 9 aa, synthetic construct
  REGION 1..9: note = Description of Artificial Sequence: Synthetic peptide
  REGION 1..9: note = XENP020853 vhCDR3
SYYTSDEDY

SEQ ID NO: 3370 - protein, 219 aa, synthetic construct
  REGION 1..219: note = Description of Artificial Sequence: Synthetic polypeptide
  REGION 1..219: note = XENP020853 3H3_H1L1_IgG1_PVA_/S267K Light Chain
DIVLTQTPLSLPVTPGEPASISCRSSQSLLNSRTRKNYLAWYLQKPGQSPQLLIYWASTRESGVPDRFTGSGSGTDFTLKISRVEAEDVGVYYCKQSYSLRTFGGGTKVEIKRTVAAPSVFIFPPSDEQLKSGTASVVCLLNNFYPREAKVQWKVDNALQSGNSQESVTEQDSKDSTYSLSSTLTLSKADYEKHKVYACEVTHQGLSSPVTKSFNRGEC

SEQ ID NO: 3371 - protein, 112 aa, synthetic construct
  REGION 1..112: note = Description of Artificial Sequence: Synthetic polypeptide
  REGION 1..112: note = VL of XENP020853
DIVLTQTPLSLPVTPGEPASISCRSSQSLLNSRTRKNYLAWYLQKPGQSPQLLIYWASTRESGVPDRFTGSGSGTDFTLKISRVEAEDVGVYYCKQSYSLRTFGGGTKVEIK

SEQ ID NO: 3372 - protein, 17 aa, synthetic construct
  REGION 1..17: note = Description of Artificial Sequence: Synthetic peptide
  REGION 1..17: note = XENP020853 vlCDR1
RSSQSLLNSRTRKNYLA

SEQ ID NO: 3373 - protein, 7 aa, synthetic construct
  REGION 1..7: note = Description of Artificial Sequence: Synthetic peptide
  REGION 1..7: note = XENP020853 vlCDR2
WASTRES

SEQ ID NO: 3374 - protein, 8 aa, synthetic construct
  REGION 1..8: note = Description of Artificial Sequence: Synthetic peptide
  REGION 1..8: note = XENP020853 vlCDR3
KQSYSLRT

SEQ ID NO: 3375 - protein, 446 aa, synthetic construct; identical to SEQ ID NO: 3365
  REGION 1..446: note = Description of Artificial Sequence: Synthetic polypeptide
  REGION 1..446: note = XENP020854 3H3_H1L2_IgG1_PVA_/S267K Heavy Chain

SEQ ID NO: 3376 - protein, 117 aa, synthetic construct; identical to SEQ ID NO: 3366
  REGION 1..117: note = Description of Artificial Sequence: Synthetic polypeptide
  REGION 1..117: note = VH of XENP020854

SEQ ID NO: 3377 - protein, 5 aa, synthetic construct
  REGION 1..5: note = Description of Artificial Sequence: Synthetic peptide
  REGION 1..5: note = XENP020854 vhCDR1
GYGVN

SEQ ID NO: 3378 - protein, 16 aa, synthetic construct
  REGION 1..16: note = Description of Artificial Sequence: Synthetic peptide
  REGION 1..16: note = XENP020854 vhCDR2
MIWGDGSTDYNSALKS

SEQ ID NO: 3379 - protein, 9 aa, synthetic construct
  REGION 1..9: note = Description of Artificial Sequence: Synthetic peptide
  REGION 1..9: note = XENP020854 vhCDR3
SYYTSDEDY

SEQ ID NO: 3380 - protein, 219 aa, synthetic construct
  REGION 1..219: note = Description of Artificial Sequence: Synthetic polypeptide
  REGION 1..219: note = XENP020854 3H3_H1L2_IgG1_PVA_/S267K Light Chain
DIVLTQSPDSLAVSLGERATINCKSSQSLLNSRTRKNYLAWYQQKPGQSPKLLIYWASTRESGVPDRFTGSGSGTDFTLTISSLQAEDVAVYYCKQSYSLRTFGGGTKVEIKRTVAAPSVFIFPPSDEQLKSGTASVVCLLNNFYPREAKVQWKVDNALQSGNSQESVTEQDSKDSTYSLSSTLTLSKADYEKHKVYACEVTHQGLSSPVTKSFNRGEC

SEQ ID NO: 3381 - protein, 112 aa, synthetic construct
  REGION 1..112: note = Description of Artificial Sequence: Synthetic polypeptide
  REGION 1..112: note = VL of XENP020854
DIVLTQSPDSLAVSLGERATINCKSSQSLLNSRTRKNYLAWYQQKPGQSPKLLIYWASTRESGVPDRFTGSGSGTDFTLTISSLQAEDVAVYYCKQSYSLRTFGGGTKVEIK

SEQ ID NO: 3382 - protein, 17 aa, synthetic construct
  REGION 1..17: note = Description of Artificial Sequence: Synthetic peptide
  REGION 1..17: note = XENP020854 vlCDR1
KSSQSLLNSRTRKNYLA

SEQ ID NO: 3383 - protein, 7 aa, synthetic construct
  REGION 1..7: note = Description of Artificial Sequence: Synthetic peptide
  REGION 1..7: note = XENP020854 vlCDR2
WASTRES

SEQ ID NO: 3384 - protein, 8 aa, synthetic construct
  REGION 1..8: note = Description of Artificial Sequence: Synthetic peptide
  REGION 1..8: note = XENP020854 vlCDR3
KQSYSLRT

SEQ ID NO: 3385 - protein, 446 aa, synthetic construct
  REGION 1..446: note = Description of Artificial Sequence: Synthetic polypeptide
  REGION 1..446: note = XENP020855 3H3_H2L1_IgG1_PVA_/S267K Heavy Chain
QVTLKESGPVLVKPTETLTLTCTVSGFSLNGYGVNWVRQPPGKGLEWLAMIWGDGSTDYNSALKSRLTISKDNSKSQVVLTMTNMDPVDTATYYCARSYYTSDFDYWGQGTLVTVSSASTKGPSVFPLAPSSKSTSGGTAALGCLVKDYFPEPVTVSWNSGALTSGVHTFPAVLQSSGLYSLSSVVTVPSSSLGTQTYICNVNHKPSNTKVDKKVEPKSCDKTHTCPPCPAPPVAGPSVFLFPPKPKDTLMISRTPEVTCVVVDVKHEDPEVKFNWYVDGVEVHNAKTKPREEQYNSTYRVVSVLTVLHQDWLNGKEYKCKVSNKALPAPIEKTISKAKGQPREPQVYTLPPSREEMTKNQVSLTCLVKGFYPSDIAVEWESNGQPENNYKTTPPVLDSDGSFFLYSKLTVDKSRWQQGNVFSCSVMHEALHNHYTQKSLSLSPGK

SEQ ID NO: 3386 - protein, 117 aa, synthetic construct
  REGION 1..117: note = Description of Artificial Sequence: Synthetic polypeptide
  REGION 1..117: note = VH of XENP020855
QVTLKESGPVLVKPTETLTLTCTVSGFSLNGYGVNWVRQPPGKGLEWLAMIWGDGSTDYNSALKSRLTISKDNSKSQVVLTMTNMDPVDTATYYCARSYYTSDFDYWGQGTLVTVSS

SEQ ID NO: 3387 - protein, 5 aa, synthetic construct
  REGION 1..5: note = Description of Artificial Sequence: Synthetic peptide
  REGION 1..5: note = XENP020855 vhCDR1
GYGVN

SEQ ID NO: 3388 - protein, 16 aa, synthetic construct
  REGION 1..16: note = Description of Artificial Sequence: Synthetic peptide
  REGION 1..16: note = XENP020855 vhCDR2
MIWGDGSTDYNSALKS

SEQ ID NO: 3389 - protein, 9 aa, synthetic construct
  REGION 1..9: note = Description of Artificial Sequence: Synthetic peptide
  REGION 1..9: note = XENP020855 vhCDR3
SYYTSDFDY

SEQ ID NO: 3390 - protein, 219 aa, synthetic construct; identical to SEQ ID NO: 3370
  REGION 1..219: note = Description of Artificial Sequence: Synthetic polypeptide
  REGION 1..219: note = XENP020855 3H3_H2L1_IgG1_PVA_/S267K Light Chain

SEQ ID NO: 3391 - protein, 112 aa, synthetic construct; identical to SEQ ID NO: 3371
  REGION 1..112: note = Description of Artificial Sequence: Synthetic polypeptide
  REGION 1..112: note = VL of XENP020855

SEQ ID NO: 3392 - protein, 17 aa, synthetic construct
  REGION 1..17: note = Description of Artificial Sequence: Synthetic peptide
  REGION 1..17: note = XENP020855 vlCDR1
RSSQSLLNSRTRKNYLA

SEQ ID NO: 3393 - protein, 7 aa, synthetic construct
  REGION 1..7: note = Description of Artificial Sequence: Synthetic peptide
  REGION 1..7: note = XENP020855 vlCDR2
WASTRES

SEQ ID NO: 3394 - protein, 8 aa, synthetic construct
  REGION 1..8: note = Description of Artificial Sequence: Synthetic peptide
  REGION 1..8: note = XENP020855 vlCDR3
KQSYSLRT

SEQ ID NO: 3395 - protein, 446 aa, synthetic construct; identical to SEQ ID NO: 3385
  REGION 1..446: note = Description of Artificial Sequence: Synthetic polypeptide
  REGION 1..446: note = XENP020856 3H3_H2L2_IgG1_PVA_/S267K Heavy Chain

SEQ ID NO: 3396 - protein, 117 aa, synthetic construct; identical to SEQ ID NO: 3386
  REGION 1..117: note = Description of Artificial Sequence: Synthetic polypeptide
  REGION 1..117: note = VH of XENP020856

SEQ ID NO: 3397 - protein, 5 aa, synthetic construct
  REGION 1..5: note = Description of Artificial Sequence: Synthetic peptide
  REGION 1..5: note = XENP020856 vhCDR1
GYGVN

SEQ ID NO: 3398 - protein, 16 aa, synthetic construct
  REGION 1..16: note = Description of Artificial Sequence: Synthetic peptide
  REGION 1..16: note = XENP020856 vhCDR2
MIWGDGSTDYNSALKS

SEQ ID NO: 3399 - protein, 9 aa, synthetic construct
  REGION 1..9: note = Description of Artificial Sequence: Synthetic peptide
  REGION 1..9: note = XENP020856 vhCDR3
SYYTSDFDY

SEQ ID NO: 3400 - protein, 219 aa, synthetic construct; identical to SEQ ID NO: 3380
  REGION 1..219: note = Description of Artificial Sequence: Synthetic polypeptide
  REGION 1..219: note = XENP020856 3H3_H2L2_IgG1_PVA_/S267K Light Chain

SEQ ID NO: 3401 - protein, 112 aa, synthetic construct; identical to SEQ ID NO: 3381
  REGION 1..112: note = Description of Artificial Sequence: Synthetic polypeptide
  REGION 1..112: note = VL of XENP020856

SEQ ID NO: 3402 - protein, 17 aa, synthetic construct
  REGION 1..17: note = Description of Artificial Sequence: Synthetic peptide
  REGION 1..17: note = XENP020856 vlCDR1
KSSQSLLNSRTRKNYLA

SEQ ID NO: 3403 - protein, 7 aa, synthetic construct
  REGION 1..7: note = Description of Artificial Sequence: Synthetic peptide
  REGION 1..7: note = XENP020856 vlCDR2
WASTRES

SEQ ID NO: 3404 - protein, 8 aa, synthetic construct
  REGION 1..8: note = Description of Artificial Sequence: Synthetic peptide
  REGION 1..8: note = XENP020856 vlCDR3
KQSYSLRT

SEQ ID NO: 3405 - protein, 446 aa, synthetic construct
  REGION 1..446: note = Description of Artificial Sequence: Synthetic polypeptide
  REGION 1..446: note = XENP020857 3H3_H3L1_IgG1_PVA_/S267K Heavy Chain
EVQLLESGGGLVQPGGSLRLSCAVSGFSLNGYGVNWVRQAPGKGLEWVSMIWGDGSTDYNSAVKGRFTISKDNSKSTVYLQMNSLRAEDTAVYYCARSYYTSDEDYWGQGTLVTVSSASTKGPSVFPLAPSSKSTSGGTAALGCLVKDYFPEPVTVSWNSGALTSGVHTFPAVLQSSGLYSLSSVVTVPSSSLGTQTYICNVNHKPSNTKVDKKVEPKSCDKTHTCPPCPAPPVAGPSVFLFPPKPKDTLMISRTPEVTCVVVDVKHEDPEVKFNWYVDGVEVHNAKTKPREEQYNSTYRVVSVLTVLHQDWLNGKEYKCKVSNKALPAPIEKTISKAKGQPREPQVYTLPPSREEMTKNQVSLTCLVKGFYPSDIAVEWESNGQPENNYKTTPPVLDSDGSFFLYSKLTVDKSRWQQGNVFSCSVMHEALHNHYTQKSLSLSPGK

SEQ ID NO: 3406 - protein, 117 aa, synthetic construct
  REGION 1..117: note = Description of Artificial Sequence: Synthetic polypeptide
  REGION 1..117: note = VH of XENP020857
EVQLLESGGGLVQPGGSLRLSCAVSGFSLNGYGVNWVRQAPGKGLEWVSMIWGDGSTDYNSAVKGRFTISKDNSKSTVYLQMNSLRAEDTAVYYCARSYYTSDEDYWGQGTLVTVSS

SEQ ID NO: 3407 - protein, 5 aa, synthetic construct
  REGION 1..5: note = Description of Artificial Sequence: Synthetic peptide
  REGION 1..5: note = XENP020857 vhCDR1
GYGVN

SEQ ID NO: 3408 - protein, 16 aa, synthetic construct
  REGION 1..16: note = Description of Artificial Sequence: Synthetic peptide
  REGION 1..16: note = XENP020857 vhCDR2
MIWGDGSTDYNSAVKG

SEQ ID NO: 3409 - protein, 9 aa, synthetic construct
  REGION 1..9: note = Description of Artificial Sequence: Synthetic peptide
  REGION 1..9: note = XENP020857 vhCDR3
SYYTSDEDY

SEQ ID NO: 3410 - protein, 219 aa, synthetic construct; identical to SEQ ID NO: 3370
  REGION 1..219: note = Description of Artificial Sequence: Synthetic polypeptide
  REGION 1..219: note = XENP020857 3H3_H3L1_IgG1_PVA_/S267K Light Chain

SEQ ID NO: 3411 - protein, 112 aa, synthetic construct; identical to SEQ ID NO: 3371
  REGION 1..112: note = Description of Artificial Sequence: Synthetic polypeptide
  REGION 1..112: note = VL of XENP020857

SEQ ID NO: 3412 - protein, 17 aa, synthetic construct
  REGION 1..17: note = Description of Artificial Sequence: Synthetic peptide
  REGION 1..17: note = XENP020857 vlCDR1
RSSQSLLNSRTRKNYLA

SEQ ID NO: 3413 - protein, 7 aa, synthetic construct
  REGION 1..7: note = Description of Artificial Sequence: Synthetic peptide
  REGION 1..7: note = XENP020857 vlCDR2
WASTRES

SEQ ID NO: 3414 - protein, 8 aa, synthetic construct
  REGION 1..8: note = Description of Artificial Sequence: Synthetic peptide
  REGION 1..8: note = XENP020857 vlCDR3
KQSYSLRT

SEQ ID NO: 3415 - protein, 446 aa, synthetic construct; identical to SEQ ID NO: 3405
  REGION 1..446: note = Description of Artificial Sequence: Synthetic polypeptide
  REGION 1..446: note = XENP020858 3H3_H3L2_IgG1_PVA_/S267K Heavy Chain

SEQ ID NO: 3416 - protein, 117 aa, synthetic construct; identical to SEQ ID NO: 3406
  REGION 1..117: note = Description of Artificial Sequence: Synthetic polypeptide
  REGION 1..117: note = VH of XENP020858

SEQ ID NO: 3417 - protein, 5 aa, synthetic construct
  REGION 1..5: note = Description of Artificial Sequence: Synthetic peptide
  REGION 1..5: note = XENP020858 vhCDR1
GYGVN

SEQ ID NO: 3418 - protein, 16 aa, synthetic construct
  REGION 1..16: note = Description of Artificial Sequence: Synthetic peptide
  REGION 1..16: note = XENP020858 vhCDR2
MIWGDGSTDYNSAVKG

SEQ ID NO: 3419 - protein, 9 aa, synthetic construct
  REGION 1..9: note = Description of Artificial Sequence: Synthetic peptide
  REGION 1..9: note = XENP020858 vhCDR3
SYYTSDEDY

SEQ ID NO: 3420 - protein, 219 aa, synthetic construct; identical to SEQ ID NO: 3380
  REGION 1..219: note = Description of Artificial Sequence: Synthetic polypeptide
  REGION 1..219: note = XENP020858 3H3_H3L2_IgG1_PVA_/S267K Light Chain

SEQ ID NO: 3421 - protein, 112 aa, synthetic construct; identical to SEQ ID NO: 3381
  REGION 1..112: note = Description of Artificial Sequence: Synthetic polypeptide
  REGION 1..112: note = VL of XENP020858

SEQ ID NO: 3422 - protein, 17 aa, synthetic construct
  REGION 1..17: note = Description of Artificial Sequence: Synthetic peptide
  REGION 1..17: note = XENP020858 vlCDR1
KSSQSLLNSRTRKNYLA

SEQ ID NO: 3423 - protein, 7 aa, synthetic construct
  REGION 1..7: note = Description of Artificial Sequence: Synthetic peptide
  REGION 1..7: note = XENP020858 vlCDR2
WASTRES

SEQ ID NO: 3424 - protein, 8 aa, synthetic construct
  REGION 1..8: note = Description of Artificial Sequence: Synthetic peptide
  REGION 1..8: note = XENP020858 vlCDR3
KQSYSLRT

SEQ ID NO: 3425 - protein, 446 aa, synthetic construct
  REGION 1..446: note = Description of Artificial Sequence: Synthetic polypeptide
  REGION 1..446: note = XENP020859 3H3_H4L1_IgG1_PVA_/S267K Heavy Chain
QVQLQESGPGLVKPSETLSLTCTVSGFSLNGYGVNWVRQPPGKGLEWIGMIWGDGSTDYNPSLKSRVTISKDNSKSQVSLKLSSVTAADTAVYYCARSYYTSDEDYWGQGTLVTVSSASTKGPSVFPLAPSSKSTSGGTAALGCLVKDYFPEPVTVSWNSGALTSGVHTFPAVLQSSGLYSLSSVVTVPSSSLGTQTYICNVNHKPSNTKVDKKVEPKSCDKTHTCPPCPAPPVAGPSVFLFPPKPKDTLMISRTPEVTCVVVDVKHEDPEVKFNWYVDGVEVHNAKTKPREEQYNSTYRVVSVLTVLHQDWLNGKEYKCKVSNKALPAPIEKTISKAKGQPREPQVYTLPPSREEMTKNQVSLTCLVKGFYPSDIAVEWESNGQPENNYKTTPPVLDSDGSFFLYSKLTVDKSRWQQGNVFSCSVMHEALHNHYTQKSLSLSPGK

SEQ ID NO: 3426 - protein, 117 aa, synthetic construct
  REGION 1..117: note = Description of Artificial Sequence: Synthetic polypeptide
  REGION 1..117: note = VH of XENP020859
QVQLQESGPGLVKPSETLSLTCTVSGFSLNGYGVNWVRQPPGKGLEWIGMIWGDGSTDYNPSLKSRVTISKDNSKSQVSLKLSSVTAADTAVYYCARSYYTSDEDYWGQGTLVTVSS

SEQ ID NO: 3427 - protein, 5 aa, synthetic construct
  REGION 1..5: note = Description of Artificial Sequence: Synthetic peptide
  REGION 1..5: note = XENP020859 vhCDR1
GYGVN

SEQ ID NO: 3428 - protein, 16 aa, synthetic construct
  REGION 1..16: note = Description of Artificial Sequence: Synthetic peptide
  REGION 1..16: note = XENP020859 vhCDR2
MIWGDGSTDYNPSLKS

SEQ ID NO: 3429 - protein, 9 aa, synthetic construct
  REGION 1..9: note = Description of Artificial Sequence: Synthetic peptide
  REGION 1..9: note = XENP020859 vhCDR3
SYYTSDEDY

SEQ ID NO: 3430 - protein, 219 aa, synthetic construct; identical to SEQ ID NO: 3370
  REGION 1..219: note = Description of Artificial Sequence: Synthetic polypeptide
  REGION 1..219: note = XENP020859 3H3_H4L1_IgG1_PVA_/S267K Light Chain

SEQ ID NO: 3431 - protein, 112 aa, synthetic construct; identical to SEQ ID NO: 3371
  REGION 1..112: note = Description of Artificial Sequence: Synthetic polypeptide
  REGION 1..112: note = VL of XENP020859

SEQ ID NO: 3432 - protein, 17 aa, synthetic construct
  REGION 1..17: note = Description of Artificial Sequence: Synthetic peptide
  REGION 1..17: note = XENP020859 vlCDR1
RSSQSLLNSRTRKNYLA

SEQ ID NO: 3433 - protein, 7 aa, synthetic construct
  REGION 1..7: note = Description of Artificial Sequence: Synthetic peptide
  REGION 1..7: note = XENP020859 vlCDR2
WASTRES

SEQ ID NO: 3434 - protein, 8 aa, synthetic construct
  REGION 1..8: note = Description of Artificial Sequence: Synthetic peptide
  REGION 1..8: note = XENP020859 vlCDR3
KQSYSLRT

SEQ ID NO: 3435 - protein, 446 aa, synthetic construct; identical to SEQ ID NO: 3425
  REGION 1..446: note = Description of Artificial Sequence: Synthetic polypeptide
  REGION 1..446: note = XENP020860 3H3_H4L2_IgG1_PVA_/S267K Heavy Chain

SEQ ID NO: 3436 - protein, 117 aa, synthetic construct; identical to SEQ ID NO: 3426
  REGION 1..117: note = Description of Artificial Sequence: Synthetic polypeptide
  REGION 1..117: note = VH of XENP020860

SEQ ID NO: 3437 - protein, 5 aa, synthetic construct
  REGION 1..5: note = Description of Artificial Sequence: Synthetic peptide
  REGION 1..5: note = XENP020860 vhCDR1
GYGVN

SEQ ID NO: 3438 - protein, 16 aa, synthetic construct
  REGION 1..16: note = Description of Artificial Sequence: Synthetic peptide
  REGION 1..16: note = XENP020860 vhCDR2
MIWGDGSTDYNPSLKS

SEQ ID NO: 3439 - protein, 9 aa, synthetic construct
  REGION 1..9: note = Description of Artificial Sequence: Synthetic peptide
  REGION 1..9: note = XENP020860 vhCDR3
SYYTSDEDY

SEQ ID NO: 3440 - protein, 219 aa, synthetic construct; identical to SEQ ID NO: 3380
  REGION 1..219: note = Description of Artificial Sequence: Synthetic polypeptide
  REGION 1..219: note = XENP020860 3H3_H4L2_IgG1_PVA_/S267K Light Chain

SEQ ID NO: 3441 - protein, 112 aa, synthetic construct; identical to SEQ ID NO: 3381
  REGION 1..112: note = Description of Artificial Sequence: Synthetic polypeptide
  REGION 1..112: note = VL of XENP020860

SEQ ID NO: 3442 - protein, 17 aa, synthetic construct
  REGION 1..17: note = Description of Artificial Sequence: Synthetic peptide
  REGION 1..17: note = XENP020860 vlCDR1
KSSQSLLNSRTRKNYLA

SEQ ID NO: 3443 - protein, 7 aa, synthetic construct
  REGION 1..7: note = Description of Artificial Sequence: Synthetic peptide
  REGION 1..7: note = XENP020860 vlCDR2
WASTRES

SEQ ID NO: 3444 - protein, 8 aa, synthetic construct
  REGION 1..8: note = Description of Artificial Sequence: Synthetic peptide
  REGION 1..8: note = XENP020860 vlCDR3
KQSYSLRT

SEQ ID NO: 3445 - protein, 447 aa, synthetic construct
  REGION 1..447: note = Description of Artificial Sequence: Synthetic polypeptide
  REGION 1..447: note = XENP020861 7B11_H1L1_IgG1_PVA_/S267K Heavy Chain
QVQLVQSGAEVKKPGASVKVSCKVSGFSLTSYAVNWVRQAPGQGLEWMGVIWSGGSTDYNAKFQGRVTMTKDNSKSTVYMELSSLRSEDTAVYYCVSLYYRYDGFDYWGQGTLVTVSSASTKGPSVFPLAPSSKSTSGGTAALGCLVKDYFPEPVTVSWNSGALTSGVHTFPAVLQSSGLYSLSSVVTVPSSSLGTQTYICNVNHKPSNTKVDKKVEPKSCDKTHTCPPCPAPPVAGPSVFLFPPKPKDTLMISRTPEVTCVVVDVKHEDPEVKFNWYVDGVEVHNAKTKPREEQYNSTYRVVSVLTVLHQDWLNGKEYKCKVSNKALPAPIEKTISKAKGQPREPQVYTLPPSREEMTKNQVSLTCLVKGFYPSDIAVEWESNGQPENNYKTTPPVLDSDGSFFLYSKLTVDKSRWQQGNVFSCSVMHEALHNHYTQKSLSLSPGK

SEQ ID NO: 3446 - protein, 118 aa, synthetic construct
  REGION 1..118: note = Description of Artificial Sequence: Synthetic polypeptide
  REGION 1..118: note = VH of XENP020861
QVQLVQSGAEVKKPGASVKVSCKVSGFSLTSYAVNWVRQAPGQGLEWMGVIWSGGSTDYNAKFQGRVTMTKDNSKSTVYMELSSLRSEDTAVYYCVSLYYRYDGFDYWGQGTLVTVSS

SEQ ID NO: 3447 - protein, 5 aa, synthetic construct
  REGION 1..5: note = Description of Artificial Sequence: Synthetic peptide
  REGION 1..5: note = XENP020861 vhCDR1
SYAVN

SEQ ID NO: 3448 - protein, 16 aa, synthetic construct
  REGION 1..16: note = Description of Artificial Sequence: Synthetic peptide
  REGION 1..16: note = XENP020861 vhCDR2
VIWSGGSTDYNAKFQG

SEQ ID NO: 3449 - protein, 10 aa, synthetic construct
  REGION 1..10: note = Description of Artificial Sequence: Synthetic peptide
  REGION 1..10: note = XENP020861 vhCDR3
LYYRYDGFDY

SEQ ID NO: 3450 - protein, 214 aa, synthetic construct
  REGION 1..214: note = Description of Artificial Sequence: Synthetic polypeptide
  REGION 1..214: note = XENP020861 7B11_H1L1_IgG1_PVA_/S267K Light Chain
DIVLTQSPSSLSASVGDRVTITCRASQNVGTHVARYQQKPGKSPKALVYSASYRYSGVPDRFTGSGSGTDFTLTISSLQPEDFATYFCQQYNSYPLTFGGGTKVEIKRTVAAPSVFIFPPSDEQLKSGTASVVCLLNNFYPREAKVQWKVDNALQSGNSQESVTEQDSKDSTYSLSSTLTLSKADYEKHKVYACEVTHQGLSSPVTKSFNRGEC

SEQ ID NO: 3451 - protein, 107 aa, synthetic construct
  REGION 1..107: note = Description of Artificial Sequence: Synthetic polypeptide
  REGION 1..107: note = VL of XENP020861
DIVLTQSPSSLSASVGDRVTITCRASQNVGTHVARYQQKPGKSPKALVYSASYRYSGVPDRFTGSGSGTDFTLTISSLQPEDFATYFCQQYNSYPLTFGGGTKVEIK

SEQ ID NO: 3452 - protein, 11 aa, synthetic construct
  REGION 1..11: note = Description of Artificial Sequence: Synthetic peptide
  REGION 1..11: note = XENP020861 vlCDR1
RASQNVGTHVA

SEQ ID NO: 3453 - protein, 7 aa, synthetic construct
  REGION 1..7: note = Description of Artificial Sequence: Synthetic peptide
  REGION 1..7: note = XENP020861 vlCDR2
SASYRYS

SEQ ID NO: 3454 - protein, 9 aa, synthetic construct
  REGION 1..9: note = Description of Artificial Sequence: Synthetic peptide
  REGION 1..9: note = XENP020861 vlCDR3
QQYNSYPLT

SEQ ID NO: 3455 - protein, 447 aa, synthetic construct; identical to SEQ ID NO: 3445
  REGION 1..447: note = Description of Artificial Sequence: Synthetic polypeptide
  REGION 1..447: note = XENP020862 7B11_H1L2_IgG1_PVA_/S267K Heavy Chain

SEQ ID NO: 3456 - protein, 118 aa, synthetic construct; identical to SEQ ID NO: 3446
  REGION 1..118: note = Description of Artificial Sequence: Synthetic polypeptide
  REGION 1..118: note = VH of XENP020862

SEQ ID NO: 3457 - protein, 5 aa, synthetic construct
  REGION 1..5: note = Description of Artificial Sequence: Synthetic peptide
  REGION 1..5: note = XENP020862 vhCDR1
SYAVN

SEQ ID NO: 3458 - protein, 16 aa, synthetic construct
  REGION 1..16: note = Description of Artificial Sequence: Synthetic peptide
  REGION 1..16: note = XENP020862 vhCDR2
VIWSGGSTDYNAKFQG

SEQ ID NO: 3459 - protein, 10 aa, synthetic construct
  REGION 1..10: note = Description of Artificial Sequence: Synthetic peptide
  REGION 1..10: note = XENP020862 vhCDR3
LYYRYDGFDY

SEQ ID NO: 3460 - protein, 214 aa, synthetic construct
  REGION 1..214: note = Description of Artificial Sequence: Synthetic polypeptide
  REGION 1..214: note = XENP020862 7B11_H1L2_IgG1_PVA_/S267K Light Chain
DIVLTQSPDSLAVSLGERATINCKASQNVGTHVARYQQKPGQSPKALVYSASYRYSGVPDRFTGSGSGTDFTLTISSLQAEDVAVYFCQQYNSYPLTFGGGTKVEIKRTVAAPSVFIFPPSDEQLKSGTASVVCLLNNFYPREAKVQWKVDNALQSGNSQESVTEQDSKDSTYSLSSTLTLSKADYEKHKVYACEVTHQGLSSPVTKSFNRGEC

SEQ ID NO: 3461 - protein, 107 aa, synthetic construct
  REGION 1..107: note = Description of Artificial Sequence: Synthetic polypeptide
  REGION 1..107: note = VL of XENP020862
DIVLTQSPDSLAVSLGERATINCKASQNVGTHVARYQQKPGQSPKALVYSASYRYSGVPDRFTGSGSGTDFTLTISSLQAEDVAVYFCQQYNSYPLTFGGGTKVEIK

SEQ ID NO: 3462 - protein, 11 aa, synthetic construct
  REGION 1..11: note = Description of Artificial Sequence: Synthetic peptide
  REGION 1..11: note = XENP020862 vlCDR1
KASQNVGTHVA

SEQ ID NO: 3463 - protein, 7 aa, synthetic construct
  REGION 1..7: note = Description of Artificial Sequence: Synthetic peptide
  REGION 1..7: note = XENP020862 vlCDR2
SASYRYS

SEQ ID NO: 3464 - protein, 9 aa, synthetic construct
  REGION 1..9: note = Description of Artificial Sequence: Synthetic peptide
  REGION 1..9: note = XENP020862 vlCDR3
QQYNSYPLT

SEQ ID NO: 3465 - protein, 447 aa, synthetic construct
  REGION 1..447: note = Description of Artificial Sequence: Synthetic polypeptide
  REGION 1..447: note = XENP020863 7B11_H2L1_IgG1_PVA_/S267K Heavy Chain
EVQLVESGGGLVQPGGSLRLSCAVSGFSLTSYAVNWVRQAPGKGLEWVSVIWSGGSTDYNPSVKGRFTISKDNSKSTVYLQLNSLRAEDTAVYYCVSLYYRYDGFDYWGQGTLVTVSSASTKGPSVFPLAPSSKSTSGGTAALGCLVKDYFPEPVTVSWNSGALTSGVHTFPAVLQSSGLYSLSSVVTVPSSSLGTQTYICNVNHKPSNTKVDKKVEPKSCDKTHTCPPCPAPPVAGPSVFLFPPKPKDTLMISRTPEVTCVVVDVKHEDPEVKFNWYVDGVEVHNAKTKPREEQYNSTYRVVSVLTVLHQDWLNGKEYKCKVSNKALPAPIEKTISKAKGQPREPQVYTLPPSREEMTKNQVSLTCLVKGFYPSDIAVEWESNGQPENNYKTTPPVLDSDGSFFLYSKLTVDKSRWQQGNVFSCSVMHEALHNHYTQKSLSLSPGK

SEQ ID NO: 3466 - protein, 118 aa, synthetic construct
  REGION 1..118: note = Description of Artificial Sequence: Synthetic polypeptide
  REGION 1..118: note = VH of XENP020863
EVQLVESGGGLVQPGGSLRLSCAVSGFSLTSYAVNWVRQAPGKGLEWVSVIWSGGSTDYNPSVKGRFTISKDNSKSTVYLQLNSLRAEDTAVYYCVSLYYRYDGFDYWGQGTLVTVSS

SEQ ID NO: 3467 - protein, 5 aa, synthetic construct
  REGION 1..5: note = Description of Artificial Sequence: Synthetic peptide
  REGION 1..5: note = XENP020863 vhCDR1
SYAVN

SEQ ID NO: 3468 - protein, 16 aa, synthetic construct
  REGION 1..16: note = Description of Artificial Sequence: Synthetic peptide
  REGION 1..16: note = XENP020863 vhCDR2
VIWSGGSTDYNPSVKG

SEQ ID NO: 3469 - protein, 10 aa, synthetic construct
  REGION 1..10: note = Description of Artificial Sequence: Synthetic peptide
  REGION 1..10: note = XENP020863 vhCDR3
LYYRYDGFDY

SEQ ID NO: 3470 - protein, 214 aa, synthetic construct; identical to SEQ ID NO: 3450
  REGION 1..214: note = Description of Artificial Sequence: Synthetic polypeptide
  REGION 1..214: note = XENP020863 7B11_H2L1_IgG1_PVA_/S267K Light Chain

SEQ ID NO: 3471 - protein, 107 aa, synthetic construct; identical to SEQ ID NO: 3451
  REGION 1..107: note = Description of Artificial Sequence: Synthetic polypeptide
  REGION 1..107: note = VL of XENP020863

SEQ ID NO: 3472 - protein, 11 aa, synthetic construct
  REGION 1..11: note = Description of Artificial Sequence: Synthetic peptide
  REGION 1..11: note = XENP020863 vlCDR1
RASQNVGTHVA

SEQ ID NO: 3473 - protein, 7 aa, synthetic construct
  REGION 1..7: note = Description of Artificial Sequence: Synthetic peptide
  REGION 1..7: note = XENP020863 vlCDR2
SASYRYS

SEQ ID NO: 3474 - protein, 9 aa, synthetic construct
  REGION 1..9: note = Description of Artificial Sequence: Synthetic peptide
  REGION 1..9: note = XENP020863 vlCDR3
QQYNSYPLT

SEQ ID NO: 3475 - protein, 447 aa, synthetic construct; identical to SEQ ID NO: 3465
  REGION 1..447: note = Description of Artificial Sequence: Synthetic polypeptide
  REGION 1..447: note = XENP020864 7B11_H2L2_IgG1_PVA_/S267K Heavy Chain

SEQ ID NO: 3476 - protein, 118 aa, synthetic construct; identical to SEQ ID NO: 3466
  REGION 1..118: note = Description of Artificial Sequence: Synthetic polypeptide
  REGION 1..118: note = VH of XENP020864

SEQ ID NO: 3477 - protein, 5 aa, synthetic construct
  REGION 1..5: note = Description of Artificial Sequence: Synthetic peptide
  REGION 1..5: note = XENP020864 vhCDR1
SYAVN

SEQ ID NO: 3478 - protein, 16 aa, synthetic construct
  REGION 1..16: note = Description of Artificial Sequence: Synthetic peptide
  REGION 1..16: note = XENP020864 vhCDR2
VIWSGGSTDYNPSVKG

SEQ ID NO: 3479 - protein, 10 aa, synthetic construct
  REGION 1..10: note = Description of Artificial Sequence: Synthetic peptide
  REGION 1..10: note = XENP020864 vhCDR3
LYYRYDGFDY

SEQ ID NO: 3480 - protein, 214 aa, synthetic construct; identical to SEQ ID NO: 3460
  REGION 1..214: note = Description of Artificial Sequence: Synthetic polypeptide
  REGION 1..214: note = XENP020864 7B11_H2L2_IgG1_PVA_/S267K Light Chain

SEQ ID NO: 3481 - protein, 107 aa, synthetic construct; identical to SEQ ID NO: 3461
  REGION 1..107: note = Description of Artificial Sequence: Synthetic polypeptide
  REGION 1..107: note = VL of XENP020864

SEQ ID NO: 3482 - protein, 11 aa, synthetic construct
  REGION 1..11: note = Description of Artificial Sequence: Synthetic peptide
  REGION 1..11: note = XENP020864 vlCDR1
KASQNVGTHVA

SEQ ID NO: 3483 - protein, 7 aa, synthetic construct
  REGION 1..7: note = Description of Artificial Sequence: Synthetic peptide
  REGION 1..7: note = XENP020864 vlCDR2
SASYRYS

SEQ ID NO: 3484 - protein, 9 aa, synthetic construct
  REGION 1..9: note = Description of Artificial Sequence: Synthetic peptide
  REGION 1..9: note = XENP020864 vlCDR3
QQYNSYPLT

SEQ ID NO: 3485 - protein, 446 aa, synthetic construct
  REGION 1..446: note = Description of Artificial Sequence: Synthetic polypeptide
  REGION 1..446: note = XENP020865 7C2_H1L1_IgG1_PVA_/S267K Heavy Chain
EVQVLESGGGLVQPGGSLRLSCAASGFTFSRYAVSWVRQAPGKRLEWVSSISSGGSTYYPDSVKGRFTISRDNSKNTLYLQLNSLRAEDTAVYYCARGDYEGYFDYWGQGTLVTVSSASTKGPSVFPLAPSSKSTSGGTAALGCLVKDYFPEPVTVSWNSGALTSGVHTFPAVLQSSGLYSLSSVVTVPSSSLGTQTYICNVNHKPSNTKVDKKVEPKSCDKTHTCPPCPAPPVAGPSVFLFPPKPKDTLMISRTPEVTCVVVDVKHEDPEVKFNWYVDGVEVHNAKTKPREEQYNSTYRVVSVLTVLHQDWLNGKEYKCKVSNKALPAPIEKTISKAKGQPREPQVYTLPPSREEMTKNQVSLTCLVKGFYPSDIAVEWESNGQPENNYKTTPPVLDSDGSFFLYSKLTVDKSRWQQGNVFSCSVMHEALHNHYTQKSLSLSPGK

SEQ ID NO: 3486 - protein, 117 aa, synthetic construct
  REGION 1..117: note = Description of Artificial Sequence: Synthetic polypeptide
  REGION 1..117: note = VH of XENP020865
EVQVLESGGGLVQPGGSLRLSCAASGFTFSRYAVSWVRQAPGKRLEWVSSISSGGSTYYPDSVKGRFTISRDNSKNTLYLQLNSLRAEDTAVYYCARGDYEGYFDYWGQGTLVTVSS

SEQ ID NO: 3487 - protein, 5 aa, synthetic construct
  REGION 1..5: note = Description of Artificial Sequence: Synthetic peptide
  REGION 1..5: note = XENP020865 vhCDR1
RYAVS

SEQ ID NO: 3488 - protein, 16 aa, synthetic construct
  REGION 1..16: note = Description of Artificial Sequence: Synthetic peptide
  REGION 1..16: note = XENP020865 vhCDR2
SISSGGSTYYPDSVKG

SEQ ID NO: 3489 - protein, 9 aa, synthetic construct
  REGION 1..9: note = Description of Artificial Sequence: Synthetic peptide
  REGION 1..9: note = XENP020865 vhCDR3
GDYEGYFDY

SEQ ID NO: 3490 - protein, 220 aa, synthetic construct
  REGION 1..220: note = Description of Artificial Sequence: Synthetic polypeptide
  REGION 1..220: note = XENP020865 7C2_H1L1_IgG1_PVA_/S267K Light Chain
DIVLTQSPDSLAVSLGERATINCKSSQSLLNSINQKNYLAGYQQKPGQSPKLLVYFASTRESGVPDRFIGSGSGTDFTLTISSLQAEDVAVYFCQQHYSTPLTFGAGTKLEIKRTVAAPSVFIFPPSDEQLKSGTASVVCLLNNFYPREAKVQWKVDNALQSGNSQESVTEQDSKDSTYSLSSTLTLSKADYEKHKVYACEVTHQGLSSPVTKSFNRGEC

SEQ ID NO: 3491 - protein, 113 aa, synthetic construct
  REGION 1..113: note = Description of Artificial Sequence: Synthetic polypeptide
  REGION 1..113: note = VL of XENP020865
DIVLTQSPDSLAVSLGERATINCKSSQSLLNSINQKNYLAGYQQKPGQSPKLLVYFASTRESGVPDRFIGSGSGTDFTLTISSLQAEDVAVYFCQQHYSTPLTFGAGTKLEIK

SEQ ID NO: 3492 - protein, 17 aa, synthetic construct
  REGION 1..17: note = Description of Artificial Sequence: Synthetic peptide
  REGION 1..17: note = XENP020865 vlCDR1
KSSQSLLNSINQKNYLA

SEQ ID NO: 3493 - protein, 7 aa, synthetic construct
  REGION 1..7: note = Description of Artificial Sequence: Synthetic peptide
  REGION 1..7: note = XENP020865 vlCDR2
FASTRES

SEQ ID NO: 3494 - protein, 9 aa, synthetic construct
  REGION 1..9: note = Description of Artificial Sequence: Synthetic peptide
  REGION 1..9: note = XENP020865 vlCDR3
QQHYSTPLT

SEQ ID NO: 3495 - protein, 446 aa, synthetic construct; identical to SEQ ID NO: 3365
  REGION 1..446: note = Description of Artificial Sequence: Synthetic polypeptide
  REGION 1..446: note = XENP021188 3H3_H1_L1.1_IgG1_PVA_/S267K Heavy Chain

SEQ ID NO: 3496 - protein, 117 aa, synthetic construct; identical to SEQ ID NO: 3366
  REGION 1..117: note = Description of Artificial Sequence: Synthetic polypeptide
  REGION 1..117: note = VH of XENP021188

SEQ ID NO: 3497 - protein, 5 aa, synthetic construct
  REGION 1..5: note = Description of Artificial Sequence: Synthetic peptide
  REGION 1..5: note = XENP021188 vhCDR1
GYGVN

SEQ ID NO: 3498 - protein, 16 aa, synthetic construct
  REGION 1..16: note = Description of Artificial Sequence: Synthetic peptide
  REGION 1..16: note = XENP021188 vhCDR2
MIWGDGSTDYNSALKS

SEQ ID NO: 3499 - protein, 9 aa, synthetic construct
  REGION 1..9: note = Description of Artificial Sequence: Synthetic peptide
  REGION 1..9: note = XENP021188 vhCDR3
SYYTSDEDY

SEQ ID NO: 3500 - protein, 219 aa, synthetic construct
  REGION 1..219: note = Description of Artificial Sequence: Synthetic polypeptide
  REGION 1..219: note = XENP021188 3H3_H1_L1.1_IgG1_PVA_/S267K Light Chain
DIVMTQTPLSLPVTPGEPASISCRSSQSLLNSRTRKNYLAWYLQKPGQSPQLLIYWASTRESGVPDRFTGSGSGTDFTLKISRVEAEDVGVYYCKQSYSLRTFGGGTKVEIKRTVAAPSVFIFPPSDEQLKSGTASVVCLLNNFYPREAKVQWKVDNALQSGNSQESVTEQDSKDSTYSLSSTLTLSKADYEKHKVYACEVTHQGLSSPVTKSFNRGEC

SEQ ID NO: 3501 - protein, 112 aa, synthetic construct
  REGION 1..112: note = Description of Artificial Sequence: Synthetic polypeptide
  REGION 1..112: note = VL of XENP021188
DIVMTQTPLSLPVTPGEPASISCRSSQSLLNSRTRKNYLAWYLQKPGQSPQLLIYWASTRESGVPDRFTGSGSGTDFTLKISRVEAEDVGVYYCKQSYSLRTFGGGTKVEIK

SEQ ID NO: 3502 - protein, 17 aa, synthetic construct
  REGION 1..17: note = Description of Artificial Sequence: Synthetic peptide
  REGION 1..17: note = XENP021188 vlCDR1
RSSQSLLNSRTRKNYLA

SEQ ID NO: 3503 - protein, 7 aa, synthetic construct
  REGION 1..7: note = Description of Artificial Sequence: Synthetic peptide
  REGION 1..7: note = XENP021188 vlCDR2
WASTRES

SEQ ID NO: 3504 - protein, 8 aa, synthetic construct
  REGION 1..8: note = Description of Artificial Sequence: Synthetic peptide
  REGION 1..8: note = XENP021188 vlCDR3
KQSYSLRT

SEQ ID NO: 3505 - protein, 446 aa, synthetic construct; identical to SEQ ID NO: 3365
  REGION 1..446: note = Description of Artificial Sequence: Synthetic polypeptide
  REGION 1..446: note = XENP021189 3H3_H1_L2.1_IgG1_PVA_/S267K Heavy Chain

SEQ ID NO: 3506 - protein, 117 aa, synthetic construct; identical to SEQ ID NO: 3366
  REGION 1..117: note = Description of Artificial Sequence: Synthetic polypeptide
  REGION 1..117: note = VH of XENP021189

SEQ ID NO: 3507 - protein, 5 aa, synthetic construct
  REGION 1..5: note = Description of Artificial Sequence: Synthetic peptide
  REGION 1..5: note = XENP021189 vhCDR1
GYGVN

SEQ ID NO: 3508 - protein, 16 aa, synthetic construct
  REGION 1..16: note = Description of Artificial Sequence: Synthetic peptide
  REGION 1..16: note = XENP021189 vhCDR2
MIWGDGSTDYNSALKS

SEQ ID NO: 3509 - protein, 9 aa, synthetic construct
  REGION 1..9: note = Description of Artificial Sequence: Synthetic peptide
  REGION 1..9: note = XENP021189 vhCDR3
SYYTSDEDY

SEQ ID NO: 3510 - protein, 219 aa, synthetic construct
  REGION 1..219: note = Description of Artificial Sequence: Synthetic polypeptide
  REGION 1..219: note = XENP021189 3H3_H1_L2.1_IgG1_PVA_/S267K Light Chain
DIVMTQSPDSLAVSLGERATINCKSSQSLLNSRTRKNYLAWYQQKPGQSPKLLIYWASTRESGVPDRFTGSGSGTDFTLTISSLQAEDVAVYYCKQSYSLRTFGGGTKVEIKRTVAAPSVFIFPPSDEQLKSGTASVVCLLNNFYPREAKVQWKVDNALQSGNSQESVTEQDSKDSTYSLSSTLTLSKADYEKHKVYACEVTHQGLSSPVTKSFNRGEC

SEQ ID NO: 3511 - protein, 112 aa, synthetic construct
  REGION 1..112: note = Description of Artificial Sequence: Synthetic polypeptide
  REGION 1..112: note = VL of XENP021189
DIVMTQSPDSLAVSLGERATINCKSSQSLLNSRTRKNYLAWYQQKPGQSPKLLIYWASTRESGVPDRFTGSGSGTDFTLTISSLQAEDVAVYYCKQSYSLRTFGGGTKVEIK

SEQ ID NO: 3512 - protein, 17 aa, synthetic construct
  REGION 1..17: note = Description of Artificial Sequence: Synthetic peptide
  REGION 1..17: note = XENP021189 vlCDR1
KSSQSLLNSRTRKNYLA

SEQ ID NO: 3513 - protein, 7 aa, synthetic construct
  REGION 1..7: note = Description of Artificial Sequence: Synthetic peptide
  REGION 1..7: note = XENP021189 vlCDR2
WASTRES

SEQ ID NO: 3514 - protein, 8 aa, synthetic construct
  REGION 1..8: note = Description of Artificial Sequence: Synthetic peptide
  REGION 1..8: note = XENP021189 vlCDR3
KQSYSLRT

SEQ ID NO: 3515 - protein, 446 aa, synthetic construct; identical to SEQ ID NO: 3385
  REGION 1..446: note = Description of Artificial Sequence: Synthetic polypeptide
  REGION 1..446: note = XENP021190 3H3_H2_L1.1_IgG1_PVA_/S267K Heavy Chain

SEQ ID NO: 3516 - protein, 117 aa, synthetic construct; identical to SEQ ID NO: 3386
  REGION 1..117: note = Description of Artificial Sequence: Synthetic polypeptide
  REGION 1..117: note = VH of XENP021190

SEQ ID NO: 3517 - protein, 5 aa, synthetic construct
  REGION 1..5: note = Description of Artificial Sequence: Synthetic peptide
  REGION 1..5: note = XENP021190 vhCDR1
GYGVN

SEQ ID NO: 3518 - protein, 16 aa, synthetic construct
  REGION 1..16: note = Description of Artificial Sequence: Synthetic peptide
  REGION 1..16: note = XENP021190 vhCDR2
MIWGDGSTDYNSALKS

SEQ ID NO: 3519 - protein, 9 aa, synthetic construct
  REGION 1..9: note = Description of Artificial Sequence: Synthetic peptide
  REGION 1..9: note = XENP021190 vhCDR3
SYYTSDFDY

SEQ ID NO: 3520 - protein, 219 aa, synthetic construct; identical to SEQ ID NO: 3500
  REGION 1..219: note = Description of Artificial Sequence: Synthetic polypeptide
  REGION 1..219: note = XENP021190 3H3_H2_L1.1_IgG1_PVA_/S267K Light Chain

SEQ ID NO: 3521 - protein, 112 aa, synthetic construct; identical to SEQ ID NO: 3501
  REGION 1..112: note = Description of Artificial Sequence: Synthetic polypeptide
  REGION 1..112: note = VL of XENP021190

SEQ ID NO: 3522 - protein, 17 aa, synthetic construct
  REGION 1..17: note = Description of Artificial Sequence: Synthetic peptide
  REGION 1..17: note = XENP021190 vlCDR1
RSSQSLLNSRTRKNYLA

SEQ ID NO: 3523 - protein, 7 aa, synthetic construct
  REGION 1..7: note = Description of Artificial Sequence: Synthetic peptide
  REGION 1..7: note = XENP021190 vlCDR2
WASTRES

SEQ ID NO: 3524 - protein, 8 aa, synthetic construct
  REGION 1..8: note = Description of Artificial Sequence: Synthetic peptide
  REGION 1..8: note = XENP021190 vlCDR3
KQSYSLRT

SEQ ID NO: 3525 - protein, 446 aa, synthetic construct; identical to SEQ ID NO: 3385
  REGION 1..446: note = Description of Artificial Sequence: Synthetic polypeptide
  REGION 1..446: note = XENP021191 3H3_H2_L2.1_IgG1_PVA_/S267K Heavy Chain

SEQ ID NO: 3526 - protein, 117 aa, synthetic construct; identical to SEQ ID NO: 3386
  REGION 1..117: note = Description of Artificial Sequence: Synthetic polypeptide
  REGION 1..117: note = VH of XENP021191

SEQ ID NO: 3527 - protein, 5 aa, synthetic construct
  REGION 1..5: note = Description of Artificial Sequence: Synthetic peptide
  REGION 1..5: note = XENP021191 vhCDR1
GYGVN

SEQ ID NO: 3528 - protein, 16 aa, synthetic construct
  REGION 1..16: note = Description of Artificial Sequence: Synthetic peptide
  REGION 1..16: note = XENP021191 vhCDR2
MIWGDGSTDYNSALKS

SEQ ID NO: 3529 - protein, 9 aa, synthetic construct
  REGION 1..9: note = Description of Artificial Sequence: Synthetic peptide
  REGION 1..9: note = XENP021191 vhCDR3
SYYTSDFDY

SEQ ID NO: 3530 - protein, 219 aa, synthetic construct; identical to SEQ ID NO: 3510
  REGION 1..219: note = Description of Artificial Sequence: Synthetic polypeptide
  REGION 1..219: note = XENP021191 3H3_H2_L2.1_IgG1_PVA_/S267K Light Chain

SEQ ID NO: 3531 - protein, 112 aa, synthetic construct; identical to SEQ ID NO: 3511
  REGION 1..112: note = Description of Artificial Sequence: Synthetic polypeptide
  REGION 1..112: note = VL of XENP021191

SEQ ID NO: 3532 - protein, 17 aa, synthetic construct
  REGION 1..17: note = Description of Artificial Sequence: Synthetic peptide
  REGION 1..17: note = XENP021191 vlCDR1
KSSQSLLNSRTRKNYLA

SEQ ID NO: 3533 - protein, 7 aa, synthetic construct
  REGION 1..7: note = Description of Artificial Sequence: Synthetic peptide
  REGION 1..7: note = XENP021191 vlCDR2
WASTRES

SEQ ID NO: 3534 - protein, 8 aa, synthetic construct
  REGION 1..8: note = Description of Artificial Sequence: Synthetic peptide
  REGION 1..8: note = XENP021191 vlCDR3
KQSYSLRT

SEQ ID NO: 3535 - protein, 446 aa, synthetic construct; identical to SEQ ID NO: 3405
  REGION 1..446: note = Description of Artificial Sequence: Synthetic polypeptide
  REGION 1..446: note = XENP021192 3H3_H3_L1.1_IgG1_PVA_/S267K Heavy Chain

SEQ ID NO: 3536 - protein, 117 aa, synthetic construct; identical to SEQ ID NO: 3406
  REGION 1..117: note = Description of Artificial Sequence: Synthetic polypeptide
  REGION 1..117: note = VH of XENP021192

SEQ ID NO: 3537 - protein, 5 aa, synthetic construct
  REGION 1..5: note = Description of Artificial Sequence: Synthetic peptide
  REGION 1..5: note = XENP021192 vhCDR1
GYGVN

SEQ ID NO: 3538 - protein, 16 aa, synthetic construct
  REGION 1..16: note = Description of Artificial Sequence: Synthetic peptide
  REGION 1..16: note = XENP021192 vhCDR2
MIWGDGSTDYNSAVKG

SEQ ID NO: 3539 - protein, 9 aa, synthetic construct
  REGION 1..9: note = Description of Artificial Sequence: Synthetic peptide
  REGION 1..9: note = XENP021192 vhCDR3
SYYTSDEDY

SEQ ID NO: 3540 - protein, 219 aa, synthetic construct; identical to SEQ ID NO: 3500
  REGION 1..219: note = Description of Artificial Sequence: Synthetic polypeptide
  REGION 1..219: note = XENP021192 3H3_H3_L1.1_IgG1_PVA_/S267K Light Chain

SEQ ID NO: 3541 - protein, 112 aa, synthetic construct; identical to SEQ ID NO: 3501
  REGION 1..112: note = Description of Artificial Sequence: Synthetic polypeptide
  REGION 1..112: note = VL of XENP021192

SEQ ID NO: 3542 - protein, 17 aa, synthetic construct
  REGION 1..17: note = Description of Artificial Sequence: Synthetic peptide
  REGION 1..17: note = XENP021192 vlCDR1
RSSQSLLNSRTRKNYLA

SEQ ID NO: 3543 - protein, 7 aa, synthetic construct
  REGION 1..7: note = Description of Artificial Sequence: Synthetic peptide
  REGION 1..7: note = XENP021192 vlCDR2
WASTRES

SEQ ID NO: 3544 - protein, 8 aa, synthetic construct
  REGION 1..8: note = Description of Artificial Sequence: Synthetic peptide
  REGION 1..8: note = XENP021192 vlCDR3
KQSYSLRT

SEQ ID NO: 3545 - protein, 446 aa, synthetic construct; identical to SEQ ID NO: 3405
  REGION 1..446: note = Description of Artificial Sequence: Synthetic polypeptide
  REGION 1..446: note = XENP021193 3H3_H3_L2.1_IgG1_PVA_/S267K Heavy Chain

SEQ ID NO: 3546 - protein, 117 aa, synthetic construct; identical to SEQ ID NO: 3406
  REGION 1..117: note = Description of Artificial Sequence: Synthetic polypeptide
  REGION 1..117: note = VH of XENP021193

SEQ ID NO: 3547 - protein, 5 aa, synthetic construct
  REGION 1..5: note = Description of Artificial Sequence: Synthetic peptide
  REGION 1..5: note = XENP021193 vhCDR1
GYGVN

SEQ ID NO: 3548 - protein, 16 aa, synthetic construct
  REGION 1..16: note = Description of Artificial Sequence: Synthetic peptide
  REGION 1..16: note = XENP021193 vhCDR2
MIWGDGSTDYNSAVKG

SEQ ID NO: 3549 - protein, 9 aa, synthetic construct
  REGION 1..9: note = Description of Artificial Sequence: Synthetic peptide
  REGION 1..9: note = XENP021193 vhCDR3
SYYTSDEDY

SEQ ID NO: 3550 - protein, 219 aa, synthetic construct; identical to SEQ ID NO: 3510
  REGION 1..219: note = Description of Artificial Sequence: Synthetic polypeptide
  REGION 1..219: note = XENP021193 3H3_H3_L2.1_IgG1_PVA_/S267K Light Chain

SEQ ID NO: 3551 - protein, 112 aa, synthetic construct; identical to SEQ ID NO: 3511
  REGION 1..112: note = Description of Artificial Sequence: Synthetic polypeptide
  REGION 1..112: note = VL of XENP021193

SEQ ID NO: 3552 - protein, 17 aa, synthetic construct
  REGION 1..17: note = Description of Artificial Sequence: Synthetic peptide
  REGION 1..17: note = XENP021193 vlCDR1
KSSQSLLNSRTRKNYLA

SEQ ID NO: 3553 - protein, 7 aa, synthetic construct
  REGION 1..7: note = Description of Artificial Sequence: Synthetic peptide
  REGION 1..7: note = XENP021193 vlCDR2
WASTRES

SEQ ID NO: 3554 - protein, 8 aa, synthetic construct
  REGION 1..8: note = Description of Artificial Sequence: Synthetic peptide
  REGION 1..8: note = XENP021193 vlCDR3
KQSYSLRT

SEQ ID NO: 3555 - protein, 446 aa, synthetic construct; identical to SEQ ID NO: 3425
  REGION 1..446: note = Description of Artificial Sequence: Synthetic polypeptide
  REGION 1..446: note = XENP021194 3H3_H4_L1.1_IgG1_PVA_/S267K Heavy Chain

SEQ ID NO: 3556 - protein, 117 aa, synthetic construct; identical to SEQ ID NO: 3426
  REGION 1..117: note = Description of Artificial Sequence: Synthetic polypeptide
  REGION 1..117: note = VH of XENP021194

SEQ ID NO: 3557 - protein, 5 aa, synthetic construct
  REGION 1..5: note = Description of Artificial Sequence: Synthetic peptide
  REGION 1..5: note = XENP021194 vhCDR1
GYGVN

SEQ ID NO: 3558 - protein, 16 aa, synthetic construct
  REGION 1..16: note = Description of Artificial Sequence: Synthetic peptide
  REGION 1..16: note = XENP021194 vhCDR2
MIWGDGSTDYNPSLKS

SEQ ID NO: 3559 - protein, 9 aa, synthetic construct
  REGION 1..9: note = Description of Artificial Sequence: Synthetic peptide
  REGION 1..9: note = XENP021194 vhCDR3
SYYTSDEDY

SEQ ID NO: 3560 - protein, 219 aa, synthetic construct; identical to SEQ ID NO: 3500
  REGION 1..219: note = Description of Artificial Sequence: Synthetic polypeptide
  REGION 1..219: note = XENP021194 3H3_H4_L1.1_IgG1_PVA_/S267K Light Chain

SEQ ID NO: 3561 - protein, 112 aa, synthetic construct; identical to SEQ ID NO: 3501
  REGION 1..112: note = Description of Artificial Sequence: Synthetic polypeptide
  REGION 1..112: note = VL of XENP021194

SEQ ID NO: 3562 - protein, 17 aa, synthetic construct
  REGION 1..17: note = Description of Artificial Sequence: Synthetic peptide
  REGION 1..17: note = XENP021194 vlCDR1
RSSQSLLNSRTRKNYLA

SEQ ID NO: 3563 - protein, 7 aa, synthetic construct
  REGION 1..7: note = Description of Artificial Sequence: Synthetic peptide
  REGION 1..7: note = XENP021194 vlCDR2
WASTRES

SEQ ID NO: 3564 - protein, 8 aa, synthetic construct
  REGION 1..8: note = Description of Artificial Sequence: Synthetic peptide
  REGION 1..8: note = XENP021194 vlCDR3
KQSYSLRT

SEQ ID NO: 3565 - protein, 446 aa, synthetic construct; identical to SEQ ID NO: 3425
  REGION 1..446: note = Description of Artificial Sequence: Synthetic polypeptide
  REGION 1..446: note = XENP021195 3H3_H4_L2.1_IgG1_PVA_/S267K Heavy Chain

SEQ ID NO: 3566 - protein, 117 aa, synthetic construct; identical to SEQ ID NO: 3426
  REGION 1..117: note = Description of Artificial Sequence: Synthetic polypeptide
  REGION 1..117: note = VH of XENP021195

SEQ ID NO: 3567 - protein, 5 aa, synthetic construct
  REGION 1..5: note = Description of Artificial Sequence: Synthetic peptide
  REGION 1..5: note = XENP021195 vhCDR1
GYGVN

SEQ ID NO: 3568 - protein, 16 aa, synthetic construct
  REGION 1..16: note = Description of Artificial Sequence: Synthetic peptide
  REGION 1..16: note = XENP021195 vhCDR2
MIWGDGSTDYNPSLKS

SEQ ID NO: 3569 - protein, 9 aa, synthetic construct
  REGION 1..9: note = Description of Artificial Sequence: Synthetic peptide
  REGION 1..9: note = XENP021195 vhCDR3
SYYTSDEDY

SEQ ID NO: 3570 - protein, 219 aa, synthetic construct; identical to SEQ ID NO: 3510
  REGION 1..219: note = Description of Artificial Sequence: Synthetic polypeptide
  REGION 1..219: note = XENP021195 3H3_H4_L2.1_IgG1_PVA_/S267K Light Chain

SEQ ID NO: 3571 - protein, 112 aa, synthetic construct; identical to SEQ ID NO: 3511
  REGION 1..112: note = Description of Artificial Sequence: Synthetic polypeptide
  REGION 1..112: note = VL of XENP021195

SEQ ID NO: 3572 - protein, 17 aa, synthetic construct
  REGION 1..17: note = Description of Artificial Sequence: Synthetic peptide
  REGION 1..17: note = XENP021195 vlCDR1
KSSQSLLNSRTRKNYLA

SEQ ID NO: 3573 - protein, 7 aa, synthetic construct
  REGION 1..7: note = Description of Artificial Sequence: Synthetic peptide
  REGION 1..7: note = XENP021195 vlCDR2
WASTRES

SEQ ID NO: 3574 - protein, 8 aa, synthetic construct
  REGION 1..8: note = Description of Artificial Sequence: Synthetic peptide
  REGION 1..8: note = XENP021195 vlCDR3
KQSYSLRT

SEQ ID NO: 3575 - protein, 447 aa, synthetic construct; identical to SEQ ID NO: 3445
  REGION 1..447: note = Description of Artificial Sequence: Synthetic polypeptide
  REGION 1..447: note = XENP021196 7B11_H1_L1.1_IgG1_PVA_/S267K Heavy Chain

SEQ ID NO: 3576 - protein, 118 aa, synthetic construct; identical to SEQ ID NO: 3446
  REGION 1..118: note = Description of Artificial Sequence: Synthetic polypeptide
  REGION 1..118: note = VH of XENP021196

SEQ ID NO: 3577 - protein, 5 aa, synthetic construct
  REGION 1..5: note = Description of Artificial Sequence: Synthetic peptide
  REGION 1..5: note = XENP021196 vhCDR1
SYAVN

SEQ ID NO: 3578 - protein, 16 aa, synthetic construct
  REGION 1..16: note = Description of Artificial Sequence: Synthetic peptide
  REGION 1..16: note = XENP021196 vhCDR2
VIWSGGSTDYNAKFQG

SEQ ID NO: 3579 - protein, 10 aa, synthetic construct
  REGION 1..10: note = Description of Artificial Sequence: Synthetic peptide
  REGION 1..10: note = XENP021196 vhCDR3
LYYRYDGFDY

SEQ ID NO: 3580 - protein, 214 aa, synthetic construct
  REGION 1..214: note = Description of Artificial Sequence: Synthetic polypeptide
  REGION 1..214: note = XENP021196 7B11_H1_L1.1_IgG1_PVA_/S267K Light Chain
DIVMTQSPSSLSASVGDRVTITCRASQNVGTHVAWYQQKPGKSPKALVYSASYRYSGVPDRFTGSGSGTDFTLTISSLQPEDFATYFCQQYNSYPLTFGGGTKVEIKRTVAAPSVFIFPPSDEQLKSGTASVVCLLNNFYPREAKVQWKVDNALQSGNSQESVTEQDSKDSTYSLSSTLTLSKADYEKHKVYACEVTHQGLSSPVTKSFNRGEC

SEQ ID NO: 3581 - protein, 107 aa, synthetic construct
  REGION 1..107: note = Description of Artificial Sequence: Synthetic polypeptide
  REGION 1..107: note = VL of XENP021196
DIVMTQSPSSLSASVGDRVTITCRASQNVGTHVAWYQQKPGKSPKALVYSASYRYSGVPDRFTGSGSGTDFTLTISSLQPEDFATYFCQQYNSYPLTFGGGTKVEIK

SEQ ID NO: 3582 - protein, 11 aa, synthetic construct
  REGION 1..11: note = Description of Artificial Sequence: Synthetic peptide
  REGION 1..11: note = XENP021196 vlCDR1
RASQNVGTHVA

SEQ ID NO: 3583 - protein, 7 aa, synthetic construct
  REGION 1..7: note = Description of Artificial Sequence: Synthetic peptide
  REGION 1..7: note = XENP021196 vlCDR2
SASYRYS

SEQ ID NO: 3584 - protein, 9 aa, synthetic construct
  REGION 1..9: note = Description of Artificial Sequence: Synthetic peptide
  REGION 1..9: note = XENP021196 vlCDR3
QQYNSYPLT

SEQ ID NO: 3585 - protein, 447 aa, synthetic construct; identical to SEQ ID NO: 3445
  REGION 1..447: note = Description of Artificial Sequence: Synthetic polypeptide
  REGION 1..447: note = XENP021201 7B11_H1_L2.1_IgG1_PVA_/S267K Heavy Chain

SEQ ID NO: 3586 - protein, 118 aa, synthetic construct; identical to SEQ ID NO: 3446
  REGION 1..118: note = Description of Artificial Sequence: Synthetic polypeptide
  REGION 1..118: note = VH of XENP021201

SEQ ID NO: 3587 - protein, 5 aa, synthetic construct
  REGION 1..5: note = Description of Artificial Sequence: Synthetic peptide
  REGION 1..5: note = XENP021201 vhCDR1
SYAVN

SEQ ID NO: 3588 - protein, 16 aa, synthetic construct
  REGION 1..16: note = Description of Artificial Sequence: Synthetic peptide
  REGION 1..16: note = XENP021201 vhCDR2
VIWSGGSTDYNAKFQG

SEQ ID NO: 3589 - protein, 10 aa, synthetic construct
  REGION 1..10: note = Description of Artificial Sequence: Synthetic peptide
  REGION 1..10: note = XENP021201 vhCDR3
LYYRYDGFDY

SEQ ID NO: 3590 - protein, 214 aa, synthetic construct
  REGION 1..214: note = Description of Artificial Sequence: Synthetic polypeptide
  REGION 1..214: note = XENP021201 7B11_H1_L2.1_IgG1_PVA_/S267K Light Chain
DIVMTQSPDSLAVSLGERATINCKASQNVGTHVAWYQQKPGQSPKALVYSASYRYSGVPDRFTGSGSGTDFTLTISSLQAEDVAVYFCQQYNSYPLTFGGGTKVEIKRTVAAPSVFIFPPSDEQLKSGTASVVCLLNNFYPREAKVQWKVDNALQSGNSQESVTEQDSKDSTYSLSSTLTLSKADYEKHKVYACEVTHQGLSSPVTKSFNRGEC

SEQ ID NO: 3591 - protein, 107 aa, synthetic construct
  REGION 1..107: note = Description of Artificial Sequence: Synthetic polypeptide
  REGION 1..107: note = VL of XENP021201
DIVMTQSPDSLAVSLGERATINCKASQNVGTHVAWYQQKPGQSPKALVYSASYRYSGVPDRFTGSGSGTDFTLTISSLQAEDVAVYFCQQYNSYPLTFGGGTKVEIK

SEQ ID NO: 3592 - protein, 11 aa, synthetic construct
  REGION 1..11: note = Description of Artificial Sequence: Synthetic peptide
  REGION 1..11: note = XENP021201 vlCDR1
KASQNVGTHVA

SEQ ID NO: 3593 - protein, 7 aa, synthetic construct
  REGION 1..7: note = Description of Artificial Sequence: Synthetic peptide
  REGION 1..7: note = XENP021201 vlCDR2
SASYRYS

SEQ ID NO: 3594 - protein, 9 aa, synthetic construct
  REGION 1..9: note = Description of Artificial Sequence: Synthetic peptide
  REGION 1..9: note = XENP021201 vlCDR3
QQYNSYPLT

SEQ ID NO: 3595 - protein, 447 aa, synthetic construct
  REGION 1..447: note = Description of Artificial Sequence: Synthetic polypeptide
  REGION 1..447: note = XENP021202 7B11_H2.1_L1.1_IgG1_PVA_/S267K Heavy Chain
EVQLVESGGGLVQPGGSLRLSCAVSGFSLTSYAVNWVRQAPGKGLEWVSVIWSGGSTDYNPSVKGRFTISKDNSKSTVYLQMNSLRAEDTAVYYCVSLYYRYDGFDYWGQGTLVTVSSASTKGPSVFPLAPSSKSTSGGTAALGCLVKDYFPEPVTVSWNSGALTSGVHTFPAVLQSSGLYSLSSVVTVPSSSLGTQTYICNVNHKPSNTKVDKKVEPKSCDKTHTCPPCPAPPVAGPSVFLFPPKPKDTLMISRTPEVTCVVVDVKHEDPEVKFNWYVDGVEVHNAKTKPREEQYNSTYRVVSVLTVLHQDWLNGKEYKCKVSNKALPAPIEKTISKAKGQPREPQVYTLPPSREEMTKNQVSLTCLVKGFYPSDIAVEWESNGQPENNYKTTPPVLDSDGSFFLYSKLTVDKSRWQQGNVFSCSVMHEALHNHYTQKSLSLSPGK

SEQ ID NO: 3596 - protein, 118 aa, synthetic construct
  REGION 1..118: note = Description of Artificial Sequence: Synthetic polypeptide
  REGION 1..118: note = VH of XENP021202
EVQLVESGGGLVQPGGSLRLSCAVSGFSLTSYAVNWVRQAPGKGLEWVSVIWSGGSTDYNPSVKGRFTISKDNSKSTVYLQMNSLRAEDTAVYYCVSLYYRYDGFDYWGQGTLVTVSS

SEQ ID NO: 3597 - protein, 5 aa, synthetic construct
  REGION 1..5: note = Description of Artificial Sequence: Synthetic peptide
  REGION 1..5: note = XENP021202 vhCDR1
SYAVN

SEQ ID NO: 3598 - protein, 16 aa, synthetic construct
  REGION 1..16: note = Description of Artificial Sequence: Synthetic peptide
  REGION 1..16: note = XENP021202 vhCDR2
VIWSGGSTDYNPSVKG

SEQ ID NO: 3599 - protein, 10 aa, synthetic construct
  REGION 1..10: note = Description of Artificial Sequence: Synthetic peptide
  REGION 1..10: note = XENP021202 vhCDR3
LYYRYDGFDY

SEQ ID NO: 3600 - protein, 214 aa, synthetic construct; identical to SEQ ID NO: 3580
  REGION 1..214: note = Description of Artificial Sequence: Synthetic polypeptide
  REGION 1..214: note = XENP021202 7B11_H2.1_L1.1_IgG1_PVA_/S267K Light Chain

SEQ ID NO: 3601 - protein, 107 aa, synthetic construct; identical to SEQ ID NO: 3581
  REGION 1..107: note = Description of Artificial Sequence: Synthetic polypeptide
  REGION 1..107: note = VL of XENP021202

SEQ ID NO: 3602 - protein, 11 aa, synthetic construct
  REGION 1..11: note = Description of Artificial Sequence: Synthetic peptide
  REGION 1..11: note = XENP021202 vlCDR1
RASQNVGTHVA

SEQ ID NO: 3603 - protein, 7 aa, synthetic construct
  REGION 1..7: note = Description of Artificial Sequence: Synthetic peptide
  REGION 1..7: note = XENP021202 vlCDR2
SASYRYS

SEQ ID NO: 3604 - protein, 9 aa, synthetic construct
  REGION 1..9: note = Description of Artificial Sequence: Synthetic peptide
  REGION 1..9: note = XENP021202 vlCDR3
QQYNSYPLT

SEQ ID NO: 3605 - protein, 447 aa, synthetic construct; identical to SEQ ID NO: 3595
  REGION 1..447: note = Description of Artificial Sequence: Synthetic polypeptide
  REGION 1..447: note = XENP021203 7B11_H2.1_L2.1_IgG1_PVA_/S267K Heavy Chain

SEQ ID NO: 3606 - protein, 118 aa, synthetic construct; identical to SEQ ID NO: 3596
  REGION 1..118: note = Description of Artificial Sequence: Synthetic polypeptide
  REGION 1..118: note = VH of XENP021203

SEQ ID NO: 3607 - protein, 5 aa, synthetic construct
  REGION 1..5: note = Description of Artificial Sequence: Synthetic peptide
  REGION 1..5: note = XENP021203 vhCDR1
SYAVN

SEQ ID NO: 3608 - protein, 16 aa, synthetic construct
  REGION 1..16: note = Description of Artificial Sequence: Synthetic peptide
  REGION 1..16: note = XENP021203 vhCDR2
VIWSGGSTDYNPSVKG

SEQ ID NO: 3609 - protein, 10 aa, synthetic construct
  REGION 1..10: note = Description of Artificial Sequence: Synthetic peptide
  REGION 1..10: note = XENP021203 vhCDR3
LYYRYDGFDY

SEQ ID NO: 3610 - protein, 214 aa, synthetic construct; identical to SEQ ID NO: 3590
  REGION 1..214: note = Description of Artificial Sequence: Synthetic polypeptide
  REGION 1..214: note = XENP021203 7B11_H2.1_L2.1_IgG1_PVA_/S267K Light Chain

SEQ ID NO: 3611 - protein, 107 aa, synthetic construct; identical to SEQ ID NO: 3591
  REGION 1..107: note = Description of Artificial Sequence: Synthetic polypeptide
  REGION 1..107: note = VL of XENP021203

SEQ ID NO: 3612 - protein, 11 aa, synthetic construct
  REGION 1..11: note = Description of Artificial Sequence: Synthetic peptide
  REGION 1..11: note = XENP021203 vlCDR1
KASQNVGTHVA

SEQ ID NO: 3613 - protein, 7 aa, synthetic construct
  REGION 1..7: note = Description of Artificial Sequence: Synthetic peptide
  REGION 1..7: note = XENP021203 vlCDR2
SASYRYS

SEQ ID NO: 3614 - protein, 9 aa, synthetic construct
  REGION 1..9: note = Description of Artificial Sequence: Synthetic peptide
  REGION 1..9: note = XENP021203 vlCDR3
QQYNSYPLT

SEQ ID NO: 3615 - protein, 446 aa, synthetic construct
  REGION 1..446: note = Description of Artificial Sequence: Synthetic polypeptide
  REGION 1..446: note = XENP021204 7C2_H1.1_L1.1_IgG1_PVA_/S267K Heavy Chain
EVQVLESGGGLVQPGGSLRLSCAASGFTFSRYAMSWVRQAPGKRLEWVSSISSGGSTYYPDSVKGRFTISRDNSKNTLYLQMNSLRAEDTAVYYCARGDYEGYFDYWGQGTLVTVSSASTKGPSVFPLAPSSKSTSGGTAALGCLVKDYFPEPVTVSWNSGALTSGVHTFPAVLQSSGLYSLSSVVTVPSSSLGTQTYICNVNHKPSNTKVDKKVEPKSCDKTHTCPPCPAPPVAGPSVFLFPPKPKDTLMISRTPEVTCVVVDVKHEDPEVKFNWYVDGVEVHNAKTKPREEQYNSTYRVVSVLTVLHQDWLNGKEYKCKVSNKALPAPIEKTISKAKGQPREPQVYTLPPSREEMTKNQVSLTCLVKGFYPSDIAVEWESNGQPENNYKTTPPVLDSDGSFFLYSKLTVDKSRWQQGNVFSCSVMHEALHNHYTQKSLSLSPGK

SEQ ID NO: 3616 - protein, 117 aa, synthetic construct
  REGION 1..117: note = Description of Artificial Sequence: Synthetic polypeptide
  REGION 1..117: note = VH of XENP021204
EVQVLESGGGLVQPGGSLRLSCAASGFTFSRYAMSWVRQAPGKRLEWVSSISSGGSTYYPDSVKGRFTISRDNSKNTLYLQMNSLRAEDTAVYYCARGDYEGYFDYWGQGTLVTVSS

SEQ ID NO: 3617 - protein, 5 aa, synthetic construct
  REGION 1..5: note = Description of Artificial Sequence: Synthetic peptide
  REGION 1..5: note = XENP021204 vhCDR1
RYAMS

SEQ ID NO: 3618 - protein, 16 aa, synthetic construct
  REGION 1..16: note = Description of Artificial Sequence: Synthetic peptide
  REGION 1..16: note = XENP021204 vhCDR2
SISSGGSTYYPDSVKG

SEQ ID NO: 3619 - protein, 9 aa, synthetic construct
  REGION 1..9: note = Description of Artificial Sequence: Synthetic peptide
  REGION 1..9: note = XENP021204 vhCDR3
GDYEGYFDY

SEQ ID NO: 3620 - protein, 220 aa, synthetic construct
  REGION 1..220: note = Description of Artificial Sequence: Synthetic polypeptide
  REGION 1..220: note = XENP021204 7C2_H1.1_L1.1_IgG1_PVA_/S267K Light Chain
DIVMTQSPDSLAVSLGERATINCKSSQSLLNSINQKNYLAWYQQKPGQSPKLLVYFASTRESGVPDRFIGSGSGTDFTLTISSLQAEDVAVYFCQQHYSTPLTFGAGTKLEIKRTVAAPSVFIFPPSDEQLKSGTASVVCLLNNFYPREAKVQWKVDNALQSGNSQESVTEQDSKDSTYSLSSTLTLSKADYEKHKVYACEVTHQGLSSPVTKSFNRGEC

SEQ ID NO: 3621 - protein, 113 aa, synthetic construct
  REGION 1..113: note = Description of Artificial Sequence: Synthetic polypeptide
  REGION 1..113: note = VL of XENP021204
DIVMTQSPDSLAVSLGERATINCKSSQSLLNSINQKNYLAWYQQKPGQSPKLLVYFASTRESGVPDRFIGSGSGTDFTLTISSLQAEDVAVYFCQQHYSTPLTFGAGTKLEIK

SEQ ID NO: 3622 - protein, 17 aa, synthetic construct
  REGION 1..17: note = Description of Artificial Sequence: Synthetic peptide
  REGION 1..17: note = XENP021204 vlCDR1
KSSQSLLNSINQKNYLA

SEQ ID NO: 3623 - protein, 7 aa, synthetic construct
  REGION 1..7: note = Description of Artificial Sequence: Synthetic peptide
  REGION 1..7: note = XENP021204 vlCDR2
FASTRES

SEQ ID NO: 3624 - protein, 9 aa, synthetic construct
  REGION 1..9: note = Description of Artificial Sequence: Synthetic peptide
  REGION 1..9: note = XENP021204 vlCDR3
QQHYSTPLT

SEQ ID NO: 3625 - protein, 442 aa, synthetic construct
  REGION 1..442: note = Description of Artificial Sequence: Synthetic polypeptide
  REGION 1..442: note = XENP021492 1D12_H0L0_IgG1_PVA_/S267K Heavy Chain
EVQLVESGGGLVKPGGSLKFSCAASGFAFSSFDMSWVRQTPEKRLEWVAYISSDGASTFYPDTMKGRFTISRDNAKNTLYLQMSSLKSEDTAMYYCTRLGAYWGQGTLVTVSAASTKGPSVFPLAPSSKSTSGGTAALGCLVKDYFPEPVTVSWNSGALTSGVHTFPAVLQSSGLYSLSSVVTVPSSSLGTQTYICNVNHKPSNTKVDKKVEPKSCDKTHTCPPCPAPPVAGPSVFLFPPKPKDTLMISRTPEVTCVVVDVKHEDPEVKFNWYVDGVEVHNAKTKPREEQYNSTYRVVSVLTVLHQDWLNGKEYKCKVSNKALPAPIEKTISKAKGQPREPQVYTLPPSREEMTKNQVSLTCLVKGFYPSDIAVEWESNGQPENNYKTTPPVLDSDGSFFLYSKLTVDKSRWQQGNVFSCSVMHEALHNHYTQKSLSLSPGK

SEQ ID NO: 3626 - protein, 113 aa, synthetic construct
  REGION 1..113: note = Description of Artificial Sequence: Synthetic polypeptide
  REGION 1..113: note = VH of XENP021492
EVQLVESGGGLVKPGGSLKFSCAASGFAFSSFDMSWVRQTPEKRLEWVAYISSDGASTFYPDTMKGRFTISRDNAKNTLYLQMSSLKSEDTAMYYCTRLGAYWGQGTLVTVSA

SEQ ID NO: 3627 - protein, 5 aa, synthetic construct
  REGION 1..5: note = Description of Artificial Sequence: Synthetic peptide
  REGION 1..5: note = XENP021492 vhCDR1
SFDMS

SEQ ID NO: 3628 - protein, 17 aa, synthetic construct
  REGION 1..17: note = Description of Artificial Sequence: Synthetic peptide
  REGION 1..17: note = XENP021492 vhCDR2
YISSDGASTFYPDTMKG

SEQ ID NO: 3629 - protein, 4 aa, synthetic construct
  REGION 1..4: note = Description of Artificial Sequence: Synthetic peptide
  REGION 1..4: note = XENP021492 vhCDR3
LGAY

SEQ ID NO: 3630 - protein, 218 aa, synthetic construct
  REGION 1..218: note = Description of Artificial Sequence: Synthetic polypeptide
  REGION 1..218: note = XENP021492 1D12_H0L0_IgG1_PVA_/S267K Light Chain
DIVLTQSPASLAVSLGQRATISCRASESVEYYGTSLMQWYQQKPGQPPKLLIYAASNVESGVPARFSGSGSGTDFSLNIHPVEEDDIAMYFCQQSRKVPWTFGGGTKLEIKRTVAAPSVFIFPPSDEQLKSGTASVVCLLNNFYPREAKVQWKVDNALQSGNSQESVTEQDSKDSTYSLSSTLTLSKADYEKHKVYACEVTHQGLSSPVTKSFNRGEC

SEQ ID NO: 3631 - protein, 111 aa, synthetic construct
  REGION 1..111: note = Description of Artificial Sequence: Synthetic polypeptide
  REGION 1..111: note = VL of XENP021492
DIVLTQSPASLAVSLGQRATISCRASESVEYYGTSLMQWYQQKPGQPPKLLIYAASNVESGVPARFSGSGSGTDFSLNIHPVEEDDIAMYFCQQSRKVPWTFGGGTKLEIK

SEQ ID NO: 3632 - protein, 15 aa, synthetic construct
  REGION 1..15: note = Description of Artificial Sequence: Synthetic peptide
  REGION 1..15: note = XENP021492 vlCDR1
RASESVEYYGTSLMQ

SEQ ID NO: 3633 - protein, 7 aa, synthetic construct
  REGION 1..7: note = Description of Artificial Sequence: Synthetic peptide
  REGION 1..7: note = XENP021492 vlCDR2
AASNVES

SEQ ID NO: 3634 - protein, 9 aa, synthetic construct
  REGION 1..9: note = Description of Artificial Sequence: Synthetic peptide
  REGION 1..9: note = XENP021492 vlCDR3
QQSRKVPWT

SEQ ID NO: 3635 - protein, 446 aa, synthetic construct
  REGION 1..446: note = Description of Artificial Sequence: Synthetic polypeptide
  REGION 1..446: note = XENP021493 6C8_H0L0_IgG1_PVA_/S267K Heavy Chain
QVQLKESGPGLVAPSQSLSITCTVSGFSLNGYGVNWVRQPPGKGLEWLGMIWGDGSTDYNSALKSRLSISKDNSKSQVFLKMNSLQTDDTARYYCARSYYTSDEDYWGQGTLVTVSAASTKGPSVFPLAPSSKSTSGGTAALGCLVKDYFPEPVTVSWNSGALTSGVHTFPAVLQSSGLYSLSSVVTVPSSSLGTQTYICNVNHKPSNTKVDKKVEPKSCDKTHTCPPCPAPPVAGPSVFLFPPKPKDTLMISRTPEVTCVVVDVKHEDPEVKFNWYVDGVEVHNAKTKPREEQYNSTYRVVSVLTVLHQDWLNGKEYKCKVSNKALPAPIEKTISKAKGQPREPQVYTLPPSREEMTKNQVSLTCLVKGFYPSDIAVEWESNGQPENNYKTTPPVLDSDGSFFLYSKLTVDKSRWQQGNVFSCSVMHEALHNHYTQKSLSLSPGK

SEQ ID NO: 3636 - protein, 117 aa, synthetic construct
  REGION 1..117: note = Description of Artificial Sequence: Synthetic polypeptide
  REGION 1..117: note = VH of XENP021493
QVQLKESGPGLVAPSQSLSITCTVSGFSLNGYGVNWVRQPPGKGLEWLGMIWGDGSTDYNSALKSRLSISKDNSKSQVFLKMNSLQTDDTARYYCARSYYTSDEDYWGQGTLVTVSA

SEQ ID NO: 3637 - protein, 5 aa, synthetic construct
  REGION 1..5: note = Description of Artificial Sequence: Synthetic peptide
  REGION 1..5: note = XENP021493 vhCDR1
GYGVN

SEQ ID NO: 3638 - protein, 16 aa, synthetic construct
  REGION 1..16: note = Description of Artificial Sequence: Synthetic peptide
  REGION 1..16: note = XENP021493 vhCDR2
MIWGDGSTDYNSALKS

SEQ ID NO: 3639 - protein, 9 aa, synthetic construct
  REGION 1..9: note = Description of Artificial Sequence: Synthetic peptide
  REGION 1..9: note = XENP021493 vhCDR3
SYYTSDEDY

SEQ ID NO: 3640 - protein, 214 aa, synthetic construct
  REGION 1..214: note = Description of Artificial Sequence: Synthetic polypeptide
  REGION 1..214: note = XENP021493 6C8_H0L0_IgG1_PVA_/S267K Light Chain
DIVMTQSQKFMSTSVGDRVSVTCKASQNVGSNVAWCQQKPGQSPKALIYSASFRYSGVPDRFTGSGSGTDFTLTISNVQSEDLAEYFCQQYNSYPYTFGGGTKLEIKRTVAAPSVFIFPPSDEQLKSGTASVVCLLNNFYPREAKVQWKVDNALQSGNSQESVTEQDSKDSTYSLSSTLTLSKADYEKHKVYACEVTHQGLSSPVTKSFNRGEC

SEQ ID NO: 3641 - protein, 107 aa, synthetic construct
  REGION 1..107: note = Description of Artificial Sequence: Synthetic polypeptide
  REGION 1..107: note = VL of XENP021493
DIVMTQSQKFMSTSVGDRVSVTCKASQNVGSNVAWCQQKPGQSPKALIYSASFRYSGVPDRFTGSGSGTDFTLTISNVQSEDLAEYFCQQYNSYPYTFGGGTKLEIK

SEQ ID NO: 3642 - protein, 11 aa, synthetic construct
  REGION 1..11: note = Description of Artificial Sequence: Synthetic peptide
  REGION 1..11: note = XENP021493 vlCDR1
KASQNVGSNVA

SEQ ID NO: 3643 - protein, 7 aa, synthetic construct
  REGION 1..7: note = Description of Artificial Sequence: Synthetic peptide
  REGION 1..7: note = XENP021493 vlCDR2
SASFRYS

SEQ ID NO: 3644 - protein, 9 aa, synthetic construct
  REGION 1..9: note = Description of Artificial Sequence: Synthetic peptide
  REGION 1..9: note = XENP021493 vlCDR3
QQYNSYPYT

SEQ ID NO: 3645 - protein, 446 aa, synthetic construct
  REGION 1..446: note = Description of Artificial Sequence: Synthetic polypeptide
  REGION 1..446: note = XENP021494 6D9_H0_1D12_L0_IgG1_PVA_/S267K Heavy Chain
QVQLKQSGPGLVQPSQSLSITCTVSGFSLTSYGVHWVRQSPGKGLEWLGVIWSGGSTEYNAAFISRLSISKDNSKSQVFFKMNSLQADDTAIYYCARGGLLSPFDYWGQGTTLTVSSASTKGPSVFPLAPSSKSTSGGTAALGCLVKDYFPEPVTVSWNSGALTSGVHTFPAVLQSSGLYSLSSVVTVPSSSLGTQTYICNVNHKPSNTKVDKKVEPKSCDKTHTCPPCPAPPVAGPSVFLFPPKPKDTLMISRTPEVTCVVVDVKHEDPEVKFNWYVDGVEVHNAKTKPREEQYNSTYRVVSVLTVLHQDWLNGKEYKCKVSNKALPAPIEKTISKAKGQPREPQVYTLPPSREEMTKNQVSLTCLVKGFYPSDIAVEWESNGQPENNYKTTPPVLDSDGSFFLYSKLTVDKSRWQQGNVFSCSVMHEALHNHYTQKSLSLSPGK

SEQ ID NO: 3646 - protein, 117 aa, synthetic construct
  REGION 1..117: note = Description of Artificial Sequence: Synthetic polypeptide
  REGION 1..117: note = VH of XENP021494
QVQLKQSGPGLVQPSQSLSITCTVSGFSLTSYGVHWVRQSPGKGLEWLGVIWSGGSTEYNAAFISRLSISKDNSKSQVFFKMNSLQADDTAIYYCARGGLLSPFDYWGQGTTLTVSS

SEQ ID NO: 3647 - protein, 5 aa, synthetic construct
  REGION 1..5: note = Description of Artificial Sequence: Synthetic peptide
  REGION 1..5: note = XENP021494 vhCDR1
SYGVH

SEQ ID NO: 3648 - protein, 16 aa, synthetic construct
  REGION 1..16: note = Description of Artificial Sequence: Synthetic peptide
  REGION 1..16: note = XENP021494 vhCDR2
VIWSGGSTEYNAAFIS

SEQ ID NO: 3649 - protein, 9 aa, synthetic construct
  REGION 1..9: note = Description of Artificial Sequence: Synthetic peptide
  REGION 1..9: note = XENP021494 vhCDR3
GGLLSPFDY

SEQ ID NO: 3650 - protein, 218 aa, synthetic construct; identical to SEQ ID NO: 3630
  REGION 1..218: note = Description of Artificial Sequence: Synthetic polypeptide
  REGION 1..218: note = XENP021494 6D9_H0_1D12_L0_IgG1_PVA_/S267K Light Chain

SEQ ID NO: 3651 - protein, 111 aa, synthetic construct; identical to SEQ ID NO: 3631
  REGION 1..111: note = Description of Artificial Sequence: Synthetic polypeptide
  REGION 1..111: note = VL of XENP021494

SEQ ID NO: 3652 - protein, 15 aa, synthetic construct
  REGION 1..15: note = Description of Artificial Sequence: Synthetic peptide
  REGION 1..15: note = XENP021494 vlCDR1
RASESVEYYGTSLMQ

SEQ ID NO: 3653 - protein, 7 aa, synthetic construct
  REGION 1..7: note = Description of Artificial Sequence: Synthetic peptide
  REGION 1..7: note = XENP021494 vlCDR2
AASNVES

SEQ ID NO: 3654 - protein, 9 aa, synthetic construct
  REGION 1..9: note = Description of Artificial Sequence: Synthetic peptide
  REGION 1..9: note = XENP021494 vlCDR3
QQSRKVPWT

SEQ ID NO: 3655 - protein, 452 aa, synthetic construct
  REGION 1..452: note = Description of Artificial Sequence: Synthetic polypeptide
  REGION 1..452: note = XENP021495 7A9_H0L0_IgG1_PVA_/S267K Heavy Chain
EVKLLESGGGLVQPGGSLKLSCAASGFDFSRYWMSWVRQAPGKGLEWIGEINPDSSTINYTPSLKDKFLISRDNAKNTLYLQMSKVRSEDTALYYCARPNGYYVGTIFPFAYWGQGTLVTVSAASTKGPSVFPLAPSSKSTSGGTAALGCLVKDYFPEPVTVSWNSGALTSGVHTFPAVLQSSGLYSLSSVVTVPSSSLGTQTYICNVNHKPSNTKVDKKVEPKSCDKTHTCPPCPAPPVAGPSVFLFPPKPKDTLMISRTPEVTCVVVDVKHEDPEVKFNWYVDGVEVHNAKTKPREEQYNSTYRVVSVLTVLHQDWLNGKEYKCKVSNKALPAPIEKTISKAKGQPREPQVYTLPPSREEMTKNQVSLTCLVKGFYPSDIAVEWESNGQPENNYKTTPPVLDSDGSFFLYSKLTVDKSRWQQGNVFSCSVMHEALHNHYTQKSLSLSPGK

SEQ ID NO: 3656 - protein, 123 aa, synthetic construct
  REGION 1..123: note = Description of Artificial Sequence: Synthetic polypeptide
  REGION 1..123: note = VH of XENP021495
EVKLLESGGGLVQPGGSLKLSCAASGFDFSRYWMSWVRQAPGKGLEWIGEINPDSSTINYTPSLKDKFLISRDNAKNTLYLQMSKVRSEDTALYYCARPNGYYVGTIFPFAYWGQGTLVTVSA

SEQ ID NO: 3657 - protein, 5 aa, synthetic construct
  REGION 1..5: note = Description of Artificial Sequence: Synthetic peptide
  REGION 1..5: note = XENP021495 vhCDR1
RYWMS

SEQ ID NO: 3658 - protein, 17 aa, synthetic construct
  REGION 1..17: note = Description of Artificial Sequence: Synthetic peptide
  REGION 1..17: note = XENP021495 vhCDR2
EINPDSSTINYTPSLKD

SEQ ID NO: 3659 - protein, 14 aa, synthetic construct
  REGION 1..14: note = Description of Artificial Sequence: Synthetic peptide
  REGION 1..14: note = XENP021495 vhCDR3
PNGYYVGTIFPFAY

SEQ ID NO: 3660 - protein, 215 aa, synthetic construct
  REGION 1..215: note = Description of Artificial Sequence: Synthetic polypeptide
  REGION 1..215: note = XENP021495 7A9_H0L0_IgG1_PVA_/S267K Light Chain
QAVVTQESALTTSPGETVTLTCRSSTGAVTTSNYANWVQEKPDHLFTGLIGGTNNRAPGVPARFSGSLIGDKAALTITGAQTEDEAIYFCALWYSNHWVFGGGTKLTVLGQPKAAPSVTLFPPSSEELQANKATLVCLISDFYPGAVTVAWKADSSPVKAGVETTTPSKQSNNKYAASSYLSLTPEQWKSHRSYSCQVTHEGSTVEKTVAPTECS

SEQ ID NO: 3661 - protein, 215 aa, synthetic construct; identical to SEQ ID NO: 3660
  REGION 1..215: note = Description of Artificial Sequence: Synthetic polypeptide
  REGION 1..215: note = VL of XENP021495

SEQ ID NO: 3662 - protein, 14 aa, synthetic construct
  REGION 1..14: note = Description of Artificial Sequence: Synthetic peptide
  REGION 1..14: note = XENP021495 vlCDR1
RSSTGAVTTSNYAN

SEQ ID NO: 3663 - protein, 7 aa, synthetic construct
  REGION 1..7: note = Description of Artificial Sequence: Synthetic peptide
  REGION 1..7: note = XENP021495 vlCDR2
GTNNRAP

SEQ ID NO: 3664 - protein, 9 aa, synthetic construct
  REGION 1..9: note = Description of Artificial Sequence: Synthetic peptide
  REGION 1..9: note = XENP021495 vlCDR3
ALWYSNHWV

SEQ ID NO: 3665 - protein, 447 aa, synthetic construct
  REGION 1..447: note = Description of Artificial Sequence: Synthetic polypeptide
  REGION 1..447: note = XENP021496 7B11_H0L0_IgG1_PVA_/S267K Heavy Chain
QVQLKQSGPGLVQPSQSLSITCTVSGFSLTSYAVNWVRQSPGKGLEWLGVIWSGGSTDYNAAFISRLSISKDNSKSQVFFKMNSLQANDTAIYYCVSLYYRYDGFDYWGQGTLVTVSAASTKGPSVFPLAPSSKSTSGGTAALGCLVKDYFPEPVTVSWNSGALTSGVHTFPAVLQSSGLYSLSSVVTVPSSSLGTQTYICNVNHKPSNTKVDKKVEPKSCDKTHTCPPCPAPPVAGPSVFLFPPKPKDTLMISRTPEVTCVVVDVKHEDPEVKFNWYVDGVEVHNAKTKPREEQYNSTYRVVSVLTVLHQDWLNGKEYKCKVSNKALPAPIEKTISKAKGQPREPQVYTLPPSREEMTKNQVSLTCLVKGFYPSDIAVEWESNGQPENNYKTTPPVLDSDGSFFLYSKLTVDKSRWQQGNVFSCSVMHEALHNHYTQKSLSLSPGK

SEQ ID NO: 3666 - protein, 118 aa, synthetic construct
  REGION 1..118: note = Description of Artificial Sequence: Synthetic polypeptide
  REGION 1..118: note = VH of XENP021496
QVQLKQSGPGLVQPSQSLSITCTVSGFSLTSYAVNWVRQSPGKGLEWLGVIWSGGSTDYNAAFISRLSISKDNSKSQVFFKMNSLQANDTAIYYCVSLYYRYDGFDYWGQGTLVTVSA

SEQ ID NO: 3667 - protein, 5 aa, synthetic construct
  REGION 1..5: note = Description of Artificial Sequence: Synthetic peptide
  REGION 1..5: note = XENP021496 vhCDR1
SYAVN

SEQ ID NO: 3668 - protein, 16 aa, synthetic construct
  REGION 1..16: note = Description of Artificial Sequence: Synthetic peptide
  REGION 1..16: note = XENP021496 vhCDR2
VIWSGGSTDYNAAFIS

SEQ ID NO: 3669 - protein, 10 aa, synthetic construct
  REGION 1..10: note = Description of Artificial Sequence: Synthetic peptide
  REGION 1..10: note = XENP021496 vhCDR3
LYYRYDGFDY

SEQ ID NO: 3670 - protein, 214 aa, synthetic construct
  REGION 1..214: note = Description of Artificial Sequence: Synthetic polypeptide
  REGION 1..214: note = XENP021496 7B11_H0L0_IgG1_PVA_/S267K Light Chain
DIVMTQSQKFMSTSVGDRVSVTCKASQNVGTHVAWYQQKPGQSPKALVYSASYRYSGVPDRFTGSGSGTDFTLTISNVQSEDLAEYFCQQYNSYPLTFGGGTKLEIKRTVAAPSVFIFPPSDEQLKSGTASVVCLLNNFYPREAKVQWKVDNALQSGNSQESVTEQDSKDSTYSLSSTLTLSKADYEKHKVYACEVTHQGLSSPVTKSFNRGEC

SEQ ID NO: 3671 - protein, 107 aa, synthetic construct
  REGION 1..107: note = Description of Artificial Sequence: Synthetic polypeptide
  REGION 1..107: note = VL of XENP021496
DIVMTQSQKFMSTSVGDRVSVTCKASQNVGTHVAWYQQKPGQSPKALVYSASYRYSGVPDRFTGSGSGTDFTLTISNVQSEDLAEYFCQQYNSYPLTFGGGTKLEIK

SEQ ID NO: 3672 - protein, 11 aa, synthetic construct
  REGION 1..11: note = Description of Artificial Sequence: Synthetic peptide
  REGION 1..11: note = XENP021496 vlCDR1
KASQNVGTHVA

SEQ ID NO: 3673 - protein, 7 aa, synthetic construct
  REGION 1..7: note = Description of Artificial Sequence: Synthetic peptide
  REGION 1..7: note = XENP021496 vlCDR2
SASYRYS

SEQ ID NO: 3674 - protein, 9 aa, synthetic construct
  REGION 1..9: note = Description of Artificial Sequence: Synthetic peptide
  REGION 1..9: note = XENP021496 vlCDR3
QQYNSYPLT

SEQ ID NO: 3675 - protein, 447 aa, synthetic construct
  REGION 1..447: note = Description of Artificial Sequence: Synthetic polypeptide
  REGION 1..447: note = XENP021501 7B11var_H0L0_IgG1_PVA_/S267K Heavy Chain
QVQLKQSGPGLVQPSQSLSITCTVSGFSLTSYAVNWVRQSPGKGLEWLGVIWSGGSTDYNAAFISRLSISKDNSKSQVFFKMNSLQADDTAIYYCVSLYYRYDGFDYWGQGTLVTVSAASTKGPSVFPLAPSSKSTSGGTAALGCLVKDYFPEPVTVSWNSGALTSGVHTFPAVLQSSGLYSLSSVVTVPSSSLGTQTYICNVNHKPSNTKVDKKVEPKSCDKTHTCPPCPAPPVAGPSVFLFPPKPKDTLMISRTPEVTCVVVDVKHEDPEVKFNWYVDGVEVHNAKTKPREEQYNSTYRVVSVLTVLHQDWLNGKEYKCKVSNKALPAPIEKTISKAKGQPREPQVYTLPPSREEMTKNQVSLTCLVKGFYPSDIAVEWESNGQPENNYKTTPPVLDSDGSFFLYSKLTVDKSRWQQGNVFSCSVMHEALHNHYTQKSLSLSPGK

SEQ ID NO: 3676 - protein, 118 aa, synthetic construct
  REGION 1..118: note = Description of Artificial Sequence: Synthetic polypeptide
  REGION 1..118: note = VH of XENP021501
QVQLKQSGPGLVQPSQSLSITCTVSGFSLTSYAVNWVRQSPGKGLEWLGVIWSGGSTDYNAAFISRLSISKDNSKSQVFFKMNSLQADDTAIYYCVSLYYRYDGFDYWGQGTLVTVSA

SEQ ID NO: 3677 - protein, 5 aa, synthetic construct
  REGION 1..5: note = Description of Artificial Sequence: Synthetic peptide
  REGION 1..5: note = XENP021501 vhCDR1
SYAVN

SEQ ID NO: 3678 - protein, 16 aa, synthetic construct
  REGION 1..16: note = Description of Artificial Sequence: Synthetic peptide
  REGION 1..16: note = XENP021501 vhCDR2
VIWSGGSTDYNAAFIS

SEQ ID NO: 3679 - protein, 10 aa, synthetic construct
  REGION 1..10: note = Description of Artificial Sequence: Synthetic peptide
  REGION 1..10: note = XENP021501 vhCDR3
LYYRYDGFDY

SEQ ID NO: 3680 - protein, 214 aa, synthetic construct; identical to SEQ ID NO: 3670
  REGION 1..214: note = Description of Artificial Sequence: Synthetic polypeptide
  REGION 1..214: note = XENP021501 7B11var_H0L0_IgG1_PVA_/S267K Light Chain

SEQ ID NO: 3681 - protein, 107 aa, synthetic construct; identical to SEQ ID NO: 3671
  REGION 1..107: note = Description of Artificial Sequence: Synthetic polypeptide
  REGION 1..107: note = VL of XENP021501

SEQ ID NO: 3682 - protein, 11 aa, synthetic construct
  REGION 1..11: note = Description of Artificial Sequence: Synthetic peptide
  REGION 1..11: note = XENP021501 vlCDR1
KASQNVGTHVA

SEQ ID NO: 3683 - protein, 7 aa, synthetic construct
  REGION 1..7: note = Description of Artificial Sequence: Synthetic peptide
  REGION 1..7: note = XENP021501 vlCDR2
SASYRYS

SEQ ID NO: 3684 - protein, 9 aa, synthetic construct
  REGION 1..9: note = Description of Artificial Sequence: Synthetic peptide
  REGION 1..9: note = XENP021501 vlCDR3
QQYNSYPLT

SEQ ID NO: 3685 - protein, 446 aa, synthetic construct
  REGION 1..446: note = Description of Artificial Sequence: Synthetic polypeptide
  REGION 1..446: note = XENP021502 7C2_H0L0_IgG1_PVA_/S267K Heavy Chain
EVKVVESGGGLVKPGGSLKLSCAASGFTFSRYAMSWVRQTPEKRLEWVASISSGGSTYYPDSVQGRFTISRDNARNILYLQMSSLRSEDTAMYYCARGDYEGYFDYWGQGTSLTVSSASTKGPSVFPLAPSSKSTSGGTAALGCLVKDYFPEPVTVSWNSGALTSGVHTFPAVLQSSGLYSLSSVVTVPSSSLGTQTYICNVNHKPSNTKVDKKVEPKSCDKTHTCPPCPAPPVAGPSVFLFPPKPKDTLMISRTPEVTCVVVDVKHEDPEVKFNWYVDGVEVHNAKTKPREEQYNSTYRVVSVLTVLHQDWLNGKEYKCKVSNKALPAPIEKTISKAKGQPREPQVYTLPPSREEMTKNQVSLTCLVKGFYPSDIAVEWESNGQPENNYKTTPPVLDSDGSFFLYSKLTVDKSRWQQGNVFSCSVMHEALHNHYTQKSLSLSPGK

SEQ ID NO: 3686 - protein, 117 aa, synthetic construct
  REGION 1..117: note = Description of Artificial Sequence: Synthetic polypeptide
  REGION 1..117: note = VH of XENP021502
EVKVVESGGGLVKPGGSLKLSCAASGFTFSRYAMSWVRQTPEKRLEWVASISSGGSTYYPDSVQGRFTISRDNARNILYLQMSSLRSEDTAMYYCARGDYEGYFDYWGQGTSLTVSS

SEQ ID NO: 3687 - protein, 5 aa, synthetic construct
  REGION 1..5: note = Description of Artificial Sequence: Synthetic peptide
  REGION 1..5: note = XENP021502 vhCDR1
RYAMS

SEQ ID NO: 3688 - protein, 16 aa, synthetic construct
  REGION 1..16: note = Description of Artificial Sequence: Synthetic peptide
  REGION 1..16: note = XENP021502 vhCDR2
SISSGGSTYYPDSVQG

SEQ ID NO: 3689 - protein, 9 aa, synthetic construct
  REGION 1..9: note = Description of Artificial Sequence: Synthetic peptide
  REGION 1..9: note = XENP021502 vhCDR3
GDYEGYFDY

SEQ ID NO: 3690 - protein, 220 aa, synthetic construct
  REGION 1..220: note = Description of Artificial Sequence: Synthetic polypeptide
  REGION 1..220: note = XENP021502 7C2_H0L0_IgG1_PVA_/S267K Light Chain
DIVMTQSPSSLAMSVGQKVTMSCKSSQSLLNSINQKNYLAWYQQKPGQSPKLLVYFASTRESGVPDRFIGSGSGTDFTLTISSVQAEDLADYFCQQHYSTPLTFGAGTKLELKRTVAAPSVFIFPPSDEQLKSGTASVVCLLNNFYPREAKVQWKVDNALQSGNSQESVTEQDSKDSTYSLSSTLTLSKADYEKHKVYACEVTHQGLSSPVTKSFNRGEC

SEQ ID NO: 3691 - protein, 113 aa, synthetic construct
  REGION 1..113: note = Description of Artificial Sequence: Synthetic polypeptide
  REGION 1..113: note = VL of XENP021502
DIVMTQSPSSLAMSVGQKVTMSCKSSQSLLNSINQKNYLAWYQQKPGQSPKLLVYFASTRESGVPDRFIGSGSGTDFTLTISSVQAEDLADYFCQQHYSTPLTFGAGTKLELK

SEQ ID NO: 3692 - protein, 17 aa, synthetic construct
  REGION 1..17: note = Description of Artificial Sequence: Synthetic peptide
  REGION 1..17: note = XENP021502 vlCDR1
KSSQSLLNSINQKNYLA

SEQ ID NO: 3693 - protein, 7 aa, synthetic construct
  REGION 1..7: note = Description of Artificial Sequence: Synthetic peptide
  REGION 1..7: note = XENP021502 vlCDR2
FASTRES

SEQ ID NO: 3694 - protein, 9 aa, synthetic construct
  REGION 1..9: note = Description of Artificial Sequence: Synthetic peptide
  REGION 1..9: note = XENP021502 vlCDR3
QQHYSTPLT

SEQ ID NO: 3695 - protein, 442 aa, synthetic construct; identical to SEQ ID NO: 3625
  REGION 1..442: note = Description of Artificial Sequence: Synthetic polypeptide
  REGION 1..442: note = XENP021503 1D10_H0L0_IgG1_PVA_/S267K Heavy Chain

SEQ ID NO: 3696 - protein, 113 aa, synthetic construct; identical to SEQ ID NO: 3626
  REGION 1..113: note = Description of Artificial Sequence: Synthetic polypeptide
  REGION 1..113: note = VH of XENP021503

SEQ ID NO: 3697 - protein, 5 aa, synthetic construct
  REGION 1..5: note = Description of Artificial Sequence: Synthetic peptide
  REGION 1..5: note = XENP021503 vhCDR1
SFDMS

SEQ ID NO: 3698 - protein, 17 aa, synthetic construct
  REGION 1..17: note = Description of Artificial Sequence: Synthetic peptide
  REGION 1..17: note = XENP021503 vhCDR2
YISSDGASTFYPDTMKG

SEQ ID NO: 3699 - protein, 4 aa, synthetic construct
  REGION 1..4: note = Description of Artificial Sequence: Synthetic peptide
  REGION 1..4: note = XENP021503 vhCDR3
LGAY

SEQ ID NO: 3700 - protein, 219 aa, synthetic construct
  REGION 1..219: note = Description of Artificial Sequence: Synthetic polypeptide
  REGION 1..219: note = XENP021503 1D10_H0L0_IgG1_PVA_/S267K Light Chain
DVVMTQTPLTLSVTIGQPASISCKSSQSLLDSDGKTYLNWLLQRPGQSPKRLIYLVSKLDSGVPDRFTGSGSGTDFTLKISRVEAEDLGVYYCWQGTHFPYTFGGGTKLEIKRTVAAPSVFIFPPSDEQLKSGTASVVCLLNNFYPREAKVQWKVDNALQSGNSQESVTEQDSKDSTYSLSSTLTLSKADYEKHKVYACEVTHQGLSSPVTKSFNRGEC

SEQ ID NO: 3701 - protein, 112 aa, synthetic construct
  REGION 1..112: note = Description of Artificial Sequence: Synthetic polypeptide
  REGION 1..112: note = VL of XENP021503
DVVMTQTPLTLSVTIGQPASISCKSSQSLLDSDGKTYLNWLLQRPGQSPKRLIYLVSKLDSGVPDRFTGSGSGTDFTLKISRVEAEDLGVYYCWQGTHFPYTFGGGTKLEIK

SEQ ID NO: 3702 - protein, 16 aa, synthetic construct
  REGION 1..16: note = Description of Artificial Sequence: Synthetic peptide
  REGION 1..16: note = XENP021503 vlCDR1
KSSQSLLDSDGKTYLN

SEQ ID NO: 3703 - protein, 7 aa, synthetic construct
  REGION 1..7: note = Description of Artificial Sequence: Synthetic peptide
  REGION 1..7: note = XENP021503 vlCDR2
LVSKLDS

SEQ ID NO: 3704 - protein, 9 aa, synthetic construct
  REGION 1..9: note = Description of Artificial Sequence: Synthetic peptide
  REGION 1..9: note = XENP021503 vlCDR3
WQGTHFPYT

SEQ ID NO: 3705 - protein, 120 aa, synthetic construct
  REGION 1..120: note = Description of Artificial Sequence: Synthetic polypeptide
  REGION 1..120: note = 3C2[BTLA] variable heavy Chain
QVQLQESGPGLVKPSETLSLTCTISGGSISNYYWNWIRQPPGKGLEWIGYIYYSTSTKYNPSLKSRVTMSVETSKNQFSLKLSSVTAADTAVYYCARVKVYSTGWFFDYWGQGTLVTVSS

SEQ ID NO: 3706 - protein, 5 aa, synthetic construct
  REGION 1..5: note = Description of Artificial Sequence: Synthetic peptide
  REGION 1..5: note = 3C2[BTLA] vhCDR1
NYYWN

SEQ ID NO: 3707 - protein, 16 aa, synthetic construct
  REGION 1..16: note = Description of Artificial Sequence: Synthetic peptide
  REGION 1..16: note = 3C2[BTLA] vhCDR2
YIYYSTSTKYNPSLKS

SEQ ID NO: 3708 - protein, 12 aa, synthetic construct
  REGION 1..12: note = Description of Artificial Sequence: Synthetic peptide
  REGION 1..12: note = 3C2[BTLA] vhCDR3
VKVYSTGWFFDY

SEQ ID NO: 3709 - protein, 107 aa, synthetic construct [sequence omitted]

SEQ ID NO: 3710 - protein, 11 aa, synthetic construct
  REGION 1..11: note = Description of Artificial Sequence: Synthetic peptide
  REGION 1..11: note = 3C2[BTLA] vlCDR1
RASQGISSALA

SEQ ID NO: 3711 - protein, 7 aa, synthetic construct
  REGION 1..7: note = Description of Artificial Sequence: Synthetic peptide
  REGION 1..7: note = 3C2[BTLA] vlCDR2
DASSLES

SEQ ID NO: 3712 - protein, 9 aa, synthetic construct
  REGION 1..9: note = Description of Artificial Sequence: Synthetic peptide
  REGION 1..9: note = 3C2[BTLA] vlCDR3
QQFNSYPLT

SEQ ID NO: 3713 - protein, 127 aa, synthetic construct
  REGION 1..127: note = Description of Artificial Sequence: Synthetic polypeptide
  REGION 1..127: note = 11E2[BTLA] variable heavy Chain
EVQLVESGGGVIRPGGSLRLSCAASGFTFDDYGMSWVRQAPGKGLEWVSGINWNGGSTGYAASVKGRFTISRDNAKNSLYLQMNSLRAEDSALYYCARDYYYGPGSPNYFYYAMDVWGQGTTVTVSS

SEQ ID NO: 3714 - protein, 5 aa, synthetic construct
  REGION 1..5: note = Description of Artificial Sequence: Synthetic peptide
  REGION 1..5: note = 11E2[BTLA] vhCDR1
DYGMS

SEQ ID NO: 3715 - protein, 17 aa, synthetic construct
  REGION 1..17: note = Description of Artificial Sequence: Synthetic peptide
  REGION 1..17: note = 11E2[BTLA] vhCDR2
GINWNGGSTGYAASVKG

SEQ ID NO: 3716 - protein, 18 aa, synthetic construct
  REGION 1..18: note = Description of Artificial Sequence: Synthetic peptide
  REGION 1..18: note = 11E2[BTLA] vhCDR3
DYYYGPGSPNYFYYAMDV

SEQ ID NO: 3717 - protein, 107 aa, synthetic construct
  REGION 1..107: note = Description of Artificial Sequence: Synthetic polypeptide
  REGION 1..107: note = 11E2[BTLA] variable light Chain
DIQMTQSPSSLSASVGDRVTITCRASQGISSWLAWYQQKPEKAPKSLIYAASSLQSGVPSRFSGSGSGTDFTLTISSLQPEDFATYYCQQYNSYPRTFGQGTKVEIK

SEQ ID NO: 3718 - protein, 11 aa, synthetic construct
  REGION 1..11: note = Description of Artificial Sequence: Synthetic peptide
  REGION 1..11: note = 11E2[BTLA] vlCDR1
RASQGISSWLA

SEQ ID NO: 3719 - protein, 7 aa, synthetic construct
  REGION 1..7: note = Description of Artificial Sequence: Synthetic peptide
  REGION 1..7: note = 11E2[BTLA] vlCDR2
AASSLQS

SEQ ID NO: 3720 - protein, 9 aa, synthetic construct
  REGION 1..9: note = Description of Artificial Sequence: Synthetic peptide
  REGION 1..9: note = 11E2[BTLA] vlCDR3
QQYNSYPRT

SEQ ID NO: 3721 - protein, 119 aa, synthetic construct
  REGION 1..119: note = Description of Artificial Sequence: Synthetic polypeptide
  REGION 1..119: note = 4C7[BTLA] variable heavy Chain
QVQLQESGPGLVKPSETLSLTCTVHGGSINHYYWSWIRQPPGKGLEWIGYIYYSGSTKYNPSLKSRVSISVDTSKNQFSLKLTSVTAADTAVYYCAREWPYYYYEMDVWGQGTTVTVSS

SEQ ID NO: 3722 - protein, 5 aa, synthetic construct
  REGION 1..5: note = Description of Artificial Sequence: Synthetic peptide
  REGION 1..5: note = 4C7[BTLA] vhCDR1
HYYWS

SEQ ID NO: 3723 - protein, 16 aa, synthetic construct
  REGION 1..16: note = Description of Artificial Sequence: Synthetic peptide
  REGION 1..16: note = 4C7[BTLA] vhCDR2
YIYYSGSTKYNPSLKS

SEQ ID NO: 3724 - protein, 11 aa, synthetic construct
  REGION 1..11: note = Description of Artificial Sequence: Synthetic peptide
  REGION 1..11: note = 4C7[BTLA] vhCDR3
EWPYYYYEMDV

SEQ ID NO: 3725 - protein, 108 aa, synthetic construct
  REGION 1..108: note = Description of Artificial Sequence: Synthetic polypeptide
  REGION 1..108: note = 4C7[BTLA] variable light Chain
EIVLTQSPGTLSLSPGERATLSCRASQSVSSSYLAWYQQKPGQAPRLLIYGASSRATGIPDRFSGSGSGTDFTLTISRLEPEDFAVYYCQQYGSSFRTFGQGTKVEIK

SEQ ID NO: 3726 - protein, 12 aa, synthetic construct
  REGION 1..12: note = Description of Artificial Sequence: Synthetic peptide
  REGION 1..12: note = 4C7[BTLA] vlCDR1
RASQSVSSSYLA

SEQ ID NO: 3727 - protein, 7 aa, synthetic construct
  REGION 1..7: note = Description of Artificial Sequence: Synthetic peptide
  REGION 1..7: note = 4C7[BTLA] vlCDR2
GASSRAT

SEQ ID NO: 3728 - protein, 9 aa, synthetic construct
  REGION 1..9: note = Description of Artificial Sequence: Synthetic peptide
  REGION 1..9: note = 4C7[BTLA] vlCDR3
QQYGSSFRT

SEQ ID NO: 3729 - protein, 121 aa, synthetic construct
  REGION 1..121: note = Description of Artificial Sequence: Synthetic polypeptide
  REGION 1..121: note = 8D5[BTLA] variable heavy Chain
EVQLVESGGGLVQPGGSLRLSCAASGFTISSYDMHWVRQATGKGLEWVSVIGPAGDTYYPGSVKGRFTISRENAKNSLYLQMNSLRAGDTAVYYCAREGMAAHNYYGMDVWGQGTTVTVSS

SEQ ID NO: 3730 - protein, 5 aa, synthetic construct
  REGION 1..5: note = Description of Artificial Sequence: Synthetic peptide
  REGION 1..5: note = 8D5[BTLA] vhCDR1
SYDMH

SEQ ID NO: 3731 - protein, 16 aa, synthetic construct
  REGION 1..16: note = Description of Artificial Sequence: Synthetic peptide
  REGION 1..16: note = 8D5[BTLA] vhCDR2
VIGPAGDTYYPGSVKG

SEQ ID NO: 3732 - protein, 13 aa, synthetic construct
  REGION 1..13: note = Description of Artificial Sequence: Synthetic peptide
  REGION 1..13: note = 8D5[BTLA] vhCDR3
EGMAAHNYYGMDV

SEQ ID NO: 3733 - protein, 108 aa, synthetic construct
  REGION 1..108: note = Description of Artificial Sequence: Synthetic polypeptide
  REGION 1..108: note = 8D5[BTLA] variable light Chain
EIVLTQSPATLSLSPGERATLSCRASQSVSSYLAWYQQKPGQAPRLLIYDASNRATGIPARFSGSGSGTDFTLTISSLEPEDFAVYYCQQRSNWPPITFGQGTRLEIK

SEQ ID NO: 3734 - protein, 11 aa, synthetic construct
  REGION 1..11: note = Description of Artificial Sequence: Synthetic peptide
  REGION 1..11: note = 8D5[BTLA] vlCDR1
RASQSVSSYLA

SEQ ID NO: 3735 - protein, 7 aa, synthetic construct
  REGION 1..7: note = Description of Artificial Sequence: Synthetic peptide
  REGION 1..7: note = 8D5[BTLA] vlCDR2
DASNRAT

SEQ ID NO: 3736 - protein, 10 aa, synthetic construct
  REGION 1..10: note = Description of Artificial Sequence: Synthetic peptide
  REGION 1..10: note = 8D5[BTLA] vlCDR3
QQRSNWPPIT

SEQ ID NO: 3737 - protein, 118 aa, synthetic construct
  REGION 1..118: note = Description of Artificial Sequence: Synthetic polypeptide
  REGION 1..118: note = ipilimumab[CTLA-4] variable heavy Chain
QVQLVESGGGVVQPGRSLRLSCAASGFTFSSYTMHWVRQAPGKGLEWVTFISYDGNNKYYADSVKGRFTISRDNSKNTLYLQMNSLRAEDTAIYYCARTGWLGPFDYWGQGTLVTVSS

SEQ ID NO: 3738 - protein, 5 aa, synthetic construct
  REGION 1..5: note = Description of Artificial Sequence: Synthetic peptide
  REGION 1..5: note = ipilimumab[CTLA-4] vhCDR1
SYTMH

SEQ ID NO: 3739 - protein, 17 aa, synthetic construct
  REGION 1..17: note = Description of Artificial Sequence: Synthetic peptide
  REGION 1..17: note = ipilimumab[CTLA-4] vhCDR2
FISYDGNNKYYADSVKG

SEQ ID NO: 3740 - protein, 9 aa, synthetic construct
  REGION 1..9: note = Description of Artificial Sequence: Synthetic peptide
  REGION 1..9: note = ipilimumab[CTLA-4] vhCDR3
TGWLGPFDY

SEQ ID NO: 3741 - protein, 108 aa, synthetic construct
  REGION 1..108: note = Description of Artificial Sequence: Synthetic polypeptide
  REGION 1..108: note = ipilimumab[CTLA-4] variable light Chain
EIVLTQSPGTLSLSPGERATLSCRASQSVGSSYLAWYQQKPGQAPRLLIYGAFSRATGIPDRFSGSGSGTDFTLTISRLEPEDFAVYYCQQYGSSPWTFGQGTKVEIK

SEQ ID NO: 3742 - protein, 12 aa, synthetic construct
  REGION 1..12: note = Description of Artificial Sequence: Synthetic peptide
  REGION 1..12: note = ipilimumab[CTLA-4] vlCDR1
RASQSVGSSYLA

SEQ ID NO: 3743 - protein, 7 aa, synthetic construct
  REGION 1..7: note = Description of Artificial Sequence: Synthetic peptide
  REGION 1..7: note = ipilimumab[CTLA-4] vlCDR2
GAFSRAT

SEQ ID NO: 3744 - protein, 9 aa, synthetic construct
  REGION 1..9: note = Description of Artificial Sequence: Synthetic peptide
  REGION 1..9: note = ipilimumab[CTLA-4] vlCDR3
QQYGSSPWT

SEQ ID NO: 3745 - protein, 125 aa, synthetic construct
  REGION 1..125: note = Description of Artificial Sequence: Synthetic polypeptide
  REGION 1..125: note = tremelimumab[CTLA-4] variable heavy Chain
QVQLVESGGGVVQPGRSLRLSCAASGFTFSSYGMHWVRQAPGKGLEWVAVIWYDGSNKYYADSVKGRFTISRDNSKNTLYLQMNSLRAEDTAVYYCARDPRGATLYYYYYGMDVWGQGTTVTVSS

SEQ ID NO: 3746 - protein, 5 aa, synthetic construct
  REGION 1..5: note = Description of Artificial Sequence: Synthetic peptide
  REGION 1..5: note = tremelimumab[CTLA-4] vhCDR1
SYGMH

SEQ ID NO: 3747 - protein, 17 aa, synthetic construct
  REGION 1..17: note = Description of Artificial Sequence: Synthetic peptide
  REGION 1..17: note = tremelimumab[CTLA-4] vhCDR2
VIWYDGSNKYYADSVKG

SEQ ID NO: 3748 - protein, 16 aa, synthetic construct
  REGION 1..16: note = Description of Artificial Sequence: Synthetic peptide
  REGION 1..16: note = tremelimumab[CTLA-4] vhCDR3
DPRGATLYYYYYGMDV

SEQ ID NO: 3749 - protein, 107 aa, synthetic construct
  REGION 1..107: note = Description of Artificial Sequence: Synthetic polypeptide
  REGION 1..107: note = tremelimumab[CTLA-4] variable light Chain
DIQMTQSPSSLSASVGDRVTITCRASQSINSYLDWYQQKPGKAPKLLIYAASSLQSGVPSRFSGSGSGTDFTLTISSLQPEDFATYYCQQYYSTPFTFGPGTKVEIK

SEQ ID NO: 3750 - protein, 11 aa, synthetic construct
  REGION 1..11: note = Description of Artificial Sequence: Synthetic peptide
  REGION 1..11: note = tremelimumab[CTLA-4] vlCDR1
RASQSINSYLD

SEQ ID NO: 3751 - protein, 7 aa, synthetic construct
  REGION 1..7: note = Description of Artificial Sequence: Synthetic peptide
  REGION 1..7: note = tremelimumab[CTLA-4] vlCDR2
AASSLQS

SEQ ID NO: 3752 - protein, 9 aa, synthetic construct
  REGION 1..9: note = Description of Artificial Sequence: Synthetic peptide
  REGION 1..9: note = tremelimumab[CTLA-4] vlCDR3
QQYYSTPFT

SEQ ID NO: 3753 - protein, 118 aa, synthetic construct
  REGION 1..118: note = Description of Artificial Sequence: Synthetic polypeptide
  REGION 1..118: note = AGEN1884[CTLA-4] variable heavy Chain
EVQLVESGGGLVKPGGSLRLSCAASGFTFSSYSMNWVRQAPGKGLEWVSSISSSSSYIYYADSVKGRFTISRDNAKNSLYLQMNSLRAEDTAVYYCARVGLMGPFDIWGQGTMVTVSS

SEQ ID NO: 3754 - protein, 5 aa, synthetic construct
  REGION 1..5: note = Description of Artificial Sequence: Synthetic peptide
  REGION 1..5: note = AGEN1884[CTLA-4] vhCDR1
SYSMN

SEQ ID NO: 3755 - protein, 17 aa, synthetic construct
  REGION 1..17: note = Description of Artificial Sequence: Synthetic peptide
  REGION 1..17: note = AGEN1884[CTLA-4] vhCDR2
SISSSSSYIYYADSVKG

SEQ ID NO: 3756 - protein, 9 aa, synthetic construct
  REGION 1..9: note = Description of Artificial Sequence: Synthetic peptide
  REGION 1..9: note = AGEN1884[CTLA-4] vhCDR3
VGLMGPFDI

SEQ ID NO: 3757 - protein, 107 aa, synthetic construct
  REGION 1..107: note = Description of Artificial Sequence: Synthetic polypeptide
  REGION 1..107: note = AGEN1884[CTLA-4] variable light Chain
EIVLTQSPGTLSLSPGERATLSCRASQSVSRYLGWYQQKPGQAPRLLIYGASTRATGIPDRFSGSGSGTDFTLTITRLEPEDFAVYYCQQYGSSPWTFGQGTKVEIK

SEQ ID NO: 3758 - protein, 11 aa, synthetic construct
  REGION 1..11: note = Description of Artificial Sequence: Synthetic peptide
  REGION 1..11: note = AGEN1884[CTLA-4] vlCDR1
RASQSVSRYLG

SEQ ID NO: 3759 - protein, 7 aa, synthetic construct
  REGION 1..7: note = Description of Artificial Sequence: Synthetic peptide
  REGION 1..7: note = AGEN1884[CTLA-4] vlCDR2
GASTRAT

SEQ ID NO: 3760 - protein, 9 aa, synthetic construct
  REGION 1..9: note = Description of Artificial Sequence: Synthetic peptide
  REGION 1..9: note = AGEN1884[CTLA-4] vlCDR3
QQYGSSPWT

SEQ ID NO: 3761 - protein, 116 aa, synthetic construct
  REGION 1..116: note = Description of Artificial Sequence: Synthetic polypeptide
  REGION 1..116: note = 4.3F6B5[CTLA-4] variable heavy Chain
EVQLQPSGPVLVKPGASVKISCKASGYTFTDYKIHWVKQSHGKSLEWIGYIYPYSGSSDYNQKFKSKATLTVDNSSTTAYMELRSLTSEDSAVYYCARGGDAMDYWGQGTAVTVSS

SEQ ID NO: 3762 - protein, 5 aa, synthetic construct
  REGION 1..5: note = Description of Artificial Sequence: Synthetic peptide
  REGION 1..5: note = 4.3F6B5[CTLA-4] vhCDR1
DYKIH

SEQ ID NO: 3763 - protein, 17 aa, synthetic construct
  REGION 1..17: note = Description of Artificial Sequence: Synthetic peptide
  REGION 1..17: note = 4.3F6B5[CTLA-4] vhCDR2
YIYPYSGSSDYNQKFKS

SEQ ID NO: 3764 - protein, 7 aa, synthetic construct
  REGION 1..7: note = Description of Artificial Sequence: Synthetic peptide
  REGION 1..7: note = 4.3F6B5[CTLA-4] vhCDR3
GGDAMDY

SEQ ID NO: 3765 - protein, 106 aa, synthetic construct
  REGION 1..106: note = Description of Artificial Sequence: Synthetic polypeptide
  REGION 1..106: note = 4.3F6B5[CTLA-4] variable light Chain
DILMTQSPASLSASVGETVTITCGASENIYGALNWYQRKQGKSPQLLIYGATNLADGMSSRFSGSGLGRQYYLKISSLHPDDVATYFCQNILGTWTFGGGTKLEIK

SEQ ID NO: 3766 - protein, 11 aa, synthetic construct
  REGION 1..11: note = Description of Artificial Sequence: Synthetic peptide
  REGION 1..11: note = 4.3F6B5[CTLA-4] vlCDR1
GASENIYGALN

SEQ ID NO: 3767 - protein, 7 aa, synthetic construct
  REGION 1..7: note = Description of Artificial Sequence: Synthetic peptide
  REGION 1..7: note = 4.3F6B5[CTLA-4] vlCDR2
GATNLAD

SEQ ID NO: 3768 - protein, 8 aa, synthetic construct
  REGION 1..8: note = Description of Artificial Sequence: Synthetic peptide
  REGION 1..8: note = 4.3F6B5[CTLA-4] vlCDR3
QNILGTWT

SEQ ID NO: 3769 - protein, 117 aa, synthetic construct
  REGION 1..117: note = Description of Artificial Sequence: Synthetic polypeptide
  REGION 1..117: note = 4.8H10H5[CTLA-4] variable heavy Chain
DVKLVESGGGLVKLGGSLKLSCAASGFTFNIYYMSWVRQTPEKRLELVAAINPDGGNTYYPDTVKGRFTISRDNAKNTLYLQMSSLKSEDSALYYCARYGGPGFDSWGQGTTLTVSS

SEQ ID NO: 3770 - protein, 5 aa, synthetic construct
  REGION 1..5: note = Description of Artificial Sequence: Synthetic peptide
  REGION 1..5: note = 4.8H10H5[CTLA-4] vhCDR1
IYYMS

SEQ ID NO: 3771 - protein, 17 aa, synthetic construct
  REGION 1..17: note = Description of Artificial Sequence: Synthetic peptide
  REGION 1..17: note = 4.8H10H5[CTLA-4] vhCDR2
AINPDGGNTYYPDTVKG

SEQ ID NO: 3772 - protein, 8 aa, synthetic construct
  REGION 1..8: note = Description of Artificial Sequence: Synthetic peptide
  REGION 1..8: note = 4.8H10H5[CTLA-4] vhCDR3
YGGPGFDS

SEQ ID NO: 3773 - protein, 108 aa, synthetic construct
  REGION 1..108: note = Description of Artificial Sequence: Synthetic polypeptide
  REGION 1..108: note = 4.8H10H5[CTLA-4] variable light Chain
ENVLTQSPAIMSASPGERVTMTCSASSSVSYMHWYQQKSNTSPKLWIYDTSKLASGVPGRFSGSGSRNSYSLTISSMEAEDVATYYCFPGSGFPFMYTFGGGTKLEIK

SEQ ID NO: 3774 - protein, 10 aa, synthetic construct
  REGION 1..10: note = Description of Artificial Sequence: Synthetic peptide
  REGION 1..10: note = 4.8H10H5[CTLA-4] vlCDR1
SASSSVSYMH

SEQ ID NO: 3775 - protein, 7 aa, synthetic construct
  REGION 1..7: note = Description of Artificial Sequence: Synthetic peptide
  REGION 1..7: note = 4.8H10H5[CTLA-4] vlCDR2
DTSKLAS

SEQ ID NO: 3776 - protein, 11 aa, synthetic construct
  REGION 1..11: note = Description of Artificial Sequence: Synthetic peptide
  REGION 1..11: note = 4.8H10H5[CTLA-4] vlCDR3
FPGSGFPFMYT

SEQ ID NO: 3777 - protein, 116 aa, synthetic construct
  REGION 1..116: note = Description of Artificial Sequence: Synthetic polypeptide
  REGION 1..116: note = TGN2122.C[CTLA-4] variable heavy Chain
QVQLVQSGAEVKKPGASVKVSCKASGYTFTDYKIHWVRQAPGQGLEWIGYIYPYSGSSDYNQKFKSRATLTVDNSISTAYMELSRLRSDDTAVYYCARGGDAMDYWGQGTLVTVSS

SEQ ID NO: 3778 - protein, 5 aa, synthetic construct
  REGION 1..5: note = Description of Artificial Sequence: Synthetic peptide
  REGION 1..5: note = TGN2122.C[CTLA-4] vhCDR1
DYKIH

SEQ ID NO: 3779 - protein, 17 aa, synthetic construct
  REGION 1..17: note = Description of Artificial Sequence: Synthetic peptide
  REGION 1..17: note = TGN2122.C[CTLA-4] vhCDR2
YIYPYSGSSDYNQKFKS

SEQ ID NO: 3780 - protein, 7 aa, synthetic construct
  REGION 1..7: note = Description of Artificial Sequence: Synthetic peptide
  REGION 1..7: note = TGN2122.C[CTLA-4] vhCDR3
GGDAMDY

SEQ ID NO: 3781 - protein, 106 aa, synthetic construct
  REGION 1..106: note = Description of Artificial Sequence: Synthetic polypeptide
  REGION 1..106: note = TGN2122.C[CTLA-4] variable light Chain
DIQMTQSPSSLSASVGDRVTITCGASENIYGALNWYQRKPGKAPKLLIYGATNLADGVPSRFSGSGSGRDYTLTISSLQPEDFATYFCQNILGTWTFGGGTKVEIK

SEQ ID NO: 3782 - protein, 11 aa, synthetic construct
  REGION 1..11: note = Description of Artificial Sequence: Synthetic peptide
  REGION 1..11: note = TGN2122.C[CTLA-4] vlCDR1
GASENIYGALN

SEQ ID NO: 3783 - protein, 7 aa, synthetic construct
  REGION 1..7: note = Description of Artificial Sequence: Synthetic peptide
  REGION 1..7: note = TGN2122.C[CTLA-4] vlCDR2
GATNLAD

SEQ ID NO: 3784 - protein, 8 aa, synthetic construct
  REGION 1..8: note = Description of Artificial Sequence: Synthetic peptide
  REGION 1..8: note = TGN2122.C[CTLA-4] vlCDR3
QNILGTWT

SEQ ID NO: 3785 - protein, 117 aa, synthetic construct
  REGION 1..117: note = Description of Artificial Sequence: Synthetic polypeptide
  REGION 1..117: note = TGN2122.H[CTLA-4] variable heavy Chain
EVQLVESGGGLVQPGGSLRLSCAASGFTFNIYYMSWVRQAPGKGLELVAAINPDGGNTYYPDTVKGRFTISRDNAKNSLYLQMNSLRAEDTAVYYCARYGGPGFDSWGQGTLVTVSS

SEQ ID NO: 3786 - protein, 5 aa, synthetic construct
  REGION 1..5: note = Description of Artificial Sequence: Synthetic peptide
  REGION 1..5: note = TGN2122.H[CTLA-4] vhCDR1
IYYMS

SEQ ID NO: 3787 - protein, 17 aa, synthetic construct
  REGION 1..17: note = Description of Artificial Sequence: Synthetic peptide
  REGION 1..17: note = TGN2122.H[CTLA-4] vhCDR2
AINPDGGNTYYPDTVKG

SEQ ID NO: 3788 - protein, 8 aa, synthetic construct
  REGION 1..8: note = Description of Artificial Sequence: Synthetic peptide
  REGION 1..8: note = TGN2122.H[CTLA-4] vhCDR3
YGGPGFDS

SEQ ID NO: 3789 - protein, 108 aa, synthetic construct
  REGION 1..108: note = Description of Artificial Sequence: Synthetic polypeptide
  REGION 1..108: note = TGN2122.H[CTLA-4] variable light Chain
ENVLTQSPATLSLSPGERATLSCSASSSVSYMHWYQQKPGQAPRLWIYDTSKLASGIPARFSGSGSRNDYTLTISSLEPEDFAVYYCFPGSGFPFMYTFGGGTKVEIK

SEQ ID NO: 3790 - protein, 10 aa, synthetic construct
  REGION 1..10: note = Description of Artificial Sequence: Synthetic peptide
  REGION 1..10: note = TGN2122.H[CTLA-4] vlCDR1
SASSSVSYMH

SEQ ID NO: 3791 - protein, 7 aa, synthetic construct
  REGION 1..7: note = Description of Artificial Sequence: Synthetic peptide
  REGION 1..7: note = TGN2122.H[CTLA-4] vlCDR2
DTSKLAS

SEQ ID NO: 3792 - protein, 11 aa, synthetic construct
  REGION 1..11: note = Description of Artificial Sequence: Synthetic peptide
  REGION 1..11: note = TGN2122.H[CTLA-4] vlCDR3
FPGSGFPFMYT

SEQ ID NO: 3793 - protein, 123 aa, synthetic construct
  REGION 1..123: note = Description of Artificial Sequence: Synthetic polypeptide
  REGION 1..123: note = F7[CTLA-4] variable heavy Chain
QVQLVQSGAEVKKPGASVKVSCKASGYAFDGHYMHWVRQAPGQRLEWMGWVDPHSGATNYAQNFQGGVTMTRDTSINTVYMELSSLKSDDTAVYYCARDFYDTSAKSGAFDIWGQGTMVTVSS

SEQ ID NO: 3794 - protein, 5 aa, synthetic construct
  REGION 1..5: note = Description of Artificial Sequence: Synthetic peptide
  REGION 1..5: note = F7[CTLA-4] vhCDR1
GHYMH

SEQ ID NO: 3795 - protein, 17 aa, synthetic construct
  REGION 1..17: note = Description of Artificial Sequence: Synthetic peptide
  REGION 1..17: note = F7[CTLA-4] vhCDR2
WVDPHSGATNYAQNFQG

SEQ ID NO: 3796 - protein, 14 aa, synthetic construct
  REGION 1..14: note = Description of Artificial Sequence: Synthetic peptide
  REGION 1..14: note = F7[CTLA-4] vhCDR3
DFYDTSAKSGAFDI

SEQ ID NO: 3797 - protein, 107 aa, synthetic construct
  REGION 1..107: note = Description of Artificial Sequence: Synthetic polypeptide
  REGION 1..107: note = F7[CTLA-4] variable light Chain
AIQLTQSPSSVSASVGDRVTITCRASQGISSWLAWYQQKPGKAPKLLIYAASSLQSGVPSRFSGSGSGTDFTLTISSLQPEDFATYYCQQVNSFPWAFGQGTKVEIK

SEQ ID NO: 3798 - protein, 11 aa, synthetic construct
  REGION 1..11: note = Description of Artificial Sequence: Synthetic peptide
  REGION 1..11: note = F7[CTLA-4] vlCDR1
RASQGISSWLA

SEQ ID NO: 3799 - protein, 7 aa, synthetic construct
  REGION 1..7: note = Description of Artificial Sequence: Synthetic peptide
  REGION 1..7: note = F7[CTLA-4] vlCDR2
AASSLQS

SEQ ID NO: 3800 - protein, 9 aa, synthetic construct
  REGION 1..9: note = Description of Artificial Sequence: Synthetic peptide
  REGION 1..9: note = F7[CTLA-4] vlCDR3
QQVNSFPWA

SEQ ID NO: 3801 - protein, 121 aa, synthetic construct
  REGION 1..121: note = Description of Artificial Sequence: Synthetic polypeptide
  REGION 1..121: note = E8[CTLA-4] variable heavy Chain
QVQLVQSGAEVKKPGASVKVSCEASGYTFTNYYIHWLRQAPGQGLEWMGIINPSGGSTTYAQKFQGRITMTRDTSTNTLYMELSSLRSEDTAIYYCARRDCRGPSCYFAYWGQGTTVTVSS

SEQ ID NO: 3802 - protein, 5 aa, synthetic construct
  REGION 1..5: note = Description of Artificial Sequence: Synthetic peptide
  REGION 1..5: note = E8[CTLA-4] vhCDR1
NYYIH

SEQ ID NO: 3803 - protein, 17 aa, synthetic construct
  REGION 1..17: note = Description of Artificial Sequence: Synthetic peptide
  REGION 1..17: note = E8[CTLA-4] vhCDR2
IINPSGGSTTYAQKFQG

SEQ ID NO: 3804 - protein, 12 aa, synthetic construct
  REGION 1..12: note = Description of Artificial Sequence: Synthetic peptide
  REGION 1..12: note = E8[CTLA-4] vhCDR3
RDCRGPSCYFAY

SEQ ID NO: 3805 - protein, 107 aa, synthetic construct
  REGION 1..107: note = Description of Artificial Sequence: Synthetic polypeptide
  REGION 1..107: note = E8[CTLA-4] variable light Chain
DIVMTQSPSSLSASVGDRVTITCRASQSISSYLNWYQQKPGKAPKLLIYAASSLQSGVPPRFSGSGSGTEFTLTISSLQPEDFATYYCQQANSFPPTFGQGTKVDIK

SEQ ID NO: 3806 - protein, 11 aa, synthetic construct
  REGION 1..11: note = Description of Artificial Sequence: Synthetic peptide
  REGION 1..11: note = E8[CTLA-4] vlCDR1
RASQSISSYLN

SEQ ID NO: 3807 - protein, 7 aa, synthetic construct
  REGION 1..7: note = Description of Artificial Sequence: Synthetic peptide
  REGION 1..7: note = E8[CTLA-4] vlCDR2
AASSLQS

SEQ ID NO: 3808 - protein, 9 aa, synthetic construct
  REGION 1..9: note = Description of Artificial Sequence: Synthetic peptide
  REGION 1..9: note = E8[CTLA-4] vlCDR3
QQANSFPPT

SEQ ID NO: 3809 - protein, 114 aa, synthetic construct
  REGION 1..114: note = Description of Artificial Sequence: Synthetic polypeptide
  REGION 1..114: note = CT1E1[CTLA-4] variable heavy Chain
EVQLVESGGGLVQPGRSLRLSCRGSNFNFDDLAISWVRQAPGKGLEWLGFVRSKAYGETTDYVASVKGRFTISRDDSKFIAWLQMDSLKTDDTAVYYCTTFNYWGQGTLVTVSS

SEQ ID NO: 3810 - protein, 5 aa, synthetic construct
  REGION 1..5: note = Description of Artificial Sequence: Synthetic peptide
  REGION 1..5: note = CT1E1[CTLA-4] vhCDR1
DLAIS

SEQ ID NO: 3811 - protein, 19 aa, synthetic construct
  REGION 1..19: note = Description of Artificial Sequence: Synthetic peptide
  REGION 1..19: note = CT1E1[CTLA-4] vhCDR2
FVRSKAYGETTDYVASVKG

SEQ ID NO: 3812 - skipped

SEQ ID NO: 3813 - protein, 108 aa, synthetic construct
  REGION 1..108: note = Description of Artificial Sequence: Synthetic polypeptide
  REGION 1..108: note = CT1E1[CTLA-4] variable light Chain
QPVLTQPPSVSVAPGKTARISCGGNNIASEAVHWYQKKPGQAPVLVIYYDSDRPSGIPERFSGSNSGNTATLRISRVDAGDEADYYCQVWDRTTDQPVFGGGTKLTVL

SEQ ID NO: 3814 - protein, 11 aa, synthetic construct
  REGION 1..11: note = Description of Artificial Sequence: Synthetic peptide
  REGION 1..11: note = CT1E1[CTLA-4] vlCDR1
GGNNIASEAVH

SEQ ID NO: 3815 - protein, 7 aa, synthetic construct
  REGION 1..7: note = Description of Artificial Sequence: Synthetic peptide
  REGION 1..7: note = CT1E1[CTLA-4] vlCDR2
YDSDRPS

SEQ ID NO: 3816 - protein, 11 aa, synthetic construct
  REGION 1..11: note = Description of Artificial Sequence: Synthetic peptide
  REGION 1..11: note = CT1E1[CTLA-4] vlCDR3
QVWDRTTDQPV

SEQ ID NO: 3817 - protein, 120 aa, synthetic construct
  REGION 1..120: note = Description of Artificial Sequence: Synthetic polypeptide
  REGION 1..120: note = BMS-986016[LAG-3] variable heavy Chain
QVQLQQWGAGLLKPSETLSLTCAVYGGSFSDYYWNWIRQPPGKGLEWIGEINHRGSTNSNPSLKSRVTLSLDTSKNQFSLKLRSVTAADTAVYYCAFGYSDYEYNWFDPWGQGTLVTVSS

SEQ ID NO: 3818 - protein, 5 aa, synthetic construct
  REGION 1..5: note = Description of Artificial Sequence: Synthetic peptide
  REGION 1..5: note = BMS-986016[LAG-3] vhCDR1
DYYWN

SEQ ID NO: 3819 - protein, 16 aa, synthetic construct
  REGION 1..16: note = Description of Artificial Sequence: Synthetic peptide
  REGION 1..16: note = BMS-986016[LAG-3] vhCDR2
EINHRGSTNSNPSLKS

SEQ ID NO: 3820 - protein, 12 aa, synthetic construct
  REGION 1..12: note = Description of Artificial Sequence: Synthetic peptide
  REGION 1..12: note = BMS-986016[LAG-3] vhCDR3
GYSDYEYNWFDP

SEQ ID NO: 3821 - protein, 107 aa, synthetic construct
  REGION 1..107: note = Description of Artificial Sequence: Synthetic polypeptide
  REGION 1..107: note = BMS-986016[LAG-3] variable light Chain
EIVLTQSPATLSLSPGERATLSCRASQSISSYLAWYQQKPGQAPRLLIYDASNRATGIPARFSGSGSGTDFTLTISSLEPEDFAVYYCQQRSNWPLTFGQGTNLEIK

SEQ ID NO: 3822 - protein, 11 aa, synthetic construct
  REGION 1..11: note = Description of Artificial Sequence: Synthetic peptide
  REGION 1..11: note = BMS-986016[LAG-3] vlCDR1
RASQSISSYLA

SEQ ID NO: 3823 - protein, 7 aa, synthetic construct
  REGION 1..7: note = Description of Artificial Sequence: Synthetic peptide
  REGION 1..7: note = BMS-986016[LAG-3] vlCDR2
DASNRAT

SEQ ID NO: 3824 - protein, 9 aa, synthetic construct
  REGION 1..9: note = Description of Artificial Sequence: Synthetic peptide
  REGION 1..9: note = BMS-986016[LAG-3] vlCDR3
QQRSNWPLT

SEQ ID NO: 3825 - protein, 116 aa, synthetic construct
  REGION 1..116: note = Description of Artificial Sequence: Synthetic polypeptide
  REGION 1..116: note = IMP731[LAG-3] variable heavy Chain
QVQLKESGPGLVAPSQSLSITCTVSGFSLTAYGVNWVRQPPGKGLEWLGMIWDDGSTDYNSALKSRLSISKDNSKSQVFLKMNSLQTDDTARYYCAREGDVAFDYWGQGTTLTVSS

SEQ ID NO: 3826 - protein, 5 aa, synthetic construct
  REGION 1..5: note = Description of Artificial Sequence: Synthetic peptide
  REGION 1..5: note = IMP731[LAG-3] vhCDR1
AYGVN

SEQ ID NO: 3827 - protein, 16 aa, synthetic construct
  REGION 1..16: note = Description of Artificial Sequence: Synthetic peptide
  REGION 1..16: note = IMP731[LAG-3] vhCDR2
MIWDDGSTDYNSALKS

SEQ ID NO: 3828 - protein, 8 aa, synthetic construct
  REGION 1..8: note = Description of Artificial Sequence: Synthetic peptide
  REGION 1..8: note = IMP731[LAG-3] vhCDR3
EGDVAFDY

SEQ ID NO: 3829 - protein, 113 aa, synthetic construct
  REGION 1..113: note = Description of Artificial Sequence: Synthetic polypeptide
  REGION 1..113: note = IMP731[LAG-3] variable light Chain
DIVMTQSPSSLAVSVGQKVTMSCKSSQSLLNGSNQKNYLAWYQQKPGQSPKLLVYFASTRDSGVPDRFIGSGSGTDFTLTISSVQAEDLADYFCLQHFGTPPTFGGGTKLEIK

SEQ ID NO: 3830 - protein, 17 aa, synthetic construct
  REGION 1..17: note = Description of Artificial Sequence: Synthetic peptide
  REGION 1..17: note = IMP731[LAG-3] vlCDR1
KSSQSLLNGSNQKNYLA

SEQ ID NO: 3831 - protein, 7 aa, synthetic construct
  REGION 1..7: note = Description of Artificial Sequence: Synthetic peptide
  REGION 1..7: note = IMP731[LAG-3] vlCDR2
FASTRDS

SEQ ID NO: 3832 - protein, 9 aa, synthetic construct
  REGION 1..9: note = Description of Artificial Sequence: Synthetic peptide
  REGION 1..9: note = IMP731[LAG-3] vlCDR3
LQHFGTPPT

SEQ ID NO: 3833 - protein, 123 aa, synthetic construct
  REGION 1..123: note = Description of Artificial Sequence: Synthetic polypeptide
  REGION 1..123: note = 13E2[LAG-3] variable heavy Chain
QVTLKESGPGILQPSQTLSLTCSFSGFSLSTSGMGLGWIRQPSGKGLEWLTHIWWDDIKRYNPDLRSRLTISKDTSSSQIFLKIASVDTADTATYYCARIVEGSYSSSYFDVWGAGTTVTVSS

SEQ ID NO: 3834 - protein, 7 aa, synthetic construct
  REGION 1..7: note = Description of Artificial Sequence: Synthetic peptide
  REGION 1..7: note = 13E2[LAG-3] vhCDR1
TSGMGLG

SEQ ID NO: 3835 - protein, 16 aa, synthetic construct
  REGION 1..16: note = Description of Artificial Sequence: Synthetic peptide
  REGION 1..16: note = 13E2[LAG-3] vhCDR2
HIWWDDIKRYNPDLRS

SEQ ID NO: 3836 - protein, 13 aa, synthetic construct
  REGION 1..13: note = Description of Artificial Sequence: Synthetic peptide
  REGION 1..13: note = 13E2[LAG-3] vhCDR3
IVEGSYSSSYFDV

SEQ ID NO: 3837 - protein, 107 aa, synthetic construct
  REGION 1..107: note = Description of Artificial Sequence: Synthetic polypeptide
  REGION 1..107: note = 13E2[LAG-3] variable light Chain
DIVMTQPHKFMSTSVEDRVTITCKASQDVIFDVAWYQQKPGQSPKLLIYSASSRVSGVPDRFTGSGSGTDFTFTISSVQAEDLAVYYCQQHYSTPYTFGGGTTLEIK

SEQ ID NO: 3838 - protein, 11 aa, synthetic construct
  REGION 1..11: note = Description of Artificial Sequence: Synthetic peptide
  REGION 1..11: note = 13E2[LAG-3] vlCDR1
KASQDVIFDVA

SEQ ID NO: 3839 - protein, 7 aa, synthetic construct
  REGION 1..7: note = Description of Artificial Sequence: Synthetic peptide
  REGION 1..7: note = 13E2[LAG-3] vlCDR2
SASSRVS

SEQ ID NO: 3840 - protein, 9 aa, synthetic construct
  REGION 1..9: note = Description of Artificial Sequence: Synthetic peptide
  REGION 1..9: note = 13E2[LAG-3] vlCDR3
QQHYSTPYT

SEQ ID NO: 3841 - protein, 123 aa, synthetic construct
  REGION 1..123: note = Description of Artificial Sequence: Synthetic polypeptide
  REGION 1..123: note = 34F4[LAG-3] variable heavy Chain
QVTLKESGPGILQPSQTLSLTCSFSGFSLNTSGMGVGWIRQPSGKGLEWLTHIWWDDVKRYNPALKSRLTISKDTSSSQVFLKIASVDTADTATYYCARIEGDTYYDYYFDYWGQGVTLTVSS

SEQ ID NO: 3842 - protein, 7 aa, synthetic construct
  REGION 1..7: note = Description of Artificial Sequence: Synthetic peptide
  REGION 1..7: note = 34F4[LAG-3] vhCDR1
TSGMGVG

SEQ ID NO: 3843 - protein, 16 aa, synthetic construct
  REGION 1..16: note = Description of Artificial Sequence: Synthetic peptide
  REGION 1..16: note = 34F4[LAG-3] vhCDR2
HIWWDDVKRYNPALKS

SEQ ID NO: 3844 - protein, 13 aa, synthetic construct
  REGION 1..13: note = Description of Artificial Sequence: Synthetic peptide
  REGION 1..13: note = 34F4[LAG-3] vhCDR3
IEGDTYYDYYFDY

SEQ ID NO: 3845 - protein, 107 aa, synthetic construct
  REGION 1..107: note = Description of Artificial Sequence: Synthetic polypeptide
  REGION 1..107: note = 34F4[LAG-3] variable light Chain
DIVMTQSHKLMSTSVGDGLSITCKASQDVSIAVVWYQQKPGQSPKLLIYSASFRYTGVPDRFTGSGSGTDFTFTISSVQAEDLAVYYCQQHYSIPWTFGGGTKLEIK

SEQ ID NO: 3846 - protein, 11 aa, synthetic construct
  REGION 1..11: note = Description of Artificial Sequence: Synthetic peptide
  REGION 1..11: note = 34F4[LAG-3] vlCDR1
KASQDVSIAVV

SEQ ID NO: 3847 - protein, 7 aa, synthetic construct
  REGION 1..7: note = Description of Artificial Sequence: Synthetic peptide
  REGION 1..7: note = 34F4[LAG-3] vlCDR2
SASFRYT

SEQ ID NO: 3848 - protein, 9 aa, synthetic construct
  REGION 1..9: note = Description of Artificial Sequence: Synthetic peptide
  REGION 1..9: note = 34F4[LAG-3] vlCDR3
QQHYSIPWT

SEQ ID NO: 3849 - protein, 123 aa, synthetic construct
  REGION 1..123: note = Description of Artificial Sequence: Synthetic polypeptide
  REGION 1..123: note = IMP761[LAG-3] variable heavy Chain
QITLKESGPTLVKPTQTLTLTCTFSGFSLSTSGMGLGWIRQPPGKTLEWLTHIWWDDIKRYNPDLRSRLSITKDTSKNQVVLTMTNMDPLDTGTYYCARIVEGSYSSSYFDVWGQGTLVTVSS

SEQ ID NO: 3850 - protein, 7 aa, synthetic construct
  REGION 1..7: note = Description of Artificial Sequence: Synthetic peptide
  REGION 1..7: note = IMP761[LAG-3] vhCDR1
TSGMGLG

SEQ ID NO: 3851 - protein, 16 aa, synthetic construct
  REGION 1..16: note = Description of Artificial Sequence: Synthetic peptide
  REGION 1..16: note = IMP761[LAG-3] vhCDR2
HIWWDDIKRYNPDLRS

SEQ ID NO: 3852 - protein, 13 aa, synthetic construct
  REGION 1..13: note = Description of Artificial Sequence: Synthetic peptide
  REGION 1..13: note = IMP761[LAG-3] vhCDR3
IVEGSYSSSYFDV

SEQ ID NO: 3853 - protein, 107 aa, synthetic construct
  REGION 1..107: note = Description of Artificial Sequence: Synthetic polypeptide
  REGION 1..107: note = IMP761[LAG-3] variable light Chain
DIVMTQTPSSLSASVGDRVTITCKASQDVIFDVAWYQQRPGQAPKLLIYSASSRVSGVPSRFSGSGSGTDFTLTISSLQPEDFATYYCQQHYSTPYTFGQGTRLDIK

SEQ ID NO: 3854 - protein, 11 aa, synthetic construct
  REGION 1..11: note = Description of Artificial Sequence: Synthetic peptide
  REGION 1..11: note = IMP761[LAG-3] vlCDR1
KASQDVIFDVA

SEQ ID NO: 3855 - protein, 7 aa, synthetic construct
  REGION 1..7: note = Description of Artificial Sequence: Synthetic peptide
  REGION 1..7: note = IMP761[LAG-3] vlCDR2
SASSRVS

SEQ ID NO: 3856 - protein, 9 aa, synthetic construct
  REGION 1..9: note = Description of Artificial Sequence: Synthetic peptide
  REGION 1..9: note = IMP761[LAG-3] vlCDR3
QQHYSTPYT

SEQ ID NO: 3857 - protein, 116 aa, synthetic construct
  REGION 1..116: note = Description of Artificial Sequence: Synthetic polypeptide
  REGION 1..116: note = H5L7[LAG-3] variable heavy Chain
QVQLQESGPGLVKPSETLSLTCTVSGFSLTAYGVNWIRQPPGKGLEWIGMIWDDGSTDYDSALKSRVTISVDTSKNQFSLKLSSVTAADTAVYYCAREGDVAFDYWGQGTLVTVSS

SEQ ID NO: 3858 - protein, 5 aa, synthetic construct
  REGION 1..5: note = Description of Artificial Sequence: Synthetic peptide
  REGION 1..5: note = H5L7[LAG-3] vhCDR1
AYGVN

SEQ ID NO: 3859 - protein, 16 aa, synthetic construct
  REGION 1..16: note = Description of Artificial Sequence: Synthetic peptide
  REGION 1..16: note = H5L7[LAG-3] vhCDR2
MIWDDGSTDYDSALKS

SEQ ID NO: 3860 - protein, 8 aa, synthetic construct
  REGION 1..8: note = Description of Artificial Sequence: Synthetic peptide
  REGION 1..8: note = H5L7[LAG-3] vhCDR3
EGDVAFDY

SEQ ID NO: 3861 - protein, 113 aa, synthetic construct
  REGION 1..113: note = Description of Artificial Sequence: Synthetic polypeptide
  REGION 1..113: note = H5L7[LAG-3] variable light Chain
DIQMTQSPSSLSASVGDRVTITCKSSQSLLNPSNQKNYLAWYQQKPGKAPKLLVYFASTRDSGVPSRFSGSGSGTDFTLTISSLQPEDFATYYCLQHFGTPPTFGQGTKLEIK

SEQ ID NO: 3862 - protein, 17 aa, synthetic construct
  REGION 1..17: note = Description of Artificial Sequence: Synthetic peptide
  REGION 1..17: note = H5L7[LAG-3] vlCDR1
KSSQSLLNPSNQKNYLA

SEQ ID NO: 3863 - protein, 7 aa, synthetic construct
  REGION 1..7: note = Description of Artificial Sequence: Synthetic peptide
  REGION 1..7: note = H5L7[LAG-3] vlCDR2
FASTRDS

SEQ ID NO: 3864 - protein, 9 aa, synthetic construct
  REGION 1..9: note = Description of Artificial Sequence: Synthetic peptide
  REGION 1..9: note = H5L7[LAG-3] vlCDR3
LQHFGTPPT

SEQ ID NO: 3865 - protein, 119 aa, synthetic construct
  REGION 1..119: note = Description of Artificial Sequence: Synthetic polypeptide
  REGION 1..119: note = hu22D2[LAG-3] variable heavy Chain
QMQLVQSGPEVKKPGTSVKVSCKASGYTFTDYNVDWVRQARGQRLEWIGDINPNNGGTIYAQKFQERVTITVDKSTSTAYMELSSLRSEDTAVYYCARNYRWFGAMDHWGQGTTVTVSS

SEQ ID NO: 3866 - protein, 5 aa, synthetic construct
  REGION 1..5: note = Description of Artificial Sequence: Synthetic peptide
  REGION 1..5: note = hu22D2[LAG-3] vhCDR1
DYNVD

SEQ ID NO: 3867 - protein, 17 aa, synthetic construct
  REGION 1..17: note = Description of Artificial Sequence: Synthetic peptide
  REGION 1..17: note = hu22D2[LAG-3] vhCDR2
DINPNNGGTIYAQKFQE

SEQ ID NO: 3868 - protein, 10 aa, synthetic construct
  REGION 1..10: note = Description of Artificial Sequence: Synthetic peptide
  REGION 1..10: note = hu22D2[LAG-3] vhCDR3
NYRWFGAMDH

SEQ ID NO: 3869 - protein, 111 aa, synthetic construct
  REGION 1..111: note = Description of Artificial Sequence: Synthetic polypeptide
  REGION 1..111: note = hu22D2[LAG-3] variable light Chain
DIVMTQTPLSLSVTPGQPASISCKASQSLDYEGDSDMNWYLQKPGQPPQLLIYGASNLESGVPDRFSGSGSGTDFTLKISRVEAEDVGVYYCQQSTEDPRTFGGGTKVEIK

SEQ ID NO: 3870 - protein, 15 aa, synthetic construct
  REGION 1..15: note = Description of Artificial Sequence: Synthetic peptide
  REGION 1..15: note = hu22D2[LAG-3] vlCDR1
KASQSLDYEGDSDMN

SEQ ID NO: 3871 - protein, 7 aa, synthetic construct
  REGION 1..7: note = Description of Artificial Sequence: Synthetic peptide
  REGION 1..7: note = hu22D2[LAG-3] vlCDR2
GASNLES

SEQ ID NO: 3872 - protein, 9 aa, synthetic construct
  REGION 1..9: note = Description of Artificial Sequence: Synthetic peptide
  REGION 1..9: note = hu22D2[LAG-3] vlCDR3
QQSTEDPRT

SEQ ID NO: 3873 - protein, 123 aa, synthetic construct
  REGION 1..123: note = Description of Artificial Sequence: Synthetic polypeptide
  REGION 1..123: note = H4sH15482P[LAG-3] variable heavy Chain
QVQLVESGGGVVQPGRSLRLSCVASGFTFSSYGMHWVRQAPGKGLEWVAIIWYDGSNKYYADSVKGRFTISRDNSKNTQYLQMNSLRAEDTAVYYCASVATSGDFDYYGMDVWGQGTTVTVSS

SEQ ID NO: 3874 - protein, 5 aa, synthetic construct
  REGION 1..5: note = Description of Artificial Sequence: Synthetic peptide
  REGION 1..5: note = H4sH15482P[LAG-3] vhCDR1
SYGMH

SEQ ID NO: 3875 - protein, 17 aa, synthetic construct
  REGION 1..17: note = Description of Artificial Sequence: Synthetic peptide
  REGION 1..17: note = H4sH15482P[LAG-3] vhCDR2
IIWYDGSNKYYADSVKG

SEQ ID NO: 3876 - protein, 14 aa, synthetic construct
  REGION 1..14: note = Description of Artificial Sequence: Synthetic peptide
  REGION 1..14: note = H4sH15482P[LAG-3] vhCDR3
VATSGDFDYYGMDV

SEQ ID NO: 3877 - protein, 107 aa, synthetic construct
  REGION 1..107: note = Description of Artificial Sequence: Synthetic polypeptide
  REGION 1..107: note = H4sH15482P[LAG-3] variable light Chain
EIVLTQSPATLSLSPGERTTLSCRASQRISTYLAWYQQKPGQAPRLLIYDASKRATGIPARFSGSGSGTGFTLTISSLEPEDFAVYYCQQRSNWPLTFGGGTKVEIK

SEQ ID NO: 3878 - protein, 11 aa, synthetic construct
  REGION 1..11: note = Description of Artificial Sequence: Synthetic peptide
  REGION 1..11: note = H4sH15482P[LAG-3] vlCDR1
RASQRISTYLA

SEQ ID NO: 3879 - protein, 7 aa, synthetic construct
  REGION 1..7: note = Description of Artificial Sequence: Synthetic peptide
  REGION 1..7: note = H4sH15482P[LAG-3] vlCDR2
DASKRAT

SEQ ID NO: 3880 - protein, 9 aa, synthetic construct
  REGION 1..9: note = Description of Artificial Sequence: Synthetic peptide
  REGION 1..9: note = H4sH15482P[LAG-3] vlCDR3
QQRSNWPLT

SEQ ID NO: 3881 - protein, 119 aa, synthetic construct
  REGION 1..119: note = Description of Artificial Sequence: Synthetic polypeptide
  REGION 1..119: note = L35D4[LAG-3] variable heavy Chain
QVQLVQSGAEVKKPGASVKVSCKASGYTFTSYYMHWVRQAPGQGLEWMGIINPSAGSTSYAQKFQGRVTMTRDTSTSTVYMELSSLRSEDTAVYYCARELMATGGFDYWGQGTLVTVSS

SEQ ID NO: 3882 - protein, 5 aa, synthetic construct
  REGION 1..5: note = Description of Artificial Sequence: Synthetic peptide
  REGION 1..5: note = L35D4[LAG-3] vhCDR1
SYYMH

SEQ ID NO: 3883 - protein, 17 aa, synthetic construct
  REGION 1..17: note = Description of Artificial Sequence: Synthetic peptide
  REGION 1..17: note = L35D4[LAG-3] vhCDR2
IINPSAGSTSYAQKFQG

SEQ ID NO: 3884 - protein, 10 aa, synthetic construct
  REGION 1..10: note = Description of Artificial Sequence: Synthetic peptide
  REGION 1..10: note = L35D4[LAG-3] vhCDR3
ELMATGGFDY

SEQ ID NO: 3885 - protein, 112 aa, synthetic construct
  REGION 1..112: note = Description of Artificial Sequence: Synthetic polypeptide
  REGION 1..112: note = L35D4[LAG-3] variable light Chain
QSVLTQPPSASGSPGQSVTISCTGTSSDVGGYNYVSWYQQYPGKAPRLMIFEVTERASGVPDRFSGSKSGNTASLTVSGLQTEDEAVYFCSSYSGSNNPGAMFGGGTKLTVL

SEQ ID NO: 3886 - protein, 14 aa, synthetic construct
  REGION 1..14: note = Description of Artificial Sequence: Synthetic peptide
  REGION 1..14: note = L35D4[LAG-3] vlCDR1
TGTSSDVGGYNYVS

SEQ ID NO: 3887 - protein, 7 aa, synthetic construct
  REGION 1..7: note = Description of Artificial Sequence: Synthetic peptide
  REGION 1..7: note = L35D4[LAG-3] vlCDR2
EVTERAS

SEQ ID NO: 3888 - protein, 12 aa, synthetic construct
  REGION 1..12: note = Description of Artificial Sequence: Synthetic peptide
  REGION 1..12: note = L35D4[LAG-3] vlCDR3
SSYSGSNNPGAM

SEQ ID NO: 3889 - protein, 119 aa, synthetic construct; identical to SEQ ID NO: 3881
  REGION 1..119: note = Description of Artificial Sequence: Synthetic polypeptide
  REGION 1..119: note = L35G6[LAG-3] variable heavy Chain

SEQ ID NO: 3890 - protein, 5 aa, synthetic construct
  REGION 1..5: note = Description of Artificial Sequence: Synthetic peptide
  REGION 1..5: note = L35G6[LAG-3] vhCDR1
SYYMH

SEQ ID NO: 3891 - protein, 17 aa, synthetic construct
  REGION 1..17: note = Description of Artificial Sequence: Synthetic peptide
  REGION 1..17: note = L35G6[LAG-3] vhCDR2
IINPSAGSTSYAQKFQG

SEQ ID NO: 3892 - protein, 10 aa, synthetic construct
  REGION 1..10: note = Description of Artificial Sequence: Synthetic peptide
  REGION 1..10: note = L35G6[LAG-3] vhCDR3
ELMATGGFDY

SEQ ID NO: 3893 - protein, 110 aa, synthetic construct
  REGION 1..110: note = Description of Artificial Sequence: Synthetic polypeptide
  REGION 1..110: note = L35G6[LAG-3] variable light Chain
QAGLTQPASVSGSPGQSITISCTGSSSDVGGYSYVSWYQKHPGKAPKLMIYDVTNRPSGVSNRFSGSKSGNTASLTISGLQAEDEADYYCSTYTRSNTLVFGPGTKVTVL

SEQ ID NO: 3894 - protein, 14 aa, synthetic construct
  REGION 1..14: note = Description of Artificial Sequence: Synthetic peptide
  REGION 1..14: note = L35G6[LAG-3] vlCDR1
TGSSSDVGGYSYVS

SEQ ID NO: 3895 - protein, 7 aa, synthetic construct
  REGION 1..7: note = Description of Artificial Sequence: Synthetic peptide
  REGION 1..7: note = L35G6[LAG-3] vlCDR2
DVTNRPS

SEQ ID NO: 3896 - protein, 10 aa, synthetic construct
  REGION 1..10: note = Description of Artificial Sequence: Synthetic peptide
  REGION 1..10: note = L35G6[LAG-3] vlCDR3
STYTRSNTLV

SEQ ID NO: 3897 - protein, 119 aa, synthetic construct; identical to SEQ ID NO: 3881
  REGION 1..119: note = Description of Artificial Sequence: Synthetic polypeptide
  REGION 1..119: note = L33H11[LAG-3] variable heavy Chain

SEQ ID NO: 3898 - protein, 5 aa, synthetic construct
  REGION 1..5: note = Description of Artificial Sequence: Synthetic peptide
  REGION 1..5: note = L33H11[LAG-3] vhCDR1
SYYMH

SEQ ID NO: 3899 - protein, 17 aa, synthetic construct
  REGION 1..17: note = Description of Artificial Sequence: Synthetic peptide
  REGION 1..17: note = L33H11[LAG-3] vhCDR2
IINPSAGSTSYAQKFQG

SEQ ID NO: 3900 - protein, 10 aa, synthetic construct
  REGION 1..10: note = Description of Artificial Sequence: Synthetic peptide
  REGION 1..10: note = L33H11[LAG-3] vhCDR3
ELMATGGFDY

SEQ ID NO: 3901 - protein, 110 aa, synthetic construct
  REGION 1..110: note = Description of Artificial Sequence: Synthetic polypeptide
  REGION 1..110: note = L33H11[LAG-3] variable light Chain
LPVLTQPASVSGSPGQSITISCTGTSSDVGGYNYVSWYQQHPGKAPKLMIYDVTNRPSGVSNRFSGSKSGNTASLTISGLQAEDEADYYCSSYTSSNTLLFGGGTQLTVL

SEQ ID NO: 3902 - protein, 14 aa, synthetic construct
  REGION 1..14: note = Description of Artificial Sequence: Synthetic peptide
  REGION 1..14: note = L33H11[LAG-3] vlCDR1
TGTSSDVGGYNYVS

SEQ ID NO: 3903 - protein, 7 aa, synthetic construct
  REGION 1..7: note = Description of Artificial Sequence: Synthetic peptide
  REGION 1..7: note = L33H11[LAG-3] vlCDR2
DVTNRPS

SEQ ID NO: 3904 - protein, 10 aa, synthetic construct
  REGION 1..10: note = Description of Artificial Sequence: Synthetic peptide
  REGION 1..10: note = L33H11[LAG-3] vlCDR3
SSYTSSNTLL

SEQ ID NO: 3905 - protein, 119 aa, synthetic construct; identical to SEQ ID NO: 3881
  REGION 1..119: note = Description of Artificial Sequence: Synthetic polypeptide
  REGION 1..119: note = L32A9[LAG-3] variable heavy Chain

SEQ ID NO: 3906 - protein, 5 aa, synthetic construct
  REGION 1..5: note = Description of Artificial Sequence: Synthetic peptide
  REGION 1..5: note = L32A9[LAG-3] vhCDR1
SYYMH

SEQ ID NO: 3907 - protein, 17 aa, synthetic construct
  REGION 1..17: note = Description of Artificial Sequence: Synthetic peptide
  REGION 1..17: note = L32A9[LAG-3] vhCDR2
IINPSAGSTSYAQKFQG

SEQ ID NO: 3908 - protein, 10 aa, synthetic construct
  REGION 1..10: note = Description of Artificial Sequence: Synthetic peptide
  REGION 1..10: note = L32A9[LAG-3] vhCDR3
ELMATGGFDY

SEQ ID NO: 3909 - protein, 110 aa, synthetic construct
  REGION 1..110: note = Description of Artificial Sequence: Synthetic polypeptide
  REGION 1..110: note = L32A9[LAG-3] variable light Chain
QSVVTQPPSVSAAPGQKVTISCSGSSSNIGNNYVSWYQQLPGTAPKLLIYDNNKRHSGIPDRFSGSTSDTSATLGITRLQTGDEADYYCGTWDSSLSAYVFGTGTKVTVL

SEQ ID NO: 3910 - protein, 13 aa, synthetic construct
  REGION 1..13: note = Description of Artificial Sequence: Synthetic peptide
  REGION 1..13: note = L32A9[LAG-3] vlCDR1
SGSSSNIGNNYVS

SEQ ID NO: 3911 - protein, 7 aa, synthetic construct
  REGION 1..7: note = Description of Artificial Sequence: Synthetic peptide
  REGION 1..7: note = L32A9[LAG-3] vlCDR2
DNNKRHS

SEQ ID NO: 3912 - protein, 11 aa, synthetic construct
  REGION 1..11: note = Description of Artificial Sequence: Synthetic peptide
  REGION 1..11: note = L32A9[LAG-3] vlCDR3
GTWDSSLSAYV

SEQ ID NO: 3913 - protein, 119 aa, synthetic construct; identical to SEQ ID NO: 3881
  REGION 1..119: note = Description of Artificial Sequence: Synthetic polypeptide
  REGION 1..119: note = L32D10[LAG-3] variable heavy Chain

SEQ ID NO: 3914 - protein, 5 aa, synthetic construct
  REGION 1..5: note = Description of Artificial Sequence: Synthetic peptide
  REGION 1..5: note = L32D10[LAG-3] vhCDR1
SYYMH

SEQ ID NO: 3915 - protein, 17 aa, synthetic construct
  REGION 1..17: note = Description of Artificial Sequence: Synthetic peptide
  REGION 1..17: note = L32D10[LAG-3] vhCDR2
IINPSAGSTSYAQKFQG

SEQ ID NO: 3916 - protein, 10 aa, synthetic construct
  REGION 1..10: note = Description of Artificial Sequence: Synthetic peptide
  REGION 1..10: note = L32D10[LAG-3] vhCDR3
ELMATGGFDY

SEQ ID NO: 3917 - protein, 110 aa, synthetic construct
  REGION 1..110: note = Description of Artificial Sequence: Synthetic polypeptide
  REGION 1..110: note = L32D10[LAG-3] variable light Chain
QSVLTQPPSASGSPGQSVTISCTGTSSDVGGYDYVSWYQQHQGKAPKLMIYDVSNRPSGVSNRFSGSKSGNTASLTISGLQAEDEADYYCSSYTSSTTLVFGGGTKLTVL

SEQ ID NO: 3918 - protein, 14 aa, synthetic construct
  REGION 1..14: note = Description of Artificial Sequence: Synthetic peptide
  REGION 1..14: note = L32D10[LAG-3] vlCDR1
TGTSSDVGGYDYVS

SEQ ID NO: 3919 - protein, 7 aa, synthetic construct
  REGION 1..7: note = Description of Artificial Sequence: Synthetic peptide
  REGION 1..7: note = L32D10[LAG-3] vlCDR2
DVSNRPS

SEQ ID NO: 3920 - protein, 10 aa, synthetic construct
  REGION 1..10: note = Description of Artificial Sequence: Synthetic peptide
  REGION 1..10: note = L32D10[LAG-3] vlCDR3
SSYTSSTTLV

SEQ ID NO: 3921 - protein, 119 aa, synthetic construct; identical to SEQ ID NO: 3881
  REGION 1..119: note = Description of Artificial Sequence: Synthetic polypeptide
  REGION 1..119: note = L32A4[LAG-3] variable heavy Chain

SEQ ID NO: 3922 - protein, 5 aa, synthetic construct
  REGION 1..5: note = Description of Artificial Sequence: Synthetic peptide
  REGION 1..5: note = L32A4[LAG-3] vhCDR1
SYYMH

SEQ ID NO: 3923 - protein, 17 aa, synthetic construct
  REGION 1..17: note = Description of Artificial Sequence: Synthetic peptide
  REGION 1..17: note = L32A4[LAG-3] vhCDR2
IINPSAGSTSYAQKFQG

SEQ ID NO: 3924 - protein, 10 aa, synthetic construct
  REGION 1..10: note = Description of Artificial Sequence: Synthetic peptide
  REGION 1..10: note = L32A4[LAG-3] vhCDR3
ELMATGGFDY

SEQ ID NO: 3925 - protein, 110 aa, synthetic construct
  REGION 1..110: note = Description of Artificial Sequence: Synthetic polypeptide
  REGION 1..110: note = L32A4[LAG-3] variable light Chain
QSVLTQPASVSGSPGQSITISCTGTSSDIGAYNFVSWYQQHPGKAPKLMIYGVSNRPSGVSSRFSGSKSGSTASLTISGLQAEDEADYYCSSYTTSGSAVFGTGTKLTVL

SEQ ID NO: 3926 - protein, 14 aa, synthetic construct
  REGION 1..14: note = Description of Artificial Sequence: Synthetic peptide
  REGION 1..14: note = L32A4[LAG-3] vlCDR1
TGTSSDIGAYNFVS

SEQ ID NO: 3927 - protein, 7 aa, synthetic construct
  REGION 1..7: note = Description of Artificial Sequence: Synthetic peptide
  REGION 1..7: note = L32A4[LAG-3] vlCDR2
GVSNRPS

SEQ ID NO: 3928 - protein, 10 aa, synthetic construct
  REGION 1..10: note = Description of Artificial Sequence: Synthetic peptide
  REGION 1..10: note = L32A4[LAG-3] vlCDR3
SSYTTSGSAV

SEQ ID NO: 3929 - protein, 119 aa, synthetic construct
  REGION 1..119: note = Description of Artificial Sequence: Synthetic polypeptide
  REGION 1..119: note = L3A1[LAG-3] variable heavy Chain
EVQLLESGAEVKKPGASVKVSCKASGYTFTSYYMHWVRQAPGQGLEWMGIINPSAGSTSYAQKFQGRVTMTRDTSTSTVYMELSSLRSEDTAVYYCARELMATGGFDYWGQGTLVTVSS

SEQ ID NO: 3930 - protein, 5 aa, synthetic construct
  REGION 1..5: note = Description of Artificial Sequence: Synthetic peptide
  REGION 1..5: note = L3A1[LAG-3] vhCDR1
SYYMH

SEQ ID NO: 3931 - protein, 17 aa, synthetic construct
  REGION 1..17: note = Description of Artificial Sequence: Synthetic peptide
  REGION 1..17: note = L3A1[LAG-3] vhCDR2
IINPSAGSTSYAQKFQG

SEQ ID NO: 3932 - protein, 10 aa, synthetic construct
  REGION 1..10: note = Description of Artificial Sequence: Synthetic peptide
  REGION 1..10: note = L3A1[LAG-3] vhCDR3
ELMATGGFDY

SEQ ID NO: 3933 - protein, 110 aa, synthetic construct
  REGION 1..110: note = Description of Artificial Sequence: Synthetic polypeptide
  REGION 1..110: note = L3A1[LAG-3] variable light Chain
QSVLTQPASVSGSPGQSITISCTGTSSDIGAYNFVSWYQQHPGKAPKLMIYGVSNRPSGVSSRFSGSKSGSTASLTITGLQAEDEADYYCSSYTTSGSAVFGTGTKLTVL

SEQ ID NO: 3934 - protein, 14 aa, synthetic construct
  REGION 1..14: note = Description of Artificial Sequence: Synthetic peptide
  REGION 1..14: note = L3A1[LAG-3] vlCDR1
TGTSSDIGAYNFVS

SEQ ID NO: 3935 - protein, 7 aa, synthetic construct
  REGION 1..7: note = Description of Artificial Sequence: Synthetic peptide
  REGION 1..7: note = L3A1[LAG-3] vlCDR2
GVSNRPS

SEQ ID NO: 3936 - protein, 10 aa, synthetic construct
  REGION 1..10: note = Description of Artificial Sequence: Synthetic peptide
  REGION 1..10: note = L3A1[LAG-3] vlCDR3
SSYTTSGSAV

SEQ ID NO: 3937 - protein, 121 aa, synthetic construct
  REGION 1..121: note = Description of Artificial Sequence: Synthetic polypeptide
  REGION 1..121: note = L3A10[LAG-3] variable heavy Chain
EVQLLESGGGVVQPGRSLRVSCAASGFTFSNHAMHWVRQAPGKGLEWVAVISYDGSKKFYSDSVRGRFTISRDNSKNTLYLQMNSLRPEDTAVYYCAKGAHGYTSGWHDYWGQGTLVTVSS

SEQ ID NO: 3938 - protein, 5 aa, synthetic construct
  REGION 1..5: note = Description of Artificial Sequence: Synthetic peptide
  REGION 1..5: note = L3A10[LAG-3] vhCDR1
NHAMH

SEQ ID NO: 3939 - protein, 17 aa, synthetic construct
  REGION 1..17: note = Description of Artificial Sequence: Synthetic peptide
  REGION 1..17: note = L3A10[LAG-3] vhCDR2
VISYDGSKKFYSDSVRG

SEQ ID NO: 3940 - protein, 12 aa, synthetic construct
  REGION 1..12: note = Description of Artificial Sequence: Synthetic peptide
  REGION 1..12: note = L3A10[LAG-3] vhCDR3
GAHGYTSGWHDY

SEQ ID NO: 3941 - protein, 108 aa, synthetic construct
  REGION 1..108: note = Description of Artificial Sequence: Synthetic polypeptide
  REGION 1..108: note = L3A10[LAG-3] variable light Chain
DVVMTQSPSSLSASVGDRVSITCRASQNIGRYLNWYQQKPGKAPKLLVSAASSLQGGVPSRFSGSGSGTDFTLTISRLQPEDFATYFCQQTYSSPQCTFGQGTKVDIK

SEQ ID NO: 3942 - protein, 11 aa, synthetic construct
  REGION 1..11: note = Description of Artificial Sequence: Synthetic peptide
  REGION 1..11: note = L3A10[LAG-3] vlCDR1
RASQNIGRYLN

SEQ ID NO: 3943 - protein, 7 aa, synthetic construct
  REGION 1..7: note = Description of Artificial Sequence: Synthetic peptide
  REGION 1..7: note = L3A10[LAG-3] vlCDR2
AASSLQG

SEQ ID NO: 3944 - protein, 10 aa, synthetic construct
  REGION 1..10: note = Description of Artificial Sequence: Synthetic peptide
  REGION 1..10: note = L3A10[LAG-3] vlCDR3
QQTYSSPQCT

SEQ ID NO: 3945 - protein, 121 aa, synthetic construct
  REGION 1..121: note = Description of Artificial Sequence: Synthetic polypeptide
  REGION 1..121: note = L3C5[LAG-3] variable heavy Chain
QVQLVQSGSELKKPGASVKVSCKASGYTFTNYYMHWVRQAPGQGLEWMGIINPSGGATNYAQKFQGRVTMTRDTSTSTVYMELSSLRSEDTAVYYCARDSGYDLGYGMDVWGQGTLVTVSS

SEQ ID NO: 3946 - protein, 5 aa, synthetic construct
  REGION 1..5: note = Description of Artificial Sequence: Synthetic peptide
  REGION 1..5: note = L3C5[LAG-3] vhCDR1
NYYMH

SEQ ID NO: 3947 - protein, 17 aa, synthetic construct
  REGION 1..17: note = Description of Artificial Sequence: Synthetic peptide
  REGION 1..17: note = L3C5[LAG-3] vhCDR2
IINPSGGATNYAQKFQG

SEQ ID NO: 3948 - protein, 12 aa, synthetic construct
  REGION 1..12: note = Description of Artificial Sequence: Synthetic peptide
  REGION 1..12: note = L3C5[LAG-3] vhCDR3
DSGYDLGYGMDV

SEQ ID NO: 3949 - protein, 110 aa, synthetic construct
  REGION 1..110: note = Description of Artificial Sequence: Synthetic polypeptide
  REGION 1..110: note = L3C5[LAG-3] variable light Chain
QSVLTQPASVSGSPGQSITISCTGTSSDVGGYNYVSWYQQHPGKAPKLMIYDVSNRPSGASNRFSGSKSGNTASLTISGLQAEDEADYYCSSYTNRNTLLFGGGTKLTVL

SEQ ID NO: 3950 - protein, 14 aa, synthetic construct
  REGION 1..14: note = Description of Artificial Sequence: Synthetic peptide
  REGION 1..14: note = L3C5[LAG-3] vlCDR1
TGTSSDVGGYNYVS

SEQ ID NO: 3951 - protein, 7 aa, synthetic construct
  REGION 1..7: note = Description of Artificial Sequence: Synthetic peptide
  REGION 1..7: note = L3C5[LAG-3] vlCDR2
DVSNRPS

SEQ ID NO: 3952 - protein, 10 aa, synthetic construct
  REGION 1..10: note = Description of Artificial Sequence: Synthetic peptide
  REGION 1..10: note = L3C5[LAG-3] vlCDR3
SSYTNRNTLL

SEQ ID NO: 3953 - protein, 119 aa, synthetic construct; identical to SEQ ID NO: 3929
  REGION 1..119: note = Description of Artificial Sequence: Synthetic polypeptide
  REGION 1..119: note = L3E3[LAG-3] variable heavy Chain

SEQ ID NO: 3954 - protein, 5 aa, synthetic construct
  REGION 1..5: note = Description of Artificial Sequence: Synthetic peptide
  REGION 1..5: note = L3E3[LAG-3] vhCDR1
SYYMH

SEQ ID NO: 3955 - protein, 17 aa, synthetic construct
  REGION 1..17: note = Description of Artificial Sequence: Synthetic peptide
  REGION 1..17: note = L3E3[LAG-3] vhCDR2
IINPSAGSTSYAQKFQG

SEQ ID NO: 3956 - protein, 10 aa, synthetic construct
  REGION 1..10: note = Description of Artificial Sequence: Synthetic peptide
  REGION 1..10: note = L3E3[LAG-3] vhCDR3
ELMATGGFDY

SEQ ID NO: 3957 - protein, 110 aa, synthetic construct
  REGION 1..110: note = Description of Artificial Sequence: Synthetic polypeptide
  REGION 1..110: note = L3E3[LAG-3] variable light Chain
QSVLTQPASASGSPGQSITISCTGTSSDVGGYNYVSWYQQHPGKAPKLMIYDVSNRPSGVSNRFSGSKSGNTASLTISGLQAEDEANYYCSSYTSSSTNVFGTGTKVTVL

SEQ ID NO: 3958 - protein, 14 aa, synthetic construct
  REGION 1..14: note = Description of Artificial Sequence: Synthetic peptide
  REGION 1..14: note = L3E3[LAG-3] vlCDR1
TGTSSDVGGYNYVS

SEQ ID NO: 3959 - protein, 7 aa, synthetic construct
  REGION 1..7: note = Description of Artificial Sequence: Synthetic peptide
  REGION 1..7: note = L3E3[LAG-3] vlCDR2
DVSNRPS

SEQ ID NO: 3960 - protein, 10 aa, synthetic construct
  REGION 1..10: note = Description of Artificial Sequence: Synthetic peptide
  REGION 1..10: note = L3E3[LAG-3] vlCDR3
SSYTSSSTNV

SEQ ID NO: 3961 - protein, 121 aa, synthetic construct
  REGION 1..121: note = Description of Artificial Sequence: Synthetic polypeptide
  REGION 1..121: note = durvalumab[PD-L1] variable heavy Chain
EVQLVESGGGLVQPGGSLRLSCAASGFTFSRYWMSWVRQAPGKGLEWVANIKQDGSEKYYVDSVKGRFTISRDNAKNSLYLQMNSLRAEDTAVYYCAREGGWFGELAFDYWGQGTLVTVSS

SEQ ID NO: 3962 - protein, 5 aa, synthetic construct
  REGION 1..5: note = Description of Artificial Sequence: Synthetic peptide
  REGION 1..5: note = durvalumab[PD-L1] vhCDR1
RYWMS

SEQ ID NO: 3963 - protein, 17 aa, synthetic construct
  REGION 1..17: note = Description of Artificial Sequence: Synthetic peptide
  REGION 1..17: note = durvalumab[PD-L1] vhCDR2
NIKQDGSEKYYVDSVKG

SEQ ID NO: 3964 - protein, 12 aa, synthetic construct
  REGION 1..12: note = Description of Artificial Sequence: Synthetic peptide
  REGION 1..12: note = durvalumab[PD-L1] vhCDR3
EGGWFGELAFDY

SEQ ID NO: 3965 - protein, 108 aa, synthetic construct
  REGION 1..108: note = Description of Artificial Sequence: Synthetic polypeptide
  REGION 1..108: note = durvalumab[PD-L1] variable light Chain
EIVLTQSPGTLSLSPGERATLSCRASQRVSSSYLAWYQQKPGQAPRLLIYDASSRATGIPDRFSGSGSGTDFTLTISRLEPEDFAVYYCQQYGSLPWTFGQGTKVEIK

SEQ ID NO: 3966 - protein, 12 aa, synthetic construct
  REGION 1..12: note = Description of Artificial Sequence: Synthetic peptide
  REGION 1..12: note = durvalumab[PD-L1] vlCDR1
RASQRVSSSYLA

SEQ ID NO: 3967 - protein, 7 aa, synthetic construct
  REGION 1..7: note = Description of Artificial Sequence: Synthetic peptide
  REGION 1..7: note = durvalumab[PD-L1] vlCDR2
DASSRAT

SEQ ID NO: 3968 - protein, 9 aa, synthetic construct
  REGION 1..9: note = Description of Artificial Sequence: Synthetic peptide
  REGION 1..9: note = durvalumab[PD-L1] vlCDR3
QQYGSLPWT

SEQ ID NO: 3969 - protein, 118 aa, synthetic construct
  REGION 1..118: note = Description of Artificial Sequence: Synthetic polypeptide
  REGION 1..118: note = atezolizumab[PD-L1] variable heavy Chain
EVQLVESGGGLVQPGGSLRLSCAASGFTFSDSWIHWVRQAPGKGLEWVAWISPYGGSTYYADSVKGRFTISADTSKNTAYLQMNSLRAEDTAVYYCARRHWPGGFDYWGQGTLVTVSA

SEQ ID NO: 3970 - protein, 5 aa, synthetic construct
  REGION 1..5: note = Description of Artificial Sequence: Synthetic peptide
  REGION 1..5: note = atezolizumab[PD-L1] vhCDR1
DSWIH

SEQ ID NO: 3971 - protein, 17 aa, synthetic construct
  REGION 1..17: note = Description of Artificial Sequence: Synthetic peptide
  REGION 1..17: note = atezolizumab[PD-L1] vhCDR2
WISPYGGSTYYADSVKG

SEQ ID NO: 3972 - protein, 9 aa, synthetic construct
  REGION 1..9: note = Description of Artificial Sequence: Synthetic peptide
  REGION 1..9: note = atezolizumab[PD-L1] vhCDR3
RHWPGGFDY

SEQ ID NO: 3973 - protein, 108 aa, synthetic construct
  REGION 1..108: note = Description of Artificial Sequence: Synthetic polypeptide
  REGION 1..108: note = atezolizumab[PD-L1] variable light Chain
DIQMTQSPSSLSASVGDRVTITCRASQDVSTAVAWYQQKPGKAPKLLIYSASFLYSGVPSRFSGSGSGTDFTLTISSLQPEDFATYYCQQYLYHPATFGQGTKVEIKR

SEQ ID NO: 3974 - protein, 11 aa, synthetic construct
  REGION 1..11: note = Description of Artificial Sequence: Synthetic peptide
  REGION 1..11: note = atezolizumab[PD-L1] vlCDR1
RASQDVSTAVA

SEQ ID NO: 3975 - protein, 7 aa, synthetic construct
  REGION 1..7: note = Description of Artificial Sequence: Synthetic peptide
  REGION 1..7: note = atezolizumab[PD-L1] vlCDR2
SASFLYS

SEQ ID NO: 3976 - protein, 9 aa, synthetic construct
  REGION 1..9: note = Description of Artificial Sequence: Synthetic peptide
  REGION 1..9: note = atezolizumab[PD-L1] vlCDR3
QQYLYHPAT

SEQ ID NO: 3977 - protein, 120 aa, synthetic construct
  REGION 1..120: note = Description of Artificial Sequence: Synthetic polypeptide
  REGION 1..120: note = A09-246-2[PD-L1] variable heavy Chain
EVQLLESGGGLVQPGGSLRLSCAASGFTFSSYIMMWVRQAPGKGLEWVSSIYPSGGITFYADTVKGRFTISRDNSKNTLYLQMNSLRAEDTAVYYCARIKLGTVTTVDYWGQGTLVTVSS

SEQ ID NO: 3978 - protein, 5 aa, synthetic construct
  REGION 1..5: note = Description of Artificial Sequence: Synthetic peptide
  REGION 1..5: note = A09-246-2[PD-L1] vhCDR1
SYIMM

SEQ ID NO: 3979 - protein, 17 aa, synthetic construct
  REGION 1..17: note = Description of Artificial Sequence: Synthetic peptide
  REGION 1..17: note = A09-246-2[PD-L1] vhCDR2
SIYPSGGITFYADTVKG

SEQ ID NO: 3980 - protein, 11 aa, synthetic construct
  REGION 1..11: note = Description of Artificial Sequence: Synthetic peptide
  REGION 1..11: note = A09-246-2[PD-L1] vhCDR3
IKLGTVTTVDY

SEQ ID NO: 3981 - protein, 110 aa, synthetic construct
  REGION 1..110: note = Description of Artificial Sequence: Synthetic polypeptide
  REGION 1..110: note = A09-246-2[PD-L1] variable light Chain
QSALTQPASVSGSPGQSITISCTGTSSDVGGYNYVSWYQQHPGKAPKLMIYDVSNRPSGVSNRFSGSKSGNTASLTISGLQAEDEADYYCSSYTSSSTRVFGTGTKVTVL

SEQ ID NO: 3982 - protein, 14 aa, synthetic construct
  REGION 1..14: note = Description of Artificial Sequence: Synthetic peptide
  REGION 1..14: note = A09-246-2[PD-L1] vlCDR1
TGTSSDVGGYNYVS

SEQ ID NO: 3983 - protein, 7 aa, synthetic construct
  REGION 1..7: note = Description of Artificial Sequence: Synthetic peptide
  REGION 1..7: note = A09-246-2[PD-L1] vlCDR2
DVSNRPS

SEQ ID NO: 3984 - protein, 10 aa, synthetic construct
  REGION 1..10: note = Description of Artificial Sequence: Synthetic peptide
  REGION 1..10: note = A09-246-2[PD-L1] vlCDR3
SSYTSSSTRV

SEQ ID NO: 3985 - protein, 123 aa, synthetic construct
  REGION 1..123: note = Description of Artificial Sequence: Synthetic polypeptide
  REGION 1..123: note = 12A4[PD-L1] variable heavy Chain
QVQLVQSGAEVKKPGSSVKVSCKTSGDTFSTYAISWVRQAPGQGLEWMGGIIPIFGKAHYAQKFQGRVTITADESTSTAYMELSSLRSEDTAVYFCARKFHFVSGSPFGMDVWGQGTTVTVSS

SEQ ID NO: 3986 - protein, 5 aa, synthetic construct
  REGION 1..5: note = Description of Artificial Sequence: Synthetic peptide
  REGION 1..5: note = 12A4[PD-L1] vhCDR1
TYAIS

SEQ ID NO: 3987 - protein, 17 aa, synthetic construct
  REGION 1..17: note = Description of Artificial Sequence: Synthetic peptide
  REGION 1..17: note = 12A4[PD-L1] vhCDR2
GIIPIFGKAHYAQKFQG

SEQ ID NO: 3988 - protein, 14 aa, synthetic construct
  REGION 1..14: note = Description of Artificial Sequence: Synthetic peptide
  REGION 1..14: note = 12A4[PD-L1] vhCDR3
KFHFVSGSPFGMDV

SEQ ID NO: 3989 - protein, 106 aa, synthetic construct
  REGION 1..106: note = Description of Artificial Sequence: Synthetic polypeptide
  REGION 1..106: note = 12A4[PD-L1] variable light Chain
EIVLTQSPATLSLSPGERATLSCRASQSVSSYLAWYQQKPGQAPRLLIYDASNRATGIPARFSGSGSGTDFTLTISSLEPEDFAVYYCQQRSNWPTFGQGTKVEIK

SEQ ID NO: 3990 - protein, 11 aa, synthetic construct
  REGION 1..11: note = Description of Artificial Sequence: Synthetic peptide
  REGION 1..11: note = 12A4[PD-L1] vlCDR1
RASQSVSSYLA

SEQ ID NO: 3991 - protein, 7 aa, synthetic construct
  REGION 1..7: note = Description of Artificial Sequence: Synthetic peptide
  REGION 1..7: note = 12A4[PD-L1] vlCDR2
DASNRAT

SEQ ID NO: 3992 - protein, 8 aa, synthetic construct
  REGION 1..8: note = Description of Artificial Sequence: Synthetic peptide
  REGION 1..8: note = 12A4[PD-L1] vlCDR3
QQRSNWPT

SEQ ID NO: 3993 - protein, 117 aa, synthetic construct
  REGION 1..117: note = Description of Artificial Sequence: Synthetic polypeptide
  REGION 1..117: note = 3G10[PD-L1] variable heavy Chain
QVQLVQSGAEVKKPGASVKVSCKASGYTFTDYGFSWVRQAPGQGLEWMGWITAYNGNTNYAQKLQGRVTMTTDTSTSTVYMELRSLRSDDTAVYYCARDYFYGMDVWGQGTTVTVSS

SEQ ID NO: 3994 - protein, 5 aa, synthetic construct
  REGION 1..5: note = Description of Artificial Sequence: Synthetic peptide
  REGION 1..5: note = 3G10[PD-L1] vhCDR1
DYGFS

SEQ ID NO: 3995 - protein, 17 aa, synthetic construct
  REGION 1..17: note = Description of Artificial Sequence: Synthetic peptide
  REGION 1..17: note = 3G10[PD-L1] vhCDR2
WITAYNGNTNYAQKLQG

SEQ ID NO: 3996 - protein, 8 aa, synthetic construct
  REGION 1..8: note = Description of Artificial Sequence: Synthetic peptide
  REGION 1..8: note = 3G10[PD-L1] vhCDR3
DYFYGMDV

SEQ ID NO: 3997 - protein, 107 aa, synthetic construct
  REGION 1..107: note = Description of Artificial Sequence: Synthetic polypeptide
  REGION 1..107: note = 3G10[PD-L1] variable light Chain
EIVLTQSPATLSLSPGERATLSCRASQSVSSYLVWYQQKPGQAPRLLIYDASNRATGIPARFSGSGSGTDFTLTISSLEPEDFAVYYCQQRSNWPRTFGQGTKVEIK

SEQ ID NO: 3998 - protein, 11 aa, synthetic construct
  REGION 1..11: note = Description of Artificial Sequence: Synthetic peptide
  REGION 1..11: note = 3G10[PD-L1] vlCDR1
RASQSVSSYLV

SEQ ID NO: 3999 - protein, 7 aa, synthetic construct
  REGION 1..7: note = Description of Artificial Sequence: Synthetic peptide
  REGION 1..7: note = 3G10[PD-L1] vlCDR2
DASNRAT

SEQ ID NO: 4000 - protein, 9 aa, synthetic construct
  REGION 1..9: note = Description of Artificial Sequence: Synthetic peptide
  REGION 1..9: note = 3G10[PD-L1] vlCDR3
QQRSNWPRT

SEQ ID NO: 4001 - protein, 118 aa, synthetic construct
  REGION 1..118: note = Description of Artificial Sequence: Synthetic polypeptide
  REGION 1..118: note = 10A5[PD-L1] variable heavy Chain
QVQLVQSGAEVKKPGASVKVSCKASGYTFTSYDVHWVRQAPGQRLEWMGWLHADTGITKFSQKFQGRVTITRDTSASTAYMELSSLRSEDTAVYYCARERIQLWFDYWGQGTLVTVSS

SEQ ID NO: 4002 - protein, 5 aa, synthetic construct
  REGION 1..5: note = Description of Artificial Sequence: Synthetic peptide
  REGION 1..5: note = 10A5[PD-L1] vhCDR1
SYDVH

SEQ ID NO: 4003 - protein, 17 aa, synthetic construct
  REGION 1..17: note = Description of Artificial Sequence: Synthetic peptide
  REGION 1..17: note = 10A5[PD-L1] vhCDR2
WLHADTGITKFSQKFQG

SEQ ID NO: 4004 - protein, 9 aa, synthetic construct
  REGION 1..9: note = Description of Artificial Sequence: Synthetic peptide
  REGION 1..9: note = 10A5[PD-L1] vhCDR3
ERIQLWFDY

SEQ ID NO: 4005 - protein, 107 aa, synthetic construct
  REGION 1..107: note = Description of Artificial Sequence: Synthetic polypeptide
  REGION 1..107: note = 10A5[PD-L1] variable light Chain
DIQMTQSPSSLSASVGDRVTITCRASQGISSWLAWYQQKPEKAPKSLIYAASSLQSGVPSRFSGSGSGTDFTLTISSLQPEDFATYYCQQYNSYPYTFGQGTKLEIK

SEQ ID NO: 4006 - protein, 11 aa, synthetic construct
  REGION 1..11: note = Description of Artificial Sequence: Synthetic peptide
  REGION 1..11: note = 10A5[PD-L1] vlCDR1
RASQGISSWLA

SEQ ID NO: 4007 - protein, 7 aa, synthetic construct
  REGION 1..7: note = Description of Artificial Sequence: Synthetic peptide
  REGION 1..7: note = 10A5[PD-L1] vlCDR2
AASSLQS

SEQ ID NO: 4008 - protein, 9 aa, synthetic construct
  REGION 1..9: note = Description of Artificial Sequence: Synthetic peptide
  REGION 1..9: note = 10A5[PD-L1] vlCDR3
QQYNSYPYT

SEQ ID NO: 4009 - protein, 114 aa, synthetic construct
  REGION 1..114: note = Description of Artificial Sequence: Synthetic polypeptide
  REGION 1..114: note = h3D10 Var 1[PD-L1] variable heavy Chain
QVQLVQSGAEVKKPGASVKVSCKASGYTFPDYYMNWVRQAPGQGLEWMGDIDPNYGGTNYAQKFQGRVTMTRDTSISTAYMELSRLRSDDTAVYYCARGALTDWGQGTMVTVSS

SEQ ID NO: 4010 - protein, 5 aa, synthetic construct
  REGION 1..5: note = Description of Artificial Sequence: Synthetic peptide
  REGION 1..5: note = h3D10 Var 1[PD-L1] vhCDR1
DYYMN

SEQ ID NO: 4011 - protein, 17 aa, synthetic construct
  REGION 1..17: note = Description of Artificial Sequence: Synthetic peptide
  REGION 1..17: note = h3D10 Var 1[PD-L1] vhCDR2
DIDPNYGGTNYAQKFQG

SEQ ID NO: 4012 - protein, 5 aa, synthetic construct
  REGION 1..5: note = Description of Artificial Sequence: Synthetic peptide
  REGION 1..5: note = h3D10 Var 1[PD-L1] vhCDR3
GALTD

SEQ ID NO: 4013 - protein, 106 aa, synthetic construct
  REGION 1..106: note = Description of Artificial Sequence: Synthetic polypeptide
  REGION 1..106: note = h3D10 Var 1[PD-L1] variable light Chain
EIVLTQSPATLSLSPGERATLSCRASSSVSYIYWFQQKPGQAPRLLIYAAFNRATGIPARFSGSGSGTDYTLTISSLEPEDFAVYYCQQWSNNPLTFGQGTKVEIK

SEQ ID NO: 4014 - protein, 10 aa, synthetic construct
  REGION 1..10: note = Description of Artificial Sequence: Synthetic peptide
  REGION 1..10: note = h3D10 Var 1[PD-L1] vlCDR1
RASSSVSYIY

SEQ ID NO: 4015 - protein, 7 aa, synthetic construct
  REGION 1..7: note = Description of Artificial Sequence: Synthetic peptide
  REGION 1..7: note = h3D10 Var 1[PD-L1] vlCDR2
AAFNRAT

SEQ ID NO: 4016 - protein, 9 aa, synthetic construct
  REGION 1..9: note = Description of Artificial Sequence: Synthetic peptide
  REGION 1..9: note = h3D10 Var 1[PD-L1] vlCDR3
QQWSNNPLT

SEQ ID NO: 4017 - protein, 114 aa, synthetic construct
  REGION 1..114: note = Description of Artificial Sequence: Synthetic polypeptide
  REGION 1..114: note = h3D10 Var 2[PD-L1] variable heavy Chain
QVQLVQSGAEVKKPGASVKVSCKASGYTFPDYYMNWVRQAPGQSLEWMGDIDPNYGGTNYNQKFQGRVTMTRDTSISTAYMELSRLRSDDTAVYYCARGALTDWGQGTMVTVSS

SEQ ID NO: 4018 - protein, 5 aa, synthetic construct
  REGION 1..5: note = Description of Artificial Sequence: Synthetic peptide
  REGION 1..5: note = h3D10 Var 2[PD-L1] vhCDR1
DYYMN

SEQ ID NO: 4019 - protein, 17 aa, synthetic construct
  REGION 1..17: note = Description of Artificial Sequence: Synthetic peptide
  REGION 1..17: note = h3D10 Var 2[PD-L1] vhCDR2
DIDPNYGGTNYNQKFQG

SEQ ID NO: 4020 - protein, 5 aa, synthetic construct
  REGION 1..5: note = Description of Artificial Sequence: Synthetic peptide
  REGION 1..5: note = h3D10 Var 2[PD-L1] vhCDR3
GALTD

SEQ ID NO: 4021 - protein, 106 aa, synthetic construct
  REGION 1..106: note = Description of Artificial Sequence: Synthetic polypeptide
  REGION 1..106: note = h3D10 Var 2[PD-L1] variable light Chain
EIVLTQSPATLSLSPGERATLSCRASSSVSYIYWFQQKPGQSPRPLIYAAFNRATGIPARFSGSGSGTDYTLTISSLEPEDFAVYYCQQWSNNPLTFGQGTKVEIK

SEQ ID NO: 4022 - protein, 10 aa, synthetic construct
  REGION 1..10: note = Description of Artificial Sequence: Synthetic peptide
  REGION 1..10: note = h3D10 Var 2[PD-L1] vlCDR1
RASSSVSYIY

SEQ ID NO: 4023 - protein, 7 aa, synthetic construct
  REGION 1..7: note = Description of Artificial Sequence: Synthetic peptide
  REGION 1..7: note = h3D10 Var 2[PD-L1] vlCDR2
AAFNRAT

SEQ ID NO: 4024 - protein, 9 aa, synthetic construct
  REGION 1..9: note = Description of Artificial Sequence: Synthetic peptide
  REGION 1..9: note = h3D10 Var 2[PD-L1] vlCDR3
QQWSNNPLT

SEQ ID NO: 4025 - protein, 114 aa, synthetic construct; identical to SEQ ID NO: 4017
  REGION 1..114: note = Description of Artificial Sequence: Synthetic polypeptide
  REGION 1..114: note = h3D10 Var 3[PD-L1] variable heavy Chain

SEQ ID NO: 4026 - protein, 5 aa, synthetic construct
  REGION 1..5: note = Description of Artificial Sequence: Synthetic peptide
  REGION 1..5: note = h3D10 Var 3[PD-L1] vhCDR1
DYYMN

SEQ ID NO: 4027 - protein, 17 aa, synthetic construct
  REGION 1..17: note = Description of Artificial Sequence: Synthetic peptide
  REGION 1..17: note = h3D10 Var 3[PD-L1] vhCDR2
DIDPNYGGTNYNQKFQG

SEQ ID NO: 4028 - protein, 5 aa, synthetic construct
  REGION 1..5: note = Description of Artificial Sequence: Synthetic peptide
  REGION 1..5: note = h3D10 Var 3[PD-L1] vhCDR3
GALTD

SEQ ID NO: 4029 - protein, 106 aa, synthetic construct
  REGION 1..106: note = Description of Artificial Sequence: Synthetic polypeptide
  REGION 1..106: note = h3D10 Var 3[PD-L1] variable light Chain
QIVLTQSPATLSLSPGERATLSCRASSSVSYIYWFQQKPGQSPRPLIYATFNLASGIPARFSGSGSGTSYTLTISRLEPEDFAVYYCQQWSNNPLTFGQGTKVEIK

SEQ ID NO: 4030 - protein, 10 aa, synthetic construct
  REGION 1..10: note = Description of Artificial Sequence: Synthetic peptide
  REGION 1..10: note = h3D10 Var 3[PD-L1] vlCDR1
RASSSVSYIY

SEQ ID NO: 4031 - protein, 7 aa, synthetic construct
  REGION 1..7: note = Description of Artificial Sequence: Synthetic peptide
  REGION 1..7: note = h3D10 Var 3[PD-L1] vlCDR2
ATFNLAS

SEQ ID NO: 4032 - protein, 9 aa, synthetic construct
  REGION 1..9: note = Description of Artificial Sequence: Synthetic peptide
  REGION 1..9: note = h3D10 Var 3[PD-L1] vlCDR3
QQWSNNPLT

SEQ ID NO: 4033 - protein, 114 aa, synthetic construct
  REGION 1..114: note = Description of Artificial Sequence: Synthetic polypeptide
  REGION 1..114: note = h3D10 Var 4[PD-L1] variable heavy Chain
EVQLVQSGAEVKKPGASVKVSCKASGYTFPDYYMNWVRQAPGQSLEWMGDIDPNYGGTNYNQKFQGRVTMTVDRSSSTAYMELSRLRSDDTAVYYCARGALTDWGQGTMVTVSS

SEQ ID NO: 4034 - protein, 5 aa, synthetic construct
  REGION 1..5: note = Description of Artificial Sequence: Synthetic peptide
  REGION 1..5: note = h3D10 Var 4[PD-L1] vhCDR1
DYYMN

SEQ ID NO: 4035 - protein, 17 aa, synthetic construct
  REGION 1..17: note = Description of Artificial Sequence: Synthetic peptide
  REGION 1..17: note = h3D10 Var 4[PD-L1] vhCDR2
DIDPNYGGTNYNQKFQG

SEQ ID NO: 4036 - protein, 5 aa, synthetic construct
  REGION 1..5: note = Description of Artificial Sequence: Synthetic peptide
  REGION 1..5: note = h3D10 Var 4[PD-L1] vhCDR3
GALTD

SEQ ID NO: 4037 - protein, 106 aa, synthetic construct; identical to SEQ ID NO: 4021
  REGION 1..106: note = Description of Artificial Sequence: Synthetic polypeptide
  REGION 1..106: note = h3D10 Var 4[PD-L1] variable light Chain

SEQ ID NO: 4038 - protein, 10 aa, synthetic construct
  REGION 1..10: note = Description of Artificial Sequence: Synthetic peptide
  REGION 1..10: note = h3D10 Var 4[PD-L1] vlCDR1
RASSSVSYIY

SEQ ID NO: 4039 - protein, 7 aa, synthetic construct
  REGION 1..7: note = Description of Artificial Sequence: Synthetic peptide
  REGION 1..7: note = h3D10 Var 4[PD-L1] vlCDR2
AAFNRAT

SEQ ID NO: 4040 - protein, 9 aa, synthetic construct
  REGION 1..9: note = Description of Artificial Sequence: Synthetic peptide
  REGION 1..9: note = h3D10 Var 4[PD-L1] vlCDR3
QQWSNNPLT

SEQ ID NO: 4041 - protein, 114 aa, synthetic construct; identical to SEQ ID NO: 4033
  REGION 1..114: note = Description of Artificial Sequence: Synthetic polypeptide
  REGION 1..114: note = h3D10 Var 5[PD-L1] variable heavy Chain

SEQ ID NO: 4042 - protein, 5 aa, synthetic construct
  REGION 1..5: note = Description of Artificial Sequence: Synthetic peptide
  REGION 1..5: note = h3D10 Var 5[PD-L1] vhCDR1
DYYMN

SEQ ID NO: 4043 - protein, 17 aa, synthetic construct
  REGION 1..17: note = Description of Artificial Sequence: Synthetic peptide
  REGION 1..17: note = h3D10 Var 5[PD-L1] vhCDR2
DIDPNYGGTNYNQKFQG

SEQ ID NO: 4044 - protein, 5 aa, synthetic construct
  REGION 1..5: note = Description of Artificial Sequence: Synthetic peptide
  REGION 1..5: note = h3D10 Var 5[PD-L1] vhCDR3
GALTD

SEQ ID NO: 4045 - protein, 106 aa, synthetic construct; identical to SEQ ID NO: 4029
  REGION 1..106: note = Description of Artificial Sequence: Synthetic polypeptide
  REGION 1..106: note = h3D10 Var 5[PD-L1] variable light Chain

SEQ ID NO: 4046 - protein, 10 aa, synthetic construct
  REGION 1..10: note = Description of Artificial Sequence: Synthetic peptide
  REGION 1..10: note = h3D10 Var 5[PD-L1] vlCDR1
RASSSVSYIY

SEQ ID NO: 4047 - protein, 7 aa, synthetic construct
  REGION 1..7: note = Description of Artificial Sequence: Synthetic peptide
  REGION 1..7: note = h3D10 Var 5[PD-L1] vlCDR2
ATFNLAS

SEQ ID NO: 4048 - protein, 9 aa, synthetic construct
  REGION 1..9: note = Description of Artificial Sequence: Synthetic peptide
  REGION 1..9: note = h3D10 Var 5[PD-L1] vlCDR3
QQWSNNPLT

SEQ ID NO: 4049 - protein, 114 aa, synthetic construct
  REGION 1..114: note = Description of Artificial Sequence: Synthetic polypeptide
  REGION 1..114: note = h3D10 Var 6[PD-L1] variable heavy Chain
EVQLVESGGGLVQPGRSLRLSCTASGYTFPDYYMNWVRQAPGKGLEWVGDIDPNYGGTTYAASVKGRFTISVDRSKSIAYLQMSSLKTEDTAVYYCTRGALTDWGQGTMVTVSS

SEQ ID NO: 4050 - protein, 5 aa, synthetic construct
  REGION 1..5: note = Description of Artificial Sequence: Synthetic peptide
  REGION 1..5: note = h3D10 Var 6[PD-L1] vhCDR1
DYYMN

SEQ ID NO: 4051 - protein, 17 aa, synthetic construct
  REGION 1..17: note = Description of Artificial Sequence: Synthetic peptide
  REGION 1..17: note = h3D10 Var 6[PD-L1] vhCDR2
DIDPNYGGTTYAASVKG

SEQ ID NO: 4052 - protein, 5 aa, synthetic construct
  REGION 1..5: note = Description of Artificial Sequence: Synthetic peptide
  REGION 1..5: note = h3D10 Var 6[PD-L1] vhCDR3
GALTD

SEQ ID NO: 4053 - protein, 106 aa, synthetic construct
  REGION 1..106: note = Description of Artificial Sequence: Synthetic polypeptide
  REGION 1..106: note = h3D10 Var 6[PD-L1] variable light Chain
DIQLTQSPSSLSASVGDRVTITCRASSGVSYIYWFQQKPGKAPKLLIYAAFNLASGVPSRFSGSGSGTEYTLTISSLQPEDFATYYCQQWSNNPLTFGQGTKVEIK

SEQ ID NO: 4054 - protein, 10 aa, synthetic construct
  REGION 1..10: note = Description of Artificial Sequence: Synthetic peptide
  REGION 1..10: note = h3D10 Var 6[PD-L1] vlCDR1
RASSGVSYIY

SEQ ID NO: 4055 - protein, 7 aa, synthetic construct
  REGION 1..7: note = Description of Artificial Sequence: Synthetic peptide
  REGION 1..7: note = h3D10 Var 6[PD-L1] vlCDR2
AAFNLAS

SEQ ID NO: 4056 - protein, 9 aa, synthetic construct
  REGION 1..9: note = Description of Artificial Sequence: Synthetic peptide
  REGION 1..9: note = h3D10 Var 6[PD-L1] vlCDR3
QQWSNNPLT

SEQ ID NO: 4057 - protein, 114 aa, synthetic construct
  REGION 1..114: note = Description of Artificial Sequence: Synthetic polypeptide
  REGION 1..114: note = h3D10 Var 7[PD-L1] variable heavy Chain
EVQLVESGGGLVQPGRSLRLSCTASGYTFPDYYMNWVRQAPGKGLEWVGDIDPNYGGTTYNASVKGRFTISVDRSKSIAYLQMSSLKTEDTAVYYCARGALTDWGQGTMVTVSS

SEQ ID NO: 4058 - protein, 5 aa, synthetic construct
  REGION 1..5: note = Description of Artificial Sequence: Synthetic peptide
  REGION 1..5: note = h3D10 Var 7[PD-L1] vhCDR1
DYYMN

SEQ ID NO: 4059 - protein, 17 aa, synthetic construct
  REGION 1..17: note = Description of Artificial Sequence: Synthetic peptide
  REGION 1..17: note = h3D10 Var 7[PD-L1] vhCDR2
DIDPNYGGTTYNASVKG

SEQ ID NO: 4060 - protein, 5 aa, synthetic construct
  REGION 1..5: note = Description of Artificial Sequence: Synthetic peptide
  REGION 1..5: note = h3D10 Var 7[PD-L1] vhCDR3
GALTD

SEQ ID NO: 4061 - protein, 106 aa, synthetic construct
  REGION 1..106: note = Description of Artificial Sequence: Synthetic polypeptide
  REGION 1..106: note = h3D10 Var 7[PD-L1] variable light Chain
DIQLTQSPSSLSASVGDRVTITCRASSGVSYIYWFQQKPGKAPKPLIYAAFNLASGVPSRFSGSGSGTEYTLTISSLQPEDFATYYCQQWSNNPLTFGQGTKVEIK

SEQ ID NO: 4062 - protein, 10 aa, synthetic construct
  REGION 1..10: note = Description of Artificial Sequence: Synthetic peptide
  REGION 1..10: note = h3D10 Var 7[PD-L1] vlCDR1
RASSGVSYIY

SEQ ID NO: 4063 - protein, 7 aa, synthetic construct
  REGION 1..7: note = Description of Artificial Sequence: Synthetic peptide
  REGION 1..7: note = h3D10 Var 7[PD-L1] vlCDR2
AAFNLAS

SEQ ID NO: 4064 - protein, 9 aa, synthetic construct
  REGION 1..9: note = Description of Artificial Sequence: Synthetic peptide
  REGION 1..9: note = h3D10 Var 7[PD-L1] vlCDR3
QQWSNNPLT

SEQ ID NO: 4065 - protein, 114 aa, synthetic construct; identical to SEQ ID NO: 4057
  REGION 1..114: note = Description of Artificial Sequence: Synthetic polypeptide
  REGION 1..114: note = h3D10 Var 8[PD-L1] variable heavy Chain

SEQ ID NO: 4066 - protein, 5 aa, synthetic construct
  REGION 1..5: note = Description of Artificial Sequence: Synthetic peptide
  REGION 1..5: note = h3D10 Var 8[PD-L1] vhCDR1
DYYMN

SEQ ID NO: 4067 - protein, 17 aa, synthetic construct
  REGION 1..17: note = Description of Artificial Sequence: Synthetic peptide
  REGION 1..17: note = h3D10 Var 8[PD-L1] vhCDR2
DIDPNYGGTTYNASVKG

SEQ ID NO: 4068 - protein, 5 aa, synthetic construct
  REGION 1..5: note = Description of Artificial Sequence: Synthetic peptide
  REGION 1..5: note = h3D10 Var 8[PD-L1] vhCDR3
GALTD

SEQ ID NO: 4069 - protein, 106 aa, synthetic construct
  REGION 1..106: note = Description of Artificial Sequence: Synthetic polypeptide
  REGION 1..106: note = h3D10 Var 8[PD-L1] variable light Chain
DIQLTQSPSILSASVGDRVTITCRASSSVSYIYWFQQKPGKAPKPLIYATFNLASGVPSRFSGSGSGTSYTLTISSLQPEDFATYYCQQWSNNPLTFGQGTKVEIK

SEQ ID NO: 4070 - protein, 10 aa, synthetic construct
  REGION 1..10: note = Description of Artificial Sequence: Synthetic peptide
  REGION 1..10: note = h3D10 Var 8[PD-L1] vlCDR1
RASSSVSYIY

SEQ ID NO: 4071 - protein, 7 aa, synthetic construct
  REGION 1..7: note = Description of Artificial Sequence: Synthetic peptide
  REGION 1..7: note = h3D10 Var 8[PD-L1] vlCDR2
ATFNLAS

SEQ ID NO: 4072 - protein, 9 aa, synthetic construct
  REGION 1..9: note = Description of Artificial Sequence: Synthetic peptide
  REGION 1..9: note = h3D10 Var 8[PD-L1] vlCDR3
QQWSNNPLT

SEQ ID NO: 4073 - protein, 114 aa, synthetic construct
  REGION 1..114: note = Description of Artificial Sequence: Synthetic polypeptide
  REGION 1..114: note = h3D10 Var 9[PD-L1] variable heavy Chain
EVQLVESGGGLVQPGRSLRLSCTASGYTFPDYYMNWVRQAPGKGLEWVGDIDPNYGGTTYNQSVKGRFTISVDRSKSIAYLQMSSLKTEDTAVYYCARGALTDWGQGTMVTVSS

SEQ ID NO: 4074 - protein, 5 aa, synthetic construct
  REGION 1..5: note = Description of Artificial Sequence: Synthetic peptide
  REGION 1..5: note = h3D10 Var 9[PD-L1] vhCDR1
DYYMN

SEQ ID NO: 4075 - protein, 17 aa, synthetic construct
  REGION 1..17: note = Description of Artificial Sequence: Synthetic peptide
  REGION 1..17: note = h3D10 Var 9[PD-L1] vhCDR2
DIDPNYGGTTYNQSVKG

SEQ ID NO: 4076 - protein, 5 aa, synthetic construct
  REGION 1..5: note = Description of Artificial Sequence: Synthetic peptide
  REGION 1..5: note = h3D10 Var 9[PD-L1] vhCDR3
GALTD

SEQ ID NO: 4077 - protein, 106 aa, synthetic construct; identical to SEQ ID NO: 4061
  REGION 1..106: note = Description of Artificial Sequence: Synthetic polypeptide
  REGION 1..106: note = h3D10 Var 9[PD-L1] variable light Chain

SEQ ID NO: 4078 - protein, 10 aa, synthetic construct
  REGION 1..10: note = Description of Artificial Sequence: Synthetic peptide
  REGION 1..10: note = h3D10 Var 9[PD-L1] vlCDR1
RASSGVSYIY

SEQ ID NO: 4079 - protein, 7 aa, synthetic construct
  REGION 1..7: note = Description of Artificial Sequence: Synthetic peptide
  REGION 1..7: note = h3D10 Var 9[PD-L1] vlCDR2
AAFNLAS

SEQ ID NO: 4080 - protein, 9 aa, synthetic construct
  REGION 1..9: note = Description of Artificial Sequence: Synthetic peptide
  REGION 1..9: note = h3D10 Var 9[PD-L1] vlCDR3
QQWSNNPLT

SEQ ID NO: 4081 - protein, 114 aa, synthetic construct; identical to SEQ ID NO: 4073
  REGION 1..114: note = Description of Artificial Sequence: Synthetic polypeptide
  REGION 1..114: note = h3D10 Var 10[PD-L1] variable heavy Chain

SEQ ID NO: 4082 - protein, 5 aa, synthetic construct
  REGION 1..5: note = Description of Artificial Sequence: Synthetic peptide
  REGION 1..5: note = h3D10 Var 10[PD-L1] vhCDR1
DYYMN

SEQ ID NO: 4083 - protein, 17 aa, synthetic construct
  REGION 1..17: note = Description of Artificial Sequence: Synthetic peptide
  REGION 1..17: note = h3D10 Var 10[PD-L1] vhCDR2
DIDPNYGGTTYNQSVKG

SEQ ID NO: 4084 - protein, 5 aa, synthetic construct
  REGION 1..5: note = Description of Artificial Sequence: Synthetic peptide
  REGION 1..5: note = h3D10 Var 10[PD-L1] vhCDR3
GALTD

SEQ ID NO: 4085 - protein, 106 aa, synthetic construct; identical to SEQ ID NO: 4069
  REGION 1..106: note = Description of Artificial Sequence: Synthetic polypeptide
  REGION 1..106: note = h3D10 Var 10[PD-L1] variable light Chain

SEQ ID NO: 4086 - protein, 10 aa, synthetic construct
  REGION 1..10: note = Description of Artificial Sequence: Synthetic peptide
  REGION 1..10: note = h3D10 Var 10[PD-L1] vlCDR1
RASSSVSYIY

SEQ ID NO: 4087 - protein, 7 aa, synthetic construct
  REGION 1..7: note = Description of Artificial Sequence: Synthetic peptide
  REGION 1..7: note = h3D10 Var 10[PD-L1] vlCDR2
ATFNLAS

SEQ ID NO: 4088 - protein, 9 aa, synthetic construct
  REGION 1..9: note = Description of Artificial Sequence: Synthetic peptide
  REGION 1..9: note = h3D10 Var 10[PD-L1] vlCDR3
QQWSNNPLT

SEQ ID NO: 4089 - protein, 114 aa, synthetic construct; identical to SEQ ID NO: 4049
  REGION 1..114: note = Description of Artificial Sequence: Synthetic polypeptide
  REGION 1..114: note = h3D10 Var 11[PD-L1] variable heavy Chain

SEQ ID NO: 4090 - protein, 5 aa, synthetic construct
  REGION 1..5: note = Description of Artificial Sequence: Synthetic peptide
  REGION 1..5: note = h3D10 Var 11[PD-L1] vhCDR1
DYYMN

SEQ ID NO: 4091 - protein, 17 aa, synthetic construct
  REGION 1..17: note = Description of Artificial Sequence: Synthetic peptide
  REGION 1..17: note = h3D10 Var 11[PD-L1] vhCDR2
DIDPNYGGTTYAASVKG

SEQ ID NO: 4092 - protein, 5 aa, synthetic construct
  REGION 1..5: note = Description of Artificial Sequence: Synthetic peptide
  REGION 1..5: note = h3D10 Var 11[PD-L1] vhCDR3
GALTD

SEQ ID NO: 4093 - protein, 106 aa, synthetic construct; identical to SEQ ID NO: 4013
  REGION 1..106: note = Description of Artificial Sequence: Synthetic polypeptide
  REGION 1..106: note = h3D10 Var 11[PD-L1] variable light Chain

SEQ ID NO: 4094 - protein, 10 aa, synthetic construct
  REGION 1..10: note = Description of Artificial Sequence: Synthetic peptide
  REGION 1..10: note = h3D10 Var 11[PD-L1] vlCDR1
RASSSVSYIY

SEQ ID NO: 4095 - protein, 7 aa, synthetic construct
  REGION 1..7: note = Description of Artificial Sequence: Synthetic peptide
  REGION 1..7: note = h3D10 Var 11[PD-L1] vlCDR2
AAFNRAT

SEQ ID NO: 4096 - protein, 9 aa, synthetic construct
  REGION 1..9: note = Description of Artificial Sequence: Synthetic peptide
  REGION 1..9: note = h3D10 Var 11[PD-L1] vlCDR3
QQWSNNPLT

SEQ ID NO: 4097 - protein, 114 aa, synthetic construct; identical to SEQ ID NO: 4009
  REGION 1..114: note = Description of Artificial Sequence: Synthetic polypeptide
  REGION 1..114: note = h3D10 Var 12[PD-L1] variable heavy Chain

SEQ ID NO: 4098 - protein, 5 aa, synthetic construct
  REGION 1..5: note = Description of Artificial Sequence: Synthetic peptide
  REGION 1..5: note = h3D10 Var 12[PD-L1] vhCDR1
DYYMN

SEQ ID NO: 4099 - protein, 17 aa, synthetic construct
  REGION 1..17: note = Description of Artificial Sequence: Synthetic peptide
  REGION 1..17: note = h3D10 Var 12[PD-L1] vhCDR2
DIDPNYGGTNYAQKFQG

SEQ ID NO: 4100 - protein, 5 aa, synthetic construct
  REGION 1..5: note = Description of Artificial Sequence: Synthetic peptide
  REGION 1..5: note = h3D10 Var 12[PD-L1] vhCDR3
GALTD

SEQ ID NO: 4101 - protein, 106 aa, synthetic construct; identical to SEQ ID NO: 4053
  REGION 1..106: note = Description of Artificial Sequence: Synthetic polypeptide
  REGION 1..106: note = h3D10 Var 12[PD-L1] variable light Chain

SEQ ID NO: 4102 - protein, 10 aa, synthetic construct
  REGION 1..10: note = Description of Artificial Sequence: Synthetic peptide
  REGION 1..10: note = h3D10 Var 12[PD-L1] vlCDR1
RASSGVSYIY

SEQ ID NO: 4103 - protein, 7 aa, synthetic construct
  REGION 1..7: note = Description of Artificial Sequence: Synthetic peptide
  REGION 1..7: note = h3D10 Var 12[PD-L1] vlCDR2
AAFNLAS

SEQ ID NO: 4104 - protein, 9 aa, synthetic construct
  REGION 1..9: note = Description of Artificial Sequence: Synthetic peptide
  REGION 1..9: note = h3D10 Var 12[PD-L1] vlCDR3
QQWSNNPLT

SEQ ID NO: 4105 - protein, 114 aa, synthetic construct; identical to SEQ ID NO: 4073
  REGION 1..114: note = Description of Artificial Sequence: Synthetic polypeptide
  REGION 1..114: note = h3D10 Var 13[PD-L1] variable heavy Chain

SEQ ID NO: 4106 - protein, 5 aa, synthetic construct
  REGION 1..5: note = Description of Artificial Sequence: Synthetic peptide
  REGION 1..5: note = h3D10 Var 13[PD-L1] vhCDR1
DYYMN

SEQ ID NO: 4107 - protein, 17 aa, synthetic construct
  REGION 1..17: note = Description of Artificial Sequence: Synthetic peptide
  REGION 1..17: note = h3D10 Var 13[PD-L1] vhCDR2
DIDPNYGGTTYNQSVKG

SEQ ID NO: 4108 - protein, 5 aa, synthetic construct
  REGION 1..5: note = Description of Artificial Sequence: Synthetic peptide
  REGION 1..5: note = h3D10 Var 13[PD-L1] vhCDR3
GALTD

SEQ ID NO: 4109 - protein, 106 aa, synthetic construct; identical to SEQ ID NO: 4029
  REGION 1..106: note = Description of Artificial Sequence: Synthetic polypeptide
  REGION 1..106: note = h3D10 Var 13[PD-L1] variable light Chain

SEQ ID NO: 4110 - protein, 10 aa, synthetic construct
  REGION 1..10: note = Description of Artificial Sequence: Synthetic peptide
  REGION 1..10: note = h3D10 Var 13[PD-L1] vlCDR1
RASSSVSYIY

SEQ ID NO: 4111 - protein, 7 aa, synthetic construct
  REGION 1..7: note = Description of Artificial Sequence: Synthetic peptide
  REGION 1..7: note = h3D10 Var 13[PD-L1] vlCDR2
ATFNLAS

SEQ ID NO: 4112 - protein, 9 aa, synthetic construct
  REGION 1..9: note = Description of Artificial Sequence: Synthetic peptide
  REGION 1..9: note = h3D10 Var 13[PD-L1] vlCDR3
QQWSNNPLT

SEQ ID NO: 4113 - protein, 114 aa, synthetic construct; identical to SEQ ID NO: 4033
  REGION 1..114: note = Description of Artificial Sequence: Synthetic polypeptide
  REGION 1..114: note = h3D10 Var 14[PD-L1] variable heavy Chain

SEQ ID NO: 4114 - protein, 5 aa, synthetic construct
  REGION 1..5: note = Description of Artificial Sequence: Synthetic peptide
  REGION 1..5: note = h3D10 Var 14[PD-L1] vhCDR1
DYYMN

SEQ ID NO: 4115 - protein, 17 aa, synthetic construct
  REGION 1..17: note = Description of Artificial Sequence: Synthetic peptide
  REGION 1..17: note = h3D10 Var 14[PD-L1] vhCDR2
DIDPNYGGTNYNQKFQG

SEQ ID NO: 4116 - protein, 5 aa, synthetic construct
  REGION 1..5: note = Description of Artificial Sequence: Synthetic peptide
  REGION 1..5: note = h3D10 Var 14[PD-L1] vhCDR3
GALTD

SEQ ID NO: 4117 - protein, 106 aa, synthetic construct; identical to SEQ ID NO: 4069
  REGION 1..106: note = Description of Artificial Sequence: Synthetic polypeptide
  REGION 1..106: note = h3D10 Var 14[PD-L1] variable light Chain

SEQ ID NO: 4118 - protein, 10 aa, synthetic construct
  REGION 1..10: note = Description of Artificial Sequence: Synthetic peptide
  REGION 1..10: note = h3D10 Var 14[PD-L1] vlCDR1
RASSSVSYIY

SEQ ID NO: 4119 - protein, 7 aa, synthetic construct
  REGION 1..7: note = Description of Artificial Sequence: Synthetic peptide
  REGION 1..7: note = h3D10 Var 14[PD-L1] vlCDR2
ATFNLAS

SEQ ID NO: 4120 - protein, 9 aa, synthetic construct
  REGION 1..9: note = Description of Artificial Sequence: Synthetic peptide
  REGION 1..9: note = h3D10 Var 14[PD-L1] vlCDR3
QQWSNNPLT

SEQ ID NO: 4121 - protein, 123 aa, synthetic construct
  REGION 1..123: note = Description of Artificial Sequence: Synthetic polypeptide
  REGION 1..123: note = Antibody A[PD-L1] variable heavy Chain
QVQLVQSGAEVKKPGSSVKVSCKASGGTFSSYAISWVRQAPGQGLEWMGGIIPIFGTANYAQKFQGRVTITADKSTSTAYMELSSLRSEDTAVYYCARSPDYSPYYYYGMDVWGQGTTVTVSS

SEQ ID NO: 4122 - protein, 5 aa, synthetic construct
  REGION 1..5: note = Description of Artificial Sequence: Synthetic peptide
  REGION 1..5: note = Antibody A[PD-L1] vhCDR1
SYAIS

SEQ ID NO: 4123 - protein, 17 aa, synthetic construct
  REGION 1..17: note = Description of Artificial Sequence: Synthetic peptide
  REGION 1..17: note = Antibody A[PD-L1] vhCDR2
GIIPIFGTANYAQKFQG

SEQ ID NO: 4124 - protein, 14 aa, synthetic construct
  REGION 1..14: note = Description of Artificial Sequence: Synthetic peptide
  REGION 1..14: note = Antibody A[PD-L1] vhCDR3
SPDYSPYYYYGMDV

SEQ ID NO: 4125 - protein, 111 aa, synthetic construct
  REGION 1..111: note = Description of Artificial Sequence: Synthetic polypeptide
  REGION 1..111: note = Antibody A[PD-L1] variable light Chain
QSVLTQPPSASGTPGQRVTISCSGSSSNIGSNTVNWYQQLPGTAPKLLIYGNSNRPSGVPDRFSGSKSGTSASLAISGLQSEDEADYYCQSYDSSLSGSVFGGGIKLTVLG

SEQ ID NO: 4126 - protein, 13 aa, synthetic construct
  REGION 1..13: note = Description of Artificial Sequence: Synthetic peptide
  REGION 1..13: note = Antibody A[PD-L1] vlCDR1
SGSSSNIGSNTVN

SEQ ID NO: 4127 - protein, 7 aa, synthetic construct
  REGION 1..7: note = Description of Artificial Sequence: Synthetic peptide
  REGION 1..7: note = Antibody A[PD-L1] vlCDR2
GNSNRPS

SEQ ID NO: 4128 - protein, 11 aa, synthetic construct
  REGION 1..11: note = Description of Artificial Sequence: Synthetic peptide
  REGION 1..11: note = Antibody A[PD-L1] vlCDR3
QSYDSSLSGSV

SEQ ID NO: 4129 - protein, 116 aa, synthetic construct
  REGION 1..116: note = Description of Artificial Sequence: Synthetic polypeptide
  REGION 1..116: note = C5H9v2[PD-L1] variable heavy Chain
EVQLLESGGGLVQPGGSLRLSCAASGFTFSSYAMSWVRQAPGKGLEWVSSIWRNGIVTVYADSVKGRFTISRDNSKNTLYLQMNSLRAEDTAVYYCAKWSAAFDYWGQGTLVTVSS

SEQ ID NO: 4130 - protein, 5 aa, synthetic construct
  REGION 1..5: note = Description of Artificial Sequence: Synthetic peptide
  REGION 1..5: note = C5H9v2[PD-L1] vhCDR1
SYAMS

SEQ ID NO: 4131 - protein, 17 aa, synthetic construct
  REGION 1..17: note = Description of Artificial Sequence: Synthetic peptide
  REGION 1..17: note = C5H9v2[PD-L1] vhCDR2
SIWRNGIVTVYADSVKG

SEQ ID NO: 4132 - protein, 7 aa, synthetic construct
  REGION 1..7: note = Description of Artificial Sequence: Synthetic peptide
  REGION 1..7: note = C5H9v2[PD-L1] vhCDR3
WSAAFDY

SEQ ID NO: 4133 - protein, 107 aa, synthetic construct
  REGION 1..107: note = Description of Artificial Sequence: Synthetic polypeptide
  REGION 1..107: note = C5H9v2[PD-L1] variable light Chain
DIQMTQSPSSLSASVGDRVTITCRASQSISSYLNWYQQKPGKAPKLLIYAASSLQSGVPSRFSGSGSGTDFTLTISSLQPEDFATYYCQQDNGYPSTFGGGTKVEIK

SEQ ID NO: 4134 - protein, 11 aa, synthetic construct
  REGION 1..11: note = Description of Artificial Sequence: Synthetic peptide
  REGION 1..11: note = C5H9v2[PD-L1] vlCDR1
RASQSISSYLN

SEQ ID NO: 4135 - protein, 7 aa, synthetic construct
  REGION 1..7: note = Description of Artificial Sequence: Synthetic peptide
  REGION 1..7: note = C5H9v2[PD-L1] vlCDR2
AASSLQS

SEQ ID NO: 4136 - protein, 9 aa, synthetic construct
  REGION 1..9: note = Description of Artificial Sequence: Synthetic peptide
  REGION 1..9: note = C5H9v2[PD-L1] vlCDR3
QQDNGYPST

SEQ ID NO: 4137 - protein, 115 aa, synthetic construct
  REGION 1..115: note = Description of Artificial Sequence: Synthetic polypeptide
  REGION 1..115: note = humanized 29E.2A3[PD-L1] variable heavy Chain
EVQLVQSGAEVKKPGASVKMSCKASGYTFTSYVMHWVKQAPGQRLEWIGYVNPFNDGTKYNEMFKGRATLTSDKSTSTAYMELSSLRSEDTAVYYCARQAWGYPWGQGTLVTVSS

SEQ ID NO: 4138 - protein, 5 aa, synthetic construct
  REGION 1..5: note = Description of Artificial Sequence: Synthetic peptide
  REGION 1..5: note = humanized 29E.2A3[PD-L1] vhCDR1
SYVMH

SEQ ID NO: 4139 - protein, 17 aa, synthetic construct
  REGION 1..17: note = Description of Artificial Sequence: Synthetic peptide
  REGION 1..17: note = humanized 29E.2A3[PD-L1] vhCDR2
YVNPFNDGTKYNEMFKG

SEQ ID NO: 4140 - protein, 6 aa, synthetic construct
  REGION 1..6: note = Description of Artificial Sequence: Synthetic peptide
  REGION 1..6: note = humanized 29E.2A3[PD-L1] vhCDR3
QAWGYP

SEQ ID NO: 4141 - protein, 111 aa, synthetic construct
  REGION 1..111: note = Description of Artificial Sequence: Synthetic polypeptide
  REGION 1..111: note = humanized 29E.2A3[PD-L1] variable light Chain
DIVLTQSPATLSLSPGERATLSCRATESVEYYGTSLVQWYQQKPGQPPKLLIYAASSVDSGVPSRFSGSGSGTDFTLTINSLEAEDAATYFCQQSRRVPYTFGQGTKLEIK

SEQ ID NO: 4142 - protein, 15 aa, synthetic construct
  REGION 1..15: note = Description of Artificial Sequence: Synthetic peptide
  REGION 1..15: note = humanized 29E.2A3[PD-L1] vlCDR1
RATESVEYYGTSLVQ

SEQ ID NO: 4143 - protein, 7 aa, synthetic construct
  REGION 1..7: note = Description of Artificial Sequence: Synthetic peptide
  REGION 1..7: note = humanized 29E.2A3[PD-L1] vlCDR2
AASSVDS

SEQ ID NO: 4144 - protein, 9 aa, synthetic construct
  REGION 1..9: note = Description of Artificial Sequence: Synthetic peptide
  REGION 1..9: note = humanized 29E.2A3[PD-L1] vlCDR3
QQSRRVPYT

SEQ ID NO: 4145 - protein, 121 aa, synthetic construct
  REGION 1..121: note = Description of Artificial Sequence: Synthetic polypeptide
  REGION 1..121: note = 1B9[PD-L1] variable heavy Chain
DVQLQESGPGLVKPSQSLSLTCTVTGYSITSDHAWNWIRQVPGNKLEWMGYITYRGSTTYSPSLKSRISITRDTSKNQFFLQLNSVTTEDTATYYCARSMITTGYYVMDYWGQGTSVTVSS

SEQ ID NO: 4146 - protein, 6 aa, synthetic construct
  REGION 1..6: note = Description of Artificial Sequence: Synthetic peptide
  REGION 1..6: note = 1B9[PD-L1] vhCDR1
SDHAWN

SEQ ID NO: 4147 - protein, 16 aa, synthetic construct
  REGION 1..16: note = Description of Artificial Sequence: Synthetic peptide
  REGION 1..16: note = 1B9[PD-L1] vhCDR2
YITYRGSTTYSPSLKS

SEQ ID NO: 4148 - protein, 12 aa, synthetic construct
  REGION 1..12: note = Description of Artificial Sequence: Synthetic peptide
  REGION 1..12: note = 1B9[PD-L1] vhCDR3
SMITTGYYVMDY

SEQ ID NO: 4149 - protein, 107 aa, synthetic construct
  REGION 1..107: note = Description of Artificial Sequence: Synthetic polypeptide
  REGION 1..107: note = 1B9[PD-L1] variable light Chain
DIVMTQSHKFMSTSLGDRVTITCKASQDVGISVVWYQQKPGQSPKLLIYWASTRHTGVPDRFTGSGSGTDFTLTINNVQSEDLADYFCQQYSSYPLTVGAGTKLELK

SEQ ID NO: 4150 - protein, 11 aa, synthetic construct
  REGION 1..11: note = Description of Artificial Sequence: Synthetic peptide
  REGION 1..11: note = 1B9[PD-L1] vlCDR1
KASQDVGISVV

SEQ ID NO: 4151 - protein, 7 aa, synthetic construct
  REGION 1..7: note = Description of Artificial Sequence: Synthetic peptide
  REGION 1..7: note = 1B9[PD-L1] vlCDR2
WASTRHT

SEQ ID NO: 4152 - protein, 9 aa, synthetic construct
  REGION 1..9: note = Description of Artificial Sequence: Synthetic peptide
  REGION 1..9: note = 1B9[PD-L1] vlCDR3
QQYSSYPLT

SEQ ID NO: 4153 - protein, 121 aa, synthetic construct
  REGION 1..121: note = Description of Artificial Sequence: Synthetic polypeptide
  REGION 1..121: note = 4H1[PD-L1] variable heavy Chain
DVQLQESGPGLVKPSQSLSLTCTVTDYSITSDYAWTWIRQFPGNKLEWMGYITYRGTTRYNPSLTSRISFTRDTSKNQLFLQLNSVTTEDTGTYCCARSMITTGYYAMDYWGQGTSVTVSS

SEQ ID NO: 4154 - protein, 6 aa, synthetic construct
  REGION 1..6: note = Description of Artificial Sequence: Synthetic peptide
  REGION 1..6: note = 4H1[PD-L1] vhCDR1
SDYAWT

SEQ ID NO: 4155 - protein, 16 aa, synthetic construct
  REGION 1..16: note = Description of Artificial Sequence: Synthetic peptide
  REGION 1..16: note = 4H1[PD-L1] vhCDR2
YITYRGTTRYNPSLTS

SEQ ID NO: 4156 - protein, 12 aa, synthetic construct
  REGION 1..12: note = Description of Artificial Sequence: Synthetic peptide
  REGION 1..12: note = 4H1[PD-L1] vhCDR3
SMITTGYYAMDY

SEQ ID NO: 4157 - protein, 107 aa, synthetic construct
  REGION 1..107: note = Description of Artificial Sequence: Synthetic polypeptide
  REGION 1..107: note = 4H1[PD-L1] variable light Chain
DIVMTQSHKFMSTSVGDRVSISCKASQDVGISVAWYQQKPGQSPKLLIYWASTRHTGVPVRFTGSGSGTDFTLTISNVQSEDLADYFCQQYSSYPPTFGAGTKLELK

SEQ ID NO: 4158 - protein, 11 aa, synthetic construct
  REGION 1..11: note = Description of Artificial Sequence: Synthetic peptide
  REGION 1..11: note = 4H1[PD-L1] vlCDR1
KASQDVGISVA

SEQ ID NO: 4159 - protein, 7 aa, synthetic construct
  REGION 1..7: note = Description of Artificial Sequence: Synthetic peptide
  REGION 1..7: note = 4H1[PD-L1] vlCDR2
WASTRHT

SEQ ID NO: 4160 - protein, 9 aa, synthetic construct
  REGION 1..9: note = Description of Artificial Sequence: Synthetic peptide
  REGION 1..9: note = 4H1[PD-L1] vlCDR3
QQYSSYPPT

SEQ ID NO: 4161 - protein, 120 aa, synthetic construct
  REGION 1..120: note = Description of Artificial Sequence: Synthetic polypeptide
  REGION 1..120: note = mAb-42[PD-L1] variable heavy Chain
QVQLVQSGAEVKKPGSSVKVSCKASGGTFSSYAISWVRQAPGQGLEWMGGIIPIFGTANYAQKFQGRVTITADKSTSTAYMELSSLRSEDTAVYYCARGRQMFGAGIDFWGPGTLVTVSS

SEQ ID NO: 4162 - protein, 5 aa, synthetic construct
  REGION 1..5: note = Description of Artificial Sequence: Synthetic peptide
  REGION 1..5: note = mAb-42[PD-L1] vhCDR1
SYAIS

SEQ ID NO: 4163 - protein, 17 aa, synthetic construct
  REGION 1..17: note = Description of Artificial Sequence: Synthetic peptide
  REGION 1..17: note = mAb-42[PD-L1] vhCDR2
GIIPIFGTANYAQKFQG

SEQ ID NO: 4164 - protein, 11 aa, synthetic construct
  REGION 1..11: note = Description of Artificial Sequence: Synthetic peptide
  REGION 1..11: note = mAb-42[PD-L1] vhCDR3
GRQMFGAGIDF

SEQ ID NO: 4165 - protein, 112 aa, synthetic construct
  REGION 1..112: note = Description of Artificial Sequence: Synthetic polypeptide
  REGION 1..112: note = mAb-42[PD-L1] variable light Chain
NFMLTQPHSVSESPGKTVTISCTRSSGSIDSNYVQWYQQRPGSAPTTVIYEDNQRPSGVPDRFSGSIDSSSNSASLTISGLKTEDEADYYCQSYDSNNRHVIFGGGTKLTVL

SEQ ID NO: 4166 - protein, 13 aa, synthetic construct
  REGION 1..13: note = Description of Artificial Sequence: Synthetic peptide
  REGION 1..13: note = mAb-42[PD-L1] vlCDR1
TRSSGSIDSNYVQ

SEQ ID NO: 4167 - protein, 7 aa, synthetic construct
  REGION 1..7: note = Description of Artificial Sequence: Synthetic peptide
  REGION 1..7: note = mAb-42[PD-L1] vlCDR2
EDNQRPS

SEQ ID NO: 4168 - protein, 11 aa, synthetic construct
  REGION 1..11: note = Description of Artificial Sequence: Synthetic peptide
  REGION 1..11: note = mAb-42[PD-L1] vlCDR3
QSYDSNNRHVI

SEQ ID NO: 4169 - protein, 120 aa, synthetic construct
  REGION 1..120: note = Description of Artificial Sequence: Synthetic polypeptide
  REGION 1..120: note = BAP058-03[PD-L1] variable heavy Chain
EVQLVQSGAEVKKPGATVKISCKVSGYTFTSYWMYWVRQATGQGLEWMGRIDPNSGSTKYNEKFKNRVTITADKSTSTAYMELSSLRSEDTAVYYCARDYRKGLYAMDYWGQGTTVTVSS

SEQ ID NO: 4170 - protein, 5 aa, synthetic construct
  REGION 1..5: note = Description of Artificial Sequence: Synthetic peptide
  REGION 1..5: note = BAP058-03[PD-L1] vhCDR1
SYWMY

SEQ ID NO: 4171 - protein, 17 aa, synthetic construct
  REGION 1..17: note = Description of Artificial Sequence: Synthetic peptide
  REGION 1..17: note = BAP058-03[PD-L1] vhCDR2
RIDPNSGSTKYNEKFKN

SEQ ID NO: 4172 - protein, 11 aa, synthetic construct
  REGION 1..11: note = Description of Artificial Sequence: Synthetic peptide
  REGION 1..11: note = BAP058-03[PD-L1] vhCDR3
DYRKGLYAMDY

SEQ ID NO: 4173 - protein, 107 aa, synthetic construct
  REGION 1..107: note = Description of Artificial Sequence: Synthetic polypeptide
  REGION 1..107: note = BAP058-03[PD-L1] variable light Chain
EIVLTQSPDFQSVTPKEKVTITCKASQDVGTAVAWYLQKPGQSPQLLIYWASTRHTGVPDRFSGSGSGTDFTLKISRVEAEDVGVYYCQQYNSYPLTFGQGTKVEIK

SEQ ID NO: 4174 - protein, 11 aa, synthetic construct
  REGION 1..11: note = Description of Artificial Sequence: Synthetic peptide
  REGION 1..11: note = BAP058-03[PD-L1] vlCDR1
KASQDVGTAVA

SEQ ID NO: 4175 - protein, 7 aa, synthetic construct
  REGION 1..7: note = Description of Artificial Sequence: Synthetic peptide
  REGION 1..7: note = BAP058-03[PD-L1] vlCDR2
WASTRHT

SEQ ID NO: 4176 - protein, 9 aa, synthetic construct
  REGION 1..9: note = Description of Artificial Sequence: Synthetic peptide
  REGION 1..9: note = BAP058-03[PD-L1] vlCDR3
QQYNSYPLT

SEQ ID NO: 4177 - protein, 120 aa, synthetic construct
  REGION 1..120: note = Description of Artificial Sequence: Synthetic polypeptide
  REGION 1..120: note = BAP058-04[PD-L1] variable heavy Chain
EVQLVQSGAEVKKPGESLRISCKGSGYTFTSYWMYWVRQAPGQGLEWMGRIDPNSGSTKYNEKFKNRVTISVDTSKNQFSLKLSSVTAADTAVYYCARDYRKGLYAMDYWGQGTTVTVSS

SEQ ID NO: 4178 - protein, 5 aa, synthetic construct
  REGION 1..5: note = Description of Artificial Sequence: Synthetic peptide
  REGION 1..5: note = BAP058-04[PD-L1] vhCDR1
SYWMY

SEQ ID NO: 4179 - protein, 17 aa, synthetic construct
  REGION 1..17: note = Description of Artificial Sequence: Synthetic peptide
  REGION 1..17: note = BAP058-04[PD-L1] vhCDR2
RIDPNSGSTKYNEKFKN

SEQ ID NO: 4180 - protein, 11 aa, synthetic construct
  REGION 1..11: note = Description of Artificial Sequence: Synthetic peptide
  REGION 1..11: note = BAP058-04[PD-L1] vhCDR3
DYRKGLYAMDY

SEQ ID NO: 4181 - protein, 107 aa, synthetic construct
  REGION 1..107: note = Description of Artificial Sequence: Synthetic polypeptide
  REGION 1..107: note = BAP058-04[PD-L1] variable light Chain
EIVLTQSPDFQSVTPKEKVTITCKASQDVGTAVAWYLQKPGQSPQLLIYWASTRHTGVPSRFSGSGSGTDFTFTISSLQPEDIATYYCQQYNSYPLTFGQGTKVEIK

SEQ ID NO: 4182 - protein, 11 aa, synthetic construct
  REGION 1..11: note = Description of Artificial Sequence: Synthetic peptide
  REGION 1..11: note = BAP058-04[PD-L1] vlCDR1
KASQDVGTAVA

SEQ ID NO: 4183 - protein, 7 aa, synthetic construct
  REGION 1..7: note = Description of Artificial Sequence: Synthetic peptide
  REGION 1..7: note = BAP058-04[PD-L1] vlCDR2
WASTRHT

SEQ ID NO: 4184 - protein, 9 aa, synthetic construct
  REGION 1..9: note = Description of Artificial Sequence: Synthetic peptide
  REGION 1..9: note = BAP058-04[PD-L1] vlCDR3
QQYNSYPLT

SEQ ID NO: 4185 - protein, 120 aa, synthetic construct
  REGION 1..120: note = Description of Artificial Sequence: Synthetic polypeptide
  REGION 1..120: note = BAP058-06[PD-L1] variable heavy Chain
EVQLVQSGAEVKKPGESLRISCKGSGYTFTSYWMYWIRQPPGKGLEWIGRIDPNSGSTKYNEKFKNRVTITADKSTSTAYMELSSLRSEDTAVYYCARDYRKGLYAMDYWGQGTTVTVSS

SEQ ID NO: 4186 - protein, 5 aa, synthetic construct
  REGION 1..5: note = Description of Artificial Sequence: Synthetic peptide
  REGION 1..5: note = BAP058-06[PD-L1] vhCDR1
SYWMY

SEQ ID NO: 4187 - protein, 17 aa, synthetic construct
  REGION 1..17: note = Description of Artificial Sequence: Synthetic peptide
  REGION 1..17: note = BAP058-06[PD-L1] vhCDR2
RIDPNSGSTKYNEKFKN

SEQ ID NO: 4188 - protein, 11 aa, synthetic construct
  REGION 1..11: note = Description of Artificial Sequence: Synthetic peptide
  REGION 1..11: note = BAP058-06[PD-L1] vhCDR3
DYRKGLYAMDY

SEQ ID NO: 4189 - protein, 107 aa, synthetic construct; identical to SEQ ID NO: 4181
  REGION 1..107: note = Description of Artificial Sequence: Synthetic polypeptide
  REGION 1..107: note = BAP058-06[PD-L1] variable light Chain

SEQ ID NO: 4190 - protein, 11 aa, synthetic construct
  REGION 1..11: note = Description of Artificial Sequence: Synthetic peptide
  REGION 1..11: note = BAP058-06[PD-L1] vlCDR1
KASQDVGTAVA

SEQ ID NO: 4191 - protein, 7 aa, synthetic construct
  REGION 1..7: note = Description of Artificial Sequence: Synthetic peptide
  REGION 1..7: note = BAP058-06[PD-L1] vlCDR2
WASTRHT

SEQ ID NO: 4192 - protein, 9 aa, synthetic construct
  REGION 1..9: note = Description of Artificial Sequence: Synthetic peptide
  REGION 1..9: note = BAP058-06[PD-L1] vlCDR3
QQYNSYPLT

SEQ ID NO: 4193 - protein, 120 aa, synthetic construct
  REGION 1..120: note = Description of Artificial Sequence: Synthetic polypeptide
  REGION 1..120: note = BAP058-07[PD-L1] variable heavy Chain
QVQLVQSGAEVKKPGASVKVSCKASGYTFTSYWMYWIRQSPSRGLEWLGRIDPNSGSTKYNEKFKNRFTISRDDSKNTAYLQMNSLKTEDTAVYYCARDYRKGLYAMDYWGQGTTVTVSS

SEQ ID NO: 4194 - protein, 5 aa, synthetic construct
  REGION 1..5: note = Description of Artificial Sequence: Synthetic peptide
  REGION 1..5: note = BAP058-07[PD-L1] vhCDR1
SYWMY

SEQ ID NO: 4195 - protein, 17 aa, synthetic construct
  REGION 1..17: note = Description of Artificial Sequence: Synthetic peptide
  REGION 1..17: note = BAP058-07[PD-L1] vhCDR2
RIDPNSGSTKYNEKFKN

SEQ ID NO: 4196 - protein, 11 aa, synthetic construct
  REGION 1..11: note = Description of Artificial Sequence: Synthetic peptide
  REGION 1..11: note = BAP058-07[PD-L1] vhCDR3
DYRKGLYAMDY

SEQ ID NO: 4197 - protein, 107 aa, synthetic construct
  REGION 1..107: note = Description of Artificial Sequence: Synthetic polypeptide
  REGION 1..107: note = BAP058-07[PD-L1] variable light Chain
EIVLTQSPATLSLSPGERATLSCKASQDVGTAVAWYLQKPGQSPQLLIYWASTRHTGIPPRFSGSGYGTDFTLTINNIESEDAAYYFCQQYNSYPLTFGQGTKVEIK

SEQ ID NO: 4198 - protein, 11 aa, synthetic construct
  REGION 1..11: note = Description of Artificial Sequence: Synthetic peptide
  REGION 1..11: note = BAP058-07[PD-L1] vlCDR1
KASQDVGTAVA

SEQ ID NO: 4199 - protein, 7 aa, synthetic construct
  REGION 1..7: note = Description of Artificial Sequence: Synthetic peptide
  REGION 1..7: note = BAP058-07[PD-L1] vlCDR2
WASTRHT

SEQ ID NO: 4200 - protein, 9 aa, synthetic construct
  REGION 1..9: note = Description of Artificial Sequence: Synthetic peptide
  REGION 1..9: note = BAP058-07[PD-L1] vlCDR3
QQYNSYPLT

SEQ ID NO: 4201 - protein, 120 aa, synthetic construct; identical to SEQ ID NO: 4169
  REGION 1..120: note = Description of Artificial Sequence: Synthetic polypeptide
  REGION 1..120: note = BAP058-11[PD-L1] variable heavy Chain

SEQ ID NO: 4202 - protein, 5 aa, synthetic construct
  REGION 1..5: note = Description of Artificial Sequence: Synthetic peptide
  REGION 1..5: note = BAP058-11[PD-L1] vhCDR1
SYWMY

SEQ ID NO: 4203 - protein, 17 aa, synthetic construct
  REGION 1..17: note = Description of Artificial Sequence: Synthetic peptide
  REGION 1..17: note = BAP058-11[PD-L1] vhCDR2
RIDPNSGSTKYNEKFKN

SEQ ID NO: 4204 - protein, 11 aa, synthetic construct
  REGION 1..11: note = Description of Artificial Sequence: Synthetic peptide
  REGION 1..11: note = BAP058-11[PD-L1] vhCDR3
DYRKGLYAMDY

SEQ ID NO: 4205 - protein, 107 aa, synthetic construct
  REGION 1..107: note = Description of Artificial Sequence: Synthetic polypeptide
  REGION 1..107: note = BAP058-11[PD-L1] variable light Chain
DVVMTQSPLSLPVTLGQPASISCKASQDVGTAVAWYQQKPGQAPRLLIYWASTRHTGVPSRFSGSGSGTEFTLTISSLQPDDFATYYCQQYNSYPLTFGQGTKVEIK

SEQ ID NO: 4206 - protein, 11 aa, synthetic construct
  REGION 1..11: note = Description of Artificial Sequence: Synthetic peptide
  REGION 1..11: note = BAP058-11[PD-L1] vlCDR1
KASQDVGTAVA

SEQ ID NO: 4207 - protein, 7 aa, synthetic construct
  REGION 1..7: note = Description of Artificial Sequence: Synthetic peptide
  REGION 1..7: note = BAP058-11[PD-L1] vlCDR2
WASTRHT

SEQ ID NO: 4208 - protein, 9 aa, synthetic construct
  REGION 1..9: note = Description of Artificial Sequence: Synthetic peptide
  REGION 1..9: note = BAP058-11[PD-L1] vlCDR3
QQYNSYPLT

SEQ ID NO: 4209 - protein, 120 aa, synthetic construct
  REGION 1..120: note = Description of Artificial Sequence: Synthetic polypeptide
  REGION 1..120: note = BAP058-13[PD-L1] variable heavy Chain
EVQLVQSGAEVKKPGATVKISCKVSGYTFTSYWMYWVRQARGQRLEWIGRIDPNSGSTKYNEKFKNRFTISRDNSKNTLYLQMNSLRAEDTAVYYCARDYRKGLYAMDYWGQGTTVTVSS

SEQ ID NO: 4210 - protein, 5 aa, synthetic construct
  REGION 1..5: note = Description of Artificial Sequence: Synthetic peptide
  REGION 1..5: note = BAP058-13[PD-L1] vhCDR1
SYWMY

SEQ ID NO: 4211 - protein, 17 aa, synthetic construct
  REGION 1..17: note = Description of Artificial Sequence: Synthetic peptide
  REGION 1..17: note = BAP058-13[PD-L1] vhCDR2
RIDPNSGSTKYNEKFKN

SEQ ID NO: 4212 - protein, 11 aa, synthetic construct
  REGION 1..11: note = Description of Artificial Sequence: Synthetic peptide
  REGION 1..11: note = BAP058-13[PD-L1] vhCDR3
DYRKGLYAMDY

SEQ ID NO: 4213 - protein, 107 aa, synthetic construct
  REGION 1..107: note = Description of Artificial Sequence: Synthetic polypeptide
  REGION 1..107: note = BAP058-13[PD-L1] variable light Chain
AIQLTQSPSSLSASVGDRVTITCKASQDVGTAVAWYLQKPGQSPQLLIYWASTRHTGVPSRFSGSGSGTDFTFTISSLEAEDAATYYCQQYNSYPLTFGQGTKVEIK

SEQ ID NO: 4214 - protein, 11 aa, synthetic construct
  REGION 1..11: note = Description of Artificial Sequence: Synthetic peptide
  REGION 1..11: note = BAP058-13[PD-L1] vlCDR1
KASQDVGTAVA

SEQ ID NO: 4215 - protein, 7 aa, synthetic construct
  REGION 1..7: note = Description of Artificial Sequence: Synthetic peptide
  REGION 1..7: note = BAP058-13[PD-L1] vlCDR2
WASTRHT

SEQ ID NO: 4216 - protein, 9 aa, synthetic construct
  REGION 1..9: note = Description of Artificial Sequence: Synthetic peptide
  REGION 1..9: note = BAP058-13[PD-L1] vlCDR3
QQYNSYPLT

SEQ ID NO: 4217 - protein, 121 aa, synthetic construct
  REGION 1..121: note = Description of Artificial Sequence: Synthetic polypeptide
  REGION 1..121: note = H6[PD-L1] variable heavy Chain
QMQLVQSGAEVKKPGSSVKVSCKASGGTFSSYAISWVRQAPGQGLEWMGGIIPIFGTANYAQKFQGRVTITADESTSTAYMELSSLRSEDTAVYYCARGNIVATITPLDYWGQGTLVTVSS

SEQ ID NO: 4218 - protein, 5 aa, synthetic construct
  REGION 1..5: note = Description of Artificial Sequence: Synthetic peptide
  REGION 1..5: note = H6[PD-L1] vhCDR1
SYAIS

SEQ ID NO: 4219 - protein, 17 aa, synthetic construct
  REGION 1..17: note = Description of Artificial Sequence: Synthetic peptide
  REGION 1..17: note = H6[PD-L1] vhCDR2
GIIPIFGTANYAQKFQG

SEQ ID NO: 4220 - protein, 12 aa, synthetic construct
  REGION 1..12: note = Description of Artificial Sequence: Synthetic peptide
  REGION 1..12: note = H6[PD-L1] vhCDR3
GNIVATITPLDY

SEQ ID NO: 4221 - protein, 108 aa, synthetic construct
  REGION 1..108: note = Description of Artificial Sequence: Synthetic polypeptide
  REGION 1..108: note = H6[PD-L1] variable light Chain
SYELMQPPSVSVAPGKTATIACGGENIGRKTVHWYQQKPGQAPVLVIYYDSDRPSGIPERFSGSNSGNTATLTISRVEAGDEADYYCQVWDSSSDHRIFGGGTKLTVL

SEQ ID NO: 4222 - protein, 11 aa, synthetic construct
  REGION 1..11: note = Description of Artificial Sequence: Synthetic peptide
  REGION 1..11: note = H6[PD-L1] vlCDR1
GGENIGRKTVH

SEQ ID NO: 4223 - protein, 7 aa, synthetic construct
  REGION 1..7: note = Description of Artificial Sequence: Synthetic peptide
  REGION 1..7: note = H6[PD-L1] vlCDR2
YDSDRPS

SEQ ID NO: 4224 - protein, 11 aa, synthetic construct
  REGION 1..11: note = Description of Artificial Sequence: Synthetic peptide
  REGION 1..11: note = H6[PD-L1] vlCDR3
QVWDSSSDHRI

SEQ ID NO: 4225 - protein, 121 aa, synthetic construct
  REGION 1..121: note = Description of Artificial Sequence: Synthetic polypeptide
  REGION 1..121: note = RC5[PD-L1] variable heavy Chain
EVQLLESGGGVVQPGGSLRLSCAASGFTFSSYWMSWVRQAPGKGLEWVANIKQDGSEKYYVDSVKGRFTISRDNSKNTVSLQMNSLRAEDTAVYYCAKDRYYNFPLGMDVWGQGTTVTVSS

SEQ ID NO: 4226 - protein, 5 aa, synthetic construct
  REGION 1..5: note = Description of Artificial Sequence: Synthetic peptide
  REGION 1..5: note = RC5[PD-L1] vhCDR1
SYWMS

SEQ ID NO: 4227 - protein, 17 aa, synthetic construct
  REGION 1..17: note = Description of Artificial Sequence: Synthetic peptide
  REGION 1..17: note = RC5[PD-L1] vhCDR2
NIKQDGSEKYYVDSVKG

SEQ ID NO: 4228 - protein, 12 aa, synthetic construct
  REGION 1..12: note = Description of Artificial Sequence: Synthetic peptide
  REGION 1..12: note = RC5[PD-L1] vhCDR3
DRYYNFPLGMDV

SEQ ID NO: 4229 - protein, 107 aa, synthetic construct
  REGION 1..107: note = Description of Artificial Sequence: Synthetic polypeptide
  REGION 1..107: note = RC5[PD-L1] variable light Chain
AIRMTQSPSSLSASVGDRVTITCRASQSISSYLNWYQQKPGKAPKLLIYTTSSLKSGVPSRFSGSGSGTDFTLTISRLQPEDFATYYCQQSYSSTWTFGRGTKVEIK

SEQ ID NO: 4230 - protein, 11 aa, synthetic construct
  REGION 1..11: note = Description of Artificial Sequence: Synthetic peptide
  REGION 1..11: note = RC5[PD-L1] vlCDR1
RASQSISSYLN

SEQ ID NO: 4231 - protein, 7 aa, synthetic construct
  REGION 1..7: note = Description of Artificial Sequence: Synthetic peptide
  REGION 1..7: note = RC5[PD-L1] vlCDR2
TTSSLKS

SEQ ID NO: 4232 - protein, 9 aa, synthetic construct
  REGION 1..9: note = Description of Artificial Sequence: Synthetic peptide
  REGION 1..9: note = RC5[PD-L1] vlCDR3
QQSYSSTWT

SEQ ID NO: 4233 - protein, 123 aa, synthetic construct
  REGION 1..123: note = Description of Artificial Sequence: Synthetic polypeptide
  REGION 1..123: note = SH1A1Q[PD-L1] variable heavy Chain
EVQLVQSGAEVKKPGSSVKVSCKASGGTFSSYAISWVRQAPGQGLEWMGGIIPIFGTANYAQKFQGRVTITADKSTSTAYMELSSLRSEDTAVYYCAREGTIYDSSGYSFDYWGQGTLVTVSS

SEQ ID NO: 4234 - protein, 5 aa, synthetic construct
  REGION 1..5: note = Description of Artificial Sequence: Synthetic peptide
  REGION 1..5: note = SH1A1Q[PD-L1] vhCDR1
SYAIS

SEQ ID NO: 4235 - protein, 17 aa, synthetic construct
  REGION 1..17: note = Description of Artificial Sequence: Synthetic peptide
  REGION 1..17: note = SH1A1Q[PD-L1] vhCDR2
GIIPIFGTANYAQKFQG

SEQ ID NO: 4236 - protein, 14 aa, synthetic construct
  REGION 1..14: note = Description of Artificial Sequence: Synthetic peptide
  REGION 1..14: note = SH1A1Q[PD-L1] vhCDR3
EGTIYDSSGYSFDY

SEQ ID NO: 4237 - protein, 110 aa, synthetic construct
  REGION 1..110: note = Description of Artificial Sequence: Synthetic polypeptide
  REGION 1..110: note = SH1A1Q[PD-L1] variable light Chain
QSVLTQPPSVSAAPGQKVTISCSGNNSNIANNYVSWYQQLPGTAPKLLIYDNNYRPSGIPDRFSGSKSGTSATLDITGLQTGDEADYYCGVWDGSLTTGVFGGGTKLTVL

SEQ ID NO: 4238 - protein, 13 aa, synthetic construct
  REGION 1..13: note = Description of Artificial Sequence: Synthetic peptide
  REGION 1..13: note = SH1A1Q[PD-L1] vlCDR1
SGNNSNIANNYVS

SEQ ID NO: 4239 - protein, 7 aa, synthetic construct
  REGION 1..7: note = Description of Artificial Sequence: Synthetic peptide
  REGION 1..7: note = SH1A1Q[PD-L1] vlCDR2
DNNYRPS

SEQ ID NO: 4240 - protein, 11 aa, synthetic construct
  REGION 1..11: note = Description of Artificial Sequence: Synthetic peptide
  REGION 1..11: note = SH1A1Q[PD-L1] vlCDR3
GVWDGSLTTGV

SEQ ID NO: 4241 - protein, 118 aa, synthetic construct
  REGION 1..118: note = Description of Artificial Sequence: Synthetic polypeptide
  REGION 1..118: note = SH1B3[PD-L1] variable heavy Chain
QVQLVESGGGVVQPGRSLRLSCAASGFTFSSYAMHWVRQAPGKGLEWVAVISFDGSNKYYADSVRGRFTISRDNSKNTLYLQMNSLRTEDTAVYYCARGWLDRDIDYWGQGTLVTVSS

SEQ ID NO: 4242 - protein, 5 aa, synthetic construct
  REGION 1..5: note = Description of Artificial Sequence: Synthetic peptide
  REGION 1..5: note = SH1B3[PD-L1] vhCDR1
SYAMH

SEQ ID NO: 4243 - protein, 17 aa, synthetic construct
  REGION 1..17: note = Description of Artificial Sequence: Synthetic peptide
  REGION 1..17: note = SH1B3[PD-L1] vhCDR2
VISFDGSNKYYADSVRG

SEQ ID NO: 4244 - protein, 9 aa, synthetic construct
  REGION 1..9: note = Description of Artificial Sequence: Synthetic peptide
  REGION 1..9: note = SH1B3[PD-L1] vhCDR3
GWLDRDIDY

SEQ ID NO: 4245 - protein, 110 aa, synthetic construct
  REGION 1..110: note = Description of Artificial Sequence: Synthetic polypeptide
  REGION 1..110: note = SH1B3[PD-L1] variable light Chain
LPVLTQPASVSGSPGQSITISCTGTTSDIGGYDYVSWYQQHPGKAPKLMIYDVSKRPSGVSNRFSGSKSGNTASLTISGLQAEDEADYYCSSYTSSSTHVFGTGTKLTVL

SEQ ID NO: 4246 - protein, 14 aa, synthetic construct
  REGION 1..14: note = Description of Artificial Sequence: Synthetic peptide
  REGION 1..14: note = SH1B3[PD-L1] vlCDR1
TGTTSDIGGYDYVS

SEQ ID NO: 4247 - protein, 7 aa, synthetic construct
  REGION 1..7: note = Description of Artificial Sequence: Synthetic peptide
  REGION 1..7: note = SH1B3[PD-L1] vlCDR2
DVSKRPS

SEQ ID NO: 4248 - protein, 10 aa, synthetic construct
  REGION 1..10: note = Description of Artificial Sequence: Synthetic peptide
  REGION 1..10: note = SH1B3[PD-L1] vlCDR3
SSYTSSSTHV

SEQ ID NO: 4249 - protein, 118 aa, synthetic construct
  REGION 1..118: note = Description of Artificial Sequence: Synthetic polypeptide
  REGION 1..118: note = SH1D1[PD-L1] variable heavy Chain
EVQLVESGGGVVQPGRSLRLSCAASGFTFSSYAMHWVRQAPGKGLEWVAVISFDGSNKYYADSVRGRFTISRDNSKNTLYLQMNSLRTEDTAVYYCARGWLDRDIDYWGQGTLVTVSS

SEQ ID NO: 4250 - protein, 5 aa, synthetic construct
  REGION 1..5: note = Description of Artificial Sequence: Synthetic peptide
  REGION 1..5: note = SH1D1[PD-L1] vhCDR1
SYAMH

SEQ ID NO: 4251 - protein, 17 aa, synthetic construct
  REGION 1..17: note = Description of Artificial Sequence: Synthetic peptide
  REGION 1..17: note = SH1D1[PD-L1] vhCDR2
VISFDGSNKYYADSVRG

SEQ ID NO: 4252 - protein, 9 aa, synthetic construct
  REGION 1..9: note = Description of Artificial Sequence: Synthetic peptide
  REGION 1..9: note = SH1D1[PD-L1] vhCDR3
GWLDRDIDY

SEQ ID NO: 4253 - protein, 111 aa, synthetic construct
  REGION 1..111: note = Description of Artificial Sequence: Synthetic polypeptide
  REGION 1..111: note = SH1D1[PD-L1] variable light Chain
QSALTQPASVSGSPGQSITISCTGTSSDVGGYNYVSWYQQHPGKAPKLMIYDVSNRPSGVSNRFSGSKSGNTASLTISGLQAEDEADYYCSSYRSSTLGPVFGGGTKLTVL

SEQ ID NO: 4254 - protein, 14 aa, synthetic construct
  REGION 1..14: note = Description of Artificial Sequence: Synthetic peptide
  REGION 1..14: note = SH1D1[PD-L1] vlCDR1
TGTSSDVGGYNYVS

SEQ ID NO: 4255 - protein, 7 aa, synthetic construct
  REGION 1..7: note = Description of Artificial Sequence: Synthetic peptide
  REGION 1..7: note = SH1D1[PD-L1] vlCDR2
DVSNRPS

SEQ ID NO: 4256 - protein, 11 aa, synthetic construct
  REGION 1..11: note = Description of Artificial Sequence: Synthetic peptide
  REGION 1..11: note = SH1D1[PD-L1] vlCDR3
SSYRSSTLGPV

SEQ ID NO: 4257 - protein, 118 aa, synthetic construct; identical to SEQ ID NO: 4241
  REGION 1..118: note = Description of Artificial Sequence: Synthetic polypeptide
  REGION 1..118: note = SH1D2[PD-L1] variable heavy Chain

SEQ ID NO: 4258 - protein, 5 aa, synthetic construct
  REGION 1..5: note = Description of Artificial Sequence: Synthetic peptide
  REGION 1..5: note = SH1D2[PD-L1] vhCDR1
SYAMH

SEQ ID NO: 4259 - protein, 17 aa, synthetic construct
  REGION 1..17: note = Description of Artificial Sequence: Synthetic peptide
  REGION 1..17: note = SH1D2[PD-L1] vhCDR2
VISFDGSNKYYADSVRG

SEQ ID NO: 4260 - protein, 9 aa, synthetic construct
  REGION 1..9: note = Description of Artificial Sequence: Synthetic peptide
  REGION 1..9: note = SH1D2[PD-L1] vhCDR3
GWLDRDIDY

SEQ ID NO: 4261 - protein, 110 aa, synthetic construct
  REGION 1..110: note = Description of Artificial Sequence: Synthetic polypeptide
  REGION 1..110: note = SH1D2[PD-L1] variable light Chain
QAGLTQPPSVSEAPRQRVTISCSGSSSNIGNNAVNWYQQLPGKAPKLLIYYDDLLPSGVSDRFSGSKSGTSASLAISGLQSEDEADYYCAAWDDSLNGYVFGTGTKLTVL

SEQ ID NO: 4262 - protein, 13 aa, synthetic construct
  REGION 1..13: note = Description of Artificial Sequence: Synthetic peptide
  REGION 1..13: note = SH1D2[PD-L1] vlCDR1
SGSSSNIGNNAVN

SEQ ID NO: 4263 - protein, 7 aa, synthetic construct
  REGION 1..7: note = Description of Artificial Sequence: Synthetic peptide
  REGION 1..7: note = SH1D2[PD-L1] vlCDR2
YDDLLPS

SEQ ID NO: 4264 - protein, 11 aa, synthetic construct
  REGION 1..11: note = Description of Artificial Sequence: Synthetic peptide
  REGION 1..11: note = SH1D2[PD-L1] vlCDR3
AAWDDSLNGYV

SEQ ID NO: 4265 - protein, 118 aa, synthetic construct; identical to SEQ ID NO: 4249
  REGION 1..118: note = Description of Artificial Sequence: Synthetic polypeptide
  REGION 1..118: note = SH1D12[PD-L1] variable heavy Chain

SEQ ID NO: 4266 - protein, 5 aa, synthetic construct
  REGION 1..5: note = Description of Artificial Sequence: Synthetic peptide
  REGION 1..5: note = SH1D12[PD-L1] vhCDR1
SYAMH

SEQ ID NO: 4267 - protein, 17 aa, synthetic construct
  REGION 1..17: note = Description of Artificial Sequence: Synthetic peptide
  REGION 1..17: note = SH1D12[PD-L1] vhCDR2
VISFDGSNKYYADSVRG

SEQ ID NO: 4268 - protein, 9 aa, synthetic construct
  REGION 1..9: note = Description of Artificial Sequence: Synthetic peptide
  REGION 1..9: note = SH1D12[PD-L1] vhCDR3
GWLDRDIDY

SEQ ID NO: 4269 - protein, 110 aa, synthetic construct
  REGION 1..110: note = Description of Artificial Sequence: Synthetic polypeptide
  REGION 1..110: note = SH1D12[PD-L1] variable light Chain
QSALTQPRSVSGSPGQSVTISCTGTSSDVGGYNYVSWYQQHPGKAPKLMIYDVSKRPSGVPDRFSGSKSGNTASLTISGLQAEDEADYYCSSYTSSTTHVFGTGTKVTVL

SEQ ID NO: 4270 - protein, 14 aa, synthetic construct
  REGION 1..14: note = Description of Artificial Sequence: Synthetic peptide
  REGION 1..14: note = SH1D12[PD-L1] vlCDR1
TGTSSDVGGYNYVS

SEQ ID NO: 4271 - protein, 7 aa, synthetic construct
  REGION 1..7: note = Description of Artificial Sequence: Synthetic peptide
  REGION 1..7: note = SH1D12[PD-L1] vlCDR2
DVSKRPS

SEQ ID NO: 4272 - protein, 10 aa, synthetic construct
  REGION 1..10: note = Description of Artificial Sequence: Synthetic peptide
  REGION 1..10: note = SH1D12[PD-L1] vlCDR3
SSYTSSTTHV

SEQ ID NO: 4273 - protein, 118 aa, synthetic construct; identical to SEQ ID NO: 4249
  REGION 1..118: note = Description of Artificial Sequence: Synthetic polypeptide
  REGION 1..118: note = SH1E1[PD-L1] variable heavy Chain

SEQ ID NO: 4274 - protein, 5 aa, synthetic construct
  REGION 1..5: note = Description of Artificial Sequence: Synthetic peptide
  REGION 1..5: note = SH1E1[PD-L1] vhCDR1
SYAMH

SEQ ID NO: 4275 - protein, 17 aa, synthetic construct
  REGION 1..17: note = Description of Artificial Sequence: Synthetic peptide
  REGION 1..17: note = SH1E1[PD-L1] vhCDR2
VISFDGSNKYYADSVRG

SEQ ID NO: 4276 - protein, 9 aa, synthetic construct
  REGION 1..9: note = Description of Artificial Sequence: Synthetic peptide
  REGION 1..9: note = SH1E1[PD-L1] vhCDR3
GWLDRDIDY

SEQ ID NO: 4277 - protein, 110 aa, synthetic construct
  REGION 1..110: note = Description of Artificial Sequence: Synthetic polypeptide
  REGION 1..110: note = SH1E1[PD-L1] variable light Chain
QSVVTQPPSVSAAPGQKVTISCSGSSSNIGNNYVSWYQQLPGTAPKLLIYDNNKRPSGIPDRFSGSKSGTSATLGITGLQTGDEADYYCGTWDSSLSVWVFGGGTQLTVL

SEQ ID NO: 4278 - protein, 13 aa, synthetic construct
  REGION 1..13: note = Description of Artificial Sequence: Synthetic peptide
  REGION 1..13: note = SH1E1[PD-L1] vlCDR1
SGSSSNIGNNYVS

SEQ ID NO: 4279 - protein, 7 aa, synthetic construct
  REGION 1..7: note = Description of Artificial Sequence: Synthetic peptide
  REGION 1..7: note = SH1E1[PD-L1] vlCDR2
DNNKRPS

SEQ ID NO: 4280 - protein, 11 aa, synthetic construct
  REGION 1..11: note = Description of Artificial Sequence: Synthetic peptide
  REGION 1..11: note = SH1E1[PD-L1] vlCDR3
GTWDSSLSVWV

SEQ ID NO: 4281 - protein, 118 aa, synthetic construct; identical to SEQ ID NO: 4241
  REGION 1..118: note = Description of Artificial Sequence: Synthetic polypeptide
  REGION 1..118: note = SH1G9[PD-L1] variable heavy Chain

SEQ ID NO: 4282 - protein, 5 aa, synthetic construct
  REGION 1..5: note = Description of Artificial Sequence: Synthetic peptide
  REGION 1..5: note = SH1G9[PD-L1] vhCDR1
SYAMH

SEQ ID NO: 4283 - protein, 17 aa, synthetic construct
  REGION 1..17: note = Description of Artificial Sequence: Synthetic peptide
  REGION 1..17: note = SH1G9[PD-L1] vhCDR2
VISFDGSNKYYADSVRG

SEQ ID NO: 4284 - protein, 9 aa, synthetic construct
  REGION 1..9: note = Description of Artificial Sequence: Synthetic peptide
  REGION 1..9: note = SH1G9[PD-L1] vhCDR3
GWLDRDIDY

SEQ ID NO: 4285 - protein, 112 aa, synthetic construct
  REGION 1..112: note = Description of Artificial Sequence: Synthetic polypeptide
  REGION 1..112: note = SH1G9[PD-L1] variable light Chain
QSVLTQPASVSGSPGQSITISCTGTSSDVGGYNYVSWYQQHPGRAPRLMIYDVSNRPSGVSNRFSGSKSGNTASLTISGLQAEDEGDYYCSSYTSGGTLGPVFGGGTKLTVL

SEQ ID NO: 4286 - protein, 14 aa, synthetic construct
  REGION 1..14: note = Description of Artificial Sequence: Synthetic peptide
  REGION 1..14: note = SH1G9[PD-L1] vlCDR1
TGTSSDVGGYNYVS

SEQ ID NO: 4287 - protein, 7 aa, synthetic construct
  REGION 1..7: note = Description of Artificial Sequence: Synthetic peptide
  REGION 1..7: note = SH1G9[PD-L1] vlCDR2
DVSNRPS

SEQ ID NO: 4288 - protein, 12 aa, synthetic construct
  REGION 1..12: note = Description of Artificial Sequence: Synthetic peptide
  REGION 1..12: note = SH1G9[PD-L1] vlCDR3
SSYTSGGTLGPV

SEQ ID NO: 4289 - protein, 120 aa, synthetic construct
  REGION 1..120: note = Description of Artificial Sequence: Synthetic polypeptide
  REGION 1..120: note = SH1E6[PD-L1] variable heavy Chain
QVQLVQSGAEVKKPGSSVKVSCKASGGTFSRYGVHWVRQAPGQGLEWMGRLIPIVSMTNYAQKFQDRVSITTDKSTGTAYMELRSLTSEDTALYYCASVGQQLPWVFFAWGQGTLVTVSS

SEQ ID NO: 4290 - protein, 5 aa, synthetic construct
  REGION 1..5: note = Description of Artificial Sequence: Synthetic peptide
  REGION 1..5: note = SH1E6[PD-L1] vhCDR1
RYGVH

SEQ ID NO: 4291 - protein, 17 aa, synthetic construct
  REGION 1..17: note = Description of Artificial Sequence: Synthetic peptide
  REGION 1..17: note = SH1E6[PD-L1] vhCDR2
RLIPIVSMTNYAQKFQD

SEQ ID NO: 4292 - protein, 11 aa, synthetic construct
  REGION 1..11: note = Description of Artificial Sequence: Synthetic peptide
  REGION 1..11: note = SH1E6[PD-L1] vhCDR3
VGQQLPWVFFA

SEQ ID NO: 4293 - protein, 110 aa, synthetic construct
  REGION 1..110: note = Description of Artificial Sequence: Synthetic polypeptide
  REGION 1..110: note = SH1E6[PD-L1] variable light Chain
QSVVTQPPSVSAAPGQKVTISCSGSSSNIGNNYVSWYQQLPGTAPKLLIYDNNKRPSGIPDRFSGSKSGTSATLGITGLQTGDEADYYCGTWDSSLSAVVFGGGTKLTVL

SEQ ID NO: 4294 - protein, 13 aa, synthetic construct
  REGION 1..13: note = Description of Artificial Sequence: Synthetic peptide
  REGION 1..13: note = SH1E6[PD-L1] vlCDR1
SGSSSNIGNNYVS

SEQ ID NO: 4295 - protein, 7 aa, synthetic construct
  REGION 1..7: note = Description of Artificial Sequence: Synthetic peptide
  REGION 1..7: note = SH1E6[PD-L1] vlCDR2
DNNKRPS

SEQ ID NO: 4296 - protein, 11 aa, synthetic construct
  REGION 1..11: note = Description of Artificial Sequence: Synthetic peptide
  REGION 1..11: note = SH1E6[PD-L1] vlCDR3
GTWDSSLSAVV

SEQ ID NO: 4297 - protein, 118 aa, synthetic construct
  REGION 1..118: note = Description of Artificial Sequence: Synthetic polypeptide
  REGION 1..118: note = SH1A2[PD-L1] variable heavy Chain
QMQLVQSGGGVVQPGRSLRLSCAASGFTFSSYAMHWVRQAPGKGLEWVAVISFDGSNKYYADSVRGRFTISRDNSKNTLYLQMNSLRTEDTAVYYCARGWLDRDIDYWGQGTLVTVSS

SEQ ID NO: 4298 - protein, 5 aa, synthetic construct
  REGION 1..5: note = Description of Artificial Sequence: Synthetic peptide
  REGION 1..5: note = SH1A2[PD-L1] vhCDR1
SYAMH

SEQ ID NO: 4299 - protein, 17 aa, synthetic construct
  REGION 1..17: note = Description of Artificial Sequence: Synthetic peptide
  REGION 1..17: note = SH1A2[PD-L1] vhCDR2
VISFDGSNKYYADSVRG

SEQ ID NO: 4300 - protein, 9 aa, synthetic construct
  REGION 1..9: note = Description of Artificial Sequence: Synthetic peptide
  REGION 1..9: note = SH1A2[PD-L1] vhCDR3
GWLDRDIDY

SEQ ID NO: 4301 - protein, 110 aa, synthetic construct
  REGION 1..110: note = Description of Artificial Sequence: Synthetic polypeptide
  REGION 1..110: note = SH1A2[PD-L1] variable light Chain
QSVVTQPPSVSAAPGQKVTISCSGSSSNIGNNYVSWYQQVPGTAPKLLIYDNNKRPSGIPDRFSGSNSDTSATLGITGLQTGDEADYYCGTWDSSLSAWVFGGGTKLTVL

SEQ ID NO: 4302 - protein, 13 aa, synthetic construct
  REGION 1..13: note = Description of Artificial Sequence: Synthetic peptide
  REGION 1..13: note = SH1A2[PD-L1] vlCDR1
SGSSSNIGNNYVS

SEQ ID NO: 4303 - protein, 7 aa, synthetic construct
  REGION 1..7: note = Description of Artificial Sequence: Synthetic peptide
  REGION 1..7: note = SH1A2[PD-L1] vlCDR2
DNNKRPS

SEQ ID NO: 4304 - protein, 11 aa, synthetic construct
  REGION 1..11: note = Description of Artificial Sequence: Synthetic peptide
  REGION 1..11: note = SH1A2[PD-L1] vlCDR3
GTWDSSLSAWV

SEQ ID NO: 4305 - protein, 118 aa, synthetic construct
  REGION 1..118: note = Description of Artificial Sequence: Synthetic polypeptide
  REGION 1..118: note = SH1B1[PD-L1] variable heavy Chain
QVQLVQSGGGVVQPGRSLRLSCAASGFTFSSYAMHWVRQAPGKGLEWVAVISFDGSNKYYADSVRGRFTISRDNSKNTLYLQMNSLRTEDTAVYYCARGWLDRDIDYWGQGTLVTVSS

SEQ ID NO: 4306 - protein, 5 aa, synthetic construct
  REGION 1..5: note = Description of Artificial Sequence: Synthetic peptide
  REGION 1..5: note = SH1B1[PD-L1] vhCDR1
SYAMH

SEQ ID NO: 4307 - protein, 17 aa, synthetic construct
  REGION 1..17: note = Description of Artificial Sequence: Synthetic peptide
  REGION 1..17: note = SH1B1[PD-L1] vhCDR2
VISFDGSNKYYADSVRG

SEQ ID NO: 4308 - protein, 9 aa, synthetic construct
  REGION 1..9: note = Description of Artificial Sequence: Synthetic peptide
  REGION 1..9: note = SH1B1[PD-L1] vhCDR3
GWLDRDIDY

SEQ ID NO: 4309 - protein, 112 aa, synthetic construct
  REGION 1..112: note = Description of Artificial Sequence: Synthetic polypeptide
  REGION 1..112: note = SH1B1[PD-L1] variable light Chain
QSVVTQPPSVSAAPGQKVTISCSGSSSNIGNNYVSWYQQLPGTAPKLLIYDNNKRPSGIPDRFSGSKSGTSATLGITGLQTGDEADYYCGTWDSSLSAGSVVFGGGTKLTVL

SEQ ID NO: 4310 - protein, 13 aa, synthetic construct
  REGION 1..13: note = Description of Artificial Sequence: Synthetic peptide
  REGION 1..13: note = SH1B1[PD-L1] vlCDR1
SGSSSNIGNNYVS

SEQ ID NO: 4311 - protein, 7 aa, synthetic construct
  REGION 1..7: note = Description of Artificial Sequence: Synthetic peptide
  REGION 1..7: note = SH1B1[PD-L1] vlCDR2
DNNKRPS

SEQ ID NO: 4312 - protein, 13 aa, synthetic construct
  REGION 1..13: note = Description of Artificial Sequence: Synthetic peptide
  REGION 1..13: note = SH1B1[PD-L1] vlCDR3
GTWDSSLSAGSVV

SEQ ID NO: 4313 - protein, 121 aa, synthetic construct
  REGION 1..121: note = Description of Artificial Sequence: Synthetic polypeptide
  REGION 1..121: note = H6B1L[PD-L1] variable heavy Chain
QMQLVQSGAEVKKPGSSVKVSCKASGGTFSSYAYSWVRQAPGQGLEWMGGIIPSFGTANYAQKFQGRVTITADESTSTAYMELSSLRSEDTAVYYCARGPIVATITPLDYWGQGTLVTVSS

SEQ ID NO: 4314 - protein, 5 aa, synthetic construct
  REGION 1..5: note = Description of Artificial Sequence: Synthetic peptide
  REGION 1..5: note = H6B1L[PD-L1] vhCDR1
SYAYS

SEQ ID NO: 4315 - protein, 17 aa, synthetic construct
  REGION 1..17: note = Description of Artificial Sequence: Synthetic peptide
  REGION 1..17: note = H6B1L[PD-L1] vhCDR2
GIIPSFGTANYAQKFQG

SEQ ID NO: 4316 - protein, 12 aa, synthetic construct
  REGION 1..12: note = Description of Artificial Sequence: Synthetic peptide
  REGION 1..12: note = H6B1L[PD-L1] vhCDR3
GPIVATITPLDY

SEQ ID NO: 4317 - protein, 108 aa, synthetic construct
  REGION 1..108: note = Description of Artificial Sequence: Synthetic polypeptide
  REGION 1..108: note = H6B1L[PD-L1] variable light Chain
SYELMQPPSVSVAPGKTATIACGGENIGRKTVHWYQQKPGQAPVLVIYYDSDRPSGIPERFSGSNSGNTATLTISRVEAGDEADYYCLVWDSSSDHRIFGGGTKLTVL

SEQ ID NO: 4318 - protein, 11 aa, synthetic construct
  REGION 1..11: note = Description of Artificial Sequence: Synthetic peptide
  REGION 1..11: note = H6B1L[PD-L1] vlCDR1
GGENIGRKTVH

SEQ ID NO: 4319 - protein, 7 aa, synthetic construct
  REGION 1..7: note = Description of Artificial Sequence: Synthetic peptide
  REGION 1..7: note = H6B1L[PD-L1] vlCDR2
YDSDRPS

SEQ ID NO: 4320 - protein, 11 aa, synthetic construct
  REGION 1..11: note = Description of Artificial Sequence: Synthetic peptide
  REGION 1..11: note = H6B1L[PD-L1] vlCDR3
LVWDSSSDHRI

SEQ ID NO: 4321 - protein, 121 aa, synthetic construct
  REGION 1..121: note = Description of Artificial Sequence: Synthetic polypeptide
  REGION 1..121: note = H6A1[PD-L1] variable heavy Chain
QMQLVQSGAEVKKPGSSVKVSCKASGGTFSSYAYSWVRQAPGQGLEWMGGIIPIFGTANYAQKFQGRVTITADESTSTAYMELSSLRSEDTAVYYCARGPIVATITPLDYWGQGTLVTVSS

SEQ ID NO: 4322 - protein, 5 aa, synthetic construct
  REGION 1..5: note = Description of Artificial Sequence: Synthetic peptide
  REGION 1..5: note = H6A1[PD-L1] vhCDR1
SYAYS

SEQ ID NO: 4323 - protein, 17 aa, synthetic construct
  REGION 1..17: note = Description of Artificial Sequence: Synthetic peptide
  REGION 1..17: note = H6A1[PD-L1] vhCDR2
GIIPIFGTANYAQKFQG

SEQ ID NO: 4324 - protein, 12 aa, synthetic construct
  REGION 1..12: note = Description of Artificial Sequence: Synthetic peptide
  REGION 1..12: note = H6A1[PD-L1] vhCDR3
GPIVATITPLDY

SEQ ID NO: 4325 - protein, 108 aa, synthetic construct; identical to SEQ ID NO: 4221
  REGION 1..108: note = Description of Artificial Sequence: Synthetic polypeptide
  REGION 1..108: note = H6A1[PD-L1] variable light Chain

SEQ ID NO: 4326 - protein, 11 aa, synthetic construct
  REGION 1..11: note = Description of Artificial Sequence: Synthetic peptide
  REGION 1..11: note = H6A1[PD-L1] vlCDR1
GGENIGRKTVH

SEQ ID NO: 4327 - protein, 7 aa, synthetic construct
  REGION 1..7: note = Description of Artificial Sequence: Synthetic peptide
  REGION 1..7: note = H6A1[PD-L1] vlCDR2
YDSDRPS

SEQ ID NO: 4328 - protein, 11 aa, synthetic construct
  REGION 1..11: note = Description of Artificial Sequence: Synthetic peptide
  REGION 1..11: note = H6A1[PD-L1] vlCDR3
QVWDSSSDHRI

SEQ ID NO: 4329 - protein, 121 aa, synthetic construct; identical to SEQ ID NO: 4313
  REGION 1..121: note = Description of Artificial Sequence: Synthetic polypeptide
  REGION 1..121: note = H6B1[PD-L1] variable heavy Chain

SEQ ID NO: 4330 - protein, 5 aa, synthetic construct
  REGION 1..5: note = Description of Artificial Sequence: Synthetic peptide
  REGION 1..5: note = H6B1[PD-L1] vhCDR1
SYAYS

SEQ ID NO: 4331 - protein, 17 aa, synthetic construct
  REGION 1..17: note = Description of Artificial Sequence: Synthetic peptide
  REGION 1..17: note = H6B1[PD-L1] vhCDR2
GIIPSFGTANYAQKFQG

SEQ ID NO: 4332 - protein, 12 aa, synthetic construct
  REGION 1..12: note = Description of Artificial Sequence: Synthetic peptide
  REGION 1..12: note = H6B1[PD-L1] vhCDR3
GPIVATITPLDY

SEQ ID NO: 4333 - protein, 108 aa, synthetic construct; identical to SEQ ID NO: 4221
  REGION 1..108: note = Description of Artificial Sequence: Synthetic polypeptide
  REGION 1..108: note = H6B1[PD-L1] variable light Chain

SEQ ID NO: 4334 - protein, 11 aa, synthetic construct
  REGION 1..11: note = Description of Artificial Sequence: Synthetic peptide
  REGION 1..11: note = H6B1[PD-L1] vlCDR1
GGENIGRKTVH

SEQ ID NO: 4335 - protein, 7 aa, synthetic construct
  REGION 1..7: note = Description of Artificial Sequence: Synthetic peptide
  REGION 1..7: note = H6B1[PD-L1] vlCDR2
YDSDRPS

SEQ ID NO: 4336 - protein, 11 aa, synthetic construct
  REGION 1..11: note = Description of Artificial Sequence: Synthetic peptide
  REGION 1..11: note = H6B1[PD-L1] vlCDR3
QVWDSSSDHRI

SEQ ID NO: 4337 - protein, 121 aa, synthetic construct
  REGION 1..121: note = Description of Artificial Sequence: Synthetic polypeptide
  REGION 1..121: note = H6B2[PD-L1] variable heavy Chain
QMQLVQSGAEVKKPGSSVKVSCKASGGTFSSYAISWVRQAPGQGLEWMGGIIPAFGTANYAQKFQGRVTITADESTSTAYMELSSLRSEDTAVYYCARGPIVATITPLDYWGQGTLVTVSS

SEQ ID NO: 4338 - protein, 5 aa, synthetic construct
  REGION 1..5: note = Description of Artificial Sequence: Synthetic peptide
  REGION 1..5: note = H6B2[PD-L1] vhCDR1
SYAIS

SEQ ID NO: 4339 - protein, 17 aa, synthetic construct
  REGION 1..17: note = Description of Artificial Sequence: Synthetic peptide
  REGION 1..17: note = H6B2[PD-L1] vhCDR2
GIIPAFGTANYAQKFQG

SEQ ID NO: 4340 - protein, 12 aa, synthetic construct
  REGION 1..12: note = Description of Artificial Sequence: Synthetic peptide
  REGION 1..12: note = H6B2[PD-L1] vhCDR3
GPIVATITPLDY

SEQ ID NO: 4341 - protein, 108 aa, synthetic construct; identical to SEQ ID NO: 4221
  REGION 1..108: note = Description of Artificial Sequence: Synthetic polypeptide
  REGION 1..108: note = H6B2[PD-L1] variable light Chain

SEQ ID NO: 4342 - protein, 11 aa, synthetic construct
  REGION 1..11: note = Description of Artificial Sequence: Synthetic peptide
  REGION 1..11: note = H6B2[PD-L1] vlCDR1
GGENIGRKTVH

SEQ ID NO: 4343 - protein, 7 aa, synthetic construct
  REGION 1..7: note = Description of Artificial Sequence: Synthetic peptide
  REGION 1..7: note = H6B2[PD-L1] vlCDR2
YDSDRPS

SEQ ID NO: 4344 - protein, 11 aa, synthetic construct
  REGION 1..11: note = Description of Artificial Sequence: Synthetic peptide
  REGION 1..11: note = H6B2[PD-L1] vlCDR3
QVWDSSSDHRI

SEQ ID NO: 4345 - protein, 118 aa, synthetic construct
  REGION 1..118: note = Description of Artificial Sequence: Synthetic polypeptide
  REGION 1..118: note = G12[PD-L1] variable heavy Chain
EVQLVQSGAEVKKPGASVKVSCKASGYTFTGYYMHWVRQAPGQGLEWMGWINPNSDNTGSAQKFQGRVFMTKTTSLNTAYMELSGLRSEDTAIYYCARERSSGYFDFWGQGTLVTVSS

SEQ ID NO: 4346 - protein, 5 aa, synthetic construct
  REGION 1..5: note = Description of Artificial Sequence: Synthetic peptide
  REGION 1..5: note = G12[PD-L1] vhCDR1
GYYMH

SEQ ID NO: 4347 - protein, 17 aa, synthetic construct
  REGION 1..17: note = Description of Artificial Sequence: Synthetic peptide
  REGION 1..17: note = G12[PD-L1] vhCDR2
WINPNSDNTGSAQKFQG

SEQ ID NO: 4348 - protein, 9 aa, synthetic construct
  REGION 1..9: note = Description of Artificial Sequence: Synthetic peptide
  REGION 1..9: note = G12[PD-L1] vhCDR3
ERSSGYFDF

SEQ ID NO: 4349 - protein, 107 aa, synthetic construct
  REGION 1..107: note = Description of Artificial Sequence: Synthetic polypeptide
  REGION 1..107: note = G12[PD-L1] variable light Chain
DIVMTQSPSSLSASVGDRVTITCRASQSISSYLNWYQQKPGKAPKLLIYAASSLQSGVPSRFSGSGSGTDFTLTISSLQPEDFATYYCQQSYSTPITFGQGTRLEIK

SEQ ID NO: 4350 - protein, 11 aa, synthetic construct
  REGION 1..11: note = Description of Artificial Sequence: Synthetic peptide
  REGION 1..11: note = G12[PD-L1] vlCDR1
RASQSISSYLN

SEQ ID NO: 4351 - protein, 7 aa, synthetic construct
  REGION 1..7: note = Description of Artificial Sequence: Synthetic peptide
  REGION 1..7: note = G12[PD-L1] vlCDR2
AASSLQS

SEQ ID NO: 4352 - protein, 9 aa, synthetic construct
  REGION 1..9: note = Description of Artificial Sequence: Synthetic peptide
  REGION 1..9: note = G12[PD-L1] vlCDR3
QQSYSTPIT

SEQ ID NO: 4353 - protein, 118 aa, synthetic construct
  REGION 1..118: note = Description of Artificial Sequence: Synthetic polypeptide
  REGION 1..118: note = RSA1[PD-L1] variable heavy Chain
EVQLVQSGGGLVQPGGSLRLSCAASGFTFSSYSMNWVRQAPGKGLEWVSYISSSSSTIYYADSVKGRFTISRDNAKNSLYLQMNSLRDEDTAVYYCARGDYYYGMDVWGQGTTVTVSS

SEQ ID NO: 4354 - protein, 5 aa, synthetic construct
  REGION 1..5: note = Description of Artificial Sequence: Synthetic peptide
  REGION 1..5: note = RSA1[PD-L1] vhCDR1
SYSMN

SEQ ID NO: 4355 - protein, 17 aa, synthetic construct
  REGION 1..17: note = Description of Artificial Sequence: Synthetic peptide
  REGION 1..17: note = RSA1[PD-L1] vhCDR2
YISSSSSTIYYADSVKG

SEQ ID NO: 4356 - protein, 9 aa, synthetic construct
  REGION 1..9: note = Description of Artificial Sequence: Synthetic peptide
  REGION 1..9: note = RSA1[PD-L1] vhCDR3
GDYYYGMDV

SEQ ID NO: 4357 - protein, 108 aa, synthetic construct
  REGION 1..108: note = Description of Artificial Sequence: Synthetic polypeptide
  REGION 1..108: note = RSA1[PD-L1] variable light Chain
NIQMTQSPSSVSASVGDRVTITCRASQDISRWLAWYQQKPGKAPKLLIYAASSLQSGVPSRFSGSGSGTDFALTISSLQPEDFATYYCQQADSFFSITFGQGTRLEIK

SEQ ID NO: 4358 - protein, 11 aa, synthetic construct
  REGION 1..11: note = Description of Artificial Sequence: Synthetic peptide
  REGION 1..11: note = RSA1[PD-L1] vlCDR1
RASQDISRWLA

SEQ ID NO: 4359 - protein, 7 aa, synthetic construct
  REGION 1..7: note = Description of Artificial Sequence: Synthetic peptide
  REGION 1..7: note = RSA1[PD-L1] vlCDR2
AASSLQS

SEQ ID NO: 4360 - protein, 10 aa, synthetic construct
  REGION 1..10: note = Description of Artificial Sequence: Synthetic peptide
  REGION 1..10: note = RSA1[PD-L1] vlCDR3
QQADSFFSIT

SEQ ID NO: 4361 - protein, 120 aa, synthetic construct
  REGION 1..120: note = Description of Artificial Sequence: Synthetic polypeptide
  REGION 1..120: note = RA3[PD-L1] variable heavy Chain
QMQLVQSGAEVKKPGSSVKVSCKASGGTFSRYGVHWVRQAPGQGLEWMGRLIPIVSMTNYAQKFQDRVSITTDKSTGTAYMELRSLTSEDTALYYCASVGQQLPWVFFAWGQGTLVTVSS

SEQ ID NO: 4362 - protein, 5 aa, synthetic construct
  REGION 1..5: note = Description of Artificial Sequence: Synthetic peptide
  REGION 1..5: note = RA3[PD-L1] vhCDR1
RYGVH

SEQ ID NO: 4363 - protein, 17 aa, synthetic construct
  REGION 1..17: note = Description of Artificial Sequence: Synthetic peptide
  REGION 1..17: note = RA3[PD-L1] vhCDR2
RLIPIVSMTNYAQKFQD

SEQ ID NO: 4364 - protein, 11 aa, synthetic construct
  REGION 1..11: note = Description of Artificial Sequence: Synthetic peptide
  REGION 1..11: note = RA3[PD-L1] vhCDR3
VGQQLPWVFFA

SEQ ID NO: 4365 - protein, 107 aa, synthetic construct
  REGION 1..107: note = Description of Artificial Sequence: Synthetic polypeptide
  REGION 1..107: note = RA3[PD-L1] variable light Chain
DIQMTQSPSSLSASVGDRVTITCQASQDISNYLNWYQQKPGKAPKLLIYDASTLQSGVPSRFSGSGSGTDFTLTISSLQPEDFATYYCQQSYSSHWTFGQGTKVEIK

SEQ ID NO: 4366 - protein, 11 aa, synthetic construct
  REGION 1..11: note = Description of Artificial Sequence: Synthetic peptide
  REGION 1..11: note = RA3[PD-L1] vlCDR1
QASQDISNYLN

SEQ ID NO: 4367 - protein, 7 aa, synthetic construct
  REGION 1..7: note = Description of Artificial Sequence: Synthetic peptide
  REGION 1..7: note = RA3[PD-L1] vlCDR2
DASTLQS

SEQ ID NO: 4368 - protein, 9 aa, synthetic construct
  REGION 1..9: note = Description of Artificial Sequence: Synthetic peptide
  REGION 1..9: note = RA3[PD-L1] vlCDR3
QQSYSSHWT

SEQ ID NO: 4369 - protein, 119 aa, synthetic construct
  REGION 1..119: note = Description of Artificial Sequence: Synthetic polypeptide
  REGION 1..119: note = SH1E2[PD-L1] variable heavy Chain
EVQLVESGAEVKKPGSSVKVSCKASGGTFSSYAISWVRQAPGQGLEWMGGIIPIFGTANYAQKFQGRVTITADESTSTAYMELSSLRSEDTAVYYCARAPYYYYYMDVWGQGTTVTVSS

SEQ ID NO: 4370 - protein, 5 aa, synthetic construct
  REGION 1..5: note = Description of Artificial Sequence: Synthetic peptide
  REGION 1..5: note = SH1E2[PD-L1] vhCDR1
SYAIS

SEQ ID NO: 4371 - protein, 17 aa, synthetic construct
  REGION 1..17: note = Description of Artificial Sequence: Synthetic peptide
  REGION 1..17: note = SH1E2[PD-L1] vhCDR2
GIIPIFGTANYAQKFQG

SEQ ID NO: 4372 - protein, 10 aa, synthetic construct
  REGION 1..10: note = Description of Artificial Sequence: Synthetic peptide
  REGION 1..10: note = SH1E2[PD-L1] vhCDR3
APYYYYYMDV

SEQ ID NO: 4373 - protein, 109 aa, synthetic construct
  REGION 1..109: note = Description of Artificial Sequence: Synthetic polypeptide
  REGION 1..109: note = SH1E2[PD-L1] variable light Chain
QSALTQPASVSGSLGQSVTISCTGSSSDVGSYNLVSWYQQHPGKAPNLMIYDVSKRSGVSNRFSGSKSGNTASLTISGLQAEDEADYYCSSYTGISTVVFGGGTKLTVL

SEQ ID NO: 4374 - protein, 14 aa, synthetic construct
  REGION 1..14: note = Description of Artificial Sequence: Synthetic peptide
  REGION 1..14: note = SH1E2[PD-L1] vlCDR1
TGSSSDVGSYNLVS

SEQ ID NO: 4375 - protein, 6 aa, synthetic construct
  REGION 1..6: note = Description of Artificial Sequence: Synthetic peptide
  REGION 1..6: note = SH1E2[PD-L1] vlCDR2
DVSKRS

SEQ ID NO: 4376 - protein, 10 aa, synthetic construct
  REGION 1..10: note = Description of Artificial Sequence: Synthetic peptide
  REGION 1..10: note = SH1E2[PD-L1] vlCDR3
SSYTGISTVV

SEQ ID NO: 4377 - protein, 120 aa, synthetic construct; identical to SEQ ID NO: 4289
  REGION 1..120: note = Description of Artificial Sequence: Synthetic polypeptide
  REGION 1..120: note = SH1E4[PD-L1] variable heavy Chain

SEQ ID NO: 4378 - protein, 5 aa, synthetic construct
  REGION 1..5: note = Description of Artificial Sequence: Synthetic peptide
  REGION 1..5: note = SH1E4[PD-L1] vhCDR1
RYGVH

SEQ ID NO: 4379 - protein, 17 aa, synthetic construct
  REGION 1..17: note = Description of Artificial Sequence: Synthetic peptide
  REGION 1..17: note = SH1E4[PD-L1] vhCDR2
RLIPIVSMTNYAQKFQD

SEQ ID NO: 4380 - protein, 11 aa, synthetic construct
  REGION 1..11: note = Description of Artificial Sequence: Synthetic peptide
  REGION 1..11: note = SH1E4[PD-L1] vhCDR3
VGQQLPWVFFA

SEQ ID NO: 4381 - protein, 112 aa, synthetic construct
  REGION 1..112: note = Description of Artificial Sequence: Synthetic polypeptide
  REGION 1..112: note = SH1E4[PD-L1] variable light Chain
QSVLTQPPSASGSPGQSVTISCTGTSSDIGGYDSVSWYQQHPGKAPKLMIYDVSKRPSGVSNRFSGSKSGNTASLTISGLQAEDEADYYCSSYTSSSIFFYVFGTGTKVTVL

SEQ ID NO: 4382 - protein, 14 aa, synthetic construct
  REGION 1..14: note = Description of Artificial Sequence: Synthetic peptide
  REGION 1..14: note = SH1E4[PD-L1] vlCDR1
TGTSSDIGGYDSVS

SEQ ID NO: 4383 - protein, 7 aa, synthetic construct
  REGION 1..7: note = Description of Artificial Sequence: Synthetic peptide
  REGION 1..7: note = SH1E4[PD-L1] vlCDR2
DVSKRPS

SEQ ID NO: 4384 - protein, 12 aa, synthetic construct
  REGION 1..12: note = Description of Artificial Sequence: Synthetic peptide
  REGION 1..12: note = SH1E4[PD-L1] vlCDR3
SSYTSSSIFFYV

SEQ ID NO: 4385 - protein, 121 aa, synthetic construct
  REGION 1..121: note = Description of Artificial Sequence: Synthetic polypeptide
  REGION 1..121: note = SH1B11[PD-L1] variable heavy Chain
QVQLVQSGSELKKPGSSVKVSCKASGYSFSGYYIHWVRQAPGQGLEWMGWIDPNSGVTNYVRRFQGRVTMTRDTSLSTAYMELSGLTADDTAVYYCARDENLWQFGYLDYWGQGTLVTVSS

SEQ ID NO: 4386 - protein, 5 aa, synthetic construct
  REGION 1..5: note = Description of Artificial Sequence: Synthetic peptide
  REGION 1..5: note = SH1B11[PD-L1] vhCDR1
GYYIH

SEQ ID NO: 4387 - protein, 17 aa, synthetic construct
  REGION 1..17: note = Description of Artificial Sequence: Synthetic peptide
  REGION 1..17: note = SH1B11[PD-L1] vhCDR2
WIDPNSGVTNYVRRFQG

SEQ ID NO: 4388 - protein, 12 aa, synthetic construct
  REGION 1..12: note = Description of Artificial Sequence: Synthetic peptide
  REGION 1..12: note = SH1B11[PD-L1] vhCDR3
DENLWQFGYLDY

SEQ ID NO: 4389 - protein, 107 aa, synthetic construct
  REGION 1..107: note = Description of Artificial Sequence: Synthetic polypeptide
  REGION 1..107: note = SH1B11[PD-L1] variable light Chain
DIVMTQSPSSLSASIGDRVTITCRASQRISAYVNWYQQKPGKAPKVLIYAASSLRSGVPSRFSGSGSGTDFTLTISSLQPEDFATYYCQQTYSSPWTFGQGTKVEIK

SEQ ID NO: 4390 - protein, 11 aa, synthetic construct
  REGION 1..11: note = Description of Artificial Sequence: Synthetic peptide
  REGION 1..11: note = SH1B11[PD-L1] vlCDR1
RASQRISAYVN

SEQ ID NO: 4391 - protein, 7 aa, synthetic construct
  REGION 1..7: note = Description of Artificial Sequence: Synthetic peptide
  REGION 1..7: note = SH1B11[PD-L1] vlCDR2
AASSLRS

SEQ ID NO: 4392 - protein, 9 aa, synthetic construct
  REGION 1..9: note = Description of Artificial Sequence: Synthetic peptide
  REGION 1..9: note = SH1B11[PD-L1] vlCDR3
QQTYSSPWT

SEQ ID NO: 4393 - protein, 119 aa, synthetic construct
  REGION 1..119: note = Description of Artificial Sequence: Synthetic polypeptide
  REGION 1..119: note = SH1C8[PD-L1] variable heavy Chain
EVQLVESGGGVVQPGRSLRLSCAASGFTFSSYAMHWVRQAPGKGLEWVAVISYDGSNKYYADSVKGRFTISRDNSKNTLYLQMNSLRAEDTAVYYCARGQWLVTELDYWGQGTLVTVSS

SEQ ID NO: 4394 - protein, 5 aa, synthetic construct
  REGION 1..5: note = Description of Artificial Sequence: Synthetic peptide
  REGION 1..5: note = SH1C8[PD-L1] vhCDR1
SYAMH

SEQ ID NO: 4395 - protein, 17 aa, synthetic construct
  REGION 1..17: note = Description of Artificial Sequence: Synthetic peptide
  REGION 1..17: note = SH1C8[PD-L1] vhCDR2
VISYDGSNKYYADSVKG

SEQ ID NO: 4396 - protein, 10 aa, synthetic construct
  REGION 1..10: note = Description of Artificial Sequence: Synthetic peptide
  REGION 1..10: note = SH1C8[PD-L1] vhCDR3
GQWLVTELDY

SEQ ID NO: 4397 - protein, 111 aa, synthetic construct
  REGION 1..111: note = Description of Artificial Sequence: Synthetic polypeptide
  REGION 1..111: note = SH1C8[PD-L1] variable light Chain
QSVVTQPPSVSAAPGQKVTISCSGSSSDIGNHYVSWYQQLPGTAPKLLIYDNNQRPSGIPDRFSGSKSGTSATLAITGLQTGDEADYYCGTWDNSLSPHLLFGGGTKLTVL

SEQ ID NO: 4398 - protein, 13 aa, synthetic construct
  REGION 1..13: note = Description of Artificial Sequence: Synthetic peptide
  REGION 1..13: note = SH1C8[PD-L1] vlCDR1
SGSSSDIGNHYVS

SEQ ID NO: 4399 - protein, 7 aa, synthetic construct
  REGION 1..7: note = Description of Artificial Sequence: Synthetic peptide
  REGION 1..7: note = SH1C8[PD-L1] vlCDR2
DNNQRPS

SEQ ID NO: 4400 - protein, 12 aa, synthetic construct
  REGION 1..12: note = Description of Artificial Sequence: Synthetic peptide
  REGION 1..12: note = SH1C8[PD-L1] vlCDR3
GTWDNSLSPHLL

SEQ ID NO: 4401 - protein, 123 aa, synthetic construct
  REGION 1..123: note = Description of Artificial Sequence: Synthetic polypeptide
  REGION 1..123: note = H1H9364P2[PD-L1] variable heavy Chain
EVQLVESGGGLVQPGRSLRLSCAASGFTFDDYALHWVRQAPGKGLEWVSGISWTGGTIDYADSVKGRFTISRDNAKNSLYLQMSSLRTEDTAIYYCTRDIRGNWKYGGWFDPWGQGTLVTVSS

SEQ ID NO: 4402 - protein, 5 aa, synthetic construct
  REGION 1..5: note = Description of Artificial Sequence: Synthetic peptide
  REGION 1..5: note = H1H9364P2[PD-L1] vhCDR1
DYALH

SEQ ID NO: 4403 - protein, 17 aa, synthetic construct
  REGION 1..17: note = Description of Artificial Sequence: Synthetic peptide
  REGION 1..17: note = H1H9364P2[PD-L1] vhCDR2
GISWTGGTIDYADSVKG

SEQ ID NO: 4404 - protein, 14 aa, synthetic construct
  REGION 1..14: note = Description of Artificial Sequence: Synthetic peptide
  REGION 1..14: note = H1H9364P2[PD-L1] vhCDR3
DIRGNWKYGGWFDP

SEQ ID NO: 4405 - protein, 108 aa, synthetic construct
  REGION 1..108: note = Description of Artificial Sequence: Synthetic polypeptide
  REGION 1..108: note = H1H9364P2[PD-L1] variable light Chain
DIQMTQSPSSLSASVGDRVTITCRASQSISSYLNWYQQKPGKAPKLLIYAASSLQSGVPSRFSGSGSGTDFTLTISSLQPEDFATYYCQQSYSTPPITFGQGTRLEIK

SEQ ID NO: 4406 - protein, 11 aa, synthetic construct
  REGION 1..11: note = Description of Artificial Sequence: Synthetic peptide
  REGION 1..11: note = H1H9364P2[PD-L1] vlCDR1
RASQSISSYLN

SEQ ID NO: 4407 - protein, 7 aa, synthetic construct
  REGION 1..7: note = Description of Artificial Sequence: Synthetic peptide
  REGION 1..7: note = H1H9364P2[PD-L1] vlCDR2
AASSLQS

SEQ ID NO: 4408 - protein, 10 aa, synthetic construct
  REGION 1..10: note = Description of Artificial Sequence: Synthetic peptide
  REGION 1..10: note = H1H9364P2[PD-L1] vlCDR3
QQSYSTPPIT

SEQ ID NO: 4409 - protein, 120 aa, synthetic construct
  REGION 1..120: note = Description of Artificial Sequence: Synthetic polypeptide
  REGION 1..120: note = H1H9373P2[PD-L1] variable heavy Chain
QVQLVQSGTEVKKPGASVKVSCKASGYTFTAYYMHWVRQAPGQGLDWMGWISPNSGFTNYAQKFQGRVTMTRDTSINTFYMELSGLRSDDTAVYYCAREGSTHHNSFDPWGQGTLVTVSS

SEQ ID NO: 4410 - protein, 5 aa, synthetic construct
  REGION 1..5: note = Description of Artificial Sequence: Synthetic peptide
  REGION 1..5: note = H1H9373P2[PD-L1] vhCDR1
AYYMH

SEQ ID NO: 4411 - protein, 17 aa, synthetic construct
  REGION 1..17: note = Description of Artificial Sequence: Synthetic peptide
  REGION 1..17: note = H1H9373P2[PD-L1] vhCDR2
WISPNSGFTNYAQKFQG

SEQ ID NO: 4412 - protein, 11 aa, synthetic construct
  REGION 1..11: note = Description of Artificial Sequence: Synthetic peptide
  REGION 1..11: note = H1H9373P2[PD-L1] vhCDR3
EGSTHHNSFDP

SEQ ID NO: 4413 - protein, 108 aa, synthetic construct; identical to SEQ ID NO: 4405
  REGION 1..108: note = Description of Artificial Sequence: Synthetic polypeptide
  REGION 1..108: note = H1H9373P2[PD-L1] variable light Chain

SEQ ID NO: 4414 - protein, 11 aa, synthetic construct
  REGION 1..11: note = Description of Artificial Sequence: Synthetic peptide
  REGION 1..11: note = H1H9373P2[PD-L1] vlCDR1
RASQSISSYLN

SEQ ID NO: 4415 - protein, 7 aa, synthetic construct
  REGION 1..7: note = Description of Artificial Sequence: Synthetic peptide
  REGION 1..7: note = H1H9373P2[PD-L1] vlCDR2
AASSLQS

SEQ ID NO: 4416 - protein, 10 aa, synthetic construct
  REGION 1..10: note = Description of Artificial Sequence: Synthetic peptide
  REGION 1..10: note = H1H9373P2[PD-L1] vlCDR3
QQSYSTPPIT

SEQ ID NO: 4417 - protein, 120 aa, synthetic construct
  REGION 1..120: note = Description of Artificial Sequence: Synthetic polypeptide
  REGION 1..120: note = H1H8314N[PD-L1] variable heavy Chain
EVQLVESGGGVVRPGGSLRLSCAASGFTFDDYGMTWVRQAPGRGLEWVSGIHWHGKRTGYADSVKGRFTISRDNAKKSLYLQMNSLKGEDTALYHCVRGGMSTGDWFDPWGQGTLVIVSS

SEQ ID NO: 4418 - protein, 5 aa, synthetic construct
  REGION 1..5: note = Description of Artificial Sequence: Synthetic peptide
  REGION 1..5: note = H1H8314N[PD-L1] vhCDR1
DYGMT

SEQ ID NO: 4419 - protein, 17 aa, synthetic construct
  REGION 1..17: note = Description of Artificial Sequence: Synthetic peptide
  REGION 1..17: note = H1H8314N[PD-L1] vhCDR2
GIHWHGKRTGYADSVKG

SEQ ID NO: 4420 - protein, 11 aa, synthetic construct
  REGION 1..11: note = Description of Artificial Sequence: Synthetic peptide
  REGION 1..11: note = H1H8314N[PD-L1] vhCDR3
GGMSTGDWFDP

SEQ ID NO: 4421 - protein, 108 aa, synthetic construct
  REGION 1..108: note = Description of Artificial Sequence: Synthetic polypeptide
  REGION 1..108: note = H1H8314N[PD-L1] variable light Chain
DIQMTQSPSSLSASLGDRVTITCRASQSINSYLNWYQQKPGKAPKLLIYVASSLQSGVPSRFSGSGSGTEFTLTISNLQPEDFATYYCQQSYSTPPITFGQGTRLEIK

SEQ ID NO: 4422 - protein, 11 aa, synthetic construct
  REGION 1..11: note = Description of Artificial Sequence: Synthetic peptide
  REGION 1..11: note = H1H8314N[PD-L1] vlCDR1
RASQSINSYLN

SEQ ID NO: 4423 - protein, 7 aa, synthetic construct
  REGION 1..7: note = Description of Artificial Sequence: Synthetic peptide
  REGION 1..7: note = H1H8314N[PD-L1] vlCDR2
VASSLQS

SEQ ID NO: 4424 - protein, 10 aa, synthetic construct
  REGION 1..10: note = Description of Artificial Sequence: Synthetic peptide
  REGION 1..10: note = H1H8314N[PD-L1] vlCDR3
QQSYSTPPIT

SEQ ID NO: 4425 - protein, 119 aa, synthetic construct
  REGION 1..119: note = Description of Artificial Sequence: Synthetic polypeptide
  REGION 1..119: note = PDL1.3.1[PD-L1] variable heavy Chain
EVQLQQSGTELVKPGASVKLSCTTSGFNIQDTYMHWVKQRPEQGLEWIGWIDPANGNTKYDPKFQGKATIIADTSSNTAYLQLRGLTSEDTAVYYCARSGVSTAHFDYWGQGTTLTVSS

SEQ ID NO: 4426 - protein, 5 aa, synthetic construct
  REGION 1..5: note = Description of Artificial Sequence: Synthetic peptide
  REGION 1..5: note = PDL1.3.1[PD-L1] vhCDR1
DTYMH

SEQ ID NO: 4427 - protein, 17 aa, synthetic construct
  REGION 1..17: note = Description of Artificial Sequence: Synthetic peptide
  REGION 1..17: note = PDL1.3.1[PD-L1] vhCDR2
WIDPANGNTKYDPKFQG

SEQ ID NO: 4428 - protein, 10 aa, synthetic construct
  REGION 1..10: note = Description of Artificial Sequence: Synthetic peptide
  REGION 1..10: note = PDL1.3.1[PD-L1] vhCDR3
SGVSTAHFDY

SEQ ID NO: 4429 - protein, 106 aa, synthetic construct
  REGION 1..106: note = Description of Artificial Sequence: Synthetic polypeptide
  REGION 1..106: note = PDL1.3.1[PD-L1] variable light Chain
QIVLSQSPAILSASPGEKVTMTCRASSSVSFMHWYQQKPGSSPKPWIYATSNLASGVPTRFSGSGSGTSYSLTLSRVEAEDAATYYCQQWSSYPRTFGGGTKLEIK

SEQ ID NO: 4430 - protein, 10 aa, synthetic construct
  REGION 1..10: note = Description of Artificial Sequence: Synthetic peptide
  REGION 1..10: note = PDL1.3.1[PD-L1] vlCDR1
RASSSVSFMH

SEQ ID NO: 4431 - protein, 7 aa, synthetic construct
  REGION 1..7: note = Description of Artificial Sequence: Synthetic peptide
  REGION 1..7: note = PDL1.3.1[PD-L1] vlCDR2
ATSNLAS

SEQ ID NO: 4432 - protein, 9 aa, synthetic construct
  REGION 1..9: note = Description of Artificial Sequence: Synthetic peptide
  REGION 1..9: note = PDL1.3.1[PD-L1] vlCDR3
QQWSSYPRT

SEQ ID NO: 4433 - protein, 119 aa, synthetic construct
  REGION 1..119: note = Description of Artificial Sequence: Synthetic polypeptide
  REGION 1..119: note = 10A7[TIGIT] variable heavy Chain
EVQLVESGGGLTQPGKSLKLSCEASGFTFSSFTMHWVRQSPGKGLEWVAFIRSGSGIVFYADAVRGRFTISRDNAKNLLFLQMNDLKSEDTAMYYCARRPLGHNTFDSWGQGTLVTVSS

SEQ ID NO: 4434 - protein, 5 aa, synthetic construct
  REGION 1..5: note = Description of Artificial Sequence: Synthetic peptide
  REGION 1..5: note = 10A7[TIGIT] vhCDR1
SFTMH

SEQ ID NO: 4435 - protein, 17 aa, synthetic construct
  REGION 1..17: note = Description of Artificial Sequence: Synthetic peptide
  REGION 1..17: note = 10A7[TIGIT] vhCDR2
FIRSGSGIVFYADAVRG

SEQ ID NO: 4436 - protein, 10 aa, synthetic construct
  REGION 1..10: note = Description of Artificial Sequence: Synthetic peptide
  REGION 1..10: note = 10A7[TIGIT] vhCDR3
RPLGHNTFDS

SEQ ID NO: 4437 - protein, 113 aa, synthetic construct
  REGION 1..113: note = Description of Artificial Sequence: Synthetic polypeptide
  REGION 1..113: note = 10A7[TIGIT] variable light Chain
DIVMTQSPSSLAVSPGEKVTMTCKSSQSLYYSGVKENLLAWYQQKPGQSPKLLIYYASIRFTGVPDRFTGSGSGTDYTLTITSVQAEDMGQYFCQQGINNPLTFGDGTKLEIK

SEQ ID NO: 4438 - protein, 17 aa, synthetic construct
  REGION 1..17: note = Description of Artificial Sequence: Synthetic peptide
  REGION 1..17: note = 10A7[TIGIT] vlCDR1
KSSQSLYYSGVKENLLA

SEQ ID NO: 4439 - protein, 7 aa, synthetic construct
  REGION 1..7: note = Description of Artificial Sequence: Synthetic peptide
  REGION 1..7: note = 10A7[TIGIT] vlCDR2
YASIRFT

SEQ ID NO: 4440 - protein, 9 aa, synthetic construct
  REGION 1..9: note = Description of Artificial Sequence: Synthetic peptide
  REGION 1..9: note = 10A7[TIGIT] vlCDR3
QQGINNPLT

SEQ ID NO: 4441 - protein, 119 aa, synthetic construct
  REGION 1..119: note = Description of Artificial Sequence: Synthetic polypeptide
  REGION 1..119: note = 1F4[TIGIT] variable heavy Chain
EVQLQQSGPELVKPGTSMKISCKASGYSFTGHLMNWVKQSHGKNLEWIGLIIPYNGGTSYNQKFKGKATLTVDKSSSTAYMELLSLTSDDSAVYFCSRGLRGFYAMDYWGQGTSVTVSS

SEQ ID NO: 4442 - protein, 5 aa, synthetic construct
  REGION 1..5: note = Description of Artificial Sequence: Synthetic peptide
  REGION 1..5: note = 1F4[TIGIT] vhCDR1
GHLMN

SEQ ID NO: 4443 - protein, 17 aa, synthetic construct
  REGION 1..17: note = Description of Artificial Sequence: Synthetic peptide
  REGION 1..17: note = 1F4[TIGIT] vhCDR2
LIIPYNGGTSYNQKFKG

SEQ ID NO: 4444 - protein, 10 aa, synthetic construct
  REGION 1..10: note = Description of Artificial Sequence: Synthetic peptide
  REGION 1..10: note = 1F4[TIGIT] vhCDR3
GLRGFYAMDY

SEQ ID NO: 4445 - protein, 112 aa, synthetic construct
  REGION 1..112: note = Description of Artificial Sequence: Synthetic polypeptide
  REGION 1..112: note = 1F4[TIGIT] variable light Chain
DVVLTQTPLSLSVSFGDQVSISCRSSQSLVNSYGNTFLSWYLHKPGQSPQLLIFGISNRFSGVPDRFSGSGSGTDFTLKISTIKPEDLGMYYCLQGTHQPPTFGPGTKLEVK

SEQ ID NO: 4446 - protein, 16 aa, synthetic construct
  REGION 1..16: note = Description of Artificial Sequence: Synthetic peptide
  REGION 1..16: note = 1F4[TIGIT] vlCDR1
RSSQSLVNSYGNTFLS

SEQ ID NO: 4447 - protein, 7 aa, synthetic construct
  REGION 1..7: note = Description of Artificial Sequence: Synthetic peptide
  REGION 1..7: note = 1F4[TIGIT] vlCDR2
GISNRFS

SEQ ID NO: 4448 - protein, 9 aa, synthetic construct
  REGION 1..9: note = Description of Artificial Sequence: Synthetic peptide
  REGION 1..9: note = 1F4[TIGIT] vlCDR3
LQGTHQPPT

SEQ ID NO: 4449 - protein, 126 aa, synthetic construct
  REGION 1..126: note = Description of Artificial Sequence: Synthetic polypeptide
  REGION 1..126: note = 4.1D3[TIGIT] variable heavy Chain
QVQLQQSGPGLVKPSQTLSLTCAISGDSVSSNSAAWNWIRQSPSRGLEWLGKTYYRFKWYSDYAVSVKGRITINPDTSKNQFSLQLNSVTPEDTAVFYCTRESTTYDLLAGPFDYWGQGTLVTVSS

SEQ ID NO: 4450 - protein, 7 aa, synthetic construct
  REGION 1..7: note = Description of Artificial Sequence: Synthetic peptide
  REGION 1..7: note = 4.1D3[TIGIT] vhCDR1
SNSAAWN

SEQ ID NO: 4451 - protein, 18 aa, synthetic construct
  REGION 1..18: note = Description of Artificial Sequence: Synthetic peptide
  REGION 1..18: note = 4.1D3[TIGIT] vhCDR2
KTYYRFKWYSDYAVSVKG

SEQ ID NO: 4452 - protein, 14 aa, synthetic construct
  REGION 1..14: note = Description of Artificial Sequence: Synthetic peptide
  REGION 1..14: note = 4.1D3[TIGIT] vhCDR3
ESTTYDLLAGPFDY

SEQ ID NO: 4453 - protein, 113 aa, synthetic construct
  REGION 1..113: note = Description of Artificial Sequence: Synthetic polypeptide
  REGION 1..113: note = 4.1D3[TIGIT] variable light Chain
DIVMTQSPDSLAVSLGERATINCKSSQTVLYSSNNKKYLAWYQQKPGQPPNLLIYWASTRESGVPDRFSGSGSGTDFTLTISSLQAEDVAVYYCQQYYSTPFTFGPGTKVEIK

SEQ ID NO: 4454 - protein, 17 aa, synthetic construct
  REGION 1..17: note = Description of Artificial Sequence: Synthetic peptide
  REGION 1..17: note = 4.1D3[TIGIT] vlCDR1
KSSQTVLYSSNNKKYLA

SEQ ID NO: 4455 - protein, 7 aa, synthetic construct
  REGION 1..7: note = Description of Artificial Sequence: Synthetic peptide
  REGION 1..7: note = 4.1D3[TIGIT] vlCDR2
WASTRES

SEQ ID NO: 4456 - protein, 9 aa, synthetic construct
  REGION 1..9: note = Description of Artificial Sequence: Synthetic peptide
  REGION 1..9: note = 4.1D3[TIGIT] vlCDR3
QQYYSTPFT

SEQ ID NO: 4457 - protein, 126 aa, synthetic construct
  REGION 1..126: note = Description of Artificial Sequence: Synthetic polypeptide
  REGION 1..126: note = 4.1D3.Q1E[TIGIT] variable heavy Chain
EVQLQQSGPGLVKPSQTLSLTCAISGDSVSSNSAAWNWIRQSPSRGLEWLGKTYYRFKWYSDYAVSVKGRITINPDTSKNQFSLQLNSVTPEDTAVFYCTRESTTYDLLAGPFDYWGQGTLVTVSS

SEQ ID NO: 4458 - protein, 7 aa, synthetic construct
  REGION 1..7: note = Description of Artificial Sequence: Synthetic peptide
  REGION 1..7: note = 4.1D3.Q1E[TIGIT] vhCDR1
SNSAAWN

SEQ ID NO: 4459 - protein, 18 aa, synthetic construct
  REGION 1..18: note = Description of Artificial Sequence: Synthetic peptide
  REGION 1..18: note = 4.1D3.Q1E[TIGIT] vhCDR2
KTYYRFKWYSDYAVSVKG

SEQ ID NO: 4460 - protein, 14 aa, synthetic construct
  REGION 1..14: note = Description of Artificial Sequence: Synthetic peptide
  REGION 1..14: note = 4.1D3.Q1E[TIGIT] vhCDR3
ESTTYDLLAGPFDY

SEQ ID NO: 4461 - protein, 113 aa, synthetic construct; identical to SEQ ID NO: 4453
  REGION 1..113: note = Description of Artificial Sequence: Synthetic polypeptide
  REGION 1..113: note = 4.1D3.Q1E[TIGIT] variable light Chain

SEQ ID NO: 4462 - protein, 17 aa, synthetic construct
  REGION 1..17: note = Description of Artificial Sequence: Synthetic peptide
  REGION 1..17: note = 4.1D3.Q1E[TIGIT] vlCDR1
KSSQTVLYSSNNKKYLA

SEQ ID NO: 4463 - protein, 7 aa, synthetic construct
  REGION 1..7: note = Description of Artificial Sequence: Synthetic peptide
  REGION 1..7: note = 4.1D3.Q1E[TIGIT] vlCDR2
WASTRES

SEQ ID NO: 4464 - protein, 9 aa, synthetic construct
  REGION 1..9: note = Description of Artificial Sequence: Synthetic peptide
  REGION 1..9: note = 4.1D3.Q1E[TIGIT] vlCDR3
QQYYSTPFT

SEQ ID NO: 4465 - protein, 121 aa, synthetic construct
  REGION 1..121: note = Description of Artificial Sequence: Synthetic polypeptide
  REGION 1..121: note = Hu14D7 VH1[TIGIT] variable heavy Chain
EVQLVESGGGLVQPGGSLKLSCAASGFTFSGAWMDWVRQAPGKGLEWVAEIRTKVNNHATNYGESVKGRFTISRDDSKSTVYLQMNSLRAEDTAVYYCRGALYDGFYFDYWGQGTLVTVSS

SEQ ID NO: 4466 - protein, 5 aa, synthetic construct
  REGION 1..5: note = Description of Artificial Sequence: Synthetic peptide
  REGION 1..5: note = Hu14D7 VH1[TIGIT] vhCDR1
GAWMD

SEQ ID NO: 4467 - protein, 19 aa, synthetic construct
  REGION 1..19: note = Description of Artificial Sequence: Synthetic peptide
  REGION 1..19: note = Hu14D7 VH1[TIGIT] vhCDR2
EIRTKVNNHATNYGESVKG

SEQ ID NO: 4468 - protein, 10 aa, synthetic construct
  REGION 1..10: note = Description of Artificial Sequence: Synthetic peptide
  REGION 1..10: note = Hu14D7 VH1[TIGIT] vhCDR3
ALYDGFYFDY

SEQ ID NO: 4469 - protein, 121 aa, synthetic construct
  REGION 1..121: note = Description of Artificial Sequence: Synthetic polypeptide
  REGION 1..121: note = Hu14D7 VH2[TIGIT] variable heavy Chain
EVQLVESGGGLVQPGGSLKLSCAASGFTFSGAWMDWVRQAPGKGLEWVAEIRTKVNNHATNYGESVKGRFTISRDDSKSSVYLQMNSLRAEDTAVYYCRGALYDGFYFDYWGQGTLVTVSS

SEQ ID NO: 4470 - protein, 5 aa, synthetic construct
  REGION 1..5: note = Description of Artificial Sequence: Synthetic peptide
  REGION 1..5: note = Hu14D7 VH2[TIGIT] vhCDR1
GAWMD

SEQ ID NO: 4471 - protein, 19 aa, synthetic construct
  REGION 1..19: note = Description of Artificial Sequence: Synthetic peptide
  REGION 1..19: note = Hu14D7 VH2[TIGIT] vhCDR2
EIRTKVNNHATNYGESVKG

SEQ ID NO: 4472 - protein, 10 aa, synthetic construct
  REGION 1..10: note = Description of Artificial Sequence: Synthetic peptide
  REGION 1..10: note = Hu14D7 VH2[TIGIT] vhCDR3
ALYDGFYFDY

SEQ ID NO: 4473 - protein, 121 aa, synthetic construct
  REGION 1..121: note = Description of Artificial Sequence: Synthetic polypeptide
  REGION 1..121: note = Hu14D7 VH3[TIGIT] variable heavy Chain
EVQLVESGGGLVQPGGSLKLSCAASGFTFSGAWMDWVRQAPGKGLEWVAEIRTKVNNHATNYGESVKGRFTISRDDSKNTVYLQMNSLRAEDTAVYYCRGALYDGFYFDYWGQGTLVTVSS

SEQ ID NO: 4474 - protein, 5 aa, synthetic construct
  REGION 1..5: note = Description of Artificial Sequence: Synthetic peptide
  REGION 1..5: note = Hu14D7 VH3[TIGIT] vhCDR1
GAWMD

SEQ ID NO: 4475 - protein, 19 aa, synthetic construct
  REGION 1..19: note = Description of Artificial Sequence: Synthetic peptide
  REGION 1..19: note = Hu14D7 VH3[TIGIT] vhCDR2
EIRTKVNNHATNYGESVKG

SEQ ID NO: 4476 - protein, 10 aa, synthetic construct
  REGION 1..10: note = Description of Artificial Sequence: Synthetic peptide
  REGION 1..10: note = Hu14D7 VH3[TIGIT] vhCDR3
ALYDGFYFDY

SEQ ID NO: 4477 - protein, 108 aa, synthetic construct
  REGION 1..108: note = Description of Artificial Sequence: Synthetic polypeptide
  REGION 1..108: note = Hu14D7 VL1[TIGIT] variable light Chain
EIVLTQSPATLSLSPGERATLSCSASSSVSSGYLYWYQQKPGQAPKLWIYGTSTLASGVPARFSGSGSGTDYTLTISSLEPEDFAVYYCHQWSSFPYTFGQGTKLEIK

SEQ ID NO: 4478 - protein, 12 aa, synthetic construct
  REGION 1..12: note = Description of Artificial Sequence: Synthetic peptide
  REGION 1..12: note = Hu14D7 VL1[TIGIT] vlCDR1
SASSSVSSGYLY

SEQ ID NO: 4479 - protein, 7 aa, synthetic construct
  REGION 1..7: note = Description of Artificial Sequence: Synthetic peptide
  REGION 1..7: note = Hu14D7 VL1[TIGIT] vlCDR2
GTSTLAS

SEQ ID NO: 4480 - protein, 9 aa, synthetic construct
  REGION 1..9: note = Description of Artificial Sequence: Synthetic peptide
  REGION 1..9: note = Hu14D7 VL1[TIGIT] vlCDR3
HQWSSFPYT

SEQ ID NO: 4481 - protein, 108 aa, synthetic construct
  REGION 1..108: note = Description of Artificial Sequence: Synthetic polypeptide
  REGION 1..108: note = Hu14D7 VL2[TIGIT] variable light Chain
EIVLTQSPATLSLSPGERATLSCSASSSVSSGYLYWYQQKPGQAPRLWIYGTSTLASGVPARFSGSGSGTDYTLTISSLEPEDFAVYYCHQWSSFPYTFGQGTKLEIK

SEQ ID NO: 4482 - protein, 12 aa, synthetic construct
  REGION 1..12: note = Description of Artificial Sequence: Synthetic peptide
  REGION 1..12: note = Hu14D7 VL2[TIGIT] vlCDR1
SASSSVSSGYLY

SEQ ID NO: 4483 - protein, 7 aa, synthetic construct
  REGION 1..7: note = Description of Artificial Sequence: Synthetic peptide
  REGION 1..7: note = Hu14D7 VL2[TIGIT] vlCDR2
GTSTLAS

SEQ ID NO: 4484 - protein, 9 aa, synthetic construct
  REGION 1..9: note = Description of Artificial Sequence: Synthetic peptide
  REGION 1..9: note = Hu14D7 VL2[TIGIT] vlCDR3
HQWSSFPYT

SEQ ID NO: 4485 - protein, 108 aa, synthetic construct
  REGION 1..108: note = Description of Artificial Sequence: Synthetic polypeptide
  REGION 1..108: note = Hu14D7 VL3[TIGIT] variable light Chain
EIVLTQSPATLSLSPGERATLSCSASSSVSSGYLYWYQQKPGQAPRLWIYGTSTLASGIPARFSGSGSGTDYTLTISSLEPEDFAVYYCHQWSSFPYTFGQGTKLEIK

SEQ ID NO: 4486 - protein, 12 aa, synthetic construct
  REGION 1..12: note = Description of Artificial Sequence: Synthetic peptide
  REGION 1..12: note = Hu14D7 VL3[TIGIT] vlCDR1
SASSSVSSGYLY

SEQ ID NO: 4487 - protein, 7 aa, synthetic construct
  REGION 1..7: note = Description of Artificial Sequence: Synthetic peptide
  REGION 1..7: note = Hu14D7 VL3[TIGIT] vlCDR2
GTSTLAS

SEQ ID NO: 4488 - protein, 9 aa, synthetic construct
  REGION 1..9: note = Description of Artificial Sequence: Synthetic peptide
  REGION 1..9: note = Hu14D7 VL3[TIGIT] vlCDR3
HQWSSFPYT

SEQ ID NO: 4489 - protein, 119 aa, synthetic construct
  REGION 1..119: note = Description of Artificial Sequence: Synthetic polypeptide
  REGION 1..119: note = Hu26B10 VH1[TIGIT] variable heavy Chain
EVQLVQSGAEVKKPGASVKISCKTSGYTFTEFTMHWVKQAPGKGLEWIGGLKPDNGGISYNQKFKGRATLTVDKSTNTAYMELSSLRSEDTAVYYCARGAYYRYDADYWGQGTLVTVSS

SEQ ID NO: 4490 - protein, 5 aa, synthetic construct
  REGION 1..5: note = Description of Artificial Sequence: Synthetic peptide
  REGION 1..5: note = Hu26B10 VH1[TIGIT] vhCDR1
EFTMH

SEQ ID NO: 4491 - protein, 17 aa, synthetic construct
  REGION 1..17: note = Description of Artificial Sequence: Synthetic peptide
  REGION 1..17: note = Hu26B10 VH1[TIGIT] vhCDR2
GLKPDNGGISYNQKFKG

SEQ ID NO: 4492 - protein, 10 aa, synthetic construct
  REGION 1..10: note = Description of Artificial Sequence: Synthetic peptide
  REGION 1..10: note = Hu26B10 VH1[TIGIT] vhCDR3
GAYYRYDADY

SEQ ID NO: 4493 - protein, 119 aa, synthetic construct
  REGION 1..119: note = Description of Artificial Sequence: Synthetic polypeptide
  REGION 1..119: note = Hu26B10 VH2[TIGIT] variable heavy Chain
EVQLVQSGAEVKKPGASVKISCKTSGYTFTEFTMHWVRQAPGKGLEWIGGLKPDNGGISYNQKFKGRATLTVDKSTSTAYMELSSLRSEDTAVYYCARGAYYRYDADYWGQGTLVTVSS

SEQ ID NO: 4494 - protein, 5 aa, synthetic construct
  REGION 1..5: note = Description of Artificial Sequence: Synthetic peptide
  REGION 1..5: note = Hu26B10 VH2[TIGIT] vhCDR1
EFTMH

SEQ ID NO: 4495 - protein, 17 aa, synthetic construct
  REGION 1..17: note = Description of Artificial Sequence: Synthetic peptide
  REGION 1..17: note = Hu26B10 VH2[TIGIT] vhCDR2
GLKPDNGGISYNQKFKG

SEQ ID NO: 4496 - protein, 10 aa, synthetic construct
  REGION 1..10: note = Description of Artificial Sequence: Synthetic peptide
  REGION 1..10: note = Hu26B10 VH2[TIGIT] vhCDR3
GAYYRYDADY

SEQ ID NO: 4497 - protein, 119 aa, synthetic construct
  REGION 1..119: note = Description of Artificial Sequence: Synthetic polypeptide
  REGION 1..119: note = Hu26B10 VH3[TIGIT] variable heavy Chain
EVQLVQSGAEVKKPGASVKISCKVSGYTFTEFTMHWVRQAPGKGLEWIGGLKPDNGGISYNQKFKGRATLTVDTSTSTAYMELSSLRSEDTAVYYCARGAYYRYDADYWGQGTLVTVSS

SEQ ID NO: 4498 - protein, 5 aa, synthetic construct
  REGION 1..5: note = Description of Artificial Sequence: Synthetic peptide
  REGION 1..5: note = Hu26B10 VH3[TIGIT] vhCDR1
EFTMH

SEQ ID NO: 4499 - protein, 17 aa, synthetic construct
  REGION 1..17: note = Description of Artificial Sequence: Synthetic peptide
  REGION 1..17: note = Hu26B10 VH3[TIGIT] vhCDR2
GLKPDNGGISYNQKFKG

SEQ ID NO: 4500 - protein, 10 aa, synthetic construct
  REGION 1..10: note = Description of Artificial Sequence: Synthetic peptide
  REGION 1..10: note = Hu26B10 VH3[TIGIT] vhCDR3
GAYYRYDADY

SEQ ID NO: 4501 - protein, 107 aa, synthetic construct
  REGION 1..107: note = Description of Artificial Sequence: Synthetic polypeptide
  REGION 1..107: note = Hu26B10 VL1[TIGIT] variable light Chain
DIQLTQSPSSLSASVGDRVTITCKASQDVKTAVAWYQQKPGKAPKLLIYSASYRNTGVPDRFSGSGSGTDFTFTISSLQPEDFATYYCQQHYSTPFTFGQGTKLEIK

SEQ ID NO: 4502 - protein, 11 aa, synthetic construct
  REGION 1..11: note = Description of Artificial Sequence: Synthetic peptide
  REGION 1..11: note = Hu26B10 VL1[TIGIT] vlCDR1
KASQDVKTAVA

SEQ ID NO: 4503 - protein, 7 aa, synthetic construct
  REGION 1..7: note = Description of Artificial Sequence: Synthetic peptide
  REGION 1..7: note = Hu26B10 VL1[TIGIT] vlCDR2
SASYRNT

SEQ ID NO: 4504 - protein, 9 aa, synthetic construct
  REGION 1..9: note = Description of Artificial Sequence: Synthetic peptide
  REGION 1..9: note = Hu26B10 VL1[TIGIT] vlCDR3
QQHYSTPFT

SEQ ID NO: 4505 - protein, 107 aa, synthetic construct
  REGION 1..107: note = Description of Artificial Sequence: Synthetic polypeptide
  REGION 1..107: note = Hu26B10 VL2[TIGIT] variable light Chain
DIQLTQSPSSLSASVGDRVTITCKASQDVKTAVAWYQQKPGKAPKLLIYSASYRNTGVPSRFSGSGSGTDFTFTISSLQPEDFATYYCQQHYSTPFTFGQGTKLEIK

SEQ ID NO: 4506 - protein, 11 aa, synthetic construct
  REGION 1..11: note = Description of Artificial Sequence: Synthetic peptide
  REGION 1..11: note = Hu26B10 VL2[TIGIT] vlCDR1
KASQDVKTAVA

SEQ ID NO: 4507 - protein, 7 aa, synthetic construct
  REGION 1..7: note = Description of Artificial Sequence: Synthetic peptide
  REGION 1..7: note = Hu26B10 VL2[TIGIT] vlCDR2
SASYRNT

SEQ ID NO: 4508 - protein, 9 aa, synthetic construct
  REGION 1..9: note = Description of Artificial Sequence: Synthetic peptide
  REGION 1..9: note = Hu26B10 VL2[TIGIT] vlCDR3
QQHYSTPFT

SEQ ID NO: 4509 - protein, 107 aa, synthetic construct
  REGION 1..107: note = Description of Artificial Sequence: Synthetic polypeptide
  REGION 1..107: note = Hu26B10 VL3[TIGIT] variable light Chain
DIQLTQSPSSLSASVGDRVTITCKASQDVKTAVAWYQQKPGKAPKLLIYSASYRNTGVPSRFSGSGSGTDFTLTISSLQPEDFATYYCQQHYSTPFTFGQGTKLEIK

SEQ ID NO: 4510 - protein, 11 aa, synthetic construct
  REGION 1..11: note = Description of Artificial Sequence: Synthetic peptide
  REGION 1..11: note = Hu26B10 VL3[TIGIT] vlCDR1
KASQDVKTAVA

SEQ ID NO: 4511 - protein, 7 aa, synthetic construct
  REGION 1..7: note = Description of Artificial Sequence: Synthetic peptide
  REGION 1..7: note = Hu26B10 VL3[TIGIT] vlCDR2
SASYRNT

SEQ ID NO: 4512 - protein, 9 aa, synthetic construct
  REGION 1..9: note = Description of Artificial Sequence: Synthetic peptide
  REGION 1..9: note = Hu26B10 VL3[TIGIT] vlCDR3
QQHYSTPFT

SEQ ID NO: 4513 - protein, 119 aa, synthetic construct
  REGION 1..119: note = Description of Artificial Sequence: Synthetic polypeptide
  REGION 1..119: note = MEB125.31C6.A1.205 VH4/VL1[TIGIT] variable heavy Chain
EVQLVQSGAEVKKPGASVKVSCKASGYTFSSYVMHWVRQAPGQGLEWIGYIDPYNDGAKYAQKFQGRVTLTSDKSTSTVYMELSSLRSEDTAVYYCARGGPYGWYFDVWGQGTTVTVSS

SEQ ID NO: 4514 - protein, 5 aa, synthetic construct
  REGION 1..5: note = Description of Artificial Sequence: Synthetic peptide
  REGION 1..5: note = MEB125.31C6.A1.205 VH4/VL1[TIGIT] vhCDR1
SYVMH

SEQ ID NO: 4515 - protein, 17 aa, synthetic construct
  REGION 1..17: note = Description of Artificial Sequence: Synthetic peptide
  REGION 1..17: note = MEB125.31C6.A1.205 VH4/VL1[TIGIT] vhCDR2
YIDPYNDGAKYAQKFQG

SEQ ID NO: 4516 - protein, 10 aa, synthetic construct
  REGION 1..10: note = Description of Artificial Sequence: Synthetic peptide
  REGION 1..10: note = MEB125.31C6.A1.205 VH4/VL1[TIGIT] vhCDR3
GGPYGWYFDV

SEQ ID NO: 4517 - protein, 107 aa, synthetic construct
  REGION 1..107: note = Description of Artificial Sequence: Synthetic polypeptide
  REGION 1..107: note = MEB125.31C6.A1.205 VH4/VL1[TIGIT] variable heavy Chain
DIQMTQSPSSLSASVGDRVTITCRASEHIYSYLSWYQQKPGKAPKLLIYNAKTLAEGVPSRFSGSGSGTDFTLTISSLQPEDFATYYCQHHFGSPLTFGQGTRLEIK

SEQ ID NO: 4518 - protein, 11 aa, synthetic construct
  REGION 1..11: note = Description of Artificial Sequence: Synthetic peptide
  REGION 1..11: note = MEB125.31C6.A1.205 VH4/VL1[TIGIT] vhCDR1
RASEHIYSYLS

SEQ ID NO: 4519 - protein, 7 aa, synthetic construct
  REGION 1..7: note = Description of Artificial Sequence: Synthetic peptide
  REGION 1..7: note = MEB125.31C6.A1.205 VH4/VL1[TIGIT] vhCDR2
NAKTLAE

SEQ ID NO: 4520 - protein, 9 aa, synthetic construct
  REGION 1..9: note = Description of Artificial Sequence: Synthetic peptide
  REGION 1..9: note = MEB125.31C6.A1.205 VH4/VL1[TIGIT] vhCDR3
QHHFGSPLT

SEQ ID NO: 4521 - protein, 119 aa, synthetic construct
  REGION 1..119: note = Description of Artificial Sequence: Synthetic polypeptide
  REGION 1..119: note = MEB125.31C6.A1.205 VH5/VL4[TIGIT] variable heavy Chain
EVQLVQSGAEVKKPGSSVKVSCKASGYTFSSYVMHWVRQAPGQGLEWIGYIDPYNDGAKYAQKFQGRVTLTSDKSTSTAYMELSSLRSEDTAVYYCARGGPYGWYFDVWGQGTTVTVSS

SEQ ID NO: 4522 - protein, 5 aa, synthetic construct
  REGION 1..5: note = Description of Artificial Sequence: Synthetic peptide
  REGION 1..5: note = MEB125.31C6.A1.205 VH5/VL4[TIGIT] vhCDR1
SYVMH

SEQ ID NO: 4523 - protein, 17 aa, synthetic construct
  REGION 1..17: note = Description of Artificial Sequence: Synthetic peptide
  REGION 1..17: note = MEB125.31C6.A1.205 VH5/VL4[TIGIT] vhCDR2
YIDPYNDGAKYAQKFQG

SEQ ID NO: 4524 - protein, 10 aa, synthetic construct
  REGION 1..10: note = Description of Artificial Sequence: Synthetic peptide
  REGION 1..10: note = MEB125.31C6.A1.205 VH5/VL4[TIGIT] vhCDR3
GGPYGWYFDV

SEQ ID NO: 4525 - protein, 107 aa, synthetic construct
  REGION 1..107: note = Description of Artificial Sequence: Synthetic polypeptide
  REGION 1..107: note = MEB125.31C6.A1.205 VH5/VL4[TIGIT] variable heavy Chain
DIQMTQSPSSLSASVGDRVTITCRASEHIYSYLSWYQQKPGKVPKLLIYNAKTLAEGVPSRFSGSGSGTQFTLTISSLQPEDVATYYCQHHFGSPLTFGQGTRLEIK

SEQ ID NO: 4526 - protein, 11 aa, synthetic construct
  REGION 1..11: note = Description of Artificial Sequence: Synthetic peptide
  REGION 1..11: note = MEB125.31C6.A1.205 VH5/VL4[TIGIT] vhCDR1
RASEHIYSYLS

SEQ ID NO: 4527 - protein, 7 aa, synthetic construct
  REGION 1..7: note = Description of Artificial Sequence: Synthetic peptide
  REGION 1..7: note = MEB125.31C6.A1.205 VH5/VL4[TIGIT] vhCDR2
NAKTLAE

SEQ ID NO: 4528 - protein, 9 aa, synthetic construct
  REGION 1..9: note = Description of Artificial Sequence: Synthetic peptide
  REGION 1..9: note = MEB125.31C6.A1.205 VH5/VL4[TIGIT] vhCDR3
QHHFGSPLT

SEQ ID NO: 4529 - protein, 119 aa, synthetic construct; identical to SEQ ID NO: 4521
  REGION 1..119: note = Description of Artificial Sequence: Synthetic polypeptide
  REGION 1..119: note = MEB125.31C6.A1.205 VH5/VL3[TIGIT] variable heavy Chain

SEQ ID NO: 4530 - protein, 5 aa, synthetic construct
  REGION 1..5: note = Description of Artificial Sequence: Synthetic peptide
  REGION 1..5: note = MEB125.31C6.A1.205 VH5/VL3[TIGIT] vhCDR1
SYVMH

SEQ ID NO: 4531 - protein, 17 aa, synthetic construct
  REGION 1..17: note = Description of Artificial Sequence: Synthetic peptide
  REGION 1..17: note = MEB125.31C6.A1.205 VH5/VL3[TIGIT] vhCDR2
YIDPYNDGAKYAQKFQG

SEQ ID NO: 4532 - protein, 10 aa, synthetic construct
  REGION 1..10: note = Description of Artificial Sequence: Synthetic peptide
  REGION 1..10: note = MEB125.31C6.A1.205 VH5/VL3[TIGIT] vhCDR3
GGPYGWYFDV

SEQ ID NO: 4533 - protein, 107 aa, synthetic construct
  REGION 1..107: note = Description of Artificial Sequence: Synthetic polypeptide
  REGION 1..107: note = MEB125.31C6.A1.205 VH5/VL3[TIGIT] variable heavy Chain
DIQMTQSPSSLSASVGDRVTITCRASEHIYSYLSWYQQKPGKVPKLLIYNAKTLAEGVPSRFSGSGSGTDFTLTISSLQPEDVATYYCQHHFGSPLTFGQGTRLEIK

SEQ ID NO: 4534 - protein, 11 aa, synthetic construct
  REGION 1..11: note = Description of Artificial Sequence: Synthetic peptide
  REGION 1..11: note = MEB125.31C6.A1.205 VH5/VL3[TIGIT] vhCDR1
RASEHIYSYLS

SEQ ID NO: 4535 - protein, 7 aa, synthetic construct
  REGION 1..7: note = Description of Artificial Sequence: Synthetic peptide
  REGION 1..7: note = MEB125.31C6.A1.205 VH5/VL3[TIGIT] vhCDR2
NAKTLAE

SEQ ID NO: 4536 - protein, 9 aa, synthetic construct
  REGION 1..9: note = Description of Artificial Sequence: Synthetic peptide
  REGION 1..9: note = MEB125.31C6.A1.205 VH5/VL3[TIGIT] vhCDR3
QHHFGSPLT

SEQ ID NO: 4537 - protein, 118 aa, synthetic construct
  REGION 1..118: note = Description of Artificial Sequence: Synthetic polypeptide
  REGION 1..118: note = 15A6[TIGIT] variable heavy Chain
QLQLQESGPGLVKPSETLSLTCTVSGGSISSSRYFWGWIRQPPGKGLEWIGYIYYRGSTYYNPSLKSRVTIAVDTSKNQFSLKLSSVTAADTAVYYCASSSAWYFDYWGQGNLVTVSS

SEQ ID NO: 4538 - protein, 7 aa, synthetic construct
  REGION 1..7: note = Description of Artificial Sequence: Synthetic peptide
  REGION 1..7: note = 15A6[TIGIT] vhCDR1
SSRYFWG

SEQ ID NO: 4539 - protein, 16 aa, synthetic construct
  REGION 1..16: note = Description of Artificial Sequence: Synthetic peptide
  REGION 1..16: note = 15A6[TIGIT] vhCDR2
YIYYRGSTYYNPSLKS

SEQ ID NO: 4540 - protein, 8 aa, synthetic construct
  REGION 1..8: note = Description of Artificial Sequence: Synthetic peptide
  REGION 1..8: note = 15A6[TIGIT] vhCDR3
SSAWYFDY

SEQ ID NO: 4541 - protein, 107 aa, synthetic construct
  REGION 1..107: note = Description of Artificial Sequence: Synthetic polypeptide
  REGION 1..107: note = 15A6[TIGIT] variable light Chain
EIVLTQSPGTLSLSPGERATLSCRASQSVSSSYLAWYQQKPGQAPRLLIYGASSRATGIPDRFSGSGSGTDFTLTISRLEPEDFAVYYCQQYGSLYTFGQGTKLEIK

SEQ ID NO: 4542 - protein, 12 aa, synthetic construct
  REGION 1..12: note = Description of Artificial Sequence: Synthetic peptide
  REGION 1..12: note = 15A6[TIGIT] vlCDR1
RASQSVSSSYLA

SEQ ID NO: 4543 - protein, 7 aa, synthetic construct
  REGION 1..7: note = Description of Artificial Sequence: Synthetic peptide
  REGION 1..7: note = 15A6[TIGIT] vlCDR2
GASSRAT

SEQ ID NO: 4544 - protein, 8 aa, synthetic construct
  REGION 1..8: note = Description of Artificial Sequence: Synthetic peptide
  REGION 1..8: note = 15A6[TIGIT] vlCDR3
QQYGSLYT

SEQ ID NO: 4545 - protein, 130 aa, synthetic construct
  REGION 1..130: note = Description of Artificial Sequence: Synthetic polypeptide
  REGION 1..130: note = 22G2[TIGIT] variable heavy Chain
QVHLQESGPGLVKPSETLSLTCTVSGGSVSSGIYYWSWIRQPPGKGLEWIGYIYYSGSTNYNPSLKSRVTISVDTSKNQFSLKLSSVTAADTAVYYCARDYYVSGNYYNVDYYFFGVDVWGQGTTVTVSS

SEQ ID NO: 4546 - protein, 7 aa, synthetic construct
  REGION 1..7: note = Description of Artificial Sequence: Synthetic peptide
  REGION 1..7: note = 22G2[TIGIT] vhCDR1
SGIYYWS

SEQ ID NO: 4547 - protein, 16 aa, synthetic construct
  REGION 1..16: note = Description of Artificial Sequence: Synthetic peptide
  REGION 1..16: note = 22G2[TIGIT] vhCDR2
YIYYSGSTNYNPSLKS

SEQ ID NO: 4548 - protein, 20 aa, synthetic construct
  REGION 1..20: note = Description of Artificial Sequence: Synthetic peptide
  REGION 1..20: note = 22G2[TIGIT] vhCDR3
DYYVSGNYYNVDYYFFGVDV

SEQ ID NO: 4549 - protein, 109 aa, synthetic construct
  REGION 1..109: note = Description of Artificial Sequence: Synthetic polypeptide
  REGION 1..109: note = 22G2[TIGIT] variable light Chain
EIVLTQSPATLSLSPGERATLSCRASQSVSSYLAWYQQKPGQAPRLLIYDASNRATGIPARFSGSGSGTDFTLTISSLEPEDFAVYYCQQRSNWPPLFTFGPGTKVDIK

SEQ ID NO: 4550 - protein, 11 aa, synthetic construct
  REGION 1..11: note = Description of Artificial Sequence: Synthetic peptide
  REGION 1..11: note = 22G2[TIGIT] vlCDR1
RASQSVSSYLA

SEQ ID NO: 4551 - protein, 7 aa, synthetic construct
  REGION 1..7: note = Description of Artificial Sequence: Synthetic peptide
  REGION 1..7: note = 22G2[TIGIT] vlCDR2
DASNRAT

SEQ ID NO: 4552 - protein, 11 aa, synthetic construct
  REGION 1..11: note = Description of Artificial Sequence: Synthetic peptide
  REGION 1..11: note = 22G2[TIGIT] vlCDR3
QQRSNWPPLFT

SEQ ID NO: 4553 - protein, 126 aa, synthetic construct
  REGION 1..126: note = Description of Artificial Sequence: Synthetic polypeptide
  REGION 1..126: note = 11G11[TIGIT] variable heavy Chain
QLQLQESGPGLVKPSETLSLTCTVSGGSISSSSHYWGWIRQPPGKGLEWIGNIFYSGHTYYNPSLKSRVTISVDTSKNQFSLKLSSVTAADTAVYYCARQGLLWFGGLSPYYFDYWGQGTLVTVSS

SEQ ID NO: 4554 - protein, 7 aa, synthetic construct
  REGION 1..7: note = Description of Artificial Sequence: Synthetic peptide
  REGION 1..7: note = 11G11[TIGIT] vhCDR1
SSSHYWG

SEQ ID NO: 4555 - protein, 16 aa, synthetic construct
  REGION 1..16: note = Description of Artificial Sequence: Synthetic peptide
  REGION 1..16: note = 11G11[TIGIT] vhCDR2
NIFYSGHTYYNPSLKS

SEQ ID NO: 4556 - protein, 16 aa, synthetic construct
  REGION 1..16: note = Description of Artificial Sequence: Synthetic peptide
  REGION 1..16: note = 11G11[TIGIT] vhCDR3
QGLLWFGGLSPYYFDY

SEQ ID NO: 4557 - protein, 106 aa, synthetic construct
  REGION 1..106: note = Description of Artificial Sequence: Synthetic polypeptide
  REGION 1..106: note = 11G11[TIGIT] variable light Chain
EIVLTQSPATLSLSPGERATLSCRASQSVSSYLAWYQQKPGQAPRLLIYDASNRATGIPARFSGSGSGTDFTLTISSLEPEDFAVYYCQQRSNWPTFGQGTKLEIK

SEQ ID NO: 4558 - protein, 11 aa, synthetic construct
  REGION 1..11: note = Description of Artificial Sequence: Synthetic peptide
  REGION 1..11: note = 11G11[TIGIT] vlCDR1
RASQSVSSYLA

SEQ ID NO: 4559 - protein, 7 aa, synthetic construct
  REGION 1..7: note = Description of Artificial Sequence: Synthetic peptide
  REGION 1..7: note = 11G11[TIGIT] vlCDR2
DASNRAT

SEQ ID NO: 4560 - protein, 8 aa, synthetic construct
  REGION 1..8: note = Description of Artificial Sequence: Synthetic peptide
  REGION 1..8: note = 11G11[TIGIT] vlCDR3
QQRSNWPT

SEQ ID NO: 4561 - protein, 128 aa, synthetic construct
  REGION 1..128: note = Description of Artificial Sequence: Synthetic polypeptide
  REGION 1..128: note = 10D7[TIGIT] variable heavy Chain
QGQLVQSGAEVKKPGSSVKVSCKASGGIFRNYAISWVRQAPGQGLEWMGGIIPFFGTANYAQKFQGRVTITADESTSTAYMELSSLRSEDTAVYYCARGGAAAGTTRYGYYYYGMDVWGQGTTVTVSS

SEQ ID NO: 4562 - protein, 5 aa, synthetic construct
  REGION 1..5: note = Description of Artificial Sequence: Synthetic peptide
  REGION 1..5: note = 10D7[TIGIT] vhCDR1
NYAIS

SEQ ID NO: 4563 - protein, 17 aa, synthetic construct
  REGION 1..17: note = Description of Artificial Sequence: Synthetic peptide
  REGION 1..17: note = 10D7[TIGIT] vhCDR2
GIIPFFGTANYAQKFQG

SEQ ID NO: 4564 - protein, 19 aa, synthetic construct
  REGION 1..19: note = Description of Artificial Sequence: Synthetic peptide
  REGION 1..19: note = 10D7[TIGIT] vhCDR3
GGAAAGTTRYGYYYYGMDV

SEQ ID NO: 4565 - protein, 107 aa, synthetic construct
  REGION 1..107: note = Description of Artificial Sequence: Synthetic polypeptide
  REGION 1..107: note = 10D7[TIGIT] variable light Chain
DIQMTQSPSSLSASVGDRVTITCRASQGISSWLAWYQQKPEKAPKSLIYAASSLQSGVPSRFSGSGSGTDFTLTISSLQPEDFATYYCQQYNSYPITFGQGTRLEIK

SEQ ID NO: 4566 - protein, 11 aa, synthetic construct
  REGION 1..11: note = Description of Artificial Sequence: Synthetic peptide
  REGION 1..11: note = 10D7[TIGIT] vlCDR1
RASQGISSWLA

SEQ ID NO: 4567 - protein, 7 aa, synthetic construct
  REGION 1..7: note = Description of Artificial Sequence: Synthetic peptide
  REGION 1..7: note = 10D7[TIGIT] vlCDR2
AASSLQS

SEQ ID NO: 4568 - protein, 9 aa, synthetic construct
  REGION 1..9: note = Description of Artificial Sequence: Synthetic peptide
  REGION 1..9: note = 10D7[TIGIT] vlCDR3
QQYNSYPIT

SEQ ID NO: 4569 - protein, 116 aa, synthetic construct
  REGION 1..116: note = Description of Artificial Sequence: Synthetic polypeptide
  REGION 1..116: note = 313R19[TIGIT] variable heavy Chain
QVQLQESGPGLVKPSETLSLTCTVSGFSLSSSYMSWIRQPPGKGLEWIGIIGSNGNTYYANWAKGRVTISKSSNQVSLKLSSVTAADTAVYYCARGGYRTSGMDPWGQGTLVTVSS

SEQ ID NO: 4570 - protein, 5 aa, synthetic construct
  REGION 1..5: note = Description of Artificial Sequence: Synthetic peptide
  REGION 1..5: note = 313R19[TIGIT] vhCDR1
SSYMS

SEQ ID NO: 4571 - protein, 14 aa, synthetic construct
  REGION 1..14: note = Description of Artificial Sequence: Synthetic peptide
  REGION 1..14: note = 313R19[TIGIT] vhCDR2
IIGSNGNTYYANWA

SEQ ID NO: 4572 - protein, 10 aa, synthetic construct
  REGION 1..10: note = Description of Artificial Sequence: Synthetic peptide
  REGION 1..10: note = 313R19[TIGIT] vhCDR3
GGYRTSGMDP

SEQ ID NO: 4573 - protein, 110 aa, synthetic construct
  REGION 1..110: note = Description of Artificial Sequence: Synthetic polypeptide
  REGION 1..110: note = 313R19[TIGIT] variable light Chain
DIQMTQSPSSLSASVGDRVTITCQASQNIYSDLAWYQQKPGKAPKLLIYRASTLASGVPSRFSGSGSGTDFTLTISSLQPEDFATYYCQQEHLVAWIYNVFGQGTKVEIK

SEQ ID NO: 4574 - protein, 11 aa, synthetic construct
  REGION 1..11: note = Description of Artificial Sequence: Synthetic peptide
  REGION 1..11: note = 313R19[TIGIT] vlCDR1
QASQNIYSDLA

SEQ ID NO: 4575 - protein, 7 aa, synthetic construct
  REGION 1..7: note = Description of Artificial Sequence: Synthetic peptide
  REGION 1..7: note = 313R19[TIGIT] vlCDR2
RASTLAS

SEQ ID NO: 4576 - protein, 12 aa, synthetic construct
  REGION 1..12: note = Description of Artificial Sequence: Synthetic peptide
  REGION 1..12: note = 313R19[TIGIT] vlCDR3
QQEHLVAWIYNV

SEQ ID NO: 4577 - protein, 118 aa, synthetic construct
  REGION 1..118: note = Description of Artificial Sequence: Synthetic polypeptide
  REGION 1..118: note = 313M32[TIGIT] variable heavy Chain
QVQLQESGPGLVKPSETLSLTCAVSGYSITSDYAWNWIRQPPGKGLEWIGYISYSGSTSYNPSLRSRVTISRDTSKNQFFLKLSSVTAADTAVYYCARRQVGLGFAYWGQGTLVTVSS

SEQ ID NO: 4578 - protein, 6 aa, synthetic construct
  REGION 1..6: note = Description of Artificial Sequence: Synthetic peptide
  REGION 1..6: note = 313M32[TIGIT] vhCDR1
SDYAWN

SEQ ID NO: 4579 - protein, 16 aa, synthetic construct
  REGION 1..16: note = Description of Artificial Sequence: Synthetic peptide
  REGION 1..16: note = 313M32[TIGIT] vhCDR2
YISYSGSTSYNPSLRS

SEQ ID NO: 4580 - protein, 9 aa, synthetic construct
  REGION 1..9: note = Description of Artificial Sequence: Synthetic peptide
  REGION 1..9: note = 313M32[TIGIT] vhCDR3
RQVGLGFAY

SEQ ID NO: 4581 - protein, 99 aa, synthetic construct
  REGION 1..99: note = Description of Artificial Sequence: Synthetic polypeptide
  REGION 1..99: note = 313M32[TIGIT] variable light Chain
DIQMTQSPSSLSASVGDRVTITCKASQDVSTAVAWYQQKPGKAPKLLIYSASYRYTGVPSRFSGSGSGTDFTFTISSLQPEDIATYYCQQHYSTPWTFG

SEQ ID NO: 4582 - protein, 11 aa, synthetic construct
  REGION 1..11: note = Description of Artificial Sequence: Synthetic peptide
  REGION 1..11: note = 313M32[TIGIT] vlCDR1
KASQDVSTAVA

SEQ ID NO: 4583 - protein, 7 aa, synthetic construct
  REGION 1..7: note = Description of Artificial Sequence: Synthetic peptide
  REGION 1..7: note = 313M32[TIGIT] vlCDR2
SASYRYT

SEQ ID NO: 4584 - protein, 9 aa, synthetic construct
  REGION 1..9: note = Description of Artificial Sequence: Synthetic peptide
  REGION 1..9: note = 313M32[TIGIT] vlCDR3
QQHYSTPWT

SEQ ID NO: 4585 - protein, 113 aa, synthetic construct
  REGION 1..113: note = Description of Artificial Sequence: Synthetic polypeptide
  REGION 1..113: note = APE5137[TIM-3] variable heavy Chain
EVQLLESGGGLVQPGGSLRLSCAAASGFTFSSYDMSWVRQAPGKGLDWVSTISGGGTYTYYQDSVKGRFTISRDNSKNTLYLQMNSLRAEDTAVYYCASMDYWGQGTTVTVSS

SEQ ID NO: 4586 - protein, 6 aa, synthetic construct
  REGION 1..6: note = Description of Artificial Sequence: Synthetic peptide
  REGION 1..6: note = APE5137[TIM-3] vhCDR1
SSYDMS

SEQ ID NO: 4587 - protein, 17 aa, synthetic construct
  REGION 1..17: note = Description of Artificial Sequence: Synthetic peptide
  REGION 1..17: note = APE5137[TIM-3] vhCDR2
TISGGGTYTYYQDSVKG

SEQ ID NO: 4588 - skipped

SEQ ID NO: 4589 - protein, 107 aa, synthetic construct
  REGION 1..107: note = Description of Artificial Sequence: Synthetic polypeptide
  REGION 1..107: note = APE5137[TIM-3] variable light Chain
DIQMTQSPSSLSASVGDRVTITCRASQSIRRYLNWYHQKPGKAPKLLIYGASTLQSGVPSRFSGSGSGTDFTLTISSLQPEDFAVYYCQQSHSAPLTFGGGTKVEIK

SEQ ID NO: 4590 - protein, 11 aa, synthetic construct
  REGION 1..11: note = Description of Artificial Sequence: Synthetic peptide
  REGION 1..11: note = APE5137[TIM-3] vlCDR1
RASQSIRRYLN

SEQ ID NO: 4591 - protein, 7 aa, synthetic construct
  REGION 1..7: note = Description of Artificial Sequence: Synthetic peptide
  REGION 1..7: note = APE5137[TIM-3] vlCDR2
GASTLQS

SEQ ID NO: 4592 - protein, 9 aa, synthetic construct
  REGION 1..9: note = Description of Artificial Sequence: Synthetic peptide
  REGION 1..9: note = APE5137[TIM-3] vlCDR3
QQSHSAPLT

SEQ ID NO: 4593 - protein, 119 aa, synthetic construct
  REGION 1..119: note = Description of Artificial Sequence: Synthetic polypeptide
  REGION 1..119: note = APE5121[TIM-3] variable heavy Chain
EVQVLESGGGLVQPGGSLRLYCVASGFTFSGSYAMSWVRQAPGKGLEWVSAISGSGGSTYYADSVKGRFTISRDNSKNTLYLQMNSLRAEDTAVYYCAKKYYVGPADYWGQGTLVTVSS

SEQ ID NO: 4594 - protein, 6 aa, synthetic construct
  REGION 1..6: note = Description of Artificial Sequence: Synthetic peptide
  REGION 1..6: note = APE5121[TIM-3] vhCDR1
GSYAMS

SEQ ID NO: 4595 - protein, 17 aa, synthetic construct
  REGION 1..17: note = Description of Artificial Sequence: Synthetic peptide
  REGION 1..17: note = APE5121[TIM-3] vhCDR2
AISGSGGSTYYADSVKG

SEQ ID NO: 4596 - protein, 9 aa, synthetic construct
  REGION 1..9: note = Description of Artificial Sequence: Synthetic peptide
  REGION 1..9: note = APE5121[TIM-3] vhCDR3
KYYVGPADY

SEQ ID NO: 4597 - protein, 113 aa, synthetic construct
  REGION 1..113: note = Description of Artificial Sequence: Synthetic polypeptide
  REGION 1..113: note = APE5121[TIM-3] variable light Chain
DIVMTQSPDSLAVSLGERATINCKSSQSVLYSSNNKNYLAWYQHKPGQPPKLLIYWASTRESGVPDRFSGSGSGTDFTLTISSLQAEDVAVYYCQQYYSSPLTFGGGTKIEVK

SEQ ID NO: 4598 - protein, 17 aa, synthetic construct
  REGION 1..17: note = Description of Artificial Sequence: Synthetic peptide
  REGION 1..17: note = APE5121[TIM-3] vlCDR1
KSSQSVLYSSNNKNYLA

SEQ ID NO: 4599 - protein, 7 aa, synthetic construct
  REGION 1..7: note = Description of Artificial Sequence: Synthetic peptide
  REGION 1..7: note = APE5121[TIM-3] vlCDR2
WASTRES

SEQ ID NO: 4600 - protein, 9 aa, synthetic construct
  REGION 1..9: note = Description of Artificial Sequence: Synthetic peptide
  REGION 1..9: note = APE5121[TIM-3] vlCDR3
QQYYSSPLT

SEQ ID NO: 4601 - protein, 118 aa, synthetic construct
  REGION 1..118: note = Description of Artificial Sequence: Synthetic polypeptide
  REGION 1..118: note = ABTIM3-hum03[TIM-3] variable heavy Chain
QVQLVQSGAEVKKPGASVKVSCKASGYTFTSYNMHWVRQAPGQGLEWIGDIYPGQGDTSYNQKFKGRATMTADKSTSTVYMELSSLRSEDTAVYYCARVGGAFPMDYWGQGTLVTVSS

SEQ ID NO: 4602 - protein, 5 aa, synthetic construct
  REGION 1..5: note = Description of Artificial Sequence: Synthetic peptide
  REGION 1..5: note = ABTIM3-hum03[TIM-3] vhCDR1
SYNMH

SEQ ID NO: 4603 - protein, 17 aa, synthetic construct
  REGION 1..17: note = Description of Artificial Sequence: Synthetic peptide
  REGION 1..17: note = ABTIM3-hum03[TIM-3] vhCDR2
DIYPGQGDTSYNQKFKG

SEQ ID NO: 4604 - protein, 9 aa, synthetic construct
  REGION 1..9: note = Description of Artificial Sequence: Synthetic peptide
  REGION 1..9: note = ABTIM3-hum03[TIM-3] vhCDR3
VGGAFPMDY

SEQ ID NO: 4605 - protein, 111 aa, synthetic construct
  REGION 1..111: note = Description of Artificial Sequence: Synthetic polypeptide
  REGION 1..111: note = ABTIM3-hum03[TIM-3] variable light Chain
DIVLTQSPDSLAVSLGERATINCRASESVEYYGTSLMQWYQQKPGQPPKLLIYAASNVESGVPDRFSGSGSGTDFTLTISSLQAEDVAVYYCQQSRKDPSTFGGGTKVEIK

SEQ ID NO: 4606 - protein, 15 aa, synthetic construct
  REGION 1..15: note = Description of Artificial Sequence: Synthetic peptide
  REGION 1..15: note = ABTIM3-hum03[TIM-3] vlCDR1
RASESVEYYGTSLMQ

SEQ ID NO: 4607 - protein, 7 aa, synthetic construct
  REGION 1..7: note = Description of Artificial Sequence: Synthetic peptide
  REGION 1..7: note = ABTIM3-hum03[TIM-3] vlCDR2
AASNVES

SEQ ID NO: 4608 - protein, 9 aa, synthetic construct
  REGION 1..9: note = Description of Artificial Sequence: Synthetic peptide
  REGION 1..9: note = ABTIM3-hum03[TIM-3] vlCDR3
QQSRKDPST

SEQ ID NO: 4609 - protein, 118 aa, synthetic construct
  REGION 1..118: note = Description of Artificial Sequence: Synthetic polypeptide
  REGION 1..118: note = ABTIM3-hum11[TIM-3] variable heavy Chain
QVQLVQSGAEVKKPGSSVKVSCKASGYTFTSYNMHWVRQAPGQGLEWMGDIYPGNGDTSYNQKFKGRVTITADKSTSTVYMELSSLRSEDTAVYYCARVGGAFPMDYWGQGTTVTVSS

SEQ ID NO: 4610 - protein, 5 aa, synthetic construct
  REGION 1..5: note = Description of Artificial Sequence: Synthetic peptide
  REGION 1..5: note = ABTIM3-hum11[TIM-3] vhCDR1
SYNMH

SEQ ID NO: 4611 - protein, 17 aa, synthetic construct
  REGION 1..17: note = Description of Artificial Sequence: Synthetic peptide
  REGION 1..17: note = ABTIM3-hum11[TIM-3] vhCDR2
DIYPGNGDTSYNQKFKG

SEQ ID NO: 4612 - protein, 9 aa, synthetic construct
  REGION 1..9: note = Description of Artificial Sequence: Synthetic peptide
  REGION 1..9: note = ABTIM3-hum11[TIM-3] vhCDR3
VGGAFPMDY

SEQ ID NO: 4613 - protein, 111 aa, synthetic construct
  REGION 1..111: note = Description of Artificial Sequence: Synthetic polypeptide
  REGION 1..111: note = ABTIM3-hum11[TIM-3] variable light Chain
AIQLTQSPSSLSASVGDRVTITCRASESVEYYGTSLMQWYQQKPGKAPKLLIYAASNVESGVPSRFSGSGSGTDFTLTISSLQPEDFATYFCQQSRKDPSTFGGGTKVEIK

SEQ ID NO: 4614 - protein, 15 aa, synthetic construct
  REGION 1..15: note = Description of Artificial Sequence: Synthetic peptide
  REGION 1..15: note = ABTIM3-hum11[TIM-3] vlCDR1
RASESVEYYGTSLMQ

SEQ ID NO: 4615 - protein, 7 aa, synthetic construct
  REGION 1..7: note = Description of Artificial Sequence: Synthetic peptide
  REGION 1..7: note = ABTIM3-hum11[TIM-3] vlCDR2
AASNVES

SEQ ID NO: 4616 - protein, 9 aa, synthetic construct
  REGION 1..9: note = Description of Artificial Sequence: Synthetic peptide
  REGION 1..9: note = ABTIM3-hum11[TIM-3] vlCDR3
QQSRKDPST

SEQ ID NO: 4617 - protein, 118 aa, synthetic construct; identical to SEQ ID NO: 4601
  REGION 1..118: note = Description of Artificial Sequence: Synthetic polypeptide
  REGION 1..118: note = ABTIM3-hum21[TIM-3] variable heavy Chain

SEQ ID NO: 4618 - protein, 5 aa, synthetic construct
  REGION 1..5: note = Description of Artificial Sequence: Synthetic peptide
  REGION 1..5: note = ABTIM3-hum21[TIM-3] vhCDR1
SYNMH

SEQ ID NO: 4619 - protein, 17 aa, synthetic construct
  REGION 1..17: note = Description of Artificial Sequence: Synthetic peptide
  REGION 1..17: note = ABTIM3-hum21[TIM-3] vhCDR2
DIYPGQGDTSYNQKFKG

SEQ ID NO: 4620 - protein, 9 aa, synthetic construct
  REGION 1..9: note = Description of Artificial Sequence: Synthetic peptide
  REGION 1..9: note = ABTIM3-hum21[TIM-3] vhCDR3
VGGAFPMDY

SEQ ID NO: 4621 - protein, 111 aa, synthetic construct; identical to SEQ ID NO: 4605
  REGION 1..111: note = Description of Artificial Sequence: Synthetic polypeptide
  REGION 1..111: note = ABTIM3-hum21[TIM-3] variable light Chain

SEQ ID NO: 4622 - protein, 15 aa, synthetic construct
  REGION 1..15: note = Description of Artificial Sequence: Synthetic peptide
  REGION 1..15: note = ABTIM3-hum21[TIM-3] vlCDR1
RASESVEYYGTSLMQ

SEQ ID NO: 4623 - protein, 7 aa, synthetic construct
  REGION 1..7: note = Description of Artificial Sequence: Synthetic peptide
  REGION 1..7: note = ABTIM3-hum21[TIM-3] vlCDR2
AASNVES

SEQ ID NO: 4624 - protein, 9 aa, synthetic construct
  REGION 1..9: note = Description of Artificial Sequence: Synthetic peptide
  REGION 1..9: note = ABTIM3-hum21[TIM-3] vlCDR3
QQSRKDPST

SEQ ID NO: 4625 - protein, 121 aa, synthetic construct
  REGION 1..121: note = Description of Artificial Sequence: Synthetic polypeptide
  REGION 1..121: note = 4177[TIM-3] variable heavy Chain
QVQLQESGPGLVKPSETLSLTCTVSGGSISSYYWSWIRQPPGKGLEWIGYIFHSGSTNYNPSLKSRVTISVDTSKNQFSLKLSSVTAADTAVYYCARDGEYFDMLTGFDYWGQGTLVTVSS

SEQ ID NO: 4626 - protein, 5 aa, synthetic construct
  REGION 1..5: note = Description of Artificial Sequence: Synthetic peptide
  REGION 1..5: note = 4177[TIM-3] vhCDR1
SYYWS

SEQ ID NO: 4627 - protein, 16 aa, synthetic construct
  REGION 1..16: note = Description of Artificial Sequence: Synthetic peptide
  REGION 1..16: note = 4177[TIM-3] vhCDR2
YIFHSGSTNYNPSLKS

SEQ ID NO: 4628 - protein, 13 aa, synthetic construct
  REGION 1..13: note = Description of Artificial Sequence: Synthetic peptide
  REGION 1..13: note = 4177[TIM-3] vhCDR3
DGEYFDMLTGFDY

SEQ ID NO: 4629 - protein, 109 aa, synthetic construct
  REGION 1..109: note = Description of Artificial Sequence: Synthetic polypeptide
  REGION 1..109: note = 4177[TIM-3] variable light Chain
RCDIQMTQSPSSLSASVGDRVTITCRASQGISSWLAWYQQKPEKAPKSLIYAASSLQSGVPSRFSGSGSGTDFTLTISSLQPEDFATYYCQQYNSYPRTFGQGTKVEIK

SEQ ID NO: 4630 - protein, 11 aa, synthetic construct
  REGION 1..11: note = Description of Artificial Sequence: Synthetic peptide
  REGION 1..11: note = 4177[TIM-3] vlCDR1
RASQGISSWLA

SEQ ID NO: 4631 - protein, 7 aa, synthetic construct
  REGION 1..7: note = Description of Artificial Sequence: Synthetic peptide
  REGION 1..7: note = 4177[TIM-3] vlCDR2
AASSLQS

SEQ ID NO: 4632 - protein, 9 aa, synthetic construct
  REGION 1..9: note = Description of Artificial Sequence: Synthetic peptide
  REGION 1..9: note = 4177[TIM-3] vlCDR3
QQYNSYPRT

SEQ ID NO: 4633 - protein, 121 aa, synthetic construct
  REGION 1..121: note = Description of Artificial Sequence: Synthetic polypeptide
  REGION 1..121: note = 4545[TIM-3] variable heavy Chain
QVQLQESGPGLVKPSETLSLTCTVSGGSFSRGGYYWNWIRQPPGKGLEWIGYIYYSGSTNYNPSLKSRVTISLDTSKNQFSLKLSSVTAADTAVYYCARDHYSSSWTFDYWGQGTLVTVSS

SEQ ID NO: 4634 - protein, 7 aa, synthetic construct
  REGION 1..7: note = Description of Artificial Sequence: Synthetic peptide
  REGION 1..7: note = 4545[TIM-3] vhCDR1
RGGYYWN

SEQ ID NO: 4635 - protein, 16 aa, synthetic construct
  REGION 1..16: note = Description of Artificial Sequence: Synthetic peptide
  REGION 1..16: note = 4545[TIM-3] vhCDR2
YIYYSGSTNYNPSLKS

SEQ ID NO: 4636 - protein, 11 aa, synthetic construct
  REGION 1..11: note = Description of Artificial Sequence: Synthetic peptide
  REGION 1..11: note = 4545[TIM-3] vhCDR3
DHYSSSWTFDY

SEQ ID NO: 4637 - protein, 107 aa, synthetic construct
  REGION 1..107: note = Description of Artificial Sequence: Synthetic polypeptide
  REGION 1..107: note = 4545[TIM-3] variable light Chain
EIVLTQSPATLSLSPGERATLSCRASQSVSSYLAWYQQKPGQAPRLLIYDASNRATGIPARFSGSGSGTDFTLTISSLEPEDFAVYYCQQRSNWPPTFGQGTKLEIK

SEQ ID NO: 4638 - protein, 11 aa, synthetic construct
  REGION 1..11: note = Description of Artificial Sequence: Synthetic peptide
  REGION 1..11: note = 4545[TIM-3] vlCDR1
RASQSVSSYLA

SEQ ID NO: 4639 - protein, 7 aa, synthetic construct
  REGION 1..7: note = Description of Artificial Sequence: Synthetic peptide
  REGION 1..7: note = 4545[TIM-3] vlCDR2
DASNRAT

SEQ ID NO: 4640 - protein, 9 aa, synthetic construct
  REGION 1..9: note = Description of Artificial Sequence: Synthetic peptide
  REGION 1..9: note = 4545[TIM-3] vlCDR3
QQRSNWPPT

SEQ ID NO: 4641 - protein, 117 aa, synthetic construct
  REGION 1..117: note = Description of Artificial Sequence: Synthetic polypeptide
  REGION 1..117: note = 8213[TIM-3] variable heavy Chain
QVQLVQSGAEVKKPGASVKVSCKASGYTFTSYWMHWVRQAPGQGLEWMGEINPSNGRTNYNEKFKTRVTITADTSTSTAYMELSSLRSEDTAVYYCARGYYLYFDYWGQGTLVTVSS

SEQ ID NO: 4642 - protein, 5 aa, synthetic construct
  REGION 1..5: note = Description of Artificial Sequence: Synthetic peptide
  REGION 1..5: note = 8213[TIM-3] vhCDR1
SYWMH

SEQ ID NO: 4643 - protein, 17 aa, synthetic construct
  REGION 1..17: note = Description of Artificial Sequence: Synthetic peptide
  REGION 1..17: note = 8213[TIM-3] vhCDR2
EINPSNGRTNYNEKFKT

SEQ ID NO: 4644 - protein, 8 aa, synthetic construct
  REGION 1..8: note = Description of Artificial Sequence: Synthetic peptide
  REGION 1..8: note = 8213[TIM-3] vhCDR3
GYYLYFDY

SEQ ID NO: 4645 - protein, 107 aa, synthetic construct
  REGION 1..107: note = Description of Artificial Sequence: Synthetic polypeptide
  REGION 1..107: note = 8213[TIM-3] variable light Chain
DIQMTQSPSSLSASVGDRVTITCHASQGIRINIGWYQQKPGKAPKLLIYHGTNLEDGVPSRFSGSGSGTDFTLTISSLQPEDFATYYCVQYGQFPWTFGQGTKLEIK

SEQ ID NO: 4646 - protein, 11 aa, synthetic construct
  REGION 1..11: note = Description of Artificial Sequence: Synthetic peptide
  REGION 1..11: note = 8213[TIM-3] vlCDR1
HASQGIRINIG

SEQ ID NO: 4647 - protein, 7 aa, synthetic construct
  REGION 1..7: note = Description of Artificial Sequence: Synthetic peptide
  REGION 1..7: note = 8213[TIM-3] vlCDR2
HGTNLED

SEQ ID NO: 4648 - protein, 9 aa, synthetic construct
  REGION 1..9: note = Description of Artificial Sequence: Synthetic peptide
  REGION 1..9: note = 8213[TIM-3] vlCDR3
VQYGQFPWT

SEQ ID NO: 4649 - protein, 117 aa, synthetic construct
  REGION 1..117: note = Description of Artificial Sequence: Synthetic polypeptide
  REGION 1..117: note = mAb15[TIM-3] variable heavy Chain
QVQLKESGPGLVAPSQSLSITCTVSGFSLTGYGVTWVRQPPGKGLEWLGMIWGDGNTDYNSGLKSRLNISKDNSKSQVFLKMNSLQTDDTARYYCARSYYYGPPDYWGQGTTLTVSS

SEQ ID NO: 4650 - protein, 5 aa, synthetic construct
  REGION 1..5: note = Description of Artificial Sequence: Synthetic peptide
  REGION 1..5: note = mAb15[TIM-3] vhCDR1
GYGVT

SEQ ID NO: 4651 - protein, 16 aa, synthetic construct
  REGION 1..16: note = Description of Artificial Sequence: Synthetic peptide
  REGION 1..16: note = mAb15[TIM-3] vhCDR2
MIWGDGNTDYNSGLKS

SEQ ID NO: 4652 - protein, 9 aa, synthetic construct
  REGION 1..9: note = Description of Artificial Sequence: Synthetic peptide
  REGION 1..9: note = mAb15[TIM-3] vhCDR3
SYYYGPPDY

SEQ ID NO: 4653 - protein, 113 aa, synthetic construct
  REGION 1..113: note = Description of Artificial Sequence: Synthetic polypeptide
  REGION 1..113: note = mAb15[TIM-3] variable light Chain
DIVMTQSPSSLAMSVGQKVTMSCKSSQSLLNSRSQKNYLAWYQRKPGQSPKLLLYFASTRESGVPDRFIGSGSGTDFTLTISSVQAEDLADYFCHQHYNTPYTFGGGTKLEIK

SEQ ID NO: 4654 - protein, 17 aa, synthetic construct
  REGION 1..17: note = Description of Artificial Sequence: Synthetic peptide
  REGION 1..17: note = mAb15[TIM-3] vlCDR1
KSSQSLLNSRSQKNYLA

SEQ ID NO: 4655 - protein, 7 aa, synthetic construct
  REGION 1..7: note = Description of Artificial Sequence: Synthetic peptide
  REGION 1..7: note = mAb15[TIM-3] vlCDR2
FASTRES

SEQ ID NO: 4656 - protein, 9 aa, synthetic construct
  REGION 1..9: note = Description of Artificial Sequence: Synthetic peptide
  REGION 1..9: note = mAb15[TIM-3] vlCDR3
HQHYNTPYT

SEQ ID NO: 4657 - protein, 121 aa, synthetic construct
  REGION 1..121: note = Description of Artificial Sequence: Synthetic polypeptide
  REGION 1..121: note = mAb58[TIM-3] variable heavy Chain
QIQLVQSGPELKKPGETVKISCKASGYTFTTYGMSWVKQAPGKGLKLMGWINTYSGAPTYADDFKGRFAFSLETSASAAYLQINNLKNEDTATYFCARKPPHYYVNSFDYWGQGTTLTVSS

SEQ ID NO: 4658 - protein, 5 aa, synthetic construct
  REGION 1..5: note = Description of Artificial Sequence: Synthetic peptide
  REGION 1..5: note = mAb58[TIM-3] vhCDR1
TYGMS

SEQ ID NO: 4659 - protein, 17 aa, synthetic construct
  REGION 1..17: note = Description of Artificial Sequence: Synthetic peptide
  REGION 1..17: note = mAb58[TIM-3] vhCDR2
WINTYSGAPTYADDFKG

SEQ ID NO: 4660 - protein, 12 aa, synthetic construct
  REGION 1..12: note = Description of Artificial Sequence: Synthetic peptide
  REGION 1..12: note = mAb58[TIM-3] vhCDR3
KPPHYYVNSFDY

SEQ ID NO: 4661 - protein, 107 aa, synthetic construct
  REGION 1..107: note = Description of Artificial Sequence: Synthetic polypeptide
  REGION 1..107: note = mAb58[TIM-3] variable light Chain
DIVMTQSPATLSVTPGDRVSLSCRASQSISDYLHWYQQKSHESPRLLIKYASQSISGIPSRFSGSGSGSDFTLSINSVEPEDVGVYYCQNGHSFPYTFGGGTKLEIK

SEQ ID NO: 4662 - protein, 11 aa, synthetic construct
  REGION 1..11: note = Description of Artificial Sequence: Synthetic peptide
  REGION 1..11: note = mAb58[TIM-3] vlCDR1
RASQSISDYLH

SEQ ID NO: 4663 - protein, 7 aa, synthetic construct
  REGION 1..7: note = Description of Artificial Sequence: Synthetic peptide
  REGION 1..7: note = mAb58[TIM-3] vlCDR2
YASQSIS

SEQ ID NO: 4664 - protein, 9 aa, synthetic construct
  REGION 1..9: note = Description of Artificial Sequence: Synthetic peptide
  REGION 1..9: note = mAb58[TIM-3] vlCDR3
QNGHSFPYT

SEQ ID NO: 4665 - protein, 120 aa, synthetic construct
  REGION 1..120: note = Description of Artificial Sequence: Synthetic polypeptide
  REGION 1..120: note = TIM3-0433[TIM-3] variable heavy Chain
QITLKESGPTLVKPTQTLTLTCTFSGFSLSTSGMSVGWIRQPPGKGLEWLAHIWLNDDVFFNPALKSRLTITKDTSKNQVVLTMTNMDPVDTATYYCVRANGYLYALDYWGQGTLVTVSS

SEQ ID NO: 4666 - protein, 7 aa, synthetic construct
  REGION 1..7: note = Description of Artificial Sequence: Synthetic peptide
  REGION 1..7: note = TIM3-0433[TIM-3] vhCDR1
TSGMSVG

SEQ ID NO: 4667 - protein, 16 aa, synthetic construct
  REGION 1..16: note = Description of Artificial Sequence: Synthetic peptide
  REGION 1..16: note = TIM3-0433[TIM-3] vhCDR2
HIWLNDDVFFNPALKS

SEQ ID NO: 4668 - protein, 10 aa, synthetic construct
  REGION 1..10: note = Description of Artificial Sequence: Synthetic peptide
  REGION 1..10: note = TIM3-0433[TIM-3] vhCDR3
ANGYLYALDY

SEQ ID NO: 4669 - protein, 106 aa, synthetic construct
  REGION 1..106: note = Description of Artificial Sequence: Synthetic polypeptide
  REGION 1..106: note = TIM3-0433[TIM-3] variable light Chain
ETTLTQSPAFMSATPGDKVNIACSASSSVSYTQWYQQKPGEAPKLWIYDAFKLAPGIPPRFSGSGYGTDFTLTINNIESEDAAYYFCHQWSSYPWTFGQGTKLEIK

SEQ ID NO: 4670 - protein, 10 aa, synthetic construct
  REGION 1..10: note = Description of Artificial Sequence: Synthetic peptide
  REGION 1..10: note = TIM3-0433[TIM-3] vlCDR1
SASSSVSYTQ

SEQ ID NO: 4671 - protein, 7 aa, synthetic construct
  REGION 1..7: note = Description of Artificial Sequence: Synthetic peptide
  REGION 1..7: note = TIM3-0433[TIM-3] vlCDR2
DAFKLAP

SEQ ID NO: 4672 - protein, 9 aa, synthetic construct
  REGION 1..9: note = Description of Artificial Sequence: Synthetic peptide
  REGION 1..9: note = TIM3-0433[TIM-3] vlCDR3
HQWSSYPWT

SEQ ID NO: 4673 - protein, 120 aa, synthetic construct; identical to SEQ ID NO: 4665
  REGION 1..120: note = Description of Artificial Sequence: Synthetic polypeptide
  REGION 1..120: note = TIM3-0434[TIM-3] variable heavy Chain

SEQ ID NO: 4674 - protein, 7 aa, synthetic construct
  REGION 1..7: note = Description of Artificial Sequence: Synthetic peptide
  REGION 1..7: note = TIM3-0434[TIM-3] vhCDR1
TSGMSVG

SEQ ID NO: 4675 - protein, 16 aa, synthetic construct
  REGION 1..16: note = Description of Artificial Sequence: Synthetic peptide
  REGION 1..16: note = TIM3-0434[TIM-3] vhCDR2
HIWLNDDVFFNPALKS

SEQ ID NO: 4676 - protein, 10 aa, synthetic construct
  REGION 1..10: note = Description of Artificial Sequence: Synthetic peptide
  REGION 1..10: note = TIM3-0434[TIM-3] vhCDR3
ANGYLYALDY

SEQ ID NO: 4677 - protein, 106 aa, synthetic construct
  REGION 1..106: note = Description of Artificial Sequence: Synthetic polypeptide
  REGION 1..106: note = TIM3-0434[TIM-3] variable light Chain
DIQLTQSPSFLSASVGDRVTITCSASSSVSYTQWYQQKPGKAPKLWIYDAFKLAPGVPSRFSGSGSGTEFTLTISSLQPEDFATYFCHQWSSYPWTFGQGTKLEIK

SEQ ID NO: 4678 - protein, 10 aa, synthetic construct
  REGION 1..10: note = Description of Artificial Sequence: Synthetic peptide
  REGION 1..10: note = TIM3-0434[TIM-3] vlCDR1
SASSSVSYTQ

SEQ ID NO: 4679 - protein, 7 aa, synthetic construct
  REGION 1..7: note = Description of Artificial Sequence: Synthetic peptide
  REGION 1..7: note = TIM3-0434[TIM-3] vlCDR2
DAFKLAP

SEQ ID NO: 4680 - protein, 9 aa, synthetic construct
  REGION 1..9: note = Description of Artificial Sequence: Synthetic peptide
  REGION 1..9: note = TIM3-0434[TIM-3] vlCDR3
HQWSSYPWT

SEQ ID NO: 4681 - protein, 119 aa, synthetic construct
  REGION 1..119: note = Description of Artificial Sequence: Synthetic polypeptide
  REGION 1..119: note = TIM3-0438[TIM-3] variable heavy Chain
EVQLVESGGGLVQPGGSLRLSCAASGFNIKTTYMHWVRQAPGKGLEWVGRIDPADDNTKYAPKFQGKATISADTSKNTAYLQMNSLRAEDTAVYYCVRDFGYVAWFAYWGQGTLVTVSS

SEQ ID NO: 4682 - protein, 5 aa, synthetic construct
  REGION 1..5: note = Description of Artificial Sequence: Synthetic peptide
  REGION 1..5: note = TIM3-0438[TIM-3] vhCDR1
TTYMH

SEQ ID NO: 4683 - protein, 17 aa, synthetic construct
  REGION 1..17: note = Description of Artificial Sequence: Synthetic peptide
  REGION 1..17: note = TIM3-0438[TIM-3] vhCDR2
RIDPADDNTKYAPKFQG

SEQ ID NO: 4684 - protein, 10 aa, synthetic construct
  REGION 1..10: note = Description of Artificial Sequence: Synthetic peptide
  REGION 1..10: note = TIM3-0438[TIM-3] vhCDR3
DFGYVAWFAY

SEQ ID NO: 4685 - protein, 107 aa, synthetic construct
  REGION 1..107: note = Description of Artificial Sequence: Synthetic polypeptide
  REGION 1..107: note = TIM3-0438[TIM-3] variable light Chain
DIVMTQSPLSLPVTPGEPASISCRASQSVDNYVAWYLQKPGQSPQLLIYYASNRYIGVPDRFSGSGSGTDFTLKISRVEAEDVGVYYCQQHYSSPYTFGQGTKVEIK

SEQ ID NO: 4686 - protein, 11 aa, synthetic construct
  REGION 1..11: note = Description of Artificial Sequence: Synthetic peptide
  REGION 1..11: note = TIM3-0438[TIM-3] vlCDR1
RASQSVDNYVA

SEQ ID NO: 4687 - protein, 7 aa, synthetic construct
  REGION 1..7: note = Description of Artificial Sequence: Synthetic peptide
  REGION 1..7: note = TIM3-0438[TIM-3] vlCDR2
YASNRYI

SEQ ID NO: 4688 - protein, 9 aa, synthetic construct
  REGION 1..9: note = Description of Artificial Sequence: Synthetic peptide
  REGION 1..9: note = TIM3-0438[TIM-3] vlCDR3
QQHYSSPYT

SEQ ID NO: 4689 - protein, 119 aa, synthetic construct
  REGION 1..119: note = Description of Artificial Sequence: Synthetic polypeptide
  REGION 1..119: note = TIM3-0443[TIM-3] variable heavy Chain
EVQLVESGGGLVQPGGSLRLSCAASGFNIKTTYMHWVRQAPGKGLEWVGRIDPADDNTKYAPKFQGKATISADTSKNTAYLQMNSLRAEDTAVYYCVRDFGYVAWFAYWGQGTLVTFSS

SEQ ID NO: 4690 - protein, 5 aa, synthetic construct
  REGION 1..5: note = Description of Artificial Sequence: Synthetic peptide
  REGION 1..5: note = TIM3-0443[TIM-3] vhCDR1
TTYMH

SEQ ID NO: 4691 - protein, 17 aa, synthetic construct
  REGION 1..17: note = Description of Artificial Sequence: Synthetic peptide
  REGION 1..17: note = TIM3-0443[TIM-3] vhCDR2
RIDPADDNTKYAPKFQG

SEQ ID NO: 4692 - protein, 10 aa, synthetic construct
  REGION 1..10: note = Description of Artificial Sequence: Synthetic peptide
  REGION 1..10: note = TIM3-0443[TIM-3] vhCDR3
DFGYVAWFAY

SEQ ID NO: 4693 - protein, 107 aa, synthetic construct; identical to SEQ ID NO: 4685
  REGION 1..107: note = Description of Artificial Sequence: Synthetic polypeptide
  REGION 1..107: note = TIM3-0443[TIM-3] variable light Chain

SEQ ID NO: 4694 - protein, 11 aa, synthetic construct
  REGION 1..11: note = Description of Artificial Sequence: Synthetic peptide
  REGION 1..11: note = TIM3-0443[TIM-3] vlCDR1
RASQSVDNYVA

SEQ ID NO: 4695 - protein, 7 aa, synthetic construct
  REGION 1..7: note = Description of Artificial Sequence: Synthetic peptide
  REGION 1..7: note = TIM3-0443[TIM-3] vlCDR2
YASNRYI

SEQ ID NO: 4696 - protein, 9 aa, synthetic construct
  REGION 1..9: note = Description of Artificial Sequence: Synthetic peptide
  REGION 1..9: note = TIM3-0443[TIM-3] vlCDR3
QQHYSSPYT

SEQ ID NO: 4697 - protein, 246 aa, synthetic construct
  REGION 1..246: note = Description of Artificial Sequence: Synthetic polypeptide
  REGION 1..246: note = XENP019533 [CTLA-4]_H0_L0_scFv(GKPGS)4
QVQLVESGGGVVQPGRSLRLSCAASGFTFSSYTMHWVRQAPGKGLEWVTFISYDGNNKYYADSVKGRFTISRDNSKNTLYLQMNSLRAEDTAIYYCARTGWLGPFDYWGQGTLVTVSSGKPGSGKPGSGKPGSGKPGSEIVLTQSPGTLSLSPGERATLSCRASQSVGSSYLAWYQQKPGQAPRLLIYGAFSRATGIPDRFSGSGSGTDFTLTISRLEPEDFAVYYCQQYGSSPWTFGQGTKVEIK

SEQ ID NO: 4698 - protein, 118 aa, synthetic construct; identical to SEQ ID NO: 3737
  REGION 1..118: note = Description of Artificial Sequence: Synthetic polypeptide
  REGION 1..118: note = VH of XENP019533

SEQ ID NO: 4699 - protein, 108 aa, synthetic construct; identical to SEQ ID NO: 3741
  REGION 1..108: note = Description of Artificial Sequence: Synthetic polypeptide
  REGION 1..108: note = VL of XENP019533

SEQ ID NO: 4700 - protein, 5 aa, synthetic construct
  REGION 1..5: note = Description of Artificial Sequence: Synthetic peptide
  REGION 1..5: note = XENP019533 vhCDR1
SYTMH

SEQ ID NO: 4701 - protein, 17 aa, synthetic construct
  REGION 1..17: note = Description of Artificial Sequence: Synthetic peptide
  REGION 1..17: note = XENP019533 vhCDR2
FISYDGNNKYYADSVKG

SEQ ID NO: 4702 - protein, 9 aa, synthetic construct
  REGION 1..9: note = Description of Artificial Sequence: Synthetic peptide
  REGION 1..9: note = XENP019533 vhCDR3
TGWLGPFDY

SEQ ID NO: 4703 - protein, 12 aa, synthetic construct
  REGION 1..12: note = Description of Artificial Sequence: Synthetic peptide
  REGION 1..12: note = XENP019533 vlCDR1
RASQSVGSSYLA

SEQ ID NO: 4704 - protein, 7 aa, synthetic construct
  REGION 1..7: note = Description of Artificial Sequence: Synthetic peptide
  REGION 1..7: note = XENP019533 vlCDR2
GAFSRAT

SEQ ID NO: 4705 - protein, 9 aa, synthetic construct
  REGION 1..9: note = Description of Artificial Sequence: Synthetic peptide
  REGION 1..9: note = XENP019533 vlCDR3
QQYGSSPWT

SEQ ID NO: 4706 - protein, 246 aa, synthetic construct
  REGION 1..246: note = Description of Artificial Sequence: Synthetic polypeptide
  REGION 1..246: note = XENP019534 [CTLA-4]_H0.36_L0.50_scFv(GKPGS)4
QVQLVESGGGVVQPGRSLRLSCAASGFTFSSYTMHWVRKAPGKGLEWVTFISYDGNNKYYADSVKGRFTISRDNSKNTLYLQMNSLRAEDTAIYYCARTGWLGPFDYWGQGTLVTVSSGKPGSGKPGSGKPGSGKPGSEIVLTQSPGTLSLSPGERATLSCRASQSVGSSYLAWYQEKPGQAPRLLIYGAFSRATGIPDRFSGSGSGTDFTLTISRLEPEDFAVYYCQQYGSSPWTFGQGTKVEIK

SEQ ID NO: 4707 - protein, 118 aa, synthetic construct
  REGION 1..118: note = Description of Artificial Sequence: Synthetic polypeptide
  REGION 1..118: note = VH of XENP019534
QVQLVESGGGVVQPGRSLRLSCAASGFTFSSYTMHWVRKAPGKGLEWVTFISYDGNNKYYADSVKGRFTISRDNSKNTLYLQMNSLRAEDTAIYYCARTGWLGPFDYWGQGTLVTVSS

SEQ ID NO: 4708 - protein, 108 aa, synthetic construct
  REGION 1..108: note = Description of Artificial Sequence: Synthetic polypeptide
  REGION 1..108: note = VL of XENP019534
EIVLTQSPGTLSLSPGERATLSCRASQSVGSSYLAWYQEKPGQAPRLLIYGAFSRATGIPDRFSGSGSGTDFTLTISRLEPEDFAVYYCQQYGSSPWTFGQGTKVEIK

SEQ ID NO: 4709 - protein, 5 aa, synthetic construct
  REGION 1..5: note = Description of Artificial Sequence: Synthetic peptide
  REGION 1..5: note = XENP019534 vhCDR1
SYTMH

SEQ ID NO: 4710 - protein, 17 aa, synthetic construct
  REGION 1..17: note = Description of Artificial Sequence: Synthetic peptide
  REGION 1..17: note = XENP019534 vhCDR2
FISYDGNNKYYADSVKG

SEQ ID NO: 4711 - protein, 9 aa, synthetic construct
  REGION 1..9: note = Description of Artificial Sequence: Synthetic peptide
  REGION 1..9: note = XENP019534 vhCDR3
TGWLGPFDY

SEQ ID NO: 4712 - protein, 12 aa, synthetic construct
  REGION 1..12: note = Description of Artificial Sequence: Synthetic peptide
  REGION 1..12: note = XENP019534 vlCDR1
RASQSVGSSYLA

SEQ ID NO: 4713 - protein, 7 aa, synthetic construct
  REGION 1..7: note = Description of Artificial Sequence: Synthetic peptide
  REGION 1..7: note = XENP019534 vlCDR2
GAFSRAT

SEQ ID NO: 4714 - protein, 9 aa, synthetic construct
  REGION 1..9: note = Description of Artificial Sequence: Synthetic peptide
  REGION 1..9: note = XENP019534 vlCDR3
QQYGSSPWT

SEQ ID NO: 4715 - protein, 246 aa, synthetic construct
  REGION 1..246: note = Description of Artificial Sequence: Synthetic polypeptide
  REGION 1..246: note = XENP019535 [CTLA-4]_H0.36_L0.51_scFv(GKPGS)4
QVQLVESGGGVVQPGRSLRLSCAASGFTFSSYTMHWVRKAPGKGLEWVTFISYDGNNKYYADSVKGRFTISRDNSKNTLYLQMNSLRAEDTAIYYCARTGWLGPFDYWGQGTLVTVSSGKPGSGKPGSGKPGSGKPGSEIVLTQSPGTLSLSPGERATLSCRASQSVGSSYLAWYQQKPDQAPRLLIYGAFSRATGIPDRFSGSGSGTDFTLTISRLEPEDFAVYYCQQYGSSPWTFGQGTKVEIK

SEQ ID NO: 4716 - protein, 118 aa, synthetic construct; identical to SEQ ID NO: 4707
  REGION 1..118: note = Description of Artificial Sequence: Synthetic polypeptide
  REGION 1..118: note = VH of XENP019535

SEQ ID NO: 4717 - protein, 108 aa, synthetic construct
  REGION 1..108: note = Description of Artificial Sequence: Synthetic polypeptide
  REGION 1..108: note = VL of XENP019535
EIVLTQSPGTLSLSPGERATLSCRASQSVGSSYLAWYQQKPDQAPRLLIYGAFSRATGIPDRFSGSGSGTDFTLTISRLEPEDFAVYYCQQYGSSPWTFGQGTKVEIK

SEQ ID NO: 4718 - protein, 5 aa, synthetic construct
  REGION 1..5: note = Description of Artificial Sequence: Synthetic peptide
  REGION 1..5: note = XENP019535 vhCDR1
SYTMH

SEQ ID NO: 4719 - protein, 17 aa, synthetic construct
  REGION 1..17: note = Description of Artificial Sequence: Synthetic peptide
  REGION 1..17: note = XENP019535 vhCDR2
FISYDGNNKYYADSVKG

SEQ ID NO: 4720 - protein, 9 aa, synthetic construct
  REGION 1..9: note = Description of Artificial Sequence: Synthetic peptide
  REGION 1..9: note = XENP019535 vhCDR3
TGWLGPFDY

SEQ ID NO: 4721 - protein, 12 aa, synthetic construct
  REGION 1..12: note = Description of Artificial Sequence: Synthetic peptide
  REGION 1..12: note = XENP019535 vlCDR1
RASQSVGSSYLA

SEQ ID NO: 4722 - protein, 7 aa, synthetic construct
  REGION 1..7: note = Description of Artificial Sequence: Synthetic peptide
  REGION 1..7: note = XENP019535 vlCDR2
GAFSRAT

SEQ ID NO: 4723 - protein, 9 aa, synthetic construct
  REGION 1..9: note = Description of Artificial Sequence: Synthetic peptide
  REGION 1..9: note = XENP019535 vlCDR3
QQYGSSPWT

SEQ ID NO: 4724 - protein, 246 aa, synthetic construct
  REGION 1..246: note = Description of Artificial Sequence: Synthetic polypeptide
  REGION 1..246: note = XENP019536 [CTLA-4]_H0.37_L0.50_scFv(GKPGS)4
QVQLVESGGGVVQPGRSLRLSCAASGFTFSSYTMHWVRQAPGKRLEWVTFISYDGNNKYYADSVKGRFTISRDNSKNTLYLQMNSLRAEDTAIYYCARTGWLGPFDYWGQGTLVTVSSGKPGSGKPGSGKPGSGKPGSEIVLTQSPGTLSLSPGERATLSCRASQSVGSSYLAWYQEKPGQAPRLLIYGAFSRATGIPDRFSGSGSGTDFTLTISRLEPEDFAVYYCQQYGSSPWTFGQGTKVEIK

SEQ ID NO: 4725 - protein, 118 aa, synthetic construct
  REGION 1..118: note = Description of Artificial Sequence: Synthetic polypeptide
  REGION 1..118: note = VH of XENP019536
QVQLVESGGGVVQPGRSLRLSCAASGFTFSSYTMHWVRQAPGKRLEWVTFISYDGNNKYYADSVKGRFTISRDNSKNTLYLQMNSLRAEDTAIYYCARTGWLGPFDYWGQGTLVTVSS

SEQ ID NO: 4726 - protein, 108 aa, synthetic construct; identical to SEQ ID NO: 4708
  REGION 1..108: note = Description of Artificial Sequence: Synthetic polypeptide
  REGION 1..108: note = VL of XENP019536

SEQ ID NO: 4727 - protein, 5 aa, synthetic construct
  REGION 1..5: note = Description of Artificial Sequence: Synthetic peptide
  REGION 1..5: note = XENP019536 vhCDR1
SYTMH

SEQ ID NO: 4728 - protein, 17 aa, synthetic construct
  REGION 1..17: note = Description of Artificial Sequence: Synthetic peptide
  REGION 1..17: note = XENP019536 vhCDR2
FISYDGNNKYYADSVKG

SEQ ID NO: 4729 - protein, 9 aa, synthetic construct
  REGION 1..9: note = Description of Artificial Sequence: Synthetic peptide
  REGION 1..9: note = XENP019536 vhCDR3
TGWLGPFDY

SEQ ID NO: 4730 - protein, 12 aa, synthetic construct
  REGION 1..12: note = Description of Artificial Sequence: Synthetic peptide
  REGION 1..12: note = XENP019536 vlCDR1
RASQSVGSSYLA

SEQ ID NO: 4731 - protein, 7 aa, synthetic construct
  REGION 1..7: note = Description of Artificial Sequence: Synthetic peptide
  REGION 1..7: note = XENP019536 vlCDR2
GAFSRAT

SEQ ID NO: 4732 - protein, 9 aa, synthetic construct
  REGION 1..9: note = Description of Artificial Sequence: Synthetic peptide
  REGION 1..9: note = XENP019536 vlCDR3
QQYGSSPWT

SEQ ID NO: 4733 - protein, 246 aa, synthetic construct
  REGION 1..246: note = Description of Artificial Sequence: Synthetic polypeptide
  REGION 1..246: note = XENP019537 [CTLA-4]_H0.37_L0.113_scFv(GKPGS)4
QVQLVESGGGVVQPGRSLRLSCAASGFTFSSYTMHWVRQAPGKRLEWVTFISYDGNNKYYADSVKGRFTISRDNSKNTLYLQMNSLRAEDTAIYYCARTGWLGPFDYWGQGTLVTVSSGKPGSGKPGSGKPGSGKPGSEIVLTQSPGTLSLSPGERATLSCRASQSVGSSYLAWYQQKPGQAPRLLIYGAFSRATGIPDRFSGSGSGTDFTLTISRLEPEDFAVYYCQQYGSSPWTFGEGTKVEIK

SEQ ID NO: 4734 - protein, 118 aa, synthetic construct; identical to SEQ ID NO: 4725
  REGION 1..118: note = Description of Artificial Sequence: Synthetic polypeptide
  REGION 1..118: note = VH of XENP019537

SEQ ID NO: 4735 - protein, 108 aa, synthetic construct
  REGION 1..108: note = Description of Artificial Sequence: Synthetic polypeptide
  REGION 1..108: note = VL of XENP019537
EIVLTQSPGTLSLSPGERATLSCRASQSVGSSYLAWYQQKPGQAPRLLIYGAFSRATGIPDRFSGSGSGTDFTLTISRLEPEDFAVYYCQQYGSSPWTFGEGTKVEIK

SEQ ID NO: 4736 - protein, 5 aa, synthetic construct
  REGION 1..5: note = Description of Artificial Sequence: Synthetic peptide
  REGION 1..5: note = XENP019537 vhCDR1
SYTMH

SEQ ID NO: 4737 - protein, 17 aa, synthetic construct
  REGION 1..17: note = Description of Artificial Sequence: Synthetic peptide
  REGION 1..17: note = XENP019537 vhCDR2
FISYDGNNKYYADSVKG

SEQ ID NO: 4738 - protein, 9 aa, synthetic construct
  REGION 1..9: note = Description of Artificial Sequence: Synthetic peptide
  REGION 1..9: note = XENP019537 vhCDR3
TGWLGPFDY

SEQ ID NO: 4739 - protein, 12 aa, synthetic construct
  REGION 1..12: note = Description of Artificial Sequence: Synthetic peptide
  REGION 1..12: note = XENP019537 vlCDR1
RASQSVGSSYLA

SEQ ID NO: 4740 - protein, 7 aa, synthetic construct
  REGION 1..7: note = Description of Artificial Sequence: Synthetic peptide
  REGION 1..7: note = XENP019537 vlCDR2
GAFSRAT

SEQ ID NO: 4741 - protein, 9 aa, synthetic construct
  REGION 1..9: note = Description of Artificial Sequence: Synthetic peptide
  REGION 1..9: note = XENP019537 vlCDR3
QQYGSSPWT

SEQ ID NO: 4742 - protein, 246 aa, synthetic construct
  REGION 1..246: note = Description of Artificial Sequence: Synthetic polypeptide
  REGION 1..246: note = XENP019538 [CTLA-4]_H0.134_L0.51_scFv(GKPGS)4
QVQLVESGGGVVQPGRSLRLSCAASGFTFSSYTMHWVRQAPGKGLEWVTFISYDGNNKYYADSVKGRFTISRDNSKNTLYLQMNSLRAEDTAIYYCARTGWLGPFDYWGRGTLVTVSSGKPGSGKPGSGKPGSGKPGSEIVLTQSPGTLSLSPGERATLSCRASQSVGSSYLAWYQQKPDQAPRLLIYGAFSRATGIPDRFSGSGSGTDFTLTISRLEPEDFAVYYCQQYGSSPWTFGQGTKVEIK

SEQ ID NO: 4743 - protein, 118 aa, synthetic construct
  REGION 1..118: note = Description of Artificial Sequence: Synthetic polypeptide
  REGION 1..118: note = VH of XENP019538
QVQLVESGGGVVQPGRSLRLSCAASGFTFSSYTMHWVRQAPGKGLEWVTFISYDGNNKYYADSVKGRFTISRDNSKNTLYLQMNSLRAEDTAIYYCARTGWLGPFDYWGRGTLVTVSS

SEQ ID NO: 4744 - protein, 108 aa, synthetic construct; identical to SEQ ID NO: 4717
  REGION 1..108: note = Description of Artificial Sequence: Synthetic polypeptide
  REGION 1..108: note = VL of XENP019538

SEQ ID NO: 4745 - protein, 5 aa, synthetic construct
  REGION 1..5: note = Description of Artificial Sequence: Synthetic peptide
  REGION 1..5: note = XENP019538 vhCDR1
SYTMH

SEQ ID NO: 4746 - protein, 17 aa, synthetic construct
  REGION 1..17: note = Description of Artificial Sequence: Synthetic peptide
  REGION 1..17: note = XENP019538 vhCDR2
FISYDGNNKYYADSVKG

SEQ ID NO: 4747 - protein, 9 aa, synthetic construct
  REGION 1..9: note = Description of Artificial Sequence: Synthetic peptide
  REGION 1..9: note = XENP019538 vhCDR3
TGWLGPFDY

SEQ ID NO: 4748 - protein, 12 aa, synthetic construct
  REGION 1..12: note = Description of Artificial Sequence: Synthetic peptide
  REGION 1..12: note = XENP019538 vlCDR1
RASQSVGSSYLA

SEQ ID NO: 4749 - protein, 7 aa, synthetic construct
  REGION 1..7: note = Description of Artificial Sequence: Synthetic peptide
  REGION 1..7: note = XENP019538 vlCDR2
GAFSRAT

SEQ ID NO: 4750 - protein, 9 aa, synthetic construct
  REGION 1..9: note = Description of Artificial Sequence: Synthetic peptide
  REGION 1..9: note = XENP019538 vlCDR3
QQYGSSPWT

SEQ ID NO: 4751 - protein, 246 aa, synthetic construct
  REGION 1..246: note = Description of Artificial Sequence: Synthetic polypeptide
  REGION 1..246: note = XENP019539 [CTLA-4]_H0.134_L0.53_scFv(GKPGS)4
QVQLVESGGGVVQPGRSLRLSCAASGFTFSSYTMHWVRQAPGKGLEWVTFISYDGNNKYYADSVKGRFTISRDNSKNTLYLQMNSLRAEDTAIYYCARTGWLGPFDYWGRGTLVTVSSGKPGSGKPGSGKPGSGKPGSEIVLTQSPGTLSLSPGERATLSCRASQSVGSSYLAWYQQKPGEAPRLLIYGAFSRATGIPDRFSGSGSGTDFTLTISRLEPEDFAVYYCQQYGSSPWTFGQGTKVEIK

SEQ ID NO: 4752 - protein, 118 aa, synthetic construct; identical to SEQ ID NO: 4743
  REGION 1..118: note = Description of Artificial Sequence: Synthetic polypeptide
  REGION 1..118: note = VH of XENP019539

SEQ ID NO: 4753 - protein, 108 aa, synthetic construct
  REGION 1..108: note = Description of Artificial Sequence: Synthetic polypeptide
  REGION 1..108: note = VL of XENP019539
EIVLTQSPGTLSLSPGERATLSCRASQSVGSSYLAWYQQKPGEAPRLLIYGAFSRATGIPDRFSGSGSGTDFTLTISRLEPEDFAVYYCQQYGSSPWTFGQGTKVEIK

SEQ ID NO: 4754 - protein, 5 aa, synthetic construct
  REGION 1..5: note = Description of Artificial Sequence: Synthetic peptide
  REGION 1..5: note = XENP019539 vhCDR1
SYTMH

SEQ ID NO: 4755 - protein, 17 aa, synthetic construct
  REGION 1..17: note = Description of Artificial Sequence: Synthetic peptide
  REGION 1..17: note = XENP019539 vhCDR2
FISYDGNNKYYADSVKG

SEQ ID NO: 4756 - protein, 9 aa, synthetic construct
  REGION 1..9: note = Description of Artificial Sequence: Synthetic peptide
  REGION 1..9: note = XENP019539 vhCDR3
TGWLGPFDY

SEQ ID NO: 4757 - protein, 12 aa, synthetic construct
  REGION 1..12: note = Description of Artificial Sequence: Synthetic peptide
  REGION 1..12: note = XENP019539 vlCDR1
RASQSVGSSYLA

SEQ ID NO: 4758 - protein, 7 aa, synthetic construct
  REGION 1..7: note = Description of Artificial Sequence: Synthetic peptide
  REGION 1..7: note = XENP019539 vlCDR2
GAFSRAT

SEQ ID NO: 4759 - protein, 9 aa, synthetic construct
  REGION 1..9: note = Description of Artificial Sequence: Synthetic peptide
  REGION 1..9: note = XENP019539 vlCDR3
QQYGSSPWT

SEQ ID NO: 4760 - protein, 246 aa, synthetic construct
  REGION 1..246: note = Description of Artificial Sequence: Synthetic polypeptide
  REGION 1..246: note = XENP019540 [CTLA-4]_H0.134_L0.57_scFv(GKPGS)4
QVQLVESGGGVVQPGRSLRLSCAASGFTFSSYTMHWVRQAPGKGLEWVTFISYDGNNKYYADSVKGRFTISRDNSKNTLYLQMNSLRAEDTAIYYCARTGWLGPFDYWGRGTLVTVSSGKPGSGKPGSGKPGSGKPGSEIVLTQSPGTLSLSPGERATLSCRASQSVGSSYLAWYQQKPGQAPELLIYGAFSRATGIPDRFSGSGSGTDFTLTISRLEPEDFAVYYCQQYGSSPWTFGQGTKVEIK

SEQ ID NO: 4761 - protein, 118 aa, synthetic construct; identical to SEQ ID NO: 4743
  REGION 1..118: note = Description of Artificial Sequence: Synthetic polypeptide
  REGION 1..118: note = VH of XENP019540

SEQ ID NO: 4762 - protein, 108 aa, synthetic construct
  REGION 1..108: note = Description of Artificial Sequence: Synthetic polypeptide
  REGION 1..108: note = VL of XENP019540
EIVLTQSPGTLSLSPGERATLSCRASQSVGSSYLAWYQQKPGQAPELLIYGAFSRATGIPDRFSGSGSGTDFTLTISRLEPEDFAVYYCQQYGSSPWTFGQGTKVEIK

SEQ ID NO: 4763 - protein, 5 aa, synthetic construct
  REGION 1..5: note = Description of Artificial Sequence: Synthetic peptide
  REGION 1..5: note = XENP019540 vhCDR1
SYTMH

SEQ ID NO: 4764 - protein, 17 aa, synthetic construct
  REGION 1..17: note = Description of Artificial Sequence: Synthetic peptide
  REGION 1..17: note = XENP019540 vhCDR2
FISYDGNNKYYADSVKG

SEQ ID NO: 4765 - protein, 9 aa, synthetic construct
  REGION 1..9: note = Description of Artificial Sequence: Synthetic peptide
  REGION 1..9: note = XENP019540 vhCDR3
TGWLGPFDY

SEQ ID NO: 4766 - protein, 12 aa, synthetic construct
  REGION 1..12: note = Description of Artificial Sequence: Synthetic peptide
  REGION 1..12: note = XENP019540 vlCDR1
RASQSVGSSYLA

SEQ ID NO: 4767 - protein, 7 aa, synthetic construct
  REGION 1..7: note = Description of Artificial Sequence: Synthetic peptide
  REGION 1..7: note = XENP019540 vlCDR2
GAFSRAT

SEQ ID NO: 4768 - protein, 9 aa, synthetic construct
  REGION 1..9: note = Description of Artificial Sequence: Synthetic peptide
  REGION 1..9: note = XENP019540 vlCDR3
QQYGSSPWT

SEQ ID NO: 4769 - protein, 246 aa, synthetic construct
  REGION 1..246: note = Description of Artificial Sequence: Synthetic polypeptide
  REGION 1..246: note = XENP019541 [CTLA-4]_H0.137_L0.114_scFv(GKPGS)4
QVQLVESGGGVVQPGRSLRLSCAASGFTFSSYTMHWVRQAPGKCLEWVTFISYDGNNKYYADSVKGRFTISRDNSKNTLYLQMNSLRAEDTAIYYCARTGWLGPFDYWGQGTLVTVSSGKPGSGKPGSGKPGSGKPGSEIVLTQSPGTLSLSPGERATLSCRASQSVGSSYLAWYQQKPGQAPRLLIYGAFSRATGIPDRFSGSGSGTDFTLTISRLEPEDFAVYYCQQYGSSPWTFGCGTKVEIK

SEQ ID NO: 4770 - protein, 118 aa, synthetic construct
  REGION 1..118: note = Description of Artificial Sequence: Synthetic polypeptide
  REGION 1..118: note = VH of XENP019541
QVQLVESGGGVVQPGRSLRLSCAASGFTFSSYTMHWVRQAPGKCLEWVTFISYDGNNKYYADSVKGRFTISRDNSKNTLYLQMNSLRAEDTAIYYCARTGWLGPFDYWGQGTLVTVSS

SEQ ID NO: 4771 - protein, 108 aa, synthetic construct
  REGION 1..108: note = Description of Artificial Sequence: Synthetic polypeptide
  REGION 1..108: note = VL of XENP019541
EIVLTQSPGTLSLSPGERATLSCRASQSVGSSYLAWYQQKPGQAPRLLIYGAFSRATGIPDRFSGSGSGTDFTLTISRLEPEDFAVYYCQQYGSSPWTFGCGTKVEIK

SEQ ID NO: 4772 - protein, 5 aa, synthetic construct
  REGION 1..5: note = Description of Artificial Sequence: Synthetic peptide
  REGION 1..5: note = XENP019541 vhCDR1
SYTMH

SEQ ID NO: 4773 - protein, 17 aa, synthetic construct
  REGION 1..17: note = Description of Artificial Sequence: Synthetic peptide
  REGION 1..17: note = XENP019541 vhCDR2
FISYDGNNKYYADSVKG

SEQ ID NO: 4774 - protein, 9 aa, synthetic construct
  REGION 1..9: note = Description of Artificial Sequence: Synthetic peptide
  REGION 1..9: note = XENP019541 vhCDR3
TGWLGPFDY

SEQ ID NO: 4775 - protein, 12 aa, synthetic construct
  REGION 1..12: note = Description of Artificial Sequence: Synthetic peptide
  REGION 1..12: note = XENP019541 vlCDR1
RASQSVGSSYLA

SEQ ID NO: 4776 - protein, 7 aa, synthetic construct
  REGION 1..7: note = Description of Artificial Sequence: Synthetic peptide
  REGION 1..7: note = XENP019541 vlCDR2
GAFSRAT

SEQ ID NO: 4777 - protein, 9 aa, synthetic construct
  REGION 1..9: note = Description of Artificial Sequence: Synthetic peptide
  REGION 1..9: note = XENP019541 vlCDR3
QQYGSSPWT

SEQ ID NO: 4778 - protein, 246 aa, synthetic construct
  REGION 1..246: note = Description of Artificial Sequence: Synthetic polypeptide
  REGION 1..246: note = XENP019542 [CTLA-4]_H0.138_L0.115_scFv(GKPGS)4
QVQLVESGGGVVQPGRSLRLSCAASGFTFSSYTMHWVRQAPGKGLEWVTFISYDGNNKYYADSVKGRFTISRDNSKNTLYLQMNSLRAEDTAIYYCARTGWLGPFDYWGCGTLVTVSSGKPGSGKPGSGKPGSGKPGSEIVLTQSPGTLSLSPGERATLSCRASQSVGSSYLAWYQQKPCQAPRLLIYGAFSRATGIPDRFSGSGSGTDFTLTISRLEPEDFAVYYCQQYGSSPWTFGQGTKVEIK

SEQ ID NO: 4779 - protein, 118 aa, synthetic construct
  REGION 1..118: note = Description of Artificial Sequence: Synthetic polypeptide
  REGION 1..118: note = VH of XENP019542
QVQLVESGGGVVQPGRSLRLSCAASGFTFSSYTMHWVRQAPGKGLEWVTFISYDGNNKYYADSVKGRFTISRDNSKNTLYLQMNSLRAEDTAIYYCARTGWLGPFDYWGCGTLVTVSS

SEQ ID NO: 4780 - protein, 108 aa, synthetic construct
  REGION 1..108: note = Description of Artificial Sequence: Synthetic polypeptide
  REGION 1..108: note = VL of XENP019542
EIVLTQSPGTLSLSPGERATLSCRASQSVGSSYLAWYQQKPCQAPRLLIYGAFSRATGIPDRFSGSGSGTDFTLTISRLEPEDFAVYYCQQYGSSPWTFGQGTKVEIK

SEQ ID NO: 4781 - protein, 5 aa, synthetic construct
  REGION 1..5: note = Description of Artificial Sequence: Synthetic peptide
  REGION 1..5: note = XENP019542 vhCDR1
SYTMH

SEQ ID NO: 4782 - protein, 17 aa, synthetic construct
  REGION 1..17: note = Description of Artificial Sequence: Synthetic peptide
  REGION 1..17: note = XENP019542 vhCDR2
FISYDGNNKYYADSVKG

SEQ ID NO: 4783 - protein, 9 aa, synthetic construct
  REGION 1..9: note = Description of Artificial Sequence: Synthetic peptide
  REGION 1..9: note = XENP019542 vhCDR3
TGWLGPFDY

SEQ ID NO: 4784 - protein, 12 aa, synthetic construct
  REGION 1..12: note = Description of Artificial Sequence: Synthetic peptide
  REGION 1..12: note = XENP019542 vlCDR1
RASQSVGSSYLA

SEQ ID NO: 4785 - protein, 7 aa, synthetic construct
  REGION 1..7: note = Description of Artificial Sequence: Synthetic peptide
  REGION 1..7: note = XENP019542 vlCDR2
GAFSRAT

SEQ ID NO: 4786 - protein, 9 aa, synthetic construct
  REGION 1..9: note = Description of Artificial Sequence: Synthetic peptide
  REGION 1..9: note = XENP019542 vlCDR3
QQYGSSPWT

SEQ ID NO: 4787 - protein, 246 aa, synthetic construct
  REGION 1..246: note = Description of Artificial Sequence: Synthetic polypeptide
  REGION 1..246: note = XENP019543 [CTLA-4]_H0.139_L0.116_scFv(GKPGS)4
QVQLVESGGGVVQPGRSLRLSCAASGFTFSSYTMHWVRQAPGKGLEWVTFISYDGNNKYYADSVKGRFTISRDNSKNTLYLQMNSLRAEDTAIYYCARTGWLGPFDYWGCGTLVTVSSGKPGSGKPGSGKPGSGKPGSEIVLTQSPGTLSLSPGERATLSCRASQSVGSSYLAWYQQKPGCAPRLLIYGAFSRATGIPDRFSGSGSGTDFTLTISRLEPEDFAVYYCQQYGSSPWTFGQGTKVEIK

SEQ ID NO: 4788 - protein, 118 aa, synthetic construct; identical to SEQ ID NO: 4779
  REGION 1..118: note = Description of Artificial Sequence: Synthetic polypeptide
  REGION 1..118: note = VH of XENP019543

SEQ ID NO: 4789 - protein, 108 aa, synthetic construct
  REGION 1..108: note = Description of Artificial Sequence: Synthetic polypeptide
  REGION 1..108: note = VL of XENP019543
EIVLTQSPGTLSLSPGERATLSCRASQSVGSSYLAWYQQKPGCAPRLLIYGAFSRATGIPDRFSGSGSGTDFTLTISRLEPEDFAVYYCQQYGSSPWTFGQGTKVEIK

SEQ ID NO: 4790 - protein, 5 aa, synthetic construct
  REGION 1..5: note = Description of Artificial Sequence: Synthetic peptide
  REGION 1..5: note = XENP019543 vhCDR1
SYTMH

SEQ ID NO: 4791 - protein, 17 aa, synthetic construct
  REGION 1..17: note = Description of Artificial Sequence: Synthetic peptide
  REGION 1..17: note = XENP019543 vhCDR2
FISYDGNNKYYADSVKG

SEQ ID NO: 4792 - protein, 9 aa, synthetic construct
  REGION 1..9: note = Description of Artificial Sequence: Synthetic peptide
  REGION 1..9: note = XENP019543 vhCDR3
TGWLGPFDY

SEQ ID NO: 4793 - protein, 12 aa, synthetic construct
  REGION 1..12: note = Description of Artificial Sequence: Synthetic peptide
  REGION 1..12: note = XENP019543 vlCDR1
RASQSVGSSYLA

SEQ ID NO: 4794 - protein, 7 aa, synthetic construct
  REGION 1..7: note = Description of Artificial Sequence: Synthetic peptide
  REGION 1..7: note = XENP019543 vlCDR2
GAFSRAT

SEQ ID NO: 4795 - protein, 9 aa, synthetic construct
  REGION 1..9: note = Description of Artificial Sequence: Synthetic peptide
  REGION 1..9: note = XENP019543 vlCDR3
QQYGSSPWT

SEQ ID NO: 4796 - protein, 246 aa, synthetic construct
  REGION 1..246: note = Description of Artificial Sequence: Synthetic polypeptide
  REGION 1..246: note = XENP019551 [CTLA-4]_H1_L0_scFv(GKPGS)4
EVQLVESGGGLVQPGGSLRLSCAASGFTFSSYTMHWVRQAPGKGLEWVTFISYDGNNKYYVDSVKGRFTISRDNAKNSLYLQMNSLRAEDTAVYYCARTGWLGPFDYWGQGTLVTVSSGKPGSGKPGSGKPGSGKPGSEIVLTQSPGTLSLSPGERATLSCRASQSVGSSYLAWYQQKPGQAPRLLIYGAFSRATGIPDRFSGSGSGTDFTLTISRLEPEDFAVYYCQQYGSSPWTFGQGTKVEIK

SEQ ID NO: 4797 - protein, 118 aa, synthetic construct
  REGION 1..118: note = Description of Artificial Sequence: Synthetic polypeptide
  REGION 1..118: note = VH of XENP019551
EVQLVESGGGLVQPGGSLRLSCAASGFTFSSYTMHWVRQAPGKGLEWVTFISYDGNNKYYVDSVKGRFTISRDNAKNSLYLQMNSLRAEDTAVYYCARTGWLGPFDYWGQGTLVTVSS

SEQ ID NO: 4798 - protein, 108 aa, synthetic construct; identical to SEQ ID NO: 3741
  REGION 1..108: note = Description of Artificial Sequence: Synthetic polypeptide
  REGION 1..108: note = VL of XENP019551

SEQ ID NO: 4799 - protein, 5 aa, synthetic construct
  REGION 1..5: note = Description of Artificial Sequence: Synthetic peptide
  REGION 1..5: note = XENP019551 vhCDR1
SYTMH

SEQ ID NO: 4800 - protein, 17 aa, synthetic construct
  REGION 1..17: note = Description of Artificial Sequence: Synthetic peptide
  REGION 1..17: note = XENP019551 vhCDR2
FISYDGNNKYYVDSVKG

SEQ ID NO: 4801 - protein, 9 aa, synthetic construct
  REGION 1..9: note = Description of Artificial Sequence: Synthetic peptide
  REGION 1..9: note = XENP019551 vhCDR3
TGWLGPFDY

SEQ ID NO: 4802 - protein, 12 aa, synthetic construct
  REGION 1..12: note = Description of Artificial Sequence: Synthetic peptide
  REGION 1..12: note = XENP019551 vlCDR1
RASQSVGSSYLA

SEQ ID NO: 4803 - protein, 7 aa, synthetic construct
  REGION 1..7: note = Description of Artificial Sequence: Synthetic peptide
  REGION 1..7: note = XENP019551 vlCDR2
GAFSRAT

SEQ ID NO: 4804 - protein, 9 aa, synthetic construct
  REGION 1..9: note = Description of Artificial Sequence: Synthetic peptide
  REGION 1..9: note = XENP019551 vlCDR3
QQYGSSPWT

SEQ ID NO: 4805 - protein, 246 aa, synthetic construct
  REGION 1..246: note = Description of Artificial Sequence: Synthetic polypeptide
  REGION 1..246: note = XENP019552 [CTLA-4]_H2_L0_scFv(GKPGS)4
EVQLVESGGGLVQPGGSLRLSCAASGFTFSSYTMHWVRQAPGKGLEWVTFISYDGNNKYYPGSVKGRFTISRENAKNSLYLQMNSLRAGDTAVYYCARTGWLGPFDYWGQGTLVTVSSGKPGSGKPGSGKPGSGKPGSEIVLTQSPGTLSLSPGERATLSCRASQSVGSSYLAWYQQKPGQAPRLLIYGAFSRATGIPDRFSGSGSGTDFTLTISRLEPEDFAVYYCQQYGSSPWTFGQGTKVEIK

SEQ ID NO: 4806 - protein, 118 aa, synthetic construct
  REGION 1..118: note = Description of Artificial Sequence: Synthetic polypeptide
  REGION 1..118: note = VH of XENP019552
EVQLVESGGGLVQPGGSLRLSCAASGFTFSSYTMHWVRQAPGKGLEWVTFISYDGNNKYYPGSVKGRFTISRENAKNSLYLQMNSLRAGDTAVYYCARTGWLGPFDYWGQGTLVTVSS

SEQ ID NO: 4807 - protein, 108 aa, synthetic construct; identical to SEQ ID NO: 3741
  REGION 1..108: note = Description of Artificial Sequence: Synthetic polypeptide
  REGION 1..108: note = VL of XENP019552

SEQ ID NO: 4808 - protein, 5 aa, synthetic construct
  REGION 1..5: note = Description of Artificial Sequence: Synthetic peptide
  REGION 1..5: note = XENP019552 vhCDR1
SYTMH

SEQ ID NO: 4809 - protein, 17 aa, synthetic construct
  REGION 1..17: note = Description of Artificial Sequence: Synthetic peptide
  REGION 1..17: note = XENP019552 vhCDR2
FISYDGNNKYYPGSVKG

SEQ ID NO: 4810 - protein, 9 aa, synthetic construct
  REGION 1..9: note = Description of Artificial Sequence: Synthetic peptide
  REGION 1..9: note = XENP019552 vhCDR3
TGWLGPFDY

SEQ ID NO: 4811 - protein, 12 aa, synthetic construct
  REGION 1..12: note = Description of Artificial Sequence: Synthetic peptide
  REGION 1..12: note = XENP019552 vlCDR1
RASQSVGSSYLA

SEQ ID NO: 4812 - protein, 7 aa, synthetic construct
  REGION 1..7: note = Description of Artificial Sequence: Synthetic peptide
  REGION 1..7: note = XENP019552 vlCDR2
GAFSRAT

SEQ ID NO: 4813 - protein, 9 aa, synthetic construct
  REGION 1..9: note = Description of Artificial Sequence: Synthetic peptide
  REGION 1..9: note = XENP019552 vlCDR3
QQYGSSPWT

SEQ ID NO: 4814 - protein, 246 aa, synthetic construct
  REGION 1..246: note = Description of Artificial Sequence: Synthetic polypeptide
  REGION 1..246: note = XENP019553 [CTLA-4]_H3_L0_scFv(GKPGS)4
EVQLVESGGGLVKPGGSLRLSCAASGFTFSSYTMHWVRQAPGKGLEWVSFISYDGNNKYYADSVKGRFTISRDNAKNSLYLQMNSLRAEDTAVYYCARTGWLGPFDYWGQGTLVTVSSGKPGSGKPGSGKPGSGKPGSEIVLTQSPGTLSLSPGERATLSCRASQSVGSSYLAWYQQKPGQAPRLLIYGAFSRATGIPDRFSGSGSGTDFTLTISRLEPEDFAVYYCQQYGSSPWTFGQGTKVEIK

SEQ ID NO: 4815 - protein, 118 aa, synthetic construct; identical to SEQ ID NO: 2405
  REGION 1..118: note = Description of Artificial Sequence: Synthetic polypeptide
  REGION 1..118: note = VH of XENP019553

SEQ ID NO: 4816 - protein, 108 aa, synthetic construct; identical to SEQ ID NO: 3741
  REGION 1..108: note = Description of Artificial Sequence: Synthetic polypeptide
  REGION 1..108: note = VL of XENP019553

SEQ ID NO: 4817 - protein, 5 aa, synthetic construct
  REGION 1..5: note = Description of Artificial Sequence: Synthetic peptide
  REGION 1..5: note = XENP019553 vhCDR1
SYTMH

SEQ ID NO: 4818 - protein, 17 aa, synthetic construct
  REGION 1..17: note = Description of Artificial Sequence: Synthetic peptide
  REGION 1..17: note = XENP019553 vhCDR2
FISYDGNNKYYADSVKG

SEQ ID NO: 4819 - protein, 9 aa, synthetic construct
  REGION 1..9: note = Description of Artificial Sequence: Synthetic peptide
  REGION 1..9: note = XENP019553 vhCDR3
TGWLGPFDY

SEQ ID NO: 4820 - protein, 12 aa, synthetic construct
  REGION 1..12: note = Description of Artificial Sequence: Synthetic peptide
  REGION 1..12: note = XENP019553 vlCDR1
RASQSVGSSYLA

SEQ ID NO: 4821 - protein, 7 aa, synthetic construct
  REGION 1..7: note = Description of Artificial Sequence: Synthetic peptide
  REGION 1..7: note = XENP019553 vlCDR2
GAFSRAT

SEQ ID NO: 4822 - protein, 9 aa, synthetic construct
  REGION 1..9: note = Description of Artificial Sequence: Synthetic peptide
  REGION 1..9: note = XENP019553 vlCDR3
QQYGSSPWT

SEQ ID NO: 4823 - protein, 246 aa, synthetic construct
  REGION 1..246: note = Description of Artificial Sequence: Synthetic polypeptide
  REGION 1..246: note = XENP019554 [CTLA-4]_H4_L0_scFv(GKPGS)4
EVQLVESGGGLVQPGGSLRLSCAASGFTFSSYTMHWVRQAPGKGLEYVTFISYDGNNKYYADSVKGRFTISRDNSKNTLYLQMGSLRAEDMAVYYCARTGWLGPFDYWGQGTLVTVSSGKPGSGKPGSGKPGSGKPGSEIVLTQSPGTLSLSPGERATLSCRASQSVGSSYLAWYQQKPGQAPRLLIYGAFSRATGIPDRFSGSGSGTDFTLTISRLEPEDFAVYYCQQYGSSPWTFGQGTKVEIK

SEQ ID NO: 4824 - protein, 118 aa, synthetic construct
  REGION 1..118: note = Description of Artificial Sequence: Synthetic polypeptide
  REGION 1..118: note = VH of XENP019554
EVQLVESGGGLVQPGGSLRLSCAASGFTFSSYTMHWVRQAPGKGLEYVTFISYDGNNKYYADSVKGRFTISRDNSKNTLYLQMGSLRAEDMAVYYCARTGWLGPFDYWGQGTLVTVSS

SEQ ID NO: 4825 - protein, 108 aa, synthetic construct; identical to SEQ ID NO: 3741
  REGION 1..108: note = Description of Artificial Sequence: Synthetic polypeptide
  REGION 1..108: note = VL of XENP019554

SEQ ID NO: 4826 - protein, 5 aa, synthetic construct
  REGION 1..5: note = Description of Artificial Sequence: Synthetic peptide
  REGION 1..5: note = XENP019554 vhCDR1
SYTMH

SEQ ID NO: 4827 - protein, 17 aa, synthetic construct
  REGION 1..17: note = Description of Artificial Sequence: Synthetic peptide
  REGION 1..17: note = XENP019554 vhCDR2
FISYDGNNKYYADSVKG

SEQ ID NO: 4828 - protein, 9 aa, synthetic construct
  REGION 1..9: note = Description of Artificial Sequence: Synthetic peptide
  REGION 1..9: note = XENP019554 vhCDR3
TGWLGPFDY

SEQ ID NO: 4829 - protein, 12 aa, synthetic construct
  REGION 1..12: note = Description of Artificial Sequence: Synthetic peptide
  REGION 1..12: note = XENP019554 vlCDR1
RASQSVGSSYLA

SEQ ID NO: 4830 - protein, 7 aa, synthetic construct
  REGION 1..7: note = Description of Artificial Sequence: Synthetic peptide
  REGION 1..7: note = XENP019554 vlCDR2
GAFSRAT

SEQ ID NO: 4831 - protein, 9 aa, synthetic construct
  REGION 1..9: note = Description of Artificial Sequence: Synthetic peptide
  REGION 1..9: note = XENP019554 vlCDR3
QQYGSSPWT

SEQ ID NO: 4832 - protein, 246 aa, synthetic construct
  REGION 1..246: note = Description of Artificial Sequence: Synthetic polypeptide
  REGION 1..246: note = XENP019555 [CTLA-4]_H0_L1_scFv(GKPGS)4
QVQLVESGGGVVQPGRSLRLSCAASGFTFSSYTMHWVRQAPGKGLEWVTFISYDGNNKYYADSVKGRFTISRDNSKNTLYLQMNSLRAEDTAIYYCARTGWLGPFDYWGQGTLVTVSSGKPGSGKPGSGKPGSGKPGSEIVLTQSPATLSLSPGERATLSCGASQSVGSSYLAWYQQKPGLAPRLLIYGAFSRATGIPDRFSGSGSGTDFTLTISRLEPEDFAVYYCQQYGSSPWTFGQGTKVEIK

SEQ ID NO: 4833 - protein, 118 aa, synthetic construct; identical to SEQ ID NO: 3737
  REGION 1..118: note = Description of Artificial Sequence: Synthetic polypeptide
  REGION 1..118: note = VH of XENP019555

SEQ ID NO: 4834 - protein, 108 aa, synthetic construct
  REGION 1..108: note = Description of Artificial Sequence: Synthetic polypeptide
  REGION 1..108: note = VL of XENP019555
EIVLTQSPATLSLSPGERATLSCGASQSVGSSYLAWYQQKPGLAPRLLIYGAFSRATGIPDRFSGSGSGTDFTLTISRLEPEDFAVYYCQQYGSSPWTFGQGTKVEIK

SEQ ID NO: 4835 - protein, 5 aa, synthetic construct
  REGION 1..5: note = Description of Artificial Sequence: Synthetic peptide
  REGION 1..5: note = XENP019555 vhCDR1
SYTMH

SEQ ID NO: 4836 - protein, 17 aa, synthetic construct
  REGION 1..17: note = Description of Artificial Sequence: Synthetic peptide
  REGION 1..17: note = XENP019555 vhCDR2
FISYDGNNKYYADSVKG

SEQ ID NO: 4837 - protein, 9 aa, synthetic construct
  REGION 1..9: note = Description of Artificial Sequence: Synthetic peptide
  REGION 1..9: note = XENP019555 vhCDR3
TGWLGPFDY

SEQ ID NO: 4838 - protein, 12 aa, synthetic construct
  REGION 1..12: note = Description of Artificial Sequence: Synthetic peptide
  REGION 1..12: note = XENP019555 vlCDR1
GASQSVGSSYLA

SEQ ID NO: 4839 - protein, 7 aa, synthetic construct
  REGION 1..7: note = Description of Artificial Sequence: Synthetic peptide
  REGION 1..7: note = XENP019555 vlCDR2
GAFSRAT

SEQ ID NO: 4840 - protein, 9 aa, synthetic construct
  REGION 1..9: note = Description of Artificial Sequence: Synthetic peptide
  REGION 1..9: note = XENP019555 vlCDR3
QQYGSSPWT

SEQ ID NO: 4841 - protein, 246 aa, synthetic construct
  REGION 1..246: note = Description of Artificial Sequence: Synthetic polypeptide
  REGION 1..246: note = XENP019556 [CTLA-4]_H0_L2_scFv(GKPGS)4
QVQLVESGGGVVQPGRSLRLSCAASGFTFSSYTMHWVRQAPGKGLEWVTFISYDGNNKYYADSVKGRFTISRDNSKNTLYLQMNSLRAEDTAIYYCARTGWLGPFDYWGQGTLVTVSSGKPGSGKPGSGKPGSGKPGSEIVMTQSPATLSVSPGERATLSCRASQSVGSSYLAWYQQKPGQAPRLLIYGAFSRATGIPARFSGSGSGTEFTLTISSLQSEDFAVYYCQQYGSSPWTFGQGTKVEIK

SEQ ID NO: 4842 - protein, 118 aa, synthetic construct; identical to SEQ ID NO: 3737
  REGION 1..118: note = Description of Artificial Sequence: Synthetic polypeptide
  REGION 1..118: note = VH of XENP019556

SEQ ID NO: 4843 - protein, 108 aa, synthetic construct
  REGION 1..108: note = Description of Artificial Sequence: Synthetic polypeptide
  REGION 1..108: note = VL of XENP019556
EIVMTQSPATLSVSPGERATLSCRASQSVGSSYLAWYQQKPGQAPRLLIYGAFSRATGIPARFSGSGSGTEFTLTISSLQSEDFAVYYCQQYGSSPWTFGQGTKVEIK

SEQ ID NO: 4844 - protein, 5 aa, synthetic construct
  REGION 1..5: note = Description of Artificial Sequence: Synthetic peptide
  REGION 1..5: note = XENP019556 vhCDR1
SYTMH

SEQ ID NO: 4845 - protein, 17 aa, synthetic construct
  REGION 1..17: note = Description of Artificial Sequence: Synthetic peptide
  REGION 1..17: note = XENP019556 vhCDR2
FISYDGNNKYYADSVKG

SEQ ID NO: 4846 - protein, 9 aa, synthetic construct
  REGION 1..9: note = Description of Artificial Sequence: Synthetic peptide
  REGION 1..9: note = XENP019556 vhCDR3
TGWLGPFDY

SEQ ID NO: 4847 - protein, 12 aa, synthetic construct
  REGION 1..12: note = Description of Artificial Sequence: Synthetic peptide
  REGION 1..12: note = XENP019556 vlCDR1
RASQSVGSSYLA

SEQ ID NO: 4848 - protein, 7 aa, synthetic construct
  REGION 1..7: note = Description of Artificial Sequence: Synthetic peptide
  REGION 1..7: note = XENP019556 vlCDR2
GAFSRAT

SEQ ID NO: 4849 - protein, 9 aa, synthetic construct
  REGION 1..9: note = Description of Artificial Sequence: Synthetic peptide
  REGION 1..9: note = XENP019556 vlCDR3
QQYGSSPWT

SEQ ID NO: 4850 - protein, 246 aa, synthetic construct
  REGION 1..246: note = Description of Artificial Sequence: Synthetic polypeptide
  REGION 1..246: note = XENP019587 [CTLA-4]_H0.140_L0_scFv(GKPGS)4
QVQLVESGGGVVQPGRSLRLSCAASGFTFSSYTMHWVRQAPGKGLEWVCFISYDGNNKYYADSVKGRFTCSRDNSKNTLYLQMNSLRAEDTAIYYCARTGWLGPFDYWGQGTLVTVSSGKPGSGKPGSGKPGSGKPGSEIVLTQSPGTLSLSPGERATLSCRASQSVGSSYLAWYQQKPGQAPRLLIYGAFSRATGIPDRFSGSGSGTDFTLTISRLEPEDFAVYYCQQYGSSPWTFGQGTKVEIK

SEQ ID NO: 4851 - protein, 118 aa, synthetic construct
  REGION 1..118: note = Description of Artificial Sequence: Synthetic polypeptide
  REGION 1..118: note = VH of XENP019587
QVQLVESGGGVVQPGRSLRLSCAASGFTFSSYTMHWVRQAPGKGLEWVCFISYDGNNKYYADSVKGRFTCSRDNSKNTLYLQMNSLRAEDTAIYYCARTGWLGPFDYWGQGTLVTVSS

SEQ ID NO: 4852 - protein, 108 aa, synthetic construct; identical to SEQ ID NO: 3741
  REGION 1..108: note = Description of Artificial Sequence: Synthetic polypeptide
  REGION 1..108: note = VL of XENP019587

SEQ ID NO: 4853 - protein, 5 aa, synthetic construct
  REGION 1..5: note = Description of Artificial Sequence: Synthetic peptide
  REGION 1..5: note = XENP019587 vhCDR1
SYTMH

SEQ ID NO: 4854 - protein, 17 aa, synthetic construct
  REGION 1..17: note = Description of Artificial Sequence: Synthetic peptide
  REGION 1..17: note = XENP019587 vhCDR2
FISYDGNNKYYADSVKG

SEQ ID NO: 4855 - protein, 9 aa, synthetic construct
  REGION 1..9: note = Description of Artificial Sequence: Synthetic peptide
  REGION 1..9: note = XENP019587 vhCDR3
TGWLGPFDY

SEQ ID NO: 4856 - protein, 12 aa, synthetic construct
  REGION 1..12: note = Description of Artificial Sequence: Synthetic peptide
  REGION 1..12: note = XENP019587 vlCDR1
RASQSVGSSYLA

SEQ ID NO: 4857 - protein, 7 aa, synthetic construct
  REGION 1..7: note = Description of Artificial Sequence: Synthetic peptide
  REGION 1..7: note = XENP019587 vlCDR2
GAFSRAT

SEQ ID NO: 4858 - protein, 9 aa, synthetic construct
  REGION 1..9: note = Description of Artificial Sequence: Synthetic peptide
  REGION 1..9: note = XENP019587 vlCDR3
QQYGSSPWT

SEQ ID NO: 4859 - protein, 246 aa, synthetic construct
  REGION 1..246: note = Description of Artificial Sequence: Synthetic polypeptide
  REGION 1..246: note = XENP019588 [CTLA-4]_H0_L0.117_scFv(GKPGS)4
QVQLVESGGGVVQPGRSLRLSCAASGFTFSSYTMHWVRQAPGKGLEWVTFISYDGNNKYYADSVKGRFTISRDNSKNTLYLQMNSLRAEDTAIYYCARTGWLGPFDYWGQGTLVTVSSGKPGSGKPGSGKPGSGKPGSEIVLTQSPGTLSLSPGERATLSCRASQSVGSSYLAWYQQKPGQAPRLLCYGAFSRATGIPDRFSCSGSGTDFTLTISRLEPEDFAVYYCQQYGSSPWTFGQGTKVEIK

SEQ ID NO: 4860 - protein, 118 aa, synthetic construct; identical to SEQ ID NO: 3737
  REGION 1..118: note = Description of Artificial Sequence: Synthetic polypeptide
  REGION 1..118: note = VH of XENP019588

SEQ ID NO: 4861 - protein, 108 aa, synthetic construct
  REGION 1..108: note = Description of Artificial Sequence: Synthetic polypeptide
  REGION 1..108: note = VL of XENP019588
EIVLTQSPGTLSLSPGERATLSCRASQSVGSSYLAWYQQKPGQAPRLLCYGAFSRATGIPDRFSCSGSGTDFTLTISRLEPEDFAVYYCQQYGSSPWTFGQGTKVEIK

SEQ ID NO: 4862 - protein, 5 aa, synthetic construct
  REGION 1..5: note = Description of Artificial Sequence: Synthetic peptide
  REGION 1..5: note = XENP019588 vhCDR1
SYTMH

SEQ ID NO: 4863 - protein, 17 aa, synthetic construct
  REGION 1..17: note = Description of Artificial Sequence: Synthetic peptide
  REGION 1..17: note = XENP019588 vhCDR2
FISYDGNNKYYADSVKG

SEQ ID NO: 4864 - protein, 9 aa, synthetic construct
  REGION 1..9: note = Description of Artificial Sequence: Synthetic peptide
  REGION 1..9: note = XENP019588 vhCDR3
TGWLGPFDY

SEQ ID NO: 4865 - protein, 12 aa, synthetic construct
  REGION 1..12: note = Description of Artificial Sequence: Synthetic peptide
  REGION 1..12: note = XENP019588 vlCDR1
RASQSVGSSYLA

SEQ ID NO: 4866 - protein, 7 aa, synthetic construct
  REGION 1..7: note = Description of Artificial Sequence: Synthetic peptide
  REGION 1..7: note = XENP019588 vlCDR2
GAFSRAT

SEQ ID NO: 4867 - protein, 9 aa, synthetic construct
  REGION 1..9: note = Description of Artificial Sequence: Synthetic peptide
  REGION 1..9: note = XENP019588 vlCDR3
QQYGSSPWT

SEQ ID NO: 4868 - protein, 246 aa, synthetic construct
  REGION 1..246: note = Description of Artificial Sequence: Synthetic polypeptide
  REGION 1..246: note = XENP019745 [CTLA-4]_H0.1_L0_scFv(GKPGS)4
EVQLVESGGGVVQPGRSLRLSCAASGFTFSSYTMHWVRQAPGKGLEWVTFISYDGNNKYYADSVKGRFTISRDNSKNTLYLQMNSLRAEDTAIYYCARTGWLGPFDYWGQGTLVTVSSGKPGSGKPGSGKPGSGKPGSEIVLTQSPGTLSLSPGERATLSCRASQSVGSSYLAWYQQKPGQAPRLLIYGAFSRATGIPDRFSGSGSGTDFTLTISRLEPEDFAVYYCQQYGSSPWTFGQGTKVEIK

SEQ ID NO: 4869 - protein, 118 aa, synthetic construct
  REGION 1..118: note = Description of Artificial Sequence: Synthetic polypeptide
  REGION 1..118: note = VH of XENP019745
EVQLVESGGGVVQPGRSLRLSCAASGFTFSSYTMHWVRQAPGKGLEWVTFISYDGNNKYYADSVKGRFTISRDNSKNTLYLQMNSLRAEDTAIYYCARTGWLGPFDYWGQGTLVTVSS

SEQ ID NO: 4870 - protein, 108 aa, synthetic construct; identical to SEQ ID NO: 3741
  REGION 1..108: note = Description of Artificial Sequence: Synthetic polypeptide
  REGION 1..108: note = VL of XENP019745

SEQ ID NO: 4871 - protein, 5 aa, synthetic construct
  REGION 1..5: note = Description of Artificial Sequence: Synthetic peptide
  REGION 1..5: note = XENP019745 vhCDR1
SYTMH

SEQ ID NO: 4872 - protein, 17 aa, synthetic construct
  REGION 1..17: note = Description of Artificial Sequence: Synthetic peptide
  REGION 1..17: note = XENP019745 vhCDR2
FISYDGNNKYYADSVKG

SEQ ID NO: 4873 - protein, 9 aa, synthetic construct
  REGION 1..9: note = Description of Artificial Sequence: Synthetic peptide
  REGION 1..9: note = XENP019745 vhCDR3
TGWLGPFDY

SEQ ID NO: 4874 - protein, 12 aa, synthetic construct
  REGION 1..12: note = Description of Artificial Sequence: Synthetic peptide
  REGION 1..12: note = XENP019745 vlCDR1
RASQSVGSSYLA

SEQ ID NO: 4875 - protein, 7 aa, synthetic construct
  REGION 1..7: note = Description of Artificial Sequence: Synthetic peptide
  REGION 1..7: note = XENP019745 vlCDR2
GAFSRAT

SEQ ID NO: 4876 - protein, 9 aa, synthetic construct
  REGION 1..9: note = Description of Artificial Sequence: Synthetic peptide
  REGION 1..9: note = XENP019745 vlCDR3
QQYGSSPWT

SEQ ID NO: 4877 - protein, 246 aa, synthetic construct
  REGION 1..246: note = Description of Artificial Sequence: Synthetic polypeptide
  REGION 1..246: note = XENP019746 [CTLA-4]_H0.2_L0_scFv(GKPGS)4
QVQLLESGGGVVQPGRSLRLSCAASGFTFSSYTMHWVRQAPGKGLEWVTFISYDGNNKYYADSVKGRFTISRDNSKNTLYLQMNSLRAEDTAIYYCARTGWLGPFDYWGQGTLVTVSSGKPGSGKPGSGKPGSGKPGSEIVLTQSPGTLSLSPGERATLSCRASQSVGSSYLAWYQQKPGQAPRLLIYGAFSRATGIPDRFSGSGSGTDFTLTISRLEPEDFAVYYCQQYGSSPWTFGQGTKVEIK

SEQ ID NO: 4878 - protein, 118 aa, synthetic construct
  REGION 1..118: note = Description of Artificial Sequence: Synthetic polypeptide
  REGION 1..118: note = VH of XENP019746
QVQLLESGGGVVQPGRSLRLSCAASGFTFSSYTMHWVRQAPGKGLEWVTFISYDGNNKYYADSVKGRFTISRDNSKNTLYLQMNSLRAEDTAIYYCARTGWLGPFDYWGQGTLVTVSS

SEQ ID NO: 4879 - protein, 108 aa, synthetic construct; identical to SEQ ID NO: 3741
  REGION 1..108: note = Description of Artificial Sequence: Synthetic polypeptide
  REGION 1..108: note = VL of XENP019746

SEQ ID NO: 4880 - protein, 5 aa, synthetic construct
  REGION 1..5: note = Description of Artificial Sequence: Synthetic peptide
  REGION 1..5: note = XENP019746 vhCDR1
SYTMH

SEQ ID NO: 4881 - protein, 17 aa, synthetic construct
  REGION 1..17: note = Description of Artificial Sequence: Synthetic peptide
  REGION 1..17: note = XENP019746 vhCDR2
FISYDGNNKYYADSVKG

SEQ ID NO: 4882 - protein, 9 aa, synthetic construct
  REGION 1..9: note = Description of Artificial Sequence: Synthetic peptide
  REGION 1..9: note = XENP019746 vhCDR3
TGWLGPFDY

SEQ ID NO: 4883 - protein, 12 aa, synthetic construct
  REGION 1..12: note = Description of Artificial Sequence: Synthetic peptide
  REGION 1..12: note = XENP019746 vlCDR1
RASQSVGSSYLA

SEQ ID NO: 4884 - protein, 7 aa, synthetic construct
  REGION 1..7: note = Description of Artificial Sequence: Synthetic peptide
  REGION 1..7: note = XENP019746 vlCDR2
GAFSRAT

SEQ ID NO: 4885 - protein, 9 aa, synthetic construct
  REGION 1..9: note = Description of Artificial Sequence: Synthetic peptide
  REGION 1..9: note = XENP019746 vlCDR3
QQYGSSPWT

SEQ ID NO: 4886 - protein, 246 aa, synthetic construct
  REGION 1..246: note = Description of Artificial Sequence: Synthetic polypeptide
  REGION 1..246: note = XENP019747 [CTLA-4]_H0.3_L0_scFv(GKPGS)4
QVQLVESGGGLVQPGRSLRLSCAASGFTFSSYTMHWVRQAPGKGLEWVTFISYDGNNKYYADSVKGRFTISRDNSKNTLYLQMNSLRAEDTAIYYCARTGWLGPFDYWGQGTLVTVSSGKPGSGKPGSGKPGSGKPGSEIVLTQSPGTLSLSPGERATLSCRASQSVGSSYLAWYQQKPGQAPRLLIYGAFSRATGIPDRFSGSGSGTDFTLTISRLEPEDFAVYYCQQYGSSPWTFGQGTKVEIK

SEQ ID NO: 4887 - protein, 118 aa, synthetic construct
  REGION 1..118: note = Description of Artificial Sequence: Synthetic polypeptide
  REGION 1..118: note = VH of XENP019747
QVQLVESGGGLVQPGRSLRLSCAASGFTFSSYTMHWVRQAPGKGLEWVTFISYDGNNKYYADSVKGRFTISRDNSKNTLYLQMNSLRAEDTAIYYCARTGWLGPFDYWGQGTLVTVSS

SEQ ID NO: 4888 - protein, 108 aa, synthetic construct; identical to SEQ ID NO: 3741
  REGION 1..108: note = Description of Artificial Sequence: Synthetic polypeptide
  REGION 1..108: note = VL of XENP019747

SEQ ID NO: 4889 - protein, 5 aa, synthetic construct
  REGION 1..5: note = Description of Artificial Sequence: Synthetic peptide
  REGION 1..5: note = XENP019747 vhCDR1
SYTMH

SEQ ID NO: 4890 - protein, 17 aa, synthetic construct
  REGION 1..17: note = Description of Artificial Sequence: Synthetic peptide
  REGION 1..17: note = XENP019747 vhCDR2
FISYDGNNKYYADSVKG

SEQ ID NO: 4891 - protein, 9 aa, synthetic construct
  REGION 1..9: note = Description of Artificial Sequence: Synthetic peptide
  REGION 1..9: note = XENP019747 vhCDR3
TGWLGPFDY

SEQ ID NO: 4892 - protein, 12 aa, synthetic construct
  REGION 1..12: note = Description of Artificial Sequence: Synthetic peptide
  REGION 1..12: note = XENP019747 vlCDR1
RASQSVGSSYLA

SEQ ID NO: 4893 - protein, 7 aa, synthetic construct
  REGION 1..7: note = Description of Artificial Sequence: Synthetic peptide
  REGION 1..7: note = XENP019747 vlCDR2
GAFSRAT

SEQ ID NO: 4894 - protein, 9 aa, synthetic construct
  REGION 1..9: note = Description of Artificial Sequence: Synthetic peptide
  REGION 1..9: note = XENP019747 vlCDR3
QQYGSSPWT

SEQ ID NO: 4895 - protein, 246 aa, synthetic construct
  REGION 1..246: note = Description of Artificial Sequence: Synthetic polypeptide
  REGION 1..246: note = XENP019748 [CTLA-4]_H0.4_L0_scFv(GKPGS)4
QVQLVESGGGVKQPGRSLRLSCAASGFTFSSYTMHWVRQAPGKGLEWVTFISYDGNNKYYADSVKGRFTISRDNSKNTLYLQMNSLRAEDTAIYYCARTGWLGPFDYWGQGTLVTVSSGKPGSGKPGSGKPGSGKPGSEIVLTQSPGTLSLSPGERATLSCRASQSVGSSYLAWYQQKPGQAPRLLIYGAFSRATGIPDRFSGSGSGTDFTLTISRLEPEDFAVYYCQQYGSSPWTFGQGTKVEIK

SEQ ID NO: 4896 - protein, 118 aa, synthetic construct
  REGION 1..118: note = Description of Artificial Sequence: Synthetic polypeptide
  REGION 1..118: note = VH of XENP019748
QVQLVESGGGVKQPGRSLRLSCAASGFTFSSYTMHWVRQAPGKGLEWVTFISYDGNNKYYADSVKGRFTISRDNSKNTLYLQMNSLRAEDTAIYYCARTGWLGPFDYWGQGTLVTVSS

SEQ ID NO: 4897 - protein, 108 aa, synthetic construct; identical to SEQ ID NO: 3741
  REGION 1..108: note = Description of Artificial Sequence: Synthetic polypeptide
  REGION 1..108: note = VL of XENP019748

SEQ ID NO: 4898 - protein, 5 aa, synthetic construct
  REGION 1..5: note = Description of Artificial Sequence: Synthetic peptide
  REGION 1..5: note = XENP019748 vhCDR1
SYTMH

SEQ ID NO: 4899 - protein, 17 aa, synthetic construct
  REGION 1..17: note = Description of Artificial Sequence: Synthetic peptide
  REGION 1..17: note = XENP019748 vhCDR2
FISYDGNNKYYADSVKG

SEQ ID NO: 4900 - protein, 9 aa, synthetic construct
  REGION 1..9: note = Description of Artificial Sequence: Synthetic peptide
  REGION 1..9: note = XENP019748 vhCDR3
TGWLGPFDY

SEQ ID NO: 4901 - protein, 12 aa, synthetic construct
  REGION 1..12: note = Description of Artificial Sequence: Synthetic peptide
  REGION 1..12: note = XENP019748 vlCDR1
RASQSVGSSYLA

SEQ ID NO: 4902 - protein, 7 aa, synthetic construct
  REGION 1..7: note = Description of Artificial Sequence: Synthetic peptide
  REGION 1..7: note = XENP019748 vlCDR2
GAFSRAT

SEQ ID NO: 4903 - protein, 9 aa, synthetic construct
  REGION 1..9: note = Description of Artificial Sequence: Synthetic peptide
  REGION 1..9: note = XENP019748 vlCDR3
QQYGSSPWT

SEQ ID NO: 4904 - protein, 246 aa, synthetic construct
  REGION 1..246: note = Description of Artificial Sequence: Synthetic polypeptide
  REGION 1..246: note = XENP019749 [CTLA-4]_H0.5_L0_scFv(GKPGS)4
QVQLVESGGGVKQPGESLRLSCAASGFTFSSYTMHWVRQAPGKGLEWVTFISYDGNNKYYADSVKGRFTISRDNSKNTLYLQMNSLRAEDTAIYYCARTGWLGPFDYWGQGTLVTVSSGKPGSGKPGSGKPGSGKPGSEIVLTQSPGTLSLSPGERATLSCRASQSVGSSYLAWYQQKPGQAPRLLIYGAFSRATGIPDRFSGSGSGTDFTLTISRLEPEDFAVYYCQQYGSSPWTFGQGTKVEIK

SEQ ID NO: 4905 - protein, 118 aa, synthetic construct
  REGION 1..118: note = Description of Artificial Sequence: Synthetic polypeptide
  REGION 1..118: note = VH of XENP019749
QVQLVESGGGVKQPGESLRLSCAASGFTFSSYTMHWVRQAPGKGLEWVTFISYDGNNKYYADSVKGRFTISRDNSKNTLYLQMNSLRAEDTAIYYCARTGWLGPFDYWGQGTLVTVSS

SEQ ID NO: 4906 - protein, 108 aa, synthetic construct; identical to SEQ ID NO: 3741
  REGION 1..108: note = Description of Artificial Sequence: Synthetic polypeptide
  REGION 1..108: note = VL of XENP019749

SEQ ID NO: 4907 - protein, 5 aa, synthetic construct
  REGION 1..5: note = Description of Artificial Sequence: Synthetic peptide
  REGION 1..5: note = XENP019749 vhCDR1
SYTMH

SEQ ID NO: 4908 - protein, 17 aa, synthetic construct
  REGION 1..17: note = Description of Artificial Sequence: Synthetic peptide
  REGION 1..17: note = XENP019749 vhCDR2
FISYDGNNKYYADSVKG

SEQ ID NO: 4909 - protein, 9 aa, synthetic construct
  REGION 1..9: note = Description of Artificial Sequence: Synthetic peptide
  REGION 1..9: note = XENP019749 vhCDR3
TGWLGPFDY

SEQ ID NO: 4910 - protein, 12 aa, synthetic construct
  REGION 1..12: note = Description of Artificial Sequence: Synthetic peptide
  REGION 1..12: note = XENP019749 vlCDR1
RASQSVGSSYLA

SEQ ID NO: 4911 - protein, 7 aa, synthetic construct
  REGION 1..7: note = Description of Artificial Sequence: Synthetic peptide
  REGION 1..7: note = XENP019749 vlCDR2
GAFSRAT

SEQ ID NO: 4912 - protein, 9 aa, synthetic construct
  REGION 1..9: note = Description of Artificial Sequence: Synthetic peptide
  REGION 1..9: note = XENP019749 vlCDR3
QQYGSSPWT

SEQ ID NO: 4913 - protein, 246 aa, synthetic construct
  REGION 1..246: note = Description of Artificial Sequence: Synthetic polypeptide
  REGION 1..246: note = XENP019750 [CTLA-4]_H0.6_L0_scFv(GKPGS)4
QVQLVESGGGVVKPGRSLRLSCAASGFTFSSYTMHWVRQAPGKGLEWVTFISYDGNNKYYADSVKGRFTISRDNSKNTLYLQMNSLRAEDTAIYYCARTGWLGPFDYWGQGTLVTVSSGKPGSGKPGSGKPGSGKPGSEIVLTQSPGTLSLSPGERATLSCRASQSVGSSYLAWYQQKPGQAPRLLIYGAFSRATGIPDRFSGSGSGTDFTLTISRLEPEDFAVYYCQQYGSSPWTFGQGTKVEIK

SEQ ID NO: 4914 - protein, 118 aa, synthetic construct
  REGION 1..118: note = Description of Artificial Sequence: Synthetic polypeptide
  REGION 1..118: note = VH of XENP019750
QVQLVESGGGVVKPGRSLRLSCAASGFTFSSYTMHWVRQAPGKGLEWVTFISYDGNNKYYADSVKGRFTISRDNSKNTLYLQMNSLRAEDTAIYYCARTGWLGPFDYWGQGTLVTVSS

SEQ ID NO: 4915 - protein, 108 aa, synthetic construct; identical to SEQ ID NO: 3741
  REGION 1..108: note = Description of Artificial Sequence: Synthetic polypeptide
  REGION 1..108: note = VL of XENP019750

SEQ ID NO: 4916 - protein, 5 aa, synthetic construct
  REGION 1..5: note = Description of Artificial Sequence: Synthetic peptide
  REGION 1..5: note = XENP019750 vhCDR1
SYTMH

SEQ ID NO: 4917 - protein, 17 aa, synthetic construct
  REGION 1..17: note = Description of Artificial Sequence: Synthetic peptide
  REGION 1..17: note = XENP019750 vhCDR2
FISYDGNNKYYADSVKG

SEQ ID NO: 4918 - protein, 9 aa, synthetic construct
  REGION 1..9: note = Description of Artificial Sequence: Synthetic peptide
  REGION 1..9: note = XENP019750 vhCDR3
TGWLGPFDY

SEQ ID NO: 4919 - protein, 12 aa, synthetic construct
  REGION 1..12: note = Description of Artificial Sequence: Synthetic peptide
  REGION 1..12: note = XENP019750 vlCDR1
RASQSVGSSYLA

SEQ ID NO: 4920 - protein, 7 aa, synthetic construct
  REGION 1..7: note = Description of Artificial Sequence: Synthetic peptide
  REGION 1..7: note = XENP019750 vlCDR2
GAFSRAT

SEQ ID NO: 4921 - protein, 9 aa, synthetic construct
  REGION 1..9: note = Description of Artificial Sequence: Synthetic peptide
  REGION 1..9: note = XENP019750 vlCDR3
QQYGSSPWT

SEQ ID NO: 4922 - protein, 246 aa, synthetic construct
  REGION 1..246: note = Description of Artificial Sequence: Synthetic polypeptide
  REGION 1..246: note = XENP019751 [CTLA-4]_H0.7_L0_scFv(GKPGS)4
QVQLVESGGGVVEPGRSLRLSCAASGFTFSSYTMHWVRQAPGKGLEWVTFISYDGNNKYYADSVKGRFTISRDNSKNTLYLQMNSLRAEDTAIYYCARTGWLGPFDYWGQGTLVTVSSGKPGSGKPGSGKPGSGKPGSEIVLTQSPGTLSLSPGERATLSCRASQSVGSSYLAWYQQKPGQAPRLLIYGAFSRATGIPDRFSGSGSGTDFTLTISRLEPEDFAVYYCQQYGSSPWTFGQGTKVEIK

SEQ ID NO: 4923 - protein, 118 aa, synthetic construct
  REGION 1..118: note = Description of Artificial Sequence: Synthetic polypeptide
  REGION 1..118: note = VH of XENP019751
QVQLVESGGGVVEPGRSLRLSCAASGFTFSSYTMHWVRQAPGKGLEWVTFISYDGNNKYYADSVKGRFTISRDNSKNTLYLQMNSLRAEDTAIYYCARTGWLGPFDYWGQGTLVTVSS

SEQ ID NO: 4924 - protein, 108 aa, synthetic construct; identical to SEQ ID NO: 3741
  REGION 1..108: note = Description of Artificial Sequence: Synthetic polypeptide
  REGION 1..108: note = VL of XENP019751

SEQ ID NO: 4925 - protein, 5 aa, synthetic construct
  REGION 1..5: note = Description of Artificial Sequence: Synthetic peptide
  REGION 1..5: note = XENP019751 vhCDR1
SYTMH

SEQ ID NO: 4926 - protein, 17 aa, synthetic construct
  REGION 1..17: note = Description of Artificial Sequence: Synthetic peptide
  REGION 1..17: note = XENP019751 vhCDR2
FISYDGNNKYYADSVKG

SEQ ID NO: 4927 - protein, 9 aa, synthetic construct
  REGION 1..9: note = Description of Artificial Sequence: Synthetic peptide
  REGION 1..9: note = XENP019751 vhCDR3
TGWLGPFDY

SEQ ID NO: 4928 - protein, 12 aa, synthetic construct
  REGION 1..12: note = Description of Artificial Sequence: Synthetic peptide
  REGION 1..12: note = XENP019751 vlCDR1
RASQSVGSSYLA

SEQ ID NO: 4929 - protein, 7 aa, synthetic construct
  REGION 1..7: note = Description of Artificial Sequence: Synthetic peptide
  REGION 1..7: note = XENP019751 vlCDR2
GAFSRAT

SEQ ID NO: 4930 - protein, 9 aa, synthetic construct
  REGION 1..9: note = Description of Artificial Sequence: Synthetic peptide
  REGION 1..9: note = XENP019751 vlCDR3
QQYGSSPWT

SEQ ID NO: 4931 - protein, 246 aa, synthetic construct
  REGION 1..246: note = Description of Artificial Sequence: Synthetic polypeptide
  REGION 1..246: note = XENP019752 [CTLA-4]_H0.8_L0_scFv(GKPGS)4
QVQLVESGGGVVQPGGSLRLSCAASGFTFSSYTMHWVRQAPGKGLEWVTFISYDGNNKYYADSVKGRFTISRDNSKNTLYLQMNSLRAEDTAIYYCARTGWLGPFDYWGQGTLVTVSSGKPGSGKPGSGKPGSGKPGSEIVLTQSPGTLSLSPGERATLSCRASQSVGSSYLAWYQQKPGQAPRLLIYGAFSRATGIPDRFSGSGSGTDFTLTISRLEPEDFAVYYCQQYGSSPWTFGQGTKVEIK

SEQ ID NO: 4932 - protein, 118 aa, synthetic construct
  REGION 1..118: note = Description of Artificial Sequence: Synthetic polypeptide
  REGION 1..118: note = VH of XENP019752
QVQLVESGGGVVQPGGSLRLSCAASGFTFSSYTMHWVRQAPGKGLEWVTFISYDGNNKYYADSVKGRFTISRDNSKNTLYLQMNSLRAEDTAIYYCARTGWLGPFDYWGQGTLVTVSS

SEQ ID NO: 4933 - protein, 108 aa, synthetic construct; identical to SEQ ID NO: 3741
  REGION 1..108: note = Description of Artificial Sequence: Synthetic polypeptide
  REGION 1..108: note = VL of XENP019752

SEQ ID NO: 4934 - protein, 5 aa, synthetic construct
  REGION 1..5: note = Description of Artificial Sequence: Synthetic peptide
  REGION 1..5: note = XENP019752 vhCDR1
SYTMH

SEQ ID NO: 4935 - protein, 17 aa, synthetic construct
  REGION 1..17: note = Description of Artificial Sequence: Synthetic peptide
  REGION 1..17: note = XENP019752 vhCDR2
FISYDGNNKYYADSVKG

SEQ ID NO: 4936 - protein, 9 aa, synthetic construct
  REGION 1..9: note = Description of Artificial Sequence: Synthetic peptide
  REGION 1..9: note = XENP019752 vhCDR3
TGWLGPFDY

SEQ ID NO: 4937 - protein, 12 aa, synthetic construct
  REGION 1..12: note = Description of Artificial Sequence: Synthetic peptide
  REGION 1..12: note = XENP019752 vlCDR1
RASQSVGSSYLA

SEQ ID NO: 4938 - protein, 7 aa, synthetic construct
  REGION 1..7: note = Description of Artificial Sequence: Synthetic peptide
  REGION 1..7: note = XENP019752 vlCDR2
GAFSRAT

SEQ ID NO: 4939 - protein, 9 aa, synthetic construct
  REGION 1..9: note = Description of Artificial Sequence: Synthetic peptide
  REGION 1..9: note = XENP019752 vlCDR3
QQYGSSPWT

SEQ ID NO: 4940 - protein, 246 aa, synthetic construct
  REGION 1..246: note = Description of Artificial Sequence: Synthetic polypeptide
  REGION 1..246: note = XENP019753 [CTLA-4]_H0.9_L0_scFv(GKPGS)4
QVQLVESGGGVVQPGESLRLSCAASGFTFSSYTMHWVRQAPGKGLEWVTFISYDGNNKYYADSVKGRFTISRDNSKNTLYLQMNSLRAEDTAIYYCARTGWLGPFDYWGQGTLVTVSSGKPGSGKPGSGKPGSGKPGSEIVLTQSPGTLSLSPGERATLSCRASQSVGSSYLAWYQQKPGQAPRLLIYGAFSRATGIPDRFSGSGSGTDFTLTISRLEPEDFAVYYCQQYGSSPWTFGQGTKVEIK

SEQ ID NO: 4941 - protein, 118 aa, synthetic construct
  REGION 1..118: note = Description of Artificial Sequence: Synthetic polypeptide
  REGION 1..118: note = VH of XENP019753
QVQLVESGGGVVQPGESLRLSCAASGFTFSSYTMHWVRQAPGKGLEWVTFISYDGNNKYYADSVKGRFTISRDNSKNTLYLQMNSLRAEDTAIYYCARTGWLGPFDYWGQGTLVTVSS

SEQ ID NO: 4942 - protein, 108 aa, synthetic construct; identical to SEQ ID NO: 3741
  REGION 1..108: note = Description of Artificial Sequence: Synthetic polypeptide
  REGION 1..108: note = VL of XENP019753

SEQ ID NO: 4943 - protein, 5 aa, synthetic construct
  REGION 1..5: note = Description of Artificial Sequence: Synthetic peptide
  REGION 1..5: note = XENP019753 vhCDR1
SYTMH

SEQ ID NO: 4944 - protein, 17 aa, synthetic construct
  REGION 1..17: note = Description of Artificial Sequence: Synthetic peptide
  REGION 1..17: note = XENP019753 vhCDR2
FISYDGNNKYYADSVKG

SEQ ID NO: 4945 - protein, 9 aa, synthetic construct
  REGION 1..9: note = Description of Artificial Sequence: Synthetic peptide
  REGION 1..9: note = XENP019753 vhCDR3
TGWLGPFDY

SEQ ID NO: 4946 - protein, 12 aa, synthetic construct
  REGION 1..12: note = Description of Artificial Sequence: Synthetic peptide
  REGION 1..12: note = XENP019753 vlCDR1
RASQSVGSSYLA

SEQ ID NO: 4947 - protein, 7 aa, synthetic construct
  REGION 1..7: note = Description of Artificial Sequence: Synthetic peptide
  REGION 1..7: note = XENP019753 vlCDR2
GAFSRAT

SEQ ID NO: 4948 - protein, 9 aa, synthetic construct
  REGION 1..9: note = Description of Artificial Sequence: Synthetic peptide
  REGION 1..9: note = XENP019753 vlCDR3
QQYGSSPWT

SEQ ID NO: 4949 - protein, 246 aa, synthetic construct
  REGION 1..246: note = Description of Artificial Sequence: Synthetic polypeptide
  REGION 1..246: note = XENP019754 [CTLA-4]_H0.10_L0_scFv(GKPGS)4
QVQLVESGGGVVQPGRSLKLSCAASGFTFSSYTMHWVRQAPGKGLEWVTFISYDGNNKYYADSVKGRFTISRDNSKNTLYLQMNSLRAEDTAIYYCARTGWLGPFDYWGQGTLVTVSSGKPGSGKPGSGKPGSGKPGSEIVLTQSPGTLSLSPGERATLSCRASQSVGSSYLAWYQQKPGQAPRLLIYGAFSRATGIPDRFSGSGSGTDFTLTISRLEPEDFAVYYCQQYGSSPWTFGQGTKVEIK

SEQ ID NO: 4950 - protein, 118 aa, synthetic construct
  REGION 1..118: note = Description of Artificial Sequence: Synthetic polypeptide
  REGION 1..118: note = VH of XENP019754
QVQLVESGGGVVQPGRSLKLSCAASGFTFSSYTMHWVRQAPGKGLEWVTFISYDGNNKYYADSVKGRFTISRDNSKNTLYLQMNSLRAEDTAIYYCARTGWLGPFDYWGQGTLVTVSS

SEQ ID NO: 4951 - protein, 108 aa, synthetic construct; identical to SEQ ID NO: 3741
  REGION 1..108: note = Description of Artificial Sequence: Synthetic polypeptide
  REGION 1..108: note = VL of XENP019754

SEQ ID NO: 4952 - protein, 5 aa, synthetic construct
  REGION 1..5: note = Description of Artificial Sequence: Synthetic peptide
  REGION 1..5: note = XENP019754 vhCDR1
SYTMH

SEQ ID NO: 4953 - protein, 17 aa, synthetic construct
  REGION 1..17: note = Description of Artificial Sequence: Synthetic peptide
  REGION 1..17: note = XENP019754 vhCDR2
FISYDGNNKYYADSVKG

SEQ ID NO: 4954 - protein, 9 aa, synthetic construct
  REGION 1..9: note = Description of Artificial Sequence: Synthetic peptide
  REGION 1..9: note = XENP019754 vhCDR3
TGWLGPFDY

SEQ ID NO: 4955 - protein, 12 aa, synthetic construct
  REGION 1..12: note = Description of Artificial Sequence: Synthetic peptide
  REGION 1..12: note = XENP019754 vlCDR1
RASQSVGSSYLA

SEQ ID NO: 4956 - protein, 7 aa, synthetic construct
  REGION 1..7: note = Description of Artificial Sequence: Synthetic peptide
  REGION 1..7: note = XENP019754 vlCDR2
GAFSRAT

SEQ ID NO: 4957 - protein, 9 aa, synthetic construct
  REGION 1..9: note = Description of Artificial Sequence: Synthetic peptide
  REGION 1..9: note = XENP019754 vlCDR3
QQYGSSPWT

SEQ ID NO: 4958 - protein, 246 aa, synthetic construct
  REGION 1..246: note = Description of Artificial Sequence: Synthetic polypeptide
  REGION 1..246: note = XENP019755 [CTLA-4]_H0.11_L0_scFv(GKPGS)4
QVQLVESGGGVVQPGRSLRLSCAASGFTVSSYTMHWVRQAPGKGLEWVTFISYDGNNKYYADSVKGRFTISRDNSKNTLYLQMNSLRAEDTAIYYCARTGWLGPFDYWGQGTLVTVSSGKPGSGKPGSGKPGSGKPGSEIVLTQSPGTLSLSPGERATLSCRASQSVGSSYLAWYQQKPGQAPRLLIYGAFSRATGIPDRFSGSGSGTDFTLTISRLEPEDFAVYYCQQYGSSPWTFGQGTKVEIK

SEQ ID NO: 4959 - protein, 118 aa, synthetic construct
  REGION 1..118: note = Description of Artificial Sequence: Synthetic polypeptide
  REGION 1..118: note = VH of XENP019755
QVQLVESGGGVVQPGRSLRLSCAASGFTVSSYTMHWVRQAPGKGLEWVTFISYDGNNKYYADSVKGRFTISRDNSKNTLYLQMNSLRAEDTAIYYCARTGWLGPFDYWGQGTLVTVSS

SEQ ID NO: 4960 - protein, 108 aa, synthetic construct; identical to SEQ ID NO: 3741
  REGION 1..108: note = Description of Artificial Sequence: Synthetic polypeptide
  REGION 1..108: note = VL of XENP019755

SEQ ID NO: 4961 - protein, 5 aa, synthetic construct
  REGION 1..5: note = Description of Artificial Sequence: Synthetic peptide
  REGION 1..5: note = XENP019755 vhCDR1
SYTMH

SEQ ID NO: 4962 - protein, 17 aa, synthetic construct
  REGION 1..17: note = Description of Artificial Sequence: Synthetic peptide
  REGION 1..17: note = XENP019755 vhCDR2
FISYDGNNKYYADSVKG

SEQ ID NO: 4963 - protein, 9 aa, synthetic construct
  REGION 1..9: note = Description of Artificial Sequence: Synthetic peptide
  REGION 1..9: note = XENP019755 vhCDR3
TGWLGPFDY

SEQ ID NO: 4964 - protein, 12 aa, synthetic construct
  REGION 1..12: note = Description of Artificial Sequence: Synthetic peptide
  REGION 1..12: note = XENP019755 vlCDR1
RASQSVGSSYLA

SEQ ID NO: 4965 - protein, 7 aa, synthetic construct
  REGION 1..7: note = Description of Artificial Sequence: Synthetic peptide
  REGION 1..7: note = XENP019755 vlCDR2
GAFSRAT

SEQ ID NO: 4966 - protein, 9 aa, synthetic construct
  REGION 1..9: note = Description of Artificial Sequence: Synthetic peptide
  REGION 1..9: note = XENP019755 vlCDR3
QQYGSSPWT

SEQ ID NO: 4967 - protein, 246 aa, synthetic construct
  REGION 1..246: note = Description of Artificial Sequence: Synthetic polypeptide
  REGION 1..246: note = XENP019756 [CTLA-4]_H0.12_L0_scFv(GKPGS)4
QVQLVESGGGVVQPGRSLRLSCAASGFTFSAYTMHWVRQAPGKGLEWVTFISYDGNNKYYADSVKGRFTISRDNSKNTLYLQMNSLRAEDTAIYYCARTGWLGPFDYWGQGTLVTVSSGKPGSGKPGSGKPGSGKPGSEIVLTQSPGTLSLSPGERATLSCRASQSVGSSYLAWYQQKPGQAPRLLIYGAFSRATGIPDRFSGSGSGTDFTLTISRLEPEDFAVYYCQQYGSSPWTFGQGTKVEIK

SEQ ID NO: 4968 - protein, 118 aa, synthetic construct
  REGION 1..118: note = Description of Artificial Sequence: Synthetic polypeptide
  REGION 1..118: note = VH of XENP019756
QVQLVESGGGVVQPGRSLRLSCAASGFTFSAYTMHWVRQAPGKGLEWVTFISYDGNNKYYADSVKGRFTISRDNSKNTLYLQMNSLRAEDTAIYYCARTGWLGPFDYWGQGTLVTVSS

SEQ ID NO: 4969 - protein, 108 aa, synthetic construct; identical to SEQ ID NO: 3741
  REGION 1..108: note = Description of Artificial Sequence: Synthetic polypeptide
  REGION 1..108: note = VL of XENP019756

SEQ ID NO: 4970 - protein, 5 aa, synthetic construct
  REGION 1..5: note = Description of Artificial Sequence: Synthetic peptide
  REGION 1..5: note = XENP019756 vhCDR1
AYTMH

SEQ ID NO: 4971 - protein, 17 aa, synthetic construct
  REGION 1..17: note = Description of Artificial Sequence: Synthetic peptide
  REGION 1..17: note = XENP019756 vhCDR2
FISYDGNNKYYADSVKG

SEQ ID NO: 4972 - protein, 9 aa, synthetic construct
  REGION 1..9: note = Description of Artificial Sequence: Synthetic peptide
  REGION 1..9: note = XENP019756 vhCDR3
TGWLGPFDY

SEQ ID NO: 4973 - protein, 12 aa, synthetic construct
  REGION 1..12: note = Description of Artificial Sequence: Synthetic peptide
  REGION 1..12: note = XENP019756 vlCDR1
RASQSVGSSYLA

SEQ ID NO: 4974 - protein, 7 aa, synthetic construct
  REGION 1..7: note = Description of Artificial Sequence: Synthetic peptide
  REGION 1..7: note = XENP019756 vlCDR2
GAFSRAT

SEQ ID NO: 4975 - protein, 9 aa, synthetic construct
  REGION 1..9: note = Description of Artificial Sequence: Synthetic peptide
  REGION 1..9: note = XENP019756 vlCDR3
QQYGSSPWT

SEQ ID NO: 4976 - protein, 246 aa, synthetic construct
  REGION 1..246: note = Description of Artificial Sequence: Synthetic polypeptide
  REGION 1..246: note = XENP019757 [CTLA-4]_H0.13_L0_scFv(GKPGS)4
QVQLVESGGGVVQPGRSLRLSCAASGFTFSDYTMHWVRQAPGKGLEWVTFISYDGNNKYYADSVKGRFTISRDNSKNTLYLQMNSLRAEDTAIYYCARTGWLGPFDYWGQGTLVTVSSGKPGSGKPGSGKPGSGKPGSEIVLTQSPGTLSLSPGERATLSCRASQSVGSSYLAWYQQKPGQAPRLLIYGAFSRATGIPDRFSGSGSGTDFTLTISRLEPEDFAVYYCQQYGSSPWTFGQGTKVEIK

SEQ ID NO: 4977 - protein, 118 aa, synthetic construct
  REGION 1..118: note = Description of Artificial Sequence: Synthetic polypeptide
  REGION 1..118: note = VH of XENP019757
QVQLVESGGGVVQPGRSLRLSCAASGFTFSDYTMHWVRQAPGKGLEWVTFISYDGNNKYYADSVKGRFTISRDNSKNTLYLQMNSLRAEDTAIYYCARTGWLGPFDYWGQGTLVTVSS

SEQ ID NO: 4978 - protein, 108 aa, synthetic construct; identical to SEQ ID NO: 3741
  REGION 1..108: note = Description of Artificial Sequence: Synthetic polypeptide
  REGION 1..108: note = VL of XENP019757

SEQ ID NO: 4979 - protein, 5 aa, synthetic construct
  REGION 1..5: note = Description of Artificial Sequence: Synthetic peptide
  REGION 1..5: note = XENP019757 vhCDR1
DYTMH

SEQ ID NO: 4980 - protein, 17 aa, synthetic construct
  REGION 1..17: note = Description of Artificial Sequence: Synthetic peptide
  REGION 1..17: note = XENP019757 vhCDR2
FISYDGNNKYYADSVKG

SEQ ID NO: 4981 - protein, 9 aa, synthetic construct
  REGION 1..9: note = Description of Artificial Sequence: Synthetic peptide
  REGION 1..9: note = XENP019757 vhCDR3
TGWLGPFDY

SEQ ID NO: 4982 - protein, 12 aa, synthetic construct
  REGION 1..12: note = Description of Artificial Sequence: Synthetic peptide
  REGION 1..12: note = XENP019757 vlCDR1
RASQSVGSSYLA

SEQ ID NO: 4983 - protein, 7 aa, synthetic construct
  REGION 1..7: note = Description of Artificial Sequence: Synthetic peptide
  REGION 1..7: note = XENP019757 vlCDR2
GAFSRAT

SEQ ID NO: 4984 - protein, 9 aa, synthetic construct
  REGION 1..9: note = Description of Artificial Sequence: Synthetic peptide
  REGION 1..9: note = XENP019757 vlCDR3
QQYGSSPWT

SEQ ID NO: 4985 - protein, 246 aa, synthetic construct
  REGION 1..246: note = Description of Artificial Sequence: Synthetic polypeptide
  REGION 1..246: note = XENP019758 [CTLA-4]_H0.14_L0_scFv(GKPGS)4
QVQLVESGGGVVQPGRSLRLSCAASGFTFSGYTMHWVRQAPGKGLEWVTFISYDGNNKYYADSVKGRFTISRDNSKNTLYLQMNSLRAEDTAIYYCARTGWLGPFDYWGQGTLVTVSSGKPGSGKPGSGKPGSGKPGSEIVLTQSPGTLSLSPGERATLSCRASQSVGSSYLAWYQQKPGQAPRLLIYGAFSRATGIPDRFSGSGSGTDFTLTISRLEPEDFAVYYCQQYGSSPWTFGQGTKVEIK

SEQ ID NO: 4986 - protein, 118 aa, synthetic construct
  REGION 1..118: note = Description of Artificial Sequence: Synthetic polypeptide
  REGION 1..118: note = VH of XENP019758
QVQLVESGGGVVQPGRSLRLSCAASGFTFSGYTMHWVRQAPGKGLEWVTFISYDGNNKYYADSVKGRFTISRDNSKNTLYLQMNSLRAEDTAIYYCARTGWLGPFDYWGQGTLVTVSS

SEQ ID NO: 4987 - protein, 108 aa, synthetic construct; identical to SEQ ID NO: 3741
  REGION 1..108: note = Description of Artificial Sequence: Synthetic polypeptide
  REGION 1..108: note = VL of XENP019758

SEQ ID NO: 4988 - protein, 5 aa, synthetic construct
  REGION 1..5: note = Description of Artificial Sequence: Synthetic peptide
  REGION 1..5: note = XENP019758 vhCDR1
GYTMH

SEQ ID NO: 4989 - protein, 17 aa, synthetic construct
  REGION 1..17: note = Description of Artificial Sequence: Synthetic peptide
  REGION 1..17: note = XENP019758 vhCDR2
FISYDGNNKYYADSVKG

SEQ ID NO: 4990 - protein, 9 aa, synthetic construct
  REGION 1..9: note = Description of Artificial Sequence: Synthetic peptide
  REGION 1..9: note = XENP019758 vhCDR3
TGWLGPFDY

SEQ ID NO: 4991 - protein, 12 aa, synthetic construct
  REGION 1..12: note = Description of Artificial Sequence: Synthetic peptide
  REGION 1..12: note = XENP019758 vlCDR1
RASQSVGSSYLA

SEQ ID NO: 4992 - protein, 7 aa, synthetic construct
  REGION 1..7: note = Description of Artificial Sequence: Synthetic peptide
  REGION 1..7: note = XENP019758 vlCDR2
GAFSRAT

SEQ ID NO: 4993 - protein, 9 aa, synthetic construct
  REGION 1..9: note = Description of Artificial Sequence: Synthetic peptide
  REGION 1..9: note = XENP019758 vlCDR3
QQYGSSPWT

SEQ ID NO: 4994 - protein, 246 aa, synthetic construct
  REGION 1..246: note = Description of Artificial Sequence: Synthetic polypeptide
  REGION 1..246: note = XENP019759 [CTLA-4]_H0.15_L0_scFv(GKPGS)4
QVQLVESGGGVVQPGRSLRLSCAASGFTFSNYTMHWVRQAPGKGLEWVTFISYDGNNKYYADSVKGRFTISRDNSKNTLYLQMNSLRAEDTAIYYCARTGWLGPFDYWGQGTLVTVSSGKPGSGKPGSGKPGSGKPGSEIVLTQSPGTLSLSPGERATLSCRASQSVGSSYLAWYQQKPGQAPRLLIYGAFSRATGIPDRFSGSGSGTDFTLTISRLEPEDFAVYYCQQYGSSPWTFGQGTKVEIK

SEQ ID NO: 4995 - protein, 118 aa, synthetic construct
  REGION 1..118: note = Description of Artificial Sequence: Synthetic polypeptide
  REGION 1..118: note = VH of XENP019759
QVQLVESGGGVVQPGRSLRLSCAASGFTFSNYTMHWVRQAPGKGLEWVTFISYDGNNKYYADSVKGRFTISRDNSKNTLYLQMNSLRAEDTAIYYCARTGWLGPFDYWGQGTLVTVSS

SEQ ID NO: 4996 - protein, 108 aa, synthetic construct; identical to SEQ ID NO: 3741
  REGION 1..108: note = Description of Artificial Sequence: Synthetic polypeptide
  REGION 1..108: note = VL of XENP019759

SEQ ID NO: 4997 - protein, 5 aa, synthetic construct
  REGION 1..5: note = Description of Artificial Sequence: Synthetic peptide
  REGION 1..5: note = XENP019759 vhCDR1
NYTMH

SEQ ID NO: 4998 - protein, 17 aa, synthetic construct
  REGION 1..17: note = Description of Artificial Sequence: Synthetic peptide
  REGION 1..17: note = XENP019759 vhCDR2
FISYDGNNKYYADSVKG

SEQ ID NO: 4999 - protein, 9 aa, synthetic construct
  REGION 1..9: note = Description of Artificial Sequence: Synthetic peptide
  REGION 1..9: note = XENP019759 vhCDR3
TGWLGPFDY

SEQ ID NO: 5000 - protein, 12 aa, synthetic construct
  REGION 1..12: note = Description of Artificial Sequence: Synthetic peptide
  REGION 1..12: note = XENP019759 vlCDR1
RASQSVGSSYLA

SEQ ID NO: 5001 - protein, 7 aa, synthetic construct
  REGION 1..7: note = Description of Artificial Sequence: Synthetic peptide
  REGION 1..7: note = XENP019759 vlCDR2
GAFSRAT

SEQ ID NO: 5002 - protein, 9 aa, synthetic construct
  REGION 1..9: note = Description of Artificial Sequence: Synthetic peptide
  REGION 1..9: note = XENP019759 vlCDR3
QQYGSSPWT

SEQ ID NO: 5003 - protein, 246 aa, synthetic construct
  REGION 1..246: note = Description of Artificial Sequence: Synthetic polypeptide
  REGION 1..246: note = XENP019760 [CTLA-4]_H0.16_L0_scFv(GKPGS)4
QVQLVESGGGVVQPGRSLRLSCAASGFTFSQYTMHWVRQAPGKGLEWVTFISYDGNNKYYADSVKGRFTISRDNSKNTLYLQMNSLRAEDTAIYYCARTGWLGPFDYWGQGTLVTVSSGKPGSGKPGSGKPGSGKPGSEIVLTQSPGTLSLSPGERATLSCRASQSVGSSYLAWYQQKPGQAPRLLIYGAFSRATGIPDRFSGSGSGTDFTLTISRLEPEDFAVYYCQQYGSSPWTFGQGTKVEIK

SEQ ID NO: 5004 - protein, 118 aa, synthetic construct
  REGION 1..118: note = Description of Artificial Sequence: Synthetic polypeptide
  REGION 1..118: note = VH of XENP019760
QVQLVESGGGVVQPGRSLRLSCAASGFTFSQYTMHWVRQAPGKGLEWVTFISYDGNNKYYADSVKGRFTISRDNSKNTLYLQMNSLRAEDTAIYYCARTGWLGPFDYWGQGTLVTVSS

SEQ ID NO: 5005 - protein, 108 aa, synthetic construct; identical to SEQ ID NO: 3741
  REGION 1..108: note = Description of Artificial Sequence: Synthetic polypeptide
  REGION 1..108: note = VL of XENP019760

SEQ ID NO: 5006 - protein, 5 aa, synthetic construct
  REGION 1..5: note = Description of Artificial Sequence: Synthetic peptide
  REGION 1..5: note = XENP019760 vhCDR1
QYTMH

SEQ ID NO: 5007 - protein, 17 aa, synthetic construct
  REGION 1..17: note = Description of Artificial Sequence: Synthetic peptide
  REGION 1..17: note = XENP019760 vhCDR2
FISYDGNNKYYADSVKG

SEQ ID NO: 5008 - protein, 9 aa, synthetic construct
  REGION 1..9: note = Description of Artificial Sequence: Synthetic peptide
  REGION 1..9: note = XENP019760 vhCDR3
TGWLGPFDY

SEQ ID NO: 5009 - protein, 12 aa, synthetic construct
  REGION 1..12: note = Description of Artificial Sequence: Synthetic peptide
  REGION 1..12: note = XENP019760 vlCDR1
RASQSVGSSYLA

SEQ ID NO: 5010 - protein, 7 aa, synthetic construct
  REGION 1..7: note = Description of Artificial Sequence: Synthetic peptide
  REGION 1..7: note = XENP019760 vlCDR2
GAFSRAT

SEQ ID NO: 5011 - protein, 9 aa, synthetic construct
  REGION 1..9: note = Description of Artificial Sequence: Synthetic peptide
  REGION 1..9: note = XENP019760 vlCDR3
QQYGSSPWT

SEQ ID NO: 5012 - protein, 246 aa, synthetic construct
  REGION 1..246: note = Description of Artificial Sequence: Synthetic polypeptide
  REGION 1..246: note = XENP019761 [CTLA-4]_H0.17_L0_scFv(GKPGS)4
QVQLVESGGGVVQPGRSLRLSCAASGFTFSTYTMHWVRQAPGKGLEWVTFISYDGNNKYYADSVKGRFTISRDNSKNTLYLQMNSLRAEDTAIYYCARTGWLGPFDYWGQGTLVTVSSGKPGSGKPGSGKPGSGKPGSEIVLTQSPGTLSLSPGERATLSCRASQSVGSSYLAWYQQKPGQAPRLLIYGAFSRATGIPDRFSGSGSGTDFTLTISRLEPEDFAVYYCQQYGSSPWTFGQGTKVEIK

SEQ ID NO: 5013 - protein, 118 aa, synthetic construct
  REGION 1..118: note = Description of Artificial Sequence: Synthetic polypeptide
  REGION 1..118: note = VH of XENP019761
QVQLVESGGGVVQPGRSLRLSCAASGFTFSTYTMHWVRQAPGKGLEWVTFISYDGNNKYYADSVKGRFTISRDNSKNTLYLQMNSLRAEDTAIYYCARTGWLGPFDYWGQGTLVTVSS

SEQ ID NO: 5014 - protein, 108 aa, synthetic construct; identical to SEQ ID NO: 3741
  REGION 1..108: note = Description of Artificial Sequence: Synthetic polypeptide
  REGION 1..108: note = VL of XENP019761

SEQ ID NO: 5015 - protein, 5 aa, synthetic construct
  REGION 1..5: note = Description of Artificial Sequence: Synthetic peptide
  REGION 1..5: note = XENP019761 vhCDR1
TYTMH

SEQ ID NO: 5016 - protein, 17 aa, synthetic construct
  REGION 1..17: note = Description of Artificial Sequence: Synthetic peptide
  REGION 1..17: note = XENP019761 vhCDR2
FISYDGNNKYYADSVKG

SEQ ID NO: 5017 - protein, 9 aa, synthetic construct
  REGION 1..9: note = Description of Artificial Sequence: Synthetic peptide
  REGION 1..9: note = XENP019761 vhCDR3
TGWLGPFDY

SEQ ID NO: 5018 - protein, 12 aa, synthetic construct
  REGION 1..12: note = Description of Artificial Sequence: Synthetic peptide
  REGION 1..12: note = XENP019761 vlCDR1
RASQSVGSSYLA

SEQ ID NO: 5019 - protein, 7 aa, synthetic construct
  REGION 1..7: note = Description of Artificial Sequence: Synthetic peptide
  REGION 1..7: note = XENP019761 vlCDR2
GAFSRAT

SEQ ID NO: 5020 - protein, 9 aa, synthetic construct
  REGION 1..9: note = Description of Artificial Sequence: Synthetic peptide
  REGION 1..9: note = XENP019761 vlCDR3
QQYGSSPWT

SEQ ID NO: 5021 - protein, 246 aa, synthetic construct
  REGION 1..246: note = Description of Artificial Sequence: Synthetic polypeptide
  REGION 1..246: note = XENP019762 [CTLA-4]_H0.18_L0_scFv(GKPGS)4
QVQLVESGGGVVQPGRSLRLSCAASGFTFSSATMHWVRQAPGKGLEWVTFISYDGNNKYYADSVKGRFTISRDNSKNTLYLQMNSLRAEDTAIYYCARTGWLGPFDYWGQGTLVTVSSGKPGSGKPGSGKPGSGKPGSEIVLTQSPGTLSLSPGERATLSCRASQSVGSSYLAWYQQKPGQAPRLLIYGAFSRATGIPDRFSGSGSGTDFTLTISRLEPEDFAVYYCQQYGSSPWTFGQGTKVEIK

SEQ ID NO: 5022 - protein, 118 aa, synthetic construct
  REGION 1..118: note = Description of Artificial Sequence: Synthetic polypeptide
  REGION 1..118: note = VH of XENP019762
QVQLVESGGGVVQPGRSLRLSCAASGFTFSSATMHWVRQAPGKGLEWVTFISYDGNNKYYADSVKGRFTISRDNSKNTLYLQMNSLRAEDTAIYYCARTGWLGPFDYWGQGTLVTVSS

SEQ ID NO: 5023 - protein, 108 aa, synthetic construct; identical to SEQ ID NO: 3741
  REGION 1..108: note = Description of Artificial Sequence: Synthetic polypeptide
  REGION 1..108: note = VL of XENP019762

SEQ ID NO: 5024 - protein, 5 aa, synthetic construct
  REGION 1..5: note = Description of Artificial Sequence: Synthetic peptide
  REGION 1..5: note = XENP019762 vhCDR1
SATMH

SEQ ID NO: 5025 - protein, 17 aa, synthetic construct
  REGION 1..17: note = Description of Artificial Sequence: Synthetic peptide
  REGION 1..17: note = XENP019762 vhCDR2
FISYDGNNKYYADSVKG

SEQ ID NO: 5026 - protein, 9 aa, synthetic construct
  REGION 1..9: note = Description of Artificial Sequence: Synthetic peptide
  REGION 1..9: note = XENP019762 vhCDR3
TGWLGPFDY

SEQ ID NO: 5027 - protein, 12 aa, synthetic construct
  REGION 1..12: note = Description of Artificial Sequence: Synthetic peptide
  REGION 1..12: note = XENP019762 vlCDR1
RASQSVGSSYLA

SEQ ID NO: 5028 - protein, 7 aa, synthetic construct
  REGION 1..7: note = Description of Artificial Sequence: Synthetic peptide
  REGION 1..7: note = XENP019762 vlCDR2
GAFSRAT

SEQ ID NO: 5029 - protein, 9 aa, synthetic construct
  REGION 1..9: note = Description of Artificial Sequence: Synthetic peptide
  REGION 1..9: note = XENP019762 vlCDR3
QQYGSSPWT

SEQ ID NO: 5030 - protein, 246 aa, synthetic construct
  REGION 1..246: note = Description of Artificial Sequence: Synthetic polypeptide
  REGION 1..246: note = XENP019763 [CTLA-4]_H0.19_L0_scFv(GKPGS)4
QVQLVESGGGVVQPGRSLRLSCAASGFTFSSHTMHWVRQAPGKGLEWVTFISYDGNNKYYADSVKGRFTISRDNSKNTLYLQMNSLRAEDTAIYYCARTGWLGPFDYWGQGTLVTVSSGKPGSGKPGSGKPGSGKPGSEIVLTQSPGTLSLSPGERATLSCRASQSVGSSYLAWYQQKPGQAPRLLIYGAFSRATGIPDRFSGSGSGTDFTLTISRLEPEDFAVYYCQQYGSSPWTFGQGTKVEIK

SEQ ID NO: 5031 - protein, 118 aa, synthetic construct
  REGION 1..118: note = Description of Artificial Sequence: Synthetic polypeptide
  REGION 1..118: note = VH of XENP019763
QVQLVESGGGVVQPGRSLRLSCAASGFTFSSHTMHWVRQAPGKGLEWVTFISYDGNNKYYADSVKGRFTISRDNSKNTLYLQMNSLRAEDTAIYYCARTGWLGPFDYWGQGTLVTVSS

SEQ ID NO: 5032 - protein, 108 aa, synthetic construct; identical to SEQ ID NO: 3741
  REGION 1..108: note = Description of Artificial Sequence: Synthetic polypeptide
  REGION 1..108: note = VL of XENP019763

SEQ ID NO: 5033 - protein, 5 aa, synthetic construct
  REGION 1..5: note = Description of Artificial Sequence: Synthetic peptide
  REGION 1..5: note = XENP019763 vhCDR1
SHTMH

SEQ ID NO: 5034 - protein, 17 aa, synthetic construct
  REGION 1..17: note = Description of Artificial Sequence: Synthetic peptide
  REGION 1..17: note = XENP019763 vhCDR2
FISYDGNNKYYADSVKG

SEQ ID NO: 5035 - protein, 9 aa, synthetic construct
  REGION 1..9: note = Description of Artificial Sequence: Synthetic peptide
  REGION 1..9: note = XENP019763 vhCDR3
TGWLGPFDY

SEQ ID NO: 5036 - protein, 12 aa, synthetic construct
  REGION 1..12: note = Description of Artificial Sequence: Synthetic peptide
  REGION 1..12: note = XENP019763 vlCDR1
RASQSVGSSYLA

SEQ ID NO: 5037 - protein, 7 aa, synthetic construct
  REGION 1..7: note = Description of Artificial Sequence: Synthetic peptide
  REGION 1..7: note = XENP019763 vlCDR2
GAFSRAT

SEQ ID NO: 5038 - protein, 9 aa, synthetic construct
  REGION 1..9: note = Description of Artificial Sequence: Synthetic peptide
  REGION 1..9: note = XENP019763 vlCDR3
QQYGSSPWT

SEQ ID NO: 5039 - protein, 246 aa, synthetic construct
  REGION 1..246: note = Description of Artificial Sequence: Synthetic polypeptide
  REGION 1..246: note = XENP019764 [CTLA-4]_H0.20_L0_scFv(GKPGS)4
QVQLVESGGGVVQPGRSLRLSCAASGFTFSSFTMHWVRQAPGKGLEWVTFISYDGNNKYYADSVKGRFTISRDNSKNTLYLQMNSLRAEDTAIYYCARTGWLGPFDYWGQGTLVTVSSGKPGSGKPGSGKPGSGKPGSEIVLTQSPGTLSLSPGERATLSCRASQSVGSSYLAWYQQKPGQAPRLLIYGAFSRATGIPDRFSGSGSGTDFTLTISRLEPEDFAVYYCQQYGSSPWTFGQGTKVEIK

SEQ ID NO: 5040 - protein, 118 aa, synthetic construct
  REGION 1..118: note = Description of Artificial Sequence: Synthetic polypeptide
  REGION 1..118: note = VH of XENP019764
QVQLVESGGGVVQPGRSLRLSCAASGFTFSSFTMHWVRQAPGKGLEWVTFISYDGNNKYYADSVKGRFTISRDNSKNTLYLQMNSLRAEDTAIYYCARTGWLGPFDYWGQGTLVTVSS

SEQ ID NO: 5041 - protein, 108 aa, synthetic construct; identical to SEQ ID NO: 3741
  REGION 1..108: note = Description of Artificial Sequence: Synthetic polypeptide
  REGION 1..108: note = VL of XENP019764

SEQ ID NO: 5042 - protein, 5 aa, synthetic construct
  REGION 1..5: note = Description of Artificial Sequence: Synthetic peptide
  REGION 1..5: note = XENP019764 vhCDR1
SFTMH

SEQ ID NO: 5043 - protein, 17 aa, synthetic construct
  REGION 1..17: note = Description of Artificial Sequence: Synthetic peptide
  REGION 1..17: note = XENP019764 vhCDR2
FISYDGNNKYYADSVKG

SEQ ID NO: 5044 - protein, 9 aa, synthetic construct
  REGION 1..9: note = Description of Artificial Sequence: Synthetic peptide
  REGION 1..9: note = XENP019764 vhCDR3
TGWLGPFDY

SEQ ID NO: 5045 - protein, 12 aa, synthetic construct
  REGION 1..12: note = Description of Artificial Sequence: Synthetic peptide
  REGION 1..12: note = XENP019764 vlCDR1
RASQSVGSSYLA

SEQ ID NO: 5046 - protein, 7 aa, synthetic construct
  REGION 1..7: note = Description of Artificial Sequence: Synthetic peptide
  REGION 1..7: note = XENP019764 vlCDR2
GAFSRAT

SEQ ID NO: 5047 - protein, 9 aa, synthetic construct
  REGION 1..9: note = Description of Artificial Sequence: Synthetic peptide
  REGION 1..9: note = XENP019764 vlCDR3
QQYGSSPWT

SEQ ID NO: 5048 - protein, 246 aa, synthetic construct
  REGION 1..246: note = Description of Artificial Sequence: Synthetic polypeptide
  REGION 1..246: note = XENP019765 [CTLA-4]_H0.21_L0_scFv(GKPGS)4
QVQLVESGGGVVQPGRSLRLSCAASGFTFSSLTMHWVRQAPGKGLEWVTFISYDGNNKYYADSVKGRFTISRDNSKNTLYLQMNSLRAEDTAIYYCARTGWLGPFDYWGQGTLVTVSSGKPGSGKPGSGKPGSGKPGSEIVLTQSPGTLSLSPGERATLSCRASQSVGSSYLAWYQQKPGQAPRLLIYGAFSRATGIPDRFSGSGSGTDFTLTISRLEPEDFAVYYCQQYGSSPWTFGQGTKVEIK

SEQ ID NO: 5049 - protein, 118 aa, synthetic construct
  REGION 1..118: note = Description of Artificial Sequence: Synthetic polypeptide
  REGION 1..118: note = VH of XENP019765
QVQLVESGGGVVQPGRSLRLSCAASGFTFSSLTMHWVRQAPGKGLEWVTFISYDGNNKYYADSVKGRFTISRDNSKNTLYLQMNSLRAEDTAIYYCARTGWLGPFDYWGQGTLVTVSS

SEQ ID NO: 5050 - protein, 108 aa, synthetic construct; identical to SEQ ID NO: 3741
  REGION 1..108: note = Description of Artificial Sequence: Synthetic polypeptide
  REGION 1..108: note = VL of XENP019765

SEQ ID NO: 5051 - protein, 5 aa, synthetic construct
  REGION 1..5: note = Description of Artificial Sequence: Synthetic peptide
  REGION 1..5: note = XENP019765 vhCDR1
SLTMH

SEQ ID NO: 5052 - protein, 17 aa, synthetic construct
  REGION 1..17: note = Description of Artificial Sequence: Synthetic peptide
  REGION 1..17: note = XENP019765 vhCDR2
FISYDGNNKYYADSVKG

SEQ ID NO: 5053 - protein, 9 aa, synthetic construct
  REGION 1..9: note = Description of Artificial Sequence: Synthetic peptide
  REGION 1..9: note = XENP019765 vhCDR3
TGWLGPFDY

SEQ ID NO: 5054 - protein, 12 aa, synthetic construct
  REGION 1..12: note = Description of Artificial Sequence: Synthetic peptide
  REGION 1..12: note = XENP019765 vlCDR1
RASQSVGSSYLA

SEQ ID NO: 5055 - protein, 7 aa, synthetic construct
  REGION 1..7: note = Description of Artificial Sequence: Synthetic peptide
  REGION 1..7: note = XENP019765 vlCDR2
GAFSRAT

SEQ ID NO: 5056 - protein, 9 aa, synthetic construct
  REGION 1..9: note = Description of Artificial Sequence: Synthetic peptide
  REGION 1..9: note = XENP019765 vlCDR3
QQYGSSPWT

SEQ ID NO: 5057 - protein, 246 aa, synthetic construct
  REGION 1..246: note = Description of Artificial Sequence: Synthetic polypeptide
  REGION 1..246: note = XENP019766 [CTLA-4]_H0.22_L0_scFv(GKPGS)4
QVQLVESGGGVVQPGRSLRLSCAASGFTFSSNTMHWVRQAPGKGLEWVTFISYDGNNKYYADSVKGRFTISRDNSKNTLYLQMNSLRAEDTAIYYCARTGWLGPFDYWGQGTLVTVSSGKPGSGKPGSGKPGSGKPGSEIVLTQSPGTLSLSPGERATLSCRASQSVGSSYLAWYQQKPGQAPRLLIYGAFSRATGIPDRFSGSGSGTDFTLTISRLEPEDFAVYYCQQYGSSPWTFGQGTKVEIK

SEQ ID NO: 5058 - protein, 118 aa, synthetic construct
  REGION 1..118: note = Description of Artificial Sequence: Synthetic polypeptide
  REGION 1..118: note = VH of XENP019766
QVQLVESGGGVVQPGRSLRLSCAASGFTFSSNTMHWVRQAPGKGLEWVTFISYDGNNKYYADSVKGRFTISRDNSKNTLYLQMNSLRAEDTAIYYCARTGWLGPFDYWGQGTLVTVSS

SEQ ID NO: 5059 - protein, 108 aa, synthetic construct; identical to SEQ ID NO: 3741
  REGION 1..108: note = Description of Artificial Sequence: Synthetic polypeptide
  REGION 1..108: note = VL of XENP019766

SEQ ID NO: 5060 - protein, 5 aa, synthetic construct
  REGION 1..5: note = Description of Artificial Sequence: Synthetic peptide
  REGION 1..5: note = XENP019766 vhCDR1
SNTMH

SEQ ID NO: 5061 - protein, 17 aa, synthetic construct
  REGION 1..17: note = Description of Artificial Sequence: Synthetic peptide
  REGION 1..17: note = XENP019766 vhCDR2
FISYDGNNKYYADSVKG

SEQ ID NO: 5062 - protein, 9 aa, synthetic construct
  REGION 1..9: note = Description of Artificial Sequence: Synthetic peptide
  REGION 1..9: note = XENP019766 vhCDR3
TGWLGPFDY

SEQ ID NO: 5063 - protein, 12 aa, synthetic construct
  REGION 1..12: note = Description of Artificial Sequence: Synthetic peptide
  REGION 1..12: note = XENP019766 vlCDR1
RASQSVGSSYLA

SEQ ID NO: 5064 - protein, 7 aa, synthetic construct
  REGION 1..7: note = Description of Artificial Sequence: Synthetic peptide
  REGION 1..7: note = XENP019766 vlCDR2
GAFSRAT

SEQ ID NO: 5065 - protein, 9 aa, synthetic construct
  REGION 1..9: note = Description of Artificial Sequence: Synthetic peptide
  REGION 1..9: note = XENP019766 vlCDR3
QQYGSSPWT

SEQ ID NO: 5066 - protein, 246 aa, synthetic construct
  REGION 1..246: note = Description of Artificial Sequence: Synthetic polypeptide
  REGION 1..246: note = XENP019767 [CTLA-4]_H0.23_L0_scFv(GKPGS)4
QVQLVESGGGVVQPGRSLRLSCAASGFTFSSSTMHWVRQAPGKGLEWVTFISYDGNNKYYADSVKGRFTISRDNSKNTLYLQMNSLRAEDTAIYYCARTGWLGPFDYWGQGTLVTVSSGKPGSGKPGSGKPGSGKPGSEIVLTQSPGTLSLSPGERATLSCRASQSVGSSYLAWYQQKPGQAPRLLIYGAFSRATGIPDRFSGSGSGTDFTLTISRLEPEDFAVYYCQQYGSSPWTFGQGTKVEIK

SEQ ID NO: 5067 - protein, 118 aa, synthetic construct
  REGION 1..118: note = Description of Artificial Sequence: Synthetic polypeptide
  REGION 1..118: note = VH of XENP019767
QVQLVESGGGVVQPGRSLRLSCAASGFTFSSSTMHWVRQAPGKGLEWVTFISYDGNNKYYADSVKGRFTISRDNSKNTLYLQMNSLRAEDTAIYYCARTGWLGPFDYWGQGTLVTVSS

SEQ ID NO: 5068 - protein, 108 aa, synthetic construct; identical to SEQ ID NO: 3741
  REGION 1..108: note = Description of Artificial Sequence: Synthetic polypeptide
  REGION 1..108: note = VL of XENP019767

SEQ ID NO: 5069 - protein, 5 aa, synthetic construct
  REGION 1..5: note = Description of Artificial Sequence: Synthetic peptide
  REGION 1..5: note = XENP019767 vhCDR1
SSTMH

SEQ ID NO: 5070 - protein, 17 aa, synthetic construct
  REGION 1..17: note = Description of Artificial Sequence: Synthetic peptide
  REGION 1..17: note = XENP019767 vhCDR2
FISYDGNNKYYADSVKG

SEQ ID NO: 5071 - protein, 9 aa, synthetic construct
  REGION 1..9: note = Description of Artificial Sequence: Synthetic peptide
  REGION 1..9: note = XENP019767 vhCDR3
TGWLGPFDY

SEQ ID NO: 5072 - protein, 12 aa, synthetic construct
  REGION 1..12: note = Description of Artificial Sequence: Synthetic peptide
  REGION 1..12: note = XENP019767 vlCDR1
RASQSVGSSYLA

SEQ ID NO: 5073 - protein, 7 aa, synthetic construct
  REGION 1..7: note = Description of Artificial Sequence: Synthetic peptide
  REGION 1..7: note = XENP019767 vlCDR2
GAFSRAT

SEQ ID NO: 5074 - protein, 9 aa, synthetic construct
  REGION 1..9: note = Description of Artificial Sequence: Synthetic peptide
  REGION 1..9: note = XENP019767 vlCDR3
QQYGSSPWT

SEQ ID NO: 5075 - protein, 246 aa, synthetic construct
  REGION 1..246: note = Description of Artificial Sequence: Synthetic polypeptide
  REGION 1..246: note = XENP019768 [CTLA-4]_H0.24_L0_scFv(GKPGS)4
QVQLVESGGGVVQPGRSLRLSCAASGFTFSSVTMHWVRQAPGKGLEWVTFISYDGNNKYYADSVKGRFTISRDNSKNTLYLQMNSLRAEDTAIYYCARTGWLGPFDYWGQGTLVTVSSGKPGSGKPGSGKPGSGKPGSEIVLTQSPGTLSLSPGERATLSCRASQSVGSSYLAWYQQKPGQAPRLLIYGAFSRATGIPDRFSGSGSGTDFTLTISRLEPEDFAVYYCQQYGSSPWTFGQGTKVEIK

SEQ ID NO: 5076 - protein, 118 aa, synthetic construct
  REGION 1..118: note = Description of Artificial Sequence: Synthetic polypeptide
  REGION 1..118: note = VH of XENP019768
QVQLVESGGGVVQPGRSLRLSCAASGFTFSSVTMHWVRQAPGKGLEWVTFISYDGNNKYYADSVKGRFTISRDNSKNTLYLQMNSLRAEDTAIYYCARTGWLGPFDYWGQGTLVTVSS

SEQ ID NO: 5077 - protein, 108 aa, synthetic construct; identical to SEQ ID NO: 3741
  REGION 1..108: note = Description of Artificial Sequence: Synthetic polypeptide
  REGION 1..108: note = VL of XENP019768

SEQ ID NO: 5078 - protein, 5 aa, synthetic construct
  REGION 1..5: note = Description of Artificial Sequence: Synthetic peptide
  REGION 1..5: note = XENP019768 vhCDR1
SVTMH

SEQ ID NO: 5079 - protein, 17 aa, synthetic construct
  REGION 1..17: note = Description of Artificial Sequence: Synthetic peptide
  REGION 1..17: note = XENP019768 vhCDR2
FISYDGNNKYYADSVKG

SEQ ID NO: 5080 - protein, 9 aa, synthetic construct
  REGION 1..9: note = Description of Artificial Sequence: Synthetic peptide
  REGION 1..9: note = XENP019768 vhCDR3
TGWLGPFDY

SEQ ID NO: 5081 - protein, 12 aa, synthetic construct
  REGION 1..12: note = Description of Artificial Sequence: Synthetic peptide
  REGION 1..12: note = XENP019768 vlCDR1
RASQSVGSSYLA

SEQ ID NO: 5082 - protein, 7 aa, synthetic construct
  REGION 1..7: note = Description of Artificial Sequence: Synthetic peptide
  REGION 1..7: note = XENP019768 vlCDR2
GAFSRAT

SEQ ID NO: 5083 - protein, 9 aa, synthetic construct
  REGION 1..9: note = Description of Artificial Sequence: Synthetic peptide
  REGION 1..9: note = XENP019768 vlCDR3
QQYGSSPWT

SEQ ID NO: 5084 - protein, 246 aa, synthetic construct
  REGION 1..246: note = Description of Artificial Sequence: Synthetic polypeptide
  REGION 1..246: note = XENP019769 [CTLA-4]_H0.25_L0_scFv(GKPGS)4
QVQLVESGGGVVQPGRSLRLSCAASGFTFSSYAMHWVRQAPGKGLEWVTFISYDGNNKYYADSVKGRFTISRDNSKNTLYLQMNSLRAEDTAIYYCARTGWLGPFDYWGQGTLVTVSSGKPGSGKPGSGKPGSGKPGSEIVLTQSPGTLSLSPGERATLSCRASQSVGSSYLAWYQQKPGQAPRLLIYGAFSRATGIPDRFSGSGSGTDFTLTISRLEPEDFAVYYCQQYGSSPWTFGQGTKVEIK

SEQ ID NO: 5085 - protein, 118 aa, synthetic construct
  REGION 1..118: note = Description of Artificial Sequence: Synthetic polypeptide
  REGION 1..118: note = VH of XENP019769
QVQLVESGGGVVQPGRSLRLSCAASGFTFSSYAMHWVRQAPGKGLEWVTFISYDGNNKYYADSVKGRFTISRDNSKNTLYLQMNSLRAEDTAIYYCARTGWLGPFDYWGQGTLVTVSS

SEQ ID NO: 5086 - protein, 108 aa, synthetic construct; identical to SEQ ID NO: 3741
  REGION 1..108: note = Description of Artificial Sequence: Synthetic polypeptide
  REGION 1..108: note = VL of XENP019769

SEQ ID NO: 5087 - protein, 5 aa, synthetic construct
  REGION 1..5: note = Description of Artificial Sequence: Synthetic peptide
  REGION 1..5: note = XENP019769 vhCDR1
SYAMH

SEQ ID NO: 5088 - protein, 17 aa, synthetic construct
  REGION 1..17: note = Description of Artificial Sequence: Synthetic peptide
  REGION 1..17: note = XENP019769 vhCDR2
FISYDGNNKYYADSVKG

SEQ ID NO: 5089 - protein, 9 aa, synthetic construct
  REGION 1..9: note = Description of Artificial Sequence: Synthetic peptide
  REGION 1..9: note = XENP019769 vhCDR3
TGWLGPFDY

SEQ ID NO: 5090 - protein, 12 aa, synthetic construct
  REGION 1..12: note = Description of Artificial Sequence: Synthetic peptide
  REGION 1..12: note = XENP019769 vlCDR1
RASQSVGSSYLA

SEQ ID NO: 5091 - protein, 7 aa, synthetic construct
  REGION 1..7: note = Description of Artificial Sequence: Synthetic peptide
  REGION 1..7: note = XENP019769 vlCDR2
GAFSRAT

SEQ ID NO: 5092 - protein, 9 aa, synthetic construct
  REGION 1..9: note = Description of Artificial Sequence: Synthetic peptide
  REGION 1..9: note = XENP019769 vlCDR3
QQYGSSPWT

SEQ ID NO: 5093 - protein, 246 aa, synthetic construct
  REGION 1..246: note = Description of Artificial Sequence: Synthetic polypeptide
  REGION 1..246: note = XENP019770 [CTLA-4]_H0.26_L0_scFv(GKPGS)4
QVQLVESGGGVVQPGRSLRLSCAASGFTFSSYGMHWVRQAPGKGLEWVTFISYDGNNKYYADSVKGRFTISRDNSKNTLYLQMNSLRAEDTAIYYCARTGWLGPFDYWGQGTLVTVSSGKPGSGKPGSGKPGSGKPGSEIVLTQSPGTLSLSPGERATLSCRASQSVGSSYLAWYQQKPGQAPRLLIYGAFSRATGIPDRFSGSGSGTDFTLTISRLEPEDFAVYYCQQYGSSPWTFGQGTKVEIK

SEQ ID NO: 5094 - protein, 118 aa, synthetic construct
  REGION 1..118: note = Description of Artificial Sequence: Synthetic polypeptide
  REGION 1..118: note = VH of XENP019770
QVQLVESGGGVVQPGRSLRLSCAASGFTFSSYGMHWVRQAPGKGLEWVTFISYDGNNKYYADSVKGRFTISRDNSKNTLYLQMNSLRAEDTAIYYCARTGWLGPFDYWGQGTLVTVSS

SEQ ID NO: 5095 - protein, 108 aa, synthetic construct; identical to SEQ ID NO: 3741
  REGION 1..108: note = Description of Artificial Sequence: Synthetic polypeptide
  REGION 1..108: note = VL of XENP019770

SEQ ID NO: 5096 - protein, 5 aa, synthetic construct
  REGION 1..5: note = Description of Artificial Sequence: Synthetic peptide
  REGION 1..5: note = XENP019770 vhCDR1
SYGMH

SEQ ID NO: 5097 - protein, 17 aa, synthetic construct
  REGION 1..17: note = Description of Artificial Sequence: Synthetic peptide
  REGION 1..17: note = XENP019770 vhCDR2
FISYDGNNKYYADSVKG

SEQ ID NO: 5098 - protein, 9 aa, synthetic construct
  REGION 1..9: note = Description of Artificial Sequence: Synthetic peptide
  REGION 1..9: note = XENP019770 vhCDR3
TGWLGPFDY

SEQ ID NO: 5099 - protein, 12 aa, synthetic construct
  REGION 1..12: note = Description of Artificial Sequence: Synthetic peptide
  REGION 1..12: note = XENP019770 vlCDR1
RASQSVGSSYLA

SEQ ID NO: 5100 - protein, 7 aa, synthetic construct
  REGION 1..7: note = Description of Artificial Sequence: Synthetic peptide
  REGION 1..7: note = XENP019770 vlCDR2
GAFSRAT

SEQ ID NO: 5101 - protein, 9 aa, synthetic construct
  REGION 1..9: note = Description of Artificial Sequence: Synthetic peptide
  REGION 1..9: note = XENP019770 vlCDR3
QQYGSSPWT

SEQ ID NO: 5102 - protein, 246 aa, synthetic construct
  REGION 1..246: note = Description of Artificial Sequence: Synthetic polypeptide
  REGION 1..246: note = XENP019771 [CTLA-4]_H0.27_L0_scFv(GKPGS)4
QVQLVESGGGVVQPGRSLRLSCAASGFTFSSYSMHWVRQAPGKGLEWVTFISYDGNNKYYADSVKGRFTISRDNSKNTLYLQMNSLRAEDTAIYYCARTGWLGPFDYWGQGTLVTVSSGKPGSGKPGSGKPGSGKPGSEIVLTQSPGTLSLSPGERATLSCRASQSVGSSYLAWYQQKPGQAPRLLIYGAFSRATGIPDRFSGSGSGTDFTLTISRLEPEDFAVYYCQQYGSSPWTFGQGTKVEIK

SEQ ID NO: 5103 - protein, 118 aa, synthetic construct
  REGION 1..118: note = Description of Artificial Sequence: Synthetic polypeptide
  REGION 1..118: note = VH of XENP019771
QVQLVESGGGVVQPGRSLRLSCAASGFTFSSYSMHWVRQAPGKGLEWVTFISYDGNNKYYADSVKGRFTISRDNSKNTLYLQMNSLRAEDTAIYYCARTGWLGPFDYWGQGTLVTVSS

SEQ ID NO: 5104 - protein, 108 aa, synthetic construct; identical to SEQ ID NO: 3741
  REGION 1..108: note = Description of Artificial Sequence: Synthetic polypeptide
  REGION 1..108: note = VL of XENP019771

SEQ ID NO: 5105 - protein, 5 aa, synthetic construct
  REGION 1..5: note = Description of Artificial Sequence: Synthetic peptide
  REGION 1..5: note = XENP019771 vhCDR1
SYSMH

SEQ ID NO: 5106 - protein, 17 aa, synthetic construct
  REGION 1..17: note = Description of Artificial Sequence: Synthetic peptide
  REGION 1..17: note = XENP019771 vhCDR2
FISYDGNNKYYADSVKG

SEQ ID NO: 5107 - protein, 9 aa, synthetic construct
  REGION 1..9: note = Description of Artificial Sequence: Synthetic peptide
  REGION 1..9: note = XENP019771 vhCDR3
TGWLGPFDY

SEQ ID NO: 5108 - protein, 12 aa, synthetic construct
  REGION 1..12: note = Description of Artificial Sequence: Synthetic peptide
  REGION 1..12: note = XENP019771 vlCDR1
RASQSVGSSYLA

SEQ ID NO: 5109 - protein, 7 aa, synthetic construct
  REGION 1..7: note = Description of Artificial Sequence: Synthetic peptide
  REGION 1..7: note = XENP019771 vlCDR2
GAFSRAT

SEQ ID NO: 5110 - protein, 9 aa, synthetic construct
  REGION 1..9: note = Description of Artificial Sequence: Synthetic peptide
  REGION 1..9: note = XENP019771 vlCDR3
QQYGSSPWT

SEQ ID NO: 5111 - protein, 246 aa, synthetic construct
  REGION 1..246: note = Description of Artificial Sequence: Synthetic polypeptide
  REGION 1..246: note = XENP019772 [CTLA-4]_H0.28_L0_scFv(GKPGS)4
QVQLVESGGGVVQPGRSLRLSCAASGFTFSSYVMHWVRQAPGKGLEWVTFISYDGNNKYYADSVKGRFTISRDNSKNTLYLQMNSLRAEDTAIYYCARTGWLGPFDYWGQGTLVTVSSGKPGSGKPGSGKPGSGKPGSEIVLTQSPGTLSLSPGERATLSCRASQSVGSSYLAWYQQKPGQAPRLLIYGAFSRATGIPDRFSGSGSGTDFTLTISRLEPEDFAVYYCQQYGSSPWTFGQGTKVEIK

SEQ ID NO: 5112 - protein, 118 aa, synthetic construct
  REGION 1..118: note = Description of Artificial Sequence: Synthetic polypeptide
  REGION 1..118: note = VH of XENP019772
QVQLVESGGGVVQPGRSLRLSCAASGFTFSSYVMHWVRQAPGKGLEWVTFISYDGNNKYYADSVKGRFTISRDNSKNTLYLQMNSLRAEDTAIYYCARTGWLGPFDYWGQGTLVTVSS

SEQ ID NO: 5113 - protein, 108 aa, synthetic construct; identical to SEQ ID NO: 3741
  REGION 1..108: note = Description of Artificial Sequence: Synthetic polypeptide
  REGION 1..108: note = VL of XENP019772

SEQ ID NO: 5114 - protein, 5 aa, synthetic construct
  REGION 1..5: note = Description of Artificial Sequence: Synthetic peptide
  REGION 1..5: note = XENP019772 vhCDR1
SYVMH

SEQ ID NO: 5115 - protein, 17 aa, synthetic construct
  REGION 1..17: note = Description of Artificial Sequence: Synthetic peptide
  REGION 1..17: note = XENP019772 vhCDR2
FISYDGNNKYYADSVKG

SEQ ID NO: 5116 - protein, 9 aa, synthetic construct
  REGION 1..9: note = Description of Artificial Sequence: Synthetic peptide
  REGION 1..9: note = XENP019772 vhCDR3
TGWLGPFDY

SEQ ID NO: 5117 - protein, 12 aa, synthetic construct
  REGION 1..12: note = Description of Artificial Sequence: Synthetic peptide
  REGION 1..12: note = XENP019772 vlCDR1
RASQSVGSSYLA

SEQ ID NO: 5118 - protein, 7 aa, synthetic construct
  REGION 1..7: note = Description of Artificial Sequence: Synthetic peptide
  REGION 1..7: note = XENP019772 vlCDR2
GAFSRAT

SEQ ID NO: 5119 - protein, 9 aa, synthetic construct
  REGION 1..9: note = Description of Artificial Sequence: Synthetic peptide
  REGION 1..9: note = XENP019772 vlCDR3
QQYGSSPWT

SEQ ID NO: 5120 - protein, 246 aa, synthetic construct
  REGION 1..246: note = Description of Artificial Sequence: Synthetic polypeptide
  REGION 1..246: note = XENP019773 [CTLA-4]_H0.29_L0_scFv(GKPGS)4
QVQLVESGGGVVQPGRSLRLSCAASGFTFSSYYMHWVRQAPGKGLEWVTFISYDGNNKYYADSVKGRFTISRDNSKNTLYLQMNSLRAEDTAIYYCARTGWLGPFDYWGQGTLVTVSSGKPGSGKPGSGKPGSGKPGSEIVLTQSPGTLSLSPGERATLSCRASQSVGSSYLAWYQQKPGQAPRLLIYGAFSRATGIPDRFSGSGSGTDFTLTISRLEPEDFAVYYCQQYGSSPWTFGQGTKVEIK

SEQ ID NO: 5121 - protein, 118 aa, synthetic construct
  REGION 1..118: note = Description of Artificial Sequence: Synthetic polypeptide
  REGION 1..118: note = VH of XENP019773
QVQLVESGGGVVQPGRSLRLSCAASGFTFSSYYMHWVRQAPGKGLEWVTFISYDGNNKYYADSVKGRFTISRDNSKNTLYLQMNSLRAEDTAIYYCARTGWLGPFDYWGQGTLVTVSS

SEQ ID NO: 5122 - protein, 108 aa, synthetic construct; identical to SEQ ID NO: 3741
  REGION 1..108: note = Description of Artificial Sequence: Synthetic polypeptide
  REGION 1..108: note = VL of XENP019773

SEQ ID NO: 5123 - protein, 5 aa, synthetic construct
  REGION 1..5: note = Description of Artificial Sequence: Synthetic peptide
  REGION 1..5: note = XENP019773 vhCDR1
SYYMH

SEQ ID NO: 5124 - protein, 17 aa, synthetic construct
  REGION 1..17: note = Description of Artificial Sequence: Synthetic peptide
  REGION 1..17: note = XENP019773 vhCDR2
FISYDGNNKYYADSVKG

SEQ ID NO: 5125 - protein, 9 aa, synthetic construct
  REGION 1..9: note = Description of Artificial Sequence: Synthetic peptide
  REGION 1..9: note = XENP019773 vhCDR3
TGWLGPFDY

SEQ ID NO: 5126 - protein, 12 aa, synthetic construct
  REGION 1..12: note = Description of Artificial Sequence: Synthetic peptide
  REGION 1..12: note = XENP019773 vlCDR1
RASQSVGSSYLA

SEQ ID NO: 5127 - protein, 7 aa, synthetic construct
  REGION 1..7: note = Description of Artificial Sequence: Synthetic peptide
  REGION 1..7: note = XENP019773 vlCDR2
GAFSRAT

SEQ ID NO: 5128 - protein, 9 aa, synthetic construct
  REGION 1..9: note = Description of Artificial Sequence: Synthetic peptide
  REGION 1..9: note = XENP019773 vlCDR3
QQYGSSPWT

SEQ ID NO: 5129 - protein, 246 aa, synthetic construct
  REGION 1..246: note = Description of Artificial Sequence: Synthetic polypeptide
  REGION 1..246: note = XENP019774 [CTLA-4]_H0.30_L0_scFv(GKPGS)4
QVQLVESGGGVVQPGRSLRLSCAASGFTFSSYTMDWVRQAPGKGLEWVTFISYDGNNKYYADSVKGRFTISRDNSKNTLYLQMNSLRAEDTAIYYCARTGWLGPFDYWGQGTLVTVSSGKPGSGKPGSGKPGSGKPGSEIVLTQSPGTLSLSPGERATLSCRASQSVGSSYLAWYQQKPGQAPRLLIYGAFSRATGIPDRFSGSGSGTDFTLTISRLEPEDFAVYYCQQYGSSPWTFGQGTKVEIK

SEQ ID NO: 5130 - protein, 118 aa, synthetic construct
  REGION 1..118: note = Description of Artificial Sequence: Synthetic polypeptide
  REGION 1..118: note = VH of XENP019774
QVQLVESGGGVVQPGRSLRLSCAASGFTFSSYTMDWVRQAPGKGLEWVTFISYDGNNKYYADSVKGRFTISRDNSKNTLYLQMNSLRAEDTAIYYCARTGWLGPFDYWGQGTLVTVSS

SEQ ID NO: 5131 - protein, 108 aa, synthetic construct; identical to SEQ ID NO: 3741
  REGION 1..108: note = Description of Artificial Sequence: Synthetic polypeptide
  REGION 1..108: note = VL of XENP019774

SEQ ID NO: 5132 - protein, 5 aa, synthetic construct
  REGION 1..5: note = Description of Artificial Sequence: Synthetic peptide
  REGION 1..5: note = XENP019774 vhCDR1
SYTMD

SEQ ID NO: 5133 - protein, 17 aa, synthetic construct
  REGION 1..17: note = Description of Artificial Sequence: Synthetic peptide
  REGION 1..17: note = XENP019774 vhCDR2
FISYDGNNKYYADSVKG

SEQ ID NO: 5134 - protein, 9 aa, synthetic construct
  REGION 1..9: note = Description of Artificial Sequence: Synthetic peptide
  REGION 1..9: note = XENP019774 vhCDR3
TGWLGPFDY

SEQ ID NO: 5135 - protein, 12 aa, synthetic construct
  REGION 1..12: note = Description of Artificial Sequence: Synthetic peptide
  REGION 1..12: note = XENP019774 vlCDR1
RASQSVGSSYLA

SEQ ID NO: 5136 - protein, 7 aa, synthetic construct
  REGION 1..7: note = Description of Artificial Sequence: Synthetic peptide
  REGION 1..7: note = XENP019774 vlCDR2
GAFSRAT

SEQ ID NO: 5137 - protein, 9 aa, synthetic construct
  REGION 1..9: note = Description of Artificial Sequence: Synthetic peptide
  REGION 1..9: note = XENP019774 vlCDR3
QQYGSSPWT

SEQ ID NO: 5138 - protein, 246 aa, synthetic construct
  REGION 1..246: note = Description of Artificial Sequence: Synthetic polypeptide
  REGION 1..246: note = XENP019775 [CTLA-4]_H0.31_L0_scFv(GKPGS)4
QVQLVESGGGVVQPGRSLRLSCAASGFTFSSYTMFWVRQAPGKGLEWVTFISYDGNNKYYADSVKGRFTISRDNSKNTLYLQMNSLRAEDTAIYYCARTGWLGPFDYWGQGTLVTVSSGKPGSGKPGSGKPGSGKPGSEIVLTQSPGTLSLSPGERATLSCRASQSVGSSYLAWYQQKPGQAPRLLIYGAFSRATGIPDRFSGSGSGTDFTLTISRLEPEDFAVYYCQQYGSSPWTFGQGTKVEIK

SEQ ID NO: 5139 - protein, 118 aa, synthetic construct
  REGION 1..118: note = Description of Artificial Sequence: Synthetic polypeptide
  REGION 1..118: note = VH of XENP019775
QVQLVESGGGVVQPGRSLRLSCAASGFTFSSYTMFWVRQAPGKGLEWVTFISYDGNNKYYADSVKGRFTISRDNSKNTLYLQMNSLRAEDTAIYYCARTGWLGPFDYWGQGTLVTVSS

SEQ ID NO: 5140 - protein, 108 aa, synthetic construct; identical to SEQ ID NO: 3741
  REGION 1..108: note = Description of Artificial Sequence: Synthetic polypeptide
  REGION 1..108: note = VL of XENP019775

SEQ ID NO: 5141 - protein, 5 aa, synthetic construct
  REGION 1..5: note = Description of Artificial Sequence: Synthetic peptide
  REGION 1..5: note = XENP019775 vhCDR1
SYTMF

SEQ ID NO: 5142 - protein, 17 aa, synthetic construct
  REGION 1..17: note = Description of Artificial Sequence: Synthetic peptide
  REGION 1..17: note = XENP019775 vhCDR2
FISYDGNNKYYADSVKG

SEQ ID NO: 5143 - protein, 9 aa, synthetic construct
  REGION 1..9: note = Description of Artificial Sequence: Synthetic peptide
  REGION 1..9: note = XENP019775 vhCDR3
TGWLGPFDY

SEQ ID NO: 5144 - protein, 12 aa, synthetic construct
  REGION 1..12: note = Description of Artificial Sequence: Synthetic peptide
  REGION 1..12: note = XENP019775 vlCDR1
RASQSVGSSYLA

SEQ ID NO: 5145 - protein, 7 aa, synthetic construct
  REGION 1..7: note = Description of Artificial Sequence: Synthetic peptide
  REGION 1..7: note = XENP019775 vlCDR2
GAFSRAT

SEQ ID NO: 5146 - protein, 9 aa, synthetic construct
  REGION 1..9: note = Description of Artificial Sequence: Synthetic peptide
  REGION 1..9: note = XENP019775 vlCDR3
QQYGSSPWT

SEQ ID NO: 5147 - protein, 246 aa, synthetic construct
  REGION 1..246: note = Description of Artificial Sequence: Synthetic polypeptide
  REGION 1..246: note = XENP019776 [CTLA-4]_H0.32_L0_scFv(GKPGS)4
QVQLVESGGGVVQPGRSLRLSCAASGFTFSSYTMNWVRQAPGKGLEWVTFISYDGNNKYYADSVKGRFTISRDNSKNTLYLQMNSLRAEDTAIYYCARTGWLGPFDYWGQGTLVTVSSGKPGSGKPGSGKPGSGKPGSEIVLTQSPGTLSLSPGERATLSCRASQSVGSSYLAWYQQKPGQAPRLLIYGAFSRATGIPDRFSGSGSGTDFTLTISRLEPEDFAVYYCQQYGSSPWTFGQGTKVEIK

SEQ ID NO: 5148 - protein, 118 aa, synthetic construct
  REGION 1..118: note = Description of Artificial Sequence: Synthetic polypeptide
  REGION 1..118: note = VH of XENP019776
QVQLVESGGGVVQPGRSLRLSCAASGFTFSSYTMNWVRQAPGKGLEWVTFISYDGNNKYYADSVKGRFTISRDNSKNTLYLQMNSLRAEDTAIYYCARTGWLGPFDYWGQGTLVTVSS

SEQ ID NO: 5149 - protein, 108 aa, synthetic construct; identical to SEQ ID NO: 3741
  REGION 1..108: note = Description of Artificial Sequence: Synthetic polypeptide
  REGION 1..108: note = VL of XENP019776

SEQ ID NO: 5150 - protein, 5 aa, synthetic construct
  REGION 1..5: note = Description of Artificial Sequence: Synthetic peptide
  REGION 1..5: note = XENP019776 vhCDR1
SYTMN

SEQ ID NO: 5151 - protein, 17 aa, synthetic construct
  REGION 1..17: note = Description of Artificial Sequence: Synthetic peptide
  REGION 1..17: note = XENP019776 vhCDR2
FISYDGNNKYYADSVKG

SEQ ID NO: 5152 - protein, 9 aa, synthetic construct
  REGION 1..9: note = Description of Artificial Sequence: Synthetic peptide
  REGION 1..9: note = XENP019776 vhCDR3
TGWLGPFDY

SEQ ID NO: 5153 - protein, 12 aa, synthetic construct
  REGION 1..12: note = Description of Artificial Sequence: Synthetic peptide
  REGION 1..12: note = XENP019776 vlCDR1
RASQSVGSSYLA

SEQ ID NO: 5154 - protein, 7 aa, synthetic construct
  REGION 1..7: note = Description of Artificial Sequence: Synthetic peptide
  REGION 1..7: note = XENP019776 vlCDR2
GAFSRAT

SEQ ID NO: 5155 - protein, 9 aa, synthetic construct
  REGION 1..9: note = Description of Artificial Sequence: Synthetic peptide
  REGION 1..9: note = XENP019776 vlCDR3
QQYGSSPWT

SEQ ID NO: 5156 - protein, 246 aa, synthetic construct
  REGION 1..246: note = Description of Artificial Sequence: Synthetic polypeptide
  REGION 1..246: note = XENP019777 [CTLA-4]_H0.33_L0_scFv(GKPGS)4
QVQLVESGGGVVQPGRSLRLSCAASGFTFSSYTMSWVRQAPGKGLEWVTFISYDGNNKYYADSVKGRFTISRDNSKNTLYLQMNSLRAEDTAIYYCARTGWLGPFDYWGQGTLVTVSSGKPGSGKPGSGKPGSGKPGSEIVLTQSPGTLSLSPGERATLSCRASQSVGSSYLAWYQQKPGQAPRLLIYGAFSRATGIPDRFSGSGSGTDFTLTISRLEPEDFAVYYCQQYGSSPWTFGQGTKVEIK

SEQ ID NO: 5157 - protein, 118 aa, synthetic construct
  REGION 1..118: note = Description of Artificial Sequence: Synthetic polypeptide
  REGION 1..118: note = VH of XENP019777
QVQLVESGGGVVQPGRSLRLSCAASGFTFSSYTMSWVRQAPGKGLEWVTFISYDGNNKYYADSVKGRFTISRDNSKNTLYLQMNSLRAEDTAIYYCARTGWLGPFDYWGQGTLVTVSS

SEQ ID NO: 5158 - protein, 108 aa, synthetic construct; identical to SEQ ID NO: 3741
  REGION 1..108: note = Description of Artificial Sequence: Synthetic polypeptide
  REGION 1..108: note = VL of XENP019777

SEQ ID NO: 5159 - protein, 5 aa, synthetic construct
  REGION 1..5: note = Description of Artificial Sequence: Synthetic peptide
  REGION 1..5: note = XENP019777 vhCDR1
SYTMS

SEQ ID NO: 5160 - protein, 17 aa, synthetic construct
  REGION 1..17: note = Description of Artificial Sequence: Synthetic peptide
  REGION 1..17: note = XENP019777 vhCDR2
FISYDGNNKYYADSVKG

SEQ ID NO: 5161 - protein, 9 aa, synthetic construct
  REGION 1..9: note = Description of Artificial Sequence: Synthetic peptide
  REGION 1..9: note = XENP019777 vhCDR3
TGWLGPFDY

SEQ ID NO: 5162 - protein, 12 aa, synthetic construct
  REGION 1..12: note = Description of Artificial Sequence: Synthetic peptide
  REGION 1..12: note = XENP019777 vlCDR1
RASQSVGSSYLA

SEQ ID NO: 5163 - protein, 7 aa, synthetic construct
  REGION 1..7: note = Description of Artificial Sequence: Synthetic peptide
  REGION 1..7: note = XENP019777 vlCDR2
GAFSRAT

SEQ ID NO: 5164 - protein, 9 aa, synthetic construct
  REGION 1..9: note = Description of Artificial Sequence: Synthetic peptide
  REGION 1..9: note = XENP019777 vlCDR3
QQYGSSPWT

SEQ ID NO: 5165 - protein, 246 aa, synthetic construct
  REGION 1..246: note = Description of Artificial Sequence: Synthetic polypeptide
  REGION 1..246: note = XENP019778 [CTLA-4]_H0.34_L0_scFv(GKPGS)4
QVQLVESGGGVVQPGRSLRLSCAASGFTFSSYTMYWVRQAPGKGLEWVTFISYDGNNKYYADSVKGRFTISRDNSKNTLYLQMNSLRAEDTAIYYCARTGWLGPFDYWGQGTLVTVSSGKPGSGKPGSGKPGSGKPGSEIVLTQSPGTLSLSPGERATLSCRASQSVGSSYLAWYQQKPGQAPRLLIYGAFSRATGIPDRFSGSGSGTDFTLTISRLEPEDFAVYYCQQYGSSPWTFGQGTKVEIK

SEQ ID NO: 5166 - protein, 118 aa, synthetic construct
  REGION 1..118: note = Description of Artificial Sequence: Synthetic polypeptide
  REGION 1..118: note = VH of XENP019778
QVQLVESGGGVVQPGRSLRLSCAASGFTFSSYTMYWVRQAPGKGLEWVTFISYDGNNKYYADSVKGRFTISRDNSKNTLYLQMNSLRAEDTAIYYCARTGWLGPFDYWGQGTLVTVSS

SEQ ID NO: 5167 - protein, 108 aa, synthetic construct; identical to SEQ ID NO: 3741
  REGION 1..108: note = Description of Artificial Sequence: Synthetic polypeptide
  REGION 1..108: note = VL of XENP019778

SEQ ID NO: 5168 - protein, 5 aa, synthetic construct
  REGION 1..5: note = Description of Artificial Sequence: Synthetic peptide
  REGION 1..5: note = XENP019778 vhCDR1
SYTMY

SEQ ID NO: 5169 - protein, 17 aa, synthetic construct
  REGION 1..17: note = Description of Artificial Sequence: Synthetic peptide
  REGION 1..17: note = XENP019778 vhCDR2
FISYDGNNKYYADSVKG

SEQ ID NO: 5170 - protein, 9 aa, synthetic construct
  REGION 1..9: note = Description of Artificial Sequence: Synthetic peptide
  REGION 1..9: note = XENP019778 vhCDR3
TGWLGPFDY

SEQ ID NO: 5171 - protein, 12 aa, synthetic construct
  REGION 1..12: note = Description of Artificial Sequence: Synthetic peptide
  REGION 1..12: note = XENP019778 vlCDR1
RASQSVGSSYLA

SEQ ID NO: 5172 - protein, 7 aa, synthetic construct
  REGION 1..7: note = Description of Artificial Sequence: Synthetic peptide
  REGION 1..7: note = XENP019778 vlCDR2
GAFSRAT

SEQ ID NO: 5173 - protein, 9 aa, synthetic construct
  REGION 1..9: note = Description of Artificial Sequence: Synthetic peptide
  REGION 1..9: note = XENP019778 vlCDR3
QQYGSSPWT

SEQ ID NO: 5174 - protein, 246 aa, synthetic construct
  REGION 1..246: note = Description of Artificial Sequence: Synthetic polypeptide
  REGION 1..246: note = XENP019779 [CTLA-4]_H0.35_L0_scFv(GKPGS)4
QVQLVESGGGVVQPGRSLRLSCAASGFTFSSYTMHWIRQAPGKGLEWVTFISYDGNNKYYADSVKGRFTISRDNSKNTLYLQMNSLRAEDTAIYYCARTGWLGPFDYWGQGTLVTVSSGKPGSGKPGSGKPGSGKPGSEIVLTQSPGTLSLSPGERATLSCRASQSVGSSYLAWYQQKPGQAPRLLIYGAFSRATGIPDRFSGSGSGTDFTLTISRLEPEDFAVYYCQQYGSSPWTFGQGTKVEIK

SEQ ID NO: 5175 - protein, 118 aa, synthetic construct
  REGION 1..118: note = Description of Artificial Sequence: Synthetic polypeptide
  REGION 1..118: note = VH of XENP019779
QVQLVESGGGVVQPGRSLRLSCAASGFTFSSYTMHWIRQAPGKGLEWVTFISYDGNNKYYADSVKGRFTISRDNSKNTLYLQMNSLRAEDTAIYYCARTGWLGPFDYWGQGTLVTVSS

SEQ ID NO: 5176 - protein, 108 aa, synthetic construct; identical to SEQ ID NO: 3741
  REGION 1..108: note = Description of Artificial Sequence: Synthetic polypeptide
  REGION 1..108: note = VL of XENP019779

SEQ ID NO: 5177 - protein, 5 aa, synthetic construct
  REGION 1..5: note = Description of Artificial Sequence: Synthetic peptide
  REGION 1..5: note = XENP019779 vhCDR1
SYTMH

SEQ ID NO: 5178 - protein, 17 aa, synthetic construct
  REGION 1..17: note = Description of Artificial Sequence: Synthetic peptide
  REGION 1..17: note = XENP019779 vhCDR2
FISYDGNNKYYADSVKG

SEQ ID NO: 5179 - protein, 9 aa, synthetic construct
  REGION 1..9: note = Description of Artificial Sequence: Synthetic peptide
  REGION 1..9: note = XENP019779 vhCDR3
TGWLGPFDY

SEQ ID NO: 5180 - protein, 12 aa, synthetic construct
  REGION 1..12: note = Description of Artificial Sequence: Synthetic peptide
  REGION 1..12: note = XENP019779 vlCDR1
RASQSVGSSYLA

SEQ ID NO: 5181 - protein, 7 aa, synthetic construct
  REGION 1..7: note = Description of Artificial Sequence: Synthetic peptide
  REGION 1..7: note = XENP019779 vlCDR2
GAFSRAT

SEQ ID NO: 5182 - protein, 9 aa, synthetic construct
  REGION 1..9: note = Description of Artificial Sequence: Synthetic peptide
  REGION 1..9: note = XENP019779 vlCDR3
QQYGSSPWT

SEQ ID NO: 5183 - protein, 246 aa, synthetic construct
  REGION 1..246: note = Description of Artificial Sequence: Synthetic polypeptide
  REGION 1..246: note = XENP019780 [CTLA-4]_H0.36_L0_scFv(GKPGS)4
QVQLVESGGGVVQPGRSLRLSCAASGFTFSSYTMHWVRKAPGKGLEWVTFISYDGNNKYYADSVKGRFTISRDNSKNTLYLQMNSLRAEDTAIYYCARTGWLGPFDYWGQGTLVTVSSGKPGSGKPGSGKPGSGKPGSEIVLTQSPGTLSLSPGERATLSCRASQSVGSSYLAWYQQKPGQAPRLLIYGAFSRATGIPDRFSGSGSGTDFTLTISRLEPEDFAVYYCQQYGSSPWTFGQGTKVEIK

SEQ ID NO: 5184 - protein, 118 aa, synthetic construct; identical to SEQ ID NO: 4707
  REGION 1..118: note = Description of Artificial Sequence: Synthetic polypeptide
  REGION 1..118: note = VH of XENP019780

SEQ ID NO: 5185 - protein, 108 aa, synthetic construct; identical to SEQ ID NO: 3741
  REGION 1..108: note = Description of Artificial Sequence: Synthetic polypeptide
  REGION 1..108: note = VL of XENP019780

SEQ ID NO: 5186 - protein, 5 aa, synthetic construct
  REGION 1..5: note = Description of Artificial Sequence: Synthetic peptide
  REGION 1..5: note = XENP019780 vhCDR1
SYTMH

SEQ ID NO: 5187 - protein, 17 aa, synthetic construct
  REGION 1..17: note = Description of Artificial Sequence: Synthetic peptide
  REGION 1..17: note = XENP019780 vhCDR2
FISYDGNNKYYADSVKG

SEQ ID NO: 5188 - protein, 9 aa, synthetic construct
  REGION 1..9: note = Description of Artificial Sequence: Synthetic peptide
  REGION 1..9: note = XENP019780 vhCDR3
TGWLGPFDY

SEQ ID NO: 5189 - protein, 12 aa, synthetic construct
  REGION 1..12: note = Description of Artificial Sequence: Synthetic peptide
  REGION 1..12: note = XENP019780 vlCDR1
RASQSVGSSYLA

SEQ ID NO: 5190 - protein, 7 aa, synthetic construct
  REGION 1..7: note = Description of Artificial Sequence: Synthetic peptide
  REGION 1..7: note = XENP019780 vlCDR2
GAFSRAT

SEQ ID NO: 5191 - protein, 9 aa, synthetic construct
  REGION 1..9: note = Description of Artificial Sequence: Synthetic peptide
  REGION 1..9: note = XENP019780 vlCDR3
QQYGSSPWT

SEQ ID NO: 5192 - protein, 246 aa, synthetic construct
  REGION 1..246: note = Description of Artificial Sequence: Synthetic polypeptide
  REGION 1..246: note = XENP019781 [CTLA-4]_H0.37_L0_scFv(GKPGS)4
QVQLVESGGGVVQPGRSLRLSCAASGFTFSSYTMHWVRQAPGKRLEWVTFISYDGNNKYYADSVKGRFTISRDNSKNTLYLQMNSLRAEDTAIYYCARTGWLGPFDYWGQGTLVTVSSGKPGSGKPGSGKPGSGKPGSEIVLTQSPGTLSLSPGERATLSCRASQSVGSSYLAWYQQKPGQAPRLLIYGAFSRATGIPDRFSGSGSGTDFTLTISRLEPEDFAVYYCQQYGSSPWTFGQGTKVEIK

SEQ ID NO: 5193 - protein, 118 aa, synthetic construct; identical to SEQ ID NO: 4725
  REGION 1..118: note = Description of Artificial Sequence: Synthetic polypeptide
  REGION 1..118: note = VH of XENP019781

SEQ ID NO: 5194 - protein, 108 aa, synthetic construct; identical to SEQ ID NO: 3741
  REGION 1..108: note = Description of Artificial Sequence: Synthetic polypeptide
  REGION 1..108: note = VL of XENP019781

SEQ ID NO: 5195 - protein, 5 aa, synthetic construct
  REGION 1..5: note = Description of Artificial Sequence: Synthetic peptide
  REGION 1..5: note = XENP019781 vhCDR1
SYTMH

SEQ ID NO: 5196 - protein, 17 aa, synthetic construct
  REGION 1..17: note = Description of Artificial Sequence: Synthetic peptide
  REGION 1..17: note = XENP019781 vhCDR2
FISYDGNNKYYADSVKG

SEQ ID NO: 5197 - protein, 9 aa, synthetic construct
  REGION 1..9: note = Description of Artificial Sequence: Synthetic peptide
  REGION 1..9: note = XENP019781 vhCDR3
TGWLGPFDY

SEQ ID NO: 5198 - protein, 12 aa, synthetic construct
  REGION 1..12: note = Description of Artificial Sequence: Synthetic peptide
  REGION 1..12: note = XENP019781 vlCDR1
RASQSVGSSYLA

SEQ ID NO: 5199 - protein, 7 aa, synthetic construct
  REGION 1..7: note = Description of Artificial Sequence: Synthetic peptide
  REGION 1..7: note = XENP019781 vlCDR2
GAFSRAT

SEQ ID NO: 5200 - protein, 9 aa, synthetic construct
  REGION 1..9: note = Description of Artificial Sequence: Synthetic peptide
  REGION 1..9: note = XENP019781 vlCDR3
QQYGSSPWT

SEQ ID NO: 5201 - protein, 246 aa, synthetic construct
  REGION 1..246: note = Description of Artificial Sequence: Synthetic polypeptide
  REGION 1..246: note = XENP019782 [CTLA-4]_H0.38_L0_scFv(GKPGS)4
QVQLVESGGGVVQPGRSLRLSCAASGFTFSSYTMHWVRQAPGKGLEWVAFISYDGNNKYYADSVKGRFTISRDNSKNTLYLQMNSLRAEDTAIYYCARTGWLGPFDYWGQGTLVTVSSGKPGSGKPGSGKPGSGKPGSEIVLTQSPGTLSLSPGERATLSCRASQSVGSSYLAWYQQKPGQAPRLLIYGAFSRATGIPDRFSGSGSGTDFTLTISRLEPEDFAVYYCQQYGSSPWTFGQGTKVEIK

SEQ ID NO: 5202 - protein, 118 aa, synthetic construct
  REGION 1..118: note = Description of Artificial Sequence: Synthetic polypeptide
  REGION 1..118: note = VH of XENP019782
QVQLVESGGGVVQPGRSLRLSCAASGFTFSSYTMHWVRQAPGKGLEWVAFISYDGNNKYYADSVKGRFTISRDNSKNTLYLQMNSLRAEDTAIYYCARTGWLGPFDYWGQGTLVTVSS

SEQ ID NO: 5203 - protein, 108 aa, synthetic construct; identical to SEQ ID NO: 3741
  REGION 1..108: note = Description of Artificial Sequence: Synthetic polypeptide
  REGION 1..108: note = VL of XENP019782

SEQ ID NO: 5204 - protein, 5 aa, synthetic construct
  REGION 1..5: note = Description of Artificial Sequence: Synthetic peptide
  REGION 1..5: note = XENP019782 vhCDR1
SYTMH

SEQ ID NO: 5205 - protein, 17 aa, synthetic construct
  REGION 1..17: note = Description of Artificial Sequence: Synthetic peptide
  REGION 1..17: note = XENP019782 vhCDR2
FISYDGNNKYYADSVKG

SEQ ID NO: 5206 - protein, 9 aa, synthetic construct
  REGION 1..9: note = Description of Artificial Sequence: Synthetic peptide
  REGION 1..9: note = XENP019782 vhCDR3
TGWLGPFDY

SEQ ID NO: 5207 - protein, 12 aa, synthetic construct
  REGION 1..12: note = Description of Artificial Sequence: Synthetic peptide
  REGION 1..12: note = XENP019782 vlCDR1
RASQSVGSSYLA

SEQ ID NO: 5208 - protein, 7 aa, synthetic construct
  REGION 1..7: note = Description of Artificial Sequence: Synthetic peptide
  REGION 1..7: note = XENP019782 vlCDR2
GAFSRAT

SEQ ID NO: 5209 - protein, 9 aa, synthetic construct
  REGION 1..9: note = Description of Artificial Sequence: Synthetic peptide
  REGION 1..9: note = XENP019782 vlCDR3
QQYGSSPWT

SEQ ID NO: 5210 - protein, 246 aa, synthetic construct
  REGION 1..246: note = Description of Artificial Sequence: Synthetic polypeptide
  REGION 1..246: note = XENP019783 [CTLA-4]_H0.39_L0_scFv(GKPGS)4
QVQLVESGGGVVQPGRSLRLSCAASGFTFSSYTMHWVRQAPGKGLEWVGFISYDGNNKYYADSVKGRFTISRDNSKNTLYLQMNSLRAEDTAIYYCARTGWLGPFDYWGQGTLVTVSSGKPGSGKPGSGKPGSGKPGSEIVLTQSPGTLSLSPGERATLSCRASQSVGSSYLAWYQQKPGQAPRLLIYGAFSRATGIPDRFSGSGSGTDFTLTISRLEPEDFAVYYCQQYGSSPWTFGQGTKVEIK

SEQ ID NO: 5211 - protein, 118 aa, synthetic construct
  REGION 1..118: note = Description of Artificial Sequence: Synthetic polypeptide
  REGION 1..118: note = VH of XENP019783
QVQLVESGGGVVQPGRSLRLSCAASGFTFSSYTMHWVRQAPGKGLEWVGFISYDGNNKYYADSVKGRFTISRDNSKNTLYLQMNSLRAEDTAIYYCARTGWLGPFDYWGQGTLVTVSS

SEQ ID NO: 5212 - protein, 108 aa, synthetic construct; identical to SEQ ID NO: 3741
  REGION 1..108: note = Description of Artificial Sequence: Synthetic polypeptide
  REGION 1..108: note = VL of XENP019783

SEQ ID NO: 5213 - protein, 5 aa, synthetic construct
  REGION 1..5: note = Description of Artificial Sequence: Synthetic peptide
  REGION 1..5: note = XENP019783 vhCDR1
SYTMH

SEQ ID NO: 5214 - protein, 17 aa, synthetic construct
  REGION 1..17: note = Description of Artificial Sequence: Synthetic peptide
  REGION 1..17: note = XENP019783 vhCDR2
FISYDGNNKYYADSVKG

SEQ ID NO: 5215 - protein, 9 aa, synthetic construct
  REGION 1..9: note = Description of Artificial Sequence: Synthetic peptide
  REGION 1..9: note = XENP019783 vhCDR3
TGWLGPFDY

SEQ ID NO: 5216 - protein, 12 aa, synthetic construct
  REGION 1..12: note = Description of Artificial Sequence: Synthetic peptide
  REGION 1..12: note = XENP019783 vlCDR1
RASQSVGSSYLA

SEQ ID NO: 5217 - protein, 7 aa, synthetic construct
  REGION 1..7: note = Description of Artificial Sequence: Synthetic peptide
  REGION 1..7: note = XENP019783 vlCDR2
GAFSRAT

SEQ ID NO: 5218 - protein, 9 aa, synthetic construct
  REGION 1..9: note = Description of Artificial Sequence: Synthetic peptide
  REGION 1..9: note = XENP019783 vlCDR3
QQYGSSPWT

SEQ ID NO: 5219 - protein, 246 aa, synthetic construct
  REGION 1..246: note = Description of Artificial Sequence: Synthetic polypeptide
  REGION 1..246: note = XENP019784 [CTLA-4]_H0.40_L0_scFv(GKPGS)4
QVQLVESGGGVVQPGRSLRLSCAASGFTFSSYTMHWVRQAPGKGLEWVSFISYDGNNKYYADSVKGRFTISRDNSKNTLYLQMNSLRAEDTAIYYCARTGWLGPFDYWGQGTLVTVSSGKPGSGKPGSGKPGSGKPGSEIVLTQSPGTLSLSPGERATLSCRASQSVGSSYLAWYQQKPGQAPRLLIYGAFSRATGIPDRFSGSGSGTDFTLTISRLEPEDFAVYYCQQYGSSPWTFGQGTKVEIK

SEQ ID NO: 5220 - protein, 118 aa, synthetic construct
  REGION 1..118: note = Description of Artificial Sequence: Synthetic polypeptide
  REGION 1..118: note = VH of XENP019784
QVQLVESGGGVVQPGRSLRLSCAASGFTFSSYTMHWVRQAPGKGLEWVSFISYDGNNKYYADSVKGRFTISRDNSKNTLYLQMNSLRAEDTAIYYCARTGWLGPFDYWGQGTLVTVSS

SEQ ID NO: 5221 - protein, 108 aa, synthetic construct; identical to SEQ ID NO: 3741
  REGION 1..108: note = Description of Artificial Sequence: Synthetic polypeptide
  REGION 1..108: note = VL of XENP019784

SEQ ID NO: 5222 - protein, 5 aa, synthetic construct
  REGION 1..5: note = Description of Artificial Sequence: Synthetic peptide
  REGION 1..5: note = XENP019784 vhCDR1
SYTMH

SEQ ID NO: 5223 - protein, 17 aa, synthetic construct
  REGION 1..17: note = Description of Artificial Sequence: Synthetic peptide
  REGION 1..17: note = XENP019784 vhCDR2
FISYDGNNKYYADSVKG

SEQ ID NO: 5224 - protein, 9 aa, synthetic construct
  REGION 1..9: note = Description of Artificial Sequence: Synthetic peptide
  REGION 1..9: note = XENP019784 vhCDR3
TGWLGPFDY

SEQ ID NO: 5225 - protein, 12 aa, synthetic construct
  REGION 1..12: note = Description of Artificial Sequence: Synthetic peptide
  REGION 1..12: note = XENP019784 vlCDR1
RASQSVGSSYLA

SEQ ID NO: 5226 - protein, 7 aa, synthetic construct
  REGION 1..7: note = Description of Artificial Sequence: Synthetic peptide
  REGION 1..7: note = XENP019784 vlCDR2
GAFSRAT

SEQ ID NO: 5227 - protein, 9 aa, synthetic construct
  REGION 1..9: note = Description of Artificial Sequence: Synthetic peptide
  REGION 1..9: note = XENP019784 vlCDR3
QQYGSSPWT

SEQ ID NO: 5228 - protein, 246 aa, synthetic construct
  REGION 1..246: note = Description of Artificial Sequence: Synthetic polypeptide
  REGION 1..246: note = XENP019785 [CTLA-4]_H0.41_L0_scFv(GKPGS)4
QVQLVESGGGVVQPGRSLRLSCAASGFTFSSYTMHWVRQAPGKGLEWVVFISYDGNNKYYADSVKGRFTISRDNSKNTLYLQMNSLRAEDTAIYYCARTGWLGPFDYWGQGTLVTVSSGKPGSGKPGSGKPGSGKPGSEIVLTQSPGTLSLSPGERATLSCRASQSVGSSYLAWYQQKPGQAPRLLIYGAFSRATGIPDRFSGSGSGTDFTLTISRLEPEDFAVYYCQQYGSSPWTFGQGTKVEIK

SEQ ID NO: 5229 - protein, 118 aa, synthetic construct
  REGION 1..118: note = Description of Artificial Sequence: Synthetic polypeptide
  REGION 1..118: note = VH of XENP019785
QVQLVESGGGVVQPGRSLRLSCAASGFTFSSYTMHWVRQAPGKGLEWVVFISYDGNNKYYADSVKGRFTISRDNSKNTLYLQMNSLRAEDTAIYYCARTGWLGPFDYWGQGTLVTVSS

SEQ ID NO: 5230 - protein, 108 aa, synthetic construct; identical to SEQ ID NO: 3741
  REGION 1..108: note = Description of Artificial Sequence: Synthetic polypeptide
  REGION 1..108: note = VL of XENP019785

SEQ ID NO: 5231 - protein, 5 aa, synthetic construct
  REGION 1..5: note = Description of Artificial Sequence: Synthetic peptide
  REGION 1..5: note = XENP019785 vhCDR1
SYTMH

SEQ ID NO: 5232 - protein, 17 aa, synthetic construct
  REGION 1..17: note = Description of Artificial Sequence: Synthetic peptide
  REGION 1..17: note = XENP019785 vhCDR2
FISYDGNNKYYADSVKG

SEQ ID NO: 5233 - protein, 9 aa, synthetic construct
  REGION 1..9: note = Description of Artificial Sequence: Synthetic peptide
  REGION 1..9: note = XENP019785 vhCDR3
TGWLGPFDY

SEQ ID NO: 5234 - protein, 12 aa, synthetic construct
  REGION 1..12: note = Description of Artificial Sequence: Synthetic peptide
  REGION 1..12: note = XENP019785 vlCDR1
RASQSVGSSYLA

SEQ ID NO: 5235 - protein, 7 aa, synthetic construct
  REGION 1..7: note = Description of Artificial Sequence: Synthetic peptide
  REGION 1..7: note = XENP019785 vlCDR2
GAFSRAT

SEQ ID NO: 5236 - protein, 9 aa, synthetic construct
  REGION 1..9: note = Description of Artificial Sequence: Synthetic peptide
  REGION 1..9: note = XENP019785 vlCDR3
QQYGSSPWT

SEQ ID NO: 5237 - protein, 246 aa, synthetic construct
  REGION 1..246: note = Description of Artificial Sequence: Synthetic polypeptide
  REGION 1..246: note = XENP019786 [CTLA-4]_H0.42_L0_scFv(GKPGS)4
QVQLVESGGGVVQPGRSLRLSCAASGFTFSSYTMHWVRQAPGKGLEWVTAISYDGNNKYYADSVKGRFTISRDNSKNTLYLQMNSLRAEDTAIYYCARTGWLGPFDYWGQGTLVTVSSGKPGSGKPGSGKPGSGKPGSEIVLTQSPGTLSLSPGERATLSCRASQSVGSSYLAWYQQKPGQAPRLLIYGAFSRATGIPDRFSGSGSGTDFTLTISRLEPEDFAVYYCQQYGSSPWTFGQGTKVEIK

SEQ ID NO: 5238 - protein, 118 aa, synthetic construct
  REGION 1..118: note = Description of Artificial Sequence: Synthetic polypeptide
  REGION 1..118: note = VH of XENP019786
QVQLVESGGGVVQPGRSLRLSCAASGFTFSSYTMHWVRQAPGKGLEWVTAISYDGNNKYYADSVKGRFTISRDNSKNTLYLQMNSLRAEDTAIYYCARTGWLGPFDYWGQGTLVTVSS

SEQ ID NO: 5239 - protein, 108 aa, synthetic construct; identical to SEQ ID NO: 3741
  REGION 1..108: note = Description of Artificial Sequence: Synthetic polypeptide
  REGION 1..108: note = VL of XENP019786

SEQ ID NO: 5240 - protein, 5 aa, synthetic construct
  REGION 1..5: note = Description of Artificial Sequence: Synthetic peptide
  REGION 1..5: note = XENP019786 vhCDR1
SYTMH

SEQ ID NO: 5241 - protein, 17 aa, synthetic construct
  REGION 1..17: note = Description of Artificial Sequence: Synthetic peptide
  REGION 1..17: note = XENP019786 vhCDR2
AISYDGNNKYYADSVKG

SEQ ID NO: 5242 - protein, 9 aa, synthetic construct
  REGION 1..9: note = Description of Artificial Sequence: Synthetic peptide
  REGION 1..9: note = XENP019786 vhCDR3
TGWLGPFDY

SEQ ID NO: 5243 - protein, 12 aa, synthetic construct
  REGION 1..12: note = Description of Artificial Sequence: Synthetic peptide
  REGION 1..12: note = XENP019786 vlCDR1
RASQSVGSSYLA

SEQ ID NO: 5244 - protein, 7 aa, synthetic construct
  REGION 1..7: note = Description of Artificial Sequence: Synthetic peptide
  REGION 1..7: note = XENP019786 vlCDR2
GAFSRAT

SEQ ID NO: 5245 - protein, 9 aa, synthetic construct
  REGION 1..9: note = Description of Artificial Sequence: Synthetic peptide
  REGION 1..9: note = XENP019786 vlCDR3
QQYGSSPWT

SEQ ID NO: 5246 - protein, 246 aa, synthetic construct
  REGION 1..246: note = Description of Artificial Sequence: Synthetic polypeptide
  REGION 1..246: note = XENP019787 [CTLA-4]_H0.43_L0_scFv(GKPGS)4
QVQLVESGGGVVQPGRSLRLSCAASGFTFSSYTMHWVRQAPGKGLEWVTGISYDGNNKYYADSVKGRFTISRDNSKNTLYLQMNSLRAEDTAIYYCARTGWLGPFDYWGQGTLVTVSSGKPGSGKPGSGKPGSGKPGSEIVLTQSPGTLSLSPGERATLSCRASQSVGSSYLAWYQQKPGQAPRLLIYGAFSRATGIPDRFSGSGSGTDFTLTISRLEPEDFAVYYCQQYGSSPWTFGQGTKVEIK

SEQ ID NO: 5247 - protein, 118 aa, synthetic construct
  REGION 1..118: note = Description of Artificial Sequence: Synthetic polypeptide
  REGION 1..118: note = VH of XENP019787
QVQLVESGGGVVQPGRSLRLSCAASGFTFSSYTMHWVRQAPGKGLEWVTGISYDGNNKYYADSVKGRFTISRDNSKNTLYLQMNSLRAEDTAIYYCARTGWLGPFDYWGQGTLVTVSS

SEQ ID NO: 5248 - protein, 108 aa, synthetic construct; identical to SEQ ID NO: 3741
  REGION 1..108: note = Description of Artificial Sequence: Synthetic polypeptide
  REGION 1..108: note = VL of XENP019787

SEQ ID NO: 5249 - protein, 5 aa, synthetic construct
  REGION 1..5: note = Description of Artificial Sequence: Synthetic peptide
  REGION 1..5: note = XENP019787 vhCDR1
SYTMH

SEQ ID NO: 5250 - protein, 17 aa, synthetic construct
  REGION 1..17: note = Description of Artificial Sequence: Synthetic peptide
  REGION 1..17: note = XENP019787 vhCDR2
GISYDGNNKYYADSVKG

SEQ ID NO: 5251 - protein, 9 aa, synthetic construct
  REGION 1..9: note = Description of Artificial Sequence: Synthetic peptide
  REGION 1..9: note = XENP019787 vhCDR3
TGWLGPFDY

SEQ ID NO: 5252 - protein, 12 aa, synthetic construct
  REGION 1..12: note = Description of Artificial Sequence: Synthetic peptide
  REGION 1..12: note = XENP019787 vlCDR1
RASQSVGSSYLA

SEQ ID NO: 5253 - protein, 7 aa, synthetic construct
  REGION 1..7: note = Description of Artificial Sequence: Synthetic peptide
  REGION 1..7: note = XENP019787 vlCDR2
GAFSRAT

SEQ ID NO: 5254 - protein, 9 aa, synthetic construct
  REGION 1..9: note = Description of Artificial Sequence: Synthetic peptide
  REGION 1..9: note = XENP019787 vlCDR3
QQYGSSPWT

SEQ ID NO: 5255 - protein, 246 aa, synthetic construct
  REGION 1..246: note = Description of Artificial Sequence: Synthetic polypeptide
  REGION 1..246: note = XENP019788 [CTLA-4]_H0.44_L0_scFv(GKPGS)4
QVQLVESGGGVVQPGRSLRLSCAASGFTFSSYTMHWVRQAPGKGLEWVTLISYDGNNKYYADSVKGRFTISRDNSKNTLYLQMNSLRAEDTAIYYCARTGWLGPFDYWGQGTLVTVSSGKPGSGKPGSGKPGSGKPGSEIVLTQSPGTLSLSPGERATLSCRASQSVGSSYLAWYQQKPGQAPRLLIYGAFSRATGIPDRFSGSGSGTDFTLTISRLEPEDFAVYYCQQYGSSPWTFGQGTKVEIK

SEQ ID NO: 5256 - protein, 118 aa, synthetic construct
  REGION 1..118: note = Description of Artificial Sequence: Synthetic polypeptide
  REGION 1..118: note = VH of XENP019788
QVQLVESGGGVVQPGRSLRLSCAASGFTFSSYTMHWVRQAPGKGLEWVTLISYDGNNKYYADSVKGRFTISRDNSKNTLYLQMNSLRAEDTAIYYCARTGWLGPFDYWGQGTLVTVSS

SEQ ID NO: 5257 - protein, 108 aa, synthetic construct; identical to SEQ ID NO: 3741
  REGION 1..108: note = Description of Artificial Sequence: Synthetic polypeptide
  REGION 1..108: note = VL of XENP019788

SEQ ID NO: 5258 - protein, 5 aa, synthetic construct
  REGION 1..5: note = Description of Artificial Sequence: Synthetic peptide
  REGION 1..5: note = XENP019788 vhCDR1
SYTMH

SEQ ID NO: 5259 - protein, 17 aa, synthetic construct
  REGION 1..17: note = Description of Artificial Sequence: Synthetic peptide
  REGION 1..17: note = XENP019788 vhCDR2
LISYDGNNKYYADSVKG

SEQ ID NO: 5260 - protein, 9 aa, synthetic construct
  REGION 1..9: note = Description of Artificial Sequence: Synthetic peptide
  REGION 1..9: note = XENP019788 vhCDR3
TGWLGPFDY

SEQ ID NO: 5261 - protein, 12 aa, synthetic construct
  REGION 1..12: note = Description of Artificial Sequence: Synthetic peptide
  REGION 1..12: note = XENP019788 vlCDR1
RASQSVGSSYLA

SEQ ID NO: 5262 - protein, 7 aa, synthetic construct
  REGION 1..7: note = Description of Artificial Sequence: Synthetic peptide
  REGION 1..7: note = XENP019788 vlCDR2
GAFSRAT

SEQ ID NO: 5263 - protein, 9 aa, synthetic construct
  REGION 1..9: note = Description of Artificial Sequence: Synthetic peptide
  REGION 1..9: note = XENP019788 vlCDR3
QQYGSSPWT

SEQ ID NO: 5264 - protein, 246 aa, synthetic construct
  REGION 1..246: note = Description of Artificial Sequence: Synthetic polypeptide
  REGION 1..246: note = XENP019789 [CTLA-4]_H0.45_L0_scFv(GKPGS)4
QVQLVESGGGVVQPGRSLRLSCAASGFTFSSYTMHWVRQAPGKGLEWVTIISYDGNNKYYADSVKGRFTISRDNSKNTLYLQMNSLRAEDTAIYYCARTGWLGPFDYWGQGTLVTVSSGKPGSGKPGSGKPGSGKPGSEIVLTQSPGTLSLSPGERATLSCRASQSVGSSYLAWYQQKPGQAPRLLIYGAFSRATGIPDRFSGSGSGTDFTLTISRLEPEDFAVYYCQQYGSSPWTFGQGTKVEIK

SEQ ID NO: 5265 - protein, 118 aa, synthetic construct
  REGION 1..118: note = Description of Artificial Sequence: Synthetic polypeptide
  REGION 1..118: note = VH of XENP019789
QVQLVESGGGVVQPGRSLRLSCAASGFTFSSYTMHWVRQAPGKGLEWVTIISYDGNNKYYADSVKGRFTISRDNSKNTLYLQMNSLRAEDTAIYYCARTGWLGPFDYWGQGTLVTVSS

SEQ ID NO: 5266 - protein, 108 aa, synthetic construct; identical to SEQ ID NO: 3741
  REGION 1..108: note = Description of Artificial Sequence: Synthetic polypeptide
  REGION 1..108: note = VL of XENP019789

SEQ ID NO: 5267 - protein, 5 aa, synthetic construct
  REGION 1..5: note = Description of Artificial Sequence: Synthetic peptide
  REGION 1..5: note = XENP019789 vhCDR1
SYTMH

SEQ ID NO: 5268 - protein, 17 aa, synthetic construct
  REGION 1..17: note = Description of Artificial Sequence: Synthetic peptide
  REGION 1..17: note = XENP019789 vhCDR2
IISYDGNNKYYADSVKG

SEQ ID NO: 5269 - protein, 9 aa, synthetic construct
  REGION 1..9: note = Description of Artificial Sequence: Synthetic peptide
  REGION 1..9: note = XENP019789 vhCDR3
TGWLGPFDY

SEQ ID NO: 5270 - protein, 12 aa, synthetic construct
  REGION 1..12: note = Description of Artificial Sequence: Synthetic peptide
  REGION 1..12: note = XENP019789 vlCDR1
RASQSVGSSYLA

SEQ ID NO: 5271 - protein, 7 aa, synthetic construct
  REGION 1..7: note = Description of Artificial Sequence: Synthetic peptide
  REGION 1..7: note = XENP019789 vlCDR2
GAFSRAT

SEQ ID NO: 5272 - protein, 9 aa, synthetic construct
  REGION 1..9: note = Description of Artificial Sequence: Synthetic peptide
  REGION 1..9: note = XENP019789 vlCDR3
QQYGSSPWT

SEQ ID NO: 5273 - protein, 246 aa, synthetic construct
  REGION 1..246: note = Description of Artificial Sequence: Synthetic polypeptide
  REGION 1..246: note = XENP019790 [CTLA-4]_H0.46_L0_scFv(GKPGS)4
QVQLVESGGGVVQPGRSLRLSCAASGFTFSSYTMHWVRQAPGKGLEWVTRISYDGNNKYYADSVKGRFTISRDNSKNTLYLQMNSLRAEDTAIYYCARTGWLGPFDYWGQGTLVTVSSGKPGSGKPGSGKPGSGKPGSEIVLTQSPGTLSLSPGERATLSCRASQSVGSSYLAWYQQKPGQAPRLLIYGAFSRATGIPDRFSGSGSGTDFTLTISRLEPEDFAVYYCQQYGSSPWTFGQGTKVEIK

SEQ ID NO: 5274 - protein, 118 aa, synthetic construct
  REGION 1..118: note = Description of Artificial Sequence: Synthetic polypeptide
  REGION 1..118: note = VH of XENP019790
QVQLVESGGGVVQPGRSLRLSCAASGFTFSSYTMHWVRQAPGKGLEWVTRISYDGNNKYYADSVKGRFTISRDNSKNTLYLQMNSLRAEDTAIYYCARTGWLGPFDYWGQGTLVTVSS

SEQ ID NO: 5275 - protein, 108 aa, synthetic construct; identical to SEQ ID NO: 3741
  REGION 1..108: note = Description of Artificial Sequence: Synthetic polypeptide
  REGION 1..108: note = VL of XENP019790

SEQ ID NO: 5276 - protein, 5 aa, synthetic construct
  REGION 1..5: note = Description of Artificial Sequence: Synthetic peptide
  REGION 1..5: note = XENP019790 vhCDR1
SYTMH

SEQ ID NO: 5277 - protein, 17 aa, synthetic construct
  REGION 1..17: note = Description of Artificial Sequence: Synthetic peptide
  REGION 1..17: note = XENP019790 vhCDR2
RISYDGNNKYYADSVKG

SEQ ID NO: 5278 - protein, 9 aa, synthetic construct
  REGION 1..9: note = Description of Artificial Sequence: Synthetic peptide
  REGION 1..9: note = XENP019790 vhCDR3
TGWLGPFDY

SEQ ID NO: 5279 - protein, 12 aa, synthetic construct
  REGION 1..12: note = Description of Artificial Sequence: Synthetic peptide
  REGION 1..12: note = XENP019790 vlCDR1
RASQSVGSSYLA

SEQ ID NO: 5280 - protein, 7 aa, synthetic construct
  REGION 1..7: note = Description of Artificial Sequence: Synthetic peptide
  REGION 1..7: note = XENP019790 vlCDR2
GAFSRAT

SEQ ID NO: 5281 - protein, 9 aa, synthetic construct
  REGION 1..9: note = Description of Artificial Sequence: Synthetic peptide
  REGION 1..9: note = XENP019790 vlCDR3
QQYGSSPWT

SEQ ID NO: 5282 - protein, 246 aa, synthetic construct
  REGION 1..246: note = Description of Artificial Sequence: Synthetic polypeptide
  REGION 1..246: note = XENP019791 [CTLA-4]_H0.47_L0_scFv(GKPGS)4
QVQLVESGGGVVQPGRSLRLSCAASGFTFSSYTMHWVRQAPGKGLEWVTVISYDGNNKYYADSVKGRFTISRDNSKNTLYLQMNSLRAEDTAIYYCARTGWLGPFDYWGQGTLVTVSSGKPGSGKPGSGKPGSGKPGSEIVLTQSPGTLSLSPGERATLSCRASQSVGSSYLAWYQQKPGQAPRLLIYGAFSRATGIPDRFSGSGSGTDFTLTISRLEPEDFAVYYCQQYGSSPWTFGQGTKVEIK

SEQ ID NO: 5283 - protein, 118 aa, synthetic construct
  REGION 1..118: note = Description of Artificial Sequence: Synthetic polypeptide
  REGION 1..118: note = VH of XENP019791
QVQLVESGGGVVQPGRSLRLSCAASGFTFSSYTMHWVRQAPGKGLEWVTVISYDGNNKYYADSVKGRFTISRDNSKNTLYLQMNSLRAEDTAIYYCARTGWLGPFDYWGQGTLVTVSS

SEQ ID NO: 5284 - protein, 108 aa, synthetic construct; identical to SEQ ID NO: 3741
  REGION 1..108: note = Description of Artificial Sequence: Synthetic polypeptide
  REGION 1..108: note = VL of XENP019791

SEQ ID NO: 5285 - protein, 5 aa, synthetic construct
  REGION 1..5: note = Description of Artificial Sequence: Synthetic peptide
  REGION 1..5: note = XENP019791 vhCDR1
SYTMH

SEQ ID NO: 5286 - protein, 17 aa, synthetic construct
  REGION 1..17: note = Description of Artificial Sequence: Synthetic peptide
  REGION 1..17: note = XENP019791 vhCDR2
VISYDGNNKYYADSVKG

SEQ ID NO: 5287 - protein, 9 aa, synthetic construct
  REGION 1..9: note = Description of Artificial Sequence: Synthetic peptide
  REGION 1..9: note = XENP019791 vhCDR3
TGWLGPFDY

SEQ ID NO: 5288 - protein, 12 aa, synthetic construct
  REGION 1..12: note = Description of Artificial Sequence: Synthetic peptide
  REGION 1..12: note = XENP019791 vlCDR1
RASQSVGSSYLA

SEQ ID NO: 5289 - protein, 7 aa, synthetic construct
  REGION 1..7: note = Description of Artificial Sequence: Synthetic peptide
  REGION 1..7: note = XENP019791 vlCDR2
GAFSRAT

SEQ ID NO: 5290 - protein, 9 aa, synthetic construct
  REGION 1..9: note = Description of Artificial Sequence: Synthetic peptide
  REGION 1..9: note = XENP019791 vlCDR3
QQYGSSPWT

SEQ ID NO: 5291 - protein, 246 aa, synthetic construct
  REGION 1..246: note = Description of Artificial Sequence: Synthetic polypeptide
  REGION 1..246: note = XENP019792 [CTLA-4]_H0.48_L0_scFv(GKPGS)4
QVQLVESGGGVVQPGRSLRLSCAASGFTFSSYTMHWVRQAPGKGLEWVTYISYDGNNKYYADSVKGRFTISRDNSKNTLYLQMNSLRAEDTAIYYCARTGWLGPFDYWGQGTLVTVSSGKPGSGKPGSGKPGSGKPGSEIVLTQSPGTLSLSPGERATLSCRASQSVGSSYLAWYQQKPGQAPRLLIYGAFSRATGIPDRFSGSGSGTDFTLTISRLEPEDFAVYYCQQYGSSPWTFGQGTKVEIK

SEQ ID NO: 5292 - protein, 118 aa, synthetic construct
  REGION 1..118: note = Description of Artificial Sequence: Synthetic polypeptide
  REGION 1..118: note = VH of XENP019792
QVQLVESGGGVVQPGRSLRLSCAASGFTFSSYTMHWVRQAPGKGLEWVTYISYDGNNKYYADSVKGRFTISRDNSKNTLYLQMNSLRAEDTAIYYCARTGWLGPFDYWGQGTLVTVSS

SEQ ID NO: 5293 - protein, 108 aa, synthetic construct; identical to SEQ ID NO: 3741
  REGION 1..108: note = Description of Artificial Sequence: Synthetic polypeptide
  REGION 1..108: note = VL of XENP019792

SEQ ID NO: 5294 - protein, 5 aa, synthetic construct
  REGION 1..5: note = Description of Artificial Sequence: Synthetic peptide
  REGION 1..5: note = XENP019792 vhCDR1
SYTMH

SEQ ID NO: 5295 - protein, 17 aa, synthetic construct
  REGION 1..17: note = Description of Artificial Sequence: Synthetic peptide
  REGION 1..17: note = XENP019792 vhCDR2
YISYDGNNKYYADSVKG

SEQ ID NO: 5296 - protein, 9 aa, synthetic construct
  REGION 1..9: note = Description of Artificial Sequence: Synthetic peptide
  REGION 1..9: note = XENP019792 vhCDR3
TGWLGPFDY

SEQ ID NO: 5297 - protein, 12 aa, synthetic construct
  REGION 1..12: note = Description of Artificial Sequence: Synthetic peptide
  REGION 1..12: note = XENP019792 vlCDR1
RASQSVGSSYLA

SEQ ID NO: 5298 - protein, 7 aa, synthetic construct
  REGION 1..7: note = Description of Artificial Sequence: Synthetic peptide
  REGION 1..7: note = XENP019792 vlCDR2
GAFSRAT

SEQ ID NO: 5299 - protein, 9 aa, synthetic construct
  REGION 1..9: note = Description of Artificial Sequence: Synthetic peptide
  REGION 1..9: note = XENP019792 vlCDR3
QQYGSSPWT

SEQ ID NO: 5300 - protein, 246 aa, synthetic construct
  REGION 1..246: note = Description of Artificial Sequence: Synthetic polypeptide
  REGION 1..246: note = XENP019793 [CTLA-4]_H0.49_L0_scFv(GKPGS)4
QVQLVESGGGVVQPGRSLRLSCAASGFTFSSYTMHWVRQAPGKGLEWVTFESYDGNNKYYADSVKGRFTISRDNSKNTLYLQMNSLRAEDTAIYYCARTGWLGPFDYWGQGTLVTVSSGKPGSGKPGSGKPGSGKPGSEIVLTQSPGTLSLSPGERATLSCRASQSVGSSYLAWYQQKPGQAPRLLIYGAFSRATGIPDRFSGSGSGTDFTLTISRLEPEDFAVYYCQQYGSSPWTFGQGTKVEIK

SEQ ID NO: 5301 - protein, 118 aa, synthetic construct
  REGION 1..118: note = Description of Artificial Sequence: Synthetic polypeptide
  REGION 1..118: note = VH of XENP019793
QVQLVESGGGVVQPGRSLRLSCAASGFTFSSYTMHWVRQAPGKGLEWVTFESYDGNNKYYADSVKGRFTISRDNSKNTLYLQMNSLRAEDTAIYYCARTGWLGPFDYWGQGTLVTVSS

SEQ ID NO: 5302 - protein, 108 aa, synthetic construct; identical to SEQ ID NO: 3741
  REGION 1..108: note = Description of Artificial Sequence: Synthetic polypeptide
  REGION 1..108: note = VL of XENP019793

SEQ ID NO: 5303 - protein, 5 aa, synthetic construct
  REGION 1..5: note = Description of Artificial Sequence: Synthetic peptide
  REGION 1..5: note = XENP019793 vhCDR1
SYTMH

SEQ ID NO: 5304 - protein, 17 aa, synthetic construct
  REGION 1..17: note = Description of Artificial Sequence: Synthetic peptide
  REGION 1..17: note = XENP019793 vhCDR2
FESYDGNNKYYADSVKG

SEQ ID NO: 5305 - protein, 9 aa, synthetic construct
  REGION 1..9: note = Description of Artificial Sequence: Synthetic peptide
  REGION 1..9: note = XENP019793 vhCDR3
TGWLGPFDY

SEQ ID NO: 5306 - protein, 12 aa, synthetic construct
  REGION 1..12: note = Description of Artificial Sequence: Synthetic peptide
  REGION 1..12: note = XENP019793 vlCDR1
RASQSVGSSYLA

SEQ ID NO: 5307 - protein, 7 aa, synthetic construct
  REGION 1..7: note = Description of Artificial Sequence: Synthetic peptide
  REGION 1..7: note = XENP019793 vlCDR2
GAFSRAT

SEQ ID NO: 5308 - protein, 9 aa, synthetic construct
  REGION 1..9: note = Description of Artificial Sequence: Synthetic peptide
  REGION 1..9: note = XENP019793 vlCDR3
QQYGSSPWT

SEQ ID NO: 5309 - protein, 246 aa, synthetic construct
  REGION 1..246: note = Description of Artificial Sequence: Synthetic polypeptide
  REGION 1..246: note = XENP019794 [CTLA-4]_H0.50_L0_scFv(GKPGS)4
QVQLVESGGGVVQPGRSLRLSCAASGFTFSSYTMHWVRQAPGKGLEWVTFHSYDGNNKYYADSVKGRFTISRDNSKNTLYLQMNSLRAEDTAIYYCARTGWLGPFDYWGQGTLVTVSSGKPGSGKPGSGKPGSGKPGSEIVLTQSPGTLSLSPGERATLSCRASQSVGSSYLAWYQQKPGQAPRLLIYGAFSRATGIPDRFSGSGSGTDFTLTISRLEPEDFAVYYCQQYGSSPWTFGQGTKVEIK

SEQ ID NO: 5310 - protein, 118 aa, synthetic construct
  REGION 1..118: note = Description of Artificial Sequence: Synthetic polypeptide
  REGION 1..118: note = VH of XENP019794
QVQLVESGGGVVQPGRSLRLSCAASGFTFSSYTMHWVRQAPGKGLEWVTFHSYDGNNKYYADSVKGRFTISRDNSKNTLYLQMNSLRAEDTAIYYCARTGWLGPFDYWGQGTLVTVSS

SEQ ID NO: 5311 - protein, 108 aa, synthetic construct; identical to SEQ ID NO: 3741
  REGION 1..108: note = Description of Artificial Sequence: Synthetic polypeptide
  REGION 1..108: note = VL of XENP019794

SEQ ID NO: 5312 - protein, 5 aa, synthetic construct
  REGION 1..5: note = Description of Artificial Sequence: Synthetic peptide
  REGION 1..5: note = XENP019794 vhCDR1
SYTMH

SEQ ID NO: 5313 - protein, 17 aa, synthetic construct
  REGION 1..17: note = Description of Artificial Sequence: Synthetic peptide
  REGION 1..17: note = XENP019794 vhCDR2
FHSYDGNNKYYADSVKG

SEQ ID NO: 5314 - protein, 9 aa, synthetic construct
  REGION 1..9: note = Description of Artificial Sequence: Synthetic peptide
  REGION 1..9: note = XENP019794 vhCDR3
TGWLGPFDY

SEQ ID NO: 5315 - protein, 12 aa, synthetic construct
  REGION 1..12: note = Description of Artificial Sequence: Synthetic peptide
  REGION 1..12: note = XENP019794 vlCDR1
RASQSVGSSYLA

SEQ ID NO: 5316 - protein, 7 aa, synthetic construct
  REGION 1..7: note = Description of Artificial Sequence: Synthetic peptide
  REGION 1..7: note = XENP019794 vlCDR2
GAFSRAT

SEQ ID NO: 5317 - protein, 9 aa, synthetic construct
  REGION 1..9: note = Description of Artificial Sequence: Synthetic peptide
  REGION 1..9: note = XENP019794 vlCDR3
QQYGSSPWT

SEQ ID NO: 5318 - protein, 246 aa, synthetic construct
  REGION 1..246: note = Description of Artificial Sequence: Synthetic polypeptide
  REGION 1..246: note = XENP019795 [CTLA-4]_H0.51_L0_scFv(GKPGS)4
QVQLVESGGGVVQPGRSLRLSCAASGFTFSSYTMHWVRQAPGKGLEWVTFTSYDGNNKYYADSVKGRFTISRDNSKNTLYLQMNSLRAEDTAIYYCARTGWLGPFDYWGQGTLVTVSSGKPGSGKPGSGKPGSGKPGSEIVLTQSPGTLSLSPGERATLSCRASQSVGSSYLAWYQQKPGQAPRLLIYGAFSRATGIPDRFSGSGSGTDFTLTISRLEPEDFAVYYCQQYGSSPWTFGQGTKVEIK

SEQ ID NO: 5319 - protein, 118 aa, synthetic construct
  REGION 1..118: note = Description of Artificial Sequence: Synthetic polypeptide
  REGION 1..118: note = VH of XENP019795
QVQLVESGGGVVQPGRSLRLSCAASGFTFSSYTMHWVRQAPGKGLEWVTFTSYDGNNKYYADSVKGRFTISRDNSKNTLYLQMNSLRAEDTAIYYCARTGWLGPFDYWGQGTLVTVSS

SEQ ID NO: 5320 - protein, 108 aa, synthetic construct; identical to SEQ ID NO: 3741
  REGION 1..108: note = Description of Artificial Sequence: Synthetic polypeptide
  REGION 1..108: note = VL of XENP019795

SEQ ID NO: 5321 - protein, 5 aa, synthetic construct
  REGION 1..5: note = Description of Artificial Sequence: Synthetic peptide
  REGION 1..5: note = XENP019795 vhCDR1
SYTMH

SEQ ID NO: 5322 - protein, 17 aa, synthetic construct
  REGION 1..17: note = Description of Artificial Sequence: Synthetic peptide
  REGION 1..17: note = XENP019795 vhCDR2
FTSYDGNNKYYADSVKG

SEQ ID NO: 5323 - protein, 9 aa, synthetic construct
  REGION 1..9: note = Description of Artificial Sequence: Synthetic peptide
  REGION 1..9: note = XENP019795 vhCDR3
TGWLGPFDY

SEQ ID NO: 5324 - protein, 12 aa, synthetic construct
  REGION 1..12: note = Description of Artificial Sequence: Synthetic peptide
  REGION 1..12: note = XENP019795 vlCDR1
RASQSVGSSYLA

SEQ ID NO: 5325 - protein, 7 aa, synthetic construct
  REGION 1..7: note = Description of Artificial Sequence: Synthetic peptide
  REGION 1..7: note = XENP019795 vlCDR2
GAFSRAT

SEQ ID NO: 5326 - protein, 9 aa, synthetic construct
  REGION 1..9: note = Description of Artificial Sequence: Synthetic peptide
  REGION 1..9: note = XENP019795 vlCDR3
QQYGSSPWT

SEQ ID NO: 5327 - protein, 246 aa, synthetic construct
  REGION 1..246: note = Description of Artificial Sequence: Synthetic polypeptide
  REGION 1..246: note = XENP019796 [CTLA-4]_H0.52_L0_scFv(GKPGS)4
QVQLVESGGGVVQPGRSLRLSCAASGFTFSSYTMHWVRQAPGKGLEWVTFVSYDGNNKYYADSVKGRFTISRDNSKNTLYLQMNSLRAEDTAIYYCARTGWLGPFDYWGQGTLVTVSSGKPGSGKPGSGKPGSGKPGSEIVLTQSPGTLSLSPGERATLSCRASQSVGSSYLAWYQQKPGQAPRLLIYGAFSRATGIPDRFSGSGSGTDFTLTISRLEPEDFAVYYCQQYGSSPWTFGQGTKVEIK

SEQ ID NO: 5328 - protein, 118 aa, synthetic construct
  REGION 1..118: note = Description of Artificial Sequence: Synthetic polypeptide
  REGION 1..118: note = VH of XENP019796
QVQLVESGGGVVQPGRSLRLSCAASGFTFSSYTMHWVRQAPGKGLEWVTFVSYDGNNKYYADSVKGRFTISRDNSKNTLYLQMNSLRAEDTAIYYCARTGWLGPFDYWGQGTLVTVSS

SEQ ID NO: 5329 - protein, 108 aa, synthetic construct; identical to SEQ ID NO: 3741
  REGION 1..108: note = Description of Artificial Sequence: Synthetic polypeptide
  REGION 1..108: note = VL of XENP019796

SEQ ID NO: 5330 - protein, 5 aa, synthetic construct
  REGION 1..5: note = Description of Artificial Sequence: Synthetic peptide
  REGION 1..5: note = XENP019796 vhCDR1
SYTMH

SEQ ID NO: 5331 - protein, 17 aa, synthetic construct
  REGION 1..17: note = Description of Artificial Sequence: Synthetic peptide
  REGION 1..17: note = XENP019796 vhCDR2
FVSYDGNNKYYADSVKG

SEQ ID NO: 5332 - protein, 9 aa, synthetic construct
  REGION 1..9: note = Description of Artificial Sequence: Synthetic peptide
  REGION 1..9: note = XENP019796 vhCDR3
TGWLGPFDY

SEQ ID NO: 5333 - protein, 12 aa, synthetic construct
  REGION 1..12: note = Description of Artificial Sequence: Synthetic peptide
  REGION 1..12: note = XENP019796 vlCDR1
RASQSVGSSYLA

SEQ ID NO: 5334 - protein, 7 aa, synthetic construct
  REGION 1..7: note = Description of Artificial Sequence: Synthetic peptide
  REGION 1..7: note = XENP019796 vlCDR2
GAFSRAT

SEQ ID NO: 5335 - protein, 9 aa, synthetic construct
  REGION 1..9: note = Description of Artificial Sequence: Synthetic peptide
  REGION 1..9: note = XENP019796 vlCDR3
QQYGSSPWT

SEQ ID NO: 5336 - protein, 246 aa, synthetic construct
  REGION 1..246: note = Description of Artificial Sequence: Synthetic polypeptide
  REGION 1..246: note = XENP019801 [CTLA-4]_H0.53_L0_scFv(GKPGS)4
QVQLVESGGGVVQPGRSLRLSCAASGFTFSSYTMHWVRQAPGKGLEWVTFYSYDGNNKYYADSVKGRFTISRDNSKNTLYLQMNSLRAEDTAIYYCARTGWLGPFDYWGQGTLVTVSSGKPGSGKPGSGKPGSGKPGSEIVLTQSPGTLSLSPGERATLSCRASQSVGSSYLAWYQQKPGQAPRLLIYGAFSRATGIPDRFSGSGSGTDFTLTISRLEPEDFAVYYCQQYGSSPWTFGQGTKVEIK

SEQ ID NO: 5337 - protein, 118 aa, synthetic construct
  REGION 1..118: note = Description of Artificial Sequence: Synthetic polypeptide
  REGION 1..118: note = VH of XENP019801
QVQLVESGGGVVQPGRSLRLSCAASGFTFSSYTMHWVRQAPGKGLEWVTFYSYDGNNKYYADSVKGRFTISRDNSKNTLYLQMNSLRAEDTAIYYCARTGWLGPFDYWGQGTLVTVSS

SEQ ID NO: 5338 - protein, 108 aa, synthetic construct; identical to SEQ ID NO: 3741
  REGION 1..108: note = Description of Artificial Sequence: Synthetic polypeptide
  REGION 1..108: note = VL of XENP019801

SEQ ID NO: 5339 - protein, 5 aa, synthetic construct
  REGION 1..5: note = Description of Artificial Sequence: Synthetic peptide
  REGION 1..5: note = XENP019801 vhCDR1
SYTMH

SEQ ID NO: 5340 - protein, 17 aa, synthetic construct
  REGION 1..17: note = Description of Artificial Sequence: Synthetic peptide
  REGION 1..17: note = XENP019801 vhCDR2
FYSYDGNNKYYADSVKG

SEQ ID NO: 5341 - protein, 9 aa, synthetic construct
  REGION 1..9: note = Description of Artificial Sequence: Synthetic peptide
  REGION 1..9: note = XENP019801 vhCDR3
TGWLGPFDY

SEQ ID NO: 5342 - protein, 12 aa, synthetic construct
  REGION 1..12: note = Description of Artificial Sequence: Synthetic peptide
  REGION 1..12: note = XENP019801 vlCDR1
RASQSVGSSYLA

SEQ ID NO: 5343 - protein, 7 aa, synthetic construct
  REGION 1..7: note = Description of Artificial Sequence: Synthetic peptide
  REGION 1..7: note = XENP019801 vlCDR2
GAFSRAT

SEQ ID NO: 5344 - protein, 9 aa, synthetic construct
  REGION 1..9: note = Description of Artificial Sequence: Synthetic peptide
  REGION 1..9: note = XENP019801 vlCDR3
QQYGSSPWT

SEQ ID NO: 5345 - protein, 246 aa, synthetic construct
  REGION 1..246: note = Description of Artificial Sequence: Synthetic polypeptide
  REGION 1..246: note = XENP019802 [CTLA-4]_H0.54_L0_scFv(GKPGS)4
QVQLVESGGGVVQPGRSLRLSCAASGFTFSSYTMHWVRQAPGKGLEWVTFISGDGNNKYYADSVKGRFTISRDNSKNTLYLQMNSLRAEDTAIYYCARTGWLGPFDYWGQGTLVTVSSGKPGSGKPGSGKPGSGKPGSEIVLTQSPGTLSLSPGERATLSCRASQSVGSSYLAWYQQKPGQAPRLLIYGAFSRATGIPDRFSGSGSGTDFTLTISRLEPEDFAVYYCQQYGSSPWTFGQGTKVEIK

SEQ ID NO: 5346 - protein, 118 aa, synthetic construct
  REGION 1..118: note = Description of Artificial Sequence: Synthetic polypeptide
  REGION 1..118: note = VH of XENP019802
QVQLVESGGGVVQPGRSLRLSCAASGFTFSSYTMHWVRQAPGKGLEWVTFISGDGNNKYYADSVKGRFTISRDNSKNTLYLQMNSLRAEDTAIYYCARTGWLGPFDYWGQGTLVTVSS

SEQ ID NO: 5347 - protein, 108 aa, synthetic construct; identical to SEQ ID NO: 3741
  REGION 1..108: note = Description of Artificial Sequence: Synthetic polypeptide
  REGION 1..108: note = VL of XENP019802

SEQ ID NO: 5348 - protein, 5 aa, synthetic construct
  REGION 1..5: note = Description of Artificial Sequence: Synthetic peptide
  REGION 1..5: note = XENP019802 vhCDR1
SYTMH

SEQ ID NO: 5349 - protein, 17 aa, synthetic construct
  REGION 1..17: note = Description of Artificial Sequence: Synthetic peptide
  REGION 1..17: note = XENP019802 vhCDR2
FISGDGNNKYYADSVKG

SEQ ID NO: 5350 - protein, 9 aa, synthetic construct
  REGION 1..9: note = Description of Artificial Sequence: Synthetic peptide
  REGION 1..9: note = XENP019802 vhCDR3
TGWLGPFDY

SEQ ID NO: 5351 - protein, 12 aa, synthetic construct
  REGION 1..12: note = Description of Artificial Sequence: Synthetic peptide
  REGION 1..12: note = XENP019802 vlCDR1
RASQSVGSSYLA

SEQ ID NO: 5352 - protein, 7 aa, synthetic construct
  REGION 1..7: note = Description of Artificial Sequence: Synthetic peptide
  REGION 1..7: note = XENP019802 vlCDR2
GAFSRAT

SEQ ID NO: 5353 - protein, 9 aa, synthetic construct
  REGION 1..9: note = Description of Artificial Sequence: Synthetic peptide
  REGION 1..9: note = XENP019802 vlCDR3
QQYGSSPWT

SEQ ID NO: 5354 - protein, 246 aa, synthetic construct
  REGION 1..246: note = Description of Artificial Sequence: Synthetic polypeptide
  REGION 1..246: note = XENP019803 [CTLA-4]_H0.55_L0_scFv(GKPGS)4
QVQLVESGGGVVQPGRSLRLSCAASGFTFSSYTMHWVRQAPGKGLEWVTFISNDGNNKYYADSVKGRFTISRDNSKNTLYLQMNSLRAEDTAIYYCARTGWLGPFDYWGQGTLVTVSSGKPGSGKPGSGKPGSGKPGSEIVLTQSPGTLSLSPGERATLSCRASQSVGSSYLAWYQQKPGQAPRLLIYGAFSRATGIPDRFSGSGSGTDFTLTISRLEPEDFAVYYCQQYGSSPWTFGQGTKVEIK

SEQ ID NO: 5355 - protein, 118 aa, synthetic construct
  REGION 1..118: note = Description of Artificial Sequence: Synthetic polypeptide
  REGION 1..118: note = VH of XENP019803
QVQLVESGGGVVQPGRSLRLSCAASGFTFSSYTMHWVRQAPGKGLEWVTFISNDGNNKYYADSVKGRFTISRDNSKNTLYLQMNSLRAEDTAIYYCARTGWLGPFDYWGQGTLVTVSS

SEQ ID NO: 5356 - protein, 108 aa, synthetic construct; identical to SEQ ID NO: 3741
  REGION 1..108: note = Description of Artificial Sequence: Synthetic polypeptide
  REGION 1..108: note = VL of XENP019803

SEQ ID NO: 5357 - protein, 5 aa, synthetic construct
  REGION 1..5: note = Description of Artificial Sequence: Synthetic peptide
  REGION 1..5: note = XENP019803 vhCDR1
SYTMH

SEQ ID NO: 5358 - protein, 17 aa, synthetic construct
  REGION 1..17: note = Description of Artificial Sequence: Synthetic peptide
  REGION 1..17: note = XENP019803 vhCDR2
FISNDGNNKYYADSVKG

SEQ ID NO: 5359 - protein, 9 aa, synthetic construct
  REGION 1..9: note = Description of Artificial Sequence: Synthetic peptide
  REGION 1..9: note = XENP019803 vhCDR3
TGWLGPFDY

SEQ ID NO: 5360 - protein, 12 aa, synthetic construct
  REGION 1..12: note = Description of Artificial Sequence: Synthetic peptide
  REGION 1..12: note = XENP019803 vlCDR1
RASQSVGSSYLA

SEQ ID NO: 5361 - protein, 7 aa, synthetic construct
  REGION 1..7: note = Description of Artificial Sequence: Synthetic peptide
  REGION 1..7: note = XENP019803 vlCDR2
GAFSRAT

SEQ ID NO: 5362 - protein, 9 aa, synthetic construct
  REGION 1..9: note = Description of Artificial Sequence: Synthetic peptide
  REGION 1..9: note = XENP019803 vlCDR3
QQYGSSPWT

SEQ ID NO: 5363 - protein, 246 aa, synthetic construct
  REGION 1..246: note = Description of Artificial Sequence: Synthetic polypeptide
  REGION 1..246: note = XENP019804 [CTLA-4]_H0.56_L0_scFv(GKPGS)4
QVQLVESGGGVVQPGRSLRLSCAASGFTFSSYTMHWVRQAPGKGLEWVTFISSDGNNKYYADSVKGRFTISRDNSKNTLYLQMNSLRAEDTAIYYCARTGWLGPFDYWGQGTLVTVSSGKPGSGKPGSGKPGSGKPGSEIVLTQSPGTLSLSPGERATLSCRASQSVGSSYLAWYQQKPGQAPRLLIYGAFSRATGIPDRFSGSGSGTDFTLTISRLEPEDFAVYYCQQYGSSPWTFGQGTKVEIK

SEQ ID NO: 5364 - protein, 118 aa, synthetic construct
  REGION 1..118: note = Description of Artificial Sequence: Synthetic polypeptide
  REGION 1..118: note = VH of XENP019804
QVQLVESGGGVVQPGRSLRLSCAASGFTFSSYTMHWVRQAPGKGLEWVTFISSDGNNKYYADSVKGRFTISRDNSKNTLYLQMNSLRAEDTAIYYCARTGWLGPFDYWGQGTLVTVSS

SEQ ID NO: 5365 - protein, 108 aa, synthetic construct; identical to SEQ ID NO: 3741
  REGION 1..108: note = Description of Artificial Sequence: Synthetic polypeptide
  REGION 1..108: note = VL of XENP019804

SEQ ID NO: 5366 - protein, 5 aa, synthetic construct
  REGION 1..5: note = Description of Artificial Sequence: Synthetic peptide
  REGION 1..5: note = XENP019804 vhCDR1
SYTMH

SEQ ID NO: 5367 - protein, 17 aa, synthetic construct
  REGION 1..17: note = Description of Artificial Sequence: Synthetic peptide
  REGION 1..17: note = XENP019804 vhCDR2
FISSDGNNKYYADSVKG

SEQ ID NO: 5368 - protein, 9 aa, synthetic construct
  REGION 1..9: note = Description of Artificial Sequence: Synthetic peptide
  REGION 1..9: note = XENP019804 vhCDR3
TGWLGPFDY

SEQ ID NO: 5369 - protein, 12 aa, synthetic construct
  REGION 1..12: note = Description of Artificial Sequence: Synthetic peptide
  REGION 1..12: note = XENP019804 vlCDR1
RASQSVGSSYLA

SEQ ID NO: 5370 - protein, 7 aa, synthetic construct
  REGION 1..7: note = Description of Artificial Sequence: Synthetic peptide
  REGION 1..7: note = XENP019804 vlCDR2
GAFSRAT

SEQ ID NO: 5371 - protein, 9 aa, synthetic construct
  REGION 1..9: note = Description of Artificial Sequence: Synthetic peptide
  REGION 1..9: note = XENP019804 vlCDR3
QQYGSSPWT

SEQ ID NO: 5372 - protein, 246 aa, synthetic construct
  REGION 1..246: note = Description of Artificial Sequence: Synthetic polypeptide
  REGION 1..246: note = XENP019805 [CTLA-4]_H0.57_L0_scFv(GKPGS)4
QVQLVESGGGVVQPGRSLRLSCAASGFTFSSYTMHWVRQAPGKGLEWVTFISYNGNNKYYADSVKGRFTISRDNSKNTLYLQMNSLRAEDTAIYYCARTGWLGPFDYWGQGTLVTVSSGKPGSGKPGSGKPGSGKPGSEIVLTQSPGTLSLSPGERATLSCRASQSVGSSYLAWYQQKPGQAPRLLIYGAFSRATGIPDRFSGSGSGTDFTLTISRLEPEDFAVYYCQQYGSSPWTFGQGTKVEIK

SEQ ID NO: 5373 - protein, 118 aa, synthetic construct
  REGION 1..118: note = Description of Artificial Sequence: Synthetic polypeptide
  REGION 1..118: note = VH of XENP019805
QVQLVESGGGVVQPGRSLRLSCAASGFTFSSYTMHWVRQAPGKGLEWVTFISYNGNNKYYADSVKGRFTISRDNSKNTLYLQMNSLRAEDTAIYYCARTGWLGPFDYWGQGTLVTVSS

SEQ ID NO: 5374 - protein, 108 aa, synthetic construct; identical to SEQ ID NO: 3741
  REGION 1..108: note = Description of Artificial Sequence: Synthetic polypeptide
  REGION 1..108: note = VL of XENP019805

SEQ ID NO: 5375 - protein, 5 aa, synthetic construct
  REGION 1..5: note = Description of Artificial Sequence: Synthetic peptide
  REGION 1..5: note = XENP019805 vhCDR1
SYTMH

SEQ ID NO: 5376 - protein, 17 aa, synthetic construct
  REGION 1..17: note = Description of Artificial Sequence: Synthetic peptide
  REGION 1..17: note = XENP019805 vhCDR2
FISYNGNNKYYADSVKG

SEQ ID NO: 5377 - protein, 9 aa, synthetic construct
  REGION 1..9: note = Description of Artificial Sequence: Synthetic peptide
  REGION 1..9: note = XENP019805 vhCDR3
TGWLGPFDY

SEQ ID NO: 5378 - protein, 12 aa, synthetic construct
  REGION 1..12: note = Description of Artificial Sequence: Synthetic peptide
  REGION 1..12: note = XENP019805 vlCDR1
RASQSVGSSYLA

SEQ ID NO: 5379 - protein, 7 aa, synthetic construct
  REGION 1..7: note = Description of Artificial Sequence: Synthetic peptide
  REGION 1..7: note = XENP019805 vlCDR2
GAFSRAT

SEQ ID NO: 5380 - protein, 9 aa, synthetic construct
  REGION 1..9: note = Description of Artificial Sequence: Synthetic peptide
  REGION 1..9: note = XENP019805 vlCDR3
QQYGSSPWT

SEQ ID NO: 5381 - protein, 246 aa, synthetic construct
  REGION 1..246: note = Description of Artificial Sequence: Synthetic polypeptide
  REGION 1..246: note = XENP019806 [CTLA-4]_H0.58_L0_scFv(GKPGS)4
QVQLVESGGGVVQPGRSLRLSCAASGFTFSSYTMHWVRQAPGKGLEWVTFISYSGNNKYYADSVKGRFTISRDNSKNTLYLQMNSLRAEDTAIYYCARTGWLGPFDYWGQGTLVTVSSGKPGSGKPGSGKPGSGKPGSEIVLTQSPGTLSLSPGERATLSCRASQSVGSSYLAWYQQKPGQAPRLLIYGAFSRATGIPDRFSGSGSGTDFTLTISRLEPEDFAVYYCQQYGSSPWTFGQGTKVEIK

SEQ ID NO: 5382 - protein, 118 aa, synthetic construct
  REGION 1..118: note = Description of Artificial Sequence: Synthetic polypeptide
  REGION 1..118: note = VH of XENP019806
QVQLVESGGGVVQPGRSLRLSCAASGFTFSSYTMHWVRQAPGKGLEWVTFISYSGNNKYYADSVKGRFTISRDNSKNTLYLQMNSLRAEDTAIYYCARTGWLGPFDYWGQGTLVTVSS

SEQ ID NO: 5383 - protein, 108 aa, synthetic construct; identical to SEQ ID NO: 3741
  REGION 1..108: note = Description of Artificial Sequence: Synthetic polypeptide
  REGION 1..108: note = VL of XENP019806

SEQ ID NO: 5384 - protein, 5 aa, synthetic construct
  REGION 1..5: note = Description of Artificial Sequence: Synthetic peptide
  REGION 1..5: note = XENP019806 vhCDR1
SYTMH

SEQ ID NO: 5385 - protein, 17 aa, synthetic construct
  REGION 1..17: note = Description of Artificial Sequence: Synthetic peptide
  REGION 1..17: note = XENP019806 vhCDR2
FISYSGNNKYYADSVKG

SEQ ID NO: 5386 - protein, 9 aa, synthetic construct
  REGION 1..9: note = Description of Artificial Sequence: Synthetic peptide
  REGION 1..9: note = XENP019806 vhCDR3
TGWLGPFDY

SEQ ID NO: 5387 - protein, 12 aa, synthetic construct
  REGION 1..12: note = Description of Artificial Sequence: Synthetic peptide
  REGION 1..12: note = XENP019806 vlCDR1
RASQSVGSSYLA

SEQ ID NO: 5388 - protein, 7 aa, synthetic construct
  REGION 1..7: note = Description of Artificial Sequence: Synthetic peptide
  REGION 1..7: note = XENP019806 vlCDR2
GAFSRAT

SEQ ID NO: 5389 - protein, 9 aa, synthetic construct
  REGION 1..9: note = Description of Artificial Sequence: Synthetic peptide
  REGION 1..9: note = XENP019806 vlCDR3
QQYGSSPWT

SEQ ID NO: 5390 - protein, 246 aa, synthetic construct
  REGION 1..246: note = Description of Artificial Sequence: Synthetic polypeptide
  REGION 1..246: note = XENP019807 [CTLA-4]_H0.59_L0_scFv(GKPGS)4
QVQLVESGGGVVQPGRSLRLSCAASGFTFSSYTMHWVRQAPGKGLEWVTFISYEGNNKYYADSVKGRFTISRDNSKNTLYLQMNSLRAEDTAIYYCARTGWLGPFDYWGQGTLVTVSSGKPGSGKPGSGKPGSGKPGSEIVLTQSPGTLSLSPGERATLSCRASQSVGSSYLAWYQQKPGQAPRLLIYGAFSRATGIPDRFSGSGSGTDFTLTISRLEPEDFAVYYCQQYGSSPWTFGQGTKVEIK

SEQ ID NO: 5391 - protein, 118 aa, synthetic construct
  REGION 1..118: note = Description of Artificial Sequence: Synthetic polypeptide
  REGION 1..118: note = VH of XENP019807
QVQLVESGGGVVQPGRSLRLSCAASGFTFSSYTMHWVRQAPGKGLEWVTFISYEGNNKYYADSVKGRFTISRDNSKNTLYLQMNSLRAEDTAIYYCARTGWLGPFDYWGQGTLVTVSS

SEQ ID NO: 5392 - protein, 108 aa, synthetic construct; identical to SEQ ID NO: 3741
  REGION 1..108: note = Description of Artificial Sequence: Synthetic polypeptide
  REGION 1..108: note = VL of XENP019807

SEQ ID NO: 5393 - protein, 5 aa, synthetic construct
  REGION 1..5: note = Description of Artificial Sequence: Synthetic peptide
  REGION 1..5: note = XENP019807 vhCDR1
SYTMH

SEQ ID NO: 5394 - protein, 17 aa, synthetic construct
  REGION 1..17: note = Description of Artificial Sequence: Synthetic peptide
  REGION 1..17: note = XENP019807 vhCDR2
FISYEGNNKYYADSVKG

SEQ ID NO: 5395 - protein, 9 aa, synthetic construct
  REGION 1..9: note = Description of Artificial Sequence: Synthetic peptide
  REGION 1..9: note = XENP019807 vhCDR3
TGWLGPFDY

SEQ ID NO: 5396 - protein, 12 aa, synthetic construct
  REGION 1..12: note = Description of Artificial Sequence: Synthetic peptide
  REGION 1..12: note = XENP019807 vlCDR1
RASQSVGSSYLA

SEQ ID NO: 5397 - protein, 7 aa, synthetic construct
  REGION 1..7: note = Description of Artificial Sequence: Synthetic peptide
  REGION 1..7: note = XENP019807 vlCDR2
GAFSRAT

SEQ ID NO: 5398 - protein, 9 aa, synthetic construct
  REGION 1..9: note = Description of Artificial Sequence: Synthetic peptide
  REGION 1..9: note = XENP019807 vlCDR3
QQYGSSPWT

SEQ ID NO: 5399 - protein, 246 aa, synthetic construct
  REGION 1..246: note = Description of Artificial Sequence: Synthetic polypeptide
  REGION 1..246: note = XENP019808 [CTLA-4]_H0.60_L0_scFv(GKPGS)4
QVQLVESGGGVVQPGRSLRLSCAASGFTFSSYTMHWVRQAPGKGLEWVTFISYHGNNKYYADSVKGRFTISRDNSKNTLYLQMNSLRAEDTAIYYCARTGWLGPFDYWGQGTLVTVSSGKPGSGKPGSGKPGSGKPGSEIVLTQSPGTLSLSPGERATLSCRASQSVGSSYLAWYQQKPGQAPRLLIYGAFSRATGIPDRFSGSGSGTDFTLTISRLEPEDFAVYYCQQYGSSPWTFGQGTKVEIK

SEQ ID NO: 5400 - protein, 118 aa, synthetic construct
  REGION 1..118: note = Description of Artificial Sequence: Synthetic polypeptide
  REGION 1..118: note = VH of XENP019808
QVQLVESGGGVVQPGRSLRLSCAASGFTFSSYTMHWVRQAPGKGLEWVTFISYHGNNKYYADSVKGRFTISRDNSKNTLYLQMNSLRAEDTAIYYCARTGWLGPFDYWGQGTLVTVSS

SEQ ID NO: 5401 - protein, 108 aa, synthetic construct; identical to SEQ ID NO: 3741
  REGION 1..108: note = Description of Artificial Sequence: Synthetic polypeptide
  REGION 1..108: note = VL of XENP019808

SEQ ID NO: 5402 - protein, 5 aa, synthetic construct
  REGION 1..5: note = Description of Artificial Sequence: Synthetic peptide
  REGION 1..5: note = XENP019808 vhCDR1
SYTMH

SEQ ID NO: 5403 - protein, 17 aa, synthetic construct
  REGION 1..17: note = Description of Artificial Sequence: Synthetic peptide
  REGION 1..17: note = XENP019808 vhCDR2
FISYHGNNKYYADSVKG

SEQ ID NO: 5404 - protein, 9 aa, synthetic construct
  REGION 1..9: note = Description of Artificial Sequence: Synthetic peptide
  REGION 1..9: note = XENP019808 vhCDR3
TGWLGPFDY

SEQ ID NO: 5405 - protein, 12 aa, synthetic construct
  REGION 1..12: note = Description of Artificial Sequence: Synthetic peptide
  REGION 1..12: note = XENP019808 vlCDR1
RASQSVGSSYLA

SEQ ID NO: 5406 - protein, 7 aa, synthetic construct
  REGION 1..7: note = Description of Artificial Sequence: Synthetic peptide
  REGION 1..7: note = XENP019808 vlCDR2
GAFSRAT

SEQ ID NO: 5407 - protein, 9 aa, synthetic construct
  REGION 1..9: note = Description of Artificial Sequence: Synthetic peptide
  REGION 1..9: note = XENP019808 vlCDR3
QQYGSSPWT

SEQ ID NO: 5408 - protein, 246 aa, synthetic construct
  REGION 1..246: note = Description of Artificial Sequence: Synthetic polypeptide
  REGION 1..246: note = XENP019809 [CTLA-4]_H0.61_L0_scFv(GKPGS)4
QVQLVESGGGVVQPGRSLRLSCAASGFTFSSYTMHWVRQAPGKGLEWVTFISYKGNNKYYADSVKGRFTISRDNSKNTLYLQMNSLRAEDTAIYYCARTGWLGPFDYWGQGTLVTVSSGKPGSGKPGSGKPGSGKPGSEIVLTQSPGTLSLSPGERATLSCRASQSVGSSYLAWYQQKPGQAPRLLIYGAFSRATGIPDRFSGSGSGTDFTLTISRLEPEDFAVYYCQQYGSSPWTFGQGTKVEIK

SEQ ID NO: 5409 - protein, 118 aa, synthetic construct
  REGION 1..118: note = Description of Artificial Sequence: Synthetic polypeptide
  REGION 1..118: note = VH of XENP019809
QVQLVESGGGVVQPGRSLRLSCAASGFTFSSYTMHWVRQAPGKGLEWVTFISYKGNNKYYADSVKGRFTISRDNSKNTLYLQMNSLRAEDTAIYYCARTGWLGPFDYWGQGTLVTVSS

SEQ ID NO: 5410 - protein, 108 aa, synthetic construct; identical to SEQ ID NO: 3741
  REGION 1..108: note = Description of Artificial Sequence: Synthetic polypeptide
  REGION 1..108: note = VL of XENP019809

SEQ ID NO: 5411 - protein, 5 aa, synthetic construct
  REGION 1..5: note = Description of Artificial Sequence: Synthetic peptide
  REGION 1..5: note = XENP019809 vhCDR1
SYTMH

SEQ ID NO: 5412 - protein, 17 aa, synthetic construct
  REGION 1..17: note = Description of Artificial Sequence: Synthetic peptide
  REGION 1..17: note = XENP019809 vhCDR2
FISYKGNNKYYADSVKG

SEQ ID NO: 5413 - protein, 9 aa, synthetic construct
  REGION 1..9: note = Description of Artificial Sequence: Synthetic peptide
  REGION 1..9: note = XENP019809 vhCDR3
TGWLGPFDY

SEQ ID NO: 5414 - protein, 12 aa, synthetic construct
  REGION 1..12: note = Description of Artificial Sequence: Synthetic peptide
  REGION 1..12: note = XENP019809 vlCDR1
RASQSVGSSYLA

SEQ ID NO: 5415 - protein, 7 aa, synthetic construct
  REGION 1..7: note = Description of Artificial Sequence: Synthetic peptide
  REGION 1..7: note = XENP019809 vlCDR2
GAFSRAT

SEQ ID NO: 5416 - protein, 9 aa, synthetic construct
  REGION 1..9: note = Description of Artificial Sequence: Synthetic peptide
  REGION 1..9: note = XENP019809 vlCDR3
QQYGSSPWT

SEQ ID NO: 5417 - protein, 246 aa, synthetic construct
  REGION 1..246: note = Description of Artificial Sequence: Synthetic polypeptide
  REGION 1..246: note = XENP019810 [CTLA-4]_H0.62_L0_scFv(GKPGS)4
QVQLVESGGGVVQPGRSLRLSCAASGFTFSSYTMHWVRQAPGKGLEWVTFISYKGNNKYYADSVKGRFTISEDNSKNTLYLQMNSLRAEDTAIYYCARTGWLGPFDYWGQGTLVTVSSGKPGSGKPGSGKPGSGKPGSEIVLTQSPGTLSLSPGERATLSCRASQSVGSSYLAWYQQKPGQAPRLLIYGAFSRATGIPDRFSGSGSGTDFTLTISRLEPEDFAVYYCQQYGSSPWTFGQGTKVEIK

SEQ ID NO: 5418 - protein, 118 aa, synthetic construct
  REGION 1..118: note = Description of Artificial Sequence: Synthetic polypeptide
  REGION 1..118: note = VH of XENP019810
QVQLVESGGGVVQPGRSLRLSCAASGFTFSSYTMHWVRQAPGKGLEWVTFISYKGNNKYYADSVKGRFTISEDNSKNTLYLQMNSLRAEDTAIYYCARTGWLGPFDYWGQGTLVTVSS

SEQ ID NO: 5419 - protein, 108 aa, synthetic construct; identical to SEQ ID NO: 3741
  REGION 1..108: note = Description of Artificial Sequence: Synthetic polypeptide
  REGION 1..108: note = VL of XENP019810

SEQ ID NO: 5420 - protein, 5 aa, synthetic construct
  REGION 1..5: note = Description of Artificial Sequence: Synthetic peptide
  REGION 1..5: note = XENP019810 vhCDR1
SYTMH

SEQ ID NO: 5421 - protein, 17 aa, synthetic construct
  REGION 1..17: note = Description of Artificial Sequence: Synthetic peptide
  REGION 1..17: note = XENP019810 vhCDR2
FISYKGNNKYYADSVKG

SEQ ID NO: 5422 - protein, 9 aa, synthetic construct
  REGION 1..9: note = Description of Artificial Sequence: Synthetic peptide
  REGION 1..9: note = XENP019810 vhCDR3
TGWLGPFDY

SEQ ID NO: 5423 - protein, 12 aa, synthetic construct
  REGION 1..12: note = Description of Artificial Sequence: Synthetic peptide
  REGION 1..12: note = XENP019810 vlCDR1
RASQSVGSSYLA

SEQ ID NO: 5424 - protein, 7 aa, synthetic construct
  REGION 1..7: note = Description of Artificial Sequence: Synthetic peptide
  REGION 1..7: note = XENP019810 vlCDR2
GAFSRAT

SEQ ID NO: 5425 - protein, 9 aa, synthetic construct
  REGION 1..9: note = Description of Artificial Sequence: Synthetic peptide
  REGION 1..9: note = XENP019810 vlCDR3
QQYGSSPWT

SEQ ID NO: 5426 - protein, 246 aa, synthetic construct
  REGION 1..246: note = Description of Artificial Sequence: Synthetic polypeptide
  REGION 1..246: note = XENP019811 [CTLA-4]_H0.63_L0_scFv(GKPGS)4
QVQLVESGGGVVQPGRSLRLSCAASGFTFSSYTMHWVRQAPGKGLEWVTFISYQGNNKYYADSVKGRFTISRDNSKNTLYLQMNSLRAEDTAIYYCARTGWLGPFDYWGQGTLVTVSSGKPGSGKPGSGKPGSGKPGSEIVLTQSPGTLSLSPGERATLSCRASQSVGSSYLAWYQQKPGQAPRLLIYGAFSRATGIPDRFSGSGSGTDFTLTISRLEPEDFAVYYCQQYGSSPWTFGQGTKVEIK

SEQ ID NO: 5427 - protein, 118 aa, synthetic construct
  REGION 1..118: note = Description of Artificial Sequence: Synthetic polypeptide
  REGION 1..118: note = VH of XENP019811
QVQLVESGGGVVQPGRSLRLSCAASGFTFSSYTMHWVRQAPGKGLEWVTFISYQGNNKYYADSVKGRFTISRDNSKNTLYLQMNSLRAEDTAIYYCARTGWLGPFDYWGQGTLVTVSS

SEQ ID NO: 5428 - protein, 108 aa, synthetic construct; identical to SEQ ID NO: 3741
  REGION 1..108: note = Description of Artificial Sequence: Synthetic polypeptide
  REGION 1..108: note = VL of XENP019811

SEQ ID NO: 5429 - protein, 5 aa, synthetic construct
  REGION 1..5: note = Description of Artificial Sequence: Synthetic peptide
  REGION 1..5: note = XENP019811 vhCDR1
SYTMH

SEQ ID NO: 5430 - protein, 17 aa, synthetic construct
  REGION 1..17: note = Description of Artificial Sequence: Synthetic peptide
  REGION 1..17: note = XENP019811 vhCDR2
FISYQGNNKYYADSVKG

SEQ ID NO: 5431 - protein, 9 aa, synthetic construct
  REGION 1..9: note = Description of Artificial Sequence: Synthetic peptide
  REGION 1..9: note = XENP019811 vhCDR3
TGWLGPFDY

SEQ ID NO: 5432 - protein, 12 aa, synthetic construct
  REGION 1..12: note = Description of Artificial Sequence: Synthetic peptide
  REGION 1..12: note = XENP019811 vlCDR1
RASQSVGSSYLA

SEQ ID NO: 5433 - protein, 7 aa, synthetic construct
  REGION 1..7: note = Description of Artificial Sequence: Synthetic peptide
  REGION 1..7: note = XENP019811 vlCDR2
GAFSRAT

SEQ ID NO: 5434 - protein, 9 aa, synthetic construct
  REGION 1..9: note = Description of Artificial Sequence: Synthetic peptide
  REGION 1..9: note = XENP019811 vlCDR3
QQYGSSPWT

SEQ ID NO: 5435 - protein, 246 aa, synthetic construct
  REGION 1..246: note = Description of Artificial Sequence: Synthetic polypeptide
  REGION 1..246: note = XENP019812 [CTLA-4]_H0.64_L0_scFv(GKPGS)4
QVQLVESGGGVVQPGRSLRLSCAASGFTFSSYTMHWVRQAPGKGLEWVTFISYDKNNKYYADSVKGRFTISRDNSKNTLYLQMNSLRAEDTAIYYCARTGWLGPFDYWGQGTLVTVSSGKPGSGKPGSGKPGSGKPGSEIVLTQSPGTLSLSPGERATLSCRASQSVGSSYLAWYQQKPGQAPRLLIYGAFSRATGIPDRFSGSGSGTDFTLTISRLEPEDFAVYYCQQYGSSPWTFGQGTKVEIK

SEQ ID NO: 5436 - protein, 118 aa, synthetic construct
  REGION 1..118: note = Description of Artificial Sequence: Synthetic polypeptide
  REGION 1..118: note = VH of XENP019812
QVQLVESGGGVVQPGRSLRLSCAASGFTFSSYTMHWVRQAPGKGLEWVTFISYDKNNKYYADSVKGRFTISRDNSKNTLYLQMNSLRAEDTAIYYCARTGWLGPFDYWGQGTLVTVSS

SEQ ID NO: 5437 - protein, 108 aa, synthetic construct; identical to SEQ ID NO: 3741
  REGION 1..108: note = Description of Artificial Sequence: Synthetic polypeptide
  REGION 1..108: note = VL of XENP019812

SEQ ID NO: 5438 - protein, 5 aa, synthetic construct
  REGION 1..5: note = Description of Artificial Sequence: Synthetic peptide
  REGION 1..5: note = XENP019812 vhCDR1
SYTMH

SEQ ID NO: 5439 - protein, 17 aa, synthetic construct
  REGION 1..17: note = Description of Artificial Sequence: Synthetic peptide
  REGION 1..17: note = XENP019812 vhCDR2
FISYDKNNKYYADSVKG

SEQ ID NO: 5440 - protein, 9 aa, synthetic construct
  REGION 1..9: note = Description of Artificial Sequence: Synthetic peptide
  REGION 1..9: note = XENP019812 vhCDR3
TGWLGPFDY

SEQ ID NO: 5441 - protein, 12 aa, synthetic construct
  REGION 1..12: note = Description of Artificial Sequence: Synthetic peptide
  REGION 1..12: note = XENP019812 vlCDR1
RASQSVGSSYLA

SEQ ID NO: 5442 - protein, 7 aa, synthetic construct
  REGION 1..7: note = Description of Artificial Sequence: Synthetic peptide
  REGION 1..7: note = XENP019812 vlCDR2
GAFSRAT

SEQ ID NO: 5443 - protein, 9 aa, synthetic construct
  REGION 1..9: note = Description of Artificial Sequence: Synthetic peptide
  REGION 1..9: note = XENP019812 vlCDR3
QQYGSSPWT

SEQ ID NO: 5444 - protein, 246 aa, synthetic construct
  REGION 1..246: note = Description of Artificial Sequence: Synthetic polypeptide
  REGION 1..246: note = XENP019813 [CTLA-4]_H0.65_L0_scFv(GKPGS)4
QVQLVESGGGVVQPGRSLRLSCAASGFTFSSYTMHWVRQAPGKGLEWVTFISYDKNNKYYADSVKGRFTISEDNSKNTLYLQMNSLRAEDTAIYYCARTGWLGPFDYWGQGTLVTVSSGKPGSGKPGSGKPGSGKPGSEIVLTQSPGTLSLSPGERATLSCRASQSVGSSYLAWYQQKPGQAPRLLIYGAFSRATGIPDRFSGSGSGTDFTLTISRLEPEDFAVYYCQQYGSSPWTFGQGTKVEIK

SEQ ID NO: 5445 - protein, 118 aa, synthetic construct
  REGION 1..118: note = Description of Artificial Sequence: Synthetic polypeptide
  REGION 1..118: note = VH of XENP019813
QVQLVESGGGVVQPGRSLRLSCAASGFTFSSYTMHWVRQAPGKGLEWVTFISYDKNNKYYADSVKGRFTISEDNSKNTLYLQMNSLRAEDTAIYYCARTGWLGPFDYWGQGTLVTVSS

SEQ ID NO: 5446 - protein, 108 aa, synthetic construct; identical to SEQ ID NO: 3741
  REGION 1..108: note = Description of Artificial Sequence: Synthetic polypeptide
  REGION 1..108: note = VL of XENP019813

SEQ ID NO: 5447 - protein, 5 aa, synthetic construct
  REGION 1..5: note = Description of Artificial Sequence: Synthetic peptide
  REGION 1..5: note = XENP019813 vhCDR1
SYTMH

SEQ ID NO: 5448 - protein, 17 aa, synthetic construct
  REGION 1..17: note = Description of Artificial Sequence: Synthetic peptide
  REGION 1..17: note = XENP019813 vhCDR2
FISYDKNNKYYADSVKG

SEQ ID NO: 5449 - protein, 9 aa, synthetic construct
  REGION 1..9: note = Description of Artificial Sequence: Synthetic peptide
  REGION 1..9: note = XENP019813 vhCDR3
TGWLGPFDY

SEQ ID NO: 5450 - protein, 12 aa, synthetic construct
  REGION 1..12: note = Description of Artificial Sequence: Synthetic peptide
  REGION 1..12: note = XENP019813 vlCDR1
RASQSVGSSYLA

SEQ ID NO: 5451 - protein, 7 aa, synthetic construct
  REGION 1..7: note = Description of Artificial Sequence: Synthetic peptide
  REGION 1..7: note = XENP019813 vlCDR2
GAFSRAT

SEQ ID NO: 5452 - protein, 9 aa, synthetic construct
  REGION 1..9: note = Description of Artificial Sequence: Synthetic peptide
  REGION 1..9: note = XENP019813 vlCDR3
QQYGSSPWT

SEQ ID NO: 5453 - protein, 246 aa, synthetic construct
  REGION 1..246: note = Description of Artificial Sequence: Synthetic polypeptide
  REGION 1..246: note = XENP019814 [CTLA-4]_H0.66_L0_scFv(GKPGS)4
QVQLVESGGGVVQPGRSLRLSCAASGFTFSSYTMHWVRQAPGKGLEWVTFISYDGDNKYYADSVKGRFTISRDNSKNTLYLQMNSLRAEDTAIYYCARTGWLGPFDYWGQGTLVTVSSGKPGSGKPGSGKPGSGKPGSEIVLTQSPGTLSLSPGERATLSCRASQSVGSSYLAWYQQKPGQAPRLLIYGAFSRATGIPDRFSGSGSGTDFTLTISRLEPEDFAVYYCQQYGSSPWTFGQGTKVEIK

SEQ ID NO: 5454 - protein, 118 aa, synthetic construct
  REGION 1..118: note = Description of Artificial Sequence: Synthetic polypeptide
  REGION 1..118: note = VH of XENP019814
QVQLVESGGGVVQPGRSLRLSCAASGFTFSSYTMHWVRQAPGKGLEWVTFISYDGDNKYYADSVKGRFTISRDNSKNTLYLQMNSLRAEDTAIYYCARTGWLGPFDYWGQGTLVTVSS

SEQ ID NO: 5455 - protein, 108 aa, synthetic construct; identical to SEQ ID NO: 3741
  REGION 1..108: note = Description of Artificial Sequence: Synthetic polypeptide
  REGION 1..108: note = VL of XENP019814

SEQ ID NO: 5456 - protein, 5 aa, synthetic construct
  REGION 1..5: note = Description of Artificial Sequence: Synthetic peptide
  REGION 1..5: note = XENP019814 vhCDR1
SYTMH

SEQ ID NO: 5457 - protein, 17 aa, synthetic construct
  REGION 1..17: note = Description of Artificial Sequence: Synthetic peptide
  REGION 1..17: note = XENP019814 vhCDR2
FISYDGDNKYYADSVKG

SEQ ID NO: 5458 - protein, 9 aa, synthetic construct
  REGION 1..9: note = Description of Artificial Sequence: Synthetic peptide
  REGION 1..9: note = XENP019814 vhCDR3
TGWLGPFDY

SEQ ID NO: 5459 - protein, 12 aa, synthetic construct
  REGION 1..12: note = Description of Artificial Sequence: Synthetic peptide
  REGION 1..12: note = XENP019814 vlCDR1
RASQSVGSSYLA

SEQ ID NO: 5460 - protein, 7 aa, synthetic construct
  REGION 1..7: note = Description of Artificial Sequence: Synthetic peptide
  REGION 1..7: note = XENP019814 vlCDR2
GAFSRAT

SEQ ID NO: 5461 - protein, 9 aa, synthetic construct
  REGION 1..9: note = Description of Artificial Sequence: Synthetic peptide
  REGION 1..9: note = XENP019814 vlCDR3
QQYGSSPWT

SEQ ID NO: 5462 - protein, 246 aa, synthetic construct
  REGION 1..246: note = Description of Artificial Sequence: Synthetic polypeptide
  REGION 1..246: note = XENP019815 [CTLA-4]_H0.67_L0_scFv(GKPGS)4
QVQLVESGGGVVQPGRSLRLSCAASGFTFSSYTMHWVRQAPGKGLEWVTFISYDGGNKYYADSVKGRFTISRDNSKNTLYLQMNSLRAEDTAIYYCARTGWLGPFDYWGQGTLVTVSSGKPGSGKPGSGKPGSGKPGSEIVLTQSPGTLSLSPGERATLSCRASQSVGSSYLAWYQQKPGQAPRLLIYGAFSRATGIPDRFSGSGSGTDFTLTISRLEPEDFAVYYCQQYGSSPWTFGQGTKVEIK

SEQ ID NO: 5463 - protein, 118 aa, synthetic construct
  REGION 1..118: note = Description of Artificial Sequence: Synthetic polypeptide
  REGION 1..118: note = VH of XENP019815
QVQLVESGGGVVQPGRSLRLSCAASGFTFSSYTMHWVRQAPGKGLEWVTFISYDGGNKYYADSVKGRFTISRDNSKNTLYLQMNSLRAEDTAIYYCARTGWLGPFDYWGQGTLVTVSS

SEQ ID NO: 5464 - protein, 108 aa, synthetic construct; identical to SEQ ID NO: 3741
  REGION 1..108: note = Description of Artificial Sequence: Synthetic polypeptide
  REGION 1..108: note = VL of XENP019815

SEQ ID NO: 5465 - protein, 5 aa, synthetic construct
  REGION 1..5: note = Description of Artificial Sequence: Synthetic peptide
  REGION 1..5: note = XENP019815 vhCDR1
SYTMH

SEQ ID NO: 5466 - protein, 17 aa, synthetic construct
  REGION 1..17: note = Description of Artificial Sequence: Synthetic peptide
  REGION 1..17: note = XENP019815 vhCDR2
FISYDGGNKYYADSVKG

SEQ ID NO: 5467 - protein, 9 aa, synthetic construct
  REGION 1..9: note = Description of Artificial Sequence: Synthetic peptide
  REGION 1..9: note = XENP019815 vhCDR3
TGWLGPFDY

SEQ ID NO: 5468 - protein, 12 aa, synthetic construct
  REGION 1..12: note = Description of Artificial Sequence: Synthetic peptide
  REGION 1..12: note = XENP019815 vlCDR1
RASQSVGSSYLA

SEQ ID NO: 5469 - protein, 7 aa, synthetic construct
  REGION 1..7: note = Description of Artificial Sequence: Synthetic peptide
  REGION 1..7: note = XENP019815 vlCDR2
GAFSRAT

SEQ ID NO: 5470 - protein, 9 aa, synthetic construct
  REGION 1..9: note = Description of Artificial Sequence: Synthetic peptide
  REGION 1..9: note = XENP019815 vlCDR3
QQYGSSPWT

SEQ ID NO: 5471 - protein, 246 aa, synthetic construct
  REGION 1..246: note = Description of Artificial Sequence: Synthetic polypeptide
  REGION 1..246: note = XENP019816 [CTLA-4]_H0.68_L0_scFv(GKPGS)4
QVQLVESGGGVVQPGRSLRLSCAASGFTFSSYTMHWVRQAPGKGLEWVTFISYDGHNKYYADSVKGRFTISRDNSKNTLYLQMNSLRAEDTAIYYCARTGWLGPFDYWGQGTLVTVSSGKPGSGKPGSGKPGSGKPGSEIVLTQSPGTLSLSPGERATLSCRASQSVGSSYLAWYQQKPGQAPRLLIYGAFSRATGIPDRFSGSGSGTDFTLTISRLEPEDFAVYYCQQYGSSPWTFGQGTKVEIK

SEQ ID NO: 5472 - protein, 118 aa, synthetic construct
  REGION 1..118: note = Description of Artificial Sequence: Synthetic polypeptide
  REGION 1..118: note = VH of XENP019816
QVQLVESGGGVVQPGRSLRLSCAASGFTFSSYTMHWVRQAPGKGLEWVTFISYDGHNKYYADSVKGRFTISRDNSKNTLYLQMNSLRAEDTAIYYCARTGWLGPFDYWGQGTLVTVSS

SEQ ID NO: 5473 - protein, 108 aa, synthetic construct; identical to SEQ ID NO: 3741
  REGION 1..108: note = Description of Artificial Sequence: Synthetic polypeptide
  REGION 1..108: note = VL of XENP019816

SEQ ID NO: 5474 - protein, 5 aa, synthetic construct
  REGION 1..5: note = Description of Artificial Sequence: Synthetic peptide
  REGION 1..5: note = XENP019816 vhCDR1
SYTMH

SEQ ID NO: 5475 - protein, 17 aa, synthetic construct
  REGION 1..17: note = Description of Artificial Sequence: Synthetic peptide
  REGION 1..17: note = XENP019816 vhCDR2
FISYDGHNKYYADSVKG

SEQ ID NO: 5476 - protein, 9 aa, synthetic construct
  REGION 1..9: note = Description of Artificial Sequence: Synthetic peptide
  REGION 1..9: note = XENP019816 vhCDR3
TGWLGPFDY

SEQ ID NO: 5477 - protein, 12 aa, synthetic construct
  REGION 1..12: note = Description of Artificial Sequence: Synthetic peptide
  REGION 1..12: note = XENP019816 vlCDR1
RASQSVGSSYLA

SEQ ID NO: 5478 - protein, 7 aa, synthetic construct
  REGION 1..7: note = Description of Artificial Sequence: Synthetic peptide
  REGION 1..7: note = XENP019816 vlCDR2
GAFSRAT

SEQ ID NO: 5479 - protein, 9 aa, synthetic construct
  REGION 1..9: note = Description of Artificial Sequence: Synthetic peptide
  REGION 1..9: note = XENP019816 vlCDR3
QQYGSSPWT

SEQ ID NO: 5480 - protein, 246 aa, synthetic construct
  REGION 1..246: note = Description of Artificial Sequence: Synthetic polypeptide
  REGION 1..246: note = XENP019817 [CTLA-4]_H0.69_L0_scFv(GKPGS)4
QVQLVESGGGVVQPGRSLRLSCAASGFTFSSYTMHWVRQAPGKGLEWVTFISYDGQNKYYADSVKGRFTISRDNSKNTLYLQMNSLRAEDTAIYYCARTGWLGPFDYWGQGTLVTVSSGKPGSGKPGSGKPGSGKPGSEIVLTQSPGTLSLSPGERATLSCRASQSVGSSYLAWYQQKPGQAPRLLIYGAFSRATGIPDRFSGSGSGTDFTLTISRLEPEDFAVYYCQQYGSSPWTFGQGTKVEIK

SEQ ID NO: 5481 - protein, 118 aa, synthetic construct
  REGION 1..118: note = Description of Artificial Sequence: Synthetic polypeptide
  REGION 1..118: note = VH of XENP019817
QVQLVESGGGVVQPGRSLRLSCAASGFTFSSYTMHWVRQAPGKGLEWVTFISYDGQNKYYADSVKGRFTISRDNSKNTLYLQMNSLRAEDTAIYYCARTGWLGPFDYWGQGTLVTVSS

SEQ ID NO: 5482 - protein, 108 aa, synthetic construct; identical to SEQ ID NO: 3741
  REGION 1..108: note = Description of Artificial Sequence: Synthetic polypeptide
  REGION 1..108: note = VL of XENP019817

SEQ ID NO: 5483 - protein, 5 aa, synthetic construct
  REGION 1..5: note = Description of Artificial Sequence: Synthetic peptide
  REGION 1..5: note = XENP019817 vhCDR1
SYTMH

SEQ ID NO: 5484 - protein, 17 aa, synthetic construct
  REGION 1..17: note = Description of Artificial Sequence: Synthetic peptide
  REGION 1..17: note = XENP019817 vhCDR2
FISYDGQNKYYADSVKG

SEQ ID NO: 5485 - protein, 9 aa, synthetic construct
  REGION 1..9: note = Description of Artificial Sequence: Synthetic peptide
  REGION 1..9: note = XENP019817 vhCDR3
TGWLGPFDY

SEQ ID NO: 5486 - protein, 12 aa, synthetic construct
  REGION 1..12: note = Description of Artificial Sequence: Synthetic peptide
  REGION 1..12: note = XENP019817 vlCDR1
RASQSVGSSYLA

SEQ ID NO: 5487 - protein, 7 aa, synthetic construct
  REGION 1..7: note = Description of Artificial Sequence: Synthetic peptide
  REGION 1..7: note = XENP019817 vlCDR2
GAFSRAT

SEQ ID NO: 5488 - protein, 9 aa, synthetic construct
  REGION 1..9: note = Description of Artificial Sequence: Synthetic peptide
  REGION 1..9: note = XENP019817 vlCDR3
QQYGSSPWT

SEQ ID NO: 5489 - protein, 246 aa, synthetic construct
  REGION 1..246: note = Description of Artificial Sequence: Synthetic polypeptide
  REGION 1..246: note = XENP019818 [CTLA-4]_H0.70_L0_scFv(GKPGS)4
QVQLVESGGGVVQPGRSLRLSCAASGFTFSSYTMHWVRQAPGKGLEWVTFISYDGSNKYYADSVKGRFTISRDNSKNTLYLQMNSLRAEDTAIYYCARTGWLGPFDYWGQGTLVTVSSGKPGSGKPGSGKPGSGKPGSEIVLTQSPGTLSLSPGERATLSCRASQSVGSSYLAWYQQKPGQAPRLLIYGAFSRATGIPDRFSGSGSGTDFTLTISRLEPEDFAVYYCQQYGSSPWTFGQGTKVEIK

SEQ ID NO: 5490 - protein, 118 aa, synthetic construct
  REGION 1..118: note = Description of Artificial Sequence: Synthetic polypeptide
  REGION 1..118: note = VH of XENP019818
QVQLVESGGGVVQPGRSLRLSCAASGFTFSSYTMHWVRQAPGKGLEWVTFISYDGSNKYYADSVKGRFTISRDNSKNTLYLQMNSLRAEDTAIYYCARTGWLGPFDYWGQGTLVTVSS

SEQ ID NO: 5491 - protein, 108 aa, synthetic construct; identical to SEQ ID NO: 3741
  REGION 1..108: note = Description of Artificial Sequence: Synthetic polypeptide
  REGION 1..108: note = VL of XENP019818

SEQ ID NO: 5492 - protein, 5 aa, synthetic construct
  REGION 1..5: note = Description of Artificial Sequence: Synthetic peptide
  REGION 1..5: note = XENP019818 vhCDR1
SYTMH

SEQ ID NO: 5493 - protein, 17 aa, synthetic construct
  REGION 1..17: note = Description of Artificial Sequence: Synthetic peptide
  REGION 1..17: note = XENP019818 vhCDR2
FISYDGSNKYYADSVKG

SEQ ID NO: 5494 - protein, 9 aa, synthetic construct
  REGION 1..9: note = Description of Artificial Sequence: Synthetic peptide
  REGION 1..9: note = XENP019818 vhCDR3
TGWLGPFDY

SEQ ID NO: 5495 - protein, 12 aa, synthetic construct
  REGION 1..12: note = Description of Artificial Sequence: Synthetic peptide
  REGION 1..12: note = XENP019818 vlCDR1
RASQSVGSSYLA

SEQ ID NO: 5496 - protein, 7 aa, synthetic construct
  REGION 1..7: note = Description of Artificial Sequence: Synthetic peptide
  REGION 1..7: note = XENP019818 vlCDR2
GAFSRAT

SEQ ID NO: 5497 - protein, 9 aa, synthetic construct
  REGION 1..9: note = Description of Artificial Sequence: Synthetic peptide
  REGION 1..9: note = XENP019818 vlCDR3
QQYGSSPWT

SEQ ID NO: 5498 - protein, 246 aa, synthetic construct
  REGION 1..246: note = Description of Artificial Sequence: Synthetic polypeptide
  REGION 1..246: note = XENP019819 [CTLA-4]_H0.71_L0_scFv(GKPGS)4
QVQLVESGGGVVQPGRSLRLSCAASGFTFSSYTMHWVRQAPGKGLEWVTFISYDGNDKYYADSVKGRFTISRDNSKNTLYLQMNSLRAEDTAIYYCARTGWLGPFDYWGQGTLVTVSSGKPGSGKPGSGKPGSGKPGSEIVLTQSPGTLSLSPGERATLSCRASQSVGSSYLAWYQQKPGQAPRLLIYGAFSRATGIPDRFSGSGSGTDFTLTISRLEPEDFAVYYCQQYGSSPWTFGQGTKVEIK

SEQ ID NO: 5499 - protein, 118 aa, synthetic construct
  REGION 1..118: note = Description of Artificial Sequence: Synthetic polypeptide
  REGION 1..118: note = VH of XENP019819
QVQLVESGGGVVQPGRSLRLSCAASGFTFSSYTMHWVRQAPGKGLEWVTFISYDGNDKYYADSVKGRFTISRDNSKNTLYLQMNSLRAEDTAIYYCARTGWLGPFDYWGQGTLVTVSS

SEQ ID NO: 5500 - protein, 108 aa, synthetic construct; identical to SEQ ID NO: 3741
  REGION 1..108: note = Description of Artificial Sequence: Synthetic polypeptide
  REGION 1..108: note = VL of XENP019819

SEQ ID NO: 5501 - protein, 5 aa, synthetic construct
  REGION 1..5: note = Description of Artificial Sequence: Synthetic peptide
  REGION 1..5: note = XENP019819 vhCDR1
SYTMH

SEQ ID NO: 5502 - protein, 17 aa, synthetic construct
  REGION 1..17: note = Description of Artificial Sequence: Synthetic peptide
  REGION 1..17: note = XENP019819 vhCDR2
FISYDGNDKYYADSVKG

SEQ ID NO: 5503 - protein, 9 aa, synthetic construct
  REGION 1..9: note = Description of Artificial Sequence: Synthetic peptide
  REGION 1..9: note = XENP019819 vhCDR3
TGWLGPFDY

SEQ ID NO: 5504 - protein, 12 aa, synthetic construct
  REGION 1..12: note = Description of Artificial Sequence: Synthetic peptide
  REGION 1..12: note = XENP019819 vlCDR1
RASQSVGSSYLA

SEQ ID NO: 5505 - protein, 7 aa, synthetic construct
  REGION 1..7: note = Description of Artificial Sequence: Synthetic peptide
  REGION 1..7: note = XENP019819 vlCDR2
GAFSRAT

SEQ ID NO: 5506 - protein, 9 aa, synthetic construct
  REGION 1..9: note = Description of Artificial Sequence: Synthetic peptide
  REGION 1..9: note = XENP019819 vlCDR3
QQYGSSPWT

SEQ ID NO: 5507 - protein, 246 aa, synthetic construct
  REGION 1..246: note = Description of Artificial Sequence: Synthetic polypeptide
  REGION 1..246: note = XENP019820 [CTLA-4]_H0.72_L0_scFv(GKPGS)4
QVQLVESGGGVVQPGRSLRLSCAASGFTFSSYTMHWVRQAPGKGLEWVTFISYDGNEKYYADSVKGRFTISRDNSKNTLYLQMNSLRAEDTAIYYCARTGWLGPFDYWGQGTLVTVSSGKPGSGKPGSGKPGSGKPGSEIVLTQSPGTLSLSPGERATLSCRASQSVGSSYLAWYQQKPGQAPRLLIYGAFSRATGIPDRFSGSGSGTDFTLTISRLEPEDFAVYYCQQYGSSPWTFGQGTKVEIK

SEQ ID NO: 5508 - protein, 118 aa, synthetic construct
  REGION 1..118: note = Description of Artificial Sequence: Synthetic polypeptide
  REGION 1..118: note = VH of XENP019820
QVQLVESGGGVVQPGRSLRLSCAASGFTFSSYTMHWVRQAPGKGLEWVTFISYDGNEKYYADSVKGRFTISRDNSKNTLYLQMNSLRAEDTAIYYCARTGWLGPFDYWGQGTLVTVSS

SEQ ID NO: 5509 - protein, 108 aa, synthetic construct; identical to SEQ ID NO: 3741
  REGION 1..108: note = Description of Artificial Sequence: Synthetic polypeptide
  REGION 1..108: note = VL of XENP019820

SEQ ID NO: 5510 - protein, 5 aa, synthetic construct
  REGION 1..5: note = Description of Artificial Sequence: Synthetic peptide
  REGION 1..5: note = XENP019820 vhCDR1
SYTMH

SEQ ID NO: 5511 - protein, 17 aa, synthetic construct
  REGION 1..17: note = Description of Artificial Sequence: Synthetic peptide
  REGION 1..17: note = XENP019820 vhCDR2
FISYDGNEKYYADSVKG

SEQ ID NO: 5512 - protein, 9 aa, synthetic construct
  REGION 1..9: note = Description of Artificial Sequence: Synthetic peptide
  REGION 1..9: note = XENP019820 vhCDR3
TGWLGPFDY

SEQ ID NO: 5513 - protein, 12 aa, synthetic construct
  REGION 1..12: note = Description of Artificial Sequence: Synthetic peptide
  REGION 1..12: note = XENP019820 vlCDR1
RASQSVGSSYLA

SEQ ID NO: 5514 - protein, 7 aa, synthetic construct
  REGION 1..7: note = Description of Artificial Sequence: Synthetic peptide
  REGION 1..7: note = XENP019820 vlCDR2
GAFSRAT

SEQ ID NO: 5515 - protein, 9 aa, synthetic construct
  REGION 1..9: note = Description of Artificial Sequence: Synthetic peptide
  REGION 1..9: note = XENP019820 vlCDR3
QQYGSSPWT

SEQ ID NO: 5516 - protein, 246 aa, synthetic construct
  REGION 1..246: note = Description of Artificial Sequence: Synthetic polypeptide
  REGION 1..246: note = XENP019821 [CTLA-4]_H0.73_L0_scFv(GKPGS)4
QVQLVESGGGVVQPGRSLRLSCAASGFTFSSYTMHWVRQAPGKGLEWVTFISYDGNHKYYADSVKGRFTISRDNSKNTLYLQMNSLRAEDTAIYYCARTGWLGPFDYWGQGTLVTVSSGKPGSGKPGSGKPGSGKPGSEIVLTQSPGTLSLSPGERATLSCRASQSVGSSYLAWYQQKPGQAPRLLIYGAFSRATGIPDRFSGSGSGTDFTLTISRLEPEDFAVYYCQQYGSSPWTFGQGTKVEIK

SEQ ID NO: 5517 - protein, 118 aa, synthetic construct
  REGION 1..118: note = Description of Artificial Sequence: Synthetic polypeptide
  REGION 1..118: note = VH of XENP019821
QVQLVESGGGVVQPGRSLRLSCAASGFTFSSYTMHWVRQAPGKGLEWVTFISYDGNHKYYADSVKGRFTISRDNSKNTLYLQMNSLRAEDTAIYYCARTGWLGPFDYWGQGTLVTVSS

SEQ ID NO: 5518 - protein, 108 aa, synthetic construct; identical to SEQ ID NO: 3741
  REGION 1..108: note = Description of Artificial Sequence: Synthetic polypeptide
  REGION 1..108: note = VL of XENP019821

SEQ ID NO: 5519 - protein, 5 aa, synthetic construct
  REGION 1..5: note = Description of Artificial Sequence: Synthetic peptide
  REGION 1..5: note = XENP019821 vhCDR1
SYTMH

SEQ ID NO: 5520 - protein, 17 aa, synthetic construct
  REGION 1..17: note = Description of Artificial Sequence: Synthetic peptide
  REGION 1..17: note = XENP019821 vhCDR2
FISYDGNHKYYADSVKG

SEQ ID NO: 5521 - protein, 9 aa, synthetic construct
  REGION 1..9: note = Description of Artificial Sequence: Synthetic peptide
  REGION 1..9: note = XENP019821 vhCDR3
TGWLGPFDY

SEQ ID NO: 5522 - protein, 12 aa, synthetic construct
  REGION 1..12: note = Description of Artificial Sequence: Synthetic peptide
  REGION 1..12: note = XENP019821 vlCDR1
RASQSVGSSYLA

SEQ ID NO: 5523 - protein, 7 aa, synthetic construct
  REGION 1..7: note = Description of Artificial Sequence: Synthetic peptide
  REGION 1..7: note = XENP019821 vlCDR2
GAFSRAT

SEQ ID NO: 5524 - protein, 9 aa, synthetic construct
  REGION 1..9: note = Description of Artificial Sequence: Synthetic peptide
  REGION 1..9: note = XENP019821 vlCDR3
QQYGSSPWT

SEQ ID NO: 5525 - protein, 246 aa, synthetic construct
  REGION 1..246: note = Description of Artificial Sequence: Synthetic polypeptide
  REGION 1..246: note = XENP019822 [CTLA-4]_H0.74_L0_scFv(GKPGS)4
QVQLVESGGGVVQPGRSLRLSCAASGFTFSSYTMHWVRQAPGKGLEWVTFISYDGNSKYYADSVKGRFTISRDNSKNTLYLQMNSLRAEDTAIYYCARTGWLGPFDYWGQGTLVTVSSGKPGSGKPGSGKPGSGKPGSEIVLTQSPGTLSLSPGERATLSCRASQSVGSSYLAWYQQKPGQAPRLLIYGAFSRATGIPDRFSGSGSGTDFTLTISRLEPEDFAVYYCQQYGSSPWTFGQGTKVEIK

SEQ ID NO: 5526 - protein, 118 aa, synthetic construct
  REGION 1..118: note = Description of Artificial Sequence: Synthetic polypeptide
  REGION 1..118: note = VH of XENP019822
QVQLVESGGGVVQPGRSLRLSCAASGFTFSSYTMHWVRQAPGKGLEWVTFISYDGNSKYYADSVKGRFTISRDNSKNTLYLQMNSLRAEDTAIYYCARTGWLGPFDYWGQGTLVTVSS

SEQ ID NO: 5527 - protein, 108 aa, synthetic construct; identical to SEQ ID NO: 3741
  REGION 1..108: note = Description of Artificial Sequence: Synthetic polypeptide
  REGION 1..108: note = VL of XENP019822

SEQ ID NO: 5528 - protein, 5 aa, synthetic construct
  REGION 1..5: note = Description of Artificial Sequence: Synthetic peptide
  REGION 1..5: note = XENP019822 vhCDR1
SYTMH

SEQ ID NO: 5529 - protein, 17 aa, synthetic construct
  REGION 1..17: note = Description of Artificial Sequence: Synthetic peptide
  REGION 1..17: note = XENP019822 vhCDR2
FISYDGNSKYYADSVKG

SEQ ID NO: 5530 - protein, 9 aa, synthetic construct
  REGION 1..9: note = Description of Artificial Sequence: Synthetic peptide
  REGION 1..9: note = XENP019822 vhCDR3
TGWLGPFDY

SEQ ID NO: 5531 - protein, 12 aa, synthetic construct
  REGION 1..12: note = Description of Artificial Sequence: Synthetic peptide
  REGION 1..12: note = XENP019822 vlCDR1
RASQSVGSSYLA

SEQ ID NO: 5532 - protein, 7 aa, synthetic construct
  REGION 1..7: note = Description of Artificial Sequence: Synthetic peptide
  REGION 1..7: note = XENP019822 vlCDR2
GAFSRAT

SEQ ID NO: 5533 - protein, 9 aa, synthetic construct
  REGION 1..9: note = Description of Artificial Sequence: Synthetic peptide
  REGION 1..9: note = XENP019822 vlCDR3
QQYGSSPWT

SEQ ID NO: 5534 - protein, 246 aa, synthetic construct
  REGION 1..246: note = Description of Artificial Sequence: Synthetic polypeptide
  REGION 1..246: note = XENP019823 [CTLA-4]_H0.75_L0_scFv(GKPGS)4
QVQLVESGGGVVQPGRSLRLSCAASGFTFSSYTMHWVRQAPGKGLEWVTFISYDGNTKYYADSVKGRFTISRDNSKNTLYLQMNSLRAEDTAIYYCARTGWLGPFDYWGQGTLVTVSSGKPGSGKPGSGKPGSGKPGSEIVLTQSPGTLSLSPGERATLSCRASQSVGSSYLAWYQQKPGQAPRLLIYGAFSRATGIPDRFSGSGSGTDFTLTISRLEPEDFAVYYCQQYGSSPWTFGQGTKVEIK

SEQ ID NO: 5535 - protein, 118 aa, synthetic construct
  REGION 1..118: note = Description of Artificial Sequence: Synthetic polypeptide
  REGION 1..118: note = VH of XENP019823
QVQLVESGGGVVQPGRSLRLSCAASGFTFSSYTMHWVRQAPGKGLEWVTFISYDGNTKYYADSVKGRFTISRDNSKNTLYLQMNSLRAEDTAIYYCARTGWLGPFDYWGQGTLVTVSS

SEQ ID NO: 5536 - protein, 108 aa, synthetic construct; identical to SEQ ID NO: 3741
  REGION 1..108: note = Description of Artificial Sequence: Synthetic polypeptide
  REGION 1..108: note = VL of XENP019823

SEQ ID NO: 5537 - protein, 5 aa, synthetic construct
  REGION 1..5: note = Description of Artificial Sequence: Synthetic peptide
  REGION 1..5: note = XENP019823 vhCDR1
SYTMH

SEQ ID NO: 5538 - protein, 17 aa, synthetic construct
  REGION 1..17: note = Description of Artificial Sequence: Synthetic peptide
  REGION 1..17: note = XENP019823 vhCDR2
FISYDGNTKYYADSVKG

SEQ ID NO: 5539 - protein, 9 aa, synthetic construct
  REGION 1..9: note = Description of Artificial Sequence: Synthetic peptide
  REGION 1..9: note = XENP019823 vhCDR3
TGWLGPFDY

SEQ ID NO: 5540 - protein, 12 aa, synthetic construct
  REGION 1..12: note = Description of Artificial Sequence: Synthetic peptide
  REGION 1..12: note = XENP019823 vlCDR1
RASQSVGSSYLA

SEQ ID NO: 5541 - protein, 7 aa, synthetic construct
  REGION 1..7: note = Description of Artificial Sequence: Synthetic peptide
  REGION 1..7: note = XENP019823 vlCDR2
GAFSRAT

SEQ ID NO: 5542 - protein, 9 aa, synthetic construct
  REGION 1..9: note = Description of Artificial Sequence: Synthetic peptide
  REGION 1..9: note = XENP019823 vlCDR3
QQYGSSPWT

SEQ ID NO: 5543 - protein, 246 aa, synthetic construct
  REGION 1..246: note = Description of Artificial Sequence: Synthetic polypeptide
  REGION 1..246: note = XENP019824 [CTLA-4]_H0.76_L0_scFv(GKPGS)4
QVQLVESGGGVVQPGRSLRLSCAASGFTFSSYTMHWVRQAPGKGLEWVTFISYDGNQKYYADSVKGRFTISRDNSKNTLYLQMNSLRAEDTAIYYCARTGWLGPFDYWGQGTLVTVSSGKPGSGKPGSGKPGSGKPGSEIVLTQSPGTLSLSPGERATLSCRASQSVGSSYLAWYQQKPGQAPRLLIYGAFSRATGIPDRFSGSGSGTDFTLTISRLEPEDFAVYYCQQYGSSPWTFGQGTKVEIK

SEQ ID NO: 5544 - protein, 118 aa, synthetic construct
  REGION 1..118: note = Description of Artificial Sequence: Synthetic polypeptide
  REGION 1..118: note = VH of XENP019824
QVQLVESGGGVVQPGRSLRLSCAASGFTFSSYTMHWVRQAPGKGLEWVTFISYDGNQKYYADSVKGRFTISRDNSKNTLYLQMNSLRAEDTAIYYCARTGWLGPFDYWGQGTLVTVSS

SEQ ID NO: 5545 - protein, 108 aa, synthetic construct; identical to SEQ ID NO: 3741
  REGION 1..108: note = Description of Artificial Sequence: Synthetic polypeptide
  REGION 1..108: note = VL of XENP019824

SEQ ID NO: 5546 - protein, 5 aa, synthetic construct
  REGION 1..5: note = Description of Artificial Sequence: Synthetic peptide
  REGION 1..5: note = XENP019824 vhCDR1
SYTMH

SEQ ID NO: 5547 - protein, 17 aa, synthetic construct
  REGION 1..17: note = Description of Artificial Sequence: Synthetic peptide
  REGION 1..17: note = XENP019824 vhCDR2
FISYDGNQKYYADSVKG

SEQ ID NO: 5548 - protein, 9 aa, synthetic construct
  REGION 1..9: note = Description of Artificial Sequence: Synthetic peptide
  REGION 1..9: note = XENP019824 vhCDR3
TGWLGPFDY

SEQ ID NO: 5549 - protein, 12 aa, synthetic construct
  REGION 1..12: note = Description of Artificial Sequence: Synthetic peptide
  REGION 1..12: note = XENP019824 vlCDR1
RASQSVGSSYLA

SEQ ID NO: 5550 - protein, 7 aa, synthetic construct
  REGION 1..7: note = Description of Artificial Sequence: Synthetic peptide
  REGION 1..7: note = XENP019824 vlCDR2
GAFSRAT

SEQ ID NO: 5551 - protein, 9 aa, synthetic construct
  REGION 1..9: note = Description of Artificial Sequence: Synthetic peptide
  REGION 1..9: note = XENP019824 vlCDR3
QQYGSSPWT

SEQ ID NO: 5552 - protein, 246 aa, synthetic construct
  REGION 1..246: note = Description of Artificial Sequence: Synthetic polypeptide
  REGION 1..246: note = XENP019825 [CTLA-4]_H0.77_L0_scFv(GKPGS)4
QVQLVESGGGVVQPGRSLRLSCAASGFTFSSYTMHWVRQAPGKGLEWVTFISYDGNNIYYADSVKGRFTISRDNSKNTLYLQMNSLRAEDTAIYYCARTGWLGPFDYWGQGTLVTVSSGKPGSGKPGSGKPGSGKPGSEIVLTQSPGTLSLSPGERATLSCRASQSVGSSYLAWYQQKPGQAPRLLIYGAFSRATGIPDRFSGSGSGTDFTLTISRLEPEDFAVYYCQQYGSSPWTFGQGTKVEIK

SEQ ID NO: 5553 - protein, 118 aa, synthetic construct
  REGION 1..118: note = Description of Artificial Sequence: Synthetic polypeptide
  REGION 1..118: note = VH of XENP019825
QVQLVESGGGVVQPGRSLRLSCAASGFTFSSYTMHWVRQAPGKGLEWVTFISYDGNNIYYADSVKGRFTISRDNSKNTLYLQMNSLRAEDTAIYYCARTGWLGPFDYWGQGTLVTVSS

SEQ ID NO: 5554 - protein, 108 aa, synthetic construct; identical to SEQ ID NO: 3741
  REGION 1..108: note = Description of Artificial Sequence: Synthetic polypeptide
  REGION 1..108: note = VL of XENP019825

SEQ ID NO: 5555 - protein, 5 aa, synthetic construct
  REGION 1..5: note = Description of Artificial Sequence: Synthetic peptide
  REGION 1..5: note = XENP019825 vhCDR1
SYTMH

SEQ ID NO: 5556 - protein, 17 aa, synthetic construct
  REGION 1..17: note = Description of Artificial Sequence: Synthetic peptide
  REGION 1..17: note = XENP019825 vhCDR2
FISYDGNNIYYADSVKG

SEQ ID NO: 5557 - protein, 9 aa, synthetic construct
  REGION 1..9: note = Description of Artificial Sequence: Synthetic peptide
  REGION 1..9: note = XENP019825 vhCDR3
TGWLGPFDY

SEQ ID NO: 5558 - protein, 12 aa, synthetic construct
  REGION 1..12: note = Description of Artificial Sequence: Synthetic peptide
  REGION 1..12: note = XENP019825 vlCDR1
RASQSVGSSYLA

SEQ ID NO: 5559 - protein, 7 aa, synthetic construct
  REGION 1..7: note = Description of Artificial Sequence: Synthetic peptide
  REGION 1..7: note = XENP019825 vlCDR2
GAFSRAT

SEQ ID NO: 5560 - protein, 9 aa, synthetic construct
  REGION 1..9: note = Description of Artificial Sequence: Synthetic peptide
  REGION 1..9: note = XENP019825 vlCDR3
QQYGSSPWT

SEQ ID NO: 5561 - protein, 246 aa, synthetic construct
  REGION 1..246: note = Description of Artificial Sequence: Synthetic polypeptide
  REGION 1..246: note = XENP019826 [CTLA-4]_H0.78_L0_scFv(GKPGS)4
QVQLVESGGGVVQPGRSLRLSCAASGFTFSSYTMHWVRQAPGKGLEWVTFISYDGNNTYYADSVKGRFTISRDNSKNTLYLQMNSLRAEDTAIYYCARTGWLGPFDYWGQGTLVTVSSGKPGSGKPGSGKPGSGKPGSEIVLTQSPGTLSLSPGERATLSCRASQSVGSSYLAWYQQKPGQAPRLLIYGAFSRATGIPDRFSGSGSGTDFTLTISRLEPEDFAVYYCQQYGSSPWTFGQGTKVEIK

SEQ ID NO: 5562 - protein, 118 aa, synthetic construct
  REGION 1..118: note = Description of Artificial Sequence: Synthetic polypeptide
  REGION 1..118: note = VH of XENP019826
QVQLVESGGGVVQPGRSLRLSCAASGFTFSSYTMHWVRQAPGKGLEWVTFISYDGNNTYYADSVKGRFTISRDNSKNTLYLQMNSLRAEDTAIYYCARTGWLGPFDYWGQGTLVTVSS

SEQ ID NO: 5563 - protein, 108 aa, synthetic construct; identical to SEQ ID NO: 3741
  REGION 1..108: note = Description of Artificial Sequence: Synthetic polypeptide
  REGION 1..108: note = VL of XENP019826

SEQ ID NO: 5564 - protein, 5 aa, synthetic construct
  REGION 1..5: note = Description of Artificial Sequence: Synthetic peptide
  REGION 1..5: note = XENP019826 vhCDR1
SYTMH

SEQ ID NO: 5565 - protein, 17 aa, synthetic construct
  REGION 1..17: note = Description of Artificial Sequence: Synthetic peptide
  REGION 1..17: note = XENP019826 vhCDR2
FISYDGNNTYYADSVKG

SEQ ID NO: 5566 - protein, 9 aa, synthetic construct
  REGION 1..9: note = Description of Artificial Sequence: Synthetic peptide
  REGION 1..9: note = XENP019826 vhCDR3
TGWLGPFDY

SEQ ID NO: 5567 - protein, 12 aa, synthetic construct
  REGION 1..12: note = Description of Artificial Sequence: Synthetic peptide
  REGION 1..12: note = XENP019826 vlCDR1
RASQSVGSSYLA

SEQ ID NO: 5568 - protein, 7 aa, synthetic construct
  REGION 1..7: note = Description of Artificial Sequence: Synthetic peptide
  REGION 1..7: note = XENP019826 vlCDR2
GAFSRAT

SEQ ID NO: 5569 - protein, 9 aa, synthetic construct
  REGION 1..9: note = Description of Artificial Sequence: Synthetic peptide
  REGION 1..9: note = XENP019826 vlCDR3
QQYGSSPWT

SEQ ID NO: 5570 - protein, 246 aa, synthetic construct
  REGION 1..246: note = Description of Artificial Sequence: Synthetic polypeptide
  REGION 1..246: note = XENP019827 [CTLA-4]_H0.79_L0_scFv(GKPGS)4
QVQLVESGGGVVQPGRSLRLSCAASGFTFSSYTMHWVRQAPGKGLEWVTFISYDGNNKAYADSVKGRFTISRDNSKNTLYLQMNSLRAEDTAIYYCARTGWLGPFDYWGQGTLVTVSSGKPGSGKPGSGKPGSGKPGSEIVLTQSPGTLSLSPGERATLSCRASQSVGSSYLAWYQQKPGQAPRLLIYGAFSRATGIPDRFSGSGSGTDFTLTISRLEPEDFAVYYCQQYGSSPWTFGQGTKVEIK

SEQ ID NO: 5571 - protein, 118 aa, synthetic construct
  REGION 1..118: note = Description of Artificial Sequence: Synthetic polypeptide
  REGION 1..118: note = VH of XENP019827
QVQLVESGGGVVQPGRSLRLSCAASGFTFSSYTMHWVRQAPGKGLEWVTFISYDGNNKAYADSVKGRFTISRDNSKNTLYLQMNSLRAEDTAIYYCARTGWLGPFDYWGQGTLVTVSS

SEQ ID NO: 5572 - protein, 108 aa, synthetic construct; identical to SEQ ID NO: 3741
  REGION 1..108: note = Description of Artificial Sequence: Synthetic polypeptide
  REGION 1..108: note = VL of XENP019827

SEQ ID NO: 5573 - protein, 5 aa, synthetic construct
  REGION 1..5: note = Description of Artificial Sequence: Synthetic peptide
  REGION 1..5: note = XENP019827 vhCDR1
SYTMH

SEQ ID NO: 5574 - protein, 17 aa, synthetic construct
  REGION 1..17: note = Description of Artificial Sequence: Synthetic peptide
  REGION 1..17: note = XENP019827 vhCDR2
FISYDGNNKAYADSVKG

SEQ ID NO: 5575 - protein, 9 aa, synthetic construct
  REGION 1..9: note = Description of Artificial Sequence: Synthetic peptide
  REGION 1..9: note = XENP019827 vhCDR3
TGWLGPFDY

SEQ ID NO: 5576 - protein, 12 aa, synthetic construct
  REGION 1..12: note = Description of Artificial Sequence: Synthetic peptide
  REGION 1..12: note = XENP019827 vlCDR1
RASQSVGSSYLA

SEQ ID NO: 5577 - protein, 7 aa, synthetic construct
  REGION 1..7: note = Description of Artificial Sequence: Synthetic peptide
  REGION 1..7: note = XENP019827 vlCDR2
GAFSRAT

SEQ ID NO: 5578 - protein, 9 aa, synthetic construct
  REGION 1..9: note = Description of Artificial Sequence: Synthetic peptide
  REGION 1..9: note = XENP019827 vlCDR3
QQYGSSPWT

SEQ ID NO: 5579 - protein, 246 aa, synthetic construct
  REGION 1..246: note = Description of Artificial Sequence: Synthetic polypeptide
  REGION 1..246: note = XENP019828 [CTLA-4]_H0.80_L0_scFv(GKPGS)4
QVQLVESGGGVVQPGRSLRLSCAASGFTFSSYTMHWVRQAPGKGLEWVTFISYDGNNKYYAASVKGRFTISRDNSKNTLYLQMNSLRAEDTAIYYCARTGWLGPFDYWGQGTLVTVSSGKPGSGKPGSGKPGSGKPGSEIVLTQSPGTLSLSPGERATLSCRASQSVGSSYLAWYQQKPGQAPRLLIYGAFSRATGIPDRFSGSGSGTDFTLTISRLEPEDFAVYYCQQYGSSPWTFGQGTKVEIK

SEQ ID NO: 5580 - protein, 118 aa, synthetic construct
  REGION 1..118: note = Description of Artificial Sequence: Synthetic polypeptide
  REGION 1..118: note = VH of XENP019828
QVQLVESGGGVVQPGRSLRLSCAASGFTFSSYTMHWVRQAPGKGLEWVTFISYDGNNKYYAASVKGRFTISRDNSKNTLYLQMNSLRAEDTAIYYCARTGWLGPFDYWGQGTLVTVSS

SEQ ID NO: 5581 - protein, 108 aa, synthetic construct; identical to SEQ ID NO: 3741
  REGION 1..108: note = Description of Artificial Sequence: Synthetic polypeptide
  REGION 1..108: note = VL of XENP019828

SEQ ID NO: 5582 - protein, 5 aa, synthetic construct
  REGION 1..5: note = Description of Artificial Sequence: Synthetic peptide
  REGION 1..5: note = XENP019828 vhCDR1
SYTMH

SEQ ID NO: 5583 - protein, 17 aa, synthetic construct
  REGION 1..17: note = Description of Artificial Sequence: Synthetic peptide
  REGION 1..17: note = XENP019828 vhCDR2
FISYDGNNKYYAASVKG

SEQ ID NO: 5584 - protein, 9 aa, synthetic construct
  REGION 1..9: note = Description of Artificial Sequence: Synthetic peptide
  REGION 1..9: note = XENP019828 vhCDR3
TGWLGPFDY

SEQ ID NO: 5585 - protein, 12 aa, synthetic construct
  REGION 1..12: note = Description of Artificial Sequence: Synthetic peptide
  REGION 1..12: note = XENP019828 vlCDR1
RASQSVGSSYLA

SEQ ID NO: 5586 - protein, 7 aa, synthetic construct
  REGION 1..7: note = Description of Artificial Sequence: Synthetic peptide
  REGION 1..7: note = XENP019828 vlCDR2
GAFSRAT

SEQ ID NO: 5587 - protein, 9 aa, synthetic construct
  REGION 1..9: note = Description of Artificial Sequence: Synthetic peptide
  REGION 1..9: note = XENP019828 vlCDR3
QQYGSSPWT

SEQ ID NO: 5588 - protein, 246 aa, synthetic construct
  REGION 1..246: note = Description of Artificial Sequence: Synthetic polypeptide
  REGION 1..246: note = XENP019829 [CTLA-4]_H0.81_L0_scFv(GKPGS)4
QVQLVESGGGVVQPGRSLRLSCAASGFTFSSYTMHWVRQAPGKGLEWVTFISYDGNNKYYAKSVKGRFTISRDNSKNTLYLQMNSLRAEDTAIYYCARTGWLGPFDYWGQGTLVTVSSGKPGSGKPGSGKPGSGKPGSEIVLTQSPGTLSLSPGERATLSCRASQSVGSSYLAWYQQKPGQAPRLLIYGAFSRATGIPDRFSGSGSGTDFTLTISRLEPEDFAVYYCQQYGSSPWTFGQGTKVEIK

SEQ ID NO: 5589 - protein, 118 aa, synthetic construct
  REGION 1..118: note = Description of Artificial Sequence: Synthetic polypeptide
  REGION 1..118: note = VH of XENP019829
QVQLVESGGGVVQPGRSLRLSCAASGFTFSSYTMHWVRQAPGKGLEWVTFISYDGNNKYYAKSVKGRFTISRDNSKNTLYLQMNSLRAEDTAIYYCARTGWLGPFDYWGQGTLVTVSS

SEQ ID NO: 5590 - protein, 108 aa, synthetic construct; identical to SEQ ID NO: 3741
  REGION 1..108: note = Description of Artificial Sequence: Synthetic polypeptide
  REGION 1..108: note = VL of XENP019829

SEQ ID NO: 5591 - protein, 5 aa, synthetic construct
  REGION 1..5: note = Description of Artificial Sequence: Synthetic peptide
  REGION 1..5: note = XENP019829 vhCDR1
SYTMH

SEQ ID NO: 5592 - protein, 17 aa, synthetic construct
  REGION 1..17: note = Description of Artificial Sequence: Synthetic peptide
  REGION 1..17: note = XENP019829 vhCDR2
FISYDGNNKYYAKSVKG

SEQ ID NO: 5593 - protein, 9 aa, synthetic construct
  REGION 1..9: note = Description of Artificial Sequence: Synthetic peptide
  REGION 1..9: note = XENP019829 vhCDR3
TGWLGPFDY

SEQ ID NO: 5594 - protein, 12 aa, synthetic construct
  REGION 1..12: note = Description of Artificial Sequence: Synthetic peptide
  REGION 1..12: note = XENP019829 vlCDR1
RASQSVGSSYLA

SEQ ID NO: 5595 - protein, 7 aa, synthetic construct
  REGION 1..7: note = Description of Artificial Sequence: Synthetic peptide
  REGION 1..7: note = XENP019829 vlCDR2
GAFSRAT

SEQ ID NO: 5596 - protein, 9 aa, synthetic construct
  REGION 1..9: note = Description of Artificial Sequence: Synthetic peptide
  REGION 1..9: note = XENP019829 vlCDR3
QQYGSSPWT

SEQ ID NO: 5597 - protein, 246 aa, synthetic construct
  REGION 1..246: note = Description of Artificial Sequence: Synthetic polypeptide
  REGION 1..246: note = XENP019830 [CTLA-4]_H0.82_L0_scFv(GKPGS)4
QVQLVESGGGVVQPGRSLRLSCAASGFTFSSYTMHWVRQAPGKGLEWVTFISYDGNNKYYADSVKDRFTISRDNSKNTLYLQMNSLRAEDTAIYYCARTGWLGPFDYWGQGTLVTVSSGKPGSGKPGSGKPGSGKPGSEIVLTQSPGTLSLSPGERATLSCRASQSVGSSYLAWYQQKPGQAPRLLIYGAFSRATGIPDRFSGSGSGTDFTLTISRLEPEDFAVYYCQQYGSSPWTFGQGTKVEIK

SEQ ID NO: 5598 - protein, 118 aa, synthetic construct
  REGION 1..118: note = Description of Artificial Sequence: Synthetic polypeptide
  REGION 1..118: note = VH of XENP019830
QVQLVESGGGVVQPGRSLRLSCAASGFTFSSYTMHWVRQAPGKGLEWVTFISYDGNNKYYADSVKDRFTISRDNSKNTLYLQMNSLRAEDTAIYYCARTGWLGPFDYWGQGTLVTVSS

SEQ ID NO: 5599 - protein, 108 aa, synthetic construct; identical to SEQ ID NO: 3741
  REGION 1..108: note = Description of Artificial Sequence: Synthetic polypeptide
  REGION 1..108: note = VL of XENP019830

SEQ ID NO: 5600 - protein, 5 aa, synthetic construct
  REGION 1..5: note = Description of Artificial Sequence: Synthetic peptide
  REGION 1..5: note = XENP019830 vhCDR1
SYTMH

SEQ ID NO: 5601 - protein, 17 aa, synthetic construct
  REGION 1..17: note = Description of Artificial Sequence: Synthetic peptide
  REGION 1..17: note = XENP019830 vhCDR2
FISYDGNNKYYADSVKD

SEQ ID NO: 5602 - protein, 9 aa, synthetic construct
  REGION 1..9: note = Description of Artificial Sequence: Synthetic peptide
  REGION 1..9: note = XENP019830 vhCDR3
TGWLGPFDY

SEQ ID NO: 5603 - protein, 12 aa, synthetic construct
  REGION 1..12: note = Description of Artificial Sequence: Synthetic peptide
  REGION 1..12: note = XENP019830 vlCDR1
RASQSVGSSYLA

SEQ ID NO: 5604 - protein, 7 aa, synthetic construct
  REGION 1..7: note = Description of Artificial Sequence: Synthetic peptide
  REGION 1..7: note = XENP019830 vlCDR2
GAFSRAT

SEQ ID NO: 5605 - protein, 9 aa, synthetic construct
  REGION 1..9: note = Description of Artificial Sequence: Synthetic peptide
  REGION 1..9: note = XENP019830 vlCDR3
QQYGSSPWT

SEQ ID NO: 5606 - protein, 246 aa, synthetic construct
  REGION 1..246: note = Description of Artificial Sequence: Synthetic polypeptide
  REGION 1..246: note = XENP019831 [CTLA-4]_H0.83_L0_scFv(GKPGS)4
QVQLVESGGGVVQPGRSLRLSCAASGFTFSSYTMHWVRQAPGKGLEWVTFISYDGNNKYYADSVKERFTISRDNSKNTLYLQMNSLRAEDTAIYYCARTGWLGPFDYWGQGTLVTVSSGKPGSGKPGSGKPGSGKPGSEIVLTQSPGTLSLSPGERATLSCRASQSVGSSYLAWYQQKPGQAPRLLIYGAFSRATGIPDRFSGSGSGTDFTLTISRLEPEDFAVYYCQQYGSSPWTFGQGTKVEIK

SEQ ID NO: 5607 - protein, 118 aa, synthetic construct
  REGION 1..118: note = Description of Artificial Sequence: Synthetic polypeptide
  REGION 1..118: note = VH of XENP019831
QVQLVESGGGVVQPGRSLRLSCAASGFTFSSYTMHWVRQAPGKGLEWVTFISYDGNNKYYADSVKERFTISRDNSKNTLYLQMNSLRAEDTAIYYCARTGWLGPFDYWGQGTLVTVSS

SEQ ID NO: 5608 - protein, 108 aa, synthetic construct; identical to SEQ ID NO: 3741
  REGION 1..108: note = Description of Artificial Sequence: Synthetic polypeptide
  REGION 1..108: note = VL of XENP019831

SEQ ID NO: 5609 - protein, 5 aa, synthetic construct
  REGION 1..5: note = Description of Artificial Sequence: Synthetic peptide
  REGION 1..5: note = XENP019831 vhCDR1
SYTMH

SEQ ID NO: 5610 - protein, 17 aa, synthetic construct
  REGION 1..17: note = Description of Artificial Sequence: Synthetic peptide
  REGION 1..17: note = XENP019831 vhCDR2
FISYDGNNKYYADSVKE

SEQ ID NO: 5611 - protein, 9 aa, synthetic construct
  REGION 1..9: note = Description of Artificial Sequence: Synthetic peptide
  REGION 1..9: note = XENP019831 vhCDR3
TGWLGPFDY

SEQ ID NO: 5612 - protein, 12 aa, synthetic construct
  REGION 1..12: note = Description of Artificial Sequence: Synthetic peptide
  REGION 1..12: note = XENP019831 vlCDR1
RASQSVGSSYLA

SEQ ID NO: 5613 - protein, 7 aa, synthetic construct
  REGION 1..7: note = Description of Artificial Sequence: Synthetic peptide
  REGION 1..7: note = XENP019831 vlCDR2
GAFSRAT

SEQ ID NO: 5614 - protein, 9 aa, synthetic construct
  REGION 1..9: note = Description of Artificial Sequence: Synthetic peptide
  REGION 1..9: note = XENP019831 vlCDR3
QQYGSSPWT

SEQ ID NO: 5615 - protein, 246 aa, synthetic construct
  REGION 1..246: note = Description of Artificial Sequence: Synthetic polypeptide
  REGION 1..246: note = XENP019832 [CTLA-4]_H0.84_L0_scFv(GKPGS)4
QVQLVESGGGVVQPGRSLRLSCAASGFTFSSYTMHWVRQAPGKGLEWVTFISYDGNNKYYADSVKGQFTISRDNSKNTLYLQMNSLRAEDTAIYYCARTGWLGPFDYWGQGTLVTVSSGKPGSGKPGSGKPGSGKPGSEIVLTQSPGTLSLSPGERATLSCRASQSVGSSYLAWYQQKPGQAPRLLIYGAFSRATGIPDRFSGSGSGTDFTLTISRLEPEDFAVYYCQQYGSSPWTFGQGTKVEIK

SEQ ID NO: 5616 - protein, 118 aa, synthetic construct
  REGION 1..118: note = Description of Artificial Sequence: Synthetic polypeptide
  REGION 1..118: note = VH of XENP019832
QVQLVESGGGVVQPGRSLRLSCAASGFTFSSYTMHWVRQAPGKGLEWVTFISYDGNNKYYADSVKGQFTISRDNSKNTLYLQMNSLRAEDTAIYYCARTGWLGPFDYWGQGTLVTVSS

SEQ ID NO: 5617 - protein, 108 aa, synthetic construct; identical to SEQ ID NO: 3741
  REGION 1..108: note = Description of Artificial Sequence: Synthetic polypeptide
  REGION 1..108: note = VL of XENP019832

SEQ ID NO: 5618 - protein, 5 aa, synthetic construct
  REGION 1..5: note = Description of Artificial Sequence: Synthetic peptide
  REGION 1..5: note = XENP019832 vhCDR1
SYTMH

SEQ ID NO: 5619 - protein, 17 aa, synthetic construct
  REGION 1..17: note = Description of Artificial Sequence: Synthetic peptide
  REGION 1..17: note = XENP019832 vhCDR2
FISYDGNNKYYADSVKG

SEQ ID NO: 5620 - protein, 9 aa, synthetic construct
  REGION 1..9: note = Description of Artificial Sequence: Synthetic peptide
  REGION 1..9: note = XENP019832 vhCDR3
TGWLGPFDY

SEQ ID NO: 5621 - protein, 12 aa, synthetic construct
  REGION 1..12: note = Description of Artificial Sequence: Synthetic peptide
  REGION 1..12: note = XENP019832 vlCDR1
RASQSVGSSYLA

SEQ ID NO: 5622 - protein, 7 aa, synthetic construct
  REGION 1..7: note = Description of Artificial Sequence: Synthetic peptide
  REGION 1..7: note = XENP019832 vlCDR2
GAFSRAT

SEQ ID NO: 5623 - protein, 9 aa, synthetic construct
  REGION 1..9: note = Description of Artificial Sequence: Synthetic peptide
  REGION 1..9: note = XENP019832 vlCDR3
QQYGSSPWT

SEQ ID NO: 5624 - protein, 246 aa, synthetic construct
  REGION 1..246: note = Description of Artificial Sequence: Synthetic polypeptide
  REGION 1..246: note = XENP019833 [CTLA-4]_H0.85_L0_scFv(GKPGS)4
QVQLVESGGGVVQPGRSLRLSCAASGFTFSSYTMHWVRQAPGKGLEWVTFISYDGNNKYYADSVKGRFTMSRDNSKNTLYLQMNSLRAEDTAIYYCARTGWLGPFDYWGQGTLVTVSSGKPGSGKPGSGKPGSGKPGSEIVLTQSPGTLSLSPGERATLSCRASQSVGSSYLAWYQQKPGQAPRLLIYGAFSRATGIPDRFSGSGSGTDFTLTISRLEPEDFAVYYCQQYGSSPWTFGQGTKVEIK

SEQ ID NO: 5625 - protein, 118 aa, synthetic construct
  REGION 1..118: note = Description of Artificial Sequence: Synthetic polypeptide
  REGION 1..118: note = VH of XENP019833
QVQLVESGGGVVQPGRSLRLSCAASGFTFSSYTMHWVRQAPGKGLEWVTFISYDGNNKYYADSVKGRFTMSRDNSKNTLYLQMNSLRAEDTAIYYCARTGWLGPFDYWGQGTLVTVSS

SEQ ID NO: 5626 - protein, 108 aa, synthetic construct; identical to SEQ ID NO: 3741
  REGION 1..108: note = Description of Artificial Sequence: Synthetic polypeptide
  REGION 1..108: note = VL of XENP019833

SEQ ID NO: 5627 - protein, 5 aa, synthetic construct
  REGION 1..5: note = Description of Artificial Sequence: Synthetic peptide
  REGION 1..5: note = XENP019833 vhCDR1
SYTMH

SEQ ID NO: 5628 - protein, 17 aa, synthetic construct
  REGION 1..17: note = Description of Artificial Sequence: Synthetic peptide
  REGION 1..17: note = XENP019833 vhCDR2
FISYDGNNKYYADSVKG

SEQ ID NO: 5629 - protein, 9 aa, synthetic construct
  REGION 1..9: note = Description of Artificial Sequence: Synthetic peptide
  REGION 1..9: note = XENP019833 vhCDR3
TGWLGPFDY

SEQ ID NO: 5630 - protein, 12 aa, synthetic construct
  REGION 1..12: note = Description of Artificial Sequence: Synthetic peptide
  REGION 1..12: note = XENP019833 vlCDR1
RASQSVGSSYLA

SEQ ID NO: 5631 - protein, 7 aa, synthetic construct
  REGION 1..7: note = Description of Artificial Sequence: Synthetic peptide
  REGION 1..7: note = XENP019833 vlCDR2
GAFSRAT

SEQ ID NO: 5632 - protein, 9 aa, synthetic construct
  REGION 1..9: note = Description of Artificial Sequence: Synthetic peptide
  REGION 1..9: note = XENP019833 vlCDR3
QQYGSSPWT

SEQ ID NO: 5633 - protein, 246 aa, synthetic construct
  REGION 1..246: note = Description of Artificial Sequence: Synthetic polypeptide
  REGION 1..246: note = XENP019834 [CTLA-4]_H0.86_L0_scFv(GKPGS)4
QVQLVESGGGVVQPGRSLRLSCAASGFTFSSYTMHWVRQAPGKGLEWVTFISYDGNNKYYADSVKGRFTVSRDNSKNTLYLQMNSLRAEDTAIYYCARTGWLGPFDYWGQGTLVTVSSGKPGSGKPGSGKPGSGKPGSEIVLTQSPGTLSLSPGERATLSCRASQSVGSSYLAWYQQKPGQAPRLLIYGAFSRATGIPDRFSGSGSGTDFTLTISRLEPEDFAVYYCQQYGSSPWTFGQGTKVEIK

SEQ ID NO: 5634 - protein, 118 aa, synthetic construct
  REGION 1..118: note = Description of Artificial Sequence: Synthetic polypeptide
  REGION 1..118: note = VH of XENP019834
QVQLVESGGGVVQPGRSLRLSCAASGFTFSSYTMHWVRQAPGKGLEWVTFISYDGNNKYYADSVKGRFTVSRDNSKNTLYLQMNSLRAEDTAIYYCARTGWLGPFDYWGQGTLVTVSS

SEQ ID NO: 5635 - protein, 108 aa, synthetic construct; identical to SEQ ID NO: 3741
  REGION 1..108: note = Description of Artificial Sequence: Synthetic polypeptide
  REGION 1..108: note = VL of XENP019834

SEQ ID NO: 5636 - protein, 5 aa, synthetic construct
  REGION 1..5: note = Description of Artificial Sequence: Synthetic peptide
  REGION 1..5: note = XENP019834 vhCDR1
SYTMH

SEQ ID NO: 5637 - protein, 17 aa, synthetic construct
  REGION 1..17: note = Description of Artificial Sequence: Synthetic peptide
  REGION 1..17: note = XENP019834 vhCDR2
FISYDGNNKYYADSVKG

SEQ ID NO: 5638 - protein, 9 aa, synthetic construct
  REGION 1..9: note = Description of Artificial Sequence: Synthetic peptide
  REGION 1..9: note = XENP019834 vhCDR3
TGWLGPFDY

SEQ ID NO: 5639 - protein, 12 aa, synthetic construct
  REGION 1..12: note = Description of Artificial Sequence: Synthetic peptide
  REGION 1..12: note = XENP019834 vlCDR1
RASQSVGSSYLA

SEQ ID NO: 5640 - protein, 7 aa, synthetic construct
  REGION 1..7: note = Description of Artificial Sequence: Synthetic peptide
  REGION 1..7: note = XENP019834 vlCDR2
GAFSRAT

SEQ ID NO: 5641 - protein, 9 aa, synthetic construct
  REGION 1..9: note = Description of Artificial Sequence: Synthetic peptide
  REGION 1..9: note = XENP019834 vlCDR3
QQYGSSPWT

SEQ ID NO: 5642 - protein, 246 aa, synthetic construct
  REGION 1..246: note = Description of Artificial Sequence: Synthetic polypeptide
  REGION 1..246: note = XENP019835 [CTLA-4]_H0.87_L0_scFv(GKPGS)4
QVQLVESGGGVVQPGRSLRLSCAASGFTFSSYTMHWVRQAPGKGLEWVTFISYDGNNKYYADSVKGRFTISEDNSKNTLYLQMNSLRAEDTAIYYCARTGWLGPFDYWGQGTLVTVSSGKPGSGKPGSGKPGSGKPGSEIVLTQSPGTLSLSPGERATLSCRASQSVGSSYLAWYQQKPGQAPRLLIYGAFSRATGIPDRFSGSGSGTDFTLTISRLEPEDFAVYYCQQYGSSPWTFGQGTKVEIK

SEQ ID NO: 5643 - protein, 118 aa, synthetic construct
  REGION 1..118: note = Description of Artificial Sequence: Synthetic polypeptide
  REGION 1..118: note = VH of XENP019835
QVQLVESGGGVVQPGRSLRLSCAASGFTFSSYTMHWVRQAPGKGLEWVTFISYDGNNKYYADSVKGRFTISEDNSKNTLYLQMNSLRAEDTAIYYCARTGWLGPFDYWGQGTLVTVSS

SEQ ID NO: 5644 - protein, 108 aa, synthetic construct; identical to SEQ ID NO: 3741
  REGION 1..108: note = Description of Artificial Sequence: Synthetic polypeptide
  REGION 1..108: note = VL of XENP019835

SEQ ID NO: 5645 - protein, 5 aa, synthetic construct
  REGION 1..5: note = Description of Artificial Sequence: Synthetic peptide
  REGION 1..5: note = XENP019835 vhCDR1
SYTMH

SEQ ID NO: 5646 - protein, 17 aa, synthetic construct
  REGION 1..17: note = Description of Artificial Sequence: Synthetic peptide
  REGION 1..17: note = XENP019835 vhCDR2
FISYDGNNKYYADSVKG

SEQ ID NO: 5647 - protein, 9 aa, synthetic construct
  REGION 1..9: note = Description of Artificial Sequence: Synthetic peptide
  REGION 1..9: note = XENP019835 vhCDR3
TGWLGPFDY

SEQ ID NO: 5648 - protein, 12 aa, synthetic construct
  REGION 1..12: note = Description of Artificial Sequence: Synthetic peptide
  REGION 1..12: note = XENP019835 vlCDR1
RASQSVGSSYLA

SEQ ID NO: 5649 - protein, 7 aa, synthetic construct
  REGION 1..7: note = Description of Artificial Sequence: Synthetic peptide
  REGION 1..7: note = XENP019835 vlCDR2
GAFSRAT

SEQ ID NO: 5650 - protein, 9 aa, synthetic construct
  REGION 1..9: note = Description of Artificial Sequence: Synthetic peptide
  REGION 1..9: note = XENP019835 vlCDR3
QQYGSSPWT

SEQ ID NO: 5651 - protein, 246 aa, synthetic construct
  REGION 1..246: note = Description of Artificial Sequence: Synthetic polypeptide
  REGION 1..246: note = XENP019836 [CTLA-4]_H0.88_L0_scFv(GKPGS)4
QVQLVESGGGVVQPGRSLRLSCAASGFTFSSYTMHWVRQAPGKGLEWVTFISYDGNNKYYADSVKGRFTISRENSKNTLYLQMNSLRAEDTAIYYCARTGWLGPFDYWGQGTLVTVSSGKPGSGKPGSGKPGSGKPGSEIVLTQSPGTLSLSPGERATLSCRASQSVGSSYLAWYQQKPGQAPRLLIYGAFSRATGIPDRFSGSGSGTDFTLTISRLEPEDFAVYYCQQYGSSPWTFGQGTKVEIK

SEQ ID NO: 5652 - protein, 118 aa, synthetic construct
  REGION 1..118: note = Description of Artificial Sequence: Synthetic polypeptide
  REGION 1..118: note = VH of XENP019836
QVQLVESGGGVVQPGRSLRLSCAASGFTFSSYTMHWVRQAPGKGLEWVTFISYDGNNKYYADSVKGRFTISRENSKNTLYLQMNSLRAEDTAIYYCARTGWLGPFDYWGQGTLVTVSS

SEQ ID NO: 5653 - protein, 108 aa, synthetic construct; identical to SEQ ID NO: 3741
  REGION 1..108: note = Description of Artificial Sequence: Synthetic polypeptide
  REGION 1..108: note = VL of XENP019836

SEQ ID NO: 5654 - protein, 5 aa, synthetic construct
  REGION 1..5: note = Description of Artificial Sequence: Synthetic peptide
  REGION 1..5: note = XENP019836 vhCDR1
SYTMH

SEQ ID NO: 5655 - protein, 17 aa, synthetic construct
  REGION 1..17: note = Description of Artificial Sequence: Synthetic peptide
  REGION 1..17: note = XENP019836 vhCDR2
FISYDGNNKYYADSVKG

SEQ ID NO: 5656 - protein, 9 aa, synthetic construct
  REGION 1..9: note = Description of Artificial Sequence: Synthetic peptide
  REGION 1..9: note = XENP019836 vhCDR3
TGWLGPFDY

SEQ ID NO: 5657 - protein, 12 aa, synthetic construct
  REGION 1..12: note = Description of Artificial Sequence: Synthetic peptide
  REGION 1..12: note = XENP019836 vlCDR1
RASQSVGSSYLA

SEQ ID NO: 5658 - protein, 7 aa, synthetic construct
  REGION 1..7: note = Description of Artificial Sequence: Synthetic peptide
  REGION 1..7: note = XENP019836 vlCDR2
GAFSRAT

SEQ ID NO: 5659 - protein, 9 aa, synthetic construct
  REGION 1..9: note = Description of Artificial Sequence: Synthetic peptide
  REGION 1..9: note = XENP019836 vlCDR3
QQYGSSPWT

SEQ ID NO: 5660 - protein, 246 aa, synthetic construct
  REGION 1..246: note = Description of Artificial Sequence: Synthetic polypeptide
  REGION 1..246: note = XENP019837 [CTLA-4]_H0.89_L0_scFv(GKPGS)4
QVQLVESGGGVVQPGRSLRLSCAASGFTFSSYTMHWVRQAPGKGLEWVTFISYDGNNKYYADSVKGRFTISRDDSKNTLYLQMNSLRAEDTAIYYCARTGWLGPFDYWGQGTLVTVSSGKPGSGKPGSGKPGSGKPGSEIVLTQSPGTLSLSPGERATLSCRASQSVGSSYLAWYQQKPGQAPRLLIYGAFSRATGIPDRFSGSGSGTDFTLTISRLEPEDFAVYYCQQYGSSPWTFGQGTKVEIK

SEQ ID NO: 5661 - protein, 118 aa, synthetic construct
  REGION 1..118: note = Description of Artificial Sequence: Synthetic polypeptide
  REGION 1..118: note = VH of XENP019837
QVQLVESGGGVVQPGRSLRLSCAASGFTFSSYTMHWVRQAPGKGLEWVTFISYDGNNKYYADSVKGRFTISRDDSKNTLYLQMNSLRAEDTAIYYCARTGWLGPFDYWGQGTLVTVSS

SEQ ID NO: 5662 - protein, 108 aa, synthetic construct; identical to SEQ ID NO: 3741
  REGION 1..108: note = Description of Artificial Sequence: Synthetic polypeptide
  REGION 1..108: note = VL of XENP019837

SEQ ID NO: 5663 - protein, 5 aa, synthetic construct
  REGION 1..5: note = Description of Artificial Sequence: Synthetic peptide
  REGION 1..5: note = XENP019837 vhCDR1
SYTMH

SEQ ID NO: 5664 - protein, 17 aa, synthetic construct
  REGION 1..17: note = Description of Artificial Sequence: Synthetic peptide
  REGION 1..17: note = XENP019837 vhCDR2
FISYDGNNKYYADSVKG

SEQ ID NO: 5665 - protein, 9 aa, synthetic construct
  REGION 1..9: note = Description of Artificial Sequence: Synthetic peptide
  REGION 1..9: note = XENP019837 vhCDR3
TGWLGPFDY

SEQ ID NO: 5666 - protein, 12 aa, synthetic construct
  REGION 1..12: note = Description of Artificial Sequence: Synthetic peptide
  REGION 1..12: note = XENP019837 vlCDR1
RASQSVGSSYLA

SEQ ID NO: 5667 - protein, 7 aa, synthetic construct
  REGION 1..7: note = Description of Artificial Sequence: Synthetic peptide
  REGION 1..7: note = XENP019837 vlCDR2
GAFSRAT

SEQ ID NO: 5668 - protein, 9 aa, synthetic construct
  REGION 1..9: note = Description of Artificial Sequence: Synthetic peptide
  REGION 1..9: note = XENP019837 vlCDR3
QQYGSSPWT

SEQ ID NO: 5669 - protein, 246 aa, synthetic construct
  REGION 1..246: note = Description of Artificial Sequence: Synthetic polypeptide
  REGION 1..246: note = XENP019838 [CTLA-4]_H0.90_L0_scFv(GKPGS)4
QVQLVESGGGVVQPGRSLRLSCAASGFTFSSYTMHWVRQAPGKGLEWVTFISYDGNNKYYADSVKGRFTISRDNAKNTLYLQMNSLRAEDTAIYYCARTGWLGPFDYWGQGTLVTVSSGKPGSGKPGSGKPGSGKPGSEIVLTQSPGTLSLSPGERATLSCRASQSVGSSYLAWYQQKPGQAPRLLIYGAFSRATGIPDRFSGSGSGTDFTLTISRLEPEDFAVYYCQQYGSSPWTFGQGTKVEIK

SEQ ID NO: 5670 - protein, 118 aa, synthetic construct
  REGION 1..118: note = Description of Artificial Sequence: Synthetic polypeptide
  REGION 1..118: note = VH of XENP019838
QVQLVESGGGVVQPGRSLRLSCAASGFTFSSYTMHWVRQAPGKGLEWVTFISYDGNNKYYADSVKGRFTISRDNAKNTLYLQMNSLRAEDTAIYYCARTGWLGPFDYWGQGTLVTVSS

SEQ ID NO: 5671 - protein, 108 aa, synthetic construct; identical to SEQ ID NO: 3741
  REGION 1..108: note = Description of Artificial Sequence: Synthetic polypeptide
  REGION 1..108: note = VL of XENP019838

SEQ ID NO: 5672 - protein, 5 aa, synthetic construct
  REGION 1..5: note = Description of Artificial Sequence: Synthetic peptide
  REGION 1..5: note = XENP019838 vhCDR1
SYTMH

SEQ ID NO: 5673 - protein, 17 aa, synthetic construct
  REGION 1..17: note = Description of Artificial Sequence: Synthetic peptide
  REGION 1..17: note = XENP019838 vhCDR2
FISYDGNNKYYADSVKG

SEQ ID NO: 5674 - protein, 9 aa, synthetic construct
  REGION 1..9: note = Description of Artificial Sequence: Synthetic peptide
  REGION 1..9: note = XENP019838 vhCDR3
TGWLGPFDY

SEQ ID NO: 5675 - protein, 12 aa, synthetic construct
  REGION 1..12: note = Description of Artificial Sequence: Synthetic peptide
  REGION 1..12: note = XENP019838 vlCDR1
RASQSVGSSYLA

SEQ ID NO: 5676 - protein, 7 aa, synthetic construct
  REGION 1..7: note = Description of Artificial Sequence: Synthetic peptide
  REGION 1..7: note = XENP019838 vlCDR2
GAFSRAT

SEQ ID NO: 5677 - protein, 9 aa, synthetic construct
  REGION 1..9: note = Description of Artificial Sequence: Synthetic peptide
  REGION 1..9: note = XENP019838 vlCDR3
QQYGSSPWT

SEQ ID NO: 5678 - protein, 246 aa, synthetic construct
  REGION 1..246: note = Description of Artificial Sequence: Synthetic polypeptide
  REGION 1..246: note = XENP019839 [CTLA-4]_H0.91_L0_scFv(GKPGS)4
QVQLVESGGGVVQPGRSLRLSCAASGFTFSSYTMHWVRQAPGKGLEWVTFISYDGNNKYYADSVKGRFTISRDNSRNTLYLQMNSLRAEDTAIYYCARTGWLGPFDYWGQGTLVTVSSGKPGSGKPGSGKPGSGKPGSEIVLTQSPGTLSLSPGERATLSCRASQSVGSSYLAWYQQKPGQAPRLLIYGAFSRATGIPDRFSGSGSGTDFTLTISRLEPEDFAVYYCQQYGSSPWTFGQGTKVEIK

SEQ ID NO: 5679 - protein, 118 aa, synthetic construct
  REGION 1..118: note = Description of Artificial Sequence: Synthetic polypeptide
  REGION 1..118: note = VH of XENP019839
QVQLVESGGGVVQPGRSLRLSCAASGFTFSSYTMHWVRQAPGKGLEWVTFISYDGNNKYYADSVKGRFTISRDNSRNTLYLQMNSLRAEDTAIYYCARTGWLGPFDYWGQGTLVTVSS

SEQ ID NO: 5680 - protein, 108 aa, synthetic construct; identical to SEQ ID NO: 3741
  REGION 1..108: note = Description of Artificial Sequence: Synthetic polypeptide
  REGION 1..108: note = VL of XENP019839

SEQ ID NO: 5681 - protein, 5 aa, synthetic construct
  REGION 1..5: note = Description of Artificial Sequence: Synthetic peptide
  REGION 1..5: note = XENP019839 vhCDR1
SYTMH

SEQ ID NO: 5682 - protein, 17 aa, synthetic construct
  REGION 1..17: note = Description of Artificial Sequence: Synthetic peptide
  REGION 1..17: note = XENP019839 vhCDR2
FISYDGNNKYYADSVKG

SEQ ID NO: 5683 - protein, 9 aa, synthetic construct
  REGION 1..9: note = Description of Artificial Sequence: Synthetic peptide
  REGION 1..9: note = XENP019839 vhCDR3
TGWLGPFDY

SEQ ID NO: 5684 - protein, 12 aa, synthetic construct
  REGION 1..12: note = Description of Artificial Sequence: Synthetic peptide
  REGION 1..12: note = XENP019839 vlCDR1
RASQSVGSSYLA

SEQ ID NO: 5685 - protein, 7 aa, synthetic construct
  REGION 1..7: note = Description of Artificial Sequence: Synthetic peptide
  REGION 1..7: note = XENP019839 vlCDR2
GAFSRAT

SEQ ID NO: 5686 - protein, 9 aa, synthetic construct
  REGION 1..9: note = Description of Artificial Sequence: Synthetic peptide
  REGION 1..9: note = XENP019839 vlCDR3
QQYGSSPWT

SEQ ID NO: 5687 - protein, 246 aa, synthetic construct
  REGION 1..246: note = Description of Artificial Sequence: Synthetic polypeptide
  REGION 1..246: note = XENP019840 [CTLA-4]_H0.92_L0_scFv(GKPGS)4
QVQLVESGGGVVQPGRSLRLSCAASGFTFSSYTMHWVRQAPGKGLEWVTFISYDGNNKYYADSVKGRFTISRDNSKNSLYLQMNSLRAEDTAIYYCARTGWLGPFDYWGQGTLVTVSSGKPGSGKPGSGKPGSGKPGSEIVLTQSPGTLSLSPGERATLSCRASQSVGSSYLAWYQQKPGQAPRLLIYGAFSRATGIPDRFSGSGSGTDFTLTISRLEPEDFAVYYCQQYGSSPWTFGQGTKVEIK

SEQ ID NO: 5688 - protein, 118 aa, synthetic construct
  REGION 1..118: note = Description of Artificial Sequence: Synthetic polypeptide
  REGION 1..118: note = VH of XENP019840
QVQLVESGGGVVQPGRSLRLSCAASGFTFSSYTMHWVRQAPGKGLEWVTFISYDGNNKYYADSVKGRFTISRDNSKNSLYLQMNSLRAEDTAIYYCARTGWLGPFDYWGQGTLVTVSS

SEQ ID NO: 5689 - protein, 108 aa, synthetic construct; identical to SEQ ID NO: 3741
  REGION 1..108: note = Description of Artificial Sequence: Synthetic polypeptide
  REGION 1..108: note = VL of XENP019840

SEQ ID NO: 5690 - protein, 5 aa, synthetic construct
  REGION 1..5: note = Description of Artificial Sequence: Synthetic peptide
  REGION 1..5: note = XENP019840 vhCDR1
SYTMH

SEQ ID NO: 5691 - protein, 17 aa, synthetic construct
  REGION 1..17: note = Description of Artificial Sequence: Synthetic peptide
  REGION 1..17: note = XENP019840 vhCDR2
FISYDGNNKYYADSVKG

SEQ ID NO: 5692 - protein, 9 aa, synthetic construct
  REGION 1..9: note = Description of Artificial Sequence: Synthetic peptide
  REGION 1..9: note = XENP019840 vhCDR3
TGWLGPFDY

SEQ ID NO: 5693 - protein, 12 aa, synthetic construct
  REGION 1..12: note = Description of Artificial Sequence: Synthetic peptide
  REGION 1..12: note = XENP019840 vlCDR1
RASQSVGSSYLA

SEQ ID NO: 5694 - protein, 7 aa, synthetic construct
  REGION 1..7: note = Description of Artificial Sequence: Synthetic peptide
  REGION 1..7: note = XENP019840 vlCDR2
GAFSRAT

SEQ ID NO: 5695 - protein, 9 aa, synthetic construct
  REGION 1..9: note = Description of Artificial Sequence: Synthetic peptide
  REGION 1..9: note = XENP019840 vlCDR3
QQYGSSPWT

SEQ ID NO: 5696 - protein, 246 aa, synthetic construct
  REGION 1..246: note = Description of Artificial Sequence: Synthetic polypeptide
  REGION 1..246: note = XENP019841 [CTLA-4]_H0.93_L0_scFv(GKPGS)4
QVQLVESGGGVVQPGRSLRLSCAASGFTFSSYTMHWVRQAPGKGLEWVTFISYDGNNKYYADSVKGRFTISRDNSKNQLYLQMNSLRAEDTAIYYCARTGWLGPFDYWGQGTLVTVSSGKPGSGKPGSGKPGSGKPGSEIVLTQSPGTLSLSPGERATLSCRASQSVGSSYLAWYQQKPGQAPRLLIYGAFSRATGIPDRFSGSGSGTDFTLTISRLEPEDFAVYYCQQYGSSPWTFGQGTKVEIK

SEQ ID NO: 5697 - protein, 118 aa, synthetic construct
  REGION 1..118: note = Description of Artificial Sequence: Synthetic polypeptide
  REGION 1..118: note = VH of XENP019841
QVQLVESGGGVVQPGRSLRLSCAASGFTFSSYTMHWVRQAPGKGLEWVTFISYDGNNKYYADSVKGRFTISRDNSKNQLYLQMNSLRAEDTAIYYCARTGWLGPFDYWGQGTLVTVSS

SEQ ID NO: 5698 - protein, 108 aa, synthetic construct; identical to SEQ ID NO: 3741
  REGION 1..108: note = Description of Artificial Sequence: Synthetic polypeptide
  REGION 1..108: note = VL of XENP019841

SEQ ID NO: 5699 - protein, 5 aa, synthetic construct
  REGION 1..5: note = Description of Artificial Sequence: Synthetic peptide
  REGION 1..5: note = XENP019841 vhCDR1
SYTMH

SEQ ID NO: 5700 - protein, 17 aa, synthetic construct
  REGION 1..17: note = Description of Artificial Sequence: Synthetic peptide
  REGION 1..17: note = XENP019841 vhCDR2
FISYDGNNKYYADSVKG

SEQ ID NO: 5701 - protein, 9 aa, synthetic construct
  REGION 1..9: note = Description of Artificial Sequence: Synthetic peptide
  REGION 1..9: note = XENP019841 vhCDR3
TGWLGPFDY

SEQ ID NO: 5702 - protein, 12 aa, synthetic construct
  REGION 1..12: note = Description of Artificial Sequence: Synthetic peptide
  REGION 1..12: note = XENP019841 vlCDR1
RASQSVGSSYLA

SEQ ID NO: 5703 - protein, 7 aa, synthetic construct
  REGION 1..7: note = Description of Artificial Sequence: Synthetic peptide
  REGION 1..7: note = XENP019841 vlCDR2
GAFSRAT

SEQ ID NO: 5704 - protein, 9 aa, synthetic construct
  REGION 1..9: note = Description of Artificial Sequence: Synthetic peptide
  REGION 1..9: note = XENP019841 vlCDR3
QQYGSSPWT

SEQ ID NO: 5705 - protein, 246 aa, synthetic construct
  REGION 1..246: note = Description of Artificial Sequence: Synthetic polypeptide
  REGION 1..246: note = XENP019842 [CTLA-4]_H0.94_L0_scFv(GKPGS)4
QVQLVESGGGVVQPGRSLRLSCAASGFTFSSYTMHWVRQAPGKGLEWVTFISYDGNNKYYADSVKGRFTISRDNSKNTLYLEMNSLRAEDTAIYYCARTGWLGPFDYWGQGTLVTVSSGKPGSGKPGSGKPGSGKPGSEIVLTQSPGTLSLSPGERATLSCRASQSVGSSYLAWYQQKPGQAPRLLIYGAFSRATGIPDRFSGSGSGTDFTLTISRLEPEDFAVYYCQQYGSSPWTFGQGTKVEIK

SEQ ID NO: 5706 - protein, 118 aa, synthetic construct
  REGION 1..118: note = Description of Artificial Sequence: Synthetic polypeptide
  REGION 1..118: note = VH of XENP019842
QVQLVESGGGVVQPGRSLRLSCAASGFTFSSYTMHWVRQAPGKGLEWVTFISYDGNNKYYADSVKGRFTISRDNSKNTLYLEMNSLRAEDTAIYYCARTGWLGPFDYWGQGTLVTVSS

SEQ ID NO: 5707 - protein, 108 aa, synthetic construct; identical to SEQ ID NO: 3741
  REGION 1..108: note = Description of Artificial Sequence: Synthetic polypeptide
  REGION 1..108: note = VL of XENP019842

SEQ ID NO: 5708 - protein, 5 aa, synthetic construct
  REGION 1..5: note = Description of Artificial Sequence: Synthetic peptide
  REGION 1..5: note = XENP019842 vhCDR1
SYTMH

SEQ ID NO: 5709 - protein, 17 aa, synthetic construct
  REGION 1..17: note = Description of Artificial Sequence: Synthetic peptide
  REGION 1..17: note = XENP019842 vhCDR2
FISYDGNNKYYADSVKG

SEQ ID NO: 5710 - protein, 9 aa, synthetic construct
  REGION 1..9: note = Description of Artificial Sequence: Synthetic peptide
  REGION 1..9: note = XENP019842 vhCDR3
TGWLGPFDY

SEQ ID NO: 5711 - protein, 12 aa, synthetic construct
  REGION 1..12: note = Description of Artificial Sequence: Synthetic peptide
  REGION 1..12: note = XENP019842 vlCDR1
RASQSVGSSYLA

SEQ ID NO: 5712 - protein, 7 aa, synthetic construct
  REGION 1..7: note = Description of Artificial Sequence: Synthetic peptide
  REGION 1..7: note = XENP019842 vlCDR2
GAFSRAT

SEQ ID NO: 5713 - protein, 9 aa, synthetic construct
  REGION 1..9: note = Description of Artificial Sequence: Synthetic peptide
  REGION 1..9: note = XENP019842 vlCDR3
QQYGSSPWT

SEQ ID NO: 5714 - protein, 246 aa, synthetic construct
  REGION 1..246: note = Description of Artificial Sequence: Synthetic polypeptide
  REGION 1..246: note = XENP019843 [CTLA-4]_H0.95_L0_scFv(GKPGS)4
QVQLVESGGGVVQPGRSLRLSCAASGFTFSSYTMHWVRQAPGKGLEWVTFISYDGNNKYYADSVKGRFTISRDNSKNTLYLQMDSLRAEDTAIYYCARTGWLGPFDYWGQGTLVTVSSGKPGSGKPGSGKPGSGKPGSEIVLTQSPGTLSLSPGERATLSCRASQSVGSSYLAWYQQKPGQAPRLLIYGAFSRATGIPDRFSGSGSGTDFTLTISRLEPEDFAVYYCQQYGSSPWTFGQGTKVEIK

SEQ ID NO: 5715 - protein, 118 aa, synthetic construct
  REGION 1..118: note = Description of Artificial Sequence: Synthetic polypeptide
  REGION 1..118: note = VH of XENP019843
QVQLVESGGGVVQPGRSLRLSCAASGFTFSSYTMHWVRQAPGKGLEWVTFISYDGNNKYYADSVKGRFTISRDNSKNTLYLQMDSLRAEDTAIYYCARTGWLGPFDYWGQGTLVTVSS

SEQ ID NO: 5716 - protein, 108 aa, synthetic construct; identical to SEQ ID NO: 3741
  REGION 1..108: note = Description of Artificial Sequence: Synthetic polypeptide
  REGION 1..108: note = VL of XENP019843

SEQ ID NO: 5717 - protein, 5 aa, synthetic construct
  REGION 1..5: note = Description of Artificial Sequence: Synthetic peptide
  REGION 1..5: note = XENP019843 vhCDR1
SYTMH

SEQ ID NO: 5718 - protein, 17 aa, synthetic construct
  REGION 1..17: note = Description of Artificial Sequence: Synthetic peptide
  REGION 1..17: note = XENP019843 vhCDR2
FISYDGNNKYYADSVKG

SEQ ID NO: 5719 - protein, 9 aa, synthetic construct
  REGION 1..9: note = Description of Artificial Sequence: Synthetic peptide
  REGION 1..9: note = XENP019843 vhCDR3
TGWLGPFDY

SEQ ID NO: 5720 - protein, 12 aa, synthetic construct
  REGION 1..12: note = Description of Artificial Sequence: Synthetic peptide
  REGION 1..12: note = XENP019843 vlCDR1
RASQSVGSSYLA

SEQ ID NO: 5721 - protein, 7 aa, synthetic construct
  REGION 1..7: note = Description of Artificial Sequence: Synthetic peptide
  REGION 1..7: note = XENP019843 vlCDR2
GAFSRAT

SEQ ID NO: 5722 - protein, 9 aa, synthetic construct
  REGION 1..9: note = Description of Artificial Sequence: Synthetic peptide
  REGION 1..9: note = XENP019843 vlCDR3
QQYGSSPWT

SEQ ID NO: 5723 - protein, 246 aa, synthetic construct
  REGION 1..246: note = Description of Artificial Sequence: Synthetic polypeptide
  REGION 1..246: note = XENP019844 [CTLA-4]_H0.96_L0_scFv(GKPGS)4
QVQLVESGGGVVQPGRSLRLSCAASGFTFSSYTMHWVRQAPGKGLEWVTFISYDGNNKYYADSVKGRFTISRDNSKNTLYLQMNDLRAEDTAIYYCARTGWLGPFDYWGQGTLVTVSSGKPGSGKPGSGKPGSGKPGSEIVLTQSPGTLSLSPGERATLSCRASQSVGSSYLAWYQQKPGQAPRLLIYGAFSRATGIPDRFSGSGSGTDFTLTISRLEPEDFAVYYCQQYGSSPWTFGQGTKVEIK

SEQ ID NO: 5724 - protein, 118 aa, synthetic construct
  REGION 1..118: note = Description of Artificial Sequence: Synthetic polypeptide
  REGION 1..118: note = VH of XENP019844
QVQLVESGGGVVQPGRSLRLSCAASGFTFSSYTMHWVRQAPGKGLEWVTFISYDGNNKYYADSVKGRFTISRDNSKNTLYLQMNDLRAEDTAIYYCARTGWLGPFDYWGQGTLVTVSS

SEQ ID NO: 5725 - protein, 108 aa, synthetic construct; identical to SEQ ID NO: 3741
  REGION 1..108: note = Description of Artificial Sequence: Synthetic polypeptide
  REGION 1..108: note = VL of XENP019844

SEQ ID NO: 5726 - protein, 5 aa, synthetic construct
  REGION 1..5: note = Description of Artificial Sequence: Synthetic peptide
  REGION 1..5: note = XENP019844 vhCDR1
SYTMH

SEQ ID NO: 5727 - protein, 17 aa, synthetic construct
  REGION 1..17: note = Description of Artificial Sequence: Synthetic peptide
  REGION 1..17: note = XENP019844 vhCDR2
FISYDGNNKYYADSVKG

SEQ ID NO: 5728 - protein, 9 aa, synthetic construct
  REGION 1..9: note = Description of Artificial Sequence: Synthetic peptide
  REGION 1..9: note = XENP019844 vhCDR3
TGWLGPFDY

SEQ ID NO: 5729 - protein, 12 aa, synthetic construct
  REGION 1..12: note = Description of Artificial Sequence: Synthetic peptide
  REGION 1..12: note = XENP019844 vlCDR1
RASQSVGSSYLA

SEQ ID NO: 5730 - protein, 7 aa, synthetic construct
  REGION 1..7: note = Description of Artificial Sequence: Synthetic peptide
  REGION 1..7: note = XENP019844 vlCDR2
GAFSRAT

SEQ ID NO: 5731 - protein, 9 aa, synthetic construct
  REGION 1..9: note = Description of Artificial Sequence: Synthetic peptide
  REGION 1..9: note = XENP019844 vlCDR3
QQYGSSPWT

SEQ ID NO: 5732 - protein, 246 aa, synthetic construct
  REGION 1..246: note = Description of Artificial Sequence: Synthetic polypeptide
  REGION 1..246: note = XENP019845 [CTLA-4]_H0.97_L0_scFv(GKPGS)4
QVQLVESGGGVVQPGRSLRLSCAASGFTFSSYTMHWVRQAPGKGLEWVTFISYDGNNKYYADSVKGRFTISRDNSKNTLYLQMNSLRTEDTAIYYCARTGWLGPFDYWGQGTLVTVSSGKPGSGKPGSGKPGSGKPGSEIVLTQSPGTLSLSPGERATLSCRASQSVGSSYLAWYQQKPGQAPRLLIYGAFSRATGIPDRFSGSGSGTDFTLTISRLEPEDFAVYYCQQYGSSPWTFGQGTKVEIK

SEQ ID NO: 5733 - protein, 118 aa, synthetic construct
  REGION 1..118: note = Description of Artificial Sequence: Synthetic polypeptide
  REGION 1..118: note = VH of XENP019845
QVQLVESGGGVVQPGRSLRLSCAASGFTFSSYTMHWVRQAPGKGLEWVTFISYDGNNKYYADSVKGRFTISRDNSKNTLYLQMNSLRTEDTAIYYCARTGWLGPFDYWGQGTLVTVSS

SEQ ID NO: 5734 - protein, 108 aa, synthetic construct; identical to SEQ ID NO: 3741
  REGION 1..108: note = Description of Artificial Sequence: Synthetic polypeptide
  REGION 1..108: note = VL of XENP019845

SEQ ID NO: 5735 - protein, 5 aa, synthetic construct
  REGION 1..5: note = Description of Artificial Sequence: Synthetic peptide
  REGION 1..5: note = XENP019845 vhCDR1
SYTMH

SEQ ID NO: 5736 - protein, 17 aa, synthetic construct
  REGION 1..17: note = Description of Artificial Sequence: Synthetic peptide
  REGION 1..17: note = XENP019845 vhCDR2
FISYDGNNKYYADSVKG

SEQ ID NO: 5737 - protein, 9 aa, synthetic construct
  REGION 1..9: note = Description of Artificial Sequence: Synthetic peptide
  REGION 1..9: note = XENP019845 vhCDR3
TGWLGPFDY

SEQ ID NO: 5738 - protein, 12 aa, synthetic construct
  REGION 1..12: note = Description of Artificial Sequence: Synthetic peptide
  REGION 1..12: note = XENP019845 vlCDR1
RASQSVGSSYLA

SEQ ID NO: 5739 - protein, 7 aa, synthetic construct
  REGION 1..7: note = Description of Artificial Sequence: Synthetic peptide
  REGION 1..7: note = XENP019845 vlCDR2
GAFSRAT

SEQ ID NO: 5740 - protein, 9 aa, synthetic construct
  REGION 1..9: note = Description of Artificial Sequence: Synthetic peptide
  REGION 1..9: note = XENP019845 vlCDR3
QQYGSSPWT

SEQ ID NO: 5741 - protein, 246 aa, synthetic construct
  REGION 1..246: note = Description of Artificial Sequence: Synthetic polypeptide
  REGION 1..246: note = XENP019846 [CTLA-4]_H0.98_L0_scFv(GKPGS)4
QVQLVESGGGVVQPGRSLRLSCAASGFTFSSYTMHWVRQAPGKGLEWVTFISYDGNNKYYADSVKGRFTISRDNSKNTLYLQMNSLRAEDTALYYCARTGWLGPFDYWGQGTLVTVSSGKPGSGKPGSGKPGSGKPGSEIVLTQSPGTLSLSPGERATLSCRASQSVGSSYLAWYQQKPGQAPRLLIYGAFSRATGIPDRFSGSGSGTDFTLTISRLEPEDFAVYYCQQYGSSPWTFGQGTKVEIK

SEQ ID NO: 5742 - protein, 118 aa, synthetic construct
  REGION 1..118: note = Description of Artificial Sequence: Synthetic polypeptide
  REGION 1..118: note = VH of XENP019846
QVQLVESGGGVVQPGRSLRLSCAASGFTFSSYTMHWVRQAPGKGLEWVTFISYDGNNKYYADSVKGRFTISRDNSKNTLYLQMNSLRAEDTALYYCARTGWLGPFDYWGQGTLVTVSS

SEQ ID NO: 5743 - protein, 108 aa, synthetic construct; identical to SEQ ID NO: 3741
  REGION 1..108: note = Description of Artificial Sequence: Synthetic polypeptide
  REGION 1..108: note = VL of XENP019846

SEQ ID NO: 5744 - protein, 5 aa, synthetic construct
  REGION 1..5: note = Description of Artificial Sequence: Synthetic peptide
  REGION 1..5: note = XENP019846 vhCDR1
SYTMH

SEQ ID NO: 5745 - protein, 17 aa, synthetic construct
  REGION 1..17: note = Description of Artificial Sequence: Synthetic peptide
  REGION 1..17: note = XENP019846 vhCDR2
FISYDGNNKYYADSVKG

SEQ ID NO: 5746 - protein, 9 aa, synthetic construct
  REGION 1..9: note = Description of Artificial Sequence: Synthetic peptide
  REGION 1..9: note = XENP019846 vhCDR3
TGWLGPFDY

SEQ ID NO: 5747 - protein, 12 aa, synthetic construct
  REGION 1..12: note = Description of Artificial Sequence: Synthetic peptide
  REGION 1..12: note = XENP019846 vlCDR1
RASQSVGSSYLA

SEQ ID NO: 5748 - protein, 7 aa, synthetic construct
  REGION 1..7: note = Description of Artificial Sequence: Synthetic peptide
  REGION 1..7: note = XENP019846 vlCDR2
GAFSRAT

SEQ ID NO: 5749 - protein, 9 aa, synthetic construct
  REGION 1..9: note = Description of Artificial Sequence: Synthetic peptide
  REGION 1..9: note = XENP019846 vlCDR3
QQYGSSPWT

SEQ ID NO: 5750 - protein, 246 aa, synthetic construct
  REGION 1..246: note = Description of Artificial Sequence: Synthetic polypeptide
  REGION 1..246: note = XENP019847 [CTLA-4]_H0.99_L0_scFv(GKPGS)4
QVQLVESGGGVVQPGRSLRLSCAASGFTFSSYTMHWVRQAPGKGLEWVTFISYDGNNKYYADSVKGRFTISRDNSKNTLYLQMNSLRAEDTAVYYCARTGWLGPFDYWGQGTLVTVSSGKPGSGKPGSGKPGSGKPGSEIVLTQSPGTLSLSPGERATLSCRASQSVGSSYLAWYQQKPGQAPRLLIYGAFSRATGIPDRFSGSGSGTDFTLTISRLEPEDFAVYYCQQYGSSPWTFGQGTKVEIK

SEQ ID NO: 5751 - protein, 118 aa, synthetic construct
  REGION 1..118: note = Description of Artificial Sequence: Synthetic polypeptide
  REGION 1..118: note = VH of XENP019847
QVQLVESGGGVVQPGRSLRLSCAASGFTFSSYTMHWVRQAPGKGLEWVTFISYDGNNKYYADSVKGRFTISRDNSKNTLYLQMNSLRAEDTAVYYCARTGWLGPFDYWGQGTLVTVSS

SEQ ID NO: 5752 - protein, 108 aa, synthetic construct; identical to SEQ ID NO: 3741
  REGION 1..108: note = Description of Artificial Sequence: Synthetic polypeptide
  REGION 1..108: note = VL of XENP019847

SEQ ID NO: 5753 - protein, 5 aa, synthetic construct
  REGION 1..5: note = Description of Artificial Sequence: Synthetic peptide
  REGION 1..5: note = XENP019847 vhCDR1
SYTMH

SEQ ID NO: 5754 - protein, 17 aa, synthetic construct
  REGION 1..17: note = Description of Artificial Sequence: Synthetic peptide
  REGION 1..17: note = XENP019847 vhCDR2
FISYDGNNKYYADSVKG

SEQ ID NO: 5755 - protein, 9 aa, synthetic construct
  REGION 1..9: note = Description of Artificial Sequence: Synthetic peptide
  REGION 1..9: note = XENP019847 vhCDR3
TGWLGPFDY

SEQ ID NO: 5756 - protein, 12 aa, synthetic construct
  REGION 1..12: note = Description of Artificial Sequence: Synthetic peptide
  REGION 1..12: note = XENP019847 vlCDR1
RASQSVGSSYLA

SEQ ID NO: 5757 - protein, 7 aa, synthetic construct
  REGION 1..7: note = Description of Artificial Sequence: Synthetic peptide
  REGION 1..7: note = XENP019847 vlCDR2
GAFSRAT

SEQ ID NO: 5758 - protein, 9 aa, synthetic construct
  REGION 1..9: note = Description of Artificial Sequence: Synthetic peptide
  REGION 1..9: note = XENP019847 vlCDR3
QQYGSSPWT

SEQ ID NO: 5759 - protein, 246 aa, synthetic construct
  REGION 1..246: note = Description of Artificial Sequence: Synthetic polypeptide
  REGION 1..246: note = XENP019848 [CTLA-4]_H0.100_L0_scFv(GKPGS)4
QVQLVESGGGVVQPGRSLRLSCAASGFTFSSYTMHWVRQAPGKGLEWVTFISYDGNNKYYADSVKGRFTISRDNSKNTLYLQMNSLRAEDTAIYYCTRTGWLGPFDYWGQGTLVTVSSGKPGSGKPGSGKPGSGKPGSEIVLTQSPGTLSLSPGERATLSCRASQSVGSSYLAWYQQKPGQAPRLLIYGAFSRATGIPDRFSGSGSGTDFTLTISRLEPEDFAVYYCQQYGSSPWTFGQGTKVEIK

SEQ ID NO: 5760 - protein, 118 aa, synthetic construct
  REGION 1..118: note = Description of Artificial Sequence: Synthetic polypeptide
  REGION 1..118: note = VH of XENP019848
QVQLVESGGGVVQPGRSLRLSCAASGFTFSSYTMHWVRQAPGKGLEWVTFISYDGNNKYYADSVKGRFTISRDNSKNTLYLQMNSLRAEDTAIYYCTRTGWLGPFDYWGQGTLVTVSS

SEQ ID NO: 5761 - protein, 108 aa, synthetic construct; identical to SEQ ID NO: 3741
  REGION 1..108: note = Description of Artificial Sequence: Synthetic polypeptide
  REGION 1..108: note = VL of XENP019848

SEQ ID NO: 5762 - protein, 5 aa, synthetic construct
  REGION 1..5: note = Description of Artificial Sequence: Synthetic peptide
  REGION 1..5: note = XENP019848 vhCDR1
SYTMH

SEQ ID NO: 5763 - protein, 17 aa, synthetic construct
  REGION 1..17: note = Description of Artificial Sequence: Synthetic peptide
  REGION 1..17: note = XENP019848 vhCDR2
FISYDGNNKYYADSVKG

SEQ ID NO: 5764 - protein, 9 aa, synthetic construct
  REGION 1..9: note = Description of Artificial Sequence: Synthetic peptide
  REGION 1..9: note = XENP019848 vhCDR3
TGWLGPFDY

SEQ ID NO: 5765 - protein, 12 aa, synthetic construct
  REGION 1..12: note = Description of Artificial Sequence: Synthetic peptide
  REGION 1..12: note = XENP019848 vlCDR1
RASQSVGSSYLA

SEQ ID NO: 5766 - protein, 7 aa, synthetic construct
  REGION 1..7: note = Description of Artificial Sequence: Synthetic peptide
  REGION 1..7: note = XENP019848 vlCDR2
GAFSRAT

SEQ ID NO: 5767 - protein, 9 aa, synthetic construct
  REGION 1..9: note = Description of Artificial Sequence: Synthetic peptide
  REGION 1..9: note = XENP019848 vlCDR3
QQYGSSPWT

SEQ ID NO: 5768 - protein, 246 aa, synthetic construct
  REGION 1..246: note = Description of Artificial Sequence: Synthetic polypeptide
  REGION 1..246: note = XENP019849 [CTLA-4]_H0.101_L0_scFv(GKPGS)4
QVQLVESGGGVVQPGRSLRLSCAASGFTFSSYTMHWVRQAPGKGLEWVTFISYDGNNKYYADSVKGRFTISRDNSKNTLYLQMNSLRAEDTAIYYCAKTGWLGPFDYWGQGTLVTVSSGKPGSGKPGSGKPGSGKPGSEIVLTQSPGTLSLSPGERATLSCRASQSVGSSYLAWYQQKPGQAPRLLIYGAFSRATGIPDRFSGSGSGTDFTLTISRLEPEDFAVYYCQQYGSSPWTFGQGTKVEIK

SEQ ID NO: 5769 - protein, 118 aa, synthetic construct
  REGION 1..118: note = Description of Artificial Sequence: Synthetic polypeptide
  REGION 1..118: note = VH of XENP019849
QVQLVESGGGVVQPGRSLRLSCAASGFTFSSYTMHWVRQAPGKGLEWVTFISYDGNNKYYADSVKGRFTISRDNSKNTLYLQMNSLRAEDTAIYYCAKTGWLGPFDYWGQGTLVTVSS

SEQ ID NO: 5770 - protein, 108 aa, synthetic construct; identical to SEQ ID NO: 3741
  REGION 1..108: note = Description of Artificial Sequence: Synthetic polypeptide
  REGION 1..108: note = VL of XENP019849

SEQ ID NO: 5771 - protein, 5 aa, synthetic construct
  REGION 1..5: note = Description of Artificial Sequence: Synthetic peptide
  REGION 1..5: note = XENP019849 vhCDR1
SYTMH

SEQ ID NO: 5772 - protein, 17 aa, synthetic construct
  REGION 1..17: note = Description of Artificial Sequence: Synthetic peptide
  REGION 1..17: note = XENP019849 vhCDR2
FISYDGNNKYYADSVKG

SEQ ID NO: 5773 - protein, 9 aa, synthetic construct
  REGION 1..9: note = Description of Artificial Sequence: Synthetic peptide
  REGION 1..9: note = XENP019849 vhCDR3
TGWLGPFDY

SEQ ID NO: 5774 - protein, 12 aa, synthetic construct
  REGION 1..12: note = Description of Artificial Sequence: Synthetic peptide
  REGION 1..12: note = XENP019849 vlCDR1
RASQSVGSSYLA

SEQ ID NO: 5775 - protein, 7 aa, synthetic construct
  REGION 1..7: note = Description of Artificial Sequence: Synthetic peptide
  REGION 1..7: note = XENP019849 vlCDR2
GAFSRAT

SEQ ID NO: 5776 - protein, 9 aa, synthetic construct
  REGION 1..9: note = Description of Artificial Sequence: Synthetic peptide
  REGION 1..9: note = XENP019849 vlCDR3
QQYGSSPWT

SEQ ID NO: 5777 - protein, 246 aa, synthetic construct
  REGION 1..246: note = Description of Artificial Sequence: Synthetic polypeptide
  REGION 1..246: note = XENP019850 [CTLA-4]_H0.102_L0_scFv(GKPGS)4
QVQLVESGGGVVQPGRSLRLSCAASGFTFSSYTMHWVRQAPGKGLEWVTFISYDGNNKYYADSVKGRFTISRDNSKNTLYLQMNSLRAEDTAIYYCARAGWLGPFDYWGQGTLVTVSSGKPGSGKPGSGKPGSGKPGSEIVLTQSPGTLSLSPGERATLSCRASQSVGSSYLAWYQQKPGQAPRLLIYGAFSRATGIPDRFSGSGSGTDFTLTISRLEPEDFAVYYCQQYGSSPWTFGQGTKVEIK

SEQ ID NO: 5778 - protein, 118 aa, synthetic construct
  REGION 1..118: note = Description of Artificial Sequence: Synthetic polypeptide
  REGION 1..118: note = VH of XENP019850
QVQLVESGGGVVQPGRSLRLSCAASGFTFSSYTMHWVRQAPGKGLEWVTFISYDGNNKYYADSVKGRFTISRDNSKNTLYLQMNSLRAEDTAIYYCARAGWLGPFDYWGQGTLVTVSS

SEQ ID NO: 5779 - protein, 108 aa, synthetic construct; identical to SEQ ID NO: 3741
  REGION 1..108: note = Description of Artificial Sequence: Synthetic polypeptide
  REGION 1..108: note = VL of XENP019850

SEQ ID NO: 5780 - protein, 5 aa, synthetic construct
  REGION 1..5: note = Description of Artificial Sequence: Synthetic peptide
  REGION 1..5: note = XENP019850 vhCDR1
SYTMH

SEQ ID NO: 5781 - protein, 17 aa, synthetic construct
  REGION 1..17: note = Description of Artificial Sequence: Synthetic peptide
  REGION 1..17: note = XENP019850 vhCDR2
FISYDGNNKYYADSVKG

SEQ ID NO: 5782 - protein, 9 aa, synthetic construct
  REGION 1..9: note = Description of Artificial Sequence: Synthetic peptide
  REGION 1..9: note = XENP019850 vhCDR3
AGWLGPFDY

SEQ ID NO: 5783 - protein, 12 aa, synthetic construct
  REGION 1..12: note = Description of Artificial Sequence: Synthetic peptide
  REGION 1..12: note = XENP019850 vlCDR1
RASQSVGSSYLA

SEQ ID NO: 5784 - protein, 7 aa, synthetic construct
  REGION 1..7: note = Description of Artificial Sequence: Synthetic peptide
  REGION 1..7: note = XENP019850 vlCDR2
GAFSRAT

SEQ ID NO: 5785 - protein, 9 aa, synthetic construct
  REGION 1..9: note = Description of Artificial Sequence: Synthetic peptide
  REGION 1..9: note = XENP019850 vlCDR3
QQYGSSPWT

SEQ ID NO: 5786 - protein, 246 aa, synthetic construct
  REGION 1..246: note = Description of Artificial Sequence: Synthetic polypeptide
  REGION 1..246: note = XENP019851 [CTLA-4]_H0.103_L0_scFv(GKPGS)4
QVQLVESGGGVVQPGRSLRLSCAASGFTFSSYTMHWVRQAPGKGLEWVTFISYDGNNKYYADSVKGRFTISRDNSKNTLYLQMNSLRAEDTAIYYCARGGWLGPFDYWGQGTLVTVSSGKPGSGKPGSGKPGSGKPGSEIVLTQSPGTLSLSPGERATLSCRASQSVGSSYLAWYQQKPGQAPRLLIYGAFSRATGIPDRFSGSGSGTDFTLTISRLEPEDFAVYYCQQYGSSPWTFGQGTKVEIK

SEQ ID NO: 5787 - protein, 118 aa, synthetic construct
  REGION 1..118: note = Description of Artificial Sequence: Synthetic polypeptide
  REGION 1..118: note = VH of XENP019851
QVQLVESGGGVVQPGRSLRLSCAASGFTFSSYTMHWVRQAPGKGLEWVTFISYDGNNKYYADSVKGRFTISRDNSKNTLYLQMNSLRAEDTAIYYCARGGWLGPFDYWGQGTLVTVSS

SEQ ID NO: 5788 - protein, 108 aa, synthetic construct; identical to SEQ ID NO: 3741
  REGION 1..108: note = Description of Artificial Sequence: Synthetic polypeptide
  REGION 1..108: note = VL of XENP019851

SEQ ID NO: 5789 - protein, 5 aa, synthetic construct
  REGION 1..5: note = Description of Artificial Sequence: Synthetic peptide
  REGION 1..5: note = XENP019851 vhCDR1
SYTMH

SEQ ID NO: 5790 - protein, 17 aa, synthetic construct
  REGION 1..17: note = Description of Artificial Sequence: Synthetic peptide
  REGION 1..17: note = XENP019851 vhCDR2
FISYDGNNKYYADSVKG

SEQ ID NO: 5791 - protein, 9 aa, synthetic construct
  REGION 1..9: note = Description of Artificial Sequence: Synthetic peptide
  REGION 1..9: note = XENP019851 vhCDR3
GGWLGPFDY

SEQ ID NO: 5792 - protein, 12 aa, synthetic construct
  REGION 1..12: note = Description of Artificial Sequence: Synthetic peptide
  REGION 1..12: note = XENP019851 vlCDR1
RASQSVGSSYLA

SEQ ID NO: 5793 - protein, 7 aa, synthetic construct
  REGION 1..7: note = Description of Artificial Sequence: Synthetic peptide
  REGION 1..7: note = XENP019851 vlCDR2
GAFSRAT

SEQ ID NO: 5794 - protein, 9 aa, synthetic construct
  REGION 1..9: note = Description of Artificial Sequence: Synthetic peptide
  REGION 1..9: note = XENP019851 vlCDR3
QQYGSSPWT

SEQ ID NO: 5795 - protein, 246 aa, synthetic construct
  REGION 1..246: note = Description of Artificial Sequence: Synthetic polypeptide
  REGION 1..246: note = XENP019852 [CTLA-4]_H0.104_L0_scFv(GKPGS)4
QVQLVESGGGVVQPGRSLRLSCAASGFTFSSYTMHWVRQAPGKGLEWVTFISYDGNNKYYADSVKGRFTISRDNSKNTLYLQMNSLRAEDTAIYYCARDGWLGPFDYWGQGTLVTVSSGKPGSGKPGSGKPGSGKPGSEIVLTQSPGTLSLSPGERATLSCRASQSVGSSYLAWYQQKPGQAPRLLIYGAFSRATGIPDRFSGSGSGTDFTLTISRLEPEDFAVYYCQQYGSSPWTFGQGTKVEIK

SEQ ID NO: 5796 - protein, 118 aa, synthetic construct
  REGION 1..118: note = Description of Artificial Sequence: Synthetic polypeptide
  REGION 1..118: note = VH of XENP019852
QVQLVESGGGVVQPGRSLRLSCAASGFTFSSYTMHWVRQAPGKGLEWVTFISYDGNNKYYADSVKGRFTISRDNSKNTLYLQMNSLRAEDTAIYYCARDGWLGPFDYWGQGTLVTVSS

SEQ ID NO: 5797 - protein, 108 aa, synthetic construct; identical to SEQ ID NO: 3741
  REGION 1..108: note = Description of Artificial Sequence: Synthetic polypeptide
  REGION 1..108: note = VL of XENP019852

SEQ ID NO: 5798 - protein, 5 aa, synthetic construct
  REGION 1..5: note = Description of Artificial Sequence: Synthetic peptide
  REGION 1..5: note = XENP019852 vhCDR1
SYTMH

SEQ ID NO: 5799 - protein, 17 aa, synthetic construct
  REGION 1..17: note = Description of Artificial Sequence: Synthetic peptide
  REGION 1..17: note = XENP019852 vhCDR2
FISYDGNNKYYADSVKG

SEQ ID NO: 5800 - protein, 9 aa, synthetic construct
  REGION 1..9: note = Description of Artificial Sequence: Synthetic peptide
  REGION 1..9: note = XENP019852 vhCDR3
DGWLGPFDY

SEQ ID NO: 5801 - protein, 12 aa, synthetic construct
  REGION 1..12: note = Description of Artificial Sequence: Synthetic peptide
  REGION 1..12: note = XENP019852 vlCDR1
RASQSVGSSYLA

SEQ ID NO: 5802 - protein, 7 aa, synthetic construct
  REGION 1..7: note = Description of Artificial Sequence: Synthetic peptide
  REGION 1..7: note = XENP019852 vlCDR2
GAFSRAT

SEQ ID NO: 5803 - protein, 9 aa, synthetic construct
  REGION 1..9: note = Description of Artificial Sequence: Synthetic peptide
  REGION 1..9: note = XENP019852 vlCDR3
QQYGSSPWT

SEQ ID NO: 5804 - protein, 246 aa, synthetic construct
  REGION 1..246: note = Description of Artificial Sequence: Synthetic polypeptide
  REGION 1..246: note = XENP019853 [CTLA-4]_H0.105_L0_scFv(GKPGS)4
QVQLVESGGGVVQPGRSLRLSCAASGFTFSSYTMHWVRQAPGKGLEWVTFISYDGNNKYYADSVKGRFTISRDNSKNTLYLQMNSLRAEDTAIYYCARSGWLGPFDYWGQGTLVTVSSGKPGSGKPGSGKPGSGKPGSEIVLTQSPGTLSLSPGERATLSCRASQSVGSSYLAWYQQKPGQAPRLLIYGAFSRATGIPDRFSGSGSGTDFTLTISRLEPEDFAVYYCQQYGSSPWTFGQGTKVEIK

SEQ ID NO: 5805 - protein, 118 aa, synthetic construct
  REGION 1..118: note = Description of Artificial Sequence: Synthetic polypeptide
  REGION 1..118: note = VH of XENP019853
QVQLVESGGGVVQPGRSLRLSCAASGFTFSSYTMHWVRQAPGKGLEWVTFISYDGNNKYYADSVKGRFTISRDNSKNTLYLQMNSLRAEDTAIYYCARSGWLGPFDYWGQGTLVTVSS

SEQ ID NO: 5806 - protein, 108 aa, synthetic construct; identical to SEQ ID NO: 3741
  REGION 1..108: note = Description of Artificial Sequence: Synthetic polypeptide
  REGION 1..108: note = VL of XENP019853

SEQ ID NO: 5807 - protein, 5 aa, synthetic construct
  REGION 1..5: note = Description of Artificial Sequence: Synthetic peptide
  REGION 1..5: note = XENP019853 vhCDR1
SYTMH

SEQ ID NO: 5808 - protein, 17 aa, synthetic construct
  REGION 1..17: note = Description of Artificial Sequence: Synthetic peptide
  REGION 1..17: note = XENP019853 vhCDR2
FISYDGNNKYYADSVKG

SEQ ID NO: 5809 - protein, 9 aa, synthetic construct
  REGION 1..9: note = Description of Artificial Sequence: Synthetic peptide
  REGION 1..9: note = XENP019853 vhCDR3
SGWLGPFDY

SEQ ID NO: 5810 - protein, 12 aa, synthetic construct
  REGION 1..12: note = Description of Artificial Sequence: Synthetic peptide
  REGION 1..12: note = XENP019853 vlCDR1
RASQSVGSSYLA

SEQ ID NO: 5811 - protein, 7 aa, synthetic construct
  REGION 1..7: note = Description of Artificial Sequence: Synthetic peptide
  REGION 1..7: note = XENP019853 vlCDR2
GAFSRAT

SEQ ID NO: 5812 - protein, 9 aa, synthetic construct
  REGION 1..9: note = Description of Artificial Sequence: Synthetic peptide
  REGION 1..9: note = XENP019853 vlCDR3
QQYGSSPWT

SEQ ID NO: 5813 - protein, 246 aa, synthetic construct
  REGION 1..246: note = Description of Artificial Sequence: Synthetic polypeptide
  REGION 1..246: note = XENP019854 [CTLA-4]_H0.106_L0_scFv(GKPGS)4
QVQLVESGGGVVQPGRSLRLSCAASGFTFSSYTMHWVRQAPGKGLEWVTFISYDGNNKYYADSVKGRFTISRDNSKNTLYLQMNSLRAEDTAIYYCARVGWLGPFDYWGQGTLVTVSSGKPGSGKPGSGKPGSGKPGSEIVLTQSPGTLSLSPGERATLSCRASQSVGSSYLAWYQQKPGQAPRLLIYGAFSRATGIPDRFSGSGSGTDFTLTISRLEPEDFAVYYCQQYGSSPWTFGQGTKVEIK

SEQ ID NO: 5814 - protein, 118 aa, synthetic construct
  REGION 1..118: note = Description of Artificial Sequence: Synthetic polypeptide
  REGION 1..118: note = VH of XENP019854
QVQLVESGGGVVQPGRSLRLSCAASGFTFSSYTMHWVRQAPGKGLEWVTFISYDGNNKYYADSVKGRFTISRDNSKNTLYLQMNSLRAEDTAIYYCARVGWLGPFDYWGQGTLVTVSS

SEQ ID NO: 5815 - protein, 108 aa, synthetic construct; identical to SEQ ID NO: 3741
  REGION 1..108: note = Description of Artificial Sequence: Synthetic polypeptide
  REGION 1..108: note = VL of XENP019854

SEQ ID NO: 5816 - protein, 5 aa, synthetic construct
  REGION 1..5: note = Description of Artificial Sequence: Synthetic peptide
  REGION 1..5: note = XENP019854 vhCDR1
SYTMH

SEQ ID NO: 5817 - protein, 17 aa, synthetic construct
  REGION 1..17: note = Description of Artificial Sequence: Synthetic peptide
  REGION 1..17: note = XENP019854 vhCDR2
FISYDGNNKYYADSVKG

SEQ ID NO: 5818 - protein, 9 aa, synthetic construct
  REGION 1..9: note = Description of Artificial Sequence: Synthetic peptide
  REGION 1..9: note = XENP019854 vhCDR3
VGWLGPFDY

SEQ ID NO: 5819 - protein, 12 aa, synthetic construct
  REGION 1..12: note = Description of Artificial Sequence: Synthetic peptide
  REGION 1..12: note = XENP019854 vlCDR1
RASQSVGSSYLA

SEQ ID NO: 5820 - protein, 7 aa, synthetic construct
  REGION 1..7: note = Description of Artificial Sequence: Synthetic peptide
  REGION 1..7: note = XENP019854 vlCDR2
GAFSRAT

SEQ ID NO: 5821 - protein, 9 aa, synthetic construct
  REGION 1..9: note = Description of Artificial Sequence: Synthetic peptide
  REGION 1..9: note = XENP019854 vlCDR3
QQYGSSPWT

SEQ ID NO: 5822 - protein, 246 aa, synthetic construct
  REGION 1..246: note = Description of Artificial Sequence: Synthetic polypeptide
  REGION 1..246: note = XENP019855 [CTLA-4]_H0.107_L0_scFv(GKPGS)4
QVQLVESGGGVVQPGRSLRLSCAASGFTFSSYTMHWVRQAPGKGLEWVTFISYDGNNKYYADSVKGRFTISRDNSKNTLYLQMNSLRAEDTAIYYCARYGWLGPFDYWGQGTLVTVSSGKPGSGKPGSGKPGSGKPGSEIVLTQSPGTLSLSPGERATLSCRASQSVGSSYLAWYQQKPGQAPRLLIYGAFSRATGIPDRFSGSGSGTDFTLTISRLEPEDFAVYYCQQYGSSPWTFGQGTKVEIK

SEQ ID NO: 5823 - protein, 118 aa, synthetic construct
  REGION 1..118: note = Description of Artificial Sequence: Synthetic polypeptide
  REGION 1..118: note = VH of XENP019855
QVQLVESGGGVVQPGRSLRLSCAASGFTFSSYTMHWVRQAPGKGLEWVTFISYDGNNKYYADSVKGRFTISRDNSKNTLYLQMNSLRAEDTAIYYCARYGWLGPFDYWGQGTLVTVSS

SEQ ID NO: 5824 - protein, 108 aa, synthetic construct; identical to SEQ ID NO: 3741
  REGION 1..108: note = Description of Artificial Sequence: Synthetic polypeptide
  REGION 1..108: note = VL of XENP019855

SEQ ID NO: 5825 - protein, 5 aa, synthetic construct
  REGION 1..5: note = Description of Artificial Sequence: Synthetic peptide
  REGION 1..5: note = XENP019855 vhCDR1
SYTMH

SEQ ID NO: 5826 - protein, 17 aa, synthetic construct
  REGION 1..17: note = Description of Artificial Sequence: Synthetic peptide
  REGION 1..17: note = XENP019855 vhCDR2
FISYDGNNKYYADSVKG

SEQ ID NO: 5827 - protein, 9 aa, synthetic construct
  REGION 1..9: note = Description of Artificial Sequence: Synthetic peptide
  REGION 1..9: note = XENP019855 vhCDR3
YGWLGPFDY

SEQ ID NO: 5828 - protein, 12 aa, synthetic construct
  REGION 1..12: note = Description of Artificial Sequence: Synthetic peptide
  REGION 1..12: note = XENP019855 vlCDR1
RASQSVGSSYLA

SEQ ID NO: 5829 - protein, 7 aa, synthetic construct
  REGION 1..7: note = Description of Artificial Sequence: Synthetic peptide
  REGION 1..7: note = XENP019855 vlCDR2
GAFSRAT

SEQ ID NO: 5830 - protein, 9 aa, synthetic construct
  REGION 1..9: note = Description of Artificial Sequence: Synthetic peptide
  REGION 1..9: note = XENP019855 vlCDR3
QQYGSSPWT

SEQ ID NO: 5831 - protein, 246 aa, synthetic construct
  REGION 1..246: note = Description of Artificial Sequence: Synthetic polypeptide
  REGION 1..246: note = XENP019856 [CTLA-4]_H0.108_L0_scFv(GKPGS)4
QVQLVESGGGVVQPGRSLRLSCAASGFTFSSYTMHWVRQAPGKGLEWVTFISYDGNNKYYADSVKGRFTISRDNSKNTLYLQMNSLRAEDTAIYYCARTAWLGPFDYWGQGTLVTVSSGKPGSGKPGSGKPGSGKPGSEIVLTQSPGTLSLSPGERATLSCRASQSVGSSYLAWYQQKPGQAPRLLIYGAFSRATGIPDRFSGSGSGTDFTLTISRLEPEDFAVYYCQQYGSSPWTFGQGTKVEIK

SEQ ID NO: 5832 - protein, 118 aa, synthetic construct
  REGION 1..118: note = Description of Artificial Sequence: Synthetic polypeptide
  REGION 1..118: note = VH of XENP019856
QVQLVESGGGVVQPGRSLRLSCAASGFTFSSYTMHWVRQAPGKGLEWVTFISYDGNNKYYADSVKGRFTISRDNSKNTLYLQMNSLRAEDTAIYYCARTAWLGPFDYWGQGTLVTVSS

SEQ ID NO: 5833 - protein, 108 aa, synthetic construct; identical to SEQ ID NO: 3741
  REGION 1..108: note = Description of Artificial Sequence: Synthetic polypeptide
  REGION 1..108: note = VL of XENP019856

SEQ ID NO: 5834 - protein, 5 aa, synthetic construct
  REGION 1..5: note = Description of Artificial Sequence: Synthetic peptide
  REGION 1..5: note = XENP019856 vhCDR1
SYTMH

SEQ ID NO: 5835 - protein, 17 aa, synthetic construct
  REGION 1..17: note = Description of Artificial Sequence: Synthetic peptide
  REGION 1..17: note = XENP019856 vhCDR2
FISYDGNNKYYADSVKG

SEQ ID NO: 5836 - protein, 9 aa, synthetic construct
  REGION 1..9: note = Description of Artificial Sequence: Synthetic peptide
  REGION 1..9: note = XENP019856 vhCDR3
TAWLGPFDY

SEQ ID NO: 5837 - protein, 12 aa, synthetic construct
  REGION 1..12: note = Description of Artificial Sequence: Synthetic peptide
  REGION 1..12: note = XENP019856 vlCDR1
RASQSVGSSYLA

SEQ ID NO: 5838 - protein, 7 aa, synthetic construct
  REGION 1..7: note = Description of Artificial Sequence: Synthetic peptide
  REGION 1..7: note = XENP019856 vlCDR2
GAFSRAT

SEQ ID NO: 5839 - protein, 9 aa, synthetic construct
  REGION 1..9: note = Description of Artificial Sequence: Synthetic peptide
  REGION 1..9: note = XENP019856 vlCDR3
QQYGSSPWT

SEQ ID NO: 5840 - protein, 246 aa, synthetic construct
  REGION 1..246: note = Description of Artificial Sequence: Synthetic polypeptide
  REGION 1..246: note = XENP019857 [CTLA-4]_H0.109_L0_scFv(GKPGS)4
QVQLVESGGGVVQPGRSLRLSCAASGFTFSSYTMHWVRQAPGKGLEWVTFISYDGNNKYYADSVKGRFTISRDNSKNTLYLQMNSLRAEDTAIYYCARTSWLGPFDYWGQGTLVTVSSGKPGSGKPGSGKPGSGKPGSEIVLTQSPGTLSLSPGERATLSCRASQSVGSSYLAWYQQKPGQAPRLLIYGAFSRATGIPDRFSGSGSGTDFTLTISRLEPEDFAVYYCQQYGSSPWTFGQGTKVEIK

SEQ ID NO: 5841 - protein, 118 aa, synthetic construct
  REGION 1..118: note = Description of Artificial Sequence: Synthetic polypeptide
  REGION 1..118: note = VH of XENP019857
QVQLVESGGGVVQPGRSLRLSCAASGFTFSSYTMHWVRQAPGKGLEWVTFISYDGNNKYYADSVKGRFTISRDNSKNTLYLQMNSLRAEDTAIYYCARTSWLGPFDYWGQGTLVTVSS

SEQ ID NO: 5842 - protein, 108 aa, synthetic construct; identical to SEQ ID NO: 3741
  REGION 1..108: note = Description of Artificial Sequence: Synthetic polypeptide
  REGION 1..108: note = VL of XENP019857

SEQ ID NO: 5843 - protein, 5 aa, synthetic construct
  REGION 1..5: note = Description of Artificial Sequence: Synthetic peptide
  REGION 1..5: note = XENP019857 vhCDR1
SYTMH

SEQ ID NO: 5844 - protein, 17 aa, synthetic construct
  REGION 1..17: note = Description of Artificial Sequence: Synthetic peptide
  REGION 1..17: note = XENP019857 vhCDR2
FISYDGNNKYYADSVKG

SEQ ID NO: 5845 - protein, 9 aa, synthetic construct
  REGION 1..9: note = Description of Artificial Sequence: Synthetic peptide
  REGION 1..9: note = XENP019857 vhCDR3
TSWLGPFDY

SEQ ID NO: 5846 - protein, 12 aa, synthetic construct
  REGION 1..12: note = Description of Artificial Sequence: Synthetic peptide
  REGION 1..12: note = XENP019857 vlCDR1
RASQSVGSSYLA

SEQ ID NO: 5847 - protein, 7 aa, synthetic construct
  REGION 1..7: note = Description of Artificial Sequence: Synthetic peptide
  REGION 1..7: note = XENP019857 vlCDR2
GAFSRAT

SEQ ID NO: 5848 - protein, 9 aa, synthetic construct
  REGION 1..9: note = Description of Artificial Sequence: Synthetic peptide
  REGION 1..9: note = XENP019857 vlCDR3
QQYGSSPWT

SEQ ID NO: 5849 - protein, 246 aa, synthetic construct
  REGION 1..246: note = Description of Artificial Sequence: Synthetic polypeptide
  REGION 1..246: note = XENP019858 [CTLA-4]_H0.110_L0_scFv(GKPGS)4
QVQLVESGGGVVQPGRSLRLSCAASGFTFSSYTMHWVRQAPGKGLEWVTFISYDGNNKYYADSVKGRFTISRDNSKNTLYLQMNSLRAEDTAIYYCARTTWLGPFDYWGQGTLVTVSSGKPGSGKPGSGKPGSGKPGSEIVLTQSPGTLSLSPGERATLSCRASQSVGSSYLAWYQQKPGQAPRLLIYGAFSRATGIPDRFSGSGSGTDFTLTISRLEPEDFAVYYCQQYGSSPWTFGQGTKVEIK

SEQ ID NO: 5850 - protein, 118 aa, synthetic construct
  REGION 1..118: note = Description of Artificial Sequence: Synthetic polypeptide
  REGION 1..118: note = VH of XENP019858
QVQLVESGGGVVQPGRSLRLSCAASGFTFSSYTMHWVRQAPGKGLEWVTFISYDGNNKYYADSVKGRFTISRDNSKNTLYLQMNSLRAEDTAIYYCARTTWLGPFDYWGQGTLVTVSS

SEQ ID NO: 5851 - protein, 108 aa, synthetic construct; identical to SEQ ID NO: 3741
  REGION 1..108: note = Description of Artificial Sequence: Synthetic polypeptide
  REGION 1..108: note = VL of XENP019858

SEQ ID NO: 5852 - protein, 5 aa, synthetic construct
  REGION 1..5: note = Description of Artificial Sequence: Synthetic peptide
  REGION 1..5: note = XENP019858 vhCDR1
SYTMH

SEQ ID NO: 5853 - protein, 17 aa, synthetic construct
  REGION 1..17: note = Description of Artificial Sequence: Synthetic peptide
  REGION 1..17: note = XENP019858 vhCDR2
FISYDGNNKYYADSVKG

SEQ ID NO: 5854 - protein, 9 aa, synthetic construct
  REGION 1..9: note = Description of Artificial Sequence: Synthetic peptide
  REGION 1..9: note = XENP019858 vhCDR3
TTWLGPFDY

SEQ ID NO: 5855 - protein, 12 aa, synthetic construct
  REGION 1..12: note = Description of Artificial Sequence: Synthetic peptide
  REGION 1..12: note = XENP019858 vlCDR1
RASQSVGSSYLA

SEQ ID NO: 5856 - protein, 7 aa, synthetic construct
  REGION 1..7: note = Description of Artificial Sequence: Synthetic peptide
  REGION 1..7: note = XENP019858 vlCDR2
GAFSRAT

SEQ ID NO: 5857 - protein, 9 aa, synthetic construct
  REGION 1..9: note = Description of Artificial Sequence: Synthetic peptide
  REGION 1..9: note = XENP019858 vlCDR3
QQYGSSPWT

SEQ ID NO: 5858 - protein, 246 aa, synthetic construct
  REGION 1..246: note = Description of Artificial Sequence: Synthetic polypeptide
  REGION 1..246: note = XENP019859 [CTLA-4]_H0.111_L0_scFv(GKPGS)4
QVQLVESGGGVVQPGRSLRLSCAASGFTFSSYTMHWVRQAPGKGLEWVTFISYDGNNKYYADSVKGRFTISRDNSKNTLYLQMNSLRAEDTAIYYCARTGFLGPFDYWGQGTLVTVSSGKPGSGKPGSGKPGSGKPGSEIVLTQSPGTLSLSPGERATLSCRASQSVGSSYLAWYQQKPGQAPRLLIYGAFSRATGIPDRFSGSGSGTDFTLTISRLEPEDFAVYYCQQYGSSPWTFGQGTKVEIK

SEQ ID NO: 5859 - protein, 118 aa, synthetic construct
  REGION 1..118: note = Description of Artificial Sequence: Synthetic polypeptide
  REGION 1..118: note = VH of XENP019859
QVQLVESGGGVVQPGRSLRLSCAASGFTFSSYTMHWVRQAPGKGLEWVTFISYDGNNKYYADSVKGRFTISRDNSKNTLYLQMNSLRAEDTAIYYCARTGFLGPFDYWGQGTLVTVSS

SEQ ID NO: 5860 - protein, 108 aa, synthetic construct; identical to SEQ ID NO: 3741
  REGION 1..108: note = Description of Artificial Sequence: Synthetic polypeptide
  REGION 1..108: note = VL of XENP019859

SEQ ID NO: 5861 - protein, 5 aa, synthetic construct
  REGION 1..5: note = Description of Artificial Sequence: Synthetic peptide
  REGION 1..5: note = XENP019859 vhCDR1
SYTMH

SEQ ID NO: 5862 - protein, 17 aa, synthetic construct
  REGION 1..17: note = Description of Artificial Sequence: Synthetic peptide
  REGION 1..17: note = XENP019859 vhCDR2
FISYDGNNKYYADSVKG

SEQ ID NO: 5863 - protein, 9 aa, synthetic construct
  REGION 1..9: note = Description of Artificial Sequence: Synthetic peptide
  REGION 1..9: note = XENP019859 vhCDR3
TGFLGPFDY

SEQ ID NO: 5864 - protein, 12 aa, synthetic construct
  REGION 1..12: note = Description of Artificial Sequence: Synthetic peptide
  REGION 1..12: note = XENP019859 vlCDR1
RASQSVGSSYLA

SEQ ID NO: 5865 - protein, 7 aa, synthetic construct
  REGION 1..7: note = Description of Artificial Sequence: Synthetic peptide
  REGION 1..7: note = XENP019859 vlCDR2
GAFSRAT

SEQ ID NO: 5866 - protein, 9 aa, synthetic construct
  REGION 1..9: note = Description of Artificial Sequence: Synthetic peptide
  REGION 1..9: note = XENP019859 vlCDR3
QQYGSSPWT

SEQ ID NO: 5867 - protein, 246 aa, synthetic construct
  REGION 1..246: note = Description of Artificial Sequence: Synthetic polypeptide
  REGION 1..246: note = XENP019860 [CTLA-4]_H0.112_L0_scFv(GKPGS)4
QVQLVESGGGVVQPGRSLRLSCAASGFTFSSYTMHWVRQAPGKGLEWVTFISYDGNNKYYADSVKGRFTISRDNSKNTLYLQMNSLRAEDTAIYYCARTGGLGPFDYWGQGTLVTVSSGKPGSGKPGSGKPGSGKPGSEIVLTQSPGTLSLSPGERATLSCRASQSVGSSYLAWYQQKPGQAPRLLIYGAFSRATGIPDRFSGSGSGTDFTLTISRLEPEDFAVYYCQQYGSSPWTFGQGTKVEIK

SEQ ID NO: 5868 - protein, 118 aa, synthetic construct
  REGION 1..118: note = Description of Artificial Sequence: Synthetic polypeptide
  REGION 1..118: note = VH of XENP019860
QVQLVESGGGVVQPGRSLRLSCAASGFTFSSYTMHWVRQAPGKGLEWVTFISYDGNNKYYADSVKGRFTISRDNSKNTLYLQMNSLRAEDTAIYYCARTGGLGPFDYWGQGTLVTVSS

SEQ ID NO: 5869 - protein, 108 aa, synthetic construct; identical to SEQ ID NO: 3741
  REGION 1..108: note = Description of Artificial Sequence: Synthetic polypeptide
  REGION 1..108: note = VL of XENP019860

SEQ ID NO: 5870 - protein, 5 aa, synthetic construct
  REGION 1..5: note = Description of Artificial Sequence: Synthetic peptide
  REGION 1..5: note = XENP019860 vhCDR1
SYTMH

SEQ ID NO: 5871 - protein, 17 aa, synthetic construct
  REGION 1..17: note = Description of Artificial Sequence: Synthetic peptide
  REGION 1..17: note = XENP019860 vhCDR2
FISYDGNNKYYADSVKG

SEQ ID NO: 5872 - protein, 9 aa, synthetic construct
  REGION 1..9: note = Description of Artificial Sequence: Synthetic peptide
  REGION 1..9: note = XENP019860 vhCDR3
TGGLGPFDY

SEQ ID NO: 5873 - protein, 12 aa, synthetic construct
  REGION 1..12: note = Description of Artificial Sequence: Synthetic peptide
  REGION 1..12: note = XENP019860 vlCDR1
RASQSVGSSYLA

SEQ ID NO: 5874 - protein, 7 aa, synthetic construct
  REGION 1..7: note = Description of Artificial Sequence: Synthetic peptide
  REGION 1..7: note = XENP019860 vlCDR2
GAFSRAT

SEQ ID NO: 5875 - protein, 9 aa, synthetic construct
  REGION 1..9: note = Description of Artificial Sequence: Synthetic peptide
  REGION 1..9: note = XENP019860 vlCDR3
QQYGSSPWT

SEQ ID NO: 5876 - protein, 246 aa, synthetic construct
  REGION 1..246: note = Description of Artificial Sequence: Synthetic polypeptide
  REGION 1..246: note = XENP019861 [CTLA-4]_H0.113_L0_scFv(GKPGS)4
QVQLVESGGGVVQPGRSLRLSCAASGFTFSSYTMHWVRQAPGKGLEWVTFISYDGNNKYYADSVKGRFTISRDNSKNTLYLQMNSLRAEDTAIYYCARTGHLGPFDYWGQGTLVTVSSGKPGSGKPGSGKPGSGKPGSEIVLTQSPGTLSLSPGERATLSCRASQSVGSSYLAWYQQKPGQAPRLLIYGAFSRATGIPDRFSGSGSGTDFTLTISRLEPEDFAVYYCQQYGSSPWTFGQGTKVEIK

SEQ ID NO: 5877 - protein, 118 aa, synthetic construct
  REGION 1..118: note = Description of Artificial Sequence: Synthetic polypeptide
  REGION 1..118: note = VH of XENP019861
QVQLVESGGGVVQPGRSLRLSCAASGFTFSSYTMHWVRQAPGKGLEWVTFISYDGNNKYYADSVKGRFTISRDNSKNTLYLQMNSLRAEDTAIYYCARTGHLGPFDYWGQGTLVTVSS

SEQ ID NO: 5878 - protein, 108 aa, synthetic construct; identical to SEQ ID NO: 3741
  REGION 1..108: note = Description of Artificial Sequence: Synthetic polypeptide
  REGION 1..108: note = VL of XENP019861

SEQ ID NO: 5879 - protein, 5 aa, synthetic construct
  REGION 1..5: note = Description of Artificial Sequence: Synthetic peptide
  REGION 1..5: note = XENP019861 vhCDR1
SYTMH

SEQ ID NO: 5880 - protein, 17 aa, synthetic construct
  REGION 1..17: note = Description of Artificial Sequence: Synthetic peptide
  REGION 1..17: note = XENP019861 vhCDR2
FISYDGNNKYYADSVKG

SEQ ID NO: 5881 - protein, 9 aa, synthetic construct
  REGION 1..9: note = Description of Artificial Sequence: Synthetic peptide
  REGION 1..9: note = XENP019861 vhCDR3
TGHLGPFDY

SEQ ID NO: 5882 - protein, 12 aa, synthetic construct
  REGION 1..12: note = Description of Artificial Sequence: Synthetic peptide
  REGION 1..12: note = XENP019861 vlCDR1
RASQSVGSSYLA

SEQ ID NO: 5883 - protein, 7 aa, synthetic construct
  REGION 1..7: note = Description of Artificial Sequence: Synthetic peptide
  REGION 1..7: note = XENP019861 vlCDR2
GAFSRAT

SEQ ID NO: 5884 - protein, 9 aa, synthetic construct
  REGION 1..9: note = Description of Artificial Sequence: Synthetic peptide
  REGION 1..9: note = XENP019861 vlCDR3
QQYGSSPWT

SEQ ID NO: 5885 - protein, 246 aa, synthetic construct
  REGION 1..246: note = Description of Artificial Sequence: Synthetic polypeptide
  REGION 1..246: note = XENP019862 [CTLA-4]_H0.114_L0_scFv(GKPGS)4
QVQLVESGGGVVQPGRSLRLSCAASGFTFSSYTMHWVRQAPGKGLEWVTFISYDGNNKYYADSVKGRFTISRDNSKNTLYLQMNSLRAEDTAIYYCARTGLLGPFDYWGQGTLVTVSSGKPGSGKPGSGKPGSGKPGSEIVLTQSPGTLSLSPGERATLSCRASQSVGSSYLAWYQQKPGQAPRLLIYGAFSRATGIPDRFSGSGSGTDFTLTISRLEPEDFAVYYCQQYGSSPWTFGQGTKVEIK

SEQ ID NO: 5886 - protein, 118 aa, synthetic construct
  REGION 1..118: note = Description of Artificial Sequence: Synthetic polypeptide
  REGION 1..118: note = VH of XENP019862
QVQLVESGGGVVQPGRSLRLSCAASGFTFSSYTMHWVRQAPGKGLEWVTFISYDGNNKYYADSVKGRFTISRDNSKNTLYLQMNSLRAEDTAIYYCARTGLLGPFDYWGQGTLVTVSS

SEQ ID NO: 5887 - protein, 108 aa, synthetic construct; identical to SEQ ID NO: 3741
  REGION 1..108: note = Description of Artificial Sequence: Synthetic polypeptide
  REGION 1..108: note = VL of XENP019862

SEQ ID NO: 5888 - protein, 5 aa, synthetic construct
  REGION 1..5: note = Description of Artificial Sequence: Synthetic peptide
  REGION 1..5: note = XENP019862 vhCDR1
SYTMH

SEQ ID NO: 5889 - protein, 17 aa, synthetic construct
  REGION 1..17: note = Description of Artificial Sequence: Synthetic peptide
  REGION 1..17: note = XENP019862 vhCDR2
FISYDGNNKYYADSVKG

SEQ ID NO: 5890 - protein, 9 aa, synthetic construct
  REGION 1..9: note = Description of Artificial Sequence: Synthetic peptide
  REGION 1..9: note = XENP019862 vhCDR3
TGLLGPFDY

SEQ ID NO: 5891 - protein, 12 aa, synthetic construct
  REGION 1..12: note = Description of Artificial Sequence: Synthetic peptide
  REGION 1..12: note = XENP019862 vlCDR1
RASQSVGSSYLA

SEQ ID NO: 5892 - protein, 7 aa, synthetic construct
  REGION 1..7: note = Description of Artificial Sequence: Synthetic peptide
  REGION 1..7: note = XENP019862 vlCDR2
GAFSRAT

SEQ ID NO: 5893 - protein, 9 aa, synthetic construct
  REGION 1..9: note = Description of Artificial Sequence: Synthetic peptide
  REGION 1..9: note = XENP019862 vlCDR3
QQYGSSPWT

SEQ ID NO: 5894 - protein, 246 aa, synthetic construct
  REGION 1..246: note = Description of Artificial Sequence: Synthetic polypeptide
  REGION 1..246: note = XENP019863 [CTLA-4]_H0.115_L0_scFv(GKPGS)4
QVQLVESGGGVVQPGRSLRLSCAASGFTFSSYTMHWVRQAPGKGLEWVTFISYDGNNKYYADSVKGRFTISRDNSKNTLYLQMNSLRAEDTAIYYCARTGYLGPFDYWGQGTLVTVSSGKPGSGKPGSGKPGSGKPGSEIVLTQSPGTLSLSPGERATLSCRASQSVGSSYLAWYQQKPGQAPRLLIYGAFSRATGIPDRFSGSGSGTDFTLTISRLEPEDFAVYYCQQYGSSPWTFGQGTKVEIK

SEQ ID NO: 5895 - protein, 118 aa, synthetic construct
  REGION 1..118: note = Description of Artificial Sequence: Synthetic polypeptide
  REGION 1..118: note = VH of XENP019863
QVQLVESGGGVVQPGRSLRLSCAASGFTFSSYTMHWVRQAPGKGLEWVTFISYDGNNKYYADSVKGRFTISRDNSKNTLYLQMNSLRAEDTAIYYCARTGYLGPFDYWGQGTLVTVSS

SEQ ID NO: 5896 - protein, 108 aa, synthetic construct; identical to SEQ ID NO: 3741
  REGION 1..108: note = Description of Artificial Sequence: Synthetic polypeptide
  REGION 1..108: note = VL of XENP019863

SEQ ID NO: 5897 - protein, 5 aa, synthetic construct
  REGION 1..5: note = Description of Artificial Sequence: Synthetic peptide
  REGION 1..5: note = XENP019863 vhCDR1
SYTMH

SEQ ID NO: 5898 - protein, 17 aa, synthetic construct
  REGION 1..17: note = Description of Artificial Sequence: Synthetic peptide
  REGION 1..17: note = XENP019863 vhCDR2
FISYDGNNKYYADSVKG

SEQ ID NO: 5899 - protein, 9 aa, synthetic construct
  REGION 1..9: note = Description of Artificial Sequence: Synthetic peptide
  REGION 1..9: note = XENP019863 vhCDR3
TGYLGPFDY

SEQ ID NO: 5900 - protein, 12 aa, synthetic construct
  REGION 1..12: note = Description of Artificial Sequence: Synthetic peptide
  REGION 1..12: note = XENP019863 vlCDR1
RASQSVGSSYLA

SEQ ID NO: 5901 - protein, 7 aa, synthetic construct
  REGION 1..7: note = Description of Artificial Sequence: Synthetic peptide
  REGION 1..7: note = XENP019863 vlCDR2
GAFSRAT

SEQ ID NO: 5902 - protein, 9 aa, synthetic construct
  REGION 1..9: note = Description of Artificial Sequence: Synthetic peptide
  REGION 1..9: note = XENP019863 vlCDR3
QQYGSSPWT

SEQ ID NO: 5903 - protein, 246 aa, synthetic construct
  REGION 1..246: note = Description of Artificial Sequence: Synthetic polypeptide
  REGION 1..246: note = XENP019864 [CTLA-4]_H0.116_L0_scFv(GKPGS)4
QVQLVESGGGVVQPGRSLRLSCAASGFTFSSYTMHWVRQAPGKGLEWVTFISYDGNNKYYADSVKGRFTISRDNSKNTLYLQMNSLRAEDTAIYYCARTGWDGPFDYWGQGTLVTVSSGKPGSGKPGSGKPGSGKPGSEIVLTQSPGTLSLSPGERATLSCRASQSVGSSYLAWYQQKPGQAPRLLIYGAFSRATGIPDRFSGSGSGTDFTLTISRLEPEDFAVYYCQQYGSSPWTFGQGTKVEIK

SEQ ID NO: 5904 - protein, 118 aa, synthetic construct
  REGION 1..118: note = Description of Artificial Sequence: Synthetic polypeptide
  REGION 1..118: note = VH of XENP019864
QVQLVESGGGVVQPGRSLRLSCAASGFTFSSYTMHWVRQAPGKGLEWVTFISYDGNNKYYADSVKGRFTISRDNSKNTLYLQMNSLRAEDTAIYYCARTGWDGPFDYWGQGTLVTVSS

SEQ ID NO: 5905 - protein, 108 aa, synthetic construct; identical to SEQ ID NO: 3741
  REGION 1..108: note = Description of Artificial Sequence: Synthetic polypeptide
  REGION 1..108: note = VL of XENP019864

SEQ ID NO: 5906 - protein, 5 aa, synthetic construct
  REGION 1..5: note = Description of Artificial Sequence: Synthetic peptide
  REGION 1..5: note = XENP019864 vhCDR1
SYTMH

SEQ ID NO: 5907 - protein, 17 aa, synthetic construct
  REGION 1..17: note = Description of Artificial Sequence: Synthetic peptide
  REGION 1..17: note = XENP019864 vhCDR2
FISYDGNNKYYADSVKG

SEQ ID NO: 5908 - protein, 9 aa, synthetic construct
  REGION 1..9: note = Description of Artificial Sequence: Synthetic peptide
  REGION 1..9: note = XENP019864 vhCDR3
TGWDGPFDY

SEQ ID NO: 5909 - protein, 12 aa, synthetic construct
  REGION 1..12: note = Description of Artificial Sequence: Synthetic peptide
  REGION 1..12: note = XENP019864 vlCDR1
RASQSVGSSYLA

SEQ ID NO: 5910 - protein, 7 aa, synthetic construct
  REGION 1..7: note = Description of Artificial Sequence: Synthetic peptide
  REGION 1..7: note = XENP019864 vlCDR2
GAFSRAT

SEQ ID NO: 5911 - protein, 9 aa, synthetic construct
  REGION 1..9: note = Description of Artificial Sequence: Synthetic peptide
  REGION 1..9: note = XENP019864 vlCDR3
QQYGSSPWT

SEQ ID NO: 5912 - protein, 246 aa, synthetic construct
  REGION 1..246: note = Description of Artificial Sequence: Synthetic polypeptide
  REGION 1..246: note = XENP019865 [CTLA-4]_H0.117_L0_scFv(GKPGS)4
QVQLVESGGGVVQPGRSLRLSCAASGFTFSSYTMHWVRQAPGKGLEWVTFISYDGNNKYYADSVKGRFTISRDNSKNTLYLQMNSLRAEDTAIYYCARTGWIGPFDYWGQGTLVTVSSGKPGSGKPGSGKPGSGKPGSEIVLTQSPGTLSLSPGERATLSCRASQSVGSSYLAWYQQKPGQAPRLLIYGAFSRATGIPDRFSGSGSGTDFTLTISRLEPEDFAVYYCQQYGSSPWTFGQGTKVEIK

SEQ ID NO: 5913 - protein, 118 aa, synthetic construct
  REGION 1..118: note = Description of Artificial Sequence: Synthetic polypeptide
  REGION 1..118: note = VH of XENP019865
QVQLVESGGGVVQPGRSLRLSCAASGFTFSSYTMHWVRQAPGKGLEWVTFISYDGNNKYYADSVKGRFTISRDNSKNTLYLQMNSLRAEDTAIYYCARTGWIGPFDYWGQGTLVTVSS

SEQ ID NO: 5914 - protein, 108 aa, synthetic construct; identical to SEQ ID NO: 3741
  REGION 1..108: note = Description of Artificial Sequence: Synthetic polypeptide
  REGION 1..108: note = VL of XENP019865

SEQ ID NO: 5915 - protein, 5 aa, synthetic construct
  REGION 1..5: note = Description of Artificial Sequence: Synthetic peptide
  REGION 1..5: note = XENP019865 vhCDR1
SYTMH

SEQ ID NO: 5916 - protein, 17 aa, synthetic construct
  REGION 1..17: note = Description of Artificial Sequence: Synthetic peptide
  REGION 1..17: note = XENP019865 vhCDR2
FISYDGNNKYYADSVKG

SEQ ID NO: 5917 - protein, 9 aa, synthetic construct
  REGION 1..9: note = Description of Artificial Sequence: Synthetic peptide
  REGION 1..9: note = XENP019865 vhCDR3
TGWIGPFDY

SEQ ID NO: 5918 - protein, 12 aa, synthetic construct
  REGION 1..12: note = Description of Artificial Sequence: Synthetic peptide
  REGION 1..12: note = XENP019865 vlCDR1
RASQSVGSSYLA

SEQ ID NO: 5919 - protein, 7 aa, synthetic construct
  REGION 1..7: note = Description of Artificial Sequence: Synthetic peptide
  REGION 1..7: note = XENP019865 vlCDR2
GAFSRAT

SEQ ID NO: 5920 - protein, 9 aa, synthetic construct
  REGION 1..9: note = Description of Artificial Sequence: Synthetic peptide
  REGION 1..9: note = XENP019865 vlCDR3
QQYGSSPWT

SEQ ID NO: 5921 - protein, 246 aa, synthetic construct
  REGION 1..246: note = Description of Artificial Sequence: Synthetic polypeptide
  REGION 1..246: note = XENP019866 [CTLA-4]_H0.118_L0_scFv(GKPGS)4
QVQLVESGGGVVQPGRSLRLSCAASGFTFSSYTMHWVRQAPGKGLEWVTFISYDGNNKYYADSVKGRFTISRDNSKNTLYLQMNSLRAEDTAIYYCARTGWVGPFDYWGQGTLVTVSSGKPGSGKPGSGKPGSGKPGSEIVLTQSPGTLSLSPGERATLSCRASQSVGSSYLAWYQQKPGQAPRLLIYGAFSRATGIPDRFSGSGSGTDFTLTISRLEPEDFAVYYCQQYGSSPWTFGQGTKVEIK

SEQ ID NO: 5922 - protein, 118 aa, synthetic construct
  REGION 1..118: note = Description of Artificial Sequence: Synthetic polypeptide
  REGION 1..118: note = VH of XENP019866
QVQLVESGGGVVQPGRSLRLSCAASGFTFSSYTMHWVRQAPGKGLEWVTFISYDGNNKYYADSVKGRFTISRDNSKNTLYLQMNSLRAEDTAIYYCARTGWVGPFDYWGQGTLVTVSS

SEQ ID NO: 5923 - protein, 108 aa, synthetic construct; identical to SEQ ID NO: 3741
  REGION 1..108: note = Description of Artificial Sequence: Synthetic polypeptide
  REGION 1..108: note = VL of XENP019866

SEQ ID NO: 5924 - protein, 5 aa, synthetic construct
  REGION 1..5: note = Description of Artificial Sequence: Synthetic peptide
  REGION 1..5: note = XENP019866 vhCDR1
SYTMH

SEQ ID NO: 5925 - protein, 17 aa, synthetic construct
  REGION 1..17: note = Description of Artificial Sequence: Synthetic peptide
  REGION 1..17: note = XENP019866 vhCDR2
FISYDGNNKYYADSVKG

SEQ ID NO: 5926 - protein, 9 aa, synthetic construct
  REGION 1..9: note = Description of Artificial Sequence: Synthetic peptide
  REGION 1..9: note = XENP019866 vhCDR3
TGWVGPFDY

SEQ ID NO: 5927 - protein, 12 aa, synthetic construct
  REGION 1..12: note = Description of Artificial Sequence: Synthetic peptide
  REGION 1..12: note = XENP019866 vlCDR1
RASQSVGSSYLA

SEQ ID NO: 5928 - protein, 7 aa, synthetic construct
  REGION 1..7: note = Description of Artificial Sequence: Synthetic peptide
  REGION 1..7: note = XENP019866 vlCDR2
GAFSRAT

SEQ ID NO: 5929 - protein, 9 aa, synthetic construct
  REGION 1..9: note = Description of Artificial Sequence: Synthetic peptide
  REGION 1..9: note = XENP019866 vlCDR3
QQYGSSPWT

SEQ ID NO: 5930 - protein, 246 aa, synthetic construct
  REGION 1..246: note = Description of Artificial Sequence: Synthetic polypeptide
  REGION 1..246: note = XENP019867 [CTLA-4]_H0.119_L0_scFv(GKPGS)4
QVQLVESGGGVVQPGRSLRLSCAASGFTFSSYTMHWVRQAPGKGLEWVTFISYDGNNKYYADSVKGRFTISRDNSKNTLYLQMNSLRAEDTAIYYCARTGWLAPFDYWGQGTLVTVSSGKPGSGKPGSGKPGSGKPGSEIVLTQSPGTLSLSPGERATLSCRASQSVGSSYLAWYQQKPGQAPRLLIYGAFSRATGIPDRFSGSGSGTDFTLTISRLEPEDFAVYYCQQYGSSPWTFGQGTKVEIK

SEQ ID NO: 5931 - protein, 118 aa, synthetic construct
  REGION 1..118: note = Description of Artificial Sequence: Synthetic polypeptide
  REGION 1..118: note = VH of XENP019867
QVQLVESGGGVVQPGRSLRLSCAASGFTFSSYTMHWVRQAPGKGLEWVTFISYDGNNKYYADSVKGRFTISRDNSKNTLYLQMNSLRAEDTAIYYCARTGWLAPFDYWGQGTLVTVSS

SEQ ID NO: 5932 - protein, 108 aa, synthetic construct; identical to SEQ ID NO: 3741
  REGION 1..108: note = Description of Artificial Sequence: Synthetic polypeptide
  REGION 1..108: note = VL of XENP019867

SEQ ID NO: 5933 - protein, 5 aa, synthetic construct
  REGION 1..5: note = Description of Artificial Sequence: Synthetic peptide
  REGION 1..5: note = XENP019867 vhCDR1
SYTMH

SEQ ID NO: 5934 - protein, 17 aa, synthetic construct
  REGION 1..17: note = Description of Artificial Sequence: Synthetic peptide
  REGION 1..17: note = XENP019867 vhCDR2
FISYDGNNKYYADSVKG

SEQ ID NO: 5935 - protein, 9 aa, synthetic construct
  REGION 1..9: note = Description of Artificial Sequence: Synthetic peptide
  REGION 1..9: note = XENP019867 vhCDR3
TGWLAPFDY

SEQ ID NO: 5936 - protein, 12 aa, synthetic construct
  REGION 1..12: note = Description of Artificial Sequence: Synthetic peptide
  REGION 1..12: note = XENP019867 vlCDR1
RASQSVGSSYLA

SEQ ID NO: 5937 - protein, 7 aa, synthetic construct
  REGION 1..7: note = Description of Artificial Sequence: Synthetic peptide
  REGION 1..7: note = XENP019867 vlCDR2
GAFSRAT

SEQ ID NO: 5938 - protein, 9 aa, synthetic construct
  REGION 1..9: note = Description of Artificial Sequence: Synthetic peptide
  REGION 1..9: note = XENP019867 vlCDR3
QQYGSSPWT

SEQ ID NO: 5939 - protein, 246 aa, synthetic construct
  REGION 1..246: note = Description of Artificial Sequence: Synthetic polypeptide
  REGION 1..246: note = XENP019868 [CTLA-4]_H0.120_L0_scFv(GKPGS)4
QVQLVESGGGVVQPGRSLRLSCAASGFTFSSYTMHWVRQAPGKGLEWVTFISYDGNNKYYADSVKGRFTISRDNSKNTLYLQMNSLRAEDTAIYYCARTGWLSPFDYWGQGTLVTVSSGKPGSGKPGSGKPGSGKPGSEIVLTQSPGTLSLSPGERATLSCRASQSVGSSYLAWYQQKPGQAPRLLIYGAFSRATGIPDRFSGSGSGTDFTLTISRLEPEDFAVYYCQQYGSSPWTFGQGTKVEIK

SEQ ID NO: 5940 - protein, 118 aa, synthetic construct
  REGION 1..118: note = Description of Artificial Sequence: Synthetic polypeptide
  REGION 1..118: note = VH of XENP019868
QVQLVESGGGVVQPGRSLRLSCAASGFTFSSYTMHWVRQAPGKGLEWVTFISYDGNNKYYADSVKGRFTISRDNSKNTLYLQMNSLRAEDTAIYYCARTGWLSPFDYWGQGTLVTVSS

SEQ ID NO: 5941 - protein, 108 aa, synthetic construct; identical to SEQ ID NO: 3741
  REGION 1..108: note = Description of Artificial Sequence: Synthetic polypeptide
  REGION 1..108: note = VL of XENP019868

SEQ ID NO: 5942 - protein, 5 aa, synthetic construct
  REGION 1..5: note = Description of Artificial Sequence: Synthetic peptide
  REGION 1..5: note = XENP019868 vhCDR1
SYTMH

SEQ ID NO: 5943 - protein, 17 aa, synthetic construct
  REGION 1..17: note = Description of Artificial Sequence: Synthetic peptide
  REGION 1..17: note = XENP019868 vhCDR2
FISYDGNNKYYADSVKG

SEQ ID NO: 5944 - protein, 9 aa, synthetic construct
  REGION 1..9: note = Description of Artificial Sequence: Synthetic peptide
  REGION 1..9: note = XENP019868 vhCDR3
TGWLSPFDY

SEQ ID NO: 5945 - protein, 12 aa, synthetic construct
  REGION 1..12: note = Description of Artificial Sequence: Synthetic peptide
  REGION 1..12: note = XENP019868 vlCDR1
RASQSVGSSYLA

SEQ ID NO: 5946 - protein, 7 aa, synthetic construct
  REGION 1..7: note = Description of Artificial Sequence: Synthetic peptide
  REGION 1..7: note = XENP019868 vlCDR2
GAFSRAT

SEQ ID NO: 5947 - protein, 9 aa, synthetic construct
  REGION 1..9: note = Description of Artificial Sequence: Synthetic peptide
  REGION 1..9: note = XENP019868 vlCDR3
QQYGSSPWT

SEQ ID NO: 5948 - protein, 246 aa, synthetic construct
  REGION 1..246: note = Description of Artificial Sequence: Synthetic polypeptide
  REGION 1..246: note = XENP019869 [CTLA-4]_H0.121_L0_scFv(GKPGS)4
QVQLVESGGGVVQPGRSLRLSCAASGFTFSSYTMHWVRQAPGKGLEWVTFISYDGNNKYYADSVKGRFTISRDNSKNTLYLQMNSLRAEDTAIYYCARTGWLTPFDYWGQGTLVTVSSGKPGSGKPGSGKPGSGKPGSEIVLTQSPGTLSLSPGERATLSCRASQSVGSSYLAWYQQKPGQAPRLLIYGAFSRATGIPDRFSGSGSGTDFTLTISRLEPEDFAVYYCQQYGSSPWTFGQGTKVEIK

SEQ ID NO: 5949 - protein, 118 aa, synthetic construct
  REGION 1..118: note = Description of Artificial Sequence: Synthetic polypeptide
  REGION 1..118: note = VH of XENP019869
QVQLVESGGGVVQPGRSLRLSCAASGFTFSSYTMHWVRQAPGKGLEWVTFISYDGNNKYYADSVKGRFTISRDNSKNTLYLQMNSLRAEDTAIYYCARTGWLTPFDYWGQGTLVTVSS

SEQ ID NO: 5950 - protein, 108 aa, synthetic construct; identical to SEQ ID NO: 3741
  REGION 1..108: note = Description of Artificial Sequence: Synthetic polypeptide
  REGION 1..108: note = VL of XENP019869

SEQ ID NO: 5951 - protein, 5 aa, synthetic construct
  REGION 1..5: note = Description of Artificial Sequence: Synthetic peptide
  REGION 1..5: note = XENP019869 vhCDR1
SYTMH

SEQ ID NO: 5952 - protein, 17 aa, synthetic construct
  REGION 1..17: note = Description of Artificial Sequence: Synthetic peptide
  REGION 1..17: note = XENP019869 vhCDR2
FISYDGNNKYYADSVKG

SEQ ID NO: 5953 - protein, 9 aa, synthetic construct
  REGION 1..9: note = Description of Artificial Sequence: Synthetic peptide
  REGION 1..9: note = XENP019869 vhCDR3
TGWLTPFDY

SEQ ID NO: 5954 - protein, 12 aa, synthetic construct
  REGION 1..12: note = Description of Artificial Sequence: Synthetic peptide
  REGION 1..12: note = XENP019869 vlCDR1
RASQSVGSSYLA

SEQ ID NO: 5955 - protein, 7 aa, synthetic construct
  REGION 1..7: note = Description of Artificial Sequence: Synthetic peptide
  REGION 1..7: note = XENP019869 vlCDR2
GAFSRAT

SEQ ID NO: 5956 - protein, 9 aa, synthetic construct
  REGION 1..9: note = Description of Artificial Sequence: Synthetic peptide
  REGION 1..9: note = XENP019869 vlCDR3
QQYGSSPWT

SEQ ID NO: 5957 - protein, 246 aa, synthetic construct
  REGION 1..246: note = Description of Artificial Sequence: Synthetic polypeptide
  REGION 1..246: note = XENP019870 [CTLA-4]_H0.122_L0_scFv(GKPGS)4
QVQLVESGGGVVQPGRSLRLSCAASGFTFSSYTMHWVRQAPGKGLEWVTFISYDGNNKYYADSVKGRFTISRDNSKNTLYLQMNSLRAEDTAIYYCARTGWLGPLDYWGQGTLVTVSSGKPGSGKPGSGKPGSGKPGSEIVLTQSPGTLSLSPGERATLSCRASQSVGSSYLAWYQQKPGQAPRLLIYGAFSRATGIPDRFSGSGSGTDFTLTISRLEPEDFAVYYCQQYGSSPWTFGQGTKVEIK

SEQ ID NO: 5958 - protein, 118 aa, synthetic construct
  REGION 1..118: note = Description of Artificial Sequence: Synthetic polypeptide
  REGION 1..118: note = VH of XENP019870
QVQLVESGGGVVQPGRSLRLSCAASGFTFSSYTMHWVRQAPGKGLEWVTFISYDGNNKYYADSVKGRFTISRDNSKNTLYLQMNSLRAEDTAIYYCARTGWLGPLDYWGQGTLVTVSS

SEQ ID NO: 5959 - protein, 108 aa, synthetic construct; identical to SEQ ID NO: 3741
  REGION 1..108: note = Description of Artificial Sequence: Synthetic polypeptide
  REGION 1..108: note = VL of XENP019870

SEQ ID NO: 5960 - protein, 5 aa, synthetic construct
  REGION 1..5: note = Description of Artificial Sequence: Synthetic peptide
  REGION 1..5: note = XENP019870 vhCDR1
SYTMH

SEQ ID NO: 5961 - protein, 17 aa, synthetic construct
  REGION 1..17: note = Description of Artificial Sequence: Synthetic peptide
  REGION 1..17: note = XENP019870 vhCDR2
FISYDGNNKYYADSVKG

SEQ ID NO: 5962 - protein, 9 aa, synthetic construct
  REGION 1..9: note = Description of Artificial Sequence: Synthetic peptide
  REGION 1..9: note = XENP019870 vhCDR3
TGWLGPLDY

SEQ ID NO: 5963 - protein, 12 aa, synthetic construct
  REGION 1..12: note = Description of Artificial Sequence: Synthetic peptide
  REGION 1..12: note = XENP019870 vlCDR1
RASQSVGSSYLA

SEQ ID NO: 5964 - protein, 7 aa, synthetic construct
  REGION 1..7: note = Description of Artificial Sequence: Synthetic peptide
  REGION 1..7: note = XENP019870 vlCDR2
GAFSRAT

SEQ ID NO: 5965 - protein, 9 aa, synthetic construct
  REGION 1..9: note = Description of Artificial Sequence: Synthetic peptide
  REGION 1..9: note = XENP019870 vlCDR3
QQYGSSPWT

SEQ ID NO: 5966 - protein, 246 aa, synthetic construct
  REGION 1..246: note = Description of Artificial Sequence: Synthetic polypeptide
  REGION 1..246: note = XENP019871 [CTLA-4]_H0.123_L0_scFv(GKPGS)4
QVQLVESGGGVVQPGRSLRLSCAASGFTFSSYTMHWVRQAPGKGLEWVTFISYDGNNKYYADSVKGRFTISRDNSKNTLYLQMNSLRAEDTAIYYCARTGWLGPMDYWGQGTLVTVSSGKPGSGKPGSGKPGSGKPGSEIVLTQSPGTLSLSPGERATLSCRASQSVGSSYLAWYQQKPGQAPRLLIYGAFSRATGIPDRFSGSGSGTDFTLTISRLEPEDFAVYYCQQYGSSPWTFGQGTKVEIK

SEQ ID NO: 5967 - protein, 118 aa, synthetic construct
  REGION 1..118: note = Description of Artificial Sequence: Synthetic polypeptide
  REGION 1..118: note = VH of XENP019871
QVQLVESGGGVVQPGRSLRLSCAASGFTFSSYTMHWVRQAPGKGLEWVTFISYDGNNKYYADSVKGRFTISRDNSKNTLYLQMNSLRAEDTAIYYCARTGWLGPMDYWGQGTLVTVSS

SEQ ID NO: 5968 - protein, 108 aa, synthetic construct; identical to SEQ ID NO: 3741
  REGION 1..108: note = Description of Artificial Sequence: Synthetic polypeptide
  REGION 1..108: note = VL of XENP019871

SEQ ID NO: 5969 - protein, 5 aa, synthetic construct
  REGION 1..5: note = Description of Artificial Sequence: Synthetic peptide
  REGION 1..5: note = XENP019871 vhCDR1
SYTMH

SEQ ID NO: 5970 - protein, 17 aa, synthetic construct
  REGION 1..17: note = Description of Artificial Sequence: Synthetic peptide
  REGION 1..17: note = XENP019871 vhCDR2
FISYDGNNKYYADSVKG

SEQ ID NO: 5971 - protein, 9 aa, synthetic construct
  REGION 1..9: note = Description of Artificial Sequence: Synthetic peptide
  REGION 1..9: note = XENP019871 vhCDR3
TGWLGPMDY

SEQ ID NO: 5972 - protein, 12 aa, synthetic construct
  REGION 1..12: note = Description of Artificial Sequence: Synthetic peptide
  REGION 1..12: note = XENP019871 vlCDR1
RASQSVGSSYLA

SEQ ID NO: 5973 - protein, 7 aa, synthetic construct
  REGION 1..7: note = Description of Artificial Sequence: Synthetic peptide
  REGION 1..7: note = XENP019871 vlCDR2
GAFSRAT

SEQ ID NO: 5974 - protein, 9 aa, synthetic construct
  REGION 1..9: note = Description of Artificial Sequence: Synthetic peptide
  REGION 1..9: note = XENP019871 vlCDR3
QQYGSSPWT

SEQ ID NO: 5975 - protein, 246 aa, synthetic construct
  REGION 1..246: note = Description of Artificial Sequence: Synthetic polypeptide
  REGION 1..246: note = XENP019872 [CTLA-4]_H0.124_L0_scFv(GKPGS)4
QVQLVESGGGVVQPGRSLRLSCAASGFTFSSYTMHWVRQAPGKGLEWVTFISYDGNNKYYADSVKGRFTISRDNSKNTLYLQMNSLRAEDTAIYYCARTGWLGPFAYWGQGTLVTVSSGKPGSGKPGSGKPGSGKPGSEIVLTQSPGTLSLSPGERATLSCRASQSVGSSYLAWYQQKPGQAPRLLIYGAFSRATGIPDRFSGSGSGTDFTLTISRLEPEDFAVYYCQQYGSSPWTFGQGTKVEIK

SEQ ID NO: 5976 - protein, 118 aa, synthetic construct
  REGION 1..118: note = Description of Artificial Sequence: Synthetic polypeptide
  REGION 1..118: note = VH of XENP019872
QVQLVESGGGVVQPGRSLRLSCAASGFTFSSYTMHWVRQAPGKGLEWVTFISYDGNNKYYADSVKGRFTISRDNSKNTLYLQMNSLRAEDTAIYYCARTGWLGPFAYWGQGTLVTVSS

SEQ ID NO: 5977 - protein, 108 aa, synthetic construct; identical to SEQ ID NO: 3741
  REGION 1..108: note = Description of Artificial Sequence: Synthetic polypeptide
  REGION 1..108: note = VL of XENP019872

SEQ ID NO: 5978 - protein, 5 aa, synthetic construct
  REGION 1..5: note = Description of Artificial Sequence: Synthetic peptide
  REGION 1..5: note = XENP019872 vhCDR1
SYTMH

SEQ ID NO: 5979 - protein, 17 aa, synthetic construct
  REGION 1..17: note = Description of Artificial Sequence: Synthetic peptide
  REGION 1..17: note = XENP019872 vhCDR2
FISYDGNNKYYADSVKG

SEQ ID NO: 5980 - protein, 9 aa, synthetic construct
  REGION 1..9: note = Description of Artificial Sequence: Synthetic peptide
  REGION 1..9: note = XENP019872 vhCDR3
TGWLGPFAY

SEQ ID NO: 5981 - protein, 12 aa, synthetic construct
  REGION 1..12: note = Description of Artificial Sequence: Synthetic peptide
  REGION 1..12: note = XENP019872 vlCDR1
RASQSVGSSYLA

SEQ ID NO: 5982 - protein, 7 aa, synthetic construct
  REGION 1..7: note = Description of Artificial Sequence: Synthetic peptide
  REGION 1..7: note = XENP019872 vlCDR2
GAFSRAT

SEQ ID NO: 5983 - protein, 9 aa, synthetic construct
  REGION 1..9: note = Description of Artificial Sequence: Synthetic peptide
  REGION 1..9: note = XENP019872 vlCDR3
QQYGSSPWT

SEQ ID NO: 5984 - protein, 246 aa, synthetic construct
  REGION 1..246: note = Description of Artificial Sequence: Synthetic polypeptide
  REGION 1..246: note = XENP019873 [CTLA-4]_H0.125_L0_scFv(GKPGS)4
QVQLVESGGGVVQPGRSLRLSCAASGFTFSSYTMHWVRQAPGKGLEWVTFISYDGNNKYYADSVKGRFTISRDNSKNTLYLQMNSLRAEDTAIYYCARTGWLGPFEYWGQGTLVTVSSGKPGSGKPGSGKPGSGKPGSEIVLTQSPGTLSLSPGERATLSCRASQSVGSSYLAWYQQKPGQAPRLLIYGAFSRATGIPDRFSGSGSGTDFTLTISRLEPEDFAVYYCQQYGSSPWTFGQGTKVEIK

SEQ ID NO: 5985 - protein, 118 aa, synthetic construct
  REGION 1..118: note = Description of Artificial Sequence: Synthetic polypeptide
  REGION 1..118: note = VH of XENP019873
QVQLVESGGGVVQPGRSLRLSCAASGFTFSSYTMHWVRQAPGKGLEWVTFISYDGNNKYYADSVKGRFTISRDNSKNTLYLQMNSLRAEDTAIYYCARTGWLGPFEYWGQGTLVTVSS

SEQ ID NO: 5986 - protein, 108 aa, synthetic construct; identical to SEQ ID NO: 3741
  REGION 1..108: note = Description of Artificial Sequence: Synthetic polypeptide
  REGION 1..108: note = VL of XENP019873

SEQ ID NO: 5987 - protein, 5 aa, synthetic construct
  REGION 1..5: note = Description of Artificial Sequence: Synthetic peptide
  REGION 1..5: note = XENP019873 vhCDR1
SYTMH

SEQ ID NO: 5988 - protein, 17 aa, synthetic construct
  REGION 1..17: note = Description of Artificial Sequence: Synthetic peptide
  REGION 1..17: note = XENP019873 vhCDR2
FISYDGNNKYYADSVKG

SEQ ID NO: 5989 - protein, 9 aa, synthetic construct
  REGION 1..9: note = Description of Artificial Sequence: Synthetic peptide
  REGION 1..9: note = XENP019873 vhCDR3
TGWLGPFEY

SEQ ID NO: 5990 - protein, 12 aa, synthetic construct
  REGION 1..12: note = Description of Artificial Sequence: Synthetic peptide
  REGION 1..12: note = XENP019873 vlCDR1
RASQSVGSSYLA

SEQ ID NO: 5991 - protein, 7 aa, synthetic construct
  REGION 1..7: note = Description of Artificial Sequence: Synthetic peptide
  REGION 1..7: note = XENP019873 vlCDR2
GAFSRAT

SEQ ID NO: 5992 - protein, 9 aa, synthetic construct
  REGION 1..9: note = Description of Artificial Sequence: Synthetic peptide
  REGION 1..9: note = XENP019873 vlCDR3
QQYGSSPWT

SEQ ID NO: 5993 - protein, 246 aa, synthetic construct
  REGION 1..246: note = Description of Artificial Sequence: Synthetic polypeptide
  REGION 1..246: note = XENP019874 [CTLA-4]_H0.126_L0_scFv(GKPGS)4
QVQLVESGGGVVQPGRSLRLSCAASGFTFSSYTMHWVRQAPGKGLEWVTFISYDGNNKYYADSVKGRFTISRDNSKNTLYLQMNSLRAEDTAIYYCARTGWLGPFHYWGQGTLVTVSSGKPGSGKPGSGKPGSGKPGSEIVLTQSPGTLSLSPGERATLSCRASQSVGSSYLAWYQQKPGQAPRLLIYGAFSRATGIPDRFSGSGSGTDFTLTISRLEPEDFAVYYCQQYGSSPWTFGQGTKVEIK

SEQ ID NO: 5994 - protein, 118 aa, synthetic construct
  REGION 1..118: note = Description of Artificial Sequence: Synthetic polypeptide
  REGION 1..118: note = VH of XENP019874
QVQLVESGGGVVQPGRSLRLSCAASGFTFSSYTMHWVRQAPGKGLEWVTFISYDGNNKYYADSVKGRFTISRDNSKNTLYLQMNSLRAEDTAIYYCARTGWLGPFHYWGQGTLVTVSS

SEQ ID NO: 5995 - protein, 108 aa, synthetic construct; identical to SEQ ID NO: 3741
  REGION 1..108: note = Description of Artificial Sequence: Synthetic polypeptide
  REGION 1..108: note = VL of XENP019874

SEQ ID NO: 5996 - protein, 5 aa, synthetic construct
  REGION 1..5: note = Description of Artificial Sequence: Synthetic peptide
  REGION 1..5: note = XENP019874 vhCDR1
SYTMH

SEQ ID NO: 5997 - protein, 17 aa, synthetic construct
  REGION 1..17: note = Description of Artificial Sequence: Synthetic peptide
  REGION 1..17: note = XENP019874 vhCDR2
FISYDGNNKYYADSVKG

SEQ ID NO: 5998 - protein, 9 aa, synthetic construct
  REGION 1..9: note = Description of Artificial Sequence: Synthetic peptide
  REGION 1..9: note = XENP019874 vhCDR3
TGWLGPFHY

SEQ ID NO: 5999 - protein, 12 aa, synthetic construct
  REGION 1..12: note = Description of Artificial Sequence: Synthetic peptide
  REGION 1..12: note = XENP019874 vlCDR1
RASQSVGSSYLA

SEQ ID NO: 6000 - protein, 7 aa, synthetic construct
  REGION 1..7: note = Description of Artificial Sequence: Synthetic peptide
  REGION 1..7: note = XENP019874 vlCDR2
GAFSRAT

SEQ ID NO: 6001 - protein, 9 aa, synthetic construct
  REGION 1..9: note = Description of Artificial Sequence: Synthetic peptide
  REGION 1..9: note = XENP019874 vlCDR3
QQYGSSPWT

SEQ ID NO: 6002 - protein, 246 aa, synthetic construct
  REGION 1..246: note = Description of Artificial Sequence: Synthetic polypeptide
  REGION 1..246: note = XENP019875 [CTLA-4]_H0.127_L0_scFv(GKPGS)4
QVQLVESGGGVVQPGRSLRLSCAASGFTFSSYTMHWVRQAPGKGLEWVTFISYDGNNKYYADSVKGRFTISRDNSKNTLYLQMNSLRAEDTAIYYCARTGWLGPFNYWGQGTLVTVSSGKPGSGKPGSGKPGSGKPGSEIVLTQSPGTLSLSPGERATLSCRASQSVGSSYLAWYQQKPGQAPRLLIYGAFSRATGIPDRFSGSGSGTDFTLTISRLEPEDFAVYYCQQYGSSPWTFGQGTKVEIK

SEQ ID NO: 6003 - protein, 118 aa, synthetic construct
  REGION 1..118: note = Description of Artificial Sequence: Synthetic polypeptide
  REGION 1..118: note = VH of XENP019875
QVQLVESGGGVVQPGRSLRLSCAASGFTFSSYTMHWVRQAPGKGLEWVTFISYDGNNKYYADSVKGRFTISRDNSKNTLYLQMNSLRAEDTAIYYCARTGWLGPFNYWGQGTLVTVSS

SEQ ID NO: 6004 - protein, 108 aa, synthetic construct; identical to SEQ ID NO: 3741
  REGION 1..108: note = Description of Artificial Sequence: Synthetic polypeptide
  REGION 1..108: note = VL of XENP019875

SEQ ID NO: 6005 - protein, 5 aa, synthetic construct
  REGION 1..5: note = Description of Artificial Sequence: Synthetic peptide
  REGION 1..5: note = XENP019875 vhCDR1
SYTMH

SEQ ID NO: 6006 - protein, 17 aa, synthetic construct
  REGION 1..17: note = Description of Artificial Sequence: Synthetic peptide
  REGION 1..17: note = XENP019875 vhCDR2
FISYDGNNKYYADSVKG

SEQ ID NO: 6007 - protein, 9 aa, synthetic construct
  REGION 1..9: note = Description of Artificial Sequence: Synthetic peptide
  REGION 1..9: note = XENP019875 vhCDR3
TGWLGPFNY

SEQ ID NO: 6008 - protein, 12 aa, synthetic construct
  REGION 1..12: note = Description of Artificial Sequence: Synthetic peptide
  REGION 1..12: note = XENP019875 vlCDR1
RASQSVGSSYLA

SEQ ID NO: 6009 - protein, 7 aa, synthetic construct
  REGION 1..7: note = Description of Artificial Sequence: Synthetic peptide
  REGION 1..7: note = XENP019875 vlCDR2
GAFSRAT

SEQ ID NO: 6010 - protein, 9 aa, synthetic construct
  REGION 1..9: note = Description of Artificial Sequence: Synthetic peptide
  REGION 1..9: note = XENP019875 vlCDR3
QQYGSSPWT

SEQ ID NO: 6011 - protein, 246 aa, synthetic construct
  REGION 1..246: note = Description of Artificial Sequence: Synthetic polypeptide
  REGION 1..246: note = XENP019876 [CTLA-4]_H0.128_L0_scFv(GKPGS)4
QVQLVESGGGVVQPGRSLRLSCAASGFTFSSYTMHWVRQAPGKGLEWVTFISYDGNNKYYADSVKGRFTISRDNSKNTLYLQMNSLRAEDTAIYYCARTGWLGPFSYWGQGTLVTVSSGKPGSGKPGSGKPGSGKPGSEIVLTQSPGTLSLSPGERATLSCRASQSVGSSYLAWYQQKPGQAPRLLIYGAFSRATGIPDRFSGSGSGTDFTLTISRLEPEDFAVYYCQQYGSSPWTFGQGTKVEIK

SEQ ID NO: 6012 - protein, 118 aa, synthetic construct
  REGION 1..118: note = Description of Artificial Sequence: Synthetic polypeptide
  REGION 1..118: note = VH of XENP019876
QVQLVESGGGVVQPGRSLRLSCAASGFTFSSYTMHWVRQAPGKGLEWVTFISYDGNNKYYADSVKGRFTISRDNSKNTLYLQMNSLRAEDTAIYYCARTGWLGPFSYWGQGTLVTVSS

SEQ ID NO: 6013 - protein, 108 aa, synthetic construct; identical to SEQ ID NO: 3741
  REGION 1..108: note = Description of Artificial Sequence: Synthetic polypeptide
  REGION 1..108: note = VL of XENP019876

SEQ ID NO: 6014 - protein, 5 aa, synthetic construct
  REGION 1..5: note = Description of Artificial Sequence: Synthetic peptide
  REGION 1..5: note = XENP019876 vhCDR1
SYTMH

SEQ ID NO: 6015 - protein, 17 aa, synthetic construct
  REGION 1..17: note = Description of Artificial Sequence: Synthetic peptide
  REGION 1..17: note = XENP019876 vhCDR2
FISYDGNNKYYADSVKG

SEQ ID NO: 6016 - protein, 9 aa, synthetic construct
  REGION 1..9: note = Description of Artificial Sequence: Synthetic peptide
  REGION 1..9: note = XENP019876 vhCDR3
TGWLGPFSY

SEQ ID NO: 6017 - protein, 12 aa, synthetic construct
  REGION 1..12: note = Description of Artificial Sequence: Synthetic peptide
  REGION 1..12: note = XENP019876 vlCDR1
RASQSVGSSYLA

SEQ ID NO: 6018 - protein, 7 aa, synthetic construct
  REGION 1..7: note = Description of Artificial Sequence: Synthetic peptide
  REGION 1..7: note = XENP019876 vlCDR2
GAFSRAT

SEQ ID NO: 6019 - protein, 9 aa, synthetic construct
  REGION 1..9: note = Description of Artificial Sequence: Synthetic peptide
  REGION 1..9: note = XENP019876 vlCDR3
QQYGSSPWT

SEQ ID NO: 6020 - protein, 246 aa, synthetic construct
  REGION 1..246: note = Description of Artificial Sequence: Synthetic polypeptide
  REGION 1..246: note = XENP019877 [CTLA-4]_H0.129_L0_scFv(GKPGS)4
QVQLVESGGGVVQPGRSLRLSCAASGFTFSSYTMHWVRQAPGKGLEWVTFISYDGNNKYYADSVKGRFTISRDNSKNTLYLQMNSLRAEDTAIYYCARTGWLGPFQYWGQGTLVTVSSGKPGSGKPGSGKPGSGKPGSEIVLTQSPGTLSLSPGERATLSCRASQSVGSSYLAWYQQKPGQAPRLLIYGAFSRATGIPDRFSGSGSGTDFTLTISRLEPEDFAVYYCQQYGSSPWTFGQGTKVEIK

SEQ ID NO: 6021 - protein, 118 aa, synthetic construct
  REGION 1..118: note = Description of Artificial Sequence: Synthetic polypeptide
  REGION 1..118: note = VH of XENP019877
QVQLVESGGGVVQPGRSLRLSCAASGFTFSSYTMHWVRQAPGKGLEWVTFISYDGNNKYYADSVKGRFTISRDNSKNTLYLQMNSLRAEDTAIYYCARTGWLGPFQYWGQGTLVTVSS

SEQ ID NO: 6022 - protein, 108 aa, synthetic construct; identical to SEQ ID NO: 3741
  REGION 1..108: note = Description of Artificial Sequence: Synthetic polypeptide
  REGION 1..108: note = VL of XENP019877

SEQ ID NO: 6023 - protein, 5 aa, synthetic construct
  REGION 1..5: note = Description of Artificial Sequence: Synthetic peptide
  REGION 1..5: note = XENP019877 vhCDR1
SYTMH

SEQ ID NO: 6024 - protein, 17 aa, synthetic construct
  REGION 1..17: note = Description of Artificial Sequence: Synthetic peptide
  REGION 1..17: note = XENP019877 vhCDR2
FISYDGNNKYYADSVKG

SEQ ID NO: 6025 - protein, 9 aa, synthetic construct
  REGION 1..9: note = Description of Artificial Sequence: Synthetic peptide
  REGION 1..9: note = XENP019877 vhCDR3
TGWLGPFQY

SEQ ID NO: 6026 - protein, 12 aa, synthetic construct
  REGION 1..12: note = Description of Artificial Sequence: Synthetic peptide
  REGION 1..12: note = XENP019877 vlCDR1
RASQSVGSSYLA

SEQ ID NO: 6027 - protein, 7 aa, synthetic construct
  REGION 1..7: note = Description of Artificial Sequence: Synthetic peptide
  REGION 1..7: note = XENP019877 vlCDR2
GAFSRAT

SEQ ID NO: 6028 - protein, 9 aa, synthetic construct
  REGION 1..9: note = Description of Artificial Sequence: Synthetic peptide
  REGION 1..9: note = XENP019877 vlCDR3
QQYGSSPWT

SEQ ID NO: 6029 - protein, 246 aa, synthetic construct
  REGION 1..246: note = Description of Artificial Sequence: Synthetic polypeptide
  REGION 1..246: note = XENP019878 [CTLA-4]_H0.130_L0_scFv(GKPGS)4
QVQLVESGGGVVQPGRSLRLSCAASGFTFSSYTMHWVRQAPGKGLEWVTFISYDGNNKYYADSVKGRFTISRDNSKNTLYLQMNSLRAEDTAIYYCARTGWLGPFDHWGQGTLVTVSSGKPGSGKPGSGKPGSGKPGSEIVLTQSPGTLSLSPGERATLSCRASQSVGSSYLAWYQQKPGQAPRLLIYGAFSRATGIPDRFSGSGSGTDFTLTISRLEPEDFAVYYCQQYGSSPWTFGQGTKVEIK

SEQ ID NO: 6030 - protein, 118 aa, synthetic construct
  REGION 1..118: note = Description of Artificial Sequence: Synthetic polypeptide
  REGION 1..118: note = VH of XENP019878
QVQLVESGGGVVQPGRSLRLSCAASGFTFSSYTMHWVRQAPGKGLEWVTFISYDGNNKYYADSVKGRFTISRDNSKNTLYLQMNSLRAEDTAIYYCARTGWLGPFDHWGQGTLVTVSS

SEQ ID NO: 6031 - protein, 108 aa, synthetic construct; identical to SEQ ID NO: 3741
  REGION 1..108: note = Description of Artificial Sequence: Synthetic polypeptide
  REGION 1..108: note = VL of XENP019878

SEQ ID NO: 6032 - protein, 5 aa, synthetic construct
  REGION 1..5: note = Description of Artificial Sequence: Synthetic peptide
  REGION 1..5: note = XENP019878 vhCDR1
SYTMH

SEQ ID NO: 6033 - protein, 17 aa, synthetic construct
  REGION 1..17: note = Description of Artificial Sequence: Synthetic peptide
  REGION 1..17: note = XENP019878 vhCDR2
FISYDGNNKYYADSVKG

SEQ ID NO: 6034 - protein, 9 aa, synthetic construct
  REGION 1..9: note = Description of Artificial Sequence: Synthetic peptide
  REGION 1..9: note = XENP019878 vhCDR3
TGWLGPFDH

SEQ ID NO: 6035 - protein, 12 aa, synthetic construct
  REGION 1..12: note = Description of Artificial Sequence: Synthetic peptide
  REGION 1..12: note = XENP019878 vlCDR1
RASQSVGSSYLA

SEQ ID NO: 6036 - protein, 7 aa, synthetic construct
  REGION 1..7: note = Description of Artificial Sequence: Synthetic peptide
  REGION 1..7: note = XENP019878 vlCDR2
GAFSRAT

SEQ ID NO: 6037 - protein, 9 aa, synthetic construct
  REGION 1..9: note = Description of Artificial Sequence: Synthetic peptide
  REGION 1..9: note = XENP019878 vlCDR3
QQYGSSPWT

SEQ ID NO: 6038 - protein, 246 aa, synthetic construct
  REGION 1..246: note = Description of Artificial Sequence: Synthetic polypeptide
  REGION 1..246: note = XENP019879 [CTLA-4]_H0.131_L0_scFv(GKPGS)4
QVQLVESGGGVVQPGRSLRLSCAASGFTFSSYTMHWVRQAPGKGLEWVTFISYDGNNKYYADSVKGRFTISRDNSKNTLYLQMNSLRAEDTAIYYCARTGWLGPFDLWGQGTLVTVSSGKPGSGKPGSGKPGSGKPGSEIVLTQSPGTLSLSPGERATLSCRASQSVGSSYLAWYQQKPGQAPRLLIYGAFSRATGIPDRFSGSGSGTDFTLTISRLEPEDFAVYYCQQYGSSPWTFGQGTKVEIK

SEQ ID NO: 6039 - protein, 118 aa, synthetic construct
  REGION 1..118: note = Description of Artificial Sequence: Synthetic polypeptide
  REGION 1..118: note = VH of XENP019879
QVQLVESGGGVVQPGRSLRLSCAASGFTFSSYTMHWVRQAPGKGLEWVTFISYDGNNKYYADSVKGRFTISRDNSKNTLYLQMNSLRAEDTAIYYCARTGWLGPFDLWGQGTLVTVSS

SEQ ID NO: 6040 - protein, 108 aa, synthetic construct; identical to SEQ ID NO: 3741
  REGION 1..108: note = Description of Artificial Sequence: Synthetic polypeptide
  REGION 1..108: note = VL of XENP019879

SEQ ID NO: 6041 - protein, 5 aa, synthetic construct
  REGION 1..5: note = Description of Artificial Sequence: Synthetic peptide
  REGION 1..5: note = XENP019879 vhCDR1
SYTMH

SEQ ID NO: 6042 - protein, 17 aa, synthetic construct
  REGION 1..17: note = Description of Artificial Sequence: Synthetic peptide
  REGION 1..17: note = XENP019879 vhCDR2
FISYDGNNKYYADSVKG

SEQ ID NO: 6043 - protein, 9 aa, synthetic construct
  REGION 1..9: note = Description of Artificial Sequence: Synthetic peptide
  REGION 1..9: note = XENP019879 vhCDR3
TGWLGPFDL

SEQ ID NO: 6044 - protein, 12 aa, synthetic construct
  REGION 1..12: note = Description of Artificial Sequence: Synthetic peptide
  REGION 1..12: note = XENP019879 vlCDR1
RASQSVGSSYLA

SEQ ID NO: 6045 - protein, 7 aa, synthetic construct
  REGION 1..7: note = Description of Artificial Sequence: Synthetic peptide
  REGION 1..7: note = XENP019879 vlCDR2
GAFSRAT

SEQ ID NO: 6046 - protein, 9 aa, synthetic construct
  REGION 1..9: note = Description of Artificial Sequence: Synthetic peptide
  REGION 1..9: note = XENP019879 vlCDR3
QQYGSSPWT

SEQ ID NO: 6047 - protein, 246 aa, synthetic construct
  REGION 1..246: note = Description of Artificial Sequence: Synthetic polypeptide
  REGION 1..246: note = XENP019880 [CTLA-4]_H0.132_L0_scFv(GKPGS)4
QVQLVESGGGVVQPGRSLRLSCAASGFTFSSYTMHWVRQAPGKGLEWVTFISYDGNNKYYADSVKGRFTISRDNSKNTLYLQMNSLRAEDTAIYYCARTGWLGPFDSWGQGTLVTVSSGKPGSGKPGSGKPGSGKPGSEIVLTQSPGTLSLSPGERATLSCRASQSVGSSYLAWYQQKPGQAPRLLIYGAFSRATGIPDRFSGSGSGTDFTLTISRLEPEDFAVYYCQQYGSSPWTFGQGTKVEIK

SEQ ID NO: 6048 - protein, 118 aa, synthetic construct
  REGION 1..118: note = Description of Artificial Sequence: Synthetic polypeptide
  REGION 1..118: note = VH of XENP019880
QVQLVESGGGVVQPGRSLRLSCAASGFTFSSYTMHWVRQAPGKGLEWVTFISYDGNNKYYADSVKGRFTISRDNSKNTLYLQMNSLRAEDTAIYYCARTGWLGPFDSWGQGTLVTVSS

SEQ ID NO: 6049 - protein, 108 aa, synthetic construct; identical to SEQ ID NO: 3741
  REGION 1..108: note = Description of Artificial Sequence: Synthetic polypeptide
  REGION 1..108: note = VL of XENP019880

SEQ ID NO: 6050 - protein, 5 aa, synthetic construct
  REGION 1..5: note = Description of Artificial Sequence: Synthetic peptide
  REGION 1..5: note = XENP019880 vhCDR1
SYTMH

SEQ ID NO: 6051 - protein, 17 aa, synthetic construct
  REGION 1..17: note = Description of Artificial Sequence: Synthetic peptide
  REGION 1..17: note = XENP019880 vhCDR2
FISYDGNNKYYADSVKG

SEQ ID NO: 6052 - protein, 9 aa, synthetic construct
  REGION 1..9: note = Description of Artificial Sequence: Synthetic peptide
  REGION 1..9: note = XENP019880 vhCDR3
TGWLGPFDS

SEQ ID NO: 6053 - protein, 12 aa, synthetic construct
  REGION 1..12: note = Description of Artificial Sequence: Synthetic peptide
  REGION 1..12: note = XENP019880 vlCDR1
RASQSVGSSYLA

SEQ ID NO: 6054 - protein, 7 aa, synthetic construct
  REGION 1..7: note = Description of Artificial Sequence: Synthetic peptide
  REGION 1..7: note = XENP019880 vlCDR2
GAFSRAT

SEQ ID NO: 6055 - protein, 9 aa, synthetic construct
  REGION 1..9: note = Description of Artificial Sequence: Synthetic peptide
  REGION 1..9: note = XENP019880 vlCDR3
QQYGSSPWT

SEQ ID NO: 6056 - protein, 246 aa, synthetic construct
  REGION 1..246: note = Description of Artificial Sequence: Synthetic polypeptide
  REGION 1..246: note = XENP019881 [CTLA-4]_H0.133_L0_scFv(GKPGS)4
QVQLVESGGGVVQPGRSLRLSCAASGFTFSSYTMHWVRQAPGKGLEWVTFISYDGNNKYYADSVKGRFTISRDNSKNTLYLQMNSLRAEDTAIYYCARTGWLGPFDVWGQGTLVTVSSGKPGSGKPGSGKPGSGKPGSEIVLTQSPGTLSLSPGERATLSCRASQSVGSSYLAWYQQKPGQAPRLLIYGAFSRATGIPDRFSGSGSGTDFTLTISRLEPEDFAVYYCQQYGSSPWTFGQGTKVEIK

SEQ ID NO: 6057 - protein, 118 aa, synthetic construct
  REGION 1..118: note = Description of Artificial Sequence: Synthetic polypeptide
  REGION 1..118: note = VH of XENP019881
QVQLVESGGGVVQPGRSLRLSCAASGFTFSSYTMHWVRQAPGKGLEWVTFISYDGNNKYYADSVKGRFTISRDNSKNTLYLQMNSLRAEDTAIYYCARTGWLGPFDVWGQGTLVTVSS

SEQ ID NO: 6058 - protein, 108 aa, synthetic construct; identical to SEQ ID NO: 3741
  REGION 1..108: note = Description of Artificial Sequence: Synthetic polypeptide
  REGION 1..108: note = VL of XENP019881

SEQ ID NO: 6059 - protein, 5 aa, synthetic construct
  REGION 1..5: note = Description of Artificial Sequence: Synthetic peptide
  REGION 1..5: note = XENP019881 vhCDR1
SYTMH

SEQ ID NO: 6060 - protein, 17 aa, synthetic construct
  REGION 1..17: note = Description of Artificial Sequence: Synthetic peptide
  REGION 1..17: note = XENP019881 vhCDR2
FISYDGNNKYYADSVKG

SEQ ID NO: 6061 - protein, 9 aa, synthetic construct
  REGION 1..9: note = Description of Artificial Sequence: Synthetic peptide
  REGION 1..9: note = XENP019881 vhCDR3
TGWLGPFDV

SEQ ID NO: 6062 - protein, 12 aa, synthetic construct
  REGION 1..12: note = Description of Artificial Sequence: Synthetic peptide
  REGION 1..12: note = XENP019881 vlCDR1
RASQSVGSSYLA

SEQ ID NO: 6063 - protein, 7 aa, synthetic construct
  REGION 1..7: note = Description of Artificial Sequence: Synthetic peptide
  REGION 1..7: note = XENP019881 vlCDR2
GAFSRAT

SEQ ID NO: 6064 - protein, 9 aa, synthetic construct
  REGION 1..9: note = Description of Artificial Sequence: Synthetic peptide
  REGION 1..9: note = XENP019881 vlCDR3
QQYGSSPWT

SEQ ID NO: 6065 - protein, 246 aa, synthetic construct
  REGION 1..246: note = Description of Artificial Sequence: Synthetic polypeptide
  REGION 1..246: note = XENP019882 [CTLA-4]_H0.134_L0_scFv(GKPGS)4
QVQLVESGGGVVQPGRSLRLSCAASGFTFSSYTMHWVRQAPGKGLEWVTFISYDGNNKYYADSVKGRFTISRDNSKNTLYLQMNSLRAEDTAIYYCARTGWLGPFDYWGRGTLVTVSSGKPGSGKPGSGKPGSGKPGSEIVLTQSPGTLSLSPGERATLSCRASQSVGSSYLAWYQQKPGQAPRLLIYGAFSRATGIPDRFSGSGSGTDFTLTISRLEPEDFAVYYCQQYGSSPWTFGQGTKVEIK

SEQ ID NO: 6066 - protein, 118 aa, synthetic construct; identical to SEQ ID NO: 4743
  REGION 1..118: note = Description of Artificial Sequence: Synthetic polypeptide
  REGION 1..118: note = VH of XENP019882

SEQ ID NO: 6067 - protein, 108 aa, synthetic construct; identical to SEQ ID NO: 3741
  REGION 1..108: note = Description of Artificial Sequence: Synthetic polypeptide
  REGION 1..108: note = VL of XENP019882

SEQ ID NO: 6068 - protein, 5 aa, synthetic construct
  REGION 1..5: note = Description of Artificial Sequence: Synthetic peptide
  REGION 1..5: note = XENP019882 vhCDR1
SYTMH

SEQ ID NO: 6069 - protein, 17 aa, synthetic construct
  REGION 1..17: note = Description of Artificial Sequence: Synthetic peptide
  REGION 1..17: note = XENP019882 vhCDR2
FISYDGNNKYYADSVKG

SEQ ID NO: 6070 - protein, 9 aa, synthetic construct
  REGION 1..9: note = Description of Artificial Sequence: Synthetic peptide
  REGION 1..9: note = XENP019882 vhCDR3
TGWLGPFDY

SEQ ID NO: 6071 - protein, 12 aa, synthetic construct
  REGION 1..12: note = Description of Artificial Sequence: Synthetic peptide
  REGION 1..12: note = XENP019882 vlCDR1
RASQSVGSSYLA

SEQ ID NO: 6072 - protein, 7 aa, synthetic construct
  REGION 1..7: note = Description of Artificial Sequence: Synthetic peptide
  REGION 1..7: note = XENP019882 vlCDR2
GAFSRAT

SEQ ID NO: 6073 - protein, 9 aa, synthetic construct
  REGION 1..9: note = Description of Artificial Sequence: Synthetic peptide
  REGION 1..9: note = XENP019882 vlCDR3
QQYGSSPWT

SEQ ID NO: 6074 - protein, 246 aa, synthetic construct
  REGION 1..246: note = Description of Artificial Sequence: Synthetic polypeptide
  REGION 1..246: note = XENP019883 [CTLA-4]_H0.135_L0_scFv(GKPGS)4
QVQLVESGGGVVQPGRSLRLSCAASGFTFSSYTMHWVRQAPGKGLEWVTFISYDGNNKYYADSVKGRFTISRDNSKNTLYLQMNSLRAEDTAIYYCARTGWLGPFDYWGQGTMVTVSSGKPGSGKPGSGKPGSGKPGSEIVLTQSPGTLSLSPGERATLSCRASQSVGSSYLAWYQQKPGQAPRLLIYGAFSRATGIPDRFSGSGSGTDFTLTISRLEPEDFAVYYCQQYGSSPWTFGQGTKVEIK

SEQ ID NO: 6075 - protein, 118 aa, synthetic construct
  REGION 1..118: note = Description of Artificial Sequence: Synthetic polypeptide
  REGION 1..118: note = VH of XENP019883
QVQLVESGGGVVQPGRSLRLSCAASGFTFSSYTMHWVRQAPGKGLEWVTFISYDGNNKYYADSVKGRFTISRDNSKNTLYLQMNSLRAEDTAIYYCARTGWLGPFDYWGQGTMVTVSS

SEQ ID NO: 6076 - protein, 108 aa, synthetic construct; identical to SEQ ID NO: 3741
  REGION 1..108: note = Description of Artificial Sequence: Synthetic polypeptide
  REGION 1..108: note = VL of XENP019883

SEQ ID NO: 6077 - protein, 5 aa, synthetic construct
  REGION 1..5: note = Description of Artificial Sequence: Synthetic peptide
  REGION 1..5: note = XENP019883 vhCDR1
SYTMH

SEQ ID NO: 6078 - protein, 17 aa, synthetic construct
  REGION 1..17: note = Description of Artificial Sequence: Synthetic peptide
  REGION 1..17: note = XENP019883 vhCDR2
FISYDGNNKYYADSVKG

SEQ ID NO: 6079 - protein, 9 aa, synthetic construct
  REGION 1..9: note = Description of Artificial Sequence: Synthetic peptide
  REGION 1..9: note = XENP019883 vhCDR3
TGWLGPFDY

SEQ ID NO: 6080 - protein, 12 aa, synthetic construct
  REGION 1..12: note = Description of Artificial Sequence: Synthetic peptide
  REGION 1..12: note = XENP019883 vlCDR1
RASQSVGSSYLA

SEQ ID NO: 6081 - protein, 7 aa, synthetic construct
  REGION 1..7: note = Description of Artificial Sequence: Synthetic peptide
  REGION 1..7: note = XENP019883 vlCDR2
GAFSRAT

SEQ ID NO: 6082 - protein, 9 aa, synthetic construct
  REGION 1..9: note = Description of Artificial Sequence: Synthetic peptide
  REGION 1..9: note = XENP019883 vlCDR3
QQYGSSPWT

SEQ ID NO: 6083 - protein, 246 aa, synthetic construct
  REGION 1..246: note = Description of Artificial Sequence: Synthetic polypeptide
  REGION 1..246: note = XENP019884 [CTLA-4]_H0.136_L0_scFv(GKPGS)4
QVQLVESGGGVVQPGRSLRLSCAASGFTFSSYTMHWVRQAPGKGLEWVTFISYDGNNKYYADSVKGRFTISRDNSKNTLYLQMNSLRAEDTAIYYCARTGWLGPFDYWGQGTTVTVSSGKPGSGKPGSGKPGSGKPGSEIVLTQSPGTLSLSPGERATLSCRASQSVGSSYLAWYQQKPGQAPRLLIYGAFSRATGIPDRFSGSGSGTDFTLTISRLEPEDFAVYYCQQYGSSPWTFGQGTKVEIK

SEQ ID NO: 6084 - protein, 118 aa, synthetic construct
  REGION 1..118: note = Description of Artificial Sequence: Synthetic polypeptide
  REGION 1..118: note = VH of XENP019884
QVQLVESGGGVVQPGRSLRLSCAASGFTFSSYTMHWVRQAPGKGLEWVTFISYDGNNKYYADSVKGRFTISRDNSKNTLYLQMNSLRAEDTAIYYCARTGWLGPFDYWGQGTTVTVSS

SEQ ID NO: 6085 - protein, 108 aa, synthetic construct; identical to SEQ ID NO: 3741
  REGION 1..108: note = Description of Artificial Sequence: Synthetic polypeptide
  REGION 1..108: note = VL of XENP019884

SEQ ID NO: 6086 - protein, 5 aa, synthetic construct
  REGION 1..5: note = Description of Artificial Sequence: Synthetic peptide
  REGION 1..5: note = XENP019884 vhCDR1
SYTMH

SEQ ID NO: 6087 - protein, 17 aa, synthetic construct
  REGION 1..17: note = Description of Artificial Sequence: Synthetic peptide
  REGION 1..17: note = XENP019884 vhCDR2
FISYDGNNKYYADSVKG

SEQ ID NO: 6088 - protein, 9 aa, synthetic construct
  REGION 1..9: note = Description of Artificial Sequence: Synthetic peptide
  REGION 1..9: note = XENP019884 vhCDR3
TGWLGPFDY

SEQ ID NO: 6089 - protein, 12 aa, synthetic construct
  REGION 1..12: note = Description of Artificial Sequence: Synthetic peptide
  REGION 1..12: note = XENP019884 vlCDR1
RASQSVGSSYLA

SEQ ID NO: 6090 - protein, 7 aa, synthetic construct
  REGION 1..7: note = Description of Artificial Sequence: Synthetic peptide
  REGION 1..7: note = XENP019884 vlCDR2
GAFSRAT

SEQ ID NO: 6091 - protein, 9 aa, synthetic construct
  REGION 1..9: note = Description of Artificial Sequence: Synthetic peptide
  REGION 1..9: note = XENP019884 vlCDR3
QQYGSSPWT

SEQ ID NO: 6092 - protein, 246 aa, synthetic construct
  REGION 1..246: note = Description of Artificial Sequence: Synthetic polypeptide
  REGION 1..246: note = XENP019885 [CTLA-4]_H0_L0.1_scFv(GKPGS)4
QVQLVESGGGVVQPGRSLRLSCAASGFTFSSYTMHWVRQAPGKGLEWVTFISYDGNNKYYADSVKGRFTISRDNSKNTLYLQMNSLRAEDTAIYYCARTGWLGPFDYWGQGTLVTVSSGKPGSGKPGSGKPGSGKPGSAIVLTQSPGTLSLSPGERATLSCRASQSVGSSYLAWYQQKPGQAPRLLIYGAFSRATGIPDRFSGSGSGTDFTLTISRLEPEDFAVYYCQQYGSSPWTFGQGTKVEIK

SEQ ID NO: 6093 - protein, 118 aa, synthetic construct; identical to SEQ ID NO: 3737
  REGION 1..118: note = Description of Artificial Sequence: Synthetic polypeptide
  REGION 1..118: note = VH of XENP019885

SEQ ID NO: 6094 - protein, 108 aa, synthetic construct
  REGION 1..108: note = Description of Artificial Sequence: Synthetic polypeptide
  REGION 1..108: note = VL of XENP019885
AIVLTQSPGTLSLSPGERATLSCRASQSVGSSYLAWYQQKPGQAPRLLIYGAFSRATGIPDRFSGSGSGTDFTLTISRLEPEDFAVYYCQQYGSSPWTFGQGTKVEIK

SEQ ID NO: 6095 - protein, 5 aa, synthetic construct
  REGION 1..5: note = Description of Artificial Sequence: Synthetic peptide
  REGION 1..5: note = XENP019885 vhCDR1
SYTMH

SEQ ID NO: 6096 - protein, 17 aa, synthetic construct
  REGION 1..17: note = Description of Artificial Sequence: Synthetic peptide
  REGION 1..17: note = XENP019885 vhCDR2
FISYDGNNKYYADSVKG

SEQ ID NO: 6097 - protein, 9 aa, synthetic construct
  REGION 1..9: note = Description of Artificial Sequence: Synthetic peptide
  REGION 1..9: note = XENP019885 vhCDR3
TGWLGPFDY

SEQ ID NO: 6098 - protein, 12 aa, synthetic construct
  REGION 1..12: note = Description of Artificial Sequence: Synthetic peptide
  REGION 1..12: note = XENP019885 vlCDR1
RASQSVGSSYLA

SEQ ID NO: 6099 - protein, 7 aa, synthetic construct
  REGION 1..7: note = Description of Artificial Sequence: Synthetic peptide
  REGION 1..7: note = XENP019885 vlCDR2
GAFSRAT

SEQ ID NO: 6100 - protein, 9 aa, synthetic construct
  REGION 1..9: note = Description of Artificial Sequence: Synthetic peptide
  REGION 1..9: note = XENP019885 vlCDR3
QQYGSSPWT

SEQ ID NO: 6101 - protein, 246 aa, synthetic construct
  REGION 1..246: note = Description of Artificial Sequence: Synthetic polypeptide
  REGION 1..246: note = XENP019886 [CTLA-4]_H0_L0.2_scFv(GKPGS)4
QVQLVESGGGVVQPGRSLRLSCAASGFTFSSYTMHWVRQAPGKGLEWVTFISYDGNNKYYADSVKGRFTISRDNSKNTLYLQMNSLRAEDTAIYYCARTGWLGPFDYWGQGTLVTVSSGKPGSGKPGSGKPGSGKPGSDIVLTQSPGTLSLSPGERATLSCRASQSVGSSYLAWYQQKPGQAPRLLIYGAFSRATGIPDRFSGSGSGTDFTLTISRLEPEDFAVYYCQQYGSSPWTFGQGTKVEIK

SEQ ID NO: 6102 - protein, 118 aa, synthetic construct; identical to SEQ ID NO: 3737
  REGION 1..118: note = Description of Artificial Sequence: Synthetic polypeptide
  REGION 1..118: note = VH of XENP019886

SEQ ID NO: 6103 - protein, 108 aa, synthetic construct
  REGION 1..108: note = Description of Artificial Sequence: Synthetic polypeptide
  REGION 1..108: note = VL of XENP019886
DIVLTQSPGTLSLSPGERATLSCRASQSVGSSYLAWYQQKPGQAPRLLIYGAFSRATGIPDRFSGSGSGTDFTLTISRLEPEDFAVYYCQQYGSSPWTFGQGTKVEIK

SEQ ID NO: 6104 - protein, 5 aa, synthetic construct
  REGION 1..5: note = Description of Artificial Sequence: Synthetic peptide
  REGION 1..5: note = XENP019886 vhCDR1
SYTMH

SEQ ID NO: 6105 - protein, 17 aa, synthetic construct
  REGION 1..17: note = Description of Artificial Sequence: Synthetic peptide
  REGION 1..17: note = XENP019886 vhCDR2
FISYDGNNKYYADSVKG

SEQ ID NO: 6106 - protein, 9 aa, synthetic construct
  REGION 1..9: note = Description of Artificial Sequence: Synthetic peptide
  REGION 1..9: note = XENP019886 vhCDR3
TGWLGPFDY

SEQ ID NO: 6107 - protein, 12 aa, synthetic construct
  REGION 1..12: note = Description of Artificial Sequence: Synthetic peptide
  REGION 1..12: note = XENP019886 vlCDR1
RASQSVGSSYLA

SEQ ID NO: 6108 - protein, 7 aa, synthetic construct
  REGION 1..7: note = Description of Artificial Sequence: Synthetic peptide
  REGION 1..7: note = XENP019886 vlCDR2
GAFSRAT

SEQ ID NO: 6109 - protein, 9 aa, synthetic construct
  REGION 1..9: note = Description of Artificial Sequence: Synthetic peptide
  REGION 1..9: note = XENP019886 vlCDR3
QQYGSSPWT

SEQ ID NO: 6110 - protein, 246 aa, synthetic construct
  REGION 1..246: note = Description of Artificial Sequence: Synthetic polypeptide
  REGION 1..246: note = XENP019887 [CTLA-4]_H0_L0.3_scFv(GKPGS)4
QVQLVESGGGVVQPGRSLRLSCAASGFTFSSYTMHWVRQAPGKGLEWVTFISYDGNNKYYADSVKGRFTISRDNSKNTLYLQMNSLRAEDTAIYYCARTGWLGPFDYWGQGTLVTVSSGKPGSGKPGSGKPGSGKPGSQIVLTQSPGTLSLSPGERATLSCRASQSVGSSYLAWYQQKPGQAPRLLIYGAFSRATGIPDRFSGSGSGTDFTLTISRLEPEDFAVYYCQQYGSSPWTFGQGTKVEIK

SEQ ID NO: 6111 - protein, 118 aa, synthetic construct; identical to SEQ ID NO: 3737
  REGION 1..118: note = Description of Artificial Sequence: Synthetic polypeptide
  REGION 1..118: note = VH of XENP019887

SEQ ID NO: 6112 - protein, 108 aa, synthetic construct
  REGION 1..108: note = Description of Artificial Sequence: Synthetic polypeptide
  REGION 1..108: note = VL of XENP019887
QIVLTQSPGTLSLSPGERATLSCRASQSVGSSYLAWYQQKPGQAPRLLIYGAFSRATGIPDRFSGSGSGTDFTLTISRLEPEDFAVYYCQQYGSSPWTFGQGTKVEIK

SEQ ID NO: 6113 - protein, 5 aa, synthetic construct
  REGION 1..5: note = Description of Artificial Sequence: Synthetic peptide
  REGION 1..5: note = XENP019887 vhCDR1
SYTMH

SEQ ID NO: 6114 - protein, 17 aa, synthetic construct
  REGION 1..17: note = Description of Artificial Sequence: Synthetic peptide
  REGION 1..17: note = XENP019887 vhCDR2
FISYDGNNKYYADSVKG

SEQ ID NO: 6115 - protein, 9 aa, synthetic construct
  REGION 1..9: note = Description of Artificial Sequence: Synthetic peptide
  REGION 1..9: note = XENP019887 vhCDR3
TGWLGPFDY

SEQ ID NO: 6116 - protein, 12 aa, synthetic construct
  REGION 1..12: note = Description of Artificial Sequence: Synthetic peptide
  REGION 1..12: note = XENP019887 vlCDR1
RASQSVGSSYLA

SEQ ID NO: 6117 - protein, 7 aa, synthetic construct
  REGION 1..7: note = Description of Artificial Sequence: Synthetic peptide
  REGION 1..7: note = XENP019887 vlCDR2
GAFSRAT

SEQ ID NO: 6118 - protein, 9 aa, synthetic construct
  REGION 1..9: note = Description of Artificial Sequence: Synthetic peptide
  REGION 1..9: note = XENP019887 vlCDR3
QQYGSSPWT

SEQ ID NO: 6119 - protein, 246 aa, synthetic construct
  REGION 1..246: note = Description of Artificial Sequence: Synthetic polypeptide
  REGION 1..246: note = XENP019888 [CTLA-4]_H0_L0.4_scFv(GKPGS)4
QVQLVESGGGVVQPGRSLRLSCAASGFTFSSYTMHWVRQAPGKGLEWVTFISYDGNNKYYADSVKGRFTISRDNSKNTLYLQMNSLRAEDTAIYYCARTGWLGPFDYWGQGTLVTVSSGKPGSGKPGSGKPGSGKPGSRIVLTQSPGTLSLSPGERATLSCRASQSVGSSYLAWYQQKPGQAPRLLIYGAFSRATGIPDRFSGSGSGTDFTLTISRLEPEDFAVYYCQQYGSSPWTFGQGTKVEIK

SEQ ID NO: 6120 - protein, 118 aa, synthetic construct; identical to SEQ ID NO: 3737
  REGION 1..118: note = Description of Artificial Sequence: Synthetic polypeptide
  REGION 1..118: note = VH of XENP019888

SEQ ID NO: 6121 - protein, 108 aa, synthetic construct
  REGION 1..108: note = Description of Artificial Sequence: Synthetic polypeptide
  REGION 1..108: note = VL of XENP019888
RIVLTQSPGTLSLSPGERATLSCRASQSVGSSYLAWYQQKPGQAPRLLIYGAFSRATGIPDRFSGSGSGTDFTLTISRLEPEDFAVYYCQQYGSSPWTFGQGTKVEIK

SEQ ID NO: 6122 - protein, 5 aa, synthetic construct
  REGION 1..5: note = Description of Artificial Sequence: Synthetic peptide
  REGION 1..5: note = XENP019888 vhCDR1
SYTMH

SEQ ID NO: 6123 - protein, 17 aa, synthetic construct
  REGION 1..17: note = Description of Artificial Sequence: Synthetic peptide
  REGION 1..17: note = XENP019888 vhCDR2
FISYDGNNKYYADSVKG

SEQ ID NO: 6124 - protein, 9 aa, synthetic construct
  REGION 1..9: note = Description of Artificial Sequence: Synthetic peptide
  REGION 1..9: note = XENP019888 vhCDR3
TGWLGPFDY

SEQ ID NO: 6125 - protein, 12 aa, synthetic construct
  REGION 1..12: note = Description of Artificial Sequence: Synthetic peptide
  REGION 1..12: note = XENP019888 vlCDR1
RASQSVGSSYLA

SEQ ID NO: 6126 - protein, 7 aa, synthetic construct
  REGION 1..7: note = Description of Artificial Sequence: Synthetic peptide
  REGION 1..7: note = XENP019888 vlCDR2
GAFSRAT

SEQ ID NO: 6127 - protein, 9 aa, synthetic construct
  REGION 1..9: note = Description of Artificial Sequence: Synthetic peptide
  REGION 1..9: note = XENP019888 vlCDR3
QQYGSSPWT

SEQ ID NO: 6128 - protein, 246 aa, synthetic construct
  REGION 1..246: note = Description of Artificial Sequence: Synthetic polypeptide
  REGION 1..246: note = XENP019889 [CTLA-4]_H0_L0.5_scFv(GKPGS)4
QVQLVESGGGVVQPGRSLRLSCAASGFTFSSYTMHWVRQAPGKGLEWVTFISYDGNNKYYADSVKGRFTISRDNSKNTLYLQMNSLRAEDTAIYYCARTGWLGPFDYWGQGTLVTVSSGKPGSGKPGSGKPGSGKPGSEIRLTQSPGTLSLSPGERATLSCRASQSVGSSYLAWYQQKPGQAPRLLIYGAFSRATGIPDRFSGSGSGTDFTLTISRLEPEDFAVYYCQQYGSSPWTFGQGTKVEIK

SEQ ID NO: 6129 - protein, 118 aa, synthetic construct; identical to SEQ ID NO: 3737
  REGION 1..118: note = Description of Artificial Sequence: Synthetic polypeptide
  REGION 1..118: note = VH of XENP019889

SEQ ID NO: 6130 - protein, 108 aa, synthetic construct
  REGION 1..108: note = Description of Artificial Sequence: Synthetic polypeptide
  REGION 1..108: note = VL of XENP019889
EIRLTQSPGTLSLSPGERATLSCRASQSVGSSYLAWYQQKPGQAPRLLIYGAFSRATGIPDRFSGSGSGTDFTLTISRLEPEDFAVYYCQQYGSSPWTFGQGTKVEIK

SEQ ID NO: 6131 - protein, 5 aa, synthetic construct
  REGION 1..5: note = Description of Artificial Sequence: Synthetic peptide
  REGION 1..5: note = XENP019889 vhCDR1
SYTMH

SEQ ID NO: 6132 - protein, 17 aa, synthetic construct
  REGION 1..17: note = Description of Artificial Sequence: Synthetic peptide
  REGION 1..17: note = XENP019889 vhCDR2
FISYDGNNKYYADSVKG

SEQ ID NO: 6133 - protein, 9 aa, synthetic construct
  REGION 1..9: note = Description of Artificial Sequence: Synthetic peptide
  REGION 1..9: note = XENP019889 vhCDR3
TGWLGPFDY

SEQ ID NO: 6134 - protein, 12 aa, synthetic construct
  REGION 1..12: note = Description of Artificial Sequence: Synthetic peptide
  REGION 1..12: note = XENP019889 vlCDR1
RASQSVGSSYLA

SEQ ID NO: 6135 - protein, 7 aa, synthetic construct
  REGION 1..7: note = Description of Artificial Sequence: Synthetic peptide
  REGION 1..7: note = XENP019889 vlCDR2
GAFSRAT

SEQ ID NO: 6136 - protein, 9 aa, synthetic construct
  REGION 1..9: note = Description of Artificial Sequence: Synthetic peptide
  REGION 1..9: note = XENP019889 vlCDR3
QQYGSSPWT

SEQ ID NO: 6137 - protein, 246 aa, synthetic construct
  REGION 1..246: note = Description of Artificial Sequence: Synthetic polypeptide
  REGION 1..246: note = XENP019890 [CTLA-4]_H0_L0.6_scFv(GKPGS)4
QVQLVESGGGVVQPGRSLRLSCAASGFTFSSYTMHWVRQAPGKGLEWVTFISYDGNNKYYADSVKGRFTISRDNSKNTLYLQMNSLRAEDTAIYYCARTGWLGPFDYWGQGTLVTVSSGKPGSGKPGSGKPGSGKPGSEIRLTQSPGTLSLSPGERATLSCRASQSVGSSYLAWYQQKPGQAPRLLIYGAFSRATGIPDRFSGSGSGTDFTLTISRLEPEDFAVYYCQQYGSSPWTFGEGTKVEIK

SEQ ID NO: 6138 - protein, 118 aa, synthetic construct; identical to SEQ ID NO: 3737
  REGION 1..118: note = Description of Artificial Sequence: Synthetic polypeptide
  REGION 1..118: note = VH of XENP019890

SEQ ID NO: 6139 - protein, 108 aa, synthetic construct
  REGION 1..108: note = Description of Artificial Sequence: Synthetic polypeptide
  REGION 1..108: note = VL of XENP019890
EIRLTQSPGTLSLSPGERATLSCRASQSVGSSYLAWYQQKPGQAPRLLIYGAFSRATGIPDRFSGSGSGTDFTLTISRLEPEDFAVYYCQQYGSSPWTFGEGTKVEIK

SEQ ID NO: 6140 - protein, 5 aa, synthetic construct
  REGION 1..5: note = Description of Artificial Sequence: Synthetic peptide
  REGION 1..5: note = XENP019890 vhCDR1
SYTMH

SEQ ID NO: 6141 - protein, 17 aa, synthetic construct
  REGION 1..17: note = Description of Artificial Sequence: Synthetic peptide
  REGION 1..17: note = XENP019890 vhCDR2
FISYDGNNKYYADSVKG

SEQ ID NO: 6142 - protein, 9 aa, synthetic construct
  REGION 1..9: note = Description of Artificial Sequence: Synthetic peptide
  REGION 1..9: note = XENP019890 vhCDR3
TGWLGPFDY

SEQ ID NO: 6143 - protein, 12 aa, synthetic construct
  REGION 1..12: note = Description of Artificial Sequence: Synthetic peptide
  REGION 1..12: note = XENP019890 vlCDR1
RASQSVGSSYLA

SEQ ID NO: 6144 - protein, 7 aa, synthetic construct
  REGION 1..7: note = Description of Artificial Sequence: Synthetic peptide
  REGION 1..7: note = XENP019890 vlCDR2
GAFSRAT

SEQ ID NO: 6145 - protein, 9 aa, synthetic construct
  REGION 1..9: note = Description of Artificial Sequence: Synthetic peptide
  REGION 1..9: note = XENP019890 vlCDR3
QQYGSSPWT

SEQ ID NO: 6146 - protein, 246 aa, synthetic construct
  REGION 1..246: note = Description of Artificial Sequence: Synthetic polypeptide
  REGION 1..246: note = XENP019891 [CTLA-4]_H0_L0.7_scFv(GKPGS)4
QVQLVESGGGVVQPGRSLRLSCAASGFTFSSYTMHWVRQAPGKGLEWVTFISYDGNNKYYADSVKGRFTISRDNSKNTLYLQMNSLRAEDTAIYYCARTGWLGPFDYWGQGTLVTVSSGKPGSGKPGSGKPGSGKPGSEIVMTQSPGTLSLSPGERATLSCRASQSVGSSYLAWYQQKPGQAPRLLIYGAFSRATGIPDRFSGSGSGTDFTLTISRLEPEDFAVYYCQQYGSSPWTFGQGTKVEIK

SEQ ID NO: 6147 - protein, 118 aa, synthetic construct; identical to SEQ ID NO: 3737
  REGION 1..118: note = Description of Artificial Sequence: Synthetic polypeptide
  REGION 1..118: note = VH of XENP019891

SEQ ID NO: 6148 - protein, 108 aa, synthetic construct
  REGION 1..108: note = Description of Artificial Sequence: Synthetic polypeptide
  REGION 1..108: note = VL of XENP019891
EIVMTQSPGTLSLSPGERATLSCRASQSVGSSYLAWYQQKPGQAPRLLIYGAFSRATGIPDRFSGSGSGTDFTLTISRLEPEDFAVYYCQQYGSSPWTFGQGTKVEIK

SEQ ID NO: 6149 - protein, 5 aa, synthetic construct
  REGION 1..5: note = Description of Artificial Sequence: Synthetic peptide
  REGION 1..5: note = XENP019891 vhCDR1
SYTMH

SEQ ID NO: 6150 - protein, 17 aa, synthetic construct
  REGION 1..17: note = Description of Artificial Sequence: Synthetic peptide
  REGION 1..17: note = XENP019891 vhCDR2
FISYDGNNKYYADSVKG

SEQ ID NO: 6151 - protein, 9 aa, synthetic construct
  REGION 1..9: note = Description of Artificial Sequence: Synthetic peptide
  REGION 1..9: note = XENP019891 vhCDR3
TGWLGPFDY

SEQ ID NO: 6152 - protein, 12 aa, synthetic construct
  REGION 1..12: note = Description of Artificial Sequence: Synthetic peptide
  REGION 1..12: note = XENP019891 vlCDR1
RASQSVGSSYLA

SEQ ID NO: 6153 - protein, 7 aa, synthetic construct
  REGION 1..7: note = Description of Artificial Sequence: Synthetic peptide
  REGION 1..7: note = XENP019891 vlCDR2
GAFSRAT

SEQ ID NO: 6154 - protein, 9 aa, synthetic construct
  REGION 1..9: note = Description of Artificial Sequence: Synthetic peptide
  REGION 1..9: note = XENP019891 vlCDR3
QQYGSSPWT

SEQ ID NO: 6155 - protein, 246 aa, synthetic construct
  REGION 1..246: note = Description of Artificial Sequence: Synthetic polypeptide
  REGION 1..246: note = XENP019892 [CTLA-4]_H0_L0.8_scFv(GKPGS)4
QVQLVESGGGVVQPGRSLRLSCAASGFTFSSYTMHWVRQAPGKGLEWVTFISYDGNNKYYADSVKGRFTISRDNSKNTLYLQMNSLRAEDTAIYYCARTGWLGPFDYWGQGTLVTVSSGKPGSGKPGSGKPGSGKPGSEIVLTQSPATLSLSPGERATLSCRASQSVGSSYLAWYQQKPGQAPRLLIYGAFSRATGIPDRFSGSGSGTDFTLTISRLEPEDFAVYYCQQYGSSPWTFGQGTKVEIK

SEQ ID NO: 6156 - protein, 118 aa, synthetic construct; identical to SEQ ID NO: 3737
  REGION 1..118: note = Description of Artificial Sequence: Synthetic polypeptide
  REGION 1..118: note = VH of XENP019892

SEQ ID NO: 6157 - protein, 108 aa, synthetic construct
  REGION 1..108: note = Description of Artificial Sequence: Synthetic polypeptide
  REGION 1..108: note = VL of XENP019892
EIVLTQSPATLSLSPGERATLSCRASQSVGSSYLAWYQQKPGQAPRLLIYGAFSRATGIPDRFSGSGSGTDFTLTISRLEPEDFAVYYCQQYGSSPWTFGQGTKVEIK

SEQ ID NO: 6158 - protein, 5 aa, synthetic construct
  REGION 1..5: note = Description of Artificial Sequence: Synthetic peptide
  REGION 1..5: note = XENP019892 vhCDR1
SYTMH

SEQ ID NO: 6159 - protein, 17 aa, synthetic construct
  REGION 1..17: note = Description of Artificial Sequence: Synthetic peptide
  REGION 1..17: note = XENP019892 vhCDR2
FISYDGNNKYYADSVKG

SEQ ID NO: 6160 - protein, 9 aa, synthetic construct
  REGION 1..9: note = Description of Artificial Sequence: Synthetic peptide
  REGION 1..9: note = XENP019892 vhCDR3
TGWLGPFDY

SEQ ID NO: 6161 - protein, 12 aa, synthetic construct
  REGION 1..12: note = Description of Artificial Sequence: Synthetic peptide
  REGION 1..12: note = XENP019892 vlCDR1
RASQSVGSSYLA

SEQ ID NO: 6162 - protein, 7 aa, synthetic construct
  REGION 1..7: note = Description of Artificial Sequence: Synthetic peptide
  REGION 1..7: note = XENP019892 vlCDR2
GAFSRAT

SEQ ID NO: 6163 - protein, 9 aa, synthetic construct
  REGION 1..9: note = Description of Artificial Sequence: Synthetic peptide
  REGION 1..9: note = XENP019892 vlCDR3
QQYGSSPWT

SEQ ID NO: 6164 - protein, 246 aa, synthetic construct
  REGION 1..246: note = Description of Artificial Sequence: Synthetic polypeptide
  REGION 1..246: note = XENP019893 [CTLA-4]_H0_L0.9_scFv(GKPGS)4
QVQLVESGGGVVQPGRSLRLSCAASGFTFSSYTMHWVRQAPGKGLEWVTFISYDGNNKYYADSVKGRFTISRDNSKNTLYLQMNSLRAEDTAIYYCARTGWLGPFDYWGQGTLVTVSSGKPGSGKPGSGKPGSGKPGSEIVLTQSPPTLSLSPGERATLSCRASQSVGSSYLAWYQQKPGQAPRLLIYGAFSRATGIPDRFSGSGSGTDFTLTISRLEPEDFAVYYCQQYGSSPWTFGQGTKVEIK

SEQ ID NO: 6165 - protein, 118 aa, synthetic construct; identical to SEQ ID NO: 3737
  REGION 1..118: note = Description of Artificial Sequence: Synthetic polypeptide
  REGION 1..118: note = VH of XENP019893

SEQ ID NO: 6166 - protein, 108 aa, synthetic construct
  REGION 1..108: note = Description of Artificial Sequence: Synthetic polypeptide
  REGION 1..108: note = VL of XENP019893
EIVLTQSPPTLSLSPGERATLSCRASQSVGSSYLAWYQQKPGQAPRLLIYGAFSRATGIPDRFSGSGSGTDFTLTISRLEPEDFAVYYCQQYGSSPWTFGQGTKVEIK

SEQ ID NO: 6167 - protein, 5 aa, synthetic construct
  REGION 1..5: note = Description of Artificial Sequence: Synthetic peptide
  REGION 1..5: note = XENP019893 vhCDR1
SYTMH

SEQ ID NO: 6168 - protein, 17 aa, synthetic construct
  REGION 1..17: note = Description of Artificial Sequence: Synthetic peptide
  REGION 1..17: note = XENP019893 vhCDR2
FISYDGNNKYYADSVKG

SEQ ID NO: 6169 - protein, 9 aa, synthetic construct
  REGION 1..9: note = Description of Artificial Sequence: Synthetic peptide
  REGION 1..9: note = XENP019893 vhCDR3
TGWLGPFDY

SEQ ID NO: 6170 - protein, 12 aa, synthetic construct
  REGION 1..12: note = Description of Artificial Sequence: Synthetic peptide
  REGION 1..12: note = XENP019893 vlCDR1
RASQSVGSSYLA

SEQ ID NO: 6171 - protein, 7 aa, synthetic construct
  REGION 1..7: note = Description of Artificial Sequence: Synthetic peptide
  REGION 1..7: note = XENP019893 vlCDR2
GAFSRAT

SEQ ID NO: 6172 - protein, 9 aa, synthetic construct
  REGION 1..9: note = Description of Artificial Sequence: Synthetic peptide
  REGION 1..9: note = XENP019893 vlCDR3
QQYGSSPWT

SEQ ID NO: 6173 - protein, 246 aa, synthetic construct
  REGION 1..246: note = Description of Artificial Sequence: Synthetic polypeptide
  REGION 1..246: note = XENP019894 [CTLA-4]_H0_L0.10_scFv(GKPGS)4
QVQLVESGGGVVQPGRSLRLSCAASGFTFSSYTMHWVRQAPGKGLEWVTFISYDGNNKYYADSVKGRFTISRDNSKNTLYLQMNSLRAEDTAIYYCARTGWLGPFDYWGQGTLVTVSSGKPGSGKPGSGKPGSGKPGSEIVLTQSPSTLSLSPGERATLSCRASQSVGSSYLAWYQQKPGQAPRLLIYGAFSRATGIPDRFSGSGSGTDFTLTISRLEPEDFAVYYCQQYGSSPWTFGQGTKVEIK

SEQ ID NO: 6174 - protein, 118 aa, synthetic construct; identical to SEQ ID NO: 3737
  REGION 1..118: note = Description of Artificial Sequence: Synthetic polypeptide
  REGION 1..118: note = VH of XENP019894

SEQ ID NO: 6175 - protein, 108 aa, synthetic construct
  REGION 1..108: note = Description of Artificial Sequence: Synthetic polypeptide
  REGION 1..108: note = VL of XENP019894
EIVLTQSPSTLSLSPGERATLSCRASQSVGSSYLAWYQQKPGQAPRLLIYGAFSRATGIPDRFSGSGSGTDFTLTISRLEPEDFAVYYCQQYGSSPWTFGQGTKVEIK

SEQ ID NO: 6176 - protein, 5 aa, synthetic construct
  REGION 1..5: note = Description of Artificial Sequence: Synthetic peptide
  REGION 1..5: note = XENP019894 vhCDR1
SYTMH

SEQ ID NO: 6177 - protein, 17 aa, synthetic construct
  REGION 1..17: note = Description of Artificial Sequence: Synthetic peptide
  REGION 1..17: note = XENP019894 vhCDR2
FISYDGNNKYYADSVKG

SEQ ID NO: 6178 - protein, 9 aa, synthetic construct
  REGION 1..9: note = Description of Artificial Sequence: Synthetic peptide
  REGION 1..9: note = XENP019894 vhCDR3
TGWLGPFDY

SEQ ID NO: 6179 - protein, 12 aa, synthetic construct
  REGION 1..12: note = Description of Artificial Sequence: Synthetic peptide
  REGION 1..12: note = XENP019894 vlCDR1
RASQSVGSSYLA

SEQ ID NO: 6180 - protein, 7 aa, synthetic construct
  REGION 1..7: note = Description of Artificial Sequence: Synthetic peptide
  REGION 1..7: note = XENP019894 vlCDR2
GAFSRAT

SEQ ID NO: 6181 - protein, 9 aa, synthetic construct
  REGION 1..9: note = Description of Artificial Sequence: Synthetic peptide
  REGION 1..9: note = XENP019894 vlCDR3
QQYGSSPWT

SEQ ID NO: 6182 - protein, 246 aa, synthetic construct
  REGION 1..246: note = Description of Artificial Sequence: Synthetic polypeptide
  REGION 1..246: note = XENP019895 [CTLA-4]_H0_L0.11_scFv(GKPGS)4
QVQLVESGGGVVQPGRSLRLSCAASGFTFSSYTMHWVRQAPGKGLEWVTFISYDGNNKYYADSVKGRFTISRDNSKNTLYLQMNSLRAEDTAIYYCARTGWLGPFDYWGQGTLVTVSSGKPGSGKPGSGKPGSGKPGSEIVLTQSPGSLSLSPGERATLSCRASQSVGSSYLAWYQQKPGQAPRLLIYGAFSRATGIPDRFSGSGSGTDFTLTISRLEPEDFAVYYCQQYGSSPWTFGQGTKVEIK

SEQ ID NO: 6183 - protein, 118 aa, synthetic construct; identical to SEQ ID NO: 3737
  REGION 1..118: note = Description of Artificial Sequence: Synthetic polypeptide
  REGION 1..118: note = VH of XENP019895

SEQ ID NO: 6184 - protein, 108 aa, synthetic construct
  REGION 1..108: note = Description of Artificial Sequence: Synthetic polypeptide
  REGION 1..108: note = VL of XENP019895
EIVLTQSPGSLSLSPGERATLSCRASQSVGSSYLAWYQQKPGQAPRLLIYGAFSRATGIPDRFSGSGSGTDFTLTISRLEPEDFAVYYCQQYGSSPWTFGQGTKVEIK

SEQ ID NO: 6185 - protein, 5 aa, synthetic construct
  REGION 1..5: note = Description of Artificial Sequence: Synthetic peptide
  REGION 1..5: note = XENP019895 vhCDR1
SYTMH

SEQ ID NO: 6186 - protein, 17 aa, synthetic construct
  REGION 1..17: note = Description of Artificial Sequence: Synthetic peptide
  REGION 1..17: note = XENP019895 vhCDR2
FISYDGNNKYYADSVKG

SEQ ID NO: 6187 - protein, 9 aa, synthetic construct
  REGION 1..9: note = Description of Artificial Sequence: Synthetic peptide
  REGION 1..9: note = XENP019895 vhCDR3
TGWLGPFDY

SEQ ID NO: 6188 - protein, 12 aa, synthetic construct
  REGION 1..12: note = Description of Artificial Sequence: Synthetic peptide
  REGION 1..12: note = XENP019895 vlCDR1
RASQSVGSSYLA

SEQ ID NO: 6189 - protein, 7 aa, synthetic construct
  REGION 1..7: note = Description of Artificial Sequence: Synthetic peptide
  REGION 1..7: note = XENP019895 vlCDR2
GAFSRAT

SEQ ID NO: 6190 - protein, 9 aa, synthetic construct
  REGION 1..9: note = Description of Artificial Sequence: Synthetic peptide
  REGION 1..9: note = XENP019895 vlCDR3
QQYGSSPWT

SEQ ID NO: 6191 - protein, 246 aa, synthetic construct
  REGION 1..246: note = Description of Artificial Sequence: Synthetic polypeptide
  REGION 1..246: note = XENP019896 [CTLA-4]_H0_L0.12_scFv(GKPGS)4
QVQLVESGGGVVQPGRSLRLSCAASGFTFSSYTMHWVRQAPGKGLEWVTFISYDGNNKYYADSVKGRFTISRDNSKNTLYLQMNSLRAEDTAIYYCARTGWLGPFDYWGQGTLVTVSSGKPGSGKPGSGKPGSGKPGSEIVLTQSPGTLSVSPGERATLSCRASQSVGSSYLAWYQQKPGQAPRLLIYGAFSRATGIPDRFSGSGSGTDFTLTISRLEPEDFAVYYCQQYGSSPWTFGQGTKVEIK

SEQ ID NO: 6192 - protein, 118 aa, synthetic construct; identical to SEQ ID NO: 3737
  REGION 1..118: note = Description of Artificial Sequence: Synthetic polypeptide
  REGION 1..118: note = VH of XENP019896

SEQ ID NO: 6193 - protein, 108 aa, synthetic construct
  REGION 1..108: note = Description of Artificial Sequence: Synthetic polypeptide
  REGION 1..108: note = VL of XENP019896
EIVLTQSPGTLSVSPGERATLSCRASQSVGSSYLAWYQQKPGQAPRLLIYGAFSRATGIPDRFSGSGSGTDFTLTISRLEPEDFAVYYCQQYGSSPWTFGQGTKVEIK

SEQ ID NO: 6194 - protein, 5 aa, synthetic construct
  REGION 1..5: note = Description of Artificial Sequence: Synthetic peptide
  REGION 1..5: note = XENP019896 vhCDR1
SYTMH

SEQ ID NO: 6195 - protein, 17 aa, synthetic construct
  REGION 1..17: note = Description of Artificial Sequence: Synthetic peptide
  REGION 1..17: note = XENP019896 vhCDR2
FISYDGNNKYYADSVKG

SEQ ID NO: 6196 - protein, 9 aa, synthetic construct
  REGION 1..9: note = Description of Artificial Sequence: Synthetic peptide
  REGION 1..9: note = XENP019896 vhCDR3
TGWLGPFDY

SEQ ID NO: 6197 - protein, 12 aa, synthetic construct
  REGION 1..12: note = Description of Artificial Sequence: Synthetic peptide
  REGION 1..12: note = XENP019896 vlCDR1
RASQSVGSSYLA

SEQ ID NO: 6198 - protein, 7 aa, synthetic construct
  REGION 1..7: note = Description of Artificial Sequence: Synthetic peptide
  REGION 1..7: note = XENP019896 vlCDR2
GAFSRAT

SEQ ID NO: 6199 - protein, 9 aa, synthetic construct
  REGION 1..9: note = Description of Artificial Sequence: Synthetic peptide
  REGION 1..9: note = XENP019896 vlCDR3
QQYGSSPWT

SEQ ID NO: 6200 - protein, 246 aa, synthetic construct
  REGION 1..246: note = Description of Artificial Sequence: Synthetic polypeptide
  REGION 1..246: note = XENP019901 [CTLA-4]_H0_L0.13_scFv(GKPGS)4
QVQLVESGGGVVQPGRSLRLSCAASGFTFSSYTMHWVRQAPGKGLEWVTFISYDGNNKYYADSVKGRFTISRDNSKNTLYLQMNSLRAEDTAIYYCARTGWLGPFDYWGQGTLVTVSSGKPGSGKPGSGKPGSGKPGSEIVLTQSPGTLSLSPGEPATLSCRASQSVGSSYLAWYQQKPGQAPRLLIYGAFSRATGIPDRFSGSGSGTDFTLTISRLEPEDFAVYYCQQYGSSPWTFGQGTKVEIK

SEQ ID NO: 6201 - protein, 118 aa, synthetic construct; identical to SEQ ID NO: 3737
  REGION 1..118: note = Description of Artificial Sequence: Synthetic polypeptide
  REGION 1..118: note = VH of XENP019901

SEQ ID NO: 6202 - protein, 108 aa, synthetic construct
  REGION 1..108: note = Description of Artificial Sequence: Synthetic polypeptide
  REGION 1..108: note = VL of XENP019901
EIVLTQSPGTLSLSPGEPATLSCRASQSVGSSYLAWYQQKPGQAPRLLIYGAFSRATGIPDRFSGSGSGTDFTLTISRLEPEDFAVYYCQQYGSSPWTFGQGTKVEIK

SEQ ID NO: 6203 - protein, 5 aa, synthetic construct
  REGION 1..5: note = Description of Artificial Sequence: Synthetic peptide
  REGION 1..5: note = XENP019901 vhCDR1
SYTMH

SEQ ID NO: 6204 - protein, 17 aa, synthetic construct
  REGION 1..17: note = Description of Artificial Sequence: Synthetic peptide
  REGION 1..17: note = XENP019901 vhCDR2
FISYDGNNKYYADSVKG

SEQ ID NO: 6205 - protein, 9 aa, synthetic construct
  REGION 1..9: note = Description of Artificial Sequence: Synthetic peptide
  REGION 1..9: note = XENP019901 vhCDR3
TGWLGPFDY

SEQ ID NO: 6206 - protein, 12 aa, synthetic construct
  REGION 1..12: note = Description of Artificial Sequence: Synthetic peptide
  REGION 1..12: note = XENP019901 vlCDR1
RASQSVGSSYLA

SEQ ID NO: 6207 - protein, 7 aa, synthetic construct
  REGION 1..7: note = Description of Artificial Sequence: Synthetic peptide
  REGION 1..7: note = XENP019901 vlCDR2
GAFSRAT

SEQ ID NO: 6208 - protein, 9 aa, synthetic construct
  REGION 1..9: note = Description of Artificial Sequence: Synthetic peptide
  REGION 1..9: note = XENP019901 vlCDR3
QQYGSSPWT

SEQ ID NO: 6209 - protein, 246 aa, synthetic construct
  REGION 1..246: note = Description of Artificial Sequence: Synthetic polypeptide
  REGION 1..246: note = XENP019902 [CTLA-4]_H0_L0.14_scFv(GKPGS)4
QVQLVESGGGVVQPGRSLRLSCAASGFTFSSYTMHWVRQAPGKGLEWVTFISYDGNNKYYADSVKGRFTISRDNSKNTLYLQMNSLRAEDTAIYYCARTGWLGPFDYWGQGTLVTVSSGKPGSGKPGSGKPGSGKPGSEIVLTQSPGTLSLSPGEQATLSCRASQSVGSSYLAWYQQKPGQAPRLLIYGAFSRATGIPDRFSGSGSGTDFTLTISRLEPEDFAVYYCQQYGSSPWTFGQGTKVEIK

SEQ ID NO: 6210 - protein, 118 aa, synthetic construct; identical to SEQ ID NO: 3737
  REGION 1..118: note = Description of Artificial Sequence: Synthetic polypeptide
  REGION 1..118: note = VH of XENP019902

SEQ ID NO: 6211 - protein, 108 aa, synthetic construct
  REGION 1..108: note = Description of Artificial Sequence: Synthetic polypeptide
  REGION 1..108: note = VL of XENP019902
EIVLTQSPGTLSLSPGEQATLSCRASQSVGSSYLAWYQQKPGQAPRLLIYGAFSRATGIPDRFSGSGSGTDFTLTISRLEPEDFAVYYCQQYGSSPWTFGQGTKVEIK

SEQ ID NO: 6212 - protein, 5 aa, synthetic construct
  REGION 1..5: note = Description of Artificial Sequence: Synthetic peptide
  REGION 1..5: note = XENP019902 vhCDR1
SYTMH

SEQ ID NO: 6213 - protein, 17 aa, synthetic construct
  REGION 1..17: note = Description of Artificial Sequence: Synthetic peptide
  REGION 1..17: note = XENP019902 vhCDR2
FISYDGNNKYYADSVKG

SEQ ID NO: 6214 - protein, 9 aa, synthetic construct
  REGION 1..9: note = Description of Artificial Sequence: Synthetic peptide
  REGION 1..9: note = XENP019902 vhCDR3
TGWLGPFDY

SEQ ID NO: 6215 - protein, 12 aa, synthetic construct
  REGION 1..12: note = Description of Artificial Sequence: Synthetic peptide
  REGION 1..12: note = XENP019902 vlCDR1
RASQSVGSSYLA

SEQ ID NO: 6216 - protein, 7 aa, synthetic construct
  REGION 1..7: note = Description of Artificial Sequence: Synthetic peptide
  REGION 1..7: note = XENP019902 vlCDR2
GAFSRAT

SEQ ID NO: 6217 - protein, 9 aa, synthetic construct
  REGION 1..9: note = Description of Artificial Sequence: Synthetic peptide
  REGION 1..9: note = XENP019902 vlCDR3
QQYGSSPWT

SEQ ID NO: 6218 - protein, 246 aa, synthetic construct
  REGION 1..246: note = Description of Artificial Sequence: Synthetic polypeptide
  REGION 1..246: note = XENP019903 [CTLA-4]_H0_L0.15_scFv(GKPGS)4
QVQLVESGGGVVQPGRSLRLSCAASGFTFSSYTMHWVRQAPGKGLEWVTFISYDGNNKYYADSVKGRFTISRDNSKNTLYLQMNSLRAEDTAIYYCARTGWLGPFDYWGQGTLVTVSSGKPGSGKPGSGKPGSGKPGSEIVLTQSPGTLSLSPGERVTLSCRASQSVGSSYLAWYQQKPGQAPRLLIYGAFSRATGIPDRFSGSGSGTDFTLTISRLEPEDFAVYYCQQYGSSPWTFGQGTKVEIK

SEQ ID NO: 6219 - protein, 118 aa, synthetic construct; identical to SEQ ID NO: 3737
  REGION 1..118: note = Description of Artificial Sequence: Synthetic polypeptide
  REGION 1..118: note = VH of XENP019903

SEQ ID NO: 6220 - protein, 108 aa, synthetic construct
  REGION 1..108: note = Description of Artificial Sequence: Synthetic polypeptide
  REGION 1..108: note = VL of XENP019903
EIVLTQSPGTLSLSPGERVTLSCRASQSVGSSYLAWYQQKPGQAPRLLIYGAFSRATGIPDRFSGSGSGTDFTLTISRLEPEDFAVYYCQQYGSSPWTFGQGTKVEIK

SEQ ID NO: 6221 - protein, 5 aa, synthetic construct
  REGION 1..5: note = Description of Artificial Sequence: Synthetic peptide
  REGION 1..5: note = XENP019903 vhCDR1
SYTMH

SEQ ID NO: 6222 - protein, 17 aa, synthetic construct
  REGION 1..17: note = Description of Artificial Sequence: Synthetic peptide
  REGION 1..17: note = XENP019903 vhCDR2
FISYDGNNKYYADSVKG

SEQ ID NO: 6223 - protein, 9 aa, synthetic construct
  REGION 1..9: note = Description of Artificial Sequence: Synthetic peptide
  REGION 1..9: note = XENP019903 vhCDR3
TGWLGPFDY

SEQ ID NO: 6224 - protein, 12 aa, synthetic construct
  REGION 1..12: note = Description of Artificial Sequence: Synthetic peptide
  REGION 1..12: note = XENP019903 vlCDR1
RASQSVGSSYLA

SEQ ID NO: 6225 - protein, 7 aa, synthetic construct
  REGION 1..7: note = Description of Artificial Sequence: Synthetic peptide
  REGION 1..7: note = XENP019903 vlCDR2
GAFSRAT

SEQ ID NO: 6226 - protein, 9 aa, synthetic construct
  REGION 1..9: note = Description of Artificial Sequence: Synthetic peptide
  REGION 1..9: note = XENP019903 vlCDR3
QQYGSSPWT

SEQ ID NO: 6227 - protein, 246 aa, synthetic construct
  REGION 1..246: note = Description of Artificial Sequence: Synthetic polypeptide
  REGION 1..246: note = XENP019904 [CTLA-4]_H0_L0.16_scFv(GKPGS)4
QVQLVESGGGVVQPGRSLRLSCAASGFTFSSYTMHWVRQAPGKGLEWVTFISYDGNNKYYADSVKGRFTISRDNSKNTLYLQMNSLRAEDTAIYYCARTGWLGPFDYWGQGTLVTVSSGKPGSGKPGSGKPGSGKPGSEIVLTQSPGTLSLSPGERASLSCRASQSVGSSYLAWYQQKPGQAPRLLIYGAFSRATGIPDRFSGSGSGTDFTLTISRLEPEDFAVYYCQQYGSSPWTFGQGTKVEIK

SEQ ID NO: 6228 - protein, 118 aa, synthetic construct; identical to SEQ ID NO: 3737
  REGION 1..118: note = Description of Artificial Sequence: Synthetic polypeptide
  REGION 1..118: note = VH of XENP019904

SEQ ID NO: 6229 - protein, 108 aa, synthetic construct
  REGION 1..108: note = Description of Artificial Sequence: Synthetic polypeptide
  REGION 1..108: note = VL of XENP019904
EIVLTQSPGTLSLSPGERASLSCRASQSVGSSYLAWYQQKPGQAPRLLIYGAFSRATGIPDRFSGSGSGTDFTLTISRLEPEDFAVYYCQQYGSSPWTFGQGTKVEIK

SEQ ID NO: 6230 - protein, 5 aa, synthetic construct
  REGION 1..5: note = Description of Artificial Sequence: Synthetic peptide
  REGION 1..5: note = XENP019904 vhCDR1
SYTMH

SEQ ID NO: 6231 - protein, 17 aa, synthetic construct
  REGION 1..17: note = Description of Artificial Sequence: Synthetic peptide
  REGION 1..17: note = XENP019904 vhCDR2
FISYDGNNKYYADSVKG

SEQ ID NO: 6232 - protein, 9 aa, synthetic construct
  REGION 1..9: note = Description of Artificial Sequence: Synthetic peptide
  REGION 1..9: note = XENP019904 vhCDR3
TGWLGPFDY

SEQ ID NO: 6233 - protein, 12 aa, synthetic construct
  REGION 1..12: note = Description of Artificial Sequence: Synthetic peptide
  REGION 1..12: note = XENP019904 vlCDR1
RASQSVGSSYLA

SEQ ID NO: 6234 - protein, 7 aa, synthetic construct
  REGION 1..7: note = Description of Artificial Sequence: Synthetic peptide
  REGION 1..7: note = XENP019904 vlCDR2
GAFSRAT

SEQ ID NO: 6235 - protein, 9 aa, synthetic construct
  REGION 1..9: note = Description of Artificial Sequence: Synthetic peptide
  REGION 1..9: note = XENP019904 vlCDR3
QQYGSSPWT

SEQ ID NO: 6236 - protein, 246 aa, synthetic construct
  REGION 1..246: note = Description of Artificial Sequence: Synthetic polypeptide
  REGION 1..246: note = XENP019905 [CTLA-4]_H0_L0.17_scFv(GKPGS)4
QVQLVESGGGVVQPGRSLRLSCAASGFTFSSYTMHWVRQAPGKGLEWVTFISYDGNNKYYADSVKGRFTISRDNSKNTLYLQMNSLRAEDTAIYYCARTGWLGPFDYWGQGTLVTVSSGKPGSGKPGSGKPGSGKPGSEIVLTQSPGTLSLSPGERATISCRASQSVGSSYLAWYQQKPGQAPRLLIYGAFSRATGIPDRFSGSGSGTDFTLTISRLEPEDFAVYYCQQYGSSPWTFGQGTKVEIK

SEQ ID NO: 6237 - protein, 118 aa, synthetic construct; identical to SEQ ID NO: 3737
  REGION 1..118: note = Description of Artificial Sequence: Synthetic polypeptide
  REGION 1..118: note = VH of XENP019905

SEQ ID NO: 6238 - protein, 108 aa, synthetic construct
  REGION 1..108: note = Description of Artificial Sequence: Synthetic polypeptide
  REGION 1..108: note = VL of XENP019905
EIVLTQSPGTLSLSPGERATISCRASQSVGSSYLAWYQQKPGQAPRLLIYGAFSRATGIPDRFSGSGSGTDFTLTISRLEPEDFAVYYCQQYGSSPWTFGQGTKVEIK

SEQ ID NO: 6239 - protein, 5 aa, synthetic construct
  REGION 1..5: note = Description of Artificial Sequence: Synthetic peptide
  REGION 1..5: note = XENP019905 vhCDR1
SYTMH

SEQ ID NO: 6240 - protein, 17 aa, synthetic construct
  REGION 1..17: note = Description of Artificial Sequence: Synthetic peptide
  REGION 1..17: note = XENP019905 vhCDR2
FISYDGNNKYYADSVKG

SEQ ID NO: 6241 - protein, 9 aa, synthetic construct
  REGION 1..9: note = Description of Artificial Sequence: Synthetic peptide
  REGION 1..9: note = XENP019905 vhCDR3
TGWLGPFDY

SEQ ID NO: 6242 - protein, 12 aa, synthetic construct
  REGION 1..12: note = Description of Artificial Sequence: Synthetic peptide
  REGION 1..12: note = XENP019905 vlCDR1
RASQSVGSSYLA

SEQ ID NO: 6243 - protein, 7 aa, synthetic construct
  REGION 1..7: note = Description of Artificial Sequence: Synthetic peptide
  REGION 1..7: note = XENP019905 vlCDR2
GAFSRAT

SEQ ID NO: 6244 - protein, 9 aa, synthetic construct
  REGION 1..9: note = Description of Artificial Sequence: Synthetic peptide
  REGION 1..9: note = XENP019905 vlCDR3
QQYGSSPWT

SEQ ID NO: 6245 - protein, 246 aa, synthetic construct
  REGION 1..246: note = Description of Artificial Sequence: Synthetic polypeptide
  REGION 1..246: note = XENP019906 [CTLA-4]_H0_L0.18_scFv(GKPGS)4
QVQLVESGGGVVQPGRSLRLSCAASGFTFSSYTMHWVRQAPGKGLEWVTFISYDGNNKYYADSVKGRFTISRDNSKNTLYLQMNSLRAEDTAIYYCARTGWLGPFDYWGQGTLVTVSSGKPGSGKPGSGKPGSGKPGSEIVLTQSPGTLSLSPGERATLSCRSSQSVGSSYLAWYQQKPGQAPRLLIYGAFSRATGIPDRFSGSGSGTDFTLTISRLEPEDFAVYYCQQYGSSPWTFGQGTKVEIK

SEQ ID NO: 6246 - protein, 118 aa, synthetic construct; identical to SEQ ID NO: 3737
  REGION 1..118: note = Description of Artificial Sequence: Synthetic polypeptide
  REGION 1..118: note = VH of XENP019906

SEQ ID NO: 6247 - protein, 108 aa, synthetic construct
  REGION 1..108: note = Description of Artificial Sequence: Synthetic polypeptide
  REGION 1..108: note = VL of XENP019906
EIVLTQSPGTLSLSPGERATLSCRSSQSVGSSYLAWYQQKPGQAPRLLIYGAFSRATGIPDRFSGSGSGTDFTLTISRLEPEDFAVYYCQQYGSSPWTFGQGTKVEIK

SEQ ID NO: 6248 - protein, 5 aa, synthetic construct
  REGION 1..5: note = Description of Artificial Sequence: Synthetic peptide
  REGION 1..5: note = XENP019906 vhCDR1
SYTMH

SEQ ID NO: 6249 - protein, 17 aa, synthetic construct
  REGION 1..17: note = Description of Artificial Sequence: Synthetic peptide
  REGION 1..17: note = XENP019906 vhCDR2
FISYDGNNKYYADSVKG

SEQ ID NO: 6250 - protein, 9 aa, synthetic construct
  REGION 1..9: note = Description of Artificial Sequence: Synthetic peptide
  REGION 1..9: note = XENP019906 vhCDR3
TGWLGPFDY

SEQ ID NO: 6251 - protein, 12 aa, synthetic construct
  REGION 1..12: note = Description of Artificial Sequence: Synthetic peptide
  REGION 1..12: note = XENP019906 vlCDR1
RSSQSVGSSYLA

SEQ ID NO: 6252 - protein, 7 aa, synthetic construct
  REGION 1..7: note = Description of Artificial Sequence: Synthetic peptide
  REGION 1..7: note = XENP019906 vlCDR2
GAFSRAT

SEQ ID NO: 6253 - protein, 9 aa, synthetic construct
  REGION 1..9: note = Description of Artificial Sequence: Synthetic peptide
  REGION 1..9: note = XENP019906 vlCDR3
QQYGSSPWT

SEQ ID NO: 6254 - protein, 246 aa, synthetic construct
  REGION 1..246: note = Description of Artificial Sequence: Synthetic polypeptide
  REGION 1..246: note = XENP019907 [CTLA-4]_H0_L0.19_scFv(GKPGS)4
QVQLVESGGGVVQPGRSLRLSCAASGFTFSSYTMHWVRQAPGKGLEWVTFISYDGNNKYYADSVKGRFTISRDNSKNTLYLQMNSLRAEDTAIYYCARTGWLGPFDYWGQGTLVTVSSGKPGSGKPGSGKPGSGKPGSEIVLTQSPGTLSLSPGERATLSCRASQSDGSSYLAWYQQKPGQAPRLLIYGAFSRATGIPDRFSGSGSGTDFTLTISRLEPEDFAVYYCQQYGSSPWTFGQGTKVEIK

SEQ ID NO: 6255 - protein, 118 aa, synthetic construct; identical to SEQ ID NO: 3737
  REGION 1..118: note = Description of Artificial Sequence: Synthetic polypeptide
  REGION 1..118: note = VH of XENP019907

SEQ ID NO: 6256 - protein, 108 aa, synthetic construct
  REGION 1..108: note = Description of Artificial Sequence: Synthetic polypeptide
  REGION 1..108: note = VL of XENP019907
EIVLTQSPGTLSLSPGERATLSCRASQSDGSSYLAWYQQKPGQAPRLLIYGAFSRATGIPDRFSGSGSGTDFTLTISRLEPEDFAVYYCQQYGSSPWTFGQGTKVEIK

SEQ ID NO: 6257 - protein, 5 aa, synthetic construct
  REGION 1..5: note = Description of Artificial Sequence: Synthetic peptide
  REGION 1..5: note = XENP019907 vhCDR1
SYTMH

SEQ ID NO: 6258 - protein, 17 aa, synthetic construct
  REGION 1..17: note = Description of Artificial Sequence: Synthetic peptide
  REGION 1..17: note = XENP019907 vhCDR2
FISYDGNNKYYADSVKG

SEQ ID NO: 6259 - protein, 9 aa, synthetic construct
  REGION 1..9: note = Description of Artificial Sequence: Synthetic peptide
  REGION 1..9: note = XENP019907 vhCDR3
TGWLGPFDY

SEQ ID NO: 6260 - protein, 12 aa, synthetic construct
  REGION 1..12: note = Description of Artificial Sequence: Synthetic peptide
  REGION 1..12: note = XENP019907 vlCDR1
RASQSDGSSYLA

SEQ ID NO: 6261 - protein, 7 aa, synthetic construct
  REGION 1..7: note = Description of Artificial Sequence: Synthetic peptide
  REGION 1..7: note = XENP019907 vlCDR2
GAFSRAT

SEQ ID NO: 6262 - protein, 9 aa, synthetic construct
  REGION 1..9: note = Description of Artificial Sequence: Synthetic peptide
  REGION 1..9: note = XENP019907 vlCDR3
QQYGSSPWT

SEQ ID NO: 6263 - protein, 246 aa, synthetic construct
  REGION 1..246: note = Description of Artificial Sequence: Synthetic polypeptide
  REGION 1..246: note = XENP019908 [CTLA-4]_H0_L0.20_scFv(GKPGS)4
QVQLVESGGGVVQPGRSLRLSCAASGFTFSSYTMHWVRQAPGKGLEWVTFISYDGNNKYYADSVKGRFTISRDNSKNTLYLQMNSLRAEDTAIYYCARTGWLGPFDYWGQGTLVTVSSGKPGSGKPGSGKPGSGKPGSEIVLTQSPGTLSLSPGERATLSCRASQSSGSSYLAWYQQKPGQAPRLLIYGAFSRATGIPDRFSGSGSGTDFTLTISRLEPEDFAVYYCQQYGSSPWTFGQGTKVEIK

SEQ ID NO: 6264 - protein, 118 aa, synthetic construct; identical to SEQ ID NO: 3737
  REGION 1..118: note = Description of Artificial Sequence: Synthetic polypeptide
  REGION 1..118: note = VH of XENP019908

SEQ ID NO: 6265 - protein, 108 aa, synthetic construct
  REGION 1..108: note = Description of Artificial Sequence: Synthetic polypeptide
  REGION 1..108: note = VL of XENP019908
EIVLTQSPGTLSLSPGERATLSCRASQSSGSSYLAWYQQKPGQAPRLLIYGAFSRATGIPDRFSGSGSGTDFTLTISRLEPEDFAVYYCQQYGSSPWTFGQGTKVEIK

SEQ ID NO: 6266 - protein, 5 aa, synthetic construct
  REGION 1..5: note = Description of Artificial Sequence: Synthetic peptide
  REGION 1..5: note = XENP019908 vhCDR1
SYTMH

SEQ ID NO: 6267 - protein, 17 aa, synthetic construct
  REGION 1..17: note = Description of Artificial Sequence: Synthetic peptide
  REGION 1..17: note = XENP019908 vhCDR2
FISYDGNNKYYADSVKG

SEQ ID NO: 6268 - protein, 9 aa, synthetic construct
  REGION 1..9: note = Description of Artificial Sequence: Synthetic peptide
  REGION 1..9: note = XENP019908 vhCDR3
TGWLGPFDY

SEQ ID NO: 6269 - protein, 12 aa, synthetic construct
  REGION 1..12: note = Description of Artificial Sequence: Synthetic peptide
  REGION 1..12: note = XENP019908 vlCDR1
RASQSSGSSYLA

SEQ ID NO: 6270 - protein, 7 aa, synthetic construct
  REGION 1..7: note = Description of Artificial Sequence: Synthetic peptide
  REGION 1..7: note = XENP019908 vlCDR2
GAFSRAT

SEQ ID NO: 6271 - protein, 9 aa, synthetic construct
  REGION 1..9: note = Description of Artificial Sequence: Synthetic peptide
  REGION 1..9: note = XENP019908 vlCDR3
QQYGSSPWT

SEQ ID NO: 6272 - protein, 246 aa, synthetic construct
  REGION 1..246: note = Description of Artificial Sequence: Synthetic polypeptide
  REGION 1..246: note = XENP019909 [CTLA-4]_H0_L0.21_scFv(GKPGS)4
QVQLVESGGGVVQPGRSLRLSCAASGFTFSSYTMHWVRQAPGKGLEWVTFISYDGNNKYYADSVKGRFTISRDNSKNTLYLQMNSLRAEDTAIYYCARTGWLGPFDYWGQGTLVTVSSGKPGSGKPGSGKPGSGKPGSEIVLTQSPGTLSLSPGERATLSCRASQSVASSYLAWYQQKPGQAPRLLIYGAFSRATGIPDRFSGSGSGTDFTLTISRLEPEDFAVYYCQQYGSSPWTFGQGTKVEIK

SEQ ID NO: 6273 - protein, 118 aa, synthetic construct; identical to SEQ ID NO: 3737
  REGION 1..118: note = Description of Artificial Sequence: Synthetic polypeptide
  REGION 1..118: note = VH of XENP019909

SEQ ID NO: 6274 - protein, 108 aa, synthetic construct
  REGION 1..108: note = Description of Artificial Sequence: Synthetic polypeptide
  REGION 1..108: note = VL of XENP019909
EIVLTQSPGTLSLSPGERATLSCRASQSVASSYLAWYQQKPGQAPRLLIYGAFSRATGIPDRFSGSGSGTDFTLTISRLEPEDFAVYYCQQYGSSPWTFGQGTKVEIK

SEQ ID NO: 6275 - protein, 5 aa, synthetic construct
  REGION 1..5: note = Description of Artificial Sequence: Synthetic peptide
  REGION 1..5: note = XENP019909 vhCDR1
SYTMH

SEQ ID NO: 6276 - protein, 17 aa, synthetic construct
  REGION 1..17: note = Description of Artificial Sequence: Synthetic peptide
  REGION 1..17: note = XENP019909 vhCDR2
FISYDGNNKYYADSVKG

SEQ ID NO: 6277 - protein, 9 aa, synthetic construct
  REGION 1..9: note = Description of Artificial Sequence: Synthetic peptide
  REGION 1..9: note = XENP019909 vhCDR3
TGWLGPFDY

SEQ ID NO: 6278 - protein, 12 aa, synthetic construct
  REGION 1..12: note = Description of Artificial Sequence: Synthetic peptide
  REGION 1..12: note = XENP019909 vlCDR1
RASQSVASSYLA

SEQ ID NO: 6279 - protein, 7 aa, synthetic construct
  REGION 1..7: note = Description of Artificial Sequence: Synthetic peptide
  REGION 1..7: note = XENP019909 vlCDR2
GAFSRAT

SEQ ID NO: 6280 - protein, 9 aa, synthetic construct
  REGION 1..9: note = Description of Artificial Sequence: Synthetic peptide
  REGION 1..9: note = XENP019909 vlCDR3
QQYGSSPWT

SEQ ID NO: 6281 - protein, 246 aa, synthetic construct
  REGION 1..246: note = Description of Artificial Sequence: Synthetic polypeptide
  REGION 1..246: note = XENP019910 [CTLA-4]_H0_L0.22_scFv(GKPGS)4
QVQLVESGGGVVQPGRSLRLSCAASGFTFSSYTMHWVRQAPGKGLEWVTFISYDGNNKYYADSVKGRFTISRDNSKNTLYLQMNSLRAEDTAIYYCARTGWLGPFDYWGQGTLVTVSSGKPGSGKPGSGKPGSGKPGSEIVLTQSPGTLSLSPGERATLSCRASQSVSSSYLAWYQQKPGQAPRLLIYGAFSRATGIPDRFSGSGSGTDFTLTISRLEPEDFAVYYCQQYGSSPWTFGQGTKVEIK

SEQ ID NO: 6282 - protein, 118 aa, synthetic construct; identical to SEQ ID NO: 3737
  REGION 1..118: note = Description of Artificial Sequence: Synthetic polypeptide
  REGION 1..118: note = VH of XENP019910

SEQ ID NO: 6283 - protein, 108 aa, synthetic construct; identical to SEQ ID NO: 2411
  REGION 1..108: note = Description of Artificial Sequence: Synthetic polypeptide
  REGION 1..108: note = VL of XENP019910

SEQ ID NO: 6284 - protein, 5 aa, synthetic construct
  REGION 1..5: note = Description of Artificial Sequence: Synthetic peptide
  REGION 1..5: note = XENP019910 vhCDR1
SYTMH

SEQ ID NO: 6285 - protein, 17 aa, synthetic construct
  REGION 1..17: note = Description of Artificial Sequence: Synthetic peptide
  REGION 1..17: note = XENP019910 vhCDR2
FISYDGNNKYYADSVKG

SEQ ID NO: 6286 - protein, 9 aa, synthetic construct
  REGION 1..9: note = Description of Artificial Sequence: Synthetic peptide
  REGION 1..9: note = XENP019910 vhCDR3
TGWLGPFDY

SEQ ID NO: 6287 - protein, 12 aa, synthetic construct
  REGION 1..12: note = Description of Artificial Sequence: Synthetic peptide
  REGION 1..12: note = XENP019910 vlCDR1
RASQSVSSSYLA

SEQ ID NO: 6288 - protein, 7 aa, synthetic construct
  REGION 1..7: note = Description of Artificial Sequence: Synthetic peptide
  REGION 1..7: note = XENP019910 vlCDR2
GAFSRAT

SEQ ID NO: 6289 - protein, 9 aa, synthetic construct
  REGION 1..9: note = Description of Artificial Sequence: Synthetic peptide
  REGION 1..9: note = XENP019910 vlCDR3
QQYGSSPWT

SEQ ID NO: 6290 - protein, 246 aa, synthetic construct
  REGION 1..246: note = Description of Artificial Sequence: Synthetic polypeptide
  REGION 1..246: note = XENP019911 [CTLA-4]_H0_L0.23_scFv(GKPGS)4
QVQLVESGGGVVQPGRSLRLSCAASGFTFSSYTMHWVRQAPGKGLEWVTFISYDGNNKYYADSVKGRFTISRDNSKNTLYLQMNSLRAEDTAIYYCARTGWLGPFDYWGQGTLVTVSSGKPGSGKPGSGKPGSGKPGSEIVLTQSPGTLSLSPGERATLSCRASQSVTSSYLAWYQQKPGQAPRLLIYGAFSRATGIPDRFSGSGSGTDFTLTISRLEPEDFAVYYCQQYGSSPWTFGQGTKVEIK

SEQ ID NO: 6291 - protein, 118 aa, synthetic construct; identical to SEQ ID NO: 3737
  REGION 1..118: note = Description of Artificial Sequence: Synthetic polypeptide
  REGION 1..118: note = VH of XENP019911

SEQ ID NO: 6292 - protein, 108 aa, synthetic construct
  REGION 1..108: note = Description of Artificial Sequence: Synthetic polypeptide
  REGION 1..108: note = VL of XENP019911
EIVLTQSPGTLSLSPGERATLSCRASQSVTSSYLAWYQQKPGQAPRLLIYGAFSRATGIPDRFSGSGSGTDFTLTISRLEPEDFAVYYCQQYGSSPWTFGQGTKVEIK

SEQ ID NO: 6293 - protein, 5 aa, synthetic construct
  REGION 1..5: note = Description of Artificial Sequence: Synthetic peptide
  REGION 1..5: note = XENP019911 vhCDR1
SYTMH

SEQ ID NO: 6294 - protein, 17 aa, synthetic construct
  REGION 1..17: note = Description of Artificial Sequence: Synthetic peptide
  REGION 1..17: note = XENP019911 vhCDR2
FISYDGNNKYYADSVKG

SEQ ID NO: 6295 - protein, 9 aa, synthetic construct
  REGION 1..9: note = Description of Artificial Sequence: Synthetic peptide
  REGION 1..9: note = XENP019911 vhCDR3
TGWLGPFDY

SEQ ID NO: 6296 - protein, 12 aa, synthetic construct
  REGION 1..12: note = Description of Artificial Sequence: Synthetic peptide
  REGION 1..12: note = XENP019911 vlCDR1
RASQSVTSSYLA

SEQ ID NO: 6297 - protein, 7 aa, synthetic construct
  REGION 1..7: note = Description of Artificial Sequence: Synthetic peptide
  REGION 1..7: note = XENP019911 vlCDR2
GAFSRAT

SEQ ID NO: 6298 - protein, 9 aa, synthetic construct
  REGION 1..9: note = Description of Artificial Sequence: Synthetic peptide
  REGION 1..9: note = XENP019911 vlCDR3
QQYGSSPWT

SEQ ID NO: 6299 - protein, 246 aa, synthetic construct
  REGION 1..246: note = Description of Artificial Sequence: Synthetic polypeptide
  REGION 1..246: note = XENP019912 [CTLA-4]_H0_L0.24_scFv(GKPGS)4
QVQLVESGGGVVQPGRSLRLSCAASGFTFSSYTMHWVRQAPGKGLEWVTFISYDGNNKYYADSVKGRFTISRDNSKNTLYLQMNSLRAEDTAIYYCARTGWLGPFDYWGQGTLVTVSSGKPGSGKPGSGKPGSGKPGSEIVLTQSPGTLSLSPGERATLSCRASQSVGASYLAWYQQKPGQAPRLLIYGAFSRATGIPDRFSGSGSGTDFTLTISRLEPEDFAVYYCQQYGSSPWTFGQGTKVEIK

SEQ ID NO: 6300 - protein, 118 aa, synthetic construct; identical to SEQ ID NO: 3737
  REGION 1..118: note = Description of Artificial Sequence: Synthetic polypeptide
  REGION 1..118: note = VH of XENP019912

SEQ ID NO: 6301 - protein, 108 aa, synthetic construct
  REGION 1..108: note = Description of Artificial Sequence: Synthetic polypeptide
  REGION 1..108: note = VL of XENP019912
EIVLTQSPGTLSLSPGERATLSCRASQSVGASYLAWYQQKPGQAPRLLIYGAFSRATGIPDRFSGSGSGTDFTLTISRLEPEDFAVYYCQQYGSSPWTFGQGTKVEIK

SEQ ID NO: 6302 - protein, 5 aa, synthetic construct
  REGION 1..5: note = Description of Artificial Sequence: Synthetic peptide
  REGION 1..5: note = XENP019912 vhCDR1
SYTMH

SEQ ID NO: 6303 - protein, 17 aa, synthetic construct
  REGION 1..17: note = Description of Artificial Sequence: Synthetic peptide
  REGION 1..17: note = XENP019912 vhCDR2
FISYDGNNKYYADSVKG

SEQ ID NO: 6304 - protein, 9 aa, synthetic construct
  REGION 1..9: note = Description of Artificial Sequence: Synthetic peptide
  REGION 1..9: note = XENP019912 vhCDR3
TGWLGPFDY

SEQ ID NO: 6305 - protein, 12 aa, synthetic construct
  REGION 1..12: note = Description of Artificial Sequence: Synthetic peptide
  REGION 1..12: note = XENP019912 vlCDR1
RASQSVGASYLA

SEQ ID NO: 6306 - protein, 7 aa, synthetic construct
  REGION 1..7: note = Description of Artificial Sequence: Synthetic peptide
  REGION 1..7: note = XENP019912 vlCDR2
GAFSRAT

SEQ ID NO: 6307 - protein, 9 aa, synthetic construct
  REGION 1..9: note = Description of Artificial Sequence: Synthetic peptide
  REGION 1..9: note = XENP019912 vlCDR3
QQYGSSPWT

SEQ ID NO: 6308 - protein, 246 aa, synthetic construct
  REGION 1..246: note = Description of Artificial Sequence: Synthetic polypeptide
  REGION 1..246: note = XENP019913 [CTLA-4]_H0_L0.25_scFv(GKPGS)4
QVQLVESGGGVVQPGRSLRLSCAASGFTFSSYTMHWVRQAPGKGLEWVTFISYDGNNKYYADSVKGRFTISRDNSKNTLYLQMNSLRAEDTAIYYCARTGWLGPFDYWGQGTLVTVSSGKPGSGKPGSGKPGSGKPGSEIVLTQSPGTLSLSPGERATLSCRASQSVGGSYLAWYQQKPGQAPRLLIYGAFSRATGIPDRFSGSGSGTDFTLTISRLEPEDFAVYYCQQYGSSPWTFGQGTKVEIK

SEQ ID NO: 6309 - protein, 118 aa, synthetic construct; identical to SEQ ID NO: 3737
  REGION 1..118: note = Description of Artificial Sequence: Synthetic polypeptide
  REGION 1..118: note = VH of XENP019913

SEQ ID NO: 6310 - protein, 108 aa, synthetic construct
  REGION 1..108: note = Description of Artificial Sequence: Synthetic polypeptide
  REGION 1..108: note = VL of XENP019913
EIVLTQSPGTLSLSPGERATLSCRASQSVGGSYLAWYQQKPGQAPRLLIYGAFSRATGIPDRFSGSGSGTDFTLTISRLEPEDFAVYYCQQYGSSPWTFGQGTKVEIK

SEQ ID NO: 6311 - protein, 5 aa, synthetic construct
  REGION 1..5: note = Description of Artificial Sequence: Synthetic peptide
  REGION 1..5: note = XENP019913 vhCDR1
SYTMH

SEQ ID NO: 6312 - protein, 17 aa, synthetic construct
  REGION 1..17: note = Description of Artificial Sequence: Synthetic peptide
  REGION 1..17: note = XENP019913 vhCDR2
FISYDGNNKYYADSVKG

SEQ ID NO: 6313 - protein, 9 aa, synthetic construct
  REGION 1..9: note = Description of Artificial Sequence: Synthetic peptide
  REGION 1..9: note = XENP019913 vhCDR3
TGWLGPFDY

SEQ ID NO: 6314 - protein, 12 aa, synthetic construct
  REGION 1..12: note = Description of Artificial Sequence: Synthetic peptide
  REGION 1..12: note = XENP019913 vlCDR1
RASQSVGGSYLA

SEQ ID NO: 6315 - protein, 7 aa, synthetic construct
  REGION 1..7: note = Description of Artificial Sequence: Synthetic peptide
  REGION 1..7: note = XENP019913 vlCDR2
GAFSRAT

SEQ ID NO: 6316 - protein, 9 aa, synthetic construct
  REGION 1..9: note = Description of Artificial Sequence: Synthetic peptide
  REGION 1..9: note = XENP019913 vlCDR3
QQYGSSPWT

SEQ ID NO: 6317 - protein, 246 aa, synthetic construct
  REGION 1..246: note = Description of Artificial Sequence: Synthetic polypeptide
  REGION 1..246: note = XENP019914 [CTLA-4]_H0_L0.26_scFv(GKPGS)4
QVQLVESGGGVVQPGRSLRLSCAASGFTFSSYTMHWVRQAPGKGLEWVTFISYDGNNKYYADSVKGRFTISRDNSKNTLYLQMNSLRAEDTAIYYCARTGWLGPFDYWGQGTLVTVSSGKPGSGKPGSGKPGSGKPGSEIVLTQSPGTLSLSPGERATLSCRASQSVGNSYLAWYQQKPGQAPRLLIYGAFSRATGIPDRFSGSGSGTDFTLTISRLEPEDFAVYYCQQYGSSPWTFGQGTKVEIK

SEQ ID NO: 6318 - protein, 118 aa, synthetic construct; identical to SEQ ID NO: 3737
  REGION 1..118: note = Description of Artificial Sequence: Synthetic polypeptide
  REGION 1..118: note = VH of XENP019914

SEQ ID NO: 6319 - protein, 108 aa, synthetic construct
  REGION 1..108: note = Description of Artificial Sequence: Synthetic polypeptide
  REGION 1..108: note = VL of XENP019914
EIVLTQSPGTLSLSPGERATLSCRASQSVGNSYLAWYQQKPGQAPRLLIYGAFSRATGIPDRFSGSGSGTDFTLTISRLEPEDFAVYYCQQYGSSPWTFGQGTKVEIK

SEQ ID NO: 6320 - protein, 5 aa, synthetic construct
  REGION 1..5: note = Description of Artificial Sequence: Synthetic peptide
  REGION 1..5: note = XENP019914 vhCDR1
SYTMH

SEQ ID NO: 6321 - protein, 17 aa, synthetic construct
  REGION 1..17: note = Description of Artificial Sequence: Synthetic peptide
  REGION 1..17: note = XENP019914 vhCDR2
FISYDGNNKYYADSVKG

SEQ ID NO: 6322 - protein, 9 aa, synthetic construct
  REGION 1..9: note = Description of Artificial Sequence: Synthetic peptide
  REGION 1..9: note = XENP019914 vhCDR3
TGWLGPFDY

SEQ ID NO: 6323 - protein, 12 aa, synthetic construct
  REGION 1..12: note = Description of Artificial Sequence: Synthetic peptide
  REGION 1..12: note = XENP019914 vlCDR1
RASQSVGNSYLA

SEQ ID NO: 6324 - protein, 7 aa, synthetic construct
  REGION 1..7: note = Description of Artificial Sequence: Synthetic peptide
  REGION 1..7: note = XENP019914 vlCDR2
GAFSRAT

SEQ ID NO: 6325 - protein, 9 aa, synthetic construct
  REGION 1..9: note = Description of Artificial Sequence: Synthetic peptide
  REGION 1..9: note = XENP019914 vlCDR3
QQYGSSPWT

SEQ ID NO: 6326 - protein, 246 aa, synthetic construct
  REGION 1..246: note = Description of Artificial Sequence: Synthetic polypeptide
  REGION 1..246: note = XENP019915 [CTLA-4]_H0_L0.27_scFv(GKPGS)4
QVQLVESGGGVVQPGRSLRLSCAASGFTFSSYTMHWVRQAPGKGLEWVTFISYDGNNKYYADSVKGRFTISRDNSKNTLYLQMNSLRAEDTAIYYCARTGWLGPFDYWGQGTLVTVSSGKPGSGKPGSGKPGSGKPGSEIVLTQSPGTLSLSPGERATLSCRASQSVGQSYLAWYQQKPGQAPRLLIYGAFSRATGIPDRFSGSGSGTDFTLTISRLEPEDFAVYYCQQYGSSPWTFGQGTKVEIK

SEQ ID NO: 6327 - protein, 118 aa, synthetic construct; identical to SEQ ID NO: 3737
  REGION 1..118: note = Description of Artificial Sequence: Synthetic polypeptide
  REGION 1..118: note = VH of XENP019915

SEQ ID NO: 6328 - protein, 108 aa, synthetic construct
  REGION 1..108: note = Description of Artificial Sequence: Synthetic polypeptide
  REGION 1..108: note = VL of XENP019915
EIVLTQSPGTLSLSPGERATLSCRASQSVGQSYLAWYQQKPGQAPRLLIYGAFSRATGIPDRFSGSGSGTDFTLTISRLEPEDFAVYYCQQYGSSPWTFGQGTKVEIK

SEQ ID NO: 6329 - protein, 5 aa, synthetic construct
  REGION 1..5: note = Description of Artificial Sequence: Synthetic peptide
  REGION 1..5: note = XENP019915 vhCDR1
SYTMH

SEQ ID NO: 6330 - protein, 17 aa, synthetic construct
  REGION 1..17: note = Description of Artificial Sequence: Synthetic peptide
  REGION 1..17: note = XENP019915 vhCDR2
FISYDGNNKYYADSVKG

SEQ ID NO: 6331 - protein, 9 aa, synthetic construct
  REGION 1..9: note = Description of Artificial Sequence: Synthetic peptide
  REGION 1..9: note = XENP019915 vhCDR3
TGWLGPFDY

SEQ ID NO: 6332 - protein, 12 aa, synthetic construct
  REGION 1..12: note = Description of Artificial Sequence: Synthetic peptide
  REGION 1..12: note = XENP019915 vlCDR1
RASQSVGQSYLA

SEQ ID NO: 6333 - protein, 7 aa, synthetic construct
  REGION 1..7: note = Description of Artificial Sequence: Synthetic peptide
  REGION 1..7: note = XENP019915 vlCDR2
GAFSRAT

SEQ ID NO: 6334 - protein, 9 aa, synthetic construct
  REGION 1..9: note = Description of Artificial Sequence: Synthetic peptide
  REGION 1..9: note = XENP019915 vlCDR3
QQYGSSPWT

SEQ ID NO: 6335 - protein, 246 aa, synthetic construct
  REGION 1..246: note = Description of Artificial Sequence: Synthetic polypeptide
  REGION 1..246: note = XENP019916 [CTLA-4]_H0_L0.28_scFv(GKPGS)4
QVQLVESGGGVVQPGRSLRLSCAASGFTFSSYTMHWVRQAPGKGLEWVTFISYDGNNKYYADSVKGRFTISRDNSKNTLYLQMNSLRAEDTAIYYCARTGWLGPFDYWGQGTLVTVSSGKPGSGKPGSGKPGSGKPGSEIVLTQSPGTLSLSPGERATLSCRASQSVGTSYLAWYQQKPGQAPRLLIYGAFSRATGIPDRFSGSGSGTDFTLTISRLEPEDFAVYYCQQYGSSPWTFGQGTKVEIK

SEQ ID NO: 6336 - protein, 118 aa, synthetic construct; identical to SEQ ID NO: 3737
  REGION 1..118: note = Description of Artificial Sequence: Synthetic polypeptide
  REGION 1..118: note = VH of XENP019916

SEQ ID NO: 6337 - protein, 108 aa, synthetic construct
  REGION 1..108: note = Description of Artificial Sequence: Synthetic polypeptide
  REGION 1..108: note = VL of XENP019916
EIVLTQSPGTLSLSPGERATLSCRASQSVGTSYLAWYQQKPGQAPRLLIYGAFSRATGIPDRFSGSGSGTDFTLTISRLEPEDFAVYYCQQYGSSPWTFGQGTKVEIK

SEQ ID NO: 6338 - protein, 5 aa, synthetic construct
  REGION 1..5: note = Description of Artificial Sequence: Synthetic peptide
  REGION 1..5: note = XENP019916 vhCDR1
SYTMH

SEQ ID NO: 6339 - protein, 17 aa, synthetic construct
  REGION 1..17: note = Description of Artificial Sequence: Synthetic peptide
  REGION 1..17: note = XENP019916 vhCDR2
FISYDGNNKYYADSVKG

SEQ ID NO: 6340 - protein, 9 aa, synthetic construct
  REGION 1..9: note = Description of Artificial Sequence: Synthetic peptide
  REGION 1..9: note = XENP019916 vhCDR3
TGWLGPFDY

SEQ ID NO: 6341 - protein, 12 aa, synthetic construct
  REGION 1..12: note = Description of Artificial Sequence: Synthetic peptide
  REGION 1..12: note = XENP019916 vlCDR1
RASQSVGTSYLA

SEQ ID NO: 6342 - protein, 7 aa, synthetic construct
  REGION 1..7: note = Description of Artificial Sequence: Synthetic peptide
  REGION 1..7: note = XENP019916 vlCDR2
GAFSRAT

SEQ ID NO: 6343 - protein, 9 aa, synthetic construct
  REGION 1..9: note = Description of Artificial Sequence: Synthetic peptide
  REGION 1..9: note = XENP019916 vlCDR3
QQYGSSPWT

SEQ ID NO: 6344 - protein, 246 aa, synthetic construct
  REGION 1..246: note = Description of Artificial Sequence: Synthetic polypeptide
  REGION 1..246: note = XENP019917 [CTLA-4]_H0_L0.29_scFv(GKPGS)4
QVQLVESGGGVVQPGRSLRLSCAASGFTFSSYTMHWVRQAPGKGLEWVTFISYDGNNKYYADSVKGRFTISRDNSKNTLYLQMNSLRAEDTAIYYCARTGWLGPFDYWGQGTLVTVSSGKPGSGKPGSGKPGSGKPGSEIVLTQSPGTLSLSPGERATLSCRASQSVGSAYLAWYQQKPGQAPRLLIYGAFSRATGIPDRFSGSGSGTDFTLTISRLEPEDFAVYYCQQYGSSPWTFGQGTKVEIK

SEQ ID NO: 6345 - protein, 118 aa, synthetic construct; identical to SEQ ID NO: 3737
  REGION 1..118: note = Description of Artificial Sequence: Synthetic polypeptide
  REGION 1..118: note = VH of XENP019917

SEQ ID NO: 6346 - protein, 108 aa, synthetic construct
  REGION 1..108: note = Description of Artificial Sequence: Synthetic polypeptide
  REGION 1..108: note = VL of XENP019917
EIVLTQSPGTLSLSPGERATLSCRASQSVGSAYLAWYQQKPGQAPRLLIYGAFSRATGIPDRFSGSGSGTDFTLTISRLEPEDFAVYYCQQYGSSPWTFGQGTKVEIK

SEQ ID NO: 6347 - protein, 5 aa, synthetic construct
  REGION 1..5: note = Description of Artificial Sequence: Synthetic peptide
  REGION 1..5: note = XENP019917 vhCDR1
SYTMH

SEQ ID NO: 6348 - protein, 17 aa, synthetic construct
  REGION 1..17: note = Description of Artificial Sequence: Synthetic peptide
  REGION 1..17: note = XENP019917 vhCDR2
FISYDGNNKYYADSVKG

SEQ ID NO: 6349 - protein, 9 aa, synthetic construct
  REGION 1..9: note = Description of Artificial Sequence: Synthetic peptide
  REGION 1..9: note = XENP019917 vhCDR3
TGWLGPFDY

SEQ ID NO: 6350 - protein, 12 aa, synthetic construct
  REGION 1..12: note = Description of Artificial Sequence: Synthetic peptide
  REGION 1..12: note = XENP019917 vlCDR1
RASQSVGSAYLA

SEQ ID NO: 6351 - protein, 7 aa, synthetic construct
  REGION 1..7: note = Description of Artificial Sequence: Synthetic peptide
  REGION 1..7: note = XENP019917 vlCDR2
GAFSRAT

SEQ ID NO: 6352 - protein, 9 aa, synthetic construct
  REGION 1..9: note = Description of Artificial Sequence: Synthetic peptide
  REGION 1..9: note = XENP019917 vlCDR3
QQYGSSPWT

SEQ ID NO: 6353 - protein, 246 aa, synthetic construct
  REGION 1..246: note = Description of Artificial Sequence: Synthetic polypeptide
  REGION 1..246: note = XENP019918 [CTLA-4]_H0_L0.30_scFv(GKPGS)4
QVQLVESGGGVVQPGRSLRLSCAASGFTFSSYTMHWVRQAPGKGLEWVTFISYDGNNKYYADSVKGRFTISRDNSKNTLYLQMNSLRAEDTAIYYCARTGWLGPFDYWGQGTLVTVSSGKPGSGKPGSGKPGSGKPGSEIVLTQSPGTLSLSPGERATLSCRASQSVGSGYLAWYQQKPGQAPRLLIYGAFSRATGIPDRFSGSGSGTDFTLTISRLEPEDFAVYYCQQYGSSPWTFGQGTKVEIK

SEQ ID NO: 6354 - protein, 118 aa, synthetic construct; identical to SEQ ID NO: 3737
  REGION 1..118: note = Description of Artificial Sequence: Synthetic polypeptide
  REGION 1..118: note = VH of XENP019918

SEQ ID NO: 6355 - protein, 108 aa, synthetic construct
  REGION 1..108: note = Description of Artificial Sequence: Synthetic polypeptide
  REGION 1..108: note = VL of XENP019918
EIVLTQSPGTLSLSPGERATLSCRASQSVGSGYLAWYQQKPGQAPRLLIYGAFSRATGIPDRFSGSGSGTDFTLTISRLEPEDFAVYYCQQYGSSPWTFGQGTKVEIK

SEQ ID NO: 6356 - protein, 5 aa, synthetic construct
  REGION 1..5: note = Description of Artificial Sequence: Synthetic peptide
  REGION 1..5: note = XENP019918 vhCDR1
SYTMH

SEQ ID NO: 6357 - protein, 17 aa, synthetic construct
  REGION 1..17: note = Description of Artificial Sequence: Synthetic peptide
  REGION 1..17: note = XENP019918 vhCDR2
FISYDGNNKYYADSVKG

SEQ ID NO: 6358 - protein, 9 aa, synthetic construct
  REGION 1..9: note = Description of Artificial Sequence: Synthetic peptide
  REGION 1..9: note = XENP019918 vhCDR3
TGWLGPFDY

SEQ ID NO: 6359 - protein, 12 aa, synthetic construct
  REGION 1..12: note = Description of Artificial Sequence: Synthetic peptide
  REGION 1..12: note = XENP019918 vlCDR1
RASQSVGSGYLA

SEQ ID NO: 6360 - protein, 7 aa, synthetic construct
  REGION 1..7: note = Description of Artificial Sequence: Synthetic peptide
  REGION 1..7: note = XENP019918 vlCDR2
GAFSRAT

SEQ ID NO: 6361 - protein, 9 aa, synthetic construct
  REGION 1..9: note = Description of Artificial Sequence: Synthetic peptide
  REGION 1..9: note = XENP019918 vlCDR3
QQYGSSPWT

SEQ ID NO: 6362 - protein, 246 aa, synthetic construct
  REGION 1..246: note = Description of Artificial Sequence: Synthetic polypeptide
  REGION 1..246: note = XENP019919 [CTLA-4]_H0_L0.31_scFv(GKPGS)4
QVQLVESGGGVVQPGRSLRLSCAASGFTFSSYTMHWVRQAPGKGLEWVTFISYDGNNKYYADSVKGRFTISRDNSKNTLYLQMNSLRAEDTAIYYCARTGWLGPFDYWGQGTLVTVSSGKPGSGKPGSGKPGSGKPGSEIVLTQSPGTLSLSPGERATLSCRASQSVGSNYLAWYQQKPGQAPRLLIYGAFSRATGIPDRFSGSGSGTDFTLTISRLEPEDFAVYYCQQYGSSPWTFGQGTKVEIK

SEQ ID NO: 6363 - protein, 118 aa, synthetic construct; identical to SEQ ID NO: 3737
  REGION 1..118: note = Description of Artificial Sequence: Synthetic polypeptide
  REGION 1..118: note = VH of XENP019919

SEQ ID NO: 6364 - protein, 108 aa, synthetic construct
  REGION 1..108: note = Description of Artificial Sequence: Synthetic polypeptide
  REGION 1..108: note = VL of XENP019919
EIVLTQSPGTLSLSPGERATLSCRASQSVGSNYLAWYQQKPGQAPRLLIYGAFSRATGIPDRFSGSGSGTDFTLTISRLEPEDFAVYYCQQYGSSPWTFGQGTKVEIK

SEQ ID NO: 6365 - protein, 5 aa, synthetic construct
  REGION 1..5: note = Description of Artificial Sequence: Synthetic peptide
  REGION 1..5: note = XENP019919 vhCDR1
SYTMH

SEQ ID NO: 6366 - protein, 17 aa, synthetic construct
  REGION 1..17: note = Description of Artificial Sequence: Synthetic peptide
  REGION 1..17: note = XENP019919 vhCDR2
FISYDGNNKYYADSVKG

SEQ ID NO: 6367 - protein, 9 aa, synthetic construct
  REGION 1..9: note = Description of Artificial Sequence: Synthetic peptide
  REGION 1..9: note = XENP019919 vhCDR3
TGWLGPFDY

SEQ ID NO: 6368 - protein, 12 aa, synthetic construct
  REGION 1..12: note = Description of Artificial Sequence: Synthetic peptide
  REGION 1..12: note = XENP019919 vlCDR1
RASQSVGSNYLA

SEQ ID NO: 6369 - protein, 7 aa, synthetic construct
  REGION 1..7: note = Description of Artificial Sequence: Synthetic peptide
  REGION 1..7: note = XENP019919 vlCDR2
GAFSRAT

SEQ ID NO: 6370 - protein, 9 aa, synthetic construct
  REGION 1..9: note = Description of Artificial Sequence: Synthetic peptide
  REGION 1..9: note = XENP019919 vlCDR3
QQYGSSPWT

SEQ ID NO: 6371 - protein, 246 aa, synthetic construct
  REGION 1..246: note = Description of Artificial Sequence: Synthetic polypeptide
  REGION 1..246: note = XENP019920 [CTLA-4]_H0_L0.32_scFv(GKPGS)4
QVQLVESGGGVVQPGRSLRLSCAASGFTFSSYTMHWVRQAPGKGLEWVTFISYDGNNKYYADSVKGRFTISRDNSKNTLYLQMNSLRAEDTAIYYCARTGWLGPFDYWGQGTLVTVSSGKPGSGKPGSGKPGSGKPGSEIVLTQSPGTLSLSPGERATLSCRASQSVGSQYLAWYQQKPGQAPRLLIYGAFSRATGIPDRFSGSGSGTDFTLTISRLEPEDFAVYYCQQYGSSPWTFGQGTKVEIK

SEQ ID NO: 6372 - protein, 118 aa, synthetic construct; identical to SEQ ID NO: 3737
  REGION 1..118: note = Description of Artificial Sequence: Synthetic polypeptide
  REGION 1..118: note = VH of XENP019920

SEQ ID NO: 6373 - protein, 108 aa, synthetic construct
  REGION 1..108: note = Description of Artificial Sequence: Synthetic polypeptide
  REGION 1..108: note = VL of XENP019920
EIVLTQSPGTLSLSPGERATLSCRASQSVGSQYLAWYQQKPGQAPRLLIYGAFSRATGIPDRFSGSGSGTDFTLTISRLEPEDFAVYYCQQYGSSPWTFGQGTKVEIK

SEQ ID NO: 6374 - protein, 5 aa, synthetic construct
  REGION 1..5: note = Description of Artificial Sequence: Synthetic peptide
  REGION 1..5: note = XENP019920 vhCDR1
SYTMH

SEQ ID NO: 6375 - protein, 17 aa, synthetic construct
  REGION 1..17: note = Description of Artificial Sequence: Synthetic peptide
  REGION 1..17: note = XENP019920 vhCDR2
FISYDGNNKYYADSVKG

SEQ ID NO: 6376 - protein, 9 aa, synthetic construct
  REGION 1..9: note = Description of Artificial Sequence: Synthetic peptide
  REGION 1..9: note = XENP019920 vhCDR3
TGWLGPFDY

SEQ ID NO: 6377 - protein, 12 aa, synthetic construct
  REGION 1..12: note = Description of Artificial Sequence: Synthetic peptide
  REGION 1..12: note = XENP019920 vlCDR1
RASQSVGSQYLA

SEQ ID NO: 6378 - protein, 7 aa, synthetic construct
  REGION 1..7: note = Description of Artificial Sequence: Synthetic peptide
  REGION 1..7: note = XENP019920 vlCDR2
GAFSRAT

SEQ ID NO: 6379 - protein, 9 aa, synthetic construct
  REGION 1..9: note = Description of Artificial Sequence: Synthetic peptide
  REGION 1..9: note = XENP019920 vlCDR3
QQYGSSPWT

SEQ ID NO: 6380 - protein, 246 aa, synthetic construct
  REGION 1..246: note = Description of Artificial Sequence: Synthetic polypeptide
  REGION 1..246: note = XENP019921 [CTLA-4]_H0_L0.33_scFv(GKPGS)4
QVQLVESGGGVVQPGRSLRLSCAASGFTFSSYTMHWVRQAPGKGLEWVTFISYDGNNKYYADSVKGRFTISRDNSKNTLYLQMNSLRAEDTAIYYCARTGWLGPFDYWGQGTLVTVSSGKPGSGKPGSGKPGSGKPGSEIVLTQSPGTLSLSPGERATLSCRASQSVGSTYLAWYQQKPGQAPRLLIYGAFSRATGIPDRFSGSGSGTDFTLTISRLEPEDFAVYYCQQYGSSPWTFGQGTKVEIK

SEQ ID NO: 6381 - protein, 118 aa, synthetic construct; identical to SEQ ID NO: 3737
  REGION 1..118: note = Description of Artificial Sequence: Synthetic polypeptide
  REGION 1..118: note = VH of XENP019921

SEQ ID NO: 6382 - protein, 108 aa, synthetic construct
  REGION 1..108: note = Description of Artificial Sequence: Synthetic polypeptide
  REGION 1..108: note = VL of XENP019921
EIVLTQSPGTLSLSPGERATLSCRASQSVGSTYLAWYQQKPGQAPRLLIYGAFSRATGIPDRFSGSGSGTDFTLTISRLEPEDFAVYYCQQYGSSPWTFGQGTKVEIK

SEQ ID NO: 6383 - protein, 5 aa, synthetic construct
  REGION 1..5: note = Description of Artificial Sequence: Synthetic peptide
  REGION 1..5: note = XENP019921 vhCDR1
SYTMH

SEQ ID NO: 6384 - protein, 17 aa, synthetic construct
  REGION 1..17: note = Description of Artificial Sequence: Synthetic peptide
  REGION 1..17: note = XENP019921 vhCDR2
FISYDGNNKYYADSVKG

SEQ ID NO: 6385 - protein, 9 aa, synthetic construct
  REGION 1..9: note = Description of Artificial Sequence: Synthetic peptide
  REGION 1..9: note = XENP019921 vhCDR3
TGWLGPFDY

SEQ ID NO: 6386 - protein, 12 aa, synthetic construct
  REGION 1..12: note = Description of Artificial Sequence: Synthetic peptide
  REGION 1..12: note = XENP019921 vlCDR1
RASQSVGSTYLA

SEQ ID NO: 6387 - protein, 7 aa, synthetic construct
  REGION 1..7: note = Description of Artificial Sequence: Synthetic peptide
  REGION 1..7: note = XENP019921 vlCDR2
GAFSRAT

SEQ ID NO: 6388 - protein, 9 aa, synthetic construct
  REGION 1..9: note = Description of Artificial Sequence: Synthetic peptide
  REGION 1..9: note = XENP019921 vlCDR3
QQYGSSPWT

SEQ ID NO: 6389 - protein, 246 aa, synthetic construct
  REGION 1..246: note = Description of Artificial Sequence: Synthetic polypeptide
  REGION 1..246: note = XENP019922 [CTLA-4]_H0_L0.34_scFv(GKPGS)4
QVQLVESGGGVVQPGRSLRLSCAASGFTFSSYTMHWVRQAPGKGLEWVTFISYDGNNKYYADSVKGRFTISRDNSKNTLYLQMNSLRAEDTAIYYCARTGWLGPFDYWGQGTLVTVSSGKPGSGKPGSGKPGSGKPGSEIVLTQSPGTLSLSPGERATLSCRASQSVGSSALAWYQQKPGQAPRLLIYGAFSRATGIPDRFSGSGSGTDFTLTISRLEPEDFAVYYCQQYGSSPWTFGQGTKVEIK

SEQ ID NO: 6390 - protein, 118 aa, synthetic construct; identical to SEQ ID NO: 3737
  REGION 1..118: note = Description of Artificial Sequence: Synthetic polypeptide
  REGION 1..118: note = VH of XENP019922

SEQ ID NO: 6391 - protein, 108 aa, synthetic construct
  REGION 1..108: note = Description of Artificial Sequence: Synthetic polypeptide
  REGION 1..108: note = VL of XENP019922
EIVLTQSPGTLSLSPGERATLSCRASQSVGSSALAWYQQKPGQAPRLLIYGAFSRATGIPDRFSGSGSGTDFTLTISRLEPEDFAVYYCQQYGSSPWTFGQGTKVEIK

SEQ ID NO: 6392 - protein, 5 aa, synthetic construct
  REGION 1..5: note = Description of Artificial Sequence: Synthetic peptide
  REGION 1..5: note = XENP019922 vhCDR1
SYTMH

SEQ ID NO: 6393 - protein, 17 aa, synthetic construct
  REGION 1..17: note = Description of Artificial Sequence: Synthetic peptide
  REGION 1..17: note = XENP019922 vhCDR2
FISYDGNNKYYADSVKG

SEQ ID NO: 6394 - protein, 9 aa, synthetic construct
  REGION 1..9: note = Description of Artificial Sequence: Synthetic peptide
  REGION 1..9: note = XENP019922 vhCDR3
TGWLGPFDY

SEQ ID NO: 6395 - protein, 12 aa, synthetic construct
  REGION 1..12: note = Description of Artificial Sequence: Synthetic peptide
  REGION 1..12: note = XENP019922 vlCDR1
RASQSVGSSALA

SEQ ID NO: 6396 - protein, 7 aa, synthetic construct
  REGION 1..7: note = Description of Artificial Sequence: Synthetic peptide
  REGION 1..7: note = XENP019922 vlCDR2
GAFSRAT

SEQ ID NO: 6397 - protein, 9 aa, synthetic construct
  REGION 1..9: note = Description of Artificial Sequence: Synthetic peptide
  REGION 1..9: note = XENP019922 vlCDR3
QQYGSSPWT

SEQ ID NO: 6398 - protein, 246 aa, synthetic construct
  REGION 1..246: note = Description of Artificial Sequence: Synthetic polypeptide
  REGION 1..246: note = XENP019923 [CTLA-4]_H0_L0.35_scFv(GKPGS)4
QVQLVESGGGVVQPGRSLRLSCAASGFTFSSYTMHWVRQAPGKGLEWVTFISYDGNNKYYADSVKGRFTISRDNSKNTLYLQMNSLRAEDTAIYYCARTGWLGPFDYWGQGTLVTVSSGKPGSGKPGSGKPGSGKPGSEIVLTQSPGTLSLSPGERATLSCRASQSVGSSFLAWYQQKPGQAPRLLIYGAFSRATGIPDRFSGSGSGTDFTLTISRLEPEDFAVYYCQQYGSSPWTFGQGTKVEIK

SEQ ID NO: 6399 - protein, 118 aa, synthetic construct; identical to SEQ ID NO: 3737
  REGION 1..118: note = Description of Artificial Sequence: Synthetic polypeptide
  REGION 1..118: note = VH of XENP019923

SEQ ID NO: 6400 - protein, 108 aa, synthetic construct
  REGION 1..108: note = Description of Artificial Sequence: Synthetic polypeptide
  REGION 1..108: note = VL of XENP019923
EIVLTQSPGTLSLSPGERATLSCRASQSVGSSFLAWYQQKPGQAPRLLIYGAFSRATGIPDRFSGSGSGTDFTLTISRLEPEDFAVYYCQQYGSSPWTFGQGTKVEIK

SEQ ID NO: 6401 - protein, 5 aa, synthetic construct
  REGION 1..5: note = Description of Artificial Sequence: Synthetic peptide
  REGION 1..5: note = XENP019923 vhCDR1
SYTMH

SEQ ID NO: 6402 - protein, 17 aa, synthetic construct
  REGION 1..17: note = Description of Artificial Sequence: Synthetic peptide
  REGION 1..17: note = XENP019923 vhCDR2
FISYDGNNKYYADSVKG

SEQ ID NO: 6403 - protein, 9 aa, synthetic construct
  REGION 1..9: note = Description of Artificial Sequence: Synthetic peptide
  REGION 1..9: note = XENP019923 vhCDR3
TGWLGPFDY

SEQ ID NO: 6404 - protein, 12 aa, synthetic construct
  REGION 1..12: note = Description of Artificial Sequence: Synthetic peptide
  REGION 1..12: note = XENP019923 vlCDR1
RASQSVGSSFLA

SEQ ID NO: 6405 - protein, 7 aa, synthetic construct
  REGION 1..7: note = Description of Artificial Sequence: Synthetic peptide
  REGION 1..7: note = XENP019923 vlCDR2
GAFSRAT

SEQ ID NO: 6406 - protein, 9 aa, synthetic construct
  REGION 1..9: note = Description of Artificial Sequence: Synthetic peptide
  REGION 1..9: note = XENP019923 vlCDR3
QQYGSSPWT

SEQ ID NO: 6407 - protein, 246 aa, synthetic construct
  REGION 1..246: note = Description of Artificial Sequence: Synthetic polypeptide
  REGION 1..246: note = XENP019924 [CTLA-4]_H0_L0.36_scFv(GKPGS)4
QVQLVESGGGVVQPGRSLRLSCAASGFTFSSYTMHWVRQAPGKGLEWVTFISYDGNNKYYADSVKGRFTISRDNSKNTLYLQMNSLRAEDTAIYYCARTGWLGPFDYWGQGTLVTVSSGKPGSGKPGSGKPGSGKPGSEIVLTQSPGTLSLSPGERATLSCRASQSVGSSHLAWYQQKPGQAPRLLIYGAFSRATGIPDRFSGSGSGTDFTLTISRLEPEDFAVYYCQQYGSSPWTFGQGTKVEIK

SEQ ID NO: 6408 - protein, 118 aa, synthetic construct; identical to SEQ ID NO: 3737
  REGION 1..118: note = Description of Artificial Sequence: Synthetic polypeptide
  REGION 1..118: note = VH of XENP019924

SEQ ID NO: 6409 - protein, 108 aa, synthetic construct
  REGION 1..108: note = Description of Artificial Sequence: Synthetic polypeptide
  REGION 1..108: note = VL of XENP019924
EIVLTQSPGTLSLSPGERATLSCRASQSVGSSHLAWYQQKPGQAPRLLIYGAFSRATGIPDRFSGSGSGTDFTLTISRLEPEDFAVYYCQQYGSSPWTFGQGTKVEIK

SEQ ID NO: 6410 - protein, 5 aa, synthetic construct
  REGION 1..5: note = Description of Artificial Sequence: Synthetic peptide
  REGION 1..5: note = XENP019924 vhCDR1
SYTMH

SEQ ID NO: 6411 - protein, 17 aa, synthetic construct
  REGION 1..17: note = Description of Artificial Sequence: Synthetic peptide
  REGION 1..17: note = XENP019924 vhCDR2
FISYDGNNKYYADSVKG

SEQ ID NO: 6412 - protein, 9 aa, synthetic construct
  REGION 1..9: note = Description of Artificial Sequence: Synthetic peptide
  REGION 1..9: note = XENP019924 vhCDR3
TGWLGPFDY

SEQ ID NO: 6413 - protein, 12 aa, synthetic construct
  REGION 1..12: note = Description of Artificial Sequence: Synthetic peptide
  REGION 1..12: note = XENP019924 vlCDR1
RASQSVGSSHLA

SEQ ID NO: 6414 - protein, 7 aa, synthetic construct
  REGION 1..7: note = Description of Artificial Sequence: Synthetic peptide
  REGION 1..7: note = XENP019924 vlCDR2
GAFSRAT

SEQ ID NO: 6415 - protein, 9 aa, synthetic construct
  REGION 1..9: note = Description of Artificial Sequence: Synthetic peptide
  REGION 1..9: note = XENP019924 vlCDR3
QQYGSSPWT

SEQ ID NO: 6416 - protein, 246 aa, synthetic construct
  REGION 1..246: note = Description of Artificial Sequence: Synthetic polypeptide
  REGION 1..246: note = XENP019925 [CTLA-4]_H0_L0.37_scFv(GKPGS)4
QVQLVESGGGVVQPGRSLRLSCAASGFTFSSYTMHWVRQAPGKGLEWVTFISYDGNNKYYADSVKGRFTISRDNSKNTLYLQMNSLRAEDTAIYYCARTGWLGPFDYWGQGTLVTVSSGKPGSGKPGSGKPGSGKPGSEIVLTQSPGTLSLSPGERATLSCRASQSVGSSLLAWYQQKPGQAPRLLIYGAFSRATGIPDRFSGSGSGTDFTLTISRLEPEDFAVYYCQQYGSSPWTFGQGTKVEIK

SEQ ID NO: 6417 - protein, 118 aa, synthetic construct; identical to SEQ ID NO: 3737
  REGION 1..118: note = Description of Artificial Sequence: Synthetic polypeptide
  REGION 1..118: note = VH of XENP019925

SEQ ID NO: 6418 - protein, 108 aa, synthetic construct
  REGION 1..108: note = Description of Artificial Sequence: Synthetic polypeptide
  REGION 1..108: note = VL of XENP019925
EIVLTQSPGTLSLSPGERATLSCRASQSVGSSLLAWYQQKPGQAPRLLIYGAFSRATGIPDRFSGSGSGTDFTLTISRLEPEDFAVYYCQQYGSSPWTFGQGTKVEIK

SEQ ID NO: 6419 - protein, 5 aa, synthetic construct
  REGION 1..5: note = Description of Artificial Sequence: Synthetic peptide
  REGION 1..5: note = XENP019925 vhCDR1
SYTMH

SEQ ID NO: 6420 - protein, 17 aa, synthetic construct
  REGION 1..17: note = Description of Artificial Sequence: Synthetic peptide
  REGION 1..17: note = XENP019925 vhCDR2
FISYDGNNKYYADSVKG

SEQ ID NO: 6421 - protein, 9 aa, synthetic construct
  REGION 1..9: note = Description of Artificial Sequence: Synthetic peptide
  REGION 1..9: note = XENP019925 vhCDR3
TGWLGPFDY

SEQ ID NO: 6422 - protein, 12 aa, synthetic construct
  REGION 1..12: note = Description of Artificial Sequence: Synthetic peptide
  REGION 1..12: note = XENP019925 vlCDR1
RASQSVGSSLLA

SEQ ID NO: 6423 - protein, 7 aa, synthetic construct
  REGION 1..7: note = Description of Artificial Sequence: Synthetic peptide
  REGION 1..7: note = XENP019925 vlCDR2
GAFSRAT

SEQ ID NO: 6424 - protein, 9 aa, synthetic construct
  REGION 1..9: note = Description of Artificial Sequence: Synthetic peptide
  REGION 1..9: note = XENP019925 vlCDR3
QQYGSSPWT

SEQ ID NO: 6425 - protein, 246 aa, synthetic construct
  REGION 1..246: note = Description of Artificial Sequence: Synthetic polypeptide
  REGION 1..246: note = XENP019926 [CTLA-4]_H0_L0.38_scFv(GKPGS)4
QVQLVESGGGVVQPGRSLRLSCAASGFTFSSYTMHWVRQAPGKGLEWVTFISYDGNNKYYADSVKGRFTISRDNSKNTLYLQMNSLRAEDTAIYYCARTGWLGPFDYWGQGTLVTVSSGKPGSGKPGSGKPGSGKPGSEIVLTQSPGTLSLSPGERATLSCRASQSVGSSNLAWYQQKPGQAPRLLIYGAFSRATGIPDRFSGSGSGTDFTLTISRLEPEDFAVYYCQQYGSSPWTFGQGTKVEIK

SEQ ID NO: 6426 - protein, 118 aa, synthetic construct; identical to SEQ ID NO: 3737
  REGION 1..118: note = Description of Artificial Sequence: Synthetic polypeptide
  REGION 1..118: note = VH of XENP019926

SEQ ID NO: 6427 - protein, 108 aa, synthetic construct
  REGION 1..108: note = Description of Artificial Sequence: Synthetic polypeptide
  REGION 1..108: note = VL of XENP019926
EIVLTQSPGTLSLSPGERATLSCRASQSVGSSNLAWYQQKPGQAPRLLIYGAFSRATGIPDRFSGSGSGTDFTLTISRLEPEDFAVYYCQQYGSSPWTFGQGTKVEIK

SEQ ID NO: 6428 - protein, 5 aa, synthetic construct
  REGION 1..5: note = Description of Artificial Sequence: Synthetic peptide
  REGION 1..5: note = XENP019926 vhCDR1
SYTMH

SEQ ID NO: 6429 - protein, 17 aa, synthetic construct
  REGION 1..17: note = Description of Artificial Sequence: Synthetic peptide
  REGION 1..17: note = XENP019926 vhCDR2
FISYDGNNKYYADSVKG

SEQ ID NO: 6430 - protein, 9 aa, synthetic construct
  REGION 1..9: note = Description of Artificial Sequence: Synthetic peptide
  REGION 1..9: note = XENP019926 vhCDR3
TGWLGPFDY

SEQ ID NO: 6431 - protein, 12 aa, synthetic construct
  REGION 1..12: note = Description of Artificial Sequence: Synthetic peptide
  REGION 1..12: note = XENP019926 vlCDR1
RASQSVGSSNLA

SEQ ID NO: 6432 - protein, 7 aa, synthetic construct
  REGION 1..7: note = Description of Artificial Sequence: Synthetic peptide
  REGION 1..7: note = XENP019926 vlCDR2
GAFSRAT

SEQ ID NO: 6433 - protein, 9 aa, synthetic construct
  REGION 1..9: note = Description of Artificial Sequence: Synthetic peptide
  REGION 1..9: note = XENP019926 vlCDR3
QQYGSSPWT

SEQ ID NO: 6434 - protein, 246 aa, synthetic construct
  REGION 1..246: note = Description of Artificial Sequence: Synthetic polypeptide
  REGION 1..246: note = XENP019927 [CTLA-4]_H0_L0.39_scFv(GKPGS)4
QVQLVESGGGVVQPGRSLRLSCAASGFTFSSYTMHWVRQAPGKGLEWVTFISYDGNNKYYADSVKGRFTISRDNSKNTLYLQMNSLRAEDTAIYYCARTGWLGPFDYWGQGTLVTVSSGKPGSGKPGSGKPGSGKPGSEIVLTQSPGTLSLSPGERATLSCRASQSVGSSSLAWYQQKPGQAPRLLIYGAFSRATGIPDRFSGSGSGTDFTLTISRLEPEDFAVYYCQQYGSSPWTFGQGTKVEIK

SEQ ID NO: 6435 - protein, 118 aa, synthetic construct; identical to SEQ ID NO: 3737
  REGION 1..118: note = Description of Artificial Sequence: Synthetic polypeptide
  REGION 1..118: note = VH of XENP019927

SEQ ID NO: 6436 - protein, 108 aa, synthetic construct
  REGION 1..108: note = Description of Artificial Sequence: Synthetic polypeptide
  REGION 1..108: note = VL of XENP019927
EIVLTQSPGTLSLSPGERATLSCRASQSVGSSSLAWYQQKPGQAPRLLIYGAFSRATGIPDRFSGSGSGTDFTLTISRLEPEDFAVYYCQQYGSSPWTFGQGTKVEIK

SEQ ID NO: 6437 - protein, 5 aa, synthetic construct
  REGION 1..5: note = Description of Artificial Sequence: Synthetic peptide
  REGION 1..5: note = XENP019927 vhCDR1
SYTMH

SEQ ID NO: 6438 - protein, 17 aa, synthetic construct
  REGION 1..17: note = Description of Artificial Sequence: Synthetic peptide
  REGION 1..17: note = XENP019927 vhCDR2
FISYDGNNKYYADSVKG

SEQ ID NO: 6439 - protein, 9 aa, synthetic construct
  REGION 1..9: note = Description of Artificial Sequence: Synthetic peptide
  REGION 1..9: note = XENP019927 vhCDR3
TGWLGPFDY

SEQ ID NO: 6440 - protein, 12 aa, synthetic construct
  REGION 1..12: note = Description of Artificial Sequence: Synthetic peptide
  REGION 1..12: note = XENP019927 vlCDR1
RASQSVGSSSLA

SEQ ID NO: 6441 - protein, 7 aa, synthetic construct
  REGION 1..7: note = Description of Artificial Sequence: Synthetic peptide
  REGION 1..7: note = XENP019927 vlCDR2
GAFSRAT

SEQ ID NO: 6442 - protein, 9 aa, synthetic construct
  REGION 1..9: note = Description of Artificial Sequence: Synthetic peptide
  REGION 1..9: note = XENP019927 vlCDR3
QQYGSSPWT

SEQ ID NO: 6443 - protein, 246 aa, synthetic construct
  REGION 1..246: note = Description of Artificial Sequence: Synthetic polypeptide
  REGION 1..246: note = XENP019928 [CTLA-4]_H0_L0.40_scFv(GKPGS)4
QVQLVESGGGVVQPGRSLRLSCAASGFTFSSYTMHWVRQAPGKGLEWVTFISYDGNNKYYADSVKGRFTISRDNSKNTLYLQMNSLRAEDTAIYYCARTGWLGPFDYWGQGTLVTVSSGKPGSGKPGSGKPGSGKPGSEIVLTQSPGTLSLSPGERATLSCRASQSVGSSVLAWYQQKPGQAPRLLIYGAFSRATGIPDRFSGSGSGTDFTLTISRLEPEDFAVYYCQQYGSSPWTFGQGTKVEIK

SEQ ID NO: 6444 - protein, 118 aa, synthetic construct; identical to SEQ ID NO: 3737
  REGION 1..118: note = Description of Artificial Sequence: Synthetic polypeptide
  REGION 1..118: note = VH of XENP019928

SEQ ID NO: 6445 - protein, 108 aa, synthetic construct
  REGION 1..108: note = Description of Artificial Sequence: Synthetic polypeptide
  REGION 1..108: note = VL of XENP019928
EIVLTQSPGTLSLSPGERATLSCRASQSVGSSVLAWYQQKPGQAPRLLIYGAFSRATGIPDRFSGSGSGTDFTLTISRLEPEDFAVYYCQQYGSSPWTFGQGTKVEIK

SEQ ID NO: 6446 - protein, 5 aa, synthetic construct
  REGION 1..5: note = Description of Artificial Sequence: Synthetic peptide
  REGION 1..5: note = XENP019928 vhCDR1
SYTMH

SEQ ID NO: 6447 - protein, 17 aa, synthetic construct
  REGION 1..17: note = Description of Artificial Sequence: Synthetic peptide
  REGION 1..17: note = XENP019928 vhCDR2
FISYDGNNKYYADSVKG

SEQ ID NO: 6448 - protein, 9 aa, synthetic construct
  REGION 1..9: note = Description of Artificial Sequence: Synthetic peptide
  REGION 1..9: note = XENP019928 vhCDR3
TGWLGPFDY

SEQ ID NO: 6449 - protein, 12 aa, synthetic construct
  REGION 1..12: note = Description of Artificial Sequence: Synthetic peptide
  REGION 1..12: note = XENP019928 vlCDR1
RASQSVGSSVLA

SEQ ID NO: 6450 - protein, 7 aa, synthetic construct
  REGION 1..7: note = Description of Artificial Sequence: Synthetic peptide
  REGION 1..7: note = XENP019928 vlCDR2
GAFSRAT

SEQ ID NO: 6451 - protein, 9 aa, synthetic construct
  REGION 1..9: note = Description of Artificial Sequence: Synthetic peptide
  REGION 1..9: note = XENP019928 vlCDR3
QQYGSSPWT

SEQ ID NO: 6452 - protein, 246 aa, synthetic construct
  REGION 1..246: note = Description of Artificial Sequence: Synthetic polypeptide
  REGION 1..246: note = XENP019929 [CTLA-4]_H0_L0.41_scFv(GKPGS)4
QVQLVESGGGVVQPGRSLRLSCAASGFTFSSYTMHWVRQAPGKGLEWVTFISYDGNNKYYADSVKGRFTISRDNSKNTLYLQMNSLRAEDTAIYYCARTGWLGPFDYWGQGTLVTVSSGKPGSGKPGSGKPGSGKPGSEIVLTQSPGTLSLSPGERATLSCRASQSVGSSYMAWYQQKPGQAPRLLIYGAFSRATGIPDRFSGSGSGTDFTLTISRLEPEDFAVYYCQQYGSSPWTFGQGTKVEIK

SEQ ID NO: 6453 - protein, 118 aa, synthetic construct; identical to SEQ ID NO: 3737
  REGION 1..118: note = Description of Artificial Sequence: Synthetic polypeptide
  REGION 1..118: note = VH of XENP019929

SEQ ID NO: 6454 - protein, 108 aa, synthetic construct
  REGION 1..108: note = Description of Artificial Sequence: Synthetic polypeptide
  REGION 1..108: note = VL of XENP019929
EIVLTQSPGTLSLSPGERATLSCRASQSVGSSYMAWYQQKPGQAPRLLIYGAFSRATGIPDRFSGSGSGTDFTLTISRLEPEDFAVYYCQQYGSSPWTFGQGTKVEIK

SEQ ID NO: 6455 - protein, 5 aa, synthetic construct
  REGION 1..5: note = Description of Artificial Sequence: Synthetic peptide
  REGION 1..5: note = XENP019929 vhCDR1
SYTMH

SEQ ID NO: 6456 - protein, 17 aa, synthetic construct
  REGION 1..17: note = Description of Artificial Sequence: Synthetic peptide
  REGION 1..17: note = XENP019929 vhCDR2
FISYDGNNKYYADSVKG

SEQ ID NO: 6457 - protein, 9 aa, synthetic construct
  REGION 1..9: note = Description of Artificial Sequence: Synthetic peptide
  REGION 1..9: note = XENP019929 vhCDR3
TGWLGPFDY

SEQ ID NO: 6458 - protein, 12 aa, synthetic construct
  REGION 1..12: note = Description of Artificial Sequence: Synthetic peptide
  REGION 1..12: note = XENP019929 vlCDR1
RASQSVGSSYMA

SEQ ID NO: 6459 - protein, 7 aa, synthetic construct
  REGION 1..7: note = Description of Artificial Sequence: Synthetic peptide
  REGION 1..7: note = XENP019929 vlCDR2
GAFSRAT

SEQ ID NO: 6460 - protein, 9 aa, synthetic construct
  REGION 1..9: note = Description of Artificial Sequence: Synthetic peptide
  REGION 1..9: note = XENP019929 vlCDR3
QQYGSSPWT

SEQ ID NO: 6461 - protein, 246 aa, synthetic construct
  REGION 1..246: note = Description of Artificial Sequence: Synthetic polypeptide
  REGION 1..246: note = XENP019930 [CTLA-4]_H0_L0.42_scFv(GKPGS)4
QVQLVESGGGVVQPGRSLRLSCAASGFTFSSYTMHWVRQAPGKGLEWVTFISYDGNNKYYADSVKGRFTISRDNSKNTLYLQMNSLRAEDTAIYYCARTGWLGPFDYWGQGTLVTVSSGKPGSGKPGSGKPGSGKPGSEIVLTQSPGTLSLSPGERATLSCRASQSVGSSYLDWYQQKPGQAPRLLIYGAFSRATGIPDRFSGSGSGTDFTLTISRLEPEDFAVYYCQQYGSSPWTFGQGTKVEIK

SEQ ID NO: 6462 - protein, 118 aa, synthetic construct; identical to SEQ ID NO: 3737
  REGION 1..118: note = Description of Artificial Sequence: Synthetic polypeptide
  REGION 1..118: note = VH of XENP019930

SEQ ID NO: 6463 - protein, 108 aa, synthetic construct
  REGION 1..108: note = Description of Artificial Sequence: Synthetic polypeptide
  REGION 1..108: note = VL of XENP019930
EIVLTQSPGTLSLSPGERATLSCRASQSVGSSYLDWYQQKPGQAPRLLIYGAFSRATGIPDRFSGSGSGTDFTLTISRLEPEDFAVYYCQQYGSSPWTFGQGTKVEIK

SEQ ID NO: 6464 - protein, 5 aa, synthetic construct
  REGION 1..5: note = Description of Artificial Sequence: Synthetic peptide
  REGION 1..5: note = XENP019930 vhCDR1
SYTMH

SEQ ID NO: 6465 - protein, 17 aa, synthetic construct
  REGION 1..17: note = Description of Artificial Sequence: Synthetic peptide
  REGION 1..17: note = XENP019930 vhCDR2
FISYDGNNKYYADSVKG

SEQ ID NO: 6466 - protein, 9 aa, synthetic construct
  REGION 1..9: note = Description of Artificial Sequence: Synthetic peptide
  REGION 1..9: note = XENP019930 vhCDR3
TGWLGPFDY

SEQ ID NO: 6467 - protein, 12 aa, synthetic construct
  REGION 1..12: note = Description of Artificial Sequence: Synthetic peptide
  REGION 1..12: note = XENP019930 vlCDR1
RASQSVGSSYLD

SEQ ID NO: 6468 - protein, 7 aa, synthetic construct
  REGION 1..7: note = Description of Artificial Sequence: Synthetic peptide
  REGION 1..7: note = XENP019930 vlCDR2
GAFSRAT

SEQ ID NO: 6469 - protein, 9 aa, synthetic construct
  REGION 1..9: note = Description of Artificial Sequence: Synthetic peptide
  REGION 1..9: note = XENP019930 vlCDR3
QQYGSSPWT

SEQ ID NO: 6470 - protein, 246 aa, synthetic construct
  REGION 1..246: note = Description of Artificial Sequence: Synthetic polypeptide
  REGION 1..246: note = XENP019931 [CTLA-4]_H0_L0.43_scFv(GKPGS)4
QVQLVESGGGVVQPGRSLRLSCAASGFTFSSYTMHWVRQAPGKGLEWVTFISYDGNNKYYADSVKGRFTISRDNSKNTLYLQMNSLRAEDTAIYYCARTGWLGPFDYWGQGTLVTVSSGKPGSGKPGSGKPGSGKPGSEIVLTQSPGTLSLSPGERATLSCRASQSVGSSYLDWYQQKPGQAPRLLIYGAFSRATGIPDRFSGSGSGTDFTLTISRLEPEDFAVYYCKQYGSSPWTFGQGTKVEIK

SEQ ID NO: 6471 - protein, 118 aa, synthetic construct; identical to SEQ ID NO: 3737
  REGION 1..118: note = Description of Artificial Sequence: Synthetic polypeptide
  REGION 1..118: note = VH of XENP019931

SEQ ID NO: 6472 - protein, 108 aa, synthetic construct
  REGION 1..108: note = Description of Artificial Sequence: Synthetic polypeptide
  REGION 1..108: note = VL of XENP019931
EIVLTQSPGTLSLSPGERATLSCRASQSVGSSYLDWYQQKPGQAPRLLIYGAFSRATGIPDRFSGSGSGTDFTLTISRLEPEDFAVYYCKQYGSSPWTFGQGTKVEIK

SEQ ID NO: 6473 - protein, 5 aa, synthetic construct
  REGION 1..5: note = Description of Artificial Sequence: Synthetic peptide
  REGION 1..5: note = XENP019931 vhCDR1
SYTMH

SEQ ID NO: 6474 - protein, 17 aa, synthetic construct
  REGION 1..17: note = Description of Artificial Sequence: Synthetic peptide
  REGION 1..17: note = XENP019931 vhCDR2
FISYDGNNKYYADSVKG

SEQ ID NO: 6475 - protein, 9 aa, synthetic construct
  REGION 1..9: note = Description of Artificial Sequence: Synthetic peptide
  REGION 1..9: note = XENP019931 vhCDR3
TGWLGPFDY

SEQ ID NO: 6476 - protein, 12 aa, synthetic construct
  REGION 1..12: note = Description of Artificial Sequence: Synthetic peptide
  REGION 1..12: note = XENP019931 vlCDR1
RASQSVGSSYLD

SEQ ID NO: 6477 - protein, 7 aa, synthetic construct
  REGION 1..7: note = Description of Artificial Sequence: Synthetic peptide
  REGION 1..7: note = XENP019931 vlCDR2
GAFSRAT

SEQ ID NO: 6478 - protein, 9 aa, synthetic construct
  REGION 1..9: note = Description of Artificial Sequence: Synthetic peptide
  REGION 1..9: note = XENP019931 vlCDR3
KQYGSSPWT

SEQ ID NO: 6479 - protein, 246 aa, synthetic construct
  REGION 1..246: note = Description of Artificial Sequence: Synthetic polypeptide
  REGION 1..246: note = XENP019932 [CTLA-4]_H0_L0.44_scFv(GKPGS)4
QVQLVESGGGVVQPGRSLRLSCAASGFTFSSYTMHWVRQAPGKGLEWVTFISYDGNNKYYADSVKGRFTISRDNSKNTLYLQMNSLRAEDTAIYYCARTGWLGPFDYWGQGTLVTVSSGKPGSGKPGSGKPGSGKPGSEIVLTQSPGTLSLSPGERATLSCRASQSVGSSYLSWYQQKPGQAPRLLIYGAFSRATGIPDRFSGSGSGTDFTLTISRLEPEDFAVYYCQQYGSSPWTFGQGTKVEIK

SEQ ID NO: 6480 - protein, 118 aa, synthetic construct; identical to SEQ ID NO: 3737
  REGION 1..118: note = Description of Artificial Sequence: Synthetic polypeptide
  REGION 1..118: note = VH of XENP019932

SEQ ID NO: 6481 - protein, 108 aa, synthetic construct
  REGION 1..108: note = Description of Artificial Sequence: Synthetic polypeptide
  REGION 1..108: note = VL of XENP019932
EIVLTQSPGTLSLSPGERATLSCRASQSVGSSYLSWYQQKPGQAPRLLIYGAFSRATGIPDRFSGSGSGTDFTLTISRLEPEDFAVYYCQQYGSSPWTFGQGTKVEIK

SEQ ID NO: 6482 - protein, 5 aa, synthetic construct
  REGION 1..5: note = Description of Artificial Sequence: Synthetic peptide
  REGION 1..5: note = XENP019932 vhCDR1
SYTMH

SEQ ID NO: 6483 - protein, 17 aa, synthetic construct
  REGION 1..17: note = Description of Artificial Sequence: Synthetic peptide
  REGION 1..17: note = XENP019932 vhCDR2
FISYDGNNKYYADSVKG

SEQ ID NO: 6484 - protein, 9 aa, synthetic construct
  REGION 1..9: note = Description of Artificial Sequence: Synthetic peptide
  REGION 1..9: note = XENP019932 vhCDR3
TGWLGPFDY

SEQ ID NO: 6485 - protein, 12 aa, synthetic construct
  REGION 1..12: note = Description of Artificial Sequence: Synthetic peptide
  REGION 1..12: note = XENP019932 vlCDR1
RASQSVGSSYLS

SEQ ID NO: 6486 - protein, 7 aa, synthetic construct
  REGION 1..7: note = Description of Artificial Sequence: Synthetic peptide
  REGION 1..7: note = XENP019932 vlCDR2
GAFSRAT

SEQ ID NO: 6487 - protein, 9 aa, synthetic construct
  REGION 1..9: note = Description of Artificial Sequence: Synthetic peptide
  REGION 1..9: note = XENP019932 vlCDR3
QQYGSSPWT

SEQ ID NO: 6488 - protein, 246 aa, synthetic construct
  REGION 1..246: note = Description of Artificial Sequence: Synthetic polypeptide
  REGION 1..246: note = XENP019933 [CTLA-4]_H0_L0.45_scFv(GKPGS)4
QVQLVESGGGVVQPGRSLRLSCAASGFTFSSYTMHWVRQAPGKGLEWVTFISYDGNNKYYADSVKGRFTISRDNSKNTLYLQMNSLRAEDTAIYYCARTGWLGPFDYWGQGTLVTVSSGKPGSGKPGSGKPGSGKPGSEIVLTQSPGTLSLSPGERATLSCRASQSVGSSYLTWYQQKPGQAPRLLIYGAFSRATGIPDRFSGSGSGTDFTLTISRLEPEDFAVYYCQQYGSSPWTFGQGTKVEIK

SEQ ID NO: 6489 - protein, 118 aa, synthetic construct; identical to SEQ ID NO: 3737
  REGION 1..118: note = Description of Artificial Sequence: Synthetic polypeptide
  REGION 1..118: note = VH of XENP019933

SEQ ID NO: 6490 - protein, 108 aa, synthetic construct
  REGION 1..108: note = Description of Artificial Sequence: Synthetic polypeptide
  REGION 1..108: note = VL of XENP019933
EIVLTQSPGTLSLSPGERATLSCRASQSVGSSYLTWYQQKPGQAPRLLIYGAFSRATGIPDRFSGSGSGTDFTLTISRLEPEDFAVYYCQQYGSSPWTFGQGTKVEIK

SEQ ID NO: 6491 - protein, 5 aa, synthetic construct
  REGION 1..5: note = Description of Artificial Sequence: Synthetic peptide
  REGION 1..5: note = XENP019933 vhCDR1
SYTMH

SEQ ID NO: 6492 - protein, 17 aa, synthetic construct
  REGION 1..17: note = Description of Artificial Sequence: Synthetic peptide
  REGION 1..17: note = XENP019933 vhCDR2
FISYDGNNKYYADSVKG

SEQ ID NO: 6493 - protein, 9 aa, synthetic construct
  REGION 1..9: note = Description of Artificial Sequence: Synthetic peptide
  REGION 1..9: note = XENP019933 vhCDR3
TGWLGPFDY

SEQ ID NO: 6494 - protein, 12 aa, synthetic construct
  REGION 1..12: note = Description of Artificial Sequence: Synthetic peptide
  REGION 1..12: note = XENP019933 vlCDR1
RASQSVGSSYLT

SEQ ID NO: 6495 - protein, 7 aa, synthetic construct
  REGION 1..7: note = Description of Artificial Sequence: Synthetic peptide
  REGION 1..7: note = XENP019933 vlCDR2
GAFSRAT

SEQ ID NO: 6496 - protein, 9 aa, synthetic construct
  REGION 1..9: note = Description of Artificial Sequence: Synthetic peptide
  REGION 1..9: note = XENP019933 vlCDR3
QQYGSSPWT

SEQ ID NO: 6497 - protein, 246 aa, synthetic construct
  REGION 1..246: note = Description of Artificial Sequence: Synthetic polypeptide
  REGION 1..246: note = XENP019934 [CTLA-4]_H0_L0.46_scFv(GKPGS)4
QVQLVESGGGVVQPGRSLRLSCAASGFTFSSYTMHWVRQAPGKGLEWVTFISYDGNNKYYADSVKGRFTISRDNSKNTLYLQMNSLRAEDTAIYYCARTGWLGPFDYWGQGTLVTVSSGKPGSGKPGSGKPGSGKPGSEIVLTQSPGTLSLSPGERATLSCRASQSVGSSYLAWYEQKPGQAPRLLIYGAFSRATGIPDRFSGSGSGTDFTLTISRLEPEDFAVYYCQQYGSSPWTFGQGTKVEIK

SEQ ID NO: 6498 - protein, 118 aa, synthetic construct; identical to SEQ ID NO: 3737
  REGION 1..118: note = Description of Artificial Sequence: Synthetic polypeptide
  REGION 1..118: note = VH of XENP019934

SEQ ID NO: 6499 - protein, 108 aa, synthetic construct
  REGION 1..108: note = Description of Artificial Sequence: Synthetic polypeptide
  REGION 1..108: note = VL of XENP019934
EIVLTQSPGTLSLSPGERATLSCRASQSVGSSYLAWYEQKPGQAPRLLIYGAFSRATGIPDRFSGSGSGTDFTLTISRLEPEDFAVYYCQQYGSSPWTFGQGTKVEIK

SEQ ID NO: 6500 - protein, 5 aa, synthetic construct
  REGION 1..5: note = Description of Artificial Sequence: Synthetic peptide
  REGION 1..5: note = XENP019934 vhCDR1
SYTMH

SEQ ID NO: 6501 - protein, 17 aa, synthetic construct
  REGION 1..17: note = Description of Artificial Sequence: Synthetic peptide
  REGION 1..17: note = XENP019934 vhCDR2
FISYDGNNKYYADSVKG

SEQ ID NO: 6502 - protein, 9 aa, synthetic construct
  REGION 1..9: note = Description of Artificial Sequence: Synthetic peptide
  REGION 1..9: note = XENP019934 vhCDR3
TGWLGPFDY

SEQ ID NO: 6503 - protein, 12 aa, synthetic construct
  REGION 1..12: note = Description of Artificial Sequence: Synthetic peptide
  REGION 1..12: note = XENP019934 vlCDR1
RASQSVGSSYLA

SEQ ID NO: 6504 - protein, 7 aa, synthetic construct
  REGION 1..7: note = Description of Artificial Sequence: Synthetic peptide
  REGION 1..7: note = XENP019934 vlCDR2
GAFSRAT

SEQ ID NO: 6505 - protein, 9 aa, synthetic construct
  REGION 1..9: note = Description of Artificial Sequence: Synthetic peptide
  REGION 1..9: note = XENP019934 vlCDR3
QQYGSSPWT

SEQ ID NO: 6506 - protein, 246 aa, synthetic construct
  REGION 1..246: note = Description of Artificial Sequence: Synthetic polypeptide
  REGION 1..246: note = XENP019935 [CTLA-4]_H0_L0.47_scFv(GKPGS)4
QVQLVESGGGVVQPGRSLRLSCAASGFTFSSYTMHWVRQAPGKGLEWVTFISYDGNNKYYADSVKGRFTISRDNSKNTLYLQMNSLRAEDTAIYYCARTGWLGPFDYWGQGTLVTVSSGKPGSGKPGSGKPGSGKPGSEIVLTQSPGTLSLSPGERATLSCRASQSVGSSYLAWYLQKPGQAPRLLIYGAFSRATGIPDRFSGSGSGTDFTLTISRLEPEDFAVYYCQQYGSSPWTFGQGTKVEIK

SEQ ID NO: 6507 - protein, 118 aa, synthetic construct; identical to SEQ ID NO: 3737
  REGION 1..118: note = Description of Artificial Sequence: Synthetic polypeptide
  REGION 1..118: note = VH of XENP019935

SEQ ID NO: 6508 - protein, 108 aa, synthetic construct
  REGION 1..108: note = Description of Artificial Sequence: Synthetic polypeptide
  REGION 1..108: note = VL of XENP019935
EIVLTQSPGTLSLSPGERATLSCRASQSVGSSYLAWYLQKPGQAPRLLIYGAFSRATGIPDRFSGSGSGTDFTLTISRLEPEDFAVYYCQQYGSSPWTFGQGTKVEIK

SEQ ID NO: 6509 - protein, 5 aa, synthetic construct
  REGION 1..5: note = Description of Artificial Sequence: Synthetic peptide
  REGION 1..5: note = XENP019935 vhCDR1
SYTMH

SEQ ID NO: 6510 - protein, 17 aa, synthetic construct
  REGION 1..17: note = Description of Artificial Sequence: Synthetic peptide
  REGION 1..17: note = XENP019935 vhCDR2
FISYDGNNKYYADSVKG

SEQ ID NO: 6511 - protein, 9 aa, synthetic construct
  REGION 1..9: note = Description of Artificial Sequence: Synthetic peptide
  REGION 1..9: note = XENP019935 vhCDR3
TGWLGPFDY

SEQ ID NO: 6512 - protein, 12 aa, synthetic construct
  REGION 1..12: note = Description of Artificial Sequence: Synthetic peptide
  REGION 1..12: note = XENP019935 vlCDR1
RASQSVGSSYLA

SEQ ID NO: 6513 - protein, 7 aa, synthetic construct
  REGION 1..7: note = Description of Artificial Sequence: Synthetic peptide
  REGION 1..7: note = XENP019935 vlCDR2
GAFSRAT

SEQ ID NO: 6514 - protein, 9 aa, synthetic construct
  REGION 1..9: note = Description of Artificial Sequence: Synthetic peptide
  REGION 1..9: note = XENP019935 vlCDR3
QQYGSSPWT

SEQ ID NO: 6515 - protein, 246 aa, synthetic construct
  REGION 1..246: note = Description of Artificial Sequence: Synthetic polypeptide
  REGION 1..246: note = XENP019936 [CTLA-4]_H0_L0.48_scFv(GKPGS)4
QVQLVESGGGVVQPGRSLRLSCAASGFTFSSYTMHWVRQAPGKGLEWVTFISYDGNNKYYADSVKGRFTISRDNSKNTLYLQMNSLRAEDTAIYYCARTGWLGPFDYWGQGTLVTVSSGKPGSGKPGSGKPGSGKPGSEIVLTQSPGTLSLSPGERATLSCRASQSVGSSYLAWYRQKPGQAPRLLIYGAFSRATGIPDRFSGSGSGTDFTLTISRLEPEDFAVYYCQQYGSSPWTFGQGTKVEIK

SEQ ID NO: 6516 - protein, 118 aa, synthetic construct; identical to SEQ ID NO: 3737
  REGION 1..118: note = Description of Artificial Sequence: Synthetic polypeptide
  REGION 1..118: note = VH of XENP019936

SEQ ID NO: 6517 - protein, 108 aa, synthetic construct
  REGION 1..108: note = Description of Artificial Sequence: Synthetic polypeptide
  REGION 1..108: note = VL of XENP019936
EIVLTQSPGTLSLSPGERATLSCRASQSVGSSYLAWYRQKPGQAPRLLIYGAFSRATGIPDRFSGSGSGTDFTLTISRLEPEDFAVYYCQQYGSSPWTFGQGTKVEIK

SEQ ID NO: 6518 - protein, 5 aa, synthetic construct
  REGION 1..5: note = Description of Artificial Sequence: Synthetic peptide
  REGION 1..5: note = XENP019936 vhCDR1
SYTMH

SEQ ID NO: 6519 - protein, 17 aa, synthetic construct
  REGION 1..17: note = Description of Artificial Sequence: Synthetic peptide
  REGION 1..17: note = XENP019936 vhCDR2
FISYDGNNKYYADSVKG

SEQ ID NO: 6520 - protein, 9 aa, synthetic construct
  REGION 1..9: note = Description of Artificial Sequence: Synthetic peptide
  REGION 1..9: note = XENP019936 vhCDR3
TGWLGPFDY

SEQ ID NO: 6521 - protein, 12 aa, synthetic construct
  REGION 1..12: note = Description of Artificial Sequence: Synthetic peptide
  REGION 1..12: note = XENP019936 vlCDR1
RASQSVGSSYLA

SEQ ID NO: 6522 - protein, 7 aa, synthetic construct
  REGION 1..7: note = Description of Artificial Sequence: Synthetic peptide
  REGION 1..7: note = XENP019936 vlCDR2
GAFSRAT

SEQ ID NO: 6523 - protein, 9 aa, synthetic construct
  REGION 1..9: note = Description of Artificial Sequence: Synthetic peptide
  REGION 1..9: note = XENP019936 vlCDR3
QQYGSSPWT

SEQ ID NO: 6524 - protein, 246 aa, synthetic construct
  REGION 1..246: note = Description of Artificial Sequence: Synthetic polypeptide
  REGION 1..246: note = XENP019937 [CTLA-4]_H0_L0.49_scFv(GKPGS)4
QVQLVESGGGVVQPGRSLRLSCAASGFTFSSYTMHWVRQAPGKGLEWVTFISYDGNNKYYADSVKGRFTISRDNSKNTLYLQMNSLRAEDTAIYYCARTGWLGPFDYWGQGTLVTVSSGKPGSGKPGSGKPGSGKPGSEIVLTQSPGTLSLSPGERATLSCRASQSVGSSYLAWYRQKPGQAPELLIYGAFSRATGIPDRFSGSGSGTDFTLTISRLEPEDFAVYYCQQYGSSPWTFGQGTKVEIK

SEQ ID NO: 6525 - protein, 118 aa, synthetic construct; identical to SEQ ID NO: 3737
  REGION 1..118: note = Description of Artificial Sequence: Synthetic polypeptide
  REGION 1..118: note = VH of XENP019937

SEQ ID NO: 6526 - protein, 108 aa, synthetic construct
  REGION 1..108: note = Description of Artificial Sequence: Synthetic polypeptide
  REGION 1..108: note = VL of XENP019937
EIVLTQSPGTLSLSPGERATLSCRASQSVGSSYLAWYRQKPGQAPELLIYGAFSRATGIPDRFSGSGSGTDFTLTISRLEPEDFAVYYCQQYGSSPWTFGQGTKVEIK

SEQ ID NO: 6527 - protein, 5 aa, synthetic construct
  REGION 1..5: note = Description of Artificial Sequence: Synthetic peptide
  REGION 1..5: note = XENP019937 vhCDR1
SYTMH

SEQ ID NO: 6528 - protein, 17 aa, synthetic construct
  REGION 1..17: note = Description of Artificial Sequence: Synthetic peptide
  REGION 1..17: note = XENP019937 vhCDR2
FISYDGNNKYYADSVKG

SEQ ID NO: 6529 - protein, 9 aa, synthetic construct
  REGION 1..9: note = Description of Artificial Sequence: Synthetic peptide
  REGION 1..9: note = XENP019937 vhCDR3
TGWLGPFDY

SEQ ID NO: 6530 - protein, 12 aa, synthetic construct
  REGION 1..12: note = Description of Artificial Sequence: Synthetic peptide
  REGION 1..12: note = XENP019937 vlCDR1
RASQSVGSSYLA

SEQ ID NO: 6531 - protein, 7 aa, synthetic construct
  REGION 1..7: note = Description of Artificial Sequence: Synthetic peptide
  REGION 1..7: note = XENP019937 vlCDR2
GAFSRAT

SEQ ID NO: 6532 - protein, 9 aa, synthetic construct
  REGION 1..9: note = Description of Artificial Sequence: Synthetic peptide
  REGION 1..9: note = XENP019937 vlCDR3
QQYGSSPWT

SEQ ID NO: 6533 - protein, 246 aa, synthetic construct
  REGION 1..246: note = Description of Artificial Sequence: Synthetic polypeptide
  REGION 1..246: note = XENP019938 [CTLA-4]_H0_L0.50_scFv(GKPGS)4
QVQLVESGGGVVQPGRSLRLSCAASGFTFSSYTMHWVRQAPGKGLEWVTFISYDGNNKYYADSVKGRFTISRDNSKNTLYLQMNSLRAEDTAIYYCARTGWLGPFDYWGQGTLVTVSSGKPGSGKPGSGKPGSGKPGSEIVLTQSPGTLSLSPGERATLSCRASQSVGSSYLAWYQEKPGQAPRLLIYGAFSRATGIPDRFSGSGSGTDFTLTISRLEPEDFAVYYCQQYGSSPWTFGQGTKVEIK

SEQ ID NO: 6534 - protein, 118 aa, synthetic construct; identical to SEQ ID NO: 3737
  REGION 1..118: note = Description of Artificial Sequence: Synthetic polypeptide
  REGION 1..118: note = VH of XENP019938

SEQ ID NO: 6535 - protein, 108 aa, synthetic construct; identical to SEQ ID NO: 4708
  REGION 1..108: note = Description of Artificial Sequence: Synthetic polypeptide
  REGION 1..108: note = VL of XENP019938

SEQ ID NO: 6536 - protein, 5 aa, synthetic construct
  REGION 1..5: note = Description of Artificial Sequence: Synthetic peptide
  REGION 1..5: note = XENP019938 vhCDR1
SYTMH

SEQ ID NO: 6537 - protein, 17 aa, synthetic construct
  REGION 1..17: note = Description of Artificial Sequence: Synthetic peptide
  REGION 1..17: note = XENP019938 vhCDR2
FISYDGNNKYYADSVKG

SEQ ID NO: 6538 - protein, 9 aa, synthetic construct
  REGION 1..9: note = Description of Artificial Sequence: Synthetic peptide
  REGION 1..9: note = XENP019938 vhCDR3
TGWLGPFDY

SEQ ID NO: 6539 - protein, 12 aa, synthetic construct
  REGION 1..12: note = Description of Artificial Sequence: Synthetic peptide
  REGION 1..12: note = XENP019938 vlCDR1
RASQSVGSSYLA

SEQ ID NO: 6540 - protein, 7 aa, synthetic construct
  REGION 1..7: note = Description of Artificial Sequence: Synthetic peptide
  REGION 1..7: note = XENP019938 vlCDR2
GAFSRAT

SEQ ID NO: 6541 - protein, 9 aa, synthetic construct
  REGION 1..9: note = Description of Artificial Sequence: Synthetic peptide
  REGION 1..9: note = XENP019938 vlCDR3
QQYGSSPWT

SEQ ID NO: 6542 - protein, 246 aa, synthetic construct
  REGION 1..246: note = Description of Artificial Sequence: Synthetic polypeptide
  REGION 1..246: note = XENP019939 [CTLA-4]_H0_L0.51_scFv(GKPGS)4
QVQLVESGGGVVQPGRSLRLSCAASGFTFSSYTMHWVRQAPGKGLEWVTFISYDGNNKYYADSVKGRFTISRDNSKNTLYLQMNSLRAEDTAIYYCARTGWLGPFDYWGQGTLVTVSSGKPGSGKPGSGKPGSGKPGSEIVLTQSPGTLSLSPGERATLSCRASQSVGSSYLAWYQQKPDQAPRLLIYGAFSRATGIPDRFSGSGSGTDFTLTISRLEPEDFAVYYCQQYGSSPWTFGQGTKVEIK

SEQ ID NO: 6543 - protein, 118 aa, synthetic construct; identical to SEQ ID NO: 3737
  REGION 1..118: note = Description of Artificial Sequence: Synthetic polypeptide
  REGION 1..118: note = VH of XENP019939

SEQ ID NO: 6544 - protein, 108 aa, synthetic construct; identical to SEQ ID NO: 4717
  REGION 1..108: note = Description of Artificial Sequence: Synthetic polypeptide
  REGION 1..108: note = VL of XENP019939

SEQ ID NO: 6545 - protein, 5 aa, synthetic construct
  REGION 1..5: note = Description of Artificial Sequence: Synthetic peptide
  REGION 1..5: note = XENP019939 vhCDR1
SYTMH

SEQ ID NO: 6546 - protein, 17 aa, synthetic construct
  REGION 1..17: note = Description of Artificial Sequence: Synthetic peptide
  REGION 1..17: note = XENP019939 vhCDR2
FISYDGNNKYYADSVKG

SEQ ID NO: 6547 - protein, 9 aa, synthetic construct
  REGION 1..9: note = Description of Artificial Sequence: Synthetic peptide
  REGION 1..9: note = XENP019939 vhCDR3
TGWLGPFDY

SEQ ID NO: 6548 - protein, 12 aa, synthetic construct
  REGION 1..12: note = Description of Artificial Sequence: Synthetic peptide
  REGION 1..12: note = XENP019939 vlCDR1
RASQSVGSSYLA

SEQ ID NO: 6549 - protein, 7 aa, synthetic construct
  REGION 1..7: note = Description of Artificial Sequence: Synthetic peptide
  REGION 1..7: note = XENP019939 vlCDR2
GAFSRAT

SEQ ID NO: 6550 - protein, 9 aa, synthetic construct
  REGION 1..9: note = Description of Artificial Sequence: Synthetic peptide
  REGION 1..9: note = XENP019939 vlCDR3
QQYGSSPWT

SEQ ID NO: 6551 - protein, 246 aa, synthetic construct
  REGION 1..246: note = Description of Artificial Sequence: Synthetic polypeptide
  REGION 1..246: note = XENP019940 [CTLA-4]_H0_L0.52_scFv(GKPGS)4
QVQLVESGGGVVQPGRSLRLSCAASGFTFSSYTMHWVRQAPGKGLEWVTFISYDGNNKYYADSVKGRFTISRDNSKNTLYLQMNSLRAEDTAIYYCARTGWLGPFDYWGQGTLVTVSSGKPGSGKPGSGKPGSGKPGSEIVLTQSPGTLSLSPGERATLSCRASQSVGSSYLAWYQQKPEQAPRLLIYGAFSRATGIPDRFSGSGSGTDFTLTISRLEPEDFAVYYCQQYGSSPWTFGQGTKVEIK

SEQ ID NO: 6552 - protein, 118 aa, synthetic construct; identical to SEQ ID NO: 3737
  REGION 1..118: note = Description of Artificial Sequence: Synthetic polypeptide
  REGION 1..118: note = VH of XENP019940

SEQ ID NO: 6553 - protein, 108 aa, synthetic construct
  REGION 1..108: note = Description of Artificial Sequence: Synthetic polypeptide
  REGION 1..108: note = VL of XENP019940
EIVLTQSPGTLSLSPGERATLSCRASQSVGSSYLAWYQQKPEQAPRLLIYGAFSRATGIPDRFSGSGSGTDFTLTISRLEPEDFAVYYCQQYGSSPWTFGQGTKVEIK

SEQ ID NO: 6554 - protein, 5 aa, synthetic construct
  REGION 1..5: note = Description of Artificial Sequence: Synthetic peptide
  REGION 1..5: note = XENP019940 vhCDR1
SYTMH

SEQ ID NO: 6555 - protein, 17 aa, synthetic construct
  REGION 1..17: note = Description of Artificial Sequence: Synthetic peptide
  REGION 1..17: note = XENP019940 vhCDR2
FISYDGNNKYYADSVKG

SEQ ID NO: 6556 - protein, 9 aa, synthetic construct
  REGION 1..9: note = Description of Artificial Sequence: Synthetic peptide
  REGION 1..9: note = XENP019940 vhCDR3
TGWLGPFDY

SEQ ID NO: 6557 - protein, 12 aa, synthetic construct
  REGION 1..12: note = Description of Artificial Sequence: Synthetic peptide
  REGION 1..12: note = XENP019940 vlCDR1
RASQSVGSSYLA

SEQ ID NO: 6558 - protein, 7 aa, synthetic construct
  REGION 1..7: note = Description of Artificial Sequence: Synthetic peptide
  REGION 1..7: note = XENP019940 vlCDR2
GAFSRAT

SEQ ID NO: 6559 - protein, 9 aa, synthetic construct
  REGION 1..9: note = Description of Artificial Sequence: Synthetic peptide
  REGION 1..9: note = XENP019940 vlCDR3
QQYGSSPWT

SEQ ID NO: 6560 - protein, 246 aa, synthetic construct
  REGION 1..246: note = Description of Artificial Sequence: Synthetic polypeptide
  REGION 1..246: note = XENP019941 [CTLA-4]_H0_L0.53_scFv(GKPGS)4
QVQLVESGGGVVQPGRSLRLSCAASGFTFSSYTMHWVRQAPGKGLEWVTFISYDGNNKYYADSVKGRFTISRDNSKNTLYLQMNSLRAEDTAIYYCARTGWLGPFDYWGQGTLVTVSSGKPGSGKPGSGKPGSGKPGSEIVLTQSPGTLSLSPGERATLSCRASQSVGSSYLAWYQQKPGEAPRLLIYGAFSRATGIPDRFSGSGSGTDFTLTISRLEPEDFAVYYCQQYGSSPWTFGQGTKVEIK

SEQ ID NO: 6561 - protein, 118 aa, synthetic construct; identical to SEQ ID NO: 3737
  REGION 1..118: note = Description of Artificial Sequence: Synthetic polypeptide
  REGION 1..118: note = VH of XENP019941

SEQ ID NO: 6562 - protein, 108 aa, synthetic construct; identical to SEQ ID NO: 4753
  REGION 1..108: note = Description of Artificial Sequence: Synthetic polypeptide
  REGION 1..108: note = VL of XENP019941

SEQ ID NO: 6563 - protein, 5 aa, synthetic construct
  REGION 1..5: note = Description of Artificial Sequence: Synthetic peptide
  REGION 1..5: note = XENP019941 vhCDR1
SYTMH

SEQ ID NO: 6564 - protein, 17 aa, synthetic construct
  REGION 1..17: note = Description of Artificial Sequence: Synthetic peptide
  REGION 1..17: note = XENP019941 vhCDR2
FISYDGNNKYYADSVKG

SEQ ID NO: 6565 - protein, 9 aa, synthetic construct
  REGION 1..9: note = Description of Artificial Sequence: Synthetic peptide
  REGION 1..9: note = XENP019941 vhCDR3
TGWLGPFDY

SEQ ID NO: 6566 - protein, 12 aa, synthetic construct
  REGION 1..12: note = Description of Artificial Sequence: Synthetic peptide
  REGION 1..12: note = XENP019941 vlCDR1
RASQSVGSSYLA

SEQ ID NO: 6567 - protein, 7 aa, synthetic construct
  REGION 1..7: note = Description of Artificial Sequence: Synthetic peptide
  REGION 1..7: note = XENP019941 vlCDR2
GAFSRAT

SEQ ID NO: 6568 - protein, 9 aa, synthetic construct
  REGION 1..9: note = Description of Artificial Sequence: Synthetic peptide
  REGION 1..9: note = XENP019941 vlCDR3
QQYGSSPWT

SEQ ID NO: 6569 - protein, 246 aa, synthetic construct
  REGION 1..246: note = Description of Artificial Sequence: Synthetic polypeptide
  REGION 1..246: note = XENP019942 [CTLA-4]_H0_L0.54_scFv(GKPGS)4
QVQLVESGGGVVQPGRSLRLSCAASGFTFSSYTMHWVRQAPGKGLEWVTFISYDGNNKYYADSVKGRFTISRDNSKNTLYLQMNSLRAEDTAIYYCARTGWLGPFDYWGQGTLVTVSSGKPGSGKPGSGKPGSGKPGSEIVLTQSPGTLSLSPGERATLSCRASQSVGSSYLAWYQQKPGKAPRLLIYGAFSRATGIPDRFSGSGSGTDFTLTISRLEPEDFAVYYCQQYGSSPWTFGQGTKVEIK

SEQ ID NO: 6570 - protein, 118 aa, synthetic construct; identical to SEQ ID NO: 3737
  REGION 1..118: note = Description of Artificial Sequence: Synthetic polypeptide
  REGION 1..118: note = VH of XENP019942

SEQ ID NO: 6571 - protein, 108 aa, synthetic construct
  REGION 1..108: note = Description of Artificial Sequence: Synthetic polypeptide
  REGION 1..108: note = VL of XENP019942
EIVLTQSPGTLSLSPGERATLSCRASQSVGSSYLAWYQQKPGKAPRLLIYGAFSRATGIPDRFSGSGSGTDFTLTISRLEPEDFAVYYCQQYGSSPWTFGQGTKVEIK

SEQ ID NO: 6572 - protein, 5 aa, synthetic construct
  REGION 1..5: note = Description of Artificial Sequence: Synthetic peptide
  REGION 1..5: note = XENP019942 vhCDR1
SYTMH

SEQ ID NO: 6573 - protein, 17 aa, synthetic construct
  REGION 1..17: note = Description of Artificial Sequence: Synthetic peptide
  REGION 1..17: note = XENP019942 vhCDR2
FISYDGNNKYYADSVKG

SEQ ID NO: 6574 - protein, 9 aa, synthetic construct
  REGION 1..9: note = Description of Artificial Sequence: Synthetic peptide
  REGION 1..9: note = XENP019942 vhCDR3
TGWLGPFDY

SEQ ID NO: 6575 - protein, 12 aa, synthetic construct
  REGION 1..12: note = Description of Artificial Sequence: Synthetic peptide
  REGION 1..12: note = XENP019942 vlCDR1
RASQSVGSSYLA

SEQ ID NO: 6576 - protein, 7 aa, synthetic construct
  REGION 1..7: note = Description of Artificial Sequence: Synthetic peptide
  REGION 1..7: note = XENP019942 vlCDR2
GAFSRAT

SEQ ID NO: 6577 - protein, 9 aa, synthetic construct
  REGION 1..9: note = Description of Artificial Sequence: Synthetic peptide
  REGION 1..9: note = XENP019942 vlCDR3
QQYGSSPWT

SEQ ID NO: 6578 - protein, 246 aa, synthetic construct
  REGION 1..246: note = Description of Artificial Sequence: Synthetic polypeptide
  REGION 1..246: note = XENP019943 [CTLA-4]_H0_L0.55_scFv(GKPGS)4
QVQLVESGGGVVQPGRSLRLSCAASGFTFSSYTMHWVRQAPGKGLEWVTFISYDGNNKYYADSVKGRFTISRDNSKNTLYLQMNSLRAEDTAIYYCARTGWLGPFDYWGQGTLVTVSSGKPGSGKPGSGKPGSGKPGSEIVLTQSPGTLSLSPGERATLSCRASQSVGSSYLAWYQQKPGKSPRLLIYGAFSRATGIPDRFSGSGSGTDFTLTISRLEPEDFAVYYCQQYGSSPWTFGQGTKVEIK

SEQ ID NO: 6579 - protein, 118 aa, synthetic construct; identical to SEQ ID NO: 3737
  REGION 1..118: note = Description of Artificial Sequence: Synthetic polypeptide
  REGION 1..118: note = VH of XENP019943

SEQ ID NO: 6580 - protein, 108 aa, synthetic construct
  REGION 1..108: note = Description of Artificial Sequence: Synthetic polypeptide
  REGION 1..108: note = VL of XENP019943
EIVLTQSPGTLSLSPGERATLSCRASQSVGSSYLAWYQQKPGKSPRLLIYGAFSRATGIPDRFSGSGSGTDFTLTISRLEPEDFAVYYCQQYGSSPWTFGQGTKVEIK

SEQ ID NO: 6581 - protein, 5 aa, synthetic construct
  REGION 1..5: note = Description of Artificial Sequence: Synthetic peptide
  REGION 1..5: note = XENP019943 vhCDR1
SYTMH

SEQ ID NO: 6582 - protein, 17 aa, synthetic construct
  REGION 1..17: note = Description of Artificial Sequence: Synthetic peptide
  REGION 1..17: note = XENP019943 vhCDR2
FISYDGNNKYYADSVKG

SEQ ID NO: 6583 - protein, 9 aa, synthetic construct
  REGION 1..9: note = Description of Artificial Sequence: Synthetic peptide
  REGION 1..9: note = XENP019943 vhCDR3
TGWLGPFDY

SEQ ID NO: 6584 - protein, 12 aa, synthetic construct
  REGION 1..12: note = Description of Artificial Sequence: Synthetic peptide
  REGION 1..12: note = XENP019943 vlCDR1
RASQSVGSSYLA

SEQ ID NO: 6585 - protein, 7 aa, synthetic construct
  REGION 1..7: note = Description of Artificial Sequence: Synthetic peptide
  REGION 1..7: note = XENP019943 vlCDR2
GAFSRAT

SEQ ID NO: 6586 - protein, 9 aa, synthetic construct
  REGION 1..9: note = Description of Artificial Sequence: Synthetic peptide
  REGION 1..9: note = XENP019943 vlCDR3
QQYGSSPWT

SEQ ID NO: 6587 - protein, 246 aa, synthetic construct
  REGION 1..246: note = Description of Artificial Sequence: Synthetic polypeptide
  REGION 1..246: note = XENP019944 [CTLA-4]_H0_L0.56_scFv(GKPGS)4
QVQLVESGGGVVQPGRSLRLSCAASGFTFSSYTMHWVRQAPGKGLEWVTFISYDGNNKYYADSVKGRFTISRDNSKNTLYLQMNSLRAEDTAIYYCARTGWLGPFDYWGQGTLVTVSSGKPGSGKPGSGKPGSGKPGSEIVLTQSPGTLSLSPGERATLSCRASQSVGSSYLAWYQQKPGQSPRLLIYGAFSRATGIPDRFSGSGSGTDFTLTISRLEPEDFAVYYCQQYGSSPWTFGQGTKVEIK

SEQ ID NO: 6588 - protein, 118 aa, synthetic construct; identical to SEQ ID NO: 3737
  REGION 1..118: note = Description of Artificial Sequence: Synthetic polypeptide
  REGION 1..118: note = VH of XENP019944

SEQ ID NO: 6589 - protein, 108 aa, synthetic construct
  REGION 1..108: note = Description of Artificial Sequence: Synthetic polypeptide
  REGION 1..108: note = VL of XENP019944
EIVLTQSPGTLSLSPGERATLSCRASQSVGSSYLAWYQQKPGQSPRLLIYGAFSRATGIPDRFSGSGSGTDFTLTISRLEPEDFAVYYCQQYGSSPWTFGQGTKVEIK

SEQ ID NO: 6590 - protein, 5 aa, synthetic construct
  REGION 1..5: note = Description of Artificial Sequence: Synthetic peptide
  REGION 1..5: note = XENP019944 vhCDR1
SYTMH

SEQ ID NO: 6591 - protein, 17 aa, synthetic construct
  REGION 1..17: note = Description of Artificial Sequence: Synthetic peptide
  REGION 1..17: note = XENP019944 vhCDR2
FISYDGNNKYYADSVKG

SEQ ID NO: 6592 - protein, 9 aa, synthetic construct
  REGION 1..9: note = Description of Artificial Sequence: Synthetic peptide
  REGION 1..9: note = XENP019944 vhCDR3
TGWLGPFDY

SEQ ID NO: 6593 - protein, 12 aa, synthetic construct
  REGION 1..12: note = Description of Artificial Sequence: Synthetic peptide
  REGION 1..12: note = XENP019944 vlCDR1
RASQSVGSSYLA

SEQ ID NO: 6594 - protein, 7 aa, synthetic construct
  REGION 1..7: note = Description of Artificial Sequence: Synthetic peptide
  REGION 1..7: note = XENP019944 vlCDR2
GAFSRAT

SEQ ID NO: 6595 - protein, 9 aa, synthetic construct
  REGION 1..9: note = Description of Artificial Sequence: Synthetic peptide
  REGION 1..9: note = XENP019944 vlCDR3
QQYGSSPWT

SEQ ID NO: 6596 - protein, 246 aa, synthetic construct
  REGION 1..246: note = Description of Artificial Sequence: Synthetic polypeptide
  REGION 1..246: note = XENP019945 [CTLA-4]_H0_L0.57_scFv(GKPGS)4
QVQLVESGGGVVQPGRSLRLSCAASGFTFSSYTMHWVRQAPGKGLEWVTFISYDGNNKYYADSVKGRFTISRDNSKNTLYLQMNSLRAEDTAIYYCARTGWLGPFDYWGQGTLVTVSSGKPGSGKPGSGKPGSGKPGSEIVLTQSPGTLSLSPGERATLSCRASQSVGSSYLAWYQQKPGQAPELLIYGAFSRATGIPDRFSGSGSGTDFTLTISRLEPEDFAVYYCQQYGSSPWTFGQGTKVEIK

SEQ ID NO: 6597 - protein, 118 aa, synthetic construct; identical to SEQ ID NO: 3737
  REGION 1..118: note = Description of Artificial Sequence: Synthetic polypeptide
  REGION 1..118: note = VH of XENP019945

SEQ ID NO: 6598 - protein, 108 aa, synthetic construct; identical to SEQ ID NO: 4762
  REGION 1..108: note = Description of Artificial Sequence: Synthetic polypeptide
  REGION 1..108: note = VL of XENP019945

SEQ ID NO: 6599 - protein, 5 aa, synthetic construct
  REGION 1..5: note = Description of Artificial Sequence: Synthetic peptide
  REGION 1..5: note = XENP019945 vhCDR1
SYTMH

SEQ ID NO: 6600 - protein, 17 aa, synthetic construct
  REGION 1..17: note = Description of Artificial Sequence: Synthetic peptide
  REGION 1..17: note = XENP019945 vhCDR2
FISYDGNNKYYADSVKG

SEQ ID NO: 6601 - protein, 9 aa, synthetic construct
  REGION 1..9: note = Description of Artificial Sequence: Synthetic peptide
  REGION 1..9: note = XENP019945 vhCDR3
TGWLGPFDY

SEQ ID NO: 6602 - protein, 12 aa, synthetic construct
  REGION 1..12: note = Description of Artificial Sequence: Synthetic peptide
  REGION 1..12: note = XENP019945 vlCDR1
RASQSVGSSYLA

SEQ ID NO: 6603 - protein, 7 aa, synthetic construct
  REGION 1..7: note = Description of Artificial Sequence: Synthetic peptide
  REGION 1..7: note = XENP019945 vlCDR2
GAFSRAT

SEQ ID NO: 6604 - protein, 9 aa, synthetic construct
  REGION 1..9: note = Description of Artificial Sequence: Synthetic peptide
  REGION 1..9: note = XENP019945 vlCDR3
QQYGSSPWT

SEQ ID NO: 6605 - protein, 246 aa, synthetic construct
  REGION 1..246: note = Description of Artificial Sequence: Synthetic polypeptide
  REGION 1..246: note = XENP019946 [CTLA-4]_H0_L0.58_scFv(GKPGS)4
QVQLVESGGGVVQPGRSLRLSCAASGFTFSSYTMHWVRQAPGKGLEWVTFISYDGNNKYYADSVKGRFTISRDNSKNTLYLQMNSLRAEDTAIYYCARTGWLGPFDYWGQGTLVTVSSGKPGSGKPGSGKPGSGKPGSEIVLTQSPGTLSLSPGERATLSCRASQSVGSSYLAWYQQKPGQAPELLIYGAFSRATGIPDRFSGSGSGTDFTLTISRLEPQDFAVYYCQQYGSSPWTFGQGTKVEIK

SEQ ID NO: 6606 - protein, 118 aa, synthetic construct; identical to SEQ ID NO: 3737
  REGION 1..118: note = Description of Artificial Sequence: Synthetic polypeptide
  REGION 1..118: note = VH of XENP019946

SEQ ID NO: 6607 - protein, 108 aa, synthetic construct
  REGION 1..108: note = Description of Artificial Sequence: Synthetic polypeptide
  REGION 1..108: note = VL of XENP019946
EIVLTQSPGTLSLSPGERATLSCRASQSVGSSYLAWYQQKPGQAPELLIYGAFSRATGIPDRFSGSGSGTDFTLTISRLEPQDFAVYYCQQYGSSPWTFGQGTKVEIK

SEQ ID NO: 6608 - protein, 5 aa, synthetic construct
  REGION 1..5: note = Description of Artificial Sequence: Synthetic peptide
  REGION 1..5: note = XENP019946 vhCDR1
SYTMH

SEQ ID NO: 6609 - protein, 17 aa, synthetic construct
  REGION 1..17: note = Description of Artificial Sequence: Synthetic peptide
  REGION 1..17: note = XENP019946 vhCDR2
FISYDGNNKYYADSVKG

SEQ ID NO: 6610 - protein, 9 aa, synthetic construct
  REGION 1..9: note = Description of Artificial Sequence: Synthetic peptide
  REGION 1..9: note = XENP019946 vhCDR3
TGWLGPFDY

SEQ ID NO: 6611 - protein, 12 aa, synthetic construct
  REGION 1..12: note = Description of Artificial Sequence: Synthetic peptide
  REGION 1..12: note = XENP019946 vlCDR1
RASQSVGSSYLA

SEQ ID NO: 6612 - protein, 7 aa, synthetic construct
  REGION 1..7: note = Description of Artificial Sequence: Synthetic peptide
  REGION 1..7: note = XENP019946 vlCDR2
GAFSRAT

SEQ ID NO: 6613 - protein, 9 aa, synthetic construct
  REGION 1..9: note = Description of Artificial Sequence: Synthetic peptide
  REGION 1..9: note = XENP019946 vlCDR3
QQYGSSPWT

SEQ ID NO: 6614 - protein, 246 aa, synthetic construct
  REGION 1..246: note = Description of Artificial Sequence: Synthetic polypeptide
  REGION 1..246: note = XENP019947 [CTLA-4]_H0_L0.59_scFv(GKPGS)4
QVQLVESGGGVVQPGRSLRLSCAASGFTFSSYTMHWVRQAPGKGLEWVTFISYDGNNKYYADSVKGRFTISRDNSKNTLYLQMNSLRAEDTAIYYCARTGWLGPFDYWGQGTLVTVSSGKPGSGKPGSGKPGSGKPGSEIVLTQSPGTLSLSPGERATLSCRASQSVGSSYLAWYQQKPGQAPKLLIYGAFSRATGIPDRFSGSGSGTDFTLTISRLEPEDFAVYYCQQYGSSPWTFGQGTKVEIK

SEQ ID NO: 6615 - protein, 118 aa, synthetic construct; identical to SEQ ID NO: 3737
  REGION 1..118: note = Description of Artificial Sequence: Synthetic polypeptide
  REGION 1..118: note = VH of XENP019947

SEQ ID NO: 6616 - protein, 108 aa, synthetic construct
  REGION 1..108: note = Description of Artificial Sequence: Synthetic polypeptide
  REGION 1..108: note = VL of XENP019947
EIVLTQSPGTLSLSPGERATLSCRASQSVGSSYLAWYQQKPGQAPKLLIYGAFSRATGIPDRFSGSGSGTDFTLTISRLEPEDFAVYYCQQYGSSPWTFGQGTKVEIK

SEQ ID NO: 6617 - protein, 5 aa, synthetic construct
  REGION 1..5: note = Description of Artificial Sequence: Synthetic peptide
  REGION 1..5: note = XENP019947 vhCDR1
SYTMH

SEQ ID NO: 6618 - protein, 17 aa, synthetic construct
  REGION 1..17: note = Description of Artificial Sequence: Synthetic peptide
  REGION 1..17: note = XENP019947 vhCDR2
FISYDGNNKYYADSVKG

SEQ ID NO: 6619 - protein, 9 aa, synthetic construct
  REGION 1..9: note = Description of Artificial Sequence: Synthetic peptide
  REGION 1..9: note = XENP019947 vhCDR3
TGWLGPFDY

SEQ ID NO: 6620 - protein, 12 aa, synthetic construct
  REGION 1..12: note = Description of Artificial Sequence: Synthetic peptide
  REGION 1..12: note = XENP019947 vlCDR1
RASQSVGSSYLA

SEQ ID NO: 6621 - protein, 7 aa, synthetic construct
  REGION 1..7: note = Description of Artificial Sequence: Synthetic peptide
  REGION 1..7: note = XENP019947 vlCDR2
GAFSRAT

SEQ ID NO: 6622 - protein, 9 aa, synthetic construct
  REGION 1..9: note = Description of Artificial Sequence: Synthetic peptide
  REGION 1..9: note = XENP019947 vlCDR3
QQYGSSPWT

SEQ ID NO: 6623 - protein, 246 aa, synthetic construct
  REGION 1..246: note = Description of Artificial Sequence: Synthetic polypeptide
  REGION 1..246: note = XENP019948 [CTLA-4]_H0_L0.60_scFv(GKPGS)4
QVQLVESGGGVVQPGRSLRLSCAASGFTFSSYTMHWVRQAPGKGLEWVTFISYDGNNKYYADSVKGRFTISRDNSKNTLYLQMNSLRAEDTAIYYCARTGWLGPFDYWGQGTLVTVSSGKPGSGKPGSGKPGSGKPGSEIVLTQSPGTLSLSPGERATLSCRASQSVGSSYLAWYQQKPGQAPRRLIYGAFSRATGIPDRFSGSGSGTDFTLTISRLEPEDFAVYYCQQYGSSPWTFGQGTKVEIK

SEQ ID NO: 6624 - protein, 118 aa, synthetic construct; identical to SEQ ID NO: 3737
  REGION 1..118: note = Description of Artificial Sequence: Synthetic polypeptide
  REGION 1..118: note = VH of XENP019948

SEQ ID NO: 6625 - protein, 108 aa, synthetic construct
  REGION 1..108: note = Description of Artificial Sequence: Synthetic polypeptide
  REGION 1..108: note = VL of XENP019948
EIVLTQSPGTLSLSPGERATLSCRASQSVGSSYLAWYQQKPGQAPRRLIYGAFSRATGIPDRFSGSGSGTDFTLTISRLEPEDFAVYYCQQYGSSPWTFGQGTKVEIK

SEQ ID NO: 6626 - protein, 5 aa, synthetic construct
  REGION 1..5: note = Description of Artificial Sequence: Synthetic peptide
  REGION 1..5: note = XENP019948 vhCDR1
SYTMH

SEQ ID NO: 6627 - protein, 17 aa, synthetic construct
  REGION 1..17: note = Description of Artificial Sequence: Synthetic peptide
  REGION 1..17: note = XENP019948 vhCDR2
FISYDGNNKYYADSVKG

SEQ ID NO: 6628 - protein, 9 aa, synthetic construct
  REGION 1..9: note = Description of Artificial Sequence: Synthetic peptide
  REGION 1..9: note = XENP019948 vhCDR3
TGWLGPFDY

SEQ ID NO: 6629 - protein, 12 aa, synthetic construct
  REGION 1..12: note = Description of Artificial Sequence: Synthetic peptide
  REGION 1..12: note = XENP019948 vlCDR1
RASQSVGSSYLA

SEQ ID NO: 6630 - protein, 7 aa, synthetic construct
  REGION 1..7: note = Description of Artificial Sequence: Synthetic peptide
  REGION 1..7: note = XENP019948 vlCDR2
GAFSRAT

SEQ ID NO: 6631 - protein, 9 aa, synthetic construct
  REGION 1..9: note = Description of Artificial Sequence: Synthetic peptide
  REGION 1..9: note = XENP019948 vlCDR3
QQYGSSPWT

SEQ ID NO: 6632 - protein, 246 aa, synthetic construct
  REGION 1..246: note = Description of Artificial Sequence: Synthetic polypeptide
  REGION 1..246: note = XENP019949 [CTLA-4]_H0_L0.61_scFv(GKPGS)4
QVQLVESGGGVVQPGRSLRLSCAASGFTFSSYTMHWVRQAPGKGLEWVTFISYDGNNKYYADSVKGRFTISRDNSKNTLYLQMNSLRAEDTAIYYCARTGWLGPFDYWGQGTLVTVSSGKPGSGKPGSGKPGSGKPGSEIVLTQSPGTLSLSPGERATLSCRASQSVGSSYLAWYQQKPGQAPRRLIYGAFSRDTGIPDRFSGSGSGTDFTLTISRLEPEDFAVYYCQQYGSSPWTFGQGTKVEIK

SEQ ID NO: 6633 - protein, 118 aa, synthetic construct; identical to SEQ ID NO: 3737
  REGION 1..118: note = Description of Artificial Sequence: Synthetic polypeptide
  REGION 1..118: note = VH of XENP019949

SEQ ID NO: 6634 - protein, 108 aa, synthetic construct
  REGION 1..108: note = Description of Artificial Sequence: Synthetic polypeptide
  REGION 1..108: note = VL of XENP019949
EIVLTQSPGTLSLSPGERATLSCRASQSVGSSYLAWYQQKPGQAPRRLIYGAFSRDTGIPDRFSGSGSGTDFTLTISRLEPEDFAVYYCQQYGSSPWTFGQGTKVEIK

SEQ ID NO: 6635 - protein, 5 aa, synthetic construct
  REGION 1..5: note = Description of Artificial Sequence: Synthetic peptide
  REGION 1..5: note = XENP019949 vhCDR1
SYTMH

SEQ ID NO: 6636 - protein, 17 aa, synthetic construct
  REGION 1..17: note = Description of Artificial Sequence: Synthetic peptide
  REGION 1..17: note = XENP019949 vhCDR2
FISYDGNNKYYADSVKG

SEQ ID NO: 6637 - protein, 9 aa, synthetic construct
  REGION 1..9: note = Description of Artificial Sequence: Synthetic peptide
  REGION 1..9: note = XENP019949 vhCDR3
TGWLGPFDY

SEQ ID NO: 6638 - protein, 12 aa, synthetic construct
  REGION 1..12: note = Description of Artificial Sequence: Synthetic peptide
  REGION 1..12: note = XENP019949 vlCDR1
RASQSVGSSYLA

SEQ ID NO: 6639 - protein, 7 aa, synthetic construct
  REGION 1..7: note = Description of Artificial Sequence: Synthetic peptide
  REGION 1..7: note = XENP019949 vlCDR2
GAFSRDT

SEQ ID NO: 6640 - protein, 9 aa, synthetic construct
  REGION 1..9: note = Description of Artificial Sequence: Synthetic peptide
  REGION 1..9: note = XENP019949 vlCDR3
QQYGSSPWT

SEQ ID NO: 6641 - protein, 246 aa, synthetic construct
  REGION 1..246: note = Description of Artificial Sequence: Synthetic polypeptide
  REGION 1..246: note = XENP019950 [CTLA-4]_H0_L0.62_scFv(GKPGS)4
QVQLVESGGGVVQPGRSLRLSCAASGFTFSSYTMHWVRQAPGKGLEWVTFISYDGNNKYYADSVKGRFTISRDNSKNTLYLQMNSLRAEDTAIYYCARTGWLGPFDYWGQGTLVTVSSGKPGSGKPGSGKPGSGKPGSEIVLTQSPGTLSLSPGERATLSCRASQSVGSSYLAWYQQKPGQAPRLLIAGAFSRATGIPDRFSGSGSGTDFTLTISRLEPEDFAVYYCQQYGSSPWTFGQGTKVEIK

SEQ ID NO: 6642 - protein, 118 aa, synthetic construct; identical to SEQ ID NO: 3737
  REGION 1..118: note = Description of Artificial Sequence: Synthetic polypeptide
  REGION 1..118: note = VH of XENP019950

SEQ ID NO: 6643 - protein, 108 aa, synthetic construct
  REGION 1..108: note = Description of Artificial Sequence: Synthetic polypeptide
  REGION 1..108: note = VL of XENP019950
EIVLTQSPGTLSLSPGERATLSCRASQSVGSSYLAWYQQKPGQAPRLLIAGAFSRATGIPDRFSGSGSGTDFTLTISRLEPEDFAVYYCQQYGSSPWTFGQGTKVEIK

SEQ ID NO: 6644 - protein, 5 aa, synthetic construct
  REGION 1..5: note = Description of Artificial Sequence: Synthetic peptide
  REGION 1..5: note = XENP019950 vhCDR1
SYTMH

SEQ ID NO: 6645 - protein, 17 aa, synthetic construct
  REGION 1..17: note = Description of Artificial Sequence: Synthetic peptide
  REGION 1..17: note = XENP019950 vhCDR2
FISYDGNNKYYADSVKG

SEQ ID NO: 6646 - protein, 9 aa, synthetic construct
  REGION 1..9: note = Description of Artificial Sequence: Synthetic peptide
  REGION 1..9: note = XENP019950 vhCDR3
TGWLGPFDY

SEQ ID NO: 6647 - protein, 12 aa, synthetic construct
  REGION 1..12: note = Description of Artificial Sequence: Synthetic peptide
  REGION 1..12: note = XENP019950 vlCDR1
RASQSVGSSYLA

SEQ ID NO: 6648 - protein, 7 aa, synthetic construct
  REGION 1..7: note = Description of Artificial Sequence: Synthetic peptide
  REGION 1..7: note = XENP019950 vlCDR2
GAFSRAT

SEQ ID NO: 6649 - protein, 9 aa, synthetic construct
  REGION 1..9: note = Description of Artificial Sequence: Synthetic peptide
  REGION 1..9: note = XENP019950 vlCDR3
QQYGSSPWT

SEQ ID NO: 6650 - protein, 246 aa, synthetic construct
  REGION 1..246: note = Description of Artificial Sequence: Synthetic polypeptide
  REGION 1..246: note = XENP019951 [CTLA-4]_H0_L0.63_scFv(GKPGS)4
QVQLVESGGGVVQPGRSLRLSCAASGFTFSSYTMHWVRQAPGKGLEWVTFISYDGNNKYYADSVKGRFTISRDNSKNTLYLQMNSLRAEDTAIYYCARTGWLGPFDYWGQGTLVTVSSGKPGSGKPGSGKPGSGKPGSEIVLTQSPGTLSLSPGERATLSCRASQSVGSSYLAWYQQKPGQAPRLLIFGAFSRATGIPDRFSGSGSGTDFTLTISRLEPEDFAVYYCQQYGSSPWTFGQGTKVEIK

SEQ ID NO: 6651 - protein, 118 aa, synthetic construct; identical to SEQ ID NO: 3737
  REGION 1..118: note = Description of Artificial Sequence: Synthetic polypeptide
  REGION 1..118: note = VH of XENP019951

SEQ ID NO: 6652 - protein, 108 aa, synthetic construct
  REGION 1..108: note = Description of Artificial Sequence: Synthetic polypeptide
  REGION 1..108: note = VL of XENP019951
EIVLTQSPGTLSLSPGERATLSCRASQSVGSSYLAWYQQKPGQAPRLLIFGAFSRATGIPDRFSGSGSGTDFTLTISRLEPEDFAVYYCQQYGSSPWTFGQGTKVEIK

SEQ ID NO: 6653 - protein, 5 aa, synthetic construct
  REGION 1..5: note = Description of Artificial Sequence: Synthetic peptide
  REGION 1..5: note = XENP019951 vhCDR1
SYTMH

SEQ ID NO: 6654 - protein, 17 aa, synthetic construct
  REGION 1..17: note = Description of Artificial Sequence: Synthetic peptide
  REGION 1..17: note = XENP019951 vhCDR2
FISYDGNNKYYADSVKG

SEQ ID NO: 6655 - protein, 9 aa, synthetic construct
  REGION 1..9: note = Description of Artificial Sequence: Synthetic peptide
  REGION 1..9: note = XENP019951 vhCDR3
TGWLGPFDY

SEQ ID NO: 6656 - protein, 12 aa, synthetic construct
  REGION 1..12: note = Description of Artificial Sequence: Synthetic peptide
  REGION 1..12: note = XENP019951 vlCDR1
RASQSVGSSYLA

SEQ ID NO: 6657 - protein, 7 aa, synthetic construct
  REGION 1..7: note = Description of Artificial Sequence: Synthetic peptide
  REGION 1..7: note = XENP019951 vlCDR2
GAFSRAT

SEQ ID NO: 6658 - protein, 9 aa, synthetic construct
  REGION 1..9: note = Description of Artificial Sequence: Synthetic peptide
  REGION 1..9: note = XENP019951 vlCDR3
QQYGSSPWT

SEQ ID NO: 6659 - protein, 246 aa, synthetic construct
  REGION 1..246: note = Description of Artificial Sequence: Synthetic polypeptide
  REGION 1..246: note = XENP019952 [CTLA-4]_H0_L0.64_scFv(GKPGS)4
QVQLVESGGGVVQPGRSLRLSCAASGFTFSSYTMHWVRQAPGKGLEWVTFISYDGNNKYYADSVKGRFTISRDNSKNTLYLQMNSLRAEDTAIYYCARTGWLGPFDYWGQGTLVTVSSGKPGSGKPGSGKPGSGKPGSEIVLTQSPGTLSLSPGERATLSCRASQSVGSSYLAWYQQKPGQAPRLLIHGAFSRATGIPDRFSGSGSGTDFTLTISRLEPEDFAVYYCQQYGSSPWTFGQGTKVEIK

SEQ ID NO: 6660 - protein, 118 aa, synthetic construct; identical to SEQ ID NO: 3737
  REGION 1..118: note = Description of Artificial Sequence: Synthetic polypeptide
  REGION 1..118: note = VH of XENP019952

SEQ ID NO: 6661 - protein, 108 aa, synthetic construct
  REGION 1..108: note = Description of Artificial Sequence: Synthetic polypeptide
  REGION 1..108: note = VL of XENP019952
EIVLTQSPGTLSLSPGERATLSCRASQSVGSSYLAWYQQKPGQAPRLLIHGAFSRATGIPDRFSGSGSGTDFTLTISRLEPEDFAVYYCQQYGSSPWTFGQGTKVEIK

SEQ ID NO: 6662 - protein, 5 aa, synthetic construct
  REGION 1..5: note = Description of Artificial Sequence: Synthetic peptide
  REGION 1..5: note = XENP019952 vhCDR1
SYTMH

SEQ ID NO: 6663 - protein, 17 aa, synthetic construct
  REGION 1..17: note = Description of Artificial Sequence: Synthetic peptide
  REGION 1..17: note = XENP019952 vhCDR2
FISYDGNNKYYADSVKG

SEQ ID NO: 6664 - protein, 9 aa, synthetic construct
  REGION 1..9: note = Description of Artificial Sequence: Synthetic peptide
  REGION 1..9: note = XENP019952 vhCDR3
TGWLGPFDY

SEQ ID NO: 6665 - protein, 12 aa, synthetic construct
  REGION 1..12: note = Description of Artificial Sequence: Synthetic peptide
  REGION 1..12: note = XENP019952 vlCDR1
RASQSVGSSYLA

SEQ ID NO: 6666 - protein, 7 aa, synthetic construct
  REGION 1..7: note = Description of Artificial Sequence: Synthetic peptide
  REGION 1..7: note = XENP019952 vlCDR2
GAFSRAT

SEQ ID NO: 6667 - protein, 9 aa, synthetic construct
  REGION 1..9: note = Description of Artificial Sequence: Synthetic peptide
  REGION 1..9: note = XENP019952 vlCDR3
QQYGSSPWT

SEQ ID NO: 6668 - protein, 246 aa, synthetic construct
  REGION 1..246: note = Description of Artificial Sequence: Synthetic polypeptide
  REGION 1..246: note = XENP019953 [CTLA-4]_H0_L0.65_scFv(GKPGS)4
QVQLVESGGGVVQPGRSLRLSCAASGFTFSSYTMHWVRQAPGKGLEWVTFISYDGNNKYYADSVKGRFTISRDNSKNTLYLQMNSLRAEDTAIYYCARTGWLGPFDYWGQGTLVTVSSGKPGSGKPGSGKPGSGKPGSEIVLTQSPGTLSLSPGERATLSCRASQSVGSSYLAWYQQKPGQAPRLLILGAFSRATGIPDRFSGSGSGTDFTLTISRLEPEDFAVYYCQQYGSSPWTFGQGTKVEIK

SEQ ID NO: 6669 - protein, 118 aa, synthetic construct; identical to SEQ ID NO: 3737
  REGION 1..118: note = Description of Artificial Sequence: Synthetic polypeptide
  REGION 1..118: note = VH of XENP019953

SEQ ID NO: 6670 - protein, 108 aa, synthetic construct
  REGION 1..108: note = Description of Artificial Sequence: Synthetic polypeptide
  REGION 1..108: note = VL of XENP019953
EIVLTQSPGTLSLSPGERATLSCRASQSVGSSYLAWYQQKPGQAPRLLILGAFSRATGIPDRFSGSGSGTDFTLTISRLEPEDFAVYYCQQYGSSPWTFGQGTKVEIK

SEQ ID NO: 6671 - protein, 5 aa, synthetic construct
  REGION 1..5: note = Description of Artificial Sequence: Synthetic peptide
  REGION 1..5: note = XENP019953 vhCDR1
SYTMH

SEQ ID NO: 6672 - protein, 17 aa, synthetic construct
  REGION 1..17: note = Description of Artificial Sequence: Synthetic peptide
  REGION 1..17: note = XENP019953 vhCDR2
FISYDGNNKYYADSVKG

SEQ ID NO: 6673 - protein, 9 aa, synthetic construct
  REGION 1..9: note = Description of Artificial Sequence: Synthetic peptide
  REGION 1..9: note = XENP019953 vhCDR3
TGWLGPFDY

SEQ ID NO: 6674 - protein, 12 aa, synthetic construct
  REGION 1..12: note = Description of Artificial Sequence: Synthetic peptide
  REGION 1..12: note = XENP019953 vlCDR1
RASQSVGSSYLA

SEQ ID NO: 6675 - protein, 7 aa, synthetic construct
  REGION 1..7: note = Description of Artificial Sequence: Synthetic peptide
  REGION 1..7: note = XENP019953 vlCDR2
GAFSRAT

SEQ ID NO: 6676 - protein, 9 aa, synthetic construct
  REGION 1..9: note = Description of Artificial Sequence: Synthetic peptide
  REGION 1..9: note = XENP019953 vlCDR3
QQYGSSPWT

SEQ ID NO: 6677 - protein, 246 aa, synthetic construct
  REGION 1..246: note = Description of Artificial Sequence: Synthetic polypeptide
  REGION 1..246: note = XENP019954 [CTLA-4]_H0_L0.66_scFv(GKPGS)4
QVQLVESGGGVVQPGRSLRLSCAASGFTFSSYTMHWVRQAPGKGLEWVTFISYDGNNKYYADSVKGRFTISRDNSKNTLYLQMNSLRAEDTAIYYCARTGWLGPFDYWGQGTLVTVSSGKPGSGKPGSGKPGSGKPGSEIVLTQSPGTLSLSPGERATLSCRASQSVGSSYLAWYQQKPGQAPRLLIVGAFSRATGIPDRFSGSGSGTDFTLTISRLEPEDFAVYYCQQYGSSPWTFGQGTKVEIK

SEQ ID NO: 6678 - protein, 118 aa, synthetic construct; identical to SEQ ID NO: 3737
  REGION 1..118: note = Description of Artificial Sequence: Synthetic polypeptide
  REGION 1..118: note = VH of XENP019954

SEQ ID NO: 6679 - protein, 108 aa, synthetic construct
  REGION 1..108: note = Description of Artificial Sequence: Synthetic polypeptide
  REGION 1..108: note = VL of XENP019954
EIVLTQSPGTLSLSPGERATLSCRASQSVGSSYLAWYQQKPGQAPRLLIVGAFSRATGIPDRFSGSGSGTDFTLTISRLEPEDFAVYYCQQYGSSPWTFGQGTKVEIK

SEQ ID NO: 6680 - protein, 5 aa, synthetic construct
  REGION 1..5: note = Description of Artificial Sequence: Synthetic peptide
  REGION 1..5: note = XENP019954 vhCDR1
SYTMH

SEQ ID NO: 6681 - protein, 17 aa, synthetic construct
  REGION 1..17: note = Description of Artificial Sequence: Synthetic peptide
  REGION 1..17: note = XENP019954 vhCDR2
FISYDGNNKYYADSVKG

SEQ ID NO: 6682 - protein, 9 aa, synthetic construct
  REGION 1..9: note = Description of Artificial Sequence: Synthetic peptide
  REGION 1..9: note = XENP019954 vhCDR3
TGWLGPFDY

SEQ ID NO: 6683 - protein, 12 aa, synthetic construct
  REGION 1..12: note = Description of Artificial Sequence: Synthetic peptide
  REGION 1..12: note = XENP019954 vlCDR1
RASQSVGSSYLA

SEQ ID NO: 6684 - protein, 7 aa, synthetic construct
  REGION 1..7: note = Description of Artificial Sequence: Synthetic peptide
  REGION 1..7: note = XENP019954 vlCDR2
GAFSRAT

SEQ ID NO: 6685 - protein, 9 aa, synthetic construct
  REGION 1..9: note = Description of Artificial Sequence: Synthetic peptide
  REGION 1..9: note = XENP019954 vlCDR3
QQYGSSPWT

SEQ ID NO: 6686 - protein, 246 aa, synthetic construct
  REGION 1..246: note = Description of Artificial Sequence: Synthetic polypeptide
  REGION 1..246: note = XENP019955 [CTLA-4]_H0_L0.67_scFv(GKPGS)4
QVQLVESGGGVVQPGRSLRLSCAASGFTFSSYTMHWVRQAPGKGLEWVTFISYDGNNKYYADSVKGRFTISRDNSKNTLYLQMNSLRAEDTAIYYCARTGWLGPFDYWGQGTLVTVSSGKPGSGKPGSGKPGSGKPGSEIVLTQSPGTLSLSPGERATLSCRASQSVGSSYLAWYQQKPGQAPRLLIYDAFSRATGIPDRFSGSGSGTDFTLTISRLEPEDFAVYYCQQYGSSPWTFGQGTKVEIK

SEQ ID NO: 6687 - protein, 118 aa, synthetic construct; identical to SEQ ID NO: 3737
  REGION 1..118: note = Description of Artificial Sequence: Synthetic polypeptide
  REGION 1..118: note = VH of XENP019955

SEQ ID NO: 6688 - protein, 108 aa, synthetic construct
  REGION 1..108: note = Description of Artificial Sequence: Synthetic polypeptide
  REGION 1..108: note = VL of XENP019955
EIVLTQSPGTLSLSPGERATLSCRASQSVGSSYLAWYQQKPGQAPRLLIYDAFSRATGIPDRFSGSGSGTDFTLTISRLEPEDFAVYYCQQYGSSPWTFGQGTKVEIK

SEQ ID NO: 6689 - protein, 5 aa, synthetic construct
  REGION 1..5: note = Description of Artificial Sequence: Synthetic peptide
  REGION 1..5: note = XENP019955 vhCDR1
SYTMH

SEQ ID NO: 6690 - protein, 17 aa, synthetic construct
  REGION 1..17: note = Description of Artificial Sequence: Synthetic peptide
  REGION 1..17: note = XENP019955 vhCDR2
FISYDGNNKYYADSVKG

SEQ ID NO: 6691 - protein, 9 aa, synthetic construct
  REGION 1..9: note = Description of Artificial Sequence: Synthetic peptide
  REGION 1..9: note = XENP019955 vhCDR3
TGWLGPFDY

SEQ ID NO: 6692 - protein, 12 aa, synthetic construct
  REGION 1..12: note = Description of Artificial Sequence: Synthetic peptide
  REGION 1..12: note = XENP019955 vlCDR1
RASQSVGSSYLA

SEQ ID NO: 6693 - protein, 7 aa, synthetic construct
  REGION 1..7: note = Description of Artificial Sequence: Synthetic peptide
  REGION 1..7: note = XENP019955 vlCDR2
DAFSRAT

SEQ ID NO: 6694 - protein, 9 aa, synthetic construct
  REGION 1..9: note = Description of Artificial Sequence: Synthetic peptide
  REGION 1..9: note = XENP019955 vlCDR3
QQYGSSPWT

SEQ ID NO: 6695 - protein, 246 aa, synthetic construct
  REGION 1..246: note = Description of Artificial Sequence: Synthetic polypeptide
  REGION 1..246: note = XENP019956 [CTLA-4]_H0_L0.68_scFv(GKPGS)4
QVQLVESGGGVVQPGRSLRLSCAASGFTFSSYTMHWVRQAPGKGLEWVTFISYDGNNKYYADSVKGRFTISRDNSKNTLYLQMNSLRAEDTAIYYCARTGWLGPFDYWGQGTLVTVSSGKPGSGKPGSGKPGSGKPGSEIVLTQSPGTLSLSPGERATLSCRASQSVGSSYLAWYQQKPGQAPRLLIYSAFSRATGIPDRFSGSGSGTDFTLTISRLEPEDFAVYYCQQYGSSPWTFGQGTKVEIK

SEQ ID NO: 6696 - protein, 118 aa, synthetic construct; identical to SEQ ID NO: 3737
  REGION 1..118: note = Description of Artificial Sequence: Synthetic polypeptide
  REGION 1..118: note = VH of XENP019956

SEQ ID NO: 6697 - protein, 108 aa, synthetic construct
  REGION 1..108: note = Description of Artificial Sequence: Synthetic polypeptide
  REGION 1..108: note = VL of XENP019956
EIVLTQSPGTLSLSPGERATLSCRASQSVGSSYLAWYQQKPGQAPRLLIYSAFSRATGIPDRFSGSGSGTDFTLTISRLEPEDFAVYYCQQYGSSPWTFGQGTKVEIK

SEQ ID NO: 6698 - protein, 5 aa, synthetic construct
  REGION 1..5: note = Description of Artificial Sequence: Synthetic peptide
  REGION 1..5: note = XENP019956 vhCDR1
SYTMH

SEQ ID NO: 6699 - protein, 17 aa, synthetic construct
  REGION 1..17: note = Description of Artificial Sequence: Synthetic peptide
  REGION 1..17: note = XENP019956 vhCDR2
FISYDGNNKYYADSVKG

SEQ ID NO: 6700 - protein, 9 aa, synthetic construct
  REGION 1..9: note = Description of Artificial Sequence: Synthetic peptide
  REGION 1..9: note = XENP019956 vhCDR3
TGWLGPFDY

SEQ ID NO: 6701 - protein, 12 aa, synthetic construct
  REGION 1..12: note = Description of Artificial Sequence: Synthetic peptide
  REGION 1..12: note = XENP019956 vlCDR1
RASQSVGSSYLA

SEQ ID NO: 6702 - protein, 7 aa, synthetic construct
  REGION 1..7: note = Description of Artificial Sequence: Synthetic peptide
  REGION 1..7: note = XENP019956 vlCDR2
SAFSRAT

SEQ ID NO: 6703 - protein, 9 aa, synthetic construct
  REGION 1..9: note = Description of Artificial Sequence: Synthetic peptide
  REGION 1..9: note = XENP019956 vlCDR3
QQYGSSPWT

SEQ ID NO: 6704 - protein, 246 aa, synthetic construct
  REGION 1..246: note = Description of Artificial Sequence: Synthetic polypeptide
  REGION 1..246: note = XENP019957 [CTLA-4]_H0_L0.69_scFv(GKPGS)4
QVQLVESGGGVVQPGRSLRLSCAASGFTFSSYTMHWVRQAPGKGLEWVTFISYDGNNKYYADSVKGRFTISRDNSKNTLYLQMNSLRAEDTAIYYCARTGWLGPFDYWGQGTLVTVSSGKPGSGKPGSGKPGSGKPGSEIVLTQSPGTLSLSPGERATLSCRASQSVGSSYLAWYQQKPGQAPRLLIYGVFSRATGIPDRFSGSGSGTDFTLTISRLEPEDFAVYYCQQYGSSPWTFGQGTKVEIK

SEQ ID NO: 6705 - protein, 118 aa, synthetic construct; identical to SEQ ID NO: 3737
  REGION 1..118: note = Description of Artificial Sequence: Synthetic polypeptide
  REGION 1..118: note = VH of XENP019957

SEQ ID NO: 6706 - protein, 108 aa, synthetic construct
  REGION 1..108: note = Description of Artificial Sequence: Synthetic polypeptide
  REGION 1..108: note = VL of XENP019957
EIVLTQSPGTLSLSPGERATLSCRASQSVGSSYLAWYQQKPGQAPRLLIYGVFSRATGIPDRFSGSGSGTDFTLTISRLEPEDFAVYYCQQYGSSPWTFGQGTKVEIK

SEQ ID NO: 6707 - protein, 5 aa, synthetic construct
  REGION 1..5: note = Description of Artificial Sequence: Synthetic peptide
  REGION 1..5: note = XENP019957 vhCDR1
SYTMH

SEQ ID NO: 6708 - protein, 17 aa, synthetic construct
  REGION 1..17: note = Description of Artificial Sequence: Synthetic peptide
  REGION 1..17: note = XENP019957 vhCDR2
FISYDGNNKYYADSVKG

SEQ ID NO: 6709 - protein, 9 aa, synthetic construct
  REGION 1..9: note = Description of Artificial Sequence: Synthetic peptide
  REGION 1..9: note = XENP019957 vhCDR3
TGWLGPFDY

SEQ ID NO: 6710 - protein, 12 aa, synthetic construct
  REGION 1..12: note = Description of Artificial Sequence: Synthetic peptide
  REGION 1..12: note = XENP019957 vlCDR1
RASQSVGSSYLA

SEQ ID NO: 6711 - protein, 7 aa, synthetic construct
  REGION 1..7: note = Description of Artificial Sequence: Synthetic peptide
  REGION 1..7: note = XENP019957 vlCDR2
GVFSRAT

SEQ ID NO: 6712 - protein, 9 aa, synthetic construct
  REGION 1..9: note = Description of Artificial Sequence: Synthetic peptide
  REGION 1..9: note = XENP019957 vlCDR3
QQYGSSPWT

SEQ ID NO: 6713 - protein, 246 aa, synthetic construct
  REGION 1..246: note = Description of Artificial Sequence: Synthetic polypeptide
  REGION 1..246: note = XENP019958 [CTLA-4]_H0_L0.70_scFv(GKPGS)4
QVQLVESGGGVVQPGRSLRLSCAASGFTFSSYTMHWVRQAPGKGLEWVTFISYDGNNKYYADSVKGRFTISRDNSKNTLYLQMNSLRAEDTAIYYCARTGWLGPFDYWGQGTLVTVSSGKPGSGKPGSGKPGSGKPGSEIVLTQSPGTLSLSPGERATLSCRASQSVGSSYLAWYQQKPGQAPRLLIYGAHSRATGIPDRFSGSGSGTDFTLTISRLEPEDFAVYYCQQYGSSPWTFGQGTKVEIK

SEQ ID NO: 6714 - protein, 118 aa, synthetic construct; identical to SEQ ID NO: 3737
  REGION 1..118: note = Description of Artificial Sequence: Synthetic polypeptide
  REGION 1..118: note = VH of XENP019958

SEQ ID NO: 6715 - protein, 108 aa, synthetic construct
  REGION 1..108: note = Description of Artificial Sequence: Synthetic polypeptide
  REGION 1..108: note = VL of XENP019958
EIVLTQSPGTLSLSPGERATLSCRASQSVGSSYLAWYQQKPGQAPRLLIYGAHSRATGIPDRFSGSGSGTDFTLTISRLEPEDFAVYYCQQYGSSPWTFGQGTKVEIK

SEQ ID NO: 6716 - protein, 5 aa, synthetic construct
  REGION 1..5: note = Description of Artificial Sequence: Synthetic peptide
  REGION 1..5: note = XENP019958 vhCDR1
SYTMH

SEQ ID NO: 6717 - protein, 17 aa, synthetic construct
  REGION 1..17: note = Description of Artificial Sequence: Synthetic peptide
  REGION 1..17: note = XENP019958 vhCDR2
FISYDGNNKYYADSVKG

SEQ ID NO: 6718 - protein, 9 aa, synthetic construct
  REGION 1..9: note = Description of Artificial Sequence: Synthetic peptide
  REGION 1..9: note = XENP019958 vhCDR3
TGWLGPFDY

SEQ ID NO: 6719 - protein, 12 aa, synthetic construct
  REGION 1..12: note = Description of Artificial Sequence: Synthetic peptide
  REGION 1..12: note = XENP019958 vlCDR1
RASQSVGSSYLA

SEQ ID NO: 6720 - protein, 7 aa, synthetic construct
  REGION 1..7: note = Description of Artificial Sequence: Synthetic peptide
  REGION 1..7: note = XENP019958 vlCDR2
GAHSRAT

SEQ ID NO: 6721 - protein, 9 aa, synthetic construct
  REGION 1..9: note = Description of Artificial Sequence: Synthetic peptide
  REGION 1..9: note = XENP019958 vlCDR3
QQYGSSPWT

SEQ ID NO: 6722 - protein, 246 aa, synthetic construct
  REGION 1..246: note = Description of Artificial Sequence: Synthetic polypeptide
  REGION 1..246: note = XENP019959 [CTLA-4]_H0_L0.71_scFv(GKPGS)4
QVQLVESGGGVVQPGRSLRLSCAASGFTFSSYTMHWVRQAPGKGLEWVTFISYDGNNKYYADSVKGRFTISRDNSKNTLYLQMNSLRAEDTAIYYCARTGWLGPFDYWGQGTLVTVSSGKPGSGKPGSGKPGSGKPGSEIVLTQSPGTLSLSPGERATLSCRASQSVGSSYLAWYQQKPGQAPRLLIYGAISRATGIPDRFSGSGSGTDFTLTISRLEPEDFAVYYCQQYGSSPWTFGQGTKVEIK

SEQ ID NO: 6723 - protein, 118 aa, synthetic construct; identical to SEQ ID NO: 3737
  REGION 1..118: note = Description of Artificial Sequence: Synthetic polypeptide
  REGION 1..118: note = VH of XENP019959

SEQ ID NO: 6724 - protein, 108 aa, synthetic construct
  REGION 1..108: note = Description of Artificial Sequence: Synthetic polypeptide
  REGION 1..108: note = VL of XENP019959
EIVLTQSPGTLSLSPGERATLSCRASQSVGSSYLAWYQQKPGQAPRLLIYGAISRATGIPDRFSGSGSGTDFTLTISRLEPEDFAVYYCQQYGSSPWTFGQGTKVEIK

SEQ ID NO: 6725 - protein, 5 aa, synthetic construct
  REGION 1..5: note = Description of Artificial Sequence: Synthetic peptide
  REGION 1..5: note = XENP019959 vhCDR1
SYTMH

SEQ ID NO: 6726 - protein, 17 aa, synthetic construct
  REGION 1..17: note = Description of Artificial Sequence: Synthetic peptide
  REGION 1..17: note = XENP019959 vhCDR2
FISYDGNNKYYADSVKG

SEQ ID NO: 6727 - protein, 9 aa, synthetic construct
  REGION 1..9: note = Description of Artificial Sequence: Synthetic peptide
  REGION 1..9: note = XENP019959 vhCDR3
TGWLGPFDY

SEQ ID NO: 6728 - protein, 12 aa, synthetic construct
  REGION 1..12: note = Description of Artificial Sequence: Synthetic peptide
  REGION 1..12: note = XENP019959 vlCDR1
RASQSVGSSYLA

SEQ ID NO: 6729 - protein, 7 aa, synthetic construct
  REGION 1..7: note = Description of Artificial Sequence: Synthetic peptide
  REGION 1..7: note = XENP019959 vlCDR2
GAISRAT

SEQ ID NO: 6730 - protein, 9 aa, synthetic construct
  REGION 1..9: note = Description of Artificial Sequence: Synthetic peptide
  REGION 1..9: note = XENP019959 vlCDR3
QQYGSSPWT

SEQ ID NO: 6731 - protein, 246 aa, synthetic construct
  REGION 1..246: note = Description of Artificial Sequence: Synthetic polypeptide
  REGION 1..246: note = XENP019960 [CTLA-4]_H0_L0.72_scFv(GKPGS)4
QVQLVESGGGVVQPGRSLRLSCAASGFTFSSYTMHWVRQAPGKGLEWVTFISYDGNNKYYADSVKGRFTISRDNSKNTLYLQMNSLRAEDTAIYYCARTGWLGPFDYWGQGTLVTVSSGKPGSGKPGSGKPGSGKPGSEIVLTQSPGTLSLSPGERATLSCRASQSVGSSYLAWYQQKPGQAPRLLIYGALSRATGIPDRFSGSGSGTDFTLTISRLEPEDFAVYYCQQYGSSPWTFGQGTKVEIK

SEQ ID NO: 6732 - protein, 118 aa, synthetic construct; identical to SEQ ID NO: 3737
  REGION 1..118: note = Description of Artificial Sequence: Synthetic polypeptide
  REGION 1..118: note = VH of XENP019960

SEQ ID NO: 6733 - protein, 108 aa, synthetic construct
  REGION 1..108: note = Description of Artificial Sequence: Synthetic polypeptide
  REGION 1..108: note = VL of XENP019960
EIVLTQSPGTLSLSPGERATLSCRASQSVGSSYLAWYQQKPGQAPRLLIYGALSRATGIPDRFSGSGSGTDFTLTISRLEPEDFAVYYCQQYGSSPWTFGQGTKVEIK

SEQ ID NO: 6734 - protein, 5 aa, synthetic construct
  REGION 1..5: note = Description of Artificial Sequence: Synthetic peptide
  REGION 1..5: note = XENP019960 vhCDR1
SYTMH

SEQ ID NO: 6735 - protein, 17 aa, synthetic construct
  REGION 1..17: note = Description of Artificial Sequence: Synthetic peptide
  REGION 1..17: note = XENP019960 vhCDR2
FISYDGNNKYYADSVKG

SEQ ID NO: 6736 - protein, 9 aa, synthetic construct
  REGION 1..9: note = Description of Artificial Sequence: Synthetic peptide
  REGION 1..9: note = XENP019960 vhCDR3
TGWLGPFDY

SEQ ID NO: 6737 - protein, 12 aa, synthetic construct
  REGION 1..12: note = Description of Artificial Sequence: Synthetic peptide
  REGION 1..12: note = XENP019960 vlCDR1
RASQSVGSSYLA

SEQ ID NO: 6738 - protein, 7 aa, synthetic construct
  REGION 1..7: note = Description of Artificial Sequence: Synthetic peptide
  REGION 1..7: note = XENP019960 vlCDR2
GALSRAT

SEQ ID NO: 6739 - protein, 9 aa, synthetic construct
  REGION 1..9: note = Description of Artificial Sequence: Synthetic peptide
  REGION 1..9: note = XENP019960 vlCDR3
QQYGSSPWT

SEQ ID NO: 6740 - protein, 246 aa, synthetic construct
  REGION 1..246: note = Description of Artificial Sequence: Synthetic polypeptide
  REGION 1..246: note = XENP019961 [CTLA-4]_H0_L0.73_scFv(GKPGS)4
QVQLVESGGGVVQPGRSLRLSCAASGFTFSSYTMHWVRQAPGKGLEWVTFISYDGNNKYYADSVKGRFTISRDNSKNTLYLQMNSLRAEDTAIYYCARTGWLGPFDYWGQGTLVTVSSGKPGSGKPGSGKPGSGKPGSEIVLTQSPGTLSLSPGERATLSCRASQSVGSSYLAWYQQKPGQAPRLLIYGASSRATGIPDRFSGSGSGTDFTLTISRLEPEDFAVYYCQQYGSSPWTFGQGTKVEIK

SEQ ID NO: 6741 - protein, 118 aa, synthetic construct; identical to SEQ ID NO: 3737
  REGION 1..118: note = Description of Artificial Sequence: Synthetic polypeptide
  REGION 1..118: note = VH of XENP019961

SEQ ID NO: 6742 - protein, 108 aa, synthetic construct
  REGION 1..108: note = Description of Artificial Sequence: Synthetic polypeptide
  REGION 1..108: note = VL of XENP019961
EIVLTQSPGTLSLSPGERATLSCRASQSVGSSYLAWYQQKPGQAPRLLIYGASSRATGIPDRFSGSGSGTDFTLTISRLEPEDFAVYYCQQYGSSPWTFGQGTKVEIK

SEQ ID NO: 6743 - protein, 5 aa, synthetic construct
  REGION 1..5: note = Description of Artificial Sequence: Synthetic peptide
  REGION 1..5: note = XENP019961 vhCDR1
SYTMH

SEQ ID NO: 6744 - protein, 17 aa, synthetic construct
  REGION 1..17: note = Description of Artificial Sequence: Synthetic peptide
  REGION 1..17: note = XENP019961 vhCDR2
FISYDGNNKYYADSVKG

SEQ ID NO: 6745 - protein, 9 aa, synthetic construct
  REGION 1..9: note = Description of Artificial Sequence: Synthetic peptide
  REGION 1..9: note = XENP019961 vhCDR3
TGWLGPFDY

SEQ ID NO: 6746 - protein, 12 aa, synthetic construct
  REGION 1..12: note = Description of Artificial Sequence: Synthetic peptide
  REGION 1..12: note = XENP019961 vlCDR1
RASQSVGSSYLA

SEQ ID NO: 6747 - protein, 7 aa, synthetic construct
  REGION 1..7: note = Description of Artificial Sequence: Synthetic peptide
  REGION 1..7: note = XENP019961 vlCDR2
GASSRAT

SEQ ID NO: 6748 - protein, 9 aa, synthetic construct
  REGION 1..9: note = Description of Artificial Sequence: Synthetic peptide
  REGION 1..9: note = XENP019961 vlCDR3
QQYGSSPWT

SEQ ID NO: 6749 - protein, 246 aa, synthetic construct
  REGION 1..246: note = Description of Artificial Sequence: Synthetic polypeptide
  REGION 1..246: note = XENP019962 [CTLA-4]_H0_L0.74_scFv(GKPGS)4
QVQLVESGGGVVQPGRSLRLSCAASGFTFSSYTMHWVRQAPGKGLEWVTFISYDGNNKYYADSVKGRFTISRDNSKNTLYLQMNSLRAEDTAIYYCARTGWLGPFDYWGQGTLVTVSSGKPGSGKPGSGKPGSGKPGSEIVLTQSPGTLSLSPGERATLSCRASQSVGSSYLAWYQQKPGQAPRLLIYGAYSRATGIPDRFSGSGSGTDFTLTISRLEPEDFAVYYCQQYGSSPWTFGQGTKVEIK

SEQ ID NO: 6750 - protein, 118 aa, synthetic construct; identical to SEQ ID NO: 3737
  REGION 1..118: note = Description of Artificial Sequence: Synthetic polypeptide
  REGION 1..118: note = VH of XENP019962

SEQ ID NO: 6751 - protein, 108 aa, synthetic construct
  REGION 1..108: note = Description of Artificial Sequence: Synthetic polypeptide
  REGION 1..108: note = VL of XENP019962
EIVLTQSPGTLSLSPGERATLSCRASQSVGSSYLAWYQQKPGQAPRLLIYGAYSRATGIPDRFSGSGSGTDFTLTISRLEPEDFAVYYCQQYGSSPWTFGQGTKVEIK

SEQ ID NO: 6752 - protein, 5 aa, synthetic construct
  REGION 1..5: note = Description of Artificial Sequence: Synthetic peptide
  REGION 1..5: note = XENP019962 vhCDR1
SYTMH

SEQ ID NO: 6753 - protein, 17 aa, synthetic construct
  REGION 1..17: note = Description of Artificial Sequence: Synthetic peptide
  REGION 1..17: note = XENP019962 vhCDR2
FISYDGNNKYYADSVKG

SEQ ID NO: 6754 - protein, 9 aa, synthetic construct
  REGION 1..9: note = Description of Artificial Sequence: Synthetic peptide
  REGION 1..9: note = XENP019962 vhCDR3
TGWLGPFDY

SEQ ID NO: 6755 - protein, 12 aa, synthetic construct
  REGION 1..12: note = Description of Artificial Sequence: Synthetic peptide
  REGION 1..12: note = XENP019962 vlCDR1
RASQSVGSSYLA

SEQ ID NO: 6756 - protein, 7 aa, synthetic construct
  REGION 1..7: note = Description of Artificial Sequence: Synthetic peptide
  REGION 1..7: note = XENP019962 vlCDR2
GAYSRAT

SEQ ID NO: 6757 - protein, 9 aa, synthetic construct
  REGION 1..9: note = Description of Artificial Sequence: Synthetic peptide
  REGION 1..9: note = XENP019962 vlCDR3
QQYGSSPWT

SEQ ID NO: 6758 - protein, 246 aa, synthetic construct
  REGION 1..246: note = Description of Artificial Sequence: Synthetic polypeptide
  REGION 1..246: note = XENP019963 [CTLA-4]_H0_L0.75_scFv(GKPGS)4
QVQLVESGGGVVQPGRSLRLSCAASGFTFSSYTMHWVRQAPGKGLEWVTFISYDGNNKYYADSVKGRFTISRDNSKNTLYLQMNSLRAEDTAIYYCARTGWLGPFDYWGQGTLVTVSSGKPGSGKPGSGKPGSGKPGSEIVLTQSPGTLSLSPGERATLSCRASQSVGSSYLAWYQQKPGQAPRLLIYGAFARATGIPDRFSGSGSGTDFTLTISRLEPEDFAVYYCQQYGSSPWTFGQGTKVEIK

SEQ ID NO: 6759 - protein, 118 aa, synthetic construct; identical to SEQ ID NO: 3737
  REGION 1..118: note = Description of Artificial Sequence: Synthetic polypeptide
  REGION 1..118: note = VH of XENP019963

SEQ ID NO: 6760 - protein, 108 aa, synthetic construct
  REGION 1..108: note = Description of Artificial Sequence: Synthetic polypeptide
  REGION 1..108: note = VL of XENP019963
EIVLTQSPGTLSLSPGERATLSCRASQSVGSSYLAWYQQKPGQAPRLLIYGAFARATGIPDRFSGSGSGTDFTLTISRLEPEDFAVYYCQQYGSSPWTFGQGTKVEIK

SEQ ID NO: 6761 - protein, 5 aa, synthetic construct
  REGION 1..5: note = Description of Artificial Sequence: Synthetic peptide
  REGION 1..5: note = XENP019963 vhCDR1
SYTMH

SEQ ID NO: 6762 - protein, 17 aa, synthetic construct
  REGION 1..17: note = Description of Artificial Sequence: Synthetic peptide
  REGION 1..17: note = XENP019963 vhCDR2
FISYDGNNKYYADSVKG

SEQ ID NO: 6763 - protein, 9 aa, synthetic construct
  REGION 1..9: note = Description of Artificial Sequence: Synthetic peptide
  REGION 1..9: note = XENP019963 vhCDR3
TGWLGPFDY

SEQ ID NO: 6764 - protein, 12 aa, synthetic construct
  REGION 1..12: note = Description of Artificial Sequence: Synthetic peptide
  REGION 1..12: note = XENP019963 vlCDR1
RASQSVGSSYLA

SEQ ID NO: 6765 - protein, 7 aa, synthetic construct
  REGION 1..7: note = Description of Artificial Sequence: Synthetic peptide
  REGION 1..7: note = XENP019963 vlCDR2
GAFARAT

SEQ ID NO: 6766 - protein, 9 aa, synthetic construct
  REGION 1..9: note = Description of Artificial Sequence: Synthetic peptide
  REGION 1..9: note = XENP019963 vlCDR3
QQYGSSPWT

SEQ ID NO: 6767 - protein, 246 aa, synthetic construct
  REGION 1..246: note = Description of Artificial Sequence: Synthetic polypeptide
  REGION 1..246: note = XENP019964 [CTLA-4]_H0_L0.76_scFv(GKPGS)4
QVQLVESGGGVVQPGRSLRLSCAASGFTFSSYTMHWVRQAPGKGLEWVTFISYDGNNKYYADSVKGRFTISRDNSKNTLYLQMNSLRAEDTAIYYCARTGWLGPFDYWGQGTLVTVSSGKPGSGKPGSGKPGSGKPGSEIVLTQSPGTLSLSPGERATLSCRASQSVGSSYLAWYQQKPGQAPRLLIYGAFGRATGIPDRFSGSGSGTDFTLTISRLEPEDFAVYYCQQYGSSPWTFGQGTKVEIK

SEQ ID NO: 6768 - protein, 118 aa, synthetic construct; identical to SEQ ID NO: 3737
  REGION 1..118: note = Description of Artificial Sequence: Synthetic polypeptide
  REGION 1..118: note = VH of XENP019964

SEQ ID NO: 6769 - protein, 108 aa, synthetic construct
  REGION 1..108: note = Description of Artificial Sequence: Synthetic polypeptide
  REGION 1..108: note = VL of XENP019964
EIVLTQSPGTLSLSPGERATLSCRASQSVGSSYLAWYQQKPGQAPRLLIYGAFGRATGIPDRFSGSGSGTDFTLTISRLEPEDFAVYYCQQYGSSPWTFGQGTKVEIK

SEQ ID NO: 6770 - protein, 5 aa, synthetic construct
  REGION 1..5: note = Description of Artificial Sequence: Synthetic peptide
  REGION 1..5: note = XENP019964 vhCDR1
SYTMH

SEQ ID NO: 6771 - protein, 17 aa, synthetic construct
  REGION 1..17: note = Description of Artificial Sequence: Synthetic peptide
  REGION 1..17: note = XENP019964 vhCDR2
FISYDGNNKYYADSVKG

SEQ ID NO: 6772 - protein, 9 aa, synthetic construct
  REGION 1..9: note = Description of Artificial Sequence: Synthetic peptide
  REGION 1..9: note = XENP019964 vhCDR3
TGWLGPFDY

SEQ ID NO: 6773 - protein, 12 aa, synthetic construct
  REGION 1..12: note = Description of Artificial Sequence: Synthetic peptide
  REGION 1..12: note = XENP019964 vlCDR1
RASQSVGSSYLA

SEQ ID NO: 6774 - protein, 7 aa, synthetic construct
  REGION 1..7: note = Description of Artificial Sequence: Synthetic peptide
  REGION 1..7: note = XENP019964 vlCDR2
GAFGRAT

SEQ ID NO: 6775 - protein, 9 aa, synthetic construct
  REGION 1..9: note = Description of Artificial Sequence: Synthetic peptide
  REGION 1..9: note = XENP019964 vlCDR3
QQYGSSPWT

SEQ ID NO: 6776 - protein, 246 aa, synthetic construct
  REGION 1..246: note = Description of Artificial Sequence: Synthetic polypeptide
  REGION 1..246: note = XENP019965 [CTLA-4]_H0_L0.77_scFv(GKPGS)4
QVQLVESGGGVVQPGRSLRLSCAASGFTFSSYTMHWVRQAPGKGLEWVTFISYDGNNKYYADSVKGRFTISRDNSKNTLYLQMNSLRAEDTAIYYCARTGWLGPFDYWGQGTLVTVSSGKPGSGKPGSGKPGSGKPGSEIVLTQSPGTLSLSPGERATLSCRASQSVGSSYLAWYQQKPGQAPRLLIYGAFNRATGIPDRFSGSGSGTDFTLTISRLEPEDFAVYYCQQYGSSPWTFGQGTKVEIK

SEQ ID NO: 6777 - protein, 118 aa, synthetic construct; identical to SEQ ID NO: 3737
  REGION 1..118: note = Description of Artificial Sequence: Synthetic polypeptide
  REGION 1..118: note = VH of XENP019965

SEQ ID NO: 6778 - protein, 108 aa, synthetic construct
  REGION 1..108: note = Description of Artificial Sequence: Synthetic polypeptide
  REGION 1..108: note = VL of XENP019965
EIVLTQSPGTLSLSPGERATLSCRASQSVGSSYLAWYQQKPGQAPRLLIYGAFNRATGIPDRFSGSGSGTDFTLTISRLEPEDFAVYYCQQYGSSPWTFGQGTKVEIK

SEQ ID NO: 6779 - protein, 5 aa, synthetic construct
  REGION 1..5: note = Description of Artificial Sequence: Synthetic peptide
  REGION 1..5: note = XENP019965 vhCDR1
SYTMH

SEQ ID NO: 6780 - protein, 17 aa, synthetic construct
  REGION 1..17: note = Description of Artificial Sequence: Synthetic peptide
  REGION 1..17: note = XENP019965 vhCDR2
FISYDGNNKYYADSVKG

SEQ ID NO: 6781 - protein, 9 aa, synthetic construct
  REGION 1..9: note = Description of Artificial Sequence: Synthetic peptide
  REGION 1..9: note = XENP019965 vhCDR3
TGWLGPFDY

SEQ ID NO: 6782 - protein, 12 aa, synthetic construct
  REGION 1..12: note = Description of Artificial Sequence: Synthetic peptide
  REGION 1..12: note = XENP019965 vlCDR1
RASQSVGSSYLA

SEQ ID NO: 6783 - protein, 7 aa, synthetic construct
  REGION 1..7: note = Description of Artificial Sequence: Synthetic peptide
  REGION 1..7: note = XENP019965 vlCDR2
GAFNRAT

SEQ ID NO: 6784 - protein, 9 aa, synthetic construct
  REGION 1..9: note = Description of Artificial Sequence: Synthetic peptide
  REGION 1..9: note = XENP019965 vlCDR3
QQYGSSPWT

SEQ ID NO: 6785 - protein, 246 aa, synthetic construct
  REGION 1..246: note = Description of Artificial Sequence: Synthetic polypeptide
  REGION 1..246: note = XENP019966 [CTLA-4]_H0_L0.78_scFv(GKPGS)4
QVQLVESGGGVVQPGRSLRLSCAASGFTFSSYTMHWVRQAPGKGLEWVTFISYDGNNKYYADSVKGRFTISRDNSKNTLYLQMNSLRAEDTAIYYCARTGWLGPFDYWGQGTLVTVSSGKPGSGKPGSGKPGSGKPGSEIVLTQSPGTLSLSPGERATLSCRASQSVGSSYLAWYQQKPGQAPRLLIYGAFQRATGIPDRFSGSGSGTDFTLTISRLEPEDFAVYYCQQYGSSPWTFGQGTKVEIK

SEQ ID NO: 6786 - protein, 118 aa, synthetic construct; identical to SEQ ID NO: 3737
  REGION 1..118: note = Description of Artificial Sequence: Synthetic polypeptide
  REGION 1..118: note = VH of XENP019966

SEQ ID NO: 6787 - protein, 108 aa, synthetic construct
  REGION 1..108: note = Description of Artificial Sequence: Synthetic polypeptide
  REGION 1..108: note = VL of XENP019966
EIVLTQSPGTLSLSPGERATLSCRASQSVGSSYLAWYQQKPGQAPRLLIYGAFQRATGIPDRFSGSGSGTDFTLTISRLEPEDFAVYYCQQYGSSPWTFGQGTKVEIK

SEQ ID NO: 6788 - protein, 5 aa, synthetic construct
  REGION 1..5: note = Description of Artificial Sequence: Synthetic peptide
  REGION 1..5: note = XENP019966 vhCDR1
SYTMH

SEQ ID NO: 6789 - protein, 17 aa, synthetic construct
  REGION 1..17: note = Description of Artificial Sequence: Synthetic peptide
  REGION 1..17: note = XENP019966 vhCDR2
FISYDGNNKYYADSVKG

SEQ ID NO: 6790 - protein, 9 aa, synthetic construct
  REGION 1..9: note = Description of Artificial Sequence: Synthetic peptide
  REGION 1..9: note = XENP019966 vhCDR3
TGWLGPFDY

SEQ ID NO: 6791 - protein, 12 aa, synthetic construct
  REGION 1..12: note = Description of Artificial Sequence: Synthetic peptide
  REGION 1..12: note = XENP019966 vlCDR1
RASQSVGSSYLA

SEQ ID NO: 6792 - protein, 7 aa, synthetic construct
  REGION 1..7: note = Description of Artificial Sequence: Synthetic peptide
  REGION 1..7: note = XENP019966 vlCDR2
GAFQRAT

SEQ ID NO: 6793 - protein, 9 aa, synthetic construct
  REGION 1..9: note = Description of Artificial Sequence: Synthetic peptide
  REGION 1..9: note = XENP019966 vlCDR3
QQYGSSPWT

SEQ ID NO: 6794 - protein, 246 aa, synthetic construct
  REGION 1..246: note = Description of Artificial Sequence: Synthetic polypeptide
  REGION 1..246: note = XENP019967 [CTLA-4]_H0_L0.79_scFv(GKPGS)4
QVQLVESGGGVVQPGRSLRLSCAASGFTFSSYTMHWVRQAPGKGLEWVTFISYDGNNKYYADSVKGRFTISRDNSKNTLYLQMNSLRAEDTAIYYCARTGWLGPFDYWGQGTLVTVSSGKPGSGKPGSGKPGSGKPGSEIVLTQSPGTLSLSPGERATLSCRASQSVGSSYLAWYQQKPGQAPRLLIYGAFTRATGIPDRFSGSGSGTDFTLTISRLEPEDFAVYYCQQYGSSPWTFGQGTKVEIK

SEQ ID NO: 6795 - protein, 118 aa, synthetic construct; identical to SEQ ID NO: 3737
  REGION 1..118: note = Description of Artificial Sequence: Synthetic polypeptide
  REGION 1..118: note = VH of XENP019967

SEQ ID NO: 6796 - protein, 108 aa, synthetic construct
  REGION 1..108: note = Description of Artificial Sequence: Synthetic polypeptide
  REGION 1..108: note = VL of XENP019967
EIVLTQSPGTLSLSPGERATLSCRASQSVGSSYLAWYQQKPGQAPRLLIYGAFTRATGIPDRFSGSGSGTDFTLTISRLEPEDFAVYYCQQYGSSPWTFGQGTKVEIK

SEQ ID NO: 6797 - protein, 5 aa, synthetic construct
  REGION 1..5: note = Description of Artificial Sequence: Synthetic peptide
  REGION 1..5: note = XENP019967 vhCDR1
SYTMH

SEQ ID NO: 6798 - protein, 17 aa, synthetic construct
  REGION 1..17: note = Description of Artificial Sequence: Synthetic peptide
  REGION 1..17: note = XENP019967 vhCDR2
FISYDGNNKYYADSVKG

SEQ ID NO: 6799 - protein, 9 aa, synthetic construct
  REGION 1..9: note = Description of Artificial Sequence: Synthetic peptide
  REGION 1..9: note = XENP019967 vhCDR3
TGWLGPFDY

SEQ ID NO: 6800 - protein, 12 aa, synthetic construct
  REGION 1..12: note = Description of Artificial Sequence: Synthetic peptide
  REGION 1..12: note = XENP019967 vlCDR1
RASQSVGSSYLA

SEQ ID NO: 6801 - protein, 7 aa, synthetic construct
  REGION 1..7: note = Description of Artificial Sequence: Synthetic peptide
  REGION 1..7: note = XENP019967 vlCDR2
GAFTRAT

SEQ ID NO: 6802 - protein, 9 aa, synthetic construct
  REGION 1..9: note = Description of Artificial Sequence: Synthetic peptide
  REGION 1..9: note = XENP019967 vlCDR3
QQYGSSPWT

SEQ ID NO: 6803 - protein, 246 aa, synthetic construct
  REGION 1..246: note = Description of Artificial Sequence: Synthetic polypeptide
  REGION 1..246: note = XENP019968 [CTLA-4]_H0_L0.80_scFv(GKPGS)4
QVQLVESGGGVVQPGRSLRLSCAASGFTFSSYTMHWVRQAPGKGLEWVTFISYDGNNKYYADSVKGRFTISRDNSKNTLYLQMNSLRAEDTAIYYCARTGWLGPFDYWGQGTLVTVSSGKPGSGKPGSGKPGSGKPGSEIVLTQSPGTLSLSPGERATLSCRASQSVGSSYLAWYQQKPGQAPRLLIYGAFSRDTGIPDRFSGSGSGTDFTLTISRLEPEDFAVYYCQQYGSSPWTFGQGTKVEIK

SEQ ID NO: 6804 - protein, 118 aa, synthetic construct; identical to SEQ ID NO: 3737
  REGION 1..118: note = Description of Artificial Sequence: Synthetic polypeptide
  REGION 1..118: note = VH of XENP019968

SEQ ID NO: 6805 - protein, 108 aa, synthetic construct
  REGION 1..108: note = Description of Artificial Sequence: Synthetic polypeptide
  REGION 1..108: note = VL of XENP019968
EIVLTQSPGTLSLSPGERATLSCRASQSVGSSYLAWYQQKPGQAPRLLIYGAFSRDTGIPDRFSGSGSGTDFTLTISRLEPEDFAVYYCQQYGSSPWTFGQGTKVEIK

SEQ ID NO: 6806 - protein, 5 aa, synthetic construct
  REGION 1..5: note = Description of Artificial Sequence: Synthetic peptide
  REGION 1..5: note = XENP019968 vhCDR1
SYTMH

SEQ ID NO: 6807 - protein, 17 aa, synthetic construct
  REGION 1..17: note = Description of Artificial Sequence: Synthetic peptide
  REGION 1..17: note = XENP019968 vhCDR2
FISYDGNNKYYADSVKG

SEQ ID NO: 6808 - protein, 9 aa, synthetic construct
  REGION 1..9: note = Description of Artificial Sequence: Synthetic peptide
  REGION 1..9: note = XENP019968 vhCDR3
TGWLGPFDY

SEQ ID NO: 6809 - protein, 12 aa, synthetic construct
  REGION 1..12: note = Description of Artificial Sequence: Synthetic peptide
  REGION 1..12: note = XENP019968 vlCDR1
RASQSVGSSYLA

SEQ ID NO: 6810 - protein, 7 aa, synthetic construct
  REGION 1..7: note = Description of Artificial Sequence: Synthetic peptide
  REGION 1..7: note = XENP019968 vlCDR2
GAFSRDT

SEQ ID NO: 6811 - protein, 9 aa, synthetic construct
  REGION 1..9: note = Description of Artificial Sequence: Synthetic peptide
  REGION 1..9: note = XENP019968 vlCDR3
QQYGSSPWT

SEQ ID NO: 6812 - protein, 246 aa, synthetic construct
  REGION 1..246: note = Description of Artificial Sequence: Synthetic polypeptide
  REGION 1..246: note = XENP019969 [CTLA-4]_H0_L0.81_scFv(GKPGS)4
QVQLVESGGGVVQPGRSLRLSCAASGFTFSSYTMHWVRQAPGKGLEWVTFISYDGNNKYYADSVKGRFTISRDNSKNTLYLQMNSLRAEDTAIYYCARTGWLGPFDYWGQGTLVTVSSGKPGSGKPGSGKPGSGKPGSEIVLTQSPGTLSLSPGERATLSCRASQSVGSSYLAWYQQKPGQAPRLLIYGAFSRASGIPDRFSGSGSGTDFTLTISRLEPEDFAVYYCQQYGSSPWTFGQGTKVEIK

SEQ ID NO: 6813 - protein, 118 aa, synthetic construct; identical to SEQ ID NO: 3737
  REGION 1..118: note = Description of Artificial Sequence: Synthetic polypeptide
  REGION 1..118: note = VH of XENP019969

SEQ ID NO: 6814 - protein, 108 aa, synthetic construct
  REGION 1..108: note = Description of Artificial Sequence: Synthetic polypeptide
  REGION 1..108: note = VL of XENP019969
EIVLTQSPGTLSLSPGERATLSCRASQSVGSSYLAWYQQKPGQAPRLLIYGAFSRASGIPDRFSGSGSGTDFTLTISRLEPEDFAVYYCQQYGSSPWTFGQGTKVEIK

SEQ ID NO: 6815 - protein, 5 aa, synthetic construct
  REGION 1..5: note = Description of Artificial Sequence: Synthetic peptide
  REGION 1..5: note = XENP019969 vhCDR1
SYTMH

SEQ ID NO: 6816 - protein, 17 aa, synthetic construct
  REGION 1..17: note = Description of Artificial Sequence: Synthetic peptide
  REGION 1..17: note = XENP019969 vhCDR2
FISYDGNNKYYADSVKG

SEQ ID NO: 6817 - protein, 9 aa, synthetic construct
  REGION 1..9: note = Description of Artificial Sequence: Synthetic peptide
  REGION 1..9: note = XENP019969 vhCDR3
TGWLGPFDY

SEQ ID NO: 6818 - protein, 12 aa, synthetic construct
  REGION 1..12: note = Description of Artificial Sequence: Synthetic peptide
  REGION 1..12: note = XENP019969 vlCDR1
RASQSVGSSYLA

SEQ ID NO: 6819 - protein, 7 aa, synthetic construct
  REGION 1..7: note = Description of Artificial Sequence: Synthetic peptide
  REGION 1..7: note = XENP019969 vlCDR2
GAFSRAS

SEQ ID NO: 6820 - protein, 9 aa, synthetic construct
  REGION 1..9: note = Description of Artificial Sequence: Synthetic peptide
  REGION 1..9: note = XENP019969 vlCDR3
QQYGSSPWT

SEQ ID NO: 6821 - protein, 246 aa, synthetic construct
  REGION 1..246: note = Description of Artificial Sequence: Synthetic polypeptide
  REGION 1..246: note = XENP019970 [CTLA-4]_H0_L0.82_scFv(GKPGS)4
QVQLVESGGGVVQPGRSLRLSCAASGFTFSSYTMHWVRQAPGKGLEWVTFISYDGNNKYYADSVKGRFTISRDNSKNTLYLQMNSLRAEDTAIYYCARTGWLGPFDYWGQGTLVTVSSGKPGSGKPGSGKPGSGKPGSEIVLTQSPGTLSLSPGERATLSCRASQSVGSSYLAWYQQKPGQAPRLLIYGAFSRATGVPDRFSGSGSGTDFTLTISRLEPEDFAVYYCQQYGSSPWTFGQGTKVEIK

SEQ ID NO: 6822 - protein, 118 aa, synthetic construct; identical to SEQ ID NO: 3737
  REGION 1..118: note = Description of Artificial Sequence: Synthetic polypeptide
  REGION 1..118: note = VH of XENP019970

SEQ ID NO: 6823 - protein, 108 aa, synthetic construct
  REGION 1..108: note = Description of Artificial Sequence: Synthetic polypeptide
  REGION 1..108: note = VL of XENP019970
EIVLTQSPGTLSLSPGERATLSCRASQSVGSSYLAWYQQKPGQAPRLLIYGAFSRATGVPDRFSGSGSGTDFTLTISRLEPEDFAVYYCQQYGSSPWTFGQGTKVEIK

SEQ ID NO: 6824 - protein, 5 aa, synthetic construct
  REGION 1..5: note = Description of Artificial Sequence: Synthetic peptide
  REGION 1..5: note = XENP019970 vhCDR1
SYTMH

SEQ ID NO: 6825 - protein, 17 aa, synthetic construct
  REGION 1..17: note = Description of Artificial Sequence: Synthetic peptide
  REGION 1..17: note = XENP019970 vhCDR2
FISYDGNNKYYADSVKG

SEQ ID NO: 6826 - protein, 9 aa, synthetic construct
  REGION 1..9: note = Description of Artificial Sequence: Synthetic peptide
  REGION 1..9: note = XENP019970 vhCDR3
TGWLGPFDY

SEQ ID NO: 6827 - protein, 12 aa, synthetic construct
  REGION 1..12: note = Description of Artificial Sequence: Synthetic peptide
  REGION 1..12: note = XENP019970 vlCDR1
RASQSVGSSYLA

SEQ ID NO: 6828 - protein, 7 aa, synthetic construct
  REGION 1..7: note = Description of Artificial Sequence: Synthetic peptide
  REGION 1..7: note = XENP019970 vlCDR2
GAFSRAT

SEQ ID NO: 6829 - protein, 9 aa, synthetic construct
  REGION 1..9: note = Description of Artificial Sequence: Synthetic peptide
  REGION 1..9: note = XENP019970 vlCDR3
QQYGSSPWT

SEQ ID NO: 6830 - protein, 246 aa, synthetic construct
  REGION 1..246: note = Description of Artificial Sequence: Synthetic polypeptide
  REGION 1..246: note = XENP019971 [CTLA-4]_H0_L0.83_scFv(GKPGS)4
QVQLVESGGGVVQPGRSLRLSCAASGFTFSSYTMHWVRQAPGKGLEWVTFISYDGNNKYYADSVKGRFTISRDNSKNTLYLQMNSLRAEDTAIYYCARTGWLGPFDYWGQGTLVTVSSGKPGSGKPGSGKPGSGKPGSEIVLTQSPGTLSLSPGERATLSCRASQSVGSSYLAWYQQKPGQAPRLLIYGAFSRATGIPARFSGSGSGTDFTLTISRLEPEDFAVYYCQQYGSSPWTFGQGTKVEIK

SEQ ID NO: 6831 - protein, 118 aa, synthetic construct; identical to SEQ ID NO: 3737
  REGION 1..118: note = Description of Artificial Sequence: Synthetic polypeptide
  REGION 1..118: note = VH of XENP019971

SEQ ID NO: 6832 - protein, 108 aa, synthetic construct
  REGION 1..108: note = Description of Artificial Sequence: Synthetic polypeptide
  REGION 1..108: note = VL of XENP019971
EIVLTQSPGTLSLSPGERATLSCRASQSVGSSYLAWYQQKPGQAPRLLIYGAFSRATGIPARFSGSGSGTDFTLTISRLEPEDFAVYYCQQYGSSPWTFGQGTKVEIK

SEQ ID NO: 6833 - protein, 5 aa, synthetic construct
  REGION 1..5: note = Description of Artificial Sequence: Synthetic peptide
  REGION 1..5: note = XENP019971 vhCDR1
SYTMH

SEQ ID NO: 6834 - protein, 17 aa, synthetic construct
  REGION 1..17: note = Description of Artificial Sequence: Synthetic peptide
  REGION 1..17: note = XENP019971 vhCDR2
FISYDGNNKYYADSVKG

SEQ ID NO: 6835 - protein, 9 aa, synthetic construct
  REGION 1..9: note = Description of Artificial Sequence: Synthetic peptide
  REGION 1..9: note = XENP019971 vhCDR3
TGWLGPFDY

SEQ ID NO: 6836 - protein, 12 aa, synthetic construct
  REGION 1..12: note = Description of Artificial Sequence: Synthetic peptide
  REGION 1..12: note = XENP019971 vlCDR1
RASQSVGSSYLA

SEQ ID NO: 6837 - protein, 7 aa, synthetic construct
  REGION 1..7: note = Description of Artificial Sequence: Synthetic peptide
  REGION 1..7: note = XENP019971 vlCDR2
GAFSRAT

SEQ ID NO: 6838 - protein, 9 aa, synthetic construct
  REGION 1..9: note = Description of Artificial Sequence: Synthetic peptide
  REGION 1..9: note = XENP019971 vlCDR3
QQYGSSPWT

SEQ ID NO: 6839 - protein, 246 aa, synthetic construct
  REGION 1..246: note = Description of Artificial Sequence: Synthetic polypeptide
  REGION 1..246: note = XENP019972 [CTLA-4]_H0_L0.84_scFv(GKPGS)4
QVQLVESGGGVVQPGRSLRLSCAASGFTFSSYTMHWVRQAPGKGLEWVTFISYDGNNKYYADSVKGRFTISRDNSKNTLYLQMNSLRAEDTAIYYCARTGWLGPFDYWGQGTLVTVSSGKPGSGKPGSGKPGSGKPGSEIVLTQSPGTLSLSPGERATLSCRASQSVGSSYLAWYQQKPGQAPRLLIYGAFSRATGIPDRFSGSGSRTDFTLTISRLEPEDFAVYYCQQYGSSPWTFGQGTKVEIK

SEQ ID NO: 6840 - protein, 118 aa, synthetic construct; identical to SEQ ID NO: 3737
  REGION 1..118: note = Description of Artificial Sequence: Synthetic polypeptide
  REGION 1..118: note = VH of XENP019972

SEQ ID NO: 6841 - protein, 108 aa, synthetic construct
  REGION 1..108: note = Description of Artificial Sequence: Synthetic polypeptide
  REGION 1..108: note = VL of XENP019972
EIVLTQSPGTLSLSPGERATLSCRASQSVGSSYLAWYQQKPGQAPRLLIYGAFSRATGIPDRFSGSGSRTDFTLTISRLEPEDFAVYYCQQYGSSPWTFGQGTKVEIK

SEQ ID NO: 6842 - protein, 5 aa, synthetic construct
  REGION 1..5: note = Description of Artificial Sequence: Synthetic peptide
  REGION 1..5: note = XENP019972 vhCDR1
SYTMH

SEQ ID NO: 6843 - protein, 17 aa, synthetic construct
  REGION 1..17: note = Description of Artificial Sequence: Synthetic peptide
  REGION 1..17: note = XENP019972 vhCDR2
FISYDGNNKYYADSVKG

SEQ ID NO: 6844 - protein, 9 aa, synthetic construct
  REGION 1..9: note = Description of Artificial Sequence: Synthetic peptide
  REGION 1..9: note = XENP019972 vhCDR3
TGWLGPFDY

SEQ ID NO: 6845 - protein, 12 aa, synthetic construct
  REGION 1..12: note = Description of Artificial Sequence: Synthetic peptide
  REGION 1..12: note = XENP019972 vlCDR1
RASQSVGSSYLA

SEQ ID NO: 6846 - protein, 7 aa, synthetic construct
  REGION 1..7: note = Description of Artificial Sequence: Synthetic peptide
  REGION 1..7: note = XENP019972 vlCDR2
GAFSRAT

SEQ ID NO: 6847 - protein, 9 aa, synthetic construct
  REGION 1..9: note = Description of Artificial Sequence: Synthetic peptide
  REGION 1..9: note = XENP019972 vlCDR3
QQYGSSPWT

SEQ ID NO: 6848 - protein, 246 aa, synthetic construct
  REGION 1..246: note = Description of Artificial Sequence: Synthetic polypeptide
  REGION 1..246: note = XENP019973 [CTLA-4]_H0_L0.85_scFv(GKPGS)4
QVQLVESGGGVVQPGRSLRLSCAASGFTFSSYTMHWVRQAPGKGLEWVTFISYDGNNKYYADSVKGRFTISRDNSKNTLYLQMNSLRAEDTAIYYCARTGWLGPFDYWGQGTLVTVSSGKPGSGKPGSGKPGSGKPGSEIVLTQSPGTLSLSPGERATLSCRASQSVGSSYLAWYQQKPGQAPRLLIYGAFSRATGIPDRFSGSGSGTEFTLTISRLEPEDFAVYYCQQYGSSPWTFGQGTKVEIK

SEQ ID NO: 6849 - protein, 118 aa, synthetic construct; identical to SEQ ID NO: 3737
  REGION 1..118: note = Description of Artificial Sequence: Synthetic polypeptide
  REGION 1..118: note = VH of XENP019973

SEQ ID NO: 6850 - protein, 108 aa, synthetic construct
  REGION 1..108: note = Description of Artificial Sequence: Synthetic polypeptide
  REGION 1..108: note = VL of XENP019973
EIVLTQSPGTLSLSPGERATLSCRASQSVGSSYLAWYQQKPGQAPRLLIYGAFSRATGIPDRFSGSGSGTEFTLTISRLEPEDFAVYYCQQYGSSPWTFGQGTKVEIK

SEQ ID NO: 6851 - protein, 5 aa, synthetic construct
  REGION 1..5: note = Description of Artificial Sequence: Synthetic peptide
  REGION 1..5: note = XENP019973 vhCDR1
SYTMH

SEQ ID NO: 6852 - protein, 17 aa, synthetic construct
  REGION 1..17: note = Description of Artificial Sequence: Synthetic peptide
  REGION 1..17: note = XENP019973 vhCDR2
FISYDGNNKYYADSVKG

SEQ ID NO: 6853 - protein, 9 aa, synthetic construct
  REGION 1..9: note = Description of Artificial Sequence: Synthetic peptide
  REGION 1..9: note = XENP019973 vhCDR3
TGWLGPFDY

SEQ ID NO: 6854 - protein, 12 aa, synthetic construct
  REGION 1..12: note = Description of Artificial Sequence: Synthetic peptide
  REGION 1..12: note = XENP019973 vlCDR1
RASQSVGSSYLA

SEQ ID NO: 6855 - protein, 7 aa, synthetic construct
  REGION 1..7: note = Description of Artificial Sequence: Synthetic peptide
  REGION 1..7: note = XENP019973 vlCDR2
GAFSRAT

SEQ ID NO: 6856 - protein, 9 aa, synthetic construct
  REGION 1..9: note = Description of Artificial Sequence: Synthetic peptide
  REGION 1..9: note = XENP019973 vlCDR3
QQYGSSPWT

SEQ ID NO: 6857 - protein, 246 aa, synthetic construct
  REGION 1..246: note = Description of Artificial Sequence: Synthetic polypeptide
  REGION 1..246: note = XENP019974 [CTLA-4]_H0_L0.86_scFv(GKPGS)4
QVQLVESGGGVVQPGRSLRLSCAASGFTFSSYTMHWVRQAPGKGLEWVTFISYDGNNKYYADSVKGRFTISRDNSKNTLYLQMNSLRAEDTAIYYCARTGWLGPFDYWGQGTLVTVSSGKPGSGKPGSGKPGSGKPGSEIVLTQSPGTLSLSPGERATLSCRASQSVGSSYLAWYQQKPGQAPRLLIYGAFSRATGIPDRFSGSGSGTDFTLKISRLEPEDFAVYYCQQYGSSPWTFGQGTKVEIK

SEQ ID NO: 6858 - protein, 118 aa, synthetic construct; identical to SEQ ID NO: 3737
  REGION 1..118: note = Description of Artificial Sequence: Synthetic polypeptide
  REGION 1..118: note = VH of XENP019974

SEQ ID NO: 6859 - protein, 108 aa, synthetic construct
  REGION 1..108: note = Description of Artificial Sequence: Synthetic polypeptide
  REGION 1..108: note = VL of XENP019974
EIVLTQSPGTLSLSPGERATLSCRASQSVGSSYLAWYQQKPGQAPRLLIYGAFSRATGIPDRFSGSGSGTDFTLKISRLEPEDFAVYYCQQYGSSPWTFGQGTKVEIK

SEQ ID NO: 6860 - protein, 5 aa, synthetic construct
  REGION 1..5: note = Description of Artificial Sequence: Synthetic peptide
  REGION 1..5: note = XENP019974 vhCDR1
SYTMH

SEQ ID NO: 6861 - protein, 17 aa, synthetic construct
  REGION 1..17: note = Description of Artificial Sequence: Synthetic peptide
  REGION 1..17: note = XENP019974 vhCDR2
FISYDGNNKYYADSVKG

SEQ ID NO: 6862 - protein, 9 aa, synthetic construct
  REGION 1..9: note = Description of Artificial Sequence: Synthetic peptide
  REGION 1..9: note = XENP019974 vhCDR3
TGWLGPFDY

SEQ ID NO: 6863 - protein, 12 aa, synthetic construct
  REGION 1..12: note = Description of Artificial Sequence: Synthetic peptide
  REGION 1..12: note = XENP019974 vlCDR1
RASQSVGSSYLA

SEQ ID NO: 6864 - protein, 7 aa, synthetic construct
  REGION 1..7: note = Description of Artificial Sequence: Synthetic peptide
  REGION 1..7: note = XENP019974 vlCDR2
GAFSRAT

SEQ ID NO: 6865 - protein, 9 aa, synthetic construct
  REGION 1..9: note = Description of Artificial Sequence: Synthetic peptide
  REGION 1..9: note = XENP019974 vlCDR3
QQYGSSPWT

SEQ ID NO: 6866 - protein, 246 aa, synthetic construct
  REGION 1..246: note = Description of Artificial Sequence: Synthetic polypeptide
  REGION 1..246: note = XENP019975 [CTLA-4]_H0_L0.87_scFv(GKPGS)4
QVQLVESGGGVVQPGRSLRLSCAASGFTFSSYTMHWVRQAPGKGLEWVTFISYDGNNKYYADSVKGRFTISRDNSKNTLYLQMNSLRAEDTAIYYCARTGWLGPFDYWGQGTLVTVSSGKPGSGKPGSGKPGSGKPGSEIVLTQSPGTLSLSPGERATLSCRASQSVGSSYLAWYQQKPGQAPRLLIYGAFSRATGIPDRFSGSGSGTDFTLTISSLEPEDFAVYYCQQYGSSPWTFGQGTKVEIK

SEQ ID NO: 6867 - protein, 118 aa, synthetic construct; identical to SEQ ID NO: 3737
  REGION 1..118: note = Description of Artificial Sequence: Synthetic polypeptide
  REGION 1..118: note = VH of XENP019975

SEQ ID NO: 6868 - protein, 108 aa, synthetic construct
  REGION 1..108: note = Description of Artificial Sequence: Synthetic polypeptide
  REGION 1..108: note = VL of XENP019975
EIVLTQSPGTLSLSPGERATLSCRASQSVGSSYLAWYQQKPGQAPRLLIYGAFSRATGIPDRFSGSGSGTDFTLTISSLEPEDFAVYYCQQYGSSPWTFGQGTKVEIK

SEQ ID NO: 6869 - protein, 5 aa, synthetic construct
  REGION 1..5: note = Description of Artificial Sequence: Synthetic peptide
  REGION 1..5: note = XENP019975 vhCDR1
SYTMH

SEQ ID NO: 6870 - protein, 17 aa, synthetic construct
  REGION 1..17: note = Description of Artificial Sequence: Synthetic peptide
  REGION 1..17: note = XENP019975 vhCDR2
FISYDGNNKYYADSVKG

SEQ ID NO: 6871 - protein, 9 aa, synthetic construct
  REGION 1..9: note = Description of Artificial Sequence: Synthetic peptide
  REGION 1..9: note = XENP019975 vhCDR3
TGWLGPFDY

SEQ ID NO: 6872 - protein, 12 aa, synthetic construct
  REGION 1..12: note = Description of Artificial Sequence: Synthetic peptide
  REGION 1..12: note = XENP019975 vlCDR1
RASQSVGSSYLA

SEQ ID NO: 6873 - protein, 7 aa, synthetic construct
  REGION 1..7: note = Description of Artificial Sequence: Synthetic peptide
  REGION 1..7: note = XENP019975 vlCDR2
GAFSRAT

SEQ ID NO: 6874 - protein, 9 aa, synthetic construct
  REGION 1..9: note = Description of Artificial Sequence: Synthetic peptide
  REGION 1..9: note = XENP019975 vlCDR3
QQYGSSPWT

SEQ ID NO: 6875 - protein, 246 aa, synthetic construct
  REGION 1..246: note = Description of Artificial Sequence: Synthetic polypeptide
  REGION 1..246: note = XENP019976 [CTLA-4]_H0_L0.88_scFv(GKPGS)4
QVQLVESGGGVVQPGRSLRLSCAASGFTFSSYTMHWVRQAPGKGLEWVTFISYDGNNKYYADSVKGRFTISRDNSKNTLYLQMNSLRAEDTAIYYCARTGWLGPFDYWGQGTLVTVSSGKPGSGKPGSGKPGSGKPGSEIVLTQSPGTLSLSPGERATLSCRASQSVGSSYLAWYQQKPGQAPRLLIYGAFSRATGIPDRFSGSGSGTDFTLTISSLQSEDFAVYYCQQYGSSPWTFGQGTKVEIK

SEQ ID NO: 6876 - protein, 118 aa, synthetic construct; identical to SEQ ID NO: 3737
  REGION 1..118: note = Description of Artificial Sequence: Synthetic polypeptide
  REGION 1..118: note = VH of XENP019976

SEQ ID NO: 6877 - protein, 108 aa, synthetic construct
  REGION 1..108: note = Description of Artificial Sequence: Synthetic polypeptide
  REGION 1..108: note = VL of XENP019976
EIVLTQSPGTLSLSPGERATLSCRASQSVGSSYLAWYQQKPGQAPRLLIYGAFSRATGIPDRFSGSGSGTDFTLTISSLQSEDFAVYYCQQYGSSPWTFGQGTKVEIK

SEQ ID NO: 6878 - protein, 5 aa, synthetic construct
  REGION 1..5: note = Description of Artificial Sequence: Synthetic peptide
  REGION 1..5: note = XENP019976 vhCDR1
SYTMH

SEQ ID NO: 6879 - protein, 17 aa, synthetic construct
  REGION 1..17: note = Description of Artificial Sequence: Synthetic peptide
  REGION 1..17: note = XENP019976 vhCDR2
FISYDGNNKYYADSVKG

SEQ ID NO: 6880 - protein, 9 aa, synthetic construct
  REGION 1..9: note = Description of Artificial Sequence: Synthetic peptide
  REGION 1..9: note = XENP019976 vhCDR3
TGWLGPFDY

SEQ ID NO: 6881 - protein, 12 aa, synthetic construct
  REGION 1..12: note = Description of Artificial Sequence: Synthetic peptide
  REGION 1..12: note = XENP019976 vlCDR1
RASQSVGSSYLA

SEQ ID NO: 6882 - protein, 7 aa, synthetic construct
  REGION 1..7: note = Description of Artificial Sequence: Synthetic peptide
  REGION 1..7: note = XENP019976 vlCDR2
GAFSRAT

SEQ ID NO: 6883 - protein, 9 aa, synthetic construct
  REGION 1..9: note = Description of Artificial Sequence: Synthetic peptide
  REGION 1..9: note = XENP019976 vlCDR3
QQYGSSPWT

SEQ ID NO: 6884 - protein, 246 aa, synthetic construct
  REGION 1..246: note = Description of Artificial Sequence: Synthetic polypeptide
  REGION 1..246: note = XENP019977 [CTLA-4]_H0_L0.89_scFv(GKPGS)4
QVQLVESGGGVVQPGRSLRLSCAASGFTFSSYTMHWVRQAPGKGLEWVTFISYDGNNKYYADSVKGRFTISRDNSKNTLYLQMNSLRAEDTAIYYCARTGWLGPFDYWGQGTLVTVSSGKPGSGKPGSGKPGSGKPGSEIVLTQSPGTLSLSPGERATLSCRASQSVGSSYLAWYQQKPGQAPRLLIYGAFSRATGIPDRFSGSGSGTDFTLTISRVEPEDFAVYYCQQYGSSPWTFGQGTKVEIK

SEQ ID NO: 6885 - protein, 118 aa, synthetic construct; identical to SEQ ID NO: 3737
  REGION 1..118: note = Description of Artificial Sequence: Synthetic polypeptide
  REGION 1..118: note = VH of XENP019977

SEQ ID NO: 6886 - protein, 108 aa, synthetic construct
  REGION 1..108: note = Description of Artificial Sequence: Synthetic polypeptide
  REGION 1..108: note = VL of XENP019977
EIVLTQSPGTLSLSPGERATLSCRASQSVGSSYLAWYQQKPGQAPRLLIYGAFSRATGIPDRFSGSGSGTDFTLTISRVEPEDFAVYYCQQYGSSPWTFGQGTKVEIK

SEQ ID NO: 6887 - protein, 5 aa, synthetic construct
  REGION 1..5: note = Description of Artificial Sequence: Synthetic peptide
  REGION 1..5: note = XENP019977 vhCDR1
SYTMH

SEQ ID NO: 6888 - protein, 17 aa, synthetic construct
  REGION 1..17: note = Description of Artificial Sequence: Synthetic peptide
  REGION 1..17: note = XENP019977 vhCDR2
FISYDGNNKYYADSVKG

SEQ ID NO: 6889 - protein, 9 aa, synthetic construct
  REGION 1..9: note = Description of Artificial Sequence: Synthetic peptide
  REGION 1..9: note = XENP019977 vhCDR3
TGWLGPFDY

SEQ ID NO: 6890 - protein, 12 aa, synthetic construct
  REGION 1..12: note = Description of Artificial Sequence: Synthetic peptide
  REGION 1..12: note = XENP019977 vlCDR1
RASQSVGSSYLA

SEQ ID NO: 6891 - protein, 7 aa, synthetic construct
  REGION 1..7: note = Description of Artificial Sequence: Synthetic peptide
  REGION 1..7: note = XENP019977 vlCDR2
GAFSRAT

SEQ ID NO: 6892 - protein, 9 aa, synthetic construct
  REGION 1..9: note = Description of Artificial Sequence: Synthetic peptide
  REGION 1..9: note = XENP019977 vlCDR3
QQYGSSPWT

SEQ ID NO: 6893 - protein, 246 aa, synthetic construct
  REGION 1..246: note = Description of Artificial Sequence: Synthetic polypeptide
  REGION 1..246: note = XENP019978 [CTLA-4]_H0_L0.90_scFv(GKPGS)4
QVQLVESGGGVVQPGRSLRLSCAASGFTFSSYTMHWVRQAPGKGLEWVTFISYDGNNKYYADSVKGRFTISRDNSKNTLYLQMNSLRAEDTAIYYCARTGWLGPFDYWGQGTLVTVSSGKPGSGKPGSGKPGSGKPGSEIVLTQSPGTLSLSPGERATLSCRASQSVGSSYLAWYQQKPGQAPRLLIYGAFSRATGIPDRFSGSGSGTDFTLTISRLQPEDFAVYYCQQYGSSPWTFGQGTKVEIK

SEQ ID NO: 6894 - protein, 118 aa, synthetic construct; identical to SEQ ID NO: 3737
  REGION 1..118: note = Description of Artificial Sequence: Synthetic polypeptide
  REGION 1..118: note = VH of XENP019978

SEQ ID NO: 6895 - protein, 108 aa, synthetic construct
  REGION 1..108: note = Description of Artificial Sequence: Synthetic polypeptide
  REGION 1..108: note = VL of XENP019978
EIVLTQSPGTLSLSPGERATLSCRASQSVGSSYLAWYQQKPGQAPRLLIYGAFSRATGIPDRFSGSGSGTDFTLTISRLQPEDFAVYYCQQYGSSPWTFGQGTKVEIK

SEQ ID NO: 6896 - protein, 5 aa, synthetic construct
  REGION 1..5: note = Description of Artificial Sequence: Synthetic peptide
  REGION 1..5: note = XENP019978 vhCDR1
SYTMH

SEQ ID NO: 6897 - protein, 17 aa, synthetic construct
  REGION 1..17: note = Description of Artificial Sequence: Synthetic peptide
  REGION 1..17: note = XENP019978 vhCDR2
FISYDGNNKYYADSVKG

SEQ ID NO: 6898 - protein, 9 aa, synthetic construct
  REGION 1..9: note = Description of Artificial Sequence: Synthetic peptide
  REGION 1..9: note = XENP019978 vhCDR3
TGWLGPFDY

SEQ ID NO: 6899 - protein, 12 aa, synthetic construct
  REGION 1..12: note = Description of Artificial Sequence: Synthetic peptide
  REGION 1..12: note = XENP019978 vlCDR1
RASQSVGSSYLA

SEQ ID NO: 6900 - protein, 7 aa, synthetic construct
  REGION 1..7: note = Description of Artificial Sequence: Synthetic peptide
  REGION 1..7: note = XENP019978 vlCDR2
GAFSRAT

SEQ ID NO: 6901 - protein, 9 aa, synthetic construct
  REGION 1..9: note = Description of Artificial Sequence: Synthetic peptide
  REGION 1..9: note = XENP019978 vlCDR3
QQYGSSPWT

SEQ ID NO: 6902 - protein, 246 aa, synthetic construct
  REGION 1..246: note = Description of Artificial Sequence: Synthetic polypeptide
  REGION 1..246: note = XENP019979 [CTLA-4]_H0_L0.91_scFv(GKPGS)4
QVQLVESGGGVVQPGRSLRLSCAASGFTFSSYTMHWVRQAPGKGLEWVTFISYDGNNKYYADSVKGRFTISRDNSKNTLYLQMNSLRAEDTAIYYCARTGWLGPFDYWGQGTLVTVSSGKPGSGKPGSGKPGSGKPGSEIVLTQSPGTLSLSPGERATLSCRASQSVGSSYLAWYQQKPGQAPRLLIYGAFSRATGIPDRFSGSGSGTDFTLTISRLESEDFAVYYCQQYGSSPWTFGQGTKVEIK

SEQ ID NO: 6903 - protein, 118 aa, synthetic construct; identical to SEQ ID NO: 3737
  REGION 1..118: note = Description of Artificial Sequence: Synthetic polypeptide
  REGION 1..118: note = VH of XENP019979

SEQ ID NO: 6904 - protein, 108 aa, synthetic construct
  REGION 1..108: note = Description of Artificial Sequence: Synthetic polypeptide
  REGION 1..108: note = VL of XENP019979
EIVLTQSPGTLSLSPGERATLSCRASQSVGSSYLAWYQQKPGQAPRLLIYGAFSRATGIPDRFSGSGSGTDFTLTISRLESEDFAVYYCQQYGSSPWTFGQGTKVEIK

SEQ ID NO: 6905 - protein, 5 aa, synthetic construct
  REGION 1..5: note = Description of Artificial Sequence: Synthetic peptide
  REGION 1..5: note = XENP019979 vhCDR1
SYTMH

SEQ ID NO: 6906 - protein, 17 aa, synthetic construct
  REGION 1..17: note = Description of Artificial Sequence: Synthetic peptide
  REGION 1..17: note = XENP019979 vhCDR2
FISYDGNNKYYADSVKG

SEQ ID NO: 6907 - protein, 9 aa, synthetic construct
  REGION 1..9: note = Description of Artificial Sequence: Synthetic peptide
  REGION 1..9: note = XENP019979 vhCDR3
TGWLGPFDY

SEQ ID NO: 6908 - protein, 12 aa, synthetic construct
  REGION 1..12: note = Description of Artificial Sequence: Synthetic peptide
  REGION 1..12: note = XENP019979 vlCDR1
RASQSVGSSYLA

SEQ ID NO: 6909 - protein, 7 aa, synthetic construct
  REGION 1..7: note = Description of Artificial Sequence: Synthetic peptide
  REGION 1..7: note = XENP019979 vlCDR2
GAFSRAT

SEQ ID NO: 6910 - protein, 9 aa, synthetic construct
  REGION 1..9: note = Description of Artificial Sequence: Synthetic peptide
  REGION 1..9: note = XENP019979 vlCDR3
QQYGSSPWT

SEQ ID NO: 6911 - protein, 246 aa, synthetic construct
  REGION 1..246: note = Description of Artificial Sequence: Synthetic polypeptide
  REGION 1..246: note = XENP019980 [CTLA-4]_H0_L0.92_scFv(GKPGS)4
QVQLVESGGGVVQPGRSLRLSCAASGFTFSSYTMHWVRQAPGKGLEWVTFISYDGNNKYYADSVKGRFTISRDNSKNTLYLQMNSLRAEDTAIYYCARTGWLGPFDYWGQGTLVTVSSGKPGSGKPGSGKPGSGKPGSEIVLTQSPGTLSLSPGERATLSCRASQSVGSSYLAWYQQKPGQAPRLLIYGAFSRATGIPDRFSGSGSGTDFTLTISRLEPQDFAVYYCQQYGSSPWTFGQGTKVEIK

SEQ ID NO: 6912 - protein, 118 aa, synthetic construct; identical to SEQ ID NO: 3737
  REGION 1..118: note = Description of Artificial Sequence: Synthetic polypeptide
  REGION 1..118: note = VH of XENP019980

SEQ ID NO: 6913 - protein, 108 aa, synthetic construct
  REGION 1..108: note = Description of Artificial Sequence: Synthetic polypeptide
  REGION 1..108: note = VL of XENP019980
EIVLTQSPGTLSLSPGERATLSCRASQSVGSSYLAWYQQKPGQAPRLLIYGAFSRATGIPDRFSGSGSGTDFTLTISRLEPQDFAVYYCQQYGSSPWTFGQGTKVEIK

SEQ ID NO: 6914 - protein, 5 aa, synthetic construct
  REGION 1..5: note = Description of Artificial Sequence: Synthetic peptide
  REGION 1..5: note = XENP019980 vhCDR1
SYTMH

SEQ ID NO: 6915 - protein, 17 aa, synthetic construct
  REGION 1..17: note = Description of Artificial Sequence: Synthetic peptide
  REGION 1..17: note = XENP019980 vhCDR2
FISYDGNNKYYADSVKG

SEQ ID NO: 6916 - protein, 9 aa, synthetic construct
  REGION 1..9: note = Description of Artificial Sequence: Synthetic peptide
  REGION 1..9: note = XENP019980 vhCDR3
TGWLGPFDY

SEQ ID NO: 6917 - protein, 12 aa, synthetic construct
  REGION 1..12: note = Description of Artificial Sequence: Synthetic peptide
  REGION 1..12: note = XENP019980 vlCDR1
RASQSVGSSYLA

SEQ ID NO: 6918 - protein, 7 aa, synthetic construct
  REGION 1..7: note = Description of Artificial Sequence: Synthetic peptide
  REGION 1..7: note = XENP019980 vlCDR2
GAFSRAT

SEQ ID NO: 6919 - protein, 9 aa, synthetic construct
  REGION 1..9: note = Description of Artificial Sequence: Synthetic peptide
  REGION 1..9: note = XENP019980 vlCDR3
QQYGSSPWT

SEQ ID NO: 6920 - protein, 246 aa, synthetic construct
  REGION 1..246: note = Description of Artificial Sequence: Synthetic polypeptide
  REGION 1..246: note = XENP019981 [CTLA-4]_H0_L0.93_scFv(GKPGS)4
QVQLVESGGGVVQPGRSLRLSCAASGFTFSSYTMHWVRQAPGKGLEWVTFISYDGNNKYYADSVKGRFTISRDNSKNTLYLQMNSLRAEDTAIYYCARTGWLGPFDYWGQGTLVTVSSGKPGSGKPGSGKPGSGKPGSEIVLTQSPGTLSLSPGERATLSCRASQSVGSSYLAWYQQKPGQAPRLLIYGAFSRATGIPDRFSGSGSGTDFTLTISRLEPEDFAVYYCKQYGSSPWTFGQGTKVEIK

SEQ ID NO: 6921 - protein, 118 aa, synthetic construct; identical to SEQ ID NO: 3737
  REGION 1..118: note = Description of Artificial Sequence: Synthetic polypeptide
  REGION 1..118: note = VH of XENP019981

SEQ ID NO: 6922 - protein, 108 aa, synthetic construct
  REGION 1..108: note = Description of Artificial Sequence: Synthetic polypeptide
  REGION 1..108: note = VL of XENP019981
EIVLTQSPGTLSLSPGERATLSCRASQSVGSSYLAWYQQKPGQAPRLLIYGAFSRATGIPDRFSGSGSGTDFTLTISRLEPEDFAVYYCKQYGSSPWTFGQGTKVEIK

SEQ ID NO: 6923 - protein, 5 aa, synthetic construct
  REGION 1..5: note = Description of Artificial Sequence: Synthetic peptide
  REGION 1..5: note = XENP019981 vhCDR1
SYTMH

SEQ ID NO: 6924 - protein, 17 aa, synthetic construct
  REGION 1..17: note = Description of Artificial Sequence: Synthetic peptide
  REGION 1..17: note = XENP019981 vhCDR2
FISYDGNNKYYADSVKG

SEQ ID NO: 6925 - protein, 9 aa, synthetic construct
  REGION 1..9: note = Description of Artificial Sequence: Synthetic peptide
  REGION 1..9: note = XENP019981 vhCDR3
TGWLGPFDY

SEQ ID NO: 6926 - protein, 12 aa, synthetic construct
  REGION 1..12: note = Description of Artificial Sequence: Synthetic peptide
  REGION 1..12: note = XENP019981 vlCDR1
RASQSVGSSYLA

SEQ ID NO: 6927 - protein, 7 aa, synthetic construct
  REGION 1..7: note = Description of Artificial Sequence: Synthetic peptide
  REGION 1..7: note = XENP019981 vlCDR2
GAFSRAT

SEQ ID NO: 6928 - protein, 9 aa, synthetic construct
  REGION 1..9: note = Description of Artificial Sequence: Synthetic peptide
  REGION 1..9: note = XENP019981 vlCDR3
KQYGSSPWT

SEQ ID NO: 6929 - protein, 246 aa, synthetic construct
  REGION 1..246: note = Description of Artificial Sequence: Synthetic polypeptide
  REGION 1..246: note = XENP019982 [CTLA-4]_H0_L0.94_scFv(GKPGS)4
QVQLVESGGGVVQPGRSLRLSCAASGFTFSSYTMHWVRQAPGKGLEWVTFISYDGNNKYYADSVKGRFTISRDNSKNTLYLQMNSLRAEDTAIYYCARTGWLGPFDYWGQGTLVTVSSGKPGSGKPGSGKPGSGKPGSEIVLTQSPGTLSLSPGERATLSCRASQSVGSSYLAWYQQKPGQAPRLLIYGAFSRATGIPDRFSGSGSGTDFTLTISRLEPEDFAVYYCLQYGSSPWTFGQGTKVEIK

SEQ ID NO: 6930 - protein, 118 aa, synthetic construct; identical to SEQ ID NO: 3737
  REGION 1..118: note = Description of Artificial Sequence: Synthetic polypeptide
  REGION 1..118: note = VH of XENP019982

SEQ ID NO: 6931 - protein, 108 aa, synthetic construct
  REGION 1..108: note = Description of Artificial Sequence: Synthetic polypeptide
  REGION 1..108: note = VL of XENP019982
EIVLTQSPGTLSLSPGERATLSCRASQSVGSSYLAWYQQKPGQAPRLLIYGAFSRATGIPDRFSGSGSGTDFTLTISRLEPEDFAVYYCLQYGSSPWTFGQGTKVEIK

SEQ ID NO: 6932 - protein, 5 aa, synthetic construct
  REGION 1..5: note = Description of Artificial Sequence: Synthetic peptide
  REGION 1..5: note = XENP019982 vhCDR1
SYTMH

SEQ ID NO: 6933 - protein, 17 aa, synthetic construct
  REGION 1..17: note = Description of Artificial Sequence: Synthetic peptide
  REGION 1..17: note = XENP019982 vhCDR2
FISYDGNNKYYADSVKG

SEQ ID NO: 6934 - protein, 9 aa, synthetic construct
  REGION 1..9: note = Description of Artificial Sequence: Synthetic peptide
  REGION 1..9: note = XENP019982 vhCDR3
TGWLGPFDY

SEQ ID NO: 6935 - protein, 12 aa, synthetic construct
  REGION 1..12: note = Description of Artificial Sequence: Synthetic peptide
  REGION 1..12: note = XENP019982 vlCDR1
RASQSVGSSYLA

SEQ ID NO: 6936 - protein, 7 aa, synthetic construct
  REGION 1..7: note = Description of Artificial Sequence: Synthetic peptide
  REGION 1..7: note = XENP019982 vlCDR2
GAFSRAT

SEQ ID NO: 6937 - protein, 9 aa, synthetic construct
  REGION 1..9: note = Description of Artificial Sequence: Synthetic peptide
  REGION 1..9: note = XENP019982 vlCDR3
LQYGSSPWT

SEQ ID NO: 6938 - protein, 246 aa, synthetic construct
  REGION 1..246: note = Description of Artificial Sequence: Synthetic polypeptide
  REGION 1..246: note = XENP019983 [CTLA-4]_H0_L0.95_scFv(GKPGS)4
QVQLVESGGGVVQPGRSLRLSCAASGFTFSSYTMHWVRQAPGKGLEWVTFISYDGNNKYYADSVKGRFTISRDNSKNTLYLQMNSLRAEDTAIYYCARTGWLGPFDYWGQGTLVTVSSGKPGSGKPGSGKPGSGKPGSEIVLTQSPGTLSLSPGERATLSCRASQSVGSSYLAWYQQKPGQAPRLLIYGAFSRATGIPDRFSGSGSGTDFTLTISRLEPEDFAVYYCMQYGSSPWTFGQGTKVEIK

SEQ ID NO: 6939 - protein, 118 aa, synthetic construct; identical to SEQ ID NO: 3737
  REGION 1..118: note = Description of Artificial Sequence: Synthetic polypeptide
  REGION 1..118: note = VH of XENP019983

SEQ ID NO: 6940 - protein, 108 aa, synthetic construct
  REGION 1..108: note = Description of Artificial Sequence: Synthetic polypeptide
  REGION 1..108: note = VL of XENP019983
EIVLTQSPGTLSLSPGERATLSCRASQSVGSSYLAWYQQKPGQAPRLLIYGAFSRATGIPDRFSGSGSGTDFTLTISRLEPEDFAVYYCMQYGSSPWTFGQGTKVEIK

SEQ ID NO: 6941 - protein, 5 aa, synthetic construct
  REGION 1..5: note = Description of Artificial Sequence: Synthetic peptide
  REGION 1..5: note = XENP019983 vhCDR1
SYTMH

SEQ ID NO: 6942 - protein, 17 aa, synthetic construct
  REGION 1..17: note = Description of Artificial Sequence: Synthetic peptide
  REGION 1..17: note = XENP019983 vhCDR2
FISYDGNNKYYADSVKG

SEQ ID NO: 6943 - protein, 9 aa, synthetic construct
  REGION 1..9: note = Description of Artificial Sequence: Synthetic peptide
  REGION 1..9: note = XENP019983 vhCDR3
TGWLGPFDY

SEQ ID NO: 6944 - protein, 12 aa, synthetic construct
  REGION 1..12: note = Description of Artificial Sequence: Synthetic peptide
  REGION 1..12: note = XENP019983 vlCDR1
RASQSVGSSYLA

SEQ ID NO: 6945 - protein, 7 aa, synthetic construct
  REGION 1..7: note = Description of Artificial Sequence: Synthetic peptide
  REGION 1..7: note = XENP019983 vlCDR2
GAFSRAT

SEQ ID NO: 6946 - protein, 9 aa, synthetic construct
  REGION 1..9: note = Description of Artificial Sequence: Synthetic peptide
  REGION 1..9: note = XENP019983 vlCDR3
MQYGSSPWT

SEQ ID NO: 6947 - protein, 246 aa, synthetic construct
  REGION 1..246: note = Description of Artificial Sequence: Synthetic polypeptide
  REGION 1..246: note = XENP019984 [CTLA-4]_H0_L0.96_scFv(GKPGS)4
QVQLVESGGGVVQPGRSLRLSCAASGFTFSSYTMHWVRQAPGKGLEWVTFISYDGNNKYYADSVKGRFTISRDNSKNTLYLQMNSLRAEDTAIYYCARTGWLGPFDYWGQGTLVTVSSGKPGSGKPGSGKPGSGKPGSEIVLTQSPGTLSLSPGERATLSCRASQSVGSSYLAWYQQKPGQAPRLLIYGAFSRATGIPDRFSGSGSGTDFTLTISRLEPEDFAVYYCQSYGSSPWTFGQGTKVEIK

SEQ ID NO: 6948 - protein, 118 aa, synthetic construct; identical to SEQ ID NO: 3737
  REGION 1..118: note = Description of Artificial Sequence: Synthetic polypeptide
  REGION 1..118: note = VH of XENP019984

SEQ ID NO: 6949 - protein, 108 aa, synthetic construct
  REGION 1..108: note = Description of Artificial Sequence: Synthetic polypeptide
  REGION 1..108: note = VL of XENP019984
EIVLTQSPGTLSLSPGERATLSCRASQSVGSSYLAWYQQKPGQAPRLLIYGAFSRATGIPDRFSGSGSGTDFTLTISRLEPEDFAVYYCQSYGSSPWTFGQGTKVEIK

SEQ ID NO: 6950 - protein, 5 aa, synthetic construct
  REGION 1..5: note = Description of Artificial Sequence: Synthetic peptide
  REGION 1..5: note = XENP019984 vhCDR1
SYTMH

SEQ ID NO: 6951 - protein, 17 aa, synthetic construct
  REGION 1..17: note = Description of Artificial Sequence: Synthetic peptide
  REGION 1..17: note = XENP019984 vhCDR2
FISYDGNNKYYADSVKG

SEQ ID NO: 6952 - protein, 9 aa, synthetic construct
  REGION 1..9: note = Description of Artificial Sequence: Synthetic peptide
  REGION 1..9: note = XENP019984 vhCDR3
TGWLGPFDY

SEQ ID NO: 6953 - protein, 12 aa, synthetic construct
  REGION 1..12: note = Description of Artificial Sequence: Synthetic peptide
  REGION 1..12: note = XENP019984 vlCDR1
RASQSVGSSYLA

SEQ ID NO: 6954 - protein, 7 aa, synthetic construct
  REGION 1..7: note = Description of Artificial Sequence: Synthetic peptide
  REGION 1..7: note = XENP019984 vlCDR2
GAFSRAT

SEQ ID NO: 6955 - protein, 9 aa, synthetic construct
  REGION 1..9: note = Description of Artificial Sequence: Synthetic peptide
  REGION 1..9: note = XENP019984 vlCDR3
QSYGSSPWT

SEQ ID NO: 6956 - protein, 246 aa, synthetic construct
  REGION 1..246: note = Description of Artificial Sequence: Synthetic polypeptide
  REGION 1..246: note = XENP019985 [CTLA-4]_H0_L0.97_scFv(GKPGS)4
QVQLVESGGGVVQPGRSLRLSCAASGFTFSSYTMHWVRQAPGKGLEWVTFISYDGNNKYYADSVKGRFTISRDNSKNTLYLQMNSLRAEDTAIYYCARTGWLGPFDYWGQGTLVTVSSGKPGSGKPGSGKPGSGKPGSEIVLTQSPGTLSLSPGERATLSCRASQSVGSSYLAWYQQKPGQAPRLLIYGAFSRATGIPDRFSGSGSGTDFTLTISRLEPEDFAVYYCQQAGSSPWTFGQGTKVEIK

SEQ ID NO: 6957 - protein, 118 aa, synthetic construct; identical to SEQ ID NO: 3737
  REGION 1..118: note = Description of Artificial Sequence: Synthetic polypeptide
  REGION 1..118: note = VH of XENP019985

SEQ ID NO: 6958 - protein, 108 aa, synthetic construct
  REGION 1..108: note = Description of Artificial Sequence: Synthetic polypeptide
  REGION 1..108: note = VL of XENP019985
EIVLTQSPGTLSLSPGERATLSCRASQSVGSSYLAWYQQKPGQAPRLLIYGAFSRATGIPDRFSGSGSGTDFTLTISRLEPEDFAVYYCQQAGSSPWTFGQGTKVEIK

SEQ ID NO: 6959 - protein, 5 aa, synthetic construct
  REGION 1..5: note = Description of Artificial Sequence: Synthetic peptide
  REGION 1..5: note = XENP019985 vhCDR1
SYTMH

SEQ ID NO: 6960 - protein, 17 aa, synthetic construct
  REGION 1..17: note = Description of Artificial Sequence: Synthetic peptide
  REGION 1..17: note = XENP019985 vhCDR2
FISYDGNNKYYADSVKG

SEQ ID NO: 6961 - protein, 9 aa, synthetic construct
  REGION 1..9: note = Description of Artificial Sequence: Synthetic peptide
  REGION 1..9: note = XENP019985 vhCDR3
TGWLGPFDY

SEQ ID NO: 6962 - protein, 12 aa, synthetic construct
  REGION 1..12: note = Description of Artificial Sequence: Synthetic peptide
  REGION 1..12: note = XENP019985 vlCDR1
RASQSVGSSYLA

SEQ ID NO: 6963 - protein, 7 aa, synthetic construct
  REGION 1..7: note = Description of Artificial Sequence: Synthetic peptide
  REGION 1..7: note = XENP019985 vlCDR2
GAFSRAT

SEQ ID NO: 6964 - protein, 9 aa, synthetic construct
  REGION 1..9: note = Description of Artificial Sequence: Synthetic peptide
  REGION 1..9: note = XENP019985 vlCDR3
QQAGSSPWT

SEQ ID NO: 6965 - protein, 246 aa, synthetic construct
  REGION 1..246: note = Description of Artificial Sequence: Synthetic polypeptide
  REGION 1..246: note = XENP019986 [CTLA-4]_H0_L0.98_scFv(GKPGS)4
QVQLVESGGGVVQPGRSLRLSCAASGFTFSSYTMHWVRQAPGKGLEWVTFISYDGNNKYYADSVKGRFTISRDNSKNTLYLQMNSLRAEDTAIYYCARTGWLGPFDYWGQGTLVTVSSGKPGSGKPGSGKPGSGKPGSEIVLTQSPGTLSLSPGERATLSCRASQSVGSSYLAWYQQKPGQAPRLLIYGAFSRATGIPDRFSGSGSGTDFTLTISRLEPEDFAVYYCQQFGSSPWTFGQGTKVEIK

SEQ ID NO: 6966 - protein, 118 aa, synthetic construct; identical to SEQ ID NO: 3737
  REGION 1..118: note = Description of Artificial Sequence: Synthetic polypeptide
  REGION 1..118: note = VH of XENP019986

SEQ ID NO: 6967 - protein, 108 aa, synthetic construct
  REGION 1..108: note = Description of Artificial Sequence: Synthetic polypeptide
  REGION 1..108: note = VL of XENP019986
EIVLTQSPGTLSLSPGERATLSCRASQSVGSSYLAWYQQKPGQAPRLLIYGAFSRATGIPDRFSGSGSGTDFTLTISRLEPEDFAVYYCQQFGSSPWTFGQGTKVEIK

SEQ ID NO: 6968 - protein, 5 aa, synthetic construct
  REGION 1..5: note = Description of Artificial Sequence: Synthetic peptide
  REGION 1..5: note = XENP019986 vhCDR1
SYTMH

SEQ ID NO: 6969 - protein, 17 aa, synthetic construct
  REGION 1..17: note = Description of Artificial Sequence: Synthetic peptide
  REGION 1..17: note = XENP019986 vhCDR2
FISYDGNNKYYADSVKG

SEQ ID NO: 6970 - protein, 9 aa, synthetic construct
  REGION 1..9: note = Description of Artificial Sequence: Synthetic peptide
  REGION 1..9: note = XENP019986 vhCDR3
TGWLGPFDY

SEQ ID NO: 6971 - protein, 12 aa, synthetic construct
  REGION 1..12: note = Description of Artificial Sequence: Synthetic peptide
  REGION 1..12: note = XENP019986 vlCDR1
RASQSVGSSYLA

SEQ ID NO: 6972 - protein, 7 aa, synthetic construct
  REGION 1..7: note = Description of Artificial Sequence: Synthetic peptide
  REGION 1..7: note = XENP019986 vlCDR2
GAFSRAT

SEQ ID NO: 6973 - protein, 9 aa, synthetic construct
  REGION 1..9: note = Description of Artificial Sequence: Synthetic peptide
  REGION 1..9: note = XENP019986 vlCDR3
QQFGSSPWT

SEQ ID NO: 6974 - protein, 246 aa, synthetic construct
  REGION 1..246: note = Description of Artificial Sequence: Synthetic polypeptide
  REGION 1..246: note = XENP019987 [CTLA-4]_H0_L0.99_scFv(GKPGS)4
QVQLVESGGGVVQPGRSLRLSCAASGFTFSSYTMHWVRQAPGKGLEWVTFISYDGNNKYYADSVKGRFTISRDNSKNTLYLQMNSLRAEDTAIYYCARTGWLGPFDYWGQGTLVTVSSGKPGSGKPGSGKPGSGKPGSEIVLTQSPGTLSLSPGERATLSCRASQSVGSSYLAWYQQKPGQAPRLLIYGAFSRATGIPDRFSGSGSGTDFTLTISRLEPEDFAVYYCQQHGSSPWTFGQGTKVEIK

SEQ ID NO: 6975 - protein, 118 aa, synthetic construct; identical to SEQ ID NO: 3737
  REGION 1..118: note = Description of Artificial Sequence: Synthetic polypeptide
  REGION 1..118: note = VH of XENP019987

SEQ ID NO: 6976 - protein, 108 aa, synthetic construct
  REGION 1..108: note = Description of Artificial Sequence: Synthetic polypeptide
  REGION 1..108: note = VL of XENP019987
EIVLTQSPGTLSLSPGERATLSCRASQSVGSSYLAWYQQKPGQAPRLLIYGAFSRATGIPDRFSGSGSGTDFTLTISRLEPEDFAVYYCQQHGSSPWTFGQGTKVEIK

SEQ ID NO: 6977 - protein, 5 aa, synthetic construct
  REGION 1..5: note = Description of Artificial Sequence: Synthetic peptide
  REGION 1..5: note = XENP019987 vhCDR1
SYTMH

SEQ ID NO: 6978 - protein, 17 aa, synthetic construct
  REGION 1..17: note = Description of Artificial Sequence: Synthetic peptide
  REGION 1..17: note = XENP019987 vhCDR2
FISYDGNNKYYADSVKG

SEQ ID NO: 6979 - protein, 9 aa, synthetic construct
  REGION 1..9: note = Description of Artificial Sequence: Synthetic peptide
  REGION 1..9: note = XENP019987 vhCDR3
TGWLGPFDY

SEQ ID NO: 6980 - protein, 12 aa, synthetic construct
  REGION 1..12: note = Description of Artificial Sequence: Synthetic peptide
  REGION 1..12: note = XENP019987 vlCDR1
RASQSVGSSYLA

SEQ ID NO: 6981 - protein, 7 aa, synthetic construct
  REGION 1..7: note = Description of Artificial Sequence: Synthetic peptide
  REGION 1..7: note = XENP019987 vlCDR2
GAFSRAT

SEQ ID NO: 6982 - protein, 9 aa, synthetic construct
  REGION 1..9: note = Description of Artificial Sequence: Synthetic peptide
  REGION 1..9: note = XENP019987 vlCDR3
QQHGSSPWT

SEQ ID NO: 6983 - protein, 246 aa, synthetic construct
  REGION 1..246: note = Description of Artificial Sequence: Synthetic polypeptide
  REGION 1..246: note = XENP019988 [CTLA-4]_H0_L0.100_scFv(GKPGS)4
QVQLVESGGGVVQPGRSLRLSCAASGFTFSSYTMHWVRQAPGKGLEWVTFISYDGNNKYYADSVKGRFTISRDNSKNTLYLQMNSLRAEDTAIYYCARTGWLGPFDYWGQGTLVTVSSGKPGSGKPGSGKPGSGKPGSEIVLTQSPGTLSLSPGERATLSCRASQSVGSSYLAWYQQKPGQAPRLLIYGAFSRATGIPDRFSGSGSGTDFTLTISRLEPEDFAVYYCQQLGSSPWTFGQGTKVEIK

SEQ ID NO: 6984 - protein, 118 aa, synthetic construct; identical to SEQ ID NO: 3737
  REGION 1..118: note = Description of Artificial Sequence: Synthetic polypeptide
  REGION 1..118: note = VH of XENP019988

SEQ ID NO: 6985 - protein, 108 aa, synthetic construct
  REGION 1..108: note = Description of Artificial Sequence: Synthetic polypeptide
  REGION 1..108: note = VL of XENP019988
EIVLTQSPGTLSLSPGERATLSCRASQSVGSSYLAWYQQKPGQAPRLLIYGAFSRATGIPDRFSGSGSGTDFTLTISRLEPEDFAVYYCQQLGSSPWTFGQGTKVEIK

SEQ ID NO: 6986 - protein, 5 aa, synthetic construct
  REGION 1..5: note = Description of Artificial Sequence: Synthetic peptide
  REGION 1..5: note = XENP019988 vhCDR1
SYTMH

SEQ ID NO: 6987 - protein, 17 aa, synthetic construct
  REGION 1..17: note = Description of Artificial Sequence: Synthetic peptide
  REGION 1..17: note = XENP019988 vhCDR2
FISYDGNNKYYADSVKG

SEQ ID NO: 6988 - protein, 9 aa, synthetic construct
  REGION 1..9: note = Description of Artificial Sequence: Synthetic peptide
  REGION 1..9: note = XENP019988 vhCDR3
TGWLGPFDY

SEQ ID NO: 6989 - protein, 12 aa, synthetic construct
  REGION 1..12: note = Description of Artificial Sequence: Synthetic peptide
  REGION 1..12: note = XENP019988 vlCDR1
RASQSVGSSYLA

SEQ ID NO: 6990 - protein, 7 aa, synthetic construct
  REGION 1..7: note = Description of Artificial Sequence: Synthetic peptide
  REGION 1..7: note = XENP019988 vlCDR2
GAFSRAT

SEQ ID NO: 6991 - protein, 9 aa, synthetic construct
  REGION 1..9: note = Description of Artificial Sequence: Synthetic peptide
  REGION 1..9: note = XENP019988 vlCDR3
QQLGSSPWT

SEQ ID NO: 6992 - protein, 246 aa, synthetic construct
  REGION 1..246: note = Description of Artificial Sequence: Synthetic polypeptide
  REGION 1..246: note = XENP019989 [CTLA-4]_H0_L0.101_scFv(GKPGS)4
QVQLVESGGGVVQPGRSLRLSCAASGFTFSSYTMHWVRQAPGKGLEWVTFISYDGNNKYYADSVKGRFTISRDNSKNTLYLQMNSLRAEDTAIYYCARTGWLGPFDYWGQGTLVTVSSGKPGSGKPGSGKPGSGKPGSEIVLTQSPGTLSLSPGERATLSCRASQSVGSSYLAWYQQKPGQAPRLLIYGAFSRATGIPDRFSGSGSGTDFTLTISRLEPEDFAVYYCQQVGSSPWTFGQGTKVEIK

SEQ ID NO: 6993 - protein, 118 aa, synthetic construct; identical to SEQ ID NO: 3737
  REGION 1..118: note = Description of Artificial Sequence: Synthetic polypeptide
  REGION 1..118: note = VH of XENP019989

SEQ ID NO: 6994 - protein, 108 aa, synthetic construct
  REGION 1..108: note = Description of Artificial Sequence: Synthetic polypeptide
  REGION 1..108: note = VL of XENP019989
EIVLTQSPGTLSLSPGERATLSCRASQSVGSSYLAWYQQKPGQAPRLLIYGAFSRATGIPDRFSGSGSGTDFTLTISRLEPEDFAVYYCQQVGSSPWTFGQGTKVEIK

SEQ ID NO: 6995 - protein, 5 aa, synthetic construct
  REGION 1..5: note = Description of Artificial Sequence: Synthetic peptide
  REGION 1..5: note = XENP019989 vhCDR1
SYTMH

SEQ ID NO: 6996 - protein, 17 aa, synthetic construct
  REGION 1..17: note = Description of Artificial Sequence: Synthetic peptide
  REGION 1..17: note = XENP019989 vhCDR2
FISYDGNNKYYADSVKG

SEQ ID NO: 6997 - protein, 9 aa, synthetic construct
  REGION 1..9: note = Description of Artificial Sequence: Synthetic peptide
  REGION 1..9: note = XENP019989 vhCDR3
TGWLGPFDY

SEQ ID NO: 6998 - protein, 12 aa, synthetic construct
  REGION 1..12: note = Description of Artificial Sequence: Synthetic peptide
  REGION 1..12: note = XENP019989 vlCDR1
RASQSVGSSYLA

SEQ ID NO: 6999 - protein, 7 aa, synthetic construct
  REGION 1..7: note = Description of Artificial Sequence: Synthetic peptide
  REGION 1..7: note = XENP019989 vlCDR2
GAFSRAT

SEQ ID NO: 7000 - protein, 9 aa, synthetic construct
  REGION 1..9: note = Description of Artificial Sequence: Synthetic peptide
  REGION 1..9: note = XENP019989 vlCDR3
QQVGSSPWT

SEQ ID NO: 7001 - protein, 246 aa, synthetic construct
  REGION 1..246: note = Description of Artificial Sequence: Synthetic polypeptide
  REGION 1..246: note = XENP019990 [CTLA-4]_H0_L0.102_scFv(GKPGS)4
QVQLVESGGGVVQPGRSLRLSCAASGFTFSSYTMHWVRQAPGKGLEWVTFISYDGNNKYYADSVKGRFTISRDNSKNTLYLQMNSLRAEDTAIYYCARTGWLGPFDYWGQGTLVTVSSGKPGSGKPGSGKPGSGKPGSEIVLTQSPGTLSLSPGERATLSCRASQSVGSSYLAWYQQKPGQAPRLLIYGAFSRATGIPDRFSGSGSGTDFTLTISRLEPEDFAVYYCQQYGESPWTFGQGTKVEIK

SEQ ID NO: 7002 - protein, 118 aa, synthetic construct; identical to SEQ ID NO: 3737
  REGION 1..118: note = Description of Artificial Sequence: Synthetic polypeptide
  REGION 1..118: note = VH of XENP019990

SEQ ID NO: 7003 - protein, 108 aa, synthetic construct
  REGION 1..108: note = Description of Artificial Sequence: Synthetic polypeptide
  REGION 1..108: note = VL of XENP019990
EIVLTQSPGTLSLSPGERATLSCRASQSVGSSYLAWYQQKPGQAPRLLIYGAFSRATGIPDRFSGSGSGTDFTLTISRLEPEDFAVYYCQQYGESPWTFGQGTKVEIK

SEQ ID NO: 7004 - protein, 5 aa, synthetic construct
  REGION 1..5: note = Description of Artificial Sequence: Synthetic peptide
  REGION 1..5: note = XENP019990 vhCDR1
SYTMH

SEQ ID NO: 7005 - protein, 17 aa, synthetic construct
  REGION 1..17: note = Description of Artificial Sequence: Synthetic peptide
  REGION 1..17: note = XENP019990 vhCDR2
FISYDGNNKYYADSVKG

SEQ ID NO: 7006 - protein, 9 aa, synthetic construct
  REGION 1..9: note = Description of Artificial Sequence: Synthetic peptide
  REGION 1..9: note = XENP019990 vhCDR3
TGWLGPFDY

SEQ ID NO: 7007 - protein, 12 aa, synthetic construct
  REGION 1..12: note = Description of Artificial Sequence: Synthetic peptide
  REGION 1..12: note = XENP019990 vlCDR1
RASQSVGSSYLA

SEQ ID NO: 7008 - protein, 7 aa, synthetic construct
  REGION 1..7: note = Description of Artificial Sequence: Synthetic peptide
  REGION 1..7: note = XENP019990 vlCDR2
GAFSRAT

SEQ ID NO: 7009 - protein, 9 aa, synthetic construct
  REGION 1..9: note = Description of Artificial Sequence: Synthetic peptide
  REGION 1..9: note = XENP019990 vlCDR3
QQYGESPWT

SEQ ID NO: 7010 - protein, 246 aa, synthetic construct
  REGION 1..246: note = Description of Artificial Sequence: Synthetic polypeptide
  REGION 1..246: note = XENP019991 [CTLA-4]_H0_L0.103_scFv(GKPGS)4
QVQLVESGGGVVQPGRSLRLSCAASGFTFSSYTMHWVRQAPGKGLEWVTFISYDGNNKYYADSVKGRFTISRDNSKNTLYLQMNSLRAEDTAIYYCARTGWLGPFDYWGQGTLVTVSSGKPGSGKPGSGKPGSGKPGSEIVLTQSPGTLSLSPGERATLSCRASQSVGSSYLAWYQQKPGQAPRLLIYGAFSRATGIPDRFSGSGSGTDFTLTISRLEPEDFAVYYCQQYGKSPWTFGQGTKVEIK

SEQ ID NO: 7011 - protein, 118 aa, synthetic construct; identical to SEQ ID NO: 3737
  REGION 1..118: note = Description of Artificial Sequence: Synthetic polypeptide
  REGION 1..118: note = VH of XENP019991

SEQ ID NO: 7012 - protein, 108 aa, synthetic construct
  REGION 1..108: note = Description of Artificial Sequence: Synthetic polypeptide
  REGION 1..108: note = VL of XENP019991
EIVLTQSPGTLSLSPGERATLSCRASQSVGSSYLAWYQQKPGQAPRLLIYGAFSRATGIPDRFSGSGSGTDFTLTISRLEPEDFAVYYCQQYGKSPWTFGQGTKVEIK

SEQ ID NO: 7013 - protein, 5 aa, synthetic construct
  REGION 1..5: note = Description of Artificial Sequence: Synthetic peptide
  REGION 1..5: note = XENP019991 vhCDR1
SYTMH

SEQ ID NO: 7014 - protein, 17 aa, synthetic construct
  REGION 1..17: note = Description of Artificial Sequence: Synthetic peptide
  REGION 1..17: note = XENP019991 vhCDR2
FISYDGNNKYYADSVKG

SEQ ID NO: 7015 - protein, 9 aa, synthetic construct
  REGION 1..9: note = Description of Artificial Sequence: Synthetic peptide
  REGION 1..9: note = XENP019991 vhCDR3
TGWLGPFDY

SEQ ID NO: 7016 - protein, 12 aa, synthetic construct
  REGION 1..12: note = Description of Artificial Sequence: Synthetic peptide
  REGION 1..12: note = XENP019991 vlCDR1
RASQSVGSSYLA

SEQ ID NO: 7017 - protein, 7 aa, synthetic construct
  REGION 1..7: note = Description of Artificial Sequence: Synthetic peptide
  REGION 1..7: note = XENP019991 vlCDR2
GAFSRAT

SEQ ID NO: 7018 - protein, 9 aa, synthetic construct
  REGION 1..9: note = Description of Artificial Sequence: Synthetic peptide
  REGION 1..9: note = XENP019991 vlCDR3
QQYGKSPWT

SEQ ID NO: 7019 - protein, 246 aa, synthetic construct
  REGION 1..246: note = Description of Artificial Sequence: Synthetic polypeptide
  REGION 1..246: note = XENP019992 [CTLA-4]_H0_L0.104_scFv(GKPGS)4
QVQLVESGGGVVQPGRSLRLSCAASGFTFSSYTMHWVRQAPGKGLEWVTFISYDGNNKYYADSVKGRFTISRDNSKNTLYLQMNSLRAEDTAIYYCARTGWLGPFDYWGQGTLVTVSSGKPGSGKPGSGKPGSGKPGSEIVLTQSPGTLSLSPGERATLSCRASQSVGSSYLAWYQQKPGQAPRLLIYGAFSRATGIPDRFSGSGSGTDFTLTISRLEPEDFAVYYCQQYGSYPWTFGQGTKVEIK

SEQ ID NO: 7020 - protein, 118 aa, synthetic construct; identical to SEQ ID NO: 3737
  REGION 1..118: note = Description of Artificial Sequence: Synthetic polypeptide
  REGION 1..118: note = VH of XENP019992

SEQ ID NO: 7021 - protein, 108 aa, synthetic construct
  REGION 1..108: note = Description of Artificial Sequence: Synthetic polypeptide
  REGION 1..108: note = VL of XENP019992
EIVLTQSPGTLSLSPGERATLSCRASQSVGSSYLAWYQQKPGQAPRLLIYGAFSRATGIPDRFSGSGSGTDFTLTISRLEPEDFAVYYCQQYGSYPWTFGQGTKVEIK

SEQ ID NO: 7022 - protein, 5 aa, synthetic construct
  REGION 1..5: note = Description of Artificial Sequence: Synthetic peptide
  REGION 1..5: note = XENP019992 vhCDR1
SYTMH

SEQ ID NO: 7023 - protein, 17 aa, synthetic construct
  REGION 1..17: note = Description of Artificial Sequence: Synthetic peptide
  REGION 1..17: note = XENP019992 vhCDR2
FISYDGNNKYYADSVKG

SEQ ID NO: 7024 - protein, 9 aa, synthetic construct
  REGION 1..9: note = Description of Artificial Sequence: Synthetic peptide
  REGION 1..9: note = XENP019992 vhCDR3
TGWLGPFDY

SEQ ID NO: 7025 - protein, 12 aa, synthetic construct
  REGION 1..12: note = Description of Artificial Sequence: Synthetic peptide
  REGION 1..12: note = XENP019992 vlCDR1
RASQSVGSSYLA

SEQ ID NO: 7026 - protein, 7 aa, synthetic construct
  REGION 1..7: note = Description of Artificial Sequence: Synthetic peptide
  REGION 1..7: note = XENP019992 vlCDR2
GAFSRAT

SEQ ID NO: 7027 - protein, 9 aa, synthetic construct
  REGION 1..9: note = Description of Artificial Sequence: Synthetic peptide
  REGION 1..9: note = XENP019992 vlCDR3
QQYGSYPWT

SEQ ID NO: 7028 - protein, 246 aa, synthetic construct
  REGION 1..246: note = Description of Artificial Sequence: Synthetic polypeptide
  REGION 1..246: note = XENP019993 [CTLA-4]_H0_L0.105_scFv(GKPGS)4
QVQLVESGGGVVQPGRSLRLSCAASGFTFSSYTMHWVRQAPGKGLEWVTFISYDGNNKYYADSVKGRFTISRDNSKNTLYLQMNSLRAEDTAIYYCARTGWLGPFDYWGQGTLVTVSSGKPGSGKPGSGKPGSGKPGSEIVLTQSPGTLSLSPGERATLSCRASQSVGSSYLAWYQQKPGQAPRLLIYGAFSRATGIPDRFSGSGSGTDFTLTISRLEPEDFAVYYCQQYGSSHWTFGQGTKVEIK

SEQ ID NO: 7029 - protein, 118 aa, synthetic construct; identical to SEQ ID NO: 3737
  REGION 1..118: note = Description of Artificial Sequence: Synthetic polypeptide
  REGION 1..118: note = VH of XENP019993

SEQ ID NO: 7030 - protein, 108 aa, synthetic construct
  REGION 1..108: note = Description of Artificial Sequence: Synthetic polypeptide
  REGION 1..108: note = VL of XENP019993
EIVLTQSPGTLSLSPGERATLSCRASQSVGSSYLAWYQQKPGQAPRLLIYGAFSRATGIPDRFSGSGSGTDFTLTISRLEPEDFAVYYCQQYGSSHWTFGQGTKVEIK

SEQ ID NO: 7031 - protein, 5 aa, synthetic construct
  REGION 1..5: note = Description of Artificial Sequence: Synthetic peptide
  REGION 1..5: note = XENP019993 vhCDR1
SYTMH

SEQ ID NO: 7032 - protein, 17 aa, synthetic construct
  REGION 1..17: note = Description of Artificial Sequence: Synthetic peptide
  REGION 1..17: note = XENP019993 vhCDR2
FISYDGNNKYYADSVKG

SEQ ID NO: 7033 - protein, 9 aa, synthetic construct
  REGION 1..9: note = Description of Artificial Sequence: Synthetic peptide
  REGION 1..9: note = XENP019993 vhCDR3
TGWLGPFDY

SEQ ID NO: 7034 - protein, 12 aa, synthetic construct
  REGION 1..12: note = Description of Artificial Sequence: Synthetic peptide
  REGION 1..12: note = XENP019993 vlCDR1
RASQSVGSSYLA

SEQ ID NO: 7035 - protein, 7 aa, synthetic construct
  REGION 1..7: note = Description of Artificial Sequence: Synthetic peptide
  REGION 1..7: note = XENP019993 vlCDR2
GAFSRAT

SEQ ID NO: 7036 - protein, 9 aa, synthetic construct
  REGION 1..9: note = Description of Artificial Sequence: Synthetic peptide
  REGION 1..9: note = XENP019993 vlCDR3
QQYGSSHWT

SEQ ID NO: 7037 - protein, 246 aa, synthetic construct
  REGION 1..246: note = Description of Artificial Sequence: Synthetic polypeptide
  REGION 1..246: note = XENP019994 [CTLA-4]_H0_L0.106_scFv(GKPGS)4
QVQLVESGGGVVQPGRSLRLSCAASGFTFSSYTMHWVRQAPGKGLEWVTFISYDGNNKYYADSVKGRFTISRDNSKNTLYLQMNSLRAEDTAIYYCARTGWLGPFDYWGQGTLVTVSSGKPGSGKPGSGKPGSGKPGSEIVLTQSPGTLSLSPGERATLSCRASQSVGSSYLAWYQQKPGQAPRLLIYGAFSRATGIPDRFSGSGSGTDFTLTISRLEPEDFAVYYCQQYGSSPFTFGQGTKVEIK

SEQ ID NO: 7038 - protein, 118 aa, synthetic construct; identical to SEQ ID NO: 3737
  REGION 1..118: note = Description of Artificial Sequence: Synthetic polypeptide
  REGION 1..118: note = VH of XENP019994

SEQ ID NO: 7039 - protein, 108 aa, synthetic construct
  REGION 1..108: note = Description of Artificial Sequence: Synthetic polypeptide
  REGION 1..108: note = VL of XENP019994
EIVLTQSPGTLSLSPGERATLSCRASQSVGSSYLAWYQQKPGQAPRLLIYGAFSRATGIPDRFSGSGSGTDFTLTISRLEPEDFAVYYCQQYGSSPFTFGQGTKVEIK

SEQ ID NO: 7040 - protein, 5 aa, synthetic construct
  REGION 1..5: note = Description of Artificial Sequence: Synthetic peptide
  REGION 1..5: note = XENP019994 vhCDR1
SYTMH

SEQ ID NO: 7041 - protein, 17 aa, synthetic construct
  REGION 1..17: note = Description of Artificial Sequence: Synthetic peptide
  REGION 1..17: note = XENP019994 vhCDR2
FISYDGNNKYYADSVKG

SEQ ID NO: 7042 - protein, 9 aa, synthetic construct
  REGION 1..9: note = Description of Artificial Sequence: Synthetic peptide
  REGION 1..9: note = XENP019994 vhCDR3
TGWLGPFDY

SEQ ID NO: 7043 - protein, 12 aa, synthetic construct
  REGION 1..12: note = Description of Artificial Sequence: Synthetic peptide
  REGION 1..12: note = XENP019994 vlCDR1
RASQSVGSSYLA

SEQ ID NO: 7044 - protein, 7 aa, synthetic construct
  REGION 1..7: note = Description of Artificial Sequence: Synthetic peptide
  REGION 1..7: note = XENP019994 vlCDR2
GAFSRAT

SEQ ID NO: 7045 - protein, 9 aa, synthetic construct
  REGION 1..9: note = Description of Artificial Sequence: Synthetic peptide
  REGION 1..9: note = XENP019994 vlCDR3
QQYGSSPFT

SEQ ID NO: 7046 - protein, 246 aa, synthetic construct
  REGION 1..246: note = Description of Artificial Sequence: Synthetic polypeptide
  REGION 1..246: note = XENP019995 [CTLA-4]_H0_L0.107_scFv(GKPGS)4
QVQLVESGGGVVQPGRSLRLSCAASGFTFSSYTMHWVRQAPGKGLEWVTFISYDGNNKYYADSVKGRFTISRDNSKNTLYLQMNSLRAEDTAIYYCARTGWLGPFDYWGQGTLVTVSSGKPGSGKPGSGKPGSGKPGSEIVLTQSPGTLSLSPGERATLSCRASQSVGSSYLAWYQQKPGQAPRLLIYGAFSRATGIPDRFSGSGSGTDFTLTISRLEPEDFAVYYCQQYGSSPHTFGQGTKVEIK

SEQ ID NO: 7047 - protein, 118 aa, synthetic construct; identical to SEQ ID NO: 3737
  REGION 1..118: note = Description of Artificial Sequence: Synthetic polypeptide
  REGION 1..118: note = VH of XENP019995

SEQ ID NO: 7048 - protein, 108 aa, synthetic construct
  REGION 1..108: note = Description of Artificial Sequence: Synthetic polypeptide
  REGION 1..108: note = VL of XENP019995
EIVLTQSPGTLSLSPGERATLSCRASQSVGSSYLAWYQQKPGQAPRLLIYGAFSRATGIPDRFSGSGSGTDFTLTISRLEPEDFAVYYCQQYGSSPHTFGQGTKVEIK

SEQ ID NO: 7049 - protein, 5 aa, synthetic construct
  REGION 1..5: note = Description of Artificial Sequence: Synthetic peptide
  REGION 1..5: note = XENP019995 vhCDR1
SYTMH

SEQ ID NO: 7050 - protein, 17 aa, synthetic construct
  REGION 1..17: note = Description of Artificial Sequence: Synthetic peptide
  REGION 1..17: note = XENP019995 vhCDR2
FISYDGNNKYYADSVKG

SEQ ID NO: 7051 - protein, 9 aa, synthetic construct
  REGION 1..9: note = Description of Artificial Sequence: Synthetic peptide
  REGION 1..9: note = XENP019995 vhCDR3
TGWLGPFDY

SEQ ID NO: 7052 - protein, 12 aa, synthetic construct
  REGION 1..12: note = Description of Artificial Sequence: Synthetic peptide
  REGION 1..12: note = XENP019995 vlCDR1
RASQSVGSSYLA

SEQ ID NO: 7053 - protein, 7 aa, synthetic construct
  REGION 1..7: note = Description of Artificial Sequence: Synthetic peptide
  REGION 1..7: note = XENP019995 vlCDR2
GAFSRAT

SEQ ID NO: 7054 - protein, 9 aa, synthetic construct
  REGION 1..9: note = Description of Artificial Sequence: Synthetic peptide
  REGION 1..9: note = XENP019995 vlCDR3
QQYGSSPHT

SEQ ID NO: 7055 - protein, 246 aa, synthetic construct
  REGION 1..246: note = Description of Artificial Sequence: Synthetic polypeptide
  REGION 1..246: note = XENP019996 [CTLA-4]_H0_L0.108_scFv(GKPGS)4
QVQLVESGGGVVQPGRSLRLSCAASGFTFSSYTMHWVRQAPGKGLEWVTFISYDGNNKYYADSVKGRFTISRDNSKNTLYLQMNSLRAEDTAIYYCARTGWLGPFDYWGQGTLVTVSSGKPGSGKPGSGKPGSGKPGSEIVLTQSPGTLSLSPGERATLSCRASQSVGSSYLAWYQQKPGQAPRLLIYGAFSRATGIPDRFSGSGSGTDFTLTISRLEPEDFAVYYCQQYGSSPITFGQGTKVEIK

SEQ ID NO: 7056 - protein, 118 aa, synthetic construct; identical to SEQ ID NO: 3737
  REGION 1..118: note = Description of Artificial Sequence: Synthetic polypeptide
  REGION 1..118: note = VH of XENP019996

SEQ ID NO: 7057 - protein, 108 aa, synthetic construct
  REGION 1..108: note = Description of Artificial Sequence: Synthetic polypeptide
  REGION 1..108: note = VL of XENP019996
EIVLTQSPGTLSLSPGERATLSCRASQSVGSSYLAWYQQKPGQAPRLLIYGAFSRATGIPDRFSGSGSGTDFTLTISRLEPEDFAVYYCQQYGSSPITFGQGTKVEIK

SEQ ID NO: 7058 - protein, 5 aa, synthetic construct
  REGION 1..5: note = Description of Artificial Sequence: Synthetic peptide
  REGION 1..5: note = XENP019996 vhCDR1
SYTMH

SEQ ID NO: 7059 - protein, 17 aa, synthetic construct
  REGION 1..17: note = Description of Artificial Sequence: Synthetic peptide
  REGION 1..17: note = XENP019996 vhCDR2
FISYDGNNKYYADSVKG

SEQ ID NO: 7060 - protein, 9 aa, synthetic construct
  REGION 1..9: note = Description of Artificial Sequence: Synthetic peptide
  REGION 1..9: note = XENP019996 vhCDR3
TGWLGPFDY

SEQ ID NO: 7061 - protein, 12 aa, synthetic construct
  REGION 1..12: note = Description of Artificial Sequence: Synthetic peptide
  REGION 1..12: note = XENP019996 vlCDR1
RASQSVGSSYLA

SEQ ID NO: 7062 - protein, 7 aa, synthetic construct
  REGION 1..7: note = Description of Artificial Sequence: Synthetic peptide
  REGION 1..7: note = XENP019996 vlCDR2
GAFSRAT

SEQ ID NO: 7063 - protein, 9 aa, synthetic construct
  REGION 1..9: note = Description of Artificial Sequence: Synthetic peptide
  REGION 1..9: note = XENP019996 vlCDR3
QQYGSSPIT

SEQ ID NO: 7064 - protein, 246 aa, synthetic construct
  REGION 1..246: note = Description of Artificial Sequence: Synthetic polypeptide
  REGION 1..246: note = XENP020001 [CTLA-4]_H0_L0.109_scFv(GKPGS)4
QVQLVESGGGVVQPGRSLRLSCAASGFTFSSYTMHWVRQAPGKGLEWVTFISYDGNNKYYADSVKGRFTISRDNSKNTLYLQMNSLRAEDTAIYYCARTGWLGPFDYWGQGTLVTVSSGKPGSGKPGSGKPGSGKPGSEIVLTQSPGTLSLSPGERATLSCRASQSVGSSYLAWYQQKPGQAPRLLIYGAFSRATGIPDRFSGSGSGTDFTLTISRLEPEDFAVYYCQQYGSSPLTFGQGTKVEIK

SEQ ID NO: 7065 - protein, 118 aa, synthetic construct; identical to SEQ ID NO: 3737
  REGION 1..118: note = Description of Artificial Sequence: Synthetic polypeptide
  REGION 1..118: note = VH of XENP020001

SEQ ID NO: 7066 - protein, 108 aa, synthetic construct
  REGION 1..108: note = Description of Artificial Sequence: Synthetic polypeptide
  REGION 1..108: note = VL of XENP020001
EIVLTQSPGTLSLSPGERATLSCRASQSVGSSYLAWYQQKPGQAPRLLIYGAFSRATGIPDRFSGSGSGTDFTLTISRLEPEDFAVYYCQQYGSSPLTFGQGTKVEIK

SEQ ID NO: 7067 - protein, 5 aa, synthetic construct
  REGION 1..5: note = Description of Artificial Sequence: Synthetic peptide
  REGION 1..5: note = XENP020001 vhCDR1
SYTMH

SEQ ID NO: 7068 - protein, 17 aa, synthetic construct
  REGION 1..17: note = Description of Artificial Sequence: Synthetic peptide
  REGION 1..17: note = XENP020001 vhCDR2
FISYDGNNKYYADSVKG

SEQ ID NO: 7069 - protein, 9 aa, synthetic construct
  REGION 1..9: note = Description of Artificial Sequence: Synthetic peptide
  REGION 1..9: note = XENP020001 vhCDR3
TGWLGPFDY

SEQ ID NO: 7070 - protein, 12 aa, synthetic construct
  REGION 1..12: note = Description of Artificial Sequence: Synthetic peptide
  REGION 1..12: note = XENP020001 vlCDR1
RASQSVGSSYLA

SEQ ID NO: 7071 - protein, 7 aa, synthetic construct
  REGION 1..7: note = Description of Artificial Sequence: Synthetic peptide
  REGION 1..7: note = XENP020001 vlCDR2
GAFSRAT

SEQ ID NO: 7072 - protein, 9 aa, synthetic construct
  REGION 1..9: note = Description of Artificial Sequence: Synthetic peptide
  REGION 1..9: note = XENP020001 vlCDR3
QQYGSSPLT

SEQ ID NO: 7073 - protein, 246 aa, synthetic construct
  REGION 1..246: note = Description of Artificial Sequence: Synthetic polypeptide
  REGION 1..246: note = XENP020002 [CTLA-4]_H0_L0.110_scFv(GKPGS)4
QVQLVESGGGVVQPGRSLRLSCAASGFTFSSYTMHWVRQAPGKGLEWVTFISYDGNNKYYADSVKGRFTISRDNSKNTLYLQMNSLRAEDTAIYYCARTGWLGPFDYWGQGTLVTVSSGKPGSGKPGSGKPGSGKPGSEIVLTQSPGTLSLSPGERATLSCRASQSVGSSYLAWYQQKPGQAPRLLIYGAFSRATGIPDRFSGSGSGTDFTLTISRLEPEDFAVYYCQQYGSSPYTFGQGTKVEIK

SEQ ID NO: 7074 - protein, 118 aa, synthetic construct; identical to SEQ ID NO: 3737
  REGION 1..118: note = Description of Artificial Sequence: Synthetic polypeptide
  REGION 1..118: note = VH of XENP020002

SEQ ID NO: 7075 - protein, 108 aa, synthetic construct
  REGION 1..108: note = Description of Artificial Sequence: Synthetic polypeptide
  REGION 1..108: note = VL of XENP020002
EIVLTQSPGTLSLSPGERATLSCRASQSVGSSYLAWYQQKPGQAPRLLIYGAFSRATGIPDRFSGSGSGTDFTLTISRLEPEDFAVYYCQQYGSSPYTFGQGTKVEIK

SEQ ID NO: 7076 - protein, 5 aa, synthetic construct
  REGION 1..5: note = Description of Artificial Sequence: Synthetic peptide
  REGION 1..5: note = XENP020002 vhCDR1
SYTMH

SEQ ID NO: 7077 - protein, 17 aa, synthetic construct
  REGION 1..17: note = Description of Artificial Sequence: Synthetic peptide
  REGION 1..17: note = XENP020002 vhCDR2
FISYDGNNKYYADSVKG

SEQ ID NO: 7078 - protein, 9 aa, synthetic construct
  REGION 1..9: note = Description of Artificial Sequence: Synthetic peptide
  REGION 1..9: note = XENP020002 vhCDR3
TGWLGPFDY

SEQ ID NO: 7079 - protein, 12 aa, synthetic construct
  REGION 1..12: note = Description of Artificial Sequence: Synthetic peptide
  REGION 1..12: note = XENP020002 vlCDR1
RASQSVGSSYLA

SEQ ID NO: 7080 - protein, 7 aa, synthetic construct
  REGION 1..7: note = Description of Artificial Sequence: Synthetic peptide
  REGION 1..7: note = XENP020002 vlCDR2
GAFSRAT

SEQ ID NO: 7081 - protein, 9 aa, synthetic construct
  REGION 1..9: note = Description of Artificial Sequence: Synthetic peptide
  REGION 1..9: note = XENP020002 vlCDR3
QQYGSSPYT

SEQ ID NO: 7082 - protein, 246 aa, synthetic construct
  REGION 1..246: note = Description of Artificial Sequence: Synthetic polypeptide
  REGION 1..246: note = XENP020003 [CTLA-4]_H0_L0.111_scFv(GKPGS)4
QVQLVESGGGVVQPGRSLRLSCAASGFTFSSYTMHWVRQAPGKGLEWVTFISYDGNNKYYADSVKGRFTISRDNSKNTLYLQMNSLRAEDTAIYYCARTGWLGPFDYWGQGTLVTVSSGKPGSGKPGSGKPGSGKPGSEIVLTQSPGTLSLSPGERATLSCRASQSVGSSYLAWYQQKPGQAPRLLIYGAFSRATGIPDRFSGSGSGTDFTLTISRLEPEDFAVYYCQQYGSSPWVFGQGTKVEIK

SEQ ID NO: 7083 - protein, 118 aa, synthetic construct; identical to SEQ ID NO: 3737
  REGION 1..118: note = Description of Artificial Sequence: Synthetic polypeptide
  REGION 1..118: note = VH of XENP020003

SEQ ID NO: 7084 - protein, 108 aa, synthetic construct
  REGION 1..108: note = Description of Artificial Sequence: Synthetic polypeptide
  REGION 1..108: note = VL of XENP020003
EIVLTQSPGTLSLSPGERATLSCRASQSVGSSYLAWYQQKPGQAPRLLIYGAFSRATGIPDRFSGSGSGTDFTLTISRLEPEDFAVYYCQQYGSSPWVFGQGTKVEIK

SEQ ID NO: 7085 - protein, 5 aa, synthetic construct
  REGION 1..5: note = Description of Artificial Sequence: Synthetic peptide
  REGION 1..5: note = XENP020003 vhCDR1
SYTMH

SEQ ID NO: 7086 - protein, 17 aa, synthetic construct
  REGION 1..17: note = Description of Artificial Sequence: Synthetic peptide
  REGION 1..17: note = XENP020003 vhCDR2
FISYDGNNKYYADSVKG

SEQ ID NO: 7087 - protein, 9 aa, synthetic construct
  REGION 1..9: note = Description of Artificial Sequence: Synthetic peptide
  REGION 1..9: note = XENP020003 vhCDR3
TGWLGPFDY

SEQ ID NO: 7088 - protein, 12 aa, synthetic construct
  REGION 1..12: note = Description of Artificial Sequence: Synthetic peptide
  REGION 1..12: note = XENP020003 vlCDR1
RASQSVGSSYLA

SEQ ID NO: 7089 - protein, 7 aa, synthetic construct
  REGION 1..7: note = Description of Artificial Sequence: Synthetic peptide
  REGION 1..7: note = XENP020003 vlCDR2
GAFSRAT

SEQ ID NO: 7090 - protein, 9 aa, synthetic construct
  REGION 1..9: note = Description of Artificial Sequence: Synthetic peptide
  REGION 1..9: note = XENP020003 vlCDR3
QQYGSSPWV

SEQ ID NO: 7091 - protein, 246 aa, synthetic construct
  REGION 1..246: note = Description of Artificial Sequence: Synthetic polypeptide
  REGION 1..246: note = XENP020004 [CTLA-4]_H0_L0.112_scFv(GKPGS)4
QVQLVESGGGVVQPGRSLRLSCAASGFTFSSYTMHWVRQAPGKGLEWVTFISYDGNNKYYADSVKGRFTISRDNSKNTLYLQMNSLRAEDTAIYYCARTGWLGPFDYWGQGTLVTVSSGKPGSGKPGSGKPGSGKPGSEIVLTQSPGTLSLSPGERATLSCRASQSVGSSYLAWYQQKPGQAPRLLIYGAFSRATGIPDRFSGSGSGTDFTLTISRLEPEDFAVYYCQQYGSSPWTFGGGTKVEIK

SEQ ID NO: 7092 - protein, 118 aa, synthetic construct; identical to SEQ ID NO: 3737
  REGION 1..118: note = Description of Artificial Sequence: Synthetic polypeptide
  REGION 1..118: note = VH of XENP020004

SEQ ID NO: 7093 - protein, 108 aa, synthetic construct
  REGION 1..108: note = Description of Artificial Sequence: Synthetic polypeptide
  REGION 1..108: note = VL of XENP020004
EIVLTQSPGTLSLSPGERATLSCRASQSVGSSYLAWYQQKPGQAPRLLIYGAFSRATGIPDRFSGSGSGTDFTLTISRLEPEDFAVYYCQQYGSSPWTFGGGTKVEIK

SEQ ID NO: 7094 - protein, 5 aa, synthetic construct
  REGION 1..5: note = Description of Artificial Sequence: Synthetic peptide
  REGION 1..5: note = XENP020004 vhCDR1
SYTMH

SEQ ID NO: 7095 - protein, 17 aa, synthetic construct
  REGION 1..17: note = Description of Artificial Sequence: Synthetic peptide
  REGION 1..17: note = XENP020004 vhCDR2
FISYDGNNKYYADSVKG

SEQ ID NO: 7096 - protein, 9 aa, synthetic construct
  REGION 1..9: note = Description of Artificial Sequence: Synthetic peptide
  REGION 1..9: note = XENP020004 vhCDR3
TGWLGPFDY

SEQ ID NO: 7097 - protein, 12 aa, synthetic construct
  REGION 1..12: note = Description of Artificial Sequence: Synthetic peptide
  REGION 1..12: note = XENP020004 vlCDR1
RASQSVGSSYLA

SEQ ID NO: 7098 - protein, 7 aa, synthetic construct
  REGION 1..7: note = Description of Artificial Sequence: Synthetic peptide
  REGION 1..7: note = XENP020004 vlCDR2
GAFSRAT

SEQ ID NO: 7099 - protein, 9 aa, synthetic construct
  REGION 1..9: note = Description of Artificial Sequence: Synthetic peptide
  REGION 1..9: note = XENP020004 vlCDR3
QQYGSSPWT

SEQ ID NO: 7100 - protein, 246 aa, synthetic construct
  REGION 1..246: note = Description of Artificial Sequence: Synthetic polypeptide
  REGION 1..246: note = XENP020005 [CTLA-4]_H0_L0.113_scFv(GKPGS)4
QVQLVESGGGVVQPGRSLRLSCAASGFTFSSYTMHWVRQAPGKGLEWVTFISYDGNNKYYADSVKGRFTISRDNSKNTLYLQMNSLRAEDTAIYYCARTGWLGPFDYWGQGTLVTVSSGKPGSGKPGSGKPGSGKPGSEIVLTQSPGTLSLSPGERATLSCRASQSVGSSYLAWYQQKPGQAPRLLIYGAFSRATGIPDRFSGSGSGTDFTLTISRLEPEDFAVYYCQQYGSSPWTFGEGTKVEIK

SEQ ID NO: 7101 - protein, 118 aa, synthetic construct; identical to SEQ ID NO: 3737
  REGION 1..118: note = Description of Artificial Sequence: Synthetic polypeptide
  REGION 1..118: note = VH of XENP020005

SEQ ID NO: 7102 - protein, 108 aa, synthetic construct; identical to SEQ ID NO: 4735
  REGION 1..108: note = Description of Artificial Sequence: Synthetic polypeptide
  REGION 1..108: note = VL of XENP020005

SEQ ID NO: 7103 - protein, 5 aa, synthetic construct
  REGION 1..5: note = Description of Artificial Sequence: Synthetic peptide
  REGION 1..5: note = XENP020005 vhCDR1
SYTMH

SEQ ID NO: 7104 - protein, 17 aa, synthetic construct
  REGION 1..17: note = Description of Artificial Sequence: Synthetic peptide
  REGION 1..17: note = XENP020005 vhCDR2
FISYDGNNKYYADSVKG

SEQ ID NO: 7105 - protein, 9 aa, synthetic construct
  REGION 1..9: note = Description of Artificial Sequence: Synthetic peptide
  REGION 1..9: note = XENP020005 vhCDR3
TGWLGPFDY

SEQ ID NO: 7106 - protein, 12 aa, synthetic construct
  REGION 1..12: note = Description of Artificial Sequence: Synthetic peptide
  REGION 1..12: note = XENP020005 vlCDR1
RASQSVGSSYLA

SEQ ID NO: 7107 - protein, 7 aa, synthetic construct
  REGION 1..7: note = Description of Artificial Sequence: Synthetic peptide
  REGION 1..7: note = XENP020005 vlCDR2
GAFSRAT

SEQ ID NO: 7108 - protein, 9 aa, synthetic construct
  REGION 1..9: note = Description of Artificial Sequence: Synthetic peptide
  REGION 1..9: note = XENP020005 vlCDR3
QQYGSSPWT

SEQ ID NO: 7109 - protein, 246 aa, synthetic construct
  REGION 1..246: note = Description of Artificial Sequence: Synthetic polypeptide
  REGION 1..246: note = XENP020075 [CTLA-4]_H3.1_L0.12_scFv(GKPGS)4
EVQLVESGGGLVKPGGSLRLSCAASGFTFSSYTMHWVRQAPGKGLEWVSFISYDGNHKYYADSVKGRFTISRDNAKNSLYLQMNSLRAEDTAVYYCARTGLLGPFDLWGQGTMVTVSSGKPGSGKPGSGKPGSGKPGSEIVLTQSPGTLSVSPGERATLSCRASQSVGSSYLAWYQQKPGQAPRLLIYGAFSRATGIPDRFSGSGSGTDFTLTISRLEPEDFAVYYCQQYGSSPWTFGQGTKVEIK

SEQ ID NO: 7110 - protein, 118 aa, synthetic construct
  REGION 1..118: note = Description of Artificial Sequence: Synthetic polypeptide
  REGION 1..118: note = VH of XENP020075
EVQLVESGGGLVKPGGSLRLSCAASGFTFSSYTMHWVRQAPGKGLEWVSFISYDGNHKYYADSVKGRFTISRDNAKNSLYLQMNSLRAEDTAVYYCARTGLLGPFDLWGQGTMVTVSS

SEQ ID NO: 7111 - protein, 108 aa, synthetic construct; identical to SEQ ID NO: 6193
  REGION 1..108: note = Description of Artificial Sequence: Synthetic polypeptide
  REGION 1..108: note = VL of XENP020075

SEQ ID NO: 7112 - protein, 5 aa, synthetic construct
  REGION 1..5: note = Description of Artificial Sequence: Synthetic peptide
  REGION 1..5: note = XENP020075 vhCDR1
SYTMH

SEQ ID NO: 7113 - protein, 17 aa, synthetic construct
  REGION 1..17: note = Description of Artificial Sequence: Synthetic peptide
  REGION 1..17: note = XENP020075 vhCDR2
FISYDGNHKYYADSVKG

SEQ ID NO: 7114 - protein, 9 aa, synthetic construct
  REGION 1..9: note = Description of Artificial Sequence: Synthetic peptide
  REGION 1..9: note = XENP020075 vhCDR3
TGLLGPFDL

SEQ ID NO: 7115 - protein, 12 aa, synthetic construct
  REGION 1..12: note = Description of Artificial Sequence: Synthetic peptide
  REGION 1..12: note = XENP020075 vlCDR1
RASQSVGSSYLA

SEQ ID NO: 7116 - protein, 7 aa, synthetic construct
  REGION 1..7: note = Description of Artificial Sequence: Synthetic peptide
  REGION 1..7: note = XENP020075 vlCDR2
GAFSRAT

SEQ ID NO: 7117 - protein, 9 aa, synthetic construct
  REGION 1..9: note = Description of Artificial Sequence: Synthetic peptide
  REGION 1..9: note = XENP020075 vlCDR3
QQYGSSPWT

SEQ ID NO: 7118 - protein, 246 aa, synthetic construct
  REGION 1..246: note = Description of Artificial Sequence: Synthetic polypeptide
  REGION 1..246: note = XENP020076 [CTLA-4]_H3.2_L0.12_scFv(GKPGS)4
EVQLVESGGGLVKPGGSLRLSCAASGFTFSSYTMHWVRQAPGKGLEWVSFISYDGNTKYYADSVKGRFTISRDNAKNSLYLQMNSLRAEDTAVYYCARTGLLGPFDLWGQGTMVTVSSGKPGSGKPGSGKPGSGKPGSEIVLTQSPGTLSVSPGERATLSCRASQSVGSSYLAWYQQKPGQAPRLLIYGAFSRATGIPDRFSGSGSGTDFTLTISRLEPEDFAVYYCQQYGSSPWTFGQGTKVEIK

SEQ ID NO: 7119 - protein, 118 aa, synthetic construct
  REGION 1..118: note = Description of Artificial Sequence: Synthetic polypeptide
  REGION 1..118: note = VH of XENP020076
EVQLVESGGGLVKPGGSLRLSCAASGFTFSSYTMHWVRQAPGKGLEWVSFISYDGNTKYYADSVKGRFTISRDNAKNSLYLQMNSLRAEDTAVYYCARTGLLGPFDLWGQGTMVTVSS

SEQ ID NO: 7120 - protein, 108 aa, synthetic construct; identical to SEQ ID NO: 6193
  REGION 1..108: note = Description of Artificial Sequence: Synthetic polypeptide
  REGION 1..108: note = VL of XENP020076

SEQ ID NO: 7121 - protein, 5 aa, synthetic construct
  REGION 1..5: note = Description of Artificial Sequence: Synthetic peptide
  REGION 1..5: note = XENP020076 vhCDR1
SYTMH

SEQ ID NO: 7122 - protein, 17 aa, synthetic construct
  REGION 1..17: note = Description of Artificial Sequence: Synthetic peptide
  REGION 1..17: note = XENP020076 vhCDR2
FISYDGNTKYYADSVKG

SEQ ID NO: 7123 - protein, 9 aa, synthetic construct
  REGION 1..9: note = Description of Artificial Sequence: Synthetic peptide
  REGION 1..9: note = XENP020076 vhCDR3
TGLLGPFDL

SEQ ID NO: 7124 - protein, 12 aa, synthetic construct
  REGION 1..12: note = Description of Artificial Sequence: Synthetic peptide
  REGION 1..12: note = XENP020076 vlCDR1
RASQSVGSSYLA

SEQ ID NO: 7125 - protein, 7 aa, synthetic construct
  REGION 1..7: note = Description of Artificial Sequence: Synthetic peptide
  REGION 1..7: note = XENP020076 vlCDR2
GAFSRAT

SEQ ID NO: 7126 - protein, 9 aa, synthetic construct
  REGION 1..9: note = Description of Artificial Sequence: Synthetic peptide
  REGION 1..9: note = XENP020076 vlCDR3
QQYGSSPWT

SEQ ID NO: 7127 - protein, 246 aa, synthetic construct
  REGION 1..246: note = Description of Artificial Sequence: Synthetic polypeptide
  REGION 1..246: note = XENP020077 [CTLA-4]_H3.3_L0.12_scFv(GKPGS)4
EVQLVESGGGLVKPGGSLRLSCAASGFTFSSYTMHWVRQAPGKGLEWVSFISYDGNQKYYADSVKGRFTISRDNAKNSLYLQMNSLRAEDTAVYYCARTGLLGPFDLWGQGTMVTVSSGKPGSGKPGSGKPGSGKPGSEIVLTQSPGTLSVSPGERATLSCRASQSVGSSYLAWYQQKPGQAPRLLIYGAFSRATGIPDRFSGSGSGTDFTLTISRLEPEDFAVYYCQQYGSSPWTFGQGTKVEIK

SEQ ID NO: 7128 - protein, 118 aa, synthetic construct
  REGION 1..118: note = Description of Artificial Sequence: Synthetic polypeptide
  REGION 1..118: note = VH of XENP020077
EVQLVESGGGLVKPGGSLRLSCAASGFTFSSYTMHWVRQAPGKGLEWVSFISYDGNQKYYADSVKGRFTISRDNAKNSLYLQMNSLRAEDTAVYYCARTGLLGPFDLWGQGTMVTVSS

SEQ ID NO: 7129 - protein, 108 aa, synthetic construct; identical to SEQ ID NO: 6193
  REGION 1..108: note = Description of Artificial Sequence: Synthetic polypeptide
  REGION 1..108: note = VL of XENP020077

SEQ ID NO: 7130 - protein, 5 aa, synthetic construct
  REGION 1..5: note = Description of Artificial Sequence: Synthetic peptide
  REGION 1..5: note = XENP020077 vhCDR1
SYTMH

SEQ ID NO: 7131 - protein, 17 aa, synthetic construct
  REGION 1..17: note = Description of Artificial Sequence: Synthetic peptide
  REGION 1..17: note = XENP020077 vhCDR2
FISYDGNQKYYADSVKG

SEQ ID NO: 7132 - protein, 9 aa, synthetic construct
  REGION 1..9: note = Description of Artificial Sequence: Synthetic peptide
  REGION 1..9: note = XENP020077 vhCDR3
TGLLGPFDL

SEQ ID NO: 7133 - protein, 12 aa, synthetic construct
  REGION 1..12: note = Description of Artificial Sequence: Synthetic peptide
  REGION 1..12: note = XENP020077 vlCDR1
RASQSVGSSYLA

SEQ ID NO: 7134 - protein, 7 aa, synthetic construct
  REGION 1..7: note = Description of Artificial Sequence: Synthetic peptide
  REGION 1..7: note = XENP020077 vlCDR2
GAFSRAT

SEQ ID NO: 7135 - protein, 9 aa, synthetic construct
  REGION 1..9: note = Description of Artificial Sequence: Synthetic peptide
  REGION 1..9: note = XENP020077 vlCDR3
QQYGSSPWT

SEQ ID NO: 7136 - protein, 246 aa, synthetic construct
  REGION 1..246: note = Description of Artificial Sequence: Synthetic polypeptide
  REGION 1..246: note = XENP020078 [CTLA-4]_H3.4_L0.12_scFv(GKPGS)4
EVQLVESGGGLVKPGGSLRLSCAASGFTFSSYTMHWVRQAPGKGLEWVSFISYDGNHKYYADSVKGRFTISRDNAKNSLYLQMNSLRAEDTAVYYCARTGHLGPFDLWGQGTMVTVSSGKPGSGKPGSGKPGSGKPGSEIVLTQSPGTLSVSPGERATLSCRASQSVGSSYLAWYQQKPGQAPRLLIYGAFSRATGIPDRFSGSGSGTDFTLTISRLEPEDFAVYYCQQYGSSPWTFGQGTKVEIK

SEQ ID NO: 7137 - protein, 118 aa, synthetic construct
  REGION 1..118: note = Description of Artificial Sequence: Synthetic polypeptide
  REGION 1..118: note = VH of XENP020078
EVQLVESGGGLVKPGGSLRLSCAASGFTFSSYTMHWVRQAPGKGLEWVSFISYDGNHKYYADSVKGRFTISRDNAKNSLYLQMNSLRAEDTAVYYCARTGHLGPFDLWGQGTMVTVSS

SEQ ID NO: 7138 - protein, 108 aa, synthetic construct; identical to SEQ ID NO: 6193
  REGION 1..108: note = Description of Artificial Sequence: Synthetic polypeptide
  REGION 1..108: note = VL of XENP020078

SEQ ID NO: 7139 - protein, 5 aa, synthetic construct
  REGION 1..5: note = Description of Artificial Sequence: Synthetic peptide
  REGION 1..5: note = XENP020078 vhCDR1
SYTMH

SEQ ID NO: 7140 - protein, 17 aa, synthetic construct
  REGION 1..17: note = Description of Artificial Sequence: Synthetic peptide
  REGION 1..17: note = XENP020078 vhCDR2
FISYDGNHKYYADSVKG

SEQ ID NO: 7141 - protein, 9 aa, synthetic construct
  REGION 1..9: note = Description of Artificial Sequence: Synthetic peptide
  REGION 1..9: note = XENP020078 vhCDR3
TGHLGPFDL

SEQ ID NO: 7142 - protein, 12 aa, synthetic construct
  REGION 1..12: note = Description of Artificial Sequence: Synthetic peptide
  REGION 1..12: note = XENP020078 vlCDR1
RASQSVGSSYLA

SEQ ID NO: 7143 - protein, 7 aa, synthetic construct
  REGION 1..7: note = Description of Artificial Sequence: Synthetic peptide
  REGION 1..7: note = XENP020078 vlCDR2
GAFSRAT

SEQ ID NO: 7144 - protein, 9 aa, synthetic construct
  REGION 1..9: note = Description of Artificial Sequence: Synthetic peptide
  REGION 1..9: note = XENP020078 vlCDR3
QQYGSSPWT

SEQ ID NO: 7145 - protein, 246 aa, synthetic construct
  REGION 1..246: note = Description of Artificial Sequence: Synthetic polypeptide
  REGION 1..246: note = XENP020079 [CTLA-4]_H3.5_L0.12_scFv(GKPGS)4
EVQLVESGGGLVKPGGSLRLSCAASGFTFSSYTMHWVRQAPGKGLEWVSFISYDGNTKYYADSVKGRFTISRDNAKNSLYLQMNSLRAEDTAVYYCARTGHLGPFDLWGQGTMVTVSSGKPGSGKPGSGKPGSGKPGSEIVLTQSPGTLSVSPGERATLSCRASQSVGSSYLAWYQQKPGQAPRLLIYGAFSRATGIPDRFSGSGSGTDFTLTISRLEPEDFAVYYCQQYGSSPWTFGQGTKVEIK

SEQ ID NO: 7146 - protein, 118 aa, synthetic construct
  REGION 1..118: note = Description of Artificial Sequence: Synthetic polypeptide
  REGION 1..118: note = VH of XENP020079
EVQLVESGGGLVKPGGSLRLSCAASGFTFSSYTMHWVRQAPGKGLEWVSFISYDGNTKYYADSVKGRFTISRDNAKNSLYLQMNSLRAEDTAVYYCARTGHLGPFDLWGQGTMVTVSS

SEQ ID NO: 7147 - protein, 108 aa, synthetic construct; identical to SEQ ID NO: 6193
  REGION 1..108: note = Description of Artificial Sequence: Synthetic polypeptide
  REGION 1..108: note = VL of XENP020079

SEQ ID NO: 7148 - protein, 5 aa, synthetic construct
  REGION 1..5: note = Description of Artificial Sequence: Synthetic peptide
  REGION 1..5: note = XENP020079 vhCDR1
SYTMH

SEQ ID NO: 7149 - protein, 17 aa, synthetic construct
  REGION 1..17: note = Description of Artificial Sequence: Synthetic peptide
  REGION 1..17: note = XENP020079 vhCDR2
FISYDGNTKYYADSVKG

SEQ ID NO: 7150 - protein, 9 aa, synthetic construct
  REGION 1..9: note = Description of Artificial Sequence: Synthetic peptide
  REGION 1..9: note = XENP020079 vhCDR3
TGHLGPFDL

SEQ ID NO: 7151 - protein, 12 aa, synthetic construct
  REGION 1..12: note = Description of Artificial Sequence: Synthetic peptide
  REGION 1..12: note = XENP020079 vlCDR1
RASQSVGSSYLA

SEQ ID NO: 7152 - protein, 7 aa, synthetic construct
  REGION 1..7: note = Description of Artificial Sequence: Synthetic peptide
  REGION 1..7: note = XENP020079 vlCDR2
GAFSRAT

SEQ ID NO: 7153 - protein, 9 aa, synthetic construct
  REGION 1..9: note = Description of Artificial Sequence: Synthetic peptide
  REGION 1..9: note = XENP020079 vlCDR3
QQYGSSPWT

SEQ ID NO: 7154 - protein, 246 aa, synthetic construct
  REGION 1..246: note = Description of Artificial Sequence: Synthetic polypeptide
  REGION 1..246: note = XENP020080 [CTLA-4]_H3.6_L0.12_scFv(GKPGS)4
EVQLVESGGGLVKPGGSLRLSCAASGFTFSSYTMHWVRQAPGKGLEWVSFISYDGNQKYYADSVKGRFTISRDNAKNSLYLQMNSLRAEDTAVYYCARTGHLGPFDLWGQGTMVTVSSGKPGSGKPGSGKPGSGKPGSEIVLTQSPGTLSVSPGERATLSCRASQSVGSSYLAWYQQKPGQAPRLLIYGAFSRATGIPDRFSGSGSGTDFTLTISRLEPEDFAVYYCQQYGSSPWTFGQGTKVEIK

SEQ ID NO: 7155 - protein, 118 aa, synthetic construct
  REGION 1..118: note = Description of Artificial Sequence: Synthetic polypeptide
  REGION 1..118: note = VH of XENP020080
EVQLVESGGGLVKPGGSLRLSCAASGFTFSSYTMHWVRQAPGKGLEWVSFISYDGNQKYYADSVKGRFTISRDNAKNSLYLQMNSLRAEDTAVYYCARTGHLGPFDLWGQGTMVTVSS

SEQ ID NO: 7156 - protein, 108 aa, synthetic construct; identical to SEQ ID NO: 6193
  REGION 1..108: note = Description of Artificial Sequence: Synthetic polypeptide
  REGION 1..108: note = VL of XENP020080

SEQ ID NO: 7157 - protein, 5 aa, synthetic construct
  REGION 1..5: note = Description of Artificial Sequence: Synthetic peptide
  REGION 1..5: note = XENP020080 vhCDR1
SYTMH

SEQ ID NO: 7158 - protein, 17 aa, synthetic construct
  REGION 1..17: note = Description of Artificial Sequence: Synthetic peptide
  REGION 1..17: note = XENP020080 vhCDR2
FISYDGNQKYYADSVKG

SEQ ID NO: 7159 - protein, 9 aa, synthetic construct
  REGION 1..9: note = Description of Artificial Sequence: Synthetic peptide
  REGION 1..9: note = XENP020080 vhCDR3
TGHLGPFDL

SEQ ID NO: 7160 - protein, 12 aa, synthetic construct
  REGION 1..12: note = Description of Artificial Sequence: Synthetic peptide
  REGION 1..12: note = XENP020080 vlCDR1
RASQSVGSSYLA

SEQ ID NO: 7161 - protein, 7 aa, synthetic construct
  REGION 1..7: note = Description of Artificial Sequence: Synthetic peptide
  REGION 1..7: note = XENP020080 vlCDR2
GAFSRAT

SEQ ID NO: 7162 - protein, 9 aa, synthetic construct
  REGION 1..9: note = Description of Artificial Sequence: Synthetic peptide
  REGION 1..9: note = XENP020080 vlCDR3
QQYGSSPWT

SEQ ID NO: 7163 - protein, 246 aa, synthetic construct
  REGION 1..246: note = Description of Artificial Sequence: Synthetic polypeptide
  REGION 1..246: note = XENP020081 [CTLA-4]_H3.7_L0.12_scFv(GKPGS)4
EVQLVESGGGLVKPGGSLRLSCAASGFTFSSYTMHWVRQAPGKGLEWVCFISYDGNNKYYADSVKGRFTCSRDNAKNSLYLQMNSLRAEDTAVYYCARTGWLGPFDYWGQGTLVTVSSGKPGSGKPGSGKPGSGKPGSEIVLTQSPGTLSVSPGERATLSCRASQSVGSSYLAWYQQKPGQAPRLLIYGAFSRATGIPDRFSGSGSGTDFTLTISRLEPEDFAVYYCQQYGSSPWTFGQGTKVEIK

SEQ ID NO: 7164 - protein, 118 aa, synthetic construct
  REGION 1..118: note = Description of Artificial Sequence: Synthetic polypeptide
  REGION 1..118: note = VH of XENP020081
EVQLVESGGGLVKPGGSLRLSCAASGFTFSSYTMHWVRQAPGKGLEWVCFISYDGNNKYYADSVKGRFTCSRDNAKNSLYLQMNSLRAEDTAVYYCARTGWLGPFDYWGQGTLVTVSS

SEQ ID NO: 7165 - protein, 108 aa, synthetic construct; identical to SEQ ID NO: 6193
  REGION 1..108: note = Description of Artificial Sequence: Synthetic polypeptide
  REGION 1..108: note = VL of XENP020081

SEQ ID NO: 7166 - protein, 5 aa, synthetic construct
  REGION 1..5: note = Description of Artificial Sequence: Synthetic peptide
  REGION 1..5: note = XENP020081 vhCDR1
SYTMH

SEQ ID NO: 7167 - protein, 17 aa, synthetic construct
  REGION 1..17: note = Description of Artificial Sequence: Synthetic peptide
  REGION 1..17: note = XENP020081 vhCDR2
FISYDGNNKYYADSVKG

SEQ ID NO: 7168 - protein, 9 aa, synthetic construct
  REGION 1..9: note = Description of Artificial Sequence: Synthetic peptide
  REGION 1..9: note = XENP020081 vhCDR3
TGWLGPFDY

SEQ ID NO: 7169 - protein, 12 aa, synthetic construct
  REGION 1..12: note = Description of Artificial Sequence: Synthetic peptide
  REGION 1..12: note = XENP020081 vlCDR1
RASQSVGSSYLA

SEQ ID NO: 7170 - protein, 7 aa, synthetic construct
  REGION 1..7: note = Description of Artificial Sequence: Synthetic peptide
  REGION 1..7: note = XENP020081 vlCDR2
GAFSRAT

SEQ ID NO: 7171 - protein, 9 aa, synthetic construct
  REGION 1..9: note = Description of Artificial Sequence: Synthetic peptide
  REGION 1..9: note = XENP020081 vlCDR3
QQYGSSPWT

SEQ ID NO: 7172 - protein, 246 aa, synthetic construct
  REGION 1..246: note = Description of Artificial Sequence: Synthetic polypeptide
  REGION 1..246: note = XENP020082 [CTLA-4]_H3.8_L0.12_scFv(GKPGS)4
EVQLVESGGGLVKPGGSLRLSCAASGFTFSSYTMHWVRQAPGKCLEWVSFISYDGNNKYYADSVKGRFTISRDNAKNSLYLQMNSLRAEDTAVYYCARTGWLGPFDYWGQGTLVTVSSGKPGSGKPGSGKPGSGKPGSEIVLTQSPGTLSVSPGERATLSCRASQSVGSSYLAWYQQKPGQAPRLLIYGAFSRATGIPDRFSGSGSGTDFTLTISRLEPEDFAVYYCQQYGSSPWTFGQGTKVEIK

SEQ ID NO: 7173 - protein, 118 aa, synthetic construct
  REGION 1..118: note = Description of Artificial Sequence: Synthetic polypeptide
  REGION 1..118: note = VH of XENP020082
EVQLVESGGGLVKPGGSLRLSCAASGFTFSSYTMHWVRQAPGKCLEWVSFISYDGNNKYYADSVKGRFTISRDNAKNSLYLQMNSLRAEDTAVYYCARTGWLGPFDYWGQGTLVTVSS

SEQ ID NO: 7174 - protein, 108 aa, synthetic construct; identical to SEQ ID NO: 6193
  REGION 1..108: note = Description of Artificial Sequence: Synthetic polypeptide
  REGION 1..108: note = VL of XENP020082

SEQ ID NO: 7175 - protein, 5 aa, synthetic construct
  REGION 1..5: note = Description of Artificial Sequence: Synthetic peptide
  REGION 1..5: note = XENP020082 vhCDR1
SYTMH

SEQ ID NO: 7176 - protein, 17 aa, synthetic construct
  REGION 1..17: note = Description of Artificial Sequence: Synthetic peptide
  REGION 1..17: note = XENP020082 vhCDR2
FISYDGNNKYYADSVKG

SEQ ID NO: 7177 - protein, 9 aa, synthetic construct
  REGION 1..9: note = Description of Artificial Sequence: Synthetic peptide
  REGION 1..9: note = XENP020082 vhCDR3
TGWLGPFDY

SEQ ID NO: 7178 - protein, 12 aa, synthetic construct
  REGION 1..12: note = Description of Artificial Sequence: Synthetic peptide
  REGION 1..12: note = XENP020082 vlCDR1
RASQSVGSSYLA

SEQ ID NO: 7179 - protein, 7 aa, synthetic construct
  REGION 1..7: note = Description of Artificial Sequence: Synthetic peptide
  REGION 1..7: note = XENP020082 vlCDR2
GAFSRAT

SEQ ID NO: 7180 - protein, 9 aa, synthetic construct
  REGION 1..9: note = Description of Artificial Sequence: Synthetic peptide
  REGION 1..9: note = XENP020082 vlCDR3
QQYGSSPWT

SEQ ID NO: 7181 - protein, 246 aa, synthetic construct
  REGION 1..246: note = Description of Artificial Sequence: Synthetic polypeptide
  REGION 1..246: note = XENP020360 [CTLA-4]_H3.9_L0.12_scFv(GKPGS)4
EVQLVESGGGLVKPGGSLRLSCAASGFTFSSYTMHWVRQAPGKGLEWVSFISYDGNYKYYADSVKGRFTISRDNAKNSLYLQMNSLRAEDTAVYYCARTGHLGPFDLWGQGTMVTVSSGKPGSGKPGSGKPGSGKPGSEIVLTQSPGTLSVSPGERATLSCRASQSVGSSYLAWYQQKPGQAPRLLIYGAFSRATGIPDRFSGSGSGTDFTLTISRLEPEDFAVYYCQQYGSSPWTFGQGTKVEIK

SEQ ID NO: 7182 - protein, 118 aa, synthetic construct
  REGION 1..118: note = Description of Artificial Sequence: Synthetic polypeptide
  REGION 1..118: note = VH of XENP020360
EVQLVESGGGLVKPGGSLRLSCAASGFTFSSYTMHWVRQAPGKGLEWVSFISYDGNYKYYADSVKGRFTISRDNAKNSLYLQMNSLRAEDTAVYYCARTGHLGPFDLWGQGTMVTVSS

SEQ ID NO: 7183 - protein, 108 aa, synthetic construct; identical to SEQ ID NO: 6193
  REGION 1..108: note = Description of Artificial Sequence: Synthetic polypeptide
  REGION 1..108: note = VL of XENP020360

SEQ ID NO: 7184 - protein, 5 aa, synthetic construct
  REGION 1..5: note = Description of Artificial Sequence: Synthetic peptide
  REGION 1..5: note = XENP020360 vhCDR1
SYTMH

SEQ ID NO: 7185 - protein, 17 aa, synthetic construct
  REGION 1..17: note = Description of Artificial Sequence: Synthetic peptide
  REGION 1..17: note = XENP020360 vhCDR2
FISYDGNYKYYADSVKG

SEQ ID NO: 7186 - protein, 9 aa, synthetic construct
  REGION 1..9: note = Description of Artificial Sequence: Synthetic peptide
  REGION 1..9: note = XENP020360 vhCDR3
TGHLGPFDL

SEQ ID NO: 7187 - protein, 12 aa, synthetic construct
  REGION 1..12: note = Description of Artificial Sequence: Synthetic peptide
  REGION 1..12: note = XENP020360 vlCDR1
RASQSVGSSYLA

SEQ ID NO: 7188 - protein, 7 aa, synthetic construct
  REGION 1..7: note = Description of Artificial Sequence: Synthetic peptide
  REGION 1..7: note = XENP020360 vlCDR2
GAFSRAT

SEQ ID NO: 7189 - protein, 9 aa, synthetic construct
  REGION 1..9: note = Description of Artificial Sequence: Synthetic peptide
  REGION 1..9: note = XENP020360 vlCDR3
QQYGSSPWT

SEQ ID NO: 7190 - protein, 246 aa, synthetic construct
  REGION 1..246: note = Description of Artificial Sequence: Synthetic polypeptide
  REGION 1..246: note = XENP020361 [CTLA-4]_H3.10_L0.12_scFv(GKPGS)4
EVQLVESGGGLVKPGGSLRLSCAASGFTFSSYTMHWVRQAPGKGLEWVSFISYDGNYKYYADSVKGRFTISRDNAKNSLYLQMNSLRAEDTAVYYCARTGLLGPFDLWGQGTMVTVSSGKPGSGKPGSGKPGSGKPGSEIVLTQSPGTLSVSPGERATLSCRASQSVGSSYLAWYQQKPGQAPRLLIYGAFSRATGIPDRFSGSGSGTDFTLTISRLEPEDFAVYYCQQYGSSPWTFGQGTKVEIK

SEQ ID NO: 7191 - protein, 118 aa, synthetic construct
  REGION 1..118: note = Description of Artificial Sequence: Synthetic polypeptide
  REGION 1..118: note = VH of XENP020361
EVQLVESGGGLVKPGGSLRLSCAASGFTFSSYTMHWVRQAPGKGLEWVSFISYDGNYKYYADSVKGRFTISRDNAKNSLYLQMNSLRAEDTAVYYCARTGLLGPFDLWGQGTMVTVSS

SEQ ID NO: 7192 - protein, 108 aa, synthetic construct; identical to SEQ ID NO: 6193
  REGION 1..108: note = Description of Artificial Sequence: Synthetic polypeptide
  REGION 1..108: note = VL of XENP020361

SEQ ID NO: 7193 - protein, 5 aa, synthetic construct
  REGION 1..5: note = Description of Artificial Sequence: Synthetic peptide
  REGION 1..5: note = XENP020361 vhCDR1
SYTMH

SEQ ID NO: 7194 - protein, 17 aa, synthetic construct
  REGION 1..17: note = Description of Artificial Sequence: Synthetic peptide
  REGION 1..17: note = XENP020361 vhCDR2
FISYDGNYKYYADSVKG

SEQ ID NO: 7195 - protein, 9 aa, synthetic construct
  REGION 1..9: note = Description of Artificial Sequence: Synthetic peptide
  REGION 1..9: note = XENP020361 vhCDR3
TGLLGPFDL

SEQ ID NO: 7196 - protein, 12 aa, synthetic construct
  REGION 1..12: note = Description of Artificial Sequence: Synthetic peptide
  REGION 1..12: note = XENP020361 vlCDR1
RASQSVGSSYLA

SEQ ID NO: 7197 - protein, 7 aa, synthetic construct
  REGION 1..7: note = Description of Artificial Sequence: Synthetic peptide
  REGION 1..7: note = XENP020361 vlCDR2
GAFSRAT

SEQ ID NO: 7198 - protein, 9 aa, synthetic construct
  REGION 1..9: note = Description of Artificial Sequence: Synthetic peptide
  REGION 1..9: note = XENP020361 vlCDR3
QQYGSSPWT

SEQ ID NO: 7199 - protein, 246 aa, synthetic construct
  REGION 1..246: note = Description of Artificial Sequence: Synthetic polypeptide
  REGION 1..246: note = XENP020362 [CTLA-4]_H3.11_L0.12_scFv(GKPGS)4
EVQLVESGGGLVKPGGSLRLSCAASGFTFSSYTMHWVRQAPGKGLEWVSFISYDGNHKYYADSVKGRFTISRDNAKNSLYLQMNSLRAEDTAVYYCARGGHLGPFDLWGQGTMVTVSSGKPGSGKPGSGKPGSGKPGSEIVLTQSPGTLSVSPGERATLSCRASQSVGSSYLAWYQQKPGQAPRLLIYGAFSRATGIPDRFSGSGSGTDFTLTISRLEPEDFAVYYCQQYGSSPWTFGQGTKVEIK

SEQ ID NO: 7200 - protein, 118 aa, synthetic construct
  REGION 1..118: note = Description of Artificial Sequence: Synthetic polypeptide
  REGION 1..118: note = VH of XENP020362
EVQLVESGGGLVKPGGSLRLSCAASGFTFSSYTMHWVRQAPGKGLEWVSFISYDGNHKYYADSVKGRFTISRDNAKNSLYLQMNSLRAEDTAVYYCARGGHLGPFDLWGQGTMVTVSS

SEQ ID NO: 7201 - protein, 108 aa, synthetic construct; identical to SEQ ID NO: 6193
  REGION 1..108: note = Description of Artificial Sequence: Synthetic polypeptide
  REGION 1..108: note = VL of XENP020362

SEQ ID NO: 7202 - protein, 5 aa, synthetic construct
  REGION 1..5: note = Description of Artificial Sequence: Synthetic peptide
  REGION 1..5: note = XENP020362 vhCDR1
SYTMH

SEQ ID NO: 7203 - protein, 17 aa, synthetic construct
  REGION 1..17: note = Description of Artificial Sequence: Synthetic peptide
  REGION 1..17: note = XENP020362 vhCDR2
FISYDGNHKYYADSVKG

SEQ ID NO: 7204 - protein, 9 aa, synthetic construct
  REGION 1..9: note = Description of Artificial Sequence: Synthetic peptide
  REGION 1..9: note = XENP020362 vhCDR3
GGHLGPFDL

SEQ ID NO: 7205 - protein, 12 aa, synthetic construct
  REGION 1..12: note = Description of Artificial Sequence: Synthetic peptide
  REGION 1..12: note = XENP020362 vlCDR1
RASQSVGSSYLA

SEQ ID NO: 7206 - protein, 7 aa, synthetic construct
  REGION 1..7: note = Description of Artificial Sequence: Synthetic peptide
  REGION 1..7: note = XENP020362 vlCDR2
GAFSRAT

SEQ ID NO: 7207 - protein, 9 aa, synthetic construct
  REGION 1..9: note = Description of Artificial Sequence: Synthetic peptide
  REGION 1..9: note = XENP020362 vlCDR3
QQYGSSPWT

SEQ ID NO: 7208 - protein, 246 aa, synthetic construct
  REGION 1..246: note = Description of Artificial Sequence: Synthetic polypeptide
  REGION 1..246: note = XENP020363 [CTLA-4]_H3.12_L0.12_scFv(GKPGS)4
EVQLVESGGGLVKPGGSLRLSCAASGFTFSSYTMHWVRQAPGKGLEWVSFISYDGNHKYYADSVKGRFTISRDNAKNSLYLQMNSLRAEDTAVYYCARTSHLGPFDLWGQGTMVTVSSGKPGSGKPGSGKPGSGKPGSEIVLTQSPGTLSVSPGERATLSCRASQSVGSSYLAWYQQKPGQAPRLLIYGAFSRATGIPDRFSGSGSGTDFTLTISRLEPEDFAVYYCQQYGSSPWTFGQGTKVEIK

SEQ ID NO: 7209 - protein, 118 aa, synthetic construct
  REGION 1..118: note = Description of Artificial Sequence: Synthetic polypeptide
  REGION 1..118: note = VH of XENP020363
EVQLVESGGGLVKPGGSLRLSCAASGFTFSSYTMHWVRQAPGKGLEWVSFISYDGNHKYYADSVKGRFTISRDNAKNSLYLQMNSLRAEDTAVYYCARTSHLGPFDLWGQGTMVTVSS

SEQ ID NO: 7210 - protein, 108 aa, synthetic construct; identical to SEQ ID NO: 6193
  REGION 1..108: note = Description of Artificial Sequence: Synthetic polypeptide
  REGION 1..108: note = VL of XENP020363

SEQ ID NO: 7211 - protein, 5 aa, synthetic construct
  REGION 1..5: note = Description of Artificial Sequence: Synthetic peptide
  REGION 1..5: note = XENP020363 vhCDR1
SYTMH

SEQ ID NO: 7212 - protein, 17 aa, synthetic construct
  REGION 1..17: note = Description of Artificial Sequence: Synthetic peptide
  REGION 1..17: note = XENP020363 vhCDR2
FISYDGNHKYYADSVKG

SEQ ID NO: 7213 - protein, 9 aa, synthetic construct
  REGION 1..9: note = Description of Artificial Sequence: Synthetic peptide
  REGION 1..9: note = XENP020363 vhCDR3
TSHLGPFDL

SEQ ID NO: 7214 - protein, 12 aa, synthetic construct
  REGION 1..12: note = Description of Artificial Sequence: Synthetic peptide
  REGION 1..12: note = XENP020363 vlCDR1
RASQSVGSSYLA

SEQ ID NO: 7215 - protein, 7 aa, synthetic construct
  REGION 1..7: note = Description of Artificial Sequence: Synthetic peptide
  REGION 1..7: note = XENP020363 vlCDR2
GAFSRAT

SEQ ID NO: 7216 - protein, 9 aa, synthetic construct
  REGION 1..9: note = Description of Artificial Sequence: Synthetic peptide
  REGION 1..9: note = XENP020363 vlCDR3
QQYGSSPWT

SEQ ID NO: 7217 - protein, 246 aa, synthetic construct
  REGION 1..246: note = Description of Artificial Sequence: Synthetic polypeptide
  REGION 1..246: note = XENP020364 [CTLA-4]_H3.13_L0.12_scFv(GKPGS)4
EVQLVESGGGLVKPGGSLRLSCAASGFTFSSYTMHWVRQAPGKGLEWVSFISYDGNHKYYADSVKGRFTISRDNAKNSLYLQMNSLRAEDTAVYYCARGGLLGPFDLWGQGTMVTVSSGKPGSGKPGSGKPGSGKPGSEIVLTQSPGTLSVSPGERATLSCRASQSVGSSYLAWYQQKPGQAPRLLIYGAFSRATGIPDRFSGSGSGTDFTLTISRLEPEDFAVYYCQQYGSSPWTFGQGTKVEIK

SEQ ID NO: 7218 - protein, 118 aa, synthetic construct
  REGION 1..118: note = Description of Artificial Sequence: Synthetic polypeptide
  REGION 1..118: note = VH of XENP020364
EVQLVESGGGLVKPGGSLRLSCAASGFTFSSYTMHWVRQAPGKGLEWVSFISYDGNHKYYADSVKGRFTISRDNAKNSLYLQMNSLRAEDTAVYYCARGGLLGPFDLWGQGTMVTVSS

SEQ ID NO: 7219 - protein, 108 aa, synthetic construct; identical to SEQ ID NO: 6193
  REGION 1..108: note = Description of Artificial Sequence: Synthetic polypeptide
  REGION 1..108: note = VL of XENP020364

SEQ ID NO: 7220 - protein, 5 aa, synthetic construct
  REGION 1..5: note = Description of Artificial Sequence: Synthetic peptide
  REGION 1..5: note = XENP020364 vhCDR1
SYTMH

SEQ ID NO: 7221 - protein, 17 aa, synthetic construct
  REGION 1..17: note = Description of Artificial Sequence: Synthetic peptide
  REGION 1..17: note = XENP020364 vhCDR2
FISYDGNHKYYADSVKG

SEQ ID NO: 7222 - protein, 9 aa, synthetic construct
  REGION 1..9: note = Description of Artificial Sequence: Synthetic peptide
  REGION 1..9: note = XENP020364 vhCDR3
GGLLGPFDL

SEQ ID NO: 7223 - protein, 12 aa, synthetic construct
  REGION 1..12: note = Description of Artificial Sequence: Synthetic peptide
  REGION 1..12: note = XENP020364 vlCDR1
RASQSVGSSYLA

SEQ ID NO: 7224 - protein, 7 aa, synthetic construct
  REGION 1..7: note = Description of Artificial Sequence: Synthetic peptide
  REGION 1..7: note = XENP020364 vlCDR2
GAFSRAT

SEQ ID NO: 7225 - protein, 9 aa, synthetic construct
  REGION 1..9: note = Description of Artificial Sequence: Synthetic peptide
  REGION 1..9: note = XENP020364 vlCDR3
QQYGSSPWT

SEQ ID NO: 7226 - protein, 246 aa, synthetic construct
  REGION 1..246: note = Description of Artificial Sequence: Synthetic polypeptide
  REGION 1..246: note = XENP020365 [CTLA-4]_H3.14_L0.12_scFv(GKPGS)4
EVQLVESGGGLVKPGGSLRLSCAASGFTFSSYTMHWVRQAPGKGLEWVSFISYDGNHKYYADSVKGRFTISRDNAKNSLYLQMNSLRAEDTAVYYCARTSLLGPFDLWGQGTMVTVSSGKPGSGKPGSGKPGSGKPGSEIVLTQSPGTLSVSPGERATLSCRASQSVGSSYLAWYQQKPGQAPRLLIYGAFSRATGIPDRFSGSGSGTDFTLTISRLEPEDFAVYYCQQYGSSPWTFGQGTKVEIK

SEQ ID NO: 7227 - protein, 118 aa, synthetic construct
  REGION 1..118: note = Description of Artificial Sequence: Synthetic polypeptide
  REGION 1..118: note = VH of XENP020365
EVQLVESGGGLVKPGGSLRLSCAASGFTFSSYTMHWVRQAPGKGLEWVSFISYDGNHKYYADSVKGRFTISRDNAKNSLYLQMNSLRAEDTAVYYCARTSLLGPFDLWGQGTMVTVSS

SEQ ID NO: 7228 - protein, 108 aa, synthetic construct; identical to SEQ ID NO: 6193
  REGION 1..108: note = Description of Artificial Sequence: Synthetic polypeptide
  REGION 1..108: note = VL of XENP020365

SEQ ID NO: 7229 - protein, 5 aa, synthetic construct
  REGION 1..5: note = Description of Artificial Sequence: Synthetic peptide
  REGION 1..5: note = XENP020365 vhCDR1
SYTMH

SEQ ID NO: 7230 - protein, 17 aa, synthetic construct
  REGION 1..17: note = Description of Artificial Sequence: Synthetic peptide
  REGION 1..17: note = XENP020365 vhCDR2
FISYDGNHKYYADSVKG

SEQ ID NO: 7231 - protein, 9 aa, synthetic construct
  REGION 1..9: note = Description of Artificial Sequence: Synthetic peptide
  REGION 1..9: note = XENP020365 vhCDR3
TSLLGPFDL

SEQ ID NO: 7232 - protein, 12 aa, synthetic construct
  REGION 1..12: note = Description of Artificial Sequence: Synthetic peptide
  REGION 1..12: note = XENP020365 vlCDR1
RASQSVGSSYLA

SEQ ID NO: 7233 - protein, 7 aa, synthetic construct
  REGION 1..7: note = Description of Artificial Sequence: Synthetic peptide
  REGION 1..7: note = XENP020365 vlCDR2
GAFSRAT

SEQ ID NO: 7234 - protein, 9 aa, synthetic construct
  REGION 1..9: note = Description of Artificial Sequence: Synthetic peptide
  REGION 1..9: note = XENP020365 vlCDR3
QQYGSSPWT

SEQ ID NO: 7235 - protein, 246 aa, synthetic construct
  REGION 1..246: note = Description of Artificial Sequence: Synthetic polypeptide
  REGION 1..246: note = XENP020366 [CTLA-4]_H3.15_L0.12_scFv(GKPGS)4
EVQLVESGGGLVKPGGSLRLSCAASGFTFSSYTMHWVRQAPGKGLEWVSFISYDGNQKYYADSVKGRFTISRDNAKNSLYLQMNSLRAEDTAVYYCARGGHLGPFDLWGQGTMVTVSSGKPGSGKPGSGKPGSGKPGSEIVLTQSPGTLSVSPGERATLSCRASQSVGSSYLAWYQQKPGQAPRLLIYGAFSRATGIPDRFSGSGSGTDFTLTISRLEPEDFAVYYCQQYGSSPWTFGQGTKVEIK

SEQ ID NO: 7236 - protein, 118 aa, synthetic construct
  REGION 1..118: note = Description of Artificial Sequence: Synthetic polypeptide
  REGION 1..118: note = VH of XENP020366
EVQLVESGGGLVKPGGSLRLSCAASGFTFSSYTMHWVRQAPGKGLEWVSFISYDGNQKYYADSVKGRFTISRDNAKNSLYLQMNSLRAEDTAVYYCARGGHLGPFDLWGQGTMVTVSS

SEQ ID NO: 7237 - protein, 108 aa, synthetic construct; identical to SEQ ID NO: 6193
  REGION 1..108: note = Description of Artificial Sequence: Synthetic polypeptide
  REGION 1..108: note = VL of XENP020366

SEQ ID NO: 7238 - protein, 5 aa, synthetic construct
  REGION 1..5: note = Description of Artificial Sequence: Synthetic peptide
  REGION 1..5: note = XENP020366 vhCDR1
SYTMH

SEQ ID NO: 7239 - protein, 17 aa, synthetic construct
  REGION 1..17: note = Description of Artificial Sequence: Synthetic peptide
  REGION 1..17: note = XENP020366 vhCDR2
FISYDGNQKYYADSVKG

SEQ ID NO: 7240 - protein, 9 aa, synthetic construct
  REGION 1..9: note = Description of Artificial Sequence: Synthetic peptide
  REGION 1..9: note = XENP020366 vhCDR3
GGHLGPFDL

SEQ ID NO: 7241 - protein, 12 aa, synthetic construct
  REGION 1..12: note = Description of Artificial Sequence: Synthetic peptide
  REGION 1..12: note = XENP020366 vlCDR1
RASQSVGSSYLA

SEQ ID NO: 7242 - protein, 7 aa, synthetic construct
  REGION 1..7: note = Description of Artificial Sequence: Synthetic peptide
  REGION 1..7: note = XENP020366 vlCDR2
GAFSRAT

SEQ ID NO: 7243 - protein, 9 aa, synthetic construct
  REGION 1..9: note = Description of Artificial Sequence: Synthetic peptide
  REGION 1..9: note = XENP020366 vlCDR3
QQYGSSPWT

SEQ ID NO: 7244 - protein, 246 aa, synthetic construct
  REGION 1..246: note = Description of Artificial Sequence: Synthetic polypeptide
  REGION 1..246: note = XENP020367 [CTLA-4]_H3.16_L0.12_scFv(GKPGS)4
EVQLVESGGGLVKPGGSLRLSCAASGFTFSSYTMHWVRQAPGKGLEWVSFISYDGNQKYYADSVKGRFTISRDNAKNSLYLQMNSLRAEDTAVYYCARTSHLGPFDLWGQGTMVTVSSGKPGSGKPGSGKPGSGKPGSEIVLTQSPGTLSVSPGERATLSCRASQSVGSSYLAWYQQKPGQAPRLLIYGAFSRATGIPDRFSGSGSGTDFTLTISRLEPEDFAVYYCQQYGSSPWTFGQGTKVEIK

SEQ ID NO: 7245 - protein, 118 aa, synthetic construct
  REGION 1..118: note = Description of Artificial Sequence: Synthetic polypeptide
  REGION 1..118: note = VH of XENP020367
EVQLVESGGGLVKPGGSLRLSCAASGFTFSSYTMHWVRQAPGKGLEWVSFISYDGNQKYYADSVKGRFTISRDNAKNSLYLQMNSLRAEDTAVYYCARTSHLGPFDLWGQGTMVTVSS

SEQ ID NO: 7246 - protein, 108 aa, synthetic construct; identical to SEQ ID NO: 6193
  REGION 1..108: note = Description of Artificial Sequence: Synthetic polypeptide
  REGION 1..108: note = VL of XENP020367

SEQ ID NO: 7247 - protein, 5 aa, synthetic construct
  REGION 1..5: note = Description of Artificial Sequence: Synthetic peptide
  REGION 1..5: note = XENP020367 vhCDR1
SYTMH

SEQ ID NO: 7248 - protein, 17 aa, synthetic construct
  REGION 1..17: note = Description of Artificial Sequence: Synthetic peptide
  REGION 1..17: note = XENP020367 vhCDR2
FISYDGNQKYYADSVKG

SEQ ID NO: 7249 - protein, 9 aa, synthetic construct
  REGION 1..9: note = Description of Artificial Sequence: Synthetic peptide
  REGION 1..9: note = XENP020367 vhCDR3
TSHLGPFDL

SEQ ID NO: 7250 - protein, 12 aa, synthetic construct
  REGION 1..12: note = Description of Artificial Sequence: Synthetic peptide
  REGION 1..12: note = XENP020367 vlCDR1
RASQSVGSSYLA

SEQ ID NO: 7251 - protein, 7 aa, synthetic construct
  REGION 1..7: note = Description of Artificial Sequence: Synthetic peptide
  REGION 1..7: note = XENP020367 vlCDR2
GAFSRAT

SEQ ID NO: 7252 - protein, 9 aa, synthetic construct
  REGION 1..9: note = Description of Artificial Sequence: Synthetic peptide
  REGION 1..9: note = XENP020367 vlCDR3
QQYGSSPWT

SEQ ID NO: 7253 - protein, 246 aa, synthetic construct
  REGION 1..246: note = Description of Artificial Sequence: Synthetic polypeptide
  REGION 1..246: note = XENP020368 [CTLA-4]_H3.17_L0.12_scFv(GKPGS)4
EVQLVESGGGLVKPGGSLRLSCAASGFTFSSYTMHWVRQAPGKGLEWVSFISYDGNQKYYADSVKGRFTISRDNAKNSLYLQMNSLRAEDTAVYYCARGGLLGPFDLWGQGTMVTVSSGKPGSGKPGSGKPGSGKPGSEIVLTQSPGTLSVSPGERATLSCRASQSVGSSYLAWYQQKPGQAPRLLIYGAFSRATGIPDRFSGSGSGTDFTLTISRLEPEDFAVYYCQQYGSSPWTFGQGTKVEIK

SEQ ID NO: 7254 - protein, 118 aa, synthetic construct
  REGION 1..118: note = Description of Artificial Sequence: Synthetic polypeptide
  REGION 1..118: note = VH of XENP020368
EVQLVESGGGLVKPGGSLRLSCAASGFTFSSYTMHWVRQAPGKGLEWVSFISYDGNQKYYADSVKGRFTISRDNAKNSLYLQMNSLRAEDTAVYYCARGGLLGPFDLWGQGTMVTVSS

SEQ ID NO: 7255 - protein, 108 aa, synthetic construct; identical to SEQ ID NO: 6193
  REGION 1..108: note = Description of Artificial Sequence: Synthetic polypeptide
  REGION 1..108: note = VL of XENP020368

SEQ ID NO: 7256 - protein, 5 aa, synthetic construct
  REGION 1..5: note = Description of Artificial Sequence: Synthetic peptide
  REGION 1..5: note = XENP020368 vhCDR1
SYTMH

SEQ ID NO: 7257 - protein, 17 aa, synthetic construct
  REGION 1..17: note = Description of Artificial Sequence: Synthetic peptide
  REGION 1..17: note = XENP020368 vhCDR2
FISYDGNQKYYADSVKG

SEQ ID NO: 7258 - protein, 9 aa, synthetic construct
  REGION 1..9: note = Description of Artificial Sequence: Synthetic peptide
  REGION 1..9: note = XENP020368 vhCDR3
GGLLGPFDL

SEQ ID NO: 7259 - protein, 12 aa, synthetic construct
  REGION 1..12: note = Description of Artificial Sequence: Synthetic peptide
  REGION 1..12: note = XENP020368 vlCDR1
RASQSVGSSYLA

SEQ ID NO: 7260 - protein, 7 aa, synthetic construct
  REGION 1..7: note = Description of Artificial Sequence: Synthetic peptide
  REGION 1..7: note = XENP020368 vlCDR2
GAFSRAT

SEQ ID NO: 7261 - protein, 9 aa, synthetic construct
  REGION 1..9: note = Description of Artificial Sequence: Synthetic peptide
  REGION 1..9: note = XENP020368 vlCDR3
QQYGSSPWT

SEQ ID NO: 7262 - protein, 246 aa, synthetic construct
  REGION 1..246: note = Description of Artificial Sequence: Synthetic polypeptide
  REGION 1..246: note = XENP020369 [CTLA-4]_H3.18_L0.12_scFv(GKPGS)4
EVQLVESGGGLVKPGGSLRLSCAASGFTFSSYTMHWVRQAPGKGLEWVSFISYDGNQKYYADSVKGRFTISRDNAKNSLYLQMNSLRAEDTAVYYCARTSLLGPFDLWGQGTMVTVSSGKPGSGKPGSGKPGSGKPGSEIVLTQSPGTLSVSPGERATLSCRASQSVGSSYLAWYQQKPGQAPRLLIYGAFSRATGIPDRFSGSGSGTDFTLTISRLEPEDFAVYYCQQYGSSPWTFGQGTKVEIK

SEQ ID NO: 7263 - protein, 118 aa, synthetic construct
  REGION 1..118: note = Description of Artificial Sequence: Synthetic polypeptide
  REGION 1..118: note = VH of XENP020369
EVQLVESGGGLVKPGGSLRLSCAASGFTFSSYTMHWVRQAPGKGLEWVSFISYDGNQKYYADSVKGRFTISRDNAKNSLYLQMNSLRAEDTAVYYCARTSLLGPFDLWGQGTMVTVSS

SEQ ID NO: 7264 - protein, 108 aa, synthetic construct; identical to SEQ ID NO: 6193
  REGION 1..108: note = Description of Artificial Sequence: Synthetic polypeptide
  REGION 1..108: note = VL of XENP020369

SEQ ID NO: 7265 - protein, 5 aa, synthetic construct
  REGION 1..5: note = Description of Artificial Sequence: Synthetic peptide
  REGION 1..5: note = XENP020369 vhCDR1
SYTMH

SEQ ID NO: 7266 - protein, 17 aa, synthetic construct
  REGION 1..17: note = Description of Artificial Sequence: Synthetic peptide
  REGION 1..17: note = XENP020369 vhCDR2
FISYDGNQKYYADSVKG

SEQ ID NO: 7267 - protein, 9 aa, synthetic construct
  REGION 1..9: note = Description of Artificial Sequence: Synthetic peptide
  REGION 1..9: note = XENP020369 vhCDR3
TSLLGPFDL

SEQ ID NO: 7268 - protein, 12 aa, synthetic construct
  REGION 1..12: note = Description of Artificial Sequence: Synthetic peptide
  REGION 1..12: note = XENP020369 vlCDR1
RASQSVGSSYLA

SEQ ID NO: 7269 - protein, 7 aa, synthetic construct
  REGION 1..7: note = Description of Artificial Sequence: Synthetic peptide
  REGION 1..7: note = XENP020369 vlCDR2
GAFSRAT

SEQ ID NO: 7270 - protein, 9 aa, synthetic construct
  REGION 1..9: note = Description of Artificial Sequence: Synthetic peptide
  REGION 1..9: note = XENP020369 vlCDR3
QQYGSSPWT

SEQ ID NO: 7271 - protein, 246 aa, synthetic construct
  REGION 1..246: note = Description of Artificial Sequence: Synthetic polypeptide
  REGION 1..246: note = XENP020370 [CTLA-4]_H3.19_L0.12_scFv(GKPGS)4
EVQLVESGGGLVKPGGSLRLSCAASGFTFSSYTMHWVRQAPGKGLEWVSFISYDGNTKYYADSVKGRFTISRDNAKNSLYLQMNSLRAEDTAVYYCARGGHLGPFDLWGQGTMVTVSSGKPGSGKPGSGKPGSGKPGSEIVLTQSPGTLSVSPGERATLSCRASQSVGSSYLAWYQQKPGQAPRLLIYGAFSRATGIPDRFSGSGSGTDFTLTISRLEPEDFAVYYCQQYGSSPWTFGQGTKVEIK

SEQ ID NO: 7272 - protein, 118 aa, synthetic construct
  REGION 1..118: note = Description of Artificial Sequence: Synthetic polypeptide
  REGION 1..118: note = VH of XENP020370
EVQLVESGGGLVKPGGSLRLSCAASGFTFSSYTMHWVRQAPGKGLEWVSFISYDGNTKYYADSVKGRFTISRDNAKNSLYLQMNSLRAEDTAVYYCARGGHLGPFDLWGQGTMVTVSS

SEQ ID NO: 7273 - protein, 108 aa, synthetic construct; identical to SEQ ID NO: 6193
  REGION 1..108: note = Description of Artificial Sequence: Synthetic polypeptide
  REGION 1..108: note = VL of XENP020370

SEQ ID NO: 7274 - protein, 5 aa, synthetic construct
  REGION 1..5: note = Description of Artificial Sequence: Synthetic peptide
  REGION 1..5: note = XENP020370 vhCDR1
SYTMH

SEQ ID NO: 7275 - protein, 17 aa, synthetic construct
  REGION 1..17: note = Description of Artificial Sequence: Synthetic peptide
  REGION 1..17: note = XENP020370 vhCDR2
FISYDGNTKYYADSVKG

SEQ ID NO: 7276 - protein, 9 aa, synthetic construct
  REGION 1..9: note = Description of Artificial Sequence: Synthetic peptide
  REGION 1..9: note = XENP020370 vhCDR3
GGHLGPFDL

SEQ ID NO: 7277 - protein, 12 aa, synthetic construct
  REGION 1..12: note = Description of Artificial Sequence: Synthetic peptide
  REGION 1..12: note = XENP020370 vlCDR1
RASQSVGSSYLA

SEQ ID NO: 7278 - protein, 7 aa, synthetic construct
  REGION 1..7: note = Description of Artificial Sequence: Synthetic peptide
  REGION 1..7: note = XENP020370 vlCDR2
GAFSRAT

SEQ ID NO: 7279 - protein, 9 aa, synthetic construct
  REGION 1..9: note = Description of Artificial Sequence: Synthetic peptide
  REGION 1..9: note = XENP020370 vlCDR3
QQYGSSPWT

SEQ ID NO: 7280 - protein, 246 aa, synthetic construct
  REGION 1..246: note = Description of Artificial Sequence: Synthetic polypeptide
  REGION 1..246: note = XENP020371 [CTLA-4]_H3.20_L0.12_scFv(GKPGS)4
EVQLVESGGGLVKPGGSLRLSCAASGFTFSSYTMHWVRQAPGKGLEWVSFISYDGNTKYYADSVKGRFTISRDNAKNSLYLQMNSLRAEDTAVYYCARTSHLGPFDLWGQGTMVTVSSGKPGSGKPGSGKPGSGKPGSEIVLTQSPGTLSVSPGERATLSCRASQSVGSSYLAWYQQKPGQAPRLLIYGAFSRATGIPDRFSGSGSGTDFTLTISRLEPEDFAVYYCQQYGSSPWTFGQGTKVEIK

SEQ ID NO: 7281 - protein, 118 aa, synthetic construct
  REGION 1..118: note = Description of Artificial Sequence: Synthetic polypeptide
  REGION 1..118: note = VH of XENP020371
EVQLVESGGGLVKPGGSLRLSCAASGFTFSSYTMHWVRQAPGKGLEWVSFISYDGNTKYYADSVKGRFTISRDNAKNSLYLQMNSLRAEDTAVYYCARTSHLGPFDLWGQGTMVTVSS

SEQ ID NO: 7282 - protein, 108 aa, synthetic construct; identical to SEQ ID NO: 6193
  REGION 1..108: note = Description of Artificial Sequence: Synthetic polypeptide
  REGION 1..108: note = VL of XENP020371

SEQ ID NO: 7283 - protein, 5 aa, synthetic construct
  REGION 1..5: note = Description of Artificial Sequence: Synthetic peptide
  REGION 1..5: note = XENP020371 vhCDR1
SYTMH

SEQ ID NO: 7284 - protein, 17 aa, synthetic construct
  REGION 1..17: note = Description of Artificial Sequence: Synthetic peptide
  REGION 1..17: note = XENP020371 vhCDR2
FISYDGNTKYYADSVKG

SEQ ID NO: 7285 - protein, 9 aa, synthetic construct
  REGION 1..9: note = Description of Artificial Sequence: Synthetic peptide
  REGION 1..9: note = XENP020371 vhCDR3
TSHLGPFDL

SEQ ID NO: 7286 - protein, 12 aa, synthetic construct
  REGION 1..12: note = Description of Artificial Sequence: Synthetic peptide
  REGION 1..12: note = XENP020371 vlCDR1
RASQSVGSSYLA

SEQ ID NO: 7287 - protein, 7 aa, synthetic construct
  REGION 1..7: note = Description of Artificial Sequence: Synthetic peptide
  REGION 1..7: note = XENP020371 vlCDR2
GAFSRAT

SEQ ID NO: 7288 - protein, 9 aa, synthetic construct
  REGION 1..9: note = Description of Artificial Sequence: Synthetic peptide
  REGION 1..9: note = XENP020371 vlCDR3
QQYGSSPWT

SEQ ID NO: 7289 - protein, 246 aa, synthetic construct
  REGION 1..246: note = Description of Artificial Sequence: Synthetic polypeptide
  REGION 1..246: note = XENP020372 [CTLA-4]_H3.21_L0.12_scFv(GKPGS)4
EVQLVESGGGLVKPGGSLRLSCAASGFTFSSYTMHWVRQAPGKGLEWVSFISYDGNTKYYADSVKGRFTISRDNAKNSLYLQMNSLRAEDTAVYYCARGGLLGPFDLWGQGTMVTVSSGKPGSGKPGSGKPGSGKPGSEIVLTQSPGTLSVSPGERATLSCRASQSVGSSYLAWYQQKPGQAPRLLIYGAFSRATGIPDRFSGSGSGTDFTLTISRLEPEDFAVYYCQQYGSSPWTFGQGTKVEIK

SEQ ID NO: 7290 - protein, 118 aa, synthetic construct
  REGION 1..118: note = Description of Artificial Sequence: Synthetic polypeptide
  REGION 1..118: note = VH of XENP020372
EVQLVESGGGLVKPGGSLRLSCAASGFTFSSYTMHWVRQAPGKGLEWVSFISYDGNTKYYADSVKGRFTISRDNAKNSLYLQMNSLRAEDTAVYYCARGGLLGPFDLWGQGTMVTVSS

SEQ ID NO: 7291 - protein, 108 aa, synthetic construct; identical to SEQ ID NO: 6193
  REGION 1..108: note = Description of Artificial Sequence: Synthetic polypeptide
  REGION 1..108: note = VL of XENP020372

SEQ ID NO: 7292 - protein, 5 aa, synthetic construct
  REGION 1..5: note = Description of Artificial Sequence: Synthetic peptide
  REGION 1..5: note = XENP020372 vhCDR1
SYTMH

SEQ ID NO: 7293 - protein, 17 aa, synthetic construct
  REGION 1..17: note = Description of Artificial Sequence: Synthetic peptide
  REGION 1..17: note = XENP020372 vhCDR2
FISYDGNTKYYADSVKG

SEQ ID NO: 7294 - protein, 9 aa, synthetic construct
  REGION 1..9: note = Description of Artificial Sequence: Synthetic peptide
  REGION 1..9: note = XENP020372 vhCDR3
GGLLGPFDL

SEQ ID NO: 7295 - protein, 12 aa, synthetic construct
  REGION 1..12: note = Description of Artificial Sequence: Synthetic peptide
  REGION 1..12: note = XENP020372 vlCDR1
RASQSVGSSYLA

SEQ ID NO: 7296 - protein, 7 aa, synthetic construct
  REGION 1..7: note = Description of Artificial Sequence: Synthetic peptide
  REGION 1..7: note = XENP020372 vlCDR2
GAFSRAT

SEQ ID NO: 7297 - protein, 9 aa, synthetic construct
  REGION 1..9: note = Description of Artificial Sequence: Synthetic peptide
  REGION 1..9: note = XENP020372 vlCDR3
QQYGSSPWT

SEQ ID NO: 7298 - protein, 246 aa, synthetic construct
  REGION 1..246: note = Description of Artificial Sequence: Synthetic polypeptide
  REGION 1..246: note = XENP020373 [CTLA-4]_H3.22_L0.12_scFv(GKPGS)4
EVQLVESGGGLVKPGGSLRLSCAASGFTFSSYTMHWVRQAPGKGLEWVSFISYDGNTKYYADSVKGRFTISRDNAKNSLYLQMNSLRAEDTAVYYCARTSLLGPFDLWGQGTMVTVSSGKPGSGKPGSGKPGSGKPGSEIVLTQSPGTLSVSPGERATLSCRASQSVGSSYLAWYQQKPGQAPRLLIYGAFSRATGIPDRFSGSGSGTDFTLTISRLEPEDFAVYYCQQYGSSPWTFGQGTKVEIK

SEQ ID NO: 7299 - protein, 118 aa, synthetic construct
  REGION 1..118: note = Description of Artificial Sequence: Synthetic polypeptide
  REGION 1..118: note = VH of XENP020373
EVQLVESGGGLVKPGGSLRLSCAASGFTFSSYTMHWVRQAPGKGLEWVSFISYDGNTKYYADSVKGRFTISRDNAKNSLYLQMNSLRAEDTAVYYCARTSLLGPFDLWGQGTMVTVSS

SEQ ID NO: 7300 - protein, 108 aa, synthetic construct; identical to SEQ ID NO: 6193
  REGION 1..108: note = Description of Artificial Sequence: Synthetic polypeptide
  REGION 1..108: note = VL of XENP020373

SEQ ID NO: 7301 - protein, 5 aa, synthetic construct
  REGION 1..5: note = Description of Artificial Sequence: Synthetic peptide
  REGION 1..5: note = XENP020373 vhCDR1
SYTMH

SEQ ID NO: 7302 - protein, 17 aa, synthetic construct
  REGION 1..17: note = Description of Artificial Sequence: Synthetic peptide
  REGION 1..17: note = XENP020373 vhCDR2
FISYDGNTKYYADSVKG

SEQ ID NO: 7303 - protein, 9 aa, synthetic construct
  REGION 1..9: note = Description of Artificial Sequence: Synthetic peptide
  REGION 1..9: note = XENP020373 vhCDR3
TSLLGPFDL

SEQ ID NO: 7304 - protein, 12 aa, synthetic construct
  REGION 1..12: note = Description of Artificial Sequence: Synthetic peptide
  REGION 1..12: note = XENP020373 vlCDR1
RASQSVGSSYLA

SEQ ID NO: 7305 - protein, 7 aa, synthetic construct
  REGION 1..7: note = Description of Artificial Sequence: Synthetic peptide
  REGION 1..7: note = XENP020373 vlCDR2
GAFSRAT

SEQ ID NO: 7306 - protein, 9 aa, synthetic construct
  REGION 1..9: note = Description of Artificial Sequence: Synthetic peptide
  REGION 1..9: note = XENP020373 vlCDR3
QQYGSSPWT

SEQ ID NO: 7307 - protein, 246 aa, synthetic construct
  REGION 1..246: note = Description of Artificial Sequence: Synthetic polypeptide
  REGION 1..246: note = XENP020374 [CTLA-4]_H3.23_L0.12_scFv(GKPGS)4
EVQLVESGGGLVKPGGSLRLSCAASGFTFSSYTMHWVRQAPGKGLEWVSFISYDGNYKYYADSVKGRFTISRDNAKNSLYLQMNSLRAEDTAVYYCARGGHLGPFDLWGQGTMVTVSSGKPGSGKPGSGKPGSGKPGSEIVLTQSPGTLSVSPGERATLSCRASQSVGSSYLAWYQQKPGQAPRLLIYGAFSRATGIPDRFSGSGSGTDFTLTISRLEPEDFAVYYCQQYGSSPWTFGQGTKVEIK

SEQ ID NO: 7308 - protein, 118 aa, synthetic construct; identical to SEQ ID NO: 2395
  REGION 1..118: note = Description of Artificial Sequence: Synthetic polypeptide
  REGION 1..118: note = VH of XENP020374

SEQ ID NO: 7309 - protein, 108 aa, synthetic construct; identical to SEQ ID NO: 6193
  REGION 1..108: note = Description of Artificial Sequence: Synthetic polypeptide
  REGION 1..108: note = VL of XENP020374

SEQ ID NO: 7310 - protein, 5 aa, synthetic construct
  REGION 1..5: note = Description of Artificial Sequence: Synthetic peptide
  REGION 1..5: note = XENP020374 vhCDR1
SYTMH

SEQ ID NO: 7311 - protein, 17 aa, synthetic construct
  REGION 1..17: note = Description of Artificial Sequence: Synthetic peptide
  REGION 1..17: note = XENP020374 vhCDR2
FISYDGNYKYYADSVKG

SEQ ID NO: 7312 - protein, 9 aa, synthetic construct
  REGION 1..9: note = Description of Artificial Sequence: Synthetic peptide
  REGION 1..9: note = XENP020374 vhCDR3
GGHLGPFDL

SEQ ID NO: 7313 - protein, 12 aa, synthetic construct
  REGION 1..12: note = Description of Artificial Sequence: Synthetic peptide
  REGION 1..12: note = XENP020374 vlCDR1
RASQSVGSSYLA

SEQ ID NO: 7314 - protein, 7 aa, synthetic construct
  REGION 1..7: note = Description of Artificial Sequence: Synthetic peptide
  REGION 1..7: note = XENP020374 vlCDR2
GAFSRAT

SEQ ID NO: 7315 - protein, 9 aa, synthetic construct
  REGION 1..9: note = Description of Artificial Sequence: Synthetic peptide
  REGION 1..9: note = XENP020374 vlCDR3
QQYGSSPWT

SEQ ID NO: 7316 - protein, 246 aa, synthetic construct
  REGION 1..246: note = Description of Artificial Sequence: Synthetic polypeptide
  REGION 1..246: note = XENP020375 [CTLA-4]_H3.24_L0.12_scFv(GKPGS)4
EVQLVESGGGLVKPGGSLRLSCAASGFTFSSYTMHWVRQAPGKGLEWVSFISYDGNYKYYADSVKGRFTISRDNAKNSLYLQMNSLRAEDTAVYYCARTSHLGPFDLWGQGTMVTVSSGKPGSGKPGSGKPGSGKPGSEIVLTQSPGTLSVSPGERATLSCRASQSVGSSYLAWYQQKPGQAPRLLIYGAFSRATGIPDRFSGSGSGTDFTLTISRLEPEDFAVYYCQQYGSSPWTFGQGTKVEIK

SEQ ID NO: 7317 - protein, 118 aa, synthetic construct
  REGION 1..118: note = Description of Artificial Sequence: Synthetic polypeptide
  REGION 1..118: note = VH of XENP020375
EVQLVESGGGLVKPGGSLRLSCAASGFTFSSYTMHWVRQAPGKGLEWVSFISYDGNYKYYADSVKGRFTISRDNAKNSLYLQMNSLRAEDTAVYYCARTSHLGPFDLWGQGTMVTVSS

SEQ ID NO: 7318 - protein, 108 aa, synthetic construct; identical to SEQ ID NO: 6193
  REGION 1..108: note = Description of Artificial Sequence: Synthetic polypeptide
  REGION 1..108: note = VL of XENP020375

SEQ ID NO: 7319 - protein, 5 aa, synthetic construct
  REGION 1..5: note = Description of Artificial Sequence: Synthetic peptide
  REGION 1..5: note = XENP020375 vhCDR1
SYTMH

SEQ ID NO: 7320 - protein, 17 aa, synthetic construct
  REGION 1..17: note = Description of Artificial Sequence: Synthetic peptide
  REGION 1..17: note = XENP020375 vhCDR2
FISYDGNYKYYADSVKG

SEQ ID NO: 7321 - protein, 9 aa, synthetic construct
  REGION 1..9: note = Description of Artificial Sequence: Synthetic peptide
  REGION 1..9: note = XENP020375 vhCDR3
TSHLGPFDL

SEQ ID NO: 7322 - protein, 12 aa, synthetic construct
  REGION 1..12: note = Description of Artificial Sequence: Synthetic peptide
  REGION 1..12: note = XENP020375 vlCDR1
RASQSVGSSYLA

SEQ ID NO: 7323 - protein, 7 aa, synthetic construct
  REGION 1..7: note = Description of Artificial Sequence: Synthetic peptide
  REGION 1..7: note = XENP020375 vlCDR2
GAFSRAT

SEQ ID NO: 7324 - protein, 9 aa, synthetic construct
  REGION 1..9: note = Description of Artificial Sequence: Synthetic peptide
  REGION 1..9: note = XENP020375 vlCDR3
QQYGSSPWT

SEQ ID NO: 7325 - protein, 246 aa, synthetic construct
  REGION 1..246: note = Description of Artificial Sequence: Synthetic polypeptide
  REGION 1..246: note = XENP020376 [CTLA-4]_H3.25_L0.12_scFv(GKPGS)4
EVQLVESGGGLVKPGGSLRLSCAASGFTFSSYTMHWVRQAPGKGLEWVSFISYDGNYKYYADSVKGRFTISRDNAKNSLYLQMNSLRAEDTAVYYCARGGLLGPFDLWGQGTMVTVSSGKPGSGKPGSGKPGSGKPGSEIVLTQSPGTLSVSPGERATLSCRASQSVGSSYLAWYQQKPGQAPRLLIYGAFSRATGIPDRFSGSGSGTDFTLTISRLEPEDFAVYYCQQYGSSPWTFGQGTKVEIK

SEQ ID NO: 7326 - protein, 118 aa, synthetic construct
  REGION 1..118: note = Description of Artificial Sequence: Synthetic polypeptide
  REGION 1..118: note = VH of XENP020376
EVQLVESGGGLVKPGGSLRLSCAASGFTFSSYTMHWVRQAPGKGLEWVSFISYDGNYKYYADSVKGRFTISRDNAKNSLYLQMNSLRAEDTAVYYCARGGLLGPFDLWGQGTMVTVSS

SEQ ID NO: 7327 - protein, 108 aa, synthetic construct; identical to SEQ ID NO: 6193
  REGION 1..108: note = Description of Artificial Sequence: Synthetic polypeptide
  REGION 1..108: note = VL of XENP020376

SEQ ID NO: 7328 - protein, 5 aa, synthetic construct
  REGION 1..5: note = Description of Artificial Sequence: Synthetic peptide
  REGION 1..5: note = XENP020376 vhCDR1
SYTMH

SEQ ID NO: 7329 - protein, 17 aa, synthetic construct
  REGION 1..17: note = Description of Artificial Sequence: Synthetic peptide
  REGION 1..17: note = XENP020376 vhCDR2
FISYDGNYKYYADSVKG

SEQ ID NO: 7330 - protein, 9 aa, synthetic construct
  REGION 1..9: note = Description of Artificial Sequence: Synthetic peptide
  REGION 1..9: note = XENP020376 vhCDR3
GGLLGPFDL

SEQ ID NO: 7331 - protein, 12 aa, synthetic construct
  REGION 1..12: note = Description of Artificial Sequence: Synthetic peptide
  REGION 1..12: note = XENP020376 vlCDR1
RASQSVGSSYLA

SEQ ID NO: 7332 - protein, 7 aa, synthetic construct
  REGION 1..7: note = Description of Artificial Sequence: Synthetic peptide
  REGION 1..7: note = XENP020376 vlCDR2
GAFSRAT

SEQ ID NO: 7333 - protein, 9 aa, synthetic construct
  REGION 1..9: note = Description of Artificial Sequence: Synthetic peptide
  REGION 1..9: note = XENP020376 vlCDR3
QQYGSSPWT

SEQ ID NO: 7334 - protein, 246 aa, synthetic construct
  REGION 1..246: note = Description of Artificial Sequence: Synthetic polypeptide
  REGION 1..246: note = XENP020377 [CTLA-4]_H3.26_L0.12_scFv(GKPGS)4
EVQLVESGGGLVKPGGSLRLSCAASGFTFSSYTMHWVRQAPGKGLEWVSFISYDGNYKYYADSVKGRFTISRDNAKNSLYLQMNSLRAEDTAVYYCARTSLLGPFDLWGQGTMVTVSSGKPGSGKPGSGKPGSGKPGSEIVLTQSPGTLSVSPGERATLSCRASQSVGSSYLAWYQQKPGQAPRLLIYGAFSRATGIPDRFSGSGSGTDFTLTISRLEPEDFAVYYCQQYGSSPWTFGQGTKVEIK

SEQ ID NO: 7335 - protein, 118 aa, synthetic construct
  REGION 1..118: note = Description of Artificial Sequence: Synthetic polypeptide
  REGION 1..118: note = VH of XENP020377
EVQLVESGGGLVKPGGSLRLSCAASGFTFSSYTMHWVRQAPGKGLEWVSFISYDGNYKYYADSVKGRFTISRDNAKNSLYLQMNSLRAEDTAVYYCARTSLLGPFDLWGQGTMVTVSS

SEQ ID NO: 7336 - protein, 108 aa, synthetic construct; identical to SEQ ID NO: 6193
  REGION 1..108: note = Description of Artificial Sequence: Synthetic polypeptide
  REGION 1..108: note = VL of XENP020377

SEQ ID NO: 7337 - protein, 5 aa, synthetic construct
  REGION 1..5: note = Description of Artificial Sequence: Synthetic peptide
  REGION 1..5: note = XENP020377 vhCDR1
SYTMH

SEQ ID NO: 7338 - protein, 17 aa, synthetic construct
  REGION 1..17: note = Description of Artificial Sequence: Synthetic peptide
  REGION 1..17: note = XENP020377 vhCDR2
FISYDGNYKYYADSVKG

SEQ ID NO: 7339 - protein, 9 aa, synthetic construct
  REGION 1..9: note = Description of Artificial Sequence: Synthetic peptide
  REGION 1..9: note = XENP020377 vhCDR3
TSLLGPFDL

SEQ ID NO: 7340 - protein, 12 aa, synthetic construct
  REGION 1..12: note = Description of Artificial Sequence: Synthetic peptide
  REGION 1..12: note = XENP020377 vlCDR1
RASQSVGSSYLA

SEQ ID NO: 7341 - protein, 7 aa, synthetic construct
  REGION 1..7: note = Description of Artificial Sequence: Synthetic peptide
  REGION 1..7: note = XENP020377 vlCDR2
GAFSRAT

SEQ ID NO: 7342 - protein, 9 aa, synthetic construct
  REGION 1..9: note = Description of Artificial Sequence: Synthetic peptide
  REGION 1..9: note = XENP020377 vlCDR3
QQYGSSPWT

SEQ ID NO: 7343 - protein, 246 aa, synthetic construct
  REGION 1..246: note = Description of Artificial Sequence: Synthetic polypeptide
  REGION 1..246: note = XENP020378 [CTLA-4]_H3.4_L0.118_scFv(GKPGS)4
EVQLVESGGGLVKPGGSLRLSCAASGFTFSSYTMHWVRQAPGKGLEWVSFISYDGNHKYYADSVKGRFTISRDNAKNSLYLQMNSLRAEDTAVYYCARTGHLGPFDLWGQGTMVTVSSGKPGSGKPGSGKPGSGKPGSEIVLTQSPATLSVSPGERATLSCRASQSVGSSYLAWYQQKPGQAPRLLIYGAFSRATGIPDRFSGSGSGTDFTLTISRLEPEDFAVYYCQQYGSSPWTFGQGTKVEIK

SEQ ID NO: 7344 - protein, 118 aa, synthetic construct; identical to SEQ ID NO: 7137
  REGION 1..118: note = Description of Artificial Sequence: Synthetic polypeptide
  REGION 1..118: note = VH of XENP020378

SEQ ID NO: 7345 - protein, 108 aa, synthetic construct
  REGION 1..108: note = Description of Artificial Sequence: Synthetic polypeptide
  REGION 1..108: note = VL of XENP020378
EIVLTQSPATLSVSPGERATLSCRASQSVGSSYLAWYQQKPGQAPRLLIYGAFSRATGIPDRFSGSGSGTDFTLTISRLEPEDFAVYYCQQYGSSPWTFGQGTKVEIK

SEQ ID NO: 7346 - protein, 5 aa, synthetic construct
  REGION 1..5: note = Description of Artificial Sequence: Synthetic peptide
  REGION 1..5: note = XENP020378 vhCDR1
SYTMH

SEQ ID NO: 7347 - protein, 17 aa, synthetic construct
  REGION 1..17: note = Description of Artificial Sequence: Synthetic peptide
  REGION 1..17: note = XENP020378 vhCDR2
FISYDGNHKYYADSVKG

SEQ ID NO: 7348 - protein, 9 aa, synthetic construct
  REGION 1..9: note = Description of Artificial Sequence: Synthetic peptide
  REGION 1..9: note = XENP020378 vhCDR3
TGHLGPFDL

SEQ ID NO: 7349 - protein, 12 aa, synthetic construct
  REGION 1..12: note = Description of Artificial Sequence: Synthetic peptide
  REGION 1..12: note = XENP020378 vlCDR1
RASQSVGSSYLA

SEQ ID NO: 7350 - protein, 7 aa, synthetic construct
  REGION 1..7: note = Description of Artificial Sequence: Synthetic peptide
  REGION 1..7: note = XENP020378 vlCDR2
GAFSRAT

SEQ ID NO: 7351 - protein, 9 aa, synthetic construct
  REGION 1..9: note = Description of Artificial Sequence: Synthetic peptide
  REGION 1..9: note = XENP020378 vlCDR3
QQYGSSPWT

SEQ ID NO: 7352 - protein, 246 aa, synthetic construct
  REGION 1..246: note = Description of Artificial Sequence: Synthetic polypeptide
  REGION 1..246: note = XENP020379 [CTLA-4]_H3.4_L0.119_scFv(GKPGS)4
EVQLVESGGGLVKPGGSLRLSCAASGFTFSSYTMHWVRQAPGKGLEWVSFISYDGNHKYYADSVKGRFTISRDNAKNSLYLQMNSLRAEDTAVYYCARTGHLGPFDLWGQGTMVTVSSGKPGSGKPGSGKPGSGKPGSEIVLTQSPGTLSLSPGERATLSCRASQSVGSSYLAWYQQKPGQAPRLLIYGAFSRATGIPDRFSGSGSGTDFTLTISRLEPEDFAVYYCQQYGSSPWTFGQGTKVEIK

SEQ ID NO: 7353 - protein, 118 aa, synthetic construct; identical to SEQ ID NO: 7137
  REGION 1..118: note = Description of Artificial Sequence: Synthetic polypeptide
  REGION 1..118: note = VH of XENP020379

SEQ ID NO: 7354 - protein, 108 aa, synthetic construct; identical to SEQ ID NO: 3741
  REGION 1..108: note = Description of Artificial Sequence: Synthetic polypeptide
  REGION 1..108: note = VL of XENP020379

SEQ ID NO: 7355 - protein, 5 aa, synthetic construct
  REGION 1..5: note = Description of Artificial Sequence: Synthetic peptide
  REGION 1..5: note = XENP020379 vhCDR1
SYTMH

SEQ ID NO: 7356 - protein, 17 aa, synthetic construct
  REGION 1..17: note = Description of Artificial Sequence: Synthetic peptide
  REGION 1..17: note = XENP020379 vhCDR2
FISYDGNHKYYADSVKG

SEQ ID NO: 7357 - protein, 9 aa, synthetic construct
  REGION 1..9: note = Description of Artificial Sequence: Synthetic peptide
  REGION 1..9: note = XENP020379 vhCDR3
TGHLGPFDL

SEQ ID NO: 7358 - protein, 12 aa, synthetic construct
  REGION 1..12: note = Description of Artificial Sequence: Synthetic peptide
  REGION 1..12: note = XENP020379 vlCDR1
RASQSVGSSYLA

SEQ ID NO: 7359 - protein, 7 aa, synthetic construct
  REGION 1..7: note = Description of Artificial Sequence: Synthetic peptide
  REGION 1..7: note = XENP020379 vlCDR2
GAFSRAT

SEQ ID NO: 7360 - protein, 9 aa, synthetic construct
  REGION 1..9: note = Description of Artificial Sequence: Synthetic peptide
  REGION 1..9: note = XENP020379 vlCDR3
QQYGSSPWT

SEQ ID NO: 7361 - protein, 246 aa, synthetic construct
  REGION 1..246: note = Description of Artificial Sequence: Synthetic polypeptide
  REGION 1..246: note = XENP020380 [CTLA-4]_H3.4_L0.120_scFv(GKPGS)4
EVQLVESGGGLVKPGGSLRLSCAASGFTFSSYTMHWVRQAPGKGLEWVSFISYDGNHKYYADSVKGRFTISRDNAKNSLYLQMNSLRAEDTAVYYCARTGHLGPFDLWGQGTMVTVSSGKPGSGKPGSGKPGSGKPGSEIVLTQSPGTLSVSPGERATLSCRASQSVSSSYLAWYQQKPGQAPRLLIYGAFSRATGIPDRFSGSGSGTDFTLTISRLEPEDFAVYYCQQYGSSPWTFGQGTKVEIK

SEQ ID NO: 7362 - protein, 118 aa, synthetic construct; identical to SEQ ID NO: 7137
  REGION 1..118: note = Description of Artificial Sequence: Synthetic polypeptide
  REGION 1..118: note = VH of XENP020380

SEQ ID NO: 7363 - protein, 108 aa, synthetic construct
  REGION 1..108: note = Description of Artificial Sequence: Synthetic polypeptide
  REGION 1..108: note = VL of XENP020380
EIVLTQSPGTLSVSPGERATLSCRASQSVSSSYLAWYQQKPGQAPRLLIYGAFSRATGIPDRFSGSGSGTDFTLTISRLEPEDFAVYYCQQYGSSPWTFGQGTKVEIK

SEQ ID NO: 7364 - protein, 5 aa, synthetic construct
  REGION 1..5: note = Description of Artificial Sequence: Synthetic peptide
  REGION 1..5: note = XENP020380 vhCDR1
SYTMH

SEQ ID NO: 7365 - protein, 17 aa, synthetic construct
  REGION 1..17: note = Description of Artificial Sequence: Synthetic peptide
  REGION 1..17: note = XENP020380 vhCDR2
FISYDGNHKYYADSVKG

SEQ ID NO: 7366 - protein, 9 aa, synthetic construct
  REGION 1..9: note = Description of Artificial Sequence: Synthetic peptide
  REGION 1..9: note = XENP020380 vhCDR3
TGHLGPFDL

SEQ ID NO: 7367 - protein, 12 aa, synthetic construct
  REGION 1..12: note = Description of Artificial Sequence: Synthetic peptide
  REGION 1..12: note = XENP020380 vlCDR1
RASQSVSSSYLA

SEQ ID NO: 7368 - protein, 7 aa, synthetic construct
  REGION 1..7: note = Description of Artificial Sequence: Synthetic peptide
  REGION 1..7: note = XENP020380 vlCDR2
GAFSRAT

SEQ ID NO: 7369 - protein, 9 aa, synthetic construct
  REGION 1..9: note = Description of Artificial Sequence: Synthetic peptide
  REGION 1..9: note = XENP020380 vlCDR3
QQYGSSPWT

SEQ ID NO: 7370 - protein, 246 aa, synthetic construct
  REGION 1..246: note = Description of Artificial Sequence: Synthetic polypeptide
  REGION 1..246: note = XENP020381 [CTLA-4]_H3.4_L0.121_scFv(GKPGS)4
EVQLVESGGGLVKPGGSLRLSCAASGFTFSSYTMHWVRQAPGKGLEWVSFISYDGNHKYYADSVKGRFTISRDNAKNSLYLQMNSLRAEDTAVYYCARTGHLGPFDLWGQGTMVTVSSGKPGSGKPGSGKPGSGKPGSEIVLTQSPGTLSVSPGERATLSCRASQSVGSSYLAWYQQKPGQAPRLLIYGASSRATGIPDRFSGSGSGTDFTLTISRLEPEDFAVYYCQQYGSSPWTFGQGTKVEIK

SEQ ID NO: 7371 - protein, 118 aa, synthetic construct; identical to SEQ ID NO: 7137
  REGION 1..118: note = Description of Artificial Sequence: Synthetic polypeptide
  REGION 1..118: note = VH of XENP020381

SEQ ID NO: 7372 - protein, 108 aa, synthetic construct
  REGION 1..108: note = Description of Artificial Sequence: Synthetic polypeptide
  REGION 1..108: note = VL of XENP020381
EIVLTQSPGTLSVSPGERATLSCRASQSVGSSYLAWYQQKPGQAPRLLIYGASSRATGIPDRFSGSGSGTDFTLTISRLEPEDFAVYYCQQYGSSPWTFGQGTKVEIK

SEQ ID NO: 7373 - protein, 5 aa, synthetic construct
  REGION 1..5: note = Description of Artificial Sequence: Synthetic peptide
  REGION 1..5: note = XENP020381 vhCDR1
SYTMH

SEQ ID NO: 7374 - protein, 17 aa, synthetic construct
  REGION 1..17: note = Description of Artificial Sequence: Synthetic peptide
  REGION 1..17: note = XENP020381 vhCDR2
FISYDGNHKYYADSVKG

SEQ ID NO: 7375 - protein, 9 aa, synthetic construct
  REGION 1..9: note = Description of Artificial Sequence: Synthetic peptide
  REGION 1..9: note = XENP020381 vhCDR3
TGHLGPFDL

SEQ ID NO: 7376 - protein, 12 aa, synthetic construct
  REGION 1..12: note = Description of Artificial Sequence: Synthetic peptide
  REGION 1..12: note = XENP020381 vlCDR1
RASQSVGSSYLA

SEQ ID NO: 7377 - protein, 7 aa, synthetic construct
  REGION 1..7: note = Description of Artificial Sequence: Synthetic peptide
  REGION 1..7: note = XENP020381 vlCDR2
GASSRAT

SEQ ID NO: 7378 - protein, 9 aa, synthetic construct
  REGION 1..9: note = Description of Artificial Sequence: Synthetic peptide
  REGION 1..9: note = XENP020381 vlCDR3
QQYGSSPWT

SEQ ID NO: 7379 - protein, 246 aa, synthetic construct
  REGION 1..246: note = Description of Artificial Sequence: Synthetic polypeptide
  REGION 1..246: note = XENP020382 [CTLA-4]_H3.4_L0.122_scFv(GKPGS)4
EVQLVESGGGLVKPGGSLRLSCAASGFTFSSYTMHWVRQAPGKGLEWVSFISYDGNHKYYADSVKGRFTISRDNAKNSLYLQMNSLRAEDTAVYYCARTGHLGPFDLWGQGTMVTVSSGKPGSGKPGSGKPGSGKPGSEIVLTQSPATLSLSPGERATLSCRASQSVGSSYLAWYQQKPGQAPRLLIYGAFSRATGIPDRFSGSGSGTDFTLTISRLEPEDFAVYYCQQYGSSPWTFGQGTKVEIK

SEQ ID NO: 7380 - protein, 118 aa, synthetic construct; identical to SEQ ID NO: 7137
  REGION 1..118: note = Description of Artificial Sequence: Synthetic polypeptide
  REGION 1..118: note = VH of XENP020382

SEQ ID NO: 7381 - protein, 108 aa, synthetic construct; identical to SEQ ID NO: 6157
  REGION 1..108: note = Description of Artificial Sequence: Synthetic polypeptide
  REGION 1..108: note = VL of XENP020382

SEQ ID NO: 7382 - protein, 5 aa, synthetic construct
  REGION 1..5: note = Description of Artificial Sequence: Synthetic peptide
  REGION 1..5: note = XENP020382 vhCDR1
SYTMH

SEQ ID NO: 7383 - protein, 17 aa, synthetic construct
  REGION 1..17: note = Description of Artificial Sequence: Synthetic peptide
  REGION 1..17: note = XENP020382 vhCDR2
FISYDGNHKYYADSVKG

SEQ ID NO: 7384 - protein, 9 aa, synthetic construct
  REGION 1..9: note = Description of Artificial Sequence: Synthetic peptide
  REGION 1..9: note = XENP020382 vhCDR3
TGHLGPFDL

SEQ ID NO: 7385 - protein, 12 aa, synthetic construct
  REGION 1..12: note = Description of Artificial Sequence: Synthetic peptide
  REGION 1..12: note = XENP020382 vlCDR1
RASQSVGSSYLA

SEQ ID NO: 7386 - protein, 7 aa, synthetic construct
  REGION 1..7: note = Description of Artificial Sequence: Synthetic peptide
  REGION 1..7: note = XENP020382 vlCDR2
GAFSRAT

SEQ ID NO: 7387 - protein, 9 aa, synthetic construct
  REGION 1..9: note = Description of Artificial Sequence: Synthetic peptide
  REGION 1..9: note = XENP020382 vlCDR3
QQYGSSPWT

SEQ ID NO: 7388 - protein, 246 aa, synthetic construct
  REGION 1..246: note = Description of Artificial Sequence: Synthetic polypeptide
  REGION 1..246: note = XENP020383 [CTLA-4]_H3.4_L0.123_scFv(GKPGS)4
EVQLVESGGGLVKPGGSLRLSCAASGFTFSSYTMHWVRQAPGKGLEWVSFISYDGNHKYYADSVKGRFTISRDNAKNSLYLQMNSLRAEDTAVYYCARTGHLGPFDLWGQGTMVTVSSGKPGSGKPGSGKPGSGKPGSEIVLTQSPATLSVSPGERATLSCRASQSVSSSYLAWYQQKPGQAPRLLIYGAFSRATGIPDRFSGSGSGTDFTLTISRLEPEDFAVYYCQQYGSSPWTFGQGTKVEIK

SEQ ID NO: 7389 - protein, 118 aa, synthetic construct; identical to SEQ ID NO: 7137
  REGION 1..118: note = Description of Artificial Sequence: Synthetic polypeptide
  REGION 1..118: note = VH of XENP020383

SEQ ID NO: 7390 - protein, 108 aa, synthetic construct
  REGION 1..108: note = Description of Artificial Sequence: Synthetic polypeptide
  REGION 1..108: note = VL of XENP020383
EIVLTQSPATLSVSPGERATLSCRASQSVSSSYLAWYQQKPGQAPRLLIYGAFSRATGIPDRFSGSGSGTDFTLTISRLEPEDFAVYYCQQYGSSPWTFGQGTKVEIK

SEQ ID NO: 7391 - protein, 5 aa, synthetic construct
  REGION 1..5: note = Description of Artificial Sequence: Synthetic peptide
  REGION 1..5: note = XENP020383 vhCDR1
SYTMH

SEQ ID NO: 7392 - protein, 17 aa, synthetic construct
  REGION 1..17: note = Description of Artificial Sequence: Synthetic peptide
  REGION 1..17: note = XENP020383 vhCDR2
FISYDGNHKYYADSVKG

SEQ ID NO: 7393 - protein, 9 aa, synthetic construct
  REGION 1..9: note = Description of Artificial Sequence: Synthetic peptide
  REGION 1..9: note = XENP020383 vhCDR3
TGHLGPFDL

SEQ ID NO: 7394 - protein, 12 aa, synthetic construct
  REGION 1..12: note = Description of Artificial Sequence: Synthetic peptide
  REGION 1..12: note = XENP020383 vlCDR1
RASQSVSSSYLA

SEQ ID NO: 7395 - protein, 7 aa, synthetic construct
  REGION 1..7: note = Description of Artificial Sequence: Synthetic peptide
  REGION 1..7: note = XENP020383 vlCDR2
GAFSRAT

SEQ ID NO: 7396 - protein, 9 aa, synthetic construct
  REGION 1..9: note = Description of Artificial Sequence: Synthetic peptide
  REGION 1..9: note = XENP020383 vlCDR3
QQYGSSPWT

SEQ ID NO: 7397 - protein, 246 aa, synthetic construct
  REGION 1..246: note = Description of Artificial Sequence: Synthetic polypeptide
  REGION 1..246: note = XENP020384 [CTLA-4]_H3.4_L0.124_scFv(GKPGS)4
EVQLVESGGGLVKPGGSLRLSCAASGFTFSSYTMHWVRQAPGKGLEWVSFISYDGNHKYYADSVKGRFTISRDNAKNSLYLQMNSLRAEDTAVYYCARTGHLGPFDLWGQGTMVTVSSGKPGSGKPGSGKPGSGKPGSEIVLTQSPATLSVSPGERATLSCRASQSVGSSYLAWYQQKPGQAPRLLIYGASSRATGIPDRFSGSGSGTDFTLTISRLEPEDFAVYYCQQYGSSPWTFGQGTKVEIK

SEQ ID NO: 7398 - protein, 118 aa, synthetic construct; identical to SEQ ID NO: 7137
  REGION 1..118: note = Description of Artificial Sequence: Synthetic polypeptide
  REGION 1..118: note = VH of XENP020384

SEQ ID NO: 7399 - protein, 108 aa, synthetic construct
  REGION 1..108: note = Description of Artificial Sequence: Synthetic polypeptide
  REGION 1..108: note = VL of XENP020384
EIVLTQSPATLSVSPGERATLSCRASQSVGSSYLAWYQQKPGQAPRLLIYGASSRATGIPDRFSGSGSGTDFTLTISRLEPEDFAVYYCQQYGSSPWTFGQGTKVEIK

SEQ ID NO: 7400 - protein, 5 aa, synthetic construct
  REGION 1..5: note = Description of Artificial Sequence: Synthetic peptide
  REGION 1..5: note = XENP020384 vhCDR1
SYTMH

SEQ ID NO: 7401 - protein, 17 aa, synthetic construct
  REGION 1..17: note = Description of Artificial Sequence: Synthetic peptide
  REGION 1..17: note = XENP020384 vhCDR2
FISYDGNHKYYADSVKG

SEQ ID NO: 7402 - protein, 9 aa, synthetic construct
  REGION 1..9: note = Description of Artificial Sequence: Synthetic peptide
  REGION 1..9: note = XENP020384 vhCDR3
TGHLGPFDL

SEQ ID NO: 7403 - protein, 12 aa, synthetic construct
  REGION 1..12: note = Description of Artificial Sequence: Synthetic peptide
  REGION 1..12: note = XENP020384 vlCDR1
RASQSVGSSYLA

SEQ ID NO: 7404 - protein, 7 aa, synthetic construct
  REGION 1..7: note = Description of Artificial Sequence: Synthetic peptide
  REGION 1..7: note = XENP020384 vlCDR2
GASSRAT

SEQ ID NO: 7405 - protein, 9 aa, synthetic construct
  REGION 1..9: note = Description of Artificial Sequence: Synthetic peptide
  REGION 1..9: note = XENP020384 vlCDR3
QQYGSSPWT

SEQ ID NO: 7406 - protein, 246 aa, synthetic construct
  REGION 1..246: note = Description of Artificial Sequence: Synthetic polypeptide
  REGION 1..246: note = XENP020385 [CTLA-4]_H3.4_L0.125_scFv(GKPGS)4
EVQLVESGGGLVKPGGSLRLSCAASGFTFSSYTMHWVRQAPGKGLEWVSFISYDGNHKYYADSVKGRFTISRDNAKNSLYLQMNSLRAEDTAVYYCARTGHLGPFDLWGQGTMVTVSSGKPGSGKPGSGKPGSGKPGSEIVLTQSPGTLSLSPGERATLSCRASQSVSSSYLAWYQQKPGQAPRLLIYGAFSRATGIPDRFSGSGSGTDFTLTISRLEPEDFAVYYCQQYGSSPWTFGQGTKVEIK

SEQ ID NO: 7407 - protein, 118 aa, synthetic construct; identical to SEQ ID NO: 7137
  REGION 1..118: note = Description of Artificial Sequence: Synthetic polypeptide
  REGION 1..118: note = VH of XENP020385

SEQ ID NO: 7408 - protein, 108 aa, synthetic construct; identical to SEQ ID NO: 2411
  REGION 1..108: note = Description of Artificial Sequence: Synthetic polypeptide
  REGION 1..108: note = VL of XENP020385

SEQ ID NO: 7409 - protein, 5 aa, synthetic construct
  REGION 1..5: note = Description of Artificial Sequence: Synthetic peptide
  REGION 1..5: note = XENP020385 vhCDR1
SYTMH

SEQ ID NO: 7410 - protein, 17 aa, synthetic construct
  REGION 1..17: note = Description of Artificial Sequence: Synthetic peptide
  REGION 1..17: note = XENP020385 vhCDR2
FISYDGNHKYYADSVKG

SEQ ID NO: 7411 - protein, 9 aa, synthetic construct
  REGION 1..9: note = Description of Artificial Sequence: Synthetic peptide
  REGION 1..9: note = XENP020385 vhCDR3
TGHLGPFDL

SEQ ID NO: 7412 - protein, 12 aa, synthetic construct
  REGION 1..12: note = Description of Artificial Sequence: Synthetic peptide
  REGION 1..12: note = XENP020385 vlCDR1
RASQSVSSSYLA

SEQ ID NO: 7413 - protein, 7 aa, synthetic construct
  REGION 1..7: note = Description of Artificial Sequence: Synthetic peptide
  REGION 1..7: note = XENP020385 vlCDR2
GAFSRAT

SEQ ID NO: 7414 - protein, 9 aa, synthetic construct
  REGION 1..9: note = Description of Artificial Sequence: Synthetic peptide
  REGION 1..9: note = XENP020385 vlCDR3
QQYGSSPWT

SEQ ID NO: 7415 - protein, 246 aa, synthetic construct
  REGION 1..246: note = Description of Artificial Sequence: Synthetic polypeptide
  REGION 1..246: note = XENP020386 [CTLA-4]_H3.4_L0.126_scFv(GKPGS)4
EVQLVESGGGLVKPGGSLRLSCAASGFTFSSYTMHWVRQAPGKGLEWVSFISYDGNHKYYADSVKGRFTISRDNAKNSLYLQMNSLRAEDTAVYYCARTGHLGPFDLWGQGTMVTVSSGKPGSGKPGSGKPGSGKPGSEIVLTQSPGTLSLSPGERATLSCRASQSVGSSYLAWYQQKPGQAPRLLIYGASSRATGIPDRFSGSGSGTDFTLTISRLEPEDFAVYYCQQYGSSPWTFGQGTKVEIK

SEQ ID NO: 7416 - protein, 118 aa, synthetic construct; identical to SEQ ID NO: 7137
  REGION 1..118: note = Description of Artificial Sequence: Synthetic polypeptide
  REGION 1..118: note = VH of XENP020386

SEQ ID NO: 7417 - protein, 108 aa, synthetic construct; identical to SEQ ID NO: 6742
  REGION 1..108: note = Description of Artificial Sequence: Synthetic polypeptide
  REGION 1..108: note = VL of XENP020386

SEQ ID NO: 7418 - protein, 5 aa, synthetic construct
  REGION 1..5: note = Description of Artificial Sequence: Synthetic peptide
  REGION 1..5: note = XENP020386 vhCDR1
SYTMH

SEQ ID NO: 7419 - protein, 17 aa, synthetic construct
  REGION 1..17: note = Description of Artificial Sequence: Synthetic peptide
  REGION 1..17: note = XENP020386 vhCDR2
FISYDGNHKYYADSVKG

SEQ ID NO: 7420 - protein, 9 aa, synthetic construct
  REGION 1..9: note = Description of Artificial Sequence: Synthetic peptide
  REGION 1..9: note = XENP020386 vhCDR3
TGHLGPFDL

SEQ ID NO: 7421 - protein, 12 aa, synthetic construct
  REGION 1..12: note = Description of Artificial Sequence: Synthetic peptide
  REGION 1..12: note = XENP020386 vlCDR1
RASQSVGSSYLA

SEQ ID NO: 7422 - protein, 7 aa, synthetic construct
  REGION 1..7: note = Description of Artificial Sequence: Synthetic peptide
  REGION 1..7: note = XENP020386 vlCDR2
GASSRAT

SEQ ID NO: 7423 - protein, 9 aa, synthetic construct
  REGION 1..9: note = Description of Artificial Sequence: Synthetic peptide
  REGION 1..9: note = XENP020386 vlCDR3
QQYGSSPWT

SEQ ID NO: 7424 - protein, 246 aa, synthetic construct
  REGION 1..246: note = Description of Artificial Sequence: Synthetic polypeptide
  REGION 1..246: note = XENP020387 [CTLA-4]_H3.4_L0.127_scFv(GKPGS)4
EVQLVESGGGLVKPGGSLRLSCAASGFTFSSYTMHWVRQAPGKGLEWVSFISYDGNHKYYADSVKGRFTISRDNAKNSLYLQMNSLRAEDTAVYYCARTGHLGPFDLWGQGTMVTVSSGKPGSGKPGSGKPGSGKPGSEIVLTQSPGTLSVSPGERATLSCRASQSVSSSYLAWYQQKPGQAPRLLIYGASSRATGIPDRFSGSGSGTDFTLTISRLEPEDFAVYYCQQYGSSPWTFGQGTKVEIK

SEQ ID NO: 7425 - protein, 118 aa, synthetic construct; identical to SEQ ID NO: 7137
  REGION 1..118: note = Description of Artificial Sequence: Synthetic polypeptide
  REGION 1..118: note = VH of XENP020387

SEQ ID NO: 7426 - protein, 108 aa, synthetic construct
  REGION 1..108: note = Description of Artificial Sequence: Synthetic polypeptide
  REGION 1..108: note = VL of XENP020387
EIVLTQSPGTLSVSPGERATLSCRASQSVSSSYLAWYQQKPGQAPRLLIYGASSRATGIPDRFSGSGSGTDFTLTISRLEPEDFAVYYCQQYGSSPWTFGQGTKVEIK

SEQ ID NO: 7427 - protein, 5 aa, synthetic construct
  REGION 1..5: note = Description of Artificial Sequence: Synthetic peptide
  REGION 1..5: note = XENP020387 vhCDR1
SYTMH

SEQ ID NO: 7428 - protein, 17 aa, synthetic construct
  REGION 1..17: note = Description of Artificial Sequence: Synthetic peptide
  REGION 1..17: note = XENP020387 vhCDR2
FISYDGNHKYYADSVKG

SEQ ID NO: 7429 - protein, 9 aa, synthetic construct
  REGION 1..9: note = Description of Artificial Sequence: Synthetic peptide
  REGION 1..9: note = XENP020387 vhCDR3
TGHLGPFDL

SEQ ID NO: 7430 - protein, 12 aa, synthetic construct
  REGION 1..12: note = Description of Artificial Sequence: Synthetic peptide
  REGION 1..12: note = XENP020387 vlCDR1
RASQSVSSSYLA

SEQ ID NO: 7431 - protein, 7 aa, synthetic construct
  REGION 1..7: note = Description of Artificial Sequence: Synthetic peptide
  REGION 1..7: note = XENP020387 vlCDR2
GASSRAT

SEQ ID NO: 7432 - protein, 9 aa, synthetic construct
  REGION 1..9: note = Description of Artificial Sequence: Synthetic peptide
  REGION 1..9: note = XENP020387 vlCDR3
QQYGSSPWT

SEQ ID NO: 7433 - protein, 246 aa, synthetic construct
  REGION 1..246: note = Description of Artificial Sequence: Synthetic polypeptide
  REGION 1..246: note = XENP020388 [CTLA-4]_H3.4_L0.128_scFv(GKPGS)4
EVQLVESGGGLVKPGGSLRLSCAASGFTFSSYTMHWVRQAPGKGLEWVSFISYDGNHKYYADSVKGRFTISRDNAKNSLYLQMNSLRAEDTAVYYCARTGHLGPFDLWGQGTMVTVSSGKPGSGKPGSGKPGSGKPGSEIVLTQSPATLSLSPGERATLSCRASQSVSSSYLAWYQQKPGQAPRLLIYGAFSRATGIPDRFSGSGSGTDFTLTISRLEPEDFAVYYCQQYGSSPWTFGQGTKVEIK

SEQ ID NO: 7434 - protein, 118 aa, synthetic construct; identical to SEQ ID NO: 7137
  REGION 1..118: note = Description of Artificial Sequence: Synthetic polypeptide
  REGION 1..118: note = VH of XENP020388

SEQ ID NO: 7435 - protein, 108 aa, synthetic construct
  REGION 1..108: note = Description of Artificial Sequence: Synthetic polypeptide
  REGION 1..108: note = VL of XENP020388
EIVLTQSPATLSLSPGERATLSCRASQSVSSSYLAWYQQKPGQAPRLLIYGAFSRATGIPDRFSGSGSGTDFTLTISRLEPEDFAVYYCQQYGSSPWTFGQGTKVEIK

SEQ ID NO: 7436 - protein, 5 aa, synthetic construct
  REGION 1..5: note = Description of Artificial Sequence: Synthetic peptide
  REGION 1..5: note = XENP020388 vhCDR1
SYTMH

SEQ ID NO: 7437 - protein, 17 aa, synthetic construct
  REGION 1..17: note = Description of Artificial Sequence: Synthetic peptide
  REGION 1..17: note = XENP020388 vhCDR2
FISYDGNHKYYADSVKG

SEQ ID NO: 7438 - protein, 9 aa, synthetic construct
  REGION 1..9: note = Description of Artificial Sequence: Synthetic peptide
  REGION 1..9: note = XENP020388 vhCDR3
TGHLGPFDL

SEQ ID NO: 7439 - protein, 12 aa, synthetic construct
  REGION 1..12: note = Description of Artificial Sequence: Synthetic peptide
  REGION 1..12: note = XENP020388 vlCDR1
RASQSVSSSYLA

SEQ ID NO: 7440 - protein, 7 aa, synthetic construct
  REGION 1..7: note = Description of Artificial Sequence: Synthetic peptide
  REGION 1..7: note = XENP020388 vlCDR2
GAFSRAT

SEQ ID NO: 7441 - protein, 9 aa, synthetic construct
  REGION 1..9: note = Description of Artificial Sequence: Synthetic peptide
  REGION 1..9: note = XENP020388 vlCDR3
QQYGSSPWT

SEQ ID NO: 7442 - protein, 246 aa, synthetic construct
  REGION 1..246: note = Description of Artificial Sequence: Synthetic polypeptide
  REGION 1..246: note = XENP020389 [CTLA-4]_H3.4_L0.129_scFv(GKPGS)4
EVQLVESGGGLVKPGGSLRLSCAASGFTFSSYTMHWVRQAPGKGLEWVSFISYDGNHKYYADSVKGRFTISRDNAKNSLYLQMNSLRAEDTAVYYCARTGHLGPFDLWGQGTMVTVSSGKPGSGKPGSGKPGSGKPGSEIVLTQSPATLSLSPGERATLSCRASQSVGSSYLAWYQQKPGQAPRLLIYGASSRATGIPDRFSGSGSGTDFTLTISRLEPEDFAVYYCQQYGSSPWTFGQGTKVEIK

SEQ ID NO: 7443 - protein, 118 aa, synthetic construct; identical to SEQ ID NO: 7137
  REGION 1..118: note = Description of Artificial Sequence: Synthetic polypeptide
  REGION 1..118: note = VH of XENP020389

SEQ ID NO: 7444 - protein, 108 aa, synthetic construct; identical to SEQ ID NO: 2396
  REGION 1..108: note = Description of Artificial Sequence: Synthetic polypeptide
  REGION 1..108: note = VL of XENP020389

SEQ ID NO: 7445 - protein, 5 aa, synthetic construct
  REGION 1..5: note = Description of Artificial Sequence: Synthetic peptide
  REGION 1..5: note = XENP020389 vhCDR1
SYTMH

SEQ ID NO: 7446 - protein, 17 aa, synthetic construct
  REGION 1..17: note = Description of Artificial Sequence: Synthetic peptide
  REGION 1..17: note = XENP020389 vhCDR2
FISYDGNHKYYADSVKG

SEQ ID NO: 7447 - protein, 9 aa, synthetic construct
  REGION 1..9: note = Description of Artificial Sequence: Synthetic peptide
  REGION 1..9: note = XENP020389 vhCDR3
TGHLGPFDL

SEQ ID NO: 7448 - protein, 12 aa, synthetic construct
  REGION 1..12: note = Description of Artificial Sequence: Synthetic peptide
  REGION 1..12: note = XENP020389 vlCDR1
RASQSVGSSYLA

SEQ ID NO: 7449 - protein, 7 aa, synthetic construct
  REGION 1..7: note = Description of Artificial Sequence: Synthetic peptide
  REGION 1..7: note = XENP020389 vlCDR2
GASSRAT

SEQ ID NO: 7450 - protein, 9 aa, synthetic construct
  REGION 1..9: note = Description of Artificial Sequence: Synthetic peptide
  REGION 1..9: note = XENP020389 vlCDR3
QQYGSSPWT

SEQ ID NO: 7451 - protein, 246 aa, synthetic construct
  REGION 1..246: note = Description of Artificial Sequence: Synthetic polypeptide
  REGION 1..246: note = XENP020390 [CTLA-4]_H3.4_L0.130_scFv(GKPGS)4
EVQLVESGGGLVKPGGSLRLSCAASGFTFSSYTMHWVRQAPGKGLEWVSFISYDGNHKYYADSVKGRFTISRDNAKNSLYLQMNSLRAEDTAVYYCARTGHLGPFDLWGQGTMVTVSSGKPGSGKPGSGKPGSGKPGSEIVLTQSPATLSVSPGERATLSCRASQSVSSSYLAWYQQKPGQAPRLLIYGASSRATGIPDRFSGSGSGTDFTLTISRLEPEDFAVYYCQQYGSSPWTFGQGTKVEIK

SEQ ID NO: 7452 - protein, 118 aa, synthetic construct; identical to SEQ ID NO: 7137
  REGION 1..118: note = Description of Artificial Sequence: Synthetic polypeptide
  REGION 1..118: note = VH of XENP020390

SEQ ID NO: 7453 - protein, 108 aa, synthetic construct
  REGION 1..108: note = Description of Artificial Sequence: Synthetic polypeptide
  REGION 1..108: note = VL of XENP020390
EIVLTQSPATLSVSPGERATLSCRASQSVSSSYLAWYQQKPGQAPRLLIYGASSRATGIPDRFSGSGSGTDFTLTISRLEPEDFAVYYCQQYGSSPWTFGQGTKVEIK

SEQ ID NO: 7454 - protein, 5 aa, synthetic construct
  REGION 1..5: note = Description of Artificial Sequence: Synthetic peptide
  REGION 1..5: note = XENP020390 vhCDR1
SYTMH

SEQ ID NO: 7455 - protein, 17 aa, synthetic construct
  REGION 1..17: note = Description of Artificial Sequence: Synthetic peptide
  REGION 1..17: note = XENP020390 vhCDR2
FISYDGNHKYYADSVKG

SEQ ID NO: 7456 - protein, 9 aa, synthetic construct
  REGION 1..9: note = Description of Artificial Sequence: Synthetic peptide
  REGION 1..9: note = XENP020390 vhCDR3
TGHLGPFDL

SEQ ID NO: 7457 - protein, 12 aa, synthetic construct
  REGION 1..12: note = Description of Artificial Sequence: Synthetic peptide
  REGION 1..12: note = XENP020390 vlCDR1
RASQSVSSSYLA

SEQ ID NO: 7458 - protein, 7 aa, synthetic construct
  REGION 1..7: note = Description of Artificial Sequence: Synthetic peptide
  REGION 1..7: note = XENP020390 vlCDR2
GASSRAT

SEQ ID NO: 7459 - protein, 9 aa, synthetic construct
  REGION 1..9: note = Description of Artificial Sequence: Synthetic peptide
  REGION 1..9: note = XENP020390 vlCDR3
QQYGSSPWT

SEQ ID NO: 7460 - protein, 246 aa, synthetic construct
  REGION 1..246: note = Description of Artificial Sequence: Synthetic polypeptide
  REGION 1..246: note = XENP020391 [CTLA-4]_H3.4_L0.131_scFv(GKPGS)4
EVQLVESGGGLVKPGGSLRLSCAASGFTFSSYTMHWVRQAPGKGLEWVSFISYDGNHKYYADSVKGRFTISRDNAKNSLYLQMNSLRAEDTAVYYCARTGHLGPFDLWGQGTMVTVSSGKPGSGKPGSGKPGSGKPGSEIVLTQSPGTLSLSPGERATLSCRASQSVSSSYLAWYQQKPGQAPRLLIYGASSRATGIPDRFSGSGSGTDFTLTISRLEPEDFAVYYCQQYGSSPWTFGQGTKVEIK

SEQ ID NO: 7461 - protein, 118 aa, synthetic construct; identical to SEQ ID NO: 7137
  REGION 1..118: note = Description of Artificial Sequence: Synthetic polypeptide
  REGION 1..118: note = VH of XENP020391

SEQ ID NO: 7462 - protein, 108 aa, synthetic construct
  REGION 1..108: note = Description of Artificial Sequence: Synthetic polypeptide
  REGION 1..108: note = VL of XENP020391
EIVLTQSPGTLSLSPGERATLSCRASQSVSSSYLAWYQQKPGQAPRLLIYGASSRATGIPDRFSGSGSGTDFTLTISRLEPEDFAVYYCQQYGSSPWTFGQGTKVEIK

SEQ ID NO: 7463 - protein, 5 aa, synthetic construct
  REGION 1..5: note = Description of Artificial Sequence: Synthetic peptide
  REGION 1..5: note = XENP020391 vhCDR1
SYTMH

SEQ ID NO: 7464 - protein, 17 aa, synthetic construct
  REGION 1..17: note = Description of Artificial Sequence: Synthetic peptide
  REGION 1..17: note = XENP020391 vhCDR2
FISYDGNHKYYADSVKG

SEQ ID NO: 7465 - protein, 9 aa, synthetic construct
  REGION 1..9: note = Description of Artificial Sequence: Synthetic peptide
  REGION 1..9: note = XENP020391 vhCDR3
TGHLGPFDL

SEQ ID NO: 7466 - protein, 12 aa, synthetic construct
  REGION 1..12: note = Description of Artificial Sequence: Synthetic peptide
  REGION 1..12: note = XENP020391 vlCDR1
RASQSVSSSYLA

SEQ ID NO: 7467 - protein, 7 aa, synthetic construct
  REGION 1..7: note = Description of Artificial Sequence: Synthetic peptide
  REGION 1..7: note = XENP020391 vlCDR2
GASSRAT

SEQ ID NO: 7468 - protein, 9 aa, synthetic construct
  REGION 1..9: note = Description of Artificial Sequence: Synthetic peptide
  REGION 1..9: note = XENP020391 vlCDR3
QQYGSSPWT

SEQ ID NO: 7469 - protein, 246 aa, synthetic construct
  REGION 1..246: note = Description of Artificial Sequence: Synthetic polypeptide
  REGION 1..246: note = XENP020392 [CTLA-4]_H3.4_L0.132_scFv(GKPGS)4
EVQLVESGGGLVKPGGSLRLSCAASGFTFSSYTMHWVRQAPGKGLEWVSFISYDGNHKYYADSVKGRFTISRDNAKNSLYLQMNSLRAEDTAVYYCARTGHLGPFDLWGQGTMVTVSSGKPGSGKPGSGKPGSGKPGSEIVLTQSPATLSLSPGERATLSCRASQSVSSSYLAWYQQKPGQAPRLLIYGASSRATGIPDRFSGSGSGTDFTLTISRLEPEDFAVYYCQQYGSSPWTFGQGTKVEIK

SEQ ID NO: 7470 - protein, 118 aa, synthetic construct; identical to SEQ ID NO: 7137
  REGION 1..118: note = Description of Artificial Sequence: Synthetic polypeptide
  REGION 1..118: note = VH of XENP020392

SEQ ID NO: 7471 - protein, 108 aa, synthetic construct
  REGION 1..108: note = Description of Artificial Sequence: Synthetic polypeptide
  REGION 1..108: note = VL of XENP020392
EIVLTQSPATLSLSPGERATLSCRASQSVSSSYLAWYQQKPGQAPRLLIYGASSRATGIPDRFSGSGSGTDFTLTISRLEPEDFAVYYCQQYGSSPWTFGQGTKVEIK

SEQ ID NO: 7472 - protein, 5 aa, synthetic construct
  REGION 1..5: note = Description of Artificial Sequence: Synthetic peptide
  REGION 1..5: note = XENP020392 vhCDR1
SYTMH

SEQ ID NO: 7473 - protein, 17 aa, synthetic construct
  REGION 1..17: note = Description of Artificial Sequence: Synthetic peptide
  REGION 1..17: note = XENP020392 vhCDR2
FISYDGNHKYYADSVKG

SEQ ID NO: 7474 - protein, 9 aa, synthetic construct
  REGION 1..9: note = Description of Artificial Sequence: Synthetic peptide
  REGION 1..9: note = XENP020392 vhCDR3
TGHLGPFDL

SEQ ID NO: 7475 - protein, 12 aa, synthetic construct
  REGION 1..12: note = Description of Artificial Sequence: Synthetic peptide
  REGION 1..12: note = XENP020392 vlCDR1
RASQSVSSSYLA

SEQ ID NO: 7476 - protein, 7 aa, synthetic construct
  REGION 1..7: note = Description of Artificial Sequence: Synthetic peptide
  REGION 1..7: note = XENP020392 vlCDR2
GASSRAT

SEQ ID NO: 7477 - protein, 9 aa, synthetic construct
  REGION 1..9: note = Description of Artificial Sequence: Synthetic peptide
  REGION 1..9: note = XENP020392 vlCDR3
QQYGSSPWT

SEQ ID NO: 7478 - protein, 246 aa, synthetic construct
  REGION 1..246: note = Description of Artificial Sequence: Synthetic polypeptide
  REGION 1..246: note = XENP020393 [CTLA-4]_H3.5_L2_scFv(GKPGS)4
EVQLVESGGGLVKPGGSLRLSCAASGFTFSSYTMHWVRQAPGKGLEWVSFISYDGNTKYYADSVKGRFTISRDNAKNSLYLQMNSLRAEDTAVYYCARTGHLGPFDLWGQGTMVTVSSGKPGSGKPGSGKPGSGKPGSEIVMTQSPATLSVSPGERATLSCRASQSVGSSYLAWYQQKPGQAPRLLIYGAFSRATGIPARFSGSGSGTEFTLTISSLQSEDFAVYYCQQYGSSPWTFGQGTKVEIK

SEQ ID NO: 7479 - protein, 118 aa, synthetic construct; identical to SEQ ID NO: 7146
  REGION 1..118: note = Description of Artificial Sequence: Synthetic polypeptide
  REGION 1..118: note = VH of XENP020393

SEQ ID NO: 7480 - protein, 108 aa, synthetic construct; identical to SEQ ID NO: 4843
  REGION 1..108: note = Description of Artificial Sequence: Synthetic polypeptide
  REGION 1..108: note = VL of XENP020393

SEQ ID NO: 7481 - protein, 5 aa, synthetic construct
  REGION 1..5: note = Description of Artificial Sequence: Synthetic peptide
  REGION 1..5: note = XENP020393 vhCDR1
SYTMH

SEQ ID NO: 7482 - protein, 17 aa, synthetic construct
  REGION 1..17: note = Description of Artificial Sequence: Synthetic peptide
  REGION 1..17: note = XENP020393 vhCDR2
FISYDGNTKYYADSVKG

SEQ ID NO: 7483 - protein, 9 aa, synthetic construct
  REGION 1..9: note = Description of Artificial Sequence: Synthetic peptide
  REGION 1..9: note = XENP020393 vhCDR3
TGHLGPFDL

SEQ ID NO: 7484 - protein, 12 aa, synthetic construct
  REGION 1..12: note = Description of Artificial Sequence: Synthetic peptide
  REGION 1..12: note = XENP020393 vlCDR1
RASQSVGSSYLA

SEQ ID NO: 7485 - protein, 7 aa, synthetic construct
  REGION 1..7: note = Description of Artificial Sequence: Synthetic peptide
  REGION 1..7: note = XENP020393 vlCDR2
GAFSRAT

SEQ ID NO: 7486 - protein, 9 aa, synthetic construct
  REGION 1..9: note = Description of Artificial Sequence: Synthetic peptide
  REGION 1..9: note = XENP020393 vlCDR3
QQYGSSPWT

SEQ ID NO: 7487 - protein, 246 aa, synthetic construct
  REGION 1..246: note = Description of Artificial Sequence: Synthetic polypeptide
  REGION 1..246: note = XENP020394 [CTLA-4]_H3.5_L2.1_scFv(GKPGS)4
EVQLVESGGGLVKPGGSLRLSCAASGFTFSSYTMHWVRQAPGKGLEWVSFISYDGNTKYYADSVKGRFTISRDNAKNSLYLQMNSLRAEDTAVYYCARTGHLGPFDLWGQGTMVTVSSGKPGSGKPGSGKPGSGKPGSEIVMTQSPATLSVSPGERATLSCRASQSVSSSYLAWYQQKPGQAPRLLIYGAFSRATGIPARFSGSGSGTEFTLTISSLQSEDFAVYYCQQYGSSPWTFGQGTKVEIK

SEQ ID NO: 7488 - protein, 118 aa, synthetic construct; identical to SEQ ID NO: 7146
  REGION 1..118: note = Description of Artificial Sequence: Synthetic polypeptide
  REGION 1..118: note = VH of XENP020394

SEQ ID NO: 7489 - protein, 108 aa, synthetic construct
  REGION 1..108: note = Description of Artificial Sequence: Synthetic polypeptide
  REGION 1..108: note = VL of XENP020394
EIVMTQSPATLSVSPGERATLSCRASQSVSSSYLAWYQQKPGQAPRLLIYGAFSRATGIPARFSGSGSGTEFTLTISSLQSEDFAVYYCQQYGSSPWTFGQGTKVEIK

SEQ ID NO: 7490 - protein, 5 aa, synthetic construct
  REGION 1..5: note = Description of Artificial Sequence: Synthetic peptide
  REGION 1..5: note = XENP020394 vhCDR1
SYTMH

SEQ ID NO: 7491 - protein, 17 aa, synthetic construct
  REGION 1..17: note = Description of Artificial Sequence: Synthetic peptide
  REGION 1..17: note = XENP020394 vhCDR2
FISYDGNTKYYADSVKG

SEQ ID NO: 7492 - protein, 9 aa, synthetic construct
  REGION 1..9: note = Description of Artificial Sequence: Synthetic peptide
  REGION 1..9: note = XENP020394 vhCDR3
TGHLGPFDL

SEQ ID NO: 7493 - protein, 12 aa, synthetic construct
  REGION 1..12: note = Description of Artificial Sequence: Synthetic peptide
  REGION 1..12: note = XENP020394 vlCDR1
RASQSVSSSYLA

SEQ ID NO: 7494 - protein, 7 aa, synthetic construct
  REGION 1..7: note = Description of Artificial Sequence: Synthetic peptide
  REGION 1..7: note = XENP020394 vlCDR2
GAFSRAT

SEQ ID NO: 7495 - protein, 9 aa, synthetic construct
  REGION 1..9: note = Description of Artificial Sequence: Synthetic peptide
  REGION 1..9: note = XENP020394 vlCDR3
QQYGSSPWT

SEQ ID NO: 7496 - protein, 246 aa, synthetic construct
  REGION 1..246: note = Description of Artificial Sequence: Synthetic polypeptide
  REGION 1..246: note = XENP020395 [CTLA-4]_H3.5_L2.2_scFv(GKPGS)4
EVQLVESGGGLVKPGGSLRLSCAASGFTFSSYTMHWVRQAPGKGLEWVSFISYDGNTKYYADSVKGRFTISRDNAKNSLYLQMNSLRAEDTAVYYCARTGHLGPFDLWGQGTMVTVSSGKPGSGKPGSGKPGSGKPGSEIVMTQSPATLSVSPGERATLSCRASQSVGSSYLAWYQQKPGQAPRLLIYGASSRATGIPARFSGSGSGTEFTLTISSLQSEDFAVYYCQQYGSSPWTFGQGTKVEIK

SEQ ID NO: 7497 - protein, 118 aa, synthetic construct; identical to SEQ ID NO: 7146
  REGION 1..118: note = Description of Artificial Sequence: Synthetic polypeptide
  REGION 1..118: note = VH of XENP020395

SEQ ID NO: 7498 - protein, 108 aa, synthetic construct
  REGION 1..108: note = Description of Artificial Sequence: Synthetic polypeptide
  REGION 1..108: note = VL of XENP020395
EIVMTQSPATLSVSPGERATLSCRASQSVGSSYLAWYQQKPGQAPRLLIYGASSRATGIPARFSGSGSGTEFTLTISSLQSEDFAVYYCQQYGSSPWTFGQGTKVEIK

SEQ ID NO: 7499 - protein, 5 aa, synthetic construct
  REGION 1..5: note = Description of Artificial Sequence: Synthetic peptide
  REGION 1..5: note = XENP020395 vhCDR1
SYTMH

SEQ ID NO: 7500 - protein, 17 aa, synthetic construct
  REGION 1..17: note = Description of Artificial Sequence: Synthetic peptide
  REGION 1..17: note = XENP020395 vhCDR2
FISYDGNTKYYADSVKG

SEQ ID NO: 7501 - protein, 9 aa, synthetic construct
  REGION 1..9: note = Description of Artificial Sequence: Synthetic peptide
  REGION 1..9: note = XENP020395 vhCDR3
TGHLGPFDL

SEQ ID NO: 7502 - protein, 12 aa, synthetic construct
  REGION 1..12: note = Description of Artificial Sequence: Synthetic peptide
  REGION 1..12: note = XENP020395 vlCDR1
RASQSVGSSYLA

SEQ ID NO: 7503 - protein, 7 aa, synthetic construct
  REGION 1..7: note = Description of Artificial Sequence: Synthetic peptide
  REGION 1..7: note = XENP020395 vlCDR2
GASSRAT

SEQ ID NO: 7504 - protein, 9 aa, synthetic construct
  REGION 1..9: note = Description of Artificial Sequence: Synthetic peptide
  REGION 1..9: note = XENP020395 vlCDR3
QQYGSSPWT

SEQ ID NO: 7505 - protein, 246 aa, synthetic construct
  REGION 1..246: note = Description of Artificial Sequence: Synthetic polypeptide
  REGION 1..246: note = XENP020396 [CTLA-4]_H3.5_L2.3_scFv(GKPGS)4
EVQLVESGGGLVKPGGSLRLSCAASGFTFSSYTMHWVRQAPGKGLEWVSFISYDGNTKYYADSVKGRFTISRDNAKNSLYLQMNSLRAEDTAVYYCARTGHLGPFDLWGQGTMVTVSSGKPGSGKPGSGKPGSGKPGSEIVMTQSPATLSVSPGERATLSCRASQSVSSSYLAWYQQKPGQAPRLLIYGASSRATGIPARFSGSGSGTEFTLTISSLQSEDFAVYYCQQYGSSPWTFGQGTKVEIK

SEQ ID NO: 7506 - protein, 118 aa, synthetic construct; identical to SEQ ID NO: 7146
  REGION 1..118: note = Description of Artificial Sequence: Synthetic polypeptide
  REGION 1..118: note = VH of XENP020396

SEQ ID NO: 7507 - protein, 108 aa, synthetic construct
  REGION 1..108: note = Description of Artificial Sequence: Synthetic polypeptide
  REGION 1..108: note = VL of XENP020396
EIVMTQSPATLSVSPGERATLSCRASQSVSSSYLAWYQQKPGQAPRLLIYGASSRATGIPARFSGSGSGTEFTLTISSLQSEDFAVYYCQQYGSSPWTFGQGTKVEIK

SEQ ID NO: 7508 - protein, 5 aa, synthetic construct
  REGION 1..5: note = Description of Artificial Sequence: Synthetic peptide
  REGION 1..5: note = XENP020396 vhCDR1
SYTMH

SEQ ID NO: 7509 - protein, 17 aa, synthetic construct
  REGION 1..17: note = Description of Artificial Sequence: Synthetic peptide
  REGION 1..17: note = XENP020396 vhCDR2
FISYDGNTKYYADSVKG

SEQ ID NO: 7510 - protein, 9 aa, synthetic construct
  REGION 1..9: note = Description of Artificial Sequence: Synthetic peptide
  REGION 1..9: note = XENP020396 vhCDR3
TGHLGPFDL

SEQ ID NO: 7511 - protein, 12 aa, synthetic construct
  REGION 1..12: note = Description of Artificial Sequence: Synthetic peptide
  REGION 1..12: note = XENP020396 vlCDR1
RASQSVSSSYLA

SEQ ID NO: 7512 - protein, 7 aa, synthetic construct
  REGION 1..7: note = Description of Artificial Sequence: Synthetic peptide
  REGION 1..7: note = XENP020396 vlCDR2
GASSRAT

SEQ ID NO: 7513 - protein, 9 aa, synthetic construct
  REGION 1..9: note = Description of Artificial Sequence: Synthetic peptide
  REGION 1..9: note = XENP020396 vlCDR3
QQYGSSPWT

SEQ ID NO: 7514 - protein, 246 aa, synthetic construct
  REGION 1..246: note = Description of Artificial Sequence: Synthetic polypeptide
  REGION 1..246: note = XENP020431 [CTLA-4]_H3.21_L0.124_scFv(GKPGS)4
EVQLVESGGGLVKPGGSLRLSCAASGFTFSSYTMHWVRQAPGKGLEWVSFISYDGNTKYYADSVKGRFTISRDNAKNSLYLQMNSLRAEDTAVYYCARGGLLGPFDLWGQGTMVTVSSGKPGSGKPGSGKPGSGKPGSEIVLTQSPATLSVSPGERATLSCRASQSVGSSYLAWYQQKPGQAPRLLIYGASSRATGIPDRFSGSGSGTDFTLTISRLEPEDFAVYYCQQYGSSPWTFGQGTKVEIK

SEQ ID NO: 7515 - protein, 118 aa, synthetic construct; identical to SEQ ID NO: 7290
  REGION 1..118: note = Description of Artificial Sequence: Synthetic polypeptide
  REGION 1..118: note = VH of XENP020431

SEQ ID NO: 7516 - protein, 108 aa, synthetic construct; identical to SEQ ID NO: 7399
  REGION 1..108: note = Description of Artificial Sequence: Synthetic polypeptide
  REGION 1..108: note = VL of XENP020431

SEQ ID NO: 7517 - protein, 5 aa, synthetic construct
  REGION 1..5: note = Description of Artificial Sequence: Synthetic peptide
  REGION 1..5: note = XENP020431 vhCDR1
SYTMH

SEQ ID NO: 7518 - protein, 17 aa, synthetic construct
  REGION 1..17: note = Description of Artificial Sequence: Synthetic peptide
  REGION 1..17: note = XENP020431 vhCDR2
FISYDGNTKYYADSVKG

SEQ ID NO: 7519 - protein, 9 aa, synthetic construct
  REGION 1..9: note = Description of Artificial Sequence: Synthetic peptide
  REGION 1..9: note = XENP020431 vhCDR3
GGLLGPFDL

SEQ ID NO: 7520 - protein, 12 aa, synthetic construct
  REGION 1..12: note = Description of Artificial Sequence: Synthetic peptide
  REGION 1..12: note = XENP020431 vlCDR1
RASQSVGSSYLA

SEQ ID NO: 7521 - protein, 7 aa, synthetic construct
  REGION 1..7: note = Description of Artificial Sequence: Synthetic peptide
  REGION 1..7: note = XENP020431 vlCDR2
GASSRAT

SEQ ID NO: 7522 - protein, 9 aa, synthetic construct
  REGION 1..9: note = Description of Artificial Sequence: Synthetic peptide
  REGION 1..9: note = XENP020431 vlCDR3
QQYGSSPWT

SEQ ID NO: 7523 - protein, 246 aa, synthetic construct
  REGION 1..246: note = Description of Artificial Sequence: Synthetic polypeptide
  REGION 1..246: note = XENP020432 [CTLA-4]_H3.21_L0.129_scFv(GKPGS)4
EVQLVESGGGLVKPGGSLRLSCAASGFTFSSYTMHWVRQAPGKGLEWVSFISYDGNTKYYADSVKGRFTISRDNAKNSLYLQMNSLRAEDTAVYYCARGGLLGPFDLWGQGTMVTVSSGKPGSGKPGSGKPGSGKPGSEIVLTQSPATLSLSPGERATLSCRASQSVGSSYLAWYQQKPGQAPRLLIYGASSRATGIPDRFSGSGSGTDFTLTISRLEPEDFAVYYCQQYGSSPWTFGQGTKVEIK

SEQ ID NO: 7524 - protein, 118 aa, synthetic construct; identical to SEQ ID NO: 7290
  REGION 1..118: note = Description of Artificial Sequence: Synthetic polypeptide
  REGION 1..118: note = VH of XENP020432

SEQ ID NO: 7525 - protein, 108 aa, synthetic construct; identical to SEQ ID NO: 2396
  REGION 1..108: note = Description of Artificial Sequence: Synthetic polypeptide
  REGION 1..108: note = VL of XENP020432

SEQ ID NO: 7526 - protein, 5 aa, synthetic construct
  REGION 1..5: note = Description of Artificial Sequence: Synthetic peptide
  REGION 1..5: note = XENP020432 vhCDR1
SYTMH

SEQ ID NO: 7527 - protein, 17 aa, synthetic construct
  REGION 1..17: note = Description of Artificial Sequence: Synthetic peptide
  REGION 1..17: note = XENP020432 vhCDR2
FISYDGNTKYYADSVKG

SEQ ID NO: 7528 - protein, 9 aa, synthetic construct
  REGION 1..9: note = Description of Artificial Sequence: Synthetic peptide
  REGION 1..9: note = XENP020432 vhCDR3
GGLLGPFDL

SEQ ID NO: 7529 - protein, 12 aa, synthetic construct
  REGION 1..12: note = Description of Artificial Sequence: Synthetic peptide
  REGION 1..12: note = XENP020432 vlCDR1
RASQSVGSSYLA

SEQ ID NO: 7530 - protein, 7 aa, synthetic construct
  REGION 1..7: note = Description of Artificial Sequence: Synthetic peptide
  REGION 1..7: note = XENP020432 vlCDR2
GASSRAT

SEQ ID NO: 7531 - protein, 9 aa, synthetic construct
  REGION 1..9: note = Description of Artificial Sequence: Synthetic peptide
  REGION 1..9: note = XENP020432 vlCDR3
QQYGSSPWT

SEQ ID NO: 7532 - protein, 246 aa, synthetic construct
  REGION 1..246: note = Description of Artificial Sequence: Synthetic polypeptide
  REGION 1..246: note = XENP020433 [CTLA-4]_H3.21_L0.132_scFv(GKPGS)4
EVQLVESGGGLVKPGGSLRLSCAASGFTFSSYTMHWVRQAPGKGLEWVSFISYDGNTKYYADSVKGRFTISRDNAKNSLYLQMNSLRAEDTAVYYCARGGLLGPFDLWGQGTMVTVSSGKPGSGKPGSGKPGSGKPGSEIVLTQSPATLSLSPGERATLSCRASQSVSSSYLAWYQQKPGQAPRLLIYGASSRATGIPDRFSGSGSGTDFTLTISRLEPEDFAVYYCQQYGSSPWTFGQGTKVEIK

SEQ ID NO: 7533 - protein, 118 aa, synthetic construct; identical to SEQ ID NO: 7290
  REGION 1..118: note = Description of Artificial Sequence: Synthetic polypeptide
  REGION 1..118: note = VH of XENP020433

SEQ ID NO: 7534 - protein, 108 aa, synthetic construct; identical to SEQ ID NO: 7471
  REGION 1..108: note = Description of Artificial Sequence: Synthetic polypeptide
  REGION 1..108: note = VL of XENP020433

SEQ ID NO: 7535 - protein, 5 aa, synthetic construct
  REGION 1..5: note = Description of Artificial Sequence: Synthetic peptide
  REGION 1..5: note = XENP020433 vhCDR1
SYTMH

SEQ ID NO: 7536 - protein, 17 aa, synthetic construct
  REGION 1..17: note = Description of Artificial Sequence: Synthetic peptide
  REGION 1..17: note = XENP020433 vhCDR2
FISYDGNTKYYADSVKG

SEQ ID NO: 7537 - protein, 9 aa, synthetic construct
  REGION 1..9: note = Description of Artificial Sequence: Synthetic peptide
  REGION 1..9: note = XENP020433 vhCDR3
GGLLGPFDL

SEQ ID NO: 7538 - protein, 12 aa, synthetic construct
  REGION 1..12: note = Description of Artificial Sequence: Synthetic peptide
  REGION 1..12: note = XENP020433 vlCDR1
RASQSVSSSYLA

SEQ ID NO: 7539 - protein, 7 aa, synthetic construct
  REGION 1..7: note = Description of Artificial Sequence: Synthetic peptide
  REGION 1..7: note = XENP020433 vlCDR2
GASSRAT

SEQ ID NO: 7540 - protein, 9 aa, synthetic construct
  REGION 1..9: note = Description of Artificial Sequence: Synthetic peptide
  REGION 1..9: note = XENP020433 vlCDR3
QQYGSSPWT

SEQ ID NO: 7541 - protein, 246 aa, synthetic construct
  REGION 1..246: note = Description of Artificial Sequence: Synthetic polypeptide
  REGION 1..246: note = XENP020434 [CTLA-4]_H3.23_L0.124_scFv(GKPGS)4
EVQLVESGGGLVKPGGSLRLSCAASGFTFSSYTMHWVRQAPGKGLEWVSFISYDGNYKYYADSVKGRFTISRDNAKNSLYLQMNSLRAEDTAVYYCARGGHLGPFDLWGQGTMVTVSSGKPGSGKPGSGKPGSGKPGSEIVLTQSPATLSVSPGERATLSCRASQSVGSSYLAWYQQKPGQAPRLLIYGASSRATGIPDRFSGSGSGTDFTLTISRLEPEDFAVYYCQQYGSSPWTFGQGTKVEIK

SEQ ID NO: 7542 - protein, 118 aa, synthetic construct; identical to SEQ ID NO: 2395
  REGION 1..118: note = Description of Artificial Sequence: Synthetic polypeptide
  REGION 1..118: note = VH of XENP020434

SEQ ID NO: 7543 - protein, 108 aa, synthetic construct; identical to SEQ ID NO: 7399
  REGION 1..108: note = Description of Artificial Sequence: Synthetic polypeptide
  REGION 1..108: note = VL of XENP020434

SEQ ID NO: 7544 - protein, 5 aa, synthetic construct
  REGION 1..5: note = Description of Artificial Sequence: Synthetic peptide
  REGION 1..5: note = XENP020434 vhCDR1
SYTMH

SEQ ID NO: 7545 - protein, 17 aa, synthetic construct
  REGION 1..17: note = Description of Artificial Sequence: Synthetic peptide
  REGION 1..17: note = XENP020434 vhCDR2
FISYDGNYKYYADSVKG

SEQ ID NO: 7546 - protein, 9 aa, synthetic construct
  REGION 1..9: note = Description of Artificial Sequence: Synthetic peptide
  REGION 1..9: note = XENP020434 vhCDR3
GGHLGPFDL

SEQ ID NO: 7547 - protein, 12 aa, synthetic construct
  REGION 1..12: note = Description of Artificial Sequence: Synthetic peptide
  REGION 1..12: note = XENP020434 vlCDR1
RASQSVGSSYLA

SEQ ID NO: 7548 - protein, 7 aa, synthetic construct
  REGION 1..7: note = Description of Artificial Sequence: Synthetic peptide
  REGION 1..7: note = XENP020434 vlCDR2
GASSRAT

SEQ ID NO: 7549 - protein, 9 aa, synthetic construct
  REGION 1..9: note = Description of Artificial Sequence: Synthetic peptide
  REGION 1..9: note = XENP020434 vlCDR3
QQYGSSPWT

SEQ ID NO: 7550 - protein, 246 aa, synthetic construct
  REGION 1..246: note = Description of Artificial Sequence: Synthetic polypeptide
  REGION 1..246: note = XENP020435 [CTLA-4]_H3.23_L0.129_scFv(GKPGS)4
EVQLVESGGGLVKPGGSLRLSCAASGFTFSSYTMHWVRQAPGKGLEWVSFISYDGNYKYYADSVKGRFTISRDNAKNSLYLQMNSLRAEDTAVYYCARGGHLGPFDLWGQGTMVTVSSGKPGSGKPGSGKPGSGKPGSEIVLTQSPATLSLSPGERATLSCRASQSVGSSYLAWYQQKPGQAPRLLIYGASSRATGIPDRFSGSGSGTDFTLTISRLEPEDFAVYYCQQYGSSPWTFGQGTKVEIK

SEQ ID NO: 7551 - protein, 118 aa, synthetic construct; identical to SEQ ID NO: 2395
  REGION 1..118: note = Description of Artificial Sequence: Synthetic polypeptide
  REGION 1..118: note = VH of XENP020435

SEQ ID NO: 7552 - protein, 108 aa, synthetic construct; identical to SEQ ID NO: 2396
  REGION 1..108: note = Description of Artificial Sequence: Synthetic polypeptide
  REGION 1..108: note = VL of XENP020435

SEQ ID NO: 7553 - protein, 5 aa, synthetic construct
  REGION 1..5: note = Description of Artificial Sequence: Synthetic peptide
  REGION 1..5: note = XENP020435 vhCDR1
SYTMH

SEQ ID NO: 7554 - protein, 17 aa, synthetic construct
  REGION 1..17: note = Description of Artificial Sequence: Synthetic peptide
  REGION 1..17: note = XENP020435 vhCDR2
FISYDGNYKYYADSVKG

SEQ ID NO: 7555 - protein, 9 aa, synthetic construct
  REGION 1..9: note = Description of Artificial Sequence: Synthetic peptide
  REGION 1..9: note = XENP020435 vhCDR3
GGHLGPFDL

SEQ ID NO: 7556 - protein, 12 aa, synthetic construct
  REGION 1..12: note = Description of Artificial Sequence: Synthetic peptide
  REGION 1..12: note = XENP020435 vlCDR1
RASQSVGSSYLA

SEQ ID NO: 7557 - protein, 7 aa, synthetic construct
  REGION 1..7: note = Description of Artificial Sequence: Synthetic peptide
  REGION 1..7: note = XENP020435 vlCDR2
GASSRAT

SEQ ID NO: 7558 - protein, 9 aa, synthetic construct
  REGION 1..9: note = Description of Artificial Sequence: Synthetic peptide
  REGION 1..9: note = XENP020435 vlCDR3
QQYGSSPWT

SEQ ID NO: 7559 - protein, 246 aa, synthetic construct
  REGION 1..246: note = Description of Artificial Sequence: Synthetic polypeptide
  REGION 1..246: note = XENP020436 [CTLA-4]_H3.23_L0.132_scFv(GKPGS)4
EVQLVESGGGLVKPGGSLRLSCAASGFTFSSYTMHWVRQAPGKGLEWVSFISYDGNYKYYADSVKGRFTISRDNAKNSLYLQMNSLRAEDTAVYYCARGGHLGPFDLWGQGTMVTVSSGKPGSGKPGSGKPGSGKPGSEIVLTQSPATLSLSPGERATLSCRASQSVSSSYLAWYQQKPGQAPRLLIYGASSRATGIPDRFSGSGSGTDFTLTISRLEPEDFAVYYCQQYGSSPWTFGQGTKVEIK

SEQ ID NO: 7560 - protein, 118 aa, synthetic construct; identical to SEQ ID NO: 2395
  REGION 1..118: note = Description of Artificial Sequence: Synthetic polypeptide
  REGION 1..118: note = VH of XENP020436

SEQ ID NO: 7561 - protein, 108 aa, synthetic construct; identical to SEQ ID NO: 7471
  REGION 1..108: note = Description of Artificial Sequence: Synthetic polypeptide
  REGION 1..108: note = VL of XENP020436

SEQ ID NO: 7562 - protein, 5 aa, synthetic construct
  REGION 1..5: note = Description of Artificial Sequence: Synthetic peptide
  REGION 1..5: note = XENP020436 vhCDR1
SYTMH

SEQ ID NO: 7563 - protein, 17 aa, synthetic construct
  REGION 1..17: note = Description of Artificial Sequence: Synthetic peptide
  REGION 1..17: note = XENP020436 vhCDR2
FISYDGNYKYYADSVKG

SEQ ID NO: 7564 - protein, 9 aa, synthetic construct
  REGION 1..9: note = Description of Artificial Sequence: Synthetic peptide
  REGION 1..9: note = XENP020436 vhCDR3
GGHLGPFDL

SEQ ID NO: 7565 - protein, 12 aa, synthetic construct
  REGION 1..12: note = Description of Artificial Sequence: Synthetic peptide
  REGION 1..12: note = XENP020436 vlCDR1
RASQSVSSSYLA

SEQ ID NO: 7566 - protein, 7 aa, synthetic construct
  REGION 1..7: note = Description of Artificial Sequence: Synthetic peptide
  REGION 1..7: note = XENP020436 vlCDR2
GASSRAT

SEQ ID NO: 7567 - protein, 9 aa, synthetic construct
  REGION 1..9: note = Description of Artificial Sequence: Synthetic peptide
  REGION 1..9: note = XENP020436 vlCDR3
QQYGSSPWT

SEQ ID NO: 7568 - protein, 246 aa, synthetic construct
  REGION 1..246: note = Description of Artificial Sequence: Synthetic polypeptide
  REGION 1..246: note = XENP020437 [CTLA-4]_H3.25_L0.124_scFv(GKPGS)4
EVQLVESGGGLVKPGGSLRLSCAASGFTFSSYTMHWVRQAPGKGLEWVSFISYDGNYKYYADSVKGRFTISRDNAKNSLYLQMNSLRAEDTAVYYCARGGLLGPFDLWGQGTMVTVSSGKPGSGKPGSGKPGSGKPGSEIVLTQSPATLSVSPGERATLSCRASQSVGSSYLAWYQQKPGQAPRLLIYGASSRATGIPDRFSGSGSGTDFTLTISRLEPEDFAVYYCQQYGSSPWTFGQGTKVEIK

SEQ ID NO: 7569 - protein, 118 aa, synthetic construct; identical to SEQ ID NO: 7326
  REGION 1..118: note = Description of Artificial Sequence: Synthetic polypeptide
  REGION 1..118: note = VH of XENP020437

SEQ ID NO: 7570 - protein, 108 aa, synthetic construct; identical to SEQ ID NO: 7399
  REGION 1..108: note = Description of Artificial Sequence: Synthetic polypeptide
  REGION 1..108: note = VL of XENP020437

SEQ ID NO: 7571 - protein, 5 aa, synthetic construct
  REGION 1..5: note = Description of Artificial Sequence: Synthetic peptide
  REGION 1..5: note = XENP020437 vhCDR1
SYTMH

SEQ ID NO: 7572 - protein, 17 aa, synthetic construct
  REGION 1..17: note = Description of Artificial Sequence: Synthetic peptide
  REGION 1..17: note = XENP020437 vhCDR2
FISYDGNYKYYADSVKG

SEQ ID NO: 7573 - protein, 9 aa, synthetic construct
  REGION 1..9: note = Description of Artificial Sequence: Synthetic peptide
  REGION 1..9: note = XENP020437 vhCDR3
GGLLGPFDL

SEQ ID NO: 7574 - protein, 12 aa, synthetic construct
  REGION 1..12: note = Description of Artificial Sequence: Synthetic peptide
  REGION 1..12: note = XENP020437 vlCDR1
RASQSVGSSYLA

SEQ ID NO: 7575 - protein, 7 aa, synthetic construct
  REGION 1..7: note = Description of Artificial Sequence: Synthetic peptide
  REGION 1..7: note = XENP020437 vlCDR2
GASSRAT

SEQ ID NO: 7576 - protein, 9 aa, synthetic construct
  REGION 1..9: note = Description of Artificial Sequence: Synthetic peptide
  REGION 1..9: note = XENP020437 vlCDR3
QQYGSSPWT

SEQ ID NO: 7577 - protein, 246 aa, synthetic construct
  REGION 1..246: note = Description of Artificial Sequence: Synthetic polypeptide
  REGION 1..246: note = XENP020438 [CTLA-4]_H3.25_L0.129_scFv(GKPGS)4
EVQLVESGGGLVKPGGSLRLSCAASGFTFSSYTMHWVRQAPGKGLEWVSFISYDGNYKYYADSVKGRFTISRDNAKNSLYLQMNSLRAEDTAVYYCARGGLLGPFDLWGQGTMVTVSSGKPGSGKPGSGKPGSGKPGSEIVLTQSPATLSLSPGERATLSCRASQSVGSSYLAWYQQKPGQAPRLLIYGASSRATGIPDRFSGSGSGTDFTLTISRLEPEDFAVYYCQQYGSSPWTFGQGTKVEIK

SEQ ID NO: 7578 - protein, 118 aa, synthetic construct; identical to SEQ ID NO: 7326
  REGION 1..118: note = Description of Artificial Sequence: Synthetic polypeptide
  REGION 1..118: note = VH of XENP020438

SEQ ID NO: 7579 - protein, 108 aa, synthetic construct; identical to SEQ ID NO: 2396
  REGION 1..108: note = Description of Artificial Sequence: Synthetic polypeptide
  REGION 1..108: note = VL of XENP020438

SEQ ID NO: 7580 - protein, 5 aa, synthetic construct
  REGION 1..5: note = Description of Artificial Sequence: Synthetic peptide
  REGION 1..5: note = XENP020438 vhCDR1
SYTMH

SEQ ID NO: 7581 - protein, 17 aa, synthetic construct
  REGION 1..17: note = Description of Artificial Sequence: Synthetic peptide
  REGION 1..17: note = XENP020438 vhCDR2
FISYDGNYKYYADSVKG

SEQ ID NO: 7582 - protein, 9 aa, synthetic construct
  REGION 1..9: note = Description of Artificial Sequence: Synthetic peptide
  REGION 1..9: note = XENP020438 vhCDR3
GGLLGPFDL

SEQ ID NO: 7583 - protein, 12 aa, synthetic construct
  REGION 1..12: note = Description of Artificial Sequence: Synthetic peptide
  REGION 1..12: note = XENP020438 vlCDR1
RASQSVGSSYLA

SEQ ID NO: 7584 - protein, 7 aa, synthetic construct
  REGION 1..7: note = Description of Artificial Sequence: Synthetic peptide
  REGION 1..7: note = XENP020438 vlCDR2
GASSRAT

SEQ ID NO: 7585 - protein, 9 aa, synthetic construct
  REGION 1..9: note = Description of Artificial Sequence: Synthetic peptide
  REGION 1..9: note = XENP020438 vlCDR3
QQYGSSPWT

SEQ ID NO: 7586 - protein, 246 aa, synthetic construct
  REGION 1..246: note = Description of Artificial Sequence: Synthetic polypeptide
  REGION 1..246: note = XENP020439 [CTLA-4]_H3.25_L0.132_scFv(GKPGS)4
EVQLVESGGGLVKPGGSLRLSCAASGFTFSSYTMHWVRQAPGKGLEWVSFISYDGNYKYYADSVKGRFTISRDNAKNSLYLQMNSLRAEDTAVYYCARGGLLGPFDLWGQGTMVTVSSGKPGSGKPGSGKPGSGKPGSEIVLTQSPATLSLSPGERATLSCRASQSVSSSYLAWYQQKPGQAPRLLIYGASSRATGIPDRFSGSGSGTDFTLTISRLEPEDFAVYYCQQYGSSPWTFGQGTKVEIK

SEQ ID NO: 7587 - protein, 118 aa, synthetic construct; identical to SEQ ID NO: 7326
  REGION 1..118: note = Description of Artificial Sequence: Synthetic polypeptide
  REGION 1..118: note = VH of XENP020439

SEQ ID NO: 7588 - protein, 108 aa, synthetic construct; identical to SEQ ID NO: 7471
  REGION 1..108: note = Description of Artificial Sequence: Synthetic polypeptide
  REGION 1..108: note = VL of XENP020439

SEQ ID NO: 7589 - protein, 5 aa, synthetic construct
  REGION 1..5: note = Description of Artificial Sequence: Synthetic peptide
  REGION 1..5: note = XENP020439 vhCDR1
SYTMH

SEQ ID NO: 7590 - protein, 17 aa, synthetic construct
  REGION 1..17: note = Description of Artificial Sequence: Synthetic peptide
  REGION 1..17: note = XENP020439 vhCDR2
FISYDGNYKYYADSVKG

SEQ ID NO: 7591 - protein, 9 aa, synthetic construct
  REGION 1..9: note = Description of Artificial Sequence: Synthetic peptide
  REGION 1..9: note = XENP020439 vhCDR3
GGLLGPFDL

SEQ ID NO: 7592 - protein, 12 aa, synthetic construct
  REGION 1..12: note = Description of Artificial Sequence: Synthetic peptide
  REGION 1..12: note = XENP020439 vlCDR1
RASQSVSSSYLA

SEQ ID NO: 7593 - protein, 7 aa, synthetic construct
  REGION 1..7: note = Description of Artificial Sequence: Synthetic peptide
  REGION 1..7: note = XENP020439 vlCDR2
GASSRAT

SEQ ID NO: 7594 - protein, 9 aa, synthetic construct
  REGION 1..9: note = Description of Artificial Sequence: Synthetic peptide
  REGION 1..9: note = XENP020439 vlCDR3
QQYGSSPWT

SEQ ID NO: 7595 - protein, 221 aa, synthetic construct
  REGION 1..221: note = Description of Artificial Sequence: Synthetic polypeptide
  REGION 1..221: note = XENP009950 [CTLA-4]_H0_L0_Fab_Heavy Chain
QVQLVESGGGVVQPGRSLRLSCAASGFTFSSYTMHWVRQAPGKGLEWVTFISYDGNNKYYADSVKGRFTISRDNSKNTLYLQMNSLRAEDTAIYYCARTGWLGPFDYWGQGTLVTVSSASTKGPSVFPLAPSSKSTSGGTAALGCLVKDYFPEPVTVSWNSGALTSGVHTFPAVLQSSGLYSLSSVVTVPSSSLGTQTYICNVNHKPSNTKVDKKVEPKSC

SEQ ID NO: 7596 - protein, 118 aa, synthetic construct; identical to SEQ ID NO: 3737
  REGION 1..118: note = Description of Artificial Sequence: Synthetic polypeptide
  REGION 1..118: note = VH of XENP009950

SEQ ID NO: 7597 - protein, 5 aa, synthetic construct
  REGION 1..5: note = Description of Artificial Sequence: Synthetic peptide
  REGION 1..5: note = XENP009950 vhCDR1
SYTMH

SEQ ID NO: 7598 - protein, 17 aa, synthetic construct
  REGION 1..17: note = Description of Artificial Sequence: Synthetic peptide
  REGION 1..17: note = XENP009950 vhCDR2
FISYDGNNKYYADSVKG

SEQ ID NO: 7599 - protein, 9 aa, synthetic construct
  REGION 1..9: note = Description of Artificial Sequence: Synthetic peptide
  REGION 1..9: note = XENP009950 vhCDR3
TGWLGPFDY

SEQ ID NO: 7600 - protein, 215 aa, synthetic construct
  REGION 1..215: note = Description of Artificial Sequence: Synthetic polypeptide
  REGION 1..215: note = XENP009950 [CTLA-4]_H0_L0_Fab Light Chain
EIVLTQSPGTLSLSPGERATLSCRASQSVGSSYLAWYQQKPGQAPRLLIYGAFSRATGIPDRFSGSGSGTDFTLTISRLEPEDFAVYYCQQYGSSPWTFGQGTKVEIKRTVAAPSVFIFPPSDEQLKSGTASVVCLLNNFYPREAKVQWKVDNALQSGNSQESVTEQDSKDSTYSLSSTLTLSKADYEKHKVYACEVTHQGLSSPVTKSFNRGEC

SEQ ID NO: 7601 - protein, 108 aa, synthetic construct; identical to SEQ ID NO: 3741
  REGION 1..108: note = Description of Artificial Sequence: Synthetic polypeptide
  REGION 1..108: note = VL of XENP009950

SEQ ID NO: 7602 - protein, 12 aa, synthetic construct
  REGION 1..12: note = Description of Artificial Sequence: Synthetic peptide
  REGION 1..12: note = XENP009950 vlCDR1
RASQSVGSSYLA

SEQ ID NO: 7603 - protein, 7 aa, synthetic construct
  REGION 1..7: note = Description of Artificial Sequence: Synthetic peptide
  REGION 1..7: note = XENP009950 vlCDR2
GAFSRAT

SEQ ID NO: 7604 - protein, 9 aa, synthetic construct
  REGION 1..9: note = Description of Artificial Sequence: Synthetic peptide
  REGION 1..9: note = XENP009950 vlCDR3
QQYGSSPWT

SEQ ID NO: 7605 - protein, 221 aa, synthetic construct
  REGION 1..221: note = Description of Artificial Sequence: Synthetic polypeptide
  REGION 1..221: note = XENP019211 [CTLA-4]_H0.1_L0_Fab Heavy Chain
EVQLVESGGGVVQPGRSLRLSCAASGFTFSSYTMHWVRQAPGKGLEWVTFISYDGNNKYYADSVKGRFTISRDNSKNTLYLQMNSLRAEDTAIYYCARTGWLGPFDYWGQGTLVTVSSASTKGPSVFPLAPSSKSTSGGTAALGCLVKDYFPEPVTVSWNSGALTSGVHTFPAVLQSSGLYSLSSVVTVPSSSLGTQTYICNVNHKPSNTKVDKKVEPKSC

SEQ ID NO: 7606 - protein, 118 aa, synthetic construct; identical to SEQ ID NO: 4869
  REGION 1..118: note = Description of Artificial Sequence: Synthetic polypeptide
  REGION 1..118: note = VH of XENP019211

SEQ ID NO: 7607 - protein, 5 aa, synthetic construct
  REGION 1..5: note = Description of Artificial Sequence: Synthetic peptide
  REGION 1..5: note = XENP019211 vhCDR1
SYTMH

SEQ ID NO: 7608 - protein, 17 aa, synthetic construct
  REGION 1..17: note = Description of Artificial Sequence: Synthetic peptide
  REGION 1..17: note = XENP019211 vhCDR2
FISYDGNNKYYADSVKG

SEQ ID NO: 7609 - protein, 9 aa, synthetic construct
  REGION 1..9: note = Description of Artificial Sequence: Synthetic peptide
  REGION 1..9: note = XENP019211 vhCDR3
TGWLGPFDY

SEQ ID NO: 7610 - protein, 215 aa, synthetic construct; identical to SEQ ID NO: 7600
  REGION 1..215: note = Description of Artificial Sequence: Synthetic polypeptide
  REGION 1..215: note = XENP019211 [CTLA-4]_H0.1_L0_Fab Light Chain

SEQ ID NO: 7611 - protein, 108 aa, synthetic construct; identical to SEQ ID NO: 3741
  REGION 1..108: note = Description of Artificial Sequence: Synthetic polypeptide
  REGION 1..108: note = VL of XENP019211

SEQ ID NO: 7612 - protein, 12 aa, synthetic construct
  REGION 1..12: note = Description of Artificial Sequence: Synthetic peptide
  REGION 1..12: note = XENP019211 vlCDR1
RASQSVGSSYLA

SEQ ID NO: 7613 - protein, 7 aa, synthetic construct
  REGION 1..7: note = Description of Artificial Sequence: Synthetic peptide
  REGION 1..7: note = XENP019211 vlCDR2
GAFSRAT

SEQ ID NO: 7614 - protein, 9 aa, synthetic construct
  REGION 1..9: note = Description of Artificial Sequence: Synthetic peptide
  REGION 1..9: note = XENP019211 vlCDR3
QQYGSSPWT

SEQ ID NO: 7615 - protein, 221 aa, synthetic construct
  REGION 1..221: note = Description of Artificial Sequence: Synthetic polypeptide
  REGION 1..221: note = XENP019212 [CTLA-4]_H0.2_L0_Fab Heavy Chain
QVQLLESGGGVVQPGRSLRLSCAASGFTFSSYTMHWVRQAPGKGLEWVTFISYDGNNKYYADSVKGRFTISRDNSKNTLYLQMNSLRAEDTAIYYCARTGWLGPFDYWGQGTLVTVSSASTKGPSVFPLAPSSKSTSGGTAALGCLVKDYFPEPVTVSWNSGALTSGVHTFPAVLQSSGLYSLSSVVTVPSSSLGTQTYICNVNHKPSNTKVDKKVEPKSC

SEQ ID NO: 7616 - protein, 118 aa, synthetic construct; identical to SEQ ID NO: 4878
  REGION 1..118: note = Description of Artificial Sequence: Synthetic polypeptide
  REGION 1..118: note = VH of XENP019212

SEQ ID NO: 7617 - protein, 5 aa, synthetic construct
  REGION 1..5: note = Description of Artificial Sequence: Synthetic peptide
  REGION 1..5: note = XENP019212 vhCDR1
SYTMH

SEQ ID NO: 7618 - protein, 17 aa, synthetic construct
  REGION 1..17: note = Description of Artificial Sequence: Synthetic peptide
  REGION 1..17: note = XENP019212 vhCDR2
FISYDGNNKYYADSVKG

SEQ ID NO: 7619 - protein, 9 aa, synthetic construct
  REGION 1..9: note = Description of Artificial Sequence: Synthetic peptide
  REGION 1..9: note = XENP019212 vhCDR3
TGWLGPFDY

SEQ ID NO: 7620 - protein, 215 aa, synthetic construct; identical to SEQ ID NO: 7600
  REGION 1..215: note = Description of Artificial Sequence: Synthetic polypeptide
  REGION 1..215: note = XENP019212 [CTLA-4]_H0.2_L0_Fab Light Chain

SEQ ID NO: 7621 - protein, 108 aa, synthetic construct; identical to SEQ ID NO: 3741
  REGION 1..108: note = Description of Artificial Sequence: Synthetic polypeptide
  REGION 1..108: note = VL of XENP019212

SEQ ID NO: 7622 - protein, 12 aa, synthetic construct
  REGION 1..12: note = Description of Artificial Sequence: Synthetic peptide
  REGION 1..12: note = XENP019212 vlCDR1
RASQSVGSSYLA

SEQ ID NO: 7623 - protein, 7 aa, synthetic construct
  REGION 1..7: note = Description of Artificial Sequence: Synthetic peptide
  REGION 1..7: note = XENP019212 vlCDR2
GAFSRAT

SEQ ID NO: 7624 - protein, 9 aa, synthetic construct
  REGION 1..9: note = Description of Artificial Sequence: Synthetic peptide
  REGION 1..9: note = XENP019212 vlCDR3
QQYGSSPWT

SEQ ID NO: 7625 - protein, 221 aa, synthetic construct
  REGION 1..221: note = Description of Artificial Sequence: Synthetic polypeptide
  REGION 1..221: note = XENP019213 [CTLA-4]_H0.3_L0_Fab Heavy Chain
QVQLVESGGGLVQPGRSLRLSCAASGFTFSSYTMHWVRQAPGKGLEWVTFISYDGNNKYYADSVKGRFTISRDNSKNTLYLQMNSLRAEDTAIYYCARTGWLGPFDYWGQGTLVTVSSASTKGPSVFPLAPSSKSTSGGTAALGCLVKDYFPEPVTVSWNSGALTSGVHTFPAVLQSSGLYSLSSVVTVPSSSLGTQTYICNVNHKPSNTKVDKKVEPKSC

SEQ ID NO: 7626 - protein, 118 aa, synthetic construct; identical to SEQ ID NO: 4887
  REGION 1..118: note = Description of Artificial Sequence: Synthetic polypeptide
  REGION 1..118: note = VH of XENP019213

SEQ ID NO: 7627 - protein, 5 aa, synthetic construct
  REGION 1..5: note = Description of Artificial Sequence: Synthetic peptide
  REGION 1..5: note = XENP019213 vhCDR1
SYTMH

SEQ ID NO: 7628 - protein, 17 aa, synthetic construct
  REGION 1..17: note = Description of Artificial Sequence: Synthetic peptide
  REGION 1..17: note = XENP019213 vhCDR2
FISYDGNNKYYADSVKG

SEQ ID NO: 7629 - protein, 9 aa, synthetic construct
  REGION 1..9: note = Description of Artificial Sequence: Synthetic peptide
  REGION 1..9: note = XENP019213 vhCDR3
TGWLGPFDY

SEQ ID NO: 7630 - protein, 215 aa, synthetic construct; identical to SEQ ID NO: 7600
  REGION 1..215: note = Description of Artificial Sequence: Synthetic polypeptide
  REGION 1..215: note = XENP019213 [CTLA-4]_H0.3_L0_Fab Light Chain

SEQ ID NO: 7631 - protein, 108 aa, synthetic construct; identical to SEQ ID NO: 3741
  REGION 1..108: note = Description of Artificial Sequence: Synthetic polypeptide
  REGION 1..108: note = VL of XENP019213

SEQ ID NO: 7632 - protein, 12 aa, synthetic construct
  REGION 1..12: note = Description of Artificial Sequence: Synthetic peptide
  REGION 1..12: note = XENP019213 vlCDR1
RASQSVGSSYLA

SEQ ID NO: 7633 - protein, 7 aa, synthetic construct
  REGION 1..7: note = Description of Artificial Sequence: Synthetic peptide
  REGION 1..7: note = XENP019213 vlCDR2
GAFSRAT

SEQ ID NO: 7634 - protein, 9 aa, synthetic construct
  REGION 1..9: note = Description of Artificial Sequence: Synthetic peptide
  REGION 1..9: note = XENP019213 vlCDR3
QQYGSSPWT

SEQ ID NO: 7635 - protein, 221 aa, synthetic construct
  REGION 1..221: note = Description of Artificial Sequence: Synthetic polypeptide
  REGION 1..221: note = XENP019214 [CTLA-4]_H0.4_L0_Fab Heavy Chain
QVQLVESGGGVKQPGRSLRLSCAASGFTFSSYTMHWVRQAPGKGLEWVTFISYDGNNKYYADSVKGRFTISRDNSKNTLYLQMNSLRAEDTAIYYCARTGWLGPFDYWGQGTLVTVSSASTKGPSVFPLAPSSKSTSGGTAALGCLVKDYFPEPVTVSWNSGALTSGVHTFPAVLQSSGLYSLSSVVTVPSSSLGTQTYICNVNHKPSNTKVDKKVEPKSC

SEQ ID NO: 7636 - protein, 118 aa, synthetic construct; identical to SEQ ID NO: 4896
  REGION 1..118: note = Description of Artificial Sequence: Synthetic polypeptide
  REGION 1..118: note = VH of XENP019214

SEQ ID NO: 7637 - protein, 5 aa, synthetic construct
  REGION 1..5: note = Description of Artificial Sequence: Synthetic peptide
  REGION 1..5: note = XENP019214 vhCDR1
SYTMH

SEQ ID NO: 7638 - protein, 17 aa, synthetic construct
  REGION 1..17: note = Description of Artificial Sequence: Synthetic peptide
  REGION 1..17: note = XENP019214 vhCDR2
FISYDGNNKYYADSVKG

SEQ ID NO: 7639 - protein, 9 aa, synthetic construct
  REGION 1..9: note = Description of Artificial Sequence: Synthetic peptide
  REGION 1..9: note = XENP019214 vhCDR3
TGWLGPFDY

SEQ ID NO: 7640 - protein, 215 aa, synthetic construct; identical to SEQ ID NO: 7600
  REGION 1..215: note = Description of Artificial Sequence: Synthetic polypeptide
  REGION 1..215: note = XENP019214 [CTLA-4]_H0.4_L0_Fab Light Chain

SEQ ID NO: 7641 - protein, 108 aa, synthetic construct; identical to SEQ ID NO: 3741
  REGION 1..108: note = Description of Artificial Sequence: Synthetic polypeptide
  REGION 1..108: note = VL of XENP019214

SEQ ID NO: 7642 - protein, 12 aa, synthetic construct
  REGION 1..12: note = Description of Artificial Sequence: Synthetic peptide
  REGION 1..12: note = XENP019214 vlCDR1
RASQSVGSSYLA

SEQ ID NO: 7643 - protein, 7 aa, synthetic construct
  REGION 1..7: note = Description of Artificial Sequence: Synthetic peptide
  REGION 1..7: note = XENP019214 vlCDR2
GAFSRAT

SEQ ID NO: 7644 - protein, 9 aa, synthetic construct
  REGION 1..9: note = Description of Artificial Sequence: Synthetic peptide
  REGION 1..9: note = XENP019214 vlCDR3
QQYGSSPWT

SEQ ID NO: 7645 - protein, 221 aa, synthetic construct
  REGION 1..221: note = Description of Artificial Sequence: Synthetic polypeptide
  REGION 1..221: note = XENP019215 [CTLA-4]_H0.5_L0_Fab Heavy Chain
QVQLVESGGGVKQPGESLRLSCAASGFTFSSYTMHWVRQAPGKGLEWVTFISYDGNNKYYADSVKGRFTISRDNSKNTLYLQMNSLRAEDTAIYYCARTGWLGPFDYWGQGTLVTVSSASTKGPSVFPLAPSSKSTSGGTAALGCLVKDYFPEPVTVSWNSGALTSGVHTFPAVLQSSGLYSLSSVVTVPSSSLGTQTYICNVNHKPSNTKVDKKVEPKSC

SEQ ID NO: 7646 - protein, 118 aa, synthetic construct; identical to SEQ ID NO: 4905
  REGION 1..118: note = Description of Artificial Sequence: Synthetic polypeptide
  REGION 1..118: note = VH of XENP019215

SEQ ID NO: 7647 - protein, 5 aa, synthetic construct
  REGION 1..5: note = Description of Artificial Sequence: Synthetic peptide
  REGION 1..5: note = XENP019215 vhCDR1
SYTMH

SEQ ID NO: 7648 - protein, 17 aa, synthetic construct
  REGION 1..17: note = Description of Artificial Sequence: Synthetic peptide
  REGION 1..17: note = XENP019215 vhCDR2
FISYDGNNKYYADSVKG

SEQ ID NO: 7649 - protein, 9 aa, synthetic construct
  REGION 1..9: note = Description of Artificial Sequence: Synthetic peptide
  REGION 1..9: note = XENP019215 vhCDR3
TGWLGPFDY

SEQ ID NO: 7650 - protein, 215 aa, synthetic construct; identical to SEQ ID NO: 7600
  REGION 1..215: note = Description of Artificial Sequence: Synthetic polypeptide
  REGION 1..215: note = XENP019215 [CTLA-4]_H0.5_L0_Fab Light Chain

SEQ ID NO: 7651 - protein, 108 aa, synthetic construct; identical to SEQ ID NO: 3741
  REGION 1..108: note = Description of Artificial Sequence: Synthetic polypeptide
  REGION 1..108: note = VL of XENP019215

SEQ ID NO: 7652 - protein, 12 aa, synthetic construct
  REGION 1..12: note = Description of Artificial Sequence: Synthetic peptide
  REGION 1..12: note = XENP019215 vlCDR1
RASQSVGSSYLA

SEQ ID NO: 7653 - protein, 7 aa, synthetic construct
  REGION 1..7: note = Description of Artificial Sequence: Synthetic peptide
  REGION 1..7: note = XENP019215 vlCDR2
GAFSRAT

SEQ ID NO: 7654 - protein, 9 aa, synthetic construct
  REGION 1..9: note = Description of Artificial Sequence: Synthetic peptide
  REGION 1..9: note = XENP019215 vlCDR3
QQYGSSPWT

SEQ ID NO: 7655 - protein, 221 aa, synthetic construct
  REGION 1..221: note = Description of Artificial Sequence: Synthetic polypeptide
  REGION 1..221: note = XENP019216 [CTLA-4]_H0.6_L0_Fab Heavy Chain
QVQLVESGGGVVKPGRSLRLSCAASGFTFSSYTMHWVRQAPGKGLEWVTFISYDGNNKYYADSVKGRFTISRDNSKNTLYLQMNSLRAEDTAIYYCARTGWLGPFDYWGQGTLVTVSSASTKGPSVFPLAPSSKSTSGGTAALGCLVKDYFPEPVTVSWNSGALTSGVHTFPAVLQSSGLYSLSSVVTVPSSSLGTQTYICNVNHKPSNTKVDKKVEPKSC

SEQ ID NO: 7656 - protein, 118 aa, synthetic construct; identical to SEQ ID NO: 4914
  REGION 1..118: note = Description of Artificial Sequence: Synthetic polypeptide
  REGION 1..118: note = VH of XENP019216

SEQ ID NO: 7657 - protein, 5 aa, synthetic construct
  REGION 1..5: note = Description of Artificial Sequence: Synthetic peptide
  REGION 1..5: note = XENP019216 vhCDR1
SYTMH

SEQ ID NO: 7658 - protein, 17 aa, synthetic construct
  REGION 1..17: note = Description of Artificial Sequence: Synthetic peptide
  REGION 1..17: note = XENP019216 vhCDR2
FISYDGNNKYYADSVKG

SEQ ID NO: 7659 - protein, 9 aa, synthetic construct
  REGION 1..9: note = Description of Artificial Sequence: Synthetic peptide
  REGION 1..9: note = XENP019216 vhCDR3
TGWLGPFDY

SEQ ID NO: 7660 - protein, 215 aa, synthetic construct; identical to SEQ ID NO: 7600
  REGION 1..215: note = Description of Artificial Sequence: Synthetic polypeptide
  REGION 1..215: note = XENP019216 [CTLA-4]_H0.6_L0_Fab Light Chain

SEQ ID NO: 7661 - protein, 108 aa, synthetic construct; identical to SEQ ID NO: 3741
  REGION 1..108: note = Description of Artificial Sequence: Synthetic polypeptide
  REGION 1..108: note = VL of XENP019216

SEQ ID NO: 7662 - protein, 12 aa, synthetic construct
  REGION 1..12: note = Description of Artificial Sequence: Synthetic peptide
  REGION 1..12: note = XENP019216 vlCDR1
RASQSVGSSYLA

SEQ ID NO: 7663 - protein, 7 aa, synthetic construct
  REGION 1..7: note = Description of Artificial Sequence: Synthetic peptide
  REGION 1..7: note = XENP019216 vlCDR2
GAFSRAT

SEQ ID NO: 7664 - protein, 9 aa, synthetic construct
  REGION 1..9: note = Description of Artificial Sequence: Synthetic peptide
  REGION 1..9: note = XENP019216 vlCDR3
QQYGSSPWT

SEQ ID NO: 7665 - protein, 221 aa, synthetic construct
  REGION 1..221: note = Description of Artificial Sequence: Synthetic polypeptide
  REGION 1..221: note = XENP019217 [CTLA-4]_H0.7_L0_Fab Heavy Chain
QVQLVESGGGVVEPGRSLRLSCAASGFTFSSYTMHWVRQAPGKGLEWVTFISYDGNNKYYADSVKGRFTISRDNSKNTLYLQMNSLRAEDTAIYYCARTGWLGPFDYWGQGTLVTVSSASTKGPSVFPLAPSSKSTSGGTAALGCLVKDYFPEPVTVSWNSGALTSGVHTFPAVLQSSGLYSLSSVVTVPSSSLGTQTYICNVNHKPSNTKVDKKVEPKSC

SEQ ID NO: 7666 - protein, 118 aa, synthetic construct; identical to SEQ ID NO: 4923
  REGION 1..118: note = Description of Artificial Sequence: Synthetic polypeptide
  REGION 1..118: note = VH of XENP019217

SEQ ID NO: 7667 - protein, 5 aa, synthetic construct
  REGION 1..5: note = Description of Artificial Sequence: Synthetic peptide
  REGION 1..5: note = XENP019217 vhCDR1
SYTMH

SEQ ID NO: 7668 - protein, 17 aa, synthetic construct
  REGION 1..17: note = Description of Artificial Sequence: Synthetic peptide
  REGION 1..17: note = XENP019217 vhCDR2
FISYDGNNKYYADSVKG

SEQ ID NO: 7669 - protein, 9 aa, synthetic construct
  REGION 1..9: note = Description of Artificial Sequence: Synthetic peptide
  REGION 1..9: note = XENP019217 vhCDR3
TGWLGPFDY

SEQ ID NO: 7670 - protein, 215 aa, synthetic construct; identical to SEQ ID NO: 7600
  REGION 1..215: note = Description of Artificial Sequence: Synthetic polypeptide
  REGION 1..215: note = XENP019217 [CTLA-4]_H0.7_L0_Fab Light Chain

SEQ ID NO: 7671 - protein, 108 aa, synthetic construct; identical to SEQ ID NO: 3741
  REGION 1..108: note = Description of Artificial Sequence: Synthetic polypeptide
  REGION 1..108: note = VL of XENP019217

SEQ ID NO: 7672 - protein, 12 aa, synthetic construct
  REGION 1..12: note = Description of Artificial Sequence: Synthetic peptide
  REGION 1..12: note = XENP019217 vlCDR1
RASQSVGSSYLA

SEQ ID NO: 7673 - protein, 7 aa, synthetic construct
  REGION 1..7: note = Description of Artificial Sequence: Synthetic peptide
  REGION 1..7: note = XENP019217 vlCDR2
GAFSRAT

SEQ ID NO: 7674 - protein, 9 aa, synthetic construct
  REGION 1..9: note = Description of Artificial Sequence: Synthetic peptide
  REGION 1..9: note = XENP019217 vlCDR3
QQYGSSPWT

SEQ ID NO: 7675 - protein, 221 aa, synthetic construct
  REGION 1..221: note = Description of Artificial Sequence: Synthetic polypeptide
  REGION 1..221: note = XENP019218 [CTLA-4]_H0.8_L0_Fab Heavy Chain
QVQLVESGGGVVQPGGSLRLSCAASGFTFSSYTMHWVRQAPGKGLEWVTFISYDGNNKYYADSVKGRFTISRDNSKNTLYLQMNSLRAEDTAIYYCARTGWLGPFDYWGQGTLVTVSSASTKGPSVFPLAPSSKSTSGGTAALGCLVKDYFPEPVTVSWNSGALTSGVHTFPAVLQSSGLYSLSSVVTVPSSSLGTQTYICNVNHKPSNTKVDKKVEPKSC

SEQ ID NO: 7676 - protein, 118 aa, synthetic construct; identical to SEQ ID NO: 4932
  REGION 1..118: note = Description of Artificial Sequence: Synthetic polypeptide
  REGION 1..118: note = VH of XENP019218

SEQ ID NO: 7677 - protein, 5 aa, synthetic construct
  REGION 1..5: note = Description of Artificial Sequence: Synthetic peptide
  REGION 1..5: note = XENP019218 vhCDR1
SYTMH

SEQ ID NO: 7678 - protein, 17 aa, synthetic construct
  REGION 1..17: note = Description of Artificial Sequence: Synthetic peptide
  REGION 1..17: note = XENP019218 vhCDR2
FISYDGNNKYYADSVKG

SEQ ID NO: 7679 - protein, 9 aa, synthetic construct
  REGION 1..9: note = Description of Artificial Sequence: Synthetic peptide
  REGION 1..9: note = XENP019218 vhCDR3
TGWLGPFDY

SEQ ID NO: 7680 - protein, 215 aa, synthetic construct; identical to SEQ ID NO: 7600
  REGION 1..215: note = Description of Artificial Sequence: Synthetic polypeptide
  REGION 1..215: note = XENP019218 [CTLA-4]_H0.8_L0_Fab Light Chain

SEQ ID NO: 7681 - protein, 108 aa, synthetic construct; identical to SEQ ID NO: 3741
  REGION 1..108: note = Description of Artificial Sequence: Synthetic polypeptide
  REGION 1..108: note = VL of XENP019218

SEQ ID NO: 7682 - protein, 12 aa, synthetic construct
  REGION 1..12: note = Description of Artificial Sequence: Synthetic peptide
  REGION 1..12: note = XENP019218 vlCDR1
RASQSVGSSYLA

SEQ ID NO: 7683 - protein, 7 aa, synthetic construct
  REGION 1..7: note = Description of Artificial Sequence: Synthetic peptide
  REGION 1..7: note = XENP019218 vlCDR2
GAFSRAT

SEQ ID NO: 7684 - protein, 9 aa, synthetic construct
  REGION 1..9: note = Description of Artificial Sequence: Synthetic peptide
  REGION 1..9: note = XENP019218 vlCDR3
QQYGSSPWT

SEQ ID NO: 7685 - protein, 221 aa, synthetic construct
  REGION 1..221: note = Description of Artificial Sequence: Synthetic polypeptide
  REGION 1..221: note = XENP019219 [CTLA-4]_H0.9_L0_Fab Heavy Chain
QVQLVESGGGVVQPGESLRLSCAASGFTFSSYTMHWVRQAPGKGLEWVTFISYDGNNKYYADSVKGRFTISRDNSKNTLYLQMNSLRAEDTAIYYCARTGWLGPFDYWGQGTLVTVSSASTKGPSVFPLAPSSKSTSGGTAALGCLVKDYFPEPVTVSWNSGALTSGVHTFPAVLQSSGLYSLSSVVTVPSSSLGTQTYICNVNHKPSNTKVDKKVEPKSC

SEQ ID NO: 7686 - protein, 118 aa, synthetic construct; identical to SEQ ID NO: 4941
  REGION 1..118: note = Description of Artificial Sequence: Synthetic polypeptide
  REGION 1..118: note = VH of XENP019219

SEQ ID NO: 7687 - protein, 5 aa, synthetic construct
  REGION 1..5: note = Description of Artificial Sequence: Synthetic peptide
  REGION 1..5: note = XENP019219 vhCDR1
SYTMH

SEQ ID NO: 7688 - protein, 17 aa, synthetic construct
  REGION 1..17: note = Description of Artificial Sequence: Synthetic peptide
  REGION 1..17: note = XENP019219 vhCDR2
FISYDGNNKYYADSVKG

SEQ ID NO: 7689 - protein, 9 aa, synthetic construct
  REGION 1..9: note = Description of Artificial Sequence: Synthetic peptide
  REGION 1..9: note = XENP019219 vhCDR3
TGWLGPFDY

SEQ ID NO: 7690 - protein, 215 aa, synthetic construct; identical to SEQ ID NO: 7600
  REGION 1..215: note = Description of Artificial Sequence: Synthetic polypeptide
  REGION 1..215: note = XENP019219 [CTLA-4]_H0.9_L0_Fab Light Chain

SEQ ID NO: 7691 - protein, 108 aa, synthetic construct; identical to SEQ ID NO: 3741
  REGION 1..108: note = Description of Artificial Sequence: Synthetic polypeptide
  REGION 1..108: note = VL of XENP019219

SEQ ID NO: 7692 - protein, 12 aa, synthetic construct
  REGION 1..12: note = Description of Artificial Sequence: Synthetic peptide
  REGION 1..12: note = XENP019219 vlCDR1
RASQSVGSSYLA

SEQ ID NO: 7693 - protein, 7 aa, synthetic construct
  REGION 1..7: note = Description of Artificial Sequence: Synthetic peptide
  REGION 1..7: note = XENP019219 vlCDR2
GAFSRAT

SEQ ID NO: 7694 - protein, 9 aa, synthetic construct
  REGION 1..9: note = Description of Artificial Sequence: Synthetic peptide
  REGION 1..9: note = XENP019219 vlCDR3
QQYGSSPWT

SEQ ID NO: 7695 - protein, 221 aa, synthetic construct
  REGION 1..221: note = Description of Artificial Sequence: Synthetic polypeptide
  REGION 1..221: note = XENP019220 [CTLA-4]_H0.10_L0_Fab Heavy Chain
QVQLVESGGGVVQPGRSLKLSCAASGFTFSSYTMHWVRQAPGKGLEWVTFISYDGNNKYYADSVKGRFTISRDNSKNTLYLQMNSLRAEDTAIYYCARTGWLGPFDYWGQGTLVTVSSASTKGPSVFPLAPSSKSTSGGTAALGCLVKDYFPEPVTVSWNSGALTSGVHTFPAVLQSSGLYSLSSVVTVPSSSLGTQTYICNVNHKPSNTKVDKKVEPKSC

SEQ ID NO: 7696 - protein, 118 aa, synthetic construct; identical to SEQ ID NO: 4950
  REGION 1..118: note = Description of Artificial Sequence: Synthetic polypeptide
  REGION 1..118: note = VH of XENP019220

SEQ ID NO: 7697 - protein, 5 aa, synthetic construct
  REGION 1..5: note = Description of Artificial Sequence: Synthetic peptide
  REGION 1..5: note = XENP019220 vhCDR1
SYTMH

SEQ ID NO: 7698 - protein, 17 aa, synthetic construct
  REGION 1..17: note = Description of Artificial Sequence: Synthetic peptide
  REGION 1..17: note = XENP019220 vhCDR2
FISYDGNNKYYADSVKG

SEQ ID NO: 7699 - protein, 9 aa, synthetic construct
  REGION 1..9: note = Description of Artificial Sequence: Synthetic peptide
  REGION 1..9: note = XENP019220 vhCDR3
TGWLGPFDY

SEQ ID NO: 7700 - protein, 215 aa, synthetic construct; identical to SEQ ID NO: 7600
  REGION 1..215: note = Description of Artificial Sequence: Synthetic polypeptide
  REGION 1..215: note = XENP019220 [CTLA-4]_H0.10_L0_Fab Light Chain

SEQ ID NO: 7701 - protein, 108 aa, synthetic construct; identical to SEQ ID NO: 3741
  REGION 1..108: note = Description of Artificial Sequence: Synthetic polypeptide
  REGION 1..108: note = VL of XENP019220

SEQ ID NO: 7702 - protein, 12 aa, synthetic construct
  REGION 1..12: note = Description of Artificial Sequence: Synthetic peptide
  REGION 1..12: note = XENP019220 vlCDR1
RASQSVGSSYLA

SEQ ID NO: 7703 - protein, 7 aa, synthetic construct
  REGION 1..7: note = Description of Artificial Sequence: Synthetic peptide
  REGION 1..7: note = XENP019220 vlCDR2
GAFSRAT

SEQ ID NO: 7704 - protein, 9 aa, synthetic construct
  REGION 1..9: note = Description of Artificial Sequence: Synthetic peptide
  REGION 1..9: note = XENP019220 vlCDR3
QQYGSSPWT

SEQ ID NO: 7705 - protein, 221 aa, synthetic construct
  REGION 1..221: note = Description of Artificial Sequence: Synthetic polypeptide
  REGION 1..221: note = XENP019221 [CTLA-4]_H0.11_L0_Fab Heavy Chain
QVQLVESGGGVVQPGRSLRLSCAASGFTVSSYTMHWVRQAPGKGLEWVTFISYDGNNKYYADSVKGRFTISRDNSKNTLYLQMNSLRAEDTAIYYCARTGWLGPFDYWGQGTLVTVSSASTKGPSVFPLAPSSKSTSGGTAALGCLVKDYFPEPVTVSWNSGALTSGVHTFPAVLQSSGLYSLSSVVTVPSSSLGTQTYICNVNHKPSNTKVDKKVEPKSC

SEQ ID NO: 7706 - protein, 118 aa, synthetic construct; identical to SEQ ID NO: 4959
  REGION 1..118: note = Description of Artificial Sequence: Synthetic polypeptide
  REGION 1..118: note = VH of XENP019221

SEQ ID NO: 7707 - protein, 5 aa, synthetic construct
  REGION 1..5: note = Description of Artificial Sequence: Synthetic peptide
  REGION 1..5: note = XENP019221 vhCDR1
SYTMH

SEQ ID NO: 7708 - protein, 17 aa, synthetic construct
  REGION 1..17: note = Description of Artificial Sequence: Synthetic peptide
  REGION 1..17: note = XENP019221 vhCDR2
FISYDGNNKYYADSVKG

SEQ ID NO: 7709 - protein, 9 aa, synthetic construct
  REGION 1..9: note = Description of Artificial Sequence: Synthetic peptide
  REGION 1..9: note = XENP019221 vhCDR3
TGWLGPFDY

SEQ ID NO: 7710 - protein, 215 aa, synthetic construct; identical to SEQ ID NO: 7600
  REGION 1..215: note = Description of Artificial Sequence: Synthetic polypeptide
  REGION 1..215: note = XENP019221 [CTLA-4]_H0.11_L0_Fab Light Chain

SEQ ID NO: 7711 - protein, 108 aa, synthetic construct; identical to SEQ ID NO: 3741
  REGION 1..108: note = Description of Artificial Sequence: Synthetic polypeptide
  REGION 1..108: note = VL of XENP019221

SEQ ID NO: 7712 - protein, 12 aa, synthetic construct
  REGION 1..12: note = Description of Artificial Sequence: Synthetic peptide
  REGION 1..12: note = XENP019221 vlCDR1
RASQSVGSSYLA

SEQ ID NO: 7713 - protein, 7 aa, synthetic construct
  REGION 1..7: note = Description of Artificial Sequence: Synthetic peptide
  REGION 1..7: note = XENP019221 vlCDR2
GAFSRAT

SEQ ID NO: 7714 - protein, 9 aa, synthetic construct
  REGION 1..9: note = Description of Artificial Sequence: Synthetic peptide
  REGION 1..9: note = XENP019221 vlCDR3
QQYGSSPWT

SEQ ID NO: 7715 - protein, 221 aa, synthetic construct
  REGION 1..221: note = Description of Artificial Sequence: Synthetic polypeptide
  REGION 1..221: note = XENP019222 [CTLA-4]_H0.12_L0_Fab Heavy Chain
QVQLVESGGGVVQPGRSLRLSCAASGFTFSAYTMHWVRQAPGKGLEWVTFISYDGNNKYYADSVKGRFTISRDNSKNTLYLQMNSLRAEDTAIYYCARTGWLGPFDYWGQGTLVTVSSASTKGPSVFPLAPSSKSTSGGTAALGCLVKDYFPEPVTVSWNSGALTSGVHTFPAVLQSSGLYSLSSVVTVPSSSLGTQTYICNVNHKPSNTKVDKKVEPKSC

SEQ ID NO: 7716 - protein, 118 aa, synthetic construct; identical to SEQ ID NO: 4968
  REGION 1..118: note = Description of Artificial Sequence: Synthetic polypeptide
  REGION 1..118: note = VH of XENP019222

SEQ ID NO: 7717 - protein, 5 aa, synthetic construct
  REGION 1..5: note = Description of Artificial Sequence: Synthetic peptide
  REGION 1..5: note = XENP019222 vhCDR1
AYTMH

SEQ ID NO: 7718 - protein, 17 aa, synthetic construct
  REGION 1..17: note = Description of Artificial Sequence: Synthetic peptide
  REGION 1..17: note = XENP019222 vhCDR2
FISYDGNNKYYADSVKG

SEQ ID NO: 7719 - protein, 9 aa, synthetic construct
  REGION 1..9: note = Description of Artificial Sequence: Synthetic peptide
  REGION 1..9: note = XENP019222 vhCDR3
TGWLGPFDY

SEQ ID NO: 7720 - protein, 215 aa, synthetic construct; identical to SEQ ID NO: 7600
  REGION 1..215: note = Description of Artificial Sequence: Synthetic polypeptide
  REGION 1..215: note = XENP019222 [CTLA-4]_H0.12_L0_Fab Light Chain

SEQ ID NO: 7721 - protein, 108 aa, synthetic construct; identical to SEQ ID NO: 3741
  REGION 1..108: note = Description of Artificial Sequence: Synthetic polypeptide
  REGION 1..108: note = VL of XENP019222

SEQ ID NO: 7722 - protein, 12 aa, synthetic construct
  REGION 1..12: note = Description of Artificial Sequence: Synthetic peptide
  REGION 1..12: note = XENP019222 vlCDR1
RASQSVGSSYLA

SEQ ID NO: 7723 - protein, 7 aa, synthetic construct
  REGION 1..7: note = Description of Artificial Sequence: Synthetic peptide
  REGION 1..7: note = XENP019222 vlCDR2
GAFSRAT

SEQ ID NO: 7724 - protein, 9 aa, synthetic construct
  REGION 1..9: note = Description of Artificial Sequence: Synthetic peptide
  REGION 1..9: note = XENP019222 vlCDR3
QQYGSSPWT

SEQ ID NO: 7725 - protein, 221 aa, synthetic construct
  REGION 1..221: note = Description of Artificial Sequence: Synthetic polypeptide
  REGION 1..221: note = XENP019223 [CTLA-4]_H0.13_L0_Fab Heavy Chain
QVQLVESGGGVVQPGRSLRLSCAASGFTFSDYTMHWVRQAPGKGLEWVTFISYDGNNKYYADSVKGRFTISRDNSKNTLYLQMNSLRAEDTAIYYCARTGWLGPFDYWGQGTLVTVSSASTKGPSVFPLAPSSKSTSGGTAALGCLVKDYFPEPVTVSWNSGALTSGVHTFPAVLQSSGLYSLSSVVTVPSSSLGTQTYICNVNHKPSNTKVDKKVEPKSC

SEQ ID NO: 7726 - protein, 118 aa, synthetic construct; identical to SEQ ID NO: 4977
  REGION 1..118: note = Description of Artificial Sequence: Synthetic polypeptide
  REGION 1..118: note = VH of XENP019223

SEQ ID NO: 7727 - protein, 5 aa, synthetic construct
  REGION 1..5: note = Description of Artificial Sequence: Synthetic peptide
  REGION 1..5: note = XENP019223 vhCDR1
DYTMH

SEQ ID NO: 7728 - protein, 17 aa, synthetic construct
  REGION 1..17: note = Description of Artificial Sequence: Synthetic peptide
  REGION 1..17: note = XENP019223 vhCDR2
FISYDGNNKYYADSVKG

SEQ ID NO: 7729 - protein, 9 aa, synthetic construct
  REGION 1..9: note = Description of Artificial Sequence: Synthetic peptide
  REGION 1..9: note = XENP019223 vhCDR3
TGWLGPFDY

SEQ ID NO: 7730 - protein, 215 aa, synthetic construct; identical to SEQ ID NO: 7600
  REGION 1..215: note = Description of Artificial Sequence: Synthetic polypeptide
  REGION 1..215: note = XENP019223 [CTLA-4]_H0.13_L0_Fab Light Chain

SEQ ID NO: 7731 - protein, 108 aa, synthetic construct; identical to SEQ ID NO: 3741
  REGION 1..108: note = Description of Artificial Sequence: Synthetic polypeptide
  REGION 1..108: note = VL of XENP019223

SEQ ID NO: 7732 - protein, 12 aa, synthetic construct
  REGION 1..12: note = Description of Artificial Sequence: Synthetic peptide
  REGION 1..12: note = XENP019223 vlCDR1
RASQSVGSSYLA

SEQ ID NO: 7733 - protein, 7 aa, synthetic construct
  REGION 1..7: note = Description of Artificial Sequence: Synthetic peptide
  REGION 1..7: note = XENP019223 vlCDR2
GAFSRAT

SEQ ID NO: 7734 - protein, 9 aa, synthetic construct
  REGION 1..9: note = Description of Artificial Sequence: Synthetic peptide
  REGION 1..9: note = XENP019223 vlCDR3
QQYGSSPWT

SEQ ID NO: 7735 - protein, 221 aa, synthetic construct
  REGION 1..221: note = Description of Artificial Sequence: Synthetic polypeptide
  REGION 1..221: note = XENP019224 [CTLA-4]_H0.14_L0_Fab Heavy Chain
QVQLVESGGGVVQPGRSLRLSCAASGFTFSGYTMHWVRQAPGKGLEWVTFISYDGNNKYYADSVKGRFTISRDNSKNTLYLQMNSLRAEDTAIYYCARTGWLGPFDYWGQGTLVTVSSASTKGPSVFPLAPSSKSTSGGTAALGCLVKDYFPEPVTVSWNSGALTSGVHTFPAVLQSSGLYSLSSVVTVPSSSLGTQTYICNVNHKPSNTKVDKKVEPKSC

SEQ ID NO: 7736 - protein, 118 aa, synthetic construct; identical to SEQ ID NO: 4986
  REGION 1..118: note = Description of Artificial Sequence: Synthetic polypeptide
  REGION 1..118: note = VH of XENP019224

SEQ ID NO: 7737 - protein, 5 aa, synthetic construct
  REGION 1..5: note = Description of Artificial Sequence: Synthetic peptide
  REGION 1..5: note = XENP019224 vhCDR1
GYTMH

SEQ ID NO: 7738 - protein, 17 aa, synthetic construct
  REGION 1..17: note = Description of Artificial Sequence: Synthetic peptide
  REGION 1..17: note = XENP019224 vhCDR2
FISYDGNNKYYADSVKG

SEQ ID NO: 7739 - protein, 9 aa, synthetic construct
  REGION 1..9: note = Description of Artificial Sequence: Synthetic peptide
  REGION 1..9: note = XENP019224 vhCDR3
TGWLGPFDY

SEQ ID NO: 7740 - protein, 215 aa, synthetic construct; identical to SEQ ID NO: 7600
  REGION 1..215: note = Description of Artificial Sequence: Synthetic polypeptide
  REGION 1..215: note = XENP019224 [CTLA-4]_H0.14_L0_Fab Light Chain

SEQ ID NO: 7741 - protein, 108 aa, synthetic construct; identical to SEQ ID NO: 3741
  REGION 1..108: note = Description of Artificial Sequence: Synthetic polypeptide
  REGION 1..108: note = VL of XENP019224

SEQ ID NO: 7742 - protein, 12 aa, synthetic construct
  REGION 1..12: note = Description of Artificial Sequence: Synthetic peptide
  REGION 1..12: note = XENP019224 vlCDR1
RASQSVGSSYLA

SEQ ID NO: 7743 - protein, 7 aa, synthetic construct
  REGION 1..7: note = Description of Artificial Sequence: Synthetic peptide
  REGION 1..7: note = XENP019224 vlCDR2
GAFSRAT

SEQ ID NO: 7744 - protein, 9 aa, synthetic construct
  REGION 1..9: note = Description of Artificial Sequence: Synthetic peptide
  REGION 1..9: note = XENP019224 vlCDR3
QQYGSSPWT

SEQ ID NO: 7745 - protein, 221 aa, synthetic construct
  REGION 1..221: note = Description of Artificial Sequence: Synthetic polypeptide
  REGION 1..221: note = XENP019225 [CTLA-4]_H0.15_L0_Fab Heavy Chain
QVQLVESGGGVVQPGRSLRLSCAASGFTFSNYTMHWVRQAPGKGLEWVTFISYDGNNKYYADSVKGRFTISRDNSKNTLYLQMNSLRAEDTAIYYCARTGWLGPFDYWGQGTLVTVSSASTKGPSVFPLAPSSKSTSGGTAALGCLVKDYFPEPVTVSWNSGALTSGVHTFPAVLQSSGLYSLSSVVTVPSSSLGTQTYICNVNHKPSNTKVDKKVEPKSC

SEQ ID NO: 7746 - protein, 118 aa, synthetic construct; identical to SEQ ID NO: 4995
  REGION 1..118: note = Description of Artificial Sequence: Synthetic polypeptide
  REGION 1..118: note = VH of XENP019225

SEQ ID NO: 7747 - protein, 5 aa, synthetic construct
  REGION 1..5: note = Description of Artificial Sequence: Synthetic peptide
  REGION 1..5: note = XENP019225 vhCDR1
NYTMH

SEQ ID NO: 7748 - protein, 17 aa, synthetic construct
  REGION 1..17: note = Description of Artificial Sequence: Synthetic peptide
  REGION 1..17: note = XENP019225 vhCDR2
FISYDGNNKYYADSVKG

SEQ ID NO: 7749 - protein, 9 aa, synthetic construct
  REGION 1..9: note = Description of Artificial Sequence: Synthetic peptide
  REGION 1..9: note = XENP019225 vhCDR3
TGWLGPFDY

SEQ ID NO: 7750 - protein, 215 aa, synthetic construct; identical to SEQ ID NO: 7600
  REGION 1..215: note = Description of Artificial Sequence: Synthetic polypeptide
  REGION 1..215: note = XENP019225 [CTLA-4]_H0.15_L0_Fab Light Chain

SEQ ID NO: 7751 - protein, 108 aa, synthetic construct; identical to SEQ ID NO: 3741
  REGION 1..108: note = Description of Artificial Sequence: Synthetic polypeptide
  REGION 1..108: note = VL of XENP019225

SEQ ID NO: 7752 - protein, 12 aa, synthetic construct
  REGION 1..12: note = Description of Artificial Sequence: Synthetic peptide
  REGION 1..12: note = XENP019225 vlCDR1
RASQSVGSSYLA

SEQ ID NO: 7753 - protein, 7 aa, synthetic construct
  REGION 1..7: note = Description of Artificial Sequence: Synthetic peptide
  REGION 1..7: note = XENP019225 vlCDR2
GAFSRAT

SEQ ID NO: 7754 - protein, 9 aa, synthetic construct
  REGION 1..9: note = Description of Artificial Sequence: Synthetic peptide
  REGION 1..9: note = XENP019225 vlCDR3
QQYGSSPWT

SEQ ID NO: 7755 - protein, 221 aa, synthetic construct
  REGION 1..221: note = Description of Artificial Sequence: Synthetic polypeptide
  REGION 1..221: note = XENP019226 [CTLA-4]_H0.16_L0_Fab Heavy Chain
QVQLVESGGGVVQPGRSLRLSCAASGFTFSQYTMHWVRQAPGKGLEWVTFISYDGNNKYYADSVKGRFTISRDNSKNTLYLQMNSLRAEDTAIYYCARTGWLGPFDYWGQGTLVTVSSASTKGPSVFPLAPSSKSTSGGTAALGCLVKDYFPEPVTVSWNSGALTSGVHTFPAVLQSSGLYSLSSVVTVPSSSLGTQTYICNVNHKPSNTKVDKKVEPKSC

SEQ ID NO: 7756 - protein, 118 aa, synthetic construct; identical to SEQ ID NO: 5004
  REGION 1..118: note = Description of Artificial Sequence: Synthetic polypeptide
  REGION 1..118: note = VH of XENP019226

SEQ ID NO: 7757 - protein, 5 aa, synthetic construct
  REGION 1..5: note = Description of Artificial Sequence: Synthetic peptide
  REGION 1..5: note = XENP019226 vhCDR1
QYTMH

SEQ ID NO: 7758 - protein, 17 aa, synthetic construct
  REGION 1..17: note = Description of Artificial Sequence: Synthetic peptide
  REGION 1..17: note = XENP019226 vhCDR2
FISYDGNNKYYADSVKG

SEQ ID NO: 7759 - protein, 9 aa, synthetic construct
  REGION 1..9: note = Description of Artificial Sequence: Synthetic peptide
  REGION 1..9: note = XENP019226 vhCDR3
TGWLGPFDY

SEQ ID NO: 7760 - protein, 215 aa, synthetic construct; identical to SEQ ID NO: 7600
  REGION 1..215: note = Description of Artificial Sequence: Synthetic polypeptide
  REGION 1..215: note = XENP019226 [CTLA-4]_H0.16_L0_Fab Light Chain

SEQ ID NO: 7761 - protein, 108 aa, synthetic construct; identical to SEQ ID NO: 3741
  REGION 1..108: note = Description of Artificial Sequence: Synthetic polypeptide
  REGION 1..108: note = VL of XENP019226

SEQ ID NO: 7762 - protein, 12 aa, synthetic construct
  REGION 1..12: note = Description of Artificial Sequence: Synthetic peptide
  REGION 1..12: note = XENP019226 vlCDR1
RASQSVGSSYLA

SEQ ID NO: 7763 - protein, 7 aa, synthetic construct
  REGION 1..7: note = Description of Artificial Sequence: Synthetic peptide
  REGION 1..7: note = XENP019226 vlCDR2
GAFSRAT

SEQ ID NO: 7764 - protein, 9 aa, synthetic construct
  REGION 1..9: note = Description of Artificial Sequence: Synthetic peptide
  REGION 1..9: note = XENP019226 vlCDR3
QQYGSSPWT

SEQ ID NO: 7765 - protein, 221 aa, synthetic construct
  REGION 1..221: note = Description of Artificial Sequence: Synthetic polypeptide
  REGION 1..221: note = XENP019227 [CTLA-4]_H0.17_L0_Fab Heavy Chain
QVQLVESGGGVVQPGRSLRLSCAASGFTFSTYTMHWVRQAPGKGLEWVTFISYDGNNKYYADSVKGRFTISRDNSKNTLYLQMNSLRAEDTAIYYCARTGWLGPFDYWGQGTLVTVSSASTKGPSVFPLAPSSKSTSGGTAALGCLVKDYFPEPVTVSWNSGALTSGVHTFPAVLQSSGLYSLSSVVTVPSSSLGTQTYICNVNHKPSNTKVDKKVEPKSC

SEQ ID NO: 7766 - protein, 118 aa, synthetic construct; identical to SEQ ID NO: 5013
  REGION 1..118: note = Description of Artificial Sequence: Synthetic polypeptide
  REGION 1..118: note = VH of XENP019227

SEQ ID NO: 7767 - protein, 5 aa, synthetic construct
  REGION 1..5: note = Description of Artificial Sequence: Synthetic peptide
  REGION 1..5: note = XENP019227 vhCDR1
TYTMH

SEQ ID NO: 7768 - protein, 17 aa, synthetic construct
  REGION 1..17: note = Description of Artificial Sequence: Synthetic peptide
  REGION 1..17: note = XENP019227 vhCDR2
FISYDGNNKYYADSVKG

SEQ ID NO: 7769 - protein, 9 aa, synthetic construct
  REGION 1..9: note = Description of Artificial Sequence: Synthetic peptide
  REGION 1..9: note = XENP019227 vhCDR3
TGWLGPFDY

SEQ ID NO: 7770 - protein, 215 aa, synthetic construct; identical to SEQ ID NO: 7600
  REGION 1..215: note = Description of Artificial Sequence: Synthetic polypeptide
  REGION 1..215: note = XENP019227 [CTLA-4]_H0.17_L0_Fab Light Chain

SEQ ID NO: 7771 - protein, 108 aa, synthetic construct; identical to SEQ ID NO: 3741
  REGION 1..108: note = Description of Artificial Sequence: Synthetic polypeptide
  REGION 1..108: note = VL of XENP019227

SEQ ID NO: 7772 - protein, 12 aa, synthetic construct
  REGION 1..12: note = Description of Artificial Sequence: Synthetic peptide
  REGION 1..12: note = XENP019227 vlCDR1
RASQSVGSSYLA

SEQ ID NO: 7773 - protein, 7 aa, synthetic construct
  REGION 1..7: note = Description of Artificial Sequence: Synthetic peptide
  REGION 1..7: note = XENP019227 vlCDR2
GAFSRAT

SEQ ID NO: 7774 - protein, 9 aa, synthetic construct
  REGION 1..9: note = Description of Artificial Sequence: Synthetic peptide
  REGION 1..9: note = XENP019227 vlCDR3
QQYGSSPWT

SEQ ID NO: 7775 - protein, 221 aa, synthetic construct
  REGION 1..221: note = Description of Artificial Sequence: Synthetic polypeptide
  REGION 1..221: note = XENP019228 [CTLA-4]_H0.18_L0_Fab Heavy Chain
QVQLVESGGGVVQPGRSLRLSCAASGFTFSSATMHWVRQAPGKGLEWVTFISYDGNNKYYADSVKGRFTISRDNSKNTLYLQMNSLRAEDTAIYYCARTGWLGPFDYWGQGTLVTVSSASTKGPSVFPLAPSSKSTSGGTAALGCLVKDYFPEPVTVSWNSGALTSGVHTFPAVLQSSGLYSLSSVVTVPSSSLGTQTYICNVNHKPSNTKVDKKVEPKSC

SEQ ID NO: 7776 - protein, 118 aa, synthetic construct; identical to SEQ ID NO: 5022
  REGION 1..118: note = Description of Artificial Sequence: Synthetic polypeptide
  REGION 1..118: note = VH of XENP019228

SEQ ID NO: 7777 - protein, 5 aa, synthetic construct
  REGION 1..5: note = Description of Artificial Sequence: Synthetic peptide
  REGION 1..5: note = XENP019228 vhCDR1
SATMH

SEQ ID NO: 7778 - protein, 17 aa, synthetic construct
  REGION 1..17: note = Description of Artificial Sequence: Synthetic peptide
  REGION 1..17: note = XENP019228 vhCDR2
FISYDGNNKYYADSVKG

SEQ ID NO: 7779 - protein, 9 aa, synthetic construct
  REGION 1..9: note = Description of Artificial Sequence: Synthetic peptide
  REGION 1..9: note = XENP019228 vhCDR3
TGWLGPFDY

SEQ ID NO: 7780 - protein, 215 aa, synthetic construct; identical to SEQ ID NO: 7600
  REGION 1..215: note = Description of Artificial Sequence: Synthetic polypeptide
  REGION 1..215: note = XENP019228 [CTLA-4]_H0.18_L0_Fab Light Chain

SEQ ID NO: 7781 - protein, 108 aa, synthetic construct; identical to SEQ ID NO: 3741
  REGION 1..108: note = Description of Artificial Sequence: Synthetic polypeptide
  REGION 1..108: note = VL of XENP019228

SEQ ID NO: 7782 - protein, 12 aa, synthetic construct
  REGION 1..12: note = Description of Artificial Sequence: Synthetic peptide
  REGION 1..12: note = XENP019228 vlCDR1
RASQSVGSSYLA

SEQ ID NO: 7783 - protein, 7 aa, synthetic construct
  REGION 1..7: note = Description of Artificial Sequence: Synthetic peptide
  REGION 1..7: note = XENP019228 vlCDR2
GAFSRAT

SEQ ID NO: 7784 - protein, 9 aa, synthetic construct
  REGION 1..9: note = Description of Artificial Sequence: Synthetic peptide
  REGION 1..9: note = XENP019228 vlCDR3
QQYGSSPWT

SEQ ID NO: 7785 - protein, 221 aa, synthetic construct
  REGION 1..221: note = Description of Artificial Sequence: Synthetic polypeptide
  REGION 1..221: note = XENP019229 [CTLA-4]_H0.19_L0_Fab Heavy Chain
QVQLVESGGGVVQPGRSLRLSCAASGFTFSSHTMHWVRQAPGKGLEWVTFISYDGNNKYYADSVKGRFTISRDNSKNTLYLQMNSLRAEDTAIYYCARTGWLGPFDYWGQGTLVTVSSASTKGPSVFPLAPSSKSTSGGTAALGCLVKDYFPEPVTVSWNSGALTSGVHTFPAVLQSSGLYSLSSVVTVPSSSLGTQTYICNVNHKPSNTKVDKKVEPKSC

SEQ ID NO: 7786 - protein, 118 aa, synthetic construct; identical to SEQ ID NO: 5031
  REGION 1..118: note = Description of Artificial Sequence: Synthetic polypeptide
  REGION 1..118: note = VH of XENP019229

SEQ ID NO: 7787 - protein, 5 aa, synthetic construct
  REGION 1..5: note = Description of Artificial Sequence: Synthetic peptide
  REGION 1..5: note = XENP019229 vhCDR1
SHTMH

SEQ ID NO: 7788 - protein, 17 aa, synthetic construct
  REGION 1..17: note = Description of Artificial Sequence: Synthetic peptide
  REGION 1..17: note = XENP019229 vhCDR2
FISYDGNNKYYADSVKG

SEQ ID NO: 7789 - protein, 9 aa, synthetic construct
  REGION 1..9: note = Description of Artificial Sequence: Synthetic peptide
  REGION 1..9: note = XENP019229 vhCDR3
TGWLGPFDY

SEQ ID NO: 7790 - protein, 215 aa, synthetic construct; identical to SEQ ID NO: 7600
  REGION 1..215: note = Description of Artificial Sequence: Synthetic polypeptide
  REGION 1..215: note = XENP019229 [CTLA-4]_H0.19_L0_Fab Light Chain

SEQ ID NO: 7791 - protein, 108 aa, synthetic construct; identical to SEQ ID NO: 3741
  REGION 1..108: note = Description of Artificial Sequence: Synthetic polypeptide
  REGION 1..108: note = VL of XENP019229

SEQ ID NO: 7792 - protein, 12 aa, synthetic construct
  REGION 1..12: note = Description of Artificial Sequence: Synthetic peptide
  REGION 1..12: note = XENP019229 vlCDR1
RASQSVGSSYLA

SEQ ID NO: 7793 - protein, 7 aa, synthetic construct
  REGION 1..7: note = Description of Artificial Sequence: Synthetic peptide
  REGION 1..7: note = XENP019229 vlCDR2
GAFSRAT

SEQ ID NO: 7794 - protein, 9 aa, synthetic construct
  REGION 1..9: note = Description of Artificial Sequence: Synthetic peptide
  REGION 1..9: note = XENP019229 vlCDR3
QQYGSSPWT

SEQ ID NO: 7795 - protein, 221 aa, synthetic construct
  REGION 1..221: note = Description of Artificial Sequence: Synthetic polypeptide
  REGION 1..221: note = XENP019230 [CTLA-4]_H0.20_L0_Fab Heavy Chain
QVQLVESGGGVVQPGRSLRLSCAASGFTFSSFTMHWVRQAPGKGLEWVTFISYDGNNKYYADSVKGRFTISRDNSKNTLYLQMNSLRAEDTAIYYCARTGWLGPFDYWGQGTLVTVSSASTKGPSVFPLAPSSKSTSGGTAALGCLVKDYFPEPVTVSWNSGALTSGVHTFPAVLQSSGLYSLSSVVTVPSSSLGTQTYICNVNHKPSNTKVDKKVEPKSC

SEQ ID NO: 7796 - protein, 118 aa, synthetic construct; identical to SEQ ID NO: 5040
  REGION 1..118: note = Description of Artificial Sequence: Synthetic polypeptide
  REGION 1..118: note = VH of XENP019230

SEQ ID NO: 7797 - protein, 5 aa, synthetic construct
  REGION 1..5: note = Description of Artificial Sequence: Synthetic peptide
  REGION 1..5: note = XENP019230 vhCDR1
SFTMH

SEQ ID NO: 7798 - protein, 17 aa, synthetic construct
  REGION 1..17: note = Description of Artificial Sequence: Synthetic peptide
  REGION 1..17: note = XENP019230 vhCDR2
FISYDGNNKYYADSVKG

SEQ ID NO: 7799 - protein, 9 aa, synthetic construct
  REGION 1..9: note = Description of Artificial Sequence: Synthetic peptide
  REGION 1..9: note = XENP019230 vhCDR3
TGWLGPFDY

SEQ ID NO: 7800 - protein, 215 aa, synthetic construct; identical to SEQ ID NO: 7600
  REGION 1..215: note = Description of Artificial Sequence: Synthetic polypeptide
  REGION 1..215: note = XENP019230 [CTLA-4]_H0.20_L0_Fab Light Chain

SEQ ID NO: 7801 - protein, 108 aa, synthetic construct; identical to SEQ ID NO: 3741
  REGION 1..108: note = Description of Artificial Sequence: Synthetic polypeptide
  REGION 1..108: note = VL of XENP019230

SEQ ID NO: 7802 - protein, 12 aa, synthetic construct
  REGION 1..12: note = Description of Artificial Sequence: Synthetic peptide
  REGION 1..12: note = XENP019230 vlCDR1
RASQSVGSSYLA

SEQ ID NO: 7803 - protein, 7 aa, synthetic construct
  REGION 1..7: note = Description of Artificial Sequence: Synthetic peptide
  REGION 1..7: note = XENP019230 vlCDR2
GAFSRAT

SEQ ID NO: 7804 - protein, 9 aa, synthetic construct
  REGION 1..9: note = Description of Artificial Sequence: Synthetic peptide
  REGION 1..9: note = XENP019230 vlCDR3
QQYGSSPWT

SEQ ID NO: 7805 - protein, 221 aa, synthetic construct
  REGION 1..221: note = Description of Artificial Sequence: Synthetic polypeptide
  REGION 1..221: note = XENP019231 [CTLA-4]_H0.21_L0_Fab Heavy Chain
QVQLVESGGGVVQPGRSLRLSCAASGFTFSSLTMHWVRQAPGKGLEWVTFISYDGNNKYYADSVKGRFTISRDNSKNTLYLQMNSLRAEDTAIYYCARTGWLGPFDYWGQGTLVTVSSASTKGPSVFPLAPSSKSTSGGTAALGCLVKDYFPEPVTVSWNSGALTSGVHTFPAVLQSSGLYSLSSVVTVPSSSLGTQTYICNVNHKPSNTKVDKKVEPKSC

SEQ ID NO: 7806 - protein, 118 aa, synthetic construct; identical to SEQ ID NO: 5049
  REGION 1..118: note = Description of Artificial Sequence: Synthetic polypeptide
  REGION 1..118: note = VH of XENP019231

SEQ ID NO: 7807 - protein, 5 aa, synthetic construct
  REGION 1..5: note = Description of Artificial Sequence: Synthetic peptide
  REGION 1..5: note = XENP019231 vhCDR1
SLTMH

SEQ ID NO: 7808 - protein, 17 aa, synthetic construct
  REGION 1..17: note = Description of Artificial Sequence: Synthetic peptide
  REGION 1..17: note = XENP019231 vhCDR2
FISYDGNNKYYADSVKG

SEQ ID NO: 7809 - protein, 9 aa, synthetic construct
  REGION 1..9: note = Description of Artificial Sequence: Synthetic peptide
  REGION 1..9: note = XENP019231 vhCDR3
TGWLGPFDY

SEQ ID NO: 7810 - protein, 215 aa, synthetic construct; identical to SEQ ID NO: 7600
  REGION 1..215: note = Description of Artificial Sequence: Synthetic polypeptide
  REGION 1..215: note = XENP019231 [CTLA-4]_H0.21_L0_Fab Light Chain

SEQ ID NO: 7811 - protein, 108 aa, synthetic construct; identical to SEQ ID NO: 3741
  REGION 1..108: note = Description of Artificial Sequence: Synthetic polypeptide
  REGION 1..108: note = VL of XENP019231

SEQ ID NO: 7812 - protein, 12 aa, synthetic construct
  REGION 1..12: note = Description of Artificial Sequence: Synthetic peptide
  REGION 1..12: note = XENP019231 vlCDR1
RASQSVGSSYLA

SEQ ID NO: 7813 - protein, 7 aa, synthetic construct
  REGION 1..7: note = Description of Artificial Sequence: Synthetic peptide
  REGION 1..7: note = XENP019231 vlCDR2
GAFSRAT

SEQ ID NO: 7814 - protein, 9 aa, synthetic construct
  REGION 1..9: note = Description of Artificial Sequence: Synthetic peptide
  REGION 1..9: note = XENP019231 vlCDR3
QQYGSSPWT

SEQ ID NO: 7815 - protein, 221 aa, synthetic construct
  REGION 1..221: note = Description of Artificial Sequence: Synthetic polypeptide
  REGION 1..221: note = XENP019232 [CTLA-4]_H0.22_L0_Fab Heavy Chain
QVQLVESGGGVVQPGRSLRLSCAASGFTFSSNTMHWVRQAPGKGLEWVTFISYDGNNKYYADSVKGRFTISRDNSKNTLYLQMNSLRAEDTAIYYCARTGWLGPFDYWGQGTLVTVSSASTKGPSVFPLAPSSKSTSGGTAALGCLVKDYFPEPVTVSWNSGALTSGVHTFPAVLQSSGLYSLSSVVTVPSSSLGTQTYICNVNHKPSNTKVDKKVEPKSC

SEQ ID NO: 7816 - protein, 118 aa, synthetic construct; identical to SEQ ID NO: 5058
  REGION 1..118: note = Description of Artificial Sequence: Synthetic polypeptide
  REGION 1..118: note = VH of XENP019232

SEQ ID NO: 7817 - protein, 5 aa, synthetic construct
  REGION 1..5: note = Description of Artificial Sequence: Synthetic peptide
  REGION 1..5: note = XENP019232 vhCDR1
SNTMH

SEQ ID NO: 7818 - protein, 17 aa, synthetic construct
  REGION 1..17: note = Description of Artificial Sequence: Synthetic peptide
  REGION 1..17: note = XENP019232 vhCDR2
FISYDGNNKYYADSVKG

SEQ ID NO: 7819 - protein, 9 aa, synthetic construct
  REGION 1..9: note = Description of Artificial Sequence: Synthetic peptide
  REGION 1..9: note = XENP019232 vhCDR3
TGWLGPFDY

SEQ ID NO: 7820 - protein, 215 aa, synthetic construct; identical to SEQ ID NO: 7600
  REGION 1..215: note = Description of Artificial Sequence: Synthetic polypeptide
  REGION 1..215: note = XENP019232 [CTLA-4]_H0.22_L0_Fab Light Chain

SEQ ID NO: 7821 - protein, 108 aa, synthetic construct; identical to SEQ ID NO: 3741
  REGION 1..108: note = Description of Artificial Sequence: Synthetic polypeptide
  REGION 1..108: note = VL of XENP019232

SEQ ID NO: 7822 - protein, 12 aa, synthetic construct
  REGION 1..12: note = Description of Artificial Sequence: Synthetic peptide
  REGION 1..12: note = XENP019232 vlCDR1
RASQSVGSSYLA

SEQ ID NO: 7823 - protein, 7 aa, synthetic construct
  REGION 1..7: note = Description of Artificial Sequence: Synthetic peptide
  REGION 1..7: note = XENP019232 vlCDR2
GAFSRAT

SEQ ID NO: 7824 - protein, 9 aa, synthetic construct
  REGION 1..9: note = Description of Artificial Sequence: Synthetic peptide
  REGION 1..9: note = XENP019232 vlCDR3
QQYGSSPWT

SEQ ID NO: 7825 - protein, 221 aa, synthetic construct
  REGION 1..221: note = Description of Artificial Sequence: Synthetic polypeptide
  REGION 1..221: note = XENP019233 [CTLA-4]_H0.23_L0_Fab Heavy Chain
QVQLVESGGGVVQPGRSLRLSCAASGFTFSSSTMHWVRQAPGKGLEWVTFISYDGNNKYYADSVKGRFTISRDNSKNTLYLQMNSLRAEDTAIYYCARTGWLGPFDYWGQGTLVTVSSASTKGPSVFPLAPSSKSTSGGTAALGCLVKDYFPEPVTVSWNSGALTSGVHTFPAVLQSSGLYSLSSVVTVPSSSLGTQTYICNVNHKPSNTKVDKKVEPKSC

SEQ ID NO: 7826 - protein, 118 aa, synthetic construct; identical to SEQ ID NO: 5067
  REGION 1..118: note = Description of Artificial Sequence: Synthetic polypeptide
  REGION 1..118: note = VH of XENP019233

SEQ ID NO: 7827 - protein, 5 aa, synthetic construct
  REGION 1..5: note = Description of Artificial Sequence: Synthetic peptide
  REGION 1..5: note = XENP019233 vhCDR1
SSTMH

SEQ ID NO: 7828 - protein, 17 aa, synthetic construct
  REGION 1..17: note = Description of Artificial Sequence: Synthetic peptide
  REGION 1..17: note = XENP019233 vhCDR2
FISYDGNNKYYADSVKG

SEQ ID NO: 7829 - protein, 9 aa, synthetic construct
  REGION 1..9: note = Description of Artificial Sequence: Synthetic peptide
  REGION 1..9: note = XENP019233 vhCDR3
TGWLGPFDY

SEQ ID NO: 7830 - protein, 215 aa, synthetic construct; identical to SEQ ID NO: 7600
  REGION 1..215: note = Description of Artificial Sequence: Synthetic polypeptide
  REGION 1..215: note = XENP019233 [CTLA-4]_H0.23_L0_Fab Light Chain

SEQ ID NO: 7831 - protein, 108 aa, synthetic construct; identical to SEQ ID NO: 3741
  REGION 1..108: note = Description of Artificial Sequence: Synthetic polypeptide
  REGION 1..108: note = VL of XENP019233

SEQ ID NO: 7832 - protein, 12 aa, synthetic construct
  REGION 1..12: note = Description of Artificial Sequence: Synthetic peptide
  REGION 1..12: note = XENP019233 vlCDR1
RASQSVGSSYLA

SEQ ID NO: 7833 - protein, 7 aa, synthetic construct
  REGION 1..7: note = Description of Artificial Sequence: Synthetic peptide
  REGION 1..7: note = XENP019233 vlCDR2
GAFSRAT

SEQ ID NO: 7834 - protein, 9 aa, synthetic construct
  REGION 1..9: note = Description of Artificial Sequence: Synthetic peptide
  REGION 1..9: note = XENP019233 vlCDR3
QQYGSSPWT

SEQ ID NO: 7835 - protein, 221 aa, synthetic construct
  REGION 1..221: note = Description of Artificial Sequence: Synthetic polypeptide
  REGION 1..221: note = XENP019234 [CTLA-4]_H0.24_L0_Fab Heavy Chain
QVQLVESGGGVVQPGRSLRLSCAASGFTFSSVTMHWVRQAPGKGLEWVTFISYDGNNKYYADSVKGRFTISRDNSKNTLYLQMNSLRAEDTAIYYCARTGWLGPFDYWGQGTLVTVSSASTKGPSVFPLAPSSKSTSGGTAALGCLVKDYFPEPVTVSWNSGALTSGVHTFPAVLQSSGLYSLSSVVTVPSSSLGTQTYICNVNHKPSNTKVDKKVEPKSC

SEQ ID NO: 7836 - protein, 118 aa, synthetic construct; identical to SEQ ID NO: 5076
  REGION 1..118: note = Description of Artificial Sequence: Synthetic polypeptide
  REGION 1..118: note = VH of XENP019234

SEQ ID NO: 7837 - protein, 5 aa, synthetic construct
  REGION 1..5: note = Description of Artificial Sequence: Synthetic peptide
  REGION 1..5: note = XENP019234 vhCDR1
SVTMH

SEQ ID NO: 7838 - protein, 17 aa, synthetic construct
  REGION 1..17: note = Description of Artificial Sequence: Synthetic peptide
  REGION 1..17: note = XENP019234 vhCDR2
FISYDGNNKYYADSVKG

SEQ ID NO: 7839 - protein, 9 aa, synthetic construct
  REGION 1..9: note = Description of Artificial Sequence: Synthetic peptide
  REGION 1..9: note = XENP019234 vhCDR3
TGWLGPFDY

SEQ ID NO: 7840 - protein, 215 aa, synthetic construct; identical to SEQ ID NO: 7600
  REGION 1..215: note = Description of Artificial Sequence: Synthetic polypeptide
  REGION 1..215: note = XENP019234 [CTLA-4]_H0.24_L0_Fab Light Chain

SEQ ID NO: 7841 - protein, 108 aa, synthetic construct; identical to SEQ ID NO: 3741
  REGION 1..108: note = Description of Artificial Sequence: Synthetic polypeptide
  REGION 1..108: note = VL of XENP019234

SEQ ID NO: 7842 - protein, 12 aa, synthetic construct
  REGION 1..12: note = Description of Artificial Sequence: Synthetic peptide
  REGION 1..12: note = XENP019234 vlCDR1
RASQSVGSSYLA

SEQ ID NO: 7843 - protein, 7 aa, synthetic construct
  REGION 1..7: note = Description of Artificial Sequence: Synthetic peptide
  REGION 1..7: note = XENP019234 vlCDR2
GAFSRAT

SEQ ID NO: 7844 - protein, 9 aa, synthetic construct
  REGION 1..9: note = Description of Artificial Sequence: Synthetic peptide
  REGION 1..9: note = XENP019234 vlCDR3
QQYGSSPWT

SEQ ID NO: 7845 - protein, 221 aa, synthetic construct
  REGION 1..221: note = Description of Artificial Sequence: Synthetic polypeptide
  REGION 1..221: note = XENP019235 [CTLA-4]_H0.25_L0_Fab Heavy Chain
QVQLVESGGGVVQPGRSLRLSCAASGFTFSSYAMHWVRQAPGKGLEWVTFISYDGNNKYYADSVKGRFTISRDNSKNTLYLQMNSLRAEDTAIYYCARTGWLGPFDYWGQGTLVTVSSASTKGPSVFPLAPSSKSTSGGTAALGCLVKDYFPEPVTVSWNSGALTSGVHTFPAVLQSSGLYSLSSVVTVPSSSLGTQTYICNVNHKPSNTKVDKKVEPKSC

SEQ ID NO: 7846 - protein, 118 aa, synthetic construct; identical to SEQ ID NO: 5085
  REGION 1..118: note = Description of Artificial Sequence: Synthetic polypeptide
  REGION 1..118: note = VH of XENP019235

SEQ ID NO: 7847 - protein, 5 aa, synthetic construct
  REGION 1..5: note = Description of Artificial Sequence: Synthetic peptide
  REGION 1..5: note = XENP019235 vhCDR1
SYAMH

SEQ ID NO: 7848 - protein, 17 aa, synthetic construct
  REGION 1..17: note = Description of Artificial Sequence: Synthetic peptide
  REGION 1..17: note = XENP019235 vhCDR2
FISYDGNNKYYADSVKG

SEQ ID NO: 7849 - protein, 9 aa, synthetic construct
  REGION 1..9: note = Description of Artificial Sequence: Synthetic peptide
  REGION 1..9: note = XENP019235 vhCDR3
TGWLGPFDY

SEQ ID NO: 7850 - protein, 215 aa, synthetic construct; identical to SEQ ID NO: 7600
  REGION 1..215: note = Description of Artificial Sequence: Synthetic polypeptide
  REGION 1..215: note = XENP019235 [CTLA-4]_H0.25_L0_Fab Light Chain

SEQ ID NO: 7851 - protein, 108 aa, synthetic construct; identical to SEQ ID NO: 3741
  REGION 1..108: note = Description of Artificial Sequence: Synthetic polypeptide
  REGION 1..108: note = VL of XENP019235

SEQ ID NO: 7852 - protein, 12 aa, synthetic construct
  REGION 1..12: note = Description of Artificial Sequence: Synthetic peptide
  REGION 1..12: note = XENP019235 vlCDR1
RASQSVGSSYLA

SEQ ID NO: 7853 - protein, 7 aa, synthetic construct
  REGION 1..7: note = Description of Artificial Sequence: Synthetic peptide
  REGION 1..7: note = XENP019235 vlCDR2
GAFSRAT

SEQ ID NO: 7854 - protein, 9 aa, synthetic construct
  REGION 1..9: note = Description of Artificial Sequence: Synthetic peptide
  REGION 1..9: note = XENP019235 vlCDR3
QQYGSSPWT

SEQ ID NO: 7855 - protein, 221 aa, synthetic construct
  REGION 1..221: note = Description of Artificial Sequence: Synthetic polypeptide
  REGION 1..221: note = XENP019236 [CTLA-4]_H0.26_L0_Fab Heavy Chain
QVQLVESGGGVVQPGRSLRLSCAASGFTFSSYGMHWVRQAPGKGLEWVTFISYDGNNKYYADSVKGRFTISRDNSKNTLYLQMNSLRAEDTAIYYCARTGWLGPFDYWGQGTLVTVSSASTKGPSVFPLAPSSKSTSGGTAALGCLVKDYFPEPVTVSWNSGALTSGVHTFPAVLQSSGLYSLSSVVTVPSSSLGTQTYICNVNHKPSNTKVDKKVEPKSC

SEQ ID NO: 7856 - protein, 118 aa, synthetic construct; identical to SEQ ID NO: 5094
  REGION 1..118: note = Description of Artificial Sequence: Synthetic polypeptide
  REGION 1..118: note = VH of XENP019236

SEQ ID NO: 7857 - protein, 5 aa, synthetic construct
  REGION 1..5: note = Description of Artificial Sequence: Synthetic peptide
  REGION 1..5: note = XENP019236 vhCDR1
SYGMH

SEQ ID NO: 7858 - protein, 17 aa, synthetic construct
  REGION 1..17: note = Description of Artificial Sequence: Synthetic peptide
  REGION 1..17: note = XENP019236 vhCDR2
FISYDGNNKYYADSVKG

SEQ ID NO: 7859 - protein, 9 aa, synthetic construct
  REGION 1..9: note = Description of Artificial Sequence: Synthetic peptide
  REGION 1..9: note = XENP019236 vhCDR3
TGWLGPFDY

SEQ ID NO: 7860 - protein, 215 aa, synthetic construct; identical to SEQ ID NO: 7600
  REGION 1..215: note = Description of Artificial Sequence: Synthetic polypeptide
  REGION 1..215: note = XENP019236 [CTLA-4]_H0.26_L0_Fab Light Chain

SEQ ID NO: 7861 - protein, 108 aa, synthetic construct; identical to SEQ ID NO: 3741
  REGION 1..108: note = Description of Artificial Sequence: Synthetic polypeptide
  REGION 1..108: note = VL of XENP019236

SEQ ID NO: 7862 - protein, 12 aa, synthetic construct
  REGION 1..12: note = Description of Artificial Sequence: Synthetic peptide
  REGION 1..12: note = XENP019236 vlCDR1
RASQSVGSSYLA

SEQ ID NO: 7863 - protein, 7 aa, synthetic construct
  REGION 1..7: note = Description of Artificial Sequence: Synthetic peptide
  REGION 1..7: note = XENP019236 vlCDR2
GAFSRAT

SEQ ID NO: 7864 - protein, 9 aa, synthetic construct
  REGION 1..9: note = Description of Artificial Sequence: Synthetic peptide
  REGION 1..9: note = XENP019236 vlCDR3
QQYGSSPWT

SEQ ID NO: 7865 - protein, 221 aa, synthetic construct
  REGION 1..221: note = Description of Artificial Sequence: Synthetic polypeptide
  REGION 1..221: note = XENP019237 [CTLA-4]_H0.27_L0_Fab Heavy Chain
QVQLVESGGGVVQPGRSLRLSCAASGFTFSSYSMHWVRQAPGKGLEWVTFISYDGNNKYYADSVKGRFTISRDNSKNTLYLQMNSLRAEDTAIYYCARTGWLGPFDYWGQGTLVTVSSASTKGPSVFPLAPSSKSTSGGTAALGCLVKDYFPEPVTVSWNSGALTSGVHTFPAVLQSSGLYSLSSVVTVPSSSLGTQTYICNVNHKPSNTKVDKKVEPKSC

SEQ ID NO: 7866 - protein, 118 aa, synthetic construct; identical to SEQ ID NO: 5103
  REGION 1..118: note = Description of Artificial Sequence: Synthetic polypeptide
  REGION 1..118: note = VH of XENP019237

SEQ ID NO: 7867 - protein, 5 aa, synthetic construct
  REGION 1..5: note = Description of Artificial Sequence: Synthetic peptide
  REGION 1..5: note = XENP019237 vhCDR1
SYSMH

SEQ ID NO: 7868 - protein, 17 aa, synthetic construct
  REGION 1..17: note = Description of Artificial Sequence: Synthetic peptide
  REGION 1..17: note = XENP019237 vhCDR2
FISYDGNNKYYADSVKG

SEQ ID NO: 7869 - protein, 9 aa, synthetic construct
  REGION 1..9: note = Description of Artificial Sequence: Synthetic peptide
  REGION 1..9: note = XENP019237 vhCDR3
TGWLGPFDY

SEQ ID NO: 7870 - protein, 215 aa, synthetic construct; identical to SEQ ID NO: 7600
  REGION 1..215: note = Description of Artificial Sequence: Synthetic polypeptide
  REGION 1..215: note = XENP019237 [CTLA-4]_H0.27_L0_Fab Light Chain

SEQ ID NO: 7871 - protein, 108 aa, synthetic construct; identical to SEQ ID NO: 3741
  REGION 1..108: note = Description of Artificial Sequence: Synthetic polypeptide
  REGION 1..108: note = VL of XENP019237

SEQ ID NO: 7872 - protein, 12 aa, synthetic construct
  REGION 1..12: note = Description of Artificial Sequence: Synthetic peptide
  REGION 1..12: note = XENP019237 vlCDR1
RASQSVGSSYLA

SEQ ID NO: 7873 - protein, 7 aa, synthetic construct
  REGION 1..7: note = Description of Artificial Sequence: Synthetic peptide
  REGION 1..7: note = XENP019237 vlCDR2
GAFSRAT

SEQ ID NO: 7874 - protein, 9 aa, synthetic construct
  REGION 1..9: note = Description of Artificial Sequence: Synthetic peptide
  REGION 1..9: note = XENP019237 vlCDR3
QQYGSSPWT

SEQ ID NO: 7875 - protein, 221 aa, synthetic construct
  REGION 1..221: note = Description of Artificial Sequence: Synthetic polypeptide
  REGION 1..221: note = XENP019238 [CTLA-4]_H0.28_L0_Fab Heavy Chain
QVQLVESGGGVVQPGRSLRLSCAASGFTFSSYVMHWVRQAPGKGLEWVTFISYDGNNKYYADSVKGRFTISRDNSKNTLYLQMNSLRAEDTAIYYCARTGWLGPFDYWGQGTLVTVSSASTKGPSVFPLAPSSKSTSGGTAALGCLVKDYFPEPVTVSWNSGALTSGVHTFPAVLQSSGLYSLSSVVTVPSSSLGTQTYICNVNHKPSNTKVDKKVEPKSC

SEQ ID NO: 7876 - protein, 118 aa, synthetic construct; identical to SEQ ID NO: 5112
  REGION 1..118: note = Description of Artificial Sequence: Synthetic polypeptide
  REGION 1..118: note = VH of XENP019238

SEQ ID NO: 7877 - protein, 5 aa, synthetic construct
  REGION 1..5: note = Description of Artificial Sequence: Synthetic peptide
  REGION 1..5: note = XENP019238 vhCDR1
SYVMH

SEQ ID NO: 7878 - protein, 17 aa, synthetic construct
  REGION 1..17: note = Description of Artificial Sequence: Synthetic peptide
  REGION 1..17: note = XENP019238 vhCDR2
FISYDGNNKYYADSVKG

SEQ ID NO: 7879 - protein, 9 aa, synthetic construct
  REGION 1..9: note = Description of Artificial Sequence: Synthetic peptide
  REGION 1..9: note = XENP019238 vhCDR3
TGWLGPFDY

SEQ ID NO: 7880 - protein, 215 aa, synthetic construct; identical to SEQ ID NO: 7600
  REGION 1..215: note = Description of Artificial Sequence: Synthetic polypeptide
  REGION 1..215: note = XENP019238 [CTLA-4]_H0.28_L0_Fab Light Chain

SEQ ID NO: 7881 - protein, 108 aa, synthetic construct; identical to SEQ ID NO: 3741
  REGION 1..108: note = Description of Artificial Sequence: Synthetic polypeptide
  REGION 1..108: note = VL of XENP019238

SEQ ID NO: 7882 - protein, 12 aa, synthetic construct
  REGION 1..12: note = Description of Artificial Sequence: Synthetic peptide
  REGION 1..12: note = XENP019238 vlCDR1
RASQSVGSSYLA

SEQ ID NO: 7883 - protein, 7 aa, synthetic construct
  REGION 1..7: note = Description of Artificial Sequence: Synthetic peptide
  REGION 1..7: note = XENP019238 vlCDR2
GAFSRAT

SEQ ID NO: 7884 - protein, 9 aa, synthetic construct
  REGION 1..9: note = Description of Artificial Sequence: Synthetic peptide
  REGION 1..9: note = XENP019238 vlCDR3
QQYGSSPWT

SEQ ID NO: 7885 - protein, 221 aa, synthetic construct
  REGION 1..221: note = Description of Artificial Sequence: Synthetic polypeptide
  REGION 1..221: note = XENP019239 [CTLA-4]_H0.29_L0_Fab Heavy Chain
QVQLVESGGGVVQPGRSLRLSCAASGFTFSSYYMHWVRQAPGKGLEWVTFISYDGNNKYYADSVKGRFTISRDNSKNTLYLQMNSLRAEDTAIYYCARTGWLGPFDYWGQGTLVTVSSASTKGPSVFPLAPSSKSTSGGTAALGCLVKDYFPEPVTVSWNSGALTSGVHTFPAVLQSSGLYSLSSVVTVPSSSLGTQTYICNVNHKPSNTKVDKKVEPKSC

SEQ ID NO: 7886 - protein, 118 aa, synthetic construct; identical to SEQ ID NO: 5121
  REGION 1..118: note = Description of Artificial Sequence: Synthetic polypeptide
  REGION 1..118: note = VH of XENP019239

SEQ ID NO: 7887 - protein, 5 aa, synthetic construct
  REGION 1..5: note = Description of Artificial Sequence: Synthetic peptide
  REGION 1..5: note = XENP019239 vhCDR1
SYYMH

SEQ ID NO: 7888 - protein, 17 aa, synthetic construct
  REGION 1..17: note = Description of Artificial Sequence: Synthetic peptide
  REGION 1..17: note = XENP019239 vhCDR2
FISYDGNNKYYADSVKG

SEQ ID NO: 7889 - protein, 9 aa, synthetic construct
  REGION 1..9: note = Description of Artificial Sequence: Synthetic peptide
  REGION 1..9: note = XENP019239 vhCDR3
TGWLGPFDY

SEQ ID NO: 7890 - protein, 215 aa, synthetic construct; identical to SEQ ID NO: 7600
  REGION 1..215: note = Description of Artificial Sequence: Synthetic polypeptide
  REGION 1..215: note = XENP019239 [CTLA-4]_H0.29_L0_Fab Light Chain

SEQ ID NO: 7891 - protein, 108 aa, synthetic construct; identical to SEQ ID NO: 3741
  REGION 1..108: note = Description of Artificial Sequence: Synthetic polypeptide
  REGION 1..108: note = VL of XENP019239

SEQ ID NO: 7892 - protein, 12 aa, synthetic construct
  REGION 1..12: note = Description of Artificial Sequence: Synthetic peptide
  REGION 1..12: note = XENP019239 vlCDR1
RASQSVGSSYLA

SEQ ID NO: 7893 - protein, 7 aa, synthetic construct
  REGION 1..7: note = Description of Artificial Sequence: Synthetic peptide
  REGION 1..7: note = XENP019239 vlCDR2
GAFSRAT

SEQ ID NO: 7894 - protein, 9 aa, synthetic construct
  REGION 1..9: note = Description of Artificial Sequence: Synthetic peptide
  REGION 1..9: note = XENP019239 vlCDR3
QQYGSSPWT

SEQ ID NO: 7895 - protein, 221 aa, synthetic construct
  REGION 1..221: note = Description of Artificial Sequence: Synthetic polypeptide
  REGION 1..221: note = XENP019240 [CTLA-4]_H0.30_L0_Fab Heavy Chain
QVQLVESGGGVVQPGRSLRLSCAASGFTFSSYTMDWVRQAPGKGLEWVTFISYDGNNKYYADSVKGRFTISRDNSKNTLYLQMNSLRAEDTAIYYCARTGWLGPFDYWGQGTLVTVSSASTKGPSVFPLAPSSKSTSGGTAALGCLVKDYFPEPVTVSWNSGALTSGVHTFPAVLQSSGLYSLSSVVTVPSSSLGTQTYICNVNHKPSNTKVDKKVEPKSC

SEQ ID NO: 7896 - protein, 118 aa, synthetic construct; identical to SEQ ID NO: 5130
  REGION 1..118: note = Description of Artificial Sequence: Synthetic polypeptide
  REGION 1..118: note = VH of XENP019240

SEQ ID NO: 7897 - protein, 5 aa, synthetic construct
  REGION 1..5: note = Description of Artificial Sequence: Synthetic peptide
  REGION 1..5: note = XENP019240 vhCDR1
SYTMD

SEQ ID NO: 7898 - protein, 17 aa, synthetic construct
  REGION 1..17: note = Description of Artificial Sequence: Synthetic peptide
  REGION 1..17: note = XENP019240 vhCDR2
FISYDGNNKYYADSVKG

SEQ ID NO: 7899 - protein, 9 aa, synthetic construct
  REGION 1..9: note = Description of Artificial Sequence: Synthetic peptide
  REGION 1..9: note = XENP019240 vhCDR3
TGWLGPFDY

SEQ ID NO: 7900 - protein, 215 aa, synthetic construct; identical to SEQ ID NO: 7600
  REGION 1..215: note = Description of Artificial Sequence: Synthetic polypeptide
  REGION 1..215: note = XENP019240 [CTLA-4]_H0.30_L0_Fab Light Chain

SEQ ID NO: 7901 - protein, 108 aa, synthetic construct; identical to SEQ ID NO: 3741
  REGION 1..108: note = Description of Artificial Sequence: Synthetic polypeptide
  REGION 1..108: note = VL of XENP019240

SEQ ID NO: 7902 - protein, 12 aa, synthetic construct
  REGION 1..12: note = Description of Artificial Sequence: Synthetic peptide
  REGION 1..12: note = XENP019240 vlCDR1
RASQSVGSSYLA

SEQ ID NO: 7903 - protein, 7 aa, synthetic construct
  REGION 1..7: note = Description of Artificial Sequence: Synthetic peptide
  REGION 1..7: note = XENP019240 vlCDR2
GAFSRAT

SEQ ID NO: 7904 - protein, 9 aa, synthetic construct
  REGION 1..9: note = Description of Artificial Sequence: Synthetic peptide
  REGION 1..9: note = XENP019240 vlCDR3
QQYGSSPWT

SEQ ID NO: 7905 - protein, 221 aa, synthetic construct
  REGION 1..221: note = Description of Artificial Sequence: Synthetic polypeptide
  REGION 1..221: note = XENP019241 [CTLA-4]_H0.31_L0_Fab Heavy Chain
QVQLVESGGGVVQPGRSLRLSCAASGFTFSSYTMFWVRQAPGKGLEWVTFISYDGNNKYYADSVKGRFTISRDNSKNTLYLQMNSLRAEDTAIYYCARTGWLGPFDYWGQGTLVTVSSASTKGPSVFPLAPSSKSTSGGTAALGCLVKDYFPEPVTVSWNSGALTSGVHTFPAVLQSSGLYSLSSVVTVPSSSLGTQTYICNVNHKPSNTKVDKKVEPKSC

SEQ ID NO: 7906 - protein, 118 aa, synthetic construct; identical to SEQ ID NO: 5139
  REGION 1..118: note = Description of Artificial Sequence: Synthetic polypeptide
  REGION 1..118: note = VH of XENP019241

SEQ ID NO: 7907 - protein, 5 aa, synthetic construct
  REGION 1..5: note = Description of Artificial Sequence: Synthetic peptide
  REGION 1..5: note = XENP019241 vhCDR1
SYTMF

SEQ ID NO: 7908 - protein, 17 aa, synthetic construct
  REGION 1..17: note = Description of Artificial Sequence: Synthetic peptide
  REGION 1..17: note = XENP019241 vhCDR2
FISYDGNNKYYADSVKG

SEQ ID NO: 7909 - protein, 9 aa, synthetic construct
  REGION 1..9: note = Description of Artificial Sequence: Synthetic peptide
  REGION 1..9: note = XENP019241 vhCDR3
TGWLGPFDY

SEQ ID NO: 7910 - protein, 215 aa, synthetic construct; identical to SEQ ID NO: 7600
  REGION 1..215: note = Description of Artificial Sequence: Synthetic polypeptide
  REGION 1..215: note = XENP019241 [CTLA-4]_H0.31_L0_Fab Light Chain

SEQ ID NO: 7911 - protein, 108 aa, synthetic construct; identical to SEQ ID NO: 3741
  REGION 1..108: note = Description of Artificial Sequence: Synthetic polypeptide
  REGION 1..108: note = VL of XENP019241

SEQ ID NO: 7912 - protein, 12 aa, synthetic construct
  REGION 1..12: note = Description of Artificial Sequence: Synthetic peptide
  REGION 1..12: note = XENP019241 vlCDR1
RASQSVGSSYLA

SEQ ID NO: 7913 - protein, 7 aa, synthetic construct
  REGION 1..7: note = Description of Artificial Sequence: Synthetic peptide
  REGION 1..7: note = XENP019241 vlCDR2
GAFSRAT

SEQ ID NO: 7914 - protein, 9 aa, synthetic construct
  REGION 1..9: note = Description of Artificial Sequence: Synthetic peptide
  REGION 1..9: note = XENP019241 vlCDR3
QQYGSSPWT

SEQ ID NO: 7915 - protein, 221 aa, synthetic construct
  REGION 1..221: note = Description of Artificial Sequence: Synthetic polypeptide
  REGION 1..221: note = XENP019242 [CTLA-4]_H0.32_L0_Fab Heavy Chain
QVQLVESGGGVVQPGRSLRLSCAASGFTFSSYTMNWVRQAPGKGLEWVTFISYDGNNKYYADSVKGRFTISRDNSKNTLYLQMNSLRAEDTAIYYCARTGWLGPFDYWGQGTLVTVSSASTKGPSVFPLAPSSKSTSGGTAALGCLVKDYFPEPVTVSWNSGALTSGVHTFPAVLQSSGLYSLSSVVTVPSSSLGTQTYICNVNHKPSNTKVDKKVEPKSC

SEQ ID NO: 7916 - protein, 118 aa, synthetic construct; identical to SEQ ID NO: 5148
  REGION 1..118: note = Description of Artificial Sequence: Synthetic polypeptide
  REGION 1..118: note = VH of XENP019242

SEQ ID NO: 7917 - protein, 5 aa, synthetic construct
  REGION 1..5: note = Description of Artificial Sequence: Synthetic peptide
  REGION 1..5: note = XENP019242 vhCDR1
SYTMN

SEQ ID NO: 7918 - protein, 17 aa, synthetic construct
  REGION 1..17: note = Description of Artificial Sequence: Synthetic peptide
  REGION 1..17: note = XENP019242 vhCDR2
FISYDGNNKYYADSVKG

SEQ ID NO: 7919 - protein, 9 aa, synthetic construct
  REGION 1..9: note = Description of Artificial Sequence: Synthetic peptide
  REGION 1..9: note = XENP019242 vhCDR3
TGWLGPFDY

SEQ ID NO: 7920 - protein, 215 aa, synthetic construct; identical to SEQ ID NO: 7600
  REGION 1..215: note = Description of Artificial Sequence: Synthetic polypeptide
  REGION 1..215: note = XENP019242 [CTLA-4]_H0.32_L0_Fab Light Chain

SEQ ID NO: 7921 - protein, 108 aa, synthetic construct; identical to SEQ ID NO: 3741
  REGION 1..108: note = Description of Artificial Sequence: Synthetic polypeptide
  REGION 1..108: note = VL of XENP019242

SEQ ID NO: 7922 - protein, 12 aa, synthetic construct
  REGION 1..12: note = Description of Artificial Sequence: Synthetic peptide
  REGION 1..12: note = XENP019242 vlCDR1
RASQSVGSSYLA

SEQ ID NO: 7923 - protein, 7 aa, synthetic construct
  REGION 1..7: note = Description of Artificial Sequence: Synthetic peptide
  REGION 1..7: note = XENP019242 vlCDR2
GAFSRAT

SEQ ID NO: 7924 - protein, 9 aa, synthetic construct
  REGION 1..9: note = Description of Artificial Sequence: Synthetic peptide
  REGION 1..9: note = XENP019242 vlCDR3
QQYGSSPWT

SEQ ID NO: 7925 - protein, 221 aa, synthetic construct
  REGION 1..221: note = Description of Artificial Sequence: Synthetic polypeptide
  REGION 1..221: note = XENP019243 [CTLA-4]_H0.33_L0_Fab Heavy Chain
QVQLVESGGGVVQPGRSLRLSCAASGFTFSSYTMSWVRQAPGKGLEWVTFISYDGNNKYYADSVKGRFTISRDNSKNTLYLQMNSLRAEDTAIYYCARTGWLGPFDYWGQGTLVTVSSASTKGPSVFPLAPSSKSTSGGTAALGCLVKDYFPEPVTVSWNSGALTSGVHTFPAVLQSSGLYSLSSVVTVPSSSLGTQTYICNVNHKPSNTKVDKKVEPKSC

SEQ ID NO: 7926 - protein, 118 aa, synthetic construct; identical to SEQ ID NO: 5157
  REGION 1..118: note = Description of Artificial Sequence: Synthetic polypeptide
  REGION 1..118: note = VH of XENP019243

SEQ ID NO: 7927 - protein, 5 aa, synthetic construct
  REGION 1..5: note = Description of Artificial Sequence: Synthetic peptide
  REGION 1..5: note = XENP019243 vhCDR1
SYTMS

SEQ ID NO: 7928 - protein, 17 aa, synthetic construct
  REGION 1..17: note = Description of Artificial Sequence: Synthetic peptide
  REGION 1..17: note = XENP019243 vhCDR2
FISYDGNNKYYADSVKG

SEQ ID NO: 7929 - protein, 9 aa, synthetic construct
  REGION 1..9: note = Description of Artificial Sequence: Synthetic peptide
  REGION 1..9: note = XENP019243 vhCDR3
TGWLGPFDY

SEQ ID NO: 7930 - protein, 215 aa, synthetic construct; identical to SEQ ID NO: 7600
  REGION 1..215: note = Description of Artificial Sequence: Synthetic polypeptide
  REGION 1..215: note = XENP019243 [CTLA-4]_H0.33_L0_Fab Light Chain

SEQ ID NO: 7931 - protein, 108 aa, synthetic construct; identical to SEQ ID NO: 3741
  REGION 1..108: note = Description of Artificial Sequence: Synthetic polypeptide
  REGION 1..108: note = VL of XENP019243

SEQ ID NO: 7932 - protein, 12 aa, synthetic construct
  REGION 1..12: note = Description of Artificial Sequence: Synthetic peptide
  REGION 1..12: note = XENP019243 vlCDR1
RASQSVGSSYLA

SEQ ID NO: 7933 - protein, 7 aa, synthetic construct
  REGION 1..7: note = Description of Artificial Sequence: Synthetic peptide
  REGION 1..7: note = XENP019243 vlCDR2
GAFSRAT

SEQ ID NO: 7934 - protein, 9 aa, synthetic construct
  REGION 1..9: note = Description of Artificial Sequence: Synthetic peptide
  REGION 1..9: note = XENP019243 vlCDR3
QQYGSSPWT

SEQ ID NO: 7935 - protein, 221 aa, synthetic construct
  REGION 1..221: note = Description of Artificial Sequence: Synthetic polypeptide
  REGION 1..221: note = XENP019244 [CTLA-4]_H0.34_L0_Fab Heavy Chain
QVQLVESGGGVVQPGRSLRLSCAASGFTFSSYTMYWVRQAPGKGLEWVTFISYDGNNKYYADSVKGRFTISRDNSKNTLYLQMNSLRAEDTAIYYCARTGWLGPFDYWGQGTLVTVSSASTKGPSVFPLAPSSKSTSGGTAALGCLVKDYFPEPVTVSWNSGALTSGVHTFPAVLQSSGLYSLSSVVTVPSSSLGTQTYICNVNHKPSNTKVDKKVEPKSC

SEQ ID NO: 7936 - protein, 118 aa, synthetic construct; identical to SEQ ID NO: 5166
  REGION 1..118: note = Description of Artificial Sequence: Synthetic polypeptide
  REGION 1..118: note = VH of XENP019244

SEQ ID NO: 7937 - protein, 5 aa, synthetic construct
  REGION 1..5: note = Description of Artificial Sequence: Synthetic peptide
  REGION 1..5: note = XENP019244 vhCDR1
SYTMY

SEQ ID NO: 7938 - protein, 17 aa, synthetic construct
  REGION 1..17: note = Description of Artificial Sequence: Synthetic peptide
  REGION 1..17: note = XENP019244 vhCDR2
FISYDGNNKYYADSVKG

SEQ ID NO: 7939 - protein, 9 aa, synthetic construct
  REGION 1..9: note = Description of Artificial Sequence: Synthetic peptide
  REGION 1..9: note = XENP019244 vhCDR3
TGWLGPFDY

SEQ ID NO: 7940 - protein, 215 aa, synthetic construct; identical to SEQ ID NO: 7600
  REGION 1..215: note = Description of Artificial Sequence: Synthetic polypeptide
  REGION 1..215: note = XENP019244 [CTLA-4]_H0.34_L0_Fab Light Chain

SEQ ID NO: 7941 - protein, 108 aa, synthetic construct; identical to SEQ ID NO: 3741
  REGION 1..108: note = Description of Artificial Sequence: Synthetic polypeptide
  REGION 1..108: note = VL of XENP019244

SEQ ID NO: 7942 - protein, 12 aa, synthetic construct
  REGION 1..12: note = Description of Artificial Sequence: Synthetic peptide
  REGION 1..12: note = XENP019244 vlCDR1
RASQSVGSSYLA

SEQ ID NO: 7943 - protein, 7 aa, synthetic construct
  REGION 1..7: note = Description of Artificial Sequence: Synthetic peptide
  REGION 1..7: note = XENP019244 vlCDR2
GAFSRAT

SEQ ID NO: 7944 - protein, 9 aa, synthetic construct
  REGION 1..9: note = Description of Artificial Sequence: Synthetic peptide
  REGION 1..9: note = XENP019244 vlCDR3
QQYGSSPWT

SEQ ID NO: 7945 - protein, 221 aa, synthetic construct
  REGION 1..221: note = Description of Artificial Sequence: Synthetic polypeptide
  REGION 1..221: note = XENP019245 [CTLA-4]_H0.35_L0_Fab Heavy Chain
QVQLVESGGGVVQPGRSLRLSCAASGFTFSSYTMHWIRQAPGKGLEWVTFISYDGNNKYYADSVKGRFTISRDNSKNTLYLQMNSLRAEDTAIYYCARTGWLGPFDYWGQGTLVTVSSASTKGPSVFPLAPSSKSTSGGTAALGCLVKDYFPEPVTVSWNSGALTSGVHTFPAVLQSSGLYSLSSVVTVPSSSLGTQTYICNVNHKPSNTKVDKKVEPKSC

SEQ ID NO: 7946 - protein, 118 aa, synthetic construct; identical to SEQ ID NO: 5175
  REGION 1..118: note = Description of Artificial Sequence: Synthetic polypeptide
  REGION 1..118: note = VH of XENP019245

SEQ ID NO: 7947 - protein, 5 aa, synthetic construct
  REGION 1..5: note = Description of Artificial Sequence: Synthetic peptide
  REGION 1..5: note = XENP019245 vhCDR1
SYTMH

SEQ ID NO: 7948 - protein, 17 aa, synthetic construct
  REGION 1..17: note = Description of Artificial Sequence: Synthetic peptide
  REGION 1..17: note = XENP019245 vhCDR2
FISYDGNNKYYADSVKG

SEQ ID NO: 7949 - protein, 9 aa, synthetic construct
  REGION 1..9: note = Description of Artificial Sequence: Synthetic peptide
  REGION 1..9: note = XENP019245 vhCDR3
TGWLGPFDY

SEQ ID NO: 7950 - protein, 215 aa, synthetic construct; identical to SEQ ID NO: 7600
  REGION 1..215: note = Description of Artificial Sequence: Synthetic polypeptide
  REGION 1..215: note = XENP019245 [CTLA-4]_H0.35_L0_Fab Light Chain

SEQ ID NO: 7951 - protein, 108 aa, synthetic construct; identical to SEQ ID NO: 3741
  REGION 1..108: note = Description of Artificial Sequence: Synthetic polypeptide
  REGION 1..108: note = VL of XENP019245

SEQ ID NO: 7952 - protein, 12 aa, synthetic construct
  REGION 1..12: note = Description of Artificial Sequence: Synthetic peptide
  REGION 1..12: note = XENP019245 vlCDR1
RASQSVGSSYLA

SEQ ID NO: 7953 - protein, 7 aa, synthetic construct
  REGION 1..7: note = Description of Artificial Sequence: Synthetic peptide
  REGION 1..7: note = XENP019245 vlCDR2
GAFSRAT

SEQ ID NO: 7954 - protein, 9 aa, synthetic construct
  REGION 1..9: note = Description of Artificial Sequence: Synthetic peptide
  REGION 1..9: note = XENP019245 vlCDR3
QQYGSSPWT

SEQ ID NO: 7955 - protein, 221 aa, synthetic construct
  REGION 1..221: note = Description of Artificial Sequence: Synthetic polypeptide
  REGION 1..221: note = XENP019246 [CTLA-4]_H0.36_L0_Fab Heavy Chain
QVQLVESGGGVVQPGRSLRLSCAASGFTFSSYTMHWVRKAPGKGLEWVTFISYDGNNKYYADSVKGRFTISRDNSKNTLYLQMNSLRAEDTAIYYCARTGWLGPFDYWGQGTLVTVSSASTKGPSVFPLAPSSKSTSGGTAALGCLVKDYFPEPVTVSWNSGALTSGVHTFPAVLQSSGLYSLSSVVTVPSSSLGTQTYICNVNHKPSNTKVDKKVEPKSC

SEQ ID NO: 7956 - protein, 118 aa, synthetic construct; identical to SEQ ID NO: 4707
  REGION 1..118: note = Description of Artificial Sequence: Synthetic polypeptide
  REGION 1..118: note = VH of XENP019246

SEQ ID NO: 7957 - protein, 5 aa, synthetic construct
  REGION 1..5: note = Description of Artificial Sequence: Synthetic peptide
  REGION 1..5: note = XENP019246 vhCDR1
SYTMH

SEQ ID NO: 7958 - protein, 17 aa, synthetic construct
  REGION 1..17: note = Description of Artificial Sequence: Synthetic peptide
  REGION 1..17: note = XENP019246 vhCDR2
FISYDGNNKYYADSVKG

SEQ ID NO: 7959 - protein, 9 aa, synthetic construct
  REGION 1..9: note = Description of Artificial Sequence: Synthetic peptide
  REGION 1..9: note = XENP019246 vhCDR3
TGWLGPFDY

SEQ ID NO: 7960 - protein, 215 aa, synthetic construct; identical to SEQ ID NO: 7600
  REGION 1..215: note = Description of Artificial Sequence: Synthetic polypeptide
  REGION 1..215: note = XENP019246 [CTLA-4]_H0.36_L0_Fab Light Chain

SEQ ID NO: 7961 - protein, 108 aa, synthetic construct; identical to SEQ ID NO: 3741
  REGION 1..108: note = Description of Artificial Sequence: Synthetic polypeptide
  REGION 1..108: note = VL of XENP019246

SEQ ID NO: 7962 - protein, 12 aa, synthetic construct
  REGION 1..12: note = Description of Artificial Sequence: Synthetic peptide
  REGION 1..12: note = XENP019246 vlCDR1
RASQSVGSSYLA

SEQ ID NO: 7963 - protein, 7 aa, synthetic construct
  REGION 1..7: note = Description of Artificial Sequence: Synthetic peptide
  REGION 1..7: note = XENP019246 vlCDR2
GAFSRAT

SEQ ID NO: 7964 - protein, 9 aa, synthetic construct
  REGION 1..9: note = Description of Artificial Sequence: Synthetic peptide
  REGION 1..9: note = XENP019246 vlCDR3
QQYGSSPWT

SEQ ID NO: 7965 - protein, 221 aa, synthetic construct
  REGION 1..221: note = Description of Artificial Sequence: Synthetic polypeptide
  REGION 1..221: note = XENP019247 [CTLA-4]_H0.37_L0_Fab Heavy Chain
QVQLVESGGGVVQPGRSLRLSCAASGFTFSSYTMHWVRQAPGKRLEWVTFISYDGNNKYYADSVKGRFTISRDNSKNTLYLQMNSLRAEDTAIYYCARTGWLGPFDYWGQGTLVTVSSASTKGPSVFPLAPSSKSTSGGTAALGCLVKDYFPEPVTVSWNSGALTSGVHTFPAVLQSSGLYSLSSVVTVPSSSLGTQTYICNVNHKPSNTKVDKKVEPKSC

SEQ ID NO: 7966 - protein, 118 aa, synthetic construct; identical to SEQ ID NO: 4725
  REGION 1..118: note = Description of Artificial Sequence: Synthetic polypeptide
  REGION 1..118: note = VH of XENP019247

SEQ ID NO: 7967 - protein, 5 aa, synthetic construct
  REGION 1..5: note = Description of Artificial Sequence: Synthetic peptide
  REGION 1..5: note = XENP019247 vhCDR1
SYTMH

SEQ ID NO: 7968 - protein, 17 aa, synthetic construct
  REGION 1..17: note = Description of Artificial Sequence: Synthetic peptide
  REGION 1..17: note = XENP019247 vhCDR2
FISYDGNNKYYADSVKG

SEQ ID NO: 7969 - protein, 9 aa, synthetic construct
  REGION 1..9: note = Description of Artificial Sequence: Synthetic peptide
  REGION 1..9: note = XENP019247 vhCDR3
TGWLGPFDY

SEQ ID NO: 7970 - protein, 215 aa, synthetic construct; identical to SEQ ID NO: 7600
  REGION 1..215: note = Description of Artificial Sequence: Synthetic polypeptide
  REGION 1..215: note = XENP019247 [CTLA-4]_H0.37_L0_Fab Light Chain

SEQ ID NO: 7971 - protein, 108 aa, synthetic construct; identical to SEQ ID NO: 3741
  REGION 1..108: note = Description of Artificial Sequence: Synthetic polypeptide
  REGION 1..108: note = VL of XENP019247

SEQ ID NO: 7972 - protein, 12 aa, synthetic construct
  REGION 1..12: note = Description of Artificial Sequence: Synthetic peptide
  REGION 1..12: note = XENP019247 vlCDR1
RASQSVGSSYLA

SEQ ID NO: 7973 - protein, 7 aa, synthetic construct
  REGION 1..7: note = Description of Artificial Sequence: Synthetic peptide
  REGION 1..7: note = XENP019247 vlCDR2
GAFSRAT

SEQ ID NO: 7974 - protein, 9 aa, synthetic construct
  REGION 1..9: note = Description of Artificial Sequence: Synthetic peptide
  REGION 1..9: note = XENP019247 vlCDR3
QQYGSSPWT

SEQ ID NO: 7975 - protein, 221 aa, synthetic construct
  REGION 1..221: note = Description of Artificial Sequence: Synthetic polypeptide
  REGION 1..221: note = XENP019248 [CTLA-4]_H0.38_L0_Fab Heavy Chain
QVQLVESGGGVVQPGRSLRLSCAASGFTFSSYTMHWVRQAPGKGLEWVAFISYDGNNKYYADSVKGRFTISRDNSKNTLYLQMNSLRAEDTAIYYCARTGWLGPFDYWGQGTLVTVSSASTKGPSVFPLAPSSKSTSGGTAALGCLVKDYFPEPVTVSWNSGALTSGVHTFPAVLQSSGLYSLSSVVTVPSSSLGTQTYICNVNHKPSNTKVDKKVEPKSC

SEQ ID NO: 7976 - protein, 118 aa, synthetic construct; identical to SEQ ID NO: 5202
  REGION 1..118: note = Description of Artificial Sequence: Synthetic polypeptide
  REGION 1..118: note = VH of XENP019248

SEQ ID NO: 7977 - protein, 5 aa, synthetic construct
  REGION 1..5: note = Description of Artificial Sequence: Synthetic peptide
  REGION 1..5: note = XENP019248 vhCDR1
SYTMH

SEQ ID NO: 7978 - protein, 17 aa, synthetic construct
  REGION 1..17: note = Description of Artificial Sequence: Synthetic peptide
  REGION 1..17: note = XENP019248 vhCDR2
FISYDGNNKYYADSVKG

SEQ ID NO: 7979 - protein, 9 aa, synthetic construct
  REGION 1..9: note = Description of Artificial Sequence: Synthetic peptide
  REGION 1..9: note = XENP019248 vhCDR3
TGWLGPFDY

SEQ ID NO: 7980 - protein, 215 aa, synthetic construct; identical to SEQ ID NO: 7600
  REGION 1..215: note = Description of Artificial Sequence: Synthetic polypeptide
  REGION 1..215: note = XENP019248 [CTLA-4]_H0.38_L0_Fab Light Chain

SEQ ID NO: 7981 - protein, 108 aa, synthetic construct; identical to SEQ ID NO: 3741
  REGION 1..108: note = Description of Artificial Sequence: Synthetic polypeptide
  REGION 1..108: note = VL of XENP019248

SEQ ID NO: 7982 - protein, 12 aa, synthetic construct
  REGION 1..12: note = Description of Artificial Sequence: Synthetic peptide
  REGION 1..12: note = XENP019248 vlCDR1
RASQSVGSSYLA

SEQ ID NO: 7983 - protein, 7 aa, synthetic construct
  REGION 1..7: note = Description of Artificial Sequence: Synthetic peptide
  REGION 1..7: note = XENP019248 vlCDR2
GAFSRAT

SEQ ID NO: 7984 - protein, 9 aa, synthetic construct
  REGION 1..9: note = Description of Artificial Sequence: Synthetic peptide
  REGION 1..9: note = XENP019248 vlCDR3
QQYGSSPWT

SEQ ID NO: 7985 - protein, 221 aa, synthetic construct
  REGION 1..221: note = Description of Artificial Sequence: Synthetic polypeptide
  REGION 1..221: note = XENP019249 [CTLA-4]_H0.39_L0_Fab Heavy Chain
QVQLVESGGGVVQPGRSLRLSCAASGFTFSSYTMHWVRQAPGKGLEWVGFISYDGNNKYYADSVKGRFTISRDNSKNTLYLQMNSLRAEDTAIYYCARTGWLGPFDYWGQGTLVTVSSASTKGPSVFPLAPSSKSTSGGTAALGCLVKDYFPEPVTVSWNSGALTSGVHTFPAVLQSSGLYSLSSVVTVPSSSLGTQTYICNVNHKPSNTKVDKKVEPKSC

SEQ ID NO: 7986 - protein, 118 aa, synthetic construct; identical to SEQ ID NO: 5211
  REGION 1..118: note = Description of Artificial Sequence: Synthetic polypeptide
  REGION 1..118: note = VH of XENP019249

SEQ ID NO: 7987 - protein, 5 aa, synthetic construct
  REGION 1..5: note = Description of Artificial Sequence: Synthetic peptide
  REGION 1..5: note = XENP019249 vhCDR1
SYTMH

SEQ ID NO: 7988 - protein, 17 aa, synthetic construct
  REGION 1..17: note = Description of Artificial Sequence: Synthetic peptide
  REGION 1..17: note = XENP019249 vhCDR2
FISYDGNNKYYADSVKG

SEQ ID NO: 7989 - protein, 9 aa, synthetic construct
  REGION 1..9: note = Description of Artificial Sequence: Synthetic peptide
  REGION 1..9: note = XENP019249 vhCDR3
TGWLGPFDY

SEQ ID NO: 7990 - protein, 215 aa, synthetic construct; identical to SEQ ID NO: 7600
  REGION 1..215: note = Description of Artificial Sequence: Synthetic polypeptide
  REGION 1..215: note = XENP019249 [CTLA-4]_H0.39_L0_Fab Light Chain

SEQ ID NO: 7991 - protein, 108 aa, synthetic construct; identical to SEQ ID NO: 3741
  REGION 1..108: note = Description of Artificial Sequence: Synthetic polypeptide
  REGION 1..108: note = VL of XENP019249

SEQ ID NO: 7992 - protein, 12 aa, synthetic construct
  REGION 1..12: note = Description of Artificial Sequence: Synthetic peptide
  REGION 1..12: note = XENP019249 vlCDR1
RASQSVGSSYLA

SEQ ID NO: 7993 - protein, 7 aa, synthetic construct
  REGION 1..7: note = Description of Artificial Sequence: Synthetic peptide
  REGION 1..7: note = XENP019249 vlCDR2
GAFSRAT

SEQ ID NO: 7994 - protein, 9 aa, synthetic construct
  REGION 1..9: note = Description of Artificial Sequence: Synthetic peptide
  REGION 1..9: note = XENP019249 vlCDR3
QQYGSSPWT

SEQ ID NO: 7995 - protein, 221 aa, synthetic construct
  REGION 1..221: note = Description of Artificial Sequence: Synthetic polypeptide
  REGION 1..221: note = XENP019250 [CTLA-4]_H0.40_L0_Fab Heavy Chain
QVQLVESGGGVVQPGRSLRLSCAASGFTFSSYTMHWVRQAPGKGLEWVSFISYDGNNKYYADSVKGRFTISRDNSKNTLYLQMNSLRAEDTAIYYCARTGWLGPFDYWGQGTLVTVSSASTKGPSVFPLAPSSKSTSGGTAALGCLVKDYFPEPVTVSWNSGALTSGVHTFPAVLQSSGLYSLSSVVTVPSSSLGTQTYICNVNHKPSNTKVDKKVEPKSC

SEQ ID NO: 7996 - protein, 118 aa, synthetic construct; identical to SEQ ID NO: 5220
  REGION 1..118: note = Description of Artificial Sequence: Synthetic polypeptide
  REGION 1..118: note = VH of XENP019250

SEQ ID NO: 7997 - protein, 5 aa, synthetic construct
  REGION 1..5: note = Description of Artificial Sequence: Synthetic peptide
  REGION 1..5: note = XENP019250 vhCDR1
SYTMH

SEQ ID NO: 7998 - protein, 17 aa, synthetic construct
  REGION 1..17: note = Description of Artificial Sequence: Synthetic peptide
  REGION 1..17: note = XENP019250 vhCDR2
FISYDGNNKYYADSVKG

SEQ ID NO: 7999 - protein, 9 aa, synthetic construct
  REGION 1..9: note = Description of Artificial Sequence: Synthetic peptide
  REGION 1..9: note = XENP019250 vhCDR3
TGWLGPFDY

SEQ ID NO: 8000 - protein, 215 aa, synthetic construct; identical to SEQ ID NO: 7600
  REGION 1..215: note = Description of Artificial Sequence: Synthetic polypeptide
  REGION 1..215: note = XENP019250 [CTLA-4]_H0.40_L0_Fab Light Chain

SEQ ID NO: 8001 - protein, 108 aa, synthetic construct; identical to SEQ ID NO: 3741
  REGION 1..108: note = Description of Artificial Sequence: Synthetic polypeptide
  REGION 1..108: note = VL of XENP019250

SEQ ID NO: 8002 - protein, 12 aa, synthetic construct
  REGION 1..12: note = Description of Artificial Sequence: Synthetic peptide
  REGION 1..12: note = XENP019250 vlCDR1
RASQSVGSSYLA

SEQ ID NO: 8003 - protein, 7 aa, synthetic construct
  REGION 1..7: note = Description of Artificial Sequence: Synthetic peptide
  REGION 1..7: note = XENP019250 vlCDR2
GAFSRAT

SEQ ID NO: 8004 - protein, 9 aa, synthetic construct
  REGION 1..9: note = Description of Artificial Sequence: Synthetic peptide
  REGION 1..9: note = XENP019250 vlCDR3
QQYGSSPWT

SEQ ID NO: 8005 - protein, 221 aa, synthetic construct
  REGION 1..221: note = Description of Artificial Sequence: Synthetic polypeptide
  REGION 1..221: note = XENP019251 [CTLA-4]_H0.41_L0_Fab Heavy Chain
QVQLVESGGGVVQPGRSLRLSCAASGFTFSSYTMHWVRQAPGKGLEWVVFISYDGNNKYYADSVKGRFTISRDNSKNTLYLQMNSLRAEDTAIYYCARTGWLGPFDYWGQGTLVTVSSASTKGPSVFPLAPSSKSTSGGTAALGCLVKDYFPEPVTVSWNSGALTSGVHTFPAVLQSSGLYSLSSVVTVPSSSLGTQTYICNVNHKPSNTKVDKKVEPKSC

SEQ ID NO: 8006 - protein, 118 aa, synthetic construct; identical to SEQ ID NO: 5229
  REGION 1..118: note = Description of Artificial Sequence: Synthetic polypeptide
  REGION 1..118: note = VH of XENP019251

SEQ ID NO: 8007 - protein, 5 aa, synthetic construct
  REGION 1..5: note = Description of Artificial Sequence: Synthetic peptide
  REGION 1..5: note = XENP019251 vhCDR1
SYTMH

SEQ ID NO: 8008 - protein, 17 aa, synthetic construct
  REGION 1..17: note = Description of Artificial Sequence: Synthetic peptide
  REGION 1..17: note = XENP019251 vhCDR2
FISYDGNNKYYADSVKG

SEQ ID NO: 8009 - protein, 9 aa, synthetic construct
  REGION 1..9: note = Description of Artificial Sequence: Synthetic peptide
  REGION 1..9: note = XENP019251 vhCDR3
TGWLGPFDY

SEQ ID NO: 8010 - protein, 215 aa, synthetic construct; identical to SEQ ID NO: 7600
  REGION 1..215: note = Description of Artificial Sequence: Synthetic polypeptide
  REGION 1..215: note = XENP019251 [CTLA-4]_H0.41_L0_Fab Light Chain

SEQ ID NO: 8011 - protein, 108 aa, synthetic construct; identical to SEQ ID NO: 3741
  REGION 1..108: note = Description of Artificial Sequence: Synthetic polypeptide
  REGION 1..108: note = VL of XENP019251

SEQ ID NO: 8012 - protein, 12 aa, synthetic construct
  REGION 1..12: note = Description of Artificial Sequence: Synthetic peptide
  REGION 1..12: note = XENP019251 vlCDR1
RASQSVGSSYLA

SEQ ID NO: 8013 - protein, 7 aa, synthetic construct
  REGION 1..7: note = Description of Artificial Sequence: Synthetic peptide
  REGION 1..7: note = XENP019251 vlCDR2
GAFSRAT

SEQ ID NO: 8014 - protein, 9 aa, synthetic construct
  REGION 1..9: note = Description of Artificial Sequence: Synthetic peptide
  REGION 1..9: note = XENP019251 vlCDR3
QQYGSSPWT

SEQ ID NO: 8015 - protein, 221 aa, synthetic construct
  REGION 1..221: note = Description of Artificial Sequence: Synthetic polypeptide
  REGION 1..221: note = XENP019252 [CTLA-4]_H0.42_L0_Fab Heavy Chain
QVQLVESGGGVVQPGRSLRLSCAASGFTFSSYTMHWVRQAPGKGLEWVTAISYDGNNKYYADSVKGRFTISRDNSKNTLYLQMNSLRAEDTAIYYCARTGWLGPFDYWGQGTLVTVSSASTKGPSVFPLAPSSKSTSGGTAALGCLVKDYFPEPVTVSWNSGALTSGVHTFPAVLQSSGLYSLSSVVTVPSSSLGTQTYICNVNHKPSNTKVDKKVEPKSC

SEQ ID NO: 8016 - protein, 118 aa, synthetic construct; identical to SEQ ID NO: 5238
  REGION 1..118: note = Description of Artificial Sequence: Synthetic polypeptide
  REGION 1..118: note = VH of XENP019252

SEQ ID NO: 8017 - protein, 5 aa, synthetic construct
  REGION 1..5: note = Description of Artificial Sequence: Synthetic peptide
  REGION 1..5: note = XENP019252 vhCDR1
SYTMH

SEQ ID NO: 8018 - protein, 17 aa, synthetic construct
  REGION 1..17: note = Description of Artificial Sequence: Synthetic peptide
  REGION 1..17: note = XENP019252 vhCDR2
AISYDGNNKYYADSVKG

SEQ ID NO: 8019 - protein, 9 aa, synthetic construct
  REGION 1..9: note = Description of Artificial Sequence: Synthetic peptide
  REGION 1..9: note = XENP019252 vhCDR3
TGWLGPFDY

SEQ ID NO: 8020 - protein, 215 aa, synthetic construct; identical to SEQ ID NO: 7600
  REGION 1..215: note = Description of Artificial Sequence: Synthetic polypeptide
  REGION 1..215: note = XENP019252 [CTLA-4]_H0.42_L0_Fab Light Chain

SEQ ID NO: 8021 - protein, 108 aa, synthetic construct; identical to SEQ ID NO: 3741
  REGION 1..108: note = Description of Artificial Sequence: Synthetic polypeptide
  REGION 1..108: note = VL of XENP019252

SEQ ID NO: 8022 - protein, 12 aa, synthetic construct
  REGION 1..12: note = Description of Artificial Sequence: Synthetic peptide
  REGION 1..12: note = XENP019252 vlCDR1
RASQSVGSSYLA

SEQ ID NO: 8023 - protein, 7 aa, synthetic construct
  REGION 1..7: note = Description of Artificial Sequence: Synthetic peptide
  REGION 1..7: note = XENP019252 vlCDR2
GAFSRAT

SEQ ID NO: 8024 - protein, 9 aa, synthetic construct
  REGION 1..9: note = Description of Artificial Sequence: Synthetic peptide
  REGION 1..9: note = XENP019252 vlCDR3
QQYGSSPWT

SEQ ID NO: 8025 - protein, 221 aa, synthetic construct
  REGION 1..221: note = Description of Artificial Sequence: Synthetic polypeptide
  REGION 1..221: note = XENP019253 [CTLA-4]_H0.43_L0_Fab Heavy Chain
QVQLVESGGGVVQPGRSLRLSCAASGFTFSSYTMHWVRQAPGKGLEWVTGISYDGNNKYYADSVKGRFTISRDNSKNTLYLQMNSLRAEDTAIYYCARTGWLGPFDYWGQGTLVTVSSASTKGPSVFPLAPSSKSTSGGTAALGCLVKDYFPEPVTVSWNSGALTSGVHTFPAVLQSSGLYSLSSVVTVPSSSLGTQTYICNVNHKPSNTKVDKKVEPKSC

SEQ ID NO: 8026 - protein, 118 aa, synthetic construct; identical to SEQ ID NO: 5247
  REGION 1..118: note = Description of Artificial Sequence: Synthetic polypeptide
  REGION 1..118: note = VH of XENP019253

SEQ ID NO: 8027 - protein, 5 aa, synthetic construct
  REGION 1..5: note = Description of Artificial Sequence: Synthetic peptide
  REGION 1..5: note = XENP019253 vhCDR1
SYTMH

SEQ ID NO: 8028 - protein, 17 aa, synthetic construct
  REGION 1..17: note = Description of Artificial Sequence: Synthetic peptide
  REGION 1..17: note = XENP019253 vhCDR2
GISYDGNNKYYADSVKG

SEQ ID NO: 8029 - protein, 9 aa, synthetic construct
  REGION 1..9: note = Description of Artificial Sequence: Synthetic peptide
  REGION 1..9: note = XENP019253 vhCDR3
TGWLGPFDY

SEQ ID NO: 8030 - protein, 215 aa, synthetic construct; identical to SEQ ID NO: 7600
  REGION 1..215: note = Description of Artificial Sequence: Synthetic polypeptide
  REGION 1..215: note = XENP019253 [CTLA-4]_H0.43_L0_Fab Light Chain

SEQ ID NO: 8031 - protein, 108 aa, synthetic construct; identical to SEQ ID NO: 3741
  REGION 1..108: note = Description of Artificial Sequence: Synthetic polypeptide
  REGION 1..108: note = VL of XENP019253

SEQ ID NO: 8032 - protein, 12 aa, synthetic construct
  REGION 1..12: note = Description of Artificial Sequence: Synthetic peptide
  REGION 1..12: note = XENP019253 vlCDR1
RASQSVGSSYLA

SEQ ID NO: 8033 - protein, 7 aa, synthetic construct
  REGION 1..7: note = Description of Artificial Sequence: Synthetic peptide
  REGION 1..7: note = XENP019253 vlCDR2
GAFSRAT

SEQ ID NO: 8034 - protein, 9 aa, synthetic construct
  REGION 1..9: note = Description of Artificial Sequence: Synthetic peptide
  REGION 1..9: note = XENP019253 vlCDR3
QQYGSSPWT

SEQ ID NO: 8035 - protein, 221 aa, synthetic construct
  REGION 1..221: note = Description of Artificial Sequence: Synthetic polypeptide
  REGION 1..221: note = XENP019254 [CTLA-4]_H0.44_L0_Fab Heavy Chain
QVQLVESGGGVVQPGRSLRLSCAASGFTFSSYTMHWVRQAPGKGLEWVTLISYDGNNKYYADSVKGRFTISRDNSKNTLYLQMNSLRAEDTAIYYCARTGWLGPFDYWGQGTLVTVSSASTKGPSVFPLAPSSKSTSGGTAALGCLVKDYFPEPVTVSWNSGALTSGVHTFPAVLQSSGLYSLSSVVTVPSSSLGTQTYICNVNHKPSNTKVDKKVEPKSC

SEQ ID NO: 8036 - protein, 118 aa, synthetic construct; identical to SEQ ID NO: 5256
  REGION 1..118: note = Description of Artificial Sequence: Synthetic polypeptide
  REGION 1..118: note = VH of XENP019254

SEQ ID NO: 8037 - protein, 5 aa, synthetic construct
  REGION 1..5: note = Description of Artificial Sequence: Synthetic peptide
  REGION 1..5: note = XENP019254 vhCDR1
SYTMH

SEQ ID NO: 8038 - protein, 17 aa, synthetic construct
  REGION 1..17: note = Description of Artificial Sequence: Synthetic peptide
  REGION 1..17: note = XENP019254 vhCDR2
LISYDGNNKYYADSVKG

SEQ ID NO: 8039 - protein, 9 aa, synthetic construct
  REGION 1..9: note = Description of Artificial Sequence: Synthetic peptide
  REGION 1..9: note = XENP019254 vhCDR3
TGWLGPFDY

SEQ ID NO: 8040 - protein, 215 aa, synthetic construct; identical to SEQ ID NO: 7600
  REGION 1..215: note = Description of Artificial Sequence: Synthetic polypeptide
  REGION 1..215: note = XENP019254 [CTLA-4]_H0.44_L0_Fab Light Chain

SEQ ID NO: 8041 - protein, 108 aa, synthetic construct; identical to SEQ ID NO: 3741
  REGION 1..108: note = Description of Artificial Sequence: Synthetic polypeptide
  REGION 1..108: note = VL of XENP019254

SEQ ID NO: 8042 - protein, 12 aa, synthetic construct
  REGION 1..12: note = Description of Artificial Sequence: Synthetic peptide
  REGION 1..12: note = XENP019254 vlCDR1
RASQSVGSSYLA

SEQ ID NO: 8043 - protein, 7 aa, synthetic construct
  REGION 1..7: note = Description of Artificial Sequence: Synthetic peptide
  REGION 1..7: note = XENP019254 vlCDR2
GAFSRAT

SEQ ID NO: 8044 - protein, 9 aa, synthetic construct
  REGION 1..9: note = Description of Artificial Sequence: Synthetic peptide
  REGION 1..9: note = XENP019254 vlCDR3
QQYGSSPWT

SEQ ID NO: 8045 - protein, 221 aa, synthetic construct
  REGION 1..221: note = Description of Artificial Sequence: Synthetic polypeptide
  REGION 1..221: note = XENP019255 [CTLA-4]_H0.45_L0_Fab Heavy Chain
QVQLVESGGGVVQPGRSLRLSCAASGFTFSSYTMHWVRQAPGKGLEWVTIISYDGNNKYYADSVKGRFTISRDNSKNTLYLQMNSLRAEDTAIYYCARTGWLGPFDYWGQGTLVTVSSASTKGPSVFPLAPSSKSTSGGTAALGCLVKDYFPEPVTVSWNSGALTSGVHTFPAVLQSSGLYSLSSVVTVPSSSLGTQTYICNVNHKPSNTKVDKKVEPKSC

SEQ ID NO: 8046 - protein, 118 aa, synthetic construct; identical to SEQ ID NO: 5265
  REGION 1..118: note = Description of Artificial Sequence: Synthetic polypeptide
  REGION 1..118: note = VH of XENP019255

SEQ ID NO: 8047 - protein, 5 aa, synthetic construct
  REGION 1..5: note = Description of Artificial Sequence: Synthetic peptide
  REGION 1..5: note = XENP019255 vhCDR1
SYTMH

SEQ ID NO: 8048 - protein, 17 aa, synthetic construct
  REGION 1..17: note = Description of Artificial Sequence: Synthetic peptide
  REGION 1..17: note = XENP019255 vhCDR2
IISYDGNNKYYADSVKG

SEQ ID NO: 8049 - protein, 9 aa, synthetic construct
  REGION 1..9: note = Description of Artificial Sequence: Synthetic peptide
  REGION 1..9: note = XENP019255 vhCDR3
TGWLGPFDY

SEQ ID NO: 8050 - protein, 215 aa, synthetic construct; identical to SEQ ID NO: 7600
  REGION 1..215: note = Description of Artificial Sequence: Synthetic polypeptide
  REGION 1..215: note = XENP019255 [CTLA-4]_H0.45_L0_Fab Light Chain

SEQ ID NO: 8051 - protein, 108 aa, synthetic construct; identical to SEQ ID NO: 3741
  REGION 1..108: note = Description of Artificial Sequence: Synthetic polypeptide
  REGION 1..108: note = VL of XENP019255

SEQ ID NO: 8052 - protein, 12 aa, synthetic construct
  REGION 1..12: note = Description of Artificial Sequence: Synthetic peptide
  REGION 1..12: note = XENP019255 vlCDR1
RASQSVGSSYLA

SEQ ID NO: 8053 - protein, 7 aa, synthetic construct
  REGION 1..7: note = Description of Artificial Sequence: Synthetic peptide
  REGION 1..7: note = XENP019255 vlCDR2
GAFSRAT

SEQ ID NO: 8054 - protein, 9 aa, synthetic construct
  REGION 1..9: note = Description of Artificial Sequence: Synthetic peptide
  REGION 1..9: note = XENP019255 vlCDR3
QQYGSSPWT

SEQ ID NO: 8055 - protein, 221 aa, synthetic construct
  REGION 1..221: note = Description of Artificial Sequence: Synthetic polypeptide
  REGION 1..221: note = XENP019256 [CTLA-4]_H0.46_L0_Fab Heavy Chain
QVQLVESGGGVVQPGRSLRLSCAASGFTFSSYTMHWVRQAPGKGLEWVTRISYDGNNKYYADSVKGRFTISRDNSKNTLYLQMNSLRAEDTAIYYCARTGWLGPFDYWGQGTLVTVSSASTKGPSVFPLAPSSKSTSGGTAALGCLVKDYFPEPVTVSWNSGALTSGVHTFPAVLQSSGLYSLSSVVTVPSSSLGTQTYICNVNHKPSNTKVDKKVEPKSC

SEQ ID NO: 8056 - protein, 118 aa, synthetic construct; identical to SEQ ID NO: 5274
  REGION 1..118: note = Description of Artificial Sequence: Synthetic polypeptide
  REGION 1..118: note = VH of XENP019256

SEQ ID NO: 8057 - protein, 5 aa, synthetic construct
  REGION 1..5: note = Description of Artificial Sequence: Synthetic peptide
  REGION 1..5: note = XENP019256 vhCDR1
SYTMH

SEQ ID NO: 8058 - protein, 17 aa, synthetic construct
  REGION 1..17: note = Description of Artificial Sequence: Synthetic peptide
  REGION 1..17: note = XENP019256 vhCDR2
RISYDGNNKYYADSVKG

SEQ ID NO: 8059 - protein, 9 aa, synthetic construct
  REGION 1..9: note = Description of Artificial Sequence: Synthetic peptide
  REGION 1..9: note = XENP019256 vhCDR3
TGWLGPFDY

SEQ ID NO: 8060 - protein, 215 aa, synthetic construct; identical to SEQ ID NO: 7600
  REGION 1..215: note = Description of Artificial Sequence: Synthetic polypeptide
  REGION 1..215: note = XENP019256 [CTLA-4]_H0.46_L0_Fab Light Chain

SEQ ID NO: 8061 - protein, 108 aa, synthetic construct; identical to SEQ ID NO: 3741
  REGION 1..108: note = Description of Artificial Sequence: Synthetic polypeptide
  REGION 1..108: note = VL of XENP019256

SEQ ID NO: 8062 - protein, 12 aa, synthetic construct
  REGION 1..12: note = Description of Artificial Sequence: Synthetic peptide
  REGION 1..12: note = XENP019256 vlCDR1
RASQSVGSSYLA

SEQ ID NO: 8063 - protein, 7 aa, synthetic construct
  REGION 1..7: note = Description of Artificial Sequence: Synthetic peptide
  REGION 1..7: note = XENP019256 vlCDR2
GAFSRAT

SEQ ID NO: 8064 - protein, 9 aa, synthetic construct
  REGION 1..9: note = Description of Artificial Sequence: Synthetic peptide
  REGION 1..9: note = XENP019256 vlCDR3
QQYGSSPWT

SEQ ID NO: 8065 - protein, 221 aa, synthetic construct
  REGION 1..221: note = Description of Artificial Sequence: Synthetic polypeptide
  REGION 1..221: note = XENP019257 [CTLA-4]_H0.47_L0_Fab Heavy Chain
QVQLVESGGGVVQPGRSLRLSCAASGFTFSSYTMHWVRQAPGKGLEWVTVISYDGNNKYYADSVKGRFTISRDNSKNTLYLQMNSLRAEDTAIYYCARTGWLGPFDYWGQGTLVTVSSASTKGPSVFPLAPSSKSTSGGTAALGCLVKDYFPEPVTVSWNSGALTSGVHTFPAVLQSSGLYSLSSVVTVPSSSLGTQTYICNVNHKPSNTKVDKKVEPKSC

SEQ ID NO: 8066 - protein, 118 aa, synthetic construct; identical to SEQ ID NO: 5283
  REGION 1..118: note = Description of Artificial Sequence: Synthetic polypeptide
  REGION 1..118: note = VH of XENP019257

SEQ ID NO: 8067 - protein, 5 aa, synthetic construct
  REGION 1..5: note = Description of Artificial Sequence: Synthetic peptide
  REGION 1..5: note = XENP019257 vhCDR1
SYTMH

SEQ ID NO: 8068 - protein, 17 aa, synthetic construct
  REGION 1..17: note = Description of Artificial Sequence: Synthetic peptide
  REGION 1..17: note = XENP019257 vhCDR2
VISYDGNNKYYADSVKG

SEQ ID NO: 8069 - protein, 9 aa, synthetic construct
  REGION 1..9: note = Description of Artificial Sequence: Synthetic peptide
  REGION 1..9: note = XENP019257 vhCDR3
TGWLGPFDY

SEQ ID NO: 8070 - protein, 215 aa, synthetic construct; identical to SEQ ID NO: 7600
  REGION 1..215: note = Description of Artificial Sequence: Synthetic polypeptide
  REGION 1..215: note = XENP019257 [CTLA-4]_H0.47_L0_Fab Light Chain

SEQ ID NO: 8071 - protein, 108 aa, synthetic construct; identical to SEQ ID NO: 3741
  REGION 1..108: note = Description of Artificial Sequence: Synthetic polypeptide
  REGION 1..108: note = VL of XENP019257

SEQ ID NO: 8072 - protein, 12 aa, synthetic construct
  REGION 1..12: note = Description of Artificial Sequence: Synthetic peptide
  REGION 1..12: note = XENP019257 vlCDR1
RASQSVGSSYLA

SEQ ID NO: 8073 - protein, 7 aa, synthetic construct
  REGION 1..7: note = Description of Artificial Sequence: Synthetic peptide
  REGION 1..7: note = XENP019257 vlCDR2
GAFSRAT

SEQ ID NO: 8074 - protein, 9 aa, synthetic construct
  REGION 1..9: note = Description of Artificial Sequence: Synthetic peptide
  REGION 1..9: note = XENP019257 vlCDR3
QQYGSSPWT

SEQ ID NO: 8075 - protein, 221 aa, synthetic construct
  REGION 1..221: note = Description of Artificial Sequence: Synthetic polypeptide
  REGION 1..221: note = XENP019258 [CTLA-4]_H0.48_L0_Fab Heavy Chain
QVQLVESGGGVVQPGRSLRLSCAASGFTFSSYTMHWVRQAPGKGLEWVTYISYDGNNKYYADSVKGRFTISRDNSKNTLYLQMNSLRAEDTAIYYCARTGWLGPFDYWGQGTLVTVSSASTKGPSVFPLAPSSKSTSGGTAALGCLVKDYFPEPVTVSWNSGALTSGVHTFPAVLQSSGLYSLSSVVTVPSSSLGTQTYICNVNHKPSNTKVDKKVEPKSC

SEQ ID NO: 8076 - protein, 118 aa, synthetic construct; identical to SEQ ID NO: 5292
  REGION 1..118: note = Description of Artificial Sequence: Synthetic polypeptide
  REGION 1..118: note = VH of XENP019258

SEQ ID NO: 8077 - protein, 5 aa, synthetic construct
  REGION 1..5: note = Description of Artificial Sequence: Synthetic peptide
  REGION 1..5: note = XENP019258 vhCDR1
SYTMH

SEQ ID NO: 8078 - protein, 17 aa, synthetic construct
  REGION 1..17: note = Description of Artificial Sequence: Synthetic peptide
  REGION 1..17: note = XENP019258 vhCDR2
YISYDGNNKYYADSVKG

SEQ ID NO: 8079 - protein, 9 aa, synthetic construct
  REGION 1..9: note = Description of Artificial Sequence: Synthetic peptide
  REGION 1..9: note = XENP019258 vhCDR3
TGWLGPFDY

SEQ ID NO: 8080 - protein, 215 aa, synthetic construct; identical to SEQ ID NO: 7600
  REGION 1..215: note = Description of Artificial Sequence: Synthetic polypeptide
  REGION 1..215: note = XENP019258 [CTLA-4]_H0.48_L0_Fab Light Chain

SEQ ID NO: 8081 - protein, 108 aa, synthetic construct; identical to SEQ ID NO: 3741
  REGION 1..108: note = Description of Artificial Sequence: Synthetic polypeptide
  REGION 1..108: note = VL of XENP019258

SEQ ID NO: 8082 - protein, 12 aa, synthetic construct
  REGION 1..12: note = Description of Artificial Sequence: Synthetic peptide
  REGION 1..12: note = XENP019258 vlCDR1
RASQSVGSSYLA

SEQ ID NO: 8083 - protein, 7 aa, synthetic construct
  REGION 1..7: note = Description of Artificial Sequence: Synthetic peptide
  REGION 1..7: note = XENP019258 vlCDR2
GAFSRAT

SEQ ID NO: 8084 - protein, 9 aa, synthetic construct
  REGION 1..9: note = Description of Artificial Sequence: Synthetic peptide
  REGION 1..9: note = XENP019258 vlCDR3
QQYGSSPWT

SEQ ID NO: 8085 - protein, 221 aa, synthetic construct
  REGION 1..221: note = Description of Artificial Sequence: Synthetic polypeptide
  REGION 1..221: note = XENP019259 [CTLA-4]_H0.49_L0_Fab Heavy Chain
QVQLVESGGGVVQPGRSLRLSCAASGFTFSSYTMHWVRQAPGKGLEWVTFESYDGNNKYYADSVKGRFTISRDNSKNTLYLQMNSLRAEDTAIYYCARTGWLGPFDYWGQGTLVTVSSASTKGPSVFPLAPSSKSTSGGTAALGCLVKDYFPEPVTVSWNSGALTSGVHTFPAVLQSSGLYSLSSVVTVPSSSLGTQTYICNVNHKPSNTKVDKKVEPKSC

SEQ ID NO: 8086 - protein, 118 aa, synthetic construct; identical to SEQ ID NO: 5301
  REGION 1..118: note = Description of Artificial Sequence: Synthetic polypeptide
  REGION 1..118: note = VH of XENP019259

SEQ ID NO: 8087 - protein, 5 aa, synthetic construct
  REGION 1..5: note = Description of Artificial Sequence: Synthetic peptide
  REGION 1..5: note = XENP019259 vhCDR1
SYTMH

SEQ ID NO: 8088 - protein, 17 aa, synthetic construct
  REGION 1..17: note = Description of Artificial Sequence: Synthetic peptide
  REGION 1..17: note = XENP019259 vhCDR2
FESYDGNNKYYADSVKG

SEQ ID NO: 8089 - protein, 9 aa, synthetic construct
  REGION 1..9: note = Description of Artificial Sequence: Synthetic peptide
  REGION 1..9: note = XENP019259 vhCDR3
TGWLGPFDY

SEQ ID NO: 8090 - protein, 215 aa, synthetic construct; identical to SEQ ID NO: 7600
  REGION 1..215: note = Description of Artificial Sequence: Synthetic polypeptide
  REGION 1..215: note = XENP019259 [CTLA-4]_H0.49_L0_Fab Light Chain

SEQ ID NO: 8091 - protein, 108 aa, synthetic construct; identical to SEQ ID NO: 3741
  REGION 1..108: note = Description of Artificial Sequence: Synthetic polypeptide
  REGION 1..108: note = VL of XENP019259

SEQ ID NO: 8092 - protein, 12 aa, synthetic construct
  REGION 1..12: note = Description of Artificial Sequence: Synthetic peptide
  REGION 1..12: note = XENP019259 vlCDR1
RASQSVGSSYLA

SEQ ID NO: 8093 - protein, 7 aa, synthetic construct
  REGION 1..7: note = Description of Artificial Sequence: Synthetic peptide
  REGION 1..7: note = XENP019259 vlCDR2
GAFSRAT

SEQ ID NO: 8094 - protein, 9 aa, synthetic construct
  REGION 1..9: note = Description of Artificial Sequence: Synthetic peptide
  REGION 1..9: note = XENP019259 vlCDR3
QQYGSSPWT

SEQ ID NO: 8095 - protein, 221 aa, synthetic construct
  REGION 1..221: note = Description of Artificial Sequence: Synthetic polypeptide
  REGION 1..221: note = XENP019260 [CTLA-4]_H0.50_L0_Fab Heavy Chain
QVQLVESGGGVVQPGRSLRLSCAASGFTFSSYTMHWVRQAPGKGLEWVTFHSYDGNNKYYADSVKGRFTISRDNSKNTLYLQMNSLRAEDTAIYYCARTGWLGPFDYWGQGTLVTVSSASTKGPSVFPLAPSSKSTSGGTAALGCLVKDYFPEPVTVSWNSGALTSGVHTFPAVLQSSGLYSLSSVVTVPSSSLGTQTYICNVNHKPSNTKVDKKVEPKSC

SEQ ID NO: 8096 - protein, 118 aa, synthetic construct; identical to SEQ ID NO: 5310
  REGION 1..118: note = Description of Artificial Sequence: Synthetic polypeptide
  REGION 1..118: note = VH of XENP019260

SEQ ID NO: 8097 - protein, 5 aa, synthetic construct
  REGION 1..5: note = Description of Artificial Sequence: Synthetic peptide
  REGION 1..5: note = XENP019260 vhCDR1
SYTMH

SEQ ID NO: 8098 - protein, 17 aa, synthetic construct
  REGION 1..17: note = Description of Artificial Sequence: Synthetic peptide
  REGION 1..17: note = XENP019260 vhCDR2
FHSYDGNNKYYADSVKG

SEQ ID NO: 8099 - protein, 9 aa, synthetic construct
  REGION 1..9: note = Description of Artificial Sequence: Synthetic peptide
  REGION 1..9: note = XENP019260 vhCDR3
TGWLGPFDY

SEQ ID NO: 8100 - protein, 215 aa, synthetic construct; identical to SEQ ID NO: 7600
  REGION 1..215: note = Description of Artificial Sequence: Synthetic polypeptide
  REGION 1..215: note = XENP019260 [CTLA-4]_H0.50_L0_Fab Light Chain

SEQ ID NO: 8101 - protein, 108 aa, synthetic construct; identical to SEQ ID NO: 3741
  REGION 1..108: note = Description of Artificial Sequence: Synthetic polypeptide
  REGION 1..108: note = VL of XENP019260

SEQ ID NO: 8102 - protein, 12 aa, synthetic construct
  REGION 1..12: note = Description of Artificial Sequence: Synthetic peptide
  REGION 1..12: note = XENP019260 vlCDR1
RASQSVGSSYLA

SEQ ID NO: 8103 - protein, 7 aa, synthetic construct
  REGION 1..7: note = Description of Artificial Sequence: Synthetic peptide
  REGION 1..7: note = XENP019260 vlCDR2
GAFSRAT

SEQ ID NO: 8104 - protein, 9 aa, synthetic construct
  REGION 1..9: note = Description of Artificial Sequence: Synthetic peptide
  REGION 1..9: note = XENP019260 vlCDR3
QQYGSSPWT

SEQ ID NO: 8105 - protein, 221 aa, synthetic construct
  REGION 1..221: note = Description of Artificial Sequence: Synthetic polypeptide
  REGION 1..221: note = XENP019261 [CTLA-4]_H0.51_L0_Fab Heavy Chain
QVQLVESGGGVVQPGRSLRLSCAASGFTFSSYTMHWVRQAPGKGLEWVTFTSYDGNNKYYADSVKGRFTISRDNSKNTLYLQMNSLRAEDTAIYYCARTGWLGPFDYWGQGTLVTVSSASTKGPSVFPLAPSSKSTSGGTAALGCLVKDYFPEPVTVSWNSGALTSGVHTFPAVLQSSGLYSLSSVVTVPSSSLGTQTYICNVNHKPSNTKVDKKVEPKSC

SEQ ID NO: 8106 - protein, 118 aa, synthetic construct; identical to SEQ ID NO: 5319
  REGION 1..118: note = Description of Artificial Sequence: Synthetic polypeptide
  REGION 1..118: note = VH of XENP019261

SEQ ID NO: 8107 - protein, 5 aa, synthetic construct
  REGION 1..5: note = Description of Artificial Sequence: Synthetic peptide
  REGION 1..5: note = XENP019261 vhCDR1
SYTMH

SEQ ID NO: 8108 - protein, 17 aa, synthetic construct
  REGION 1..17: note = Description of Artificial Sequence: Synthetic peptide
  REGION 1..17: note = XENP019261 vhCDR2
FTSYDGNNKYYADSVKG

SEQ ID NO: 8109 - protein, 9 aa, synthetic construct
  REGION 1..9: note = Description of Artificial Sequence: Synthetic peptide
  REGION 1..9: note = XENP019261 vhCDR3
TGWLGPFDY

SEQ ID NO: 8110 - protein, 215 aa, synthetic construct; identical to SEQ ID NO: 7600
  REGION 1..215: note = Description of Artificial Sequence: Synthetic polypeptide
  REGION 1..215: note = XENP019261 [CTLA-4]_H0.51_L0_Fab Light Chain

SEQ ID NO: 8111 - protein, 108 aa, synthetic construct; identical to SEQ ID NO: 3741
  REGION 1..108: note = Description of Artificial Sequence: Synthetic polypeptide
  REGION 1..108: note = VL of XENP019261

SEQ ID NO: 8112 - protein, 12 aa, synthetic construct
  REGION 1..12: note = Description of Artificial Sequence: Synthetic peptide
  REGION 1..12: note = XENP019261 vlCDR1
RASQSVGSSYLA

SEQ ID NO: 8113 - protein, 7 aa, synthetic construct
  REGION 1..7: note = Description of Artificial Sequence: Synthetic peptide
  REGION 1..7: note = XENP019261 vlCDR2
GAFSRAT

SEQ ID NO: 8114 - protein, 9 aa, synthetic construct
  REGION 1..9: note = Description of Artificial Sequence: Synthetic peptide
  REGION 1..9: note = XENP019261 vlCDR3
QQYGSSPWT

SEQ ID NO: 8115 - protein, 221 aa, synthetic construct
  REGION 1..221: note = Description of Artificial Sequence: Synthetic polypeptide
  REGION 1..221: note = XENP019262 [CTLA-4]_H0.52_L0_Fab Heavy Chain
QVQLVESGGGVVQPGRSLRLSCAASGFTFSSYTMHWVRQAPGKGLEWVTFVSYDGNNKYYADSVKGRFTISRDNSKNTLYLQMNSLRAEDTAIYYCARTGWLGPFDYWGQGTLVTVSSASTKGPSVFPLAPSSKSTSGGTAALGCLVKDYFPEPVTVSWNSGALTSGVHTFPAVLQSSGLYSLSSVVTVPSSSLGTQTYICNVNHKPSNTKVDKKVEPKSC

SEQ ID NO: 8116 - protein, 118 aa, synthetic construct; identical to SEQ ID NO: 5328
  REGION 1..118: note = Description of Artificial Sequence: Synthetic polypeptide
  REGION 1..118: note = VH of XENP019262

SEQ ID NO: 8117 - protein, 5 aa, synthetic construct
  REGION 1..5: note = Description of Artificial Sequence: Synthetic peptide
  REGION 1..5: note = XENP019262 vhCDR1
SYTMH

SEQ ID NO: 8118 - protein, 17 aa, synthetic construct
  REGION 1..17: note = Description of Artificial Sequence: Synthetic peptide
  REGION 1..17: note = XENP019262 vhCDR2
FVSYDGNNKYYADSVKG

SEQ ID NO: 8119 - protein, 9 aa, synthetic construct
  REGION 1..9: note = Description of Artificial Sequence: Synthetic peptide
  REGION 1..9: note = XENP019262 vhCDR3
TGWLGPFDY

SEQ ID NO: 8120 - protein, 215 aa, synthetic construct; identical to SEQ ID NO: 7600
  REGION 1..215: note = Description of Artificial Sequence: Synthetic polypeptide
  REGION 1..215: note = XENP019262 [CTLA-4]_H0.52_L0_Fab Light Chain

SEQ ID NO: 8121 - protein, 108 aa, synthetic construct; identical to SEQ ID NO: 3741
  REGION 1..108: note = Description of Artificial Sequence: Synthetic polypeptide
  REGION 1..108: note = VL of XENP019262

SEQ ID NO: 8122 - protein, 12 aa, synthetic construct
  REGION 1..12: note = Description of Artificial Sequence: Synthetic peptide
  REGION 1..12: note = XENP019262 vlCDR1
RASQSVGSSYLA

SEQ ID NO: 8123 - protein, 7 aa, synthetic construct
  REGION 1..7: note = Description of Artificial Sequence: Synthetic peptide
  REGION 1..7: note = XENP019262 vlCDR2
GAFSRAT

SEQ ID NO: 8124 - protein, 9 aa, synthetic construct
  REGION 1..9: note = Description of Artificial Sequence: Synthetic peptide
  REGION 1..9: note = XENP019262 vlCDR3
QQYGSSPWT

SEQ ID NO: 8125 - protein, 221 aa, synthetic construct
  REGION 1..221: note = Description of Artificial Sequence: Synthetic polypeptide
  REGION 1..221: note = XENP019263 [CTLA-4]_H0.53_L0_Fab Heavy Chain
QVQLVESGGGVVQPGRSLRLSCAASGFTFSSYTMHWVRQAPGKGLEWVTFYSYDGNNKYYADSVKGRFTISRDNSKNTLYLQMNSLRAEDTAIYYCARTGWLGPFDYWGQGTLVTVSSASTKGPSVFPLAPSSKSTSGGTAALGCLVKDYFPEPVTVSWNSGALTSGVHTFPAVLQSSGLYSLSSVVTVPSSSLGTQTYICNVNHKPSNTKVDKKVEPKSC

SEQ ID NO: 8126 - protein, 118 aa, synthetic construct; identical to SEQ ID NO: 5337
  REGION 1..118: note = Description of Artificial Sequence: Synthetic polypeptide
  REGION 1..118: note = VH of XENP019263

SEQ ID NO: 8127 - protein, 5 aa, synthetic construct
  REGION 1..5: note = Description of Artificial Sequence: Synthetic peptide
  REGION 1..5: note = XENP019263 vhCDR1
SYTMH

SEQ ID NO: 8128 - protein, 17 aa, synthetic construct
  REGION 1..17: note = Description of Artificial Sequence: Synthetic peptide
  REGION 1..17: note = XENP019263 vhCDR2
FYSYDGNNKYYADSVKG

SEQ ID NO: 8129 - protein, 9 aa, synthetic construct
  REGION 1..9: note = Description of Artificial Sequence: Synthetic peptide
  REGION 1..9: note = XENP019263 vhCDR3
TGWLGPFDY

SEQ ID NO: 8130 - protein, 215 aa, synthetic construct; identical to SEQ ID NO: 7600
  REGION 1..215: note = Description of Artificial Sequence: Synthetic polypeptide
  REGION 1..215: note = XENP019263 [CTLA-4]_H0.53_L0_Fab Light Chain

SEQ ID NO: 8131 - protein, 108 aa, synthetic construct; identical to SEQ ID NO: 3741
  REGION 1..108: note = Description of Artificial Sequence: Synthetic polypeptide
  REGION 1..108: note = VL of XENP019263

SEQ ID NO: 8132 - protein, 12 aa, synthetic construct
  REGION 1..12: note = Description of Artificial Sequence: Synthetic peptide
  REGION 1..12: note = XENP019263 vlCDR1
RASQSVGSSYLA

SEQ ID NO: 8133 - protein, 7 aa, synthetic construct
  REGION 1..7: note = Description of Artificial Sequence: Synthetic peptide
  REGION 1..7: note = XENP019263 vlCDR2
GAFSRAT

SEQ ID NO: 8134 - protein, 9 aa, synthetic construct
  REGION 1..9: note = Description of Artificial Sequence: Synthetic peptide
  REGION 1..9: note = XENP019263 vlCDR3
QQYGSSPWT

SEQ ID NO: 8135 - protein, 221 aa, synthetic construct
  REGION 1..221: note = Description of Artificial Sequence: Synthetic polypeptide
  REGION 1..221: note = XENP019264 [CTLA-4]_H0.54_L0_Fab Heavy Chain
QVQLVESGGGVVQPGRSLRLSCAASGFTFSSYTMHWVRQAPGKGLEWVTFISGDGNNKYYADSVKGRFTISRDNSKNTLYLQMNSLRAEDTAIYYCARTGWLGPFDYWGQGTLVTVSSASTKGPSVFPLAPSSKSTSGGTAALGCLVKDYFPEPVTVSWNSGALTSGVHTFPAVLQSSGLYSLSSVVTVPSSSLGTQTYICNVNHKPSNTKVDKKVEPKSC

SEQ ID NO: 8136 - protein, 118 aa, synthetic construct; identical to SEQ ID NO: 5346
  REGION 1..118: note = Description of Artificial Sequence: Synthetic polypeptide
  REGION 1..118: note = VH of XENP019264

SEQ ID NO: 8137 - protein, 5 aa, synthetic construct
  REGION 1..5: note = Description of Artificial Sequence: Synthetic peptide
  REGION 1..5: note = XENP019264 vhCDR1
SYTMH

SEQ ID NO: 8138 - protein, 17 aa, synthetic construct
  REGION 1..17: note = Description of Artificial Sequence: Synthetic peptide
  REGION 1..17: note = XENP019264 vhCDR2
FISGDGNNKYYADSVKG

SEQ ID NO: 8139 - protein, 9 aa, synthetic construct
  REGION 1..9: note = Description of Artificial Sequence: Synthetic peptide
  REGION 1..9: note = XENP019264 vhCDR3
TGWLGPFDY

SEQ ID NO: 8140 - protein, 215 aa, synthetic construct; identical to SEQ ID NO: 7600
  REGION 1..215: note = Description of Artificial Sequence: Synthetic polypeptide
  REGION 1..215: note = XENP019264 [CTLA-4]_H0.54_L0_Fab Light Chain

SEQ ID NO: 8141 - protein, 108 aa, synthetic construct; identical to SEQ ID NO: 3741
  REGION 1..108: note = Description of Artificial Sequence: Synthetic polypeptide
  REGION 1..108: note = VL of XENP019264

SEQ ID NO: 8142 - protein, 12 aa, synthetic construct
  REGION 1..12: note = Description of Artificial Sequence: Synthetic peptide
  REGION 1..12: note = XENP019264 vlCDR1
RASQSVGSSYLA

SEQ ID NO: 8143 - protein, 7 aa, synthetic construct
  REGION 1..7: note = Description of Artificial Sequence: Synthetic peptide
  REGION 1..7: note = XENP019264 vlCDR2
GAFSRAT

SEQ ID NO: 8144 - protein, 9 aa, synthetic construct
  REGION 1..9: note = Description of Artificial Sequence: Synthetic peptide
  REGION 1..9: note = XENP019264 vlCDR3
QQYGSSPWT

SEQ ID NO: 8145 - protein, 221 aa, synthetic construct
  REGION 1..221: note = Description of Artificial Sequence: Synthetic polypeptide
  REGION 1..221: note = XENP019265 [CTLA-4]_H0.55_L0_Fab Heavy Chain
QVQLVESGGGVVQPGRSLRLSCAASGFTFSSYTMHWVRQAPGKGLEWVTFISNDGNNKYYADSVKGRFTISRDNSKNTLYLQMNSLRAEDTAIYYCARTGWLGPFDYWGQGTLVTVSSASTKGPSVFPLAPSSKSTSGGTAALGCLVKDYFPEPVTVSWNSGALTSGVHTFPAVLQSSGLYSLSSVVTVPSSSLGTQTYICNVNHKPSNTKVDKKVEPKSC

SEQ ID NO: 8146 - protein, 118 aa, synthetic construct; identical to SEQ ID NO: 5355
  REGION 1..118: note = Description of Artificial Sequence: Synthetic polypeptide
  REGION 1..118: note = VH of XENP019265

SEQ ID NO: 8147 - protein, 5 aa, synthetic construct
  REGION 1..5: note = Description of Artificial Sequence: Synthetic peptide
  REGION 1..5: note = XENP019265 vhCDR1
SYTMH

SEQ ID NO: 8148 - protein, 17 aa, synthetic construct
  REGION 1..17: note = Description of Artificial Sequence: Synthetic peptide
  REGION 1..17: note = XENP019265 vhCDR2
FISNDGNNKYYADSVKG

SEQ ID NO: 8149 - protein, 9 aa, synthetic construct
  REGION 1..9: note = Description of Artificial Sequence: Synthetic peptide
  REGION 1..9: note = XENP019265 vhCDR3
TGWLGPFDY

SEQ ID NO: 8150 - protein, 215 aa, synthetic construct; identical to SEQ ID NO: 7600
  REGION 1..215: note = Description of Artificial Sequence: Synthetic polypeptide
  REGION 1..215: note = XENP019265 [CTLA-4]_H0.55_L0_Fab Light Chain

SEQ ID NO: 8151 - protein, 108 aa, synthetic construct; identical to SEQ ID NO: 3741
  REGION 1..108: note = Description of Artificial Sequence: Synthetic polypeptide
  REGION 1..108: note = VL of XENP019265

SEQ ID NO: 8152 - protein, 12 aa, synthetic construct
  REGION 1..12: note = Description of Artificial Sequence: Synthetic peptide
  REGION 1..12: note = XENP019265 vlCDR1
RASQSVGSSYLA

SEQ ID NO: 8153 - protein, 7 aa, synthetic construct
  REGION 1..7: note = Description of Artificial Sequence: Synthetic peptide
  REGION 1..7: note = XENP019265 vlCDR2
GAFSRAT

SEQ ID NO: 8154 - protein, 9 aa, synthetic construct
  REGION 1..9: note = Description of Artificial Sequence: Synthetic peptide
  REGION 1..9: note = XENP019265 vlCDR3
QQYGSSPWT

SEQ ID NO: 8155 - protein, 221 aa, synthetic construct
  REGION 1..221: note = Description of Artificial Sequence: Synthetic polypeptide
  REGION 1..221: note = XENP019266 [CTLA-4]_H0.56_L0_Fab Heavy Chain
QVQLVESGGGVVQPGRSLRLSCAASGFTFSSYTMHWVRQAPGKGLEWVTFISSDGNNKYYADSVKGRFTISRDNSKNTLYLQMNSLRAEDTAIYYCARTGWLGPFDYWGQGTLVTVSSASTKGPSVFPLAPSSKSTSGGTAALGCLVKDYFPEPVTVSWNSGALTSGVHTFPAVLQSSGLYSLSSVVTVPSSSLGTQTYICNVNHKPSNTKVDKKVEPKSC

SEQ ID NO: 8156 - protein, 118 aa, synthetic construct; identical to SEQ ID NO: 5364
  REGION 1..118: note = Description of Artificial Sequence: Synthetic polypeptide
  REGION 1..118: note = VH of XENP019266

SEQ ID NO: 8157 - protein, 5 aa, synthetic construct
  REGION 1..5: note = Description of Artificial Sequence: Synthetic peptide
  REGION 1..5: note = XENP019266 vhCDR1
SYTMH

SEQ ID NO: 8158 - protein, 17 aa, synthetic construct
  REGION 1..17: note = Description of Artificial Sequence: Synthetic peptide
  REGION 1..17: note = XENP019266 vhCDR2
FISSDGNNKYYADSVKG

SEQ ID NO: 8159 - protein, 9 aa, synthetic construct
  REGION 1..9: note = Description of Artificial Sequence: Synthetic peptide
  REGION 1..9: note = XENP019266 vhCDR3
TGWLGPFDY

SEQ ID NO: 8160 - protein, 215 aa, synthetic construct; identical to SEQ ID NO: 7600
  REGION 1..215: note = Description of Artificial Sequence: Synthetic polypeptide
  REGION 1..215: note = XENP019266 [CTLA-4]_H0.56_L0_Fab Light Chain

SEQ ID NO: 8161 - protein, 108 aa, synthetic construct; identical to SEQ ID NO: 3741
  REGION 1..108: note = Description of Artificial Sequence: Synthetic polypeptide
  REGION 1..108: note = VL of XENP019266

SEQ ID NO: 8162 - protein, 12 aa, synthetic construct
  REGION 1..12: note = Description of Artificial Sequence: Synthetic peptide
  REGION 1..12: note = XENP019266 vlCDR1
RASQSVGSSYLA

SEQ ID NO: 8163 - protein, 7 aa, synthetic construct
  REGION 1..7: note = Description of Artificial Sequence: Synthetic peptide
  REGION 1..7: note = XENP019266 vlCDR2
GAFSRAT

SEQ ID NO: 8164 - protein, 9 aa, synthetic construct
  REGION 1..9: note = Description of Artificial Sequence: Synthetic peptide
  REGION 1..9: note = XENP019266 vlCDR3
QQYGSSPWT

SEQ ID NO: 8165 - protein, 221 aa, synthetic construct
  REGION 1..221: note = Description of Artificial Sequence: Synthetic polypeptide
  REGION 1..221: note = XENP019267 [CTLA-4]_H0.57_L0_Fab Heavy Chain
QVQLVESGGGVVQPGRSLRLSCAASGFTFSSYTMHWVRQAPGKGLEWVTFISYNGNNKYYADSVKGRFTISRDNSKNTLYLQMNSLRAEDTAIYYCARTGWLGPFDYWGQGTLVTVSSASTKGPSVFPLAPSSKSTSGGTAALGCLVKDYFPEPVTVSWNSGALTSGVHTFPAVLQSSGLYSLSSVVTVPSSSLGTQTYICNVNHKPSNTKVDKKVEPKSC

SEQ ID NO: 8166 - protein, 118 aa, synthetic construct; identical to SEQ ID NO: 5373
  REGION 1..118: note = Description of Artificial Sequence: Synthetic polypeptide
  REGION 1..118: note = VH of XENP019267

SEQ ID NO: 8167 - protein, 5 aa, synthetic construct
  REGION 1..5: note = Description of Artificial Sequence: Synthetic peptide
  REGION 1..5: note = XENP019267 vhCDR1
SYTMH

SEQ ID NO: 8168 - protein, 17 aa, synthetic construct
  REGION 1..17: note = Description of Artificial Sequence: Synthetic peptide
  REGION 1..17: note = XENP019267 vhCDR2
FISYNGNNKYYADSVKG

SEQ ID NO: 8169 - protein, 9 aa, synthetic construct
  REGION 1..9: note = Description of Artificial Sequence: Synthetic peptide
  REGION 1..9: note = XENP019267 vhCDR3
TGWLGPFDY

SEQ ID NO: 8170 - protein, 215 aa, synthetic construct; identical to SEQ ID NO: 7600
  REGION 1..215: note = Description of Artificial Sequence: Synthetic polypeptide
  REGION 1..215: note = XENP019267 [CTLA-4]_H0.57_L0_Fab Light Chain

SEQ ID NO: 8171 - protein, 108 aa, synthetic construct; identical to SEQ ID NO: 3741
  REGION 1..108: note = Description of Artificial Sequence: Synthetic polypeptide
  REGION 1..108: note = VL of XENP019267

SEQ ID NO: 8172 - protein, 12 aa, synthetic construct
  REGION 1..12: note = Description of Artificial Sequence: Synthetic peptide
  REGION 1..12: note = XENP019267 vlCDR1
RASQSVGSSYLA

SEQ ID NO: 8173 - protein, 7 aa, synthetic construct
  REGION 1..7: note = Description of Artificial Sequence: Synthetic peptide
  REGION 1..7: note = XENP019267 vlCDR2
GAFSRAT

SEQ ID NO: 8174 - protein, 9 aa, synthetic construct
  REGION 1..9: note = Description of Artificial Sequence: Synthetic peptide
  REGION 1..9: note = XENP019267 vlCDR3
QQYGSSPWT

SEQ ID NO: 8175 - protein, 221 aa, synthetic construct
  REGION 1..221: note = Description of Artificial Sequence: Synthetic polypeptide
  REGION 1..221: note = XENP019268 [CTLA-4]_H0.58_L0_Fab Heavy Chain
QVQLVESGGGVVQPGRSLRLSCAASGFTFSSYTMHWVRQAPGKGLEWVTFISYSGNNKYYADSVKGRFTISRDNSKNTLYLQMNSLRAEDTAIYYCARTGWLGPFDYWGQGTLVTVSSASTKGPSVFPLAPSSKSTSGGTAALGCLVKDYFPEPVTVSWNSGALTSGVHTFPAVLQSSGLYSLSSVVTVPSSSLGTQTYICNVNHKPSNTKVDKKVEPKSC

SEQ ID NO: 8176 - protein, 118 aa, synthetic construct; identical to SEQ ID NO: 5382
  REGION 1..118: note = Description of Artificial Sequence: Synthetic polypeptide
  REGION 1..118: note = VH of XENP019268

SEQ ID NO: 8177 - protein, 5 aa, synthetic construct
  REGION 1..5: note = Description of Artificial Sequence: Synthetic peptide
  REGION 1..5: note = XENP019268 vhCDR1
SYTMH

SEQ ID NO: 8178 - protein, 17 aa, synthetic construct
  REGION 1..17: note = Description of Artificial Sequence: Synthetic peptide
  REGION 1..17: note = XENP019268 vhCDR2
FISYSGNNKYYADSVKG

SEQ ID NO: 8179 - protein, 9 aa, synthetic construct
  REGION 1..9: note = Description of Artificial Sequence: Synthetic peptide
  REGION 1..9: note = XENP019268 vhCDR3
TGWLGPFDY

SEQ ID NO: 8180 - protein, 215 aa, synthetic construct; identical to SEQ ID NO: 7600
  REGION 1..215: note = Description of Artificial Sequence: Synthetic polypeptide
  REGION 1..215: note = XENP019268 [CTLA-4]_H0.58_L0_Fab Light Chain

SEQ ID NO: 8181 - protein, 108 aa, synthetic construct; identical to SEQ ID NO: 3741
  REGION 1..108: note = Description of Artificial Sequence: Synthetic polypeptide
  REGION 1..108: note = VL of XENP019268

SEQ ID NO: 8182 - protein, 12 aa, synthetic construct
  REGION 1..12: note = Description of Artificial Sequence: Synthetic peptide
  REGION 1..12: note = XENP019268 vlCDR1
RASQSVGSSYLA

SEQ ID NO: 8183 - protein, 7 aa, synthetic construct
  REGION 1..7: note = Description of Artificial Sequence: Synthetic peptide
  REGION 1..7: note = XENP019268 vlCDR2
GAFSRAT

SEQ ID NO: 8184 - protein, 9 aa, synthetic construct
  REGION 1..9: note = Description of Artificial Sequence: Synthetic peptide
  REGION 1..9: note = XENP019268 vlCDR3
QQYGSSPWT

SEQ ID NO: 8185 - protein, 221 aa, synthetic construct
  REGION 1..221: note = Description of Artificial Sequence: Synthetic polypeptide
  REGION 1..221: note = XENP019269 [CTLA-4]_H0.59_L0_Fab Heavy Chain
QVQLVESGGGVVQPGRSLRLSCAASGFTFSSYTMHWVRQAPGKGLEWVTFISYEGNNKYYADSVKGRFTISRDNSKNTLYLQMNSLRAEDTAIYYCARTGWLGPFDYWGQGTLVTVSSASTKGPSVFPLAPSSKSTSGGTAALGCLVKDYFPEPVTVSWNSGALTSGVHTFPAVLQSSGLYSLSSVVTVPSSSLGTQTYICNVNHKPSNTKVDKKVEPKSC

SEQ ID NO: 8186 - protein, 118 aa, synthetic construct; identical to SEQ ID NO: 5391
  REGION 1..118: note = Description of Artificial Sequence: Synthetic polypeptide
  REGION 1..118: note = VH of XENP019269

SEQ ID NO: 8187 - protein, 5 aa, synthetic construct
  REGION 1..5: note = Description of Artificial Sequence: Synthetic peptide
  REGION 1..5: note = XENP019269 vhCDR1
SYTMH

SEQ ID NO: 8188 - protein, 17 aa, synthetic construct
  REGION 1..17: note = Description of Artificial Sequence: Synthetic peptide
  REGION 1..17: note = XENP019269 vhCDR2
FISYEGNNKYYADSVKG

SEQ ID NO: 8189 - protein, 9 aa, synthetic construct
  REGION 1..9: note = Description of Artificial Sequence: Synthetic peptide
  REGION 1..9: note = XENP019269 vhCDR3
TGWLGPFDY

SEQ ID NO: 8190 - protein, 215 aa, synthetic construct; identical to SEQ ID NO: 7600
  REGION 1..215: note = Description of Artificial Sequence: Synthetic polypeptide
  REGION 1..215: note = XENP019269 [CTLA-4]_H0.59_L0_Fab Light Chain

SEQ ID NO: 8191 - protein, 108 aa, synthetic construct; identical to SEQ ID NO: 3741
  REGION 1..108: note = Description of Artificial Sequence: Synthetic polypeptide
  REGION 1..108: note = VL of XENP019269

SEQ ID NO: 8192 - protein, 12 aa, synthetic construct
  REGION 1..12: note = Description of Artificial Sequence: Synthetic peptide
  REGION 1..12: note = XENP019269 vlCDR1
RASQSVGSSYLA

SEQ ID NO: 8193 - protein, 7 aa, synthetic construct
  REGION 1..7: note = Description of Artificial Sequence: Synthetic peptide
  REGION 1..7: note = XENP019269 vlCDR2
GAFSRAT

SEQ ID NO: 8194 - protein, 9 aa, synthetic construct
  REGION 1..9: note = Description of Artificial Sequence: Synthetic peptide
  REGION 1..9: note = XENP019269 vlCDR3
QQYGSSPWT

SEQ ID NO: 8195 - protein, 221 aa, synthetic construct
  REGION 1..221: note = Description of Artificial Sequence: Synthetic polypeptide
  REGION 1..221: note = XENP019270 [CTLA-4]_H0.60_L0_Fab Heavy Chain
QVQLVESGGGVVQPGRSLRLSCAASGFTFSSYTMHWVRQAPGKGLEWVTFISYHGNNKYYADSVKGRFTISRDNSKNTLYLQMNSLRAEDTAIYYCARTGWLGPFDYWGQGTLVTVSSASTKGPSVFPLAPSSKSTSGGTAALGCLVKDYFPEPVTVSWNSGALTSGVHTFPAVLQSSGLYSLSSVVTVPSSSLGTQTYICNVNHKPSNTKVDKKVEPKSC

SEQ ID NO: 8196 - protein, 118 aa, synthetic construct; identical to SEQ ID NO: 5400
  REGION 1..118: note = Description of Artificial Sequence: Synthetic polypeptide
  REGION 1..118: note = VH of XENP019270

SEQ ID NO: 8197 - protein, 5 aa, synthetic construct
  REGION 1..5: note = Description of Artificial Sequence: Synthetic peptide
  REGION 1..5: note = XENP019270 vhCDR1
SYTMH

SEQ ID NO: 8198 - protein, 17 aa, synthetic construct
  REGION 1..17: note = Description of Artificial Sequence: Synthetic peptide
  REGION 1..17: note = XENP019270 vhCDR2
FISYHGNNKYYADSVKG

SEQ ID NO: 8199 - protein, 9 aa, synthetic construct
  REGION 1..9: note = Description of Artificial Sequence: Synthetic peptide
  REGION 1..9: note = XENP019270 vhCDR3
TGWLGPFDY

SEQ ID NO: 8200 - protein, 215 aa, synthetic construct; identical to SEQ ID NO: 7600
  REGION 1..215: note = Description of Artificial Sequence: Synthetic polypeptide
  REGION 1..215: note = XENP019270 [CTLA-4]_H0.60_L0_Fab Light Chain

SEQ ID NO: 8201 - protein, 108 aa, synthetic construct; identical to SEQ ID NO: 3741
  REGION 1..108: note = Description of Artificial Sequence: Synthetic polypeptide
  REGION 1..108: note = VL of XENP019270

SEQ ID NO: 8202 - protein, 12 aa, synthetic construct
  REGION 1..12: note = Description of Artificial Sequence: Synthetic peptide
  REGION 1..12: note = XENP019270 vlCDR1
RASQSVGSSYLA

SEQ ID NO: 8203 - protein, 7 aa, synthetic construct
  REGION 1..7: note = Description of Artificial Sequence: Synthetic peptide
  REGION 1..7: note = XENP019270 vlCDR2
GAFSRAT

SEQ ID NO: 8204 - protein, 9 aa, synthetic construct
  REGION 1..9: note = Description of Artificial Sequence: Synthetic peptide
  REGION 1..9: note = XENP019270 vlCDR3
QQYGSSPWT

SEQ ID NO: 8205 - protein, 221 aa, synthetic construct
  REGION 1..221: note = Description of Artificial Sequence: Synthetic polypeptide
  REGION 1..221: note = XENP019271 [CTLA-4]_H0.61_L0_Fab Heavy Chain
QVQLVESGGGVVQPGRSLRLSCAASGFTFSSYTMHWVRQAPGKGLEWVTFISYKGNNKYYADSVKGRFTISRDNSKNTLYLQMNSLRAEDTAIYYCARTGWLGPFDYWGQGTLVTVSSASTKGPSVFPLAPSSKSTSGGTAALGCLVKDYFPEPVTVSWNSGALTSGVHTFPAVLQSSGLYSLSSVVTVPSSSLGTQTYICNVNHKPSNTKVDKKVEPKSC

SEQ ID NO: 8206 - protein, 118 aa, synthetic construct; identical to SEQ ID NO: 5409
  REGION 1..118: note = Description of Artificial Sequence: Synthetic polypeptide
  REGION 1..118: note = VH of XENP019271

SEQ ID NO: 8207 - protein, 5 aa, synthetic construct
  REGION 1..5: note = Description of Artificial Sequence: Synthetic peptide
  REGION 1..5: note = XENP019271 vhCDR1
SYTMH

SEQ ID NO: 8208 - protein, 17 aa, synthetic construct
  REGION 1..17: note = Description of Artificial Sequence: Synthetic peptide
  REGION 1..17: note = XENP019271 vhCDR2
FISYKGNNKYYADSVKG

SEQ ID NO: 8209 - protein, 9 aa, synthetic construct
  REGION 1..9: note = Description of Artificial Sequence: Synthetic peptide
  REGION 1..9: note = XENP019271 vhCDR3
TGWLGPFDY

SEQ ID NO: 8210 - protein, 215 aa, synthetic construct; identical to SEQ ID NO: 7600
  REGION 1..215: note = Description of Artificial Sequence: Synthetic polypeptide
  REGION 1..215: note = XENP019271 [CTLA-4]_H0.61_L0_Fab Light Chain

SEQ ID NO: 8211 - protein, 108 aa, synthetic construct; identical to SEQ ID NO: 3741
  REGION 1..108: note = Description of Artificial Sequence: Synthetic polypeptide
  REGION 1..108: note = VL of XENP019271

SEQ ID NO: 8212 - protein, 12 aa, synthetic construct
  REGION 1..12: note = Description of Artificial Sequence: Synthetic peptide
  REGION 1..12: note = XENP019271 vlCDR1
RASQSVGSSYLA

SEQ ID NO: 8213 - protein, 7 aa, synthetic construct
  REGION 1..7: note = Description of Artificial Sequence: Synthetic peptide
  REGION 1..7: note = XENP019271 vlCDR2
GAFSRAT

SEQ ID NO: 8214 - protein, 9 aa, synthetic construct
  REGION 1..9: note = Description of Artificial Sequence: Synthetic peptide
  REGION 1..9: note = XENP019271 vlCDR3
QQYGSSPWT

SEQ ID NO: 8215 - protein, 221 aa, synthetic construct
  REGION 1..221: note = Description of Artificial Sequence: Synthetic polypeptide
  REGION 1..221: note = XENP019272 [CTLA-4]_H0.62_L0_Fab Heavy Chain
QVQLVESGGGVVQPGRSLRLSCAASGFTFSSYTMHWVRQAPGKGLEWVTFISYKGNNKYYADSVKGRFTISEDNSKNTLYLQMNSLRAEDTAIYYCARTGWLGPFDYWGQGTLVTVSSASTKGPSVFPLAPSSKSTSGGTAALGCLVKDYFPEPVTVSWNSGALTSGVHTFPAVLQSSGLYSLSSVVTVPSSSLGTQTYICNVNHKPSNTKVDKKVEPKSC

SEQ ID NO: 8216 - protein, 118 aa, synthetic construct; identical to SEQ ID NO: 5418
  REGION 1..118: note = Description of Artificial Sequence: Synthetic polypeptide
  REGION 1..118: note = VH of XENP019272

SEQ ID NO: 8217 - protein, 5 aa, synthetic construct
  REGION 1..5: note = Description of Artificial Sequence: Synthetic peptide
  REGION 1..5: note = XENP019272 vhCDR1
SYTMH

SEQ ID NO: 8218 - protein, 17 aa, synthetic construct
  REGION 1..17: note = Description of Artificial Sequence: Synthetic peptide
  REGION 1..17: note = XENP019272 vhCDR2
FISYKGNNKYYADSVKG

SEQ ID NO: 8219 - protein, 9 aa, synthetic construct
  REGION 1..9: note = Description of Artificial Sequence: Synthetic peptide
  REGION 1..9: note = XENP019272 vhCDR3
TGWLGPFDY

SEQ ID NO: 8220 - protein, 215 aa, synthetic construct; identical to SEQ ID NO: 7600
  REGION 1..215: note = Description of Artificial Sequence: Synthetic polypeptide
  REGION 1..215: note = XENP019272 [CTLA-4]_H0.62_L0_Fab Light Chain

SEQ ID NO: 8221 - protein, 108 aa, synthetic construct; identical to SEQ ID NO: 3741
  REGION 1..108: note = Description of Artificial Sequence: Synthetic polypeptide
  REGION 1..108: note = VL of XENP019272

SEQ ID NO: 8222 - protein, 12 aa, synthetic construct
  REGION 1..12: note = Description of Artificial Sequence: Synthetic peptide
  REGION 1..12: note = XENP019272 vlCDR1
RASQSVGSSYLA

SEQ ID NO: 8223 - protein, 7 aa, synthetic construct
  REGION 1..7: note = Description of Artificial Sequence: Synthetic peptide
  REGION 1..7: note = XENP019272 vlCDR2
GAFSRAT

SEQ ID NO: 8224 - protein, 9 aa, synthetic construct
  REGION 1..9: note = Description of Artificial Sequence: Synthetic peptide
  REGION 1..9: note = XENP019272 vlCDR3
QQYGSSPWT

SEQ ID NO: 8225 - protein, 221 aa, synthetic construct
  REGION 1..221: note = Description of Artificial Sequence: Synthetic polypeptide
  REGION 1..221: note = XENP019273 [CTLA-4]_H0.63_L0_Fab Heavy Chain
QVQLVESGGGVVQPGRSLRLSCAASGFTFSSYTMHWVRQAPGKGLEWVTFISYQGNNKYYADSVKGRFTISRDNSKNTLYLQMNSLRAEDTAIYYCARTGWLGPFDYWGQGTLVTVSSASTKGPSVFPLAPSSKSTSGGTAALGCLVKDYFPEPVTVSWNSGALTSGVHTFPAVLQSSGLYSLSSVVTVPSSSLGTQTYICNVNHKPSNTKVDKKVEPKSC

SEQ ID NO: 8226 - protein, 118 aa, synthetic construct; identical to SEQ ID NO: 5427
  REGION 1..118: note = Description of Artificial Sequence: Synthetic polypeptide
  REGION 1..118: note = VH of XENP019273

SEQ ID NO: 8227 - protein, 5 aa, synthetic construct
  REGION 1..5: note = Description of Artificial Sequence: Synthetic peptide
  REGION 1..5: note = XENP019273 vhCDR1
SYTMH

SEQ ID NO: 8228 - protein, 17 aa, synthetic construct
  REGION 1..17: note = Description of Artificial Sequence: Synthetic peptide
  REGION 1..17: note = XENP019273 vhCDR2
FISYQGNNKYYADSVKG

SEQ ID NO: 8229 - protein, 9 aa, synthetic construct
  REGION 1..9: note = Description of Artificial Sequence: Synthetic peptide
  REGION 1..9: note = XENP019273 vhCDR3
TGWLGPFDY

SEQ ID NO: 8230 - protein, 215 aa, synthetic construct; identical to SEQ ID NO: 7600
  REGION 1..215: note = Description of Artificial Sequence: Synthetic polypeptide
  REGION 1..215: note = XENP019273 [CTLA-4]_H0.63_L0_Fab Light Chain

SEQ ID NO: 8231 - protein, 108 aa, synthetic construct; identical to SEQ ID NO: 3741
  REGION 1..108: note = Description of Artificial Sequence: Synthetic polypeptide
  REGION 1..108: note = VL of XENP019273

SEQ ID NO: 8232 - protein, 12 aa, synthetic construct
  REGION 1..12: note = Description of Artificial Sequence: Synthetic peptide
  REGION 1..12: note = XENP019273 vlCDR1
RASQSVGSSYLA

SEQ ID NO: 8233 - protein, 7 aa, synthetic construct
  REGION 1..7: note = Description of Artificial Sequence: Synthetic peptide
  REGION 1..7: note = XENP019273 vlCDR2
GAFSRAT

SEQ ID NO: 8234 - protein, 9 aa, synthetic construct
  REGION 1..9: note = Description of Artificial Sequence: Synthetic peptide
  REGION 1..9: note = XENP019273 vlCDR3
QQYGSSPWT

SEQ ID NO: 8235 - protein, 221 aa, synthetic construct
  REGION 1..221: note = Description of Artificial Sequence: Synthetic polypeptide
  REGION 1..221: note = XENP019274 [CTLA-4]_H0.64_L0_Fab Heavy Chain
QVQLVESGGGVVQPGRSLRLSCAASGFTFSSYTMHWVRQAPGKGLEWVTFISYDKNNKYYADSVKGRFTISRDNSKNTLYLQMNSLRAEDTAIYYCARTGWLGPFDYWGQGTLVTVSSASTKGPSVFPLAPSSKSTSGGTAALGCLVKDYFPEPVTVSWNSGALTSGVHTFPAVLQSSGLYSLSSVVTVPSSSLGTQTYICNVNHKPSNTKVDKKVEPKSC

SEQ ID NO: 8236 - protein, 118 aa, synthetic construct; identical to SEQ ID NO: 5436
  REGION 1..118: note = Description of Artificial Sequence: Synthetic polypeptide
  REGION 1..118: note = VH of XENP019274

SEQ ID NO: 8237 - protein, 5 aa, synthetic construct
  REGION 1..5: note = Description of Artificial Sequence: Synthetic peptide
  REGION 1..5: note = XENP019274 vhCDR1
SYTMH

SEQ ID NO: 8238 - protein, 17 aa, synthetic construct
  REGION 1..17: note = Description of Artificial Sequence: Synthetic peptide
  REGION 1..17: note = XENP019274 vhCDR2
FISYDKNNKYYADSVKG

SEQ ID NO: 8239 - protein, 9 aa, synthetic construct
  REGION 1..9: note = Description of Artificial Sequence: Synthetic peptide
  REGION 1..9: note = XENP019274 vhCDR3
TGWLGPFDY

SEQ ID NO: 8240 - protein, 215 aa, synthetic construct; identical to SEQ ID NO: 7600
  REGION 1..215: note = Description of Artificial Sequence: Synthetic polypeptide
  REGION 1..215: note = XENP019274 [CTLA-4]_H0.64_L0_Fab Light Chain

SEQ ID NO: 8241 - protein, 108 aa, synthetic construct; identical to SEQ ID NO: 3741
  REGION 1..108: note = Description of Artificial Sequence: Synthetic polypeptide
  REGION 1..108: note = VL of XENP019274

SEQ ID NO: 8242 - protein, 12 aa, synthetic construct
  REGION 1..12: note = Description of Artificial Sequence: Synthetic peptide
  REGION 1..12: note = XENP019274 vlCDR1
RASQSVGSSYLA

SEQ ID NO: 8243 - protein, 7 aa, synthetic construct
  REGION 1..7: note = Description of Artificial Sequence: Synthetic peptide
  REGION 1..7: note = XENP019274 vlCDR2
GAFSRAT

SEQ ID NO: 8244 - protein, 9 aa, synthetic construct
  REGION 1..9: note = Description of Artificial Sequence: Synthetic peptide
  REGION 1..9: note = XENP019274 vlCDR3
QQYGSSPWT

SEQ ID NO: 8245 - protein, 221 aa, synthetic construct
  REGION 1..221: note = Description of Artificial Sequence: Synthetic polypeptide
  REGION 1..221: note = XENP019275 [CTLA-4]_H0.65_L0_Fab Heavy Chain
QVQLVESGGGVVQPGRSLRLSCAASGFTFSSYTMHWVRQAPGKGLEWVTFISYDKNNKYYADSVKGRFTISEDNSKNTLYLQMNSLRAEDTAIYYCARTGWLGPFDYWGQGTLVTVSSASTKGPSVFPLAPSSKSTSGGTAALGCLVKDYFPEPVTVSWNSGALTSGVHTFPAVLQSSGLYSLSSVVTVPSSSLGTQTYICNVNHKPSNTKVDKKVEPKSC

SEQ ID NO: 8246 - protein, 118 aa, synthetic construct; identical to SEQ ID NO: 5445
  REGION 1..118: note = Description of Artificial Sequence: Synthetic polypeptide
  REGION 1..118: note = VH of XENP019275

SEQ ID NO: 8247 - protein, 5 aa, synthetic construct
  REGION 1..5: note = Description of Artificial Sequence: Synthetic peptide
  REGION 1..5: note = XENP019275 vhCDR1
SYTMH

SEQ ID NO: 8248 - protein, 17 aa, synthetic construct
  REGION 1..17: note = Description of Artificial Sequence: Synthetic peptide
  REGION 1..17: note = XENP019275 vhCDR2
FISYDKNNKYYADSVKG

SEQ ID NO: 8249 - protein, 9 aa, synthetic construct
  REGION 1..9: note = Description of Artificial Sequence: Synthetic peptide
  REGION 1..9: note = XENP019275 vhCDR3
TGWLGPFDY

SEQ ID NO: 8250 - protein, 215 aa, synthetic construct; identical to SEQ ID NO: 7600
  REGION 1..215: note = Description of Artificial Sequence: Synthetic polypeptide
  REGION 1..215: note = XENP019275 [CTLA-4]_H0.65_L0_Fab Light Chain

SEQ ID NO: 8251 - protein, 108 aa, synthetic construct; identical to SEQ ID NO: 3741
  REGION 1..108: note = Description of Artificial Sequence: Synthetic polypeptide
  REGION 1..108: note = VL of XENP019275

SEQ ID NO: 8252 - protein, 12 aa, synthetic construct
  REGION 1..12: note = Description of Artificial Sequence: Synthetic peptide
  REGION 1..12: note = XENP019275 vlCDR1
RASQSVGSSYLA

SEQ ID NO: 8253 - protein, 7 aa, synthetic construct
  REGION 1..7: note = Description of Artificial Sequence: Synthetic peptide
  REGION 1..7: note = XENP019275 vlCDR2
GAFSRAT

SEQ ID NO: 8254 - protein, 9 aa, synthetic construct
  REGION 1..9: note = Description of Artificial Sequence: Synthetic peptide
  REGION 1..9: note = XENP019275 vlCDR3
QQYGSSPWT

SEQ ID NO: 8255 - protein, 221 aa, synthetic construct
  REGION 1..221: note = Description of Artificial Sequence: Synthetic polypeptide
  REGION 1..221: note = XENP019276 [CTLA-4]_H0.66_L0_Fab Heavy Chain
QVQLVESGGGVVQPGRSLRLSCAASGFTFSSYTMHWVRQAPGKGLEWVTFISYDGDNKYYADSVKGRFTISRDNSKNTLYLQMNSLRAEDTAIYYCARTGWLGPFDYWGQGTLVTVSSASTKGPSVFPLAPSSKSTSGGTAALGCLVKDYFPEPVTVSWNSGALTSGVHTFPAVLQSSGLYSLSSVVTVPSSSLGTQTYICNVNHKPSNTKVDKKVEPKSC

SEQ ID NO: 8256 - protein, 118 aa, synthetic construct; identical to SEQ ID NO: 5454
  REGION 1..118: note = Description of Artificial Sequence: Synthetic polypeptide
  REGION 1..118: note = VH of XENP019276

SEQ ID NO: 8257 - protein, 5 aa, synthetic construct
  REGION 1..5: note = Description of Artificial Sequence: Synthetic peptide
  REGION 1..5: note = XENP019276 vhCDR1
SYTMH

SEQ ID NO: 8258 - protein, 17 aa, synthetic construct
  REGION 1..17: note = Description of Artificial Sequence: Synthetic peptide
  REGION 1..17: note = XENP019276 vhCDR2
FISYDGDNKYYADSVKG

SEQ ID NO: 8259 - protein, 9 aa, synthetic construct
  REGION 1..9: note = Description of Artificial Sequence: Synthetic peptide
  REGION 1..9: note = XENP019276 vhCDR3
TGWLGPFDY

SEQ ID NO: 8260 - protein, 215 aa, synthetic construct; identical to SEQ ID NO: 7600
  REGION 1..215: note = Description of Artificial Sequence: Synthetic polypeptide
  REGION 1..215: note = XENP019276 [CTLA-4]_H0.66_L0_Fab Light Chain

SEQ ID NO: 8261 - protein, 108 aa, synthetic construct; identical to SEQ ID NO: 3741
  REGION 1..108: note = Description of Artificial Sequence: Synthetic polypeptide
  REGION 1..108: note = VL of XENP019276

SEQ ID NO: 8262 - protein, 12 aa, synthetic construct
  REGION 1..12: note = Description of Artificial Sequence: Synthetic peptide
  REGION 1..12: note = XENP019276 vlCDR1
RASQSVGSSYLA

SEQ ID NO: 8263 - protein, 7 aa, synthetic construct
  REGION 1..7: note = Description of Artificial Sequence: Synthetic peptide
  REGION 1..7: note = XENP019276 vlCDR2
GAFSRAT

SEQ ID NO: 8264 - protein, 9 aa, synthetic construct
  REGION 1..9: note = Description of Artificial Sequence: Synthetic peptide
  REGION 1..9: note = XENP019276 vlCDR3
QQYGSSPWT

SEQ ID NO: 8265 - protein, 221 aa, synthetic construct
  REGION 1..221: note = Description of Artificial Sequence: Synthetic polypeptide
  REGION 1..221: note = XENP019277 [CTLA-4]_H0.67_L0_Fab Heavy Chain
QVQLVESGGGVVQPGRSLRLSCAASGFTFSSYTMHWVRQAPGKGLEWVTFISYDGGNKYYADSVKGRFTISRDNSKNTLYLQMNSLRAEDTAIYYCARTGWLGPFDYWGQGTLVTVSSASTKGPSVFPLAPSSKSTSGGTAALGCLVKDYFPEPVTVSWNSGALTSGVHTFPAVLQSSGLYSLSSVVTVPSSSLGTQTYICNVNHKPSNTKVDKKVEPKSC

SEQ ID NO: 8266 - protein, 118 aa, synthetic construct; identical to SEQ ID NO: 5463
  REGION 1..118: note = Description of Artificial Sequence: Synthetic polypeptide
  REGION 1..118: note = VH of XENP019277

SEQ ID NO: 8267 - protein, 5 aa, synthetic construct
  REGION 1..5: note = Description of Artificial Sequence: Synthetic peptide
  REGION 1..5: note = XENP019277 vhCDR1
SYTMH

SEQ ID NO: 8268 - protein, 17 aa, synthetic construct
  REGION 1..17: note = Description of Artificial Sequence: Synthetic peptide
  REGION 1..17: note = XENP019277 vhCDR2
FISYDGGNKYYADSVKG

SEQ ID NO: 8269 - protein, 9 aa, synthetic construct
  REGION 1..9: note = Description of Artificial Sequence: Synthetic peptide
  REGION 1..9: note = XENP019277 vhCDR3
TGWLGPFDY

SEQ ID NO: 8270 - protein, 215 aa, synthetic construct; identical to SEQ ID NO: 7600
  REGION 1..215: note = Description of Artificial Sequence: Synthetic polypeptide
  REGION 1..215: note = XENP019277 [CTLA-4]_H0.67_L0_Fab Light Chain

SEQ ID NO: 8271 - protein, 108 aa, synthetic construct; identical to SEQ ID NO: 3741
  REGION 1..108: note = Description of Artificial Sequence: Synthetic polypeptide
  REGION 1..108: note = VL of XENP019277

SEQ ID NO: 8272 - protein, 12 aa, synthetic construct
  REGION 1..12: note = Description of Artificial Sequence: Synthetic peptide
  REGION 1..12: note = XENP019277 vlCDR1
RASQSVGSSYLA

SEQ ID NO: 8273 - protein, 7 aa, synthetic construct
  REGION 1..7: note = Description of Artificial Sequence: Synthetic peptide
  REGION 1..7: note = XENP019277 vlCDR2
GAFSRAT

SEQ ID NO: 8274 - protein, 9 aa, synthetic construct
  REGION 1..9: note = Description of Artificial Sequence: Synthetic peptide
  REGION 1..9: note = XENP019277 vlCDR3
QQYGSSPWT

SEQ ID NO: 8275 - protein, 221 aa, synthetic construct
  REGION 1..221: note = Description of Artificial Sequence: Synthetic polypeptide
  REGION 1..221: note = XENP019278 [CTLA-4]_H0.68_L0_Fab Heavy Chain
QVQLVESGGGVVQPGRSLRLSCAASGFTFSSYTMHWVRQAPGKGLEWVTFISYDGHNKYYADSVKGRFTISRDNSKNTLYLQMNSLRAEDTAIYYCARTGWLGPFDYWGQGTLVTVSSASTKGPSVFPLAPSSKSTSGGTAALGCLVKDYFPEPVTVSWNSGALTSGVHTFPAVLQSSGLYSLSSVVTVPSSSLGTQTYICNVNHKPSNTKVDKKVEPKSC

SEQ ID NO: 8276 - protein, 118 aa, synthetic construct; identical to SEQ ID NO: 5472
  REGION 1..118: note = Description of Artificial Sequence: Synthetic polypeptide
  REGION 1..118: note = VH of XENP019278

SEQ ID NO: 8277 - protein, 5 aa, synthetic construct
  REGION 1..5: note = Description of Artificial Sequence: Synthetic peptide
  REGION 1..5: note = XENP019278 vhCDR1
SYTMH

SEQ ID NO: 8278 - protein, 17 aa, synthetic construct
  REGION 1..17: note = Description of Artificial Sequence: Synthetic peptide
  REGION 1..17: note = XENP019278 vhCDR2
FISYDGHNKYYADSVKG

SEQ ID NO: 8279 - protein, 9 aa, synthetic construct
  REGION 1..9: note = Description of Artificial Sequence: Synthetic peptide
  REGION 1..9: note = XENP019278 vhCDR3
TGWLGPFDY

SEQ ID NO: 8280 - protein, 215 aa, synthetic construct; identical to SEQ ID NO: 7600
  REGION 1..215: note = Description of Artificial Sequence: Synthetic polypeptide
  REGION 1..215: note = XENP019278 [CTLA-4]_H0.68_L0_Fab Light Chain

SEQ ID NO: 8281 - protein, 108 aa, synthetic construct; identical to SEQ ID NO: 3741
  REGION 1..108: note = Description of Artificial Sequence: Synthetic polypeptide
  REGION 1..108: note = VL of XENP019278

SEQ ID NO: 8282 - protein, 12 aa, synthetic construct
  REGION 1..12: note = Description of Artificial Sequence: Synthetic peptide
  REGION 1..12: note = XENP019278 vlCDR1
RASQSVGSSYLA

SEQ ID NO: 8283 - protein, 7 aa, synthetic construct
  REGION 1..7: note = Description of Artificial Sequence: Synthetic peptide
  REGION 1..7: note = XENP019278 vlCDR2
GAFSRAT

SEQ ID NO: 8284 - protein, 9 aa, synthetic construct
  REGION 1..9: note = Description of Artificial Sequence: Synthetic peptide
  REGION 1..9: note = XENP019278 vlCDR3
QQYGSSPWT

SEQ ID NO: 8285 - protein, 221 aa, synthetic construct
  REGION 1..221: note = Description of Artificial Sequence: Synthetic polypeptide
  REGION 1..221: note = XENP019279 [CTLA-4]_H0.69_L0_Fab Heavy Chain
QVQLVESGGGVVQPGRSLRLSCAASGFTFSSYTMHWVRQAPGKGLEWVTFISYDGQNKYYADSVKGRFTISRDNSKNTLYLQMNSLRAEDTAIYYCARTGWLGPFDYWGQGTLVTVSSASTKGPSVFPLAPSSKSTSGGTAALGCLVKDYFPEPVTVSWNSGALTSGVHTFPAVLQSSGLYSLSSVVTVPSSSLGTQTYICNVNHKPSNTKVDKKVEPKSC

SEQ ID NO: 8286 - protein, 118 aa, synthetic construct; identical to SEQ ID NO: 5481
  REGION 1..118: note = Description of Artificial Sequence: Synthetic polypeptide
  REGION 1..118: note = VH of XENP019279

SEQ ID NO: 8287 - protein, 5 aa, synthetic construct
  REGION 1..5: note = Description of Artificial Sequence: Synthetic peptide
  REGION 1..5: note = XENP019279 vhCDR1
SYTMH

SEQ ID NO: 8288 - protein, 17 aa, synthetic construct
  REGION 1..17: note = Description of Artificial Sequence: Synthetic peptide
  REGION 1..17: note = XENP019279 vhCDR2
FISYDGQNKYYADSVKG

SEQ ID NO: 8289 - protein, 9 aa, synthetic construct
  REGION 1..9: note = Description of Artificial Sequence: Synthetic peptide
  REGION 1..9: note = XENP019279 vhCDR3
TGWLGPFDY

SEQ ID NO: 8290 - protein, 215 aa, synthetic construct; identical to SEQ ID NO: 7600
  REGION 1..215: note = Description of Artificial Sequence: Synthetic polypeptide
  REGION 1..215: note = XENP019279 [CTLA-4]_H0.69_L0_Fab Light Chain

SEQ ID NO: 8291 - protein, 108 aa, synthetic construct; identical to SEQ ID NO: 3741
  REGION 1..108: note = Description of Artificial Sequence: Synthetic polypeptide
  REGION 1..108: note = VL of XENP019279

SEQ ID NO: 8292 - protein, 12 aa, synthetic construct
  REGION 1..12: note = Description of Artificial Sequence: Synthetic peptide
  REGION 1..12: note = XENP019279 vlCDR1
RASQSVGSSYLA

SEQ ID NO: 8293 - protein, 7 aa, synthetic construct
  REGION 1..7: note = Description of Artificial Sequence: Synthetic peptide
  REGION 1..7: note = XENP019279 vlCDR2
GAFSRAT

SEQ ID NO: 8294 - protein, 9 aa, synthetic construct
  REGION 1..9: note = Description of Artificial Sequence: Synthetic peptide
  REGION 1..9: note = XENP019279 vlCDR3
QQYGSSPWT

SEQ ID NO: 8295 - protein, 221 aa, synthetic construct
  REGION 1..221: note = Description of Artificial Sequence: Synthetic polypeptide
  REGION 1..221: note = XENP019280 [CTLA-4]_H0.70_L0_Fab Heavy Chain
QVQLVESGGGVVQPGRSLRLSCAASGFTFSSYTMHWVRQAPGKGLEWVTFISYDGSNKYYADSVKGRFTISRDNSKNTLYLQMNSLRAEDTAIYYCARTGWLGPFDYWGQGTLVTVSSASTKGPSVFPLAPSSKSTSGGTAALGCLVKDYFPEPVTVSWNSGALTSGVHTFPAVLQSSGLYSLSSVVTVPSSSLGTQTYICNVNHKPSNTKVDKKVEPKSC

SEQ ID NO: 8296 - protein, 118 aa, synthetic construct; identical to SEQ ID NO: 5490
  REGION 1..118: note = Description of Artificial Sequence: Synthetic polypeptide
  REGION 1..118: note = VH of XENP019280

SEQ ID NO: 8297 - protein, 5 aa, synthetic construct
  REGION 1..5: note = Description of Artificial Sequence: Synthetic peptide
  REGION 1..5: note = XENP019280 vhCDR1
SYTMH

SEQ ID NO: 8298 - protein, 17 aa, synthetic construct
  REGION 1..17: note = Description of Artificial Sequence: Synthetic peptide
  REGION 1..17: note = XENP019280 vhCDR2
FISYDGSNKYYADSVKG

SEQ ID NO: 8299 - protein, 9 aa, synthetic construct
  REGION 1..9: note = Description of Artificial Sequence: Synthetic peptide
  REGION 1..9: note = XENP019280 vhCDR3
TGWLGPFDY

SEQ ID NO: 8300 - protein, 215 aa, synthetic construct; identical to SEQ ID NO: 7600
  REGION 1..215: note = Description of Artificial Sequence: Synthetic polypeptide
  REGION 1..215: note = XENP019280 [CTLA-4]_H0.70_L0_Fab Light Chain

SEQ ID NO: 8301 - protein, 108 aa, synthetic construct; identical to SEQ ID NO: 3741
  REGION 1..108: note = Description of Artificial Sequence: Synthetic polypeptide
  REGION 1..108: note = VL of XENP019280

SEQ ID NO: 8302 - protein, 12 aa, synthetic construct
  REGION 1..12: note = Description of Artificial Sequence: Synthetic peptide
  REGION 1..12: note = XENP019280 vlCDR1
RASQSVGSSYLA

SEQ ID NO: 8303 - protein, 7 aa, synthetic construct
  REGION 1..7: note = Description of Artificial Sequence: Synthetic peptide
  REGION 1..7: note = XENP019280 vlCDR2
GAFSRAT

SEQ ID NO: 8304 - protein, 9 aa, synthetic construct
  REGION 1..9: note = Description of Artificial Sequence: Synthetic peptide
  REGION 1..9: note = XENP019280 vlCDR3
QQYGSSPWT

SEQ ID NO: 8305 - protein, 221 aa, synthetic construct
  REGION 1..221: note = Description of Artificial Sequence: Synthetic polypeptide
  REGION 1..221: note = XENP019281 [CTLA-4]_H0.71_L0_Fab Heavy Chain
QVQLVESGGGVVQPGRSLRLSCAASGFTFSSYTMHWVRQAPGKGLEWVTFISYDGNDKYYADSVKGRFTISRDNSKNTLYLQMNSLRAEDTAIYYCARTGWLGPFDYWGQGTLVTVSSASTKGPSVFPLAPSSKSTSGGTAALGCLVKDYFPEPVTVSWNSGALTSGVHTFPAVLQSSGLYSLSSVVTVPSSSLGTQTYICNVNHKPSNTKVDKKVEPKSC

SEQ ID NO: 8306 - protein, 118 aa, synthetic construct; identical to SEQ ID NO: 5499
  REGION 1..118: note = Description of Artificial Sequence: Synthetic polypeptide
  REGION 1..118: note = VH of XENP019281

SEQ ID NO: 8307 - protein, 5 aa, synthetic construct
  REGION 1..5: note = Description of Artificial Sequence: Synthetic peptide
  REGION 1..5: note = XENP019281 vhCDR1
SYTMH

SEQ ID NO: 8308 - protein, 17 aa, synthetic construct
  REGION 1..17: note = Description of Artificial Sequence: Synthetic peptide
  REGION 1..17: note = XENP019281 vhCDR2
FISYDGNDKYYADSVKG

SEQ ID NO: 8309 - protein, 9 aa, synthetic construct
  REGION 1..9: note = Description of Artificial Sequence: Synthetic peptide
  REGION 1..9: note = XENP019281 vhCDR3
TGWLGPFDY

SEQ ID NO: 8310 - protein, 215 aa, synthetic construct; identical to SEQ ID NO: 7600
  REGION 1..215: note = Description of Artificial Sequence: Synthetic polypeptide
  REGION 1..215: note = XENP019281 [CTLA-4]_H0.71_L0_Fab Light Chain

SEQ ID NO: 8311 - protein, 108 aa, synthetic construct; identical to SEQ ID NO: 3741
  REGION 1..108: note = Description of Artificial Sequence: Synthetic polypeptide
  REGION 1..108: note = VL of XENP019281

SEQ ID NO: 8312 - protein, 12 aa, synthetic construct
  REGION 1..12: note = Description of Artificial Sequence: Synthetic peptide
  REGION 1..12: note = XENP019281 vlCDR1
RASQSVGSSYLA

SEQ ID NO: 8313 - protein, 7 aa, synthetic construct
  REGION 1..7: note = Description of Artificial Sequence: Synthetic peptide
  REGION 1..7: note = XENP019281 vlCDR2
GAFSRAT

SEQ ID NO: 8314 - protein, 9 aa, synthetic construct
  REGION 1..9: note = Description of Artificial Sequence: Synthetic peptide
  REGION 1..9: note = XENP019281 vlCDR3
QQYGSSPWT

SEQ ID NO: 8315 - protein, 221 aa, synthetic construct
  REGION 1..221: note = Description of Artificial Sequence: Synthetic polypeptide
  REGION 1..221: note = XENP019282 [CTLA-4]_H0.72_L0_Fab Heavy Chain
QVQLVESGGGVVQPGRSLRLSCAASGFTFSSYTMHWVRQAPGKGLEWVTFISYDGNEKYYADSVKGRFTISRDNSKNTLYLQMNSLRAEDTAIYYCARTGWLGPFDYWGQGTLVTVSSASTKGPSVFPLAPSSKSTSGGTAALGCLVKDYFPEPVTVSWNSGALTSGVHTFPAVLQSSGLYSLSSVVTVPSSSLGTQTYICNVNHKPSNTKVDKKVEPKSC

SEQ ID NO: 8316 - protein, 118 aa, synthetic construct; identical to SEQ ID NO: 5508
  REGION 1..118: note = Description of Artificial Sequence: Synthetic polypeptide
  REGION 1..118: note = VH of XENP019282

SEQ ID NO: 8317 - protein, 5 aa, synthetic construct
  REGION 1..5: note = Description of Artificial Sequence: Synthetic peptide
  REGION 1..5: note = XENP019282 vhCDR1
SYTMH

SEQ ID NO: 8318 - protein, 17 aa, synthetic construct
  REGION 1..17: note = Description of Artificial Sequence: Synthetic peptide
  REGION 1..17: note = XENP019282 vhCDR2
FISYDGNEKYYADSVKG

SEQ ID NO: 8319 - protein, 9 aa, synthetic construct
  REGION 1..9: note = Description of Artificial Sequence: Synthetic peptide
  REGION 1..9: note = XENP019282 vhCDR3
TGWLGPFDY

SEQ ID NO: 8320 - protein, 215 aa, synthetic construct; identical to SEQ ID NO: 7600
  REGION 1..215: note = Description of Artificial Sequence: Synthetic polypeptide
  REGION 1..215: note = XENP019282 [CTLA-4]_H0.72_L0_Fab Light Chain

SEQ ID NO: 8321 - protein, 108 aa, synthetic construct; identical to SEQ ID NO: 3741
  REGION 1..108: note = Description of Artificial Sequence: Synthetic polypeptide
  REGION 1..108: note = VL of XENP019282

SEQ ID NO: 8322 - protein, 12 aa, synthetic construct
  REGION 1..12: note = Description of Artificial Sequence: Synthetic peptide
  REGION 1..12: note = XENP019282 vlCDR1
RASQSVGSSYLA

SEQ ID NO: 8323 - protein, 7 aa, synthetic construct
  REGION 1..7: note = Description of Artificial Sequence: Synthetic peptide
  REGION 1..7: note = XENP019282 vlCDR2
GAFSRAT

SEQ ID NO: 8324 - protein, 9 aa, synthetic construct
  REGION 1..9: note = Description of Artificial Sequence: Synthetic peptide
  REGION 1..9: note = XENP019282 vlCDR3
QQYGSSPWT

SEQ ID NO: 8325 - protein, 221 aa, synthetic construct
  REGION 1..221: note = Description of Artificial Sequence: Synthetic polypeptide
  REGION 1..221: note = XENP019283 [CTLA-4]_H0.73_L0_Fab Heavy Chain
QVQLVESGGGVVQPGRSLRLSCAASGFTFSSYTMHWVRQAPGKGLEWVTFISYDGNHKYYADSVKGRFTISRDNSKNTLYLQMNSLRAEDTAIYYCARTGWLGPFDYWGQGTLVTVSSASTKGPSVFPLAPSSKSTSGGTAALGCLVKDYFPEPVTVSWNSGALTSGVHTFPAVLQSSGLYSLSSVVTVPSSSLGTQTYICNVNHKPSNTKVDKKVEPKSC

SEQ ID NO: 8326 - protein, 118 aa, synthetic construct; identical to SEQ ID NO: 5517
  REGION 1..118: note = Description of Artificial Sequence: Synthetic polypeptide
  REGION 1..118: note = VH of XENP019283

SEQ ID NO: 8327 - protein, 5 aa, synthetic construct
  REGION 1..5: note = Description of Artificial Sequence: Synthetic peptide
  REGION 1..5: note = XENP019283 vhCDR1
SYTMH

SEQ ID NO: 8328 - protein, 17 aa, synthetic construct
  REGION 1..17: note = Description of Artificial Sequence: Synthetic peptide
  REGION 1..17: note = XENP019283 vhCDR2
FISYDGNHKYYADSVKG

SEQ ID NO: 8329 - protein, 9 aa, synthetic construct
  REGION 1..9: note = Description of Artificial Sequence: Synthetic peptide
  REGION 1..9: note = XENP019283 vhCDR3
TGWLGPFDY

SEQ ID NO: 8330 - protein, 215 aa, synthetic construct; identical to SEQ ID NO: 7600
  REGION 1..215: note = Description of Artificial Sequence: Synthetic polypeptide
  REGION 1..215: note = XENP019283 [CTLA-4]_H0.73_L0_Fab Light Chain

SEQ ID NO: 8331 - protein, 108 aa, synthetic construct; identical to SEQ ID NO: 3741
  REGION 1..108: note = Description of Artificial Sequence: Synthetic polypeptide
  REGION 1..108: note = VL of XENP019283

SEQ ID NO: 8332 - protein, 12 aa, synthetic construct
  REGION 1..12: note = Description of Artificial Sequence: Synthetic peptide
  REGION 1..12: note = XENP019283 vlCDR1
RASQSVGSSYLA

SEQ ID NO: 8333 - protein, 7 aa, synthetic construct
  REGION 1..7: note = Description of Artificial Sequence: Synthetic peptide
  REGION 1..7: note = XENP019283 vlCDR2
GAFSRAT

SEQ ID NO: 8334 - protein, 9 aa, synthetic construct
  REGION 1..9: note = Description of Artificial Sequence: Synthetic peptide
  REGION 1..9: note = XENP019283 vlCDR3
QQYGSSPWT

SEQ ID NO: 8335 - protein, 221 aa, synthetic construct
  REGION 1..221: note = Description of Artificial Sequence: Synthetic polypeptide
  REGION 1..221: note = XENP019284 [CTLA-4]_H0.74_L0_Fab Heavy Chain
QVQLVESGGGVVQPGRSLRLSCAASGFTFSSYTMHWVRQAPGKGLEWVTFISYDGNSKYYADSVKGRFTISRDNSKNTLYLQMNSLRAEDTAIYYCARTGWLGPFDYWGQGTLVTVSSASTKGPSVFPLAPSSKSTSGGTAALGCLVKDYFPEPVTVSWNSGALTSGVHTFPAVLQSSGLYSLSSVVTVPSSSLGTQTYICNVNHKPSNTKVDKKVEPKSC

SEQ ID NO: 8336 - protein, 118 aa, synthetic construct; identical to SEQ ID NO: 5526
  REGION 1..118: note = Description of Artificial Sequence: Synthetic polypeptide
  REGION 1..118: note = VH of XENP019284

SEQ ID NO: 8337 - protein, 5 aa, synthetic construct
  REGION 1..5: note = Description of Artificial Sequence: Synthetic peptide
  REGION 1..5: note = XENP019284 vhCDR1
SYTMH

SEQ ID NO: 8338 - protein, 17 aa, synthetic construct
  REGION 1..17: note = Description of Artificial Sequence: Synthetic peptide
  REGION 1..17: note = XENP019284 vhCDR2
FISYDGNSKYYADSVKG

SEQ ID NO: 8339 - protein, 9 aa, synthetic construct
  REGION 1..9: note = Description of Artificial Sequence: Synthetic peptide
  REGION 1..9: note = XENP019284 vhCDR3
TGWLGPFDY

SEQ ID NO: 8340 - protein, 215 aa, synthetic construct; identical to SEQ ID NO: 7600
  REGION 1..215: note = Description of Artificial Sequence: Synthetic polypeptide
  REGION 1..215: note = XENP019284 [CTLA-4]_H0.74_L0_Fab Light Chain

SEQ ID NO: 8341 - protein, 108 aa, synthetic construct; identical to SEQ ID NO: 3741
  REGION 1..108: note = Description of Artificial Sequence: Synthetic polypeptide
  REGION 1..108: note = VL of XENP019284

SEQ ID NO: 8342 - protein, 12 aa, synthetic construct
  REGION 1..12: note = Description of Artificial Sequence: Synthetic peptide
  REGION 1..12: note = XENP019284 vlCDR1
RASQSVGSSYLA

SEQ ID NO: 8343 - protein, 7 aa, synthetic construct
  REGION 1..7: note = Description of Artificial Sequence: Synthetic peptide
  REGION 1..7: note = XENP019284 vlCDR2
GAFSRAT

SEQ ID NO: 8344 - protein, 9 aa, synthetic construct
  REGION 1..9: note = Description of Artificial Sequence: Synthetic peptide
  REGION 1..9: note = XENP019284 vlCDR3
QQYGSSPWT

SEQ ID NO: 8345 - protein, 221 aa, synthetic construct
  REGION 1..221: note = Description of Artificial Sequence: Synthetic polypeptide
  REGION 1..221: note = XENP019285 [CTLA-4]_H0.75_L0_Fab Heavy Chain
QVQLVESGGGVVQPGRSLRLSCAASGFTFSSYTMHWVRQAPGKGLEWVTFISYDGNTKYYADSVKGRFTISRDNSKNTLYLQMNSLRAEDTAIYYCARTGWLGPFDYWGQGTLVTVSSASTKGPSVFPLAPSSKSTSGGTAALGCLVKDYFPEPVTVSWNSGALTSGVHTFPAVLQSSGLYSLSSVVTVPSSSLGTQTYICNVNHKPSNTKVDKKVEPKSC

SEQ ID NO: 8346 - protein, 118 aa, synthetic construct; identical to SEQ ID NO: 5535
  REGION 1..118: note = Description of Artificial Sequence: Synthetic polypeptide
  REGION 1..118: note = VH of XENP019285

SEQ ID NO: 8347 - protein, 5 aa, synthetic construct
  REGION 1..5: note = Description of Artificial Sequence: Synthetic peptide
  REGION 1..5: note = XENP019285 vhCDR1
SYTMH

SEQ ID NO: 8348 - protein, 17 aa, synthetic construct
  REGION 1..17: note = Description of Artificial Sequence: Synthetic peptide
  REGION 1..17: note = XENP019285 vhCDR2
FISYDGNTKYYADSVKG

SEQ ID NO: 8349 - protein, 9 aa, synthetic construct
  REGION 1..9: note = Description of Artificial Sequence: Synthetic peptide
  REGION 1..9: note = XENP019285 vhCDR3
TGWLGPFDY

SEQ ID NO: 8350 - protein, 215 aa, synthetic construct; identical to SEQ ID NO: 7600
  REGION 1..215: note = Description of Artificial Sequence: Synthetic polypeptide
  REGION 1..215: note = XENP019285 [CTLA-4]_H0.75_L0_Fab Light Chain

SEQ ID NO: 8351 - protein, 108 aa, synthetic construct; identical to SEQ ID NO: 3741
  REGION 1..108: note = Description of Artificial Sequence: Synthetic polypeptide
  REGION 1..108: note = VL of XENP019285

SEQ ID NO: 8352 - protein, 12 aa, synthetic construct
  REGION 1..12: note = Description of Artificial Sequence: Synthetic peptide
  REGION 1..12: note = XENP019285 vlCDR1
RASQSVGSSYLA

SEQ ID NO: 8353 - protein, 7 aa, synthetic construct
  REGION 1..7: note = Description of Artificial Sequence: Synthetic peptide
  REGION 1..7: note = XENP019285 vlCDR2
GAFSRAT

SEQ ID NO: 8354 - protein, 9 aa, synthetic construct
  REGION 1..9: note = Description of Artificial Sequence: Synthetic peptide
  REGION 1..9: note = XENP019285 vlCDR3
QQYGSSPWT

SEQ ID NO: 8355 - protein, 221 aa, synthetic construct
  REGION 1..221: note = Description of Artificial Sequence: Synthetic polypeptide
  REGION 1..221: note = XENP019286 [CTLA-4]_H0.76_L0_Fab Heavy Chain
QVQLVESGGGVVQPGRSLRLSCAASGFTFSSYTMHWVRQAPGKGLEWVTFISYDGNQKYYADSVKGRFTISRDNSKNTLYLQMNSLRAEDTAIYYCARTGWLGPFDYWGQGTLVTVSSASTKGPSVFPLAPSSKSTSGGTAALGCLVKDYFPEPVTVSWNSGALTSGVHTFPAVLQSSGLYSLSSVVTVPSSSLGTQTYICNVNHKPSNTKVDKKVEPKSC

SEQ ID NO: 8356 - protein, 118 aa, synthetic construct; identical to SEQ ID NO: 5544
  REGION 1..118: note = Description of Artificial Sequence: Synthetic polypeptide
  REGION 1..118: note = VH of XENP019286

SEQ ID NO: 8357 - protein, 5 aa, synthetic construct
  REGION 1..5: note = Description of Artificial Sequence: Synthetic peptide
  REGION 1..5: note = XENP019286 vhCDR1
SYTMH

SEQ ID NO: 8358 - protein, 17 aa, synthetic construct
  REGION 1..17: note = Description of Artificial Sequence: Synthetic peptide
  REGION 1..17: note = XENP019286 vhCDR2
FISYDGNQKYYADSVKG

SEQ ID NO: 8359 - protein, 9 aa, synthetic construct
  REGION 1..9: note = Description of Artificial Sequence: Synthetic peptide
  REGION 1..9: note = XENP019286 vhCDR3
TGWLGPFDY

SEQ ID NO: 8360 - protein, 215 aa, synthetic construct; identical to SEQ ID NO: 7600
  REGION 1..215: note = Description of Artificial Sequence: Synthetic polypeptide
  REGION 1..215: note = XENP019286 [CTLA-4]_H0.76_L0_Fab Light Chain

SEQ ID NO: 8361 - protein, 108 aa, synthetic construct; identical to SEQ ID NO: 3741
  REGION 1..108: note = Description of Artificial Sequence: Synthetic polypeptide
  REGION 1..108: note = VL of XENP019286

SEQ ID NO: 8362 - protein, 12 aa, synthetic construct
  REGION 1..12: note = Description of Artificial Sequence: Synthetic peptide
  REGION 1..12: note = XENP019286 vlCDR1
RASQSVGSSYLA

SEQ ID NO: 8363 - protein, 7 aa, synthetic construct
  REGION 1..7: note = Description of Artificial Sequence: Synthetic peptide
  REGION 1..7: note = XENP019286 vlCDR2
GAFSRAT

SEQ ID NO: 8364 - protein, 9 aa, synthetic construct
  REGION 1..9: note = Description of Artificial Sequence: Synthetic peptide
  REGION 1..9: note = XENP019286 vlCDR3
QQYGSSPWT

SEQ ID NO: 8365 - protein, 221 aa, synthetic construct
  REGION 1..221: note = Description of Artificial Sequence: Synthetic polypeptide
  REGION 1..221: note = XENP019287 [CTLA-4]_H0.77_L0_Fab Heavy Chain
QVQLVESGGGVVQPGRSLRLSCAASGFTFSSYTMHWVRQAPGKGLEWVTFISYDGNNIYYADSVKGRFTISRDNSKNTLYLQMNSLRAEDTAIYYCARTGWLGPFDYWGQGTLVTVSSASTKGPSVFPLAPSSKSTSGGTAALGCLVKDYFPEPVTVSWNSGALTSGVHTFPAVLQSSGLYSLSSVVTVPSSSLGTQTYICNVNHKPSNTKVDKKVEPKSC

SEQ ID NO: 8366 - protein, 118 aa, synthetic construct; identical to SEQ ID NO: 5553
  REGION 1..118: note = Description of Artificial Sequence: Synthetic polypeptide
  REGION 1..118: note = VH of XENP019287

SEQ ID NO: 8367 - protein, 5 aa, synthetic construct
  REGION 1..5: note = Description of Artificial Sequence: Synthetic peptide
  REGION 1..5: note = XENP019287 vhCDR1
SYTMH

SEQ ID NO: 8368 - protein, 17 aa, synthetic construct
  REGION 1..17: note = Description of Artificial Sequence: Synthetic peptide
  REGION 1..17: note = XENP019287 vhCDR2
FISYDGNNIYYADSVKG

SEQ ID NO: 8369 - protein, 9 aa, synthetic construct
  REGION 1..9: note = Description of Artificial Sequence: Synthetic peptide
  REGION 1..9: note = XENP019287 vhCDR3
TGWLGPFDY

SEQ ID NO: 8370 - protein, 215 aa, synthetic construct; identical to SEQ ID NO: 7600
  REGION 1..215: note = Description of Artificial Sequence: Synthetic polypeptide
  REGION 1..215: note = XENP019287 [CTLA-4]_H0.77_L0_Fab Light Chain

SEQ ID NO: 8371 - protein, 108 aa, synthetic construct; identical to SEQ ID NO: 3741
  REGION 1..108: note = Description of Artificial Sequence: Synthetic polypeptide
  REGION 1..108: note = VL of XENP019287

SEQ ID NO: 8372 - protein, 12 aa, synthetic construct
  REGION 1..12: note = Description of Artificial Sequence: Synthetic peptide
  REGION 1..12: note = XENP019287 vlCDR1
RASQSVGSSYLA

SEQ ID NO: 8373 - protein, 7 aa, synthetic construct
  REGION 1..7: note = Description of Artificial Sequence: Synthetic peptide
  REGION 1..7: note = XENP019287 vlCDR2
GAFSRAT

SEQ ID NO: 8374 - protein, 9 aa, synthetic construct
  REGION 1..9: note = Description of Artificial Sequence: Synthetic peptide
  REGION 1..9: note = XENP019287 vlCDR3
QQYGSSPWT

SEQ ID NO: 8375 - protein, 221 aa, synthetic construct
  REGION 1..221: note = Description of Artificial Sequence: Synthetic polypeptide
  REGION 1..221: note = XENP019288 [CTLA-4]_H0.78_L0_Fab Heavy Chain
QVQLVESGGGVVQPGRSLRLSCAASGFTFSSYTMHWVRQAPGKGLEWVTFISYDGNNTYYADSVKGRFTISRDNSKNTLYLQMNSLRAEDTAIYYCARTGWLGPFDYWGQGTLVTVSSASTKGPSVFPLAPSSKSTSGGTAALGCLVKDYFPEPVTVSWNSGALTSGVHTFPAVLQSSGLYSLSSVVTVPSSSLGTQTYICNVNHKPSNTKVDKKVEPKSC

SEQ ID NO: 8376 - protein, 118 aa, synthetic construct; identical to SEQ ID NO: 5562
  REGION 1..118: note = Description of Artificial Sequence: Synthetic polypeptide
  REGION 1..118: note = VH of XENP019288

SEQ ID NO: 8377 - protein, 5 aa, synthetic construct
  REGION 1..5: note = Description of Artificial Sequence: Synthetic peptide
  REGION 1..5: note = XENP019288 vhCDR1
SYTMH

SEQ ID NO: 8378 - protein, 17 aa, synthetic construct
  REGION 1..17: note = Description of Artificial Sequence: Synthetic peptide
  REGION 1..17: note = XENP019288 vhCDR2
FISYDGNNTYYADSVKG

SEQ ID NO: 8379 - protein, 9 aa, synthetic construct
  REGION 1..9: note = Description of Artificial Sequence: Synthetic peptide
  REGION 1..9: note = XENP019288 vhCDR3
TGWLGPFDY

SEQ ID NO: 8380 - protein, 215 aa, synthetic construct; identical to SEQ ID NO: 7600
  REGION 1..215: note = Description of Artificial Sequence: Synthetic polypeptide
  REGION 1..215: note = XENP019288 [CTLA-4]_H0.78_L0_Fab Light Chain

SEQ ID NO: 8381 - protein, 108 aa, synthetic construct; identical to SEQ ID NO: 3741
  REGION 1..108: note = Description of Artificial Sequence: Synthetic polypeptide
  REGION 1..108: note = VL of XENP019288

SEQ ID NO: 8382 - protein, 12 aa, synthetic construct
  REGION 1..12: note = Description of Artificial Sequence: Synthetic peptide
  REGION 1..12: note = XENP019288 vlCDR1
RASQSVGSSYLA

SEQ ID NO: 8383 - protein, 7 aa, synthetic construct
  REGION 1..7: note = Description of Artificial Sequence: Synthetic peptide
  REGION 1..7: note = XENP019288 vlCDR2
GAFSRAT

SEQ ID NO: 8384 - protein, 9 aa, synthetic construct
  REGION 1..9: note = Description of Artificial Sequence: Synthetic peptide
  REGION 1..9: note = XENP019288 vlCDR3
QQYGSSPWT

SEQ ID NO: 8385 - protein, 221 aa, synthetic construct
  REGION 1..221: note = Description of Artificial Sequence: Synthetic polypeptide
  REGION 1..221: note = XENP019289 [CTLA-4]_H0.79_L0_Fab Heavy Chain
QVQLVESGGGVVQPGRSLRLSCAASGFTFSSYTMHWVRQAPGKGLEWVTFISYDGNNKAYADSVKGRFTISRDNSKNTLYLQMNSLRAEDTAIYYCARTGWLGPFDYWGQGTLVTVSSASTKGPSVFPLAPSSKSTSGGTAALGCLVKDYFPEPVTVSWNSGALTSGVHTFPAVLQSSGLYSLSSVVTVPSSSLGTQTYICNVNHKPSNTKVDKKVEPKSC

SEQ ID NO: 8386 - protein, 118 aa, synthetic construct; identical to SEQ ID NO: 5571
  REGION 1..118: note = Description of Artificial Sequence: Synthetic polypeptide
  REGION 1..118: note = VH of XENP019289

SEQ ID NO: 8387 - protein, 5 aa, synthetic construct
  REGION 1..5: note = Description of Artificial Sequence: Synthetic peptide
  REGION 1..5: note = XENP019289 vhCDR1
SYTMH

SEQ ID NO: 8388 - protein, 17 aa, synthetic construct
  REGION 1..17: note = Description of Artificial Sequence: Synthetic peptide
  REGION 1..17: note = XENP019289 vhCDR2
FISYDGNNKAYADSVKG

SEQ ID NO: 8389 - protein, 9 aa, synthetic construct
  REGION 1..9: note = Description of Artificial Sequence: Synthetic peptide
  REGION 1..9: note = XENP019289 vhCDR3
TGWLGPFDY

SEQ ID NO: 8390 - protein, 215 aa, synthetic construct; identical to SEQ ID NO: 7600
  REGION 1..215: note = Description of Artificial Sequence: Synthetic polypeptide
  REGION 1..215: note = XENP019289 [CTLA-4]_H0.79_L0_Fab Light Chain

SEQ ID NO: 8391 - protein, 108 aa, synthetic construct; identical to SEQ ID NO: 3741
  REGION 1..108: note = Description of Artificial Sequence: Synthetic polypeptide
  REGION 1..108: note = VL of XENP019289

SEQ ID NO: 8392 - protein, 12 aa, synthetic construct
  REGION 1..12: note = Description of Artificial Sequence: Synthetic peptide
  REGION 1..12: note = XENP019289 vlCDR1
RASQSVGSSYLA

SEQ ID NO: 8393 - protein, 7 aa, synthetic construct
  REGION 1..7: note = Description of Artificial Sequence: Synthetic peptide
  REGION 1..7: note = XENP019289 vlCDR2
GAFSRAT

SEQ ID NO: 8394 - protein, 9 aa, synthetic construct
  REGION 1..9: note = Description of Artificial Sequence: Synthetic peptide
  REGION 1..9: note = XENP019289 vlCDR3
QQYGSSPWT

SEQ ID NO: 8395 - protein, 221 aa, synthetic construct
  REGION 1..221: note = Description of Artificial Sequence: Synthetic polypeptide
  REGION 1..221: note = XENP019290 [CTLA-4]_H0.80_L0_Fab Heavy Chain
QVQLVESGGGVVQPGRSLRLSCAASGFTFSSYTMHWVRQAPGKGLEWVTFISYDGNNKYYAASVKGRFTISRDNSKNTLYLQMNSLRAEDTAIYYCARTGWLGPFDYWGQGTLVTVSSASTKGPSVFPLAPSSKSTSGGTAALGCLVKDYFPEPVTVSWNSGALTSGVHTFPAVLQSSGLYSLSSVVTVPSSSLGTQTYICNVNHKPSNTKVDKKVEPKSC

SEQ ID NO: 8396 - protein, 118 aa, synthetic construct; identical to SEQ ID NO: 5580
  REGION 1..118: note = Description of Artificial Sequence: Synthetic polypeptide
  REGION 1..118: note = VH of XENP019290

SEQ ID NO: 8397 - protein, 5 aa, synthetic construct
  REGION 1..5: note = Description of Artificial Sequence: Synthetic peptide
  REGION 1..5: note = XENP019290 vhCDR1
SYTMH

SEQ ID NO: 8398 - protein, 17 aa, synthetic construct
  REGION 1..17: note = Description of Artificial Sequence: Synthetic peptide
  REGION 1..17: note = XENP019290 vhCDR2
FISYDGNNKYYAASVKG

SEQ ID NO: 8399 - protein, 9 aa, synthetic construct
  REGION 1..9: note = Description of Artificial Sequence: Synthetic peptide
  REGION 1..9: note = XENP019290 vhCDR3
TGWLGPFDY

SEQ ID NO: 8400 - protein, 215 aa, synthetic construct; identical to SEQ ID NO: 7600
  REGION 1..215: note = Description of Artificial Sequence: Synthetic polypeptide
  REGION 1..215: note = XENP019290 [CTLA-4]_H0.80_L0_Fab Light Chain

SEQ ID NO: 8401 - protein, 108 aa, synthetic construct; identical to SEQ ID NO: 3741
  REGION 1..108: note = Description of Artificial Sequence: Synthetic polypeptide
  REGION 1..108: note = VL of XENP019290

SEQ ID NO: 8402 - protein, 12 aa, synthetic construct
  REGION 1..12: note = Description of Artificial Sequence: Synthetic peptide
  REGION 1..12: note = XENP019290 vlCDR1
RASQSVGSSYLA

SEQ ID NO: 8403 - protein, 7 aa, synthetic construct
  REGION 1..7: note = Description of Artificial Sequence: Synthetic peptide
  REGION 1..7: note = XENP019290 vlCDR2
GAFSRAT

SEQ ID NO: 8404 - protein, 9 aa, synthetic construct
  REGION 1..9: note = Description of Artificial Sequence: Synthetic peptide
  REGION 1..9: note = XENP019290 vlCDR3
QQYGSSPWT

SEQ ID NO: 8405 - protein, 221 aa, synthetic construct
  REGION 1..221: note = Description of Artificial Sequence: Synthetic polypeptide
  REGION 1..221: note = XENP019291 [CTLA-4]_H0.81_L0_Fab Heavy Chain
QVQLVESGGGVVQPGRSLRLSCAASGFTFSSYTMHWVRQAPGKGLEWVTFISYDGNNKYYAKSVKGRFTISRDNSKNTLYLQMNSLRAEDTAIYYCARTGWLGPFDYWGQGTLVTVSSASTKGPSVFPLAPSSKSTSGGTAALGCLVKDYFPEPVTVSWNSGALTSGVHTFPAVLQSSGLYSLSSVVTVPSSSLGTQTYICNVNHKPSNTKVDKKVEPKSC

SEQ ID NO: 8406 - protein, 118 aa, synthetic construct; identical to SEQ ID NO: 5589
  REGION 1..118: note = Description of Artificial Sequence: Synthetic polypeptide
  REGION 1..118: note = VH of XENP019291

SEQ ID NO: 8407 - protein, 5 aa, synthetic construct
  REGION 1..5: note = Description of Artificial Sequence: Synthetic peptide
  REGION 1..5: note = XENP019291 vhCDR1
SYTMH

SEQ ID NO: 8408 - protein, 17 aa, synthetic construct
  REGION 1..17: note = Description of Artificial Sequence: Synthetic peptide
  REGION 1..17: note = XENP019291 vhCDR2
FISYDGNNKYYAKSVKG

SEQ ID NO: 8409 - protein, 9 aa, synthetic construct
  REGION 1..9: note = Description of Artificial Sequence: Synthetic peptide
  REGION 1..9: note = XENP019291 vhCDR3
TGWLGPFDY

SEQ ID NO: 8410 - protein, 215 aa, synthetic construct; identical to SEQ ID NO: 7600
  REGION 1..215: note = Description of Artificial Sequence: Synthetic polypeptide
  REGION 1..215: note = XENP019291 [CTLA-4]_H0.81_L0_Fab Light Chain

SEQ ID NO: 8411 - protein, 108 aa, synthetic construct; identical to SEQ ID NO: 3741
  REGION 1..108: note = Description of Artificial Sequence: Synthetic polypeptide
  REGION 1..108: note = VL of XENP019291

SEQ ID NO: 8412 - protein, 12 aa, synthetic construct
  REGION 1..12: note = Description of Artificial Sequence: Synthetic peptide
  REGION 1..12: note = XENP019291 vlCDR1
RASQSVGSSYLA

SEQ ID NO: 8413 - protein, 7 aa, synthetic construct
  REGION 1..7: note = Description of Artificial Sequence: Synthetic peptide
  REGION 1..7: note = XENP019291 vlCDR2
GAFSRAT

SEQ ID NO: 8414 - protein, 9 aa, synthetic construct
  REGION 1..9: note = Description of Artificial Sequence: Synthetic peptide
  REGION 1..9: note = XENP019291 vlCDR3
QQYGSSPWT

SEQ ID NO: 8415 - protein, 221 aa, synthetic construct
  REGION 1..221: note = Description of Artificial Sequence: Synthetic polypeptide
  REGION 1..221: note = XENP019292 [CTLA-4]_H0.82_L0_Fab Heavy Chain
QVQLVESGGGVVQPGRSLRLSCAASGFTFSSYTMHWVRQAPGKGLEWVTFISYDGNNKYYADSVKDRFTISRDNSKNTLYLQMNSLRAEDTAIYYCARTGWLGPFDYWGQGTLVTVSSASTKGPSVFPLAPSSKSTSGGTAALGCLVKDYFPEPVTVSWNSGALTSGVHTFPAVLQSSGLYSLSSVVTVPSSSLGTQTYICNVNHKPSNTKVDKKVEPKSC

SEQ ID NO: 8416 - protein, 118 aa, synthetic construct; identical to SEQ ID NO: 5598
  REGION 1..118: note = Description of Artificial Sequence: Synthetic polypeptide
  REGION 1..118: note = VH of XENP019292

SEQ ID NO: 8417 - protein, 5 aa, synthetic construct
  REGION 1..5: note = Description of Artificial Sequence: Synthetic peptide
  REGION 1..5: note = XENP019292 vhCDR1
SYTMH

SEQ ID NO: 8418 - protein, 17 aa, synthetic construct
  REGION 1..17: note = Description of Artificial Sequence: Synthetic peptide
  REGION 1..17: note = XENP019292 vhCDR2
FISYDGNNKYYADSVKD

SEQ ID NO: 8419 - protein, 9 aa, synthetic construct
  REGION 1..9: note = Description of Artificial Sequence: Synthetic peptide
  REGION 1..9: note = XENP019292 vhCDR3
TGWLGPFDY

SEQ ID NO: 8420 - protein, 215 aa, synthetic construct; identical to SEQ ID NO: 7600
  REGION 1..215: note = Description of Artificial Sequence: Synthetic polypeptide
  REGION 1..215: note = XENP019292 [CTLA-4]_H0.82_L0_Fab Light Chain

SEQ ID NO: 8421 - protein, 108 aa, synthetic construct; identical to SEQ ID NO: 3741
  REGION 1..108: note = Description of Artificial Sequence: Synthetic polypeptide
  REGION 1..108: note = VL of XENP019292

SEQ ID NO: 8422 - protein, 12 aa, synthetic construct
  REGION 1..12: note = Description of Artificial Sequence: Synthetic peptide
  REGION 1..12: note = XENP019292 vlCDR1
RASQSVGSSYLA

SEQ ID NO: 8423 - protein, 7 aa, synthetic construct
  REGION 1..7: note = Description of Artificial Sequence: Synthetic peptide
  REGION 1..7: note = XENP019292 vlCDR2
GAFSRAT

SEQ ID NO: 8424 - protein, 9 aa, synthetic construct
  REGION 1..9: note = Description of Artificial Sequence: Synthetic peptide
  REGION 1..9: note = XENP019292 vlCDR3
QQYGSSPWT

SEQ ID NO: 8425 - protein, 221 aa, synthetic construct
  REGION 1..221: note = Description of Artificial Sequence: Synthetic polypeptide
  REGION 1..221: note = XENP019293 [CTLA-4]_H0.83_L0_Fab Heavy Chain
QVQLVESGGGVVQPGRSLRLSCAASGFTFSSYTMHWVRQAPGKGLEWVTFISYDGNNKYYADSVKERFTISRDNSKNTLYLQMNSLRAEDTAIYYCARTGWLGPFDYWGQGTLVTVSSASTKGPSVFPLAPSSKSTSGGTAALGCLVKDYFPEPVTVSWNSGALTSGVHTFPAVLQSSGLYSLSSVVTVPSSSLGTQTYICNVNHKPSNTKVDKKVEPKSC

SEQ ID NO: 8426 - protein, 118 aa, synthetic construct; identical to SEQ ID NO: 5607
  REGION 1..118: note = Description of Artificial Sequence: Synthetic polypeptide
  REGION 1..118: note = VH of XENP019293

SEQ ID NO: 8427 - protein, 5 aa, synthetic construct
  REGION 1..5: note = Description of Artificial Sequence: Synthetic peptide
  REGION 1..5: note = XENP019293 vhCDR1
SYTMH

SEQ ID NO: 8428 - protein, 17 aa, synthetic construct
  REGION 1..17: note = Description of Artificial Sequence: Synthetic peptide
  REGION 1..17: note = XENP019293 vhCDR2
FISYDGNNKYYADSVKE

SEQ ID NO: 8429 - protein, 9 aa, synthetic construct
  REGION 1..9: note = Description of Artificial Sequence: Synthetic peptide
  REGION 1..9: note = XENP019293 vhCDR3
TGWLGPFDY

SEQ ID NO: 8430 - protein, 215 aa, synthetic construct; identical to SEQ ID NO: 7600
  REGION 1..215: note = Description of Artificial Sequence: Synthetic polypeptide
  REGION 1..215: note = XENP019293 [CTLA-4]_H0.83_L0_Fab Light Chain

SEQ ID NO: 8431 - protein, 108 aa, synthetic construct; identical to SEQ ID NO: 3741
  REGION 1..108: note = Description of Artificial Sequence: Synthetic polypeptide
  REGION 1..108: note = VL of XENP019293

SEQ ID NO: 8432 - protein, 12 aa, synthetic construct
  REGION 1..12: note = Description of Artificial Sequence: Synthetic peptide
  REGION 1..12: note = XENP019293 vlCDR1
RASQSVGSSYLA

SEQ ID NO: 8433 - protein, 7 aa, synthetic construct
  REGION 1..7: note = Description of Artificial Sequence: Synthetic peptide
  REGION 1..7: note = XENP019293 vlCDR2
GAFSRAT

SEQ ID NO: 8434 - protein, 9 aa, synthetic construct
  REGION 1..9: note = Description of Artificial Sequence: Synthetic peptide
  REGION 1..9: note = XENP019293 vlCDR3
QQYGSSPWT

SEQ ID NO: 8435 - protein, 221 aa, synthetic construct
  REGION 1..221: note = Description of Artificial Sequence: Synthetic polypeptide
  REGION 1..221: note = XENP019294 [CTLA-4]_H0.84_L0_Fab Heavy Chain
QVQLVESGGGVVQPGRSLRLSCAASGFTFSSYTMHWVRQAPGKGLEWVTFISYDGNNKYYADSVKGQFTISRDNSKNTLYLQMNSLRAEDTAIYYCARTGWLGPFDYWGQGTLVTVSSASTKGPSVFPLAPSSKSTSGGTAALGCLVKDYFPEPVTVSWNSGALTSGVHTFPAVLQSSGLYSLSSVVTVPSSSLGTQTYICNVNHKPSNTKVDKKVEPKSC

SEQ ID NO: 8436 - protein, 118 aa, synthetic construct; identical to SEQ ID NO: 5616
  REGION 1..118: note = Description of Artificial Sequence: Synthetic polypeptide
  REGION 1..118: note = VH of XENP019294

SEQ ID NO: 8437 - protein, 5 aa, synthetic construct
  REGION 1..5: note = Description of Artificial Sequence: Synthetic peptide
  REGION 1..5: note = XENP019294 vhCDR1
SYTMH

SEQ ID NO: 8438 - protein, 17 aa, synthetic construct
  REGION 1..17: note = Description of Artificial Sequence: Synthetic peptide
  REGION 1..17: note = XENP019294 vhCDR2
FISYDGNNKYYADSVKG

SEQ ID NO: 8439 - protein, 9 aa, synthetic construct
  REGION 1..9: note = Description of Artificial Sequence: Synthetic peptide
  REGION 1..9: note = XENP019294 vhCDR3
TGWLGPFDY

SEQ ID NO: 8440 - protein, 215 aa, synthetic construct; identical to SEQ ID NO: 7600
  REGION 1..215: note = Description of Artificial Sequence: Synthetic polypeptide
  REGION 1..215: note = XENP019294 [CTLA-4]_H0.84_L0_Fab Light Chain

SEQ ID NO: 8441 - protein, 108 aa, synthetic construct; identical to SEQ ID NO: 3741
  REGION 1..108: note = Description of Artificial Sequence: Synthetic polypeptide
  REGION 1..108: note = VL of XENP019294

SEQ ID NO: 8442 - protein, 12 aa, synthetic construct
  REGION 1..12: note = Description of Artificial Sequence: Synthetic peptide
  REGION 1..12: note = XENP019294 vlCDR1
RASQSVGSSYLA

SEQ ID NO: 8443 - protein, 7 aa, synthetic construct
  REGION 1..7: note = Description of Artificial Sequence: Synthetic peptide
  REGION 1..7: note = XENP019294 vlCDR2
GAFSRAT

SEQ ID NO: 8444 - protein, 9 aa, synthetic construct
  REGION 1..9: note = Description of Artificial Sequence: Synthetic peptide
  REGION 1..9: note = XENP019294 vlCDR3
QQYGSSPWT

SEQ ID NO: 8445 - protein, 221 aa, synthetic construct
  REGION 1..221: note = Description of Artificial Sequence: Synthetic polypeptide
  REGION 1..221: note = XENP019295 [CTLA-4]_H0.85_L0_Fab Heavy Chain
QVQLVESGGGVVQPGRSLRLSCAASGFTFSSYTMHWVRQAPGKGLEWVTFISYDGNNKYYADSVKGRFTMSRDNSKNTLYLQMNSLRAEDTAIYYCARTGWLGPFDYWGQGTLVTVSSASTKGPSVFPLAPSSKSTSGGTAALGCLVKDYFPEPVTVSWNSGALTSGVHTFPAVLQSSGLYSLSSVVTVPSSSLGTQTYICNVNHKPSNTKVDKKVEPKSC

SEQ ID NO: 8446 - protein, 118 aa, synthetic construct; identical to SEQ ID NO: 5625
  REGION 1..118: note = Description of Artificial Sequence: Synthetic polypeptide
  REGION 1..118: note = VH of XENP019295

SEQ ID NO: 8447 - protein, 5 aa, synthetic construct
  REGION 1..5: note = Description of Artificial Sequence: Synthetic peptide
  REGION 1..5: note = XENP019295 vhCDR1
SYTMH

SEQ ID NO: 8448 - protein, 17 aa, synthetic construct
  REGION 1..17: note = Description of Artificial Sequence: Synthetic peptide
  REGION 1..17: note = XENP019295 vhCDR2
FISYDGNNKYYADSVKG

SEQ ID NO: 8449 - protein, 9 aa, synthetic construct
  REGION 1..9: note = Description of Artificial Sequence: Synthetic peptide
  REGION 1..9: note = XENP019295 vhCDR3
TGWLGPFDY

SEQ ID NO: 8450 - protein, 215 aa, synthetic construct; identical to SEQ ID NO: 7600
  REGION 1..215: note = Description of Artificial Sequence: Synthetic polypeptide
  REGION 1..215: note = XENP019295 [CTLA-4]_H0.85_L0_Fab Light Chain

SEQ ID NO: 8451 - protein, 108 aa, synthetic construct; identical to SEQ ID NO: 3741
  REGION 1..108: note = Description of Artificial Sequence: Synthetic polypeptide
  REGION 1..108: note = VL of XENP019295

SEQ ID NO: 8452 - protein, 12 aa, synthetic construct
  REGION 1..12: note = Description of Artificial Sequence: Synthetic peptide
  REGION 1..12: note = XENP019295 vlCDR1
RASQSVGSSYLA

SEQ ID NO: 8453 - protein, 7 aa, synthetic construct
  REGION 1..7: note = Description of Artificial Sequence: Synthetic peptide
  REGION 1..7: note = XENP019295 vlCDR2
GAFSRAT

SEQ ID NO: 8454 - protein, 9 aa, synthetic construct
  REGION 1..9: note = Description of Artificial Sequence: Synthetic peptide
  REGION 1..9: note = XENP019295 vlCDR3
QQYGSSPWT

SEQ ID NO: 8455 - protein, 221 aa, synthetic construct
  REGION 1..221: note = Description of Artificial Sequence: Synthetic polypeptide
  REGION 1..221: note = XENP019296 [CTLA-4]_H0.86_L0_Fab Heavy Chain
QVQLVESGGGVVQPGRSLRLSCAASGFTFSSYTMHWVRQAPGKGLEWVTFISYDGNNKYYADSVKGRFTVSRDNSKNTLYLQMNSLRAEDTAIYYCARTGWLGPFDYWGQGTLVTVSSASTKGPSVFPLAPSSKSTSGGTAALGCLVKDYFPEPVTVSWNSGALTSGVHTFPAVLQSSGLYSLSSVVTVPSSSLGTQTYICNVNHKPSNTKVDKKVEPKSC

SEQ ID NO: 8456 - protein, 118 aa, synthetic construct; identical to SEQ ID NO: 5634
  REGION 1..118: note = Description of Artificial Sequence: Synthetic polypeptide
  REGION 1..118: note = VH of XENP019296

SEQ ID NO: 8457 - protein, 5 aa, synthetic construct
  REGION 1..5: note = Description of Artificial Sequence: Synthetic peptide
  REGION 1..5: note = XENP019296 vhCDR1
SYTMH

SEQ ID NO: 8458 - protein, 17 aa, synthetic construct
  REGION 1..17: note = Description of Artificial Sequence: Synthetic peptide
  REGION 1..17: note = XENP019296 vhCDR2
FISYDGNNKYYADSVKG

SEQ ID NO: 8459 - protein, 9 aa, synthetic construct
  REGION 1..9: note = Description of Artificial Sequence: Synthetic peptide
  REGION 1..9: note = XENP019296 vhCDR3
TGWLGPFDY

SEQ ID NO: 8460 - protein, 215 aa, synthetic construct; identical to SEQ ID NO: 7600
  REGION 1..215: note = Description of Artificial Sequence: Synthetic polypeptide
  REGION 1..215: note = XENP019296 [CTLA-4]_H0.86_L0_Fab Light Chain

SEQ ID NO: 8461 - protein, 108 aa, synthetic construct; identical to SEQ ID NO: 3741
  REGION 1..108: note = Description of Artificial Sequence: Synthetic polypeptide
  REGION 1..108: note = VL of XENP019296

SEQ ID NO: 8462 - protein, 12 aa, synthetic construct
  REGION 1..12: note = Description of Artificial Sequence: Synthetic peptide
  REGION 1..12: note = XENP019296 vlCDR1
RASQSVGSSYLA

SEQ ID NO: 8463 - protein, 7 aa, synthetic construct
  REGION 1..7: note = Description of Artificial Sequence: Synthetic peptide
  REGION 1..7: note = XENP019296 vlCDR2
GAFSRAT

SEQ ID NO: 8464 - protein, 9 aa, synthetic construct
  REGION 1..9: note = Description of Artificial Sequence: Synthetic peptide
  REGION 1..9: note = XENP019296 vlCDR3
QQYGSSPWT

SEQ ID NO: 8465 - protein, 221 aa, synthetic construct
  REGION 1..221: note = Description of Artificial Sequence: Synthetic polypeptide
  REGION 1..221: note = XENP019301 [CTLA-4]_H0.87_L0_Fab Heavy Chain
QVQLVESGGGVVQPGRSLRLSCAASGFTFSSYTMHWVRQAPGKGLEWVTFISYDGNNKYYADSVKGRFTISEDNSKNTLYLQMNSLRAEDTAIYYCARTGWLGPFDYWGQGTLVTVSSASTKGPSVFPLAPSSKSTSGGTAALGCLVKDYFPEPVTVSWNSGALTSGVHTFPAVLQSSGLYSLSSVVTVPSSSLGTQTYICNVNHKPSNTKVDKKVEPKSC

SEQ ID NO: 8466 - protein, 118 aa, synthetic construct; identical to SEQ ID NO: 5643
  REGION 1..118: note = Description of Artificial Sequence: Synthetic polypeptide
  REGION 1..118: note = VH of XENP019301

SEQ ID NO: 8467 - protein, 5 aa, synthetic construct
  REGION 1..5: note = Description of Artificial Sequence: Synthetic peptide
  REGION 1..5: note = XENP019301 vhCDR1
SYTMH

SEQ ID NO: 8468 - protein, 17 aa, synthetic construct
  REGION 1..17: note = Description of Artificial Sequence: Synthetic peptide
  REGION 1..17: note = XENP019301 vhCDR2
FISYDGNNKYYADSVKG

SEQ ID NO: 8469 - protein, 9 aa, synthetic construct
  REGION 1..9: note = Description of Artificial Sequence: Synthetic peptide
  REGION 1..9: note = XENP019301 vhCDR3
TGWLGPFDY

SEQ ID NO: 8470 - protein, 215 aa, synthetic construct; identical to SEQ ID NO: 7600
  REGION 1..215: note = Description of Artificial Sequence: Synthetic polypeptide
  REGION 1..215: note = XENP019301 [CTLA-4]_H0.87_L0_Fab Light Chain

SEQ ID NO: 8471 - protein, 108 aa, synthetic construct; identical to SEQ ID NO: 3741
  REGION 1..108: note = Description of Artificial Sequence: Synthetic polypeptide
  REGION 1..108: note = VL of XENP019301

SEQ ID NO: 8472 - protein, 12 aa, synthetic construct
  REGION 1..12: note = Description of Artificial Sequence: Synthetic peptide
  REGION 1..12: note = XENP019301 vlCDR1
RASQSVGSSYLA

SEQ ID NO: 8473 - protein, 7 aa, synthetic construct
  REGION 1..7: note = Description of Artificial Sequence: Synthetic peptide
  REGION 1..7: note = XENP019301 vlCDR2
GAFSRAT

SEQ ID NO: 8474 - protein, 9 aa, synthetic construct
  REGION 1..9: note = Description of Artificial Sequence: Synthetic peptide
  REGION 1..9: note = XENP019301 vlCDR3
QQYGSSPWT

SEQ ID NO: 8475 - protein, 221 aa, synthetic construct
  REGION 1..221: note = Description of Artificial Sequence: Synthetic polypeptide
  REGION 1..221: note = XENP019302 [CTLA-4]_H0.88_L0_Fab Heavy Chain
QVQLVESGGGVVQPGRSLRLSCAASGFTFSSYTMHWVRQAPGKGLEWVTFISYDGNNKYYADSVKGRFTISRENSKNTLYLQMNSLRAEDTAIYYCARTGWLGPFDYWGQGTLVTVSSASTKGPSVFPLAPSSKSTSGGTAALGCLVKDYFPEPVTVSWNSGALTSGVHTFPAVLQSSGLYSLSSVVTVPSSSLGTQTYICNVNHKPSNTKVDKKVEPKSC

SEQ ID NO: 8476 - protein, 118 aa, synthetic construct; identical to SEQ ID NO: 5652
  REGION 1..118: note = Description of Artificial Sequence: Synthetic polypeptide
  REGION 1..118: note = VH of XENP019302

SEQ ID NO: 8477 - protein, 5 aa, synthetic construct
  REGION 1..5: note = Description of Artificial Sequence: Synthetic peptide
  REGION 1..5: note = XENP019302 vhCDR1
SYTMH

SEQ ID NO: 8478 - protein, 17 aa, synthetic construct
  REGION 1..17: note = Description of Artificial Sequence: Synthetic peptide
  REGION 1..17: note = XENP019302 vhCDR2
FISYDGNNKYYADSVKG

SEQ ID NO: 8479 - protein, 9 aa, synthetic construct
  REGION 1..9: note = Description of Artificial Sequence: Synthetic peptide
  REGION 1..9: note = XENP019302 vhCDR3
TGWLGPFDY

SEQ ID NO: 8480 - protein, 215 aa, synthetic construct; identical to SEQ ID NO: 7600
  REGION 1..215: note = Description of Artificial Sequence: Synthetic polypeptide
  REGION 1..215: note = XENP019302 [CTLA-4]_H0.88_L0_Fab Light Chain

SEQ ID NO: 8481 - protein, 108 aa, synthetic construct; identical to SEQ ID NO: 3741
  REGION 1..108: note = Description of Artificial Sequence: Synthetic polypeptide
  REGION 1..108: note = VL of XENP019302

SEQ ID NO: 8482 - protein, 12 aa, synthetic construct
  REGION 1..12: note = Description of Artificial Sequence: Synthetic peptide
  REGION 1..12: note = XENP019302 vlCDR1
RASQSVGSSYLA

SEQ ID NO: 8483 - protein, 7 aa, synthetic construct
  REGION 1..7: note = Description of Artificial Sequence: Synthetic peptide
  REGION 1..7: note = XENP019302 vlCDR2
GAFSRAT

SEQ ID NO: 8484 - protein, 9 aa, synthetic construct
  REGION 1..9: note = Description of Artificial Sequence: Synthetic peptide
  REGION 1..9: note = XENP019302 vlCDR3
QQYGSSPWT

SEQ ID NO: 8485 - protein, 221 aa, synthetic construct
  REGION 1..221: note = Description of Artificial Sequence: Synthetic polypeptide
  REGION 1..221: note = XENP019303 [CTLA-4]_H0.89_L0_Fab Heavy Chain
QVQLVESGGGVVQPGRSLRLSCAASGFTFSSYTMHWVRQAPGKGLEWVTFISYDGNNKYYADSVKGRFTISRDDSKNTLYLQMNSLRAEDTAIYYCARTGWLGPFDYWGQGTLVTVSSASTKGPSVFPLAPSSKSTSGGTAALGCLVKDYFPEPVTVSWNSGALTSGVHTFPAVLQSSGLYSLSSVVTVPSSSLGTQTYICNVNHKPSNTKVDKKVEPKSC

SEQ ID NO: 8486 - protein, 118 aa, synthetic construct; identical to SEQ ID NO: 5661
  REGION 1..118: note = Description of Artificial Sequence: Synthetic polypeptide
  REGION 1..118: note = VH of XENP019303

SEQ ID NO: 8487 - protein, 5 aa, synthetic construct
  REGION 1..5: note = Description of Artificial Sequence: Synthetic peptide
  REGION 1..5: note = XENP019303 vhCDR1
SYTMH

SEQ ID NO: 8488 - protein, 17 aa, synthetic construct
  REGION 1..17: note = Description of Artificial Sequence: Synthetic peptide
  REGION 1..17: note = XENP019303 vhCDR2
FISYDGNNKYYADSVKG

SEQ ID NO: 8489 - protein, 9 aa, synthetic construct
  REGION 1..9: note = Description of Artificial Sequence: Synthetic peptide
  REGION 1..9: note = XENP019303 vhCDR3
TGWLGPFDY

SEQ ID NO: 8490 - protein, 215 aa, synthetic construct; identical to SEQ ID NO: 7600
  REGION 1..215: note = Description of Artificial Sequence: Synthetic polypeptide
  REGION 1..215: note = XENP019303 [CTLA-4]_H0.89_L0_Fab Light Chain

SEQ ID NO: 8491 - protein, 108 aa, synthetic construct; identical to SEQ ID NO: 3741
  REGION 1..108: note = Description of Artificial Sequence: Synthetic polypeptide
  REGION 1..108: note = VL of XENP019303

SEQ ID NO: 8492 - protein, 12 aa, synthetic construct
  REGION 1..12: note = Description of Artificial Sequence: Synthetic peptide
  REGION 1..12: note = XENP019303 vlCDR1
RASQSVGSSYLA

SEQ ID NO: 8493 - protein, 7 aa, synthetic construct
  REGION 1..7: note = Description of Artificial Sequence: Synthetic peptide
  REGION 1..7: note = XENP019303 vlCDR2
GAFSRAT

SEQ ID NO: 8494 - protein, 9 aa, synthetic construct
  REGION 1..9: note = Description of Artificial Sequence: Synthetic peptide
  REGION 1..9: note = XENP019303 vlCDR3
QQYGSSPWT

SEQ ID NO: 8495 - protein, 221 aa, synthetic construct
  REGION 1..221: note = Description of Artificial Sequence: Synthetic polypeptide
  REGION 1..221: note = XENP019304 [CTLA-4]_H0.90_L0_Fab Heavy Chain
QVQLVESGGGVVQPGRSLRLSCAASGFTFSSYTMHWVRQAPGKGLEWVTFISYDGNNKYYADSVKGRFTISRDNAKNTLYLQMNSLRAEDTAIYYCARTGWLGPFDYWGQGTLVTVSSASTKGPSVFPLAPSSKSTSGGTAALGCLVKDYFPEPVTVSWNSGALTSGVHTFPAVLQSSGLYSLSSVVTVPSSSLGTQTYICNVNHKPSNTKVDKKVEPKSC

SEQ ID NO: 8496 - protein, 118 aa, synthetic construct; identical to SEQ ID NO: 5670
  REGION 1..118: note = Description of Artificial Sequence: Synthetic polypeptide
  REGION 1..118: note = VH of XENP019304

SEQ ID NO: 8497 - protein, 5 aa, synthetic construct
  REGION 1..5: note = Description of Artificial Sequence: Synthetic peptide
  REGION 1..5: note = XENP019304 vhCDR1
SYTMH

SEQ ID NO: 8498 - protein, 17 aa, synthetic construct
  REGION 1..17: note = Description of Artificial Sequence: Synthetic peptide
  REGION 1..17: note = XENP019304 vhCDR2
FISYDGNNKYYADSVKG

SEQ ID NO: 8499 - protein, 9 aa, synthetic construct
  REGION 1..9: note = Description of Artificial Sequence: Synthetic peptide
  REGION 1..9: note = XENP019304 vhCDR3
TGWLGPFDY

SEQ ID NO: 8500 - protein, 215 aa, synthetic construct; identical to SEQ ID NO: 7600
  REGION 1..215: note = Description of Artificial Sequence: Synthetic polypeptide
  REGION 1..215: note = XENP019304 [CTLA-4]_H0.90_L0_Fab Light Chain

SEQ ID NO: 8501 - protein, 108 aa, synthetic construct; identical to SEQ ID NO: 3741
  REGION 1..108: note = Description of Artificial Sequence: Synthetic polypeptide
  REGION 1..108: note = VL of XENP019304

SEQ ID NO: 8502 - protein, 12 aa, synthetic construct
  REGION 1..12: note = Description of Artificial Sequence: Synthetic peptide
  REGION 1..12: note = XENP019304 vlCDR1
RASQSVGSSYLA

SEQ ID NO: 8503 - protein, 7 aa, synthetic construct
  REGION 1..7: note = Description of Artificial Sequence: Synthetic peptide
  REGION 1..7: note = XENP019304 vlCDR2
GAFSRAT

SEQ ID NO: 8504 - protein, 9 aa, synthetic construct
  REGION 1..9: note = Description of Artificial Sequence: Synthetic peptide
  REGION 1..9: note = XENP019304 vlCDR3
QQYGSSPWT

SEQ ID NO: 8505 - protein, 221 aa, synthetic construct
  REGION 1..221: note = Description of Artificial Sequence: Synthetic polypeptide
  REGION 1..221: note = XENP019305 [CTLA-4]_H0.91_L0_Fab Heavy Chain
QVQLVESGGGVVQPGRSLRLSCAASGFTFSSYTMHWVRQAPGKGLEWVTFISYDGNNKYYADSVKGRFTISRDNSRNTLYLQMNSLRAEDTAIYYCARTGWLGPFDYWGQGTLVTVSSASTKGPSVFPLAPSSKSTSGGTAALGCLVKDYFPEPVTVSWNSGALTSGVHTFPAVLQSSGLYSLSSVVTVPSSSLGTQTYICNVNHKPSNTKVDKKVEPKSC

SEQ ID NO: 8506 - protein, 118 aa, synthetic construct; identical to SEQ ID NO: 5679
  REGION 1..118: note = Description of Artificial Sequence: Synthetic polypeptide
  REGION 1..118: note = VH of XENP019305

SEQ ID NO: 8507 - protein, 5 aa, synthetic construct
  REGION 1..5: note = Description of Artificial Sequence: Synthetic peptide
  REGION 1..5: note = XENP019305 vhCDR1
SYTMH

SEQ ID NO: 8508 - protein, 17 aa, synthetic construct
  REGION 1..17: note = Description of Artificial Sequence: Synthetic peptide
  REGION 1..17: note = XENP019305 vhCDR2
FISYDGNNKYYADSVKG

SEQ ID NO: 8509 - protein, 9 aa, synthetic construct
  REGION 1..9: note = Description of Artificial Sequence: Synthetic peptide
  REGION 1..9: note = XENP019305 vhCDR3
TGWLGPFDY

SEQ ID NO: 8510 - protein, 215 aa, synthetic construct; identical to SEQ ID NO: 7600
  REGION 1..215: note = Description of Artificial Sequence: Synthetic polypeptide
  REGION 1..215: note = XENP019305 [CTLA-4]_H0.91_L0_Fab Light Chain

SEQ ID NO: 8511 - protein, 108 aa, synthetic construct; identical to SEQ ID NO: 3741
  REGION 1..108: note = Description of Artificial Sequence: Synthetic polypeptide
  REGION 1..108: note = VL of XENP019305

SEQ ID NO: 8512 - protein, 12 aa, synthetic construct
  REGION 1..12: note = Description of Artificial Sequence: Synthetic peptide
  REGION 1..12: note = XENP019305 vlCDR1
RASQSVGSSYLA

SEQ ID NO: 8513 - protein, 7 aa, synthetic construct
  REGION 1..7: note = Description of Artificial Sequence: Synthetic peptide
  REGION 1..7: note = XENP019305 vlCDR2
GAFSRAT

SEQ ID NO: 8514 - protein, 9 aa, synthetic construct
  REGION 1..9: note = Description of Artificial Sequence: Synthetic peptide
  REGION 1..9: note = XENP019305 vlCDR3
QQYGSSPWT

SEQ ID NO: 8515 - protein, 221 aa, synthetic construct
  REGION 1..221: note = Description of Artificial Sequence: Synthetic polypeptide
  REGION 1..221: note = XENP019306 [CTLA-4]_H0.92_L0_Fab Heavy Chain
QVQLVESGGGVVQPGRSLRLSCAASGFTFSSYTMHWVRQAPGKGLEWVTFISYDGNNKYYADSVKGRFTISRDNSKNSLYLQMNSLRAEDTAIYYCARTGWLGPFDYWGQGTLVTVSSASTKGPSVFPLAPSSKSTSGGTAALGCLVKDYFPEPVTVSWNSGALTSGVHTFPAVLQSSGLYSLSSVVTVPSSSLGTQTYICNVNHKPSNTKVDKKVEPKSC

SEQ ID NO: 8516 - protein, 118 aa, synthetic construct; identical to SEQ ID NO: 5688
  REGION 1..118: note = Description of Artificial Sequence: Synthetic polypeptide
  REGION 1..118: note = VH of XENP019306

SEQ ID NO: 8517 - protein, 5 aa, synthetic construct
  REGION 1..5: note = Description of Artificial Sequence: Synthetic peptide
  REGION 1..5: note = XENP019306 vhCDR1
SYTMH

SEQ ID NO: 8518 - protein, 17 aa, synthetic construct
  REGION 1..17: note = Description of Artificial Sequence: Synthetic peptide
  REGION 1..17: note = XENP019306 vhCDR2
FISYDGNNKYYADSVKG

SEQ ID NO: 8519 - protein, 9 aa, synthetic construct
  REGION 1..9: note = Description of Artificial Sequence: Synthetic peptide
  REGION 1..9: note = XENP019306 vhCDR3
TGWLGPFDY

SEQ ID NO: 8520 - protein, 215 aa, synthetic construct; identical to SEQ ID NO: 7600
  REGION 1..215: note = Description of Artificial Sequence: Synthetic polypeptide
  REGION 1..215: note = XENP019306 [CTLA-4]_H0.92_L0_Fab Light Chain

SEQ ID NO: 8521 - protein, 108 aa, synthetic construct; identical to SEQ ID NO: 3741
  REGION 1..108: note = Description of Artificial Sequence: Synthetic polypeptide
  REGION 1..108: note = VL of XENP019306

SEQ ID NO: 8522 - protein, 12 aa, synthetic construct
  REGION 1..12: note = Description of Artificial Sequence: Synthetic peptide
  REGION 1..12: note = XENP019306 vlCDR1
RASQSVGSSYLA

SEQ ID NO: 8523 - protein, 7 aa, synthetic construct
  REGION 1..7: note = Description of Artificial Sequence: Synthetic peptide
  REGION 1..7: note = XENP019306 vlCDR2
GAFSRAT

SEQ ID NO: 8524 - protein, 9 aa, synthetic construct
  REGION 1..9: note = Description of Artificial Sequence: Synthetic peptide
  REGION 1..9: note = XENP019306 vlCDR3
QQYGSSPWT

SEQ ID NO: 8525 - protein, 221 aa, synthetic construct
  REGION 1..221: note = Description of Artificial Sequence: Synthetic polypeptide
  REGION 1..221: note = XENP019307 [CTLA-4]_H0.93_L0_Fab Heavy Chain
QVQLVESGGGVVQPGRSLRLSCAASGFTFSSYTMHWVRQAPGKGLEWVTFISYDGNNKYYADSVKGRFTISRDNSKNQLYLQMNSLRAEDTAIYYCARTGWLGPFDYWGQGTLVTVSSASTKGPSVFPLAPSSKSTSGGTAALGCLVKDYFPEPVTVSWNSGALTSGVHTFPAVLQSSGLYSLSSVVTVPSSSLGTQTYICNVNHKPSNTKVDKKVEPKSC

SEQ ID NO: 8526 - protein, 118 aa, synthetic construct; identical to SEQ ID NO: 5697
  REGION 1..118: note = Description of Artificial Sequence: Synthetic polypeptide
  REGION 1..118: note = VH of XENP019307

SEQ ID NO: 8527 - protein, 5 aa, synthetic construct
  REGION 1..5: note = Description of Artificial Sequence: Synthetic peptide
  REGION 1..5: note = XENP019307 vhCDR1
SYTMH

SEQ ID NO: 8528 - protein, 17 aa, synthetic construct
  REGION 1..17: note = Description of Artificial Sequence: Synthetic peptide
  REGION 1..17: note = XENP019307 vhCDR2
FISYDGNNKYYADSVKG

SEQ ID NO: 8529 - protein, 9 aa, synthetic construct
  REGION 1..9: note = Description of Artificial Sequence: Synthetic peptide
  REGION 1..9: note = XENP019307 vhCDR3
TGWLGPFDY

SEQ ID NO: 8530 - protein, 215 aa, synthetic construct; identical to SEQ ID NO: 7600
  REGION 1..215: note = Description of Artificial Sequence: Synthetic polypeptide
  REGION 1..215: note = XENP019307 [CTLA-4]_H0.93_L0_Fab Light Chain

SEQ ID NO: 8531 - protein, 108 aa, synthetic construct; identical to SEQ ID NO: 3741
  REGION 1..108: note = Description of Artificial Sequence: Synthetic polypeptide
  REGION 1..108: note = VL of XENP019307

SEQ ID NO: 8532 - protein, 12 aa, synthetic construct
  REGION 1..12: note = Description of Artificial Sequence: Synthetic peptide
  REGION 1..12: note = XENP019307 vlCDR1
RASQSVGSSYLA

SEQ ID NO: 8533 - protein, 7 aa, synthetic construct
  REGION 1..7: note = Description of Artificial Sequence: Synthetic peptide
  REGION 1..7: note = XENP019307 vlCDR2
GAFSRAT

SEQ ID NO: 8534 - protein, 9 aa, synthetic construct
  REGION 1..9: note = Description of Artificial Sequence: Synthetic peptide
  REGION 1..9: note = XENP019307 vlCDR3
QQYGSSPWT

SEQ ID NO: 8535 - protein, 221 aa, synthetic construct
  REGION 1..221: note = Description of Artificial Sequence: Synthetic polypeptide
  REGION 1..221: note = XENP019308 [CTLA-4]_H0.94_L0_Fab Heavy Chain
QVQLVESGGGVVQPGRSLRLSCAASGFTFSSYTMHWVRQAPGKGLEWVTFISYDGNNKYYADSVKGRFTISRDNSKNTLYLEMNSLRAEDTAIYYCARTGWLGPFDYWGQGTLVTVSSASTKGPSVFPLAPSSKSTSGGTAALGCLVKDYFPEPVTVSWNSGALTSGVHTFPAVLQSSGLYSLSSVVTVPSSSLGTQTYICNVNHKPSNTKVDKKVEPKSC

SEQ ID NO: 8536 - protein, 118 aa, synthetic construct; identical to SEQ ID NO: 5706
  REGION 1..118: note = Description of Artificial Sequence: Synthetic polypeptide
  REGION 1..118: note = VH of XENP019308

SEQ ID NO: 8537 - protein, 5 aa, synthetic construct
  REGION 1..5: note = Description of Artificial Sequence: Synthetic peptide
  REGION 1..5: note = XENP019308 vhCDR1
SYTMH

SEQ ID NO: 8538 - protein, 17 aa, synthetic construct
  REGION 1..17: note = Description of Artificial Sequence: Synthetic peptide
  REGION 1..17: note = XENP019308 vhCDR2
FISYDGNNKYYADSVKG

SEQ ID NO: 8539 - protein, 9 aa, synthetic construct
  REGION 1..9: note = Description of Artificial Sequence: Synthetic peptide
  REGION 1..9: note = XENP019308 vhCDR3
TGWLGPFDY

SEQ ID NO: 8540 - protein, 215 aa, synthetic construct; identical to SEQ ID NO: 7600
  REGION 1..215: note = Description of Artificial Sequence: Synthetic polypeptide
  REGION 1..215: note = XENP019308 [CTLA-4]_H0.94_L0_Fab Light Chain

SEQ ID NO: 8541 - protein, 108 aa, synthetic construct; identical to SEQ ID NO: 3741
  REGION 1..108: note = Description of Artificial Sequence: Synthetic polypeptide
  REGION 1..108: note = VL of XENP019308

SEQ ID NO: 8542 - protein, 12 aa, synthetic construct
  REGION 1..12: note = Description of Artificial Sequence: Synthetic peptide
  REGION 1..12: note = XENP019308 vlCDR1
RASQSVGSSYLA

SEQ ID NO: 8543 - protein, 7 aa, synthetic construct
  REGION 1..7: note = Description of Artificial Sequence: Synthetic peptide
  REGION 1..7: note = XENP019308 vlCDR2
GAFSRAT

SEQ ID NO: 8544 - protein, 9 aa, synthetic construct
  REGION 1..9: note = Description of Artificial Sequence: Synthetic peptide
  REGION 1..9: note = XENP019308 vlCDR3
QQYGSSPWT

SEQ ID NO: 8545 - protein, 221 aa, synthetic construct
  REGION 1..221: note = Description of Artificial Sequence: Synthetic polypeptide
  REGION 1..221: note = XENP019309 [CTLA-4]_H0.95_L0_Fab Heavy Chain
QVQLVESGGGVVQPGRSLRLSCAASGFTFSSYTMHWVRQAPGKGLEWVTFISYDGNNKYYADSVKGRFTISRDNSKNTLYLQMDSLRAEDTAIYYCARTGWLGPFDYWGQGTLVTVSSASTKGPSVFPLAPSSKSTSGGTAALGCLVKDYFPEPVTVSWNSGALTSGVHTFPAVLQSSGLYSLSSVVTVPSSSLGTQTYICNVNHKPSNTKVDKKVEPKSC

SEQ ID NO: 8546 - protein, 118 aa, synthetic construct; identical to SEQ ID NO: 5715
  REGION 1..118: note = Description of Artificial Sequence: Synthetic polypeptide
  REGION 1..118: note = VH of XENP019309

SEQ ID NO: 8547 - protein, 5 aa, synthetic construct
  REGION 1..5: note = Description of Artificial Sequence: Synthetic peptide
  REGION 1..5: note = XENP019309 vhCDR1
SYTMH

SEQ ID NO: 8548 - protein, 17 aa, synthetic construct
  REGION 1..17: note = Description of Artificial Sequence: Synthetic peptide
  REGION 1..17: note = XENP019309 vhCDR2
FISYDGNNKYYADSVKG

SEQ ID NO: 8549 - protein, 9 aa, synthetic construct
  REGION 1..9: note = Description of Artificial Sequence: Synthetic peptide
  REGION 1..9: note = XENP019309 vhCDR3
TGWLGPFDY

SEQ ID NO: 8550 - protein, 215 aa, synthetic construct; identical to SEQ ID NO: 7600
  REGION 1..215: note = Description of Artificial Sequence: Synthetic polypeptide
  REGION 1..215: note = XENP019309 [CTLA-4]_H0.95_L0_Fab Light Chain

SEQ ID NO: 8551 - protein, 108 aa, synthetic construct; identical to SEQ ID NO: 3741
  REGION 1..108: note = Description of Artificial Sequence: Synthetic polypeptide
  REGION 1..108: note = VL of XENP019309

SEQ ID NO: 8552 - protein, 12 aa, synthetic construct
  REGION 1..12: note = Description of Artificial Sequence: Synthetic peptide
  REGION 1..12: note = XENP019309 vlCDR1
RASQSVGSSYLA

SEQ ID NO: 8553 - protein, 7 aa, synthetic construct
  REGION 1..7: note = Description of Artificial Sequence: Synthetic peptide
  REGION 1..7: note = XENP019309 vlCDR2
GAFSRAT

SEQ ID NO: 8554 - protein, 9 aa, synthetic construct
  REGION 1..9: note = Description of Artificial Sequence: Synthetic peptide
  REGION 1..9: note = XENP019309 vlCDR3
QQYGSSPWT

SEQ ID NO: 8555 - protein, 221 aa, synthetic construct
  REGION 1..221: note = Description of Artificial Sequence: Synthetic polypeptide
  REGION 1..221: note = XENP019310 [CTLA-4]_H0.96_L0_Fab Heavy Chain
QVQLVESGGGVVQPGRSLRLSCAASGFTFSSYTMHWVRQAPGKGLEWVTFISYDGNNKYYADSVKGRFTISRDNSKNTLYLQMNDLRAEDTAIYYCARTGWLGPFDYWGQGTLVTVSSASTKGPSVFPLAPSSKSTSGGTAALGCLVKDYFPEPVTVSWNSGALTSGVHTFPAVLQSSGLYSLSSVVTVPSSSLGTQTYICNVNHKPSNTKVDKKVEPKSC

SEQ ID NO: 8556 - protein, 118 aa, synthetic construct; identical to SEQ ID NO: 5724
  REGION 1..118: note = Description of Artificial Sequence: Synthetic polypeptide
  REGION 1..118: note = VH of XENP019310

SEQ ID NO: 8557 - protein, 5 aa, synthetic construct
  REGION 1..5: note = Description of Artificial Sequence: Synthetic peptide
  REGION 1..5: note = XENP019310 vhCDR1
SYTMH

SEQ ID NO: 8558 - protein, 17 aa, synthetic construct
  REGION 1..17: note = Description of Artificial Sequence: Synthetic peptide
  REGION 1..17: note = XENP019310 vhCDR2
FISYDGNNKYYADSVKG

SEQ ID NO: 8559 - protein, 9 aa, synthetic construct
  REGION 1..9: note = Description of Artificial Sequence: Synthetic peptide
  REGION 1..9: note = XENP019310 vhCDR3
TGWLGPFDY

SEQ ID NO: 8560 - protein, 215 aa, synthetic construct; identical to SEQ ID NO: 7600
  REGION 1..215: note = Description of Artificial Sequence: Synthetic polypeptide
  REGION 1..215: note = XENP019310 [CTLA-4]_H0.96_L0_Fab Light Chain

SEQ ID NO: 8561 - protein, 108 aa, synthetic construct; identical to SEQ ID NO: 3741
  REGION 1..108: note = Description of Artificial Sequence: Synthetic polypeptide
  REGION 1..108: note = VL of XENP019310

SEQ ID NO: 8562 - protein, 12 aa, synthetic construct
  REGION 1..12: note = Description of Artificial Sequence: Synthetic peptide
  REGION 1..12: note = XENP019310 vlCDR1
RASQSVGSSYLA

SEQ ID NO: 8563 - protein, 7 aa, synthetic construct
  REGION 1..7: note = Description of Artificial Sequence: Synthetic peptide
  REGION 1..7: note = XENP019310 vlCDR2
GAFSRAT

SEQ ID NO: 8564 - protein, 9 aa, synthetic construct
  REGION 1..9: note = Description of Artificial Sequence: Synthetic peptide
  REGION 1..9: note = XENP019310 vlCDR3
QQYGSSPWT

SEQ ID NO: 8565 - protein, 221 aa, synthetic construct
  REGION 1..221: note = Description of Artificial Sequence: Synthetic polypeptide
  REGION 1..221: note = XENP019311 [CTLA-4]_H0.97_L0_Fab Heavy Chain
QVQLVESGGGVVQPGRSLRLSCAASGFTFSSYTMHWVRQAPGKGLEWVTFISYDGNNKYYADSVKGRFTISRDNSKNTLYLQMNSLRTEDTAIYYCARTGWLGPFDYWGQGTLVTVSSASTKGPSVFPLAPSSKSTSGGTAALGCLVKDYFPEPVTVSWNSGALTSGVHTFPAVLQSSGLYSLSSVVTVPSSSLGTQTYICNVNHKPSNTKVDKKVEPKSC

SEQ ID NO: 8566 - protein, 118 aa, synthetic construct; identical to SEQ ID NO: 5733
  REGION 1..118: note = Description of Artificial Sequence: Synthetic polypeptide
  REGION 1..118: note = VH of XENP019311

SEQ ID NO: 8567 - protein, 5 aa, synthetic construct
  REGION 1..5: note = Description of Artificial Sequence: Synthetic peptide
  REGION 1..5: note = XENP019311 vhCDR1
SYTMH

SEQ ID NO: 8568 - protein, 17 aa, synthetic construct
  REGION 1..17: note = Description of Artificial Sequence: Synthetic peptide
  REGION 1..17: note = XENP019311 vhCDR2
FISYDGNNKYYADSVKG

SEQ ID NO: 8569 - protein, 9 aa, synthetic construct
  REGION 1..9: note = Description of Artificial Sequence: Synthetic peptide
  REGION 1..9: note = XENP019311 vhCDR3
TGWLGPFDY

SEQ ID NO: 8570 - protein, 215 aa, synthetic construct; identical to SEQ ID NO: 7600
  REGION 1..215: note = Description of Artificial Sequence: Synthetic polypeptide
  REGION 1..215: note = XENP019311 [CTLA-4]_H0.97_L0_Fab Light Chain

SEQ ID NO: 8571 - protein, 108 aa, synthetic construct; identical to SEQ ID NO: 3741
  REGION 1..108: note = Description of Artificial Sequence: Synthetic polypeptide
  REGION 1..108: note = VL of XENP019311

SEQ ID NO: 8572 - protein, 12 aa, synthetic construct
  REGION 1..12: note = Description of Artificial Sequence: Synthetic peptide
  REGION 1..12: note = XENP019311 vlCDR1
RASQSVGSSYLA

SEQ ID NO: 8573 - protein, 7 aa, synthetic construct
  REGION 1..7: note = Description of Artificial Sequence: Synthetic peptide
  REGION 1..7: note = XENP019311 vlCDR2
GAFSRAT

SEQ ID NO: 8574 - protein, 9 aa, synthetic construct
  REGION 1..9: note = Description of Artificial Sequence: Synthetic peptide
  REGION 1..9: note = XENP019311 vlCDR3
QQYGSSPWT

SEQ ID NO: 8575 - protein, 221 aa, synthetic construct
  REGION 1..221: note = Description of Artificial Sequence: Synthetic polypeptide
  REGION 1..221: note = XENP019312 [CTLA-4]_H0.98_L0_Fab Heavy Chain
QVQLVESGGGVVQPGRSLRLSCAASGFTFSSYTMHWVRQAPGKGLEWVTFISYDGNNKYYADSVKGRFTISRDNSKNTLYLQMNSLRAEDTALYYCARTGWLGPFDYWGQGTLVTVSSASTKGPSVFPLAPSSKSTSGGTAALGCLVKDYFPEPVTVSWNSGALTSGVHTFPAVLQSSGLYSLSSVVTVPSSSLGTQTYICNVNHKPSNTKVDKKVEPKSC

SEQ ID NO: 8576 - protein, 118 aa, synthetic construct; identical to SEQ ID NO: 5742
  REGION 1..118: note = Description of Artificial Sequence: Synthetic polypeptide
  REGION 1..118: note = VH of XENP019312

SEQ ID NO: 8577 - protein, 5 aa, synthetic construct
  REGION 1..5: note = Description of Artificial Sequence: Synthetic peptide
  REGION 1..5: note = XENP019312 vhCDR1
SYTMH

SEQ ID NO: 8578 - protein, 17 aa, synthetic construct
  REGION 1..17: note = Description of Artificial Sequence: Synthetic peptide
  REGION 1..17: note = XENP019312 vhCDR2
FISYDGNNKYYADSVKG

SEQ ID NO: 8579 - protein, 9 aa, synthetic construct
  REGION 1..9: note = Description of Artificial Sequence: Synthetic peptide
  REGION 1..9: note = XENP019312 vhCDR3
TGWLGPFDY

SEQ ID NO: 8580 - protein, 215 aa, synthetic construct; identical to SEQ ID NO: 7600
  REGION 1..215: note = Description of Artificial Sequence: Synthetic polypeptide
  REGION 1..215: note = XENP019312 [CTLA-4]_H0.98_L0_Fab Light Chain

SEQ ID NO: 8581 - protein, 108 aa, synthetic construct; identical to SEQ ID NO: 3741
  REGION 1..108: note = Description of Artificial Sequence: Synthetic polypeptide
  REGION 1..108: note = VL of XENP019312

SEQ ID NO: 8582 - protein, 12 aa, synthetic construct
  REGION 1..12: note = Description of Artificial Sequence: Synthetic peptide
  REGION 1..12: note = XENP019312 vlCDR1
RASQSVGSSYLA

SEQ ID NO: 8583 - protein, 7 aa, synthetic construct
  REGION 1..7: note = Description of Artificial Sequence: Synthetic peptide
  REGION 1..7: note = XENP019312 vlCDR2
GAFSRAT

SEQ ID NO: 8584 - protein, 9 aa, synthetic construct
  REGION 1..9: note = Description of Artificial Sequence: Synthetic peptide
  REGION 1..9: note = XENP019312 vlCDR3
QQYGSSPWT

SEQ ID NO: 8585 - protein, 221 aa, synthetic construct
  REGION 1..221: note = Description of Artificial Sequence: Synthetic polypeptide
  REGION 1..221: note = XENP019313 [CTLA-4]_H0.99_L0_Fab Heavy Chain
QVQLVESGGGVVQPGRSLRLSCAASGFTFSSYTMHWVRQAPGKGLEWVTFISYDGNNKYYADSVKGRFTISRDNSKNTLYLQMNSLRAEDTAVYYCARTGWLGPFDYWGQGTLVTVSSASTKGPSVFPLAPSSKSTSGGTAALGCLVKDYFPEPVTVSWNSGALTSGVHTFPAVLQSSGLYSLSSVVTVPSSSLGTQTYICNVNHKPSNTKVDKKVEPKSC

SEQ ID NO: 8586 - protein, 118 aa, synthetic construct; identical to SEQ ID NO: 5751
  REGION 1..118: note = Description of Artificial Sequence: Synthetic polypeptide
  REGION 1..118: note = VH of XENP019313

SEQ ID NO: 8587 - protein, 5 aa, synthetic construct
  REGION 1..5: note = Description of Artificial Sequence: Synthetic peptide
  REGION 1..5: note = XENP019313 vhCDR1
SYTMH

SEQ ID NO: 8588 - protein, 17 aa, synthetic construct
  REGION 1..17: note = Description of Artificial Sequence: Synthetic peptide
  REGION 1..17: note = XENP019313 vhCDR2
FISYDGNNKYYADSVKG

SEQ ID NO: 8589 - protein, 9 aa, synthetic construct
  REGION 1..9: note = Description of Artificial Sequence: Synthetic peptide
  REGION 1..9: note = XENP019313 vhCDR3
TGWLGPFDY

SEQ ID NO: 8590 - protein, 215 aa, synthetic construct; identical to SEQ ID NO: 7600
  REGION 1..215: note = Description of Artificial Sequence: Synthetic polypeptide
  REGION 1..215: note = XENP019313 [CTLA-4]_H0.99_L0_Fab Light Chain

SEQ ID NO: 8591 - protein, 108 aa, synthetic construct; identical to SEQ ID NO: 3741
  REGION 1..108: note = Description of Artificial Sequence: Synthetic polypeptide
  REGION 1..108: note = VL of XENP019313

SEQ ID NO: 8592 - protein, 12 aa, synthetic construct
  REGION 1..12: note = Description of Artificial Sequence: Synthetic peptide
  REGION 1..12: note = XENP019313 vlCDR1
RASQSVGSSYLA

SEQ ID NO: 8593 - protein, 7 aa, synthetic construct
  REGION 1..7: note = Description of Artificial Sequence: Synthetic peptide
  REGION 1..7: note = XENP019313 vlCDR2
GAFSRAT

SEQ ID NO: 8594 - protein, 9 aa, synthetic construct
  REGION 1..9: note = Description of Artificial Sequence: Synthetic peptide
  REGION 1..9: note = XENP019313 vlCDR3
QQYGSSPWT

SEQ ID NO: 8595 - protein, 221 aa, synthetic construct
  REGION 1..221: note = Description of Artificial Sequence: Synthetic polypeptide
  REGION 1..221: note = XENP019314 [CTLA-4]_H0.100_L0_Fab Heavy Chain
QVQLVESGGGVVQPGRSLRLSCAASGFTFSSYTMHWVRQAPGKGLEWVTFISYDGNNKYYADSVKGRFTISRDNSKNTLYLQMNSLRAEDTAIYYCTRTGWLGPFDYWGQGTLVTVSSASTKGPSVFPLAPSSKSTSGGTAALGCLVKDYFPEPVTVSWNSGALTSGVHTFPAVLQSSGLYSLSSVVTVPSSSLGTQTYICNVNHKPSNTKVDKKVEPKSC

SEQ ID NO: 8596 - protein, 118 aa, synthetic construct; identical to SEQ ID NO: 5760
  REGION 1..118: note = Description of Artificial Sequence: Synthetic polypeptide
  REGION 1..118: note = VH of XENP019314

SEQ ID NO: 8597 - protein, 5 aa, synthetic construct
  REGION 1..5: note = Description of Artificial Sequence: Synthetic peptide
  REGION 1..5: note = XENP019314 vhCDR1
SYTMH

SEQ ID NO: 8598 - protein, 17 aa, synthetic construct
  REGION 1..17: note = Description of Artificial Sequence: Synthetic peptide
  REGION 1..17: note = XENP019314 vhCDR2
FISYDGNNKYYADSVKG

SEQ ID NO: 8599 - protein, 9 aa, synthetic construct
  REGION 1..9: note = Description of Artificial Sequence: Synthetic peptide
  REGION 1..9: note = XENP019314 vhCDR3
TGWLGPFDY

SEQ ID NO: 8600 - protein, 215 aa, synthetic construct; identical to SEQ ID NO: 7600
  REGION 1..215: note = Description of Artificial Sequence: Synthetic polypeptide
  REGION 1..215: note = XENP019314 [CTLA-4]_H0.100_L0_Fab Light Chain

SEQ ID NO: 8601 - protein, 108 aa, synthetic construct; identical to SEQ ID NO: 3741
  REGION 1..108: note = Description of Artificial Sequence: Synthetic polypeptide
  REGION 1..108: note = VL of XENP019314

SEQ ID NO: 8602 - protein, 12 aa, synthetic construct
  REGION 1..12: note = Description of Artificial Sequence: Synthetic peptide
  REGION 1..12: note = XENP019314 vlCDR1
RASQSVGSSYLA

SEQ ID NO: 8603 - protein, 7 aa, synthetic construct
  REGION 1..7: note = Description of Artificial Sequence: Synthetic peptide
  REGION 1..7: note = XENP019314 vlCDR2
GAFSRAT

SEQ ID NO: 8604 - protein, 9 aa, synthetic construct
  REGION 1..9: note = Description of Artificial Sequence: Synthetic peptide
  REGION 1..9: note = XENP019314 vlCDR3
QQYGSSPWT

SEQ ID NO: 8605 - protein, 221 aa, synthetic construct
  REGION 1..221: note = Description of Artificial Sequence: Synthetic polypeptide
  REGION 1..221: note = XENP019315 [CTLA-4]_H0.101_L0_Fab Heavy Chain
QVQLVESGGGVVQPGRSLRLSCAASGFTFSSYTMHWVRQAPGKGLEWVTFISYDGNNKYYADSVKGRFTISRDNSKNTLYLQMNSLRAEDTAIYYCAKTGWLGPFDYWGQGTLVTVSSASTKGPSVFPLAPSSKSTSGGTAALGCLVKDYFPEPVTVSWNSGALTSGVHTFPAVLQSSGLYSLSSVVTVPSSSLGTQTYICNVNHKPSNTKVDKKVEPKSC

SEQ ID NO: 8606 - protein, 118 aa, synthetic construct; identical to SEQ ID NO: 5769
  REGION 1..118: note = Description of Artificial Sequence: Synthetic polypeptide
  REGION 1..118: note = VH of XENP019315

SEQ ID NO: 8607 - protein, 5 aa, synthetic construct
  REGION 1..5: note = Description of Artificial Sequence: Synthetic peptide
  REGION 1..5: note = XENP019315 vhCDR1
SYTMH

SEQ ID NO: 8608 - protein, 17 aa, synthetic construct
  REGION 1..17: note = Description of Artificial Sequence: Synthetic peptide
  REGION 1..17: note = XENP019315 vhCDR2
FISYDGNNKYYADSVKG

SEQ ID NO: 8609 - protein, 9 aa, synthetic construct
  REGION 1..9: note = Description of Artificial Sequence: Synthetic peptide
  REGION 1..9: note = XENP019315 vhCDR3
TGWLGPFDY

SEQ ID NO: 8610 - protein, 215 aa, synthetic construct; identical to SEQ ID NO: 7600
  REGION 1..215: note = Description of Artificial Sequence: Synthetic polypeptide
  REGION 1..215: note = XENP019315 [CTLA-4]_H0.101_L0_Fab Light Chain

SEQ ID NO: 8611 - protein, 108 aa, synthetic construct; identical to SEQ ID NO: 3741
  REGION 1..108: note = Description of Artificial Sequence: Synthetic polypeptide
  REGION 1..108: note = VL of XENP019315

SEQ ID NO: 8612 - protein, 12 aa, synthetic construct
  REGION 1..12: note = Description of Artificial Sequence: Synthetic peptide
  REGION 1..12: note = XENP019315 vlCDR1
RASQSVGSSYLA

SEQ ID NO: 8613 - protein, 7 aa, synthetic construct
  REGION 1..7: note = Description of Artificial Sequence: Synthetic peptide
  REGION 1..7: note = XENP019315 vlCDR2
GAFSRAT

SEQ ID NO: 8614 - protein, 9 aa, synthetic construct
  REGION 1..9: note = Description of Artificial Sequence: Synthetic peptide
  REGION 1..9: note = XENP019315 vlCDR3
QQYGSSPWT

SEQ ID NO: 8615 - protein, 221 aa, synthetic construct
  REGION 1..221: note = Description of Artificial Sequence: Synthetic polypeptide
  REGION 1..221: note = XENP019316 [CTLA-4]_H0.102_L0_Fab Heavy Chain
QVQLVESGGGVVQPGRSLRLSCAASGFTFSSYTMHWVRQAPGKGLEWVTFISYDGNNKYYADSVKGRFTISRDNSKNTLYLQMNSLRAEDTAIYYCARAGWLGPFDYWGQGTLVTVSSASTKGPSVFPLAPSSKSTSGGTAALGCLVKDYFPEPVTVSWNSGALTSGVHTFPAVLQSSGLYSLSSVVTVPSSSLGTQTYICNVNHKPSNTKVDKKVEPKSC

SEQ ID NO: 8616 - protein, 118 aa, synthetic construct; identical to SEQ ID NO: 5778
  REGION 1..118: note = Description of Artificial Sequence: Synthetic polypeptide
  REGION 1..118: note = VH of XENP019316

SEQ ID NO: 8617 - protein, 5 aa, synthetic construct
  REGION 1..5: note = Description of Artificial Sequence: Synthetic peptide
  REGION 1..5: note = XENP019316 vhCDR1
SYTMH

SEQ ID NO: 8618 - protein, 17 aa, synthetic construct
  REGION 1..17: note = Description of Artificial Sequence: Synthetic peptide
  REGION 1..17: note = XENP019316 vhCDR2
FISYDGNNKYYADSVKG

SEQ ID NO: 8619 - protein, 9 aa, synthetic construct
  REGION 1..9: note = Description of Artificial Sequence: Synthetic peptide
  REGION 1..9: note = XENP019316 vhCDR3
AGWLGPFDY

SEQ ID NO: 8620 - protein, 215 aa, synthetic construct; identical to SEQ ID NO: 7600
  REGION 1..215: note = Description of Artificial Sequence: Synthetic polypeptide
  REGION 1..215: note = XENP019316 [CTLA-4]_H0.102_L0_Fab Light Chain

SEQ ID NO: 8621 - protein, 108 aa, synthetic construct; identical to SEQ ID NO: 3741
  REGION 1..108: note = Description of Artificial Sequence: Synthetic polypeptide
  REGION 1..108: note = VL of XENP019316

SEQ ID NO: 8622 - protein, 12 aa, synthetic construct
  REGION 1..12: note = Description of Artificial Sequence: Synthetic peptide
  REGION 1..12: note = XENP019316 vlCDR1
RASQSVGSSYLA

SEQ ID NO: 8623 - protein, 7 aa, synthetic construct
  REGION 1..7: note = Description of Artificial Sequence: Synthetic peptide
  REGION 1..7: note = XENP019316 vlCDR2
GAFSRAT

SEQ ID NO: 8624 - protein, 9 aa, synthetic construct
  REGION 1..9: note = Description of Artificial Sequence: Synthetic peptide
  REGION 1..9: note = XENP019316 vlCDR3
QQYGSSPWT

SEQ ID NO: 8625 - protein, 221 aa, synthetic construct
  REGION 1..221: note = Description of Artificial Sequence: Synthetic polypeptide
  REGION 1..221: note = XENP019317 [CTLA-4]_H0.103_L0_Fab Heavy Chain
QVQLVESGGGVVQPGRSLRLSCAASGFTFSSYTMHWVRQAPGKGLEWVTFISYDGNNKYYADSVKGRFTISRDNSKNTLYLQMNSLRAEDTAIYYCARGGWLGPFDYWGQGTLVTVSSASTKGPSVFPLAPSSKSTSGGTAALGCLVKDYFPEPVTVSWNSGALTSGVHTFPAVLQSSGLYSLSSVVTVPSSSLGTQTYICNVNHKPSNTKVDKKVEPKSC

SEQ ID NO: 8626 - protein, 118 aa, synthetic construct; identical to SEQ ID NO: 5787
  REGION 1..118: note = Description of Artificial Sequence: Synthetic polypeptide
  REGION 1..118: note = VH of XENP019317

SEQ ID NO: 8627 - protein, 5 aa, synthetic construct
  REGION 1..5: note = Description of Artificial Sequence: Synthetic peptide
  REGION 1..5: note = XENP019317 vhCDR1
SYTMH

SEQ ID NO: 8628 - protein, 17 aa, synthetic construct
  REGION 1..17: note = Description of Artificial Sequence: Synthetic peptide
  REGION 1..17: note = XENP019317 vhCDR2
FISYDGNNKYYADSVKG

SEQ ID NO: 8629 - protein, 9 aa, synthetic construct
  REGION 1..9: note = Description of Artificial Sequence: Synthetic peptide
  REGION 1..9: note = XENP019317 vhCDR3
GGWLGPFDY

SEQ ID NO: 8630 - protein, 215 aa, synthetic construct; identical to SEQ ID NO: 7600
  REGION 1..215: note = Description of Artificial Sequence: Synthetic polypeptide
  REGION 1..215: note = XENP019317 [CTLA-4]_H0.103_L0_Fab Light Chain

SEQ ID NO: 8631 - protein, 108 aa, synthetic construct; identical to SEQ ID NO: 3741
  REGION 1..108: note = Description of Artificial Sequence: Synthetic polypeptide
  REGION 1..108: note = VL of XENP019317

SEQ ID NO: 8632 - protein, 12 aa, synthetic construct
  REGION 1..12: note = Description of Artificial Sequence: Synthetic peptide
  REGION 1..12: note = XENP019317 vlCDR1
RASQSVGSSYLA

SEQ ID NO: 8633 - protein, 7 aa, synthetic construct
  REGION 1..7: note = Description of Artificial Sequence: Synthetic peptide
  REGION 1..7: note = XENP019317 vlCDR2
GAFSRAT

SEQ ID NO: 8634 - protein, 9 aa, synthetic construct
  REGION 1..9: note = Description of Artificial Sequence: Synthetic peptide
  REGION 1..9: note = XENP019317 vlCDR3
QQYGSSPWT

SEQ ID NO: 8635 - protein, 221 aa, synthetic construct
  REGION 1..221: note = Description of Artificial Sequence: Synthetic polypeptide
  REGION 1..221: note = XENP019318 [CTLA-4]_H0.104_L0_Fab Heavy Chain
QVQLVESGGGVVQPGRSLRLSCAASGFTFSSYTMHWVRQAPGKGLEWVTFISYDGNNKYYADSVKGRFTISRDNSKNTLYLQMNSLRAEDTAIYYCARDGWLGPFDYWGQGTLVTVSSASTKGPSVFPLAPSSKSTSGGTAALGCLVKDYFPEPVTVSWNSGALTSGVHTFPAVLQSSGLYSLSSVVTVPSSSLGTQTYICNVNHKPSNTKVDKKVEPKSC

SEQ ID NO: 8636 - protein, 118 aa, synthetic construct; identical to SEQ ID NO: 5796
  REGION 1..118: note = Description of Artificial Sequence: Synthetic polypeptide
  REGION 1..118: note = VH of XENP019318

SEQ ID NO: 8637 - protein, 5 aa, synthetic construct
  REGION 1..5: note = Description of Artificial Sequence: Synthetic peptide
  REGION 1..5: note = XENP019318 vhCDR1
SYTMH

SEQ ID NO: 8638 - protein, 17 aa, synthetic construct
  REGION 1..17: note = Description of Artificial Sequence: Synthetic peptide
  REGION 1..17: note = XENP019318 vhCDR2
FISYDGNNKYYADSVKG

SEQ ID NO: 8639 - protein, 9 aa, synthetic construct
  REGION 1..9: note = Description of Artificial Sequence: Synthetic peptide
  REGION 1..9: note = XENP019318 vhCDR3
DGWLGPFDY

SEQ ID NO: 8640 - protein, 215 aa, synthetic construct; identical to SEQ ID NO: 7600
  REGION 1..215: note = Description of Artificial Sequence: Synthetic polypeptide
  REGION 1..215: note = XENP019318 [CTLA-4]_H0.104_L0_Fab Light Chain

SEQ ID NO: 8641 - protein, 108 aa, synthetic construct; identical to SEQ ID NO: 3741
  REGION 1..108: note = Description of Artificial Sequence: Synthetic polypeptide
  REGION 1..108: note = VL of XENP019318

SEQ ID NO: 8642 - protein, 12 aa, synthetic construct
  REGION 1..12: note = Description of Artificial Sequence: Synthetic peptide
  REGION 1..12: note = XENP019318 vlCDR1
RASQSVGSSYLA

SEQ ID NO: 8643 - protein, 7 aa, synthetic construct
  REGION 1..7: note = Description of Artificial Sequence: Synthetic peptide
  REGION 1..7: note = XENP019318 vlCDR2
GAFSRAT

SEQ ID NO: 8644 - protein, 9 aa, synthetic construct
  REGION 1..9: note = Description of Artificial Sequence: Synthetic peptide
  REGION 1..9: note = XENP019318 vlCDR3
QQYGSSPWT

SEQ ID NO: 8645 - protein, 221 aa, synthetic construct
  REGION 1..221: note = Description of Artificial Sequence: Synthetic polypeptide
  REGION 1..221: note = XENP019319 [CTLA-4]_H0.105_L0_Fab Heavy Chain
QVQLVESGGGVVQPGRSLRLSCAASGFTFSSYTMHWVRQAPGKGLEWVTFISYDGNNKYYADSVKGRFTISRDNSKNTLYLQMNSLRAEDTAIYYCARSGWLGPFDYWGQGTLVTVSSASTKGPSVFPLAPSSKSTSGGTAALGCLVKDYFPEPVTVSWNSGALTSGVHTFPAVLQSSGLYSLSSVVTVPSSSLGTQTYICNVNHKPSNTKVDKKVEPKSC

SEQ ID NO: 8646 - protein, 118 aa, synthetic construct; identical to SEQ ID NO: 5805
  REGION 1..118: note = Description of Artificial Sequence: Synthetic polypeptide
  REGION 1..118: note = VH of XENP019319

SEQ ID NO: 8647 - protein, 5 aa, synthetic construct
  REGION 1..5: note = Description of Artificial Sequence: Synthetic peptide
  REGION 1..5: note = XENP019319 vhCDR1
SYTMH

SEQ ID NO: 8648 - protein, 17 aa, synthetic construct
  REGION 1..17: note = Description of Artificial Sequence: Synthetic peptide
  REGION 1..17: note = XENP019319 vhCDR2
FISYDGNNKYYADSVKG

SEQ ID NO: 8649 - protein, 9 aa, synthetic construct
  REGION 1..9: note = Description of Artificial Sequence: Synthetic peptide
  REGION 1..9: note = XENP019319 vhCDR3
SGWLGPFDY

SEQ ID NO: 8650 - protein, 215 aa, synthetic construct; identical to SEQ ID NO: 7600
  REGION 1..215: note = Description of Artificial Sequence: Synthetic polypeptide
  REGION 1..215: note = XENP019319 [CTLA-4]_H0.105_L0_Fab Light Chain

SEQ ID NO: 8651 - protein, 108 aa, synthetic construct; identical to SEQ ID NO: 3741
  REGION 1..108: note = Description of Artificial Sequence: Synthetic polypeptide
  REGION 1..108: note = VL of XENP019319

SEQ ID NO: 8652 - protein, 12 aa, synthetic construct
  REGION 1..12: note = Description of Artificial Sequence: Synthetic peptide
  REGION 1..12: note = XENP019319 vlCDR1
RASQSVGSSYLA

SEQ ID NO: 8653 - protein, 7 aa, synthetic construct
  REGION 1..7: note = Description of Artificial Sequence: Synthetic peptide
  REGION 1..7: note = XENP019319 vlCDR2
GAFSRAT

SEQ ID NO: 8654 - protein, 9 aa, synthetic construct
  REGION 1..9: note = Description of Artificial Sequence: Synthetic peptide
  REGION 1..9: note = XENP019319 vlCDR3
QQYGSSPWT

SEQ ID NO: 8655 - protein, 221 aa, synthetic construct
  REGION 1..221: note = Description of Artificial Sequence: Synthetic polypeptide
  REGION 1..221: note = XENP019320 [CTLA-4]_H0.106_L0_Fab Heavy Chain
QVQLVESGGGVVQPGRSLRLSCAASGFTFSSYTMHWVRQAPGKGLEWVTFISYDGNNKYYADSVKGRFTISRDNSKNTLYLQMNSLRAEDTAIYYCARVGWLGPFDYWGQGTLVTVSSASTKGPSVFPLAPSSKSTSGGTAALGCLVKDYFPEPVTVSWNSGALTSGVHTFPAVLQSSGLYSLSSVVTVPSSSLGTQTYICNVNHKPSNTKVDKKVEPKSC

SEQ ID NO: 8656 - protein, 118 aa, synthetic construct; identical to SEQ ID NO: 5814
  REGION 1..118: note = Description of Artificial Sequence: Synthetic polypeptide
  REGION 1..118: note = VH of XENP019320

SEQ ID NO: 8657 - protein, 5 aa, synthetic construct
  REGION 1..5: note = Description of Artificial Sequence: Synthetic peptide
  REGION 1..5: note = XENP019320 vhCDR1
SYTMH

SEQ ID NO: 8658 - protein, 17 aa, synthetic construct
  REGION 1..17: note = Description of Artificial Sequence: Synthetic peptide
  REGION 1..17: note = XENP019320 vhCDR2
FISYDGNNKYYADSVKG

SEQ ID NO: 8659 - protein, 9 aa, synthetic construct
  REGION 1..9: note = Description of Artificial Sequence: Synthetic peptide
  REGION 1..9: note = XENP019320 vhCDR3
VGWLGPFDY

SEQ ID NO: 8660 - protein, 215 aa, synthetic construct; identical to SEQ ID NO: 7600
  REGION 1..215: note = Description of Artificial Sequence: Synthetic polypeptide
  REGION 1..215: note = XENP019320 [CTLA-4]_H0.106_L0_Fab Light Chain

SEQ ID NO: 8661 - protein, 108 aa, synthetic construct; identical to SEQ ID NO: 3741
  REGION 1..108: note = Description of Artificial Sequence: Synthetic polypeptide
  REGION 1..108: note = VL of XENP019320

SEQ ID NO: 8662 - protein, 12 aa, synthetic construct
  REGION 1..12: note = Description of Artificial Sequence: Synthetic peptide
  REGION 1..12: note = XENP019320 vlCDR1
RASQSVGSSYLA

SEQ ID NO: 8663 - protein, 7 aa, synthetic construct
  REGION 1..7: note = Description of Artificial Sequence: Synthetic peptide
  REGION 1..7: note = XENP019320 vlCDR2
GAFSRAT

SEQ ID NO: 8664 - protein, 9 aa, synthetic construct
  REGION 1..9: note = Description of Artificial Sequence: Synthetic peptide
  REGION 1..9: note = XENP019320 vlCDR3
QQYGSSPWT

SEQ ID NO: 8665 - protein, 221 aa, synthetic construct
  REGION 1..221: note = Description of Artificial Sequence: Synthetic polypeptide
  REGION 1..221: note = XENP019321 [CTLA-4]_H0.107_L0_Fab Heavy Chain
QVQLVESGGGVVQPGRSLRLSCAASGFTFSSYTMHWVRQAPGKGLEWVTFISYDGNNKYYADSVKGRFTISRDNSKNTLYLQMNSLRAEDTAIYYCARYGWLGPFDYWGQGTLVTVSSASTKGPSVFPLAPSSKSTSGGTAALGCLVKDYFPEPVTVSWNSGALTSGVHTFPAVLQSSGLYSLSSVVTVPSSSLGTQTYICNVNHKPSNTKVDKKVEPKSC

SEQ ID NO: 8666 - protein, 118 aa, synthetic construct; identical to SEQ ID NO: 5823
  REGION 1..118: note = Description of Artificial Sequence: Synthetic polypeptide
  REGION 1..118: note = VH of XENP019321

SEQ ID NO: 8667 - protein, 5 aa, synthetic construct
  REGION 1..5: note = Description of Artificial Sequence: Synthetic peptide
  REGION 1..5: note = XENP019321 vhCDR1
SYTMH

SEQ ID NO: 8668 - protein, 17 aa, synthetic construct
  REGION 1..17: note = Description of Artificial Sequence: Synthetic peptide
  REGION 1..17: note = XENP019321 vhCDR2
FISYDGNNKYYADSVKG

SEQ ID NO: 8669 - protein, 9 aa, synthetic construct
  REGION 1..9: note = Description of Artificial Sequence: Synthetic peptide
  REGION 1..9: note = XENP019321 vhCDR3
YGWLGPFDY

SEQ ID NO: 8670 - protein, 215 aa, synthetic construct; identical to SEQ ID NO: 7600
  REGION 1..215: note = Description of Artificial Sequence: Synthetic polypeptide
  REGION 1..215: note = XENP019321 [CTLA-4]_H0.107_L0_Fab Light Chain

SEQ ID NO: 8671 - protein, 108 aa, synthetic construct; identical to SEQ ID NO: 3741
  REGION 1..108: note = Description of Artificial Sequence: Synthetic polypeptide
  REGION 1..108: note = VL of XENP019321

SEQ ID NO: 8672 - protein, 12 aa, synthetic construct
  REGION 1..12: note = Description of Artificial Sequence: Synthetic peptide
  REGION 1..12: note = XENP019321 vlCDR1
RASQSVGSSYLA

SEQ ID NO: 8673 - protein, 7 aa, synthetic construct
  REGION 1..7: note = Description of Artificial Sequence: Synthetic peptide
  REGION 1..7: note = XENP019321 vlCDR2
GAFSRAT

SEQ ID NO: 8674 - protein, 9 aa, synthetic construct
  REGION 1..9: note = Description of Artificial Sequence: Synthetic peptide
  REGION 1..9: note = XENP019321 vlCDR3
QQYGSSPWT

SEQ ID NO: 8675 - protein, 221 aa, synthetic construct
  REGION 1..221: note = Description of Artificial Sequence: Synthetic polypeptide
  REGION 1..221: note = XENP019322 [CTLA-4]_H0.108_L0_Fab Heavy Chain
QVQLVESGGGVVQPGRSLRLSCAASGFTFSSYTMHWVRQAPGKGLEWVTFISYDGNNKYYADSVKGRFTISRDNSKNTLYLQMNSLRAEDTAIYYCARTAWLGPFDYWGQGTLVTVSSASTKGPSVFPLAPSSKSTSGGTAALGCLVKDYFPEPVTVSWNSGALTSGVHTFPAVLQSSGLYSLSSVVTVPSSSLGTQTYICNVNHKPSNTKVDKKVEPKSC

SEQ ID NO: 8676 - protein, 118 aa, synthetic construct; identical to SEQ ID NO: 5832
  REGION 1..118: note = Description of Artificial Sequence: Synthetic polypeptide
  REGION 1..118: note = VH of XENP019322

SEQ ID NO: 8677 - protein, 5 aa, synthetic construct
  REGION 1..5: note = Description of Artificial Sequence: Synthetic peptide
  REGION 1..5: note = XENP019322 vhCDR1
SYTMH

SEQ ID NO: 8678 - protein, 17 aa, synthetic construct
  REGION 1..17: note = Description of Artificial Sequence: Synthetic peptide
  REGION 1..17: note = XENP019322 vhCDR2
FISYDGNNKYYADSVKG

SEQ ID NO: 8679 - protein, 9 aa, synthetic construct
  REGION 1..9: note = Description of Artificial Sequence: Synthetic peptide
  REGION 1..9: note = XENP019322 vhCDR3
TAWLGPFDY

SEQ ID NO: 8680 - protein, 215 aa, synthetic construct; identical to SEQ ID NO: 7600
  REGION 1..215: note = Description of Artificial Sequence: Synthetic polypeptide
  REGION 1..215: note = XENP019322 [CTLA-4]_H0.108_L0_Fab Light Chain

SEQ ID NO: 8681 - protein, 108 aa, synthetic construct; identical to SEQ ID NO: 3741
  REGION 1..108: note = Description of Artificial Sequence: Synthetic polypeptide
  REGION 1..108: note = VL of XENP019322

SEQ ID NO: 8682 - protein, 12 aa, synthetic construct
  REGION 1..12: note = Description of Artificial Sequence: Synthetic peptide
  REGION 1..12: note = XENP019322 vlCDR1
RASQSVGSSYLA

SEQ ID NO: 8683 - protein, 7 aa, synthetic construct
  REGION 1..7: note = Description of Artificial Sequence: Synthetic peptide
  REGION 1..7: note = XENP019322 vlCDR2
GAFSRAT

SEQ ID NO: 8684 - protein, 9 aa, synthetic construct
  REGION 1..9: note = Description of Artificial Sequence: Synthetic peptide
  REGION 1..9: note = XENP019322 vlCDR3
QQYGSSPWT

SEQ ID NO: 8685 - protein, 221 aa, synthetic construct
  REGION 1..221: note = Description of Artificial Sequence: Synthetic polypeptide
  REGION 1..221: note = XENP019323 [CTLA-4]_H0.109_L0_Fab Heavy Chain
QVQLVESGGGVVQPGRSLRLSCAASGFTFSSYTMHWVRQAPGKGLEWVTFISYDGNNKYYADSVKGRFTISRDNSKNTLYLQMNSLRAEDTAIYYCARTSWLGPFDYWGQGTLVTVSSASTKGPSVFPLAPSSKSTSGGTAALGCLVKDYFPEPVTVSWNSGALTSGVHTFPAVLQSSGLYSLSSVVTVPSSSLGTQTYICNVNHKPSNTKVDKKVEPKSC

SEQ ID NO: 8686 - protein, 118 aa, synthetic construct; identical to SEQ ID NO: 5841
  REGION 1..118: note = Description of Artificial Sequence: Synthetic polypeptide
  REGION 1..118: note = VH of XENP019323

SEQ ID NO: 8687 - protein, 5 aa, synthetic construct
  REGION 1..5: note = Description of Artificial Sequence: Synthetic peptide
  REGION 1..5: note = XENP019323 vhCDR1
SYTMH

SEQ ID NO: 8688 - protein, 17 aa, synthetic construct
  REGION 1..17: note = Description of Artificial Sequence: Synthetic peptide
  REGION 1..17: note = XENP019323 vhCDR2
FISYDGNNKYYADSVKG

SEQ ID NO: 8689 - protein, 9 aa, synthetic construct
  REGION 1..9: note = Description of Artificial Sequence: Synthetic peptide
  REGION 1..9: note = XENP019323 vhCDR3
TSWLGPFDY

SEQ ID NO: 8690 - protein, 215 aa, synthetic construct; identical to SEQ ID NO: 7600
  REGION 1..215: note = Description of Artificial Sequence: Synthetic polypeptide
  REGION 1..215: note = XENP019323 [CTLA-4]_H0.109_L0_Fab Light Chain

SEQ ID NO: 8691 - protein, 108 aa, synthetic construct; identical to SEQ ID NO: 3741
  REGION 1..108: note = Description of Artificial Sequence: Synthetic polypeptide
  REGION 1..108: note = VL of XENP019323

SEQ ID NO: 8692 - protein, 12 aa, synthetic construct
  REGION 1..12: note = Description of Artificial Sequence: Synthetic peptide
  REGION 1..12: note = XENP019323 vlCDR1
RASQSVGSSYLA

SEQ ID NO: 8693 - protein, 7 aa, synthetic construct
  REGION 1..7: note = Description of Artificial Sequence: Synthetic peptide
  REGION 1..7: note = XENP019323 vlCDR2
GAFSRAT

SEQ ID NO: 8694 - protein, 9 aa, synthetic construct
  REGION 1..9: note = Description of Artificial Sequence: Synthetic peptide
  REGION 1..9: note = XENP019323 vlCDR3
QQYGSSPWT

SEQ ID NO: 8695 - protein, 221 aa, synthetic construct
  REGION 1..221: note = Description of Artificial Sequence: Synthetic polypeptide
  REGION 1..221: note = XENP019324 [CTLA-4]_H0.110_L0_Fab Heavy Chain
QVQLVESGGGVVQPGRSLRLSCAASGFTFSSYTMHWVRQAPGKGLEWVTFISYDGNNKYYADSVKGRFTISRDNSKNTLYLQMNSLRAEDTAIYYCARTTWLGPFDYWGQGTLVTVSSASTKGPSVFPLAPSSKSTSGGTAALGCLVKDYFPEPVTVSWNSGALTSGVHTFPAVLQSSGLYSLSSVVTVPSSSLGTQTYICNVNHKPSNTKVDKKVEPKSC

SEQ ID NO: 8696 - protein, 118 aa, synthetic construct; identical to SEQ ID NO: 5850
  REGION 1..118: note = Description of Artificial Sequence: Synthetic polypeptide
  REGION 1..118: note = VH of XENP019324

SEQ ID NO: 8697 - protein, 5 aa, synthetic construct
  REGION 1..5: note = Description of Artificial Sequence: Synthetic peptide
  REGION 1..5: note = XENP019324 vhCDR1
SYTMH

SEQ ID NO: 8698 - protein, 17 aa, synthetic construct
  REGION 1..17: note = Description of Artificial Sequence: Synthetic peptide
  REGION 1..17: note = XENP019324 vhCDR2
FISYDGNNKYYADSVKG

SEQ ID NO: 8699 - protein, 9 aa, synthetic construct
  REGION 1..9: note = Description of Artificial Sequence: Synthetic peptide
  REGION 1..9: note = XENP019324 vhCDR3
TTWLGPFDY

SEQ ID NO: 8700 - protein, 215 aa, synthetic construct; identical to SEQ ID NO: 7600
  REGION 1..215: note = Description of Artificial Sequence: Synthetic polypeptide
  REGION 1..215: note = XENP019324 [CTLA-4]_H0.110_L0_Fab Light Chain

SEQ ID NO: 8701 - protein, 108 aa, synthetic construct; identical to SEQ ID NO: 3741
  REGION 1..108: note = Description of Artificial Sequence: Synthetic polypeptide
  REGION 1..108: note = VL of XENP019324

SEQ ID NO: 8702 - protein, 12 aa, synthetic construct
  REGION 1..12: note = Description of Artificial Sequence: Synthetic peptide
  REGION 1..12: note = XENP019324 vlCDR1
RASQSVGSSYLA

SEQ ID NO: 8703 - protein, 7 aa, synthetic construct
  REGION 1..7: note = Description of Artificial Sequence: Synthetic peptide
  REGION 1..7: note = XENP019324 vlCDR2
GAFSRAT

SEQ ID NO: 8704 - protein, 9 aa, synthetic construct
  REGION 1..9: note = Description of Artificial Sequence: Synthetic peptide
  REGION 1..9: note = XENP019324 vlCDR3
QQYGSSPWT

SEQ ID NO: 8705 - protein, 221 aa, synthetic construct
  REGION 1..221: note = Description of Artificial Sequence: Synthetic polypeptide
  REGION 1..221: note = XENP019325 [CTLA-4]_H0.111_L0_Fab Heavy Chain
QVQLVESGGGVVQPGRSLRLSCAASGFTFSSYTMHWVRQAPGKGLEWVTFISYDGNNKYYADSVKGRFTISRDNSKNTLYLQMNSLRAEDTAIYYCARTGFLGPFDYWGQGTLVTVSSASTKGPSVFPLAPSSKSTSGGTAALGCLVKDYFPEPVTVSWNSGALTSGVHTFPAVLQSSGLYSLSSVVTVPSSSLGTQTYICNVNHKPSNTKVDKKVEPKSC

SEQ ID NO: 8706 - protein, 118 aa, synthetic construct; identical to SEQ ID NO: 5859
  REGION 1..118: note = Description of Artificial Sequence: Synthetic polypeptide
  REGION 1..118: note = VH of XENP019325

SEQ ID NO: 8707 - protein, 5 aa, synthetic construct
  REGION 1..5: note = Description of Artificial Sequence: Synthetic peptide
  REGION 1..5: note = XENP019325 vhCDR1
SYTMH

SEQ ID NO: 8708 - protein, 17 aa, synthetic construct
  REGION 1..17: note = Description of Artificial Sequence: Synthetic peptide
  REGION 1..17: note = XENP019325 vhCDR2
FISYDGNNKYYADSVKG

SEQ ID NO: 8709 - protein, 9 aa, synthetic construct
  REGION 1..9: note = Description of Artificial Sequence: Synthetic peptide
  REGION 1..9: note = XENP019325 vhCDR3
TGFLGPFDY

SEQ ID NO: 8710 - protein, 215 aa, synthetic construct; identical to SEQ ID NO: 7600
  REGION 1..215: note = Description of Artificial Sequence: Synthetic polypeptide
  REGION 1..215: note = XENP019325 [CTLA-4]_H0.111_L0_Fab Light Chain

SEQ ID NO: 8711 - protein, 108 aa, synthetic construct; identical to SEQ ID NO: 3741
  REGION 1..108: note = Description of Artificial Sequence: Synthetic polypeptide
  REGION 1..108: note = VL of XENP019325

SEQ ID NO: 8712 - protein, 12 aa, synthetic construct
  REGION 1..12: note = Description of Artificial Sequence: Synthetic peptide
  REGION 1..12: note = XENP019325 vlCDR1
RASQSVGSSYLA

SEQ ID NO: 8713 - protein, 7 aa, synthetic construct
  REGION 1..7: note = Description of Artificial Sequence: Synthetic peptide
  REGION 1..7: note = XENP019325 vlCDR2
GAFSRAT

SEQ ID NO: 8714 - protein, 9 aa, synthetic construct
  REGION 1..9: note = Description of Artificial Sequence: Synthetic peptide
  REGION 1..9: note = XENP019325 vlCDR3
QQYGSSPWT

SEQ ID NO: 8715 - protein, 221 aa, synthetic construct
  REGION 1..221: note = Description of Artificial Sequence: Synthetic polypeptide
  REGION 1..221: note = XENP019326 [CTLA-4]_H0.112_L0_Fab Heavy Chain
QVQLVESGGGVVQPGRSLRLSCAASGFTFSSYTMHWVRQAPGKGLEWVTFISYDGNNKYYADSVKGRFTISRDNSKNTLYLQMNSLRAEDTAIYYCARTGGLGPFDYWGQGTLVTVSSASTKGPSVFPLAPSSKSTSGGTAALGCLVKDYFPEPVTVSWNSGALTSGVHTFPAVLQSSGLYSLSSVVTVPSSSLGTQTYICNVNHKPSNTKVDKKVEPKSC

SEQ ID NO: 8716 - protein, 118 aa, synthetic construct; identical to SEQ ID NO: 5868
  REGION 1..118: note = Description of Artificial Sequence: Synthetic polypeptide
  REGION 1..118: note = VH of XENP019326

SEQ ID NO: 8717 - protein, 5 aa, synthetic construct
  REGION 1..5: note = Description of Artificial Sequence: Synthetic peptide
  REGION 1..5: note = XENP019326 vhCDR1
SYTMH

SEQ ID NO: 8718 - protein, 17 aa, synthetic construct
  REGION 1..17: note = Description of Artificial Sequence: Synthetic peptide
  REGION 1..17: note = XENP019326 vhCDR2
FISYDGNNKYYADSVKG

SEQ ID NO: 8719 - protein, 9 aa, synthetic construct
  REGION 1..9: note = Description of Artificial Sequence: Synthetic peptide
  REGION 1..9: note = XENP019326 vhCDR3
TGGLGPFDY

SEQ ID NO: 8720 - protein, 215 aa, synthetic construct; identical to SEQ ID NO: 7600
  REGION 1..215: note = Description of Artificial Sequence: Synthetic polypeptide
  REGION 1..215: note = XENP019326 [CTLA-4]_H0.112_L0_Fab Light Chain

SEQ ID NO: 8721 - protein, 108 aa, synthetic construct; identical to SEQ ID NO: 3741
  REGION 1..108: note = Description of Artificial Sequence: Synthetic polypeptide
  REGION 1..108: note = VL of XENP019326

SEQ ID NO: 8722 - protein, 12 aa, synthetic construct
  REGION 1..12: note = Description of Artificial Sequence: Synthetic peptide
  REGION 1..12: note = XENP019326 vlCDR1
RASQSVGSSYLA

SEQ ID NO: 8723 - protein, 7 aa, synthetic construct
  REGION 1..7: note = Description of Artificial Sequence: Synthetic peptide
  REGION 1..7: note = XENP019326 vlCDR2
GAFSRAT

SEQ ID NO: 8724 - protein, 9 aa, synthetic construct
  REGION 1..9: note = Description of Artificial Sequence: Synthetic peptide
  REGION 1..9: note = XENP019326 vlCDR3
QQYGSSPWT

SEQ ID NO: 8725 - protein, 221 aa, synthetic construct
  REGION 1..221: note = Description of Artificial Sequence: Synthetic polypeptide
  REGION 1..221: note = XENP019327 [CTLA-4]_H0.113_L0_Fab Heavy Chain
QVQLVESGGGVVQPGRSLRLSCAASGFTFSSYTMHWVRQAPGKGLEWVTFISYDGNNKYYADSVKGRFTISRDNSKNTLYLQMNSLRAEDTAIYYCARTGHLGPFDYWGQGTLVTVSSASTKGPSVFPLAPSSKSTSGGTAALGCLVKDYFPEPVTVSWNSGALTSGVHTFPAVLQSSGLYSLSSVVTVPSSSLGTQTYICNVNHKPSNTKVDKKVEPKSC

SEQ ID NO: 8726 - protein, 118 aa, synthetic construct; identical to SEQ ID NO: 5877
  REGION 1..118: note = Description of Artificial Sequence: Synthetic polypeptide
  REGION 1..118: note = VH of XENP019327

SEQ ID NO: 8727 - protein, 5 aa, synthetic construct
  REGION 1..5: note = Description of Artificial Sequence: Synthetic peptide
  REGION 1..5: note = XENP019327 vhCDR1
SYTMH

SEQ ID NO: 8728 - protein, 17 aa, synthetic construct
  REGION 1..17: note = Description of Artificial Sequence: Synthetic peptide
  REGION 1..17: note = XENP019327 vhCDR2
FISYDGNNKYYADSVKG

SEQ ID NO: 8729 - protein, 9 aa, synthetic construct
  REGION 1..9: note = Description of Artificial Sequence: Synthetic peptide
  REGION 1..9: note = XENP019327 vhCDR3
TGHLGPFDY

SEQ ID NO: 8730 - protein, 215 aa, synthetic construct; identical to SEQ ID NO: 7600
  REGION 1..215: note = Description of Artificial Sequence: Synthetic polypeptide
  REGION 1..215: note = XENP019327 [CTLA-4]_H0.113_L0_Fab Light Chain

SEQ ID NO: 8731 - protein, 108 aa, synthetic construct; identical to SEQ ID NO: 3741
  REGION 1..108: note = Description of Artificial Sequence: Synthetic polypeptide
  REGION 1..108: note = VL of XENP019327

SEQ ID NO: 8732 - protein, 12 aa, synthetic construct
  REGION 1..12: note = Description of Artificial Sequence: Synthetic peptide
  REGION 1..12: note = XENP019327 vlCDR1
RASQSVGSSYLA

SEQ ID NO: 8733 - protein, 7 aa, synthetic construct
  REGION 1..7: note = Description of Artificial Sequence: Synthetic peptide
  REGION 1..7: note = XENP019327 vlCDR2
GAFSRAT

SEQ ID NO: 8734 - protein, 9 aa, synthetic construct
  REGION 1..9: note = Description of Artificial Sequence: Synthetic peptide
  REGION 1..9: note = XENP019327 vlCDR3
QQYGSSPWT

SEQ ID NO: 8735 - protein, 221 aa, synthetic construct
  REGION 1..221: note = Description of Artificial Sequence: Synthetic polypeptide
  REGION 1..221: note = XENP019328 [CTLA-4]_H0.114_L0_Fab Heavy Chain
QVQLVESGGGVVQPGRSLRLSCAASGFTFSSYTMHWVRQAPGKGLEWVTFISYDGNNKYYADSVKGRFTISRDNSKNTLYLQMNSLRAEDTAIYYCARTGLLGPFDYWGQGTLVTVSSASTKGPSVFPLAPSSKSTSGGTAALGCLVKDYFPEPVTVSWNSGALTSGVHTFPAVLQSSGLYSLSSVVTVPSSSLGTQTYICNVNHKPSNTKVDKKVEPKSC

SEQ ID NO: 8736 - protein, 118 aa, synthetic construct; identical to SEQ ID NO: 5886
  REGION 1..118: note = Description of Artificial Sequence: Synthetic polypeptide
  REGION 1..118: note = VH of XENP019328

SEQ ID NO: 8737 - protein, 5 aa, synthetic construct
  REGION 1..5: note = Description of Artificial Sequence: Synthetic peptide
  REGION 1..5: note = XENP019328 vhCDR1
SYTMH

SEQ ID NO: 8738 - protein, 17 aa, synthetic construct
  REGION 1..17: note = Description of Artificial Sequence: Synthetic peptide
  REGION 1..17: note = XENP019328 vhCDR2
FISYDGNNKYYADSVKG

SEQ ID NO: 8739 - protein, 9 aa, synthetic construct
  REGION 1..9: note = Description of Artificial Sequence: Synthetic peptide
  REGION 1..9: note = XENP019328 vhCDR3
TGLLGPFDY

SEQ ID NO: 8740 - protein, 215 aa, synthetic construct; identical to SEQ ID NO: 7600
  REGION 1..215: note = Description of Artificial Sequence: Synthetic polypeptide
  REGION 1..215: note = XENP019328 [CTLA-4]_H0.114_L0_Fab Light Chain

SEQ ID NO: 8741 - protein, 108 aa, synthetic construct; identical to SEQ ID NO: 3741
  REGION 1..108: note = Description of Artificial Sequence: Synthetic polypeptide
  REGION 1..108: note = VL of XENP019328

SEQ ID NO: 8742 - protein, 12 aa, synthetic construct
  REGION 1..12: note = Description of Artificial Sequence: Synthetic peptide
  REGION 1..12: note = XENP019328 vlCDR1
RASQSVGSSYLA

SEQ ID NO: 8743 - protein, 7 aa, synthetic construct
  REGION 1..7: note = Description of Artificial Sequence: Synthetic peptide
  REGION 1..7: note = XENP019328 vlCDR2
GAFSRAT

SEQ ID NO: 8744 - protein, 9 aa, synthetic construct
  REGION 1..9: note = Description of Artificial Sequence: Synthetic peptide
  REGION 1..9: note = XENP019328 vlCDR3
QQYGSSPWT

SEQ ID NO: 8745 - protein, 221 aa, synthetic construct
  REGION 1..221: note = Description of Artificial Sequence: Synthetic polypeptide
  REGION 1..221: note = XENP019329 [CTLA-4]_H0.115_L0_Fab Heavy Chain
QVQLVESGGGVVQPGRSLRLSCAASGFTFSSYTMHWVRQAPGKGLEWVTFISYDGNNKYYADSVKGRFTISRDNSKNTLYLQMNSLRAEDTAIYYCARTGYLGPFDYWGQGTLVTVSSASTKGPSVFPLAPSSKSTSGGTAALGCLVKDYFPEPVTVSWNSGALTSGVHTFPAVLQSSGLYSLSSVVTVPSSSLGTQTYICNVNHKPSNTKVDKKVEPKSC

SEQ ID NO: 8746 - protein, 118 aa, synthetic construct; identical to SEQ ID NO: 5895
  REGION 1..118: note = Description of Artificial Sequence: Synthetic polypeptide
  REGION 1..118: note = VH of XENP019329

SEQ ID NO: 8747 - protein, 5 aa, synthetic construct
  REGION 1..5: note = Description of Artificial Sequence: Synthetic peptide
  REGION 1..5: note = XENP019329 vhCDR1
SYTMH

SEQ ID NO: 8748 - protein, 17 aa, synthetic construct
  REGION 1..17: note = Description of Artificial Sequence: Synthetic peptide
  REGION 1..17: note = XENP019329 vhCDR2
FISYDGNNKYYADSVKG

SEQ ID NO: 8749 - protein, 9 aa, synthetic construct
  REGION 1..9: note = Description of Artificial Sequence: Synthetic peptide
  REGION 1..9: note = XENP019329 vhCDR3
TGYLGPFDY

SEQ ID NO: 8750 - protein, 215 aa, synthetic construct; identical to SEQ ID NO: 7600
  REGION 1..215: note = Description of Artificial Sequence: Synthetic polypeptide
  REGION 1..215: note = XENP019329 [CTLA-4]_H0.115_L0_Fab Light Chain

SEQ ID NO: 8751 - protein, 108 aa, synthetic construct; identical to SEQ ID NO: 3741
  REGION 1..108: note = Description of Artificial Sequence: Synthetic polypeptide
  REGION 1..108: note = VL of XENP019329

SEQ ID NO: 8752 - protein, 12 aa, synthetic construct
  REGION 1..12: note = Description of Artificial Sequence: Synthetic peptide
  REGION 1..12: note = XENP019329 vlCDR1
RASQSVGSSYLA

SEQ ID NO: 8753 - protein, 7 aa, synthetic construct
  REGION 1..7: note = Description of Artificial Sequence: Synthetic peptide
  REGION 1..7: note = XENP019329 vlCDR2
GAFSRAT

SEQ ID NO: 8754 - protein, 9 aa, synthetic construct
  REGION 1..9: note = Description of Artificial Sequence: Synthetic peptide
  REGION 1..9: note = XENP019329 vlCDR3
QQYGSSPWT

SEQ ID NO: 8755 - protein, 221 aa, synthetic construct
  REGION 1..221: note = Description of Artificial Sequence: Synthetic polypeptide
  REGION 1..221: note = XENP019330 [CTLA-4]_H0.116_L0_Fab Heavy Chain
QVQLVESGGGVVQPGRSLRLSCAASGFTFSSYTMHWVRQAPGKGLEWVTFISYDGNNKYYADSVKGRFTISRDNSKNTLYLQMNSLRAEDTAIYYCARTGWDGPFDYWGQGTLVTVSSASTKGPSVFPLAPSSKSTSGGTAALGCLVKDYFPEPVTVSWNSGALTSGVHTFPAVLQSSGLYSLSSVVTVPSSSLGTQTYICNVNHKPSNTKVDKKVEPKSC

SEQ ID NO: 8756 - protein, 118 aa, synthetic construct; identical to SEQ ID NO: 5904
  REGION 1..118: note = Description of Artificial Sequence: Synthetic polypeptide
  REGION 1..118: note = VH of XENP019330

SEQ ID NO: 8757 - protein, 5 aa, synthetic construct
  REGION 1..5: note = Description of Artificial Sequence: Synthetic peptide
  REGION 1..5: note = XENP019330 vhCDR1
SYTMH

SEQ ID NO: 8758 - protein, 17 aa, synthetic construct
  REGION 1..17: note = Description of Artificial Sequence: Synthetic peptide
  REGION 1..17: note = XENP019330 vhCDR2
FISYDGNNKYYADSVKG

SEQ ID NO: 8759 - protein, 9 aa, synthetic construct
  REGION 1..9: note = Description of Artificial Sequence: Synthetic peptide
  REGION 1..9: note = XENP019330 vhCDR3
TGWDGPFDY

SEQ ID NO: 8760 - protein, 215 aa, synthetic construct; identical to SEQ ID NO: 7600
  REGION 1..215: note = Description of Artificial Sequence: Synthetic polypeptide
  REGION 1..215: note = XENP019330 [CTLA-4]_H0.116_L0_Fab Light Chain

SEQ ID NO: 8761 - protein, 108 aa, synthetic construct; identical to SEQ ID NO: 3741
  REGION 1..108: note = Description of Artificial Sequence: Synthetic polypeptide
  REGION 1..108: note = VL of XENP019330

SEQ ID NO: 8762 - protein, 12 aa, synthetic construct
  REGION 1..12: note = Description of Artificial Sequence: Synthetic peptide
  REGION 1..12: note = XENP019330 vlCDR1
RASQSVGSSYLA

SEQ ID NO: 8763 - protein, 7 aa, synthetic construct
  REGION 1..7: note = Description of Artificial Sequence: Synthetic peptide
  REGION 1..7: note = XENP019330 vlCDR2
GAFSRAT

SEQ ID NO: 8764 - protein, 9 aa, synthetic construct
  REGION 1..9: note = Description of Artificial Sequence: Synthetic peptide
  REGION 1..9: note = XENP019330 vlCDR3
QQYGSSPWT

SEQ ID NO: 8765 - protein, 221 aa, synthetic construct
  REGION 1..221: note = Description of Artificial Sequence: Synthetic polypeptide
  REGION 1..221: note = XENP019331 [CTLA-4]_H0.117_L0_Fab Heavy Chain
QVQLVESGGGVVQPGRSLRLSCAASGFTFSSYTMHWVRQAPGKGLEWVTFISYDGNNKYYADSVKGRFTISRDNSKNTLYLQMNSLRAEDTAIYYCARTGWIGPFDYWGQGTLVTVSSASTKGPSVFPLAPSSKSTSGGTAALGCLVKDYFPEPVTVSWNSGALTSGVHTFPAVLQSSGLYSLSSVVTVPSSSLGTQTYICNVNHKPSNTKVDKKVEPKSC

SEQ ID NO: 8766 - protein, 118 aa, synthetic construct; identical to SEQ ID NO: 5913
  REGION 1..118: note = Description of Artificial Sequence: Synthetic polypeptide
  REGION 1..118: note = VH of XENP019331

SEQ ID NO: 8767 - protein, 5 aa, synthetic construct
  REGION 1..5: note = Description of Artificial Sequence: Synthetic peptide
  REGION 1..5: note = XENP019331 vhCDR1
SYTMH

SEQ ID NO: 8768 - protein, 17 aa, synthetic construct
  REGION 1..17: note = Description of Artificial Sequence: Synthetic peptide
  REGION 1..17: note = XENP019331 vhCDR2
FISYDGNNKYYADSVKG

SEQ ID NO: 8769 - protein, 9 aa, synthetic construct
  REGION 1..9: note = Description of Artificial Sequence: Synthetic peptide
  REGION 1..9: note = XENP019331 vhCDR3
TGWIGPFDY

SEQ ID NO: 8770 - protein, 215 aa, synthetic construct; identical to SEQ ID NO: 7600
  REGION 1..215: note = Description of Artificial Sequence: Synthetic polypeptide
  REGION 1..215: note = XENP019331 [CTLA-4]_H0.117_L0_Fab Light Chain

SEQ ID NO: 8771 - protein, 108 aa, synthetic construct; identical to SEQ ID NO: 3741
  REGION 1..108: note = Description of Artificial Sequence: Synthetic polypeptide
  REGION 1..108: note = VL of XENP019331

SEQ ID NO: 8772 - protein, 12 aa, synthetic construct
  REGION 1..12: note = Description of Artificial Sequence: Synthetic peptide
  REGION 1..12: note = XENP019331 vlCDR1
RASQSVGSSYLA

SEQ ID NO: 8773 - protein, 7 aa, synthetic construct
  REGION 1..7: note = Description of Artificial Sequence: Synthetic peptide
  REGION 1..7: note = XENP019331 vlCDR2
GAFSRAT

SEQ ID NO: 8774 - protein, 9 aa, synthetic construct
  REGION 1..9: note = Description of Artificial Sequence: Synthetic peptide
  REGION 1..9: note = XENP019331 vlCDR3
QQYGSSPWT

SEQ ID NO: 8775 - protein, 221 aa, synthetic construct
  REGION 1..221: note = Description of Artificial Sequence: Synthetic polypeptide
  REGION 1..221: note = XENP019332 [CTLA-4]_H0.118_L0_Fab Heavy Chain
QVQLVESGGGVVQPGRSLRLSCAASGFTFSSYTMHWVRQAPGKGLEWVTFISYDGNNKYYADSVKGRFTISRDNSKNTLYLQMNSLRAEDTAIYYCARTGWVGPFDYWGQGTLVTVSSASTKGPSVFPLAPSSKSTSGGTAALGCLVKDYFPEPVTVSWNSGALTSGVHTFPAVLQSSGLYSLSSVVTVPSSSLGTQTYICNVNHKPSNTKVDKKVEPKSC

SEQ ID NO: 8776 - protein, 118 aa, synthetic construct; identical to SEQ ID NO: 5922
  REGION 1..118: note = Description of Artificial Sequence: Synthetic polypeptide
  REGION 1..118: note = VH of XENP019332

SEQ ID NO: 8777 - protein, 5 aa, synthetic construct
  REGION 1..5: note = Description of Artificial Sequence: Synthetic peptide
  REGION 1..5: note = XENP019332 vhCDR1
SYTMH

SEQ ID NO: 8778 - protein, 17 aa, synthetic construct
  REGION 1..17: note = Description of Artificial Sequence: Synthetic peptide
  REGION 1..17: note = XENP019332 vhCDR2
FISYDGNNKYYADSVKG

SEQ ID NO: 8779 - protein, 9 aa, synthetic construct
  REGION 1..9: note = Description of Artificial Sequence: Synthetic peptide
  REGION 1..9: note = XENP019332 vhCDR3
TGWVGPFDY

SEQ ID NO: 8780 - protein, 215 aa, synthetic construct; identical to SEQ ID NO: 7600
  REGION 1..215: note = Description of Artificial Sequence: Synthetic polypeptide
  REGION 1..215: note = XENP019332 [CTLA-4]_H0.118_L0_Fab Light Chain

SEQ ID NO: 8781 - protein, 108 aa, synthetic construct; identical to SEQ ID NO: 3741
  REGION 1..108: note = Description of Artificial Sequence: Synthetic polypeptide
  REGION 1..108: note = VL of XENP019332

SEQ ID NO: 8782 - protein, 12 aa, synthetic construct
  REGION 1..12: note = Description of Artificial Sequence: Synthetic peptide
  REGION 1..12: note = XENP019332 vlCDR1
RASQSVGSSYLA

SEQ ID NO: 8783 - protein, 7 aa, synthetic construct
  REGION 1..7: note = Description of Artificial Sequence: Synthetic peptide
  REGION 1..7: note = XENP019332 vlCDR2
GAFSRAT

SEQ ID NO: 8784 - protein, 9 aa, synthetic construct
  REGION 1..9: note = Description of Artificial Sequence: Synthetic peptide
  REGION 1..9: note = XENP019332 vlCDR3
QQYGSSPWT

SEQ ID NO: 8785 - protein, 221 aa, synthetic construct
  REGION 1..221: note = Description of Artificial Sequence: Synthetic polypeptide
  REGION 1..221: note = XENP019333 [CTLA-4]_H0.119_L0_Fab Heavy Chain
QVQLVESGGGVVQPGRSLRLSCAASGFTFSSYTMHWVRQAPGKGLEWVTFISYDGNNKYYADSVKGRFTISRDNSKNTLYLQMNSLRAEDTAIYYCARTGWLAPFDYWGQGTLVTVSSASTKGPSVFPLAPSSKSTSGGTAALGCLVKDYFPEPVTVSWNSGALTSGVHTFPAVLQSSGLYSLSSVVTVPSSSLGTQTYICNVNHKPSNTKVDKKVEPKSC

SEQ ID NO: 8786 - protein, 118 aa, synthetic construct; identical to SEQ ID NO: 5931
  REGION 1..118: note = Description of Artificial Sequence: Synthetic polypeptide
  REGION 1..118: note = VH of XENP019333

SEQ ID NO: 8787 - protein, 5 aa, synthetic construct
  REGION 1..5: note = Description of Artificial Sequence: Synthetic peptide
  REGION 1..5: note = XENP019333 vhCDR1
SYTMH

SEQ ID NO: 8788 - protein, 17 aa, synthetic construct
  REGION 1..17: note = Description of Artificial Sequence: Synthetic peptide
  REGION 1..17: note = XENP019333 vhCDR2
FISYDGNNKYYADSVKG

SEQ ID NO: 8789 - protein, 9 aa, synthetic construct
  REGION 1..9: note = Description of Artificial Sequence: Synthetic peptide
  REGION 1..9: note = XENP019333 vhCDR3
TGWLAPFDY

SEQ ID NO: 8790 - protein, 215 aa, synthetic construct; identical to SEQ ID NO: 7600
  REGION 1..215: note = Description of Artificial Sequence: Synthetic polypeptide
  REGION 1..215: note = XENP019333 [CTLA-4]_H0.119_L0_Fab Light Chain

SEQ ID NO: 8791 - protein, 108 aa, synthetic construct; identical to SEQ ID NO: 3741
  REGION 1..108: note = Description of Artificial Sequence: Synthetic polypeptide
  REGION 1..108: note = VL of XENP019333

SEQ ID NO: 8792 - protein, 12 aa, synthetic construct
  REGION 1..12: note = Description of Artificial Sequence: Synthetic peptide
  REGION 1..12: note = XENP019333 vlCDR1
RASQSVGSSYLA

SEQ ID NO: 8793 - protein, 7 aa, synthetic construct
  REGION 1..7: note = Description of Artificial Sequence: Synthetic peptide
  REGION 1..7: note = XENP019333 vlCDR2
GAFSRAT

SEQ ID NO: 8794 - protein, 9 aa, synthetic construct
  REGION 1..9: note = Description of Artificial Sequence: Synthetic peptide
  REGION 1..9: note = XENP019333 vlCDR3
QQYGSSPWT

SEQ ID NO: 8795 - protein, 221 aa, synthetic construct
  REGION 1..221: note = Description of Artificial Sequence: Synthetic polypeptide
  REGION 1..221: note = XENP019334 [CTLA-4]_H0.120_L0_Fab Heavy Chain
QVQLVESGGGVVQPGRSLRLSCAASGFTFSSYTMHWVRQAPGKGLEWVTFISYDGNNKYYADSVKGRFTISRDNSKNTLYLQMNSLRAEDTAIYYCARTGWLSPFDYWGQGTLVTVSSASTKGPSVFPLAPSSKSTSGGTAALGCLVKDYFPEPVTVSWNSGALTSGVHTFPAVLQSSGLYSLSSVVTVPSSSLGTQTYICNVNHKPSNTKVDKKVEPKSC

SEQ ID NO: 8796 - protein, 118 aa, synthetic construct; identical to SEQ ID NO: 5940
  REGION 1..118: note = Description of Artificial Sequence: Synthetic polypeptide
  REGION 1..118: note = VH of XENP019334

SEQ ID NO: 8797 - protein, 5 aa, synthetic construct
  REGION 1..5: note = Description of Artificial Sequence: Synthetic peptide
  REGION 1..5: note = XENP019334 vhCDR1
SYTMH

SEQ ID NO: 8798 - protein, 17 aa, synthetic construct
  REGION 1..17: note = Description of Artificial Sequence: Synthetic peptide
  REGION 1..17: note = XENP019334 vhCDR2
FISYDGNNKYYADSVKG

SEQ ID NO: 8799 - protein, 9 aa, synthetic construct
  REGION 1..9: note = Description of Artificial Sequence: Synthetic peptide
  REGION 1..9: note = XENP019334 vhCDR3
TGWLSPFDY

SEQ ID NO: 8800 - protein, 215 aa, synthetic construct; identical to SEQ ID NO: 7600
  REGION 1..215: note = Description of Artificial Sequence: Synthetic polypeptide
  REGION 1..215: note = XENP019334 [CTLA-4]_H0.120_L0_Fab Light Chain

SEQ ID NO: 8801 - protein, 108 aa, synthetic construct; identical to SEQ ID NO: 3741
  REGION 1..108: note = Description of Artificial Sequence: Synthetic polypeptide
  REGION 1..108: note = VL of XENP019334

SEQ ID NO: 8802 - protein, 12 aa, synthetic construct
  REGION 1..12: note = Description of Artificial Sequence: Synthetic peptide
  REGION 1..12: note = XENP019334 vlCDR1
RASQSVGSSYLA

SEQ ID NO: 8803 - protein, 7 aa, synthetic construct
  REGION 1..7: note = Description of Artificial Sequence: Synthetic peptide
  REGION 1..7: note = XENP019334 vlCDR2
GAFSRAT

SEQ ID NO: 8804 - protein, 9 aa, synthetic construct
  REGION 1..9: note = Description of Artificial Sequence: Synthetic peptide
  REGION 1..9: note = XENP019334 vlCDR3
QQYGSSPWT

SEQ ID NO: 8805 - protein, 221 aa, synthetic construct
  REGION 1..221: note = Description of Artificial Sequence: Synthetic polypeptide
  REGION 1..221: note = XENP019335 [CTLA-4]_H0.121_L0_Fab Heavy Chain
QVQLVESGGGVVQPGRSLRLSCAASGFTFSSYTMHWVRQAPGKGLEWVTFISYDGNNKYYADSVKGRFTISRDNSKNTLYLQMNSLRAEDTAIYYCARTGWLTPFDYWGQGTLVTVSSASTKGPSVFPLAPSSKSTSGGTAALGCLVKDYFPEPVTVSWNSGALTSGVHTFPAVLQSSGLYSLSSVVTVPSSSLGTQTYICNVNHKPSNTKVDKKVEPKSC

SEQ ID NO: 8806 - protein, 118 aa, synthetic construct; identical to SEQ ID NO: 5949
  REGION 1..118: note = Description of Artificial Sequence: Synthetic polypeptide
  REGION 1..118: note = VH of XENP019335

SEQ ID NO: 8807 - protein, 5 aa, synthetic construct
  REGION 1..5: note = Description of Artificial Sequence: Synthetic peptide
  REGION 1..5: note = XENP019335 vhCDR1
SYTMH

SEQ ID NO: 8808 - protein, 17 aa, synthetic construct
  REGION 1..17: note = Description of Artificial Sequence: Synthetic peptide
  REGION 1..17: note = XENP019335 vhCDR2
FISYDGNNKYYADSVKG

SEQ ID NO: 8809 - protein, 9 aa, synthetic construct
  REGION 1..9: note = Description of Artificial Sequence: Synthetic peptide
  REGION 1..9: note = XENP019335 vhCDR3
TGWLTPFDY

SEQ ID NO: 8810 - protein, 215 aa, synthetic construct; identical to SEQ ID NO: 7600
  REGION 1..215: note = Description of Artificial Sequence: Synthetic polypeptide
  REGION 1..215: note = XENP019335 [CTLA-4]_H0.121_L0_Fab Light Chain

SEQ ID NO: 8811 - protein, 108 aa, synthetic construct; identical to SEQ ID NO: 3741
  REGION 1..108: note = Description of Artificial Sequence: Synthetic polypeptide
  REGION 1..108: note = VL of XENP019335

SEQ ID NO: 8812 - protein, 12 aa, synthetic construct
  REGION 1..12: note = Description of Artificial Sequence: Synthetic peptide
  REGION 1..12: note = XENP019335 vlCDR1
RASQSVGSSYLA

SEQ ID NO: 8813 - protein, 7 aa, synthetic construct
  REGION 1..7: note = Description of Artificial Sequence: Synthetic peptide
  REGION 1..7: note = XENP019335 vlCDR2
GAFSRAT

SEQ ID NO: 8814 - protein, 9 aa, synthetic construct
  REGION 1..9: note = Description of Artificial Sequence: Synthetic peptide
  REGION 1..9: note = XENP019335 vlCDR3
QQYGSSPWT

SEQ ID NO: 8815 - protein, 221 aa, synthetic construct
  REGION 1..221: note = Description of Artificial Sequence: Synthetic polypeptide
  REGION 1..221: note = XENP019336 [CTLA-4]_H0.122_L0_Fab Heavy Chain
QVQLVESGGGVVQPGRSLRLSCAASGFTFSSYTMHWVRQAPGKGLEWVTFISYDGNNKYYADSVKGRFTISRDNSKNTLYLQMNSLRAEDTAIYYCARTGWLGPLDYWGQGTLVTVSSASTKGPSVFPLAPSSKSTSGGTAALGCLVKDYFPEPVTVSWNSGALTSGVHTFPAVLQSSGLYSLSSVVTVPSSSLGTQTYICNVNHKPSNTKVDKKVEPKSC

SEQ ID NO: 8816 - protein, 118 aa, synthetic construct; identical to SEQ ID NO: 5958
  REGION 1..118: note = Description of Artificial Sequence: Synthetic polypeptide
  REGION 1..118: note = VH of XENP019336

SEQ ID NO: 8817 - protein, 5 aa, synthetic construct
  REGION 1..5: note = Description of Artificial Sequence: Synthetic peptide
  REGION 1..5: note = XENP019336 vhCDR1
SYTMH

SEQ ID NO: 8818 - protein, 17 aa, synthetic construct
  REGION 1..17: note = Description of Artificial Sequence: Synthetic peptide
  REGION 1..17: note = XENP019336 vhCDR2
FISYDGNNKYYADSVKG

SEQ ID NO: 8819 - protein, 9 aa, synthetic construct
  REGION 1..9: note = Description of Artificial Sequence: Synthetic peptide
  REGION 1..9: note = XENP019336 vhCDR3
TGWLGPLDY

SEQ ID NO: 8820 - protein, 215 aa, synthetic construct; identical to SEQ ID NO: 7600
  REGION 1..215: note = Description of Artificial Sequence: Synthetic polypeptide
  REGION 1..215: note = XENP019336 [CTLA-4]_H0.122_L0_Fab Light Chain

SEQ ID NO: 8821 - protein, 108 aa, synthetic construct; identical to SEQ ID NO: 3741
  REGION 1..108: note = Description of Artificial Sequence: Synthetic polypeptide
  REGION 1..108: note = VL of XENP019336

SEQ ID NO: 8822 - protein, 12 aa, synthetic construct
  REGION 1..12: note = Description of Artificial Sequence: Synthetic peptide
  REGION 1..12: note = XENP019336 vlCDR1
RASQSVGSSYLA

SEQ ID NO: 8823 - protein, 7 aa, synthetic construct
  REGION 1..7: note = Description of Artificial Sequence: Synthetic peptide
  REGION 1..7: note = XENP019336 vlCDR2
GAFSRAT

SEQ ID NO: 8824 - protein, 9 aa, synthetic construct
  REGION 1..9: note = Description of Artificial Sequence: Synthetic peptide
  REGION 1..9: note = XENP019336 vlCDR3
QQYGSSPWT

SEQ ID NO: 8825 - protein, 221 aa, synthetic construct
  REGION 1..221: note = Description of Artificial Sequence: Synthetic polypeptide
  REGION 1..221: note = XENP019337 [CTLA-4]_H0.123_L0_Fab Heavy Chain
QVQLVESGGGVVQPGRSLRLSCAASGFTFSSYTMHWVRQAPGKGLEWVTFISYDGNNKYYADSVKGRFTISRDNSKNTLYLQMNSLRAEDTAIYYCARTGWLGPMDYWGQGTLVTVSSASTKGPSVFPLAPSSKSTSGGTAALGCLVKDYFPEPVTVSWNSGALTSGVHTFPAVLQSSGLYSLSSVVTVPSSSLGTQTYICNVNHKPSNTKVDKKVEPKSC

SEQ ID NO: 8826 - protein, 118 aa, synthetic construct; identical to SEQ ID NO: 5967
  REGION 1..118: note = Description of Artificial Sequence: Synthetic polypeptide
  REGION 1..118: note = VH of XENP019337

SEQ ID NO: 8827 - protein, 5 aa, synthetic construct
  REGION 1..5: note = Description of Artificial Sequence: Synthetic peptide
  REGION 1..5: note = XENP019337 vhCDR1
SYTMH

SEQ ID NO: 8828 - protein, 17 aa, synthetic construct
  REGION 1..17: note = Description of Artificial Sequence: Synthetic peptide
  REGION 1..17: note = XENP019337 vhCDR2
FISYDGNNKYYADSVKG

SEQ ID NO: 8829 - protein, 9 aa, synthetic construct
  REGION 1..9: note = Description of Artificial Sequence: Synthetic peptide
  REGION 1..9: note = XENP019337 vhCDR3
TGWLGPMDY

SEQ ID NO: 8830 - protein, 215 aa, synthetic construct; identical to SEQ ID NO: 7600
  REGION 1..215: note = Description of Artificial Sequence: Synthetic polypeptide
  REGION 1..215: note = XENP019337 [CTLA-4]_H0.123_L0_Fab Light Chain

SEQ ID NO: 8831 - protein, 108 aa, synthetic construct; identical to SEQ ID NO: 3741
  REGION 1..108: note = Description of Artificial Sequence: Synthetic polypeptide
  REGION 1..108: note = VL of XENP019337

SEQ ID NO: 8832 - protein, 12 aa, synthetic construct
  REGION 1..12: note = Description of Artificial Sequence: Synthetic peptide
  REGION 1..12: note = XENP019337 vlCDR1
RASQSVGSSYLA

SEQ ID NO: 8833 - protein, 7 aa, synthetic construct
  REGION 1..7: note = Description of Artificial Sequence: Synthetic peptide
  REGION 1..7: note = XENP019337 vlCDR2
GAFSRAT

SEQ ID NO: 8834 - protein, 9 aa, synthetic construct
  REGION 1..9: note = Description of Artificial Sequence: Synthetic peptide
  REGION 1..9: note = XENP019337 vlCDR3
QQYGSSPWT

SEQ ID NO: 8835 - protein, 221 aa, synthetic construct
  REGION 1..221: note = Description of Artificial Sequence: Synthetic polypeptide
  REGION 1..221: note = XENP019338 [CTLA-4]_H0.124_L0_Fab Heavy Chain
QVQLVESGGGVVQPGRSLRLSCAASGFTFSSYTMHWVRQAPGKGLEWVTFISYDGNNKYYADSVKGRFTISRDNSKNTLYLQMNSLRAEDTAIYYCARTGWLGPFAYWGQGTLVTVSSASTKGPSVFPLAPSSKSTSGGTAALGCLVKDYFPEPVTVSWNSGALTSGVHTFPAVLQSSGLYSLSSVVTVPSSSLGTQTYICNVNHKPSNTKVDKKVEPKSC

SEQ ID NO: 8836 - protein, 118 aa, synthetic construct; identical to SEQ ID NO: 5976
  REGION 1..118: note = Description of Artificial Sequence: Synthetic polypeptide
  REGION 1..118: note = VH of XENP019338

SEQ ID NO: 8837 - protein, 5 aa, synthetic construct
  REGION 1..5: note = Description of Artificial Sequence: Synthetic peptide
  REGION 1..5: note = XENP019338 vhCDR1
SYTMH

SEQ ID NO: 8838 - protein, 17 aa, synthetic construct
  REGION 1..17: note = Description of Artificial Sequence: Synthetic peptide
  REGION 1..17: note = XENP019338 vhCDR2
FISYDGNNKYYADSVKG

SEQ ID NO: 8839 - protein, 9 aa, synthetic construct
  REGION 1..9: note = Description of Artificial Sequence: Synthetic peptide
  REGION 1..9: note = XENP019338 vhCDR3
TGWLGPFAY

SEQ ID NO: 8840 - protein, 215 aa, synthetic construct; identical to SEQ ID NO: 7600
  REGION 1..215: note = Description of Artificial Sequence: Synthetic polypeptide
  REGION 1..215: note = XENP019338 [CTLA-4]_H0.124_L0_Fab Light Chain

SEQ ID NO: 8841 - protein, 108 aa, synthetic construct; identical to SEQ ID NO: 3741
  REGION 1..108: note = Description of Artificial Sequence: Synthetic polypeptide
  REGION 1..108: note = VL of XENP019338

SEQ ID NO: 8842 - protein, 12 aa, synthetic construct
  REGION 1..12: note = Description of Artificial Sequence: Synthetic peptide
  REGION 1..12: note = XENP019338 vlCDR1
RASQSVGSSYLA

SEQ ID NO: 8843 - protein, 7 aa, synthetic construct
  REGION 1..7: note = Description of Artificial Sequence: Synthetic peptide
  REGION 1..7: note = XENP019338 vlCDR2
GAFSRAT

SEQ ID NO: 8844 - protein, 9 aa, synthetic construct
  REGION 1..9: note = Description of Artificial Sequence: Synthetic peptide
  REGION 1..9: note = XENP019338 vlCDR3
QQYGSSPWT

SEQ ID NO: 8845 - protein, 221 aa, synthetic construct
  REGION 1..221: note = Description of Artificial Sequence: Synthetic polypeptide
  REGION 1..221: note = XENP019339 [CTLA-4]_H0.125_L0_Fab Heavy Chain
QVQLVESGGGVVQPGRSLRLSCAASGFTFSSYTMHWVRQAPGKGLEWVTFISYDGNNKYYADSVKGRFTISRDNSKNTLYLQMNSLRAEDTAIYYCARTGWLGPFEYWGQGTLVTVSSASTKGPSVFPLAPSSKSTSGGTAALGCLVKDYFPEPVTVSWNSGALTSGVHTFPAVLQSSGLYSLSSVVTVPSSSLGTQTYICNVNHKPSNTKVDKKVEPKSC

SEQ ID NO: 8846 - protein, 118 aa, synthetic construct; identical to SEQ ID NO: 5985
  REGION 1..118: note = Description of Artificial Sequence: Synthetic polypeptide
  REGION 1..118: note = VH of XENP019339

SEQ ID NO: 8847 - protein, 5 aa, synthetic construct
  REGION 1..5: note = Description of Artificial Sequence: Synthetic peptide
  REGION 1..5: note = XENP019339 vhCDR1
SYTMH

SEQ ID NO: 8848 - protein, 17 aa, synthetic construct
  REGION 1..17: note = Description of Artificial Sequence: Synthetic peptide
  REGION 1..17: note = XENP019339 vhCDR2
FISYDGNNKYYADSVKG

SEQ ID NO: 8849 - protein, 9 aa, synthetic construct
  REGION 1..9: note = Description of Artificial Sequence: Synthetic peptide
  REGION 1..9: note = XENP019339 vhCDR3
TGWLGPFEY

SEQ ID NO: 8850 - protein, 215 aa, synthetic construct; identical to SEQ ID NO: 7600
  REGION 1..215: note = Description of Artificial Sequence: Synthetic polypeptide
  REGION 1..215: note = XENP019339 [CTLA-4]_H0.125_L0_Fab Light Chain

SEQ ID NO: 8851 - protein, 108 aa, synthetic construct; identical to SEQ ID NO: 3741
  REGION 1..108: note = Description of Artificial Sequence: Synthetic polypeptide
  REGION 1..108: note = VL of XENP019339

SEQ ID NO: 8852 - protein, 12 aa, synthetic construct
  REGION 1..12: note = Description of Artificial Sequence: Synthetic peptide
  REGION 1..12: note = XENP019339 vlCDR1
RASQSVGSSYLA

SEQ ID NO: 8853 - protein, 7 aa, synthetic construct
  REGION 1..7: note = Description of Artificial Sequence: Synthetic peptide
  REGION 1..7: note = XENP019339 vlCDR2
GAFSRAT

SEQ ID NO: 8854 - protein, 9 aa, synthetic construct
  REGION 1..9: note = Description of Artificial Sequence: Synthetic peptide
  REGION 1..9: note = XENP019339 vlCDR3
QQYGSSPWT

SEQ ID NO: 8855 - protein, 221 aa, synthetic construct
  REGION 1..221: note = Description of Artificial Sequence: Synthetic polypeptide
  REGION 1..221: note = XENP019340 [CTLA-4]_H0.126_L0_Fab Heavy Chain
QVQLVESGGGVVQPGRSLRLSCAASGFTFSSYTMHWVRQAPGKGLEWVTFISYDGNNKYYADSVKGRFTISRDNSKNTLYLQMNSLRAEDTAIYYCARTGWLGPFHYWGQGTLVTVSSASTKGPSVFPLAPSSKSTSGGTAALGCLVKDYFPEPVTVSWNSGALTSGVHTFPAVLQSSGLYSLSSVVTVPSSSLGTQTYICNVNHKPSNTKVDKKVEPKSC

SEQ ID NO: 8856 - protein, 118 aa, synthetic construct; identical to SEQ ID NO: 5994
  REGION 1..118: note = Description of Artificial Sequence: Synthetic polypeptide
  REGION 1..118: note = VH of XENP019340

SEQ ID NO: 8857 - protein, 5 aa, synthetic construct
  REGION 1..5: note = Description of Artificial Sequence: Synthetic peptide
  REGION 1..5: note = XENP019340 vhCDR1
SYTMH

SEQ ID NO: 8858 - protein, 17 aa, synthetic construct
  REGION 1..17: note = Description of Artificial Sequence: Synthetic peptide
  REGION 1..17: note = XENP019340 vhCDR2
FISYDGNNKYYADSVKG

SEQ ID NO: 8859 - protein, 9 aa, synthetic construct
  REGION 1..9: note = Description of Artificial Sequence: Synthetic peptide
  REGION 1..9: note = XENP019340 vhCDR3
TGWLGPFHY

SEQ ID NO: 8860 - protein, 215 aa, synthetic construct; identical to SEQ ID NO: 7600
  REGION 1..215: note = Description of Artificial Sequence: Synthetic polypeptide
  REGION 1..215: note = XENP019340 [CTLA-4]_H0.126_L0_Fab Light Chain

SEQ ID NO: 8861 - protein, 108 aa, synthetic construct; identical to SEQ ID NO: 3741
  REGION 1..108: note = Description of Artificial Sequence: Synthetic polypeptide
  REGION 1..108: note = VL of XENP019340

SEQ ID NO: 8862 - protein, 12 aa, synthetic construct
  REGION 1..12: note = Description of Artificial Sequence: Synthetic peptide
  REGION 1..12: note = XENP019340 vlCDR1
RASQSVGSSYLA

SEQ ID NO: 8863 - protein, 7 aa, synthetic construct
  REGION 1..7: note = Description of Artificial Sequence: Synthetic peptide
  REGION 1..7: note = XENP019340 vlCDR2
GAFSRAT

SEQ ID NO: 8864 - protein, 9 aa, synthetic construct
  REGION 1..9: note = Description of Artificial Sequence: Synthetic peptide
  REGION 1..9: note = XENP019340 vlCDR3
QQYGSSPWT

SEQ ID NO: 8865 - protein, 221 aa, synthetic construct
  REGION 1..221: note = Description of Artificial Sequence: Synthetic polypeptide
  REGION 1..221: note = XENP019341 [CTLA-4]_H0.127_L0_Fab Heavy Chain
QVQLVESGGGVVQPGRSLRLSCAASGFTFSSYTMHWVRQAPGKGLEWVTFISYDGNNKYYADSVKGRFTISRDNSKNTLYLQMNSLRAEDTAIYYCARTGWLGPFNYWGQGTLVTVSSASTKGPSVFPLAPSSKSTSGGTAALGCLVKDYFPEPVTVSWNSGALTSGVHTFPAVLQSSGLYSLSSVVTVPSSSLGTQTYICNVNHKPSNTKVDKKVEPKSC

SEQ ID NO: 8866 - protein, 118 aa, synthetic construct; identical to SEQ ID NO: 6003
  REGION 1..118: note = Description of Artificial Sequence: Synthetic polypeptide
  REGION 1..118: note = VH of XENP019341

SEQ ID NO: 8867 - protein, 5 aa, synthetic construct
  REGION 1..5: note = Description of Artificial Sequence: Synthetic peptide
  REGION 1..5: note = XENP019341 vhCDR1
SYTMH

SEQ ID NO: 8868 - protein, 17 aa, synthetic construct
  REGION 1..17: note = Description of Artificial Sequence: Synthetic peptide
  REGION 1..17: note = XENP019341 vhCDR2
FISYDGNNKYYADSVKG

SEQ ID NO: 8869 - protein, 9 aa, synthetic construct
  REGION 1..9: note = Description of Artificial Sequence: Synthetic peptide
  REGION 1..9: note = XENP019341 vhCDR3
TGWLGPFNY

SEQ ID NO: 8870 - protein, 215 aa, synthetic construct; identical to SEQ ID NO: 7600
  REGION 1..215: note = Description of Artificial Sequence: Synthetic polypeptide
  REGION 1..215: note = XENP019341 [CTLA-4]_H0.127_L0_Fab Light Chain

SEQ ID NO: 8871 - protein, 108 aa, synthetic construct; identical to SEQ ID NO: 3741
  REGION 1..108: note = Description of Artificial Sequence: Synthetic polypeptide
  REGION 1..108: note = VL of XENP019341

SEQ ID NO: 8872 - protein, 12 aa, synthetic construct
  REGION 1..12: note = Description of Artificial Sequence: Synthetic peptide
  REGION 1..12: note = XENP019341 vlCDR1
RASQSVGSSYLA

SEQ ID NO: 8873 - protein, 7 aa, synthetic construct
  REGION 1..7: note = Description of Artificial Sequence: Synthetic peptide
  REGION 1..7: note = XENP019341 vlCDR2
GAFSRAT

SEQ ID NO: 8874 - protein, 9 aa, synthetic construct
  REGION 1..9: note = Description of Artificial Sequence: Synthetic peptide
  REGION 1..9: note = XENP019341 vlCDR3
QQYGSSPWT

SEQ ID NO: 8875 - protein, 221 aa, synthetic construct
  REGION 1..221: note = Description of Artificial Sequence: Synthetic polypeptide
  REGION 1..221: note = XENP019342 [CTLA-4]_H0.128_L0_Fab Heavy Chain
QVQLVESGGGVVQPGRSLRLSCAASGFTFSSYTMHWVRQAPGKGLEWVTFISYDGNNKYYADSVKGRFTISRDNSKNTLYLQMNSLRAEDTAIYYCARTGWLGPFSYWGQGTLVTVSSASTKGPSVFPLAPSSKSTSGGTAALGCLVKDYFPEPVTVSWNSGALTSGVHTFPAVLQSSGLYSLSSVVTVPSSSLGTQTYICNVNHKPSNTKVDKKVEPKSC

SEQ ID NO: 8876 - protein, 118 aa, synthetic construct; identical to SEQ ID NO: 6012
  REGION 1..118: note = Description of Artificial Sequence: Synthetic polypeptide
  REGION 1..118: note = VH of XENP019342

SEQ ID NO: 8877 - protein, 5 aa, synthetic construct
  REGION 1..5: note = Description of Artificial Sequence: Synthetic peptide
  REGION 1..5: note = XENP019342 vhCDR1
SYTMH

SEQ ID NO: 8878 - protein, 17 aa, synthetic construct
  REGION 1..17: note = Description of Artificial Sequence: Synthetic peptide
  REGION 1..17: note = XENP019342 vhCDR2
FISYDGNNKYYADSVKG

SEQ ID NO: 8879 - protein, 9 aa, synthetic construct
  REGION 1..9: note = Description of Artificial Sequence: Synthetic peptide
  REGION 1..9: note = XENP019342 vhCDR3
TGWLGPFSY

SEQ ID NO: 8880 - protein, 215 aa, synthetic construct; identical to SEQ ID NO: 7600
  REGION 1..215: note = Description of Artificial Sequence: Synthetic polypeptide
  REGION 1..215: note = XENP019342 [CTLA-4]_H0.128_L0_Fab Light Chain

SEQ ID NO: 8881 - protein, 108 aa, synthetic construct; identical to SEQ ID NO: 3741
  REGION 1..108: note = Description of Artificial Sequence: Synthetic polypeptide
  REGION 1..108: note = VL of XENP019342

SEQ ID NO: 8882 - protein, 12 aa, synthetic construct
  REGION 1..12: note = Description of Artificial Sequence: Synthetic peptide
  REGION 1..12: note = XENP019342 vlCDR1
RASQSVGSSYLA

SEQ ID NO: 8883 - protein, 7 aa, synthetic construct
  REGION 1..7: note = Description of Artificial Sequence: Synthetic peptide
  REGION 1..7: note = XENP019342 vlCDR2
GAFSRAT

SEQ ID NO: 8884 - protein, 9 aa, synthetic construct
  REGION 1..9: note = Description of Artificial Sequence: Synthetic peptide
  REGION 1..9: note = XENP019342 vlCDR3
QQYGSSPWT

SEQ ID NO: 8885 - protein, 221 aa, synthetic construct
  REGION 1..221: note = Description of Artificial Sequence: Synthetic polypeptide
  REGION 1..221: note = XENP019343 [CTLA-4]_H0.129_L0_Fab Heavy Chain
QVQLVESGGGVVQPGRSLRLSCAASGFTFSSYTMHWVRQAPGKGLEWVTFISYDGNNKYYADSVKGRFTISRDNSKNTLYLQMNSLRAEDTAIYYCARTGWLGPFQYWGQGTLVTVSSASTKGPSVFPLAPSSKSTSGGTAALGCLVKDYFPEPVTVSWNSGALTSGVHTFPAVLQSSGLYSLSSVVTVPSSSLGTQTYICNVNHKPSNTKVDKKVEPKSC

SEQ ID NO: 8886 - protein, 118 aa, synthetic construct; identical to SEQ ID NO: 6021
  REGION 1..118: note = Description of Artificial Sequence: Synthetic polypeptide
  REGION 1..118: note = VH of XENP019343

SEQ ID NO: 8887 - protein, 5 aa, synthetic construct
  REGION 1..5: note = Description of Artificial Sequence: Synthetic peptide
  REGION 1..5: note = XENP019343 vhCDR1
SYTMH

SEQ ID NO: 8888 - protein, 17 aa, synthetic construct
  REGION 1..17: note = Description of Artificial Sequence: Synthetic peptide
  REGION 1..17: note = XENP019343 vhCDR2
FISYDGNNKYYADSVKG

SEQ ID NO: 8889 - protein, 9 aa, synthetic construct
  REGION 1..9: note = Description of Artificial Sequence: Synthetic peptide
  REGION 1..9: note = XENP019343 vhCDR3
TGWLGPFQY

SEQ ID NO: 8890 - protein, 215 aa, synthetic construct; identical to SEQ ID NO: 7600
  REGION 1..215: note = Description of Artificial Sequence: Synthetic polypeptide
  REGION 1..215: note = XENP019343 [CTLA-4]_H0.129_L0_Fab Light Chain

SEQ ID NO: 8891 - protein, 108 aa, synthetic construct; identical to SEQ ID NO: 3741
  REGION 1..108: note = Description of Artificial Sequence: Synthetic polypeptide
  REGION 1..108: note = VL of XENP019343

SEQ ID NO: 8892 - protein, 12 aa, synthetic construct
  REGION 1..12: note = Description of Artificial Sequence: Synthetic peptide
  REGION 1..12: note = XENP019343 vlCDR1
RASQSVGSSYLA

SEQ ID NO: 8893 - protein, 7 aa, synthetic construct
  REGION 1..7: note = Description of Artificial Sequence: Synthetic peptide
  REGION 1..7: note = XENP019343 vlCDR2
GAFSRAT

SEQ ID NO: 8894 - protein, 9 aa, synthetic construct
  REGION 1..9: note = Description of Artificial Sequence: Synthetic peptide
  REGION 1..9: note = XENP019343 vlCDR3
QQYGSSPWT

SEQ ID NO: 8895 - protein, 221 aa, synthetic construct
  REGION 1..221: note = Description of Artificial Sequence: Synthetic polypeptide
  REGION 1..221: note = XENP019344 [CTLA-4]_H0.130_L0_Fab Heavy Chain
QVQLVESGGGVVQPGRSLRLSCAASGFTFSSYTMHWVRQAPGKGLEWVTFISYDGNNKYYADSVKGRFTISRDNSKNTLYLQMNSLRAEDTAIYYCARTGWLGPFDHWGQGTLVTVSSASTKGPSVFPLAPSSKSTSGGTAALGCLVKDYFPEPVTVSWNSGALTSGVHTFPAVLQSSGLYSLSSVVTVPSSSLGTQTYICNVNHKPSNTKVDKKVEPKSC

SEQ ID NO: 8896 - protein, 118 aa, synthetic construct; identical to SEQ ID NO: 6030
  REGION 1..118: note = Description of Artificial Sequence: Synthetic polypeptide
  REGION 1..118: note = VH of XENP019344

SEQ ID NO: 8897 - protein, 5 aa, synthetic construct
  REGION 1..5: note = Description of Artificial Sequence: Synthetic peptide
  REGION 1..5: note = XENP019344 vhCDR1
SYTMH

SEQ ID NO: 8898 - protein, 17 aa, synthetic construct
  REGION 1..17: note = Description of Artificial Sequence: Synthetic peptide
  REGION 1..17: note = XENP019344 vhCDR2
FISYDGNNKYYADSVKG

SEQ ID NO: 8899 - protein, 9 aa, synthetic construct
  REGION 1..9: note = Description of Artificial Sequence: Synthetic peptide
  REGION 1..9: note = XENP019344 vhCDR3
TGWLGPFDH

SEQ ID NO: 8900 - protein, 215 aa, synthetic construct; identical to SEQ ID NO: 7600
  REGION 1..215: note = Description of Artificial Sequence: Synthetic polypeptide
  REGION 1..215: note = XENP019344 [CTLA-4]_H0.130_L0_Fab Light Chain

SEQ ID NO: 8901 - protein, 108 aa, synthetic construct; identical to SEQ ID NO: 3741
  REGION 1..108: note = Description of Artificial Sequence: Synthetic polypeptide
  REGION 1..108: note = VL of XENP019344

SEQ ID NO: 8902 - protein, 12 aa, synthetic construct
  REGION 1..12: note = Description of Artificial Sequence: Synthetic peptide
  REGION 1..12: note = XENP019344 vlCDR1
RASQSVGSSYLA

SEQ ID NO: 8903 - protein, 7 aa, synthetic construct
  REGION 1..7: note = Description of Artificial Sequence: Synthetic peptide
  REGION 1..7: note = XENP019344 vlCDR2
GAFSRAT

SEQ ID NO: 8904 - protein, 9 aa, synthetic construct
  REGION 1..9: note = Description of Artificial Sequence: Synthetic peptide
  REGION 1..9: note = XENP019344 vlCDR3
QQYGSSPWT

SEQ ID NO: 8905 - protein, 221 aa, synthetic construct
  REGION 1..221: note = Description of Artificial Sequence: Synthetic polypeptide
  REGION 1..221: note = XENP019345 [CTLA-4]_H0.131_L0_Fab Heavy Chain
QVQLVESGGGVVQPGRSLRLSCAASGFTFSSYTMHWVRQAPGKGLEWVTFISYDGNNKYYADSVKGRFTISRDNSKNTLYLQMNSLRAEDTAIYYCARTGWLGPFDLWGQGTLVTVSSASTKGPSVFPLAPSSKSTSGGTAALGCLVKDYFPEPVTVSWNSGALTSGVHTFPAVLQSSGLYSLSSVVTVPSSSLGTQTYICNVNHKPSNTKVDKKVEPKSC

SEQ ID NO: 8906 - protein, 118 aa, synthetic construct; identical to SEQ ID NO: 6039
  REGION 1..118: note = Description of Artificial Sequence: Synthetic polypeptide
  REGION 1..118: note = VH of XENP019345

SEQ ID NO: 8907 - protein, 5 aa, synthetic construct
  REGION 1..5: note = Description of Artificial Sequence: Synthetic peptide
  REGION 1..5: note = XENP019345 vhCDR1
SYTMH

SEQ ID NO: 8908 - protein, 17 aa, synthetic construct
  REGION 1..17: note = Description of Artificial Sequence: Synthetic peptide
  REGION 1..17: note = XENP019345 vhCDR2
FISYDGNNKYYADSVKG

SEQ ID NO: 8909 - protein, 9 aa, synthetic construct
  REGION 1..9: note = Description of Artificial Sequence: Synthetic peptide
  REGION 1..9: note = XENP019345 vhCDR3
TGWLGPFDL

SEQ ID NO: 8910 - protein, 215 aa, synthetic construct; identical to SEQ ID NO: 7600
  REGION 1..215: note = Description of Artificial Sequence: Synthetic polypeptide
  REGION 1..215: note = XENP019345 [CTLA-4]_H0.131_L0_Fab Light Chain

SEQ ID NO: 8911 - protein, 108 aa, synthetic construct; identical to SEQ ID NO: 3741
  REGION 1..108: note = Description of Artificial Sequence: Synthetic polypeptide
  REGION 1..108: note = VL of XENP019345

SEQ ID NO: 8912 - protein, 12 aa, synthetic construct
  REGION 1..12: note = Description of Artificial Sequence: Synthetic peptide
  REGION 1..12: note = XENP019345 vlCDR1
RASQSVGSSYLA

SEQ ID NO: 8913 - protein, 7 aa, synthetic construct
  REGION 1..7: note = Description of Artificial Sequence: Synthetic peptide
  REGION 1..7: note = XENP019345 vlCDR2
GAFSRAT

SEQ ID NO: 8914 - protein, 9 aa, synthetic construct
  REGION 1..9: note = Description of Artificial Sequence: Synthetic peptide
  REGION 1..9: note = XENP019345 vlCDR3
QQYGSSPWT

SEQ ID NO: 8915 - protein, 221 aa, synthetic construct
  REGION 1..221: note = Description of Artificial Sequence: Synthetic polypeptide
  REGION 1..221: note = XENP019346 [CTLA-4]_H0.132_L0_Fab Heavy Chain
QVQLVESGGGVVQPGRSLRLSCAASGFTFSSYTMHWVRQAPGKGLEWVTFISYDGNNKYYADSVKGRFTISRDNSKNTLYLQMNSLRAEDTAIYYCARTGWLGPFDSWGQGTLVTVSSASTKGPSVFPLAPSSKSTSGGTAALGCLVKDYFPEPVTVSWNSGALTSGVHTFPAVLQSSGLYSLSSVVTVPSSSLGTQTYICNVNHKPSNTKVDKKVEPKSC

SEQ ID NO: 8916 - protein, 118 aa, synthetic construct; identical to SEQ ID NO: 6048
  REGION 1..118: note = Description of Artificial Sequence: Synthetic polypeptide
  REGION 1..118: note = VH of XENP019346

SEQ ID NO: 8917 - protein, 5 aa, synthetic construct
  REGION 1..5: note = Description of Artificial Sequence: Synthetic peptide
  REGION 1..5: note = XENP019346 vhCDR1
SYTMH

SEQ ID NO: 8918 - protein, 17 aa, synthetic construct
  REGION 1..17: note = Description of Artificial Sequence: Synthetic peptide
  REGION 1..17: note = XENP019346 vhCDR2
FISYDGNNKYYADSVKG

SEQ ID NO: 8919 - protein, 9 aa, synthetic construct
  REGION 1..9: note = Description of Artificial Sequence: Synthetic peptide
  REGION 1..9: note = XENP019346 vhCDR3
TGWLGPFDS

SEQ ID NO: 8920 - protein, 215 aa, synthetic construct; identical to SEQ ID NO: 7600
  REGION 1..215: note = Description of Artificial Sequence: Synthetic polypeptide
  REGION 1..215: note = XENP019346 [CTLA-4]_H0.132_L0_Fab Light Chain

SEQ ID NO: 8921 - protein, 108 aa, synthetic construct; identical to SEQ ID NO: 3741
  REGION 1..108: note = Description of Artificial Sequence: Synthetic polypeptide
  REGION 1..108: note = VL of XENP019346

SEQ ID NO: 8922 - protein, 12 aa, synthetic construct
  REGION 1..12: note = Description of Artificial Sequence: Synthetic peptide
  REGION 1..12: note = XENP019346 vlCDR1
RASQSVGSSYLA

SEQ ID NO: 8923 - protein, 7 aa, synthetic construct
  REGION 1..7: note = Description of Artificial Sequence: Synthetic peptide
  REGION 1..7: note = XENP019346 vlCDR2
GAFSRAT

SEQ ID NO: 8924 - protein, 9 aa, synthetic construct
  REGION 1..9: note = Description of Artificial Sequence: Synthetic peptide
  REGION 1..9: note = XENP019346 vlCDR3
QQYGSSPWT

SEQ ID NO: 8925 - protein, 221 aa, synthetic construct
  REGION 1..221: note = Description of Artificial Sequence: Synthetic polypeptide
  REGION 1..221: note = XENP019347 [CTLA-4]_H0.133_L0_Fab Heavy Chain
QVQLVESGGGVVQPGRSLRLSCAASGFTFSSYTMHWVRQAPGKGLEWVTFISYDGNNKYYADSVKGRFTISRDNSKNTLYLQMNSLRAEDTAIYYCARTGWLGPFDVWGQGTLVTVSSASTKGPSVFPLAPSSKSTSGGTAALGCLVKDYFPEPVTVSWNSGALTSGVHTFPAVLQSSGLYSLSSVVTVPSSSLGTQTYICNVNHKPSNTKVDKKVEPKSC

SEQ ID NO: 8926 - protein, 118 aa, synthetic construct; identical to SEQ ID NO: 6057
  REGION 1..118: note = Description of Artificial Sequence: Synthetic polypeptide
  REGION 1..118: note = VH of XENP019347

SEQ ID NO: 8927 - protein, 5 aa, synthetic construct
  REGION 1..5: note = Description of Artificial Sequence: Synthetic peptide
  REGION 1..5: note = XENP019347 vhCDR1
SYTMH

SEQ ID NO: 8928 - protein, 17 aa, synthetic construct
  REGION 1..17: note = Description of Artificial Sequence: Synthetic peptide
  REGION 1..17: note = XENP019347 vhCDR2
FISYDGNNKYYADSVKG

SEQ ID NO: 8929 - protein, 9 aa, synthetic construct
  REGION 1..9: note = Description of Artificial Sequence: Synthetic peptide
  REGION 1..9: note = XENP019347 vhCDR3
TGWLGPFDV

SEQ ID NO: 8930 - protein, 215 aa, synthetic construct; identical to SEQ ID NO: 7600
  REGION 1..215: note = Description of Artificial Sequence: Synthetic polypeptide
  REGION 1..215: note = XENP019347 [CTLA-4]_H0.133_L0_Fab Light Chain

SEQ ID NO: 8931 - protein, 108 aa, synthetic construct; identical to SEQ ID NO: 3741
  REGION 1..108: note = Description of Artificial Sequence: Synthetic polypeptide
  REGION 1..108: note = VL of XENP019347

SEQ ID NO: 8932 - protein, 12 aa, synthetic construct
  REGION 1..12: note = Description of Artificial Sequence: Synthetic peptide
  REGION 1..12: note = XENP019347 vlCDR1
RASQSVGSSYLA

SEQ ID NO: 8933 - protein, 7 aa, synthetic construct
  REGION 1..7: note = Description of Artificial Sequence: Synthetic peptide
  REGION 1..7: note = XENP019347 vlCDR2
GAFSRAT

SEQ ID NO: 8934 - protein, 9 aa, synthetic construct
  REGION 1..9: note = Description of Artificial Sequence: Synthetic peptide
  REGION 1..9: note = XENP019347 vlCDR3
QQYGSSPWT

SEQ ID NO: 8935 - protein, 221 aa, synthetic construct
  REGION 1..221: note = Description of Artificial Sequence: Synthetic polypeptide
  REGION 1..221: note = XENP019348 [CTLA-4]_H0.134_L0_Fab Heavy Chain
QVQLVESGGGVVQPGRSLRLSCAASGFTFSSYTMHWVRQAPGKGLEWVTFISYDGNNKYYADSVKGRFTISRDNSKNTLYLQMNSLRAEDTAIYYCARTGWLGPFDYWGRGTLVTVSSASTKGPSVFPLAPSSKSTSGGTAALGCLVKDYFPEPVTVSWNSGALTSGVHTFPAVLQSSGLYSLSSVVTVPSSSLGTQTYICNVNHKPSNTKVDKKVEPKSC

SEQ ID NO: 8936 - protein, 118 aa, synthetic construct; identical to SEQ ID NO: 4743
  REGION 1..118: note = Description of Artificial Sequence: Synthetic polypeptide
  REGION 1..118: note = VH of XENP019348

SEQ ID NO: 8937 - protein, 5 aa, synthetic construct
  REGION 1..5: note = Description of Artificial Sequence: Synthetic peptide
  REGION 1..5: note = XENP019348 vhCDR1
SYTMH

SEQ ID NO: 8938 - protein, 17 aa, synthetic construct
  REGION 1..17: note = Description of Artificial Sequence: Synthetic peptide
  REGION 1..17: note = XENP019348 vhCDR2
FISYDGNNKYYADSVKG

SEQ ID NO: 8939 - protein, 9 aa, synthetic construct
  REGION 1..9: note = Description of Artificial Sequence: Synthetic peptide
  REGION 1..9: note = XENP019348 vhCDR3
TGWLGPFDY

SEQ ID NO: 8940 - protein, 215 aa, synthetic construct; identical to SEQ ID NO: 7600
  REGION 1..215: note = Description of Artificial Sequence: Synthetic polypeptide
  REGION 1..215: note = XENP019348 [CTLA-4]_H0.134_L0_Fab Light Chain

SEQ ID NO: 8941 - protein, 108 aa, synthetic construct; identical to SEQ ID NO: 3741
  REGION 1..108: note = Description of Artificial Sequence: Synthetic polypeptide
  REGION 1..108: note = VL of XENP019348

SEQ ID NO: 8942 - protein, 12 aa, synthetic construct
  REGION 1..12: note = Description of Artificial Sequence: Synthetic peptide
  REGION 1..12: note = XENP019348 vlCDR1
RASQSVGSSYLA

SEQ ID NO: 8943 - protein, 7 aa, synthetic construct
  REGION 1..7: note = Description of Artificial Sequence: Synthetic peptide
  REGION 1..7: note = XENP019348 vlCDR2
GAFSRAT

SEQ ID NO: 8944 - protein, 9 aa, synthetic construct
  REGION 1..9: note = Description of Artificial Sequence: Synthetic peptide
  REGION 1..9: note = XENP019348 vlCDR3
QQYGSSPWT

SEQ ID NO: 8945 - protein, 221 aa, synthetic construct
  REGION 1..221: note = Description of Artificial Sequence: Synthetic polypeptide
  REGION 1..221: note = XENP019349 [CTLA-4]_H0.135_L0_Fab Heavy Chain
QVQLVESGGGVVQPGRSLRLSCAASGFTFSSYTMHWVRQAPGKGLEWVTFISYDGNNKYYADSVKGRFTISRDNSKNTLYLQMNSLRAEDTAIYYCARTGWLGPFDYWGQGTMVTVSSASTKGPSVFPLAPSSKSTSGGTAALGCLVKDYFPEPVTVSWNSGALTSGVHTFPAVLQSSGLYSLSSVVTVPSSSLGTQTYICNVNHKPSNTKVDKKVEPKSC

SEQ ID NO: 8946 - protein, 118 aa, synthetic construct; identical to SEQ ID NO: 6075
  REGION 1..118: note = Description of Artificial Sequence: Synthetic polypeptide
  REGION 1..118: note = VH of XENP019349

SEQ ID NO: 8947 - protein, 5 aa, synthetic construct
  REGION 1..5: note = Description of Artificial Sequence: Synthetic peptide
  REGION 1..5: note = XENP019349 vhCDR1
SYTMH

SEQ ID NO: 8948 - protein, 17 aa, synthetic construct
  REGION 1..17: note = Description of Artificial Sequence: Synthetic peptide
  REGION 1..17: note = XENP019349 vhCDR2
FISYDGNNKYYADSVKG

SEQ ID NO: 8949 - protein, 9 aa, synthetic construct
  REGION 1..9: note = Description of Artificial Sequence: Synthetic peptide
  REGION 1..9: note = XENP019349 vhCDR3
TGWLGPFDY

SEQ ID NO: 8950 - protein, 215 aa, synthetic construct; identical to SEQ ID NO: 7600
  REGION 1..215: note = Description of Artificial Sequence: Synthetic polypeptide
  REGION 1..215: note = XENP019349 [CTLA-4]_H0.135_L0_Fab Light Chain

SEQ ID NO: 8951 - protein, 108 aa, synthetic construct; identical to SEQ ID NO: 3741
  REGION 1..108: note = Description of Artificial Sequence: Synthetic polypeptide
  REGION 1..108: note = VL of XENP019349

SEQ ID NO: 8952 - protein, 12 aa, synthetic construct
  REGION 1..12: note = Description of Artificial Sequence: Synthetic peptide
  REGION 1..12: note = XENP019349 vlCDR1
RASQSVGSSYLA

SEQ ID NO: 8953 - protein, 7 aa, synthetic construct
  REGION 1..7: note = Description of Artificial Sequence: Synthetic peptide
  REGION 1..7: note = XENP019349 vlCDR2
GAFSRAT

SEQ ID NO: 8954 - protein, 9 aa, synthetic construct
  REGION 1..9: note = Description of Artificial Sequence: Synthetic peptide
  REGION 1..9: note = XENP019349 vlCDR3
QQYGSSPWT

SEQ ID NO: 8955 - protein, 221 aa, synthetic construct
  REGION 1..221: note = Description of Artificial Sequence: Synthetic polypeptide
  REGION 1..221: note = XENP019350 [CTLA-4]_H0.136_L0_Fab Heavy Chain
QVQLVESGGGVVQPGRSLRLSCAASGFTFSSYTMHWVRQAPGKGLEWVTFISYDGNNKYYADSVKGRFTISRDNSKNTLYLQMNSLRAEDTAIYYCARTGWLGPFDYWGQGTTVTVSSASTKGPSVFPLAPSSKSTSGGTAALGCLVKDYFPEPVTVSWNSGALTSGVHTFPAVLQSSGLYSLSSVVTVPSSSLGTQTYICNVNHKPSNTKVDKKVEPKSC

SEQ ID NO: 8956 - protein, 118 aa, synthetic construct; identical to SEQ ID NO: 6084
  REGION 1..118: note = Description of Artificial Sequence: Synthetic polypeptide
  REGION 1..118: note = VH of XENP019350

SEQ ID NO: 8957 - protein, 5 aa, synthetic construct
  REGION 1..5: note = Description of Artificial Sequence: Synthetic peptide
  REGION 1..5: note = XENP019350 vhCDR1
SYTMH

SEQ ID NO: 8958 - protein, 17 aa, synthetic construct
  REGION 1..17: note = Description of Artificial Sequence: Synthetic peptide
  REGION 1..17: note = XENP019350 vhCDR2
FISYDGNNKYYADSVKG

SEQ ID NO: 8959 - protein, 9 aa, synthetic construct
  REGION 1..9: note = Description of Artificial Sequence: Synthetic peptide
  REGION 1..9: note = XENP019350 vhCDR3
TGWLGPFDY

SEQ ID NO: 8960 - protein, 215 aa, synthetic construct; identical to SEQ ID NO: 7600
  REGION 1..215: note = Description of Artificial Sequence: Synthetic polypeptide
  REGION 1..215: note = XENP019350 [CTLA-4]_H0.136_L0_Fab Light Chain

SEQ ID NO: 8961 - protein, 108 aa, synthetic construct; identical to SEQ ID NO: 3741
  REGION 1..108: note = Description of Artificial Sequence: Synthetic polypeptide
  REGION 1..108: note = VL of XENP019350

SEQ ID NO: 8962 - protein, 12 aa, synthetic construct
  REGION 1..12: note = Description of Artificial Sequence: Synthetic peptide
  REGION 1..12: note = XENP019350 vlCDR1
RASQSVGSSYLA

SEQ ID NO: 8963 - protein, 7 aa, synthetic construct
  REGION 1..7: note = Description of Artificial Sequence: Synthetic peptide
  REGION 1..7: note = XENP019350 vlCDR2
GAFSRAT

SEQ ID NO: 8964 - protein, 9 aa, synthetic construct
  REGION 1..9: note = Description of Artificial Sequence: Synthetic peptide
  REGION 1..9: note = XENP019350 vlCDR3
QQYGSSPWT

SEQ ID NO: 8965 - protein, 221 aa, synthetic construct; identical to SEQ ID NO: 7595
  REGION 1..221: note = Description of Artificial Sequence: Synthetic polypeptide
  REGION 1..221: note = XENP019416 [CTLA-4]_H0_L0.1_Fab Heavy Chain

SEQ ID NO: 8966 - protein, 118 aa, synthetic construct; identical to SEQ ID NO: 3737
  REGION 1..118: note = Description of Artificial Sequence: Synthetic polypeptide
  REGION 1..118: note = VH of XENP019416

SEQ ID NO: 8967 - protein, 5 aa, synthetic construct
  REGION 1..5: note = Description of Artificial Sequence: Synthetic peptide
  REGION 1..5: note = XENP019416 vhCDR1
SYTMH

SEQ ID NO: 8968 - protein, 17 aa, synthetic construct
  REGION 1..17: note = Description of Artificial Sequence: Synthetic peptide
  REGION 1..17: note = XENP019416 vhCDR2
FISYDGNNKYYADSVKG

SEQ ID NO: 8969 - protein, 9 aa, synthetic construct
  REGION 1..9: note = Description of Artificial Sequence: Synthetic peptide
  REGION 1..9: note = XENP019416 vhCDR3
TGWLGPFDY

SEQ ID NO: 8970 - protein, 215 aa, synthetic construct
  REGION 1..215: note = Description of Artificial Sequence: Synthetic polypeptide
  REGION 1..215: note = XENP019416 [CTLA-4]_H0_L0.1_Fab Light Chain
AIVLTQSPGTLSLSPGERATLSCRASQSVGSSYLAWYQQKPGQAPRLLIYGAFSRATGIPDRFSGSGSGTDFTLTISRLEPEDFAVYYCQQYGSSPWTFGQGTKVEIKRTVAAPSVFIFPPSDEQLKSGTASVVCLLNNFYPREAKVQWKVDNALQSGNSQESVTEQDSKDSTYSLSSTLTLSKADYEKHKVYACEVTHQGLSSPVTKSFNRGEC

SEQ ID NO: 8971 - protein, 108 aa, synthetic construct; identical to SEQ ID NO: 6094
  REGION 1..108: note = Description of Artificial Sequence: Synthetic polypeptide
  REGION 1..108: note = VL of XENP019416

SEQ ID NO: 8972 - protein, 12 aa, synthetic construct
  REGION 1..12: note = Description of Artificial Sequence: Synthetic peptide
  REGION 1..12: note = XENP019416 vlCDR1
RASQSVGSSYLA

SEQ ID NO: 8973 - protein, 7 aa, synthetic construct
  REGION 1..7: note = Description of Artificial Sequence: Synthetic peptide
  REGION 1..7: note = XENP019416 vlCDR2
GAFSRAT

SEQ ID NO: 8974 - protein, 9 aa, synthetic construct
  REGION 1..9: note = Description of Artificial Sequence: Synthetic peptide
  REGION 1..9: note = XENP019416 vlCDR3
QQYGSSPWT

SEQ ID NO: 8975 - protein, 221 aa, synthetic construct; identical to SEQ ID NO: 7595
  REGION 1..221: note = Description of Artificial Sequence: Synthetic polypeptide
  REGION 1..221: note = XENP019417 [CTLA-4]_H0_L0.2_Fab Heavy Chain

SEQ ID NO: 8976 - protein, 118 aa, synthetic construct; identical to SEQ ID NO: 3737
  REGION 1..118: note = Description of Artificial Sequence: Synthetic polypeptide
  REGION 1..118: note = VH of XENP019417

SEQ ID NO: 8977 - protein, 5 aa, synthetic construct
  REGION 1..5: note = Description of Artificial Sequence: Synthetic peptide
  REGION 1..5: note = XENP019417 vhCDR1
SYTMH

SEQ ID NO: 8978 - protein, 17 aa, synthetic construct
  REGION 1..17: note = Description of Artificial Sequence: Synthetic peptide
  REGION 1..17: note = XENP019417 vhCDR2
FISYDGNNKYYADSVKG

SEQ ID NO: 8979 - protein, 9 aa, synthetic construct
  REGION 1..9: note = Description of Artificial Sequence: Synthetic peptide
  REGION 1..9: note = XENP019417 vhCDR3
TGWLGPFDY

SEQ ID NO: 8980 - protein, 215 aa, synthetic construct
  REGION 1..215: note = Description of Artificial Sequence: Synthetic polypeptide
  REGION 1..215: note = XENP019417 [CTLA-4]_H0_L0.2_Fab Light Chain
DIVLTQSPGTLSLSPGERATLSCRASQSVGSSYLAWYQQKPGQAPRLLIYGAFSRATGIPDRFSGSGSGTDFTLTISRLEPEDFAVYYCQQYGSSPWTFGQGTKVEIKRTVAAPSVFIFPPSDEQLKSGTASVVCLLNNFYPREAKVQWKVDNALQSGNSQESVTEQDSKDSTYSLSSTLTLSKADYEKHKVYACEVTHQGLSSPVTKSFNRGEC

SEQ ID NO: 8981 - protein, 108 aa, synthetic construct; identical to SEQ ID NO: 6103
  REGION 1..108: note = Description of Artificial Sequence: Synthetic polypeptide
  REGION 1..108: note = VL of XENP019417

SEQ ID NO: 8982 - protein, 12 aa, synthetic construct
  REGION 1..12: note = Description of Artificial Sequence: Synthetic peptide
  REGION 1..12: note = XENP019417 vlCDR1
RASQSVGSSYLA

SEQ ID NO: 8983 - protein, 7 aa, synthetic construct
  REGION 1..7: note = Description of Artificial Sequence: Synthetic peptide
  REGION 1..7: note = XENP019417 vlCDR2
GAFSRAT

SEQ ID NO: 8984 - protein, 9 aa, synthetic construct
  REGION 1..9: note = Description of Artificial Sequence: Synthetic peptide
  REGION 1..9: note = XENP019417 vlCDR3
QQYGSSPWT

SEQ ID NO: 8985 - protein, 221 aa, synthetic construct; identical to SEQ ID NO: 7595
  REGION 1..221: note = Description of Artificial Sequence: Synthetic polypeptide
  REGION 1..221: note = XENP019418 [CTLA-4]_H0_L0.3_Fab Heavy Chain

SEQ ID NO: 8986 - protein, 118 aa, synthetic construct; identical to SEQ ID NO: 3737
  REGION 1..118: note = Description of Artificial Sequence: Synthetic polypeptide
  REGION 1..118: note = VH of XENP019418

SEQ ID NO: 8987 - protein, 5 aa, synthetic construct
  REGION 1..5: note = Description of Artificial Sequence: Synthetic peptide
  REGION 1..5: note = XENP019418 vhCDR1
SYTMH

SEQ ID NO: 8988 - protein, 17 aa, synthetic construct
  REGION 1..17: note = Description of Artificial Sequence: Synthetic peptide
  REGION 1..17: note = XENP019418 vhCDR2
FISYDGNNKYYADSVKG

SEQ ID NO: 8989 - protein, 9 aa, synthetic construct
  REGION 1..9: note = Description of Artificial Sequence: Synthetic peptide
  REGION 1..9: note = XENP019418 vhCDR3
TGWLGPFDY

SEQ ID NO: 8990 - protein, 215 aa, synthetic construct
  REGION 1..215: note = Description of Artificial Sequence: Synthetic polypeptide
  REGION 1..215: note = XENP019418 [CTLA-4]_H0_L0.3_Fab Light Chain
QIVLTQSPGTLSLSPGERATLSCRASQSVGSSYLAWYQQKPGQAPRLLIYGAFSRATGIPDRFSGSGSGTDFTLTISRLEPEDFAVYYCQQYGSSPWTFGQGTKVEIKRTVAAPSVFIFPPSDEQLKSGTASVVCLLNNFYPREAKVQWKVDNALQSGNSQESVTEQDSKDSTYSLSSTLTLSKADYEKHKVYACEVTHQGLSSPVTKSFNRGEC

SEQ ID NO: 8991 - protein, 108 aa, synthetic construct; identical to SEQ ID NO: 6112
  REGION 1..108: note = Description of Artificial Sequence: Synthetic polypeptide
  REGION 1..108: note = VL of XENP019418

SEQ ID NO: 8992 - protein, 12 aa, synthetic construct
  REGION 1..12: note = Description of Artificial Sequence: Synthetic peptide
  REGION 1..12: note = XENP019418 vlCDR1
RASQSVGSSYLA

SEQ ID NO: 8993 - protein, 7 aa, synthetic construct
  REGION 1..7: note = Description of Artificial Sequence: Synthetic peptide
  REGION 1..7: note = XENP019418 vlCDR2
GAFSRAT

SEQ ID NO: 8994 - protein, 9 aa, synthetic construct
  REGION 1..9: note = Description of Artificial Sequence: Synthetic peptide
  REGION 1..9: note = XENP019418 vlCDR3
QQYGSSPWT

SEQ ID NO: 8995 - protein, 221 aa, synthetic construct; identical to SEQ ID NO: 7595
  REGION 1..221: note = Description of Artificial Sequence: Synthetic polypeptide
  REGION 1..221: note = XENP019419 [CTLA-4]_H0_L0.4_Fab Heavy Chain

SEQ ID NO: 8996 - protein, 118 aa, synthetic construct; identical to SEQ ID NO: 3737
  REGION 1..118: note = Description of Artificial Sequence: Synthetic polypeptide
  REGION 1..118: note = VH of XENP019419

SEQ ID NO: 8997 - protein, 5 aa, synthetic construct
  REGION 1..5: note = Description of Artificial Sequence: Synthetic peptide
  REGION 1..5: note = XENP019419 vhCDR1
SYTMH

SEQ ID NO: 8998 - protein, 17 aa, synthetic construct
  REGION 1..17: note = Description of Artificial Sequence: Synthetic peptide
  REGION 1..17: note = XENP019419 vhCDR2
FISYDGNNKYYADSVKG

SEQ ID NO: 8999 - protein, 9 aa, synthetic construct
  REGION 1..9: note = Description of Artificial Sequence: Synthetic peptide
  REGION 1..9: note = XENP019419 vhCDR3
TGWLGPFDY

SEQ ID NO: 9000 - protein, 215 aa, synthetic construct
  REGION 1..215: note = Description of Artificial Sequence: Synthetic polypeptide
  REGION 1..215: note = XENP019419 [CTLA-4]_H0_L0.4_Fab Light Chain
RIVLTQSPGTLSLSPGERATLSCRASQSVGSSYLAWYQQKPGQAPRLLIYGAFSRATGIPDRFSGSGSGTDFTLTISRLEPEDFAVYYCQQYGSSPWTFGQGTKVEIKRTVAAPSVFIFPPSDEQLKSGTASVVCLLNNFYPREAKVQWKVDNALQSGNSQESVTEQDSKDSTYSLSSTLTLSKADYEKHKVYACEVTHQGLSSPVTKSFNRGEC

SEQ ID NO: 9001 - protein, 108 aa, synthetic construct; identical to SEQ ID NO: 6121
  REGION 1..108: note = Description of Artificial Sequence: Synthetic polypeptide
  REGION 1..108: note = VL of XENP019419

SEQ ID NO: 9002 - protein, 12 aa, synthetic construct
  REGION 1..12: note = Description of Artificial Sequence: Synthetic peptide
  REGION 1..12: note = XENP019419 vlCDR1
RASQSVGSSYLA

SEQ ID NO: 9003 - protein, 7 aa, synthetic construct
  REGION 1..7: note = Description of Artificial Sequence: Synthetic peptide
  REGION 1..7: note = XENP019419 vlCDR2
GAFSRAT

SEQ ID NO: 9004 - protein, 9 aa, synthetic construct
  REGION 1..9: note = Description of Artificial Sequence: Synthetic peptide
  REGION 1..9: note = XENP019419 vlCDR3
QQYGSSPWT

SEQ ID NO: 9005 - protein, 221 aa, synthetic construct; identical to SEQ ID NO: 7595
  REGION 1..221: note = Description of Artificial Sequence: Synthetic polypeptide
  REGION 1..221: note = XENP019420 [CTLA-4]_H0_L0.5_Fab Heavy Chain

SEQ ID NO: 9006 - protein, 118 aa, synthetic construct; identical to SEQ ID NO: 3737
  REGION 1..118: note = Description of Artificial Sequence: Synthetic polypeptide
  REGION 1..118: note = VH of XENP019420

SEQ ID NO: 9007 - protein, 5 aa, synthetic construct
  REGION 1..5: note = Description of Artificial Sequence: Synthetic peptide
  REGION 1..5: note = XENP019420 vhCDR1
SYTMH

SEQ ID NO: 9008 - protein, 17 aa, synthetic construct
  REGION 1..17: note = Description of Artificial Sequence: Synthetic peptide
  REGION 1..17: note = XENP019420 vhCDR2
FISYDGNNKYYADSVKG

SEQ ID NO: 9009 - protein, 9 aa, synthetic construct
  REGION 1..9: note = Description of Artificial Sequence: Synthetic peptide
  REGION 1..9: note = XENP019420 vhCDR3
TGWLGPFDY

SEQ ID NO: 9010 - protein, 215 aa, synthetic construct
  REGION 1..215: note = Description of Artificial Sequence: Synthetic polypeptide
  REGION 1..215: note = XENP019420 [CTLA-4]_H0_L0.5_Fab Light Chain
EIRLTQSPGTLSLSPGERATLSCRASQSVGSSYLAWYQQKPGQAPRLLIYGAFSRATGIPDRFSGSGSGTDFTLTISRLEPEDFAVYYCQQYGSSPWTFGQGTKVEIKRTVAAPSVFIFPPSDEQLKSGTASVVCLLNNFYPREAKVQWKVDNALQSGNSQESVTEQDSKDSTYSLSSTLTLSKADYEKHKVYACEVTHQGLSSPVTKSFNRGEC

SEQ ID NO: 9011 - protein, 108 aa, synthetic construct; identical to SEQ ID NO: 6130
  REGION 1..108: note = Description of Artificial Sequence: Synthetic polypeptide
  REGION 1..108: note = VL of XENP019420

SEQ ID NO: 9012 - protein, 12 aa, synthetic construct
  REGION 1..12: note = Description of Artificial Sequence: Synthetic peptide
  REGION 1..12: note = XENP019420 vlCDR1
RASQSVGSSYLA

SEQ ID NO: 9013 - protein, 7 aa, synthetic construct
  REGION 1..7: note = Description of Artificial Sequence: Synthetic peptide
  REGION 1..7: note = XENP019420 vlCDR2
GAFSRAT

SEQ ID NO: 9014 - protein, 9 aa, synthetic construct
  REGION 1..9: note = Description of Artificial Sequence: Synthetic peptide
  REGION 1..9: note = XENP019420 vlCDR3
QQYGSSPWT

SEQ ID NO: 9015 - protein, 221 aa, synthetic construct; identical to SEQ ID NO: 7595
  REGION 1..221: note = Description of Artificial Sequence: Synthetic polypeptide
  REGION 1..221: note = XENP019421 [CTLA-4]_H0_L0.6_Fab Heavy Chain

SEQ ID NO: 9016 - protein, 118 aa, synthetic construct; identical to SEQ ID NO: 3737
  REGION 1..118: note = Description of Artificial Sequence: Synthetic polypeptide
  REGION 1..118: note = VH of XENP019421

SEQ ID NO: 9017 - protein, 5 aa, synthetic construct
  REGION 1..5: note = Description of Artificial Sequence: Synthetic peptide
  REGION 1..5: note = XENP019421 vhCDR1
SYTMH

SEQ ID NO: 9018 - protein, 17 aa, synthetic construct
  REGION 1..17: note = Description of Artificial Sequence: Synthetic peptide
  REGION 1..17: note = XENP019421 vhCDR2
FISYDGNNKYYADSVKG

SEQ ID NO: 9019 - protein, 9 aa, synthetic construct
  REGION 1..9: note = Description of Artificial Sequence: Synthetic peptide
  REGION 1..9: note = XENP019421 vhCDR3
TGWLGPFDY

SEQ ID NO: 9020 - protein, 215 aa, synthetic construct
  REGION 1..215: note = Description of Artificial Sequence: Synthetic polypeptide
  REGION 1..215: note = XENP019421 [CTLA-4]_H0_L0.6_Fab Light Chain
EIRLTQSPGTLSLSPGERATLSCRASQSVGSSYLAWYQQKPGQAPRLLIYGAFSRATGIPDRFSGSGSGTDFTLTISRLEPEDFAVYYCQQYGSSPWTFGEGTKVEIKRTVAAPSVFIFPPSDEQLKSGTASVVCLLNNFYPREAKVQWKVDNALQSGNSQESVTEQDSKDSTYSLSSTLTLSKADYEKHKVYACEVTHQGLSSPVTKSFNRGEC

SEQ ID NO: 9021 - protein, 108 aa, synthetic construct; identical to SEQ ID NO: 6139
  REGION 1..108: note = Description of Artificial Sequence: Synthetic polypeptide
  REGION 1..108: note = VL of XENP019421

SEQ ID NO: 9022 - protein, 12 aa, synthetic construct
  REGION 1..12: note = Description of Artificial Sequence: Synthetic peptide
  REGION 1..12: note = XENP019421 vlCDR1
RASQSVGSSYLA

SEQ ID NO: 9023 - protein, 7 aa, synthetic construct
  REGION 1..7: note = Description of Artificial Sequence: Synthetic peptide
  REGION 1..7: note = XENP019421 vlCDR2
GAFSRAT

SEQ ID NO: 9024 - protein, 9 aa, synthetic construct
  REGION 1..9: note = Description of Artificial Sequence: Synthetic peptide
  REGION 1..9: note = XENP019421 vlCDR3
QQYGSSPWT

SEQ ID NO: 9025 - protein, 221 aa, synthetic construct; identical to SEQ ID NO: 7595
  REGION 1..221: note = Description of Artificial Sequence: Synthetic polypeptide
  REGION 1..221: note = XENP019422 [CTLA-4]_H0_L0.7_Fab Heavy Chain

SEQ ID NO: 9026 - protein, 118 aa, synthetic construct; identical to SEQ ID NO: 3737
  REGION 1..118: note = Description of Artificial Sequence: Synthetic polypeptide
  REGION 1..118: note = VH of XENP019422

SEQ ID NO: 9027 - protein, 5 aa, synthetic construct
  REGION 1..5: note = Description of Artificial Sequence: Synthetic peptide
  REGION 1..5: note = XENP019422 vhCDR1
SYTMH

SEQ ID NO: 9028 - protein, 17 aa, synthetic construct
  REGION 1..17: note = Description of Artificial Sequence: Synthetic peptide
  REGION 1..17: note = XENP019422 vhCDR2
FISYDGNNKYYADSVKG

SEQ ID NO: 9029 - protein, 9 aa, synthetic construct
  REGION 1..9: note = Description of Artificial Sequence: Synthetic peptide
  REGION 1..9: note = XENP019422 vhCDR3
TGWLGPFDY

SEQ ID NO: 9030 - protein, 215 aa, synthetic construct
  REGION 1..215: note = Description of Artificial Sequence: Synthetic polypeptide
  REGION 1..215: note = XENP019422 [CTLA-4]_H0_L0.7_Fab Light Chain
EIVMTQSPGTLSLSPGERATLSCRASQSVGSSYLAWYQQKPGQAPRLLIYGAFSRATGIPDRFSGSGSGTDFTLTISRLEPEDFAVYYCQQYGSSPWTFGQGTKVEIKRTVAAPSVFIFPPSDEQLKSGTASVVCLLNNFYPREAKVQWKVDNALQSGNSQESVTEQDSKDSTYSLSSTLTLSKADYEKHKVYACEVTHQGLSSPVTKSFNRGEC

SEQ ID NO: 9031 - protein, 108 aa, synthetic construct; identical to SEQ ID NO: 6148
  REGION 1..108: note = Description of Artificial Sequence: Synthetic polypeptide
  REGION 1..108: note = VL of XENP019422

SEQ ID NO: 9032 - protein, 12 aa, synthetic construct
  REGION 1..12: note = Description of Artificial Sequence: Synthetic peptide
  REGION 1..12: note = XENP019422 vlCDR1
RASQSVGSSYLA

SEQ ID NO: 9033 - protein, 7 aa, synthetic construct
  REGION 1..7: note = Description of Artificial Sequence: Synthetic peptide
  REGION 1..7: note = XENP019422 vlCDR2
GAFSRAT

SEQ ID NO: 9034 - protein, 9 aa, synthetic construct
  REGION 1..9: note = Description of Artificial Sequence: Synthetic peptide
  REGION 1..9: note = XENP019422 vlCDR3
QQYGSSPWT

SEQ ID NO: 9035 - protein, 221 aa, synthetic construct; identical to SEQ ID NO: 7595
  REGION 1..221: note = Description of Artificial Sequence: Synthetic polypeptide
  REGION 1..221: note = XENP019423 [CTLA-4]_H0_L0.8_Fab Heavy Chain

SEQ ID NO: 9036 - protein, 118 aa, synthetic construct; identical to SEQ ID NO: 3737
  REGION 1..118: note = Description of Artificial Sequence: Synthetic polypeptide
  REGION 1..118: note = VH of XENP019423

SEQ ID NO: 9037 - protein, 5 aa, synthetic construct
  REGION 1..5: note = Description of Artificial Sequence: Synthetic peptide
  REGION 1..5: note = XENP019423 vhCDR1
SYTMH

SEQ ID NO: 9038 - protein, 17 aa, synthetic construct
  REGION 1..17: note = Description of Artificial Sequence: Synthetic peptide
  REGION 1..17: note = XENP019423 vhCDR2
FISYDGNNKYYADSVKG

SEQ ID NO: 9039 - protein, 9 aa, synthetic construct
  REGION 1..9: note = Description of Artificial Sequence: Synthetic peptide
  REGION 1..9: note = XENP019423 vhCDR3
TGWLGPFDY

SEQ ID NO: 9040 - protein, 215 aa, synthetic construct
  REGION 1..215: note = Description of Artificial Sequence: Synthetic polypeptide
  REGION 1..215: note = XENP019423 [CTLA-4]_H0_L0.8_Fab Light Chain
EIVLTQSPATLSLSPGERATLSCRASQSVGSSYLAWYQQKPGQAPRLLIYGAFSRATGIPDRFSGSGSGTDFTLTISRLEPEDFAVYYCQQYGSSPWTFGQGTKVEIKRTVAAPSVFIFPPSDEQLKSGTASVVCLLNNFYPREAKVQWKVDNALQSGNSQESVTEQDSKDSTYSLSSTLTLSKADYEKHKVYACEVTHQGLSSPVTKSFNRGEC

SEQ ID NO: 9041 - protein, 108 aa, synthetic construct; identical to SEQ ID NO: 6157
  REGION 1..108: note = Description of Artificial Sequence: Synthetic polypeptide
  REGION 1..108: note = VL of XENP019423

SEQ ID NO: 9042 - protein, 12 aa, synthetic construct
  REGION 1..12: note = Description of Artificial Sequence: Synthetic peptide
  REGION 1..12: note = XENP019423 vlCDR1
RASQSVGSSYLA

SEQ ID NO: 9043 - protein, 7 aa, synthetic construct
  REGION 1..7: note = Description of Artificial Sequence: Synthetic peptide
  REGION 1..7: note = XENP019423 vlCDR2
GAFSRAT

SEQ ID NO: 9044 - protein, 9 aa, synthetic construct
  REGION 1..9: note = Description of Artificial Sequence: Synthetic peptide
  REGION 1..9: note = XENP019423 vlCDR3
QQYGSSPWT

SEQ ID NO: 9045 - protein, 221 aa, synthetic construct; identical to SEQ ID NO: 7595
  REGION 1..221: note = Description of Artificial Sequence: Synthetic polypeptide
  REGION 1..221: note = XENP019424 [CTLA-4]_H0_L0.9_Fab Heavy Chain

SEQ ID NO: 9046 - protein, 118 aa, synthetic construct; identical to SEQ ID NO: 3737
  REGION 1..118: note = Description of Artificial Sequence: Synthetic polypeptide
  REGION 1..118: note = VH of XENP019424

SEQ ID NO: 9047 - protein, 5 aa, synthetic construct
  REGION 1..5: note = Description of Artificial Sequence: Synthetic peptide
  REGION 1..5: note = XENP019424 vhCDR1
SYTMH

SEQ ID NO: 9048 - protein, 17 aa, synthetic construct
  REGION 1..17: note = Description of Artificial Sequence: Synthetic peptide
  REGION 1..17: note = XENP019424 vhCDR2
FISYDGNNKYYADSVKG

SEQ ID NO: 9049 - protein, 9 aa, synthetic construct
  REGION 1..9: note = Description of Artificial Sequence: Synthetic peptide
  REGION 1..9: note = XENP019424 vhCDR3
TGWLGPFDY

SEQ ID NO: 9050 - protein, 215 aa, synthetic construct
  REGION 1..215: note = Description of Artificial Sequence: Synthetic polypeptide
  REGION 1..215: note = XENP019424 [CTLA-4]_H0_L0.9_Fab Light Chain
EIVLTQSPPTLSLSPGERATLSCRASQSVGSSYLAWYQQKPGQAPRLLIYGAFSRATGIPDRFSGSGSGTDFTLTISRLEPEDFAVYYCQQYGSSPWTFGQGTKVEIKRTVAAPSVFIFPPSDEQLKSGTASVVCLLNNFYPREAKVQWKVDNALQSGNSQESVTEQDSKDSTYSLSSTLTLSKADYEKHKVYACEVTHQGLSSPVTKSFNRGEC

SEQ ID NO: 9051 - protein, 108 aa, synthetic construct; identical to SEQ ID NO: 6166
  REGION 1..108: note = Description of Artificial Sequence: Synthetic polypeptide
  REGION 1..108: note = VL of XENP019424

SEQ ID NO: 9052 - protein, 12 aa, synthetic construct
  REGION 1..12: note = Description of Artificial Sequence: Synthetic peptide
  REGION 1..12: note = XENP019424 vlCDR1
RASQSVGSSYLA

SEQ ID NO: 9053 - protein, 7 aa, synthetic construct
  REGION 1..7: note = Description of Artificial Sequence: Synthetic peptide
  REGION 1..7: note = XENP019424 vlCDR2
GAFSRAT

SEQ ID NO: 9054 - protein, 9 aa, synthetic construct
  REGION 1..9: note = Description of Artificial Sequence: Synthetic peptide
  REGION 1..9: note = XENP019424 vlCDR3
QQYGSSPWT

SEQ ID NO: 9055 - protein, 221 aa, synthetic construct; identical to SEQ ID NO: 7595
  REGION 1..221: note = Description of Artificial Sequence: Synthetic polypeptide
  REGION 1..221: note = XENP019425 [CTLA-4]_H0_L0.10_Fab Heavy Chain

SEQ ID NO: 9056 - protein, 118 aa, synthetic construct; identical to SEQ ID NO: 3737
  REGION 1..118: note = Description of Artificial Sequence: Synthetic polypeptide
  REGION 1..118: note = VH of XENP019425

SEQ ID NO: 9057 - protein, 5 aa, synthetic construct
  REGION 1..5: note = Description of Artificial Sequence: Synthetic peptide
  REGION 1..5: note = XENP019425 vhCDR1
SYTMH

SEQ ID NO: 9058 - protein, 17 aa, synthetic construct
  REGION 1..17: note = Description of Artificial Sequence: Synthetic peptide
  REGION 1..17: note = XENP019425 vhCDR2
FISYDGNNKYYADSVKG

SEQ ID NO: 9059 - protein, 9 aa, synthetic construct
  REGION 1..9: note = Description of Artificial Sequence: Synthetic peptide
  REGION 1..9: note = XENP019425 vhCDR3
TGWLGPFDY

SEQ ID NO: 9060 - protein, 215 aa, synthetic construct
  REGION 1..215: note = Description of Artificial Sequence: Synthetic polypeptide
  REGION 1..215: note = XENP019425 [CTLA-4]_H0_L0.10_Fab Light Chain
EIVLTQSPSTLSLSPGERATLSCRASQSVGSSYLAWYQQKPGQAPRLLIYGAFSRATGIPDRFSGSGSGTDFTLTISRLEPEDFAVYYCQQYGSSPWTFGQGTKVEIKRTVAAPSVFIFPPSDEQLKSGTASVVCLLNNFYPREAKVQWKVDNALQSGNSQESVTEQDSKDSTYSLSSTLTLSKADYEKHKVYACEVTHQGLSSPVTKSFNRGEC

SEQ ID NO: 9061 - protein, 108 aa, synthetic construct; identical to SEQ ID NO: 6175
  REGION 1..108: note = Description of Artificial Sequence: Synthetic polypeptide
  REGION 1..108: note = VL of XENP019425

SEQ ID NO: 9062 - protein, 12 aa, synthetic construct
  REGION 1..12: note = Description of Artificial Sequence: Synthetic peptide
  REGION 1..12: note = XENP019425 vlCDR1
RASQSVGSSYLA

SEQ ID NO: 9063 - protein, 7 aa, synthetic construct
  REGION 1..7: note = Description of Artificial Sequence: Synthetic peptide
  REGION 1..7: note = XENP019425 vlCDR2
GAFSRAT

SEQ ID NO: 9064 - protein, 9 aa, synthetic construct
  REGION 1..9: note = Description of Artificial Sequence: Synthetic peptide
  REGION 1..9: note = XENP019425 vlCDR3
QQYGSSPWT

SEQ ID NO: 9065 - protein, 221 aa, synthetic construct; identical to SEQ ID NO: 7595
  REGION 1..221: note = Description of Artificial Sequence: Synthetic polypeptide
  REGION 1..221: note = XENP019426 [CTLA-4]_H0_L0.11_Fab Heavy Chain

SEQ ID NO: 9066 - protein, 118 aa, synthetic construct; identical to SEQ ID NO: 3737
  REGION 1..118: note = Description of Artificial Sequence: Synthetic polypeptide
  REGION 1..118: note = VH of XENP019426

SEQ ID NO: 9067 - protein, 5 aa, synthetic construct
  REGION 1..5: note = Description of Artificial Sequence: Synthetic peptide
  REGION 1..5: note = XENP019426 vhCDR1
SYTMH

SEQ ID NO: 9068 - protein, 17 aa, synthetic construct
  REGION 1..17: note = Description of Artificial Sequence: Synthetic peptide
  REGION 1..17: note = XENP019426 vhCDR2
FISYDGNNKYYADSVKG

SEQ ID NO: 9069 - protein, 9 aa, synthetic construct
  REGION 1..9: note = Description of Artificial Sequence: Synthetic peptide
  REGION 1..9: note = XENP019426 vhCDR3
TGWLGPFDY

SEQ ID NO: 9070 - protein, 215 aa, synthetic construct
  REGION 1..215: note = Description of Artificial Sequence: Synthetic polypeptide
  REGION 1..215: note = XENP019426 [CTLA-4]_H0_L0.11_Fab Light Chain
EIVLTQSPGSLSLSPGERATLSCRASQSVGSSYLAWYQQKPGQAPRLLIYGAFSRATGIPDRFSGSGSGTDFTLTISRLEPEDFAVYYCQQYGSSPWTFGQGTKVEIKRTVAAPSVFIFPPSDEQLKSGTASVVCLLNNFYPREAKVQWKVDNALQSGNSQESVTEQDSKDSTYSLSSTLTLSKADYEKHKVYACEVTHQGLSSPVTKSFNRGEC

SEQ ID NO: 9071 - protein, 108 aa, synthetic construct; identical to SEQ ID NO: 6184
  REGION 1..108: note = Description of Artificial Sequence: Synthetic polypeptide
  REGION 1..108: note = VL of XENP019426

SEQ ID NO: 9072 - protein, 12 aa, synthetic construct
  REGION 1..12: note = Description of Artificial Sequence: Synthetic peptide
  REGION 1..12: note = XENP019426 vlCDR1
RASQSVGSSYLA

SEQ ID NO: 9073 - protein, 7 aa, synthetic construct
  REGION 1..7: note = Description of Artificial Sequence: Synthetic peptide
  REGION 1..7: note = XENP019426 vlCDR2
GAFSRAT

SEQ ID NO: 9074 - protein, 9 aa, synthetic construct
  REGION 1..9: note = Description of Artificial Sequence: Synthetic peptide
  REGION 1..9: note = XENP019426 vlCDR3
QQYGSSPWT

SEQ ID NO: 9075 - protein, 221 aa, synthetic construct; identical to SEQ ID NO: 7595
  REGION 1..221: note = Description of Artificial Sequence: Synthetic polypeptide
  REGION 1..221: note = XENP019427 [CTLA-4]_H0_L0.12_Fab Heavy Chain

SEQ ID NO: 9076 - protein, 118 aa, synthetic construct; identical to SEQ ID NO: 3737
  REGION 1..118: note = Description of Artificial Sequence: Synthetic polypeptide
  REGION 1..118: note = VH of XENP019427

SEQ ID NO: 9077 - protein, 5 aa, synthetic construct
  REGION 1..5: note = Description of Artificial Sequence: Synthetic peptide
  REGION 1..5: note = XENP019427 vhCDR1
SYTMH

SEQ ID NO: 9078 - protein, 17 aa, synthetic construct
  REGION 1..17: note = Description of Artificial Sequence: Synthetic peptide
  REGION 1..17: note = XENP019427 vhCDR2
FISYDGNNKYYADSVKG

SEQ ID NO: 9079 - protein, 9 aa, synthetic construct
  REGION 1..9: note = Description of Artificial Sequence: Synthetic peptide
  REGION 1..9: note = XENP019427 vhCDR3
TGWLGPFDY

SEQ ID NO: 9080 - protein, 215 aa, synthetic construct
  REGION 1..215: note = Description of Artificial Sequence: Synthetic polypeptide
  REGION 1..215: note = XENP019427 [CTLA-4]_H0_L0.12_Fab Light Chain
EIVLTQSPGTLSVSPGERATLSCRASQSVGSSYLAWYQQKPGQAPRLLIYGAFSRATGIPDRFSGSGSGTDFTLTISRLEPEDFAVYYCQQYGSSPWTFGQGTKVEIKRTVAAPSVFIFPPSDEQLKSGTASVVCLLNNFYPREAKVQWKVDNALQSGNSQESVTEQDSKDSTYSLSSTLTLSKADYEKHKVYACEVTHQGLSSPVTKSFNRGEC

SEQ ID NO: 9081 - protein, 108 aa, synthetic construct; identical to SEQ ID NO: 6193
  REGION 1..108: note = Description of Artificial Sequence: Synthetic polypeptide
  REGION 1..108: note = VL of XENP019427

SEQ ID NO: 9082 - protein, 12 aa, synthetic construct
  REGION 1..12: note = Description of Artificial Sequence: Synthetic peptide
  REGION 1..12: note = XENP019427 vlCDR1
RASQSVGSSYLA

SEQ ID NO: 9083 - protein, 7 aa, synthetic construct
  REGION 1..7: note = Description of Artificial Sequence: Synthetic peptide
  REGION 1..7: note = XENP019427 vlCDR2
GAFSRAT

SEQ ID NO: 9084 - protein, 9 aa, synthetic construct
  REGION 1..9: note = Description of Artificial Sequence: Synthetic peptide
  REGION 1..9: note = XENP019427 vlCDR3
QQYGSSPWT

SEQ ID NO: 9085 - protein, 221 aa, synthetic construct; identical to SEQ ID NO: 7595
  REGION 1..221: note = Description of Artificial Sequence: Synthetic polypeptide
  REGION 1..221: note = XENP019428 [CTLA-4]_H0_L0.13_Fab Heavy Chain

SEQ ID NO: 9086 - protein, 118 aa, synthetic construct; identical to SEQ ID NO: 3737
  REGION 1..118: note = Description of Artificial Sequence: Synthetic polypeptide
  REGION 1..118: note = VH of XENP019428

SEQ ID NO: 9087 - protein, 5 aa, synthetic construct
  REGION 1..5: note = Description of Artificial Sequence: Synthetic peptide
  REGION 1..5: note = XENP019428 vhCDR1
SYTMH

SEQ ID NO: 9088 - protein, 17 aa, synthetic construct
  REGION 1..17: note = Description of Artificial Sequence: Synthetic peptide
  REGION 1..17: note = XENP019428 vhCDR2
FISYDGNNKYYADSVKG

SEQ ID NO: 9089 - protein, 9 aa, synthetic construct
  REGION 1..9: note = Description of Artificial Sequence: Synthetic peptide
  REGION 1..9: note = XENP019428 vhCDR3
TGWLGPFDY

SEQ ID NO: 9090 - protein, 215 aa, synthetic construct
  REGION 1..215: note = Description of Artificial Sequence: Synthetic polypeptide
  REGION 1..215: note = XENP019428 [CTLA-4]_H0_L0.13_Fab Light Chain
EIVLTQSPGTLSLSPGEPATLSCRASQSVGSSYLAWYQQKPGQAPRLLIYGAFSRATGIPDRFSGSGSGTDFTLTISRLEPEDFAVYYCQQYGSSPWTFGQGTKVEIKRTVAAPSVFIFPPSDEQLKSGTASVVCLLNNFYPREAKVQWKVDNALQSGNSQESVTEQDSKDSTYSLSSTLTLSKADYEKHKVYACEVTHQGLSSPVTKSFNRGEC

SEQ ID NO: 9091 - protein, 108 aa, synthetic construct; identical to SEQ ID NO: 6202
  REGION 1..108: note = Description of Artificial Sequence: Synthetic polypeptide
  REGION 1..108: note = VL of XENP019428

SEQ ID NO: 9092 - protein, 12 aa, synthetic construct
  REGION 1..12: note = Description of Artificial Sequence: Synthetic peptide
  REGION 1..12: note = XENP019428 vlCDR1
RASQSVGSSYLA

SEQ ID NO: 9093 - protein, 7 aa, synthetic construct
  REGION 1..7: note = Description of Artificial Sequence: Synthetic peptide
  REGION 1..7: note = XENP019428 vlCDR2
GAFSRAT

SEQ ID NO: 9094 - protein, 9 aa, synthetic construct
  REGION 1..9: note = Description of Artificial Sequence: Synthetic peptide
  REGION 1..9: note = XENP019428 vlCDR3
QQYGSSPWT

SEQ ID NO: 9095 - protein, 221 aa, synthetic construct; identical to SEQ ID NO: 7595
  REGION 1..221: note = Description of Artificial Sequence: Synthetic polypeptide
  REGION 1..221: note = XENP019429 [CTLA-4]_H0_L0.14_Fab Heavy Chain

SEQ ID NO: 9096 - protein, 118 aa, synthetic construct; identical to SEQ ID NO: 3737
  REGION 1..118: note = Description of Artificial Sequence: Synthetic polypeptide
  REGION 1..118: note = VH of XENP019429

SEQ ID NO: 9097 - protein, 5 aa, synthetic construct
  REGION 1..5: note = Description of Artificial Sequence: Synthetic peptide
  REGION 1..5: note = XENP019429 vhCDR1
SYTMH

SEQ ID NO: 9098 - protein, 17 aa, synthetic construct
  REGION 1..17: note = Description of Artificial Sequence: Synthetic peptide
  REGION 1..17: note = XENP019429 vhCDR2
FISYDGNNKYYADSVKG

SEQ ID NO: 9099 - protein, 9 aa, synthetic construct
  REGION 1..9: note = Description of Artificial Sequence: Synthetic peptide
  REGION 1..9: note = XENP019429 vhCDR3
TGWLGPFDY

SEQ ID NO: 9100 - protein, 215 aa, synthetic construct
  REGION 1..215: note = Description of Artificial Sequence: Synthetic polypeptide
  REGION 1..215: note = XENP019429 [CTLA-4]_H0_L0.14_Fab Light Chain
EIVLTQSPGTLSLSPGEQATLSCRASQSVGSSYLAWYQQKPGQAPRLLIYGAFSRATGIPDRFSGSGSGTDFTLTISRLEPEDFAVYYCQQYGSSPWTFGQGTKVEIKRTVAAPSVFIFPPSDEQLKSGTASVVCLLNNFYPREAKVQWKVDNALQSGNSQESVTEQDSKDSTYSLSSTLTLSKADYEKHKVYACEVTHQGLSSPVTKSFNRGEC

SEQ ID NO: 9101 - protein, 108 aa, synthetic construct; identical to SEQ ID NO: 6211
  REGION 1..108: note = Description of Artificial Sequence: Synthetic polypeptide
  REGION 1..108: note = VL of XENP019429

SEQ ID NO: 9102 - protein, 12 aa, synthetic construct
  REGION 1..12: note = Description of Artificial Sequence: Synthetic peptide
  REGION 1..12: note = XENP019429 vlCDR1
RASQSVGSSYLA

SEQ ID NO: 9103 - protein, 7 aa, synthetic construct
  REGION 1..7: note = Description of Artificial Sequence: Synthetic peptide
  REGION 1..7: note = XENP019429 vlCDR2
GAFSRAT

SEQ ID NO: 9104 - protein, 9 aa, synthetic construct
  REGION 1..9: note = Description of Artificial Sequence: Synthetic peptide
  REGION 1..9: note = XENP019429 vlCDR3
QQYGSSPWT

SEQ ID NO: 9105 - protein, 221 aa, synthetic construct; identical to SEQ ID NO: 7595
  REGION 1..221: note = Description of Artificial Sequence: Synthetic polypeptide
  REGION 1..221: note = XENP019430 [CTLA-4]_H0_L0.15_Fab Heavy Chain

SEQ ID NO: 9106 - protein, 118 aa, synthetic construct; identical to SEQ ID NO: 3737
  REGION 1..118: note = Description of Artificial Sequence: Synthetic polypeptide
  REGION 1..118: note = VH of XENP019430

SEQ ID NO: 9107 - protein, 5 aa, synthetic construct
  REGION 1..5: note = Description of Artificial Sequence: Synthetic peptide
  REGION 1..5: note = XENP019430 vhCDR1
SYTMH

SEQ ID NO: 9108 - protein, 17 aa, synthetic construct
  REGION 1..17: note = Description of Artificial Sequence: Synthetic peptide
  REGION 1..17: note = XENP019430 vhCDR2
FISYDGNNKYYADSVKG

SEQ ID NO: 9109 - protein, 9 aa, synthetic construct
  REGION 1..9: note = Description of Artificial Sequence: Synthetic peptide
  REGION 1..9: note = XENP019430 vhCDR3
TGWLGPFDY

SEQ ID NO: 9110 - protein, 215 aa, synthetic construct
  REGION 1..215: note = Description of Artificial Sequence: Synthetic polypeptide
  REGION 1..215: note = XENP019430 [CTLA-4]_H0_L0.15_Fab Light Chain
EIVLTQSPGTLSLSPGERVTLSCRASQSVGSSYLAWYQQKPGQAPRLLIYGAFSRATGIPDRFSGSGSGTDFTLTISRLEPEDFAVYYCQQYGSSPWTFGQGTKVEIKRTVAAPSVFIFPPSDEQLKSGTASVVCLLNNFYPREAKVQWKVDNALQSGNSQESVTEQDSKDSTYSLSSTLTLSKADYEKHKVYACEVTHQGLSSPVTKSFNRGEC

SEQ ID NO: 9111 - protein, 108 aa, synthetic construct; identical to SEQ ID NO: 6220
  REGION 1..108: note = Description of Artificial Sequence: Synthetic polypeptide
  REGION 1..108: note = VL of XENP019430

SEQ ID NO: 9112 - protein, 12 aa, synthetic construct
  REGION 1..12: note = Description of Artificial Sequence: Synthetic peptide
  REGION 1..12: note = XENP019430 vlCDR1
RASQSVGSSYLA

SEQ ID NO: 9113 - protein, 7 aa, synthetic construct
  REGION 1..7: note = Description of Artificial Sequence: Synthetic peptide
  REGION 1..7: note = XENP019430 vlCDR2
GAFSRAT

SEQ ID NO: 9114 - protein, 9 aa, synthetic construct
  REGION 1..9: note = Description of Artificial Sequence: Synthetic peptide
  REGION 1..9: note = XENP019430 vlCDR3
QQYGSSPWT

SEQ ID NO: 9115 - protein, 221 aa, synthetic construct; identical to SEQ ID NO: 7595
  REGION 1..221: note = Description of Artificial Sequence: Synthetic polypeptide
  REGION 1..221: note = XENP019431 [CTLA-4]_H0_L0.16_Fab Heavy Chain

SEQ ID NO: 9116 - protein, 118 aa, synthetic construct; identical to SEQ ID NO: 3737
  REGION 1..118: note = Description of Artificial Sequence: Synthetic polypeptide
  REGION 1..118: note = VH of XENP019431

SEQ ID NO: 9117 - protein, 5 aa, synthetic construct
  REGION 1..5: note = Description of Artificial Sequence: Synthetic peptide
  REGION 1..5: note = XENP019431 vhCDR1
SYTMH

SEQ ID NO: 9118 - protein, 17 aa, synthetic construct
  REGION 1..17: note = Description of Artificial Sequence: Synthetic peptide
  REGION 1..17: note = XENP019431 vhCDR2
FISYDGNNKYYADSVKG

SEQ ID NO: 9119 - protein, 9 aa, synthetic construct
  REGION 1..9: note = Description of Artificial Sequence: Synthetic peptide
  REGION 1..9: note = XENP019431 vhCDR3
TGWLGPFDY

SEQ ID NO: 9120 - protein, 215 aa, synthetic construct
  REGION 1..215: note = Description of Artificial Sequence: Synthetic polypeptide
  REGION 1..215: note = XENP019431 [CTLA-4]_H0_L0.16_Fab Light Chain
EIVLTQSPGTLSLSPGERASLSCRASQSVGSSYLAWYQQKPGQAPRLLIYGAFSRATGIPDRFSGSGSGTDFTLTISRLEPEDFAVYYCQQYGSSPWTFGQGTKVEIKRTVAAPSVFIFPPSDEQLKSGTASVVCLLNNFYPREAKVQWKVDNALQSGNSQESVTEQDSKDSTYSLSSTLTLSKADYEKHKVYACEVTHQGLSSPVTKSFNRGEC

SEQ ID NO: 9121 - protein, 108 aa, synthetic construct; identical to SEQ ID NO: 6229
  REGION 1..108: note = Description of Artificial Sequence: Synthetic polypeptide
  REGION 1..108: note = VL of XENP019431

SEQ ID NO: 9122 - protein, 12 aa, synthetic construct
  REGION 1..12: note = Description of Artificial Sequence: Synthetic peptide
  REGION 1..12: note = XENP019431 vlCDR1
RASQSVGSSYLA

SEQ ID NO: 9123 - protein, 7 aa, synthetic construct
  REGION 1..7: note = Description of Artificial Sequence: Synthetic peptide
  REGION 1..7: note = XENP019431 vlCDR2
GAFSRAT

SEQ ID NO: 9124 - protein, 9 aa, synthetic construct
  REGION 1..9: note = Description of Artificial Sequence: Synthetic peptide
  REGION 1..9: note = XENP019431 vlCDR3
QQYGSSPWT

SEQ ID NO: 9125 - protein, 221 aa, synthetic construct; identical to SEQ ID NO: 7595
  REGION 1..221: note = Description of Artificial Sequence: Synthetic polypeptide
  REGION 1..221: note = XENP019432 [CTLA-4]_H0_L0.17_Fab Heavy Chain

SEQ ID NO: 9126 - protein, 118 aa, synthetic construct; identical to SEQ ID NO: 3737
  REGION 1..118: note = Description of Artificial Sequence: Synthetic polypeptide
  REGION 1..118: note = VH of XENP019432

SEQ ID NO: 9127 - protein, 5 aa, synthetic construct
  REGION 1..5: note = Description of Artificial Sequence: Synthetic peptide
  REGION 1..5: note = XENP019432 vhCDR1
SYTMH

SEQ ID NO: 9128 - protein, 17 aa, synthetic construct
  REGION 1..17: note = Description of Artificial Sequence: Synthetic peptide
  REGION 1..17: note = XENP019432 vhCDR2
FISYDGNNKYYADSVKG

SEQ ID NO: 9129 - protein, 9 aa, synthetic construct
  REGION 1..9: note = Description of Artificial Sequence: Synthetic peptide
  REGION 1..9: note = XENP019432 vhCDR3
TGWLGPFDY

SEQ ID NO: 9130 - protein, 215 aa, synthetic construct
  REGION 1..215: note = Description of Artificial Sequence: Synthetic polypeptide
  REGION 1..215: note = XENP019432 [CTLA-4]_H0_L0.17_Fab Light Chain
EIVLTQSPGTLSLSPGERATISCRASQSVGSSYLAWYQQKPGQAPRLLIYGAFSRATGIPDRFSGSGSGTDFTLTISRLEPEDFAVYYCQQYGSSPWTFGQGTKVEIKRTVAAPSVFIFPPSDEQLKSGTASVVCLLNNFYPREAKVQWKVDNALQSGNSQESVTEQDSKDSTYSLSSTLTLSKADYEKHKVYACEVTHQGLSSPVTKSFNRGEC

SEQ ID NO: 9131 - protein, 108 aa, synthetic construct; identical to SEQ ID NO: 6238
  REGION 1..108: note = Description of Artificial Sequence: Synthetic polypeptide
  REGION 1..108: note = VL of XENP019432

SEQ ID NO: 9132 - protein, 12 aa, synthetic construct
  REGION 1..12: note = Description of Artificial Sequence: Synthetic peptide
  REGION 1..12: note = XENP019432 vlCDR1
RASQSVGSSYLA

SEQ ID NO: 9133 - protein, 7 aa, synthetic construct
  REGION 1..7: note = Description of Artificial Sequence: Synthetic peptide
  REGION 1..7: note = XENP019432 vlCDR2
GAFSRAT

SEQ ID NO: 9134 - protein, 9 aa, synthetic construct
  REGION 1..9: note = Description of Artificial Sequence: Synthetic peptide
  REGION 1..9: note = XENP019432 vlCDR3
QQYGSSPWT

SEQ ID NO: 9135 - protein, 221 aa, synthetic construct; identical to SEQ ID NO: 7595
  REGION 1..221: note = Description of Artificial Sequence: Synthetic polypeptide
  REGION 1..221: note = XENP019433 [CTLA-4]_H0_L0.18_Fab Heavy Chain

SEQ ID NO: 9136 - protein, 118 aa, synthetic construct; identical to SEQ ID NO: 3737
  REGION 1..118: note = Description of Artificial Sequence: Synthetic polypeptide
  REGION 1..118: note = VH of XENP019433

SEQ ID NO: 9137 - protein, 5 aa, synthetic construct
  REGION 1..5: note = Description of Artificial Sequence: Synthetic peptide
  REGION 1..5: note = XENP019433 vhCDR1
SYTMH

SEQ ID NO: 9138 - protein, 17 aa, synthetic construct
  REGION 1..17: note = Description of Artificial Sequence: Synthetic peptide
  REGION 1..17: note = XENP019433 vhCDR2
FISYDGNNKYYADSVKG

SEQ ID NO: 9139 - protein, 9 aa, synthetic construct
  REGION 1..9: note = Description of Artificial Sequence: Synthetic peptide
  REGION 1..9: note = XENP019433 vhCDR3
TGWLGPFDY

SEQ ID NO: 9140 - protein, 215 aa, synthetic construct
  REGION 1..215: note = Description of Artificial Sequence: Synthetic polypeptide
  REGION 1..215: note = XENP019433 [CTLA-4]_H0_L0.18_Fab Light Chain
EIVLTQSPGTLSLSPGERATLSCRSSQSVGSSYLAWYQQKPGQAPRLLIYGAFSRATGIPDRFSGSGSGTDFTLTISRLEPEDFAVYYCQQYGSSPWTFGQGTKVEIKRTVAAPSVFIFPPSDEQLKSGTASVVCLLNNFYPREAKVQWKVDNALQSGNSQESVTEQDSKDSTYSLSSTLTLSKADYEKHKVYACEVTHQGLSSPVTKSFNRGEC

SEQ ID NO: 9141 - protein, 108 aa, synthetic construct; identical to SEQ ID NO: 6247
  REGION 1..108: note = Description of Artificial Sequence: Synthetic polypeptide
  REGION 1..108: note = VL of XENP019433

SEQ ID NO: 9142 - protein, 12 aa, synthetic construct
  REGION 1..12: note = Description of Artificial Sequence: Synthetic peptide
  REGION 1..12: note = XENP019433 vlCDR1
RSSQSVGSSYLA

SEQ ID NO: 9143 - protein, 7 aa, synthetic construct
  REGION 1..7: note = Description of Artificial Sequence: Synthetic peptide
  REGION 1..7: note = XENP019433 vlCDR2
GAFSRAT

SEQ ID NO: 9144 - protein, 9 aa, synthetic construct
  REGION 1..9: note = Description of Artificial Sequence: Synthetic peptide
  REGION 1..9: note = XENP019433 vlCDR3
QQYGSSPWT

SEQ ID NO: 9145 - protein, 221 aa, synthetic construct; identical to SEQ ID NO: 7595
  REGION 1..221: note = Description of Artificial Sequence: Synthetic polypeptide
  REGION 1..221: note = XENP019434 [CTLA-4]_H0_L0.19_Fab Heavy Chain

SEQ ID NO: 9146 - protein, 118 aa, synthetic construct; identical to SEQ ID NO: 3737
  REGION 1..118: note = Description of Artificial Sequence: Synthetic polypeptide
  REGION 1..118: note = VH of XENP019434

SEQ ID NO: 9147 - protein, 5 aa, synthetic construct
  REGION 1..5: note = Description of Artificial Sequence: Synthetic peptide
  REGION 1..5: note = XENP019434 vhCDR1
SYTMH

SEQ ID NO: 9148 - protein, 17 aa, synthetic construct
  REGION 1..17: note = Description of Artificial Sequence: Synthetic peptide
  REGION 1..17: note = XENP019434 vhCDR2
FISYDGNNKYYADSVKG

SEQ ID NO: 9149 - protein, 9 aa, synthetic construct
  REGION 1..9: note = Description of Artificial Sequence: Synthetic peptide
  REGION 1..9: note = XENP019434 vhCDR3
TGWLGPFDY

SEQ ID NO: 9150 - protein, 215 aa, synthetic construct
  REGION 1..215: note = Description of Artificial Sequence: Synthetic polypeptide
  REGION 1..215: note = XENP019434 [CTLA-4]_H0_L0.19_Fab Light Chain
EIVLTQSPGTLSLSPGERATLSCRASQSDGSSYLAWYQQKPGQAPRLLIYGAFSRATGIPDRFSGSGSGTDFTLTISRLEPEDFAVYYCQQYGSSPWTFGQGTKVEIKRTVAAPSVFIFPPSDEQLKSGTASVVCLLNNFYPREAKVQWKVDNALQSGNSQESVTEQDSKDSTYSLSSTLTLSKADYEKHKVYACEVTHQGLSSPVTKSFNRGEC

SEQ ID NO: 9151 - protein, 108 aa, synthetic construct; identical to SEQ ID NO: 6256
  REGION 1..108: note = Description of Artificial Sequence: Synthetic polypeptide
  REGION 1..108: note = VL of XENP019434

SEQ ID NO: 9152 - protein, 12 aa, synthetic construct
  REGION 1..12: note = Description of Artificial Sequence: Synthetic peptide
  REGION 1..12: note = XENP019434 vlCDR1
RASQSDGSSYLA

SEQ ID NO: 9153 - protein, 7 aa, synthetic construct
  REGION 1..7: note = Description of Artificial Sequence: Synthetic peptide
  REGION 1..7: note = XENP019434 vlCDR2
GAFSRAT

SEQ ID NO: 9154 - protein, 9 aa, synthetic construct
  REGION 1..9: note = Description of Artificial Sequence: Synthetic peptide
  REGION 1..9: note = XENP019434 vlCDR3
QQYGSSPWT

SEQ ID NO: 9155 - protein, 221 aa, synthetic construct; identical to SEQ ID NO: 7595
  REGION 1..221: note = Description of Artificial Sequence: Synthetic polypeptide
  REGION 1..221: note = XENP019435 [CTLA-4]_H0_L0.20_Fab Heavy Chain

SEQ ID NO: 9156 - protein, 118 aa, synthetic construct; identical to SEQ ID NO: 3737
  REGION 1..118: note = Description of Artificial Sequence: Synthetic polypeptide
  REGION 1..118: note = VH of XENP019435

SEQ ID NO: 9157 - protein, 5 aa, synthetic construct
  REGION 1..5: note = Description of Artificial Sequence: Synthetic peptide
  REGION 1..5: note = XENP019435 vhCDR1
SYTMH

SEQ ID NO: 9158 - protein, 17 aa, synthetic construct
  REGION 1..17: note = Description of Artificial Sequence: Synthetic peptide
  REGION 1..17: note = XENP019435 vhCDR2
FISYDGNNKYYADSVKG

SEQ ID NO: 9159 - protein, 9 aa, synthetic construct
  REGION 1..9: note = Description of Artificial Sequence: Synthetic peptide
  REGION 1..9: note = XENP019435 vhCDR3
TGWLGPFDY

SEQ ID NO: 9160 - protein, 215 aa, synthetic construct
  REGION 1..215: note = Description of Artificial Sequence: Synthetic polypeptide
  REGION 1..215: note = XENP019435 [CTLA-4]_H0_L0.20_Fab Light Chain
EIVLTQSPGTLSLSPGERATLSCRASQSSGSSYLAWYQQKPGQAPRLLIYGAFSRATGIPDRFSGSGSGTDFTLTISRLEPEDFAVYYCQQYGSSPWTFGQGTKVEIKRTVAAPSVFIFPPSDEQLKSGTASVVCLLNNFYPREAKVQWKVDNALQSGNSQESVTEQDSKDSTYSLSSTLTLSKADYEKHKVYACEVTHQGLSSPVTKSFNRGEC

SEQ ID NO: 9161 - protein, 108 aa, synthetic construct; identical to SEQ ID NO: 6265
  REGION 1..108: note = Description of Artificial Sequence: Synthetic polypeptide
  REGION 1..108: note = VL of XENP019435

SEQ ID NO: 9162 - protein, 12 aa, synthetic construct
  REGION 1..12: note = Description of Artificial Sequence: Synthetic peptide
  REGION 1..12: note = XENP019435 vlCDR1
RASQSSGSSYLA

SEQ ID NO: 9163 - protein, 7 aa, synthetic construct
  REGION 1..7: note = Description of Artificial Sequence: Synthetic peptide
  REGION 1..7: note = XENP019435 vlCDR2
GAFSRAT

SEQ ID NO: 9164 - protein, 9 aa, synthetic construct
  REGION 1..9: note = Description of Artificial Sequence: Synthetic peptide
  REGION 1..9: note = XENP019435 vlCDR3
QQYGSSPWT

SEQ ID NO: 9165 - protein, 221 aa, synthetic construct; identical to SEQ ID NO: 7595
  REGION 1..221: note = Description of Artificial Sequence: Synthetic polypeptide
  REGION 1..221: note = XENP019436 [CTLA-4]_H0_L0.21_Fab Heavy Chain

SEQ ID NO: 9166 - protein, 118 aa, synthetic construct; identical to SEQ ID NO: 3737
  REGION 1..118: note = Description of Artificial Sequence: Synthetic polypeptide
  REGION 1..118: note = VH of XENP019436

SEQ ID NO: 9167 - protein, 5 aa, synthetic construct
  REGION 1..5: note = Description of Artificial Sequence: Synthetic peptide
  REGION 1..5: note = XENP019436 vhCDR1
SYTMH

SEQ ID NO: 9168 - protein, 17 aa, synthetic construct
  REGION 1..17: note = Description of Artificial Sequence: Synthetic peptide
  REGION 1..17: note = XENP019436 vhCDR2
FISYDGNNKYYADSVKG

SEQ ID NO: 9169 - protein, 9 aa, synthetic construct
  REGION 1..9: note = Description of Artificial Sequence: Synthetic peptide
  REGION 1..9: note = XENP019436 vhCDR3
TGWLGPFDY

SEQ ID NO: 9170 - protein, 215 aa, synthetic construct
  REGION 1..215: note = Description of Artificial Sequence: Synthetic polypeptide
  REGION 1..215: note = XENP019436 [CTLA-4]_H0_L0.21_Fab Light Chain
EIVLTQSPGTLSLSPGERATLSCRASQSVASSYLAWYQQKPGQAPRLLIYGAFSRATGIPDRFSGSGSGTDFTLTISRLEPEDFAVYYCQQYGSSPWTFGQGTKVEIKRTVAAPSVFIFPPSDEQLKSGTASVVCLLNNFYPREAKVQWKVDNALQSGNSQESVTEQDSKDSTYSLSSTLTLSKADYEKHKVYACEVTHQGLSSPVTKSFNRGEC

SEQ ID NO: 9171 - protein, 108 aa, synthetic construct; identical to SEQ ID NO: 6274
  REGION 1..108: note = Description of Artificial Sequence: Synthetic polypeptide
  REGION 1..108: note = VL of XENP019436

SEQ ID NO: 9172 - protein, 12 aa, synthetic construct
  REGION 1..12: note = Description of Artificial Sequence: Synthetic peptide
  REGION 1..12: note = XENP019436 vlCDR1
RASQSVASSYLA

SEQ ID NO: 9173 - protein, 7 aa, synthetic construct
  REGION 1..7: note = Description of Artificial Sequence: Synthetic peptide
  REGION 1..7: note = XENP019436 vlCDR2
GAFSRAT

SEQ ID NO: 9174 - protein, 9 aa, synthetic construct
  REGION 1..9: note = Description of Artificial Sequence: Synthetic peptide
  REGION 1..9: note = XENP019436 vlCDR3
QQYGSSPWT

SEQ ID NO: 9175 - protein, 221 aa, synthetic construct; identical to SEQ ID NO: 7595
  REGION 1..221: note = Description of Artificial Sequence: Synthetic polypeptide
  REGION 1..221: note = XENP019437 [CTLA-4]_H0_L0.22_Fab Heavy Chain

SEQ ID NO: 9176 - protein, 118 aa, synthetic construct; identical to SEQ ID NO: 3737
  REGION 1..118: note = Description of Artificial Sequence: Synthetic polypeptide
  REGION 1..118: note = VH of XENP019437

SEQ ID NO: 9177 - protein, 5 aa, synthetic construct
  REGION 1..5: note = Description of Artificial Sequence: Synthetic peptide
  REGION 1..5: note = XENP019437 vhCDR1
SYTMH

SEQ ID NO: 9178 - protein, 17 aa, synthetic construct
  REGION 1..17: note = Description of Artificial Sequence: Synthetic peptide
  REGION 1..17: note = XENP019437 vhCDR2
FISYDGNNKYYADSVKG

SEQ ID NO: 9179 - protein, 9 aa, synthetic construct
  REGION 1..9: note = Description of Artificial Sequence: Synthetic peptide
  REGION 1..9: note = XENP019437 vhCDR3
TGWLGPFDY

SEQ ID NO: 9180 - protein, 215 aa, synthetic construct; identical to SEQ ID NO: 2410
  REGION 1..215: note = Description of Artificial Sequence: Synthetic polypeptide
  REGION 1..215: note = XENP019437 [CTLA-4]_H0_L0.22_Fab Light Chain

SEQ ID NO: 9181 - protein, 108 aa, synthetic construct; identical to SEQ ID NO: 2411
  REGION 1..108: note = Description of Artificial Sequence: Synthetic polypeptide
  REGION 1..108: note = VL of XENP019437

SEQ ID NO: 9182 - protein, 12 aa, synthetic construct
  REGION 1..12: note = Description of Artificial Sequence: Synthetic peptide
  REGION 1..12: note = XENP019437 vlCDR1
RASQSVSSSYLA

SEQ ID NO: 9183 - protein, 7 aa, synthetic construct
  REGION 1..7: note = Description of Artificial Sequence: Synthetic peptide
  REGION 1..7: note = XENP019437 vlCDR2
GAFSRAT

SEQ ID NO: 9184 - protein, 9 aa, synthetic construct
  REGION 1..9: note = Description of Artificial Sequence: Synthetic peptide
  REGION 1..9: note = XENP019437 vlCDR3
QQYGSSPWT

SEQ ID NO: 9185 - protein, 221 aa, synthetic construct; identical to SEQ ID NO: 7595
  REGION 1..221: note = Description of Artificial Sequence: Synthetic polypeptide
  REGION 1..221: note = XENP019438 [CTLA-4]_H0_L0.23_Fab Heavy Chain

SEQ ID NO: 9186 - protein, 118 aa, synthetic construct; identical to SEQ ID NO: 3737
  REGION 1..118: note = Description of Artificial Sequence: Synthetic polypeptide
  REGION 1..118: note = VH of XENP019438

SEQ ID NO: 9187 - protein, 5 aa, synthetic construct
  REGION 1..5: note = Description of Artificial Sequence: Synthetic peptide
  REGION 1..5: note = XENP019438 vhCDR1
SYTMH

SEQ ID NO: 9188 - protein, 17 aa, synthetic construct
  REGION 1..17: note = Description of Artificial Sequence: Synthetic peptide
  REGION 1..17: note = XENP019438 vhCDR2
FISYDGNNKYYADSVKG

SEQ ID NO: 9189 - protein, 9 aa, synthetic construct
  REGION 1..9: note = Description of Artificial Sequence: Synthetic peptide
  REGION 1..9: note = XENP019438 vhCDR3
TGWLGPFDY

SEQ ID NO: 9190 - protein, 215 aa, synthetic construct
  REGION 1..215: note = Description of Artificial Sequence: Synthetic polypeptide
  REGION 1..215: note = XENP019438 [CTLA-4]_H0_L0.23_Fab Light Chain
EIVLTQSPGTLSLSPGERATLSCRASQSVTSSYLAWYQQKPGQAPRLLIYGAFSRATGIPDRFSGSGSGTDFTLTISRLEPEDFAVYYCQQYGSSPWTFGQGTKVEIKRTVAAPSVFIFPPSDEQLKSGTASVVCLLNNFYPREAKVQWKVDNALQSGNSQESVTEQDSKDSTYSLSSTLTLSKADYEKHKVYACEVTHQGLSSPVTKSFNRGEC

SEQ ID NO: 9191 - protein, 108 aa, synthetic construct; identical to SEQ ID NO: 6292
  REGION 1..108: note = Description of Artificial Sequence: Synthetic polypeptide
  REGION 1..108: note = VL of XENP019438

SEQ ID NO: 9192 - protein, 12 aa, synthetic construct
  REGION 1..12: note = Description of Artificial Sequence: Synthetic peptide
  REGION 1..12: note = XENP019438 vlCDR1
RASQSVTSSYLA

SEQ ID NO: 9193 - protein, 7 aa, synthetic construct
  REGION 1..7: note = Description of Artificial Sequence: Synthetic peptide
  REGION 1..7: note = XENP019438 vlCDR2
GAFSRAT

SEQ ID NO: 9194 - protein, 9 aa, synthetic construct
  REGION 1..9: note = Description of Artificial Sequence: Synthetic peptide
  REGION 1..9: note = XENP019438 vlCDR3
QQYGSSPWT

SEQ ID NO: 9195 - protein, 221 aa, synthetic construct; identical to SEQ ID NO: 7595
  REGION 1..221: note = Description of Artificial Sequence: Synthetic polypeptide
  REGION 1..221: note = XENP019439 [CTLA-4]_H0_L0.24_Fab Heavy Chain

SEQ ID NO: 9196 - protein, 118 aa, synthetic construct; identical to SEQ ID NO: 3737
  REGION 1..118: note = Description of Artificial Sequence: Synthetic polypeptide
  REGION 1..118: note = VH of XENP019439

SEQ ID NO: 9197 - protein, 5 aa, synthetic construct
  REGION 1..5: note = Description of Artificial Sequence: Synthetic peptide
  REGION 1..5: note = XENP019439 vhCDR1
SYTMH

SEQ ID NO: 9198 - protein, 17 aa, synthetic construct
  REGION 1..17: note = Description of Artificial Sequence: Synthetic peptide
  REGION 1..17: note = XENP019439 vhCDR2
FISYDGNNKYYADSVKG

SEQ ID NO: 9199 - protein, 9 aa, synthetic construct
  REGION 1..9: note = Description of Artificial Sequence: Synthetic peptide
  REGION 1..9: note = XENP019439 vhCDR3
TGWLGPFDY

SEQ ID NO: 9200 - protein, 215 aa, synthetic construct
  REGION 1..215: note = Description of Artificial Sequence: Synthetic polypeptide
  REGION 1..215: note = XENP019439 [CTLA-4]_H0_L0.24_Fab Light Chain
EIVLTQSPGTLSLSPGERATLSCRASQSVGASYLAWYQQKPGQAPRLLIYGAFSRATGIPDRFSGSGSGTDFTLTISRLEPEDFAVYYCQQYGSSPWTFGQGTKVEIKRTVAAPSVFIFPPSDEQLKSGTASVVCLLNNFYPREAKVQWKVDNALQSGNSQESVTEQDSKDSTYSLSSTLTLSKADYEKHKVYACEVTHQGLSSPVTKSFNRGEC

SEQ ID NO: 9201 - protein, 108 aa, synthetic construct; identical to SEQ ID NO: 6301
  REGION 1..108: note = Description of Artificial Sequence: Synthetic polypeptide
  REGION 1..108: note = VL of XENP019439

SEQ ID NO: 9202 - protein, 12 aa, synthetic construct
  REGION 1..12: note = Description of Artificial Sequence: Synthetic peptide
  REGION 1..12: note = XENP019439 vlCDR1
RASQSVGASYLA

SEQ ID NO: 9203 - protein, 7 aa, synthetic construct
  REGION 1..7: note = Description of Artificial Sequence: Synthetic peptide
  REGION 1..7: note = XENP019439 vlCDR2
GAFSRAT

SEQ ID NO: 9204 - protein, 9 aa, synthetic construct
  REGION 1..9: note = Description of Artificial Sequence: Synthetic peptide
  REGION 1..9: note = XENP019439 vlCDR3
QQYGSSPWT

SEQ ID NO: 9205 - protein, 221 aa, synthetic construct; identical to SEQ ID NO: 7595
  REGION 1..221: note = Description of Artificial Sequence: Synthetic polypeptide
  REGION 1..221: note = XENP019440 [CTLA-4]_H0_L0.25_Fab Heavy Chain

SEQ ID NO: 9206 - protein, 118 aa, synthetic construct; identical to SEQ ID NO: 3737
  REGION 1..118: note = Description of Artificial Sequence: Synthetic polypeptide
  REGION 1..118: note = VH of XENP019440

SEQ ID NO: 9207 - protein, 5 aa, synthetic construct
  REGION 1..5: note = Description of Artificial Sequence: Synthetic peptide
  REGION 1..5: note = XENP019440 vhCDR1
SYTMH

SEQ ID NO: 9208 - protein, 17 aa, synthetic construct
  REGION 1..17: note = Description of Artificial Sequence: Synthetic peptide
  REGION 1..17: note = XENP019440 vhCDR2
FISYDGNNKYYADSVKG

SEQ ID NO: 9209 - protein, 9 aa, synthetic construct
  REGION 1..9: note = Description of Artificial Sequence: Synthetic peptide
  REGION 1..9: note = XENP019440 vhCDR3
TGWLGPFDY

SEQ ID NO: 9210 - protein, 215 aa, synthetic construct
  REGION 1..215: note = Description of Artificial Sequence: Synthetic polypeptide
  REGION 1..215: note = XENP019440 [CTLA-4]_H0_L0.25_Fab Light Chain
EIVLTQSPGTLSLSPGERATLSCRASQSVGGSYLAWYQQKPGQAPRLLIYGAFSRATGIPDRFSGSGSGTDFTLTISRLEPEDFAVYYCQQYGSSPWTFGQGTKVEIKRTVAAPSVFIFPPSDEQLKSGTASVVCLLNNFYPREAKVQWKVDNALQSGNSQESVTEQDSKDSTYSLSSTLTLSKADYEKHKVYACEVTHQGLSSPVTKSFNRGEC

SEQ ID NO: 9211 - protein, 108 aa, synthetic construct; identical to SEQ ID NO: 6310
  REGION 1..108: note = Description of Artificial Sequence: Synthetic polypeptide
  REGION 1..108: note = VL of XENP019440

SEQ ID NO: 9212 - protein, 12 aa, synthetic construct
  REGION 1..12: note = Description of Artificial Sequence: Synthetic peptide
  REGION 1..12: note = XENP019440 vlCDR1
RASQSVGGSYLA

SEQ ID NO: 9213 - protein, 7 aa, synthetic construct
  REGION 1..7: note = Description of Artificial Sequence: Synthetic peptide
  REGION 1..7: note = XENP019440 vlCDR2
GAFSRAT

SEQ ID NO: 9214 - protein, 9 aa, synthetic construct
  REGION 1..9: note = Description of Artificial Sequence: Synthetic peptide
  REGION 1..9: note = XENP019440 vlCDR3
QQYGSSPWT

SEQ ID NO: 9215 - protein, 221 aa, synthetic construct; identical to SEQ ID NO: 7595
  REGION 1..221: note = Description of Artificial Sequence: Synthetic polypeptide
  REGION 1..221: note = XENP019441 [CTLA-4]_H0_L0.26_Fab Heavy Chain

SEQ ID NO: 9216 - protein, 118 aa, synthetic construct; identical to SEQ ID NO: 3737
  REGION 1..118: note = Description of Artificial Sequence: Synthetic polypeptide
  REGION 1..118: note = VH of XENP019441

SEQ ID NO: 9217 - protein, 5 aa, synthetic construct
  REGION 1..5: note = Description of Artificial Sequence: Synthetic peptide
  REGION 1..5: note = XENP019441 vhCDR1
SYTMH

SEQ ID NO: 9218 - protein, 17 aa, synthetic construct
  REGION 1..17: note = Description of Artificial Sequence: Synthetic peptide
  REGION 1..17: note = XENP019441 vhCDR2
FISYDGNNKYYADSVKG

SEQ ID NO: 9219 - protein, 9 aa, synthetic construct
  REGION 1..9: note = Description of Artificial Sequence: Synthetic peptide
  REGION 1..9: note = XENP019441 vhCDR3
TGWLGPFDY

SEQ ID NO: 9220 - protein, 215 aa, synthetic construct
  REGION 1..215: note = Description of Artificial Sequence: Synthetic polypeptide
  REGION 1..215: note = XENP019441 [CTLA-4]_H0_L0.26_Fab Light Chain
EIVLTQSPGTLSLSPGERATLSCRASQSVGNSYLAWYQQKPGQAPRLLIYGAFSRATGIPDRFSGSGSGTDFTLTISRLEPEDFAVYYCQQYGSSPWTFGQGTKVEIKRTVAAPSVFIFPPSDEQLKSGTASVVCLLNNFYPREAKVQWKVDNALQSGNSQESVTEQDSKDSTYSLSSTLTLSKADYEKHKVYACEVTHQGLSSPVTKSFNRGEC

SEQ ID NO: 9221 - protein, 108 aa, synthetic construct; identical to SEQ ID NO: 6319
  REGION 1..108: note = Description of Artificial Sequence: Synthetic polypeptide
  REGION 1..108: note = VL of XENP019441

SEQ ID NO: 9222 - protein, 12 aa, synthetic construct
  REGION 1..12: note = Description of Artificial Sequence: Synthetic peptide
  REGION 1..12: note = XENP019441 vlCDR1
RASQSVGNSYLA

SEQ ID NO: 9223 - protein, 7 aa, synthetic construct
  REGION 1..7: note = Description of Artificial Sequence: Synthetic peptide
  REGION 1..7: note = XENP019441 vlCDR2
GAFSRAT

SEQ ID NO: 9224 - protein, 9 aa, synthetic construct
  REGION 1..9: note = Description of Artificial Sequence: Synthetic peptide
  REGION 1..9: note = XENP019441 vlCDR3
QQYGSSPWT

SEQ ID NO: 9225 - protein, 221 aa, synthetic construct; identical to SEQ ID NO: 7595
  REGION 1..221: note = Description of Artificial Sequence: Synthetic polypeptide
  REGION 1..221: note = XENP019442 [CTLA-4]_H0_L0.27_Fab Heavy Chain

SEQ ID NO: 9226 - protein, 118 aa, synthetic construct; identical to SEQ ID NO: 3737
  REGION 1..118: note = Description of Artificial Sequence: Synthetic polypeptide
  REGION 1..118: note = VH of XENP019442

SEQ ID NO: 9227 - protein, 5 aa, synthetic construct
  REGION 1..5: note = Description of Artificial Sequence: Synthetic peptide
  REGION 1..5: note = XENP019442 vhCDR1
SYTMH

SEQ ID NO: 9228 - protein, 17 aa, synthetic construct
  REGION 1..17: note = Description of Artificial Sequence: Synthetic peptide
  REGION 1..17: note = XENP019442 vhCDR2
FISYDGNNKYYADSVKG

SEQ ID NO: 9229 - protein, 9 aa, synthetic construct
  REGION 1..9: note = Description of Artificial Sequence: Synthetic peptide
  REGION 1..9: note = XENP019442 vhCDR3
TGWLGPFDY

SEQ ID NO: 9230 - protein, 215 aa, synthetic construct
  REGION 1..215: note = Description of Artificial Sequence: Synthetic polypeptide
  REGION 1..215: note = XENP019442 [CTLA-4]_H0_L0.27_Fab Light Chain
EIVLTQSPGTLSLSPGERATLSCRASQSVGQSYLAWYQQKPGQAPRLLIYGAFSRATGIPDRFSGSGSGTDFTLTISRLEPEDFAVYYCQQYGSSPWTFGQGTKVEIKRTVAAPSVFIFPPSDEQLKSGTASVVCLLNNFYPREAKVQWKVDNALQSGNSQESVTEQDSKDSTYSLSSTLTLSKADYEKHKVYACEVTHQGLSSPVTKSFNRGEC

SEQ ID NO: 9231 - protein, 108 aa, synthetic construct; identical to SEQ ID NO: 6328
  REGION 1..108: note = Description of Artificial Sequence: Synthetic polypeptide
  REGION 1..108: note = VL of XENP019442

SEQ ID NO: 9232 - protein, 12 aa, synthetic construct
  REGION 1..12: note = Description of Artificial Sequence: Synthetic peptide
  REGION 1..12: note = XENP019442 vlCDR1
RASQSVGQSYLA

SEQ ID NO: 9233 - protein, 7 aa, synthetic construct
  REGION 1..7: note = Description of Artificial Sequence: Synthetic peptide
  REGION 1..7: note = XENP019442 vlCDR2
GAFSRAT

SEQ ID NO: 9234 - protein, 9 aa, synthetic construct
  REGION 1..9: note = Description of Artificial Sequence: Synthetic peptide
  REGION 1..9: note = XENP019442 vlCDR3
QQYGSSPWT

SEQ ID NO: 9235 - protein, 221 aa, synthetic construct; identical to SEQ ID NO: 7595
  REGION 1..221: note = Description of Artificial Sequence: Synthetic polypeptide
  REGION 1..221: note = XENP019443 [CTLA-4]_H0_L0.28_Fab Heavy Chain

SEQ ID NO: 9236 - protein, 118 aa, synthetic construct; identical to SEQ ID NO: 3737
  REGION 1..118: note = Description of Artificial Sequence: Synthetic polypeptide
  REGION 1..118: note = VH of XENP019443

SEQ ID NO: 9237 - protein, 5 aa, synthetic construct
  REGION 1..5: note = Description of Artificial Sequence: Synthetic peptide
  REGION 1..5: note = XENP019443 vhCDR1
SYTMH

SEQ ID NO: 9238 - protein, 17 aa, synthetic construct
  REGION 1..17: note = Description of Artificial Sequence: Synthetic peptide
  REGION 1..17: note = XENP019443 vhCDR2
FISYDGNNKYYADSVKG

SEQ ID NO: 9239 - protein, 9 aa, synthetic construct
  REGION 1..9: note = Description of Artificial Sequence: Synthetic peptide
  REGION 1..9: note = XENP019443 vhCDR3
TGWLGPFDY

SEQ ID NO: 9240 - protein, 215 aa, synthetic construct
  REGION 1..215: note = Description of Artificial Sequence: Synthetic polypeptide
  REGION 1..215: note = XENP019443 [CTLA-4]_H0_L0.28_Fab Light Chain
EIVLTQSPGTLSLSPGERATLSCRASQSVGTSYLAWYQQKPGQAPRLLIYGAFSRATGIPDRFSGSGSGTDFTLTISRLEPEDFAVYYCQQYGSSPWTFGQGTKVEIKRTVAAPSVFIFPPSDEQLKSGTASVVCLLNNFYPREAKVQWKVDNALQSGNSQESVTEQDSKDSTYSLSSTLTLSKADYEKHKVYACEVTHQGLSSPVTKSFNRGEC

SEQ ID NO: 9241 - protein, 108 aa, synthetic construct; identical to SEQ ID NO: 6337
  REGION 1..108: note = Description of Artificial Sequence: Synthetic polypeptide
  REGION 1..108: note = VL of XENP019443

SEQ ID NO: 9242 - protein, 12 aa, synthetic construct
  REGION 1..12: note = Description of Artificial Sequence: Synthetic peptide
  REGION 1..12: note = XENP019443 vlCDR1
RASQSVGTSYLA

SEQ ID NO: 9243 - protein, 7 aa, synthetic construct
  REGION 1..7: note = Description of Artificial Sequence: Synthetic peptide
  REGION 1..7: note = XENP019443 vlCDR2
GAFSRAT

SEQ ID NO: 9244 - protein, 9 aa, synthetic construct
  REGION 1..9: note = Description of Artificial Sequence: Synthetic peptide
  REGION 1..9: note = XENP019443 vlCDR3
QQYGSSPWT

SEQ ID NO: 9245 - protein, 221 aa, synthetic construct; identical to SEQ ID NO: 7595
  REGION 1..221: note = Description of Artificial Sequence: Synthetic polypeptide
  REGION 1..221: note = XENP019444 [CTLA-4]_H0_L0.29_Fab Heavy Chain

SEQ ID NO: 9246 - protein, 118 aa, synthetic construct; identical to SEQ ID NO: 3737
  REGION 1..118: note = Description of Artificial Sequence: Synthetic polypeptide
  REGION 1..118: note = VH of XENP019444

SEQ ID NO: 9247 - protein, 5 aa, synthetic construct
  REGION 1..5: note = Description of Artificial Sequence: Synthetic peptide
  REGION 1..5: note = XENP019444 vhCDR1
SYTMH

SEQ ID NO: 9248 - protein, 17 aa, synthetic construct
  REGION 1..17: note = Description of Artificial Sequence: Synthetic peptide
  REGION 1..17: note = XENP019444 vhCDR2
FISYDGNNKYYADSVKG

SEQ ID NO: 9249 - protein, 9 aa, synthetic construct
  REGION 1..9: note = Description of Artificial Sequence: Synthetic peptide
  REGION 1..9: note = XENP019444 vhCDR3
TGWLGPFDY

SEQ ID NO: 9250 - protein, 215 aa, synthetic construct
  REGION 1..215: note = Description of Artificial Sequence: Synthetic polypeptide
  REGION 1..215: note = XENP019444 [CTLA-4]_H0_L0.29_Fab Light Chain
EIVLTQSPGTLSLSPGERATLSCRASQSVGSAYLAWYQQKPGQAPRLLIYGAFSRATGIPDRFSGSGSGTDFTLTISRLEPEDFAVYYCQQYGSSPWTFGQGTKVEIKRTVAAPSVFIFPPSDEQLKSGTASVVCLLNNFYPREAKVQWKVDNALQSGNSQESVTEQDSKDSTYSLSSTLTLSKADYEKHKVYACEVTHQGLSSPVTKSFNRGEC

SEQ ID NO: 9251 - protein, 108 aa, synthetic construct; identical to SEQ ID NO: 6346
  REGION 1..108: note = Description of Artificial Sequence: Synthetic polypeptide
  REGION 1..108: note = VL of XENP019444

SEQ ID NO: 9252 - protein, 12 aa, synthetic construct
  REGION 1..12: note = Description of Artificial Sequence: Synthetic peptide
  REGION 1..12: note = XENP019444 vlCDR1
RASQSVGSAYLA

SEQ ID NO: 9253 - protein, 7 aa, synthetic construct
  REGION 1..7: note = Description of Artificial Sequence: Synthetic peptide
  REGION 1..7: note = XENP019444 vlCDR2
GAFSRAT

SEQ ID NO: 9254 - protein, 9 aa, synthetic construct
  REGION 1..9: note = Description of Artificial Sequence: Synthetic peptide
  REGION 1..9: note = XENP019444 vlCDR3
QQYGSSPWT

SEQ ID NO: 9255 - protein, 221 aa, synthetic construct; identical to SEQ ID NO: 7595
  REGION 1..221: note = Description of Artificial Sequence: Synthetic polypeptide
  REGION 1..221: note = XENP019445 [CTLA-4]_H0_L0.30_Fab Heavy Chain

SEQ ID NO: 9256 - protein, 118 aa, synthetic construct; identical to SEQ ID NO: 3737
  REGION 1..118: note = Description of Artificial Sequence: Synthetic polypeptide
  REGION 1..118: note = VH of XENP019445

SEQ ID NO: 9257 - protein, 5 aa, synthetic construct
  REGION 1..5: note = Description of Artificial Sequence: Synthetic peptide
  REGION 1..5: note = XENP019445 vhCDR1
SYTMH

SEQ ID NO: 9258 - protein, 17 aa, synthetic construct
  REGION 1..17: note = Description of Artificial Sequence: Synthetic peptide
  REGION 1..17: note = XENP019445 vhCDR2
FISYDGNNKYYADSVKG

SEQ ID NO: 9259 - protein, 9 aa, synthetic construct
  REGION 1..9: note = Description of Artificial Sequence: Synthetic peptide
  REGION 1..9: note = XENP019445 vhCDR3
TGWLGPFDY

SEQ ID NO: 9260 - protein, 215 aa, synthetic construct
  REGION 1..215: note = Description of Artificial Sequence: Synthetic polypeptide
  REGION 1..215: note = XENP019445 [CTLA-4]_H0_L0.30_Fab Light Chain
EIVLTQSPGTLSLSPGERATLSCRASQSVGSGYLAWYQQKPGQAPRLLIYGAFSRATGIPDRFSGSGSGTDFTLTISRLEPEDFAVYYCQQYGSSPWTFGQGTKVEIKRTVAAPSVFIFPPSDEQLKSGTASVVCLLNNFYPREAKVQWKVDNALQSGNSQESVTEQDSKDSTYSLSSTLTLSKADYEKHKVYACEVTHQGLSSPVTKSFNRGEC

SEQ ID NO: 9261 - protein, 108 aa, synthetic construct; identical to SEQ ID NO: 6355
  REGION 1..108: note = Description of Artificial Sequence: Synthetic polypeptide
  REGION 1..108: note = VL of XENP019445

SEQ ID NO: 9262 - protein, 12 aa, synthetic construct
  REGION 1..12: note = Description of Artificial Sequence: Synthetic peptide
  REGION 1..12: note = XENP019445 vlCDR1
RASQSVGSGYLA

SEQ ID NO: 9263 - protein, 7 aa, synthetic construct
  REGION 1..7: note = Description of Artificial Sequence: Synthetic peptide
  REGION 1..7: note = XENP019445 vlCDR2
GAFSRAT

SEQ ID NO: 9264 - protein, 9 aa, synthetic construct
  REGION 1..9: note = Description of Artificial Sequence: Synthetic peptide
  REGION 1..9: note = XENP019445 vlCDR3
QQYGSSPWT

SEQ ID NO: 9265 - protein, 221 aa, synthetic construct; identical to SEQ ID NO: 7595
  REGION 1..221: note = Description of Artificial Sequence: Synthetic polypeptide
  REGION 1..221: note = XENP019446 [CTLA-4]_H0_L0.31_Fab Heavy Chain

SEQ ID NO: 9266 - protein, 118 aa, synthetic construct; identical to SEQ ID NO: 3737
  REGION 1..118: note = Description of Artificial Sequence: Synthetic polypeptide
  REGION 1..118: note = VH of XENP019446

SEQ ID NO: 9267 - protein, 5 aa, synthetic construct
  REGION 1..5: note = Description of Artificial Sequence: Synthetic peptide
  REGION 1..5: note = XENP019446 vhCDR1
SYTMH

SEQ ID NO: 9268 - protein, 17 aa, synthetic construct
  REGION 1..17: note = Description of Artificial Sequence: Synthetic peptide
  REGION 1..17: note = XENP019446 vhCDR2
FISYDGNNKYYADSVKG

SEQ ID NO: 9269 - protein, 9 aa, synthetic construct
  REGION 1..9: note = Description of Artificial Sequence: Synthetic peptide
  REGION 1..9: note = XENP019446 vhCDR3
TGWLGPFDY

SEQ ID NO: 9270 - protein, 215 aa, synthetic construct
  REGION 1..215: note = Description of Artificial Sequence: Synthetic polypeptide
  REGION 1..215: note = XENP019446 [CTLA-4]_H0_L0.31_Fab Light Chain
EIVLTQSPGTLSLSPGERATLSCRASQSVGSNYLAWYQQKPGQAPRLLIYGAFSRATGIPDRFSGSGSGTDFTLTISRLEPEDFAVYYCQQYGSSPWTFGQGTKVEIKRTVAAPSVFIFPPSDEQLKSGTASVVCLLNNFYPREAKVQWKVDNALQSGNSQESVTEQDSKDSTYSLSSTLTLSKADYEKHKVYACEVTHQGLSSPVTKSFNRGEC

SEQ ID NO: 9271 - protein, 108 aa, synthetic construct; identical to SEQ ID NO: 6364
  REGION 1..108: note = Description of Artificial Sequence: Synthetic polypeptide
  REGION 1..108: note = VL of XENP019446

SEQ ID NO: 9272 - protein, 12 aa, synthetic construct
  REGION 1..12: note = Description of Artificial Sequence: Synthetic peptide
  REGION 1..12: note = XENP019446 vlCDR1
RASQSVGSNYLA

SEQ ID NO: 9273 - protein, 7 aa, synthetic construct
  REGION 1..7: note = Description of Artificial Sequence: Synthetic peptide
  REGION 1..7: note = XENP019446 vlCDR2
GAFSRAT

SEQ ID NO: 9274 - protein, 9 aa, synthetic construct
  REGION 1..9: note = Description of Artificial Sequence: Synthetic peptide
  REGION 1..9: note = XENP019446 vlCDR3
QQYGSSPWT

SEQ ID NO: 9275 - protein, 221 aa, synthetic construct; identical to SEQ ID NO: 7595
  REGION 1..221: note = Description of Artificial Sequence: Synthetic polypeptide
  REGION 1..221: note = XENP019447 [CTLA-4]_H0_L0.32_Fab Heavy Chain

SEQ ID NO: 9276 - protein, 118 aa, synthetic construct; identical to SEQ ID NO: 3737
  REGION 1..118: note = Description of Artificial Sequence: Synthetic polypeptide
  REGION 1..118: note = VH of XENP019447

SEQ ID NO: 9277 - protein, 5 aa, synthetic construct
  REGION 1..5: note = Description of Artificial Sequence: Synthetic peptide
  REGION 1..5: note = XENP019447 vhCDR1
SYTMH

SEQ ID NO: 9278 - protein, 17 aa, synthetic construct
  REGION 1..17: note = Description of Artificial Sequence: Synthetic peptide
  REGION 1..17: note = XENP019447 vhCDR2
FISYDGNNKYYADSVKG

SEQ ID NO: 9279 - protein, 9 aa, synthetic construct
  REGION 1..9: note = Description of Artificial Sequence: Synthetic peptide
  REGION 1..9: note = XENP019447 vhCDR3
TGWLGPFDY

SEQ ID NO: 9280 - protein, 215 aa, synthetic construct
  REGION 1..215: note = Description of Artificial Sequence: Synthetic polypeptide
  REGION 1..215: note = XENP019447 [CTLA-4]_H0_L0.32_Fab Light Chain
EIVLTQSPGTLSLSPGERATLSCRASQSVGSQYLAWYQQKPGQAPRLLIYGAFSRATGIPDRFSGSGSGTDFTLTISRLEPEDFAVYYCQQYGSSPWTFGQGTKVEIKRTVAAPSVFIFPPSDEQLKSGTASVVCLLNNFYPREAKVQWKVDNALQSGNSQESVTEQDSKDSTYSLSSTLTLSKADYEKHKVYACEVTHQGLSSPVTKSFNRGEC

SEQ ID NO: 9281 - protein, 108 aa, synthetic construct; identical to SEQ ID NO: 6373
  REGION 1..108: note = Description of Artificial Sequence: Synthetic polypeptide
  REGION 1..108: note = VL of XENP019447

SEQ ID NO: 9282 - protein, 12 aa, synthetic construct
  REGION 1..12: note = Description of Artificial Sequence: Synthetic peptide
  REGION 1..12: note = XENP019447 vlCDR1
RASQSVGSQYLA

SEQ ID NO: 9283 - protein, 7 aa, synthetic construct
  REGION 1..7: note = Description of Artificial Sequence: Synthetic peptide
  REGION 1..7: note = XENP019447 vlCDR2
GAFSRAT

SEQ ID NO: 9284 - protein, 9 aa, synthetic construct
  REGION 1..9: note = Description of Artificial Sequence: Synthetic peptide
  REGION 1..9: note = XENP019447 vlCDR3
QQYGSSPWT

SEQ ID NO: 9285 - protein, 221 aa, synthetic construct; identical to SEQ ID NO: 7595
  REGION 1..221: note = Description of Artificial Sequence: Synthetic polypeptide
  REGION 1..221: note = XENP019448 [CTLA-4]_H0_L0.33_Fab Heavy Chain

SEQ ID NO: 9286 - protein, 118 aa, synthetic construct; identical to SEQ ID NO: 3737
  REGION 1..118: note = Description of Artificial Sequence: Synthetic polypeptide
  REGION 1..118: note = VH of XENP019448

SEQ ID NO: 9287 - protein, 5 aa, synthetic construct
  REGION 1..5: note = Description of Artificial Sequence: Synthetic peptide
  REGION 1..5: note = XENP019448 vhCDR1
SYTMH

SEQ ID NO: 9288 - protein, 17 aa, synthetic construct
  REGION 1..17: note = Description of Artificial Sequence: Synthetic peptide
  REGION 1..17: note = XENP019448 vhCDR2
FISYDGNNKYYADSVKG

SEQ ID NO: 9289 - protein, 9 aa, synthetic construct
  REGION 1..9: note = Description of Artificial Sequence: Synthetic peptide
  REGION 1..9: note = XENP019448 vhCDR3
TGWLGPFDY

SEQ ID NO: 9290 - protein, 215 aa, synthetic construct
  REGION 1..215: note = Description of Artificial Sequence: Synthetic polypeptide
  REGION 1..215: note = XENP019448 [CTLA-4]_H0_L0.33_Fab Light Chain
EIVLTQSPGTLSLSPGERATLSCRASQSVGSTYLAWYQQKPGQAPRLLIYGAFSRATGIPDRFSGSGSGTDFTLTISRLEPEDFAVYYCQQYGSSPWTFGQGTKVEIKRTVAAPSVFIFPPSDEQLKSGTASVVCLLNNFYPREAKVQWKVDNALQSGNSQESVTEQDSKDSTYSLSSTLTLSKADYEKHKVYACEVTHQGLSSPVTKSFNRGEC

SEQ ID NO: 9291 - protein, 108 aa, synthetic construct; identical to SEQ ID NO: 6382
  REGION 1..108: note = Description of Artificial Sequence: Synthetic polypeptide
  REGION 1..108: note = VL of XENP019448

SEQ ID NO: 9292 - protein, 12 aa, synthetic construct
  REGION 1..12: note = Description of Artificial Sequence: Synthetic peptide
  REGION 1..12: note = XENP019448 vlCDR1
RASQSVGSTYLA

SEQ ID NO: 9293 - protein, 7 aa, synthetic construct
  REGION 1..7: note = Description of Artificial Sequence: Synthetic peptide
  REGION 1..7: note = XENP019448 vlCDR2
GAFSRAT

SEQ ID NO: 9294 - protein, 9 aa, synthetic construct
  REGION 1..9: note = Description of Artificial Sequence: Synthetic peptide
  REGION 1..9: note = XENP019448 vlCDR3
QQYGSSPWT

SEQ ID NO: 9295 - protein, 221 aa, synthetic construct; identical to SEQ ID NO: 7595
  REGION 1..221: note = Description of Artificial Sequence: Synthetic polypeptide
  REGION 1..221: note = XENP019449 [CTLA-4]_H0_L0.34_Fab Heavy Chain

SEQ ID NO: 9296 - protein, 118 aa, synthetic construct; identical to SEQ ID NO: 3737
  REGION 1..118: note = Description of Artificial Sequence: Synthetic polypeptide
  REGION 1..118: note = VH of XENP019449

SEQ ID NO: 9297 - protein, 5 aa, synthetic construct
  REGION 1..5: note = Description of Artificial Sequence: Synthetic peptide
  REGION 1..5: note = XENP019449 vhCDR1
SYTMH

SEQ ID NO: 9298 - protein, 17 aa, synthetic construct
  REGION 1..17: note = Description of Artificial Sequence: Synthetic peptide
  REGION 1..17: note = XENP019449 vhCDR2
FISYDGNNKYYADSVKG

SEQ ID NO: 9299 - protein, 9 aa, synthetic construct
  REGION 1..9: note = Description of Artificial Sequence: Synthetic peptide
  REGION 1..9: note = XENP019449 vhCDR3
TGWLGPFDY

SEQ ID NO: 9300 - protein, 215 aa, synthetic construct
  REGION 1..215: note = Description of Artificial Sequence: Synthetic polypeptide
  REGION 1..215: note = XENP019449 [CTLA-4]_H0_L0.34_Fab Light Chain
EIVLTQSPGTLSLSPGERATLSCRASQSVGSSALAWYQQKPGQAPRLLIYGAFSRATGIPDRFSGSGSGTDFTLTISRLEPEDFAVYYCQQYGSSPWTFGQGTKVEIKRTVAAPSVFIFPPSDEQLKSGTASVVCLLNNFYPREAKVQWKVDNALQSGNSQESVTEQDSKDSTYSLSSTLTLSKADYEKHKVYACEVTHQGLSSPVTKSFNRGEC

SEQ ID NO: 9301 - protein, 108 aa, synthetic construct; identical to SEQ ID NO: 6391
  REGION 1..108: note = Description of Artificial Sequence: Synthetic polypeptide
  REGION 1..108: note = VL of XENP019449

SEQ ID NO: 9302 - protein, 12 aa, synthetic construct
  REGION 1..12: note = Description of Artificial Sequence: Synthetic peptide
  REGION 1..12: note = XENP019449 vlCDR1
RASQSVGSSALA

SEQ ID NO: 9303 - protein, 7 aa, synthetic construct
  REGION 1..7: note = Description of Artificial Sequence: Synthetic peptide
  REGION 1..7: note = XENP019449 vlCDR2
GAFSRAT

SEQ ID NO: 9304 - protein, 9 aa, synthetic construct
  REGION 1..9: note = Description of Artificial Sequence: Synthetic peptide
  REGION 1..9: note = XENP019449 vlCDR3
QQYGSSPWT

SEQ ID NO: 9305 - protein, 221 aa, synthetic construct; identical to SEQ ID NO: 7595
  REGION 1..221: note = Description of Artificial Sequence: Synthetic polypeptide
  REGION 1..221: note = XENP019450 [CTLA-4]_H0_L0.35_Fab Heavy Chain

SEQ ID NO: 9306 - protein, 118 aa, synthetic construct; identical to SEQ ID NO: 3737
  REGION 1..118: note = Description of Artificial Sequence: Synthetic polypeptide
  REGION 1..118: note = VH of XENP019450

SEQ ID NO: 9307 - protein, 5 aa, synthetic construct
  REGION 1..5: note = Description of Artificial Sequence: Synthetic peptide
  REGION 1..5: note = XENP019450 vhCDR1
SYTMH

SEQ ID NO: 9308 - protein, 17 aa, synthetic construct
  REGION 1..17: note = Description of Artificial Sequence: Synthetic peptide
  REGION 1..17: note = XENP019450 vhCDR2
FISYDGNNKYYADSVKG

SEQ ID NO: 9309 - protein, 9 aa, synthetic construct
  REGION 1..9: note = Description of Artificial Sequence: Synthetic peptide
  REGION 1..9: note = XENP019450 vhCDR3
TGWLGPFDY

SEQ ID NO: 9310 - protein, 215 aa, synthetic construct
  REGION 1..215: note = Description of Artificial Sequence: Synthetic polypeptide
  REGION 1..215: note = XENP019450 [CTLA-4]_H0_L0.35_Fab Light Chain
EIVLTQSPGTLSLSPGERATLSCRASQSVGSSFLAWYQQKPGQAPRLLIYGAFSRATGIPDRFSGSGSGTDFTLTISRLEPEDFAVYYCQQYGSSPWTFGQGTKVEIKRTVAAPSVFIFPPSDEQLKSGTASVVCLLNNFYPREAKVQWKVDNALQSGNSQESVTEQDSKDSTYSLSSTLTLSKADYEKHKVYACEVTHQGLSSPVTKSFNRGEC

SEQ ID NO: 9311 - protein, 108 aa, synthetic construct; identical to SEQ ID NO: 6400
  REGION 1..108: note = Description of Artificial Sequence: Synthetic polypeptide
  REGION 1..108: note = VL of XENP019450

SEQ ID NO: 9312 - protein, 12 aa, synthetic construct
  REGION 1..12: note = Description of Artificial Sequence: Synthetic peptide
  REGION 1..12: note = XENP019450 vlCDR1
RASQSVGSSFLA

SEQ ID NO: 9313 - protein, 7 aa, synthetic construct
  REGION 1..7: note = Description of Artificial Sequence: Synthetic peptide
  REGION 1..7: note = XENP019450 vlCDR2
GAFSRAT

SEQ ID NO: 9314 - protein, 9 aa, synthetic construct
  REGION 1..9: note = Description of Artificial Sequence: Synthetic peptide
  REGION 1..9: note = XENP019450 vlCDR3
QQYGSSPWT

SEQ ID NO: 9315 - protein, 221 aa, synthetic construct; identical to SEQ ID NO: 7595
  REGION 1..221: note = Description of Artificial Sequence: Synthetic polypeptide
  REGION 1..221: note = XENP019451 [CTLA-4]_H0_L0.36_Fab Heavy Chain

SEQ ID NO: 9316 - protein, 118 aa, synthetic construct; identical to SEQ ID NO: 3737
  REGION 1..118: note = Description of Artificial Sequence: Synthetic polypeptide
  REGION 1..118: note = VH of XENP019451

SEQ ID NO: 9317 - protein, 5 aa, synthetic construct
  REGION 1..5: note = Description of Artificial Sequence: Synthetic peptide
  REGION 1..5: note = XENP019451 vhCDR1
SYTMH

SEQ ID NO: 9318 - protein, 17 aa, synthetic construct
  REGION 1..17: note = Description of Artificial Sequence: Synthetic peptide
  REGION 1..17: note = XENP019451 vhCDR2
FISYDGNNKYYADSVKG

SEQ ID NO: 9319 - protein, 9 aa, synthetic construct
  REGION 1..9: note = Description of Artificial Sequence: Synthetic peptide
  REGION 1..9: note = XENP019451 vhCDR3
TGWLGPFDY

SEQ ID NO: 9320 - protein, 215 aa, synthetic construct
  REGION 1..215: note = Description of Artificial Sequence: Synthetic polypeptide
  REGION 1..215: note = XENP019451 [CTLA-4]_H0_L0.36_Fab Light Chain
EIVLTQSPGTLSLSPGERATLSCRASQSVGSSHLAWYQQKPGQAPRLLIYGAFSRATGIPDRFSGSGSGTDFTLTISRLEPEDFAVYYCQQYGSSPWTFGQGTKVEIKRTVAAPSVFIFPPSDEQLKSGTASVVCLLNNFYPREAKVQWKVDNALQSGNSQESVTEQDSKDSTYSLSSTLTLSKADYEKHKVYACEVTHQGLSSPVTKSFNRGEC

SEQ ID NO: 9321 - protein, 108 aa, synthetic construct; identical to SEQ ID NO: 6409
  REGION 1..108: note = Description of Artificial Sequence: Synthetic polypeptide
  REGION 1..108: note = VL of XENP019451

SEQ ID NO: 9322 - protein, 12 aa, synthetic construct
  REGION 1..12: note = Description of Artificial Sequence: Synthetic peptide
  REGION 1..12: note = XENP019451 vlCDR1
RASQSVGSSHLA

SEQ ID NO: 9323 - protein, 7 aa, synthetic construct
  REGION 1..7: note = Description of Artificial Sequence: Synthetic peptide
  REGION 1..7: note = XENP019451 vlCDR2
GAFSRAT

SEQ ID NO: 9324 - protein, 9 aa, synthetic construct
  REGION 1..9: note = Description of Artificial Sequence: Synthetic peptide
  REGION 1..9: note = XENP019451 vlCDR3
QQYGSSPWT

SEQ ID NO: 9325 - protein, 221 aa, synthetic construct; identical to SEQ ID NO: 7595
  REGION 1..221: note = Description of Artificial Sequence: Synthetic polypeptide
  REGION 1..221: note = XENP019452 [CTLA-4]_H0_L0.37_Fab Heavy Chain

SEQ ID NO: 9326 - protein, 118 aa, synthetic construct; identical to SEQ ID NO: 3737
  REGION 1..118: note = Description of Artificial Sequence: Synthetic polypeptide
  REGION 1..118: note = VH of XENP019452

SEQ ID NO: 9327 - protein, 5 aa, synthetic construct
  REGION 1..5: note = Description of Artificial Sequence: Synthetic peptide
  REGION 1..5: note = XENP019452 vhCDR1
SYTMH

SEQ ID NO: 9328 - protein, 17 aa, synthetic construct
  REGION 1..17: note = Description of Artificial Sequence: Synthetic peptide
  REGION 1..17: note = XENP019452 vhCDR2
FISYDGNNKYYADSVKG

SEQ ID NO: 9329 - protein, 9 aa, synthetic construct
  REGION 1..9: note = Description of Artificial Sequence: Synthetic peptide
  REGION 1..9: note = XENP019452 vhCDR3
TGWLGPFDY

SEQ ID NO: 9330 - protein, 215 aa, synthetic construct
  REGION 1..215: note = Description of Artificial Sequence: Synthetic polypeptide
  REGION 1..215: note = XENP019452 [CTLA-4]_H0_L0.37_Fab Light Chain
EIVLTQSPGTLSLSPGERATLSCRASQSVGSSLLAWYQQKPGQAPRLLIYGAFSRATGIPDRFSGSGSGTDFTLTISRLEPEDFAVYYCQQYGSSPWTFGQGTKVEIKRTVAAPSVFIFPPSDEQLKSGTASVVCLLNNFYPREAKVQWKVDNALQSGNSQESVTEQDSKDSTYSLSSTLTLSKADYEKHKVYACEVTHQGLSSPVTKSFNRGEC

SEQ ID NO: 9331 - protein, 108 aa, synthetic construct; identical to SEQ ID NO: 6418
  REGION 1..108: note = Description of Artificial Sequence: Synthetic polypeptide
  REGION 1..108: note = VL of XENP019452

SEQ ID NO: 9332 - protein, 12 aa, synthetic construct
  REGION 1..12: note = Description of Artificial Sequence: Synthetic peptide
  REGION 1..12: note = XENP019452 vlCDR1
RASQSVGSSLLA

SEQ ID NO: 9333 - protein, 7 aa, synthetic construct
  REGION 1..7: note = Description of Artificial Sequence: Synthetic peptide
  REGION 1..7: note = XENP019452 vlCDR2
GAFSRAT

SEQ ID NO: 9334 - protein, 9 aa, synthetic construct
  REGION 1..9: note = Description of Artificial Sequence: Synthetic peptide
  REGION 1..9: note = XENP019452 vlCDR3
QQYGSSPWT

SEQ ID NO: 9335 - protein, 221 aa, synthetic construct; identical to SEQ ID NO: 7595
  REGION 1..221: note = Description of Artificial Sequence: Synthetic polypeptide
  REGION 1..221: note = XENP019453 [CTLA-4]_H0_L0.38_Fab Heavy Chain

SEQ ID NO: 9336 - protein, 118 aa, synthetic construct; identical to SEQ ID NO: 3737
  REGION 1..118: note = Description of Artificial Sequence: Synthetic polypeptide
  REGION 1..118: note = VH of XENP019453

SEQ ID NO: 9337 - protein, 5 aa, synthetic construct
  REGION 1..5: note = Description of Artificial Sequence: Synthetic peptide
  REGION 1..5: note = XENP019453 vhCDR1
SYTMH

SEQ ID NO: 9338 - protein, 17 aa, synthetic construct
  REGION 1..17: note = Description of Artificial Sequence: Synthetic peptide
  REGION 1..17: note = XENP019453 vhCDR2
FISYDGNNKYYADSVKG

SEQ ID NO: 9339 - protein, 9 aa, synthetic construct
  REGION 1..9: note = Description of Artificial Sequence: Synthetic peptide
  REGION 1..9: note = XENP019453 vhCDR3
TGWLGPFDY

SEQ ID NO: 9340 - protein, 215 aa, synthetic construct
  REGION 1..215: note = Description of Artificial Sequence: Synthetic polypeptide
  REGION 1..215: note = XENP019453 [CTLA-4]_H0_L0.38_Fab Light Chain
EIVLTQSPGTLSLSPGERATLSCRASQSVGSSNLAWYQQKPGQAPRLLIYGAFSRATGIPDRFSGSGSGTDFTLTISRLEPEDFAVYYCQQYGSSPWTFGQGTKVEIKRTVAAPSVFIFPPSDEQLKSGTASVVCLLNNFYPREAKVQWKVDNALQSGNSQESVTEQDSKDSTYSLSSTLTLSKADYEKHKVYACEVTHQGLSSPVTKSFNRGEC

SEQ ID NO: 9341 - protein, 108 aa, synthetic construct; identical to SEQ ID NO: 6427
  REGION 1..108: note = Description of Artificial Sequence: Synthetic polypeptide
  REGION 1..108: note = VL of XENP019453

SEQ ID NO: 9342 - protein, 12 aa, synthetic construct
  REGION 1..12: note = Description of Artificial Sequence: Synthetic peptide
  REGION 1..12: note = XENP019453 vlCDR1
RASQSVGSSNLA

SEQ ID NO: 9343 - protein, 7 aa, synthetic construct
  REGION 1..7: note = Description of Artificial Sequence: Synthetic peptide
  REGION 1..7: note = XENP019453 vlCDR2
GAFSRAT

SEQ ID NO: 9344 - protein, 9 aa, synthetic construct
  REGION 1..9: note = Description of Artificial Sequence: Synthetic peptide
  REGION 1..9: note = XENP019453 vlCDR3
QQYGSSPWT

SEQ ID NO: 9345 - protein, 221 aa, synthetic construct; identical to SEQ ID NO: 7595
  REGION 1..221: note = Description of Artificial Sequence: Synthetic polypeptide
  REGION 1..221: note = XENP019454 [CTLA-4]_H0_L0.39_Fab Heavy Chain

SEQ ID NO: 9346 - protein, 118 aa, synthetic construct; identical to SEQ ID NO: 3737
  REGION 1..118: note = Description of Artificial Sequence: Synthetic polypeptide
  REGION 1..118: note = VH of XENP019454

SEQ ID NO: 9347 - protein, 5 aa, synthetic construct
  REGION 1..5: note = Description of Artificial Sequence: Synthetic peptide
  REGION 1..5: note = XENP019454 vhCDR1
SYTMH

SEQ ID NO: 9348 - protein, 17 aa, synthetic construct
  REGION 1..17: note = Description of Artificial Sequence: Synthetic peptide
  REGION 1..17: note = XENP019454 vhCDR2
FISYDGNNKYYADSVKG

SEQ ID NO: 9349 - protein, 9 aa, synthetic construct
  REGION 1..9: note = Description of Artificial Sequence: Synthetic peptide
  REGION 1..9: note = XENP019454 vhCDR3
TGWLGPFDY

SEQ ID NO: 9350 - protein, 215 aa, synthetic construct
  REGION 1..215: note = Description of Artificial Sequence: Synthetic polypeptide
  REGION 1..215: note = XENP019454 [CTLA-4]_H0_L0.39_Fab Light Chain
EIVLTQSPGTLSLSPGERATLSCRASQSVGSSSLAWYQQKPGQAPRLLIYGAFSRATGIPDRFSGSGSGTDFTLTISRLEPEDFAVYYCQQYGSSPWTFGQGTKVEIKRTVAAPSVFIFPPSDEQLKSGTASVVCLLNNFYPREAKVQWKVDNALQSGNSQESVTEQDSKDSTYSLSSTLTLSKADYEKHKVYACEVTHQGLSSPVTKSFNRGEC

SEQ ID NO: 9351 - protein, 108 aa, synthetic construct; identical to SEQ ID NO: 6436
  REGION 1..108: note = Description of Artificial Sequence: Synthetic polypeptide
  REGION 1..108: note = VL of XENP019454

SEQ ID NO: 9352 - protein, 12 aa, synthetic construct
  REGION 1..12: note = Description of Artificial Sequence: Synthetic peptide
  REGION 1..12: note = XENP019454 vlCDR1
RASQSVGSSSLA

SEQ ID NO: 9353 - protein, 7 aa, synthetic construct
  REGION 1..7: note = Description of Artificial Sequence: Synthetic peptide
  REGION 1..7: note = XENP019454 vlCDR2
GAFSRAT

SEQ ID NO: 9354 - protein, 9 aa, synthetic construct
  REGION 1..9: note = Description of Artificial Sequence: Synthetic peptide
  REGION 1..9: note = XENP019454 vlCDR3
QQYGSSPWT

SEQ ID NO: 9355 - protein, 221 aa, synthetic construct; identical to SEQ ID NO: 7595
  REGION 1..221: note = Description of Artificial Sequence: Synthetic polypeptide
  REGION 1..221: note = XENP019455 [CTLA-4]_H0_L0.40_Fab Heavy Chain

SEQ ID NO: 9356 - protein, 118 aa, synthetic construct; identical to SEQ ID NO: 3737
  REGION 1..118: note = Description of Artificial Sequence: Synthetic polypeptide
  REGION 1..118: note = VH of XENP019455

SEQ ID NO: 9357 - protein, 5 aa, synthetic construct
  REGION 1..5: note = Description of Artificial Sequence: Synthetic peptide
  REGION 1..5: note = XENP019455 vhCDR1
SYTMH

SEQ ID NO: 9358 - protein, 17 aa, synthetic construct
  REGION 1..17: note = Description of Artificial Sequence: Synthetic peptide
  REGION 1..17: note = XENP019455 vhCDR2
FISYDGNNKYYADSVKG

SEQ ID NO: 9359 - protein, 9 aa, synthetic construct
  REGION 1..9: note = Description of Artificial Sequence: Synthetic peptide
  REGION 1..9: note = XENP019455 vhCDR3
TGWLGPFDY

SEQ ID NO: 9360 - protein, 215 aa, synthetic construct
  REGION 1..215: note = Description of Artificial Sequence: Synthetic polypeptide
  REGION 1..215: note = XENP019455 [CTLA-4]_H0_L0.40_Fab Light Chain
EIVLTQSPGTLSLSPGERATLSCRASQSVGSSVLAWYQQKPGQAPRLLIYGAFSRATGIPDRFSGSGSGTDFTLTISRLEPEDFAVYYCQQYGSSPWTFGQGTKVEIKRTVAAPSVFIFPPSDEQLKSGTASVVCLLNNFYPREAKVQWKVDNALQSGNSQESVTEQDSKDSTYSLSSTLTLSKADYEKHKVYACEVTHQGLSSPVTKSFNRGEC

SEQ ID NO: 9361 - protein, 108 aa, synthetic construct; identical to SEQ ID NO: 6445
  REGION 1..108: note = Description of Artificial Sequence: Synthetic polypeptide
  REGION 1..108: note = VL of XENP019455

SEQ ID NO: 9362 - protein, 12 aa, synthetic construct
  REGION 1..12: note = Description of Artificial Sequence: Synthetic peptide
  REGION 1..12: note = XENP019455 vlCDR1
RASQSVGSSVLA

SEQ ID NO: 9363 - protein, 7 aa, synthetic construct
  REGION 1..7: note = Description of Artificial Sequence: Synthetic peptide
  REGION 1..7: note = XENP019455 vlCDR2
GAFSRAT

SEQ ID NO: 9364 - protein, 9 aa, synthetic construct
  REGION 1..9: note = Description of Artificial Sequence: Synthetic peptide
  REGION 1..9: note = XENP019455 vlCDR3
QQYGSSPWT

SEQ ID NO: 9365 - protein, 221 aa, synthetic construct; identical to SEQ ID NO: 7595
  REGION 1..221: note = Description of Artificial Sequence: Synthetic polypeptide
  REGION 1..221: note = XENP019456 [CTLA-4]_H0_L0.41_Fab Heavy Chain

SEQ ID NO: 9366 - protein, 118 aa, synthetic construct; identical to SEQ ID NO: 3737
  REGION 1..118: note = Description of Artificial Sequence: Synthetic polypeptide
  REGION 1..118: note = VH of XENP019456

SEQ ID NO: 9367 - protein, 5 aa, synthetic construct
  REGION 1..5: note = Description of Artificial Sequence: Synthetic peptide
  REGION 1..5: note = XENP019456 vhCDR1
SYTMH

SEQ ID NO: 9368 - protein, 17 aa, synthetic construct
  REGION 1..17: note = Description of Artificial Sequence: Synthetic peptide
  REGION 1..17: note = XENP019456 vhCDR2
FISYDGNNKYYADSVKG

SEQ ID NO: 9369 - protein, 9 aa, synthetic construct
  REGION 1..9: note = Description of Artificial Sequence: Synthetic peptide
  REGION 1..9: note = XENP019456 vhCDR3
TGWLGPFDY

SEQ ID NO: 9370 - protein, 215 aa, synthetic construct
  REGION 1..215: note = Description of Artificial Sequence: Synthetic polypeptide
  REGION 1..215: note = XENP019456 [CTLA-4]_H0_L0.41_Fab Light Chain
EIVLTQSPGTLSLSPGERATLSCRASQSVGSSYMAWYQQKPGQAPRLLIYGAFSRATGIPDRFSGSGSGTDFTLTISRLEPEDFAVYYCQQYGSSPWTFGQGTKVEIKRTVAAPSVFIFPPSDEQLKSGTASVVCLLNNFYPREAKVQWKVDNALQSGNSQESVTEQDSKDSTYSLSSTLTLSKADYEKHKVYACEVTHQGLSSPVTKSFNRGEC

SEQ ID NO: 9371 - protein, 108 aa, synthetic construct; identical to SEQ ID NO: 6454
  REGION 1..108: note = Description of Artificial Sequence: Synthetic polypeptide
  REGION 1..108: note = VL of XENP019456

SEQ ID NO: 9372 - protein, 12 aa, synthetic construct
  REGION 1..12: note = Description of Artificial Sequence: Synthetic peptide
  REGION 1..12: note = XENP019456 vlCDR1
RASQSVGSSYMA

SEQ ID NO: 9373 - protein, 7 aa, synthetic construct
  REGION 1..7: note = Description of Artificial Sequence: Synthetic peptide
  REGION 1..7: note = XENP019456 vlCDR2
GAFSRAT

SEQ ID NO: 9374 - protein, 9 aa, synthetic construct
  REGION 1..9: note = Description of Artificial Sequence: Synthetic peptide
  REGION 1..9: note = XENP019456 vlCDR3
QQYGSSPWT

SEQ ID NO: 9375 - protein, 221 aa, synthetic construct; identical to SEQ ID NO: 7595
  REGION 1..221: note = Description of Artificial Sequence: Synthetic polypeptide
  REGION 1..221: note = XENP019457 [CTLA-4]_H0_L0.42_Fab Heavy Chain

SEQ ID NO: 9376 - protein, 118 aa, synthetic construct; identical to SEQ ID NO: 3737
  REGION 1..118: note = Description of Artificial Sequence: Synthetic polypeptide
  REGION 1..118: note = VH of XENP019457

SEQ ID NO: 9377 - protein, 5 aa, synthetic construct
  REGION 1..5: note = Description of Artificial Sequence: Synthetic peptide
  REGION 1..5: note = XENP019457 vhCDR1
SYTMH

SEQ ID NO: 9378 - protein, 17 aa, synthetic construct
  REGION 1..17: note = Description of Artificial Sequence: Synthetic peptide
  REGION 1..17: note = XENP019457 vhCDR2
FISYDGNNKYYADSVKG

SEQ ID NO: 9379 - protein, 9 aa, synthetic construct
  REGION 1..9: note = Description of Artificial Sequence: Synthetic peptide
  REGION 1..9: note = XENP019457 vhCDR3
TGWLGPFDY

SEQ ID NO: 9380 - protein, 215 aa, synthetic construct
  REGION 1..215: note = Description of Artificial Sequence: Synthetic polypeptide
  REGION 1..215: note = XENP019457 [CTLA-4]_H0_L0.42_Fab Light Chain
EIVLTQSPGTLSLSPGERATLSCRASQSVGSSYLDWYQQKPGQAPRLLIYGAFSRATGIPDRFSGSGSGTDFTLTISRLEPEDFAVYYCQQYGSSPWTFGQGTKVEIKRTVAAPSVFIFPPSDEQLKSGTASVVCLLNNFYPREAKVQWKVDNALQSGNSQESVTEQDSKDSTYSLSSTLTLSKADYEKHKVYACEVTHQGLSSPVTKSFNRGEC

SEQ ID NO: 9381 - protein, 108 aa, synthetic construct; identical to SEQ ID NO: 6463
  REGION 1..108: note = Description of Artificial Sequence: Synthetic polypeptide
  REGION 1..108: note = VL of XENP019457

SEQ ID NO: 9382 - protein, 12 aa, synthetic construct
  REGION 1..12: note = Description of Artificial Sequence: Synthetic peptide
  REGION 1..12: note = XENP019457 vlCDR1
RASQSVGSSYLD

SEQ ID NO: 9383 - protein, 7 aa, synthetic construct
  REGION 1..7: note = Description of Artificial Sequence: Synthetic peptide
  REGION 1..7: note = XENP019457 vlCDR2
GAFSRAT

SEQ ID NO: 9384 - protein, 9 aa, synthetic construct
  REGION 1..9: note = Description of Artificial Sequence: Synthetic peptide
  REGION 1..9: note = XENP019457 vlCDR3
QQYGSSPWT

SEQ ID NO: 9385 - protein, 221 aa, synthetic construct; identical to SEQ ID NO: 7595
  REGION 1..221: note = Description of Artificial Sequence: Synthetic polypeptide
  REGION 1..221: note = XENP019458 [CTLA-4]_H0_L0.43_Fab Heavy Chain

SEQ ID NO: 9386 - protein, 118 aa, synthetic construct; identical to SEQ ID NO: 3737
  REGION 1..118: note = Description of Artificial Sequence: Synthetic polypeptide
  REGION 1..118: note = VH of XENP019458

SEQ ID NO: 9387 - protein, 5 aa, synthetic construct
  REGION 1..5: note = Description of Artificial Sequence: Synthetic peptide
  REGION 1..5: note = XENP019458 vhCDR1
SYTMH

SEQ ID NO: 9388 - protein, 17 aa, synthetic construct
  REGION 1..17: note = Description of Artificial Sequence: Synthetic peptide
  REGION 1..17: note = XENP019458 vhCDR2
FISYDGNNKYYADSVKG

SEQ ID NO: 9389 - protein, 9 aa, synthetic construct
  REGION 1..9: note = Description of Artificial Sequence: Synthetic peptide
  REGION 1..9: note = XENP019458 vhCDR3
TGWLGPFDY

SEQ ID NO: 9390 - protein, 215 aa, synthetic construct
  REGION 1..215: note = Description of Artificial Sequence: Synthetic polypeptide
  REGION 1..215: note = XENP019458 [CTLA-4]_H0_L0.43_Fab Light Chain
EIVLTQSPGTLSLSPGERATLSCRASQSVGSSYLDWYQQKPGQAPRLLIYGAFSRATGIPDRFSGSGSGTDFTLTISRLEPEDFAVYYCKQYGSSPWTFGQGTKVEIKRTVAAPSVFIFPPSDEQLKSGTASVVCLLNNFYPREAKVQWKVDNALQSGNSQESVTEQDSKDSTYSLSSTLTLSKADYEKHKVYACEVTHQGLSSPVTKSFNRGEC

SEQ ID NO: 9391 - protein, 108 aa, synthetic construct; identical to SEQ ID NO: 6472
  REGION 1..108: note = Description of Artificial Sequence: Synthetic polypeptide
  REGION 1..108: note = VL of XENP019458

SEQ ID NO: 9392 - protein, 12 aa, synthetic construct
  REGION 1..12: note = Description of Artificial Sequence: Synthetic peptide
  REGION 1..12: note = XENP019458 vlCDR1
RASQSVGSSYLD

SEQ ID NO: 9393 - protein, 7 aa, synthetic construct
  REGION 1..7: note = Description of Artificial Sequence: Synthetic peptide
  REGION 1..7: note = XENP019458 vlCDR2
GAFSRAT

SEQ ID NO: 9394 - protein, 9 aa, synthetic construct
  REGION 1..9: note = Description of Artificial Sequence: Synthetic peptide
  REGION 1..9: note = XENP019458 vlCDR3
KQYGSSPWT

SEQ ID NO: 9395 - protein, 221 aa, synthetic construct; identical to SEQ ID NO: 7595
  REGION 1..221: note = Description of Artificial Sequence: Synthetic polypeptide
  REGION 1..221: note = XENP019459 [CTLA-4]_H0_L0.44_Fab Heavy Chain

SEQ ID NO: 9396 - protein, 118 aa, synthetic construct; identical to SEQ ID NO: 3737
  REGION 1..118: note = Description of Artificial Sequence: Synthetic polypeptide
  REGION 1..118: note = VH of XENP019459

SEQ ID NO: 9397 - protein, 5 aa, synthetic construct
  REGION 1..5: note = Description of Artificial Sequence: Synthetic peptide
  REGION 1..5: note = XENP019459 vhCDR1
SYTMH

SEQ ID NO: 9398 - protein, 17 aa, synthetic construct
  REGION 1..17: note = Description of Artificial Sequence: Synthetic peptide
  REGION 1..17: note = XENP019459 vhCDR2
FISYDGNNKYYADSVKG

SEQ ID NO: 9399 - protein, 9 aa, synthetic construct
  REGION 1..9: note = Description of Artificial Sequence: Synthetic peptide
  REGION 1..9: note = XENP019459 vhCDR3
TGWLGPFDY

SEQ ID NO: 9400 - protein, 215 aa, synthetic construct
  REGION 1..215: note = Description of Artificial Sequence: Synthetic polypeptide
  REGION 1..215: note = XENP019459 [CTLA-4]_H0_L0.44_Fab Light Chain
EIVLTQSPGTLSLSPGERATLSCRASQSVGSSYLSWYQQKPGQAPRLLIYGAFSRATGIPDRFSGSGSGTDFTLTISRLEPEDFAVYYCQQYGSSPWTFGQGTKVEIKRTVAAPSVFIFPPSDEQLKSGTASVVCLLNNFYPREAKVQWKVDNALQSGNSQESVTEQDSKDSTYSLSSTLTLSKADYEKHKVYACEVTHQGLSSPVTKSFNRGEC

SEQ ID NO: 9401 - protein, 108 aa, synthetic construct; identical to SEQ ID NO: 6481
  REGION 1..108: note = Description of Artificial Sequence: Synthetic polypeptide
  REGION 1..108: note = VL of XENP019459

SEQ ID NO: 9402 - protein, 12 aa, synthetic construct
  REGION 1..12: note = Description of Artificial Sequence: Synthetic peptide
  REGION 1..12: note = XENP019459 vlCDR1
RASQSVGSSYLS

SEQ ID NO: 9403 - protein, 7 aa, synthetic construct
  REGION 1..7: note = Description of Artificial Sequence: Synthetic peptide
  REGION 1..7: note = XENP019459 vlCDR2
GAFSRAT

SEQ ID NO: 9404 - protein, 9 aa, synthetic construct
  REGION 1..9: note = Description of Artificial Sequence: Synthetic peptide
  REGION 1..9: note = XENP019459 vlCDR3
QQYGSSPWT

SEQ ID NO: 9405 - protein, 221 aa, synthetic construct; identical to SEQ ID NO: 7595
  REGION 1..221: note = Description of Artificial Sequence: Synthetic polypeptide
  REGION 1..221: note = XENP019460 [CTLA-4]_H0_L0.45_Fab Heavy Chain

SEQ ID NO: 9406 - protein, 118 aa, synthetic construct; identical to SEQ ID NO: 3737
  REGION 1..118: note = Description of Artificial Sequence: Synthetic polypeptide
  REGION 1..118: note = VH of XENP019460

SEQ ID NO: 9407 - protein, 5 aa, synthetic construct
  REGION 1..5: note = Description of Artificial Sequence: Synthetic peptide
  REGION 1..5: note = XENP019460 vhCDR1
SYTMH

SEQ ID NO: 9408 - protein, 17 aa, synthetic construct
  REGION 1..17: note = Description of Artificial Sequence: Synthetic peptide
  REGION 1..17: note = XENP019460 vhCDR2
FISYDGNNKYYADSVKG

SEQ ID NO: 9409 - protein, 9 aa, synthetic construct
  REGION 1..9: note = Description of Artificial Sequence: Synthetic peptide
  REGION 1..9: note = XENP019460 vhCDR3
TGWLGPFDY

SEQ ID NO: 9410 - protein, 215 aa, synthetic construct
  REGION 1..215: note = Description of Artificial Sequence: Synthetic polypeptide
  REGION 1..215: note = XENP019460 [CTLA-4]_H0_L0.45_Fab Light Chain
EIVLTQSPGTLSLSPGERATLSCRASQSVGSSYLTWYQQKPGQAPRLLIYGAFSRATGIPDRFSGSGSGTDFTLTISRLEPEDFAVYYCQQYGSSPWTFGQGTKVEIKRTVAAPSVFIFPPSDEQLKSGTASVVCLLNNFYPREAKVQWKVDNALQSGNSQESVTEQDSKDSTYSLSSTLTLSKADYEKHKVYACEVTHQGLSSPVTKSFNRGEC

SEQ ID NO: 9411 - protein, 108 aa, synthetic construct; identical to SEQ ID NO: 6490
  REGION 1..108: note = Description of Artificial Sequence: Synthetic polypeptide
  REGION 1..108: note = VL of XENP019460

SEQ ID NO: 9412 - protein, 12 aa, synthetic construct
  REGION 1..12: note = Description of Artificial Sequence: Synthetic peptide
  REGION 1..12: note = XENP019460 vlCDR1
RASQSVGSSYLT

SEQ ID NO: 9413 - protein, 7 aa, synthetic construct
  REGION 1..7: note = Description of Artificial Sequence: Synthetic peptide
  REGION 1..7: note = XENP019460 vlCDR2
GAFSRAT

SEQ ID NO: 9414 - protein, 9 aa, synthetic construct
  REGION 1..9: note = Description of Artificial Sequence: Synthetic peptide
  REGION 1..9: note = XENP019460 vlCDR3
QQYGSSPWT

SEQ ID NO: 9415 - protein, 221 aa, synthetic construct; identical to SEQ ID NO: 7595
  REGION 1..221: note = Description of Artificial Sequence: Synthetic polypeptide
  REGION 1..221: note = XENP019461 [CTLA-4]_H0_L0.46_Fab Heavy Chain

SEQ ID NO: 9416 - protein, 118 aa, synthetic construct; identical to SEQ ID NO: 3737
  REGION 1..118: note = Description of Artificial Sequence: Synthetic polypeptide
  REGION 1..118: note = VH of XENP019461

SEQ ID NO: 9417 - protein, 5 aa, synthetic construct
  REGION 1..5: note = Description of Artificial Sequence: Synthetic peptide
  REGION 1..5: note = XENP019461 vhCDR1
SYTMH

SEQ ID NO: 9418 - protein, 17 aa, synthetic construct
  REGION 1..17: note = Description of Artificial Sequence: Synthetic peptide
  REGION 1..17: note = XENP019461 vhCDR2
FISYDGNNKYYADSVKG

SEQ ID NO: 9419 - protein, 9 aa, synthetic construct
  REGION 1..9: note = Description of Artificial Sequence: Synthetic peptide
  REGION 1..9: note = XENP019461 vhCDR3
TGWLGPFDY

SEQ ID NO: 9420 - protein, 215 aa, synthetic construct
  REGION 1..215: note = Description of Artificial Sequence: Synthetic polypeptide
  REGION 1..215: note = XENP019461 [CTLA-4]_H0_L0.46_Fab Light Chain
EIVLTQSPGTLSLSPGERATLSCRASQSVGSSYLAWYEQKPGQAPRLLIYGAFSRATGIPDRFSGSGSGTDFTLTISRLEPEDFAVYYCQQYGSSPWTFGQGTKVEIKRTVAAPSVFIFPPSDEQLKSGTASVVCLLNNFYPREAKVQWKVDNALQSGNSQESVTEQDSKDSTYSLSSTLTLSKADYEKHKVYACEVTHQGLSSPVTKSFNRGEC

SEQ ID NO: 9421 - protein, 108 aa, synthetic construct; identical to SEQ ID NO: 6499
  REGION 1..108: note = Description of Artificial Sequence: Synthetic polypeptide
  REGION 1..108: note = VL of XENP019461

SEQ ID NO: 9422 - protein, 12 aa, synthetic construct
  REGION 1..12: note = Description of Artificial Sequence: Synthetic peptide
  REGION 1..12: note = XENP019461 vlCDR1
RASQSVGSSYLA

SEQ ID NO: 9423 - protein, 7 aa, synthetic construct
  REGION 1..7: note = Description of Artificial Sequence: Synthetic peptide
  REGION 1..7: note = XENP019461 vlCDR2
GAFSRAT

SEQ ID NO: 9424 - protein, 9 aa, synthetic construct
  REGION 1..9: note = Description of Artificial Sequence: Synthetic peptide
  REGION 1..9: note = XENP019461 vlCDR3
QQYGSSPWT

SEQ ID NO: 9425 - protein, 221 aa, synthetic construct; identical to SEQ ID NO: 7595
  REGION 1..221: note = Description of Artificial Sequence: Synthetic polypeptide
  REGION 1..221: note = XENP019462 [CTLA-4]_H0_L0.47_Fab Heavy Chain

SEQ ID NO: 9426 - protein, 118 aa, synthetic construct; identical to SEQ ID NO: 3737
  REGION 1..118: note = Description of Artificial Sequence: Synthetic polypeptide
  REGION 1..118: note = VH of XENP019462

SEQ ID NO: 9427 - protein, 5 aa, synthetic construct
  REGION 1..5: note = Description of Artificial Sequence: Synthetic peptide
  REGION 1..5: note = XENP019462 vhCDR1
SYTMH

SEQ ID NO: 9428 - protein, 17 aa, synthetic construct
  REGION 1..17: note = Description of Artificial Sequence: Synthetic peptide
  REGION 1..17: note = XENP019462 vhCDR2
FISYDGNNKYYADSVKG

SEQ ID NO: 9429 - protein, 9 aa, synthetic construct
  REGION 1..9: note = Description of Artificial Sequence: Synthetic peptide
  REGION 1..9: note = XENP019462 vhCDR3
TGWLGPFDY

SEQ ID NO: 9430 - protein, 215 aa, synthetic construct
  REGION 1..215: note = Description of Artificial Sequence: Synthetic polypeptide
  REGION 1..215: note = XENP019462 [CTLA-4]_H0_L0.47_Fab Light Chain
EIVLTQSPGTLSLSPGERATLSCRASQSVGSSYLAWYLQKPGQAPRLLIYGAFSRATGIPDRFSGSGSGTDFTLTISRLEPEDFAVYYCQQYGSSPWTFGQGTKVEIKRTVAAPSVFIFPPSDEQLKSGTASVVCLLNNFYPREAKVQWKVDNALQSGNSQESVTEQDSKDSTYSLSSTLTLSKADYEKHKVYACEVTHQGLSSPVTKSFNRGEC

SEQ ID NO: 9431 - protein, 108 aa, synthetic construct; identical to SEQ ID NO: 6508
  REGION 1..108: note = Description of Artificial Sequence: Synthetic polypeptide
  REGION 1..108: note = VL of XENP019462

SEQ ID NO: 9432 - protein, 12 aa, synthetic construct
  REGION 1..12: note = Description of Artificial Sequence: Synthetic peptide
  REGION 1..12: note = XENP019462 vlCDR1
RASQSVGSSYLA

SEQ ID NO: 9433 - protein, 7 aa, synthetic construct
  REGION 1..7: note = Description of Artificial Sequence: Synthetic peptide
  REGION 1..7: note = XENP019462 vlCDR2
GAFSRAT

SEQ ID NO: 9434 - protein, 9 aa, synthetic construct
  REGION 1..9: note = Description of Artificial Sequence: Synthetic peptide
  REGION 1..9: note = XENP019462 vlCDR3
QQYGSSPWT

SEQ ID NO: 9435 - protein, 221 aa, synthetic construct; identical to SEQ ID NO: 7595
  REGION 1..221: note = Description of Artificial Sequence: Synthetic polypeptide
  REGION 1..221: note = XENP019463 [CTLA-4]_H0_L0.48_Fab Heavy Chain

SEQ ID NO: 9436 - protein, 118 aa, synthetic construct; identical to SEQ ID NO: 3737
  REGION 1..118: note = Description of Artificial Sequence: Synthetic polypeptide
  REGION 1..118: note = VH of XENP019463

SEQ ID NO: 9437 - protein, 5 aa, synthetic construct
  REGION 1..5: note = Description of Artificial Sequence: Synthetic peptide
  REGION 1..5: note = XENP019463 vhCDR1
SYTMH

SEQ ID NO: 9438 - protein, 17 aa, synthetic construct
  REGION 1..17: note = Description of Artificial Sequence: Synthetic peptide
  REGION 1..17: note = XENP019463 vhCDR2
FISYDGNNKYYADSVKG

SEQ ID NO: 9439 - protein, 9 aa, synthetic construct
  REGION 1..9: note = Description of Artificial Sequence: Synthetic peptide
  REGION 1..9: note = XENP019463 vhCDR3
TGWLGPFDY

SEQ ID NO: 9440 - protein, 215 aa, synthetic construct
  REGION 1..215: note = Description of Artificial Sequence: Synthetic polypeptide
  REGION 1..215: note = XENP019463 [CTLA-4]_H0_L0.48_Fab Light Chain
EIVLTQSPGTLSLSPGERATLSCRASQSVGSSYLAWYRQKPGQAPRLLIYGAFSRATGIPDRFSGSGSGTDFTLTISRLEPEDFAVYYCQQYGSSPWTFGQGTKVEIKRTVAAPSVFIFPPSDEQLKSGTASVVCLLNNFYPREAKVQWKVDNALQSGNSQESVTEQDSKDSTYSLSSTLTLSKADYEKHKVYACEVTHQGLSSPVTKSFNRGEC

SEQ ID NO: 9441 - protein, 108 aa, synthetic construct; identical to SEQ ID NO: 6517
  REGION 1..108: note = Description of Artificial Sequence: Synthetic polypeptide
  REGION 1..108: note = VL of XENP019463

SEQ ID NO: 9442 - protein, 12 aa, synthetic construct
  REGION 1..12: note = Description of Artificial Sequence: Synthetic peptide
  REGION 1..12: note = XENP019463 vlCDR1
RASQSVGSSYLA

SEQ ID NO: 9443 - protein, 7 aa, synthetic construct
  REGION 1..7: note = Description of Artificial Sequence: Synthetic peptide
  REGION 1..7: note = XENP019463 vlCDR2
GAFSRAT

SEQ ID NO: 9444 - protein, 9 aa, synthetic construct
  REGION 1..9: note = Description of Artificial Sequence: Synthetic peptide
  REGION 1..9: note = XENP019463 vlCDR3
QQYGSSPWT

SEQ ID NO: 9445 - protein, 221 aa, synthetic construct; identical to SEQ ID NO: 7595
  REGION 1..221: note = Description of Artificial Sequence: Synthetic polypeptide
  REGION 1..221: note = XENP019464 [CTLA-4]_H0_L0.49_Fab Heavy Chain

SEQ ID NO: 9446 - protein, 118 aa, synthetic construct; identical to SEQ ID NO: 3737
  REGION 1..118: note = Description of Artificial Sequence: Synthetic polypeptide
  REGION 1..118: note = VH of XENP019464

SEQ ID NO: 9447 - protein, 5 aa, synthetic construct
  REGION 1..5: note = Description of Artificial Sequence: Synthetic peptide
  REGION 1..5: note = XENP019464 vhCDR1
SYTMH

SEQ ID NO: 9448 - protein, 17 aa, synthetic construct
  REGION 1..17: note = Description of Artificial Sequence: Synthetic peptide
  REGION 1..17: note = XENP019464 vhCDR2
FISYDGNNKYYADSVKG

SEQ ID NO: 9449 - protein, 9 aa, synthetic construct
  REGION 1..9: note = Description of Artificial Sequence: Synthetic peptide
  REGION 1..9: note = XENP019464 vhCDR3
TGWLGPFDY

SEQ ID NO: 9450 - protein, 215 aa, synthetic construct
  REGION 1..215: note = Description of Artificial Sequence: Synthetic polypeptide
  REGION 1..215: note = XENP019464 [CTLA-4]_H0_L0.49_Fab Light Chain
EIVLTQSPGTLSLSPGERATLSCRASQSVGSSYLAWYRQKPGQAPELLIYGAFSRATGIPDRFSGSGSGTDFTLTISRLEPEDFAVYYCQQYGSSPWTFGQGTKVEIKRTVAAPSVFIFPPSDEQLKSGTASVVCLLNNFYPREAKVQWKVDNALQSGNSQESVTEQDSKDSTYSLSSTLTLSKADYEKHKVYACEVTHQGLSSPVTKSFNRGEC

SEQ ID NO: 9451 - protein, 108 aa, synthetic construct; identical to SEQ ID NO: 6526
  REGION 1..108: note = Description of Artificial Sequence: Synthetic polypeptide
  REGION 1..108: note = VL of XENP019464

SEQ ID NO: 9452 - protein, 12 aa, synthetic construct
  REGION 1..12: note = Description of Artificial Sequence: Synthetic peptide
  REGION 1..12: note = XENP019464 vlCDR1
RASQSVGSSYLA

SEQ ID NO: 9453 - protein, 7 aa, synthetic construct
  REGION 1..7: note = Description of Artificial Sequence: Synthetic peptide
  REGION 1..7: note = XENP019464 vlCDR2
GAFSRAT

SEQ ID NO: 9454 - protein, 9 aa, synthetic construct
  REGION 1..9: note = Description of Artificial Sequence: Synthetic peptide
  REGION 1..9: note = XENP019464 vlCDR3
QQYGSSPWT

SEQ ID NO: 9455 - protein, 221 aa, synthetic construct; identical to SEQ ID NO: 7595
  REGION 1..221: note = Description of Artificial Sequence: Synthetic polypeptide
  REGION 1..221: note = XENP019465 [CTLA-4]_H0_L0.50_Fab Heavy Chain

SEQ ID NO: 9456 - protein, 118 aa, synthetic construct; identical to SEQ ID NO: 3737
  REGION 1..118: note = Description of Artificial Sequence: Synthetic polypeptide
  REGION 1..118: note = VH of XENP019465

SEQ ID NO: 9457 - protein, 5 aa, synthetic construct
  REGION 1..5: note = Description of Artificial Sequence: Synthetic peptide
  REGION 1..5: note = XENP019465 vhCDR1
SYTMH

SEQ ID NO: 9458 - protein, 17 aa, synthetic construct
  REGION 1..17: note = Description of Artificial Sequence: Synthetic peptide
  REGION 1..17: note = XENP019465 vhCDR2
FISYDGNNKYYADSVKG

SEQ ID NO: 9459 - protein, 9 aa, synthetic construct
  REGION 1..9: note = Description of Artificial Sequence: Synthetic peptide
  REGION 1..9: note = XENP019465 vhCDR3
TGWLGPFDY

SEQ ID NO: 9460 - protein, 215 aa, synthetic construct
  REGION 1..215: note = Description of Artificial Sequence: Synthetic polypeptide
  REGION 1..215: note = XENP019465 [CTLA-4]_H0_L0.50_Fab Light Chain
EIVLTQSPGTLSLSPGERATLSCRASQSVGSSYLAWYQEKPGQAPRLLIYGAFSRATGIPDRFSGSGSGTDFTLTISRLEPEDFAVYYCQQYGSSPWTFGQGTKVEIKRTVAAPSVFIFPPSDEQLKSGTASVVCLLNNFYPREAKVQWKVDNALQSGNSQESVTEQDSKDSTYSLSSTLTLSKADYEKHKVYACEVTHQGLSSPVTKSFNRGEC

SEQ ID NO: 9461 - protein, 108 aa, synthetic construct; identical to SEQ ID NO: 4708
  REGION 1..108: note = Description of Artificial Sequence: Synthetic polypeptide
  REGION 1..108: note = VL of XENP019465

SEQ ID NO: 9462 - protein, 12 aa, synthetic construct
  REGION 1..12: note = Description of Artificial Sequence: Synthetic peptide
  REGION 1..12: note = XENP019465 vlCDR1
RASQSVGSSYLA

SEQ ID NO: 9463 - protein, 7 aa, synthetic construct
  REGION 1..7: note = Description of Artificial Sequence: Synthetic peptide
  REGION 1..7: note = XENP019465 vlCDR2
GAFSRAT

SEQ ID NO: 9464 - protein, 9 aa, synthetic construct
  REGION 1..9: note = Description of Artificial Sequence: Synthetic peptide
  REGION 1..9: note = XENP019465 vlCDR3
QQYGSSPWT

SEQ ID NO: 9465 - protein, 221 aa, synthetic construct; identical to SEQ ID NO: 7595
  REGION 1..221: note = Description of Artificial Sequence: Synthetic polypeptide
  REGION 1..221: note = XENP019466 [CTLA-4]_H0_L0.51_Fab Heavy Chain

SEQ ID NO: 9466 - protein, 118 aa, synthetic construct; identical to SEQ ID NO: 3737
  REGION 1..118: note = Description of Artificial Sequence: Synthetic polypeptide
  REGION 1..118: note = VH of XENP019466

SEQ ID NO: 9467 - protein, 5 aa, synthetic construct
  REGION 1..5: note = Description of Artificial Sequence: Synthetic peptide
  REGION 1..5: note = XENP019466 vhCDR1
SYTMH

SEQ ID NO: 9468 - protein, 17 aa, synthetic construct
  REGION 1..17: note = Description of Artificial Sequence: Synthetic peptide
  REGION 1..17: note = XENP019466 vhCDR2
FISYDGNNKYYADSVKG

SEQ ID NO: 9469 - protein, 9 aa, synthetic construct
  REGION 1..9: note = Description of Artificial Sequence: Synthetic peptide
  REGION 1..9: note = XENP019466 vhCDR3
TGWLGPFDY

SEQ ID NO: 9470 - protein, 215 aa, synthetic construct
  REGION 1..215: note = Description of Artificial Sequence: Synthetic polypeptide
  REGION 1..215: note = XENP019466 [CTLA-4]_H0_L0.51_Fab Light Chain
EIVLTQSPGTLSLSPGERATLSCRASQSVGSSYLAWYQQKPDQAPRLLIYGAFSRATGIPDRFSGSGSGTDFTLTISRLEPEDFAVYYCQQYGSSPWTFGQGTKVEIKRTVAAPSVFIFPPSDEQLKSGTASVVCLLNNFYPREAKVQWKVDNALQSGNSQESVTEQDSKDSTYSLSSTLTLSKADYEKHKVYACEVTHQGLSSPVTKSFNRGEC

SEQ ID NO: 9471 - protein, 108 aa, synthetic construct; identical to SEQ ID NO: 4717
  REGION 1..108: note = Description of Artificial Sequence: Synthetic polypeptide
  REGION 1..108: note = VL of XENP019466

SEQ ID NO: 9472 - protein, 12 aa, synthetic construct
  REGION 1..12: note = Description of Artificial Sequence: Synthetic peptide
  REGION 1..12: note = XENP019466 vlCDR1
RASQSVGSSYLA

SEQ ID NO: 9473 - protein, 7 aa, synthetic construct
  REGION 1..7: note = Description of Artificial Sequence: Synthetic peptide
  REGION 1..7: note = XENP019466 vlCDR2
GAFSRAT

SEQ ID NO: 9474 - protein, 9 aa, synthetic construct
  REGION 1..9: note = Description of Artificial Sequence: Synthetic peptide
  REGION 1..9: note = XENP019466 vlCDR3
QQYGSSPWT

SEQ ID NO: 9475 - protein, 221 aa, synthetic construct; identical to SEQ ID NO: 7595
  REGION 1..221: note = Description of Artificial Sequence: Synthetic polypeptide
  REGION 1..221: note = XENP019467 [CTLA-4]_H0_L0.52_Fab Heavy Chain

SEQ ID NO: 9476 - protein, 118 aa, synthetic construct; identical to SEQ ID NO: 3737
  REGION 1..118: note = Description of Artificial Sequence: Synthetic polypeptide
  REGION 1..118: note = VH of XENP019467

SEQ ID NO: 9477 - protein, 5 aa, synthetic construct
  REGION 1..5: note = Description of Artificial Sequence: Synthetic peptide
  REGION 1..5: note = XENP019467 vhCDR1
SYTMH

SEQ ID NO: 9478 - protein, 17 aa, synthetic construct
  REGION 1..17: note = Description of Artificial Sequence: Synthetic peptide
  REGION 1..17: note = XENP019467 vhCDR2
FISYDGNNKYYADSVKG

SEQ ID NO: 9479 - protein, 9 aa, synthetic construct
  REGION 1..9: note = Description of Artificial Sequence: Synthetic peptide
  REGION 1..9: note = XENP019467 vhCDR3
TGWLGPFDY

SEQ ID NO: 9480 - protein, 215 aa, synthetic construct
  REGION 1..215: note = Description of Artificial Sequence: Synthetic polypeptide
  REGION 1..215: note = XENP019467 [CTLA-4]_H0_L0.52_Fab Light Chain
EIVLTQSPGTLSLSPGERATLSCRASQSVGSSYLAWYQQKPEQAPRLLIYGAFSRATGIPDRFSGSGSGTDFTLTISRLEPEDFAVYYCQQYGSSPWTFGQGTKVEIKRTVAAPSVFIFPPSDEQLKSGTASVVCLLNNFYPREAKVQWKVDNALQSGNSQESVTEQDSKDSTYSLSSTLTLSKADYEKHKVYACEVTHQGLSSPVTKSFNRGEC

SEQ ID NO: 9481 - protein, 108 aa, synthetic construct; identical to SEQ ID NO: 6553
  REGION 1..108: note = Description of Artificial Sequence: Synthetic polypeptide
  REGION 1..108: note = VL of XENP019467

SEQ ID NO: 9482 - protein, 12 aa, synthetic construct
  REGION 1..12: note = Description of Artificial Sequence: Synthetic peptide
  REGION 1..12: note = XENP019467 vlCDR1
RASQSVGSSYLA

SEQ ID NO: 9483 - protein, 7 aa, synthetic construct
  REGION 1..7: note = Description of Artificial Sequence: Synthetic peptide
  REGION 1..7: note = XENP019467 vlCDR2
GAFSRAT

SEQ ID NO: 9484 - protein, 9 aa, synthetic construct
  REGION 1..9: note = Description of Artificial Sequence: Synthetic peptide
  REGION 1..9: note = XENP019467 vlCDR3
QQYGSSPWT

SEQ ID NO: 9485 - protein, 221 aa, synthetic construct; identical to SEQ ID NO: 7595
  REGION 1..221: note = Description of Artificial Sequence: Synthetic polypeptide
  REGION 1..221: note = XENP019468 [CTLA-4]_H0_L0.53_Fab Heavy Chain

SEQ ID NO: 9486 - protein, 118 aa, synthetic construct; identical to SEQ ID NO: 3737
  REGION 1..118: note = Description of Artificial Sequence: Synthetic polypeptide
  REGION 1..118: note = VH of XENP019468

SEQ ID NO: 9487 - protein, 5 aa, synthetic construct
  REGION 1..5: note = Description of Artificial Sequence: Synthetic peptide
  REGION 1..5: note = XENP019468 vhCDR1
SYTMH

SEQ ID NO: 9488 - protein, 17 aa, synthetic construct
  REGION 1..17: note = Description of Artificial Sequence: Synthetic peptide
  REGION 1..17: note = XENP019468 vhCDR2
FISYDGNNKYYADSVKG

SEQ ID NO: 9489 - protein, 9 aa, synthetic construct
  REGION 1..9: note = Description of Artificial Sequence: Synthetic peptide
  REGION 1..9: note = XENP019468 vhCDR3
TGWLGPFDY

SEQ ID NO: 9490 - protein, 215 aa, synthetic construct
  REGION 1..215: note = Description of Artificial Sequence: Synthetic polypeptide
  REGION 1..215: note = XENP019468 [CTLA-4]_H0_L0.53_Fab Light Chain
EIVLTQSPGTLSLSPGERATLSCRASQSVGSSYLAWYQQKPGEAPRLLIYGAFSRATGIPDRFSGSGSGTDFTLTISRLEPEDFAVYYCQQYGSSPWTFGQGTKVEIKRTVAAPSVFIFPPSDEQLKSGTASVVCLLNNFYPREAKVQWKVDNALQSGNSQESVTEQDSKDSTYSLSSTLTLSKADYEKHKVYACEVTHQGLSSPVTKSFNRGEC

SEQ ID NO: 9491 - protein, 108 aa, synthetic construct; identical to SEQ ID NO: 4753
  REGION 1..108: note = Description of Artificial Sequence: Synthetic polypeptide
  REGION 1..108: note = VL of XENP019468

SEQ ID NO: 9492 - protein, 12 aa, synthetic construct
  REGION 1..12: note = Description of Artificial Sequence: Synthetic peptide
  REGION 1..12: note = XENP019468 vlCDR1
RASQSVGSSYLA

SEQ ID NO: 9493 - protein, 7 aa, synthetic construct
  REGION 1..7: note = Description of Artificial Sequence: Synthetic peptide
  REGION 1..7: note = XENP019468 vlCDR2
GAFSRAT

SEQ ID NO: 9494 - protein, 9 aa, synthetic construct
  REGION 1..9: note = Description of Artificial Sequence: Synthetic peptide
  REGION 1..9: note = XENP019468 vlCDR3
QQYGSSPWT

SEQ ID NO: 9495 - protein, 221 aa, synthetic construct; identical to SEQ ID NO: 7595
  REGION 1..221: note = Description of Artificial Sequence: Synthetic polypeptide
  REGION 1..221: note = XENP019469 [CTLA-4]_H0_L0.54_Fab Heavy Chain

SEQ ID NO: 9496 - protein, 118 aa, synthetic construct; identical to SEQ ID NO: 3737
  REGION 1..118: note = Description of Artificial Sequence: Synthetic polypeptide
  REGION 1..118: note = VH of XENP019469

SEQ ID NO: 9497 - protein, 5 aa, synthetic construct
  REGION 1..5: note = Description of Artificial Sequence: Synthetic peptide
  REGION 1..5: note = XENP019469 vhCDR1
SYTMH

SEQ ID NO: 9498 - protein, 17 aa, synthetic construct
  REGION 1..17: note = Description of Artificial Sequence: Synthetic peptide
  REGION 1..17: note = XENP019469 vhCDR2
FISYDGNNKYYADSVKG

SEQ ID NO: 9499 - protein, 9 aa, synthetic construct
  REGION 1..9: note = Description of Artificial Sequence: Synthetic peptide
  REGION 1..9: note = XENP019469 vhCDR3
TGWLGPFDY

SEQ ID NO: 9500 - protein, 215 aa, synthetic construct
  REGION 1..215: note = Description of Artificial Sequence: Synthetic polypeptide
  REGION 1..215: note = XENP019469 [CTLA-4]_H0_L0.54_Fab Light Chain
EIVLTQSPGTLSLSPGERATLSCRASQSVGSSYLAWYQQKPGKAPRLLIYGAFSRATGIPDRFSGSGSGTDFTLTISRLEPEDFAVYYCQQYGSSPWTFGQGTKVEIKRTVAAPSVFIFPPSDEQLKSGTASVVCLLNNFYPREAKVQWKVDNALQSGNSQESVTEQDSKDSTYSLSSTLTLSKADYEKHKVYACEVTHQGLSSPVTKSFNRGEC

SEQ ID NO: 9501 - protein, 108 aa, synthetic construct; identical to SEQ ID NO: 6571
  REGION 1..108: note = Description of Artificial Sequence: Synthetic polypeptide
  REGION 1..108: note = VL of XENP019469

SEQ ID NO: 9502 - protein, 12 aa, synthetic construct
  REGION 1..12: note = Description of Artificial Sequence: Synthetic peptide
  REGION 1..12: note = XENP019469 vlCDR1
RASQSVGSSYLA

SEQ ID NO: 9503 - protein, 7 aa, synthetic construct
  REGION 1..7: note = Description of Artificial Sequence: Synthetic peptide
  REGION 1..7: note = XENP019469 vlCDR2
GAFSRAT

SEQ ID NO: 9504 - protein, 9 aa, synthetic construct
  REGION 1..9: note = Description of Artificial Sequence: Synthetic peptide
  REGION 1..9: note = XENP019469 vlCDR3
QQYGSSPWT

SEQ ID NO: 9505 - protein, 221 aa, synthetic construct; identical to SEQ ID NO: 7595
  REGION 1..221: note = Description of Artificial Sequence: Synthetic polypeptide
  REGION 1..221: note = XENP019470 [CTLA-4]_H0_L0.55_Fab Heavy Chain

SEQ ID NO: 9506 - protein, 118 aa, synthetic construct; identical to SEQ ID NO: 3737
  REGION 1..118: note = Description of Artificial Sequence: Synthetic polypeptide
  REGION 1..118: note = VH of XENP019470

SEQ ID NO: 9507 - protein, 5 aa, synthetic construct
  REGION 1..5: note = Description of Artificial Sequence: Synthetic peptide
  REGION 1..5: note = XENP019470 vhCDR1
SYTMH

SEQ ID NO: 9508 - protein, 17 aa, synthetic construct
  REGION 1..17: note = Description of Artificial Sequence: Synthetic peptide
  REGION 1..17: note = XENP019470 vhCDR2
FISYDGNNKYYADSVKG

SEQ ID NO: 9509 - protein, 9 aa, synthetic construct
  REGION 1..9: note = Description of Artificial Sequence: Synthetic peptide
  REGION 1..9: note = XENP019470 vhCDR3
TGWLGPFDY

SEQ ID NO: 9510 - protein, 215 aa, synthetic construct
  REGION 1..215: note = Description of Artificial Sequence: Synthetic polypeptide
  REGION 1..215: note = XENP019470 [CTLA-4]_H0_L0.55_Fab Light Chain
EIVLTQSPGTLSLSPGERATLSCRASQSVGSSYLAWYQQKPGKSPRLLIYGAFSRATGIPDRFSGSGSGTDFTLTISRLEPEDFAVYYCQQYGSSPWTFGQGTKVEIKRTVAAPSVFIFPPSDEQLKSGTASVVCLLNNFYPREAKVQWKVDNALQSGNSQESVTEQDSKDSTYSLSSTLTLSKADYEKHKVYACEVTHQGLSSPVTKSFNRGEC

SEQ ID NO: 9511 - protein, 108 aa, synthetic construct; identical to SEQ ID NO: 6580
  REGION 1..108: note = Description of Artificial Sequence: Synthetic polypeptide
  REGION 1..108: note = VL of XENP019470

SEQ ID NO: 9512 - protein, 12 aa, synthetic construct
  REGION 1..12: note = Description of Artificial Sequence: Synthetic peptide
  REGION 1..12: note = XENP019470 vlCDR1
RASQSVGSSYLA

SEQ ID NO: 9513 - protein, 7 aa, synthetic construct
  REGION 1..7: note = Description of Artificial Sequence: Synthetic peptide
  REGION 1..7: note = XENP019470 vlCDR2
GAFSRAT

SEQ ID NO: 9514 - protein, 9 aa, synthetic construct
  REGION 1..9: note = Description of Artificial Sequence: Synthetic peptide
  REGION 1..9: note = XENP019470 vlCDR3
QQYGSSPWT

SEQ ID NO: 9515 - protein, 221 aa, synthetic construct; identical to SEQ ID NO: 7595
  REGION 1..221: note = Description of Artificial Sequence: Synthetic polypeptide
  REGION 1..221: note = XENP019471 [CTLA-4]_H0_L0.56_Fab Heavy Chain

SEQ ID NO: 9516 - protein, 118 aa, synthetic construct; identical to SEQ ID NO: 3737
  REGION 1..118: note = Description of Artificial Sequence: Synthetic polypeptide
  REGION 1..118: note = VH of XENP019471

SEQ ID NO: 9517 - protein, 5 aa, synthetic construct
  REGION 1..5: note = Description of Artificial Sequence: Synthetic peptide
  REGION 1..5: note = XENP019471 vhCDR1
SYTMH

SEQ ID NO: 9518 - protein, 17 aa, synthetic construct
  REGION 1..17: note = Description of Artificial Sequence: Synthetic peptide
  REGION 1..17: note = XENP019471 vhCDR2
FISYDGNNKYYADSVKG

SEQ ID NO: 9519 - protein, 9 aa, synthetic construct
  REGION 1..9: note = Description of Artificial Sequence: Synthetic peptide
  REGION 1..9: note = XENP019471 vhCDR3
TGWLGPFDY

SEQ ID NO: 9520 - protein, 215 aa, synthetic construct
  REGION 1..215: note = Description of Artificial Sequence: Synthetic polypeptide
  REGION 1..215: note = XENP019471 [CTLA-4]_H0_L0.56_Fab Light Chain
EIVLTQSPGTLSLSPGERATLSCRASQSVGSSYLAWYQQKPGQSPRLLIYGAFSRATGIPDRFSGSGSGTDFTLTISRLEPEDFAVYYCQQYGSSPWTFGQGTKVEIKRTVAAPSVFIFPPSDEQLKSGTASVVCLLNNFYPREAKVQWKVDNALQSGNSQESVTEQDSKDSTYSLSSTLTLSKADYEKHKVYACEVTHQGLSSPVTKSFNRGEC

SEQ ID NO: 9521 - protein, 108 aa, synthetic construct; identical to SEQ ID NO: 6589
  REGION 1..108: note = Description of Artificial Sequence: Synthetic polypeptide
  REGION 1..108: note = VL of XENP019471

SEQ ID NO: 9522 - protein, 12 aa, synthetic construct
  REGION 1..12: note = Description of Artificial Sequence: Synthetic peptide
  REGION 1..12: note = XENP019471 vlCDR1
RASQSVGSSYLA

SEQ ID NO: 9523 - protein, 7 aa, synthetic construct
  REGION 1..7: note = Description of Artificial Sequence: Synthetic peptide
  REGION 1..7: note = XENP019471 vlCDR2
GAFSRAT

SEQ ID NO: 9524 - protein, 9 aa, synthetic construct
  REGION 1..9: note = Description of Artificial Sequence: Synthetic peptide
  REGION 1..9: note = XENP019471 vlCDR3
QQYGSSPWT

SEQ ID NO: 9525 - protein, 221 aa, synthetic construct; identical to SEQ ID NO: 7595
  REGION 1..221: note = Description of Artificial Sequence: Synthetic polypeptide
  REGION 1..221: note = XENP019472 [CTLA-4]_H0_L0.57_Fab Heavy Chain

SEQ ID NO: 9526 - protein, 118 aa, synthetic construct; identical to SEQ ID NO: 3737
  REGION 1..118: note = Description of Artificial Sequence: Synthetic polypeptide
  REGION 1..118: note = VH of XENP019472

SEQ ID NO: 9527 - protein, 5 aa, synthetic construct
  REGION 1..5: note = Description of Artificial Sequence: Synthetic peptide
  REGION 1..5: note = XENP019472 vhCDR1
SYTMH

SEQ ID NO: 9528 - protein, 17 aa, synthetic construct
  REGION 1..17: note = Description of Artificial Sequence: Synthetic peptide
  REGION 1..17: note = XENP019472 vhCDR2
FISYDGNNKYYADSVKG

SEQ ID NO: 9529 - protein, 9 aa, synthetic construct
  REGION 1..9: note = Description of Artificial Sequence: Synthetic peptide
  REGION 1..9: note = XENP019472 vhCDR3
TGWLGPFDY

SEQ ID NO: 9530 - protein, 215 aa, synthetic construct
  REGION 1..215: note = Description of Artificial Sequence: Synthetic polypeptide
  REGION 1..215: note = XENP019472 [CTLA-4]_H0_L0.57_Fab Light Chain
EIVLTQSPGTLSLSPGERATLSCRASQSVGSSYLAWYQQKPGQAPELLIYGAFSRATGIPDRFSGSGSGTDFTLTISRLEPEDFAVYYCQQYGSSPWTFGQGTKVEIKRTVAAPSVFIFPPSDEQLKSGTASVVCLLNNFYPREAKVQWKVDNALQSGNSQESVTEQDSKDSTYSLSSTLTLSKADYEKHKVYACEVTHQGLSSPVTKSFNRGEC

SEQ ID NO: 9531 - protein, 108 aa, synthetic construct; identical to SEQ ID NO: 4762
  REGION 1..108: note = Description of Artificial Sequence: Synthetic polypeptide
  REGION 1..108: note = VL of XENP019472

SEQ ID NO: 9532 - protein, 12 aa, synthetic construct
  REGION 1..12: note = Description of Artificial Sequence: Synthetic peptide
  REGION 1..12: note = XENP019472 vlCDR1
RASQSVGSSYLA

SEQ ID NO: 9533 - protein, 7 aa, synthetic construct
  REGION 1..7: note = Description of Artificial Sequence: Synthetic peptide
  REGION 1..7: note = XENP019472 vlCDR2
GAFSRAT

SEQ ID NO: 9534 - protein, 9 aa, synthetic construct
  REGION 1..9: note = Description of Artificial Sequence: Synthetic peptide
  REGION 1..9: note = XENP019472 vlCDR3
QQYGSSPWT

SEQ ID NO: 9535 - protein, 221 aa, synthetic construct; identical to SEQ ID NO: 7595
  REGION 1..221: note = Description of Artificial Sequence: Synthetic polypeptide
  REGION 1..221: note = XENP019473 [CTLA-4]_H0_L0.58_Fab Heavy Chain

SEQ ID NO: 9536 - protein, 118 aa, synthetic construct; identical to SEQ ID NO: 3737
  REGION 1..118: note = Description of Artificial Sequence: Synthetic polypeptide
  REGION 1..118: note = VH of XENP019473

SEQ ID NO: 9537 - protein, 5 aa, synthetic construct
  REGION 1..5: note = Description of Artificial Sequence: Synthetic peptide
  REGION 1..5: note = XENP019473 vhCDR1
SYTMH

SEQ ID NO: 9538 - protein, 17 aa, synthetic construct
  REGION 1..17: note = Description of Artificial Sequence: Synthetic peptide
  REGION 1..17: note = XENP019473 vhCDR2
FISYDGNNKYYADSVKG

SEQ ID NO: 9539 - protein, 9 aa, synthetic construct
  REGION 1..9: note = Description of Artificial Sequence: Synthetic peptide
  REGION 1..9: note = XENP019473 vhCDR3
TGWLGPFDY

SEQ ID NO: 9540 - protein, 215 aa, synthetic construct
  REGION 1..215: note = Description of Artificial Sequence: Synthetic polypeptide
  REGION 1..215: note = XENP019473 [CTLA-4]_H0_L0.58_Fab Light Chain
EIVLTQSPGTLSLSPGERATLSCRASQSVGSSYLAWYQQKPGQAPELLIYGAFSRATGIPDRFSGSGSGTDFTLTISRLEPQDFAVYYCQQYGSSPWTFGQGTKVEIKRTVAAPSVFIFPPSDEQLKSGTASVVCLLNNFYPREAKVQWKVDNALQSGNSQESVTEQDSKDSTYSLSSTLTLSKADYEKHKVYACEVTHQGLSSPVTKSFNRGEC

SEQ ID NO: 9541 - protein, 108 aa, synthetic construct; identical to SEQ ID NO: 6607
  REGION 1..108: note = Description of Artificial Sequence: Synthetic polypeptide
  REGION 1..108: note = VL of XENP019473

SEQ ID NO: 9542 - protein, 12 aa, synthetic construct
  REGION 1..12: note = Description of Artificial Sequence: Synthetic peptide
  REGION 1..12: note = XENP019473 vlCDR1
RASQSVGSSYLA

SEQ ID NO: 9543 - protein, 7 aa, synthetic construct
  REGION 1..7: note = Description of Artificial Sequence: Synthetic peptide
  REGION 1..7: note = XENP019473 vlCDR2
GAFSRAT

SEQ ID NO: 9544 - protein, 9 aa, synthetic construct
  REGION 1..9: note = Description of Artificial Sequence: Synthetic peptide
  REGION 1..9: note = XENP019473 vlCDR3
QQYGSSPWT

SEQ ID NO: 9545 - protein, 221 aa, synthetic construct; identical to SEQ ID NO: 7595
  REGION 1..221: note = Description of Artificial Sequence: Synthetic polypeptide
  REGION 1..221: note = XENP019474 [CTLA-4]_H0_L0.59_Fab Heavy Chain

SEQ ID NO: 9546 - protein, 118 aa, synthetic construct; identical to SEQ ID NO: 3737
  REGION 1..118: note = Description of Artificial Sequence: Synthetic polypeptide
  REGION 1..118: note = VH of XENP019474

SEQ ID NO: 9547 - protein, 5 aa, synthetic construct
  REGION 1..5: note = Description of Artificial Sequence: Synthetic peptide
  REGION 1..5: note = XENP019474 vhCDR1
SYTMH

SEQ ID NO: 9548 - protein, 17 aa, synthetic construct
  REGION 1..17: note = Description of Artificial Sequence: Synthetic peptide
  REGION 1..17: note = XENP019474 vhCDR2
FISYDGNNKYYADSVKG

SEQ ID NO: 9549 - protein, 9 aa, synthetic construct
  REGION 1..9: note = Description of Artificial Sequence: Synthetic peptide
  REGION 1..9: note = XENP019474 vhCDR3
TGWLGPFDY

SEQ ID NO: 9550 - protein, 215 aa, synthetic construct
  REGION 1..215: note = Description of Artificial Sequence: Synthetic polypeptide
  REGION 1..215: note = XENP019474 [CTLA-4]_H0_L0.59_Fab Light Chain
EIVLTQSPGTLSLSPGERATLSCRASQSVGSSYLAWYQQKPGQAPKLLIYGAFSRATGIPDRFSGSGSGTDFTLTISRLEPEDFAVYYCQQYGSSPWTFGQGTKVEIKRTVAAPSVFIFPPSDEQLKSGTASVVCLLNNFYPREAKVQWKVDNALQSGNSQESVTEQDSKDSTYSLSSTLTLSKADYEKHKVYACEVTHQGLSSPVTKSFNRGEC

SEQ ID NO: 9551 - protein, 108 aa, synthetic construct; identical to SEQ ID NO: 6616
  REGION 1..108: note = Description of Artificial Sequence: Synthetic polypeptide
  REGION 1..108: note = VL of XENP019474

SEQ ID NO: 9552 - protein, 12 aa, synthetic construct
  REGION 1..12: note = Description of Artificial Sequence: Synthetic peptide
  REGION 1..12: note = XENP019474 vlCDR1
RASQSVGSSYLA

SEQ ID NO: 9553 - protein, 7 aa, synthetic construct
  REGION 1..7: note = Description of Artificial Sequence: Synthetic peptide
  REGION 1..7: note = XENP019474 vlCDR2
GAFSRAT

SEQ ID NO: 9554 - protein, 9 aa, synthetic construct
  REGION 1..9: note = Description of Artificial Sequence: Synthetic peptide
  REGION 1..9: note = XENP019474 vlCDR3
QQYGSSPWT

SEQ ID NO: 9555 - protein, 221 aa, synthetic construct; identical to SEQ ID NO: 7595
  REGION 1..221: note = Description of Artificial Sequence: Synthetic polypeptide
  REGION 1..221: note = XENP019475 [CTLA-4]_H0_L0.60_Fab Heavy Chain

SEQ ID NO: 9556 - protein, 118 aa, synthetic construct; identical to SEQ ID NO: 3737
  REGION 1..118: note = Description of Artificial Sequence: Synthetic polypeptide
  REGION 1..118: note = VH of XENP019475

SEQ ID NO: 9557 - protein, 5 aa, synthetic construct
  REGION 1..5: note = Description of Artificial Sequence: Synthetic peptide
  REGION 1..5: note = XENP019475 vhCDR1
SYTMH

SEQ ID NO: 9558 - protein, 17 aa, synthetic construct
  REGION 1..17: note = Description of Artificial Sequence: Synthetic peptide
  REGION 1..17: note = XENP019475 vhCDR2
FISYDGNNKYYADSVKG

SEQ ID NO: 9559 - protein, 9 aa, synthetic construct
  REGION 1..9: note = Description of Artificial Sequence: Synthetic peptide
  REGION 1..9: note = XENP019475 vhCDR3
TGWLGPFDY

SEQ ID NO: 9560 - protein, 215 aa, synthetic construct
  REGION 1..215: note = Description of Artificial Sequence: Synthetic polypeptide
  REGION 1..215: note = XENP019475 [CTLA-4]_H0_L0.60_Fab Light Chain
EIVLTQSPGTLSLSPGERATLSCRASQSVGSSYLAWYQQKPGQAPRRLIYGAFSRATGIPDRFSGSGSGTDFTLTISRLEPEDFAVYYCQQYGSSPWTFGQGTKVEIKRTVAAPSVFIFPPSDEQLKSGTASVVCLLNNFYPREAKVQWKVDNALQSGNSQESVTEQDSKDSTYSLSSTLTLSKADYEKHKVYACEVTHQGLSSPVTKSFNRGEC

SEQ ID NO: 9561 - protein, 108 aa, synthetic construct; identical to SEQ ID NO: 6625
  REGION 1..108: note = Description of Artificial Sequence: Synthetic polypeptide
  REGION 1..108: note = VL of XENP019475

SEQ ID NO: 9562 - protein, 12 aa, synthetic construct
  REGION 1..12: note = Description of Artificial Sequence: Synthetic peptide
  REGION 1..12: note = XENP019475 vlCDR1
RASQSVGSSYLA

SEQ ID NO: 9563 - protein, 7 aa, synthetic construct
  REGION 1..7: note = Description of Artificial Sequence: Synthetic peptide
  REGION 1..7: note = XENP019475 vlCDR2
GAFSRAT

SEQ ID NO: 9564 - protein, 9 aa, synthetic construct
  REGION 1..9: note = Description of Artificial Sequence: Synthetic peptide
  REGION 1..9: note = XENP019475 vlCDR3
QQYGSSPWT

SEQ ID NO: 9565 - protein, 221 aa, synthetic construct; identical to SEQ ID NO: 7595
  REGION 1..221: note = Description of Artificial Sequence: Synthetic polypeptide
  REGION 1..221: note = XENP019476 [CTLA-4]_H0_L0.61_Fab Heavy Chain

SEQ ID NO: 9566 - protein, 118 aa, synthetic construct; identical to SEQ ID NO: 3737
  REGION 1..118: note = Description of Artificial Sequence: Synthetic polypeptide
  REGION 1..118: note = VH of XENP019476

SEQ ID NO: 9567 - protein, 5 aa, synthetic construct
  REGION 1..5: note = Description of Artificial Sequence: Synthetic peptide
  REGION 1..5: note = XENP019476 vhCDR1
SYTMH

SEQ ID NO: 9568 - protein, 17 aa, synthetic construct
  REGION 1..17: note = Description of Artificial Sequence: Synthetic peptide
  REGION 1..17: note = XENP019476 vhCDR2
FISYDGNNKYYADSVKG

SEQ ID NO: 9569 - protein, 9 aa, synthetic construct
  REGION 1..9: note = Description of Artificial Sequence: Synthetic peptide
  REGION 1..9: note = XENP019476 vhCDR3
TGWLGPFDY

SEQ ID NO: 9570 - protein, 215 aa, synthetic construct
  REGION 1..215: note = Description of Artificial Sequence: Synthetic polypeptide
  REGION 1..215: note = XENP019476 [CTLA-4]_H0_L0.61_Fab Light Chain
EIVLTQSPGTLSLSPGERATLSCRASQSVGSSYLAWYQQKPGQAPRRLIYGAFSRDTGIPDRFSGSGSGTDFTLTISRLEPEDFAVYYCQQYGSSPWTFGQGTKVEIKRTVAAPSVFIFPPSDEQLKSGTASVVCLLNNFYPREAKVQWKVDNALQSGNSQESVTEQDSKDSTYSLSSTLTLSKADYEKHKVYACEVTHQGLSSPVTKSFNRGEC

SEQ ID NO: 9571 - protein, 108 aa, synthetic construct; identical to SEQ ID NO: 6634
  REGION 1..108: note = Description of Artificial Sequence: Synthetic polypeptide
  REGION 1..108: note = VL of XENP019476

SEQ ID NO: 9572 - protein, 12 aa, synthetic construct
  REGION 1..12: note = Description of Artificial Sequence: Synthetic peptide
  REGION 1..12: note = XENP019476 vlCDR1
RASQSVGSSYLA

SEQ ID NO: 9573 - protein, 7 aa, synthetic construct
  REGION 1..7: note = Description of Artificial Sequence: Synthetic peptide
  REGION 1..7: note = XENP019476 vlCDR2
GAFSRDT

SEQ ID NO: 9574 - protein, 9 aa, synthetic construct
  REGION 1..9: note = Description of Artificial Sequence: Synthetic peptide
  REGION 1..9: note = XENP019476 vlCDR3
QQYGSSPWT

SEQ ID NO: 9575 - protein, 221 aa, synthetic construct; identical to SEQ ID NO: 7595
  REGION 1..221: note = Description of Artificial Sequence: Synthetic polypeptide
  REGION 1..221: note = XENP019477 [CTLA-4]_H0_L0.62_Fab Heavy Chain

SEQ ID NO: 9576 - protein, 118 aa, synthetic construct; identical to SEQ ID NO: 3737
  REGION 1..118: note = Description of Artificial Sequence: Synthetic polypeptide
  REGION 1..118: note = VH of XENP019477

SEQ ID NO: 9577 - protein, 5 aa, synthetic construct
  REGION 1..5: note = Description of Artificial Sequence: Synthetic peptide
  REGION 1..5: note = XENP019477 vhCDR1
SYTMH

SEQ ID NO: 9578 - protein, 17 aa, synthetic construct
  REGION 1..17: note = Description of Artificial Sequence: Synthetic peptide
  REGION 1..17: note = XENP019477 vhCDR2
FISYDGNNKYYADSVKG

SEQ ID NO: 9579 - protein, 9 aa, synthetic construct
  REGION 1..9: note = Description of Artificial Sequence: Synthetic peptide
  REGION 1..9: note = XENP019477 vhCDR3
TGWLGPFDY

SEQ ID NO: 9580 - protein, 215 aa, synthetic construct
  REGION 1..215: note = Description of Artificial Sequence: Synthetic polypeptide
  REGION 1..215: note = XENP019477 [CTLA-4]_H0_L0.62_Fab Light Chain
EIVLTQSPGTLSLSPGERATLSCRASQSVGSSYLAWYQQKPGQAPRLLIAGAFSRATGIPDRFSGSGSGTDFTLTISRLEPEDFAVYYCQQYGSSPWTFGQGTKVEIKRTVAAPSVFIFPPSDEQLKSGTASVVCLLNNFYPREAKVQWKVDNALQSGNSQESVTEQDSKDSTYSLSSTLTLSKADYEKHKVYACEVTHQGLSSPVTKSFNRGEC

SEQ ID NO: 9581 - protein, 108 aa, synthetic construct; identical to SEQ ID NO: 6643
  REGION 1..108: note = Description of Artificial Sequence: Synthetic polypeptide
  REGION 1..108: note = VL of XENP019477

SEQ ID NO: 9582 - protein, 12 aa, synthetic construct
  REGION 1..12: note = Description of Artificial Sequence: Synthetic peptide
  REGION 1..12: note = XENP019477 vlCDR1
RASQSVGSSYLA

SEQ ID NO: 9583 - protein, 7 aa, synthetic construct
  REGION 1..7: note = Description of Artificial Sequence: Synthetic peptide
  REGION 1..7: note = XENP019477 vlCDR2
GAFSRAT

SEQ ID NO: 9584 - protein, 9 aa, synthetic construct
  REGION 1..9: note = Description of Artificial Sequence: Synthetic peptide
  REGION 1..9: note = XENP019477 vlCDR3
QQYGSSPWT

SEQ ID NO: 9585 - protein, 221 aa, synthetic construct; identical to SEQ ID NO: 7595
  REGION 1..221: note = Description of Artificial Sequence: Synthetic polypeptide
  REGION 1..221: note = XENP019478 [CTLA-4]_H0_L0.63_Fab Heavy Chain

SEQ ID NO: 9586 - protein, 118 aa, synthetic construct; identical to SEQ ID NO: 3737
  REGION 1..118: note = Description of Artificial Sequence: Synthetic polypeptide
  REGION 1..118: note = VH of XENP019478

SEQ ID NO: 9587 - protein, 5 aa, synthetic construct
  REGION 1..5: note = Description of Artificial Sequence: Synthetic peptide
  REGION 1..5: note = XENP019478 vhCDR1
SYTMH

SEQ ID NO: 9588 - protein, 17 aa, synthetic construct
  REGION 1..17: note = Description of Artificial Sequence: Synthetic peptide
  REGION 1..17: note = XENP019478 vhCDR2
FISYDGNNKYYADSVKG

SEQ ID NO: 9589 - protein, 9 aa, synthetic construct
  REGION 1..9: note = Description of Artificial Sequence: Synthetic peptide
  REGION 1..9: note = XENP019478 vhCDR3
TGWLGPFDY

SEQ ID NO: 9590 - protein, 215 aa, synthetic construct
  REGION 1..215: note = Description of Artificial Sequence: Synthetic polypeptide
  REGION 1..215: note = XENP019478 [CTLA-4]_H0_L0.63_Fab Light Chain
EIVLTQSPGTLSLSPGERATLSCRASQSVGSSYLAWYQQKPGQAPRLLIFGAFSRATGIPDRFSGSGSGTDFTLTISRLEPEDFAVYYCQQYGSSPWTFGQGTKVEIKRTVAAPSVFIFPPSDEQLKSGTASVVCLLNNFYPREAKVQWKVDNALQSGNSQESVTEQDSKDSTYSLSSTLTLSKADYEKHKVYACEVTHQGLSSPVTKSFNRGEC

SEQ ID NO: 9591 - protein, 108 aa, synthetic construct; identical to SEQ ID NO: 6652
  REGION 1..108: note = Description of Artificial Sequence: Synthetic polypeptide
  REGION 1..108: note = VL of XENP019478

SEQ ID NO: 9592 - protein, 12 aa, synthetic construct
  REGION 1..12: note = Description of Artificial Sequence: Synthetic peptide
  REGION 1..12: note = XENP019478 vlCDR1
RASQSVGSSYLA

SEQ ID NO: 9593 - protein, 7 aa, synthetic construct
  REGION 1..7: note = Description of Artificial Sequence: Synthetic peptide
  REGION 1..7: note = XENP019478 vlCDR2
GAFSRAT

SEQ ID NO: 9594 - protein, 9 aa, synthetic construct
  REGION 1..9: note = Description of Artificial Sequence: Synthetic peptide
  REGION 1..9: note = XENP019478 vlCDR3
QQYGSSPWT

SEQ ID NO: 9595 - protein, 221 aa, synthetic construct; identical to SEQ ID NO: 7595
  REGION 1..221: note = Description of Artificial Sequence: Synthetic polypeptide
  REGION 1..221: note = XENP019479 [CTLA-4]_H0_L0.64_Fab Heavy Chain

SEQ ID NO: 9596 - protein, 118 aa, synthetic construct; identical to SEQ ID NO: 3737
  REGION 1..118: note = Description of Artificial Sequence: Synthetic polypeptide
  REGION 1..118: note = VH of XENP019479

SEQ ID NO: 9597 - protein, 5 aa, synthetic construct
  REGION 1..5: note = Description of Artificial Sequence: Synthetic peptide
  REGION 1..5: note = XENP019479 vhCDR1
SYTMH

SEQ ID NO: 9598 - protein, 17 aa, synthetic construct
  REGION 1..17: note = Description of Artificial Sequence: Synthetic peptide
  REGION 1..17: note = XENP019479 vhCDR2
FISYDGNNKYYADSVKG

SEQ ID NO: 9599 - protein, 9 aa, synthetic construct
  REGION 1..9: note = Description of Artificial Sequence: Synthetic peptide
  REGION 1..9: note = XENP019479 vhCDR3
TGWLGPFDY

SEQ ID NO: 9600 - protein, 215 aa, synthetic construct
  REGION 1..215: note = Description of Artificial Sequence: Synthetic polypeptide
  REGION 1..215: note = XENP019479 [CTLA-4]_H0_L0.64_Fab Light Chain
EIVLTQSPGTLSLSPGERATLSCRASQSVGSSYLAWYQQKPGQAPRLLIHGAFSRATGIPDRFSGSGSGTDFTLTISRLEPEDFAVYYCQQYGSSPWTFGQGTKVEIKRTVAAPSVFIFPPSDEQLKSGTASVVCLLNNFYPREAKVQWKVDNALQSGNSQESVTEQDSKDSTYSLSSTLTLSKADYEKHKVYACEVTHQGLSSPVTKSFNRGEC

SEQ ID NO: 9601 - protein, 108 aa, synthetic construct; identical to SEQ ID NO: 6661
  REGION 1..108: note = Description of Artificial Sequence: Synthetic polypeptide
  REGION 1..108: note = VL of XENP019479

SEQ ID NO: 9602 - protein, 12 aa, synthetic construct
  REGION 1..12: note = Description of Artificial Sequence: Synthetic peptide
  REGION 1..12: note = XENP019479 vlCDR1
RASQSVGSSYLA

SEQ ID NO: 9603 - protein, 7 aa, synthetic construct
  REGION 1..7: note = Description of Artificial Sequence: Synthetic peptide
  REGION 1..7: note = XENP019479 vlCDR2
GAFSRAT

SEQ ID NO: 9604 - protein, 9 aa, synthetic construct
  REGION 1..9: note = Description of Artificial Sequence: Synthetic peptide
  REGION 1..9: note = XENP019479 vlCDR3
QQYGSSPWT

SEQ ID NO: 9605 - protein, 221 aa, synthetic construct; identical to SEQ ID NO: 7595
  REGION 1..221: note = Description of Artificial Sequence: Synthetic polypeptide
  REGION 1..221: note = XENP019480 [CTLA-4]_H0_L0.65_Fab Heavy Chain

SEQ ID NO: 9606 - protein, 118 aa, synthetic construct; identical to SEQ ID NO: 3737
  REGION 1..118: note = Description of Artificial Sequence: Synthetic polypeptide
  REGION 1..118: note = VH of XENP019480

SEQ ID NO: 9607 - protein, 5 aa, synthetic construct
  REGION 1..5: note = Description of Artificial Sequence: Synthetic peptide
  REGION 1..5: note = XENP019480 vhCDR1
SYTMH

SEQ ID NO: 9608 - protein, 17 aa, synthetic construct
  REGION 1..17: note = Description of Artificial Sequence: Synthetic peptide
  REGION 1..17: note = XENP019480 vhCDR2
FISYDGNNKYYADSVKG

SEQ ID NO: 9609 - protein, 9 aa, synthetic construct
  REGION 1..9: note = Description of Artificial Sequence: Synthetic peptide
  REGION 1..9: note = XENP019480 vhCDR3
TGWLGPFDY

SEQ ID NO: 9610 - protein, 215 aa, synthetic construct
  REGION 1..215: note = Description of Artificial Sequence: Synthetic polypeptide
  REGION 1..215: note = XENP019480 [CTLA-4]_H0_L0.65_Fab Light Chain
EIVLTQSPGTLSLSPGERATLSCRASQSVGSSYLAWYQQKPGQAPRLLILGAFSRATGIPDRFSGSGSGTDFTLTISRLEPEDFAVYYCQQYGSSPWTFGQGTKVEIKRTVAAPSVFIFPPSDEQLKSGTASVVCLLNNFYPREAKVQWKVDNALQSGNSQESVTEQDSKDSTYSLSSTLTLSKADYEKHKVYACEVTHQGLSSPVTKSFNRGEC

SEQ ID NO: 9611 - protein, 108 aa, synthetic construct; identical to SEQ ID NO: 6670
  REGION 1..108: note = Description of Artificial Sequence: Synthetic polypeptide
  REGION 1..108: note = VL of XENP019480

SEQ ID NO: 9612 - protein, 12 aa, synthetic construct
  REGION 1..12: note = Description of Artificial Sequence: Synthetic peptide
  REGION 1..12: note = XENP019480 vlCDR1
RASQSVGSSYLA

SEQ ID NO: 9613 - protein, 7 aa, synthetic construct
  REGION 1..7: note = Description of Artificial Sequence: Synthetic peptide
  REGION 1..7: note = XENP019480 vlCDR2
GAFSRAT

SEQ ID NO: 9614 - protein, 9 aa, synthetic construct
  REGION 1..9: note = Description of Artificial Sequence: Synthetic peptide
  REGION 1..9: note = XENP019480 vlCDR3
QQYGSSPWT

SEQ ID NO: 9615 - protein, 221 aa, synthetic construct; identical to SEQ ID NO: 7595
  REGION 1..221: note = Description of Artificial Sequence: Synthetic polypeptide
  REGION 1..221: note = XENP019481 [CTLA-4]_H0_L0.66_Fab Heavy Chain

SEQ ID NO: 9616 - protein, 118 aa, synthetic construct; identical to SEQ ID NO: 3737
  REGION 1..118: note = Description of Artificial Sequence: Synthetic polypeptide
  REGION 1..118: note = VH of XENP019481

SEQ ID NO: 9617 - protein, 5 aa, synthetic construct
  REGION 1..5: note = Description of Artificial Sequence: Synthetic peptide
  REGION 1..5: note = XENP019481 vhCDR1
SYTMH

SEQ ID NO: 9618 - protein, 17 aa, synthetic construct
  REGION 1..17: note = Description of Artificial Sequence: Synthetic peptide
  REGION 1..17: note = XENP019481 vhCDR2
FISYDGNNKYYADSVKG

SEQ ID NO: 9619 - protein, 9 aa, synthetic construct
  REGION 1..9: note = Description of Artificial Sequence: Synthetic peptide
  REGION 1..9: note = XENP019481 vhCDR3
TGWLGPFDY

SEQ ID NO: 9620 - protein, 215 aa, synthetic construct
  REGION 1..215: note = Description of Artificial Sequence: Synthetic polypeptide
  REGION 1..215: note = XENP019481 [CTLA-4]_H0_L0.66_Fab Light Chain
EIVLTQSPGTLSLSPGERATLSCRASQSVGSSYLAWYQQKPGQAPRLLIVGAFSRATGIPDRFSGSGSGTDFTLTISRLEPEDFAVYYCQQYGSSPWTFGQGTKVEIKRTVAAPSVFIFPPSDEQLKSGTASVVCLLNNFYPREAKVQWKVDNALQSGNSQESVTEQDSKDSTYSLSSTLTLSKADYEKHKVYACEVTHQGLSSPVTKSFNRGEC

SEQ ID NO: 9621 - protein, 108 aa, synthetic construct; identical to SEQ ID NO: 6679
  REGION 1..108: note = Description of Artificial Sequence: Synthetic polypeptide
  REGION 1..108: note = VL of XENP019481

SEQ ID NO: 9622 - protein, 12 aa, synthetic construct
  REGION 1..12: note = Description of Artificial Sequence: Synthetic peptide
  REGION 1..12: note = XENP019481 vlCDR1
RASQSVGSSYLA

SEQ ID NO: 9623 - protein, 7 aa, synthetic construct
  REGION 1..7: note = Description of Artificial Sequence: Synthetic peptide
  REGION 1..7: note = XENP019481 vlCDR2
GAFSRAT

SEQ ID NO: 9624 - protein, 9 aa, synthetic construct
  REGION 1..9: note = Description of Artificial Sequence: Synthetic peptide
  REGION 1..9: note = XENP019481 vlCDR3
QQYGSSPWT

SEQ ID NO: 9625 - protein, 221 aa, synthetic construct; identical to SEQ ID NO: 7595
  REGION 1..221: note = Description of Artificial Sequence: Synthetic polypeptide
  REGION 1..221: note = XENP019482 [CTLA-4]_H0_L0.67_Fab Heavy Chain

SEQ ID NO: 9626 - protein, 118 aa, synthetic construct; identical to SEQ ID NO: 3737
  REGION 1..118: note = Description of Artificial Sequence: Synthetic polypeptide
  REGION 1..118: note = VH of XENP019482

SEQ ID NO: 9627 - protein, 5 aa, synthetic construct
  REGION 1..5: note = Description of Artificial Sequence: Synthetic peptide
  REGION 1..5: note = XENP019482 vhCDR1
SYTMH

SEQ ID NO: 9628 - protein, 17 aa, synthetic construct
  REGION 1..17: note = Description of Artificial Sequence: Synthetic peptide
  REGION 1..17: note = XENP019482 vhCDR2
FISYDGNNKYYADSVKG

SEQ ID NO: 9629 - protein, 9 aa, synthetic construct
  REGION 1..9: note = Description of Artificial Sequence: Synthetic peptide
  REGION 1..9: note = XENP019482 vhCDR3
TGWLGPFDY

SEQ ID NO: 9630 - protein, 215 aa, synthetic construct
  REGION 1..215: note = Description of Artificial Sequence: Synthetic polypeptide
  REGION 1..215: note = XENP019482 [CTLA-4]_H0_L0.67_Fab Light Chain
EIVLTQSPGTLSLSPGERATLSCRASQSVGSSYLAWYQQKPGQAPRLLIYDAFSRATGIPDRFSGSGSGTDFTLTISRLEPEDFAVYYCQQYGSSPWTFGQGTKVEIKRTVAAPSVFIFPPSDEQLKSGTASVVCLLNNFYPREAKVQWKVDNALQSGNSQESVTEQDSKDSTYSLSSTLTLSKADYEKHKVYACEVTHQGLSSPVTKSFNRGEC

SEQ ID NO: 9631 - protein, 108 aa, synthetic construct; identical to SEQ ID NO: 6688
  REGION 1..108: note = Description of Artificial Sequence: Synthetic polypeptide
  REGION 1..108: note = VL of XENP019482

SEQ ID NO: 9632 - protein, 12 aa, synthetic construct
  REGION 1..12: note = Description of Artificial Sequence: Synthetic peptide
  REGION 1..12: note = XENP019482 vlCDR1
RASQSVGSSYLA

SEQ ID NO: 9633 - protein, 7 aa, synthetic construct
  REGION 1..7: note = Description of Artificial Sequence: Synthetic peptide
  REGION 1..7: note = XENP019482 vlCDR2
DAFSRAT

SEQ ID NO: 9634 - protein, 9 aa, synthetic construct
  REGION 1..9: note = Description of Artificial Sequence: Synthetic peptide
  REGION 1..9: note = XENP019482 vlCDR3
QQYGSSPWT

SEQ ID NO: 9635 - protein, 221 aa, synthetic construct; identical to SEQ ID NO: 7595
  REGION 1..221: note = Description of Artificial Sequence: Synthetic polypeptide
  REGION 1..221: note = XENP019483 [CTLA-4]_H0_L0.68_Fab Heavy Chain

SEQ ID NO: 9636 - protein, 118 aa, synthetic construct; identical to SEQ ID NO: 3737
  REGION 1..118: note = Description of Artificial Sequence: Synthetic polypeptide
  REGION 1..118: note = VH of XENP019483

SEQ ID NO: 9637 - protein, 5 aa, synthetic construct
  REGION 1..5: note = Description of Artificial Sequence: Synthetic peptide
  REGION 1..5: note = XENP019483 vhCDR1
SYTMH

SEQ ID NO: 9638 - protein, 17 aa, synthetic construct
  REGION 1..17: note = Description of Artificial Sequence: Synthetic peptide
  REGION 1..17: note = XENP019483 vhCDR2
FISYDGNNKYYADSVKG

SEQ ID NO: 9639 - protein, 9 aa, synthetic construct
  REGION 1..9: note = Description of Artificial Sequence: Synthetic peptide
  REGION 1..9: note = XENP019483 vhCDR3
TGWLGPFDY

SEQ ID NO: 9640 - protein, 215 aa, synthetic construct
  REGION 1..215: note = Description of Artificial Sequence: Synthetic polypeptide
  REGION 1..215: note = XENP019483 [CTLA-4]_H0_L0.68_Fab Light Chain
EIVLTQSPGTLSLSPGERATLSCRASQSVGSSYLAWYQQKPGQAPRLLIYSAFSRATGIPDRFSGSGSGTDFTLTISRLEPEDFAVYYCQQYGSSPWTFGQGTKVEIKRTVAAPSVFIFPPSDEQLKSGTASVVCLLNNFYPREAKVQWKVDNALQSGNSQESVTEQDSKDSTYSLSSTLTLSKADYEKHKVYACEVTHQGLSSPVTKSFNRGEC

SEQ ID NO: 9641 - protein, 108 aa, synthetic construct; identical to SEQ ID NO: 6697
  REGION 1..108: note = Description of Artificial Sequence: Synthetic polypeptide
  REGION 1..108: note = VL of XENP019483

SEQ ID NO: 9642 - protein, 12 aa, synthetic construct
  REGION 1..12: note = Description of Artificial Sequence: Synthetic peptide
  REGION 1..12: note = XENP019483 vlCDR1
RASQSVGSSYLA

SEQ ID NO: 9643 - protein, 7 aa, synthetic construct
  REGION 1..7: note = Description of Artificial Sequence: Synthetic peptide
  REGION 1..7: note = XENP019483 vlCDR2
SAFSRAT

SEQ ID NO: 9644 - protein, 9 aa, synthetic construct
  REGION 1..9: note = Description of Artificial Sequence: Synthetic peptide
  REGION 1..9: note = XENP019483 vlCDR3
QQYGSSPWT

SEQ ID NO: 9645 - protein, 221 aa, synthetic construct; identical to SEQ ID NO: 7595
  REGION 1..221: note = Description of Artificial Sequence: Synthetic polypeptide
  REGION 1..221: note = XENP019484 [CTLA-4]_H0_L0.69_Fab Heavy Chain

SEQ ID NO: 9646 - protein, 118 aa, synthetic construct; identical to SEQ ID NO: 3737
  REGION 1..118: note = Description of Artificial Sequence: Synthetic polypeptide
  REGION 1..118: note = VH of XENP019484

SEQ ID NO: 9647 - protein, 5 aa, synthetic construct
  REGION 1..5: note = Description of Artificial Sequence: Synthetic peptide
  REGION 1..5: note = XENP019484 vhCDR1
SYTMH

SEQ ID NO: 9648 - protein, 17 aa, synthetic construct
  REGION 1..17: note = Description of Artificial Sequence: Synthetic peptide
  REGION 1..17: note = XENP019484 vhCDR2
FISYDGNNKYYADSVKG

SEQ ID NO: 9649 - protein, 9 aa, synthetic construct
  REGION 1..9: note = Description of Artificial Sequence: Synthetic peptide
  REGION 1..9: note = XENP019484 vhCDR3
TGWLGPFDY

SEQ ID NO: 9650 - protein, 215 aa, synthetic construct
  REGION 1..215: note = Description of Artificial Sequence: Synthetic polypeptide
  REGION 1..215: note = XENP019484 [CTLA-4]_H0_L0.69_Fab Light Chain
EIVLTQSPGTLSLSPGERATLSCRASQSVGSSYLAWYQQKPGQAPRLLIYGVFSRATGIPDRFSGSGSGTDFTLTISRLEPEDFAVYYCQQYGSSPWTFGQGTKVEIKRTVAAPSVFIFPPSDEQLKSGTASVVCLLNNFYPREAKVQWKVDNALQSGNSQESVTEQDSKDSTYSLSSTLTLSKADYEKHKVYACEVTHQGLSSPVTKSFNRGEC

SEQ ID NO: 9651 - protein, 108 aa, synthetic construct; identical to SEQ ID NO: 6706
  REGION 1..108: note = Description of Artificial Sequence: Synthetic polypeptide
  REGION 1..108: note = VL of XENP019484

SEQ ID NO: 9652 - protein, 12 aa, synthetic construct
  REGION 1..12: note = Description of Artificial Sequence: Synthetic peptide
  REGION 1..12: note = XENP019484 vlCDR1
RASQSVGSSYLA

SEQ ID NO: 9653 - protein, 7 aa, synthetic construct
  REGION 1..7: note = Description of Artificial Sequence: Synthetic peptide
  REGION 1..7: note = XENP019484 vlCDR2
GVFSRAT

SEQ ID NO: 9654 - protein, 9 aa, synthetic construct
  REGION 1..9: note = Description of Artificial Sequence: Synthetic peptide
  REGION 1..9: note = XENP019484 vlCDR3
QQYGSSPWT

SEQ ID NO: 9655 - protein, 221 aa, synthetic construct; identical to SEQ ID NO: 7595
  REGION 1..221: note = Description of Artificial Sequence: Synthetic polypeptide
  REGION 1..221: note = XENP019485 [CTLA-4]_H0_L0.70_Fab Heavy Chain

SEQ ID NO: 9656 - protein, 118 aa, synthetic construct; identical to SEQ ID NO: 3737
  REGION 1..118: note = Description of Artificial Sequence: Synthetic polypeptide
  REGION 1..118: note = VH of XENP019485

SEQ ID NO: 9657 - protein, 5 aa, synthetic construct
  REGION 1..5: note = Description of Artificial Sequence: Synthetic peptide
  REGION 1..5: note = XENP019485 vhCDR1
SYTMH

SEQ ID NO: 9658 - protein, 17 aa, synthetic construct
  REGION 1..17: note = Description of Artificial Sequence: Synthetic peptide
  REGION 1..17: note = XENP019485 vhCDR2
FISYDGNNKYYADSVKG

SEQ ID NO: 9659 - protein, 9 aa, synthetic construct
  REGION 1..9: note = Description of Artificial Sequence: Synthetic peptide
  REGION 1..9: note = XENP019485 vhCDR3
TGWLGPFDY

SEQ ID NO: 9660 - protein, 215 aa, synthetic construct
  REGION 1..215: note = Description of Artificial Sequence: Synthetic polypeptide
  REGION 1..215: note = XENP019485 [CTLA-4]_H0_L0.70_Fab Light Chain
EIVLTQSPGTLSLSPGERATLSCRASQSVGSSYLAWYQQKPGQAPRLLIYGAHSRATGIPDRFSGSGSGTDFTLTISRLEPEDFAVYYCQQYGSSPWTFGQGTKVEIKRTVAAPSVFIFPPSDEQLKSGTASVVCLLNNFYPREAKVQWKVDNALQSGNSQESVTEQDSKDSTYSLSSTLTLSKADYEKHKVYACEVTHQGLSSPVTKSFNRGEC

SEQ ID NO: 9661 - protein, 108 aa, synthetic construct; identical to SEQ ID NO: 6715
  REGION 1..108: note = Description of Artificial Sequence: Synthetic polypeptide
  REGION 1..108: note = VL of XENP019485

SEQ ID NO: 9662 - protein, 12 aa, synthetic construct
  REGION 1..12: note = Description of Artificial Sequence: Synthetic peptide
  REGION 1..12: note = XENP019485 vlCDR1
RASQSVGSSYLA

SEQ ID NO: 9663 - protein, 7 aa, synthetic construct
  REGION 1..7: note = Description of Artificial Sequence: Synthetic peptide
  REGION 1..7: note = XENP019485 vlCDR2
GAHSRAT

SEQ ID NO: 9664 - protein, 9 aa, synthetic construct
  REGION 1..9: note = Description of Artificial Sequence: Synthetic peptide
  REGION 1..9: note = XENP019485 vlCDR3
QQYGSSPWT

SEQ ID NO: 9665 - protein, 221 aa, synthetic construct; identical to SEQ ID NO: 7595
  REGION 1..221: note = Description of Artificial Sequence: Synthetic polypeptide
  REGION 1..221: note = XENP019486 [CTLA-4]_H0_L0.71_Fab Heavy Chain

SEQ ID NO: 9666 - protein, 118 aa, synthetic construct; identical to SEQ ID NO: 3737
  REGION 1..118: note = Description of Artificial Sequence: Synthetic polypeptide
  REGION 1..118: note = VH of XENP019486

SEQ ID NO: 9667 - protein, 5 aa, synthetic construct
  REGION 1..5: note = Description of Artificial Sequence: Synthetic peptide
  REGION 1..5: note = XENP019486 vhCDR1
SYTMH

SEQ ID NO: 9668 - protein, 17 aa, synthetic construct
  REGION 1..17: note = Description of Artificial Sequence: Synthetic peptide
  REGION 1..17: note = XENP019486 vhCDR2
FISYDGNNKYYADSVKG

SEQ ID NO: 9669 - protein, 9 aa, synthetic construct
  REGION 1..9: note = Description of Artificial Sequence: Synthetic peptide
  REGION 1..9: note = XENP019486 vhCDR3
TGWLGPFDY

SEQ ID NO: 9670 - protein, 215 aa, synthetic construct
  REGION 1..215: note = Description of Artificial Sequence: Synthetic polypeptide
  REGION 1..215: note = XENP019486 [CTLA-4]_H0_L0.71_Fab Light Chain
EIVLTQSPGTLSLSPGERATLSCRASQSVGSSYLAWYQQKPGQAPRLLIYGAISRATGIPDRFSGSGSGTDFTLTISRLEPEDFAVYYCQQYGSSPWTFGQGTKVEIKRTVAAPSVFIFPPSDEQLKSGTASVVCLLNNFYPREAKVQWKVDNALQSGNSQESVTEQDSKDSTYSLSSTLTLSKADYEKHKVYACEVTHQGLSSPVTKSFNRGEC

SEQ ID NO: 9671 - protein, 108 aa, synthetic construct; identical to SEQ ID NO: 6724
  REGION 1..108: note = Description of Artificial Sequence: Synthetic polypeptide
  REGION 1..108: note = VL of XENP019486

SEQ ID NO: 9672 - protein, 12 aa, synthetic construct
  REGION 1..12: note = Description of Artificial Sequence: Synthetic peptide
  REGION 1..12: note = XENP019486 vlCDR1
RASQSVGSSYLA

SEQ ID NO: 9673 - protein, 7 aa, synthetic construct
  REGION 1..7: note = Description of Artificial Sequence: Synthetic peptide
  REGION 1..7: note = XENP019486 vlCDR2
GAISRAT

SEQ ID NO: 9674 - protein, 9 aa, synthetic construct
  REGION 1..9: note = Description of Artificial Sequence: Synthetic peptide
  REGION 1..9: note = XENP019486 vlCDR3
QQYGSSPWT

SEQ ID NO: 9675 - protein, 221 aa, synthetic construct; identical to SEQ ID NO: 7595
  REGION 1..221: note = Description of Artificial Sequence: Synthetic polypeptide
  REGION 1..221: note = XENP019487 [CTLA-4]_H0_L0.72_Fab Heavy Chain

SEQ ID NO: 9676 - protein, 118 aa, synthetic construct; identical to SEQ ID NO: 3737
  REGION 1..118: note = Description of Artificial Sequence: Synthetic polypeptide
  REGION 1..118: note = VH of XENP019487

SEQ ID NO: 9677 - protein, 5 aa, synthetic construct
  REGION 1..5: note = Description of Artificial Sequence: Synthetic peptide
  REGION 1..5: note = XENP019487 vhCDR1
SYTMH

SEQ ID NO: 9678 - protein, 17 aa, synthetic construct
  REGION 1..17: note = Description of Artificial Sequence: Synthetic peptide
  REGION 1..17: note = XENP019487 vhCDR2
FISYDGNNKYYADSVKG

SEQ ID NO: 9679 - protein, 9 aa, synthetic construct
  REGION 1..9: note = Description of Artificial Sequence: Synthetic peptide
  REGION 1..9: note = XENP019487 vhCDR3
TGWLGPFDY

SEQ ID NO: 9680 - protein, 215 aa, synthetic construct
  REGION 1..215: note = Description of Artificial Sequence: Synthetic polypeptide
  REGION 1..215: note = XENP019487 [CTLA-4]_H0_L0.72_Fab Light Chain
EIVLTQSPGTLSLSPGERATLSCRASQSVGSSYLAWYQQKPGQAPRLLIYGALSRATGIPDRFSGSGSGTDFTLTISRLEPEDFAVYYCQQYGSSPWTFGQGTKVEIKRTVAAPSVFIFPPSDEQLKSGTASVVCLLNNFYPREAKVQWKVDNALQSGNSQESVTEQDSKDSTYSLSSTLTLSKADYEKHKVYACEVTHQGLSSPVTKSFNRGEC

SEQ ID NO: 9681 - protein, 108 aa, synthetic construct; identical to SEQ ID NO: 6733
  REGION 1..108: note = Description of Artificial Sequence: Synthetic polypeptide
  REGION 1..108: note = VL of XENP019487

SEQ ID NO: 9682 - protein, 12 aa, synthetic construct
  REGION 1..12: note = Description of Artificial Sequence: Synthetic peptide
  REGION 1..12: note = XENP019487 vlCDR1
RASQSVGSSYLA

SEQ ID NO: 9683 - protein, 7 aa, synthetic construct
  REGION 1..7: note = Description of Artificial Sequence: Synthetic peptide
  REGION 1..7: note = XENP019487 vlCDR2
GALSRAT

SEQ ID NO: 9684 - protein, 9 aa, synthetic construct
  REGION 1..9: note = Description of Artificial Sequence: Synthetic peptide
  REGION 1..9: note = XENP019487 vlCDR3
QQYGSSPWT

SEQ ID NO: 9685 - protein, 221 aa, synthetic construct; identical to SEQ ID NO: 7595
  REGION 1..221: note = Description of Artificial Sequence: Synthetic polypeptide
  REGION 1..221: note = XENP019488 [CTLA-4]_H0_L0.73_Fab Heavy Chain

SEQ ID NO: 9686 - protein, 118 aa, synthetic construct; identical to SEQ ID NO: 3737
  REGION 1..118: note = Description of Artificial Sequence: Synthetic polypeptide
  REGION 1..118: note = VH of XENP019488

SEQ ID NO: 9687 - protein, 5 aa, synthetic construct
  REGION 1..5: note = Description of Artificial Sequence: Synthetic peptide
  REGION 1..5: note = XENP019488 vhCDR1
SYTMH

SEQ ID NO: 9688 - protein, 17 aa, synthetic construct
  REGION 1..17: note = Description of Artificial Sequence: Synthetic peptide
  REGION 1..17: note = XENP019488 vhCDR2
FISYDGNNKYYADSVKG

SEQ ID NO: 9689 - protein, 9 aa, synthetic construct
  REGION 1..9: note = Description of Artificial Sequence: Synthetic peptide
  REGION 1..9: note = XENP019488 vhCDR3
TGWLGPFDY

SEQ ID NO: 9690 - protein, 215 aa, synthetic construct
  REGION 1..215: note = Description of Artificial Sequence: Synthetic polypeptide
  REGION 1..215: note = XENP019488 [CTLA-4]_H0_L0.73_Fab Light Chain
EIVLTQSPGTLSLSPGERATLSCRASQSVGSSYLAWYQQKPGQAPRLLIYGASSRATGIPDRFSGSGSGTDFTLTISRLEPEDFAVYYCQQYGSSPWTFGQGTKVEIKRTVAAPSVFIFPPSDEQLKSGTASVVCLLNNFYPREAKVQWKVDNALQSGNSQESVTEQDSKDSTYSLSSTLTLSKADYEKHKVYACEVTHQGLSSPVTKSFNRGEC

SEQ ID NO: 9691 - protein, 108 aa, synthetic construct; identical to SEQ ID NO: 6742
  REGION 1..108: note = Description of Artificial Sequence: Synthetic polypeptide
  REGION 1..108: note = VL of XENP019488

SEQ ID NO: 9692 - protein, 12 aa, synthetic construct
  REGION 1..12: note = Description of Artificial Sequence: Synthetic peptide
  REGION 1..12: note = XENP019488 vlCDR1
RASQSVGSSYLA

SEQ ID NO: 9693 - protein, 7 aa, synthetic construct
  REGION 1..7: note = Description of Artificial Sequence: Synthetic peptide
  REGION 1..7: note = XENP019488 vlCDR2
GASSRAT

SEQ ID NO: 9694 - protein, 9 aa, synthetic construct
  REGION 1..9: note = Description of Artificial Sequence: Synthetic peptide
  REGION 1..9: note = XENP019488 vlCDR3
QQYGSSPWT

SEQ ID NO: 9695 - protein, 221 aa, synthetic construct; identical to SEQ ID NO: 7595
  REGION 1..221: note = Description of Artificial Sequence: Synthetic polypeptide
  REGION 1..221: note = XENP019489 [CTLA-4]_H0_L0.74_Fab Heavy Chain

SEQ ID NO: 9696 - protein, 118 aa, synthetic construct; identical to SEQ ID NO: 3737
  REGION 1..118: note = Description of Artificial Sequence: Synthetic polypeptide
  REGION 1..118: note = VH of XENP019489

SEQ ID NO: 9697 - protein, 5 aa, synthetic construct
  REGION 1..5: note = Description of Artificial Sequence: Synthetic peptide
  REGION 1..5: note = XENP019489 vhCDR1
SYTMH

SEQ ID NO: 9698 - protein, 17 aa, synthetic construct
  REGION 1..17: note = Description of Artificial Sequence: Synthetic peptide
  REGION 1..17: note = XENP019489 vhCDR2
FISYDGNNKYYADSVKG

SEQ ID NO: 9699 - protein, 9 aa, synthetic construct
  REGION 1..9: note = Description of Artificial Sequence: Synthetic peptide
  REGION 1..9: note = XENP019489 vhCDR3
TGWLGPFDY

SEQ ID NO: 9700 - protein, 215 aa, synthetic construct
  REGION 1..215: note = Description of Artificial Sequence: Synthetic polypeptide
  REGION 1..215: note = XENP019489 [CTLA-4]_H0_L0.74_Fab Light Chain
EIVLTQSPGTLSLSPGERATLSCRASQSVGSSYLAWYQQKPGQAPRLLIYGAYSRATGIPDRFSGSGSGTDFTLTISRLEPEDFAVYYCQQYGSSPWTFGQGTKVEIKRTVAAPSVFIFPPSDEQLKSGTASVVCLLNNFYPREAKVQWKVDNALQSGNSQESVTEQDSKDSTYSLSSTLTLSKADYEKHKVYACEVTHQGLSSPVTKSFNRGEC

SEQ ID NO: 9701 - protein, 108 aa, synthetic construct; identical to SEQ ID NO: 6751
  REGION 1..108: note = Description of Artificial Sequence: Synthetic polypeptide
  REGION 1..108: note = VL of XENP019489

SEQ ID NO: 9702 - protein, 12 aa, synthetic construct
  REGION 1..12: note = Description of Artificial Sequence: Synthetic peptide
  REGION 1..12: note = XENP019489 vlCDR1
RASQSVGSSYLA

SEQ ID NO: 9703 - protein, 7 aa, synthetic construct
  REGION 1..7: note = Description of Artificial Sequence: Synthetic peptide
  REGION 1..7: note = XENP019489 vlCDR2
GAYSRAT

SEQ ID NO: 9704 - protein, 9 aa, synthetic construct
  REGION 1..9: note = Description of Artificial Sequence: Synthetic peptide
  REGION 1..9: note = XENP019489 vlCDR3
QQYGSSPWT

SEQ ID NO: 9705 - protein, 221 aa, synthetic construct; identical to SEQ ID NO: 7595
  REGION 1..221: note = Description of Artificial Sequence: Synthetic polypeptide
  REGION 1..221: note = XENP019490 [CTLA-4]_H0_L0.75_Fab Heavy Chain

SEQ ID NO: 9706 - protein, 118 aa, synthetic construct; identical to SEQ ID NO: 3737
  REGION 1..118: note = Description of Artificial Sequence: Synthetic polypeptide
  REGION 1..118: note = VH of XENP019490

SEQ ID NO: 9707 - protein, 5 aa, synthetic construct
  REGION 1..5: note = Description of Artificial Sequence: Synthetic peptide
  REGION 1..5: note = XENP019490 vhCDR1
SYTMH

SEQ ID NO: 9708 - protein, 17 aa, synthetic construct
  REGION 1..17: note = Description of Artificial Sequence: Synthetic peptide
  REGION 1..17: note = XENP019490 vhCDR2
FISYDGNNKYYADSVKG

SEQ ID NO: 9709 - protein, 9 aa, synthetic construct
  REGION 1..9: note = Description of Artificial Sequence: Synthetic peptide
  REGION 1..9: note = XENP019490 vhCDR3
TGWLGPFDY

SEQ ID NO: 9710 - protein, 215 aa, synthetic construct
  REGION 1..215: note = Description of Artificial Sequence: Synthetic polypeptide
  REGION 1..215: note = XENP019490 [CTLA-4]_H0_L0.75_Fab Light Chain
EIVLTQSPGTLSLSPGERATLSCRASQSVGSSYLAWYQQKPGQAPRLLIYGAFARATGIPDRFSGSGSGTDFTLTISRLEPEDFAVYYCQQYGSSPWTFGQGTKVEIKRTVAAPSVFIFPPSDEQLKSGTASVVCLLNNFYPREAKVQWKVDNALQSGNSQESVTEQDSKDSTYSLSSTLTLSKADYEKHKVYACEVTHQGLSSPVTKSFNRGEC

SEQ ID NO: 9711 - protein, 108 aa, synthetic construct; identical to SEQ ID NO: 6760
  REGION 1..108: note = Description of Artificial Sequence: Synthetic polypeptide
  REGION 1..108: note = VL of XENP019490

SEQ ID NO: 9712 - protein, 12 aa, synthetic construct
  REGION 1..12: note = Description of Artificial Sequence: Synthetic peptide
  REGION 1..12: note = XENP019490 vlCDR1
RASQSVGSSYLA

SEQ ID NO: 9713 - protein, 7 aa, synthetic construct
  REGION 1..7: note = Description of Artificial Sequence: Synthetic peptide
  REGION 1..7: note = XENP019490 vlCDR2
GAFARAT

SEQ ID NO: 9714 - protein, 9 aa, synthetic construct
  REGION 1..9: note = Description of Artificial Sequence: Synthetic peptide
  REGION 1..9: note = XENP019490 vlCDR3
QQYGSSPWT

SEQ ID NO: 9715 - protein, 221 aa, synthetic construct; identical to SEQ ID NO: 7595
  REGION 1..221: note = Description of Artificial Sequence: Synthetic polypeptide
  REGION 1..221: note = XENP019491 [CTLA-4]_H0_L0.76_Fab Heavy Chain

SEQ ID NO: 9716 - protein, 118 aa, synthetic construct; identical to SEQ ID NO: 3737
  REGION 1..118: note = Description of Artificial Sequence: Synthetic polypeptide
  REGION 1..118: note = VH of XENP019491

SEQ ID NO: 9717 - protein, 5 aa, synthetic construct
  REGION 1..5: note = Description of Artificial Sequence: Synthetic peptide
  REGION 1..5: note = XENP019491 vhCDR1
SYTMH

SEQ ID NO: 9718 - protein, 17 aa, synthetic construct
  REGION 1..17: note = Description of Artificial Sequence: Synthetic peptide
  REGION 1..17: note = XENP019491 vhCDR2
FISYDGNNKYYADSVKG

SEQ ID NO: 9719 - protein, 9 aa, synthetic construct
  REGION 1..9: note = Description of Artificial Sequence: Synthetic peptide
  REGION 1..9: note = XENP019491 vhCDR3
TGWLGPFDY

SEQ ID NO: 9720 - protein, 215 aa, synthetic construct
  REGION 1..215: note = Description of Artificial Sequence: Synthetic polypeptide
  REGION 1..215: note = XENP019491 [CTLA-4]_H0_L0.76_Fab Light Chain
EIVLTQSPGTLSLSPGERATLSCRASQSVGSSYLAWYQQKPGQAPRLLIYGAFGRATGIPDRFSGSGSGTDFTLTISRLEPEDFAVYYCQQYGSSPWTFGQGTKVEIKRTVAAPSVFIFPPSDEQLKSGTASVVCLLNNFYPREAKVQWKVDNALQSGNSQESVTEQDSKDSTYSLSSTLTLSKADYEKHKVYACEVTHQGLSSPVTKSFNRGEC

SEQ ID NO: 9721 - protein, 108 aa, synthetic construct; identical to SEQ ID NO: 6769
  REGION 1..108: note = Description of Artificial Sequence: Synthetic polypeptide
  REGION 1..108: note = VL of XENP019491

SEQ ID NO: 9722 - protein, 12 aa, synthetic construct
  REGION 1..12: note = Description of Artificial Sequence: Synthetic peptide
  REGION 1..12: note = XENP019491 vlCDR1
RASQSVGSSYLA

SEQ ID NO: 9723 - protein, 7 aa, synthetic construct
  REGION 1..7: note = Description of Artificial Sequence: Synthetic peptide
  REGION 1..7: note = XENP019491 vlCDR2
GAFGRAT

SEQ ID NO: 9724 - protein, 9 aa, synthetic construct
  REGION 1..9: note = Description of Artificial Sequence: Synthetic peptide
  REGION 1..9: note = XENP019491 vlCDR3
QQYGSSPWT

SEQ ID NO: 9725 - protein, 221 aa, synthetic construct; identical to SEQ ID NO: 7595
  REGION 1..221: note = Description of Artificial Sequence: Synthetic polypeptide
  REGION 1..221: note = XENP019492 [CTLA-4]_H0_L0.77_Fab Heavy Chain

SEQ ID NO: 9726 - protein, 118 aa, synthetic construct; identical to SEQ ID NO: 3737
  REGION 1..118: note = Description of Artificial Sequence: Synthetic polypeptide
  REGION 1..118: note = VH of XENP019492

SEQ ID NO: 9727 - protein, 5 aa, synthetic construct
  REGION 1..5: note = Description of Artificial Sequence: Synthetic peptide
  REGION 1..5: note = XENP019492 vhCDR1
SYTMH

SEQ ID NO: 9728 - protein, 17 aa, synthetic construct
  REGION 1..17: note = Description of Artificial Sequence: Synthetic peptide
  REGION 1..17: note = XENP019492 vhCDR2
FISYDGNNKYYADSVKG

SEQ ID NO: 9729 - protein, 9 aa, synthetic construct
  REGION 1..9: note = Description of Artificial Sequence: Synthetic peptide
  REGION 1..9: note = XENP019492 vhCDR3
TGWLGPFDY

SEQ ID NO: 9730 - protein, 215 aa, synthetic construct
  REGION 1..215: note = Description of Artificial Sequence: Synthetic polypeptide
  REGION 1..215: note = XENP019492 [CTLA-4]_H0_L0.77_Fab Light Chain
EIVLTQSPGTLSLSPGERATLSCRASQSVGSSYLAWYQQKPGQAPRLLIYGAFNRATGIPDRFSGSGSGTDFTLTISRLEPEDFAVYYCQQYGSSPWTFGQGTKVEIKRTVAAPSVFIFPPSDEQLKSGTASVVCLLNNFYPREAKVQWKVDNALQSGNSQESVTEQDSKDSTYSLSSTLTLSKADYEKHKVYACEVTHQGLSSPVTKSFNRGEC

SEQ ID NO: 9731 - protein, 108 aa, synthetic construct; identical to SEQ ID NO: 6778
  REGION 1..108: note = Description of Artificial Sequence: Synthetic polypeptide
  REGION 1..108: note = VL of XENP019492

SEQ ID NO: 9732 - protein, 12 aa, synthetic construct
  REGION 1..12: note = Description of Artificial Sequence: Synthetic peptide
  REGION 1..12: note = XENP019492 vlCDR1
RASQSVGSSYLA

SEQ ID NO: 9733 - protein, 7 aa, synthetic construct
  REGION 1..7: note = Description of Artificial Sequence: Synthetic peptide
  REGION 1..7: note = XENP019492 vlCDR2
GAFNRAT

SEQ ID NO: 9734 - protein, 9 aa, synthetic construct
  REGION 1..9: note = Description of Artificial Sequence: Synthetic peptide
  REGION 1..9: note = XENP019492 vlCDR3
QQYGSSPWT

SEQ ID NO: 9735 - protein, 221 aa, synthetic construct; identical to SEQ ID NO: 7595
  REGION 1..221: note = Description of Artificial Sequence: Synthetic polypeptide
  REGION 1..221: note = XENP019493 [CTLA-4]_H0_L0.78_Fab Heavy Chain

SEQ ID NO: 9736 - protein, 118 aa, synthetic construct; identical to SEQ ID NO: 3737
  REGION 1..118: note = Description of Artificial Sequence: Synthetic polypeptide
  REGION 1..118: note = VH of XENP019493

SEQ ID NO: 9737 - protein, 5 aa, synthetic construct
  REGION 1..5: note = Description of Artificial Sequence: Synthetic peptide
  REGION 1..5: note = XENP019493 vhCDR1
SYTMH

SEQ ID NO: 9738 - protein, 17 aa, synthetic construct
  REGION 1..17: note = Description of Artificial Sequence: Synthetic peptide
  REGION 1..17: note = XENP019493 vhCDR2
FISYDGNNKYYADSVKG

SEQ ID NO: 9739 - protein, 9 aa, synthetic construct
  REGION 1..9: note = Description of Artificial Sequence: Synthetic peptide
  REGION 1..9: note = XENP019493 vhCDR3
TGWLGPFDY

SEQ ID NO: 9740 - protein, 215 aa, synthetic construct
  REGION 1..215: note = Description of Artificial Sequence: Synthetic polypeptide
  REGION 1..215: note = XENP019493 [CTLA-4]_H0_L0.78_Fab Light Chain
EIVLTQSPGTLSLSPGERATLSCRASQSVGSSYLAWYQQKPGQAPRLLIYGAFQRATGIPDRFSGSGSGTDFTLTISRLEPEDFAVYYCQQYGSSPWTFGQGTKVEIKRTVAAPSVFIFPPSDEQLKSGTASVVCLLNNFYPREAKVQWKVDNALQSGNSQESVTEQDSKDSTYSLSSTLTLSKADYEKHKVYACEVTHQGLSSPVTKSFNRGEC

SEQ ID NO: 9741 - protein, 108 aa, synthetic construct; identical to SEQ ID NO: 6787
  REGION 1..108: note = Description of Artificial Sequence: Synthetic polypeptide
  REGION 1..108: note = VL of XENP019493

SEQ ID NO: 9742 - protein, 12 aa, synthetic construct
  REGION 1..12: note = Description of Artificial Sequence: Synthetic peptide
  REGION 1..12: note = XENP019493 vlCDR1
RASQSVGSSYLA

SEQ ID NO: 9743 - protein, 7 aa, synthetic construct
  REGION 1..7: note = Description of Artificial Sequence: Synthetic peptide
  REGION 1..7: note = XENP019493 vlCDR2
GAFQRAT

SEQ ID NO: 9744 - protein, 9 aa, synthetic construct
  REGION 1..9: note = Description of Artificial Sequence: Synthetic peptide
  REGION 1..9: note = XENP019493 vlCDR3
QQYGSSPWT

SEQ ID NO: 9745 - protein, 221 aa, synthetic construct; identical to SEQ ID NO: 7595
  REGION 1..221: note = Description of Artificial Sequence: Synthetic polypeptide
  REGION 1..221: note = XENP019494 [CTLA-4]_H0_L0.79_Fab Heavy Chain

SEQ ID NO: 9746 - protein, 118 aa, synthetic construct; identical to SEQ ID NO: 3737
  REGION 1..118: note = Description of Artificial Sequence: Synthetic polypeptide
  REGION 1..118: note = VH of XENP019494

SEQ ID NO: 9747 - protein, 5 aa, synthetic construct
  REGION 1..5: note = Description of Artificial Sequence: Synthetic peptide
  REGION 1..5: note = XENP019494 vhCDR1
SYTMH

SEQ ID NO: 9748 - protein, 17 aa, synthetic construct
  REGION 1..17: note = Description of Artificial Sequence: Synthetic peptide
  REGION 1..17: note = XENP019494 vhCDR2
FISYDGNNKYYADSVKG

SEQ ID NO: 9749 - protein, 9 aa, synthetic construct
  REGION 1..9: note = Description of Artificial Sequence: Synthetic peptide
  REGION 1..9: note = XENP019494 vhCDR3
TGWLGPFDY

SEQ ID NO: 9750 - protein, 215 aa, synthetic construct
  REGION 1..215: note = Description of Artificial Sequence: Synthetic polypeptide
  REGION 1..215: note = XENP019494 [CTLA-4]_H0_L0.79_Fab Light Chain
EIVLTQSPGTLSLSPGERATLSCRASQSVGSSYLAWYQQKPGQAPRLLIYGAFTRATGIPDRFSGSGSGTDFTLTISRLEPEDFAVYYCQQYGSSPWTFGQGTKVEIKRTVAAPSVFIFPPSDEQLKSGTASVVCLLNNFYPREAKVQWKVDNALQSGNSQESVTEQDSKDSTYSLSSTLTLSKADYEKHKVYACEVTHQGLSSPVTKSFNRGEC

SEQ ID NO: 9751 - protein, 108 aa, synthetic construct; identical to SEQ ID NO: 6796
  REGION 1..108: note = Description of Artificial Sequence: Synthetic polypeptide
  REGION 1..108: note = VL of XENP019494

SEQ ID NO: 9752 - protein, 12 aa, synthetic construct
  REGION 1..12: note = Description of Artificial Sequence: Synthetic peptide
  REGION 1..12: note = XENP019494 vlCDR1
RASQSVGSSYLA

SEQ ID NO: 9753 - protein, 7 aa, synthetic construct
  REGION 1..7: note = Description of Artificial Sequence: Synthetic peptide
  REGION 1..7: note = XENP019494 vlCDR2
GAFTRAT

SEQ ID NO: 9754 - protein, 9 aa, synthetic construct
  REGION 1..9: note = Description of Artificial Sequence: Synthetic peptide
  REGION 1..9: note = XENP019494 vlCDR3
QQYGSSPWT

SEQ ID NO: 9755 - protein, 221 aa, synthetic construct; identical to SEQ ID NO: 7595
  REGION 1..221: note = Description of Artificial Sequence: Synthetic polypeptide
  REGION 1..221: note = XENP019495 [CTLA-4]_H0_L0.80_Fab Heavy Chain

SEQ ID NO: 9756 - protein, 118 aa, synthetic construct; identical to SEQ ID NO: 3737
  REGION 1..118: note = Description of Artificial Sequence: Synthetic polypeptide
  REGION 1..118: note = VH of XENP019495

SEQ ID NO: 9757 - protein, 5 aa, synthetic construct
  REGION 1..5: note = Description of Artificial Sequence: Synthetic peptide
  REGION 1..5: note = XENP019495 vhCDR1
SYTMH

SEQ ID NO: 9758 - protein, 17 aa, synthetic construct
  REGION 1..17: note = Description of Artificial Sequence: Synthetic peptide
  REGION 1..17: note = XENP019495 vhCDR2
FISYDGNNKYYADSVKG

SEQ ID NO: 9759 - protein, 9 aa, synthetic construct
  REGION 1..9: note = Description of Artificial Sequence: Synthetic peptide
  REGION 1..9: note = XENP019495 vhCDR3
TGWLGPFDY

SEQ ID NO: 9760 - protein, 215 aa, synthetic construct
  REGION 1..215: note = Description of Artificial Sequence: Synthetic polypeptide
  REGION 1..215: note = XENP019495 [CTLA-4]_H0_L0.80_Fab Light Chain
EIVLTQSPGTLSLSPGERATLSCRASQSVGSSYLAWYQQKPGQAPRLLIYGAFSRDTGIPDRFSGSGSGTDFTLTISRLEPEDFAVYYCQQYGSSPWTFGQGTKVEIKRTVAAPSVFIFPPSDEQLKSGTASVVCLLNNFYPREAKVQWKVDNALQSGNSQESVTEQDSKDSTYSLSSTLTLSKADYEKHKVYACEVTHQGLSSPVTKSFNRGEC

SEQ ID NO: 9761 - protein, 108 aa, synthetic construct; identical to SEQ ID NO: 6805
  REGION 1..108: note = Description of Artificial Sequence: Synthetic polypeptide
  REGION 1..108: note = VL of XENP019495

SEQ ID NO: 9762 - protein, 12 aa, synthetic construct
  REGION 1..12: note = Description of Artificial Sequence: Synthetic peptide
  REGION 1..12: note = XENP019495 vlCDR1
RASQSVGSSYLA

SEQ ID NO: 9763 - protein, 7 aa, synthetic construct
  REGION 1..7: note = Description of Artificial Sequence: Synthetic peptide
  REGION 1..7: note = XENP019495 vlCDR2
GAFSRDT

SEQ ID NO: 9764 - protein, 9 aa, synthetic construct
  REGION 1..9: note = Description of Artificial Sequence: Synthetic peptide
  REGION 1..9: note = XENP019495 vlCDR3
QQYGSSPWT

SEQ ID NO: 9765 - protein, 221 aa, synthetic construct; identical to SEQ ID NO: 7595
  REGION 1..221: note = Description of Artificial Sequence: Synthetic polypeptide
  REGION 1..221: note = XENP019496 [CTLA-4]_H0_L0.81_Fab Heavy Chain

SEQ ID NO: 9766 - protein, 118 aa, synthetic construct; identical to SEQ ID NO: 3737
  REGION 1..118: note = Description of Artificial Sequence: Synthetic polypeptide
  REGION 1..118: note = VH of XENP019496

SEQ ID NO: 9767 - protein, 5 aa, synthetic construct
  REGION 1..5: note = Description of Artificial Sequence: Synthetic peptide
  REGION 1..5: note = XENP019496 vhCDR1
SYTMH

SEQ ID NO: 9768 - protein, 17 aa, synthetic construct
  REGION 1..17: note = Description of Artificial Sequence: Synthetic peptide
  REGION 1..17: note = XENP019496 vhCDR2
FISYDGNNKYYADSVKG

SEQ ID NO: 9769 - protein, 9 aa, synthetic construct
  REGION 1..9: note = Description of Artificial Sequence: Synthetic peptide
  REGION 1..9: note = XENP019496 vhCDR3
TGWLGPFDY

SEQ ID NO: 9770 - protein, 215 aa, synthetic construct
  REGION 1..215: note = Description of Artificial Sequence: Synthetic polypeptide
  REGION 1..215: note = XENP019496 [CTLA-4]_H0_L0.81_Fab Light Chain
EIVLTQSPGTLSLSPGERATLSCRASQSVGSSYLAWYQQKPGQAPRLLIYGAFSRASGIPDRFSGSGSGTDFTLTISRLEPEDFAVYYCQQYGSSPWTFGQGTKVEIKRTVAAPSVFIFPPSDEQLKSGTASVVCLLNNFYPREAKVQWKVDNALQSGNSQESVTEQDSKDSTYSLSSTLTLSKADYEKHKVYACEVTHQGLSSPVTKSFNRGEC

SEQ ID NO: 9771 - protein, 108 aa, synthetic construct; identical to SEQ ID NO: 6814
  REGION 1..108: note = Description of Artificial Sequence: Synthetic polypeptide
  REGION 1..108: note = VL of XENP019496

SEQ ID NO: 9772 - protein, 12 aa, synthetic construct
  REGION 1..12: note = Description of Artificial Sequence: Synthetic peptide
  REGION 1..12: note = XENP019496 vlCDR1
RASQSVGSSYLA

SEQ ID NO: 9773 - protein, 7 aa, synthetic construct
  REGION 1..7: note = Description of Artificial Sequence: Synthetic peptide
  REGION 1..7: note = XENP019496 vlCDR2
GAFSRAS

SEQ ID NO: 9774 - protein, 9 aa, synthetic construct
  REGION 1..9: note = Description of Artificial Sequence: Synthetic peptide
  REGION 1..9: note = XENP019496 vlCDR3
QQYGSSPWT

SEQ ID NO: 9775 - protein, 221 aa, synthetic construct; identical to SEQ ID NO: 7595
  REGION 1..221: note = Description of Artificial Sequence: Synthetic polypeptide
  REGION 1..221: note = XENP019501 [CTLA-4]_H0_L0.82_Fab Heavy Chain

SEQ ID NO: 9776 - protein, 118 aa, synthetic construct; identical to SEQ ID NO: 3737
  REGION 1..118: note = Description of Artificial Sequence: Synthetic polypeptide
  REGION 1..118: note = VH of XENP019501

SEQ ID NO: 9777 - protein, 5 aa, synthetic construct
  REGION 1..5: note = Description of Artificial Sequence: Synthetic peptide
  REGION 1..5: note = XENP019501 vhCDR1
SYTMH

SEQ ID NO: 9778 - protein, 17 aa, synthetic construct
  REGION 1..17: note = Description of Artificial Sequence: Synthetic peptide
  REGION 1..17: note = XENP019501 vhCDR2
FISYDGNNKYYADSVKG

SEQ ID NO: 9779 - protein, 9 aa, synthetic construct
  REGION 1..9: note = Description of Artificial Sequence: Synthetic peptide
  REGION 1..9: note = XENP019501 vhCDR3
TGWLGPFDY

SEQ ID NO: 9780 - protein, 215 aa, synthetic construct
  REGION 1..215: note = Description of Artificial Sequence: Synthetic polypeptide
  REGION 1..215: note = XENP019501 [CTLA-4]_H0_L0.82_Fab Light Chain
EIVLTQSPGTLSLSPGERATLSCRASQSVGSSYLAWYQQKPGQAPRLLIYGAFSRATGVPDRFSGSGSGTDFTLTISRLEPEDFAVYYCQQYGSSPWTFGQGTKVEIKRTVAAPSVFIFPPSDEQLKSGTASVVCLLNNFYPREAKVQWKVDNALQSGNSQESVTEQDSKDSTYSLSSTLTLSKADYEKHKVYACEVTHQGLSSPVTKSFNRGEC

SEQ ID NO: 9781 - protein, 108 aa, synthetic construct; identical to SEQ ID NO: 6823
  REGION 1..108: note = Description of Artificial Sequence: Synthetic polypeptide
  REGION 1..108: note = VL of XENP019501

SEQ ID NO: 9782 - protein, 12 aa, synthetic construct
  REGION 1..12: note = Description of Artificial Sequence: Synthetic peptide
  REGION 1..12: note = XENP019501 vlCDR1
RASQSVGSSYLA

SEQ ID NO: 9783 - protein, 7 aa, synthetic construct
  REGION 1..7: note = Description of Artificial Sequence: Synthetic peptide
  REGION 1..7: note = XENP019501 vlCDR2
GAFSRAT

SEQ ID NO: 9784 - protein, 9 aa, synthetic construct
  REGION 1..9: note = Description of Artificial Sequence: Synthetic peptide
  REGION 1..9: note = XENP019501 vlCDR3
QQYGSSPWT

SEQ ID NO: 9785 - protein, 221 aa, synthetic construct; identical to SEQ ID NO: 7595
  REGION 1..221: note = Description of Artificial Sequence: Synthetic polypeptide
  REGION 1..221: note = XENP019502 [CTLA-4]_H0_L0.83_Fab Heavy Chain

SEQ ID NO: 9786 - protein, 118 aa, synthetic construct; identical to SEQ ID NO: 3737
  REGION 1..118: note = Description of Artificial Sequence: Synthetic polypeptide
  REGION 1..118: note = VH of XENP019502

SEQ ID NO: 9787 - protein, 5 aa, synthetic construct
  REGION 1..5: note = Description of Artificial Sequence: Synthetic peptide
  REGION 1..5: note = XENP019502 vhCDR1
SYTMH

SEQ ID NO: 9788 - protein, 17 aa, synthetic construct
  REGION 1..17: note = Description of Artificial Sequence: Synthetic peptide
  REGION 1..17: note = XENP019502 vhCDR2
FISYDGNNKYYADSVKG

SEQ ID NO: 9789 - protein, 9 aa, synthetic construct
  REGION 1..9: note = Description of Artificial Sequence: Synthetic peptide
  REGION 1..9: note = XENP019502 vhCDR3
TGWLGPFDY

SEQ ID NO: 9790 - protein, 215 aa, synthetic construct
  REGION 1..215: note = Description of Artificial Sequence: Synthetic polypeptide
  REGION 1..215: note = XENP019502 [CTLA-4]_H0_L0.83_Fab Light Chain
EIVLTQSPGTLSLSPGERATLSCRASQSVGSSYLAWYQQKPGQAPRLLIYGAFSRATGIPARFSGSGSGTDFTLTISRLEPEDFAVYYCQQYGSSPWTFGQGTKVEIKRTVAAPSVFIFPPSDEQLKSGTASVVCLLNNFYPREAKVQWKVDNALQSGNSQESVTEQDSKDSTYSLSSTLTLSKADYEKHKVYACEVTHQGLSSPVTKSFNRGEC

SEQ ID NO: 9791 - protein, 108 aa, synthetic construct; identical to SEQ ID NO: 6832
  REGION 1..108: note = Description of Artificial Sequence: Synthetic polypeptide
  REGION 1..108: note = VL of XENP019502

SEQ ID NO: 9792 - protein, 12 aa, synthetic construct
  REGION 1..12: note = Description of Artificial Sequence: Synthetic peptide
  REGION 1..12: note = XENP019502 vlCDR1
RASQSVGSSYLA

SEQ ID NO: 9793 - protein, 7 aa, synthetic construct
  REGION 1..7: note = Description of Artificial Sequence: Synthetic peptide
  REGION 1..7: note = XENP019502 vlCDR2
GAFSRAT

SEQ ID NO: 9794 - protein, 9 aa, synthetic construct
  REGION 1..9: note = Description of Artificial Sequence: Synthetic peptide
  REGION 1..9: note = XENP019502 vlCDR3
QQYGSSPWT

SEQ ID NO: 9795 - protein, 221 aa, synthetic construct; identical to SEQ ID NO: 7595
  REGION 1..221: note = Description of Artificial Sequence: Synthetic polypeptide
  REGION 1..221: note = XENP019503 [CTLA-4]_H0_L0.84_Fab Heavy Chain

SEQ ID NO: 9796 - protein, 118 aa, synthetic construct; identical to SEQ ID NO: 3737
  REGION 1..118: note = Description of Artificial Sequence: Synthetic polypeptide
  REGION 1..118: note = VH of XENP019503

SEQ ID NO: 9797 - protein, 5 aa, synthetic construct
  REGION 1..5: note = Description of Artificial Sequence: Synthetic peptide
  REGION 1..5: note = XENP019503 vhCDR1
SYTMH

SEQ ID NO: 9798 - protein, 17 aa, synthetic construct
  REGION 1..17: note = Description of Artificial Sequence: Synthetic peptide
  REGION 1..17: note = XENP019503 vhCDR2
FISYDGNNKYYADSVKG

SEQ ID NO: 9799 - protein, 9 aa, synthetic construct
  REGION 1..9: note = Description of Artificial Sequence: Synthetic peptide
  REGION 1..9: note = XENP019503 vhCDR3
TGWLGPFDY

SEQ ID NO: 9800 - protein, 215 aa, synthetic construct
  REGION 1..215: note = Description of Artificial Sequence: Synthetic polypeptide
  REGION 1..215: note = XENP019503 [CTLA-4]_H0_L0.84_Fab Light Chain
EIVLTQSPGTLSLSPGERATLSCRASQSVGSSYLAWYQQKPGQAPRLLIYGAFSRATGIPDRFSGSGSRTDFTLTISRLEPEDFAVYYCQQYGSSPWTFGQGTKVEIKRTVAAPSVFIFPPSDEQLKSGTASVVCLLNNFYPREAKVQWKVDNALQSGNSQESVTEQDSKDSTYSLSSTLTLSKADYEKHKVYACEVTHQGLSSPVTKSFNRGEC

SEQ ID NO: 9801 - protein, 108 aa, synthetic construct; identical to SEQ ID NO: 6841
  REGION 1..108: note = Description of Artificial Sequence: Synthetic polypeptide
  REGION 1..108: note = VL of XENP019503

SEQ ID NO: 9802 - protein, 12 aa, synthetic construct
  REGION 1..12: note = Description of Artificial Sequence: Synthetic peptide
  REGION 1..12: note = XENP019503 vlCDR1
RASQSVGSSYLA

SEQ ID NO: 9803 - protein, 7 aa, synthetic construct
  REGION 1..7: note = Description of Artificial Sequence: Synthetic peptide
  REGION 1..7: note = XENP019503 vlCDR2
GAFSRAT

SEQ ID NO: 9804 - protein, 9 aa, synthetic construct
  REGION 1..9: note = Description of Artificial Sequence: Synthetic peptide
  REGION 1..9: note = XENP019503 vlCDR3
QQYGSSPWT

SEQ ID NO: 9805 - protein, 221 aa, synthetic construct; identical to SEQ ID NO: 7595
  REGION 1..221: note = Description of Artificial Sequence: Synthetic polypeptide
  REGION 1..221: note = XENP019504 [CTLA-4]_H0_L0.85_Fab Heavy Chain

SEQ ID NO: 9806 - protein, 118 aa, synthetic construct; identical to SEQ ID NO: 3737
  REGION 1..118: note = Description of Artificial Sequence: Synthetic polypeptide
  REGION 1..118: note = VH of XENP019504

SEQ ID NO: 9807 - protein, 5 aa, synthetic construct
  REGION 1..5: note = Description of Artificial Sequence: Synthetic peptide
  REGION 1..5: note = XENP019504 vhCDR1
SYTMH

SEQ ID NO: 9808 - protein, 17 aa, synthetic construct
  REGION 1..17: note = Description of Artificial Sequence: Synthetic peptide
  REGION 1..17: note = XENP019504 vhCDR2
FISYDGNNKYYADSVKG

SEQ ID NO: 9809 - protein, 9 aa, synthetic construct
  REGION 1..9: note = Description of Artificial Sequence: Synthetic peptide
  REGION 1..9: note = XENP019504 vhCDR3
TGWLGPFDY

SEQ ID NO: 9810 - protein, 215 aa, synthetic construct
  REGION 1..215: note = Description of Artificial Sequence: Synthetic polypeptide
  REGION 1..215: note = XENP019504 [CTLA-4]_H0_L0.85_Fab Light Chain
EIVLTQSPGTLSLSPGERATLSCRASQSVGSSYLAWYQQKPGQAPRLLIYGAFSRATGIPDRFSGSGSGTEFTLTISRLEPEDFAVYYCQQYGSSPWTFGQGTKVEIKRTVAAPSVFIFPPSDEQLKSGTASVVCLLNNFYPREAKVQWKVDNALQSGNSQESVTEQDSKDSTYSLSSTLTLSKADYEKHKVYACEVTHQGLSSPVTKSFNRGEC

SEQ ID NO: 9811 - protein, 108 aa, synthetic construct; identical to SEQ ID NO: 6850
  REGION 1..108: note = Description of Artificial Sequence: Synthetic polypeptide
  REGION 1..108: note = VL of XENP019504

SEQ ID NO: 9812 - protein, 12 aa, synthetic construct
  REGION 1..12: note = Description of Artificial Sequence: Synthetic peptide
  REGION 1..12: note = XENP019504 vlCDR1
RASQSVGSSYLA

SEQ ID NO: 9813 - protein, 7 aa, synthetic construct
  REGION 1..7: note = Description of Artificial Sequence: Synthetic peptide
  REGION 1..7: note = XENP019504 vlCDR2
GAFSRAT

SEQ ID NO: 9814 - protein, 9 aa, synthetic construct
  REGION 1..9: note = Description of Artificial Sequence: Synthetic peptide
  REGION 1..9: note = XENP019504 vlCDR3
QQYGSSPWT

SEQ ID NO: 9815 - protein, 221 aa, synthetic construct; identical to SEQ ID NO: 7595
  REGION 1..221: note = Description of Artificial Sequence: Synthetic polypeptide
  REGION 1..221: note = XENP019505 [CTLA-4]_H0_L0.86_Fab Heavy Chain

SEQ ID NO: 9816 - protein, 118 aa, synthetic construct; identical to SEQ ID NO: 3737
  REGION 1..118: note = Description of Artificial Sequence: Synthetic polypeptide
  REGION 1..118: note = VH of XENP019505

SEQ ID NO: 9817 - protein, 5 aa, synthetic construct
  REGION 1..5: note = Description of Artificial Sequence: Synthetic peptide
  REGION 1..5: note = XENP019505 vhCDR1
SYTMH

SEQ ID NO: 9818 - protein, 17 aa, synthetic construct
  REGION 1..17: note = Description of Artificial Sequence: Synthetic peptide
  REGION 1..17: note = XENP019505 vhCDR2
FISYDGNNKYYADSVKG

SEQ ID NO: 9819 - protein, 9 aa, synthetic construct
  REGION 1..9: note = Description of Artificial Sequence: Synthetic peptide
  REGION 1..9: note = XENP019505 vhCDR3
TGWLGPFDY

SEQ ID NO: 9820 - protein, 215 aa, synthetic construct
  REGION 1..215: note = Description of Artificial Sequence: Synthetic polypeptide
  REGION 1..215: note = XENP019505 [CTLA-4]_H0_L0.86_Fab Light Chain
EIVLTQSPGTLSLSPGERATLSCRASQSVGSSYLAWYQQKPGQAPRLLIYGAFSRATGIPDRFSGSGSGTDFTLKISRLEPEDFAVYYCQQYGSSPWTFGQGTKVEIKRTVAAPSVFIFPPSDEQLKSGTASVVCLLNNFYPREAKVQWKVDNALQSGNSQESVTEQDSKDSTYSLSSTLTLSKADYEKHKVYACEVTHQGLSSPVTKSFNRGEC

SEQ ID NO: 9821 - protein, 108 aa, synthetic construct; identical to SEQ ID NO: 6859
  REGION 1..108: note = Description of Artificial Sequence: Synthetic polypeptide
  REGION 1..108: note = VL of XENP019505

SEQ ID NO: 9822 - protein, 12 aa, synthetic construct
  REGION 1..12: note = Description of Artificial Sequence: Synthetic peptide
  REGION 1..12: note = XENP019505 vlCDR1
RASQSVGSSYLA

SEQ ID NO: 9823 - protein, 7 aa, synthetic construct
  REGION 1..7: note = Description of Artificial Sequence: Synthetic peptide
  REGION 1..7: note = XENP019505 vlCDR2
GAFSRAT

SEQ ID NO: 9824 - protein, 9 aa, synthetic construct
  REGION 1..9: note = Description of Artificial Sequence: Synthetic peptide
  REGION 1..9: note = XENP019505 vlCDR3
QQYGSSPWT

SEQ ID NO: 9825 - protein, 221 aa, synthetic construct; identical to SEQ ID NO: 7595
  REGION 1..221: note = Description of Artificial Sequence: Synthetic polypeptide
  REGION 1..221: note = XENP019506 [CTLA-4]_H0_L0.87_Fab Heavy Chain

SEQ ID NO: 9826 - protein, 118 aa, synthetic construct; identical to SEQ ID NO: 3737
  REGION 1..118: note = Description of Artificial Sequence: Synthetic polypeptide
  REGION 1..118: note = VH of XENP019506

SEQ ID NO: 9827 - protein, 5 aa, synthetic construct
  REGION 1..5: note = Description of Artificial Sequence: Synthetic peptide
  REGION 1..5: note = XENP019506 vhCDR1
SYTMH

SEQ ID NO: 9828 - protein, 17 aa, synthetic construct
  REGION 1..17: note = Description of Artificial Sequence: Synthetic peptide
  REGION 1..17: note = XENP019506 vhCDR2
FISYDGNNKYYADSVKG

SEQ ID NO: 9829 - protein, 9 aa, synthetic construct
  REGION 1..9: note = Description of Artificial Sequence: Synthetic peptide
  REGION 1..9: note = XENP019506 vhCDR3
TGWLGPFDY

SEQ ID NO: 9830 - protein, 215 aa, synthetic construct
  REGION 1..215: note = Description of Artificial Sequence: Synthetic polypeptide
  REGION 1..215: note = XENP019506 [CTLA-4]_H0_L0.87_Fab Light Chain
EIVLTQSPGTLSLSPGERATLSCRASQSVGSSYLAWYQQKPGQAPRLLIYGAFSRATGIPDRFSGSGSGTDFTLTISSLEPEDFAVYYCQQYGSSPWTFGQGTKVEIKRTVAAPSVFIFPPSDEQLKSGTASVVCLLNNFYPREAKVQWKVDNALQSGNSQESVTEQDSKDSTYSLSSTLTLSKADYEKHKVYACEVTHQGLSSPVTKSFNRGEC

SEQ ID NO: 9831 - protein, 108 aa, synthetic construct; identical to SEQ ID NO: 6868
  REGION 1..108: note = Description of Artificial Sequence: Synthetic polypeptide
  REGION 1..108: note = VL of XENP019506

SEQ ID NO: 9832 - protein, 12 aa, synthetic construct
  REGION 1..12: note = Description of Artificial Sequence: Synthetic peptide
  REGION 1..12: note = XENP019506 vlCDR1
RASQSVGSSYLA

SEQ ID NO: 9833 - protein, 7 aa, synthetic construct
  REGION 1..7: note = Description of Artificial Sequence: Synthetic peptide
  REGION 1..7: note = XENP019506 vlCDR2
GAFSRAT

SEQ ID NO: 9834 - protein, 9 aa, synthetic construct
  REGION 1..9: note = Description of Artificial Sequence: Synthetic peptide
  REGION 1..9: note = XENP019506 vlCDR3
QQYGSSPWT

SEQ ID NO: 9835 - protein, 221 aa, synthetic construct; identical to SEQ ID NO: 7595
  REGION 1..221: note = Description of Artificial Sequence: Synthetic polypeptide
  REGION 1..221: note = XENP019507 [CTLA-4]_H0_L0.88_Fab Heavy Chain

SEQ ID NO: 9836 - protein, 118 aa, synthetic construct; identical to SEQ ID NO: 3737
  REGION 1..118: note = Description of Artificial Sequence: Synthetic polypeptide
  REGION 1..118: note = VH of XENP019507

SEQ ID NO: 9837 - protein, 5 aa, synthetic construct
  REGION 1..5: note = Description of Artificial Sequence: Synthetic peptide
  REGION 1..5: note = XENP019507 vhCDR1
SYTMH

SEQ ID NO: 9838 - protein, 17 aa, synthetic construct
  REGION 1..17: note = Description of Artificial Sequence: Synthetic peptide
  REGION 1..17: note = XENP019507 vhCDR2
FISYDGNNKYYADSVKG

SEQ ID NO: 9839 - protein, 9 aa, synthetic construct
  REGION 1..9: note = Description of Artificial Sequence: Synthetic peptide
  REGION 1..9: note = XENP019507 vhCDR3
TGWLGPFDY

SEQ ID NO: 9840 - protein, 215 aa, synthetic construct
  REGION 1..215: note = Description of Artificial Sequence: Synthetic polypeptide
  REGION 1..215: note = XENP019507 [CTLA-4]_H0_L0.88_Fab Light Chain
EIVLTQSPGTLSLSPGERATLSCRASQSVGSSYLAWYQQKPGQAPRLLIYGAFSRATGIPDRFSGSGSGTDFTLTISSLQSEDFAVYYCQQYGSSPWTFGQGTKVEIKRTVAAPSVFIFPPSDEQLKSGTASVVCLLNNFYPREAKVQWKVDNALQSGNSQESVTEQDSKDSTYSLSSTLTLSKADYEKHKVYACEVTHQGLSSPVTKSFNRGEC

SEQ ID NO: 9841 - protein, 108 aa, synthetic construct; identical to SEQ ID NO: 6877
  REGION 1..108: note = Description of Artificial Sequence: Synthetic polypeptide
  REGION 1..108: note = VL of XENP019507

SEQ ID NO: 9842 - protein, 12 aa, synthetic construct
  REGION 1..12: note = Description of Artificial Sequence: Synthetic peptide
  REGION 1..12: note = XENP019507 vlCDR1
RASQSVGSSYLA

SEQ ID NO: 9843 - protein, 7 aa, synthetic construct
  REGION 1..7: note = Description of Artificial Sequence: Synthetic peptide
  REGION 1..7: note = XENP019507 vlCDR2
GAFSRAT

SEQ ID NO: 9844 - protein, 9 aa, synthetic construct
  REGION 1..9: note = Description of Artificial Sequence: Synthetic peptide
  REGION 1..9: note = XENP019507 vlCDR3
QQYGSSPWT

SEQ ID NO: 9845 - protein, 221 aa, synthetic construct; identical to SEQ ID NO: 7595
  REGION 1..221: note = Description of Artificial Sequence: Synthetic polypeptide
  REGION 1..221: note = XENP019508 [CTLA-4]_H0_L0.89_Fab Heavy Chain

SEQ ID NO: 9846 - protein, 118 aa, synthetic construct; identical to SEQ ID NO: 3737
  REGION 1..118: note = Description of Artificial Sequence: Synthetic polypeptide
  REGION 1..118: note = VH of XENP019508

SEQ ID NO: 9847 - protein, 5 aa, synthetic construct
  REGION 1..5: note = Description of Artificial Sequence: Synthetic peptide
  REGION 1..5: note = XENP019508 vhCDR1
SYTMH

SEQ ID NO: 9848 - protein, 17 aa, synthetic construct
  REGION 1..17: note = Description of Artificial Sequence: Synthetic peptide
  REGION 1..17: note = XENP019508 vhCDR2
FISYDGNNKYYADSVKG

SEQ ID NO: 9849 - protein, 9 aa, synthetic construct
  REGION 1..9: note = Description of Artificial Sequence: Synthetic peptide
  REGION 1..9: note = XENP019508 vhCDR3
TGWLGPFDY

SEQ ID NO: 9850 - protein, 215 aa, synthetic construct
  REGION 1..215: note = Description of Artificial Sequence: Synthetic polypeptide
  REGION 1..215: note = XENP019508 [CTLA-4]_H0_L0.89_Fab Light Chain
EIVLTQSPGTLSLSPGERATLSCRASQSVGSSYLAWYQQKPGQAPRLLIYGAFSRATGIPDRFSGSGSGTDFTLTISRVEPEDFAVYYCQQYGSSPWTFGQGTKVEIKRTVAAPSVFIFPPSDEQLKSGTASVVCLLNNFYPREAKVQWKVDNALQSGNSQESVTEQDSKDSTYSLSSTLTLSKADYEKHKVYACEVTHQGLSSPVTKSFNRGEC

SEQ ID NO: 9851 - protein, 108 aa, synthetic construct; identical to SEQ ID NO: 6886
  REGION 1..108: note = Description of Artificial Sequence: Synthetic polypeptide
  REGION 1..108: note = VL of XENP019508

SEQ ID NO: 9852 - protein, 12 aa, synthetic construct
  REGION 1..12: note = Description of Artificial Sequence: Synthetic peptide
  REGION 1..12: note = XENP019508 vlCDR1
RASQSVGSSYLA

SEQ ID NO: 9853 - protein, 7 aa, synthetic construct
  REGION 1..7: note = Description of Artificial Sequence: Synthetic peptide
  REGION 1..7: note = XENP019508 vlCDR2
GAFSRAT

SEQ ID NO: 9854 - protein, 9 aa, synthetic construct
  REGION 1..9: note = Description of Artificial Sequence: Synthetic peptide
  REGION 1..9: note = XENP019508 vlCDR3
QQYGSSPWT

SEQ ID NO: 9855 - protein, 221 aa, synthetic construct; identical to SEQ ID NO: 7595
  REGION 1..221: note = Description of Artificial Sequence: Synthetic polypeptide
  REGION 1..221: note = XENP019509 [CTLA-4]_H0_L0.90_Fab Heavy Chain

SEQ ID NO: 9856 - protein, 118 aa, synthetic construct; identical to SEQ ID NO: 3737
  REGION 1..118: note = Description of Artificial Sequence: Synthetic polypeptide
  REGION 1..118: note = VH of XENP019509

SEQ ID NO: 9857 - protein, 5 aa, synthetic construct
  REGION 1..5: note = Description of Artificial Sequence: Synthetic peptide
  REGION 1..5: note = XENP019509 vhCDR1
SYTMH

SEQ ID NO: 9858 - protein, 17 aa, synthetic construct
  REGION 1..17: note = Description of Artificial Sequence: Synthetic peptide
  REGION 1..17: note = XENP019509 vhCDR2
FISYDGNNKYYADSVKG

SEQ ID NO: 9859 - protein, 9 aa, synthetic construct
  REGION 1..9: note = Description of Artificial Sequence: Synthetic peptide
  REGION 1..9: note = XENP019509 vhCDR3
TGWLGPFDY

SEQ ID NO: 9860 - protein, 215 aa, synthetic construct
  REGION 1..215: note = Description of Artificial Sequence: Synthetic polypeptide
  REGION 1..215: note = XENP019509 [CTLA-4]_H0_L0.90_Fab Light Chain
EIVLTQSPGTLSLSPGERATLSCRASQSVGSSYLAWYQQKPGQAPRLLIYGAFSRATGIPDRFSGSGSGTDFTLTISRLQPEDFAVYYCQQYGSSPWTFGQGTKVEIKRTVAAPSVFIFPPSDEQLKSGTASVVCLLNNFYPREAKVQWKVDNALQSGNSQESVTEQDSKDSTYSLSSTLTLSKADYEKHKVYACEVTHQGLSSPVTKSFNRGEC

SEQ ID NO: 9861 - protein, 108 aa, synthetic construct; identical to SEQ ID NO: 6895
  REGION 1..108: note = Description of Artificial Sequence: Synthetic polypeptide
  REGION 1..108: note = VL of XENP019509

SEQ ID NO: 9862 - protein, 12 aa, synthetic construct
  REGION 1..12: note = Description of Artificial Sequence: Synthetic peptide
  REGION 1..12: note = XENP019509 vlCDR1
RASQSVGSSYLA

SEQ ID NO: 9863 - protein, 7 aa, synthetic construct
  REGION 1..7: note = Description of Artificial Sequence: Synthetic peptide
  REGION 1..7: note = XENP019509 vlCDR2
GAFSRAT

SEQ ID NO: 9864 - protein, 9 aa, synthetic construct
  REGION 1..9: note = Description of Artificial Sequence: Synthetic peptide
  REGION 1..9: note = XENP019509 vlCDR3
QQYGSSPWT

SEQ ID NO: 9865 - protein, 221 aa, synthetic construct; identical to SEQ ID NO: 7595
  REGION 1..221: note = Description of Artificial Sequence: Synthetic polypeptide
  REGION 1..221: note = XENP019510 [CTLA-4]_H0_L0.91_Fab Heavy Chain

SEQ ID NO: 9866 - protein, 118 aa, synthetic construct; identical to SEQ ID NO: 3737
  REGION 1..118: note = Description of Artificial Sequence: Synthetic polypeptide
  REGION 1..118: note = VH of XENP019510

SEQ ID NO: 9867 - protein, 5 aa, synthetic construct
  REGION 1..5: note = Description of Artificial Sequence: Synthetic peptide
  REGION 1..5: note = XENP019510 vhCDR1
SYTMH

SEQ ID NO: 9868 - protein, 17 aa, synthetic construct
  REGION 1..17: note = Description of Artificial Sequence: Synthetic peptide
  REGION 1..17: note = XENP019510 vhCDR2
FISYDGNNKYYADSVKG

SEQ ID NO: 9869 - protein, 9 aa, synthetic construct
  REGION 1..9: note = Description of Artificial Sequence: Synthetic peptide
  REGION 1..9: note = XENP019510 vhCDR3
TGWLGPFDY

SEQ ID NO: 9870 - protein, 215 aa, synthetic construct
  REGION 1..215: note = Description of Artificial Sequence: Synthetic polypeptide
  REGION 1..215: note = XENP019510 [CTLA-4]_H0_L0.91_Fab Light Chain
EIVLTQSPGTLSLSPGERATLSCRASQSVGSSYLAWYQQKPGQAPRLLIYGAFSRATGIPDRFSGSGSGTDFTLTISRLESEDFAVYYCQQYGSSPWTFGQGTKVEIKRTVAAPSVFIFPPSDEQLKSGTASVVCLLNNFYPREAKVQWKVDNALQSGNSQESVTEQDSKDSTYSLSSTLTLSKADYEKHKVYACEVTHQGLSSPVTKSFNRGEC

SEQ ID NO: 9871 - protein, 108 aa, synthetic construct; identical to SEQ ID NO: 6904
  REGION 1..108: note = Description of Artificial Sequence: Synthetic polypeptide
  REGION 1..108: note = VL of XENP019510

SEQ ID NO: 9872 - protein, 12 aa, synthetic construct
  REGION 1..12: note = Description of Artificial Sequence: Synthetic peptide
  REGION 1..12: note = XENP019510 vlCDR1
RASQSVGSSYLA

SEQ ID NO: 9873 - protein, 7 aa, synthetic construct
  REGION 1..7: note = Description of Artificial Sequence: Synthetic peptide
  REGION 1..7: note = XENP019510 vlCDR2
GAFSRAT

SEQ ID NO: 9874 - protein, 9 aa, synthetic construct
  REGION 1..9: note = Description of Artificial Sequence: Synthetic peptide
  REGION 1..9: note = XENP019510 vlCDR3
QQYGSSPWT

SEQ ID NO: 9875 - protein, 221 aa, synthetic construct; identical to SEQ ID NO: 7595
  REGION 1..221: note = Description of Artificial Sequence: Synthetic polypeptide
  REGION 1..221: note = XENP019511 [CTLA-4]_H0_L0.92_Fab Heavy Chain

SEQ ID NO: 9876 - protein, 118 aa, synthetic construct; identical to SEQ ID NO: 3737
  REGION 1..118: note = Description of Artificial Sequence: Synthetic polypeptide
  REGION 1..118: note = VH of XENP019511

SEQ ID NO: 9877 - protein, 5 aa, synthetic construct
  REGION 1..5: note = Description of Artificial Sequence: Synthetic peptide
  REGION 1..5: note = XENP019511 vhCDR1
SYTMH

SEQ ID NO: 9878 - protein, 17 aa, synthetic construct
  REGION 1..17: note = Description of Artificial Sequence: Synthetic peptide
  REGION 1..17: note = XENP019511 vhCDR2
FISYDGNNKYYADSVKG

SEQ ID NO: 9879 - protein, 9 aa, synthetic construct
  REGION 1..9: note = Description of Artificial Sequence: Synthetic peptide
  REGION 1..9: note = XENP019511 vhCDR3
TGWLGPFDY

SEQ ID NO: 9880 - protein, 215 aa, synthetic construct
  REGION 1..215: note = Description of Artificial Sequence: Synthetic polypeptide
  REGION 1..215: note = XENP019511 [CTLA-4]_H0_L0.92_Fab Light Chain
EIVLTQSPGTLSLSPGERATLSCRASQSVGSSYLAWYQQKPGQAPRLLIYGAFSRATGIPDRFSGSGSGTDFTLTISRLEPQDFAVYYCQQYGSSPWTFGQGTKVEIKRTVAAPSVFIFPPSDEQLKSGTASVVCLLNNFYPREAKVQWKVDNALQSGNSQESVTEQDSKDSTYSLSSTLTLSKADYEKHKVYACEVTHQGLSSPVTKSFNRGEC

SEQ ID NO: 9881 - protein, 108 aa, synthetic construct; identical to SEQ ID NO: 6913
  REGION 1..108: note = Description of Artificial Sequence: Synthetic polypeptide
  REGION 1..108: note = VL of XENP019511

SEQ ID NO: 9882 - protein, 12 aa, synthetic construct
  REGION 1..12: note = Description of Artificial Sequence: Synthetic peptide
  REGION 1..12: note = XENP019511 vlCDR1
RASQSVGSSYLA

SEQ ID NO: 9883 - protein, 7 aa, synthetic construct
  REGION 1..7: note = Description of Artificial Sequence: Synthetic peptide
  REGION 1..7: note = XENP019511 vlCDR2
GAFSRAT

SEQ ID NO: 9884 - protein, 9 aa, synthetic construct
  REGION 1..9: note = Description of Artificial Sequence: Synthetic peptide
  REGION 1..9: note = XENP019511 vlCDR3
QQYGSSPWT

SEQ ID NO: 9885 - protein, 221 aa, synthetic construct; identical to SEQ ID NO: 7595
  REGION 1..221: note = Description of Artificial Sequence: Synthetic polypeptide
  REGION 1..221: note = XENP019512 [CTLA-4]_H0_L0.93_Fab Heavy Chain

SEQ ID NO: 9886 - protein, 118 aa, synthetic construct; identical to SEQ ID NO: 3737
  REGION 1..118: note = Description of Artificial Sequence: Synthetic polypeptide
  REGION 1..118: note = VH of XENP019512

SEQ ID NO: 9887 - protein, 5 aa, synthetic construct
  REGION 1..5: note = Description of Artificial Sequence: Synthetic peptide
  REGION 1..5: note = XENP019512 vhCDR1
SYTMH

SEQ ID NO: 9888 - protein, 17 aa, synthetic construct
  REGION 1..17: note = Description of Artificial Sequence: Synthetic peptide
  REGION 1..17: note = XENP019512 vhCDR2
FISYDGNNKYYADSVKG

SEQ ID NO: 9889 - protein, 9 aa, synthetic construct
  REGION 1..9: note = Description of Artificial Sequence: Synthetic peptide
  REGION 1..9: note = XENP019512 vhCDR3
TGWLGPFDY

SEQ ID NO: 9890 - protein, 215 aa, synthetic construct
  REGION 1..215: note = Description of Artificial Sequence: Synthetic polypeptide
  REGION 1..215: note = XENP019512 [CTLA-4]_H0_L0.93_Fab Light Chain
EIVLTQSPGTLSLSPGERATLSCRASQSVGSSYLAWYQQKPGQAPRLLIYGAFSRATGIPDRFSGSGSGTDFTLTISRLEPEDFAVYYCKQYGSSPWTFGQGTKVEIKRTVAAPSVFIFPPSDEQLKSGTASVVCLLNNFYPREAKVQWKVDNALQSGNSQESVTEQDSKDSTYSLSSTLTLSKADYEKHKVYACEVTHQGLSSPVTKSFNRGEC

SEQ ID NO: 9891 - protein, 108 aa, synthetic construct; identical to SEQ ID NO: 6922
  REGION 1..108: note = Description of Artificial Sequence: Synthetic polypeptide
  REGION 1..108: note = VL of XENP019512

SEQ ID NO: 9892 - protein, 12 aa, synthetic construct
  REGION 1..12: note = Description of Artificial Sequence: Synthetic peptide
  REGION 1..12: note = XENP019512 vlCDR1
RASQSVGSSYLA

SEQ ID NO: 9893 - protein, 7 aa, synthetic construct
  REGION 1..7: note = Description of Artificial Sequence: Synthetic peptide
  REGION 1..7: note = XENP019512 vlCDR2
GAFSRAT

SEQ ID NO: 9894 - protein, 9 aa, synthetic construct
  REGION 1..9: note = Description of Artificial Sequence: Synthetic peptide
  REGION 1..9: note = XENP019512 vlCDR3
KQYGSSPWT

SEQ ID NO: 9895 - protein, 221 aa, synthetic construct; identical to SEQ ID NO: 7595
  REGION 1..221: note = Description of Artificial Sequence: Synthetic polypeptide
  REGION 1..221: note = XENP019513 [CTLA-4]_H0_L0.94_Fab Heavy Chain

SEQ ID NO: 9896 - protein, 118 aa, synthetic construct; identical to SEQ ID NO: 3737
  REGION 1..118: note = Description of Artificial Sequence: Synthetic polypeptide
  REGION 1..118: note = VH of XENP019513

SEQ ID NO: 9897 - protein, 5 aa, synthetic construct
  REGION 1..5: note = Description of Artificial Sequence: Synthetic peptide
  REGION 1..5: note = XENP019513 vhCDR1
SYTMH

SEQ ID NO: 9898 - protein, 17 aa, synthetic construct
  REGION 1..17: note = Description of Artificial Sequence: Synthetic peptide
  REGION 1..17: note = XENP019513 vhCDR2
FISYDGNNKYYADSVKG

SEQ ID NO: 9899 - protein, 9 aa, synthetic construct
  REGION 1..9: note = Description of Artificial Sequence: Synthetic peptide
  REGION 1..9: note = XENP019513 vhCDR3
TGWLGPFDY

SEQ ID NO: 9900 - protein, 215 aa, synthetic construct
  REGION 1..215: note = Description of Artificial Sequence: Synthetic polypeptide
  REGION 1..215: note = XENP019513 [CTLA-4]_H0_L0.94_Fab Light Chain
EIVLTQSPGTLSLSPGERATLSCRASQSVGSSYLAWYQQKPGQAPRLLIYGAFSRATGIPDRFSGSGSGTDFTLTISRLEPEDFAVYYCLQYGSSPWTFGQGTKVEIKRTVAAPSVFIFPPSDEQLKSGTASVVCLLNNFYPREAKVQWKVDNALQSGNSQESVTEQDSKDSTYSLSSTLTLSKADYEKHKVYACEVTHQGLSSPVTKSFNRGEC

SEQ ID NO: 9901 - protein, 108 aa, synthetic construct; identical to SEQ ID NO: 6931
  REGION 1..108: note = Description of Artificial Sequence: Synthetic polypeptide
  REGION 1..108: note = VL of XENP019513

SEQ ID NO: 9902 - protein, 12 aa, synthetic construct
  REGION 1..12: note = Description of Artificial Sequence: Synthetic peptide
  REGION 1..12: note = XENP019513 vlCDR1
RASQSVGSSYLA

SEQ ID NO: 9903 - protein, 7 aa, synthetic construct
  REGION 1..7: note = Description of Artificial Sequence: Synthetic peptide
  REGION 1..7: note = XENP019513 vlCDR2
GAFSRAT

SEQ ID NO: 9904 - protein, 9 aa, synthetic construct
  REGION 1..9: note = Description of Artificial Sequence: Synthetic peptide
  REGION 1..9: note = XENP019513 vlCDR3
LQYGSSPWT

SEQ ID NO: 9905 - protein, 221 aa, synthetic construct; identical to SEQ ID NO: 7595
  REGION 1..221: note = Description of Artificial Sequence: Synthetic polypeptide
  REGION 1..221: note = XENP019514 [CTLA-4]_H0_L0.95_Fab Heavy Chain

SEQ ID NO: 9906 - protein, 118 aa, synthetic construct; identical to SEQ ID NO: 3737
  REGION 1..118: note = Description of Artificial Sequence: Synthetic polypeptide
  REGION 1..118: note = VH of XENP019514

SEQ ID NO: 9907 - protein, 5 aa, synthetic construct
  REGION 1..5: note = Description of Artificial Sequence: Synthetic peptide
  REGION 1..5: note = XENP019514 vhCDR1
SYTMH

SEQ ID NO: 9908 - protein, 17 aa, synthetic construct
  REGION 1..17: note = Description of Artificial Sequence: Synthetic peptide
  REGION 1..17: note = XENP019514 vhCDR2
FISYDGNNKYYADSVKG

SEQ ID NO: 9909 - protein, 9 aa, synthetic construct
  REGION 1..9: note = Description of Artificial Sequence: Synthetic peptide
  REGION 1..9: note = XENP019514 vhCDR3
TGWLGPFDY

SEQ ID NO: 9910 - protein, 215 aa, synthetic construct
  REGION 1..215: note = Description of Artificial Sequence: Synthetic polypeptide
  REGION 1..215: note = XENP019514 [CTLA-4]_H0_L0.95_Fab Light Chain
EIVLTQSPGTLSLSPGERATLSCRASQSVGSSYLAWYQQKPGQAPRLLIYGAFSRATGIPDRFSGSGSGTDFTLTISRLEPEDFAVYYCMQYGSSPWTFGQGTKVEIKRTVAAPSVFIFPPSDEQLKSGTASVVCLLNNFYPREAKVQWKVDNALQSGNSQESVTEQDSKDSTYSLSSTLTLSKADYEKHKVYACEVTHQGLSSPVTKSFNRGEC

SEQ ID NO: 9911 - protein, 108 aa, synthetic construct; identical to SEQ ID NO: 6940
  REGION 1..108: note = Description of Artificial Sequence: Synthetic polypeptide
  REGION 1..108: note = VL of XENP019514

SEQ ID NO: 9912 - protein, 12 aa, synthetic construct
  REGION 1..12: note = Description of Artificial Sequence: Synthetic peptide
  REGION 1..12: note = XENP019514 vlCDR1
RASQSVGSSYLA

SEQ ID NO: 9913 - protein, 7 aa, synthetic construct
  REGION 1..7: note = Description of Artificial Sequence: Synthetic peptide
  REGION 1..7: note = XENP019514 vlCDR2
GAFSRAT

SEQ ID NO: 9914 - protein, 9 aa, synthetic construct
  REGION 1..9: note = Description of Artificial Sequence: Synthetic peptide
  REGION 1..9: note = XENP019514 vlCDR3
MQYGSSPWT

SEQ ID NO: 9915 - protein, 221 aa, synthetic construct; identical to SEQ ID NO: 7595
  REGION 1..221: note = Description of Artificial Sequence: Synthetic polypeptide
  REGION 1..221: note = XENP019515 [CTLA-4]_H0_L0.96_Fab Heavy Chain

SEQ ID NO: 9916 - protein, 118 aa, synthetic construct; identical to SEQ ID NO: 3737
  REGION 1..118: note = Description of Artificial Sequence: Synthetic polypeptide
  REGION 1..118: note = VH of XENP019515

SEQ ID NO: 9917 - protein, 5 aa, synthetic construct
  REGION 1..5: note = Description of Artificial Sequence: Synthetic peptide
  REGION 1..5: note = XENP019515 vhCDR1
SYTMH

SEQ ID NO: 9918 - protein, 17 aa, synthetic construct
  REGION 1..17: note = Description of Artificial Sequence: Synthetic peptide
  REGION 1..17: note = XENP019515 vhCDR2
FISYDGNNKYYADSVKG

SEQ ID NO: 9919 - protein, 9 aa, synthetic construct
  REGION 1..9: note = Description of Artificial Sequence: Synthetic peptide
  REGION 1..9: note = XENP019515 vhCDR3
TGWLGPFDY

SEQ ID NO: 9920 - protein, 215 aa, synthetic construct
  REGION 1..215: note = Description of Artificial Sequence: Synthetic polypeptide
  REGION 1..215: note = XENP019515 [CTLA-4]_H0_L0.96_Fab Light Chain
EIVLTQSPGTLSLSPGERATLSCRASQSVGSSYLAWYQQKPGQAPRLLIYGAFSRATGIPDRFSGSGSGTDFTLTISRLEPEDFAVYYCQSYGSSPWTFGQGTKVEIKRTVAAPSVFIFPPSDEQLKSGTASVVCLLNNFYPREAKVQWKVDNALQSGNSQESVTEQDSKDSTYSLSSTLTLSKADYEKHKVYACEVTHQGLSSPVTKSFNRGEC

SEQ ID NO: 9921 - protein, 108 aa, synthetic construct; identical to SEQ ID NO: 6949
  REGION 1..108: note = Description of Artificial Sequence: Synthetic polypeptide
  REGION 1..108: note = VL of XENP019515

SEQ ID NO: 9922 - protein, 12 aa, synthetic construct
  REGION 1..12: note = Description of Artificial Sequence: Synthetic peptide
  REGION 1..12: note = XENP019515 vlCDR1
RASQSVGSSYLA

SEQ ID NO: 9923 - protein, 7 aa, synthetic construct
  REGION 1..7: note = Description of Artificial Sequence: Synthetic peptide
  REGION 1..7: note = XENP019515 vlCDR2
GAFSRAT

SEQ ID NO: 9924 - protein, 9 aa, synthetic construct
  REGION 1..9: note = Description of Artificial Sequence: Synthetic peptide
  REGION 1..9: note = XENP019515 vlCDR3
QSYGSSPWT

SEQ ID NO: 9925 - protein, 221 aa, synthetic construct; identical to SEQ ID NO: 7595
  REGION 1..221: note = Description of Artificial Sequence: Synthetic polypeptide
  REGION 1..221: note = XENP019516 [CTLA-4]_H0_L0.97_Fab Heavy Chain

SEQ ID NO: 9926 - protein, 118 aa, synthetic construct; identical to SEQ ID NO: 3737
  REGION 1..118: note = Description of Artificial Sequence: Synthetic polypeptide
  REGION 1..118: note = VH of XENP019516

SEQ ID NO: 9927 - protein, 5 aa, synthetic construct
  REGION 1..5: note = Description of Artificial Sequence: Synthetic peptide
  REGION 1..5: note = XENP019516 vhCDR1
SYTMH

SEQ ID NO: 9928 - protein, 17 aa, synthetic construct
  REGION 1..17: note = Description of Artificial Sequence: Synthetic peptide
  REGION 1..17: note = XENP019516 vhCDR2
FISYDGNNKYYADSVKG

SEQ ID NO: 9929 - protein, 9 aa, synthetic construct
  REGION 1..9: note = Description of Artificial Sequence: Synthetic peptide
  REGION 1..9: note = XENP019516 vhCDR3
TGWLGPFDY

SEQ ID NO: 9930 - protein, 215 aa, synthetic construct
  REGION 1..215: note = Description of Artificial Sequence: Synthetic polypeptide
  REGION 1..215: note = XENP019516 [CTLA-4]_H0_L0.97_Fab Light Chain
EIVLTQSPGTLSLSPGERATLSCRASQSVGSSYLAWYQQKPGQAPRLLIYGAFSRATGIPDRFSGSGSGTDFTLTISRLEPEDFAVYYCQQAGSSPWTFGQGTKVEIKRTVAAPSVFIFPPSDEQLKSGTASVVCLLNNFYPREAKVQWKVDNALQSGNSQESVTEQDSKDSTYSLSSTLTLSKADYEKHKVYACEVTHQGLSSPVTKSFNRGEC

SEQ ID NO: 9931 - protein, 108 aa, synthetic construct; identical to SEQ ID NO: 6958
  REGION 1..108: note = Description of Artificial Sequence: Synthetic polypeptide
  REGION 1..108: note = VL of XENP019516

SEQ ID NO: 9932 - protein, 12 aa, synthetic construct
  REGION 1..12: note = Description of Artificial Sequence: Synthetic peptide
  REGION 1..12: note = XENP019516 vlCDR1
RASQSVGSSYLA

SEQ ID NO: 9933 - protein, 7 aa, synthetic construct
  REGION 1..7: note = Description of Artificial Sequence: Synthetic peptide
  REGION 1..7: note = XENP019516 vlCDR2
GAFSRAT

SEQ ID NO: 9934 - protein, 9 aa, synthetic construct
  REGION 1..9: note = Description of Artificial Sequence: Synthetic peptide
  REGION 1..9: note = XENP019516 vlCDR3
QQAGSSPWT

SEQ ID NO: 9935 - protein, 221 aa, synthetic construct; identical to SEQ ID NO: 7595
  REGION 1..221: note = Description of Artificial Sequence: Synthetic polypeptide
  REGION 1..221: note = XENP019517 [CTLA-4]_H0_L0.98_Fab Heavy Chain

SEQ ID NO: 9936 - protein, 118 aa, synthetic construct; identical to SEQ ID NO: 3737
  REGION 1..118: note = Description of Artificial Sequence: Synthetic polypeptide
  REGION 1..118: note = VH of XENP019517

SEQ ID NO: 9937 - protein, 5 aa, synthetic construct
  REGION 1..5: note = Description of Artificial Sequence: Synthetic peptide
  REGION 1..5: note = XENP019517 vhCDR1
SYTMH

SEQ ID NO: 9938 - protein, 17 aa, synthetic construct
  REGION 1..17: note = Description of Artificial Sequence: Synthetic peptide
  REGION 1..17: note = XENP019517 vhCDR2
FISYDGNNKYYADSVKG

SEQ ID NO: 9939 - protein, 9 aa, synthetic construct
  REGION 1..9: note = Description of Artificial Sequence: Synthetic peptide
  REGION 1..9: note = XENP019517 vhCDR3
TGWLGPFDY

SEQ ID NO: 9940 - protein, 215 aa, synthetic construct
  REGION 1..215: note = Description of Artificial Sequence: Synthetic polypeptide
  REGION 1..215: note = XENP019517 [CTLA-4]_H0_L0.98_Fab Light Chain
EIVLTQSPGTLSLSPGERATLSCRASQSVGSSYLAWYQQKPGQAPRLLIYGAFSRATGIPDRFSGSGSGTDFTLTISRLEPEDFAVYYCQQFGSSPWTFGQGTKVEIKRTVAAPSVFIFPPSDEQLKSGTASVVCLLNNFYPREAKVQWKVDNALQSGNSQESVTEQDSKDSTYSLSSTLTLSKADYEKHKVYACEVTHQGLSSPVTKSFNRGEC

SEQ ID NO: 9941 - protein, 108 aa, synthetic construct; identical to SEQ ID NO: 6967
  REGION 1..108: note = Description of Artificial Sequence: Synthetic polypeptide
  REGION 1..108: note = VL of XENP019517

SEQ ID NO: 9942 - protein, 12 aa, synthetic construct
  REGION 1..12: note = Description of Artificial Sequence: Synthetic peptide
  REGION 1..12: note = XENP019517 vlCDR1
RASQSVGSSYLA

SEQ ID NO: 9943 - protein, 7 aa, synthetic construct
  REGION 1..7: note = Description of Artificial Sequence: Synthetic peptide
  REGION 1..7: note = XENP019517 vlCDR2
GAFSRAT

SEQ ID NO: 9944 - protein, 9 aa, synthetic construct
  REGION 1..9: note = Description of Artificial Sequence: Synthetic peptide
  REGION 1..9: note = XENP019517 vlCDR3
QQFGSSPWT

SEQ ID NO: 9945 - protein, 221 aa, synthetic construct; identical to SEQ ID NO: 7595
  REGION 1..221: note = Description of Artificial Sequence: Synthetic polypeptide
  REGION 1..221: note = XENP019518 [CTLA-4]_H0_L0.99_Fab Heavy Chain

SEQ ID NO: 9946 - protein, 118 aa, synthetic construct; identical to SEQ ID NO: 3737
  REGION 1..118: note = Description of Artificial Sequence: Synthetic polypeptide
  REGION 1..118: note = VH of XENP019518

SEQ ID NO: 9947 - protein, 5 aa, synthetic construct
  REGION 1..5: note = Description of Artificial Sequence: Synthetic peptide
  REGION 1..5: note = XENP019518 vhCDR1
SYTMH

SEQ ID NO: 9948 - protein, 17 aa, synthetic construct
  REGION 1..17: note = Description of Artificial Sequence: Synthetic peptide
  REGION 1..17: note = XENP019518 vhCDR2
FISYDGNNKYYADSVKG

SEQ ID NO: 9949 - protein, 9 aa, synthetic construct
  REGION 1..9: note = Description of Artificial Sequence: Synthetic peptide
  REGION 1..9: note = XENP019518 vhCDR3
TGWLGPFDY

SEQ ID NO: 9950 - protein, 215 aa, synthetic construct
  REGION 1..215: note = Description of Artificial Sequence: Synthetic polypeptide
  REGION 1..215: note = XENP019518 [CTLA-4]_H0_L0.99_Fab Light Chain
EIVLTQSPGTLSLSPGERATLSCRASQSVGSSYLAWYQQKPGQAPRLLIYGAFSRATGIPDRFSGSGSGTDFTLTISRLEPEDFAVYYCQQHGSSPWTFGQGTKVEIKRTVAAPSVFIFPPSDEQLKSGTASVVCLLNNFYPREAKVQWKVDNALQSGNSQESVTEQDSKDSTYSLSSTLTLSKADYEKHKVYACEVTHQGLSSPVTKSFNRGEC

SEQ ID NO: 9951 - protein, 108 aa, synthetic construct; identical to SEQ ID NO: 6976
  REGION 1..108: note = Description of Artificial Sequence: Synthetic polypeptide
  REGION 1..108: note = VL of XENP019518

SEQ ID NO: 9952 - protein, 12 aa, synthetic construct
  REGION 1..12: note = Description of Artificial Sequence: Synthetic peptide
  REGION 1..12: note = XENP019518 vlCDR1
RASQSVGSSYLA

SEQ ID NO: 9953 - protein, 7 aa, synthetic construct
  REGION 1..7: note = Description of Artificial Sequence: Synthetic peptide
  REGION 1..7: note = XENP019518 vlCDR2
GAFSRAT

SEQ ID NO: 9954 - protein, 9 aa, synthetic construct
  REGION 1..9: note = Description of Artificial Sequence: Synthetic peptide
  REGION 1..9: note = XENP019518 vlCDR3
QQHGSSPWT

SEQ ID NO: 9955 - protein, 221 aa, synthetic construct; identical to SEQ ID NO: 7595
  REGION 1..221: note = Description of Artificial Sequence: Synthetic polypeptide
  REGION 1..221: note = XENP019519 [CTLA-4]_H0_L0.100_Fab Heavy Chain

SEQ ID NO: 9956 - protein, 118 aa, synthetic construct; identical to SEQ ID NO: 3737
  REGION 1..118: note = Description of Artificial Sequence: Synthetic polypeptide
  REGION 1..118: note = VH of XENP019519

SEQ ID NO: 9957 - protein, 5 aa, synthetic construct
  REGION 1..5: note = Description of Artificial Sequence: Synthetic peptide
  REGION 1..5: note = XENP019519 vhCDR1
SYTMH

SEQ ID NO: 9958 - protein, 17 aa, synthetic construct
  REGION 1..17: note = Description of Artificial Sequence: Synthetic peptide
  REGION 1..17: note = XENP019519 vhCDR2
FISYDGNNKYYADSVKG

SEQ ID NO: 9959 - protein, 9 aa, synthetic construct
  REGION 1..9: note = Description of Artificial Sequence: Synthetic peptide
  REGION 1..9: note = XENP019519 vhCDR3
TGWLGPFDY

SEQ ID NO: 9960 - protein, 215 aa, synthetic construct
  REGION 1..215: note = Description of Artificial Sequence: Synthetic polypeptide
  REGION 1..215: note = XENP019519 [CTLA-4]_H0_L0.100_Fab Light Chain
EIVLTQSPGTLSLSPGERATLSCRASQSVGSSYLAWYQQKPGQAPRLLIYGAFSRATGIPDRFSGSGSGTDFTLTISRLEPEDFAVYYCQQLGSSPWTFGQGTKVEIKRTVAAPSVFIFPPSDEQLKSGTASVVCLLNNFYPREAKVQWKVDNALQSGNSQESVTEQDSKDSTYSLSSTLTLSKADYEKHKVYACEVTHQGLSSPVTKSFNRGEC

SEQ ID NO: 9961 - protein, 108 aa, synthetic construct; identical to SEQ ID NO: 6985
  REGION 1..108: note = Description of Artificial Sequence: Synthetic polypeptide
  REGION 1..108: note = VL of XENP019519

SEQ ID NO: 9962 - protein, 12 aa, synthetic construct
  REGION 1..12: note = Description of Artificial Sequence: Synthetic peptide
  REGION 1..12: note = XENP019519 vlCDR1
RASQSVGSSYLA

SEQ ID NO: 9963 - protein, 7 aa, synthetic construct
  REGION 1..7: note = Description of Artificial Sequence: Synthetic peptide
  REGION 1..7: note = XENP019519 vlCDR2
GAFSRAT

SEQ ID NO: 9964 - protein, 9 aa, synthetic construct
  REGION 1..9: note = Description of Artificial Sequence: Synthetic peptide
  REGION 1..9: note = XENP019519 vlCDR3
QQLGSSPWT

SEQ ID NO: 9965 - protein, 221 aa, synthetic construct; identical to SEQ ID NO: 7595
  REGION 1..221: note = Description of Artificial Sequence: Synthetic polypeptide
  REGION 1..221: note = XENP019520 [CTLA-4]_H0_L0.101_Fab Heavy Chain

SEQ ID NO: 9966 - protein, 118 aa, synthetic construct; identical to SEQ ID NO: 3737
  REGION 1..118: note = Description of Artificial Sequence: Synthetic polypeptide
  REGION 1..118: note = VH of XENP019520

SEQ ID NO: 9967 - protein, 5 aa, synthetic construct
  REGION 1..5: note = Description of Artificial Sequence: Synthetic peptide
  REGION 1..5: note = XENP019520 vhCDR1
SYTMH

SEQ ID NO: 9968 - protein, 17 aa, synthetic construct
  REGION 1..17: note = Description of Artificial Sequence: Synthetic peptide
  REGION 1..17: note = XENP019520 vhCDR2
FISYDGNNKYYADSVKG

SEQ ID NO: 9969 - protein, 9 aa, synthetic construct
  REGION 1..9: note = Description of Artificial Sequence: Synthetic peptide
  REGION 1..9: note = XENP019520 vhCDR3
TGWLGPFDY

SEQ ID NO: 9970 - protein, 215 aa, synthetic construct
  REGION 1..215: note = Description of Artificial Sequence: Synthetic polypeptide
  REGION 1..215: note = XENP019520 [CTLA-4]_H0_L0.101_Fab Light Chain
EIVLTQSPGTLSLSPGERATLSCRASQSVGSSYLAWYQQKPGQAPRLLIYGAFSRATGIPDRFSGSGSGTDFTLTISRLEPEDFAVYYCQQVGSSPWTFGQGTKVEIKRTVAAPSVFIFPPSDEQLKSGTASVVCLLNNFYPREAKVQWKVDNALQSGNSQESVTEQDSKDSTYSLSSTLTLSKADYEKHKVYACEVTHQGLSSPVTKSFNRGEC

SEQ ID NO: 9971 - protein, 108 aa, synthetic construct; identical to SEQ ID NO: 6994
  REGION 1..108: note = Description of Artificial Sequence: Synthetic polypeptide
  REGION 1..108: note = VL of XENP019520

SEQ ID NO: 9972 - protein, 12 aa, synthetic construct
  REGION 1..12: note = Description of Artificial Sequence: Synthetic peptide
  REGION 1..12: note = XENP019520 vlCDR1
RASQSVGSSYLA

SEQ ID NO: 9973 - protein, 7 aa, synthetic construct
  REGION 1..7: note = Description of Artificial Sequence: Synthetic peptide
  REGION 1..7: note = XENP019520 vlCDR2
GAFSRAT

SEQ ID NO: 9974 - protein, 9 aa, synthetic construct
  REGION 1..9: note = Description of Artificial Sequence: Synthetic peptide
  REGION 1..9: note = XENP019520 vlCDR3
QQVGSSPWT

SEQ ID NO: 9975 - protein, 221 aa, synthetic construct; identical to SEQ ID NO: 7595
  REGION 1..221: note = Description of Artificial Sequence: Synthetic polypeptide
  REGION 1..221: note = XENP019521 [CTLA-4]_H0_L0.102_Fab Heavy Chain

SEQ ID NO: 9976 - protein, 118 aa, synthetic construct; identical to SEQ ID NO: 3737
  REGION 1..118: note = Description of Artificial Sequence: Synthetic polypeptide
  REGION 1..118: note = VH of XENP019521

SEQ ID NO: 9977 - protein, 5 aa, synthetic construct
  REGION 1..5: note = Description of Artificial Sequence: Synthetic peptide
  REGION 1..5: note = XENP019521 vhCDR1
SYTMH

SEQ ID NO: 9978 - protein, 17 aa, synthetic construct
  REGION 1..17: note = Description of Artificial Sequence: Synthetic peptide
  REGION 1..17: note = XENP019521 vhCDR2
FISYDGNNKYYADSVKG

SEQ ID NO: 9979 - protein, 9 aa, synthetic construct
  REGION 1..9: note = Description of Artificial Sequence: Synthetic peptide
  REGION 1..9: note = XENP019521 vhCDR3
TGWLGPFDY

SEQ ID NO: 9980 - protein, 215 aa, synthetic construct
  REGION 1..215: note = Description of Artificial Sequence: Synthetic polypeptide
  REGION 1..215: note = XENP019521 [CTLA-4]_H0_L0.102_Fab Light Chain
EIVLTQSPGTLSLSPGERATLSCRASQSVGSSYLAWYQQKPGQAPRLLIYGAFSRATGIPDRFSGSGSGTDFTLTISRLEPEDFAVYYCQQYGESPWTFGQGTKVEIKRTVAAPSVFIFPPSDEQLKSGTASVVCLLNNFYPREAKVQWKVDNALQSGNSQESVTEQDSKDSTYSLSSTLTLSKADYEKHKVYACEVTHQGLSSPVTKSFNRGEC

SEQ ID NO: 9981 - protein, 108 aa, synthetic construct; identical to SEQ ID NO: 7003
  REGION 1..108: note = Description of Artificial Sequence: Synthetic polypeptide
  REGION 1..108: note = VL of XENP019521

SEQ ID NO: 9982 - protein, 12 aa, synthetic construct
  REGION 1..12: note = Description of Artificial Sequence: Synthetic peptide
  REGION 1..12: note = XENP019521 vlCDR1
RASQSVGSSYLA

SEQ ID NO: 9983 - protein, 7 aa, synthetic construct
  REGION 1..7: note = Description of Artificial Sequence: Synthetic peptide
  REGION 1..7: note = XENP019521 vlCDR2
GAFSRAT

SEQ ID NO: 9984 - protein, 9 aa, synthetic construct
  REGION 1..9: note = Description of Artificial Sequence: Synthetic peptide
  REGION 1..9: note = XENP019521 vlCDR3
QQYGESPWT

SEQ ID NO: 9985 - protein, 221 aa, synthetic construct; identical to SEQ ID NO: 7595
  REGION 1..221: note = Description of Artificial Sequence: Synthetic polypeptide
  REGION 1..221: note = XENP019522 [CTLA-4]_H0_L0.103_Fab Heavy Chain

SEQ ID NO: 9986 - protein, 118 aa, synthetic construct; identical to SEQ ID NO: 3737
  REGION 1..118: note = Description of Artificial Sequence: Synthetic polypeptide
  REGION 1..118: note = VH of XENP019522

SEQ ID NO: 9987 - protein, 5 aa, synthetic construct
  REGION 1..5: note = Description of Artificial Sequence: Synthetic peptide
  REGION 1..5: note = XENP019522 vhCDR1
SYTMH

SEQ ID NO: 9988 - protein, 17 aa, synthetic construct
  REGION 1..17: note = Description of Artificial Sequence: Synthetic peptide
  REGION 1..17: note = XENP019522 vhCDR2
FISYDGNNKYYADSVKG

SEQ ID NO: 9989 - protein, 9 aa, synthetic construct
  REGION 1..9: note = Description of Artificial Sequence: Synthetic peptide
  REGION 1..9: note = XENP019522 vhCDR3
TGWLGPFDY

SEQ ID NO: 9990 - protein, 215 aa, synthetic construct
  REGION 1..215: note = Description of Artificial Sequence: Synthetic polypeptide
  REGION 1..215: note = XENP019522 [CTLA-4]_H0_L0.103_Fab Light Chain
EIVLTQSPGTLSLSPGERATLSCRASQSVGSSYLAWYQQKPGQAPRLLIYGAFSRATGIPDRFSGSGSGTDFTLTISRLEPEDFAVYYCQQYGKSPWTFGQGTKVEIKRTVAAPSVFIFPPSDEQLKSGTASVVCLLNNFYPREAKVQWKVDNALQSGNSQESVTEQDSKDSTYSLSSTLTLSKADYEKHKVYACEVTHQGLSSPVTKSFNRGEC

SEQ ID NO: 9991 - protein, 108 aa, synthetic construct; identical to SEQ ID NO: 7012
  REGION 1..108: note = Description of Artificial Sequence: Synthetic polypeptide
  REGION 1..108: note = VL of XENP019522

SEQ ID NO: 9992 - protein, 12 aa, synthetic construct
  REGION 1..12: note = Description of Artificial Sequence: Synthetic peptide
  REGION 1..12: note = XENP019522 vlCDR1
RASQSVGSSYLA

SEQ ID NO: 9993 - protein, 7 aa, synthetic construct
  REGION 1..7: note = Description of Artificial Sequence: Synthetic peptide
  REGION 1..7: note = XENP019522 vlCDR2
GAFSRAT

SEQ ID NO: 9994 - protein, 9 aa, synthetic construct
  REGION 1..9: note = Description of Artificial Sequence: Synthetic peptide
  REGION 1..9: note = XENP019522 vlCDR3
QQYGKSPWT

SEQ ID NO: 9995 - protein, 221 aa, synthetic construct; identical to SEQ ID NO: 7595
  REGION 1..221: note = Description of Artificial Sequence: Synthetic polypeptide
  REGION 1..221: note = XENP019523 [CTLA-4]_H0_L0.104_Fab Heavy Chain

SEQ ID NO: 9996 - protein, 118 aa, synthetic construct; identical to SEQ ID NO: 3737
  REGION 1..118: note = Description of Artificial Sequence: Synthetic polypeptide
  REGION 1..118: note = VH of XENP019523

SEQ ID NO: 9997 - protein, 5 aa, synthetic construct
  REGION 1..5: note = Description of Artificial Sequence: Synthetic peptide
  REGION 1..5: note = XENP019523 vhCDR1
SYTMH

SEQ ID NO: 9998 - protein, 17 aa, synthetic construct
  REGION 1..17: note = Description of Artificial Sequence: Synthetic peptide
  REGION 1..17: note = XENP019523 vhCDR2
FISYDGNNKYYADSVKG

SEQ ID NO: 9999 - protein, 9 aa, synthetic construct
  REGION 1..9: note = Description of Artificial Sequence: Synthetic peptide
  REGION 1..9: note = XENP019523 vhCDR3
TGWLGPFDY

SEQ ID NO: 10000 - protein, 215 aa, synthetic construct
  REGION 1..215: note = Description of Artificial Sequence: Synthetic polypeptide
  REGION 1..215: note = XENP019523 [CTLA-4]_H0_L0.104_Fab Light Chain
EIVLTQSPGTLSLSPGERATLSCRASQSVGSSYLAWYQQKPGQAPRLLIYGAFSRATGIPDRFSGSGSGTDFTLTISRLEPEDFAVYYCQQYGSYPWTFGQGTKVEIKRTVAAPSVFIFPPSDEQLKSGTASVVCLLNNFYPREAKVQWKVDNALQSGNSQESVTEQDSKDSTYSLSSTLTLSKADYEKHKVYACEVTHQGLSSPVTKSFNRGEC

SEQ ID NO: 10001 - protein, 108 aa, synthetic construct; identical to SEQ ID NO: 7021
  REGION 1..108: note = Description of Artificial Sequence: Synthetic polypeptide
  REGION 1..108: note = VL of XENP019523

SEQ ID NO: 10002 - protein, 12 aa, synthetic construct
  REGION 1..12: note = Description of Artificial Sequence: Synthetic peptide
  REGION 1..12: note = XENP019523 vlCDR1
RASQSVGSSYLA

SEQ ID NO: 10003 - protein, 7 aa, synthetic construct
  REGION 1..7: note = Description of Artificial Sequence: Synthetic peptide
  REGION 1..7: note = XENP019523 vlCDR2
GAFSRAT

SEQ ID NO: 10004 - protein, 9 aa, synthetic construct
  REGION 1..9: note = Description of Artificial Sequence: Synthetic peptide
  REGION 1..9: note = XENP019523 vlCDR3
QQYGSYPWT

SEQ ID NO: 10005 - protein, 221 aa, synthetic construct; identical to SEQ ID NO: 7595
  REGION 1..221: note = Description of Artificial Sequence: Synthetic polypeptide
  REGION 1..221: note = XENP019524 [CTLA-4]_H0_L0.105_Fab Heavy Chain

SEQ ID NO: 10006 - protein, 118 aa, synthetic construct; identical to SEQ ID NO: 3737
  REGION 1..118: note = Description of Artificial Sequence: Synthetic polypeptide
  REGION 1..118: note = VH of XENP019524

SEQ ID NO: 10007 - protein, 5 aa, synthetic construct
  REGION 1..5: note = Description of Artificial Sequence: Synthetic peptide
  REGION 1..5: note = XENP019524 vhCDR1
SYTMH

SEQ ID NO: 10008 - protein, 17 aa, synthetic construct
  REGION 1..17: note = Description of Artificial Sequence: Synthetic peptide
  REGION 1..17: note = XENP019524 vhCDR2
FISYDGNNKYYADSVKG

SEQ ID NO: 10009 - protein, 9 aa, synthetic construct
  REGION 1..9: note = Description of Artificial Sequence: Synthetic peptide
  REGION 1..9: note = XENP019524 vhCDR3
TGWLGPFDY

SEQ ID NO: 10010 - protein, 215 aa, synthetic construct
  REGION 1..215: note = Description of Artificial Sequence: Synthetic polypeptide
  REGION 1..215: note = XENP019524 [CTLA-4]_H0_L0.105_Fab Light Chain
EIVLTQSPGTLSLSPGERATLSCRASQSVGSSYLAWYQQKPGQAPRLLIYGAFSRATGIPDRFSGSGSGTDFTLTISRLEPEDFAVYYCQQYGSSHWTFGQGTKVEIKRTVAAPSVFIFPPSDEQLKSGTASVVCLLNNFYPREAKVQWKVDNALQSGNSQESVTEQDSKDSTYSLSSTLTLSKADYEKHKVYACEVTHQGLSSPVTKSFNRGEC

SEQ ID NO: 10011 - protein, 108 aa, synthetic construct; identical to SEQ ID NO: 7030
  REGION 1..108: note = Description of Artificial Sequence: Synthetic polypeptide
  REGION 1..108: note = VL of XENP019524

SEQ ID NO: 10012 - protein, 12 aa, synthetic construct
  REGION 1..12: note = Description of Artificial Sequence: Synthetic peptide
  REGION 1..12: note = XENP019524 vlCDR1
RASQSVGSSYLA

SEQ ID NO: 10013 - protein, 7 aa, synthetic construct
  REGION 1..7: note = Description of Artificial Sequence: Synthetic peptide
  REGION 1..7: note = XENP019524 vlCDR2
GAFSRAT

SEQ ID NO: 10014 - protein, 9 aa, synthetic construct
  REGION 1..9: note = Description of Artificial Sequence: Synthetic peptide
  REGION 1..9: note = XENP019524 vlCDR3
QQYGSSHWT

SEQ ID NO: 10015 - protein, 221 aa, synthetic construct; identical to SEQ ID NO: 7595
  REGION 1..221: note = Description of Artificial Sequence: Synthetic polypeptide
  REGION 1..221: note = XENP019525 [CTLA-4]_H0_L0.106_Fab Heavy Chain

SEQ ID NO: 10016 - protein, 118 aa, synthetic construct; identical to SEQ ID NO: 3737
  REGION 1..118: note = Description of Artificial Sequence: Synthetic polypeptide
  REGION 1..118: note = VH of XENP019525

SEQ ID NO: 10017 - protein, 5 aa, synthetic construct
  REGION 1..5: note = Description of Artificial Sequence: Synthetic peptide
  REGION 1..5: note = XENP019525 vhCDR1
SYTMH

SEQ ID NO: 10018 - protein, 17 aa, synthetic construct
  REGION 1..17: note = Description of Artificial Sequence: Synthetic peptide
  REGION 1..17: note = XENP019525 vhCDR2
FISYDGNNKYYADSVKG

SEQ ID NO: 10019 - protein, 9 aa, synthetic construct
  REGION 1..9: note = Description of Artificial Sequence: Synthetic peptide
  REGION 1..9: note = XENP019525 vhCDR3
TGWLGPFDY

SEQ ID NO: 10020 - protein, 215 aa, synthetic construct
  REGION 1..215: note = Description of Artificial Sequence: Synthetic polypeptide
  REGION 1..215: note = XENP019525 [CTLA-4]_H0_L0.106_Fab Light Chain
EIVLTQSPGTLSLSPGERATLSCRASQSVGSSYLAWYQQKPGQAPRLLIYGAFSRATGIPDRFSGSGSGTDFTLTISRLEPEDFAVYYCQQYGSSPFTFGQGTKVEIKRTVAAPSVFIFPPSDEQLKSGTASVVCLLNNFYPREAKVQWKVDNALQSGNSQESVTEQDSKDSTYSLSSTLTLSKADYEKHKVYACEVTHQGLSSPVTKSFNRGEC

SEQ ID NO: 10021 - protein, 108 aa, synthetic construct; identical to SEQ ID NO: 7039
  REGION 1..108: note = Description of Artificial Sequence: Synthetic polypeptide
  REGION 1..108: note = VL of XENP019525

SEQ ID NO: 10022 - protein, 12 aa, synthetic construct
  REGION 1..12: note = Description of Artificial Sequence: Synthetic peptide
  REGION 1..12: note = XENP019525 vlCDR1
RASQSVGSSYLA

SEQ ID NO: 10023 - protein, 7 aa, synthetic construct
  REGION 1..7: note = Description of Artificial Sequence: Synthetic peptide
  REGION 1..7: note = XENP019525 vlCDR2
GAFSRAT

SEQ ID NO: 10024 - protein, 9 aa, synthetic construct
  REGION 1..9: note = Description of Artificial Sequence: Synthetic peptide
  REGION 1..9: note = XENP019525 vlCDR3
QQYGSSPFT

SEQ ID NO: 10025 - protein, 221 aa, synthetic construct; identical to SEQ ID NO: 7595
  REGION 1..221: note = Description of Artificial Sequence: Synthetic polypeptide
  REGION 1..221: note = XENP019526 [CTLA-4]_H0_L0.107_Fab Heavy Chain

SEQ ID NO: 10026 - protein, 118 aa, synthetic construct; identical to SEQ ID NO: 3737
  REGION 1..118: note = Description of Artificial Sequence: Synthetic polypeptide
  REGION 1..118: note = VH of XENP019526

SEQ ID NO: 10027 - protein, 5 aa, synthetic construct
  REGION 1..5: note = Description of Artificial Sequence: Synthetic peptide
  REGION 1..5: note = XENP019526 vhCDR1
SYTMH

SEQ ID NO: 10028 - protein, 17 aa, synthetic construct
  REGION 1..17: note = Description of Artificial Sequence: Synthetic peptide
  REGION 1..17: note = XENP019526 vhCDR2
FISYDGNNKYYADSVKG

SEQ ID NO: 10029 - protein, 9 aa, synthetic construct
  REGION 1..9: note = Description of Artificial Sequence: Synthetic peptide
  REGION 1..9: note = XENP019526 vhCDR3
TGWLGPFDY

SEQ ID NO: 10030 - protein, 215 aa, synthetic construct
  REGION 1..215: note = Description of Artificial Sequence: Synthetic polypeptide
  REGION 1..215: note = XENP019526 [CTLA-4]_H0_L0.107_Fab Light Chain
EIVLTQSPGTLSLSPGERATLSCRASQSVGSSYLAWYQQKPGQAPRLLIYGAFSRATGIPDRFSGSGSGTDFTLTISRLEPEDFAVYYCQQYGSSPHTFGQGTKVEIKRTVAAPSVFIFPPSDEQLKSGTASVVCLLNNFYPREAKVQWKVDNALQSGNSQESVTEQDSKDSTYSLSSTLTLSKADYEKHKVYACEVTHQGLSSPVTKSFNRGEC

SEQ ID NO: 10031 - protein, 108 aa, synthetic construct; identical to SEQ ID NO: 7048
  REGION 1..108: note = Description of Artificial Sequence: Synthetic polypeptide
  REGION 1..108: note = VL of XENP019526

SEQ ID NO: 10032 - protein, 12 aa, synthetic construct
  REGION 1..12: note = Description of Artificial Sequence: Synthetic peptide
  REGION 1..12: note = XENP019526 vlCDR1
RASQSVGSSYLA

SEQ ID NO: 10033 - protein, 7 aa, synthetic construct
  REGION 1..7: note = Description of Artificial Sequence: Synthetic peptide
  REGION 1..7: note = XENP019526 vlCDR2
GAFSRAT

SEQ ID NO: 10034 - protein, 9 aa, synthetic construct
  REGION 1..9: note = Description of Artificial Sequence: Synthetic peptide
  REGION 1..9: note = XENP019526 vlCDR3
QQYGSSPHT

SEQ ID NO: 10035 - protein, 221 aa, synthetic construct; identical to SEQ ID NO: 7595
  REGION 1..221: note = Description of Artificial Sequence: Synthetic polypeptide
  REGION 1..221: note = XENP019527 [CTLA-4]_H0_L0.108_Fab Heavy Chain

SEQ ID NO: 10036 - protein, 118 aa, synthetic construct; identical to SEQ ID NO: 3737
  REGION 1..118: note = Description of Artificial Sequence: Synthetic polypeptide
  REGION 1..118: note = VH of XENP019527

SEQ ID NO: 10037 - protein, 5 aa, synthetic construct
  REGION 1..5: note = Description of Artificial Sequence: Synthetic peptide
  REGION 1..5: note = XENP019527 vhCDR1
SYTMH

SEQ ID NO: 10038 - protein, 17 aa, synthetic construct
  REGION 1..17: note = Description of Artificial Sequence: Synthetic peptide
  REGION 1..17: note = XENP019527 vhCDR2
FISYDGNNKYYADSVKG

SEQ ID NO: 10039 - protein, 9 aa, synthetic construct
  REGION 1..9: note = Description of Artificial Sequence: Synthetic peptide
  REGION 1..9: note = XENP019527 vhCDR3
TGWLGPFDY

SEQ ID NO: 10040 - protein, 215 aa, synthetic construct
  REGION 1..215: note = Description of Artificial Sequence: Synthetic polypeptide
  REGION 1..215: note = XENP019527 [CTLA-4]_H0_L0.108_Fab Light Chain
EIVLTQSPGTLSLSPGERATLSCRASQSVGSSYLAWYQQKPGQAPRLLIYGAFSRATGIPDRFSGSGSGTDFTLTISRLEPEDFAVYYCQQYGSSPITFGQGTKVEIKRTVAAPSVFIFPPSDEQLKSGTASVVCLLNNFYPREAKVQWKVDNALQSGNSQESVTEQDSKDSTYSLSSTLTLSKADYEKHKVYACEVTHQGLSSPVTKSFNRGEC

SEQ ID NO: 10041 - protein, 108 aa, synthetic construct; identical to SEQ ID NO: 7057
  REGION 1..108: note = Description of Artificial Sequence: Synthetic polypeptide
  REGION 1..108: note = VL of XENP019527

SEQ ID NO: 10042 - protein, 12 aa, synthetic construct
  REGION 1..12: note = Description of Artificial Sequence: Synthetic peptide
  REGION 1..12: note = XENP019527 vlCDR1
RASQSVGSSYLA

SEQ ID NO: 10043 - protein, 7 aa, synthetic construct
  REGION 1..7: note = Description of Artificial Sequence: Synthetic peptide
  REGION 1..7: note = XENP019527 vlCDR2
GAFSRAT

SEQ ID NO: 10044 - protein, 9 aa, synthetic construct
  REGION 1..9: note = Description of Artificial Sequence: Synthetic peptide
  REGION 1..9: note = XENP019527 vlCDR3
QQYGSSPIT

SEQ ID NO: 10045 - protein, 221 aa, synthetic construct; identical to SEQ ID NO: 7595
  REGION 1..221: note = Description of Artificial Sequence: Synthetic polypeptide
  REGION 1..221: note = XENP019528 [CTLA-4]_H0_L0.109_Fab Heavy Chain

SEQ ID NO: 10046 - protein, 118 aa, synthetic construct; identical to SEQ ID NO: 3737
  REGION 1..118: note = Description of Artificial Sequence: Synthetic polypeptide
  REGION 1..118: note = VH of XENP019528

SEQ ID NO: 10047 - protein, 5 aa, synthetic construct
  REGION 1..5: note = Description of Artificial Sequence: Synthetic peptide
  REGION 1..5: note = XENP019528 vhCDR1
SYTMH

SEQ ID NO: 10048 - protein, 17 aa, synthetic construct
  REGION 1..17: note = Description of Artificial Sequence: Synthetic peptide
  REGION 1..17: note = XENP019528 vhCDR2
FISYDGNNKYYADSVKG

SEQ ID NO: 10049 - protein, 9 aa, synthetic construct
  REGION 1..9: note = Description of Artificial Sequence: Synthetic peptide
  REGION 1..9: note = XENP019528 vhCDR3
TGWLGPFDY

SEQ ID NO: 10050 - protein, 215 aa, synthetic construct
  REGION 1..215: note = Description of Artificial Sequence: Synthetic polypeptide
  REGION 1..215: note = XENP019528 [CTLA-4]_H0_L0.109_Fab Light Chain
EIVLTQSPGTLSLSPGERATLSCRASQSVGSSYLAWYQQKPGQAPRLLIYGAFSRATGIPDRFSGSGSGTDFTLTISRLEPEDFAVYYCQQYGSSPLTFGQGTKVEIKRTVAAPSVFIFPPSDEQLKSGTASVVCLLNNFYPREAKVQWKVDNALQSGNSQESVTEQDSKDSTYSLSSTLTLSKADYEKHKVYACEVTHQGLSSPVTKSFNRGEC

SEQ ID NO: 10051 - protein, 108 aa, synthetic construct; identical to SEQ ID NO: 7066
  REGION 1..108: note = Description of Artificial Sequence: Synthetic polypeptide
  REGION 1..108: note = VL of XENP019528

SEQ ID NO: 10052 - protein, 12 aa, synthetic construct
  REGION 1..12: note = Description of Artificial Sequence: Synthetic peptide
  REGION 1..12: note = XENP019528 vlCDR1
RASQSVGSSYLA

SEQ ID NO: 10053 - protein, 7 aa, synthetic construct
  REGION 1..7: note = Description of Artificial Sequence: Synthetic peptide
  REGION 1..7: note = XENP019528 vlCDR2
GAFSRAT

SEQ ID NO: 10054 - protein, 9 aa, synthetic construct
  REGION 1..9: note = Description of Artificial Sequence: Synthetic peptide
  REGION 1..9: note = XENP019528 vlCDR3
QQYGSSPLT

SEQ ID NO: 10055 - protein, 221 aa, synthetic construct; identical to SEQ ID NO: 7595
  REGION 1..221: note = Description of Artificial Sequence: Synthetic polypeptide
  REGION 1..221: note = XENP019529 [CTLA-4]_H0_L0.110_Fab Heavy Chain

SEQ ID NO: 10056 - protein, 118 aa, synthetic construct; identical to SEQ ID NO: 3737
  REGION 1..118: note = Description of Artificial Sequence: Synthetic polypeptide
  REGION 1..118: note = VH of XENP019529

SEQ ID NO: 10057 - protein, 5 aa, synthetic construct
  REGION 1..5: note = Description of Artificial Sequence: Synthetic peptide
  REGION 1..5: note = XENP019529 vhCDR1
SYTMH

SEQ ID NO: 10058 - protein, 17 aa, synthetic construct
  REGION 1..17: note = Description of Artificial Sequence: Synthetic peptide
  REGION 1..17: note = XENP019529 vhCDR2
FISYDGNNKYYADSVKG

SEQ ID NO: 10059 - protein, 9 aa, synthetic construct
  REGION 1..9: note = Description of Artificial Sequence: Synthetic peptide
  REGION 1..9: note = XENP019529 vhCDR3
TGWLGPFDY

SEQ ID NO: 10060 - protein, 215 aa, synthetic construct
  REGION 1..215: note = Description of Artificial Sequence: Synthetic polypeptide
  REGION 1..215: note = XENP019529 [CTLA-4]_H0_L0.110_Fab Light Chain
EIVLTQSPGTLSLSPGERATLSCRASQSVGSSYLAWYQQKPGQAPRLLIYGAFSRATGIPDRFSGSGSGTDFTLTISRLEPEDFAVYYCQQYGSSPYTFGQGTKVEIKRTVAAPSVFIFPPSDEQLKSGTASVVCLLNNFYPREAKVQWKVDNALQSGNSQESVTEQDSKDSTYSLSSTLTLSKADYEKHKVYACEVTHQGLSSPVTKSFNRGEC

SEQ ID NO: 10061 - protein, 108 aa, synthetic construct; identical to SEQ ID NO: 7075
  REGION 1..108: note = Description of Artificial Sequence: Synthetic polypeptide
  REGION 1..108: note = VL of XENP019529

SEQ ID NO: 10062 - protein, 12 aa, synthetic construct
  REGION 1..12: note = Description of Artificial Sequence: Synthetic peptide
  REGION 1..12: note = XENP019529 vlCDR1
RASQSVGSSYLA

SEQ ID NO: 10063 - protein, 7 aa, synthetic construct
  REGION 1..7: note = Description of Artificial Sequence: Synthetic peptide
  REGION 1..7: note = XENP019529 vlCDR2
GAFSRAT

SEQ ID NO: 10064 - protein, 9 aa, synthetic construct
  REGION 1..9: note = Description of Artificial Sequence: Synthetic peptide
  REGION 1..9: note = XENP019529 vlCDR3
QQYGSSPYT

SEQ ID NO: 10065 - protein, 221 aa, synthetic construct; identical to SEQ ID NO: 7595
  REGION 1..221: note = Description of Artificial Sequence: Synthetic polypeptide
  REGION 1..221: note = XENP019530 [CTLA-4]_H0_L0.111_Fab Heavy Chain

SEQ ID NO: 10066 - protein, 118 aa, synthetic construct; identical to SEQ ID NO: 3737
  REGION 1..118: note = Description of Artificial Sequence: Synthetic polypeptide
  REGION 1..118: note = VH of XENP019530

SEQ ID NO: 10067 - protein, 5 aa, synthetic construct
  REGION 1..5: note = Description of Artificial Sequence: Synthetic peptide
  REGION 1..5: note = XENP019530 vhCDR1
SYTMH

SEQ ID NO: 10068 - protein, 17 aa, synthetic construct
  REGION 1..17: note = Description of Artificial Sequence: Synthetic peptide
  REGION 1..17: note = XENP019530 vhCDR2
FISYDGNNKYYADSVKG

SEQ ID NO: 10069 - protein, 9 aa, synthetic construct
  REGION 1..9: note = Description of Artificial Sequence: Synthetic peptide
  REGION 1..9: note = XENP019530 vhCDR3
TGWLGPFDY

SEQ ID NO: 10070 - protein, 215 aa, synthetic construct
  REGION 1..215: note = Description of Artificial Sequence: Synthetic polypeptide
  REGION 1..215: note = XENP019530 [CTLA-4]_H0_L0.111_Fab Light Chain
EIVLTQSPGTLSLSPGERATLSCRASQSVGSSYLAWYQQKPGQAPRLLIYGAFSRATGIPDRFSGSGSGTDFTLTISRLEPEDFAVYYCQQYGSSPWVFGQGTKVEIKRTVAAPSVFIFPPSDEQLKSGTASVVCLLNNFYPREAKVQWKVDNALQSGNSQESVTEQDSKDSTYSLSSTLTLSKADYEKHKVYACEVTHQGLSSPVTKSFNRGEC

SEQ ID NO: 10071 - protein, 108 aa, synthetic construct; identical to SEQ ID NO: 7084
  REGION 1..108: note = Description of Artificial Sequence: Synthetic polypeptide
  REGION 1..108: note = VL of XENP019530

SEQ ID NO: 10072 - protein, 12 aa, synthetic construct
  REGION 1..12: note = Description of Artificial Sequence: Synthetic peptide
  REGION 1..12: note = XENP019530 vlCDR1
RASQSVGSSYLA

SEQ ID NO: 10073 - protein, 7 aa, synthetic construct
  REGION 1..7: note = Description of Artificial Sequence: Synthetic peptide
  REGION 1..7: note = XENP019530 vlCDR2
GAFSRAT

SEQ ID NO: 10074 - protein, 9 aa, synthetic construct
  REGION 1..9: note = Description of Artificial Sequence: Synthetic peptide
  REGION 1..9: note = XENP019530 vlCDR3
QQYGSSPWV

SEQ ID NO: 10075 - protein, 221 aa, synthetic construct; identical to SEQ ID NO: 7595
  REGION 1..221: note = Description of Artificial Sequence: Synthetic polypeptide
  REGION 1..221: note = XENP019531 [CTLA-4]_H0_L0.112_Fab Heavy Chain

SEQ ID NO: 10076 - protein, 118 aa, synthetic construct; identical to SEQ ID NO: 3737
  REGION 1..118: note = Description of Artificial Sequence: Synthetic polypeptide
  REGION 1..118: note = VH of XENP019531

SEQ ID NO: 10077 - protein, 5 aa, synthetic construct
  REGION 1..5: note = Description of Artificial Sequence: Synthetic peptide
  REGION 1..5: note = XENP019531 vhCDR1
SYTMH

SEQ ID NO: 10078 - protein, 17 aa, synthetic construct
  REGION 1..17: note = Description of Artificial Sequence: Synthetic peptide
  REGION 1..17: note = XENP019531 vhCDR2
FISYDGNNKYYADSVKG

SEQ ID NO: 10079 - protein, 9 aa, synthetic construct
  REGION 1..9: note = Description of Artificial Sequence: Synthetic peptide
  REGION 1..9: note = XENP019531 vhCDR3
TGWLGPFDY

SEQ ID NO: 10080 - protein, 215 aa, synthetic construct
  REGION 1..215: note = Description of Artificial Sequence: Synthetic polypeptide
  REGION 1..215: note = XENP019531 [CTLA-4]_H0_L0.112_Fab Light Chain
EIVLTQSPGTLSLSPGERATLSCRASQSVGSSYLAWYQQKPGQAPRLLIYGAFSRATGIPDRFSGSGSGTDFTLTISRLEPEDFAVYYCQQYGSSPWTFGGGTKVEIKRTVAAPSVFIFPPSDEQLKSGTASVVCLLNNFYPREAKVQWKVDNALQSGNSQESVTEQDSKDSTYSLSSTLTLSKADYEKHKVYACEVTHQGLSSPVTKSFNRGEC

SEQ ID NO: 10081 - protein, 108 aa, synthetic construct; identical to SEQ ID NO: 7093
  REGION 1..108: note = Description of Artificial Sequence: Synthetic polypeptide
  REGION 1..108: note = VL of XENP019531

SEQ ID NO: 10082 - protein, 12 aa, synthetic construct
  REGION 1..12: note = Description of Artificial Sequence: Synthetic peptide
  REGION 1..12: note = XENP019531 vlCDR1
RASQSVGSSYLA

SEQ ID NO: 10083 - protein, 7 aa, synthetic construct
  REGION 1..7: note = Description of Artificial Sequence: Synthetic peptide
  REGION 1..7: note = XENP019531 vlCDR2
GAFSRAT

SEQ ID NO: 10084 - protein, 9 aa, synthetic construct
  REGION 1..9: note = Description of Artificial Sequence: Synthetic peptide
  REGION 1..9: note = XENP019531 vlCDR3
QQYGSSPWT

SEQ ID NO: 10085 - protein, 221 aa, synthetic construct; identical to SEQ ID NO: 7595
  REGION 1..221: note = Description of Artificial Sequence: Synthetic polypeptide
  REGION 1..221: note = XENP019532 [CTLA-4]_H0_L0.113_Fab Heavy Chain

SEQ ID NO: 10086 - protein, 118 aa, synthetic construct; identical to SEQ ID NO: 3737
  REGION 1..118: note = Description of Artificial Sequence: Synthetic polypeptide
  REGION 1..118: note = VH of XENP019532

SEQ ID NO: 10087 - protein, 5 aa, synthetic construct
  REGION 1..5: note = Description of Artificial Sequence: Synthetic peptide
  REGION 1..5: note = XENP019532 vhCDR1
SYTMH

SEQ ID NO: 10088 - protein, 17 aa, synthetic construct
  REGION 1..17: note = Description of Artificial Sequence: Synthetic peptide
  REGION 1..17: note = XENP019532 vhCDR2
FISYDGNNKYYADSVKG

SEQ ID NO: 10089 - protein, 9 aa, synthetic construct
  REGION 1..9: note = Description of Artificial Sequence: Synthetic peptide
  REGION 1..9: note = XENP019532 vhCDR3
TGWLGPFDY

SEQ ID NO: 10090 - protein, 215 aa, synthetic construct
  REGION 1..215: note = Description of Artificial Sequence: Synthetic polypeptide
  REGION 1..215: note = XENP019532 [CTLA-4]_H0_L0.113_Fab Light Chain
EIVLTQSPGTLSLSPGERATLSCRASQSVGSSYLAWYQQKPGQAPRLLIYGAFSRATGIPDRFSGSGSGTDFTLTISRLEPEDFAVYYCQQYGSSPWTFGEGTKVEIKRTVAAPSVFIFPPSDEQLKSGTASVVCLLNNFYPREAKVQWKVDNALQSGNSQESVTEQDSKDSTYSLSSTLTLSKADYEKHKVYACEVTHQGLSSPVTKSFNRGEC

SEQ ID NO: 10091 - protein, 108 aa, synthetic construct; identical to SEQ ID NO: 4735
  REGION 1..108: note = Description of Artificial Sequence: Synthetic polypeptide
  REGION 1..108: note = VL of XENP019532

SEQ ID NO: 10092 - protein, 12 aa, synthetic construct
  REGION 1..12: note = Description of Artificial Sequence: Synthetic peptide
  REGION 1..12: note = XENP019532 vlCDR1
RASQSVGSSYLA

SEQ ID NO: 10093 - protein, 7 aa, synthetic construct
  REGION 1..7: note = Description of Artificial Sequence: Synthetic peptide
  REGION 1..7: note = XENP019532 vlCDR2
GAFSRAT

SEQ ID NO: 10094 - protein, 9 aa, synthetic construct
  REGION 1..9: note = Description of Artificial Sequence: Synthetic peptide
  REGION 1..9: note = XENP019532 vlCDR3
QQYGSSPWT

SEQ ID NO: 10095 - protein, 221 aa, synthetic construct
  REGION 1..221: note = Description of Artificial Sequence: Synthetic polypeptide
  REGION 1..221: note = XENP019544 [CTLA-4]_H1_L0_Fab Heavy Chain
EVQLVESGGGLVQPGGSLRLSCAASGFTFSSYTMHWVRQAPGKGLEWVTFISYDGNNKYYVDSVKGRFTISRDNAKNSLYLQMNSLRAEDTAVYYCARTGWLGPFDYWGQGTLVTVSSASTKGPSVFPLAPSSKSTSGGTAALGCLVKDYFPEPVTVSWNSGALTSGVHTFPAVLQSSGLYSLSSVVTVPSSSLGTQTYICNVNHKPSNTKVDKKVEPKSC

SEQ ID NO: 10096 - protein, 118 aa, synthetic construct; identical to SEQ ID NO: 4797
  REGION 1..118: note = Description of Artificial Sequence: Synthetic polypeptide
  REGION 1..118: note = VH of XENP019544

SEQ ID NO: 10097 - protein, 5 aa, synthetic construct
  REGION 1..5: note = Description of Artificial Sequence: Synthetic peptide
  REGION 1..5: note = XENP019544 vhCDR1
SYTMH

SEQ ID NO: 10098 - protein, 17 aa, synthetic construct
  REGION 1..17: note = Description of Artificial Sequence: Synthetic peptide
  REGION 1..17: note = XENP019544 vhCDR2
FISYDGNNKYYVDSVKG

SEQ ID NO: 10099 - protein, 9 aa, synthetic construct
  REGION 1..9: note = Description of Artificial Sequence: Synthetic peptide
  REGION 1..9: note = XENP019544 vhCDR3
TGWLGPFDY

SEQ ID NO: 10100 - protein, 215 aa, synthetic construct; identical to SEQ ID NO: 7600
  REGION 1..215: note = Description of Artificial Sequence: Synthetic polypeptide
  REGION 1..215: note = XENP019544 [CTLA-4]_H1_L0_Fab Light Chain

SEQ ID NO: 10101 - protein, 108 aa, synthetic construct; identical to SEQ ID NO: 3741
  REGION 1..108: note = Description of Artificial Sequence: Synthetic polypeptide
  REGION 1..108: note = VL of XENP019544

SEQ ID NO: 10102 - protein, 12 aa, synthetic construct
  REGION 1..12: note = Description of Artificial Sequence: Synthetic peptide
  REGION 1..12: note = XENP019544 vlCDR1
RASQSVGSSYLA

SEQ ID NO: 10103 - protein, 7 aa, synthetic construct
  REGION 1..7: note = Description of Artificial Sequence: Synthetic peptide
  REGION 1..7: note = XENP019544 vlCDR2
GAFSRAT

SEQ ID NO: 10104 - protein, 9 aa, synthetic construct
  REGION 1..9: note = Description of Artificial Sequence: Synthetic peptide
  REGION 1..9: note = XENP019544 vlCDR3
QQYGSSPWT

SEQ ID NO: 10105 - protein, 221 aa, synthetic construct
  REGION 1..221: note = Description of Artificial Sequence: Synthetic polypeptide
  REGION 1..221: note = XENP019545 [CTLA-4]_H2_L0_Fab Heavy Chain
EVQLVESGGGLVQPGGSLRLSCAASGFTFSSYTMHWVRQAPGKGLEWVTFISYDGNNKYYPGSVKGRFTISRENAKNSLYLQMNSLRAGDTAVYYCARTGWLGPFDYWGQGTLVTVSSASTKGPSVFPLAPSSKSTSGGTAALGCLVKDYFPEPVTVSWNSGALTSGVHTFPAVLQSSGLYSLSSVVTVPSSSLGTQTYICNVNHKPSNTKVDKKVEPKSC

SEQ ID NO: 10106 - protein, 118 aa, synthetic construct; identical to SEQ ID NO: 4806
  REGION 1..118: note = Description of Artificial Sequence: Synthetic polypeptide
  REGION 1..118: note = VH of XENP019545

SEQ ID NO: 10107 - protein, 5 aa, synthetic construct
  REGION 1..5: note = Description of Artificial Sequence: Synthetic peptide
  REGION 1..5: note = XENP019545 vhCDR1
SYTMH

SEQ ID NO: 10108 - protein, 17 aa, synthetic construct
  REGION 1..17: note = Description of Artificial Sequence: Synthetic peptide
  REGION 1..17: note = XENP019545 vhCDR2
FISYDGNNKYYPGSVKG

SEQ ID NO: 10109 - protein, 9 aa, synthetic construct
  REGION 1..9: note = Description of Artificial Sequence: Synthetic peptide
  REGION 1..9: note = XENP019545 vhCDR3
TGWLGPFDY

SEQ ID NO: 10110 - protein, 215 aa, synthetic construct; identical to SEQ ID NO: 7600
  REGION 1..215: note = Description of Artificial Sequence: Synthetic polypeptide
  REGION 1..215: note = XENP019545 [CTLA-4]_H2_L0_Fab Light Chain

SEQ ID NO: 10111 - protein, 108 aa, synthetic construct; identical to SEQ ID NO: 3741
  REGION 1..108: note = Description of Artificial Sequence: Synthetic polypeptide
  REGION 1..108: note = VL of XENP019545

SEQ ID NO: 10112 - protein, 12 aa, synthetic construct
  REGION 1..12: note = Description of Artificial Sequence: Synthetic peptide
  REGION 1..12: note = XENP019545 vlCDR1
RASQSVGSSYLA

SEQ ID NO: 10113 - protein, 7 aa, synthetic construct
  REGION 1..7: note = Description of Artificial Sequence: Synthetic peptide
  REGION 1..7: note = XENP019545 vlCDR2
GAFSRAT

SEQ ID NO: 10114 - protein, 9 aa, synthetic construct
  REGION 1..9: note = Description of Artificial Sequence: Synthetic peptide
  REGION 1..9: note = XENP019545 vlCDR3
QQYGSSPWT

SEQ ID NO: 10115 - protein, 221 aa, synthetic construct
  REGION 1..221: note = Description of Artificial Sequence: Synthetic polypeptide
  REGION 1..221: note = XENP019546 [CTLA-4]_H3_L0_Fab Heavy Chain
EVQLVESGGGLVKPGGSLRLSCAASGFTFSSYTMHWVRQAPGKGLEWVSFISYDGNNKYYADSVKGRFTISRDNAKNSLYLQMNSLRAEDTAVYYCARTGWLGPFDYWGQGTLVTVSSASTKGPSVFPLAPSSKSTSGGTAALGCLVKDYFPEPVTVSWNSGALTSGVHTFPAVLQSSGLYSLSSVVTVPSSSLGTQTYICNVNHKPSNTKVDKKVEPKSC

SEQ ID NO: 10116 - protein, 118 aa, synthetic construct; identical to SEQ ID NO: 2405
  REGION 1..118: note = Description of Artificial Sequence: Synthetic polypeptide
  REGION 1..118: note = VH of XENP019546

SEQ ID NO: 10117 - protein, 5 aa, synthetic construct
  REGION 1..5: note = Description of Artificial Sequence: Synthetic peptide
  REGION 1..5: note = XENP019546 vhCDR1
SYTMH

SEQ ID NO: 10118 - protein, 17 aa, synthetic construct
  REGION 1..17: note = Description of Artificial Sequence: Synthetic peptide
  REGION 1..17: note = XENP019546 vhCDR2
FISYDGNNKYYADSVKG

SEQ ID NO: 10119 - protein, 9 aa, synthetic construct
  REGION 1..9: note = Description of Artificial Sequence: Synthetic peptide
  REGION 1..9: note = XENP019546 vhCDR3
TGWLGPFDY

SEQ ID NO: 10120 - protein, 215 aa, synthetic construct; identical to SEQ ID NO: 7600
  REGION 1..215: note = Description of Artificial Sequence: Synthetic polypeptide
  REGION 1..215: note = XENP019546 [CTLA-4]_H3_L0_Fab Light Chain

SEQ ID NO: 10121 - protein, 108 aa, synthetic construct; identical to SEQ ID NO: 3741
  REGION 1..108: note = Description of Artificial Sequence: Synthetic polypeptide
  REGION 1..108: note = VL of XENP019546

SEQ ID NO: 10122 - protein, 12 aa, synthetic construct
  REGION 1..12: note = Description of Artificial Sequence: Synthetic peptide
  REGION 1..12: note = XENP019546 vlCDR1
RASQSVGSSYLA

SEQ ID NO: 10123 - protein, 7 aa, synthetic construct
  REGION 1..7: note = Description of Artificial Sequence: Synthetic peptide
  REGION 1..7: note = XENP019546 vlCDR2
GAFSRAT

SEQ ID NO: 10124 - protein, 9 aa, synthetic construct
  REGION 1..9: note = Description of Artificial Sequence: Synthetic peptide
  REGION 1..9: note = XENP019546 vlCDR3
QQYGSSPWT

SEQ ID NO: 10125 - protein, 221 aa, synthetic construct
  REGION 1..221: note = Description of Artificial Sequence: Synthetic polypeptide
  REGION 1..221: note = XENP019547 [CTLA-4]_H4_L0_Fab Heavy Chain
EVQLVESGGGLVQPGGSLRLSCAASGFTFSSYTMHWVRQAPGKGLEYVTFISYDGNNKYYADSVKGRFTISRDNSKNTLYLQMGSLRAEDMAVYYCARTGWLGPFDYWGQGTLVTVSSASTKGPSVFPLAPSSKSTSGGTAALGCLVKDYFPEPVTVSWNSGALTSGVHTFPAVLQSSGLYSLSSVVTVPSSSLGTQTYICNVNHKPSNTKVDKKVEPKSC

SEQ ID NO: 10126 - protein, 118 aa, synthetic construct; identical to SEQ ID NO: 4824
  REGION 1..118: note = Description of Artificial Sequence: Synthetic polypeptide
  REGION 1..118: note = VH of XENP019547

SEQ ID NO: 10127 - protein, 5 aa, synthetic construct
  REGION 1..5: note = Description of Artificial Sequence: Synthetic peptide
  REGION 1..5: note = XENP019547 vhCDR1
SYTMH

SEQ ID NO: 10128 - protein, 17 aa, synthetic construct
  REGION 1..17: note = Description of Artificial Sequence: Synthetic peptide
  REGION 1..17: note = XENP019547 vhCDR2
FISYDGNNKYYADSVKG

SEQ ID NO: 10129 - protein, 9 aa, synthetic construct
  REGION 1..9: note = Description of Artificial Sequence: Synthetic peptide
  REGION 1..9: note = XENP019547 vhCDR3
TGWLGPFDY

SEQ ID NO: 10130 - protein, 215 aa, synthetic construct; identical to SEQ ID NO: 7600
  REGION 1..215: note = Description of Artificial Sequence: Synthetic polypeptide
  REGION 1..215: note = XENP019547 [CTLA-4]_H4_L0_Fab Light Chain

SEQ ID NO: 10131 - protein, 108 aa, synthetic construct; identical to SEQ ID NO: 3741
  REGION 1..108: note = Description of Artificial Sequence: Synthetic polypeptide
  REGION 1..108: note = VL of XENP019547

SEQ ID NO: 10132 - protein, 12 aa, synthetic construct
  REGION 1..12: note = Description of Artificial Sequence: Synthetic peptide
  REGION 1..12: note = XENP019547 vlCDR1
RASQSVGSSYLA

SEQ ID NO: 10133 - protein, 7 aa, synthetic construct
  REGION 1..7: note = Description of Artificial Sequence: Synthetic peptide
  REGION 1..7: note = XENP019547 vlCDR2
GAFSRAT

SEQ ID NO: 10134 - protein, 9 aa, synthetic construct
  REGION 1..9: note = Description of Artificial Sequence: Synthetic peptide
  REGION 1..9: note = XENP019547 vlCDR3
QQYGSSPWT

SEQ ID NO: 10135 - protein, 221 aa, synthetic construct; identical to SEQ ID NO: 7595
  REGION 1..221: note = Description of Artificial Sequence: Synthetic polypeptide
  REGION 1..221: note = XENP019548 [CTLA-4]_H0_L1_Fab Heavy Chain

SEQ ID NO: 10136 - protein, 118 aa, synthetic construct; identical to SEQ ID NO: 3737
  REGION 1..118: note = Description of Artificial Sequence: Synthetic polypeptide
  REGION 1..118: note = VH of XENP019548

SEQ ID NO: 10137 - protein, 5 aa, synthetic construct
  REGION 1..5: note = Description of Artificial Sequence: Synthetic peptide
  REGION 1..5: note = XENP019548 vhCDR1
SYTMH

SEQ ID NO: 10138 - protein, 17 aa, synthetic construct
  REGION 1..17: note = Description of Artificial Sequence: Synthetic peptide
  REGION 1..17: note = XENP019548 vhCDR2
FISYDGNNKYYADSVKG

SEQ ID NO: 10139 - protein, 9 aa, synthetic construct
  REGION 1..9: note = Description of Artificial Sequence: Synthetic peptide
  REGION 1..9: note = XENP019548 vhCDR3
TGWLGPFDY

SEQ ID NO: 10140 - protein, 215 aa, synthetic construct
  REGION 1..215: note = Description of Artificial Sequence: Synthetic polypeptide
  REGION 1..215: note = XENP019548 [CTLA-4]_H0_L1_Fab Light Chain
EIVLTQSPATLSLSPGERATLSCGASQSVGSSYLAWYQQKPGLAPRLLIYGAFSRATGIPDRFSGSGSGTDFTLTISRLEPEDFAVYYCQQYGSSPWTFGQGTKVEIKRTVAAPSVFIFPPSDEQLKSGTASVVCLLNNFYPREAKVQWKVDNALQSGNSQESVTEQDSKDSTYSLSSTLTLSKADYEKHKVYACEVTHQGLSSPVTKSFNRGEC

SEQ ID NO: 10141 - protein, 108 aa, synthetic construct; identical to SEQ ID NO: 4834
  REGION 1..108: note = Description of Artificial Sequence: Synthetic polypeptide
  REGION 1..108: note = VL of XENP019548

SEQ ID NO: 10142 - protein, 12 aa, synthetic construct
  REGION 1..12: note = Description of Artificial Sequence: Synthetic peptide
  REGION 1..12: note = XENP019548 vlCDR1
GASQSVGSSYLA

SEQ ID NO: 10143 - protein, 7 aa, synthetic construct
  REGION 1..7: note = Description of Artificial Sequence: Synthetic peptide
  REGION 1..7: note = XENP019548 vlCDR2
GAFSRAT

SEQ ID NO: 10144 - protein, 9 aa, synthetic construct
  REGION 1..9: note = Description of Artificial Sequence: Synthetic peptide
  REGION 1..9: note = XENP019548 vlCDR3
QQYGSSPWT

SEQ ID NO: 10145 - protein, 221 aa, synthetic construct; identical to SEQ ID NO: 7595
  REGION 1..221: note = Description of Artificial Sequence: Synthetic polypeptide
  REGION 1..221: note = XENP019549 [CTLA-4]_H0_L2_Fab Heavy Chain

SEQ ID NO: 10146 - protein, 118 aa, synthetic construct; identical to SEQ ID NO: 3737
  REGION 1..118: note = Description of Artificial Sequence: Synthetic polypeptide
  REGION 1..118: note = VH of XENP019549

SEQ ID NO: 10147 - protein, 5 aa, synthetic construct
  REGION 1..5: note = Description of Artificial Sequence: Synthetic peptide
  REGION 1..5: note = XENP019549 vhCDR1
SYTMH

SEQ ID NO: 10148 - protein, 17 aa, synthetic construct
  REGION 1..17: note = Description of Artificial Sequence: Synthetic peptide
  REGION 1..17: note = XENP019549 vhCDR2
FISYDGNNKYYADSVKG

SEQ ID NO: 10149 - protein, 9 aa, synthetic construct
  REGION 1..9: note = Description of Artificial Sequence: Synthetic peptide
  REGION 1..9: note = XENP019549 vhCDR3
TGWLGPFDY

SEQ ID NO: 10150 - protein, 215 aa, synthetic construct
  REGION 1..215: note = Description of Artificial Sequence: Synthetic polypeptide
  REGION 1..215: note = XENP019549 [CTLA-4]_H0_L2_Fab Light Chain
EIVMTQSPATLSVSPGERATLSCRASQSVGSSYLAWYQQKPGQAPRLLIYGAFSRATGIPARFSGSGSGTEFTLTISSLQSEDFAVYYCQQYGSSPWTFGQGTKVEIKRTVAAPSVFIFPPSDEQLKSGTASVVCLLNNFYPREAKVQWKVDNALQSGNSQESVTEQDSKDSTYSLSSTLTLSKADYEKHKVYACEVTHQGLSSPVTKSFNRGEC

SEQ ID NO: 10151 - protein, 108 aa, synthetic construct; identical to SEQ ID NO: 4843
  REGION 1..108: note = Description of Artificial Sequence: Synthetic polypeptide
  REGION 1..108: note = VL of XENP019549

SEQ ID NO: 10152 - protein, 12 aa, synthetic construct
  REGION 1..12: note = Description of Artificial Sequence: Synthetic peptide
  REGION 1..12: note = XENP019549 vlCDR1
RASQSVGSSYLA

SEQ ID NO: 10153 - protein, 7 aa, synthetic construct
  REGION 1..7: note = Description of Artificial Sequence: Synthetic peptide
  REGION 1..7: note = XENP019549 vlCDR2
GAFSRAT

SEQ ID NO: 10154 - protein, 9 aa, synthetic construct
  REGION 1..9: note = Description of Artificial Sequence: Synthetic peptide
  REGION 1..9: note = XENP019549 vlCDR3
QQYGSSPWT

SEQ ID NO: 10155 - protein, 221 aa, synthetic construct
  REGION 1..221: note = Description of Artificial Sequence: Synthetic polypeptide
  REGION 1..221: note = XENP019585 [CTLA-4]_H0.140_L0_Fab Heavy Chain
QVQLVESGGGVVQPGRSLRLSCAASGFTFSSYTMHWVRQAPGKGLEWVCFISYDGNNKYYADSVKGRFTCSRDNSKNTLYLQMNSLRAEDTAIYYCARTGWLGPFDYWGQGTLVTVSSASTKGPSVFPLAPSSKSTSGGTAALGCLVKDYFPEPVTVSWNSGALTSGVHTFPAVLQSSGLYSLSSVVTVPSSSLGTQTYICNVNHKPSNTKVDKKVEPKSC

SEQ ID NO: 10156 - protein, 118 aa, synthetic construct; identical to SEQ ID NO: 4851
  REGION 1..118: note = Description of Artificial Sequence: Synthetic polypeptide
  REGION 1..118: note = VH of XENP019585

SEQ ID NO: 10157 - protein, 5 aa, synthetic construct
  REGION 1..5: note = Description of Artificial Sequence: Synthetic peptide
  REGION 1..5: note = XENP019585 vhCDR1
SYTMH

SEQ ID NO: 10158 - protein, 17 aa, synthetic construct
  REGION 1..17: note = Description of Artificial Sequence: Synthetic peptide
  REGION 1..17: note = XENP019585 vhCDR2
FISYDGNNKYYADSVKG

SEQ ID NO: 10159 - protein, 9 aa, synthetic construct
  REGION 1..9: note = Description of Artificial Sequence: Synthetic peptide
  REGION 1..9: note = XENP019585 vhCDR3
TGWLGPFDY

SEQ ID NO: 10160 - protein, 215 aa, synthetic construct; identical to SEQ ID NO: 7600
  REGION 1..215: note = Description of Artificial Sequence: Synthetic polypeptide
  REGION 1..215: note = XENP019585 [CTLA-4]_H0.140_L0_Fab Light Chain

SEQ ID NO: 10161 - protein, 108 aa, synthetic construct; identical to SEQ ID NO: 3741
  REGION 1..108: note = Description of Artificial Sequence: Synthetic polypeptide
  REGION 1..108: note = VL of XENP019585

SEQ ID NO: 10162 - protein, 12 aa, synthetic construct
  REGION 1..12: note = Description of Artificial Sequence: Synthetic peptide
  REGION 1..12: note = XENP019585 vlCDR1
RASQSVGSSYLA

SEQ ID NO: 10163 - protein, 7 aa, synthetic construct
  REGION 1..7: note = Description of Artificial Sequence: Synthetic peptide
  REGION 1..7: note = XENP019585 vlCDR2
GAFSRAT

SEQ ID NO: 10164 - protein, 9 aa, synthetic construct
  REGION 1..9: note = Description of Artificial Sequence: Synthetic peptide
  REGION 1..9: note = XENP019585 vlCDR3
QQYGSSPWT

SEQ ID NO: 10165 - protein, 221 aa, synthetic construct; identical to SEQ ID NO: 7595
  REGION 1..221: note = Description of Artificial Sequence: Synthetic polypeptide
  REGION 1..221: note = XENP019586 [CTLA-4]_H0_L0.117_Fab Heavy Chain

SEQ ID NO: 10166 - protein, 118 aa, synthetic construct; identical to SEQ ID NO: 3737
  REGION 1..118: note = Description of Artificial Sequence: Synthetic polypeptide
  REGION 1..118: note = VH of XENP019586

SEQ ID NO: 10167 - protein, 5 aa, synthetic construct
  REGION 1..5: note = Description of Artificial Sequence: Synthetic peptide
  REGION 1..5: note = XENP019586 vhCDR1
SYTMH

SEQ ID NO: 10168 - protein, 17 aa, synthetic construct
  REGION 1..17: note = Description of Artificial Sequence: Synthetic peptide
  REGION 1..17: note = XENP019586 vhCDR2
FISYDGNNKYYADSVKG

SEQ ID NO: 10169 - protein, 9 aa, synthetic construct
  REGION 1..9: note = Description of Artificial Sequence: Synthetic peptide
  REGION 1..9: note = XENP019586 vhCDR3
TGWLGPFDY

SEQ ID NO: 10170 - protein, 215 aa, synthetic construct
  REGION 1..215: note = Description of Artificial Sequence: Synthetic polypeptide
  REGION 1..215: note = XENP019586 [CTLA-4]_H0_L0.117_Fab Light Chain
EIVLTQSPGTLSLSPGERATLSCRASQSVGSSYLAWYQQKPGQAPRLLCYGAFSRATGIPDRFSCSGSGTDFTLTISRLEPEDFAVYYCQQYGSSPWTFGQGTKVEIKRTVAAPSVFIFPPSDEQLKSGTASVVCLLNNFYPREAKVQWKVDNALQSGNSQESVTEQDSKDSTYSLSSTLTLSKADYEKHKVYACEVTHQGLSSPVTKSFNRGEC

SEQ ID NO: 10171 - protein, 108 aa, synthetic construct; identical to SEQ ID NO: 4861
  REGION 1..108: note = Description of Artificial Sequence: Synthetic polypeptide
  REGION 1..108: note = VL of XENP019586

SEQ ID NO: 10172 - protein, 12 aa, synthetic construct
  REGION 1..12: note = Description of Artificial Sequence: Synthetic peptide
  REGION 1..12: note = XENP019586 vlCDR1
RASQSVGSSYLA

SEQ ID NO: 10173 - protein, 7 aa, synthetic construct
  REGION 1..7: note = Description of Artificial Sequence: Synthetic peptide
  REGION 1..7: note = XENP019586 vlCDR2
GAFSRAT

SEQ ID NO: 10174 - protein, 9 aa, synthetic construct
  REGION 1..9: note = Description of Artificial Sequence: Synthetic peptide
  REGION 1..9: note = XENP019586 vlCDR3
QQYGSSPWT

SEQ ID NO: 10175 - protein, 221 aa, synthetic construct; identical to SEQ ID NO: 8935
  REGION 1..221: note = Description of Artificial Sequence: Synthetic polypeptide
  REGION 1..221: note = XENP020006 [CTLA-4]_H0.134_L0.53_Fab Heavy Chain

SEQ ID NO: 10176 - protein, 118 aa, synthetic construct; identical to SEQ ID NO: 4743
  REGION 1..118: note = Description of Artificial Sequence: Synthetic polypeptide
  REGION 1..118: note = VH of XENP020006

SEQ ID NO: 10177 - protein, 5 aa, synthetic construct
  REGION 1..5: note = Description of Artificial Sequence: Synthetic peptide
  REGION 1..5: note = XENP020006 vhCDR1
SYTMH

SEQ ID NO: 10178 - protein, 17 aa, synthetic construct
  REGION 1..17: note = Description of Artificial Sequence: Synthetic peptide
  REGION 1..17: note = XENP020006 vhCDR2
FISYDGNNKYYADSVKG

SEQ ID NO: 10179 - protein, 9 aa, synthetic construct
  REGION 1..9: note = Description of Artificial Sequence: Synthetic peptide
  REGION 1..9: note = XENP020006 vhCDR3
TGWLGPFDY

SEQ ID NO: 10180 - protein, 215 aa, synthetic construct; identical to SEQ ID NO: 9490
  REGION 1..215: note = Description of Artificial Sequence: Synthetic polypeptide
  REGION 1..215: note = XENP020006 [CTLA-4]_H0.134_L0.53_Fab Light Chain

SEQ ID NO: 10181 - protein, 108 aa, synthetic construct; identical to SEQ ID NO: 4753
  REGION 1..108: note = Description of Artificial Sequence: Synthetic polypeptide
  REGION 1..108: note = VL of XENP020006

SEQ ID NO: 10182 - protein, 12 aa, synthetic construct
  REGION 1..12: note = Description of Artificial Sequence: Synthetic peptide
  REGION 1..12: note = XENP020006 vlCDR1
RASQSVGSSYLA

SEQ ID NO: 10183 - protein, 7 aa, synthetic construct
  REGION 1..7: note = Description of Artificial Sequence: Synthetic peptide
  REGION 1..7: note = XENP020006 vlCDR2
GAFSRAT

SEQ ID NO: 10184 - protein, 9 aa, synthetic construct
  REGION 1..9: note = Description of Artificial Sequence: Synthetic peptide
  REGION 1..9: note = XENP020006 vlCDR3
QQYGSSPWT

SEQ ID NO: 10185 - protein, 221 aa, synthetic construct; identical to SEQ ID NO: 10115
  REGION 1..221: note = Description of Artificial Sequence: Synthetic polypeptide
  REGION 1..221: note = XENP020007 [CTLA-4]_H3_L1_Fab Heavy Chain

SEQ ID NO: 10186 - protein, 118 aa, synthetic construct; identical to SEQ ID NO: 2405
  REGION 1..118: note = Description of Artificial Sequence: Synthetic polypeptide
  REGION 1..118: note = VH of XENP020007

SEQ ID NO: 10187 - protein, 5 aa, synthetic construct
  REGION 1..5: note = Description of Artificial Sequence: Synthetic peptide
  REGION 1..5: note = XENP020007 vhCDR1
SYTMH

SEQ ID NO: 10188 - protein, 17 aa, synthetic construct
  REGION 1..17: note = Description of Artificial Sequence: Synthetic peptide
  REGION 1..17: note = XENP020007 vhCDR2
FISYDGNNKYYADSVKG

SEQ ID NO: 10189 - protein, 9 aa, synthetic construct
  REGION 1..9: note = Description of Artificial Sequence: Synthetic peptide
  REGION 1..9: note = XENP020007 vhCDR3
TGWLGPFDY

SEQ ID NO: 10190 - protein, 215 aa, synthetic construct; identical to SEQ ID NO: 10140
  REGION 1..215: note = Description of Artificial Sequence: Synthetic polypeptide
  REGION 1..215: note = XENP020007 [CTLA-4]_H3_L1_Fab Light Chain

SEQ ID NO: 10191 - protein, 108 aa, synthetic construct; identical to SEQ ID NO: 4834
  REGION 1..108: note = Description of Artificial Sequence: Synthetic polypeptide
  REGION 1..108: note = VL of XENP020007

SEQ ID NO: 10192 - protein, 12 aa, synthetic construct
  REGION 1..12: note = Description of Artificial Sequence: Synthetic peptide
  REGION 1..12: note = XENP020007 vlCDR1
GASQSVGSSYLA

SEQ ID NO: 10193 - protein, 7 aa, synthetic construct
  REGION 1..7: note = Description of Artificial Sequence: Synthetic peptide
  REGION 1..7: note = XENP020007 vlCDR2
GAFSRAT

SEQ ID NO: 10194 - protein, 9 aa, synthetic construct
  REGION 1..9: note = Description of Artificial Sequence: Synthetic peptide
  REGION 1..9: note = XENP020007 vlCDR3
QQYGSSPWT

SEQ ID NO: 10195 - protein, 221 aa, synthetic construct; identical to SEQ ID NO: 10115
  REGION 1..221: note = Description of Artificial Sequence: Synthetic polypeptide
  REGION 1..221: note = XENP020008 [CTLA-4]_H3_L2_Fab Heavy Chain

SEQ ID NO: 10196 - protein, 118 aa, synthetic construct; identical to SEQ ID NO: 2405
  REGION 1..118: note = Description of Artificial Sequence: Synthetic polypeptide
  REGION 1..118: note = VH of XENP020008

SEQ ID NO: 10197 - protein, 5 aa, synthetic construct
  REGION 1..5: note = Description of Artificial Sequence: Synthetic peptide
  REGION 1..5: note = XENP020008 vhCDR1
SYTMH

SEQ ID NO: 10198 - protein, 17 aa, synthetic construct
  REGION 1..17: note = Description of Artificial Sequence: Synthetic peptide
  REGION 1..17: note = XENP020008 vhCDR2
FISYDGNNKYYADSVKG

SEQ ID NO: 10199 - protein, 9 aa, synthetic construct
  REGION 1..9: note = Description of Artificial Sequence: Synthetic peptide
  REGION 1..9: note = XENP020008 vhCDR3
TGWLGPFDY

SEQ ID NO: 10200 - protein, 215 aa, synthetic construct; identical to SEQ ID NO: 10150
  REGION 1..215: note = Description of Artificial Sequence: Synthetic polypeptide
  REGION 1..215: note = XENP020008 [CTLA-4]_H3_L2_Fab Light Chain

SEQ ID NO: 10201 - protein, 108 aa, synthetic construct; identical to SEQ ID NO: 4843
  REGION 1..108: note = Description of Artificial Sequence: Synthetic polypeptide
  REGION 1..108: note = VL of XENP020008

SEQ ID NO: 10202 - protein, 12 aa, synthetic construct
  REGION 1..12: note = Description of Artificial Sequence: Synthetic peptide
  REGION 1..12: note = XENP020008 vlCDR1
RASQSVGSSYLA

SEQ ID NO: 10203 - protein, 7 aa, synthetic construct
  REGION 1..7: note = Description of Artificial Sequence: Synthetic peptide
  REGION 1..7: note = XENP020008 vlCDR2
GAFSRAT

SEQ ID NO: 10204 - protein, 9 aa, synthetic construct
  REGION 1..9: note = Description of Artificial Sequence: Synthetic peptide
  REGION 1..9: note = XENP020008 vlCDR3
QQYGSSPWT

SEQ ID NO: 10205 - protein, 221 aa, synthetic construct; identical to SEQ ID NO: 10115
  REGION 1..221: note = Description of Artificial Sequence: Synthetic polypeptide
  REGION 1..221: note = XENP020009 [CTLA-4]_H3_L0.12_Fab Heavy Chain

SEQ ID NO: 10206 - protein, 118 aa, synthetic construct; identical to SEQ ID NO: 2405
  REGION 1..118: note = Description of Artificial Sequence: Synthetic polypeptide
  REGION 1..118: note = VH of XENP020009

SEQ ID NO: 10207 - protein, 5 aa, synthetic construct
  REGION 1..5: note = Description of Artificial Sequence: Synthetic peptide
  REGION 1..5: note = XENP020009 vhCDR1
SYTMH

SEQ ID NO: 10208 - protein, 17 aa, synthetic construct
  REGION 1..17: note = Description of Artificial Sequence: Synthetic peptide
  REGION 1..17: note = XENP020009 vhCDR2
FISYDGNNKYYADSVKG

SEQ ID NO: 10209 - protein, 9 aa, synthetic construct
  REGION 1..9: note = Description of Artificial Sequence: Synthetic peptide
  REGION 1..9: note = XENP020009 vhCDR3
TGWLGPFDY

SEQ ID NO: 10210 - protein, 215 aa, synthetic construct; identical to SEQ ID NO: 9080
  REGION 1..215: note = Description of Artificial Sequence: Synthetic polypeptide
  REGION 1..215: note = XENP020009 [CTLA-4]_H3_L0.12_Fab Light Chain

SEQ ID NO: 10211 - protein, 108 aa, synthetic construct; identical to SEQ ID NO: 6193
  REGION 1..108: note = Description of Artificial Sequence: Synthetic polypeptide
  REGION 1..108: note = VL of XENP020009

SEQ ID NO: 10212 - protein, 12 aa, synthetic construct
  REGION 1..12: note = Description of Artificial Sequence: Synthetic peptide
  REGION 1..12: note = XENP020009 vlCDR1
RASQSVGSSYLA

SEQ ID NO: 10213 - protein, 7 aa, synthetic construct
  REGION 1..7: note = Description of Artificial Sequence: Synthetic peptide
  REGION 1..7: note = XENP020009 vlCDR2
GAFSRAT

SEQ ID NO: 10214 - protein, 9 aa, synthetic construct
  REGION 1..9: note = Description of Artificial Sequence: Synthetic peptide
  REGION 1..9: note = XENP020009 vlCDR3
QQYGSSPWT

SEQ ID NO: 10215 - protein, 221 aa, synthetic construct; identical to SEQ ID NO: 10115
  REGION 1..221: note = Description of Artificial Sequence: Synthetic polypeptide
  REGION 1..221: note = XENP020010 [CTLA-4]_H3_L0.18_Fab Heavy Chain

SEQ ID NO: 10216 - protein, 118 aa, synthetic construct; identical to SEQ ID NO: 2405
  REGION 1..118: note = Description of Artificial Sequence: Synthetic polypeptide
  REGION 1..118: note = VH of XENP020010

SEQ ID NO: 10217 - protein, 5 aa, synthetic construct
  REGION 1..5: note = Description of Artificial Sequence: Synthetic peptide
  REGION 1..5: note = XENP020010 vhCDR1
SYTMH

SEQ ID NO: 10218 - protein, 17 aa, synthetic construct
  REGION 1..17: note = Description of Artificial Sequence: Synthetic peptide
  REGION 1..17: note = XENP020010 vhCDR2
FISYDGNNKYYADSVKG

SEQ ID NO: 10219 - protein, 9 aa, synthetic construct
  REGION 1..9: note = Description of Artificial Sequence: Synthetic peptide
  REGION 1..9: note = XENP020010 vhCDR3
TGWLGPFDY

SEQ ID NO: 10220 - protein, 215 aa, synthetic construct; identical to SEQ ID NO: 9140
  REGION 1..215: note = Description of Artificial Sequence: Synthetic polypeptide
  REGION 1..215: note = XENP020010 [CTLA-4]_H3_L0.18_Fab Light Chain

SEQ ID NO: 10221 - protein, 108 aa, synthetic construct; identical to SEQ ID NO: 6247
  REGION 1..108: note = Description of Artificial Sequence: Synthetic polypeptide
  REGION 1..108: note = VL of XENP020010

SEQ ID NO: 10222 - protein, 12 aa, synthetic construct
  REGION 1..12: note = Description of Artificial Sequence: Synthetic peptide
  REGION 1..12: note = XENP020010 vlCDR1
RSSQSVGSSYLA

SEQ ID NO: 10223 - protein, 7 aa, synthetic construct
  REGION 1..7: note = Description of Artificial Sequence: Synthetic peptide
  REGION 1..7: note = XENP020010 vlCDR2
GAFSRAT

SEQ ID NO: 10224 - protein, 9 aa, synthetic construct
  REGION 1..9: note = Description of Artificial Sequence: Synthetic peptide
  REGION 1..9: note = XENP020010 vlCDR3
QQYGSSPWT

SEQ ID NO: 10225 - protein, 221 aa, synthetic construct; identical to SEQ ID NO: 10115
  REGION 1..221: note = Description of Artificial Sequence: Synthetic polypeptide
  REGION 1..221: note = XENP020011 [CTLA-4]_H3_L0.22_Fab Heavy Chain

SEQ ID NO: 10226 - protein, 118 aa, synthetic construct; identical to SEQ ID NO: 2405
  REGION 1..118: note = Description of Artificial Sequence: Synthetic polypeptide
  REGION 1..118: note = VH of XENP020011

SEQ ID NO: 10227 - protein, 5 aa, synthetic construct
  REGION 1..5: note = Description of Artificial Sequence: Synthetic peptide
  REGION 1..5: note = XENP020011 vhCDR1
SYTMH

SEQ ID NO: 10228 - protein, 17 aa, synthetic construct
  REGION 1..17: note = Description of Artificial Sequence: Synthetic peptide
  REGION 1..17: note = XENP020011 vhCDR2
FISYDGNNKYYADSVKG

SEQ ID NO: 10229 - protein, 9 aa, synthetic construct
  REGION 1..9: note = Description of Artificial Sequence: Synthetic peptide
  REGION 1..9: note = XENP020011 vhCDR3
TGWLGPFDY

SEQ ID NO: 10230 - protein, 215 aa, synthetic construct; identical to SEQ ID NO: 2410
  REGION 1..215: note = Description of Artificial Sequence: Synthetic polypeptide
  REGION 1..215: note = XENP020011 [CTLA-4]_H3_L0.22_Fab Light Chain

SEQ ID NO: 10231 - protein, 108 aa, synthetic construct; identical to SEQ ID NO: 2411
  REGION 1..108: note = Description of Artificial Sequence: Synthetic polypeptide
  REGION 1..108: note = VL of XENP020011

SEQ ID NO: 10232 - protein, 12 aa, synthetic construct
  REGION 1..12: note = Description of Artificial Sequence: Synthetic peptide
  REGION 1..12: note = XENP020011 vlCDR1
RASQSVSSSYLA

SEQ ID NO: 10233 - protein, 7 aa, synthetic construct
  REGION 1..7: note = Description of Artificial Sequence: Synthetic peptide
  REGION 1..7: note = XENP020011 vlCDR2
GAFSRAT

SEQ ID NO: 10234 - protein, 9 aa, synthetic construct
  REGION 1..9: note = Description of Artificial Sequence: Synthetic peptide
  REGION 1..9: note = XENP020011 vlCDR3
QQYGSSPWT

SEQ ID NO: 10235 - protein, 221 aa, synthetic construct; identical to SEQ ID NO: 10115
  REGION 1..221: note = Description of Artificial Sequence: Synthetic polypeptide
  REGION 1..221: note = XENP020012 [CTLA-4]_H3_L0.27_Fab Heavy Chain

SEQ ID NO: 10236 - protein, 118 aa, synthetic construct; identical to SEQ ID NO: 2405
  REGION 1..118: note = Description of Artificial Sequence: Synthetic polypeptide
  REGION 1..118: note = VH of XENP020012

SEQ ID NO: 10237 - protein, 5 aa, synthetic construct
  REGION 1..5: note = Description of Artificial Sequence: Synthetic peptide
  REGION 1..5: note = XENP020012 vhCDR1
SYTMH

SEQ ID NO: 10238 - protein, 17 aa, synthetic construct
  REGION 1..17: note = Description of Artificial Sequence: Synthetic peptide
  REGION 1..17: note = XENP020012 vhCDR2
FISYDGNNKYYADSVKG

SEQ ID NO: 10239 - protein, 9 aa, synthetic construct
  REGION 1..9: note = Description of Artificial Sequence: Synthetic peptide
  REGION 1..9: note = XENP020012 vhCDR3
TGWLGPFDY

SEQ ID NO: 10240 - protein, 215 aa, synthetic construct; identical to SEQ ID NO: 9230
  REGION 1..215: note = Description of Artificial Sequence: Synthetic polypeptide
  REGION 1..215: note = XENP020012 [CTLA-4]_H3_L0.27_Fab Light Chain

SEQ ID NO: 10241 - protein, 108 aa, synthetic construct; identical to SEQ ID NO: 6328
  REGION 1..108: note = Description of Artificial Sequence: Synthetic polypeptide
  REGION 1..108: note = VL of XENP020012

SEQ ID NO: 10242 - protein, 12 aa, synthetic construct
  REGION 1..12: note = Description of Artificial Sequence: Synthetic peptide
  REGION 1..12: note = XENP020012 vlCDR1
RASQSVGQSYLA

SEQ ID NO: 10243 - protein, 7 aa, synthetic construct
  REGION 1..7: note = Description of Artificial Sequence: Synthetic peptide
  REGION 1..7: note = XENP020012 vlCDR2
GAFSRAT

SEQ ID NO: 10244 - protein, 9 aa, synthetic construct
  REGION 1..9: note = Description of Artificial Sequence: Synthetic peptide
  REGION 1..9: note = XENP020012 vlCDR3
QQYGSSPWT

SEQ ID NO: 10245 - protein, 221 aa, synthetic construct; identical to SEQ ID NO: 10115
  REGION 1..221: note = Description of Artificial Sequence: Synthetic polypeptide
  REGION 1..221: note = XENP020013 [CTLA-4]_H3_L0.32_Fab Heavy Chain

SEQ ID NO: 10246 - protein, 118 aa, synthetic construct; identical to SEQ ID NO: 2405
  REGION 1..118: note = Description of Artificial Sequence: Synthetic polypeptide
  REGION 1..118: note = VH of XENP020013

SEQ ID NO: 10247 - protein, 5 aa, synthetic construct
  REGION 1..5: note = Description of Artificial Sequence: Synthetic peptide
  REGION 1..5: note = XENP020013 vhCDR1
SYTMH

SEQ ID NO: 10248 - protein, 17 aa, synthetic construct
  REGION 1..17: note = Description of Artificial Sequence: Synthetic peptide
  REGION 1..17: note = XENP020013 vhCDR2
FISYDGNNKYYADSVKG

SEQ ID NO: 10249 - protein, 9 aa, synthetic construct
  REGION 1..9: note = Description of Artificial Sequence: Synthetic peptide
  REGION 1..9: note = XENP020013 vhCDR3
TGWLGPFDY

SEQ ID NO: 10250 - protein, 215 aa, synthetic construct; identical to SEQ ID NO: 9280
  REGION 1..215: note = Description of Artificial Sequence: Synthetic polypeptide
  REGION 1..215: note = XENP020013 [CTLA-4]_H3_L0.32_Fab Light Chain

SEQ ID NO: 10251 - protein, 108 aa, synthetic construct; identical to SEQ ID NO: 6373
  REGION 1..108: note = Description of Artificial Sequence: Synthetic polypeptide
  REGION 1..108: note = VL of XENP020013

SEQ ID NO: 10252 - protein, 12 aa, synthetic construct
  REGION 1..12: note = Description of Artificial Sequence: Synthetic peptide
  REGION 1..12: note = XENP020013 vlCDR1
RASQSVGSQYLA

SEQ ID NO: 10253 - protein, 7 aa, synthetic construct
  REGION 1..7: note = Description of Artificial Sequence: Synthetic peptide
  REGION 1..7: note = XENP020013 vlCDR2
GAFSRAT

SEQ ID NO: 10254 - protein, 9 aa, synthetic construct
  REGION 1..9: note = Description of Artificial Sequence: Synthetic peptide
  REGION 1..9: note = XENP020013 vlCDR3
QQYGSSPWT

SEQ ID NO: 10255 - protein, 221 aa, synthetic construct; identical to SEQ ID NO: 10115
  REGION 1..221: note = Description of Artificial Sequence: Synthetic polypeptide
  REGION 1..221: note = XENP020014 [CTLA-4]_H3_L0.36_Fab Heavy Chain

SEQ ID NO: 10256 - protein, 118 aa, synthetic construct; identical to SEQ ID NO: 2405
  REGION 1..118: note = Description of Artificial Sequence: Synthetic polypeptide
  REGION 1..118: note = VH of XENP020014

SEQ ID NO: 10257 - protein, 5 aa, synthetic construct
  REGION 1..5: note = Description of Artificial Sequence: Synthetic peptide
  REGION 1..5: note = XENP020014 vhCDR1
SYTMH

SEQ ID NO: 10258 - protein, 17 aa, synthetic construct
  REGION 1..17: note = Description of Artificial Sequence: Synthetic peptide
  REGION 1..17: note = XENP020014 vhCDR2
FISYDGNNKYYADSVKG

SEQ ID NO: 10259 - protein, 9 aa, synthetic construct
  REGION 1..9: note = Description of Artificial Sequence: Synthetic peptide
  REGION 1..9: note = XENP020014 vhCDR3
TGWLGPFDY

SEQ ID NO: 10260 - protein, 215 aa, synthetic construct; identical to SEQ ID NO: 9320
  REGION 1..215: note = Description of Artificial Sequence: Synthetic polypeptide
  REGION 1..215: note = XENP020014 [CTLA-4]_H3_L0.36_Fab Light Chain

SEQ ID NO: 10261 - protein, 108 aa, synthetic construct; identical to SEQ ID NO: 6409
  REGION 1..108: note = Description of Artificial Sequence: Synthetic polypeptide
  REGION 1..108: note = VL of XENP020014

SEQ ID NO: 10262 - protein, 12 aa, synthetic construct
  REGION 1..12: note = Description of Artificial Sequence: Synthetic peptide
  REGION 1..12: note = XENP020014 vlCDR1
RASQSVGSSHLA

SEQ ID NO: 10263 - protein, 7 aa, synthetic construct
  REGION 1..7: note = Description of Artificial Sequence: Synthetic peptide
  REGION 1..7: note = XENP020014 vlCDR2
GAFSRAT

SEQ ID NO: 10264 - protein, 9 aa, synthetic construct
  REGION 1..9: note = Description of Artificial Sequence: Synthetic peptide
  REGION 1..9: note = XENP020014 vlCDR3
QQYGSSPWT

SEQ ID NO: 10265 - protein, 221 aa, synthetic construct; identical to SEQ ID NO: 10115
  REGION 1..221: note = Description of Artificial Sequence: Synthetic polypeptide
  REGION 1..221: note = XENP020015 [CTLA-4]_H3_L0.37_Fab Heavy Chain

SEQ ID NO: 10266 - protein, 118 aa, synthetic construct; identical to SEQ ID NO: 2405
  REGION 1..118: note = Description of Artificial Sequence: Synthetic polypeptide
  REGION 1..118: note = VH of XENP020015

SEQ ID NO: 10267 - protein, 5 aa, synthetic construct
  REGION 1..5: note = Description of Artificial Sequence: Synthetic peptide
  REGION 1..5: note = XENP020015 vhCDR1
SYTMH

SEQ ID NO: 10268 - protein, 17 aa, synthetic construct
  REGION 1..17: note = Description of Artificial Sequence: Synthetic peptide
  REGION 1..17: note = XENP020015 vhCDR2
FISYDGNNKYYADSVKG

SEQ ID NO: 10269 - protein, 9 aa, synthetic construct
  REGION 1..9: note = Description of Artificial Sequence: Synthetic peptide
  REGION 1..9: note = XENP020015 vhCDR3
TGWLGPFDY

SEQ ID NO: 10270 - protein, 215 aa, synthetic construct; identical to SEQ ID NO: 9330
  REGION 1..215: note = Description of Artificial Sequence: Synthetic polypeptide
  REGION 1..215: note = XENP020015 [CTLA-4]_H3_L0.37_Fab Light Chain

SEQ ID NO: 10271 - protein, 108 aa, synthetic construct; identical to SEQ ID NO: 6418
  REGION 1..108: note = Description of Artificial Sequence: Synthetic polypeptide
  REGION 1..108: note = VL of XENP020015

SEQ ID NO: 10272 - protein, 12 aa, synthetic construct
  REGION 1..12: note = Description of Artificial Sequence: Synthetic peptide
  REGION 1..12: note = XENP020015 vlCDR1
RASQSVGSSLLA

SEQ ID NO: 10273 - protein, 7 aa, synthetic construct
  REGION 1..7: note = Description of Artificial Sequence: Synthetic peptide
  REGION 1..7: note = XENP020015 vlCDR2
GAFSRAT

SEQ ID NO: 10274 - protein, 9 aa, synthetic construct
  REGION 1..9: note = Description of Artificial Sequence: Synthetic peptide
  REGION 1..9: note = XENP020015 vlCDR3
QQYGSSPWT

SEQ ID NO: 10275 - protein, 221 aa, synthetic construct; identical to SEQ ID NO: 10115
  REGION 1..221: note = Description of Artificial Sequence: Synthetic polypeptide
  REGION 1..221: note = XENP020016 [CTLA-4]_H3_L0.39_Fab Heavy Chain

SEQ ID NO: 10276 - protein, 118 aa, synthetic construct; identical to SEQ ID NO: 2405
  REGION 1..118: note = Description of Artificial Sequence: Synthetic polypeptide
  REGION 1..118: note = VH of XENP020016

SEQ ID NO: 10277 - protein, 5 aa, synthetic construct
  REGION 1..5: note = Description of Artificial Sequence: Synthetic peptide
  REGION 1..5: note = XENP020016 vhCDR1
SYTMH

SEQ ID NO: 10278 - protein, 17 aa, synthetic construct
  REGION 1..17: note = Description of Artificial Sequence: Synthetic peptide
  REGION 1..17: note = XENP020016 vhCDR2
FISYDGNNKYYADSVKG

SEQ ID NO: 10279 - protein, 9 aa, synthetic construct
  REGION 1..9: note = Description of Artificial Sequence: Synthetic peptide
  REGION 1..9: note = XENP020016 vhCDR3
TGWLGPFDY

SEQ ID NO: 10280 - protein, 215 aa, synthetic construct; identical to SEQ ID NO: 9350
  REGION 1..215: note = Description of Artificial Sequence: Synthetic polypeptide
  REGION 1..215: note = XENP020016 [CTLA-4]_H3_L0.39_Fab Light Chain

SEQ ID NO: 10281 - protein, 108 aa, synthetic construct; identical to SEQ ID NO: 6436
  REGION 1..108: note = Description of Artificial Sequence: Synthetic polypeptide
  REGION 1..108: note = VL of XENP020016

SEQ ID NO: 10282 - protein, 12 aa, synthetic construct
  REGION 1..12: note = Description of Artificial Sequence: Synthetic peptide
  REGION 1..12: note = XENP020016 vlCDR1
RASQSVGSSSLA

SEQ ID NO: 10283 - protein, 7 aa, synthetic construct
  REGION 1..7: note = Description of Artificial Sequence: Synthetic peptide
  REGION 1..7: note = XENP020016 vlCDR2
GAFSRAT

SEQ ID NO: 10284 - protein, 9 aa, synthetic construct
  REGION 1..9: note = Description of Artificial Sequence: Synthetic peptide
  REGION 1..9: note = XENP020016 vlCDR3
QQYGSSPWT

SEQ ID NO: 10285 - protein, 221 aa, synthetic construct; identical to SEQ ID NO: 10115
  REGION 1..221: note = Description of Artificial Sequence: Synthetic polypeptide
  REGION 1..221: note = XENP020017 [CTLA-4]_H3_L0.41_Fab Heavy Chain

SEQ ID NO: 10286 - protein, 118 aa, synthetic construct; identical to SEQ ID NO: 2405
  REGION 1..118: note = Description of Artificial Sequence: Synthetic polypeptide
  REGION 1..118: note = VH of XENP020017

SEQ ID NO: 10287 - protein, 5 aa, synthetic construct
  REGION 1..5: note = Description of Artificial Sequence: Synthetic peptide
  REGION 1..5: note = XENP020017 vhCDR1
SYTMH

SEQ ID NO: 10288 - protein, 17 aa, synthetic construct
  REGION 1..17: note = Description of Artificial Sequence: Synthetic peptide
  REGION 1..17: note = XENP020017 vhCDR2
FISYDGNNKYYADSVKG

SEQ ID NO: 10289 - protein, 9 aa, synthetic construct
  REGION 1..9: note = Description of Artificial Sequence: Synthetic peptide
  REGION 1..9: note = XENP020017 vhCDR3
TGWLGPFDY

SEQ ID NO: 10290 - protein, 215 aa, synthetic construct; identical to SEQ ID NO: 9370
  REGION 1..215: note = Description of Artificial Sequence: Synthetic polypeptide
  REGION 1..215: note = XENP020017 [CTLA-4]_H3_L0.41_Fab Light Chain

SEQ ID NO: 10291 - protein, 108 aa, synthetic construct; identical to SEQ ID NO: 6454
  REGION 1..108: note = Description of Artificial Sequence: Synthetic polypeptide
  REGION 1..108: note = VL of XENP020017

SEQ ID NO: 10292 - protein, 12 aa, synthetic construct
  REGION 1..12: note = Description of Artificial Sequence: Synthetic peptide
  REGION 1..12: note = XENP020017 vlCDR1
RASQSVGSSYMA

SEQ ID NO: 10293 - protein, 7 aa, synthetic construct
  REGION 1..7: note = Description of Artificial Sequence: Synthetic peptide
  REGION 1..7: note = XENP020017 vlCDR2
GAFSRAT

SEQ ID NO: 10294 - protein, 9 aa, synthetic construct
  REGION 1..9: note = Description of Artificial Sequence: Synthetic peptide
  REGION 1..9: note = XENP020017 vlCDR3
QQYGSSPWT

SEQ ID NO: 10295 - protein, 221 aa, synthetic construct; identical to SEQ ID NO: 10115
  REGION 1..221: note = Description of Artificial Sequence: Synthetic polypeptide
  REGION 1..221: note = XENP020018 [CTLA-4]_H3_L0.67_Fab Heavy Chain

SEQ ID NO: 10296 - protein, 118 aa, synthetic construct; identical to SEQ ID NO: 2405
  REGION 1..118: note = Description of Artificial Sequence: Synthetic polypeptide
  REGION 1..118: note = VH of XENP020018

SEQ ID NO: 10297 - protein, 5 aa, synthetic construct
  REGION 1..5: note = Description of Artificial Sequence: Synthetic peptide
  REGION 1..5: note = XENP020018 vhCDR1
SYTMH

SEQ ID NO: 10298 - protein, 17 aa, synthetic construct
  REGION 1..17: note = Description of Artificial Sequence: Synthetic peptide
  REGION 1..17: note = XENP020018 vhCDR2
FISYDGNNKYYADSVKG

SEQ ID NO: 10299 - protein, 9 aa, synthetic construct
  REGION 1..9: note = Description of Artificial Sequence: Synthetic peptide
  REGION 1..9: note = XENP020018 vhCDR3
TGWLGPFDY

SEQ ID NO: 10300 - protein, 215 aa, synthetic construct; identical to SEQ ID NO: 9630
  REGION 1..215: note = Description of Artificial Sequence: Synthetic polypeptide
  REGION 1..215: note = XENP020018 [CTLA-4]_H3_L0.67_Fab Light Chain

SEQ ID NO: 10301 - protein, 108 aa, synthetic construct; identical to SEQ ID NO: 6688
  REGION 1..108: note = Description of Artificial Sequence: Synthetic polypeptide
  REGION 1..108: note = VL of XENP020018

SEQ ID NO: 10302 - protein, 12 aa, synthetic construct
  REGION 1..12: note = Description of Artificial Sequence: Synthetic peptide
  REGION 1..12: note = XENP020018 vlCDR1
RASQSVGSSYLA

SEQ ID NO: 10303 - protein, 7 aa, synthetic construct
  REGION 1..7: note = Description of Artificial Sequence: Synthetic peptide
  REGION 1..7: note = XENP020018 vlCDR2
DAFSRAT

SEQ ID NO: 10304 - protein, 9 aa, synthetic construct
  REGION 1..9: note = Description of Artificial Sequence: Synthetic peptide
  REGION 1..9: note = XENP020018 vlCDR3
QQYGSSPWT

SEQ ID NO: 10305 - protein, 221 aa, synthetic construct; identical to SEQ ID NO: 10115
  REGION 1..221: note = Description of Artificial Sequence: Synthetic polypeptide
  REGION 1..221: note = XENP020019 [CTLA-4]_H3_L0.69_Fab Heavy Chain

SEQ ID NO: 10306 - protein, 118 aa, synthetic construct; identical to SEQ ID NO: 2405
  REGION 1..118: note = Description of Artificial Sequence: Synthetic polypeptide
  REGION 1..118: note = VH of XENP020019

SEQ ID NO: 10307 - protein, 5 aa, synthetic construct
  REGION 1..5: note = Description of Artificial Sequence: Synthetic peptide
  REGION 1..5: note = XENP020019 vhCDR1
SYTMH

SEQ ID NO: 10308 - protein, 17 aa, synthetic construct
  REGION 1..17: note = Description of Artificial Sequence: Synthetic peptide
  REGION 1..17: note = XENP020019 vhCDR2
FISYDGNNKYYADSVKG

SEQ ID NO: 10309 - protein, 9 aa, synthetic construct
  REGION 1..9: note = Description of Artificial Sequence: Synthetic peptide
  REGION 1..9: note = XENP020019 vhCDR3
TGWLGPFDY

SEQ ID NO: 10310 - protein, 215 aa, synthetic construct; identical to SEQ ID NO: 9650
  REGION 1..215: note = Description of Artificial Sequence: Synthetic polypeptide
  REGION 1..215: note = XENP020019 [CTLA-4]_H3_L0.69_Fab Light Chain

SEQ ID NO: 10311 - protein, 108 aa, synthetic construct; identical to SEQ ID NO: 6706
  REGION 1..108: note = Description of Artificial Sequence: Synthetic polypeptide
  REGION 1..108: note = VL of XENP020019

SEQ ID NO: 10312 - protein, 12 aa, synthetic construct
  REGION 1..12: note = Description of Artificial Sequence: Synthetic peptide
  REGION 1..12: note = XENP020019 vlCDR1
RASQSVGSSYLA

SEQ ID NO: 10313 - protein, 7 aa, synthetic construct
  REGION 1..7: note = Description of Artificial Sequence: Synthetic peptide
  REGION 1..7: note = XENP020019 vlCDR2
GVFSRAT

SEQ ID NO: 10314 - protein, 9 aa, synthetic construct
  REGION 1..9: note = Description of Artificial Sequence: Synthetic peptide
  REGION 1..9: note = XENP020019 vlCDR3
QQYGSSPWT

SEQ ID NO: 10315 - protein, 221 aa, synthetic construct; identical to SEQ ID NO: 10115
  REGION 1..221: note = Description of Artificial Sequence: Synthetic polypeptide
  REGION 1..221: note = XENP020020 [CTLA-4]_H3_L0.74_Fab Heavy Chain

SEQ ID NO: 10316 - protein, 118 aa, synthetic construct; identical to SEQ ID NO: 2405
  REGION 1..118: note = Description of Artificial Sequence: Synthetic polypeptide
  REGION 1..118: note = VH of XENP020020

SEQ ID NO: 10317 - protein, 5 aa, synthetic construct
  REGION 1..5: note = Description of Artificial Sequence: Synthetic peptide
  REGION 1..5: note = XENP020020 vhCDR1
SYTMH

SEQ ID NO: 10318 - protein, 17 aa, synthetic construct
  REGION 1..17: note = Description of Artificial Sequence: Synthetic peptide
  REGION 1..17: note = XENP020020 vhCDR2
FISYDGNNKYYADSVKG

SEQ ID NO: 10319 - protein, 9 aa, synthetic construct
  REGION 1..9: note = Description of Artificial Sequence: Synthetic peptide
  REGION 1..9: note = XENP020020 vhCDR3
TGWLGPFDY

SEQ ID NO: 10320 - protein, 215 aa, synthetic construct; identical to SEQ ID NO: 9700
  REGION 1..215: note = Description of Artificial Sequence: Synthetic polypeptide
  REGION 1..215: note = XENP020020 [CTLA-4]_H3_L0.74_Fab Light Chain

SEQ ID NO: 10321 - protein, 108 aa, synthetic construct; identical to SEQ ID NO: 6751
  REGION 1..108: note = Description of Artificial Sequence: Synthetic polypeptide
  REGION 1..108: note = VL of XENP020020

SEQ ID NO: 10322 - protein, 12 aa, synthetic construct
  REGION 1..12: note = Description of Artificial Sequence: Synthetic peptide
  REGION 1..12: note = XENP020020 vlCDR1
RASQSVGSSYLA

SEQ ID NO: 10323 - protein, 7 aa, synthetic construct
  REGION 1..7: note = Description of Artificial Sequence: Synthetic peptide
  REGION 1..7: note = XENP020020 vlCDR2
GAYSRAT

SEQ ID NO: 10324 - protein, 9 aa, synthetic construct
  REGION 1..9: note = Description of Artificial Sequence: Synthetic peptide
  REGION 1..9: note = XENP020020 vlCDR3
QQYGSSPWT

SEQ ID NO: 10325 - protein, 221 aa, synthetic construct; identical to SEQ ID NO: 10115
  REGION 1..221: note = Description of Artificial Sequence: Synthetic polypeptide
  REGION 1..221: note = XENP020021 [CTLA-4]_H3_L0.75_Fab Heavy Chain

SEQ ID NO: 10326 - protein, 118 aa, synthetic construct; identical to SEQ ID NO: 2405
  REGION 1..118: note = Description of Artificial Sequence: Synthetic polypeptide
  REGION 1..118: note = VH of XENP020021

SEQ ID NO: 10327 - protein, 5 aa, synthetic construct
  REGION 1..5: note = Description of Artificial Sequence: Synthetic peptide
  REGION 1..5: note = XENP020021 vhCDR1
SYTMH

SEQ ID NO: 10328 - protein, 17 aa, synthetic construct
  REGION 1..17: note = Description of Artificial Sequence: Synthetic peptide
  REGION 1..17: note = XENP020021 vhCDR2
FISYDGNNKYYADSVKG

SEQ ID NO: 10329 - protein, 9 aa, synthetic construct
  REGION 1..9: note = Description of Artificial Sequence: Synthetic peptide
  REGION 1..9: note = XENP020021 vhCDR3
TGWLGPFDY

SEQ ID NO: 10330 - protein, 215 aa, synthetic construct; identical to SEQ ID NO: 9710
  REGION 1..215: note = Description of Artificial Sequence: Synthetic polypeptide
  REGION 1..215: note = XENP020021 [CTLA-4]_H3_L0.75_Fab Light Chain

SEQ ID NO: 10331 - protein, 108 aa, synthetic construct; identical to SEQ ID NO: 6760
  REGION 1..108: note = Description of Artificial Sequence: Synthetic polypeptide
  REGION 1..108: note = VL of XENP020021

SEQ ID NO: 10332 - protein, 12 aa, synthetic construct
  REGION 1..12: note = Description of Artificial Sequence: Synthetic peptide
  REGION 1..12: note = XENP020021 vlCDR1
RASQSVGSSYLA

SEQ ID NO: 10333 - protein, 7 aa, synthetic construct
  REGION 1..7: note = Description of Artificial Sequence: Synthetic peptide
  REGION 1..7: note = XENP020021 vlCDR2
GAFARAT

SEQ ID NO: 10334 - protein, 9 aa, synthetic construct
  REGION 1..9: note = Description of Artificial Sequence: Synthetic peptide
  REGION 1..9: note = XENP020021 vlCDR3
QQYGSSPWT

SEQ ID NO: 10335 - protein, 221 aa, synthetic construct; identical to SEQ ID NO: 10115
  REGION 1..221: note = Description of Artificial Sequence: Synthetic polypeptide
  REGION 1..221: note = XENP020022 [CTLA-4]_H3_L0.103_Fab Heavy Chain

SEQ ID NO: 10336 - protein, 118 aa, synthetic construct; identical to SEQ ID NO: 2405
  REGION 1..118: note = Description of Artificial Sequence: Synthetic polypeptide
  REGION 1..118: note = VH of XENP020022

SEQ ID NO: 10337 - protein, 5 aa, synthetic construct
  REGION 1..5: note = Description of Artificial Sequence: Synthetic peptide
  REGION 1..5: note = XENP020022 vhCDR1
SYTMH

SEQ ID NO: 10338 - protein, 17 aa, synthetic construct
  REGION 1..17: note = Description of Artificial Sequence: Synthetic peptide
  REGION 1..17: note = XENP020022 vhCDR2
FISYDGNNKYYADSVKG

SEQ ID NO: 10339 - protein, 9 aa, synthetic construct
  REGION 1..9: note = Description of Artificial Sequence: Synthetic peptide
  REGION 1..9: note = XENP020022 vhCDR3
TGWLGPFDY

SEQ ID NO: 10340 - protein, 215 aa, synthetic construct; identical to SEQ ID NO: 9990
  REGION 1..215: note = Description of Artificial Sequence: Synthetic polypeptide
  REGION 1..215: note = XENP020022 [CTLA-4]_H3_L0.103_Fab Light Chain

SEQ ID NO: 10341 - protein, 108 aa, synthetic construct; identical to SEQ ID NO: 7012
  REGION 1..108: note = Description of Artificial Sequence: Synthetic polypeptide
  REGION 1..108: note = VL of XENP020022

SEQ ID NO: 10342 - protein, 12 aa, synthetic construct
  REGION 1..12: note = Description of Artificial Sequence: Synthetic peptide
  REGION 1..12: note = XENP020022 vlCDR1
RASQSVGSSYLA

SEQ ID NO: 10343 - protein, 7 aa, synthetic construct
  REGION 1..7: note = Description of Artificial Sequence: Synthetic peptide
  REGION 1..7: note = XENP020022 vlCDR2
GAFSRAT

SEQ ID NO: 10344 - protein, 9 aa, synthetic construct
  REGION 1..9: note = Description of Artificial Sequence: Synthetic peptide
  REGION 1..9: note = XENP020022 vlCDR3
QQYGKSPWT

SEQ ID NO: 10345 - protein, 221 aa, synthetic construct; identical to SEQ ID NO: 10115
  REGION 1..221: note = Description of Artificial Sequence: Synthetic polypeptide
  REGION 1..221: note = XENP020052 [CTLA-4]_H3_L0.44_Fab Heavy Chain

SEQ ID NO: 10346 - protein, 118 aa, synthetic construct; identical to SEQ ID NO: 2405
  REGION 1..118: note = Description of Artificial Sequence: Synthetic polypeptide
  REGION 1..118: note = VH of XENP020052

SEQ ID NO: 10347 - protein, 5 aa, synthetic construct
  REGION 1..5: note = Description of Artificial Sequence: Synthetic peptide
  REGION 1..5: note = XENP020052 vhCDR1
SYTMH

SEQ ID NO: 10348 - protein, 17 aa, synthetic construct
  REGION 1..17: note = Description of Artificial Sequence: Synthetic peptide
  REGION 1..17: note = XENP020052 vhCDR2
FISYDGNNKYYADSVKG

SEQ ID NO: 10349 - protein, 9 aa, synthetic construct
  REGION 1..9: note = Description of Artificial Sequence: Synthetic peptide
  REGION 1..9: note = XENP020052 vhCDR3
TGWLGPFDY

SEQ ID NO: 10350 - protein, 215 aa, synthetic construct; identical to SEQ ID NO: 9400
  REGION 1..215: note = Description of Artificial Sequence: Synthetic polypeptide
  REGION 1..215: note = XENP020052 [CTLA-4]_H3_L0.44_Fab Light Chain

SEQ ID NO: 10351 - protein, 108 aa, synthetic construct; identical to SEQ ID NO: 6481
  REGION 1..108: note = Description of Artificial Sequence: Synthetic polypeptide
  REGION 1..108: note = VL of XENP020052

SEQ ID NO: 10352 - protein, 12 aa, synthetic construct
  REGION 1..12: note = Description of Artificial Sequence: Synthetic peptide
  REGION 1..12: note = XENP020052 vlCDR1
RASQSVGSSYLS

SEQ ID NO: 10353 - protein, 7 aa, synthetic construct
  REGION 1..7: note = Description of Artificial Sequence: Synthetic peptide
  REGION 1..7: note = XENP020052 vlCDR2
GAFSRAT

SEQ ID NO: 10354 - protein, 9 aa, synthetic construct
  REGION 1..9: note = Description of Artificial Sequence: Synthetic peptide
  REGION 1..9: note = XENP020052 vlCDR3
QQYGSSPWT

SEQ ID NO: 10355 - protein, 221 aa, synthetic construct
  REGION 1..221: note = Description of Artificial Sequence: Synthetic polypeptide
  REGION 1..221: note = XENP020068 [CTLA-4]_H3.1_L0.12_Fab Heavy Chain
EVQLVESGGGLVKPGGSLRLSCAASGFTFSSYTMHWVRQAPGKGLEWVSFISYDGNHKYYADSVKGRFTISRDNAKNSLYLQMNSLRAEDTAVYYCARTGLLGPFDLWGQGTMVTVSSASTKGPSVFPLAPSSKSTSGGTAALGCLVKDYFPEPVTVSWNSGALTSGVHTFPAVLQSSGLYSLSSVVTVPSSSLGTQTYICNVNHKPSNTKVDKKVEPKSC

SEQ ID NO: 10356 - protein, 118 aa, synthetic construct; identical to SEQ ID NO: 7110
  REGION 1..118: note = Description of Artificial Sequence: Synthetic polypeptide
  REGION 1..118: note = VH of XENP020068

SEQ ID NO: 10357 - protein, 5 aa, synthetic construct
  REGION 1..5: note = Description of Artificial Sequence: Synthetic peptide
  REGION 1..5: note = XENP020068 vhCDR1
SYTMH

SEQ ID NO: 10358 - protein, 17 aa, synthetic construct
  REGION 1..17: note = Description of Artificial Sequence: Synthetic peptide
  REGION 1..17: note = XENP020068 vhCDR2
FISYDGNHKYYADSVKG

SEQ ID NO: 10359 - protein, 9 aa, synthetic construct
  REGION 1..9: note = Description of Artificial Sequence: Synthetic peptide
  REGION 1..9: note = XENP020068 vhCDR3
TGLLGPFDL

SEQ ID NO: 10360 - protein, 215 aa, synthetic construct; identical to SEQ ID NO: 9080
  REGION 1..215: note = Description of Artificial Sequence: Synthetic polypeptide
  REGION 1..215: note = XENP020068 [CTLA-4]_H3.1_L0.12_Fab Light Chain

SEQ ID NO: 10361 - protein, 108 aa, synthetic construct; identical to SEQ ID NO: 6193
  REGION 1..108: note = Description of Artificial Sequence: Synthetic polypeptide
  REGION 1..108: note = VL of XENP020068

SEQ ID NO: 10362 - protein, 12 aa, synthetic construct
  REGION 1..12: note = Description of Artificial Sequence: Synthetic peptide
  REGION 1..12: note = XENP020068 vlCDR1
RASQSVGSSYLA

SEQ ID NO: 10363 - protein, 7 aa, synthetic construct
  REGION 1..7: note = Description of Artificial Sequence: Synthetic peptide
  REGION 1..7: note = XENP020068 vlCDR2
GAFSRAT

SEQ ID NO: 10364 - protein, 9 aa, synthetic construct
  REGION 1..9: note = Description of Artificial Sequence: Synthetic peptide
  REGION 1..9: note = XENP020068 vlCDR3
QQYGSSPWT

SEQ ID NO: 10365 - protein, 221 aa, synthetic construct
  REGION 1..221: note = Description of Artificial Sequence: Synthetic polypeptide
  REGION 1..221: note = XENP020069 [CTLA-4]_H3.2_L0.12_Fab Heavy Chain
EVQLVESGGGLVKPGGSLRLSCAASGFTFSSYTMHWVRQAPGKGLEWVSFISYDGNTKYYADSVKGRFTISRDNAKNSLYLQMNSLRAEDTAVYYCARTGLLGPFDLWGQGTMVTVSSASTKGPSVFPLAPSSKSTSGGTAALGCLVKDYFPEPVTVSWNSGALTSGVHTFPAVLQSSGLYSLSSVVTVPSSSLGTQTYICNVNHKPSNTKVDKKVEPKSC

SEQ ID NO: 10366 - protein, 118 aa, synthetic construct; identical to SEQ ID NO: 7119
  REGION 1..118: note = Description of Artificial Sequence: Synthetic polypeptide
  REGION 1..118: note = VH of XENP020069

SEQ ID NO: 10367 - protein, 5 aa, synthetic construct
  REGION 1..5: note = Description of Artificial Sequence: Synthetic peptide
  REGION 1..5: note = XENP020069 vhCDR1
SYTMH

SEQ ID NO: 10368 - protein, 17 aa, synthetic construct
  REGION 1..17: note = Description of Artificial Sequence: Synthetic peptide
  REGION 1..17: note = XENP020069 vhCDR2
FISYDGNTKYYADSVKG

SEQ ID NO: 10369 - protein, 9 aa, synthetic construct
  REGION 1..9: note = Description of Artificial Sequence: Synthetic peptide
  REGION 1..9: note = XENP020069 vhCDR3
TGLLGPFDL

SEQ ID NO: 10370 - protein, 215 aa, synthetic construct; identical to SEQ ID NO: 9080
  REGION 1..215: note = Description of Artificial Sequence: Synthetic polypeptide
  REGION 1..215: note = XENP020069 [CTLA-4]_H3.2_L0.12_Fab Light Chain

SEQ ID NO: 10371 - protein, 108 aa, synthetic construct; identical to SEQ ID NO: 6193
  REGION 1..108: note = Description of Artificial Sequence: Synthetic polypeptide
  REGION 1..108: note = VL of XENP020069

SEQ ID NO: 10372 - protein, 12 aa, synthetic construct
  REGION 1..12: note = Description of Artificial Sequence: Synthetic peptide
  REGION 1..12: note = XENP020069 vlCDR1
RASQSVGSSYLA

SEQ ID NO: 10373 - protein, 7 aa, synthetic construct
  REGION 1..7: note = Description of Artificial Sequence: Synthetic peptide
  REGION 1..7: note = XENP020069 vlCDR2
GAFSRAT

SEQ ID NO: 10374 - protein, 9 aa, synthetic construct
  REGION 1..9: note = Description of Artificial Sequence: Synthetic peptide
  REGION 1..9: note = XENP020069 vlCDR3
QQYGSSPWT

SEQ ID NO: 10375 - protein, 221 aa, synthetic construct
  REGION 1..221: note = Description of Artificial Sequence: Synthetic polypeptide
  REGION 1..221: note = XENP020070 [CTLA-4]_H3.3_L0.12_Fab Heavy Chain
EVQLVESGGGLVKPGGSLRLSCAASGFTFSSYTMHWVRQAPGKGLEWVSFISYDGNQKYYADSVKGRFTISRDNAKNSLYLQMNSLRAEDTAVYYCARTGLLGPFDLWGQGTMVTVSSASTKGPSVFPLAPSSKSTSGGTAALGCLVKDYFPEPVTVSWNSGALTSGVHTFPAVLQSSGLYSLSSVVTVPSSSLGTQTYICNVNHKPSNTKVDKKVEPKSC

SEQ ID NO: 10376 - protein, 118 aa, synthetic construct; identical to SEQ ID NO: 7128
  REGION 1..118: note = Description of Artificial Sequence: Synthetic polypeptide
  REGION 1..118: note = VH of XENP020070

SEQ ID NO: 10377 - protein, 5 aa, synthetic construct
  REGION 1..5: note = Description of Artificial Sequence: Synthetic peptide
  REGION 1..5: note = XENP020070 vhCDR1
SYTMH

SEQ ID NO: 10378 - protein, 17 aa, synthetic construct
  REGION 1..17: note = Description of Artificial Sequence: Synthetic peptide
  REGION 1..17: note = XENP020070 vhCDR2
FISYDGNQKYYADSVKG

SEQ ID NO: 10379 - protein, 9 aa, synthetic construct
  REGION 1..9: note = Description of Artificial Sequence: Synthetic peptide
  REGION 1..9: note = XENP020070 vhCDR3
TGLLGPFDL

SEQ ID NO: 10380 - protein, 215 aa, synthetic construct; identical to SEQ ID NO: 9080
  REGION 1..215: note = Description of Artificial Sequence: Synthetic polypeptide
  REGION 1..215: note = XENP020070 [CTLA-4]_H3.3_L0.12_Fab Light Chain

SEQ ID NO: 10381 - protein, 108 aa, synthetic construct; identical to SEQ ID NO: 6193
  REGION 1..108: note = Description of Artificial Sequence: Synthetic polypeptide
  REGION 1..108: note = VL of XENP020070

SEQ ID NO: 10382 - protein, 12 aa, synthetic construct
  REGION 1..12: note = Description of Artificial Sequence: Synthetic peptide
  REGION 1..12: note = XENP020070 vlCDR1
RASQSVGSSYLA

SEQ ID NO: 10383 - protein, 7 aa, synthetic construct
  REGION 1..7: note = Description of Artificial Sequence: Synthetic peptide
  REGION 1..7: note = XENP020070 vlCDR2
GAFSRAT

SEQ ID NO: 10384 - protein, 9 aa, synthetic construct
  REGION 1..9: note = Description of Artificial Sequence: Synthetic peptide
  REGION 1..9: note = XENP020070 vlCDR3
QQYGSSPWT

SEQ ID NO: 10385 - protein, 221 aa, synthetic construct
  REGION 1..221: note = Description of Artificial Sequence: Synthetic polypeptide
  REGION 1..221: note = XENP020071 [CTLA-4]_H3.4_L0.12_Fab Heavy Chain
EVQLVESGGGLVKPGGSLRLSCAASGFTFSSYTMHWVRQAPGKGLEWVSFISYDGNHKYYADSVKGRFTISRDNAKNSLYLQMNSLRAEDTAVYYCARTGHLGPFDLWGQGTMVTVSSASTKGPSVFPLAPSSKSTSGGTAALGCLVKDYFPEPVTVSWNSGALTSGVHTFPAVLQSSGLYSLSSVVTVPSSSLGTQTYICNVNHKPSNTKVDKKVEPKSC

SEQ ID NO: 10386 - protein, 118 aa, synthetic construct; identical to SEQ ID NO: 7137
  REGION 1..118: note = Description of Artificial Sequence: Synthetic polypeptide
  REGION 1..118: note = VH of XENP020071

SEQ ID NO: 10387 - protein, 5 aa, synthetic construct
  REGION 1..5: note = Description of Artificial Sequence: Synthetic peptide
  REGION 1..5: note = XENP020071 vhCDR1
SYTMH

SEQ ID NO: 10388 - protein, 17 aa, synthetic construct
  REGION 1..17: note = Description of Artificial Sequence: Synthetic peptide
  REGION 1..17: note = XENP020071 vhCDR2
FISYDGNHKYYADSVKG

SEQ ID NO: 10389 - protein, 9 aa, synthetic construct
  REGION 1..9: note = Description of Artificial Sequence: Synthetic peptide
  REGION 1..9: note = XENP020071 vhCDR3
TGHLGPFDL

SEQ ID NO: 10390 - protein, 215 aa, synthetic construct; identical to SEQ ID NO: 9080
  REGION 1..215: note = Description of Artificial Sequence: Synthetic polypeptide
  REGION 1..215: note = XENP020071 [CTLA-4]_H3.4_L0.12_Fab Light Chain

SEQ ID NO: 10391 - protein, 108 aa, synthetic construct; identical to SEQ ID NO: 6193
  REGION 1..108: note = Description of Artificial Sequence: Synthetic polypeptide
  REGION 1..108: note = VL of XENP020071

SEQ ID NO: 10392 - protein, 12 aa, synthetic construct
  REGION 1..12: note = Description of Artificial Sequence: Synthetic peptide
  REGION 1..12: note = XENP020071 vlCDR1
RASQSVGSSYLA

SEQ ID NO: 10393 - protein, 7 aa, synthetic construct
  REGION 1..7: note = Description of Artificial Sequence: Synthetic peptide
  REGION 1..7: note = XENP020071 vlCDR2
GAFSRAT

SEQ ID NO: 10394 - protein, 9 aa, synthetic construct
  REGION 1..9: note = Description of Artificial Sequence: Synthetic peptide
  REGION 1..9: note = XENP020071 vlCDR3
QQYGSSPWT

SEQ ID NO: 10395 - protein, 221 aa, synthetic construct
  REGION 1..221: note = Description of Artificial Sequence: Synthetic polypeptide
  REGION 1..221: note = XENP020072 [CTLA-4]_H3.5_L0.12_Fab Heavy Chain
EVQLVESGGGLVKPGGSLRLSCAASGFTFSSYTMHWVRQAPGKGLEWVSFISYDGNTKYYADSVKGRFTISRDNAKNSLYLQMNSLRAEDTAVYYCARTGHLGPFDLWGQGTMVTVSSASTKGPSVFPLAPSSKSTSGGTAALGCLVKDYFPEPVTVSWNSGALTSGVHTFPAVLQSSGLYSLSSVVTVPSSSLGTQTYICNVNHKPSNTKVDKKVEPKSC

SEQ ID NO: 10396 - protein, 118 aa, synthetic construct; identical to SEQ ID NO: 7146
  REGION 1..118: note = Description of Artificial Sequence: Synthetic polypeptide
  REGION 1..118: note = VH of XENP020072

SEQ ID NO: 10397 - protein, 5 aa, synthetic construct
  REGION 1..5: note = Description of Artificial Sequence: Synthetic peptide
  REGION 1..5: note = XENP020072 vhCDR1
SYTMH

SEQ ID NO: 10398 - protein, 17 aa, synthetic construct
  REGION 1..17: note = Description of Artificial Sequence: Synthetic peptide
  REGION 1..17: note = XENP020072 vhCDR2
FISYDGNTKYYADSVKG

SEQ ID NO: 10399 - protein, 9 aa, synthetic construct
  REGION 1..9: note = Description of Artificial Sequence: Synthetic peptide
  REGION 1..9: note = XENP020072 vhCDR3
TGHLGPFDL

SEQ ID NO: 10400 - protein, 215 aa, synthetic construct; identical to SEQ ID NO: 9080
  REGION 1..215: note = Description of Artificial Sequence: Synthetic polypeptide
  REGION 1..215: note = XENP020072 [CTLA-4]_H3.5_L0.12_Fab Light Chain

SEQ ID NO: 10401 - protein, 108 aa, synthetic construct; identical to SEQ ID NO: 6193
  REGION 1..108: note = Description of Artificial Sequence: Synthetic polypeptide
  REGION 1..108: note = VL of XENP020072

SEQ ID NO: 10402 - protein, 12 aa, synthetic construct
  REGION 1..12: note = Description of Artificial Sequence: Synthetic peptide
  REGION 1..12: note = XENP020072 vlCDR1
RASQSVGSSYLA

SEQ ID NO: 10403 - protein, 7 aa, synthetic construct
  REGION 1..7: note = Description of Artificial Sequence: Synthetic peptide
  REGION 1..7: note = XENP020072 vlCDR2
GAFSRAT

SEQ ID NO: 10404 - protein, 9 aa, synthetic construct
  REGION 1..9: note = Description of Artificial Sequence: Synthetic peptide
  REGION 1..9: note = XENP020072 vlCDR3
QQYGSSPWT

SEQ ID NO: 10405 - protein, 221 aa, synthetic construct
  REGION 1..221: note = Description of Artificial Sequence: Synthetic polypeptide
  REGION 1..221: note = XENP020073 [CTLA-4]_H3.6_L0.12_Fab Heavy Chain
EVQLVESGGGLVKPGGSLRLSCAASGFTFSSYTMHWVRQAPGKGLEWVSFISYDGNQKYYADSVKGRFTISRDNAKNSLYLQMNSLRAEDTAVYYCARTGHLGPFDLWGQGTMVTVSSASTKGPSVFPLAPSSKSTSGGTAALGCLVKDYFPEPVTVSWNSGALTSGVHTFPAVLQSSGLYSLSSVVTVPSSSLGTQTYICNVNHKPSNTKVDKKVEPKSC

SEQ ID NO: 10406 - protein, 118 aa, synthetic construct; identical to SEQ ID NO: 7155
  REGION 1..118: note = Description of Artificial Sequence: Synthetic polypeptide
  REGION 1..118: note = VH of XENP020073

SEQ ID NO: 10407 - protein, 5 aa, synthetic construct
  REGION 1..5: note = Description of Artificial Sequence: Synthetic peptide
  REGION 1..5: note = XENP020073 vhCDR1
SYTMH

SEQ ID NO: 10408 - protein, 17 aa, synthetic construct
  REGION 1..17: note = Description of Artificial Sequence: Synthetic peptide
  REGION 1..17: note = XENP020073 vhCDR2
FISYDGNQKYYADSVKG

SEQ ID NO: 10409 - protein, 9 aa, synthetic construct
  REGION 1..9: note = Description of Artificial Sequence: Synthetic peptide
  REGION 1..9: note = XENP020073 vhCDR3
TGHLGPFDL

SEQ ID NO: 10410 - protein, 215 aa, synthetic construct; identical to SEQ ID NO: 9080
  REGION 1..215: note = Description of Artificial Sequence: Synthetic polypeptide
  REGION 1..215: note = XENP020073 [CTLA-4]_H3.6_L0.12_Fab Light Chain

SEQ ID NO: 10411 - protein, 108 aa, synthetic construct; identical to SEQ ID NO: 6193
  REGION 1..108: note = Description of Artificial Sequence: Synthetic polypeptide
  REGION 1..108: note = VL of XENP020073

SEQ ID NO: 10412 - protein, 12 aa, synthetic construct
  REGION 1..12: note = Description of Artificial Sequence: Synthetic peptide
  REGION 1..12: note = XENP020073 vlCDR1
RASQSVGSSYLA

SEQ ID NO: 10413 - protein, 7 aa, synthetic construct
  REGION 1..7: note = Description of Artificial Sequence: Synthetic peptide
  REGION 1..7: note = XENP020073 vlCDR2
GAFSRAT

SEQ ID NO: 10414 - protein, 9 aa, synthetic construct
  REGION 1..9: note = Description of Artificial Sequence: Synthetic peptide
  REGION 1..9: note = XENP020073 vlCDR3
QQYGSSPWT

SEQ ID NO: 10415 - protein, 221 aa, synthetic construct
  REGION 1..221: note = Description of Artificial Sequence: Synthetic polypeptide
  REGION 1..221: note = XENP020074 [CTLA-4]_H3.7_L0.12_Fab Heavy Chain
EVQLVESGGGLVKPGGSLRLSCAASGFTFSSYTMHWVRQAPGKGLEWVCFISYDGNNKYYADSVKGRFTCSRDNAKNSLYLQMNSLRAEDTAVYYCARTGWLGPFDYWGQGTLVTVSSASTKGPSVFPLAPSSKSTSGGTAALGCLVKDYFPEPVTVSWNSGALTSGVHTFPAVLQSSGLYSLSSVVTVPSSSLGTQTYICNVNHKPSNTKVDKKVEPKSC

SEQ ID NO: 10416 - protein, 118 aa, synthetic construct; identical to SEQ ID NO: 7164
  REGION 1..118: note = Description of Artificial Sequence: Synthetic polypeptide
  REGION 1..118: note = VH of XENP020074

SEQ ID NO: 10417 - protein, 5 aa, synthetic construct
  REGION 1..5: note = Description of Artificial Sequence: Synthetic peptide
  REGION 1..5: note = XENP020074 vhCDR1
SYTMH

SEQ ID NO: 10418 - protein, 17 aa, synthetic construct
  REGION 1..17: note = Description of Artificial Sequence: Synthetic peptide
  REGION 1..17: note = XENP020074 vhCDR2
FISYDGNNKYYADSVKG

SEQ ID NO: 10419 - protein, 9 aa, synthetic construct
  REGION 1..9: note = Description of Artificial Sequence: Synthetic peptide
  REGION 1..9: note = XENP020074 vhCDR3
TGWLGPFDY

SEQ ID NO: 10420 - protein, 215 aa, synthetic construct; identical to SEQ ID NO: 9080
  REGION 1..215: note = Description of Artificial Sequence: Synthetic polypeptide
  REGION 1..215: note = XENP020074 [CTLA-4]_H3.7_L0.12_Fab Light Chain

SEQ ID NO: 10421 - protein, 108 aa, synthetic construct; identical to SEQ ID NO: 6193
  REGION 1..108: note = Description of Artificial Sequence: Synthetic polypeptide
  REGION 1..108: note = VL of XENP020074

SEQ ID NO: 10422 - protein, 12 aa, synthetic construct
  REGION 1..12: note = Description of Artificial Sequence: Synthetic peptide
  REGION 1..12: note = XENP020074 vlCDR1
RASQSVGSSYLA

SEQ ID NO: 10423 - protein, 7 aa, synthetic construct
  REGION 1..7: note = Description of Artificial Sequence: Synthetic peptide
  REGION 1..7: note = XENP020074 vlCDR2
GAFSRAT

SEQ ID NO: 10424 - protein, 9 aa, synthetic construct
  REGION 1..9: note = Description of Artificial Sequence: Synthetic peptide
  REGION 1..9: note = XENP020074 vlCDR3
QQYGSSPWT

SEQ ID NO: 10425 - protein, 221 aa, synthetic construct
  REGION 1..221: note = Description of Artificial Sequence: Synthetic polypeptide
  REGION 1..221: note = XENP020323 [CTLA-4]_H3.9_L0.12_Fab Heavy Chain
EVQLVESGGGLVKPGGSLRLSCAASGFTFSSYTMHWVRQAPGKGLEWVSFISYDGNYKYYADSVKGRFTISRDNAKNSLYLQMNSLRAEDTAVYYCARTGHLGPFDLWGQGTMVTVSSASTKGPSVFPLAPSSKSTSGGTAALGCLVKDYFPEPVTVSWNSGALTSGVHTFPAVLQSSGLYSLSSVVTVPSSSLGTQTYICNVNHKPSNTKVDKKVEPKSC

SEQ ID NO: 10426 - protein, 118 aa, synthetic construct; identical to SEQ ID NO: 7182
  REGION 1..118: note = Description of Artificial Sequence: Synthetic polypeptide
  REGION 1..118: note = VH of XENP020323

SEQ ID NO: 10427 - protein, 5 aa, synthetic construct
  REGION 1..5: note = Description of Artificial Sequence: Synthetic peptide
  REGION 1..5: note = XENP020323 vhCDR1
SYTMH

SEQ ID NO: 10428 - protein, 17 aa, synthetic construct
  REGION 1..17: note = Description of Artificial Sequence: Synthetic peptide
  REGION 1..17: note = XENP020323 vhCDR2
FISYDGNYKYYADSVKG

SEQ ID NO: 10429 - protein, 9 aa, synthetic construct
  REGION 1..9: note = Description of Artificial Sequence: Synthetic peptide
  REGION 1..9: note = XENP020323 vhCDR3
TGHLGPFDL

SEQ ID NO: 10430 - protein, 215 aa, synthetic construct; identical to SEQ ID NO: 9080
  REGION 1..215: note = Description of Artificial Sequence: Synthetic polypeptide
  REGION 1..215: note = XENP020323 [CTLA-4]_H3.9_L0.12_Fab Light Chain

SEQ ID NO: 10431 - protein, 108 aa, synthetic construct; identical to SEQ ID NO: 6193
  REGION 1..108: note = Description of Artificial Sequence: Synthetic polypeptide
  REGION 1..108: note = VL of XENP020323

SEQ ID NO: 10432 - protein, 12 aa, synthetic construct
  REGION 1..12: note = Description of Artificial Sequence: Synthetic peptide
  REGION 1..12: note = XENP020323 vlCDR1
RASQSVGSSYLA

SEQ ID NO: 10433 - protein, 7 aa, synthetic construct
  REGION 1..7: note = Description of Artificial Sequence: Synthetic peptide
  REGION 1..7: note = XENP020323 vlCDR2
GAFSRAT

SEQ ID NO: 10434 - protein, 9 aa, synthetic construct
  REGION 1..9: note = Description of Artificial Sequence: Synthetic peptide
  REGION 1..9: note = XENP020323 vlCDR3
QQYGSSPWT

SEQ ID NO: 10435 - protein, 221 aa, synthetic construct
  REGION 1..221: note = Description of Artificial Sequence: Synthetic polypeptide
  REGION 1..221: note = XENP020324 [CTLA-4]_H3.10_L0.12_Fab Heavy Chain
EVQLVESGGGLVKPGGSLRLSCAASGFTFSSYTMHWVRQAPGKGLEWVSFISYDGNYKYYADSVKGRFTISRDNAKNSLYLQMNSLRAEDTAVYYCARTGLLGPFDLWGQGTMVTVSSASTKGPSVFPLAPSSKSTSGGTAALGCLVKDYFPEPVTVSWNSGALTSGVHTFPAVLQSSGLYSLSSVVTVPSSSLGTQTYICNVNHKPSNTKVDKKVEPKSC

SEQ ID NO: 10436 - protein, 118 aa, synthetic construct; identical to SEQ ID NO: 7191
  REGION 1..118: note = Description of Artificial Sequence: Synthetic polypeptide
  REGION 1..118: note = VH of XENP020324

SEQ ID NO: 10437 - protein, 5 aa, synthetic construct
  REGION 1..5: note = Description of Artificial Sequence: Synthetic peptide
  REGION 1..5: note = XENP020324 vhCDR1
SYTMH

SEQ ID NO: 10438 - protein, 17 aa, synthetic construct
  REGION 1..17: note = Description of Artificial Sequence: Synthetic peptide
  REGION 1..17: note = XENP020324 vhCDR2
FISYDGNYKYYADSVKG

SEQ ID NO: 10439 - protein, 9 aa, synthetic construct
  REGION 1..9: note = Description of Artificial Sequence: Synthetic peptide
  REGION 1..9: note = XENP020324 vhCDR3
TGLLGPFDL

SEQ ID NO: 10440 - protein, 215 aa, synthetic construct; identical to SEQ ID NO: 9080
  REGION 1..215: note = Description of Artificial Sequence: Synthetic polypeptide
  REGION 1..215: note = XENP020324 [CTLA-4]_H3.10_L0.12_Fab Light Chain

SEQ ID NO: 10441 - protein, 108 aa, synthetic construct; identical to SEQ ID NO: 6193
  REGION 1..108: note = Description of Artificial Sequence: Synthetic polypeptide
  REGION 1..108: note = VL of XENP020324

SEQ ID NO: 10442 - protein, 12 aa, synthetic construct
  REGION 1..12: note = Description of Artificial Sequence: Synthetic peptide
  REGION 1..12: note = XENP020324 vlCDR1
RASQSVGSSYLA

SEQ ID NO: 10443 - protein, 7 aa, synthetic construct
  REGION 1..7: note = Description of Artificial Sequence: Synthetic peptide
  REGION 1..7: note = XENP020324 vlCDR2
GAFSRAT

SEQ ID NO: 10444 - protein, 9 aa, synthetic construct
  REGION 1..9: note = Description of Artificial Sequence: Synthetic peptide
  REGION 1..9: note = XENP020324 vlCDR3
QQYGSSPWT

SEQ ID NO: 10445 - protein, 221 aa, synthetic construct
  REGION 1..221: note = Description of Artificial Sequence: Synthetic polypeptide
  REGION 1..221: note = XENP020325 [CTLA-4]_H3.11_L0.12_Fab Heavy Chain
EVQLVESGGGLVKPGGSLRLSCAASGFTFSSYTMHWVRQAPGKGLEWVSFISYDGNHKYYADSVKGRFTISRDNAKNSLYLQMNSLRAEDTAVYYCARGGHLGPFDLWGQGTMVTVSSASTKGPSVFPLAPSSKSTSGGTAALGCLVKDYFPEPVTVSWNSGALTSGVHTFPAVLQSSGLYSLSSVVTVPSSSLGTQTYICNVNHKPSNTKVDKKVEPKSC

SEQ ID NO: 10446 - protein, 118 aa, synthetic construct; identical to SEQ ID NO: 7200
  REGION 1..118: note = Description of Artificial Sequence: Synthetic polypeptide
  REGION 1..118: note = VH of XENP020325

SEQ ID NO: 10447 - protein, 5 aa, synthetic construct
  REGION 1..5: note = Description of Artificial Sequence: Synthetic peptide
  REGION 1..5: note = XENP020325 vhCDR1
SYTMH

SEQ ID NO: 10448 - protein, 17 aa, synthetic construct
  REGION 1..17: note = Description of Artificial Sequence: Synthetic peptide
  REGION 1..17: note = XENP020325 vhCDR2
FISYDGNHKYYADSVKG

SEQ ID NO: 10449 - protein, 9 aa, synthetic construct
  REGION 1..9: note = Description of Artificial Sequence: Synthetic peptide
  REGION 1..9: note = XENP020325 vhCDR3
GGHLGPFDL

SEQ ID NO: 10450 - protein, 215 aa, synthetic construct; identical to SEQ ID NO: 9080
  REGION 1..215: note = Description of Artificial Sequence: Synthetic polypeptide
  REGION 1..215: note = XENP020325 [CTLA-4]_H3.11_L0.12_Fab Light Chain

SEQ ID NO: 10451 - protein, 108 aa, synthetic construct; identical to SEQ ID NO: 6193
  REGION 1..108: note = Description of Artificial Sequence: Synthetic polypeptide
  REGION 1..108: note = VL of XENP020325

SEQ ID NO: 10452 - protein, 12 aa, synthetic construct
  REGION 1..12: note = Description of Artificial Sequence: Synthetic peptide
  REGION 1..12: note = XENP020325 vlCDR1
RASQSVGSSYLA

SEQ ID NO: 10453 - protein, 7 aa, synthetic construct
  REGION 1..7: note = Description of Artificial Sequence: Synthetic peptide
  REGION 1..7: note = XENP020325 vlCDR2
GAFSRAT

SEQ ID NO: 10454 - protein, 9 aa, synthetic construct
  REGION 1..9: note = Description of Artificial Sequence: Synthetic peptide
  REGION 1..9: note = XENP020325 vlCDR3
QQYGSSPWT

SEQ ID NO: 10455 - protein, 221 aa, synthetic construct
  REGION 1..221: note = Description of Artificial Sequence: Synthetic polypeptide
  REGION 1..221: note = XENP020326 [CTLA-4]_H3.12_L0.12_Fab Heavy Chain
EVQLVESGGGLVKPGGSLRLSCAASGFTFSSYTMHWVRQAPGKGLEWVSFISYDGNHKYYADSVKGRFTISRDNAKNSLYLQMNSLRAEDTAVYYCARTSHLGPFDLWGQGTMVTVSSASTKGPSVFPLAPSSKSTSGGTAALGCLVKDYFPEPVTVSWNSGALTSGVHTFPAVLQSSGLYSLSSVVTVPSSSLGTQTYICNVNHKPSNTKVDKKVEPKSC

SEQ ID NO: 10456 - protein, 118 aa, synthetic construct; identical to SEQ ID NO: 7209
  REGION 1..118: note = Description of Artificial Sequence: Synthetic polypeptide
  REGION 1..118: note = VH of XENP020326

SEQ ID NO: 10457 - protein, 5 aa, synthetic construct
  REGION 1..5: note = Description of Artificial Sequence: Synthetic peptide
  REGION 1..5: note = XENP020326 vhCDR1
SYTMH

SEQ ID NO: 10458 - protein, 17 aa, synthetic construct
  REGION 1..17: note = Description of Artificial Sequence: Synthetic peptide
  REGION 1..17: note = XENP020326 vhCDR2
FISYDGNHKYYADSVKG

SEQ ID NO: 10459 - protein, 9 aa, synthetic construct
  REGION 1..9: note = Description of Artificial Sequence: Synthetic peptide
  REGION 1..9: note = XENP020326 vhCDR3
TSHLGPFDL

SEQ ID NO: 10460 - protein, 215 aa, synthetic construct; identical to SEQ ID NO: 9080
  REGION 1..215: note = Description of Artificial Sequence: Synthetic polypeptide
  REGION 1..215: note = XENP020326 [CTLA-4]_H3.12_L0.12_Fab Light Chain

SEQ ID NO: 10461 - protein, 108 aa, synthetic construct; identical to SEQ ID NO: 6193
  REGION 1..108: note = Description of Artificial Sequence: Synthetic polypeptide
  REGION 1..108: note = VL of XENP020326

SEQ ID NO: 10462 - protein, 12 aa, synthetic construct
  REGION 1..12: note = Description of Artificial Sequence: Synthetic peptide
  REGION 1..12: note = XENP020326 vlCDR1
RASQSVGSSYLA

SEQ ID NO: 10463 - protein, 7 aa, synthetic construct
  REGION 1..7: note = Description of Artificial Sequence: Synthetic peptide
  REGION 1..7: note = XENP020326 vlCDR2
GAFSRAT

SEQ ID NO: 10464 - protein, 9 aa, synthetic construct
  REGION 1..9: note = Description of Artificial Sequence: Synthetic peptide
  REGION 1..9: note = XENP020326 vlCDR3
QQYGSSPWT

SEQ ID NO: 10465 - protein, 221 aa, synthetic construct
  REGION 1..221: note = Description of Artificial Sequence: Synthetic polypeptide
  REGION 1..221: note = XENP020327 [CTLA-4]_H3.13_L0.12_Fab Heavy Chain
EVQLVESGGGLVKPGGSLRLSCAASGFTFSSYTMHWVRQAPGKGLEWVSFISYDGNHKYYADSVKGRFTISRDNAKNSLYLQMNSLRAEDTAVYYCARGGLLGPFDLWGQGTMVTVSSASTKGPSVFPLAPSSKSTSGGTAALGCLVKDYFPEPVTVSWNSGALTSGVHTFPAVLQSSGLYSLSSVVTVPSSSLGTQTYICNVNHKPSNTKVDKKVEPKSC

SEQ ID NO: 10466 - protein, 118 aa, synthetic construct; identical to SEQ ID NO: 7218
  REGION 1..118: note = Description of Artificial Sequence: Synthetic polypeptide
  REGION 1..118: note = VH of XENP020327

SEQ ID NO: 10467 - protein, 5 aa, synthetic construct
  REGION 1..5: note = Description of Artificial Sequence: Synthetic peptide
  REGION 1..5: note = XENP020327 vhCDR1
SYTMH

SEQ ID NO: 10468 - protein, 17 aa, synthetic construct
  REGION 1..17: note = Description of Artificial Sequence: Synthetic peptide
  REGION 1..17: note = XENP020327 vhCDR2
FISYDGNHKYYADSVKG

SEQ ID NO: 10469 - protein, 9 aa, synthetic construct
  REGION 1..9: note = Description of Artificial Sequence: Synthetic peptide
  REGION 1..9: note = XENP020327 vhCDR3
GGLLGPFDL

SEQ ID NO: 10470 - protein, 215 aa, synthetic construct; identical to SEQ ID NO: 9080
  REGION 1..215: note = Description of Artificial Sequence: Synthetic polypeptide
  REGION 1..215: note = XENP020327 [CTLA-4]_H3.13_L0.12_Fab Light Chain

SEQ ID NO: 10471 - protein, 108 aa, synthetic construct; identical to SEQ ID NO: 6193
  REGION 1..108: note = Description of Artificial Sequence: Synthetic polypeptide
  REGION 1..108: note = VL of XENP020327

SEQ ID NO: 10472 - protein, 12 aa, synthetic construct
  REGION 1..12: note = Description of Artificial Sequence: Synthetic peptide
  REGION 1..12: note = XENP020327 vlCDR1
RASQSVGSSYLA

SEQ ID NO: 10473 - protein, 7 aa, synthetic construct
  REGION 1..7: note = Description of Artificial Sequence: Synthetic peptide
  REGION 1..7: note = XENP020327 vlCDR2
GAFSRAT

SEQ ID NO: 10474 - protein, 9 aa, synthetic construct
  REGION 1..9: note = Description of Artificial Sequence: Synthetic peptide
  REGION 1..9: note = XENP020327 vlCDR3
QQYGSSPWT

SEQ ID NO: 10475 - protein, 221 aa, synthetic construct
  REGION 1..221: note = Description of Artificial Sequence: Synthetic polypeptide
  REGION 1..221: note = XENP020328 [CTLA-4]_H3.14_L0.12_Fab Heavy Chain
EVQLVESGGGLVKPGGSLRLSCAASGFTFSSYTMHWVRQAPGKGLEWVSFISYDGNHKYYADSVKGRFTISRDNAKNSLYLQMNSLRAEDTAVYYCARTSLLGPFDLWGQGTMVTVSSASTKGPSVFPLAPSSKSTSGGTAALGCLVKDYFPEPVTVSWNSGALTSGVHTFPAVLQSSGLYSLSSVVTVPSSSLGTQTYICNVNHKPSNTKVDKKVEPKSC

SEQ ID NO: 10476 - protein, 118 aa, synthetic construct; identical to SEQ ID NO: 7227
  REGION 1..118: note = Description of Artificial Sequence: Synthetic polypeptide
  REGION 1..118: note = VH of XENP020328

SEQ ID NO: 10477 - protein, 5 aa, synthetic construct
  REGION 1..5: note = Description of Artificial Sequence: Synthetic peptide
  REGION 1..5: note = XENP020328 vhCDR1
SYTMH

SEQ ID NO: 10478 - protein, 17 aa, synthetic construct
  REGION 1..17: note = Description of Artificial Sequence: Synthetic peptide
  REGION 1..17: note = XENP020328 vhCDR2
FISYDGNHKYYADSVKG

SEQ ID NO: 10479 - protein, 9 aa, synthetic construct
  REGION 1..9: note = Description of Artificial Sequence: Synthetic peptide
  REGION 1..9: note = XENP020328 vhCDR3
TSLLGPFDL

SEQ ID NO: 10480 - protein, 215 aa, synthetic construct; identical to SEQ ID NO: 9080
  REGION 1..215: note = Description of Artificial Sequence: Synthetic polypeptide
  REGION 1..215: note = XENP020328 [CTLA-4]_H3.14_L0.12_Fab Light Chain

SEQ ID NO: 10481 - protein, 108 aa, synthetic construct; identical to SEQ ID NO: 6193
  REGION 1..108: note = Description of Artificial Sequence: Synthetic polypeptide
  REGION 1..108: note = VL of XENP020328

SEQ ID NO: 10482 - protein, 12 aa, synthetic construct
  REGION 1..12: note = Description of Artificial Sequence: Synthetic peptide
  REGION 1..12: note = XENP020328 vlCDR1
RASQSVGSSYLA

SEQ ID NO: 10483 - protein, 7 aa, synthetic construct
  REGION 1..7: note = Description of Artificial Sequence: Synthetic peptide
  REGION 1..7: note = XENP020328 vlCDR2
GAFSRAT

SEQ ID NO: 10484 - protein, 9 aa, synthetic construct
  REGION 1..9: note = Description of Artificial Sequence: Synthetic peptide
  REGION 1..9: note = XENP020328 vlCDR3
QQYGSSPWT

SEQ ID NO: 10485 - protein, 221 aa, synthetic construct
  REGION 1..221: note = Description of Artificial Sequence: Synthetic polypeptide
  REGION 1..221: note = XENP020329 [CTLA-4]_H3.15_L0.12_Fab Heavy Chain
EVQLVESGGGLVKPGGSLRLSCAASGFTFSSYTMHWVRQAPGKGLEWVSFISYDGNQKYYADSVKGRFTISRDNAKNSLYLQMNSLRAEDTAVYYCARGGHLGPFDLWGQGTMVTVSSASTKGPSVFPLAPSSKSTSGGTAALGCLVKDYFPEPVTVSWNSGALTSGVHTFPAVLQSSGLYSLSSVVTVPSSSLGTQTYICNVNHKPSNTKVDKKVEPKSC

SEQ ID NO: 10486 - protein, 118 aa, synthetic construct; identical to SEQ ID NO: 7236
  REGION 1..118: note = Description of Artificial Sequence: Synthetic polypeptide
  REGION 1..118: note = VH of XENP020329

SEQ ID NO: 10487 - protein, 5 aa, synthetic construct
  REGION 1..5: note = Description of Artificial Sequence: Synthetic peptide
  REGION 1..5: note = XENP020329 vhCDR1
SYTMH

SEQ ID NO: 10488 - protein, 17 aa, synthetic construct
  REGION 1..17: note = Description of Artificial Sequence: Synthetic peptide
  REGION 1..17: note = XENP020329 vhCDR2
FISYDGNQKYYADSVKG

SEQ ID NO: 10489 - protein, 9 aa, synthetic construct
  REGION 1..9: note = Description of Artificial Sequence: Synthetic peptide
  REGION 1..9: note = XENP020329 vhCDR3
GGHLGPFDL

SEQ ID NO: 10490 - protein, 215 aa, synthetic construct; identical to SEQ ID NO: 9080
  REGION 1..215: note = Description of Artificial Sequence: Synthetic polypeptide
  REGION 1..215: note = XENP020329 [CTLA-4]_H3.15_L0.12_Fab Light Chain

SEQ ID NO: 10491 - protein, 108 aa, synthetic construct; identical to SEQ ID NO: 6193
  REGION 1..108: note = Description of Artificial Sequence: Synthetic polypeptide
  REGION 1..108: note = VL of XENP020329

SEQ ID NO: 10492 - protein, 12 aa, synthetic construct
  REGION 1..12: note = Description of Artificial Sequence: Synthetic peptide
  REGION 1..12: note = XENP020329 vlCDR1
RASQSVGSSYLA

SEQ ID NO: 10493 - protein, 7 aa, synthetic construct
  REGION 1..7: note = Description of Artificial Sequence: Synthetic peptide
  REGION 1..7: note = XENP020329 vlCDR2
GAFSRAT

SEQ ID NO: 10494 - protein, 9 aa, synthetic construct
  REGION 1..9: note = Description of Artificial Sequence: Synthetic peptide
  REGION 1..9: note = XENP020329 vlCDR3
QQYGSSPWT

SEQ ID NO: 10495 - protein, 221 aa, synthetic construct
  REGION 1..221: note = Description of Artificial Sequence: Synthetic polypeptide
  REGION 1..221: note = XENP020330 [CTLA-4]_H3.16_L0.12_Fab Heavy Chain
EVQLVESGGGLVKPGGSLRLSCAASGFTFSSYTMHWVRQAPGKGLEWVSFISYDGNQKYYADSVKGRFTISRDNAKNSLYLQMNSLRAEDTAVYYCARTSHLGPFDLWGQGTMVTVSSASTKGPSVFPLAPSSKSTSGGTAALGCLVKDYFPEPVTVSWNSGALTSGVHTFPAVLQSSGLYSLSSVVTVPSSSLGTQTYICNVNHKPSNTKVDKKVEPKSC

SEQ ID NO: 10496 - protein, 118 aa, synthetic construct; identical to SEQ ID NO: 7245
  REGION 1..118: note = Description of Artificial Sequence: Synthetic polypeptide
  REGION 1..118: note = VH of XENP020330

SEQ ID NO: 10497 - protein, 5 aa, synthetic construct
  REGION 1..5: note = Description of Artificial Sequence: Synthetic peptide
  REGION 1..5: note = XENP020330 vhCDR1
SYTMH

SEQ ID NO: 10498 - protein, 17 aa, synthetic construct
  REGION 1..17: note = Description of Artificial Sequence: Synthetic peptide
  REGION 1..17: note = XENP020330 vhCDR2
FISYDGNQKYYADSVKG

SEQ ID NO: 10499 - protein, 9 aa, synthetic construct
  REGION 1..9: note = Description of Artificial Sequence: Synthetic peptide
  REGION 1..9: note = XENP020330 vhCDR3
TSHLGPFDL

SEQ ID NO: 10500 - protein, 215 aa, synthetic construct; identical to SEQ ID NO: 9080
  REGION 1..215: note = Description of Artificial Sequence: Synthetic polypeptide
  REGION 1..215: note = XENP020330 [CTLA-4]_H3.16_L0.12_Fab Light Chain

SEQ ID NO: 10501 - protein, 108 aa, synthetic construct; identical to SEQ ID NO: 6193
  REGION 1..108: note = Description of Artificial Sequence: Synthetic polypeptide
  REGION 1..108: note = VL of XENP020330

SEQ ID NO: 10502 - protein, 12 aa, synthetic construct
  REGION 1..12: note = Description of Artificial Sequence: Synthetic peptide
  REGION 1..12: note = XENP020330 vlCDR1
RASQSVGSSYLA

SEQ ID NO: 10503 - protein, 7 aa, synthetic construct
  REGION 1..7: note = Description of Artificial Sequence: Synthetic peptide
  REGION 1..7: note = XENP020330 vlCDR2
GAFSRAT

SEQ ID NO: 10504 - protein, 9 aa, synthetic construct
  REGION 1..9: note = Description of Artificial Sequence: Synthetic peptide
  REGION 1..9: note = XENP020330 vlCDR3
QQYGSSPWT

SEQ ID NO: 10505 - protein, 221 aa, synthetic construct
  REGION 1..221: note = Description of Artificial Sequence: Synthetic polypeptide
  REGION 1..221: note = XENP020331 [CTLA-4]_H3.17_L0.12_Fab Heavy Chain
EVQLVESGGGLVKPGGSLRLSCAASGFTFSSYTMHWVRQAPGKGLEWVSFISYDGNQKYYADSVKGRFTISRDNAKNSLYLQMNSLRAEDTAVYYCARGGLLGPFDLWGQGTMVTVSSASTKGPSVFPLAPSSKSTSGGTAALGCLVKDYFPEPVTVSWNSGALTSGVHTFPAVLQSSGLYSLSSVVTVPSSSLGTQTYICNVNHKPSNTKVDKKVEPKSC

SEQ ID NO: 10506 - protein, 118 aa, synthetic construct; identical to SEQ ID NO: 7254
  REGION 1..118: note = Description of Artificial Sequence: Synthetic polypeptide
  REGION 1..118: note = VH of XENP020331

SEQ ID NO: 10507 - protein, 5 aa, synthetic construct
  REGION 1..5: note = Description of Artificial Sequence: Synthetic peptide
  REGION 1..5: note = XENP020331 vhCDR1
SYTMH

SEQ ID NO: 10508 - protein, 17 aa, synthetic construct
  REGION 1..17: note = Description of Artificial Sequence: Synthetic peptide
  REGION 1..17: note = XENP020331 vhCDR2
FISYDGNQKYYADSVKG

SEQ ID NO: 10509 - protein, 9 aa, synthetic construct
  REGION 1..9: note = Description of Artificial Sequence: Synthetic peptide
  REGION 1..9: note = XENP020331 vhCDR3
GGLLGPFDL

SEQ ID NO: 10510 - protein, 215 aa, synthetic construct; identical to SEQ ID NO: 9080
  REGION 1..215: note = Description of Artificial Sequence: Synthetic polypeptide
  REGION 1..215: note = XENP020331 [CTLA-4]_H3.17_L0.12_Fab Light Chain

SEQ ID NO: 10511 - protein, 108 aa, synthetic construct; identical to SEQ ID NO: 6193
  REGION 1..108: note = Description of Artificial Sequence: Synthetic polypeptide
  REGION 1..108: note = VL of XENP020331

SEQ ID NO: 10512 - protein, 12 aa, synthetic construct
  REGION 1..12: note = Description of Artificial Sequence: Synthetic peptide
  REGION 1..12: note = XENP020331 vlCDR1
RASQSVGSSYLA

SEQ ID NO: 10513 - protein, 7 aa, synthetic construct
  REGION 1..7: note = Description of Artificial Sequence: Synthetic peptide
  REGION 1..7: note = XENP020331 vlCDR2
GAFSRAT

SEQ ID NO: 10514 - protein, 9 aa, synthetic construct
  REGION 1..9: note = Description of Artificial Sequence: Synthetic peptide
  REGION 1..9: note = XENP020331 vlCDR3
QQYGSSPWT

SEQ ID NO: 10515 - protein, 221 aa, synthetic construct
  REGION 1..221: note = Description of Artificial Sequence: Synthetic polypeptide
  REGION 1..221: note = XENP020332 [CTLA-4]_H3.18_L0.12_Fab Heavy Chain
EVQLVESGGGLVKPGGSLRLSCAASGFTFSSYTMHWVRQAPGKGLEWVSFISYDGNQKYYADSVKGRFTISRDNAKNSLYLQMNSLRAEDTAVYYCARTSLLGPFDLWGQGTMVTVSSASTKGPSVFPLAPSSKSTSGGTAALGCLVKDYFPEPVTVSWNSGALTSGVHTFPAVLQSSGLYSLSSVVTVPSSSLGTQTYICNVNHKPSNTKVDKKVEPKSC

SEQ ID NO: 10516 - protein, 118 aa, synthetic construct; identical to SEQ ID NO: 7263
  REGION 1..118: note = Description of Artificial Sequence: Synthetic polypeptide
  REGION 1..118: note = VH of XENP020332

SEQ ID NO: 10517 - protein, 5 aa, synthetic construct
  REGION 1..5: note = Description of Artificial Sequence: Synthetic peptide
  REGION 1..5: note = XENP020332 vhCDR1
SYTMH

SEQ ID NO: 10518 - protein, 17 aa, synthetic construct
  REGION 1..17: note = Description of Artificial Sequence: Synthetic peptide
  REGION 1..17: note = XENP020332 vhCDR2
FISYDGNQKYYADSVKG

SEQ ID NO: 10519 - protein, 9 aa, synthetic construct
  REGION 1..9: note = Description of Artificial Sequence: Synthetic peptide
  REGION 1..9: note = XENP020332 vhCDR3
TSLLGPFDL

SEQ ID NO: 10520 - protein, 215 aa, synthetic construct; identical to SEQ ID NO: 9080
  REGION 1..215: note = Description of Artificial Sequence: Synthetic polypeptide
  REGION 1..215: note = XENP020332 [CTLA-4]_H3.18_L0.12_Fab Light Chain

SEQ ID NO: 10521 - protein, 108 aa, synthetic construct; identical to SEQ ID NO: 6193
  REGION 1..108: note = Description of Artificial Sequence: Synthetic polypeptide
  REGION 1..108: note = VL of XENP020332

SEQ ID NO: 10522 - protein, 12 aa, synthetic construct
  REGION 1..12: note = Description of Artificial Sequence: Synthetic peptide
  REGION 1..12: note = XENP020332 vlCDR1
RASQSVGSSYLA

SEQ ID NO: 10523 - protein, 7 aa, synthetic construct
  REGION 1..7: note = Description of Artificial Sequence: Synthetic peptide
  REGION 1..7: note = XENP020332 vlCDR2
GAFSRAT

SEQ ID NO: 10524 - protein, 9 aa, synthetic construct
  REGION 1..9: note = Description of Artificial Sequence: Synthetic peptide
  REGION 1..9: note = XENP020332 vlCDR3
QQYGSSPWT

SEQ ID NO: 10525 - protein, 221 aa, synthetic construct
  REGION 1..221: note = Description of Artificial Sequence: Synthetic polypeptide
  REGION 1..221: note = XENP020333 [CTLA-4]_H3.19_L0.12_Fab Heavy Chain
EVQLVESGGGLVKPGGSLRLSCAASGFTFSSYTMHWVRQAPGKGLEWVSFISYDGNTKYYADSVKGRFTISRDNAKNSLYLQMNSLRAEDTAVYYCARGGHLGPFDLWGQGTMVTVSSASTKGPSVFPLAPSSKSTSGGTAALGCLVKDYFPEPVTVSWNSGALTSGVHTFPAVLQSSGLYSLSSVVTVPSSSLGTQTYICNVNHKPSNTKVDKKVEPKSC

SEQ ID NO: 10526 - protein, 118 aa, synthetic construct; identical to SEQ ID NO: 7272
  REGION 1..118: note = Description of Artificial Sequence: Synthetic polypeptide
  REGION 1..118: note = VH of XENP020333

SEQ ID NO: 10527 - protein, 5 aa, synthetic construct
  REGION 1..5: note = Description of Artificial Sequence: Synthetic peptide
  REGION 1..5: note = XENP020333 vhCDR1
SYTMH

SEQ ID NO: 10528 - protein, 17 aa, synthetic construct
  REGION 1..17: note = Description of Artificial Sequence: Synthetic peptide
  REGION 1..17: note = XENP020333 vhCDR2
FISYDGNTKYYADSVKG

SEQ ID NO: 10529 - protein, 9 aa, synthetic construct
  REGION 1..9: note = Description of Artificial Sequence: Synthetic peptide
  REGION 1..9: note = XENP020333 vhCDR3
GGHLGPFDL

SEQ ID NO: 10530 - protein, 215 aa, synthetic construct; identical to SEQ ID NO: 9080
  REGION 1..215: note = Description of Artificial Sequence: Synthetic polypeptide
  REGION 1..215: note = XENP020333 [CTLA-4]_H3.19_L0.12_Fab Light Chain

SEQ ID NO: 10531 - protein, 108 aa, synthetic construct; identical to SEQ ID NO: 6193
  REGION 1..108: note = Description of Artificial Sequence: Synthetic polypeptide
  REGION 1..108: note = VL of XENP020333

SEQ ID NO: 10532 - protein, 12 aa, synthetic construct
  REGION 1..12: note = Description of Artificial Sequence: Synthetic peptide
  REGION 1..12: note = XENP020333 vlCDR1
RASQSVGSSYLA

SEQ ID NO: 10533 - protein, 7 aa, synthetic construct
  REGION 1..7: note = Description of Artificial Sequence: Synthetic peptide
  REGION 1..7: note = XENP020333 vlCDR2
GAFSRAT

SEQ ID NO: 10534 - protein, 9 aa, synthetic construct
  REGION 1..9: note = Description of Artificial Sequence: Synthetic peptide
  REGION 1..9: note = XENP020333 vlCDR3
QQYGSSPWT

SEQ ID NO: 10535 - protein, 221 aa, synthetic construct
  REGION 1..221: note = Description of Artificial Sequence: Synthetic polypeptide
  REGION 1..221: note = XENP020334 [CTLA-4]_H3.20_L0.12_Fab Heavy Chain
EVQLVESGGGLVKPGGSLRLSCAASGFTFSSYTMHWVRQAPGKGLEWVSFISYDGNTKYYADSVKGRFTISRDNAKNSLYLQMNSLRAEDTAVYYCARTSHLGPFDLWGQGTMVTVSSASTKGPSVFPLAPSSKSTSGGTAALGCLVKDYFPEPVTVSWNSGALTSGVHTFPAVLQSSGLYSLSSVVTVPSSSLGTQTYICNVNHKPSNTKVDKKVEPKSC

SEQ ID NO: 10536 - protein, 118 aa, synthetic construct; identical to SEQ ID NO: 7281
  REGION 1..118: note = Description of Artificial Sequence: Synthetic polypeptide
  REGION 1..118: note = VH of XENP020334

SEQ ID NO: 10537 - protein, 5 aa, synthetic construct
  REGION 1..5: note = Description of Artificial Sequence: Synthetic peptide
  REGION 1..5: note = XENP020334 vhCDR1
SYTMH

SEQ ID NO: 10538 - protein, 17 aa, synthetic construct
  REGION 1..17: note = Description of Artificial Sequence: Synthetic peptide
  REGION 1..17: note = XENP020334 vhCDR2
FISYDGNTKYYADSVKG

SEQ ID NO: 10539 - protein, 9 aa, synthetic construct
  REGION 1..9: note = Description of Artificial Sequence: Synthetic peptide
  REGION 1..9: note = XENP020334 vhCDR3
TSHLGPFDL

SEQ ID NO: 10540 - protein, 215 aa, synthetic construct; identical to SEQ ID NO: 9080
  REGION 1..215: note = Description of Artificial Sequence: Synthetic polypeptide
  REGION 1..215: note = XENP020334 [CTLA-4]_H3.20_L0.12_Fab Light Chain

SEQ ID NO: 10541 - protein, 108 aa, synthetic construct; identical to SEQ ID NO: 6193
  REGION 1..108: note = Description of Artificial Sequence: Synthetic polypeptide
  REGION 1..108: note = VL of XENP020334

SEQ ID NO: 10542 - protein, 12 aa, synthetic construct
  REGION 1..12: note = Description of Artificial Sequence: Synthetic peptide
  REGION 1..12: note = XENP020334 vlCDR1
RASQSVGSSYLA

SEQ ID NO: 10543 - protein, 7 aa, synthetic construct
  REGION 1..7: note = Description of Artificial Sequence: Synthetic peptide
  REGION 1..7: note = XENP020334 vlCDR2
GAFSRAT

SEQ ID NO: 10544 - protein, 9 aa, synthetic construct
  REGION 1..9: note = Description of Artificial Sequence: Synthetic peptide
  REGION 1..9: note = XENP020334 vlCDR3
QQYGSSPWT

SEQ ID NO: 10545 - protein, 221 aa, synthetic construct
  REGION 1..221: note = Description of Artificial Sequence: Synthetic polypeptide
  REGION 1..221: note = XENP020335 [CTLA-4]_H3.21_L0.12_Fab Heavy Chain
EVQLVESGGGLVKPGGSLRLSCAASGFTFSSYTMHWVRQAPGKGLEWVSFISYDGNTKYYADSVKGRFTISRDNAKNSLYLQMNSLRAEDTAVYYCARGGLLGPFDLWGQGTMVTVSSASTKGPSVFPLAPSSKSTSGGTAALGCLVKDYFPEPVTVSWNSGALTSGVHTFPAVLQSSGLYSLSSVVTVPSSSLGTQTYICNVNHKPSNTKVDKKVEPKSC

SEQ ID NO: 10546 - protein, 118 aa, synthetic construct; identical to SEQ ID NO: 7290
  REGION 1..118: note = Description of Artificial Sequence: Synthetic polypeptide
  REGION 1..118: note = VH of XENP020335

SEQ ID NO: 10547 - protein, 5 aa, synthetic construct
  REGION 1..5: note = Description of Artificial Sequence: Synthetic peptide
  REGION 1..5: note = XENP020335 vhCDR1
SYTMH

SEQ ID NO: 10548 - protein, 17 aa, synthetic construct
  REGION 1..17: note = Description of Artificial Sequence: Synthetic peptide
  REGION 1..17: note = XENP020335 vhCDR2
FISYDGNTKYYADSVKG

SEQ ID NO: 10549 - protein, 9 aa, synthetic construct
  REGION 1..9: note = Description of Artificial Sequence: Synthetic peptide
  REGION 1..9: note = XENP020335 vhCDR3
GGLLGPFDL

SEQ ID NO: 10550 - protein, 215 aa, synthetic construct; identical to SEQ ID NO: 9080
  REGION 1..215: note = Description of Artificial Sequence: Synthetic polypeptide
  REGION 1..215: note = XENP020335 [CTLA-4]_H3.21_L0.12_Fab Light Chain

SEQ ID NO: 10551 - protein, 108 aa, synthetic construct; identical to SEQ ID NO: 6193
  REGION 1..108: note = Description of Artificial Sequence: Synthetic polypeptide
  REGION 1..108: note = VL of XENP020335

SEQ ID NO: 10552 - protein, 12 aa, synthetic construct
  REGION 1..12: note = Description of Artificial Sequence: Synthetic peptide
  REGION 1..12: note = XENP020335 vlCDR1
RASQSVGSSYLA

SEQ ID NO: 10553 - protein, 7 aa, synthetic construct
  REGION 1..7: note = Description of Artificial Sequence: Synthetic peptide
  REGION 1..7: note = XENP020335 vlCDR2
GAFSRAT

SEQ ID NO: 10554 - protein, 9 aa, synthetic construct
  REGION 1..9: note = Description of Artificial Sequence: Synthetic peptide
  REGION 1..9: note = XENP020335 vlCDR3
QQYGSSPWT

SEQ ID NO: 10555 - protein, 221 aa, synthetic construct
  REGION 1..221: note = Description of Artificial Sequence: Synthetic polypeptide
  REGION 1..221: note = XENP020336 [CTLA-4]_H3.22_L0.12_Fab Heavy Chain
EVQLVESGGGLVKPGGSLRLSCAASGFTFSSYTMHWVRQAPGKGLEWVSFISYDGNTKYYADSVKGRFTISRDNAKNSLYLQMNSLRAEDTAVYYCARTSLLGPFDLWGQGTMVTVSSASTKGPSVFPLAPSSKSTSGGTAALGCLVKDYFPEPVTVSWNSGALTSGVHTFPAVLQSSGLYSLSSVVTVPSSSLGTQTYICNVNHKPSNTKVDKKVEPKSC

SEQ ID NO: 10556 - protein, 118 aa, synthetic construct; identical to SEQ ID NO: 7299
  REGION 1..118: note = Description of Artificial Sequence: Synthetic polypeptide
  REGION 1..118: note = VH of XENP020336

SEQ ID NO: 10557 - protein, 5 aa, synthetic construct
  REGION 1..5: note = Description of Artificial Sequence: Synthetic peptide
  REGION 1..5: note = XENP020336 vhCDR1
SYTMH

SEQ ID NO: 10558 - protein, 17 aa, synthetic construct
  REGION 1..17: note = Description of Artificial Sequence: Synthetic peptide
  REGION 1..17: note = XENP020336 vhCDR2
FISYDGNTKYYADSVKG

SEQ ID NO: 10559 - protein, 9 aa, synthetic construct
  REGION 1..9: note = Description of Artificial Sequence: Synthetic peptide
  REGION 1..9: note = XENP020336 vhCDR3
TSLLGPFDL

SEQ ID NO: 10560 - protein, 215 aa, synthetic construct; identical to SEQ ID NO: 9080
  REGION 1..215: note = Description of Artificial Sequence: Synthetic polypeptide
  REGION 1..215: note = XENP020336 [CTLA-4]_H3.22_L0.12_Fab Light Chain

SEQ ID NO: 10561 - protein, 108 aa, synthetic construct; identical to SEQ ID NO: 6193
  REGION 1..108: note = Description of Artificial Sequence: Synthetic polypeptide
  REGION 1..108: note = VL of XENP020336

SEQ ID NO: 10562 - protein, 12 aa, synthetic construct
  REGION 1..12: note = Description of Artificial Sequence: Synthetic peptide
  REGION 1..12: note = XENP020336 vlCDR1
RASQSVGSSYLA

SEQ ID NO: 10563 - protein, 7 aa, synthetic construct
  REGION 1..7: note = Description of Artificial Sequence: Synthetic peptide
  REGION 1..7: note = XENP020336 vlCDR2
GAFSRAT

SEQ ID NO: 10564 - protein, 9 aa, synthetic construct
  REGION 1..9: note = Description of Artificial Sequence: Synthetic peptide
  REGION 1..9: note = XENP020336 vlCDR3
QQYGSSPWT

SEQ ID NO: 10565 - protein, 221 aa, synthetic construct
  REGION 1..221: note = Description of Artificial Sequence: Synthetic polypeptide
  REGION 1..221: note = XENP020337 [CTLA-4]_H3.23_L0.12_Fab Heavy Chain
EVQLVESGGGLVKPGGSLRLSCAASGFTFSSYTMHWVRQAPGKGLEWVSFISYDGNYKYYADSVKGRFTISRDNAKNSLYLQMNSLRAEDTAVYYCARGGHLGPFDLWGQGTMVTVSSASTKGPSVFPLAPSSKSTSGGTAALGCLVKDYFPEPVTVSWNSGALTSGVHTFPAVLQSSGLYSLSSVVTVPSSSLGTQTYICNVNHKPSNTKVDKKVEPKSC

SEQ ID NO: 10566 - protein, 118 aa, synthetic construct; identical to SEQ ID NO: 2395
  REGION 1..118: note = Description of Artificial Sequence: Synthetic polypeptide
  REGION 1..118: note = VH of XENP020337

SEQ ID NO: 10567 - protein, 5 aa, synthetic construct
  REGION 1..5: note = Description of Artificial Sequence: Synthetic peptide
  REGION 1..5: note = XENP020337 vhCDR1
SYTMH

SEQ ID NO: 10568 - protein, 17 aa, synthetic construct
  REGION 1..17: note = Description of Artificial Sequence: Synthetic peptide
  REGION 1..17: note = XENP020337 vhCDR2
FISYDGNYKYYADSVKG

SEQ ID NO: 10569 - protein, 9 aa, synthetic construct
  REGION 1..9: note = Description of Artificial Sequence: Synthetic peptide
  REGION 1..9: note = XENP020337 vhCDR3
GGHLGPFDL

SEQ ID NO: 10570 - protein, 215 aa, synthetic construct; identical to SEQ ID NO: 9080
  REGION 1..215: note = Description of Artificial Sequence: Synthetic polypeptide
  REGION 1..215: note = XENP020337 [CTLA-4]_H3.23_L0.12_Fab Light Chain

SEQ ID NO: 10571 - protein, 108 aa, synthetic construct; identical to SEQ ID NO: 6193
  REGION 1..108: note = Description of Artificial Sequence: Synthetic polypeptide
  REGION 1..108: note = VL of XENP020337

SEQ ID NO: 10572 - protein, 12 aa, synthetic construct
  REGION 1..12: note = Description of Artificial Sequence: Synthetic peptide
  REGION 1..12: note = XENP020337 vlCDR1
RASQSVGSSYLA

SEQ ID NO: 10573 - protein, 7 aa, synthetic construct
  REGION 1..7: note = Description of Artificial Sequence: Synthetic peptide
  REGION 1..7: note = XENP020337 vlCDR2
GAFSRAT

SEQ ID NO: 10574 - protein, 9 aa, synthetic construct
  REGION 1..9: note = Description of Artificial Sequence: Synthetic peptide
  REGION 1..9: note = XENP020337 vlCDR3
QQYGSSPWT

SEQ ID NO: 10575 - protein, 221 aa, synthetic construct
  REGION 1..221: note = Description of Artificial Sequence: Synthetic polypeptide
  REGION 1..221: note = XENP020338 [CTLA-4]_H3.24_L0.12_Fab Heavy Chain
EVQLVESGGGLVKPGGSLRLSCAASGFTFSSYTMHWVRQAPGKGLEWVSFISYDGNYKYYADSVKGRFTISRDNAKNSLYLQMNSLRAEDTAVYYCARTSHLGPFDLWGQGTMVTVSSASTKGPSVFPLAPSSKSTSGGTAALGCLVKDYFPEPVTVSWNSGALTSGVHTFPAVLQSSGLYSLSSVVTVPSSSLGTQTYICNVNHKPSNTKVDKKVEPKSC

SEQ ID NO: 10576 - protein, 118 aa, synthetic construct; identical to SEQ ID NO: 7317
  REGION 1..118: note = Description of Artificial Sequence: Synthetic polypeptide
  REGION 1..118: note = VH of XENP020338

SEQ ID NO: 10577 - protein, 5 aa, synthetic construct
  REGION 1..5: note = Description of Artificial Sequence: Synthetic peptide
  REGION 1..5: note = XENP020338 vhCDR1
SYTMH

SEQ ID NO: 10578 - protein, 17 aa, synthetic construct
  REGION 1..17: note = Description of Artificial Sequence: Synthetic peptide
  REGION 1..17: note = XENP020338 vhCDR2
FISYDGNYKYYADSVKG

SEQ ID NO: 10579 - protein, 9 aa, synthetic construct
  REGION 1..9: note = Description of Artificial Sequence: Synthetic peptide
  REGION 1..9: note = XENP020338 vhCDR3
TSHLGPFDL

SEQ ID NO: 10580 - protein, 215 aa, synthetic construct; identical to SEQ ID NO: 9080
  REGION 1..215: note = Description of Artificial Sequence: Synthetic polypeptide
  REGION 1..215: note = XENP020338 [CTLA-4]_H3.24_L0.12_Fab Light Chain

SEQ ID NO: 10581 - protein, 108 aa, synthetic construct; identical to SEQ ID NO: 6193
  REGION 1..108: note = Description of Artificial Sequence: Synthetic polypeptide
  REGION 1..108: note = VL of XENP020338

SEQ ID NO: 10582 - protein, 12 aa, synthetic construct
  REGION 1..12: note = Description of Artificial Sequence: Synthetic peptide
  REGION 1..12: note = XENP020338 vlCDR1
RASQSVGSSYLA

SEQ ID NO: 10583 - protein, 7 aa, synthetic construct
  REGION 1..7: note = Description of Artificial Sequence: Synthetic peptide
  REGION 1..7: note = XENP020338 vlCDR2
GAFSRAT

SEQ ID NO: 10584 - protein, 9 aa, synthetic construct
  REGION 1..9: note = Description of Artificial Sequence: Synthetic peptide
  REGION 1..9: note = XENP020338 vlCDR3
QQYGSSPWT

SEQ ID NO: 10585 - protein, 221 aa, synthetic construct
  REGION 1..221: note = Description of Artificial Sequence: Synthetic polypeptide
  REGION 1..221: note = XENP020339 [CTLA-4]_H3.25_L0.12_Fab Heavy Chain
EVQLVESGGGLVKPGGSLRLSCAASGFTFSSYTMHWVRQAPGKGLEWVSFISYDGNYKYYADSVKGRFTISRDNAKNSLYLQMNSLRAEDTAVYYCARGGLLGPFDLWGQGTMVTVSSASTKGPSVFPLAPSSKSTSGGTAALGCLVKDYFPEPVTVSWNSGALTSGVHTFPAVLQSSGLYSLSSVVTVPSSSLGTQTYICNVNHKPSNTKVDKKVEPKSC

SEQ ID NO: 10586 - protein, 118 aa, synthetic construct; identical to SEQ ID NO: 7326
  REGION 1..118: note = Description of Artificial Sequence: Synthetic polypeptide
  REGION 1..118: note = VH of XENP020339

SEQ ID NO: 10587 - protein, 5 aa, synthetic construct
  REGION 1..5: note = Description of Artificial Sequence: Synthetic peptide
  REGION 1..5: note = XENP020339 vhCDR1
SYTMH

SEQ ID NO: 10588 - protein, 17 aa, synthetic construct
  REGION 1..17: note = Description of Artificial Sequence: Synthetic peptide
  REGION 1..17: note = XENP020339 vhCDR2
FISYDGNYKYYADSVKG

SEQ ID NO: 10589 - protein, 9 aa, synthetic construct
  REGION 1..9: note = Description of Artificial Sequence: Synthetic peptide
  REGION 1..9: note = XENP020339 vhCDR3
GGLLGPFDL

SEQ ID NO: 10590 - protein, 215 aa, synthetic construct; identical to SEQ ID NO: 9080
  REGION 1..215: note = Description of Artificial Sequence: Synthetic polypeptide
  REGION 1..215: note = XENP020339 [CTLA-4]_H3.25_L0.12_Fab Light Chain

SEQ ID NO: 10591 - protein, 108 aa, synthetic construct; identical to SEQ ID NO: 6193
  REGION 1..108: note = Description of Artificial Sequence: Synthetic polypeptide
  REGION 1..108: note = VL of XENP020339

SEQ ID NO: 10592 - protein, 12 aa, synthetic construct
  REGION 1..12: note = Description of Artificial Sequence: Synthetic peptide
  REGION 1..12: note = XENP020339 vlCDR1
RASQSVGSSYLA

SEQ ID NO: 10593 - protein, 7 aa, synthetic construct
  REGION 1..7: note = Description of Artificial Sequence: Synthetic peptide
  REGION 1..7: note = XENP020339 vlCDR2
GAFSRAT

SEQ ID NO: 10594 - protein, 9 aa, synthetic construct
  REGION 1..9: note = Description of Artificial Sequence: Synthetic peptide
  REGION 1..9: note = XENP020339 vlCDR3
QQYGSSPWT

SEQ ID NO: 10595 - protein, 221 aa, synthetic construct
  REGION 1..221: note = Description of Artificial Sequence: Synthetic polypeptide
  REGION 1..221: note = XENP020340 [CTLA-4]_H3.26_L0.12_Fab Heavy Chain
EVQLVESGGGLVKPGGSLRLSCAASGFTFSSYTMHWVRQAPGKGLEWVSFISYDGNYKYYADSVKGRFTISRDNAKNSLYLQMNSLRAEDTAVYYCARTSLLGPFDLWGQGTMVTVSSASTKGPSVFPLAPSSKSTSGGTAALGCLVKDYFPEPVTVSWNSGALTSGVHTFPAVLQSSGLYSLSSVVTVPSSSLGTQTYICNVNHKPSNTKVDKKVEPKSC

SEQ ID NO: 10596 - protein, 118 aa, synthetic construct; identical to SEQ ID NO: 7335
  REGION 1..118: note = Description of Artificial Sequence: Synthetic polypeptide
  REGION 1..118: note = VH of XENP020340

SEQ ID NO: 10597 - protein, 5 aa, synthetic construct
  REGION 1..5: note = Description of Artificial Sequence: Synthetic peptide
  REGION 1..5: note = XENP020340 vhCDR1
SYTMH

SEQ ID NO: 10598 - protein, 17 aa, synthetic construct
  REGION 1..17: note = Description of Artificial Sequence: Synthetic peptide
  REGION 1..17: note = XENP020340 vhCDR2
FISYDGNYKYYADSVKG

SEQ ID NO: 10599 - protein, 9 aa, synthetic construct
  REGION 1..9: note = Description of Artificial Sequence: Synthetic peptide
  REGION 1..9: note = XENP020340 vhCDR3
TSLLGPFDL

SEQ ID NO: 10600 - protein, 215 aa, synthetic construct; identical to SEQ ID NO: 9080
  REGION 1..215: note = Description of Artificial Sequence: Synthetic polypeptide
  REGION 1..215: note = XENP020340 [CTLA-4]_H3.26_L0.12_Fab Light Chain

SEQ ID NO: 10601 - protein, 108 aa, synthetic construct; identical to SEQ ID NO: 6193
  REGION 1..108: note = Description of Artificial Sequence: Synthetic polypeptide
  REGION 1..108: note = VL of XENP020340

SEQ ID NO: 10602 - protein, 12 aa, synthetic construct
  REGION 1..12: note = Description of Artificial Sequence: Synthetic peptide
  REGION 1..12: note = XENP020340 vlCDR1
RASQSVGSSYLA

SEQ ID NO: 10603 - protein, 7 aa, synthetic construct
  REGION 1..7: note = Description of Artificial Sequence: Synthetic peptide
  REGION 1..7: note = XENP020340 vlCDR2
GAFSRAT

SEQ ID NO: 10604 - protein, 9 aa, synthetic construct
  REGION 1..9: note = Description of Artificial Sequence: Synthetic peptide
  REGION 1..9: note = XENP020340 vlCDR3
QQYGSSPWT

SEQ ID NO: 10605 - protein, 221 aa, synthetic construct; identical to SEQ ID NO: 10385
  REGION 1..221: note = Description of Artificial Sequence: Synthetic polypeptide
  REGION 1..221: note = XENP020341 [CTLA-4]_H3.4_L0.118_Fab Heavy Chain

SEQ ID NO: 10606 - protein, 118 aa, synthetic construct; identical to SEQ ID NO: 7137
  REGION 1..118: note = Description of Artificial Sequence: Synthetic polypeptide
  REGION 1..118: note = VH of XENP020341

SEQ ID NO: 10607 - protein, 5 aa, synthetic construct
  REGION 1..5: note = Description of Artificial Sequence: Synthetic peptide
  REGION 1..5: note = XENP020341 vhCDR1
SYTMH

SEQ ID NO: 10608 - protein, 17 aa, synthetic construct
  REGION 1..17: note = Description of Artificial Sequence: Synthetic peptide
  REGION 1..17: note = XENP020341 vhCDR2
FISYDGNHKYYADSVKG

SEQ ID NO: 10609 - protein, 9 aa, synthetic construct
  REGION 1..9: note = Description of Artificial Sequence: Synthetic peptide
  REGION 1..9: note = XENP020341 vhCDR3
TGHLGPFDL

SEQ ID NO: 10610 - protein, 215 aa, synthetic construct
  REGION 1..215: note = Description of Artificial Sequence: Synthetic polypeptide
  REGION 1..215: note = XENP020341 [CTLA-4]_H3.4_L0.118_Fab Light Chain
EIVLTQSPATLSVSPGERATLSCRASQSVGSSYLAWYQQKPGQAPRLLIYGAFSRATGIPDRFSGSGSGTDFTLTISRLEPEDFAVYYCQQYGSSPWTFGQGTKVEIKRTVAAPSVFIFPPSDEQLKSGTASVVCLLNNFYPREAKVQWKVDNALQSGNSQESVTEQDSKDSTYSLSSTLTLSKADYEKHKVYACEVTHQGLSSPVTKSFNRGEC

SEQ ID NO: 10611 - protein, 108 aa, synthetic construct; identical to SEQ ID NO: 7345
  REGION 1..108: note = Description of Artificial Sequence: Synthetic polypeptide
  REGION 1..108: note = VL of XENP020341

SEQ ID NO: 10612 - protein, 12 aa, synthetic construct
  REGION 1..12: note = Description of Artificial Sequence: Synthetic peptide
  REGION 1..12: note = XENP020341 vlCDR1
RASQSVGSSYLA

SEQ ID NO: 10613 - protein, 7 aa, synthetic construct
  REGION 1..7: note = Description of Artificial Sequence: Synthetic peptide
  REGION 1..7: note = XENP020341 vlCDR2
GAFSRAT

SEQ ID NO: 10614 - protein, 9 aa, synthetic construct
  REGION 1..9: note = Description of Artificial Sequence: Synthetic peptide
  REGION 1..9: note = XENP020341 vlCDR3
QQYGSSPWT

SEQ ID NO: 10615 - protein, 221 aa, synthetic construct; identical to SEQ ID NO: 10385
  REGION 1..221: note = Description of Artificial Sequence: Synthetic polypeptide
  REGION 1..221: note = XENP020342 [CTLA-4]_H3.4_L0.119_Fab Heavy Chain

SEQ ID NO: 10616 - protein, 118 aa, synthetic construct; identical to SEQ ID NO: 7137
  REGION 1..118: note = Description of Artificial Sequence: Synthetic polypeptide
  REGION 1..118: note = VH of XENP020342

SEQ ID NO: 10617 - protein, 5 aa, synthetic construct
  REGION 1..5: note = Description of Artificial Sequence: Synthetic peptide
  REGION 1..5: note = XENP020342 vhCDR1
SYTMH

SEQ ID NO: 10618 - protein, 17 aa, synthetic construct
  REGION 1..17: note = Description of Artificial Sequence: Synthetic peptide
  REGION 1..17: note = XENP020342 vhCDR2
FISYDGNHKYYADSVKG

SEQ ID NO: 10619 - protein, 9 aa, synthetic construct
  REGION 1..9: note = Description of Artificial Sequence: Synthetic peptide
  REGION 1..9: note = XENP020342 vhCDR3
TGHLGPFDL

SEQ ID NO: 10620 - protein, 215 aa, synthetic construct; identical to SEQ ID NO: 7600
  REGION 1..215: note = Description of Artificial Sequence: Synthetic polypeptide
  REGION 1..215: note = XENP020342 [CTLA-4]_H3.4_L0.119_Fab Light Chain

SEQ ID NO: 10621 - protein, 108 aa, synthetic construct; identical to SEQ ID NO: 3741
  REGION 1..108: note = Description of Artificial Sequence: Synthetic polypeptide
  REGION 1..108: note = VL of XENP020342

SEQ ID NO: 10622 - protein, 12 aa, synthetic construct
  REGION 1..12: note = Description of Artificial Sequence: Synthetic peptide
  REGION 1..12: note = XENP020342 vlCDR1
RASQSVGSSYLA

SEQ ID NO: 10623 - protein, 7 aa, synthetic construct
  REGION 1..7: note = Description of Artificial Sequence: Synthetic peptide
  REGION 1..7: note = XENP020342 vlCDR2
GAFSRAT

SEQ ID NO: 10624 - protein, 9 aa, synthetic construct
  REGION 1..9: note = Description of Artificial Sequence: Synthetic peptide
  REGION 1..9: note = XENP020342 vlCDR3
QQYGSSPWT

SEQ ID NO: 10625 - protein, 221 aa, synthetic construct; identical to SEQ ID NO: 10385
  REGION 1..221: note = Description of Artificial Sequence: Synthetic polypeptide
  REGION 1..221: note = XENP020343 [CTLA-4]_H3.4_L0.120_Fab Heavy Chain

SEQ ID NO: 10626 - protein, 118 aa, synthetic construct; identical to SEQ ID NO: 7137
  REGION 1..118: note = Description of Artificial Sequence: Synthetic polypeptide
  REGION 1..118: note = VH of XENP020343

SEQ ID NO: 10627 - protein, 5 aa, synthetic construct
  REGION 1..5: note = Description of Artificial Sequence: Synthetic peptide
  REGION 1..5: note = XENP020343 vhCDR1
SYTMH

SEQ ID NO: 10628 - protein, 17 aa, synthetic construct
  REGION 1..17: note = Description of Artificial Sequence: Synthetic peptide
  REGION 1..17: note = XENP020343 vhCDR2
FISYDGNHKYYADSVKG

SEQ ID NO: 10629 - protein, 9 aa, synthetic construct
  REGION 1..9: note = Description of Artificial Sequence: Synthetic peptide
  REGION 1..9: note = XENP020343 vhCDR3
TGHLGPFDL

SEQ ID NO: 10630 - protein, 215 aa, synthetic construct
  REGION 1..215: note = Description of Artificial Sequence: Synthetic polypeptide
  REGION 1..215: note = XENP020343 [CTLA-4]_H3.4_L0.120_Fab Light Chain
EIVLTQSPGTLSVSPGERATLSCRASQSVSSSYLAWYQQKPGQAPRLLIYGAFSRATGIPDRFSGSGSGTDFTLTISRLEPEDFAVYYCQQYGSSPWTFGQGTKVEIKRTVAAPSVFIFPPSDEQLKSGTASVVCLLNNFYPREAKVQWKVDNALQSGNSQESVTEQDSKDSTYSLSSTLTLSKADYEKHKVYACEVTHQGLSSPVTKSFNRGEC

SEQ ID NO: 10631 - protein, 108 aa, synthetic construct; identical to SEQ ID NO: 7363
  REGION 1..108: note = Description of Artificial Sequence: Synthetic polypeptide
  REGION 1..108: note = VL of XENP020343

SEQ ID NO: 10632 - protein, 12 aa, synthetic construct
  REGION 1..12: note = Description of Artificial Sequence: Synthetic peptide
  REGION 1..12: note = XENP020343 vlCDR1
RASQSVSSSYLA

SEQ ID NO: 10633 - protein, 7 aa, synthetic construct
  REGION 1..7: note = Description of Artificial Sequence: Synthetic peptide
  REGION 1..7: note = XENP020343 vlCDR2
GAFSRAT

SEQ ID NO: 10634 - protein, 9 aa, synthetic construct
  REGION 1..9: note = Description of Artificial Sequence: Synthetic peptide
  REGION 1..9: note = XENP020343 vlCDR3
QQYGSSPWT

SEQ ID NO: 10635 - protein, 221 aa, synthetic construct; identical to SEQ ID NO: 10385
  REGION 1..221: note = Description of Artificial Sequence: Synthetic polypeptide
  REGION 1..221: note = XENP020344 [CTLA-4]_H3.4_L0.121_Fab Heavy Chain

SEQ ID NO: 10636 - protein, 118 aa, synthetic construct; identical to SEQ ID NO: 7137
  REGION 1..118: note = Description of Artificial Sequence: Synthetic polypeptide
  REGION 1..118: note = VH of XENP020344

SEQ ID NO: 10637 - protein, 5 aa, synthetic construct
  REGION 1..5: note = Description of Artificial Sequence: Synthetic peptide
  REGION 1..5: note = XENP020344 vhCDR1
SYTMH

SEQ ID NO: 10638 - protein, 17 aa, synthetic construct
  REGION 1..17: note = Description of Artificial Sequence: Synthetic peptide
  REGION 1..17: note = XENP020344 vhCDR2
FISYDGNHKYYADSVKG

SEQ ID NO: 10639 - protein, 9 aa, synthetic construct
  REGION 1..9: note = Description of Artificial Sequence: Synthetic peptide
  REGION 1..9: note = XENP020344 vhCDR3
TGHLGPFDL

SEQ ID NO: 10640 - protein, 215 aa, synthetic construct
  REGION 1..215: note = Description of Artificial Sequence: Synthetic polypeptide
  REGION 1..215: note = XENP020344 [CTLA-4]_H3.4_L0.121_Fab Light Chain
EIVLTQSPGTLSVSPGERATLSCRASQSVGSSYLAWYQQKPGQAPRLLIYGASSRATGIPDRFSGSGSGTDFTLTISRLEPEDFAVYYCQQYGSSPWTFGQGTKVEIKRTVAAPSVFIFPPSDEQLKSGTASVVCLLNNFYPREAKVQWKVDNALQSGNSQESVTEQDSKDSTYSLSSTLTLSKADYEKHKVYACEVTHQGLSSPVTKSFNRGEC

SEQ ID NO: 10641 - protein, 108 aa, synthetic construct; identical to SEQ ID NO: 7372
  REGION 1..108: note = Description of Artificial Sequence: Synthetic polypeptide
  REGION 1..108: note = VL of XENP020344

SEQ ID NO: 10642 - protein, 12 aa, synthetic construct
  REGION 1..12: note = Description of Artificial Sequence: Synthetic peptide
  REGION 1..12: note = XENP020344 vlCDR1
RASQSVGSSYLA

SEQ ID NO: 10643 - protein, 7 aa, synthetic construct
  REGION 1..7: note = Description of Artificial Sequence: Synthetic peptide
  REGION 1..7: note = XENP020344 vlCDR2
GASSRAT

SEQ ID NO: 10644 - protein, 9 aa, synthetic construct
  REGION 1..9: note = Description of Artificial Sequence: Synthetic peptide
  REGION 1..9: note = XENP020344 vlCDR3
QQYGSSPWT

SEQ ID NO: 10645 - protein, 221 aa, synthetic construct; identical to SEQ ID NO: 10385
  REGION 1..221: note = Description of Artificial Sequence: Synthetic polypeptide
  REGION 1..221: note = XENP020345 [CTLA-4]_H3.4_L0.122_Fab Heavy Chain

SEQ ID NO: 10646 - protein, 118 aa, synthetic construct; identical to SEQ ID NO: 7137
  REGION 1..118: note = Description of Artificial Sequence: Synthetic polypeptide
  REGION 1..118: note = VH of XENP020345

SEQ ID NO: 10647 - protein, 5 aa, synthetic construct
  REGION 1..5: note = Description of Artificial Sequence: Synthetic peptide
  REGION 1..5: note = XENP020345 vhCDR1
SYTMH

SEQ ID NO: 10648 - protein, 17 aa, synthetic construct
  REGION 1..17: note = Description of Artificial Sequence: Synthetic peptide
  REGION 1..17: note = XENP020345 vhCDR2
FISYDGNHKYYADSVKG

SEQ ID NO: 10649 - protein, 9 aa, synthetic construct
  REGION 1..9: note = Description of Artificial Sequence: Synthetic peptide
  REGION 1..9: note = XENP020345 vhCDR3
TGHLGPFDL

SEQ ID NO: 10650 - protein, 215 aa, synthetic construct; identical to SEQ ID NO: 9040
  REGION 1..215: note = Description of Artificial Sequence: Synthetic polypeptide
  REGION 1..215: note = XENP020345 [CTLA-4]_H3.4_L0.122_Fab Light Chain

SEQ ID NO: 10651 - protein, 108 aa, synthetic construct; identical to SEQ ID NO: 6157
  REGION 1..108: note = Description of Artificial Sequence: Synthetic polypeptide
  REGION 1..108: note = VL of XENP020345

SEQ ID NO: 10652 - protein, 12 aa, synthetic construct
  REGION 1..12: note = Description of Artificial Sequence: Synthetic peptide
  REGION 1..12: note = XENP020345 vlCDR1
RASQSVGSSYLA

SEQ ID NO: 10653 - protein, 7 aa, synthetic construct
  REGION 1..7: note = Description of Artificial Sequence: Synthetic peptide
  REGION 1..7: note = XENP020345 vlCDR2
GAFSRAT

SEQ ID NO: 10654 - protein, 9 aa, synthetic construct
  REGION 1..9: note = Description of Artificial Sequence: Synthetic peptide
  REGION 1..9: note = XENP020345 vlCDR3
QQYGSSPWT

SEQ ID NO: 10655 - protein, 221 aa, synthetic construct; identical to SEQ ID NO: 10385
  REGION 1..221: note = Description of Artificial Sequence: Synthetic polypeptide
  REGION 1..221: note = XENP020346 [CTLA-4]_H3.4_L0.123_Fab Heavy Chain

SEQ ID NO: 10656 - protein, 118 aa, synthetic construct; identical to SEQ ID NO: 7137
  REGION 1..118: note = Description of Artificial Sequence: Synthetic polypeptide
  REGION 1..118: note = VH of XENP020346

SEQ ID NO: 10657 - protein, 5 aa, synthetic construct
  REGION 1..5: note = Description of Artificial Sequence: Synthetic peptide
  REGION 1..5: note = XENP020346 vhCDR1
SYTMH

SEQ ID NO: 10658 - protein, 17 aa, synthetic construct
  REGION 1..17: note = Description of Artificial Sequence: Synthetic peptide
  REGION 1..17: note = XENP020346 vhCDR2
FISYDGNHKYYADSVKG

SEQ ID NO: 10659 - protein, 9 aa, synthetic construct
  REGION 1..9: note = Description of Artificial Sequence: Synthetic peptide
  REGION 1..9: note = XENP020346 vhCDR3
TGHLGPFDL

SEQ ID NO: 10660 - protein, 215 aa, synthetic construct
  REGION 1..215: note = Description of Artificial Sequence: Synthetic polypeptide
  REGION 1..215: note = XENP020346 [CTLA-4]_H3.4_L0.123_Fab Light Chain
EIVLTQSPATLSVSPGERATLSCRASQSVSSSYLAWYQQKPGQAPRLLIYGAFSRATGIPDRFSGSGSGTDFTLTISRLEPEDFAVYYCQQYGSSPWTFGQGTKVEIKRTVAAPSVFIFPPSDEQLKSGTASVVCLLNNFYPREAKVQWKVDNALQSGNSQESVTEQDSKDSTYSLSSTLTLSKADYEKHKVYACEVTHQGLSSPVTKSFNRGEC

SEQ ID NO: 10661 - protein, 108 aa, synthetic construct; identical to SEQ ID NO: 7390
  REGION 1..108: note = Description of Artificial Sequence: Synthetic polypeptide
  REGION 1..108: note = VL of XENP020346

SEQ ID NO: 10662 - protein, 12 aa, synthetic construct
  REGION 1..12: note = Description of Artificial Sequence: Synthetic peptide
  REGION 1..12: note = XENP020346 vlCDR1
RASQSVSSSYLA

SEQ ID NO: 10663 - protein, 7 aa, synthetic construct
  REGION 1..7: note = Description of Artificial Sequence: Synthetic peptide
  REGION 1..7: note = XENP020346 vlCDR2
GAFSRAT

SEQ ID NO: 10664 - protein, 9 aa, synthetic construct
  REGION 1..9: note = Description of Artificial Sequence: Synthetic peptide
  REGION 1..9: note = XENP020346 vlCDR3
QQYGSSPWT

SEQ ID NO: 10665 - protein, 221 aa, synthetic construct; identical to SEQ ID NO: 10385
  REGION 1..221: note = Description of Artificial Sequence: Synthetic polypeptide
  REGION 1..221: note = XENP020347 [CTLA-4]_H3.4_L0.124_Fab Heavy Chain

SEQ ID NO: 10666 - protein, 118 aa, synthetic construct; identical to SEQ ID NO: 7137
  REGION 1..118: note = Description of Artificial Sequence: Synthetic polypeptide
  REGION 1..118: note = VH of XENP020347

SEQ ID NO: 10667 - protein, 5 aa, synthetic construct
  REGION 1..5: note = Description of Artificial Sequence: Synthetic peptide
  REGION 1..5: note = XENP020347 vhCDR1
SYTMH

SEQ ID NO: 10668 - protein, 17 aa, synthetic construct
  REGION 1..17: note = Description of Artificial Sequence: Synthetic peptide
  REGION 1..17: note = XENP020347 vhCDR2
FISYDGNHKYYADSVKG

SEQ ID NO: 10669 - protein, 9 aa, synthetic construct
  REGION 1..9: note = Description of Artificial Sequence: Synthetic peptide
  REGION 1..9: note = XENP020347 vhCDR3
TGHLGPFDL

SEQ ID NO: 10670 - protein, 215 aa, synthetic construct
  REGION 1..215: note = Description of Artificial Sequence: Synthetic polypeptide
  REGION 1..215: note = XENP020347 [CTLA-4]_H3.4_L0.124_Fab Light Chain
EIVLTQSPATLSVSPGERATLSCRASQSVGSSYLAWYQQKPGQAPRLLIYGASSRATGIPDRFSGSGSGTDFTLTISRLEPEDFAVYYCQQYGSSPWTFGQGTKVEIKRTVAAPSVFIFPPSDEQLKSGTASVVCLLNNFYPREAKVQWKVDNALQSGNSQESVTEQDSKDSTYSLSSTLTLSKADYEKHKVYACEVTHQGLSSPVTKSFNRGEC

SEQ ID NO: 10671 - protein, 108 aa, synthetic construct; identical to SEQ ID NO: 7399
  REGION 1..108: note = Description of Artificial Sequence: Synthetic polypeptide
  REGION 1..108: note = VL of XENP020347

SEQ ID NO: 10672 - protein, 12 aa, synthetic construct
  REGION 1..12: note = Description of Artificial Sequence: Synthetic peptide
  REGION 1..12: note = XENP020347 vlCDR1
RASQSVGSSYLA

SEQ ID NO: 10673 - protein, 7 aa, synthetic construct
  REGION 1..7: note = Description of Artificial Sequence: Synthetic peptide
  REGION 1..7: note = XENP020347 vlCDR2
GASSRAT

SEQ ID NO: 10674 - protein, 9 aa, synthetic construct
  REGION 1..9: note = Description of Artificial Sequence: Synthetic peptide
  REGION 1..9: note = XENP020347 vlCDR3
QQYGSSPWT

SEQ ID NO: 10675 - protein, 221 aa, synthetic construct; identical to SEQ ID NO: 10385
  REGION 1..221: note = Description of Artificial Sequence: Synthetic polypeptide
  REGION 1..221: note = XENP020348 [CTLA-4]_H3.4_L0.125_Fab Heavy Chain

SEQ ID NO: 10676 - protein, 118 aa, synthetic construct; identical to SEQ ID NO: 7137
  REGION 1..118: note = Description of Artificial Sequence: Synthetic polypeptide
  REGION 1..118: note = VH of XENP020348

SEQ ID NO: 10677 - protein, 5 aa, synthetic construct
  REGION 1..5: note = Description of Artificial Sequence: Synthetic peptide
  REGION 1..5: note = XENP020348 vhCDR1
SYTMH

SEQ ID NO: 10678 - protein, 17 aa, synthetic construct
  REGION 1..17: note = Description of Artificial Sequence: Synthetic peptide
  REGION 1..17: note = XENP020348 vhCDR2
FISYDGNHKYYADSVKG

SEQ ID NO: 10679 - protein, 9 aa, synthetic construct
  REGION 1..9: note = Description of Artificial Sequence: Synthetic peptide
  REGION 1..9: note = XENP020348 vhCDR3
TGHLGPFDL

SEQ ID NO: 10680 - protein, 215 aa, synthetic construct; identical to SEQ ID NO: 2410
  REGION 1..215: note = Description of Artificial Sequence: Synthetic polypeptide
  REGION 1..215: note = XENP020348 [CTLA-4]_H3.4_L0.125_Fab Light Chain

SEQ ID NO: 10681 - protein, 108 aa, synthetic construct; identical to SEQ ID NO: 2411
  REGION 1..108: note = Description of Artificial Sequence: Synthetic polypeptide
  REGION 1..108: note = VL of XENP020348

SEQ ID NO: 10682 - protein, 12 aa, synthetic construct
  REGION 1..12: note = Description of Artificial Sequence: Synthetic peptide
  REGION 1..12: note = XENP020348 vlCDR1
RASQSVSSSYLA

SEQ ID NO: 10683 - protein, 7 aa, synthetic construct
  REGION 1..7: note = Description of Artificial Sequence: Synthetic peptide
  REGION 1..7: note = XENP020348 vlCDR2
GAFSRAT

SEQ ID NO: 10684 - protein, 9 aa, synthetic construct
  REGION 1..9: note = Description of Artificial Sequence: Synthetic peptide
  REGION 1..9: note = XENP020348 vlCDR3
QQYGSSPWT

SEQ ID NO: 10685 - protein, 221 aa, synthetic construct; identical to SEQ ID NO: 10385
  REGION 1..221: note = Description of Artificial Sequence: Synthetic polypeptide
  REGION 1..221: note = XENP020349 [CTLA-4]_H3.4_L0.126_Fab Heavy Chain

SEQ ID NO: 10686 - protein, 118 aa, synthetic construct; identical to SEQ ID NO: 7137
  REGION 1..118: note = Description of Artificial Sequence: Synthetic polypeptide
  REGION 1..118: note = VH of XENP020349

SEQ ID NO: 10687 - protein, 5 aa, synthetic construct
  REGION 1..5: note = Description of Artificial Sequence: Synthetic peptide
  REGION 1..5: note = XENP020349 vhCDR1
SYTMH

SEQ ID NO: 10688 - protein, 17 aa, synthetic construct
  REGION 1..17: note = Description of Artificial Sequence: Synthetic peptide
  REGION 1..17: note = XENP020349 vhCDR2
FISYDGNHKYYADSVKG

SEQ ID NO: 10689 - protein, 9 aa, synthetic construct
  REGION 1..9: note = Description of Artificial Sequence: Synthetic peptide
  REGION 1..9: note = XENP020349 vhCDR3
TGHLGPFDL

SEQ ID NO: 10690 - protein, 215 aa, synthetic construct; identical to SEQ ID NO: 9690
  REGION 1..215: note = Description of Artificial Sequence: Synthetic polypeptide
  REGION 1..215: note = XENP020349 [CTLA-4]_H3.4_L0.126_Fab Light Chain

SEQ ID NO: 10691 - protein, 108 aa, synthetic construct; identical to SEQ ID NO: 6742
  REGION 1..108: note = Description of Artificial Sequence: Synthetic polypeptide
  REGION 1..108: note = VL of XENP020349

SEQ ID NO: 10692 - protein, 12 aa, synthetic construct
  REGION 1..12: note = Description of Artificial Sequence: Synthetic peptide
  REGION 1..12: note = XENP020349 vlCDR1
RASQSVGSSYLA

SEQ ID NO: 10693 - protein, 7 aa, synthetic construct
  REGION 1..7: note = Description of Artificial Sequence: Synthetic peptide
  REGION 1..7: note = XENP020349 vlCDR2
GASSRAT

SEQ ID NO: 10694 - protein, 9 aa, synthetic construct
  REGION 1..9: note = Description of Artificial Sequence: Synthetic peptide
  REGION 1..9: note = XENP020349 vlCDR3
QQYGSSPWT

SEQ ID NO: 10695 - protein, 221 aa, synthetic construct; identical to SEQ ID NO: 10385
  REGION 1..221: note = Description of Artificial Sequence: Synthetic polypeptide
  REGION 1..221: note = XENP020350 [CTLA-4]_H3.4_L0.127_Fab Heavy Chain

SEQ ID NO: 10696 - protein, 118 aa, synthetic construct; identical to SEQ ID NO: 7137
  REGION 1..118: note = Description of Artificial Sequence: Synthetic polypeptide
  REGION 1..118: note = VH of XENP020350

SEQ ID NO: 10697 - protein, 5 aa, synthetic construct
  REGION 1..5: note = Description of Artificial Sequence: Synthetic peptide
  REGION 1..5: note = XENP020350 vhCDR1
SYTMH

SEQ ID NO: 10698 - protein, 17 aa, synthetic construct
  REGION 1..17: note = Description of Artificial Sequence: Synthetic peptide
  REGION 1..17: note = XENP020350 vhCDR2
FISYDGNHKYYADSVKG

SEQ ID NO: 10699 - protein, 9 aa, synthetic construct
  REGION 1..9: note = Description of Artificial Sequence: Synthetic peptide
  REGION 1..9: note = XENP020350 vhCDR3
TGHLGPFDL

SEQ ID NO: 10700 - protein, 215 aa, synthetic construct
  REGION 1..215: note = Description of Artificial Sequence: Synthetic polypeptide
  REGION 1..215: note = XENP020350 [CTLA-4]_H3.4_L0.127_Fab Light Chain
EIVLTQSPGTLSVSPGERATLSCRASQSVSSSYLAWYQQKPGQAPRLLIYGASSRATGIPDRFSGSGSGTDFTLTISRLEPEDFAVYYCQQYGSSPWTFGQGTKVEIKRTVAAPSVFIFPPSDEQLKSGTASVVCLLNNFYPREAKVQWKVDNALQSGNSQESVTEQDSKDSTYSLSSTLTLSKADYEKHKVYACEVTHQGLSSPVTKSFNRGEC

SEQ ID NO: 10701 - protein, 108 aa, synthetic construct; identical to SEQ ID NO: 7426
  REGION 1..108: note = Description of Artificial Sequence: Synthetic polypeptide
  REGION 1..108: note = VL of XENP020350

SEQ ID NO: 10702 - protein, 12 aa, synthetic construct
  REGION 1..12: note = Description of Artificial Sequence: Synthetic peptide
  REGION 1..12: note = XENP020350 vlCDR1
RASQSVSSSYLA

SEQ ID NO: 10703 - protein, 7 aa, synthetic construct
  REGION 1..7: note = Description of Artificial Sequence: Synthetic peptide
  REGION 1..7: note = XENP020350 vlCDR2
GASSRAT

SEQ ID NO: 10704 - protein, 9 aa, synthetic construct
  REGION 1..9: note = Description of Artificial Sequence: Synthetic peptide
  REGION 1..9: note = XENP020350 vlCDR3
QQYGSSPWT

SEQ ID NO: 10705 - protein, 221 aa, synthetic construct; identical to SEQ ID NO: 10385
  REGION 1..221: note = Description of Artificial Sequence: Synthetic polypeptide
  REGION 1..221: note = XENP020351 [CTLA-4]_H3.4_L0.128_Fab Heavy Chain

SEQ ID NO: 10706 - protein, 118 aa, synthetic construct; identical to SEQ ID NO: 7137
  REGION 1..118: note = Description of Artificial Sequence: Synthetic polypeptide
  REGION 1..118: note = VH of XENP020351

SEQ ID NO: 10707 - protein, 5 aa, synthetic construct
  REGION 1..5: note = Description of Artificial Sequence: Synthetic peptide
  REGION 1..5: note = XENP020351 vhCDR1
SYTMH

SEQ ID NO: 10708 - protein, 17 aa, synthetic construct
  REGION 1..17: note = Description of Artificial Sequence: Synthetic peptide
  REGION 1..17: note = XENP020351 vhCDR2
FISYDGNHKYYADSVKG

SEQ ID NO: 10709 - protein, 9 aa, synthetic construct
  REGION 1..9: note = Description of Artificial Sequence: Synthetic peptide
  REGION 1..9: note = XENP020351 vhCDR3
TGHLGPFDL

SEQ ID NO: 10710 - protein, 215 aa, synthetic construct
  REGION 1..215: note = Description of Artificial Sequence: Synthetic polypeptide
  REGION 1..215: note = XENP020351 [CTLA-4]_H3.4_L0.128_Fab Light Chain
EIVLTQSPATLSLSPGERATLSCRASQSVSSSYLAWYQQKPGQAPRLLIYGAFSRATGIPDRFSGSGSGTDFTLTISRLEPEDFAVYYCQQYGSSPWTFGQGTKVEIKRTVAAPSVFIFPPSDEQLKSGTASVVCLLNNFYPREAKVQWKVDNALQSGNSQESVTEQDSKDSTYSLSSTLTLSKADYEKHKVYACEVTHQGLSSPVTKSFNRGEC

SEQ ID NO: 10711 - protein, 108 aa, synthetic construct; identical to SEQ ID NO: 7435
  REGION 1..108: note = Description of Artificial Sequence: Synthetic polypeptide
  REGION 1..108: note = VL of XENP020351

SEQ ID NO: 10712 - protein, 12 aa, synthetic construct
  REGION 1..12: note = Description of Artificial Sequence: Synthetic peptide
  REGION 1..12: note = XENP020351 vlCDR1
RASQSVSSSYLA

SEQ ID NO: 10713 - protein, 7 aa, synthetic construct
  REGION 1..7: note = Description of Artificial Sequence: Synthetic peptide
  REGION 1..7: note = XENP020351 vlCDR2
GAFSRAT

SEQ ID NO: 10714 - protein, 9 aa, synthetic construct
  REGION 1..9: note = Description of Artificial Sequence: Synthetic peptide
  REGION 1..9: note = XENP020351 vlCDR3
QQYGSSPWT

SEQ ID NO: 10715 - protein, 221 aa, synthetic construct; identical to SEQ ID NO: 10385
  REGION 1..221: note = Description of Artificial Sequence: Synthetic polypeptide
  REGION 1..221: note = XENP020352 [CTLA-4]_H3.4_L0.129_Fab Heavy Chain

SEQ ID NO: 10716 - protein, 118 aa, synthetic construct; identical to SEQ ID NO: 7137
  REGION 1..118: note = Description of Artificial Sequence: Synthetic polypeptide
  REGION 1..118: note = VH of XENP020352

SEQ ID NO: 10717 - protein, 5 aa, synthetic construct
  REGION 1..5: note = Description of Artificial Sequence: Synthetic peptide
  REGION 1..5: note = XENP020352 vhCDR1
SYTMH

SEQ ID NO: 10718 - protein, 17 aa, synthetic construct
  REGION 1..17: note = Description of Artificial Sequence: Synthetic peptide
  REGION 1..17: note = XENP020352 vhCDR2
FISYDGNHKYYADSVKG

SEQ ID NO: 10719 - protein, 9 aa, synthetic construct
  REGION 1..9: note = Description of Artificial Sequence: Synthetic peptide
  REGION 1..9: note = XENP020352 vhCDR3
TGHLGPFDL

SEQ ID NO: 10720 - protein, 215 aa, synthetic construct
  REGION 1..215: note = Description of Artificial Sequence: Synthetic polypeptide
  REGION 1..215: note = XENP020352 [CTLA-4]_H3.4_L0.129_Fab Light Chain
EIVLTQSPATLSLSPGERATLSCRASQSVGSSYLAWYQQKPGQAPRLLIYGASSRATGIPDRFSGSGSGTDFTLTISRLEPEDFAVYYCQQYGSSPWTFGQGTKVEIKRTVAAPSVFIFPPSDEQLKSGTASVVCLLNNFYPREAKVQWKVDNALQSGNSQESVTEQDSKDSTYSLSSTLTLSKADYEKHKVYACEVTHQGLSSPVTKSFNRGEC

SEQ ID NO: 10721 - protein, 108 aa, synthetic construct; identical to SEQ ID NO: 2396
  REGION 1..108: note = Description of Artificial Sequence: Synthetic polypeptide
  REGION 1..108: note = VL of XENP020352

SEQ ID NO: 10722 - protein, 12 aa, synthetic construct
  REGION 1..12: note = Description of Artificial Sequence: Synthetic peptide
  REGION 1..12: note = XENP020352 vlCDR1
RASQSVGSSYLA

SEQ ID NO: 10723 - protein, 7 aa, synthetic construct
  REGION 1..7: note = Description of Artificial Sequence: Synthetic peptide
  REGION 1..7: note = XENP020352 vlCDR2
GASSRAT

SEQ ID NO: 10724 - protein, 9 aa, synthetic construct
  REGION 1..9: note = Description of Artificial Sequence: Synthetic peptide
  REGION 1..9: note = XENP020352 vlCDR3
QQYGSSPWT

SEQ ID NO: 10725 - protein, 221 aa, synthetic construct; identical to SEQ ID NO: 10385
  REGION 1..221: note = Description of Artificial Sequence: Synthetic polypeptide
  REGION 1..221: note = XENP020353 [CTLA-4]_H3.4_L0.130_Fab Heavy Chain

SEQ ID NO: 10726 - protein, 118 aa, synthetic construct; identical to SEQ ID NO: 7137
  REGION 1..118: note = Description of Artificial Sequence: Synthetic polypeptide
  REGION 1..118: note = VH of XENP020353

SEQ ID NO: 10727 - protein, 5 aa, synthetic construct
  REGION 1..5: note = Description of Artificial Sequence: Synthetic peptide
  REGION 1..5: note = XENP020353 vhCDR1
SYTMH

SEQ ID NO: 10728 - protein, 17 aa, synthetic construct
  REGION 1..17: note = Description of Artificial Sequence: Synthetic peptide
  REGION 1..17: note = XENP020353 vhCDR2
FISYDGNHKYYADSVKG

SEQ ID NO: 10729 - protein, 9 aa, synthetic construct
  REGION 1..9: note = Description of Artificial Sequence: Synthetic peptide
  REGION 1..9: note = XENP020353 vhCDR3
TGHLGPFDL

SEQ ID NO: 10730 - protein, 215 aa, synthetic construct
  REGION 1..215: note = Description of Artificial Sequence: Synthetic polypeptide
  REGION 1..215: note = XENP020353 [CTLA-4]_H3.4_L0.130_Fab Light Chain
EIVLTQSPATLSVSPGERATLSCRASQSVSSSYLAWYQQKPGQAPRLLIYGASSRATGIPDRFSGSGSGTDFTLTISRLEPEDFAVYYCQQYGSSPWTFGQGTKVEIKRTVAAPSVFIFPPSDEQLKSGTASVVCLLNNFYPREAKVQWKVDNALQSGNSQESVTEQDSKDSTYSLSSTLTLSKADYEKHKVYACEVTHQGLSSPVTKSFNRGEC

SEQ ID NO: 10731 - protein, 108 aa, synthetic construct; identical to SEQ ID NO: 7453
  REGION 1..108: note = Description of Artificial Sequence: Synthetic polypeptide
  REGION 1..108: note = VL of XENP020353

SEQ ID NO: 10732 - protein, 12 aa, synthetic construct
  REGION 1..12: note = Description of Artificial Sequence: Synthetic peptide
  REGION 1..12: note = XENP020353 vlCDR1
RASQSVSSSYLA

SEQ ID NO: 10733 - protein, 7 aa, synthetic construct
  REGION 1..7: note = Description of Artificial Sequence: Synthetic peptide
  REGION 1..7: note = XENP020353 vlCDR2
GASSRAT

SEQ ID NO: 10734 - protein, 9 aa, synthetic construct
  REGION 1..9: note = Description of Artificial Sequence: Synthetic peptide
  REGION 1..9: note = XENP020353 vlCDR3
QQYGSSPWT

SEQ ID NO: 10735 - protein, 221 aa, synthetic construct; identical to SEQ ID NO: 10385
  REGION 1..221: note = Description of Artificial Sequence: Synthetic polypeptide
  REGION 1..221: note = XENP020354 [CTLA-4]_H3.4_L0.131_Fab Heavy Chain

SEQ ID NO: 10736 - protein, 118 aa, synthetic construct; identical to SEQ ID NO: 7137
  REGION 1..118: note = Description of Artificial Sequence: Synthetic polypeptide
  REGION 1..118: note = VH of XENP020354

SEQ ID NO: 10737 - protein, 5 aa, synthetic construct
  REGION 1..5: note = Description of Artificial Sequence: Synthetic peptide
  REGION 1..5: note = XENP020354 vhCDR1
SYTMH

SEQ ID NO: 10738 - protein, 17 aa, synthetic construct
  REGION 1..17: note = Description of Artificial Sequence: Synthetic peptide
  REGION 1..17: note = XENP020354 vhCDR2
FISYDGNHKYYADSVKG

SEQ ID NO: 10739 - protein, 9 aa, synthetic construct
  REGION 1..9: note = Description of Artificial Sequence: Synthetic peptide
  REGION 1..9: note = XENP020354 vhCDR3
TGHLGPFDL

SEQ ID NO: 10740 - protein, 215 aa, synthetic construct
  REGION 1..215: note = Description of Artificial Sequence: Synthetic polypeptide
  REGION 1..215: note = XENP020354 [CTLA-4]_H3.4_L0.131_Fab Light Chain
EIVLTQSPGTLSLSPGERATLSCRASQSVSSSYLAWYQQKPGQAPRLLIYGASSRATGIPDRFSGSGSGTDFTLTISRLEPEDFAVYYCQQYGSSPWTFGQGTKVEIKRTVAAPSVFIFPPSDEQLKSGTASVVCLLNNFYPREAKVQWKVDNALQSGNSQESVTEQDSKDSTYSLSSTLTLSKADYEKHKVYACEVTHQGLSSPVTKSFNRGEC

SEQ ID NO: 10741 - protein, 108 aa, synthetic construct; identical to SEQ ID NO: 7462
  REGION 1..108: note = Description of Artificial Sequence: Synthetic polypeptide
  REGION 1..108: note = VL of XENP020354

SEQ ID NO: 10742 - protein, 12 aa, synthetic construct
  REGION 1..12: note = Description of Artificial Sequence: Synthetic peptide
  REGION 1..12: note = XENP020354 vlCDR1
RASQSVSSSYLA

SEQ ID NO: 10743 - protein, 7 aa, synthetic construct
  REGION 1..7: note = Description of Artificial Sequence: Synthetic peptide
  REGION 1..7: note = XENP020354 vlCDR2
GASSRAT

SEQ ID NO: 10744 - protein, 9 aa, synthetic construct
  REGION 1..9: note = Description of Artificial Sequence: Synthetic peptide
  REGION 1..9: note = XENP020354 vlCDR3
QQYGSSPWT

SEQ ID NO: 10745 - protein, 221 aa, synthetic construct; identical to SEQ ID NO: 10385
  REGION 1..221: note = Description of Artificial Sequence: Synthetic polypeptide
  REGION 1..221: note = XENP020355 [CTLA-4]_H3.4_L0.132_Fab Heavy Chain

SEQ ID NO: 10746 - protein, 118 aa, synthetic construct; identical to SEQ ID NO: 7137
  REGION 1..118: note = Description of Artificial Sequence: Synthetic polypeptide
  REGION 1..118: note = VH of XENP020355

SEQ ID NO: 10747 - protein, 5 aa, synthetic construct
  REGION 1..5: note = Description of Artificial Sequence: Synthetic peptide
  REGION 1..5: note = XENP020355 vhCDR1
SYTMH

SEQ ID NO: 10748 - protein, 17 aa, synthetic construct
  REGION 1..17: note = Description of Artificial Sequence: Synthetic peptide
  REGION 1..17: note = XENP020355 vhCDR2
FISYDGNHKYYADSVKG

SEQ ID NO: 10749 - protein, 9 aa, synthetic construct
  REGION 1..9: note = Description of Artificial Sequence: Synthetic peptide
  REGION 1..9: note = XENP020355 vhCDR3
TGHLGPFDL

SEQ ID NO: 10750 - protein, 215 aa, synthetic construct
  REGION 1..215: note = Description of Artificial Sequence: Synthetic polypeptide
  REGION 1..215: note = XENP020355 [CTLA-4]_H3.4_L0.132_Fab Light Chain
EIVLTQSPATLSLSPGERATLSCRASQSVSSSYLAWYQQKPGQAPRLLIYGASSRATGIPDRFSGSGSGTDFTLTISRLEPEDFAVYYCQQYGSSPWTFGQGTKVEIKRTVAAPSVFIFPPSDEQLKSGTASVVCLLNNFYPREAKVQWKVDNALQSGNSQESVTEQDSKDSTYSLSSTLTLSKADYEKHKVYACEVTHQGLSSPVTKSFNRGEC

SEQ ID NO: 10751 - protein, 108 aa, synthetic construct; identical to SEQ ID NO: 7471
  REGION 1..108: note = Description of Artificial Sequence: Synthetic polypeptide
  REGION 1..108: note = VL of XENP020355

SEQ ID NO: 10752 - protein, 12 aa, synthetic construct
  REGION 1..12: note = Description of Artificial Sequence: Synthetic peptide
  REGION 1..12: note = XENP020355 vlCDR1
RASQSVSSSYLA

SEQ ID NO: 10753 - protein, 7 aa, synthetic construct
  REGION 1..7: note = Description of Artificial Sequence: Synthetic peptide
  REGION 1..7: note = XENP020355 vlCDR2
GASSRAT

SEQ ID NO: 10754 - protein, 9 aa, synthetic construct
  REGION 1..9: note = Description of Artificial Sequence: Synthetic peptide
  REGION 1..9: note = XENP020355 vlCDR3
QQYGSSPWT

SEQ ID NO: 10755 - protein, 221 aa, synthetic construct; identical to SEQ ID NO: 10395
  REGION 1..221: note = Description of Artificial Sequence: Synthetic polypeptide
  REGION 1..221: note = XENP020356 [CTLA-4]_H3.5_L2_Fab Heavy Chain

SEQ ID NO: 10756 - protein, 118 aa, synthetic construct; identical to SEQ ID NO: 7146
  REGION 1..118: note = Description of Artificial Sequence: Synthetic polypeptide
  REGION 1..118: note = VH of XENP020356

SEQ ID NO: 10757 - protein, 5 aa, synthetic construct
  REGION 1..5: note = Description of Artificial Sequence: Synthetic peptide
  REGION 1..5: note = XENP020356 vhCDR1
SYTMH

SEQ ID NO: 10758 - protein, 17 aa, synthetic construct
  REGION 1..17: note = Description of Artificial Sequence: Synthetic peptide
  REGION 1..17: note = XENP020356 vhCDR2
FISYDGNTKYYADSVKG

SEQ ID NO: 10759 - protein, 9 aa, synthetic construct
  REGION 1..9: note = Description of Artificial Sequence: Synthetic peptide
  REGION 1..9: note = XENP020356 vhCDR3
TGHLGPFDL

SEQ ID NO: 10760 - protein, 215 aa, synthetic construct; identical to SEQ ID NO: 10150
  REGION 1..215: note = Description of Artificial Sequence: Synthetic polypeptide
  REGION 1..215: note = XENP020356 [CTLA-4]_H3.5_L2_Fab Light Chain

SEQ ID NO: 10761 - protein, 108 aa, synthetic construct; identical to SEQ ID NO: 4843
  REGION 1..108: note = Description of Artificial Sequence: Synthetic polypeptide
  REGION 1..108: note = VL of XENP020356

SEQ ID NO: 10762 - protein, 12 aa, synthetic construct
  REGION 1..12: note = Description of Artificial Sequence: Synthetic peptide
  REGION 1..12: note = XENP020356 vlCDR1
RASQSVGSSYLA

SEQ ID NO: 10763 - protein, 7 aa, synthetic construct
  REGION 1..7: note = Description of Artificial Sequence: Synthetic peptide
  REGION 1..7: note = XENP020356 vlCDR2
GAFSRAT

SEQ ID NO: 10764 - protein, 9 aa, synthetic construct
  REGION 1..9: note = Description of Artificial Sequence: Synthetic peptide
  REGION 1..9: note = XENP020356 vlCDR3
QQYGSSPWT

SEQ ID NO: 10765 - protein, 221 aa, synthetic construct; identical to SEQ ID NO: 10395
  REGION 1..221: note = Description of Artificial Sequence: Synthetic polypeptide
  REGION 1..221: note = XENP020357 [CTLA-4]_H3.5_L2.1_Fab Heavy Chain

SEQ ID NO: 10766 - protein, 118 aa, synthetic construct; identical to SEQ ID NO: 7146
  REGION 1..118: note = Description of Artificial Sequence: Synthetic polypeptide
  REGION 1..118: note = VH of XENP020357

SEQ ID NO: 10767 - protein, 5 aa, synthetic construct
  REGION 1..5: note = Description of Artificial Sequence: Synthetic peptide
  REGION 1..5: note = XENP020357 vhCDR1
SYTMH

SEQ ID NO: 10768 - protein, 17 aa, synthetic construct
  REGION 1..17: note = Description of Artificial Sequence: Synthetic peptide
  REGION 1..17: note = XENP020357 vhCDR2
FISYDGNTKYYADSVKG

SEQ ID NO: 10769 - protein, 9 aa, synthetic construct
  REGION 1..9: note = Description of Artificial Sequence: Synthetic peptide
  REGION 1..9: note = XENP020357 vhCDR3
TGHLGPFDL

SEQ ID NO: 10770 - protein, 215 aa, synthetic construct
  REGION 1..215: note = Description of Artificial Sequence: Synthetic polypeptide
  REGION 1..215: note = XENP020357 [CTLA-4]_H3.5_L2.1_Fab Light Chain
EIVMTQSPATLSVSPGERATLSCRASQSVSSSYLAWYQQKPGQAPRLLIYGAFSRATGIPARFSGSGSGTEFTLTISSLQSEDFAVYYCQQYGSSPWTFGQGTKVEIKRTVAAPSVFIFPPSDEQLKSGTASVVCLLNNFYPREAKVQWKVDNALQSGNSQESVTEQDSKDSTYSLSSTLTLSKADYEKHKVYACEVTHQGLSSPVTKSFNRGEC

SEQ ID NO: 10771 - protein, 108 aa, synthetic construct; identical to SEQ ID NO: 7489
  REGION 1..108: note = Description of Artificial Sequence: Synthetic polypeptide
  REGION 1..108: note = VL of XENP020357

SEQ ID NO: 10772 - protein, 12 aa, synthetic construct
  REGION 1..12: note = Description of Artificial Sequence: Synthetic peptide
  REGION 1..12: note = XENP020357 vlCDR1
RASQSVSSSYLA

SEQ ID NO: 10773 - protein, 7 aa, synthetic construct
  REGION 1..7: note = Description of Artificial Sequence: Synthetic peptide
  REGION 1..7: note = XENP020357 vlCDR2
GAFSRAT

SEQ ID NO: 10774 - protein, 9 aa, synthetic construct
  REGION 1..9: note = Description of Artificial Sequence: Synthetic peptide
  REGION 1..9: note = XENP020357 vlCDR3
QQYGSSPWT

SEQ ID NO: 10775 - protein, 221 aa, synthetic construct; identical to SEQ ID NO: 10395
  REGION 1..221: note = Description of Artificial Sequence: Synthetic polypeptide
  REGION 1..221: note = XENP020358 [CTLA-4]_H3.5_L2.2_Fab Heavy Chain

SEQ ID NO: 10776 - protein, 118 aa, synthetic construct; identical to SEQ ID NO: 7146
  REGION 1..118: note = Description of Artificial Sequence: Synthetic polypeptide
  REGION 1..118: note = VH of XENP020358

SEQ ID NO: 10777 - protein, 5 aa, synthetic construct
  REGION 1..5: note = Description of Artificial Sequence: Synthetic peptide
  REGION 1..5: note = XENP020358 vhCDR1
SYTMH

SEQ ID NO: 10778 - protein, 17 aa, synthetic construct
  REGION 1..17: note = Description of Artificial Sequence: Synthetic peptide
  REGION 1..17: note = XENP020358 vhCDR2
FISYDGNTKYYADSVKG

SEQ ID NO: 10779 - protein, 9 aa, synthetic construct
  REGION 1..9: note = Description of Artificial Sequence: Synthetic peptide
  REGION 1..9: note = XENP020358 vhCDR3
TGHLGPFDL

SEQ ID NO: 10780 - protein, 215 aa, synthetic construct
  REGION 1..215: note = Description of Artificial Sequence: Synthetic polypeptide
  REGION 1..215: note = XENP020358 [CTLA-4]_H3.5_L2.2_Fab Light Chain
EIVMTQSPATLSVSPGERATLSCRASQSVGSSYLAWYQQKPGQAPRLLIYGASSRATGIPARFSGSGSGTEFTLTISSLQSEDFAVYYCQQYGSSPWTFGQGTKVEIKRTVAAPSVFIFPPSDEQLKSGTASVVCLLNNFYPREAKVQWKVDNALQSGNSQESVTEQDSKDSTYSLSSTLTLSKADYEKHKVYACEVTHQGLSSPVTKSFNRGEC

SEQ ID NO: 10781 - protein, 108 aa, synthetic construct; identical to SEQ ID NO: 7498
  REGION 1..108: note = Description of Artificial Sequence: Synthetic polypeptide
  REGION 1..108: note = VL of XENP020358

SEQ ID NO: 10782 - protein, 12 aa, synthetic construct
  REGION 1..12: note = Description of Artificial Sequence: Synthetic peptide
  REGION 1..12: note = XENP020358 vlCDR1
RASQSVGSSYLA

SEQ ID NO: 10783 - protein, 7 aa, synthetic construct
  REGION 1..7: note = Description of Artificial Sequence: Synthetic peptide
  REGION 1..7: note = XENP020358 vlCDR2
GASSRAT

SEQ ID NO: 10784 - protein, 9 aa, synthetic construct
  REGION 1..9: note = Description of Artificial Sequence: Synthetic peptide
  REGION 1..9: note = XENP020358 vlCDR3
QQYGSSPWT

SEQ ID NO: 10785 - protein, 221 aa, synthetic construct; identical to SEQ ID NO: 10395
  REGION 1..221: note = Description of Artificial Sequence: Synthetic polypeptide
  REGION 1..221: note = XENP020359 [CTLA-4]_H3.5_L2.3_Fab Heavy Chain

SEQ ID NO: 10786 - protein, 118 aa, synthetic construct; identical to SEQ ID NO: 7146
  REGION 1..118: note = Description of Artificial Sequence: Synthetic polypeptide
  REGION 1..118: note = VH of XENP020359

SEQ ID NO: 10787 - protein, 5 aa, synthetic construct
  REGION 1..5: note = Description of Artificial Sequence: Synthetic peptide
  REGION 1..5: note = XENP020359 vhCDR1
SYTMH

SEQ ID NO: 10788 - protein, 17 aa, synthetic construct
  REGION 1..17: note = Description of Artificial Sequence: Synthetic peptide
  REGION 1..17: note = XENP020359 vhCDR2
FISYDGNTKYYADSVKG

SEQ ID NO: 10789 - protein, 9 aa, synthetic construct
  REGION 1..9: note = Description of Artificial Sequence: Synthetic peptide
  REGION 1..9: note = XENP020359 vhCDR3
TGHLGPFDL

SEQ ID NO: 10790 - protein, 215 aa, synthetic construct
  REGION 1..215: note = Description of Artificial Sequence: Synthetic polypeptide
  REGION 1..215: note = XENP020359 [CTLA-4]_H3.5_L2.3_Fab Light Chain
EIVMTQSPATLSVSPGERATLSCRASQSVSSSYLAWYQQKPGQAPRLLIYGASSRATGIPARFSGSGSGTEFTLTISSLQSEDFAVYYCQQYGSSPWTFGQGTKVEIKRTVAAPSVFIFPPSDEQLKSGTASVVCLLNNFYPREAKVQWKVDNALQSGNSQESVTEQDSKDSTYSLSSTLTLSKADYEKHKVYACEVTHQGLSSPVTKSFNRGEC

SEQ ID NO: 10791 - protein, 108 aa, synthetic construct; identical to SEQ ID NO: 7507
  REGION 1..108: note = Description of Artificial Sequence: Synthetic polypeptide
  REGION 1..108: note = VL of XENP020359

SEQ ID NO: 10792 - protein, 12 aa, synthetic construct
  REGION 1..12: note = Description of Artificial Sequence: Synthetic peptide
  REGION 1..12: note = XENP020359 vlCDR1
RASQSVSSSYLA

SEQ ID NO: 10793 - protein, 7 aa, synthetic construct
  REGION 1..7: note = Description of Artificial Sequence: Synthetic peptide
  REGION 1..7: note = XENP020359 vlCDR2
GASSRAT

SEQ ID NO: 10794 - protein, 9 aa, synthetic construct
  REGION 1..9: note = Description of Artificial Sequence: Synthetic peptide
  REGION 1..9: note = XENP020359 vlCDR3
QQYGSSPWT

SEQ ID NO: 10795 - protein, 221 aa, synthetic construct; identical to SEQ ID NO: 10545
  REGION 1..221: note = Description of Artificial Sequence: Synthetic polypeptide
  REGION 1..221: note = XENP020422 [CTLA-4]_H3.21_L0.124_Fab Heavy Chain

SEQ ID NO: 10796 - protein, 118 aa, synthetic construct; identical to SEQ ID NO: 7290
  REGION 1..118: note = Description of Artificial Sequence: Synthetic polypeptide
  REGION 1..118: note = VH of XENP020422

SEQ ID NO: 10797 - protein, 5 aa, synthetic construct
  REGION 1..5: note = Description of Artificial Sequence: Synthetic peptide
  REGION 1..5: note = XENP020422 vhCDR1
SYTMH

SEQ ID NO: 10798 - protein, 17 aa, synthetic construct
  REGION 1..17: note = Description of Artificial Sequence: Synthetic peptide
  REGION 1..17: note = XENP020422 vhCDR2
FISYDGNTKYYADSVKG

SEQ ID NO: 10799 - protein, 9 aa, synthetic construct
  REGION 1..9: note = Description of Artificial Sequence: Synthetic peptide
  REGION 1..9: note = XENP020422 vhCDR3
GGLLGPFDL

SEQ ID NO: 10800 - protein, 215 aa, synthetic construct; identical to SEQ ID NO: 10670
  REGION 1..215: note = Description of Artificial Sequence: Synthetic polypeptide
  REGION 1..215: note = XENP020422 [CTLA-4]_H3.21_L0.124_Fab Light Chain

SEQ ID NO: 10801 - protein, 108 aa, synthetic construct; identical to SEQ ID NO: 7399
  REGION 1..108: note = Description of Artificial Sequence: Synthetic polypeptide
  REGION 1..108: note = VL of XENP020422

SEQ ID NO: 10802 - protein, 12 aa, synthetic construct
  REGION 1..12: note = Description of Artificial Sequence: Synthetic peptide
  REGION 1..12: note = XENP020422 vlCDR1
RASQSVGSSYLA

SEQ ID NO: 10803 - protein, 7 aa, synthetic construct
  REGION 1..7: note = Description of Artificial Sequence: Synthetic peptide
  REGION 1..7: note = XENP020422 vlCDR2
GASSRAT

SEQ ID NO: 10804 - protein, 9 aa, synthetic construct
  REGION 1..9: note = Description of Artificial Sequence: Synthetic peptide
  REGION 1..9: note = XENP020422 vlCDR3
QQYGSSPWT

SEQ ID NO: 10805 - protein, 221 aa, synthetic construct; identical to SEQ ID NO: 10545
  REGION 1..221: note = Description of Artificial Sequence: Synthetic polypeptide
  REGION 1..221: note = XENP020423 [CTLA-4]_H3.21_L0.129_Fab Heavy Chain

SEQ ID NO: 10806 - protein, 118 aa, synthetic construct; identical to SEQ ID NO: 7290
  REGION 1..118: note = Description of Artificial Sequence: Synthetic polypeptide
  REGION 1..118: note = VH of XENP020423

SEQ ID NO: 10807 - protein, 5 aa, synthetic construct
  REGION 1..5: note = Description of Artificial Sequence: Synthetic peptide
  REGION 1..5: note = XENP020423 vhCDR1
SYTMH

SEQ ID NO: 10808 - protein, 17 aa, synthetic construct
  REGION 1..17: note = Description of Artificial Sequence: Synthetic peptide
  REGION 1..17: note = XENP020423 vhCDR2
FISYDGNTKYYADSVKG

SEQ ID NO: 10809 - protein, 9 aa, synthetic construct
  REGION 1..9: note = Description of Artificial Sequence: Synthetic peptide
  REGION 1..9: note = XENP020423 vhCDR3
GGLLGPFDL

SEQ ID NO: 10810 - protein, 215 aa, synthetic construct; identical to SEQ ID NO: 10720
  REGION 1..215: note = Description of Artificial Sequence: Synthetic polypeptide
  REGION 1..215: note = XENP020423 [CTLA-4]_H3.21_L0.129_Fab Light Chain

SEQ ID NO: 10811 - protein, 108 aa, synthetic construct; identical to SEQ ID NO: 2396
  REGION 1..108: note = Description of Artificial Sequence: Synthetic polypeptide
  REGION 1..108: note = VL of XENP020423

SEQ ID NO: 10812 - protein, 12 aa, synthetic construct
  REGION 1..12: note = Description of Artificial Sequence: Synthetic peptide
  REGION 1..12: note = XENP020423 vlCDR1
RASQSVGSSYLA

SEQ ID NO: 10813 - protein, 7 aa, synthetic construct
  REGION 1..7: note = Description of Artificial Sequence: Synthetic peptide
  REGION 1..7: note = XENP020423 vlCDR2
GASSRAT

SEQ ID NO: 10814 - protein, 9 aa, synthetic construct
  REGION 1..9: note = Description of Artificial Sequence: Synthetic peptide
  REGION 1..9: note = XENP020423 vlCDR3
QQYGSSPWT

SEQ ID NO: 10815 - protein, 221 aa, synthetic construct; identical to SEQ ID NO: 10545
  REGION 1..221: note = Description of Artificial Sequence: Synthetic polypeptide
  REGION 1..221: note = XENP020424 [CTLA-4]_H3.21_L0.132_Fab Heavy Chain

SEQ ID NO: 10816 - protein, 118 aa, synthetic construct; identical to SEQ ID NO: 7290
  REGION 1..118: note = Description of Artificial Sequence: Synthetic polypeptide
  REGION 1..118: note = VH of XENP020424

SEQ ID NO: 10817 - protein, 5 aa, synthetic construct
  REGION 1..5: note = Description of Artificial Sequence: Synthetic peptide
  REGION 1..5: note = XENP020424 vhCDR1
SYTMH

SEQ ID NO: 10818 - protein, 17 aa, synthetic construct
  REGION 1..17: note = Description of Artificial Sequence: Synthetic peptide
  REGION 1..17: note = XENP020424 vhCDR2
FISYDGNTKYYADSVKG

SEQ ID NO: 10819 - protein, 9 aa, synthetic construct
  REGION 1..9: note = Description of Artificial Sequence: Synthetic peptide
  REGION 1..9: note = XENP020424 vhCDR3
GGLLGPFDL

SEQ ID NO: 10820 - protein, 215 aa, synthetic construct; identical to SEQ ID NO: 10750
  REGION 1..215: note = Description of Artificial Sequence: Synthetic polypeptide
  REGION 1..215: note = XENP020424 [CTLA-4]_H3.21_L0.132_Fab Light Chain

SEQ ID NO: 10821 - protein, 108 aa, synthetic construct; identical to SEQ ID NO: 7471
  REGION 1..108: note = Description of Artificial Sequence: Synthetic polypeptide
  REGION 1..108: note = VL of XENP020424

SEQ ID NO: 10822 - protein, 12 aa, synthetic construct
  REGION 1..12: note = Description of Artificial Sequence: Synthetic peptide
  REGION 1..12: note = XENP020424 vlCDR1
RASQSVSSSYLA

SEQ ID NO: 10823 - protein, 7 aa, synthetic construct
  REGION 1..7: note = Description of Artificial Sequence: Synthetic peptide
  REGION 1..7: note = XENP020424 vlCDR2
GASSRAT

SEQ ID NO: 10824 - protein, 9 aa, synthetic construct
  REGION 1..9: note = Description of Artificial Sequence: Synthetic peptide
  REGION 1..9: note = XENP020424 vlCDR3
QQYGSSPWT

SEQ ID NO: 10825 - protein, 221 aa, synthetic construct; identical to SEQ ID NO: 10565
  REGION 1..221: note = Description of Artificial Sequence: Synthetic polypeptide
  REGION 1..221: note = XENP020425 [CTLA-4]_H3.23_L0.124_Fab Heavy Chain

SEQ ID NO: 10826 - protein, 118 aa, synthetic construct; identical to SEQ ID NO: 2395
  REGION 1..118: note = Description of Artificial Sequence: Synthetic polypeptide
  REGION 1..118: note = VH of XENP020425

SEQ ID NO: 10827 - protein, 5 aa, synthetic construct
  REGION 1..5: note = Description of Artificial Sequence: Synthetic peptide
  REGION 1..5: note = XENP020425 vhCDR1
SYTMH

SEQ ID NO: 10828 - protein, 17 aa, synthetic construct
  REGION 1..17: note = Description of Artificial Sequence: Synthetic peptide
  REGION 1..17: note = XENP020425 vhCDR2
FISYDGNYKYYADSVKG

SEQ ID NO: 10829 - protein, 9 aa, synthetic construct
  REGION 1..9: note = Description of Artificial Sequence: Synthetic peptide
  REGION 1..9: note = XENP020425 vhCDR3
GGHLGPFDL

SEQ ID NO: 10830 - protein, 215 aa, synthetic construct; identical to SEQ ID NO: 10670
  REGION 1..215: note = Description of Artificial Sequence: Synthetic polypeptide
  REGION 1..215: note = XENP020425 [CTLA-4]_H3.23_L0.124_Fab Light Chain

SEQ ID NO: 10831 - protein, 108 aa, synthetic construct; identical to SEQ ID NO: 7399
  REGION 1..108: note = Description of Artificial Sequence: Synthetic polypeptide
  REGION 1..108: note = VL of XENP020425

SEQ ID NO: 10832 - protein, 12 aa, synthetic construct
  REGION 1..12: note = Description of Artificial Sequence: Synthetic peptide
  REGION 1..12: note = XENP020425 vlCDR1
RASQSVGSSYLA

SEQ ID NO: 10833 - protein, 7 aa, synthetic construct
  REGION 1..7: note = Description of Artificial Sequence: Synthetic peptide
  REGION 1..7: note = XENP020425 vlCDR2
GASSRAT

SEQ ID NO: 10834 - protein, 9 aa, synthetic construct
  REGION 1..9: note = Description of Artificial Sequence: Synthetic peptide
  REGION 1..9: note = XENP020425 vlCDR3
QQYGSSPWT

SEQ ID NO: 10835 - protein, 221 aa, synthetic construct; identical to SEQ ID NO: 10565
  REGION 1..221: note = Description of Artificial Sequence: Synthetic polypeptide
  REGION 1..221: note = XENP020426 [CTLA-4]_H3.23_L0.129_Fab Heavy Chain

SEQ ID NO: 10836 - protein, 118 aa, synthetic construct; identical to SEQ ID NO: 2395
  REGION 1..118: note = Description of Artificial Sequence: Synthetic polypeptide
  REGION 1..118: note = VH of XENP020426

SEQ ID NO: 10837 - protein, 5 aa, synthetic construct
  REGION 1..5: note = Description of Artificial Sequence: Synthetic peptide
  REGION 1..5: note = XENP020426 vhCDR1
SYTMH

SEQ ID NO: 10838 - protein, 17 aa, synthetic construct
  REGION 1..17: note = Description of Artificial Sequence: Synthetic peptide
  REGION 1..17: note = XENP020426 vhCDR2
FISYDGNYKYYADSVKG

SEQ ID NO: 10839 - protein, 9 aa, synthetic construct
  REGION 1..9: note = Description of Artificial Sequence: Synthetic peptide
  REGION 1..9: note = XENP020426 vhCDR3
GGHLGPFDL

SEQ ID NO: 10840 - protein, 215 aa, synthetic construct; identical to SEQ ID NO: 10720
  REGION 1..215: note = Description of Artificial Sequence: Synthetic polypeptide
  REGION 1..215: note = XENP020426 [CTLA-4]_H3.23_L0.129_Fab Light Chain

SEQ ID NO: 10841 - protein, 108 aa, synthetic construct; identical to SEQ ID NO: 2396
  REGION 1..108: note = Description of Artificial Sequence: Synthetic polypeptide
  REGION 1..108: note = VL of XENP020426

SEQ ID NO: 10842 - protein, 12 aa, synthetic construct
  REGION 1..12: note = Description of Artificial Sequence: Synthetic peptide
  REGION 1..12: note = XENP020426 vlCDR1
RASQSVGSSYLA

SEQ ID NO: 10843 - protein, 7 aa, synthetic construct
  REGION 1..7: note = Description of Artificial Sequence: Synthetic peptide
  REGION 1..7: note = XENP020426 vlCDR2
GASSRAT

SEQ ID NO: 10844 - protein, 9 aa, synthetic construct
  REGION 1..9: note = Description of Artificial Sequence: Synthetic peptide
  REGION 1..9: note = XENP020426 vlCDR3
QQYGSSPWT

SEQ ID NO: 10845 - protein, 221 aa, synthetic construct; identical to SEQ ID NO: 10565
  REGION 1..221: note = Description of Artificial Sequence: Synthetic polypeptide
  REGION 1..221: note = XENP020427 [CTLA-4]_H3.23_L0.132_Fab Heavy Chain

SEQ ID NO: 10846 - protein, 118 aa, synthetic construct; identical to SEQ ID NO: 2395
  REGION 1..118: note = Description of Artificial Sequence: Synthetic polypeptide
  REGION 1..118: note = VH of XENP020427

SEQ ID NO: 10847 - protein, 5 aa, synthetic construct
  REGION 1..5: note = Description of Artificial Sequence: Synthetic peptide
  REGION 1..5: note = XENP020427 vhCDR1
SYTMH

SEQ ID NO: 10848 - protein, 17 aa, synthetic construct
  REGION 1..17: note = Description of Artificial Sequence: Synthetic peptide
  REGION 1..17: note = XENP020427 vhCDR2
FISYDGNYKYYADSVKG

SEQ ID NO: 10849 - protein, 9 aa, synthetic construct
  REGION 1..9: note = Description of Artificial Sequence: Synthetic peptide
  REGION 1..9: note = XENP020427 vhCDR3
GGHLGPFDL

SEQ ID NO: 10850 - protein, 215 aa, synthetic construct; identical to SEQ ID NO: 10750
  REGION 1..215: note = Description of Artificial Sequence: Synthetic polypeptide
  REGION 1..215: note = XENP020427 [CTLA-4]_H3.23_L0.132_Fab Light Chain

SEQ ID NO: 10851 - protein, 108 aa, synthetic construct; identical to SEQ ID NO: 7471
  REGION 1..108: note = Description of Artificial Sequence: Synthetic polypeptide
  REGION 1..108: note = VL of XENP020427

SEQ ID NO: 10852 - protein, 12 aa, synthetic construct
  REGION 1..12: note = Description of Artificial Sequence: Synthetic peptide
  REGION 1..12: note = XENP020427 vlCDR1
RASQSVSSSYLA

SEQ ID NO: 10853 - protein, 7 aa, synthetic construct
  REGION 1..7: note = Description of Artificial Sequence: Synthetic peptide
  REGION 1..7: note = XENP020427 vlCDR2
GASSRAT

SEQ ID NO: 10854 - protein, 9 aa, synthetic construct
  REGION 1..9: note = Description of Artificial Sequence: Synthetic peptide
  REGION 1..9: note = XENP020427 vlCDR3
QQYGSSPWT

SEQ ID NO: 10855 - protein, 221 aa, synthetic construct; identical to SEQ ID NO: 10585
  REGION 1..221: note = Description of Artificial Sequence: Synthetic polypeptide
  REGION 1..221: note = XENP020428 [CTLA-4]_H3.25_L0.124_Fab Heavy Chain

SEQ ID NO: 10856 - protein, 118 aa, synthetic construct; identical to SEQ ID NO: 7326
  REGION 1..118: note = Description of Artificial Sequence: Synthetic polypeptide
  REGION 1..118: note = VH of XENP020428

SEQ ID NO: 10857 - protein, 5 aa, synthetic construct
  REGION 1..5: note = Description of Artificial Sequence: Synthetic peptide
  REGION 1..5: note = XENP020428 vhCDR1
SYTMH

SEQ ID NO: 10858 - protein, 17 aa, synthetic construct
  REGION 1..17: note = Description of Artificial Sequence: Synthetic peptide
  REGION 1..17: note = XENP020428 vhCDR2
FISYDGNYKYYADSVKG

SEQ ID NO: 10859 - protein, 9 aa, synthetic construct
  REGION 1..9: note = Description of Artificial Sequence: Synthetic peptide
  REGION 1..9: note = XENP020428 vhCDR3
GGLLGPFDL

SEQ ID NO: 10860 - protein, 215 aa, synthetic construct; identical to SEQ ID NO: 10670
  REGION 1..215: note = Description of Artificial Sequence: Synthetic polypeptide
  REGION 1..215: note = XENP020428 [CTLA-4]_H3.25_L0.124_Fab Light Chain

SEQ ID NO: 10861 - protein, 108 aa, synthetic construct; identical to SEQ ID NO: 7399
  REGION 1..108: note = Description of Artificial Sequence: Synthetic polypeptide
  REGION 1..108: note = VL of XENP020428

SEQ ID NO: 10862 - protein, 12 aa, synthetic construct
  REGION 1..12: note = Description of Artificial Sequence: Synthetic peptide
  REGION 1..12: note = XENP020428 vlCDR1
RASQSVGSSYLA

SEQ ID NO: 10863 - protein, 7 aa, synthetic construct
  REGION 1..7: note = Description of Artificial Sequence: Synthetic peptide
  REGION 1..7: note = XENP020428 vlCDR2
GASSRAT

SEQ ID NO: 10864 - protein, 9 aa, synthetic construct
  REGION 1..9: note = Description of Artificial Sequence: Synthetic peptide
  REGION 1..9: note = XENP020428 vlCDR3
QQYGSSPWT

SEQ ID NO: 10865 - protein, 221 aa, synthetic construct; identical to SEQ ID NO: 10585
  REGION 1..221: note = Description of Artificial Sequence: Synthetic polypeptide
  REGION 1..221: note = XENP020429 [CTLA-4]_H3.25_L0.129_Fab Heavy Chain

SEQ ID NO: 10866 - protein, 118 aa, synthetic construct; identical to SEQ ID NO: 7326
  REGION 1..118: note = Description of Artificial Sequence: Synthetic polypeptide
  REGION 1..118: note = VH of XENP020429

SEQ ID NO: 10867 - protein, 5 aa, synthetic construct
  REGION 1..5: note = Description of Artificial Sequence: Synthetic peptide
  REGION 1..5: note = XENP020429 vhCDR1
SYTMH

SEQ ID NO: 10868 - protein, 17 aa, synthetic construct
  REGION 1..17: note = Description of Artificial Sequence: Synthetic peptide
  REGION 1..17: note = XENP020429 vhCDR2
FISYDGNYKYYADSVKG

SEQ ID NO: 10869 - protein, 9 aa, synthetic construct
  REGION 1..9: note = Description of Artificial Sequence: Synthetic peptide
  REGION 1..9: note = XENP020429 vhCDR3
GGLLGPFDL

SEQ ID NO: 10870 - protein, 215 aa, synthetic construct; identical to SEQ ID NO: 10720
  REGION 1..215: note = Description of Artificial Sequence: Synthetic polypeptide
  REGION 1..215: note = XENP020429 [CTLA-4]_H3.25_L0.129_Fab Light Chain

SEQ ID NO: 10871 - protein, 108 aa, synthetic construct; identical to SEQ ID NO: 2396
  REGION 1..108: note = Description of Artificial Sequence: Synthetic polypeptide
  REGION 1..108: note = VL of XENP020429

SEQ ID NO: 10872 - protein, 12 aa, synthetic construct
  REGION 1..12: note = Description of Artificial Sequence: Synthetic peptide
  REGION 1..12: note = XENP020429 vlCDR1
RASQSVGSSYLA

SEQ ID NO: 10873 - protein, 7 aa, synthetic construct
  REGION 1..7: note = Description of Artificial Sequence: Synthetic peptide
  REGION 1..7: note = XENP020429 vlCDR2
GASSRAT

SEQ ID NO: 10874 - protein, 9 aa, synthetic construct
  REGION 1..9: note = Description of Artificial Sequence: Synthetic peptide
  REGION 1..9: note = XENP020429 vlCDR3
QQYGSSPWT

SEQ ID NO: 10875 - protein, 221 aa, synthetic construct; identical to SEQ ID NO: 10585
  REGION 1..221: note = Description of Artificial Sequence: Synthetic polypeptide
  REGION 1..221: note = XENP020430 [CTLA-4]_H3.25_L0.132_Fab Heavy Chain

SEQ ID NO: 10876 - protein, 118 aa, synthetic construct; identical to SEQ ID NO: 7326
  REGION 1..118: note = Description of Artificial Sequence: Synthetic polypeptide
  REGION 1..118: note = VH of XENP020430

SEQ ID NO: 10877 - protein, 5 aa, synthetic construct
  REGION 1..5: note = Description of Artificial Sequence: Synthetic peptide
  REGION 1..5: note = XENP020430 vhCDR1
SYTMH

SEQ ID NO: 10878 - protein, 17 aa, synthetic construct
  REGION 1..17: note = Description of Artificial Sequence: Synthetic peptide
  REGION 1..17: note = XENP020430 vhCDR2
FISYDGNYKYYADSVKG

SEQ ID NO: 10879 - protein, 9 aa, synthetic construct
  REGION 1..9: note = Description of Artificial Sequence: Synthetic peptide
  REGION 1..9: note = XENP020430 vhCDR3
GGLLGPFDL

SEQ ID NO: 10880 - protein, 215 aa, synthetic construct; identical to SEQ ID NO: 10750
  REGION 1..215: note = Description of Artificial Sequence: Synthetic polypeptide
  REGION 1..215: note = XENP020430 [CTLA-4]_H3.25_L0.132_Fab Light Chain

SEQ ID NO: 10881 - protein, 108 aa, synthetic construct; identical to SEQ ID NO: 7471
  REGION 1..108: note = Description of Artificial Sequence: Synthetic polypeptide
  REGION 1..108: note = VL of XENP020430

SEQ ID NO: 10882 - protein, 12 aa, synthetic construct
  REGION 1..12: note = Description of Artificial Sequence: Synthetic peptide
  REGION 1..12: note = XENP020430 vlCDR1
RASQSVSSSYLA

SEQ ID NO: 10883 - protein, 7 aa, synthetic construct
  REGION 1..7: note = Description of Artificial Sequence: Synthetic peptide
  REGION 1..7: note = XENP020430 vlCDR2
GASSRAT

SEQ ID NO: 10884 - protein, 9 aa, synthetic construct
  REGION 1..9: note = Description of Artificial Sequence: Synthetic peptide
  REGION 1..9: note = XENP020430 vlCDR3
QQYGSSPWT

SEQ ID NO: 10885 - protein, 240 aa, synthetic construct
  REGION 1..240: note = Description of Artificial Sequence: Synthetic polypeptide
  REGION 1..240: note = XENP016402 nivolumab_H0.1_L0_scFv(GKPGS)4
QVQLVESGGGVVQPGRSLRLSCKASGITFSNSGMHWVRQAPGKGLEWVAVIWYDGSKRYYADSVKGRFTISRDNSKNTLFLQMNSLRAEDTAVYYCATNDDYWGQGTLVTVSSGKPGSGKPGSGKPGSGKPGSEIVLTQSPATLSLSPGERATLSCRASQSVSSYLAWYQQKPGQAPRLLIYDASNRATGIPARFSGSGSGTDFTLTISSLEPEDFAVYYCQQSSNWPRTFGQGTKVEIK

SEQ ID NO: 10886 - protein, 113 aa, synthetic construct
  REGION 1..113: note = Description of Artificial Sequence: Synthetic polypeptide
  REGION 1..113: note = VH of XENP016402
QVQLVESGGGVVQPGRSLRLSCKASGITFSNSGMHWVRQAPGKGLEWVAVIWYDGSKRYYADSVKGRFTISRDNSKNTLFLQMNSLRAEDTAVYYCATNDDYWGQGTLVTVSS

SEQ ID NO: 10887 - protein, 107 aa, synthetic construct [sequence omitted]

SEQ ID NO: 10888 - protein, 5 aa, synthetic construct
  REGION 1..5: note = Description of Artificial Sequence: Synthetic peptide
  REGION 1..5: note = XENP016402 vhCDR1
NSGMH

SEQ ID NO: 10889 - protein, 17 aa, synthetic construct
  REGION 1..17: note = Description of Artificial Sequence: Synthetic peptide
  REGION 1..17: note = XENP016402 vhCDR2
VIWYDGSKRYYADSVKG

SEQ ID NO: 10890 - protein, 4 aa, synthetic construct
  REGION 1..4: note = Description of Artificial Sequence: Synthetic peptide
  REGION 1..4: note = XENP016402 vhCDR3
NDDY

SEQ ID NO: 10891 - protein, 11 aa, synthetic construct
  REGION 1..11: note = Description of Artificial Sequence: Synthetic peptide
  REGION 1..11: note = XENP016402 vlCDR1
RASQSVSSYLA

SEQ ID NO: 10892 - protein, 7 aa, synthetic construct
  REGION 1..7: note = Description of Artificial Sequence: Synthetic peptide
  REGION 1..7: note = XENP016402 vlCDR2
DASNRAT

SEQ ID NO: 10893 - protein, 9 aa, synthetic construct
  REGION 1..9: note = Description of Artificial Sequence: Synthetic peptide
  REGION 1..9: note = XENP016402 vlCDR3
QQSSNWPRT

SEQ ID NO: 10894 - protein, 246 aa, synthetic construct
  REGION 1..246: note = Description of Artificial Sequence: Synthetic polypeptide
  REGION 1..246: note = XENP017919 1A2_H1L1_scFv(GKPGS)4
QIQLVQSGAEVKKPGASVKVSCKASGYTFTDYSMHWVRQAPGQGLEWMGWINTETGEPTYADKFQGRVTMTLDTSTSTAYMELSSLRSEDTAVYFCASSPLDYWGQGTLVTVSSGKPGSGKPGSGKPGSGKPGSDLLLTQSPLSLPVTPGEPASISCRSSQSIVHSNGNTYLEWFLQKPGQSPQLLIYKVFNRFSGVPDRFSGSGSGTDFTLKISRVEAEDVGVYYCFQGSHVPFTFGSGTKLEIK

SEQ ID NO: 10895 - protein, 114 aa, synthetic construct
  REGION 1..114: note = Description of Artificial Sequence: Synthetic polypeptide
  REGION 1..114: note = VH of XENP017919
QIQLVQSGAEVKKPGASVKVSCKASGYTFTDYSMHWVRQAPGQGLEWMGWINTETGEPTYADKFQGRVTMTLDTSTSTAYMELSSLRSEDTAVYFCASSPLDYWGQGTLVTVSS

SEQ ID NO: 10896 - protein, 112 aa, synthetic construct
  REGION 1..112: note = Description of Artificial Sequence: Synthetic polypeptide
  REGION 1..112: note = VL of XENP017919
DLLLTQSPLSLPVTPGEPASISCRSSQSIVHSNGNTYLEWFLQKPGQSPQLLIYKVFNRFSGVPDRFSGSGSGTDFTLKISRVEAEDVGVYYCFQGSHVPFTFGSGTKLEIK

SEQ ID NO: 10897 - protein, 5 aa, synthetic construct
  REGION 1..5: note = Description of Artificial Sequence: Synthetic peptide
  REGION 1..5: note = XENP017919 vhCDR1
DYSMH

SEQ ID NO: 10898 - protein, 17 aa, synthetic construct
  REGION 1..17: note = Description of Artificial Sequence: Synthetic peptide
  REGION 1..17: note = XENP017919 vhCDR2
WINTETGEPTYADKFQG

SEQ ID NO: 10899 - protein, 5 aa, synthetic construct
  REGION 1..5: note = Description of Artificial Sequence: Synthetic peptide
  REGION 1..5: note = XENP017919 vhCDR3
SPLDY

SEQ ID NO: 10900 - protein, 16 aa, synthetic construct
  REGION 1..16: note = Description of Artificial Sequence: Synthetic peptide
  REGION 1..16: note = XENP017919 vlCDR1
RSSQSIVHSNGNTYLE

SEQ ID NO: 10901 - protein, 7 aa, synthetic construct
  REGION 1..7: note = Description of Artificial Sequence: Synthetic peptide
  REGION 1..7: note = XENP017919 vlCDR2
KVFNRFS

SEQ ID NO: 10902 - protein, 9 aa, synthetic construct
  REGION 1..9: note = Description of Artificial Sequence: Synthetic peptide
  REGION 1..9: note = XENP017919 vlCDR3
FQGSHVPFT

SEQ ID NO: 10903 - protein, 251 aa, synthetic construct
  REGION 1..251: note = Description of Artificial Sequence: Synthetic polypeptide
  REGION 1..251: note = XENP017920 1C7_H1L1_scFv(GKPGS)4
EVQLLESGGGLVQPGGSLRLSCAASGFAFSSYDMSWVRQAPGKRLEWVSYISSGGGSTYYPDSVKGRFTISRDNSKNTLYLQMNSLRAEDTAVYYCARPLDDYYAPFAYWGQGTLVTVSSGKPGSGKPGSGKPGSGKPGSDIVLTQSPSSLSASVGDRVTITCRASESVDNDGISFMNWFQQKPGKPPKLLIYAASNQGSGVPARFSGSGSGTDFTLTISSLQPEDFATYFCQQSKEVPWTFGGGTKVEIK

SEQ ID NO: 10904 - protein, 120 aa, synthetic construct
  REGION 1..120: note = Description of Artificial Sequence: Synthetic polypeptide
  REGION 1..120: note = VH of XENP017920
EVQLLESGGGLVQPGGSLRLSCAASGFAFSSYDMSWVRQAPGKRLEWVSYISSGGGSTYYPDSVKGRFTISRDNSKNTLYLQMNSLRAEDTAVYYCARPLDDYYAPFAYWGQGTLVTVSS

SEQ ID NO: 10905 - protein, 111 aa, synthetic construct
  REGION 1..111: note = Description of Artificial Sequence: Synthetic polypeptide
  REGION 1..111: note = VL of XENP017920
DIVLTQSPSSLSASVGDRVTITCRASESVDNDGISFMNWFQQKPGKPPKLLIYAASNQGSGVPARFSGSGSGTDFTLTISSLQPEDFATYFCQQSKEVPWTFGGGTKVEIK

SEQ ID NO: 10906 - protein, 5 aa, synthetic construct
  REGION 1..5: note = Description of Artificial Sequence: Synthetic peptide
  REGION 1..5: note = XENP017920 vhCDR1
SYDMS

SEQ ID NO: 10907 - protein, 17 aa, synthetic construct
  REGION 1..17: note = Description of Artificial Sequence: Synthetic peptide
  REGION 1..17: note = XENP017920 vhCDR2
YISSGGGSTYYPDSVKG

SEQ ID NO: 10908 - protein, 11 aa, synthetic construct
  REGION 1..11: note = Description of Artificial Sequence: Synthetic peptide
  REGION 1..11: note = XENP017920 vhCDR3
PLDDYYAPFAY

SEQ ID NO: 10909 - protein, 15 aa, synthetic construct
  REGION 1..15: note = Description of Artificial Sequence: Synthetic peptide
  REGION 1..15: note = XENP017920 vlCDR1
RASESVDNDGISFMN

SEQ ID NO: 10910 - protein, 7 aa, synthetic construct
  REGION 1..7: note = Description of Artificial Sequence: Synthetic peptide
  REGION 1..7: note = XENP017920 vlCDR2
AASNQGS

SEQ ID NO: 10911 - protein, 9 aa, synthetic construct
  REGION 1..9: note = Description of Artificial Sequence: Synthetic peptide
  REGION 1..9: note = XENP017920 vlCDR3
QQSKEVPWT

SEQ ID NO: 10912 - protein, 246 aa, synthetic construct
  REGION 1..246: note = Description of Artificial Sequence: Synthetic polypeptide
  REGION 1..246: note = XENP017921 1G2_H1L1_scFv(GKPGS)4
QVQLVQSGAEVKKPGASVKVSCKVSGFSLTDYGVNWVRQAPGQGLEWMGMIWGDGSTDYNSKFQGRVTMTKDISTSTVYMELSSLRSEDTAVYYCAREYAMDYWGQGTLVTVSSGKPGSGKPGSGKPGSGKPGSDIVMTQSPDSLAVSLGERATINCKSSQSLLNSRTRKNYLAWYQQKPGQSPKLLIFWASTRESGVPDRFTGSGSGTDFTLTISSLQAEDVAVYYCKQSYNLRTFGGGTKVEIK

SEQ ID NO: 10913 - protein, 114 aa, synthetic construct
  REGION 1..114: note = Description of Artificial Sequence: Synthetic polypeptide
  REGION 1..114: note = VH of XENP017921
QVQLVQSGAEVKKPGASVKVSCKVSGFSLTDYGVNWVRQAPGQGLEWMGMIWGDGSTDYNSKFQGRVTMTKDISTSTVYMELSSLRSEDTAVYYCAREYAMDYWGQGTLVTVSS

SEQ ID NO: 10914 - protein, 112 aa, synthetic construct
  REGION 1..112: note = Description of Artificial Sequence: Synthetic polypeptide
  REGION 1..112: note = VL of XENP017921
DIVMTQSPDSLAVSLGERATINCKSSQSLLNSRTRKNYLAWYQQKPGQSPKLLIFWASTRESGVPDRFTGSGSGTDFTLTISSLQAEDVAVYYCKQSYNLRTFGGGTKVEIK

SEQ ID NO: 10915 - protein, 5 aa, synthetic construct
  REGION 1..5: note = Description of Artificial Sequence: Synthetic peptide
  REGION 1..5: note = XENP017921 vhCDR1
DYGVN

SEQ ID NO: 10916 - protein, 16 aa, synthetic construct
  REGION 1..16: note = Description of Artificial Sequence: Synthetic peptide
  REGION 1..16: note = XENP017921 vhCDR2
MIWGDGSTDYNSKFQG

SEQ ID NO: 10917 - protein, 6 aa, synthetic construct
  REGION 1..6: note = Description of Artificial Sequence: Synthetic peptide
  REGION 1..6: note = XENP017921 vhCDR3
EYAMDY

SEQ ID NO: 10918 - protein, 17 aa, synthetic construct
  REGION 1..17: note = Description of Artificial Sequence: Synthetic peptide
  REGION 1..17: note = XENP017921 vlCDR1
KSSQSLLNSRTRKNYLA

SEQ ID NO: 10919 - protein, 7 aa, synthetic construct
  REGION 1..7: note = Description of Artificial Sequence: Synthetic peptide
  REGION 1..7: note = XENP017921 vlCDR2
WASTRES

SEQ ID NO: 10920 - protein, 8 aa, synthetic construct
  REGION 1..8: note = Description of Artificial Sequence: Synthetic peptide
  REGION 1..8: note = XENP017921 vlCDR3
KQSYNLRT

SEQ ID NO: 10921 - protein, 249 aa, synthetic construct
  REGION 1..249: note = Description of Artificial Sequence: Synthetic polypeptide
  REGION 1..249: note = XENP017922 1G6_H1L1_scFv(GKPGS)4
EVQLVESGGGLVKPGGSLRLSCAASGFTFSNYWMNWVRQAPGKGLEWVGEIRLKSNNYATHYAEPVKGRFTISRDDSKSTVYLQMNSLKTEDTAVYYCTRYYGNYGGYFDVWGAGTLVTVSSGKPGSGKPGSGKPGSGKPGSSIVMTQSPATLSVSPGERATLSCRASQSVSNDVAWYQQKPGQSPRLLINYASHRYTGVPDRFTGSGYGTEFTLTISSLQSEDFAVYFCQQDYSSPRTFGGGTKVEIK

SEQ ID NO: 10922 - protein, 122 aa, synthetic construct
  REGION 1..122: note = Description of Artificial Sequence: Synthetic polypeptide
  REGION 1..122: note = VH of XENP017922
EVQLVESGGGLVKPGGSLRLSCAASGFTFSNYWMNWVRQAPGKGLEWVGEIRLKSNNYATHYAEPVKGRFTISRDDSKSTVYLQMNSLKTEDTAVYYCTRYYGNYGGYFDVWGAGTLVTVSS

SEQ ID NO: 10923 - protein, 107 aa, synthetic construct
  REGION 1..107: note = Description of Artificial Sequence: Synthetic polypeptide
  REGION 1..107: note = VL of XENP017922
SIVMTQSPATLSVSPGERATLSCRASQSVSNDVAWYQQKPGQSPRLLINYASHRYTGVPDRFTGSGYGTEFTLTISSLQSEDFAVYFCQQDYSSPRTFGGGTKVEIK

SEQ ID NO: 10924 - protein, 5 aa, synthetic construct
  REGION 1..5: note = Description of Artificial Sequence: Synthetic peptide
  REGION 1..5: note = XENP017922 vhCDR1
NYWMN

SEQ ID NO: 10925 - protein, 19 aa, synthetic construct
  REGION 1..19: note = Description of Artificial Sequence: Synthetic peptide
  REGION 1..19: note = XENP017922 vhCDR2
EIRLKSNNYATHYAEPVKG

SEQ ID NO: 10926 - protein, 11 aa, synthetic construct
  REGION 1..11: note = Description of Artificial Sequence: Synthetic peptide
  REGION 1..11: note = XENP017922 vhCDR3
YYGNYGGYFDV

SEQ ID NO: 10927 - protein, 11 aa, synthetic construct
  REGION 1..11: note = Description of Artificial Sequence: Synthetic peptide
  REGION 1..11: note = XENP017922 vlCDR1
RASQSVSNDVA

SEQ ID NO: 10928 - protein, 7 aa, synthetic construct
  REGION 1..7: note = Description of Artificial Sequence: Synthetic peptide
  REGION 1..7: note = XENP017922 vlCDR2
YASHRYT

SEQ ID NO: 10929 - protein, 9 aa, synthetic construct
  REGION 1..9: note = Description of Artificial Sequence: Synthetic peptide
  REGION 1..9: note = XENP017922 vlCDR3
QQDYSSPRT

SEQ ID NO: 10930 - protein, 249 aa, synthetic construct
  REGION 1..249: note = Description of Artificial Sequence: Synthetic polypeptide
  REGION 1..249: note = XENP017923 1G6_H1L2_scFv(GKPGS)4
EVQLVESGGGLVKPGGSLRLSCAASGFTFSNYWMNWVRQAPGKGLEWVGEIRLKSNNYATHYAEPVKGRFTISRDDSKSTVYLQMNSLKTEDTAVYYCTRYYGNYGGYFDVWGAGTLVTVSSGKPGSGKPGSGKPGSGKPGSSIVMTQSPSSLSASVGDRVTITCRASQSVSNDVAWYQQKPGKSPKLLINYASHRYTGVPDRFTGSGYGTDFTLTISSLQPEDFATYFCQQDYSSPRTFGGGTKVEIK

SEQ ID NO: 10931 - protein, 122 aa, synthetic construct; identical to SEQ ID NO: 10922
  REGION 1..122: note = Description of Artificial Sequence: Synthetic polypeptide
  REGION 1..122: note = VH of XENP017923

SEQ ID NO: 10932 - protein, 107 aa, synthetic construct
  REGION 1..107: note = Description of Artificial Sequence: Synthetic polypeptide
  REGION 1..107: note = VL of XENP017923
SIVMTQSPSSLSASVGDRVTITCRASQSVSNDVAWYQQKPGKSPKLLINYASHRYTGVPDRFTGSGYGTDFTLTISSLQPEDFATYFCQQDYSSPRTFGGGTKVEIK

SEQ ID NO: 10933 - protein, 5 aa, synthetic construct
  REGION 1..5: note = Description of Artificial Sequence: Synthetic peptide
  REGION 1..5: note = XENP017923 vhCDR1
NYWMN

SEQ ID NO: 10934 - protein, 19 aa, synthetic construct
  REGION 1..19: note = Description of Artificial Sequence: Synthetic peptide
  REGION 1..19: note = XENP017923 vhCDR2
EIRLKSNNYATHYAEPVKG

SEQ ID NO: 10935 - protein, 11 aa, synthetic construct
  REGION 1..11: note = Description of Artificial Sequence: Synthetic peptide
  REGION 1..11: note = XENP017923 vhCDR3
YYGNYGGYFDV

SEQ ID NO: 10936 - protein, 11 aa, synthetic construct
  REGION 1..11: note = Description of Artificial Sequence: Synthetic peptide
  REGION 1..11: note = XENP017923 vlCDR1
RASQSVSNDVA

SEQ ID NO: 10937 - protein, 7 aa, synthetic construct
  REGION 1..7: note = Description of Artificial Sequence: Synthetic peptide
  REGION 1..7: note = XENP017923 vlCDR2
YASHRYT

SEQ ID NO: 10938 - protein, 9 aa, synthetic construct
  REGION 1..9: note = Description of Artificial Sequence: Synthetic peptide
  REGION 1..9: note = XENP017923 vlCDR3
QQDYSSPRT

SEQ ID NO: 10939 - protein, 242 aa, synthetic construct
  REGION 1..242: note = Description of Artificial Sequence: Synthetic polypeptide
  REGION 1..242: note = XENP017924 2A2_H1L1_scFv(GKPGS)4
QVQLVQSGAEVKKPGASVKVSCKASGYTFTNYWMHWVRQAPGQGLEWMGYINPSTGYTEYNQKFQGRVTMTADKSTSTAYMELSSLRSEDTAVYYCATGNYFAYWGQGTLVTVSSGKPGSGKPGSGKPGSGKPGSDIQMTQSPSSLSASVGDRVTITCRPSESLYSYLAWYQQKPGKSPKLLVYNAKTLVEGVPSRFSGSGSGTDFTLTISSLQPEDFATYYCQHHYGTPFTFGSGTKLEIK

SEQ ID NO: 10940 - protein, 115 aa, synthetic construct
  REGION 1..115: note = Description of Artificial Sequence: Synthetic polypeptide
  REGION 1..115: note = VH of XENP017924
QVQLVQSGAEVKKPGASVKVSCKASGYTFTNYWMHWVRQAPGQGLEWMGYINPSTGYTEYNQKFQGRVTMTADKSTSTAYMELSSLRSEDTAVYYCATGNYFAYWGQGTLVTVSS

SEQ ID NO: 10941 - protein, 107 aa, synthetic construct
  REGION 1..107: note = Description of Artificial Sequence: Synthetic polypeptide
  REGION 1..107: note = VL of XENP017924
DIQMTQSPSSLSASVGDRVTITCRPSESLYSYLAWYQQKPGKSPKLLVYNAKTLVEGVPSRFSGSGSGTDFTLTISSLQPEDFATYYCQHHYGTPFTFGSGTKLEIK

SEQ ID NO: 10942 - protein, 5 aa, synthetic construct
  REGION 1..5: note = Description of Artificial Sequence: Synthetic peptide
  REGION 1..5: note = XENP017924 vhCDR1
NYWMH

SEQ ID NO: 10943 - protein, 17 aa, synthetic construct
  REGION 1..17: note = Description of Artificial Sequence: Synthetic peptide
  REGION 1..17: note = XENP017924 vhCDR2
YINPSTGYTEYNQKFQG

SEQ ID NO: 10944 - protein, 6 aa, synthetic construct
  REGION 1..6: note = Description of Artificial Sequence: Synthetic peptide
  REGION 1..6: note = XENP017924 vhCDR3
GNYFAY

SEQ ID NO: 10945 - protein, 11 aa, synthetic construct
  REGION 1..11: note = Description of Artificial Sequence: Synthetic peptide
  REGION 1..11: note = XENP017924 vlCDR1
RPSESLYSYLA

SEQ ID NO: 10946 - protein, 7 aa, synthetic construct
  REGION 1..7: note = Description of Artificial Sequence: Synthetic peptide
  REGION 1..7: note = XENP017924 vlCDR2
NAKTLVE

SEQ ID NO: 10947 - protein, 9 aa, synthetic construct
  REGION 1..9: note = Description of Artificial Sequence: Synthetic peptide
  REGION 1..9: note = XENP017924 vlCDR3
QHHYGTPFT

SEQ ID NO: 10948 - protein, 252 aa, synthetic construct
  REGION 1..252: note = Description of Artificial Sequence: Synthetic polypeptide
  REGION 1..252: note = XENP017925 2F11_H1L1_scFv(GKPGS)4
QVQLVQSGAEVKKPGASVKVSCKGSGYTFTDYVMHWVRQAPGQSLEWMGVISTYYGDASYNQKFQGRVTMTVDKSTSTAYMELSSLRSEDTAVYYCAREGYDGYLYFDVWGAGTLVTVSSGKPGSGKPGSGKPGSGKPGSDVLMTQTPLSSPVTLGQPASISCRSSQSIVHSNGNTYLEWYQQRPGQSPRLLIYKVSNRFSGVPDRFSGSGSGTDFTLKISRVEAEDVGVYYCFQGSHVPYTFGGGTKVEIK

SEQ ID NO: 10949 - protein, 120 aa, synthetic construct
  REGION 1..120: note = Description of Artificial Sequence: Synthetic polypeptide
  REGION 1..120: note = VH of XENP017925
QVQLVQSGAEVKKPGASVKVSCKGSGYTFTDYVMHWVRQAPGQSLEWMGVISTYYGDASYNQKFQGRVTMTVDKSTSTAYMELSSLRSEDTAVYYCAREGYDGYLYFDVWGAGTLVTVSS

SEQ ID NO: 10950 - protein, 112 aa, synthetic construct
  REGION 1..112: note = Description of Artificial Sequence: Synthetic polypeptide
  REGION 1..112: note = VL of XENP017925
DVLMTQTPLSSPVTLGQPASISCRSSQSIVHSNGNTYLEWYQQRPGQSPRLLIYKVSNRFSGVPDRFSGSGSGTDFTLKISRVEAEDVGVYYCFQGSHVPYTFGGGTKVEIK

SEQ ID NO: 10951 - protein, 5 aa, synthetic construct
  REGION 1..5: note = Description of Artificial Sequence: Synthetic peptide
  REGION 1..5: note = XENP017925 vhCDR1
DYVMH

SEQ ID NO: 10952 - protein, 17 aa, synthetic construct
  REGION 1..17: note = Description of Artificial Sequence: Synthetic peptide
  REGION 1..17: note = XENP017925 vhCDR2
VISTYYGDASYNQKFQG

SEQ ID NO: 10953 - protein, 11 aa, synthetic construct
  REGION 1..11: note = Description of Artificial Sequence: Synthetic peptide
  REGION 1..11: note = XENP017925 vhCDR3
EGYDGYLYFDV

SEQ ID NO: 10954 - protein, 16 aa, synthetic construct
  REGION 1..16: note = Description of Artificial Sequence: Synthetic peptide
  REGION 1..16: note = XENP017925 vlCDR1
RSSQSIVHSNGNTYLE

SEQ ID NO: 10955 - protein, 7 aa, synthetic construct
  REGION 1..7: note = Description of Artificial Sequence: Synthetic peptide
  REGION 1..7: note = XENP017925 vlCDR2
KVSNRFS

SEQ ID NO: 10956 - protein, 9 aa, synthetic construct
  REGION 1..9: note = Description of Artificial Sequence: Synthetic peptide
  REGION 1..9: note = XENP017925 vlCDR3
FQGSHVPYT

SEQ ID NO: 10957 - protein, 252 aa, synthetic construct
  REGION 1..252: note = Description of Artificial Sequence: Synthetic polypeptide
  REGION 1..252: note = XENP017926 5H1_H1L1_scFv(GKPGS)4
QVQLVQSGAEVKKPGASVKVSCKGSGYTFTDYVMHWVRQAPGQSLEWMGVISIHYGDGRYNQKFQGRVTMTVDKSTSTAYMELSSLRSEDTAVYYCAREVYDGYLYFDVWGAGTLVTVSSGKPGSGKPGSGKPGSGKPGSDVLMTQSPLSLPVTPGEPASISCRSSQSIVHSNGNTYLEWYLQKPGQSPQLLIYKVSNRFSGVPDRFGGRGSGTDFTLKISRVEAEDVGVYYCFQGSHVPYTFGGGTKVEIK

SEQ ID NO: 10958 - protein, 120 aa, synthetic construct
  REGION 1..120: note = Description of Artificial Sequence: Synthetic polypeptide
  REGION 1..120: note = VH of XENP017926
QVQLVQSGAEVKKPGASVKVSCKGSGYTFTDYVMHWVRQAPGQSLEWMGVISIHYGDGRYNQKFQGRVTMTVDKSTSTAYMELSSLRSEDTAVYYCAREVYDGYLYFDVWGAGTLVTVSS

SEQ ID NO: 10959 - protein, 112 aa, synthetic construct
  REGION 1..112: note = Description of Artificial Sequence: Synthetic polypeptide
  REGION 1..112: note = VL of XENP017926
DVLMTQSPLSLPVTPGEPASISCRSSQSIVHSNGNTYLEWYLQKPGQSPQLLIYKVSNRFSGVPDRFGGRGSGTDFTLKISRVEAEDVGVYYCFQGSHVPYTFGGGTKVEIK

SEQ ID NO: 10960 - protein, 5 aa, synthetic construct
  REGION 1..5: note = Description of Artificial Sequence: Synthetic peptide
  REGION 1..5: note = XENP017926 vhCDR1
DYVMH

SEQ ID NO: 10961 - protein, 17 aa, synthetic construct
  REGION 1..17: note = Description of Artificial Sequence: Synthetic peptide
  REGION 1..17: note = XENP017926 vhCDR2
VISIHYGDGRYNQKFQG

SEQ ID NO: 10962 - protein, 11 aa, synthetic construct
  REGION 1..11: note = Description of Artificial Sequence: Synthetic peptide
  REGION 1..11: note = XENP017926 vhCDR3
EVYDGYLYFDV

SEQ ID NO: 10963 - protein, 16 aa, synthetic construct
  REGION 1..16: note = Description of Artificial Sequence: Synthetic peptide
  REGION 1..16: note = XENP017926 vlCDR1
RSSQSIVHSNGNTYLE

SEQ ID NO: 10964 - protein, 7 aa, synthetic construct
  REGION 1..7: note = Description of Artificial Sequence: Synthetic peptide
  REGION 1..7: note = XENP017926 vlCDR2
KVSNRFS

SEQ ID NO: 10965 - protein, 9 aa, synthetic construct
  REGION 1..9: note = Description of Artificial Sequence: Synthetic peptide
  REGION 1..9: note = XENP017926 vlCDR3
FQGSHVPYT

SEQ ID NO: 10966 - protein, 252 aa, synthetic construct
  REGION 1..252: note = Description of Artificial Sequence: Synthetic polypeptide
  REGION 1..252: note = XENP017927 5H1_H1L2_scFv(GKPGS)4
QVQLVQSGAEVKKPGASVKVSCKGSGYTFTDYVMHWVRQAPGQSLEWMGVISIHYGDGRYNQKFQGRVTMTVDKSTSTAYMELSSLRSEDTAVYYCAREVYDGYLYFDVWGAGTLVTVSSGKPGSGKPGSGKPGSGKPGSDVLMTQSPLSLPVTLGQPASISCRSSQSIVHSNGNTYLEWYQQRPGQSPRLLIYKVSNRFSGVPDRFGGRGSGTDFTLKISRVEAEDVGVYYCFQGSHVPYTFGGGTKVEIK

SEQ ID NO: 10967 - protein, 120 aa, synthetic construct; identical to SEQ ID NO: 10958
  REGION 1..120: note = Description of Artificial Sequence: Synthetic polypeptide
  REGION 1..120: note = VH of XENP017927

SEQ ID NO: 10968 - protein, 112 aa, synthetic construct
  REGION 1..112: note = Description of Artificial Sequence: Synthetic polypeptide
  REGION 1..112: note = VL of XENP017927
DVLMTQSPLSLPVTLGQPASISCRSSQSIVHSNGNTYLEWYQQRPGQSPRLLIYKVSNRFSGVPDRFGGRGSGTDFTLKISRVEAEDVGVYYCFQGSHVPYTFGGGTKVEIK

SEQ ID NO: 10969 - protein, 5 aa, synthetic construct
  REGION 1..5: note = Description of Artificial Sequence: Synthetic peptide
  REGION 1..5: note = XENP017927 vhCDR1
DYVMH

SEQ ID NO: 10970 - protein, 17 aa, synthetic construct
  REGION 1..17: note = Description of Artificial Sequence: Synthetic peptide
  REGION 1..17: note = XENP017927 vhCDR2
VISIHYGDGRYNQKFQG

SEQ ID NO: 10971 - protein, 11 aa, synthetic construct
  REGION 1..11: note = Description of Artificial Sequence: Synthetic peptide
  REGION 1..11: note = XENP017927 vhCDR3
EVYDGYLYFDV

SEQ ID NO: 10972 - protein, 16 aa, synthetic construct
  REGION 1..16: note = Description of Artificial Sequence: Synthetic peptide
  REGION 1..16: note = XENP017927 vlCDR1
RSSQSIVHSNGNTYLE

SEQ ID NO: 10973 - protein, 7 aa, synthetic construct
  REGION 1..7: note = Description of Artificial Sequence: Synthetic peptide
  REGION 1..7: note = XENP017927 vlCDR2
KVSNRFS

SEQ ID NO: 10974 - protein, 9 aa, synthetic construct
  REGION 1..9: note = Description of Artificial Sequence: Synthetic peptide
  REGION 1..9: note = XENP017927 vlCDR3
FQGSHVPYT

SEQ ID NO: 10975 - protein, 247 aa, synthetic construct
  REGION 1..247: note = Description of Artificial Sequence: Synthetic polypeptide
  REGION 1..247: note = XENP017928 10E4_H1L1_scFv(GKPGS)4
QVQLVQSGAEVKKPGASVKVSCKASGYSFTSYWMHWVRQAPGQGLEWMGAIYPGNSDTSYNQKFQGRVTMTADTSTSTAYMELSSLRSEDTAVYYCTRDGNYVRYYFDYWGQGTLVTVSSGKPGSGKPGSGKPGSGKPGSDIQMTQSPSSLSASVGDRVTITCRASQDIGSNLNWLQQKPGKTIKRLIYATSNLDSGVPKRFSGRRSGSDYTLTISSLQPEDFATYYCLQYASSPLTFGTGTKLEIK

SEQ ID NO: 10976 - protein, 120 aa, synthetic construct
  REGION 1..120: note = Description of Artificial Sequence: Synthetic polypeptide
  REGION 1..120: note = VH of XENP017928
QVQLVQSGAEVKKPGASVKVSCKASGYSFTSYWMHWVRQAPGQGLEWMGAIYPGNSDTSYNQKFQGRVTMTADTSTSTAYMELSSLRSEDTAVYYCTRDGNYVRYYFDYWGQGTLVTVSS

SEQ ID NO: 10977 - protein, 107 aa, synthetic construct
  REGION 1..107: note = Description of Artificial Sequence: Synthetic polypeptide
  REGION 1..107: note = VL of XENP017928
DIQMTQSPSSLSASVGDRVTITCRASQDIGSNLNWLQQKPGKTIKRLIYATSNLDSGVPKRFSGRRSGSDYTLTISSLQPEDFATYYCLQYASSPLTFGTGTKLEIK

SEQ ID NO: 10978 - protein, 5 aa, synthetic construct
  REGION 1..5: note = Description of Artificial Sequence: Synthetic peptide
  REGION 1..5: note = XENP017928 vhCDR1
SYWMH

SEQ ID NO: 10979 - protein, 17 aa, synthetic construct
  REGION 1..17: note = Description of Artificial Sequence: Synthetic peptide
  REGION 1..17: note = XENP017928 vhCDR2
AIYPGNSDTSYNQKFQG

SEQ ID NO: 10980 - protein, 11 aa, synthetic construct
  REGION 1..11: note = Description of Artificial Sequence: Synthetic peptide
  REGION 1..11: note = XENP017928 vhCDR3
DGNYVRYYFDY

SEQ ID NO: 10981 - protein, 11 aa, synthetic construct
  REGION 1..11: note = Description of Artificial Sequence: Synthetic peptide
  REGION 1..11: note = XENP017928 vlCDR1
RASQDIGSNLN

SEQ ID NO: 10982 - protein, 7 aa, synthetic construct
  REGION 1..7: note = Description of Artificial Sequence: Synthetic peptide
  REGION 1..7: note = XENP017928 vlCDR2
ATSNLDS

SEQ ID NO: 10983 - protein, 9 aa, synthetic construct
  REGION 1..9: note = Description of Artificial Sequence: Synthetic peptide
  REGION 1..9: note = XENP017928 vlCDR3
LQYASSPLT

SEQ ID NO: 10984 - protein, 247 aa, synthetic construct
  REGION 1..247: note = Description of Artificial Sequence: Synthetic polypeptide
  REGION 1..247: note = XENP017929 4C11_H1L1_scFv(GKPGS)4
QIQLVQSGAEVKKPGASVKVSCKASGYTFTSYWMHWVRQAPGQGLEWMGAIYPGNSDTSYNQKFQGRVTMTADTSTSTAYMELSSLRSEDTAVYYCTNLYYGSSFAMDYWGQGTLVTVSSGKPGSGKPGSGKPGSGKPGSDIKMTQSPSSLSASVGDRVTITCRASQDINTYLSWFQQKPGKSPKTLIYRANRLVDGVPSRFSGSGSGQDYTLTISSLQPEDFATYYCLHYDDFPYTFGGGTKVEIK

SEQ ID NO: 10985 - protein, 120 aa, synthetic construct
  REGION 1..120: note = Description of Artificial Sequence: Synthetic polypeptide
  REGION 1..120: note = VH of XENP017929
QIQLVQSGAEVKKPGASVKVSCKASGYTFTSYWMHWVRQAPGQGLEWMGAIYPGNSDTSYNQKFQGRVTMTADTSTSTAYMELSSLRSEDTAVYYCTNLYYGSSFAMDYWGQGTLVTVSS

SEQ ID NO: 10986 - protein, 107 aa, synthetic construct
  REGION 1..107: note = Description of Artificial Sequence: Synthetic polypeptide
  REGION 1..107: note = VL of XENP017929
DIKMTQSPSSLSASVGDRVTITCRASQDINTYLSWFQQKPGKSPKTLIYRANRLVDGVPSRFSGSGSGQDYTLTISSLQPEDFATYYCLHYDDFPYTFGGGTKVEIK

SEQ ID NO: 10987 - protein, 5 aa, synthetic construct
  REGION 1..5: note = Description of Artificial Sequence: Synthetic peptide
  REGION 1..5: note = XENP017929 vhCDR1
SYWMH

SEQ ID NO: 10988 - protein, 17 aa, synthetic construct
  REGION 1..17: note = Description of Artificial Sequence: Synthetic peptide
  REGION 1..17: note = XENP017929 vhCDR2
AIYPGNSDTSYNQKFQG

SEQ ID NO: 10989 - protein, 11 aa, synthetic construct
  REGION 1..11: note = Description of Artificial Sequence: Synthetic peptide
  REGION 1..11: note = XENP017929 vhCDR3
LYYGSSFAMDY

SEQ ID NO: 10990 - protein, 11 aa, synthetic construct
  REGION 1..11: note = Description of Artificial Sequence: Synthetic peptide
  REGION 1..11: note = XENP017929 vlCDR1
RASQDINTYLS

SEQ ID NO: 10991 - protein, 7 aa, synthetic construct
  REGION 1..7: note = Description of Artificial Sequence: Synthetic peptide
  REGION 1..7: note = XENP017929 vlCDR2
RANRLVD

SEQ ID NO: 10992 - protein, 9 aa, synthetic construct
  REGION 1..9: note = Description of Artificial Sequence: Synthetic peptide
  REGION 1..9: note = XENP017929 vlCDR3
LHYDDFPYT

SEQ ID NO: 10993 - protein, 244 aa, synthetic construct
  REGION 1..244: note = Description of Artificial Sequence: Synthetic polypeptide
  REGION 1..244: note = XENP017930 6A3_H1L1_scFv(GKPGS)4
EVQLLESGGGLVQPGGSLRLSCAASGFTFSSYGMSWVRQAPGKRLEWVSTISGGGRYTYYPDSVKGRFTISRDNSKNTLYLQMNSLRAEDTAVYYCASYYDSSFDYWGQGTLVTVSSGKPGSGKPGSGKPGSGKPGSDIVMTQSPDSLAVSLGERATINCKASQDVGTAVAWYQQKPGQSPKLLIYWASTRHTGVPDRFTGSGSGTDFTLTISSLQAEDVAVYFCQHYSIYPWTFGGGTKVEIK

SEQ ID NO: 10994 - protein, 117 aa, synthetic construct
  REGION 1..117: note = Description of Artificial Sequence: Synthetic polypeptide
  REGION 1..117: note = VH of XENP017930
EVQLLESGGGLVQPGGSLRLSCAASGFTFSSYGMSWVRQAPGKRLEWVSTISGGGRYTYYPDSVKGRFTISRDNSKNTLYLQMNSLRAEDTAVYYCASYYDSSFDYWGQGTLVTVSS

SEQ ID NO: 10995 - protein, 107 aa, synthetic construct
  REGION 1..107: note = Description of Artificial Sequence: Synthetic polypeptide
  REGION 1..107: note = VL of XENP017930
DIVMTQSPDSLAVSLGERATINCKASQDVGTAVAWYQQKPGQSPKLLIYWASTRHTGVPDRFTGSGSGTDFTLTISSLQAEDVAVYFCQHYSIYPWTFGGGTKVEIK

SEQ ID NO: 10996 - protein, 5 aa, synthetic construct
  REGION 1..5: note = Description of Artificial Sequence: Synthetic peptide
  REGION 1..5: note = XENP017930 vhCDR1
SYGMS

SEQ ID NO: 10997 - protein, 17 aa, synthetic construct
  REGION 1..17: note = Description of Artificial Sequence: Synthetic peptide
  REGION 1..17: note = XENP017930 vhCDR2
TISGGGRYTYYPDSVKG

SEQ ID NO: 10998 - protein, 8 aa, synthetic construct
  REGION 1..8: note = Description of Artificial Sequence: Synthetic peptide
  REGION 1..8: note = XENP017930 vhCDR3
YYDSSFDY

SEQ ID NO: 10999 - protein, 11 aa, synthetic construct
  REGION 1..11: note = Description of Artificial Sequence: Synthetic peptide
  REGION 1..11: note = XENP017930 vlCDR1
KASQDVGTAVA

SEQ ID NO: 11000 - protein, 7 aa, synthetic construct
  REGION 1..7: note = Description of Artificial Sequence: Synthetic peptide
  REGION 1..7: note = XENP017930 vlCDR2
WASTRHT

SEQ ID NO: 11001 - protein, 9 aa, synthetic construct
  REGION 1..9: note = Description of Artificial Sequence: Synthetic peptide
  REGION 1..9: note = XENP017930 vlCDR3
QHYSIYPWT

SEQ ID NO: 11002 - protein, 244 aa, synthetic construct
  REGION 1..244: note = Description of Artificial Sequence: Synthetic polypeptide
  REGION 1..244: note = XENP017931 6A3_H1L2_scFv(GKPGS)4
EVQLLESGGGLVQPGGSLRLSCAASGFTFSSYGMSWVRQAPGKRLEWVSTISGGGRYTYYPDSVKGRFTISRDNSKNTLYLQMNSLRAEDTAVYYCASYYDSSFDYWGQGTLVTVSSGKPGSGKPGSGKPGSGKPGSDIVMTQSPATLSVSPGERATLSCRASQDVGTAVAWYQQKPGQSPRLLIYWASTRHTGVPDRFTGSGSGTEFTLTISSLQSEDFAVYFCQHYSIYPWTFGGGTKVEIK

SEQ ID NO: 11003 - protein, 117 aa, synthetic construct; identical to SEQ ID NO: 10994
  REGION 1..117: note = Description of Artificial Sequence: Synthetic polypeptide
  REGION 1..117: note = VH of XENP017931

SEQ ID NO: 11004 - protein, 107 aa, synthetic construct
  REGION 1..107: note = Description of Artificial Sequence: Synthetic polypeptide
  REGION 1..107: note = VL of XENP017931
DIVMTQSPATLSVSPGERATLSCRASQDVGTAVAWYQQKPGQSPRLLIYWASTRHTGVPDRFTGSGSGTEFTLTISSLQSEDFAVYFCQHYSIYPWTFGGGTKVEIK

SEQ ID NO: 11005 - protein, 5 aa, synthetic construct
  REGION 1..5: note = Description of Artificial Sequence: Synthetic peptide
  REGION 1..5: note = XENP017931 vhCDR1
SYGMS

SEQ ID NO: 11006 - protein, 17 aa, synthetic construct
  REGION 1..17: note = Description of Artificial Sequence: Synthetic peptide
  REGION 1..17: note = XENP017931 vhCDR2
TISGGGRYTYYPDSVKG

SEQ ID NO: 11007 - protein, 8 aa, synthetic construct
  REGION 1..8: note = Description of Artificial Sequence: Synthetic peptide
  REGION 1..8: note = XENP017931 vhCDR3
YYDSSFDY

SEQ ID NO: 11008 - protein, 11 aa, synthetic construct
  REGION 1..11: note = Description of Artificial Sequence: Synthetic peptide
  REGION 1..11: note = XENP017931 vlCDR1
RASQDVGTAVA

SEQ ID NO: 11009 - protein, 7 aa, synthetic construct
  REGION 1..7: note = Description of Artificial Sequence: Synthetic peptide
  REGION 1..7: note = XENP017931 vlCDR2
WASTRHT

SEQ ID NO: 11010 - protein, 9 aa, synthetic construct
  REGION 1..9: note = Description of Artificial Sequence: Synthetic peptide
  REGION 1..9: note = XENP017931 vlCDR3
QHYSIYPWT

SEQ ID NO: 11011 - protein, 244 aa, synthetic construct
  REGION 1..244: note = Description of Artificial Sequence: Synthetic polypeptide
  REGION 1..244: note = XENP017932 6A3_H1L3_scFv(GKPGS)4
EVQLLESGGGLVQPGGSLRLSCAASGFTFSSYGMSWVRQAPGKRLEWVSTISGGGRYTYYPDSVKGRFTISRDNSKNTLYLQMNSLRAEDTAVYYCASYYDSSFDYWGQGTLVTVSSGKPGSGKPGSGKPGSGKPGSDIVMTQSPSSLSASVGDRVTITCRASQDVGTAVAWYQQKPGKSPKLLIYWASTRHTGVPDRFTGSGSGTDFTLTISSLQPEDFATYFCQHYSIYPWTFGGGTKVEIK

SEQ ID NO: 11012 - protein, 117 aa, synthetic construct; identical to SEQ ID NO: 10994
  REGION 1..117: note = Description of Artificial Sequence: Synthetic polypeptide
  REGION 1..117: note = VH of XENP017932

SEQ ID NO: 11013 - protein, 107 aa, synthetic construct
  REGION 1..107: note = Description of Artificial Sequence: Synthetic polypeptide
  REGION 1..107: note = VL of XENP017932
DIVMTQSPSSLSASVGDRVTITCRASQDVGTAVAWYQQKPGKSPKLLIYWASTRHTGVPDRFTGSGSGTDFTLTISSLQPEDFATYFCQHYSIYPWTFGGGTKVEIK

SEQ ID NO: 11014 - protein, 5 aa, synthetic construct
  REGION 1..5: note = Description of Artificial Sequence: Synthetic peptide
  REGION 1..5: note = XENP017932 vhCDR1
SYGMS

SEQ ID NO: 11015 - protein, 17 aa, synthetic construct
  REGION 1..17: note = Description of Artificial Sequence: Synthetic peptide
  REGION 1..17: note = XENP017932 vhCDR2
TISGGGRYTYYPDSVKG

SEQ ID NO: 11016 - protein, 8 aa, synthetic construct
  REGION 1..8: note = Description of Artificial Sequence: Synthetic peptide
  REGION 1..8: note = XENP017932 vhCDR3
YYDSSFDY

SEQ ID NO: 11017 - protein, 11 aa, synthetic construct
  REGION 1..11: note = Description of Artificial Sequence: Synthetic peptide
  REGION 1..11: note = XENP017932 vlCDR1
RASQDVGTAVA

SEQ ID NO: 11018 - protein, 7 aa, synthetic construct
  REGION 1..7: note = Description of Artificial Sequence: Synthetic peptide
  REGION 1..7: note = XENP017932 vlCDR2
WASTRHT

SEQ ID NO: 11019 - protein, 9 aa, synthetic construct
  REGION 1..9: note = Description of Artificial Sequence: Synthetic peptide
  REGION 1..9: note = XENP017932 vlCDR3
QHYSIYPWT

SEQ ID NO: 11020 - protein, 244 aa, synthetic construct
  REGION 1..244: note = Description of Artificial Sequence: Synthetic polypeptide
  REGION 1..244: note = XENP017933 6A3_H2L3_scFv(GKPGS)4
QVQLVESGGGLVKPGGSLRLSCAASGFTFSSYGMSWVRQAPGKRLEWVSTISGGGRYTYYPDSVKGRFTISRDNAKNSLYLQMNSLRAEDTAVYYCASYYDSSFDYWGQGTLVTVSSGKPGSGKPGSGKPGSGKPGSDIVMTQSPSSLSASVGDRVTITCRASQDVGTAVAWYQQKPGKSPKLLIYWASTRHTGVPDRFTGSGSGTDFTLTISSLQPEDFATYFCQHYSIYPWTFGGGTKVEIK

SEQ ID NO: 11021 - protein, 117 aa, synthetic construct
  REGION 1..117: note = Description of Artificial Sequence: Synthetic polypeptide
  REGION 1..117: note = VH of XENP017933
QVQLVESGGGLVKPGGSLRLSCAASGFTFSSYGMSWVRQAPGKRLEWVSTISGGGRYTYYPDSVKGRFTISRDNAKNSLYLQMNSLRAEDTAVYYCASYYDSSFDYWGQGTLVTVSS

SEQ ID NO: 11022 - protein, 107 aa, synthetic construct; identical to SEQ ID NO: 11013
  REGION 1..107: note = Description of Artificial Sequence: Synthetic polypeptide
  REGION 1..107: note = VL of XENP017933

SEQ ID NO: 11023 - protein, 5 aa, synthetic construct
  REGION 1..5: note = Description of Artificial Sequence: Synthetic peptide
  REGION 1..5: note = XENP017933 vhCDR1
SYGMS

SEQ ID NO: 11024 - protein, 17 aa, synthetic construct
  REGION 1..17: note = Description of Artificial Sequence: Synthetic peptide
  REGION 1..17: note = XENP017933 vhCDR2
TISGGGRYTYYPDSVKG

SEQ ID NO: 11025 - protein, 8 aa, synthetic construct
  REGION 1..8: note = Description of Artificial Sequence: Synthetic peptide
  REGION 1..8: note = XENP017933 vhCDR3
YYDSSFDY

SEQ ID NO: 11026 - protein, 11 aa, synthetic construct
  REGION 1..11: note = Description of Artificial Sequence: Synthetic peptide
  REGION 1..11: note = XENP017933 vlCDR1
RASQDVGTAVA

SEQ ID NO: 11027 - protein, 7 aa, synthetic construct
  REGION 1..7: note = Description of Artificial Sequence: Synthetic peptide
  REGION 1..7: note = XENP017933 vlCDR2
WASTRHT

SEQ ID NO: 11028 - protein, 9 aa, synthetic construct
  REGION 1..9: note = Description of Artificial Sequence: Synthetic peptide
  REGION 1..9: note = XENP017933 vlCDR3
QHYSIYPWT

SEQ ID NO: 11029 - protein, 244 aa, synthetic construct
  REGION 1..244: note = Description of Artificial Sequence: Synthetic polypeptide
  REGION 1..244: note = XENP017934 6A3_H1.1_L3_scFv(GKPGS)4
EVQLLESGGGLVQPGGSLRLSCAASGFTFSSYGMSWVRQAPGKGLEWVSTISGGGRYTYYPDSVKGRFTISRDNSKNTLYLQMNSLRAEDTAVYYCASYYDSSFDYWGQGTLVTVSSGKPGSGKPGSGKPGSGKPGSDIVMTQSPSSLSASVGDRVTITCRASQDVGTAVAWYQQKPGKSPKLLIYWASTRHTGVPDRFTGSGSGTDFTLTISSLQPEDFATYFCQHYSIYPWTFGGGTKVEIK

SEQ ID NO: 11030 - protein, 117 aa, synthetic construct
  REGION 1..117: note = Description of Artificial Sequence: Synthetic polypeptide
  REGION 1..117: note = VH of XENP017934
EVQLLESGGGLVQPGGSLRLSCAASGFTFSSYGMSWVRQAPGKGLEWVSTISGGGRYTYYPDSVKGRFTISRDNSKNTLYLQMNSLRAEDTAVYYCASYYDSSFDYWGQGTLVTVSS

SEQ ID NO: 11031 - protein, 107 aa, synthetic construct; identical to SEQ ID NO: 11013
  REGION 1..107: note = Description of Artificial Sequence: Synthetic polypeptide
  REGION 1..107: note = VL of XENP017934

SEQ ID NO: 11032 - protein, 5 aa, synthetic construct
  REGION 1..5: note = Description of Artificial Sequence: Synthetic peptide
  REGION 1..5: note = XENP017934 vhCDR1
SYGMS

SEQ ID NO: 11033 - protein, 17 aa, synthetic construct
  REGION 1..17: note = Description of Artificial Sequence: Synthetic peptide
  REGION 1..17: note = XENP017934 vhCDR2
TISGGGRYTYYPDSVKG

SEQ ID NO: 11034 - protein, 8 aa, synthetic construct
  REGION 1..8: note = Description of Artificial Sequence: Synthetic peptide
  REGION 1..8: note = XENP017934 vhCDR3
YYDSSFDY

SEQ ID NO: 11035 - protein, 11 aa, synthetic construct
  REGION 1..11: note = Description of Artificial Sequence: Synthetic peptide
  REGION 1..11: note = XENP017934 vlCDR1
RASQDVGTAVA

SEQ ID NO: 11036 - protein, 7 aa, synthetic construct
  REGION 1..7: note = Description of Artificial Sequence: Synthetic peptide
  REGION 1..7: note = XENP017934 vlCDR2
WASTRHT

SEQ ID NO: 11037 - protein, 9 aa, synthetic construct
  REGION 1..9: note = Description of Artificial Sequence: Synthetic peptide
  REGION 1..9: note = XENP017934 vlCDR3
QHYSIYPWT

SEQ ID NO: 11038 - protein, 249 aa, synthetic construct
  REGION 1..249: note = Description of Artificial Sequence: Synthetic polypeptide
  REGION 1..249: note = XENP018493 1G6_H1.1_L1_scFv(GKPGS)4
QVQLVESGGGLVKPGGSLRLSCAASGFTFSNYWMNWVRQAPGKGLEWVGEIRLKSNNYATHYAEPVKGRFTISRDDSKSTVYLQMNSLKTEDTAVYYCTRYYGNYGGYFDVWGAGTLVTVSSGKPGSGKPGSGKPGSGKPGSSIVMTQSPATLSVSPGERATLSCRASQSVSNDVAWYQQKPGQSPRLLINYASHRYTGVPDRFTGSGYGTEFTLTISSLQSEDFAVYFCQQDYSSPRTFGGGTKVEIK

SEQ ID NO: 11039 - protein, 122 aa, synthetic construct
  REGION 1..122: note = Description of Artificial Sequence: Synthetic polypeptide
  REGION 1..122: note = VH of XENP018493
QVQLVESGGGLVKPGGSLRLSCAASGFTFSNYWMNWVRQAPGKGLEWVGEIRLKSNNYATHYAEPVKGRFTISRDDSKSTVYLQMNSLKTEDTAVYYCTRYYGNYGGYFDVWGAGTLVTVSS

SEQ ID NO: 11040 - protein, 107 aa, synthetic construct; identical to SEQ ID NO: 10923
  REGION 1..107: note = Description of Artificial Sequence: Synthetic polypeptide
  REGION 1..107: note = VL of XENP018493

SEQ ID NO: 11041 - protein, 5 aa, synthetic construct
  REGION 1..5: note = Description of Artificial Sequence: Synthetic peptide
  REGION 1..5: note = XENP018493 vhCDR1
NYWMN

SEQ ID NO: 11042 - protein, 19 aa, synthetic construct
  REGION 1..19: note = Description of Artificial Sequence: Synthetic peptide
  REGION 1..19: note = XENP018493 vhCDR2
EIRLKSNNYATHYAEPVKG

SEQ ID NO: 11043 - protein, 11 aa, synthetic construct
  REGION 1..11: note = Description of Artificial Sequence: Synthetic peptide
  REGION 1..11: note = XENP018493 vhCDR3
YYGNYGGYFDV

SEQ ID NO: 11044 - protein, 11 aa, synthetic construct
  REGION 1..11: note = Description of Artificial Sequence: Synthetic peptide
  REGION 1..11: note = XENP018493 vlCDR1
RASQSVSNDVA

SEQ ID NO: 11045 - protein, 7 aa, synthetic construct
  REGION 1..7: note = Description of Artificial Sequence: Synthetic peptide
  REGION 1..7: note = XENP018493 vlCDR2
YASHRYT

SEQ ID NO: 11046 - protein, 9 aa, synthetic construct
  REGION 1..9: note = Description of Artificial Sequence: Synthetic peptide
  REGION 1..9: note = XENP018493 vlCDR3
QQDYSSPRT

SEQ ID NO: 11047 - protein, 249 aa, synthetic construct
  REGION 1..249: note = Description of Artificial Sequence: Synthetic polypeptide
  REGION 1..249: note = XENP018494 1G6_H1.2_L1_scFv(GKPGS)4
EVKLVESGGGLVKPGGSLRLSCAASGFTFSNYWMNWVRQAPGKGLEWVGEIRLKSNNYATHYAEPVKGRFTISRDDSKSTVYLQMNSLKTEDTAVYYCTRYYGNYGGYFDVWGAGTLVTVSSGKPGSGKPGSGKPGSGKPGSSIVMTQSPATLSVSPGERATLSCRASQSVSNDVAWYQQKPGQSPRLLINYASHRYTGVPDRFTGSGYGTEFTLTISSLQSEDFAVYFCQQDYSSPRTFGGGTKVEIK

SEQ ID NO: 11048 - protein, 122 aa, synthetic construct
  REGION 1..122: note = Description of Artificial Sequence: Synthetic polypeptide
  REGION 1..122: note = VH of XENP018494
EVKLVESGGGLVKPGGSLRLSCAASGFTFSNYWMNWVRQAPGKGLEWVGEIRLKSNNYATHYAEPVKGRFTISRDDSKSTVYLQMNSLKTEDTAVYYCTRYYGNYGGYFDVWGAGTLVTVSS

SEQ ID NO: 11049 - protein, 107 aa, synthetic construct; identical to SEQ ID NO: 10923
  REGION 1..107: note = Description of Artificial Sequence: Synthetic polypeptide
  REGION 1..107: note = VL of XENP018494

SEQ ID NO: 11050 - protein, 5 aa, synthetic construct
  REGION 1..5: note = Description of Artificial Sequence: Synthetic peptide
  REGION 1..5: note = XENP018494 vhCDR1
NYWMN

SEQ ID NO: 11051 - protein, 19 aa, synthetic construct
  REGION 1..19: note = Description of Artificial Sequence: Synthetic peptide
  REGION 1..19: note = XENP018494 vhCDR2
EIRLKSNNYATHYAEPVKG

SEQ ID NO: 11052 - protein, 11 aa, synthetic construct
  REGION 1..11: note = Description of Artificial Sequence: Synthetic peptide
  REGION 1..11: note = XENP018494 vhCDR3
YYGNYGGYFDV

SEQ ID NO: 11053 - protein, 11 aa, synthetic construct
  REGION 1..11: note = Description of Artificial Sequence: Synthetic peptide
  REGION 1..11: note = XENP018494 vlCDR1
RASQSVSNDVA

SEQ ID NO: 11054 - protein, 7 aa, synthetic construct
  REGION 1..7: note = Description of Artificial Sequence: Synthetic peptide
  REGION 1..7: note = XENP018494 vlCDR2
YASHRYT

SEQ ID NO: 11055 - protein, 9 aa, synthetic construct
  REGION 1..9: note = Description of Artificial Sequence: Synthetic peptide
  REGION 1..9: note = XENP018494 vlCDR3
QQDYSSPRT

SEQ ID NO: 11056 - protein, 249 aa, synthetic construct
  REGION 1..249: note = Description of Artificial Sequence: Synthetic polypeptide
  REGION 1..249: note = XENP018495 1G6_H1.3_L1_scFv(GKPGS)4
EVQLEESGGGLVKPGGSLRLSCAASGFTFSNYWMNWVRQAPGKGLEWVGEIRLKSNNYATHYAEPVKGRFTISRDDSKSTVYLQMNSLKTEDTAVYYCTRYYGNYGGYFDVWGAGTLVTVSSGKPGSGKPGSGKPGSGKPGSSIVMTQSPATLSVSPGERATLSCRASQSVSNDVAWYQQKPGQSPRLLINYASHRYTGVPDRFTGSGYGTEFTLTISSLQSEDFAVYFCQQDYSSPRTFGGGTKVEIK

SEQ ID NO: 11057 - protein, 122 aa, synthetic construct
  REGION 1..122: note = Description of Artificial Sequence: Synthetic polypeptide
  REGION 1..122: note = VH of XENP018495
EVQLEESGGGLVKPGGSLRLSCAASGFTFSNYWMNWVRQAPGKGLEWVGEIRLKSNNYATHYAEPVKGRFTISRDDSKSTVYLQMNSLKTEDTAVYYCTRYYGNYGGYFDVWGAGTLVTVSS

SEQ ID NO: 11058 - protein, 107 aa, synthetic construct; identical to SEQ ID NO: 10923
  REGION 1..107: note = Description of Artificial Sequence: Synthetic polypeptide
  REGION 1..107: note = VL of XENP018495

SEQ ID NO: 11059 - protein, 5 aa, synthetic construct
  REGION 1..5: note = Description of Artificial Sequence: Synthetic peptide
  REGION 1..5: note = XENP018495 vhCDR1
NYWMN

SEQ ID NO: 11060 - protein, 19 aa, synthetic construct
  REGION 1..19: note = Description of Artificial Sequence: Synthetic peptide
  REGION 1..19: note = XENP018495 vhCDR2
EIRLKSNNYATHYAEPVKG

SEQ ID NO: 11061 - protein, 11 aa, synthetic construct
  REGION 1..11: note = Description of Artificial Sequence: Synthetic peptide
  REGION 1..11: note = XENP018495 vhCDR3
YYGNYGGYFDV

SEQ ID NO: 11062 - protein, 11 aa, synthetic construct
  REGION 1..11: note = Description of Artificial Sequence: Synthetic peptide
  REGION 1..11: note = XENP018495 vlCDR1
RASQSVSNDVA

SEQ ID NO: 11063 - protein, 7 aa, synthetic construct
  REGION 1..7: note = Description of Artificial Sequence: Synthetic peptide
  REGION 1..7: note = XENP018495 vlCDR2
YASHRYT

SEQ ID NO: 11064 - protein, 9 aa, synthetic construct
  REGION 1..9: note = Description of Artificial Sequence: Synthetic peptide
  REGION 1..9: note = XENP018495 vlCDR3
QQDYSSPRT

SEQ ID NO: 11065 - protein, 249 aa, synthetic construct
  REGION 1..249: note = Description of Artificial Sequence: Synthetic polypeptide
  REGION 1..249: note = XENP018496 1G6_H1.4_L1_scFv(GKPGS)4
EVQLVESGGGLVQPGGSLRLSCAASGFTFSNYWMNWVRQAPGKGLEWVGEIRLKSNNYATHYAEPVKGRFTISRDDSKSTVYLQMNSLKTEDTAVYYCTRYYGNYGGYFDVWGAGTLVTVSSGKPGSGKPGSGKPGSGKPGSSIVMTQSPATLSVSPGERATLSCRASQSVSNDVAWYQQKPGQSPRLLINYASHRYTGVPDRFTGSGYGTEFTLTISSLQSEDFAVYFCQQDYSSPRTFGGGTKVEIK

SEQ ID NO: 11066 - protein, 122 aa, synthetic construct
  REGION 1..122: note = Description of Artificial Sequence: Synthetic polypeptide
  REGION 1..122: note = VH of XENP018496
EVQLVESGGGLVQPGGSLRLSCAASGFTFSNYWMNWVRQAPGKGLEWVGEIRLKSNNYATHYAEPVKGRFTISRDDSKSTVYLQMNSLKTEDTAVYYCTRYYGNYGGYFDVWGAGTLVTVSS

SEQ ID NO: 11067 - protein, 107 aa, synthetic construct; identical to SEQ ID NO: 10923
  REGION 1..107: note = Description of Artificial Sequence: Synthetic polypeptide
  REGION 1..107: note = VL of XENP018496

SEQ ID NO: 11068 - protein, 5 aa, synthetic construct
  REGION 1..5: note = Description of Artificial Sequence: Synthetic peptide
  REGION 1..5: note = XENP018496 vhCDR1
NYWMN

SEQ ID NO: 11069 - protein, 19 aa, synthetic construct
  REGION 1..19: note = Description of Artificial Sequence: Synthetic peptide
  REGION 1..19: note = XENP018496 vhCDR2
EIRLKSNNYATHYAEPVKG

SEQ ID NO: 11070 - protein, 11 aa, synthetic construct
  REGION 1..11: note = Description of Artificial Sequence: Synthetic peptide
  REGION 1..11: note = XENP018496 vhCDR3
YYGNYGGYFDV

SEQ ID NO: 11071 - protein, 11 aa, synthetic construct
  REGION 1..11: note = Description of Artificial Sequence: Synthetic peptide
  REGION 1..11: note = XENP018496 vlCDR1
RASQSVSNDVA

SEQ ID NO: 11072 - protein, 7 aa, synthetic construct
  REGION 1..7: note = Description of Artificial Sequence: Synthetic peptide
  REGION 1..7: note = XENP018496 vlCDR2
YASHRYT

SEQ ID NO: 11073 - protein, 9 aa, synthetic construct
  REGION 1..9: note = Description of Artificial Sequence: Synthetic peptide
  REGION 1..9: note = XENP018496 vlCDR3
QQDYSSPRT

SEQ ID NO: 11074 - protein, 249 aa, synthetic construct
  REGION 1..249: note = Description of Artificial Sequence: Synthetic polypeptide
  REGION 1..249: note = XENP018501 1G6_H1.5_L1_scFv(GKPGS)4
EVQLVESGGGLVRPGGSLRLSCAASGFTFSNYWMNWVRQAPGKGLEWVGEIRLKSNNYATHYAEPVKGRFTISRDDSKSTVYLQMNSLKTEDTAVYYCTRYYGNYGGYFDVWGAGTLVTVSSGKPGSGKPGSGKPGSGKPGSSIVMTQSPATLSVSPGERATLSCRASQSVSNDVAWYQQKPGQSPRLLINYASHRYTGVPDRFTGSGYGTEFTLTISSLQSEDFAVYFCQQDYSSPRTFGGGTKVEIK

SEQ ID NO: 11075 - protein, 122 aa, synthetic construct
  REGION 1..122: note = Description of Artificial Sequence: Synthetic polypeptide
  REGION 1..122: note = VH of XENP018501
EVQLVESGGGLVRPGGSLRLSCAASGFTFSNYWMNWVRQAPGKGLEWVGEIRLKSNNYATHYAEPVKGRFTISRDDSKSTVYLQMNSLKTEDTAVYYCTRYYGNYGGYFDVWGAGTLVTVSS

SEQ ID NO: 11076 - protein, 107 aa, synthetic construct; identical to SEQ ID NO: 10923
  REGION 1..107: note = Description of Artificial Sequence: Synthetic polypeptide
  REGION 1..107: note = VL of XENP018501

SEQ ID NO: 11077 - protein, 5 aa, synthetic construct
  REGION 1..5: note = Description of Artificial Sequence: Synthetic peptide
  REGION 1..5: note = XENP018501 vhCDR1
NYWMN

SEQ ID NO: 11078 - protein, 19 aa, synthetic construct
  REGION 1..19: note = Description of Artificial Sequence: Synthetic peptide
  REGION 1..19: note = XENP018501 vhCDR2
EIRLKSNNYATHYAEPVKG

SEQ ID NO: 11079 - protein, 11 aa, synthetic construct
  REGION 1..11: note = Description of Artificial Sequence: Synthetic peptide
  REGION 1..11: note = XENP018501 vhCDR3
YYGNYGGYFDV

SEQ ID NO: 11080 - protein, 11 aa, synthetic construct
  REGION 1..11: note = Description of Artificial Sequence: Synthetic peptide
  REGION 1..11: note = XENP018501 vlCDR1
RASQSVSNDVA

SEQ ID NO: 11081 - protein, 7 aa, synthetic construct
  REGION 1..7: note = Description of Artificial Sequence: Synthetic peptide
  REGION 1..7: note = XENP018501 vlCDR2
YASHRYT

SEQ ID NO: 11082 - protein, 9 aa, synthetic construct
  REGION 1..9: note = Description of Artificial Sequence: Synthetic peptide
  REGION 1..9: note = XENP018501 vlCDR3
QQDYSSPRT

SEQ ID NO: 11083 - protein, 249 aa, synthetic construct
  REGION 1..249: note = Description of Artificial Sequence: Synthetic polypeptide
  REGION 1..249: note = XENP018502 1G6_H1.6_L1_scFv(GKPGS)4
EVQLVESGGGLVKPGGSMRLSCAASGFTFSNYWMNWVRQAPGKGLEWVGEIRLKSNNYATHYAEPVKGRFTISRDDSKSTVYLQMNSLKTEDTAVYYCTRYYGNYGGYFDVWGAGTLVTVSSGKPGSGKPGSGKPGSGKPGSSIVMTQSPATLSVSPGERATLSCRASQSVSNDVAWYQQKPGQSPRLLINYASHRYTGVPDRFTGSGYGTEFTLTISSLQSEDFAVYFCQQDYSSPRTFGGGTKVEIK

SEQ ID NO: 11084 - protein, 122 aa, synthetic construct
  REGION 1..122: note = Description of Artificial Sequence: Synthetic polypeptide
  REGION 1..122: note = VH of XENP018502
EVQLVESGGGLVKPGGSMRLSCAASGFTFSNYWMNWVRQAPGKGLEWVGEIRLKSNNYATHYAEPVKGRFTISRDDSKSTVYLQMNSLKTEDTAVYYCTRYYGNYGGYFDVWGAGTLVTVSS

SEQ ID NO: 11085 - protein, 107 aa, synthetic construct; identical to SEQ ID NO: 10923
  REGION 1..107: note = Description of Artificial Sequence: Synthetic polypeptide
  REGION 1..107: note = VL of XENP018502

SEQ ID NO: 11086 - protein, 5 aa, synthetic construct
  REGION 1..5: note = Description of Artificial Sequence: Synthetic peptide
  REGION 1..5: note = XENP018502 vhCDR1
NYWMN

SEQ ID NO: 11087 - protein, 19 aa, synthetic construct
  REGION 1..19: note = Description of Artificial Sequence: Synthetic peptide
  REGION 1..19: note = XENP018502 vhCDR2
EIRLKSNNYATHYAEPVKG

SEQ ID NO: 11088 - protein, 11 aa, synthetic construct
  REGION 1..11: note = Description of Artificial Sequence: Synthetic peptide
  REGION 1..11: note = XENP018502 vhCDR3
YYGNYGGYFDV

SEQ ID NO: 11089 - protein, 11 aa, synthetic construct
  REGION 1..11: note = Description of Artificial Sequence: Synthetic peptide
  REGION 1..11: note = XENP018502 vlCDR1
RASQSVSNDVA

SEQ ID NO: 11090 - protein, 7 aa, synthetic construct
  REGION 1..7: note = Description of Artificial Sequence: Synthetic peptide
  REGION 1..7: note = XENP018502 vlCDR2
YASHRYT

SEQ ID NO: 11091 - protein, 9 aa, synthetic construct
  REGION 1..9: note = Description of Artificial Sequence: Synthetic peptide
  REGION 1..9: note = XENP018502 vlCDR3
QQDYSSPRT

SEQ ID NO: 11092 - protein, 249 aa, synthetic construct
  REGION 1..249: note = Description of Artificial Sequence: Synthetic polypeptide
  REGION 1..249: note = XENP018503 1G6_H1.7_L1_scFv(GKPGS)4
EVQLVESGGGLVKPGGSLKLSCAASGFTFSNYWMNWVRQAPGKGLEWVGEIRLKSNNYATHYAEPVKGRFTISRDDSKSTVYLQMNSLKTEDTAVYYCTRYYGNYGGYFDVWGAGTLVTVSSGKPGSGKPGSGKPGSGKPGSSIVMTQSPATLSVSPGERATLSCRASQSVSNDVAWYQQKPGQSPRLLINYASHRYTGVPDRFTGSGYGTEFTLTISSLQSEDFAVYFCQQDYSSPRTFGGGTKVEIK

SEQ ID NO: 11093 - protein, 122 aa, synthetic construct
  REGION 1..122: note = Description of Artificial Sequence: Synthetic polypeptide
  REGION 1..122: note = VH of XENP018503
EVQLVESGGGLVKPGGSLKLSCAASGFTFSNYWMNWVRQAPGKGLEWVGEIRLKSNNYATHYAEPVKGRFTISRDDSKSTVYLQMNSLKTEDTAVYYCTRYYGNYGGYFDVWGAGTLVTVSS

SEQ ID NO: 11094 - protein, 107 aa, synthetic construct; identical to SEQ ID NO: 10923
  REGION 1..107: note = Description of Artificial Sequence: Synthetic polypeptide
  REGION 1..107: note = VL of XENP018503

SEQ ID NO: 11095 - protein, 5 aa, synthetic construct
  REGION 1..5: note = Description of Artificial Sequence: Synthetic peptide
  REGION 1..5: note = XENP018503 vhCDR1
NYWMN

SEQ ID NO: 11096 - protein, 19 aa, synthetic construct
  REGION 1..19: note = Description of Artificial Sequence: Synthetic peptide
  REGION 1..19: note = XENP018503 vhCDR2
EIRLKSNNYATHYAEPVKG

SEQ ID NO: 11097 - protein, 11 aa, synthetic construct
  REGION 1..11: note = Description of Artificial Sequence: Synthetic peptide
  REGION 1..11: note = XENP018503 vhCDR3
YYGNYGGYFDV

SEQ ID NO: 11098 - protein, 11 aa, synthetic construct
  REGION 1..11: note = Description of Artificial Sequence: Synthetic peptide
  REGION 1..11: note = XENP018503 vlCDR1
RASQSVSNDVA

SEQ ID NO: 11099 - protein, 7 aa, synthetic construct
  REGION 1..7: note = Description of Artificial Sequence: Synthetic peptide
  REGION 1..7: note = XENP018503 vlCDR2
YASHRYT

SEQ ID NO: 11100 - protein, 9 aa, synthetic construct
  REGION 1..9: note = Description of Artificial Sequence: Synthetic peptide
  REGION 1..9: note = XENP018503 vlCDR3
QQDYSSPRT

SEQ ID NO: 11101 - protein, 249 aa, synthetic construct
  REGION 1..249: note = Description of Artificial Sequence: Synthetic polypeptide
  REGION 1..249: note = XENP018504 1G6_H1.8_L1_scFv(GKPGS)4
EVQLVESGGGLVKPGGSLRLSCVASGFTFSNYWMNWVRQAPGKGLEWVGEIRLKSNNYATHYAEPVKGRFTISRDDSKSTVYLQMNSLKTEDTAVYYCTRYYGNYGGYFDVWGAGTLVTVSSGKPGSGKPGSGKPGSGKPGSSIVMTQSPATLSVSPGERATLSCRASQSVSNDVAWYQQKPGQSPRLLINYASHRYTGVPDRFTGSGYGTEFTLTISSLQSEDFAVYFCQQDYSSPRTFGGGTKVEIK

SEQ ID NO: 11102 - protein, 122 aa, synthetic construct
  REGION 1..122: note = Description of Artificial Sequence: Synthetic polypeptide
  REGION 1..122: note = VH of XENP018504
EVQLVESGGGLVKPGGSLRLSCVASGFTFSNYWMNWVRQAPGKGLEWVGEIRLKSNNYATHYAEPVKGRFTISRDDSKSTVYLQMNSLKTEDTAVYYCTRYYGNYGGYFDVWGAGTLVTVSS

SEQ ID NO: 11103 - protein, 107 aa, synthetic construct; identical to SEQ ID NO: 10923
  REGION 1..107: note = Description of Artificial Sequence: Synthetic polypeptide
  REGION 1..107: note = VL of XENP018504

SEQ ID NO: 11104 - protein, 5 aa, synthetic construct
  REGION 1..5: note = Description of Artificial Sequence: Synthetic peptide
  REGION 1..5: note = XENP018504 vhCDR1
NYWMN

SEQ ID NO: 11105 - protein, 19 aa, synthetic construct
  REGION 1..19: note = Description of Artificial Sequence: Synthetic peptide
  REGION 1..19: note = XENP018504 vhCDR2
EIRLKSNNYATHYAEPVKG

SEQ ID NO: 11106 - protein, 11 aa, synthetic construct
  REGION 1..11: note = Description of Artificial Sequence: Synthetic peptide
  REGION 1..11: note = XENP018504 vhCDR3
YYGNYGGYFDV

SEQ ID NO: 11107 - protein, 11 aa, synthetic construct
  REGION 1..11: note = Description of Artificial Sequence: Synthetic peptide
  REGION 1..11: note = XENP018504 vlCDR1
RASQSVSNDVA

SEQ ID NO: 11108 - protein, 7 aa, synthetic construct
  REGION 1..7: note = Description of Artificial Sequence: Synthetic peptide
  REGION 1..7: note = XENP018504 vlCDR2
YASHRYT

SEQ ID NO: 11109 - protein, 9 aa, synthetic construct
  REGION 1..9: note = Description of Artificial Sequence: Synthetic peptide
  REGION 1..9: note = XENP018504 vlCDR3
QQDYSSPRT

SEQ ID NO: 11110 - protein, 249 aa, synthetic construct
  REGION 1..249: note = Description of Artificial Sequence: Synthetic polypeptide
  REGION 1..249: note = XENP018505 1G6_H1.9_L1_scFv(GKPGS)4
EVQLVESGGGLVKPGGSLRLSCAASGFTVSNYWMNWVRQAPGKGLEWVGEIRLKSNNYATHYAEPVKGRFTISRDDSKSTVYLQMNSLKTEDTAVYYCTRYYGNYGGYFDVWGAGTLVTVSSGKPGSGKPGSGKPGSGKPGSSIVMTQSPATLSVSPGERATLSCRASQSVSNDVAWYQQKPGQSPRLLINYASHRYTGVPDRFTGSGYGTEFTLTISSLQSEDFAVYFCQQDYSSPRTFGGGTKVEIK

SEQ ID NO: 11111 - protein, 122 aa, synthetic construct
  REGION 1..122: note = Description of Artificial Sequence: Synthetic polypeptide
  REGION 1..122: note = VH of XENP018505
EVQLVESGGGLVKPGGSLRLSCAASGFTVSNYWMNWVRQAPGKGLEWVGEIRLKSNNYATHYAEPVKGRFTISRDDSKSTVYLQMNSLKTEDTAVYYCTRYYGNYGGYFDVWGAGTLVTVSS

SEQ ID NO: 11112 - protein, 107 aa, synthetic construct; identical to SEQ ID NO: 10923
  REGION 1..107: note = Description of Artificial Sequence: Synthetic polypeptide
  REGION 1..107: note = VL of XENP018505

SEQ ID NO: 11113 - protein, 5 aa, synthetic construct
  REGION 1..5: note = Description of Artificial Sequence: Synthetic peptide
  REGION 1..5: note = XENP018505 vhCDR1
NYWMN

SEQ ID NO: 11114 - protein, 19 aa, synthetic construct
  REGION 1..19: note = Description of Artificial Sequence: Synthetic peptide
  REGION 1..19: note = XENP018505 vhCDR2
EIRLKSNNYATHYAEPVKG

SEQ ID NO: 11115 - protein, 11 aa, synthetic construct
  REGION 1..11: note = Description of Artificial Sequence: Synthetic peptide
  REGION 1..11: note = XENP018505 vhCDR3
YYGNYGGYFDV

SEQ ID NO: 11116 - protein, 11 aa, synthetic construct
  REGION 1..11: note = Description of Artificial Sequence: Synthetic peptide
  REGION 1..11: note = XENP018505 vlCDR1
RASQSVSNDVA

SEQ ID NO: 11117 - protein, 7 aa, synthetic construct
  REGION 1..7: note = Description of Artificial Sequence: Synthetic peptide
  REGION 1..7: note = XENP018505 vlCDR2
YASHRYT

SEQ ID NO: 11118 - protein, 9 aa, synthetic construct
  REGION 1..9: note = Description of Artificial Sequence: Synthetic peptide
  REGION 1..9: note = XENP018505 vlCDR3
QQDYSSPRT

SEQ ID NO: 11119 - protein, 249 aa, synthetic construct
  REGION 1..249: note = Description of Artificial Sequence: Synthetic polypeptide
  REGION 1..249: note = XENP018506 1G6_H1.10_L1_scFv(GKPGS)4
EVQLVESGGGLVKPGGSLRLSCAASGFTFTNYWMNWVRQAPGKGLEWVGEIRLKSNNYATHYAEPVKGRFTISRDDSKSTVYLQMNSLKTEDTAVYYCTRYYGNYGGYFDVWGAGTLVTVSSGKPGSGKPGSGKPGSGKPGSSIVMTQSPATLSVSPGERATLSCRASQSVSNDVAWYQQKPGQSPRLLINYASHRYTGVPDRFTGSGYGTEFTLTISSLQSEDFAVYFCQQDYSSPRTFGGGTKVEIK

SEQ ID NO: 11120 - protein, 122 aa, synthetic construct
  REGION 1..122: note = Description of Artificial Sequence: Synthetic polypeptide
  REGION 1..122: note = VH of XENP018506
EVQLVESGGGLVKPGGSLRLSCAASGFTFTNYWMNWVRQAPGKGLEWVGEIRLKSNNYATHYAEPVKGRFTISRDDSKSTVYLQMNSLKTEDTAVYYCTRYYGNYGGYFDVWGAGTLVTVSS

SEQ ID NO: 11121 - protein, 107 aa, synthetic construct; identical to SEQ ID NO: 10923
  REGION 1..107: note = Description of Artificial Sequence: Synthetic polypeptide
  REGION 1..107: note = VL of XENP018506

SEQ ID NO: 11122 - protein, 5 aa, synthetic construct
  REGION 1..5: note = Description of Artificial Sequence: Synthetic peptide
  REGION 1..5: note = XENP018506 vhCDR1
NYWMN

SEQ ID NO: 11123 - protein, 19 aa, synthetic construct
  REGION 1..19: note = Description of Artificial Sequence: Synthetic peptide
  REGION 1..19: note = XENP018506 vhCDR2
EIRLKSNNYATHYAEPVKG

SEQ ID NO: 11124 - protein, 11 aa, synthetic construct
  REGION 1..11: note = Description of Artificial Sequence: Synthetic peptide
  REGION 1..11: note = XENP018506 vhCDR3
YYGNYGGYFDV

SEQ ID NO: 11125 - protein, 11 aa, synthetic construct
  REGION 1..11: note = Description of Artificial Sequence: Synthetic peptide
  REGION 1..11: note = XENP018506 vlCDR1
RASQSVSNDVA

SEQ ID NO: 11126 - protein, 7 aa, synthetic construct
  REGION 1..7: note = Description of Artificial Sequence: Synthetic peptide
  REGION 1..7: note = XENP018506 vlCDR2
YASHRYT

SEQ ID NO: 11127 - protein, 9 aa, synthetic construct
  REGION 1..9: note = Description of Artificial Sequence: Synthetic peptide
  REGION 1..9: note = XENP018506 vlCDR3
QQDYSSPRT

SEQ ID NO: 11128 - protein, 249 aa, synthetic construct
  REGION 1..249: note = Description of Artificial Sequence: Synthetic polypeptide
  REGION 1..249: note = XENP018507 1G6_H1.11_L1_scFv(GKPGS)4
EVQLVESGGGLVKPGGSLRLSCAASGFTFANYWMNWVRQAPGKGLEWVGEIRLKSNNYATHYAEPVKGRFTISRDDSKSTVYLQMNSLKTEDTAVYYCTRYYGNYGGYFDVWGAGTLVTVSSGKPGSGKPGSGKPGSGKPGSSIVMTQSPATLSVSPGERATLSCRASQSVSNDVAWYQQKPGQSPRLLINYASHRYTGVPDRFTGSGYGTEFTLTISSLQSEDFAVYFCQQDYSSPRTFGGGTKVEIK

SEQ ID NO: 11129 - protein, 122 aa, synthetic construct
  REGION 1..122: note = Description of Artificial Sequence: Synthetic polypeptide
  REGION 1..122: note = VH of XENP018507
EVQLVESGGGLVKPGGSLRLSCAASGFTFANYWMNWVRQAPGKGLEWVGEIRLKSNNYATHYAEPVKGRFTISRDDSKSTVYLQMNSLKTEDTAVYYCTRYYGNYGGYFDVWGAGTLVTVSS

SEQ ID NO: 11130 - protein, 107 aa, synthetic construct; identical to SEQ ID NO: 10923
  REGION 1..107: note = Description of Artificial Sequence: Synthetic polypeptide
  REGION 1..107: note = VL of XENP018507

SEQ ID NO: 11131 - protein, 5 aa, synthetic construct
  REGION 1..5: note = Description of Artificial Sequence: Synthetic peptide
  REGION 1..5: note = XENP018507 vhCDR1
NYWMN

SEQ ID NO: 11132 - protein, 19 aa, synthetic construct
  REGION 1..19: note = Description of Artificial Sequence: Synthetic peptide
  REGION 1..19: note = XENP018507 vhCDR2
EIRLKSNNYATHYAEPVKG

SEQ ID NO: 11133 - protein, 11 aa, synthetic construct
  REGION 1..11: note = Description of Artificial Sequence: Synthetic peptide
  REGION 1..11: note = XENP018507 vhCDR3
YYGNYGGYFDV

SEQ ID NO: 11134 - protein, 11 aa, synthetic construct
  REGION 1..11: note = Description of Artificial Sequence: Synthetic peptide
  REGION 1..11: note = XENP018507 vlCDR1
RASQSVSNDVA

SEQ ID NO: 11135 - protein, 7 aa, synthetic construct
  REGION 1..7: note = Description of Artificial Sequence: Synthetic peptide
  REGION 1..7: note = XENP018507 vlCDR2
YASHRYT

SEQ ID NO: 11136 - protein, 9 aa, synthetic construct
  REGION 1..9: note = Description of Artificial Sequence: Synthetic peptide
  REGION 1..9: note = XENP018507 vlCDR3
QQDYSSPRT

SEQ ID NO: 11137 - protein, 249 aa, synthetic construct
  REGION 1..249: note = Description of Artificial Sequence: Synthetic polypeptide
  REGION 1..249: note = XENP018508 1G6_H1.12_L1_scFv(GKPGS)4
EVQLVESGGGLVKPGGSLRLSCAASGFTFQNYWMNWVRQAPGKGLEWVGEIRLKSNNYATHYAEPVKGRFTISRDDSKSTVYLQMNSLKTEDTAVYYCTRYYGNYGGYFDVWGAGTLVTVSSGKPGSGKPGSGKPGSGKPGSSIVMTQSPATLSVSPGERATLSCRASQSVSNDVAWYQQKPGQSPRLLINYASHRYTGVPDRFTGSGYGTEFTLTISSLQSEDFAVYFCQQDYSSPRTFGGGTKVEIK

SEQ ID NO: 11138 - protein, 122 aa, synthetic construct
  REGION 1..122: note = Description of Artificial Sequence: Synthetic polypeptide
  REGION 1..122: note = VH of XENP018508
EVQLVESGGGLVKPGGSLRLSCAASGFTFQNYWMNWVRQAPGKGLEWVGEIRLKSNNYATHYAEPVKGRFTISRDDSKSTVYLQMNSLKTEDTAVYYCTRYYGNYGGYFDVWGAGTLVTVSS

SEQ ID NO: 11139 - protein, 107 aa, synthetic construct; identical to SEQ ID NO: 10923
  REGION 1..107: note = Description of Artificial Sequence: Synthetic polypeptide
  REGION 1..107: note = VL of XENP018508

SEQ ID NO: 11140 - protein, 5 aa, synthetic construct
  REGION 1..5: note = Description of Artificial Sequence: Synthetic peptide
  REGION 1..5: note = XENP018508 vhCDR1
NYWMN

SEQ ID NO: 11141 - protein, 19 aa, synthetic construct
  REGION 1..19: note = Description of Artificial Sequence: Synthetic peptide
  REGION 1..19: note = XENP018508 vhCDR2
EIRLKSNNYATHYAEPVKG

SEQ ID NO: 11142 - protein, 11 aa, synthetic construct
  REGION 1..11: note = Description of Artificial Sequence: Synthetic peptide
  REGION 1..11: note = XENP018508 vhCDR3
YYGNYGGYFDV

SEQ ID NO: 11143 - protein, 11 aa, synthetic construct
  REGION 1..11: note = Description of Artificial Sequence: Synthetic peptide
  REGION 1..11: note = XENP018508 vlCDR1
RASQSVSNDVA

SEQ ID NO: 11144 - protein, 7 aa, synthetic construct
  REGION 1..7: note = Description of Artificial Sequence: Synthetic peptide
  REGION 1..7: note = XENP018508 vlCDR2
YASHRYT

SEQ ID NO: 11145 - protein, 9 aa, synthetic construct
  REGION 1..9: note = Description of Artificial Sequence: Synthetic peptide
  REGION 1..9: note = XENP018508 vlCDR3
QQDYSSPRT

SEQ ID NO: 11146 - protein, 249 aa, synthetic construct
  REGION 1..249: note = Description of Artificial Sequence: Synthetic polypeptide
  REGION 1..249: note = XENP018509 1G6_H1.13_L1_scFv(GKPGS)4
EVQLVESGGGLVKPGGSLRLSCAASGFTFGNYWMNWVRQAPGKGLEWVGEIRLKSNNYATHYAEPVKGRFTISRDDSKSTVYLQMNSLKTEDTAVYYCTRYYGNYGGYFDVWGAGTLVTVSSGKPGSGKPGSGKPGSGKPGSSIVMTQSPATLSVSPGERATLSCRASQSVSNDVAWYQQKPGQSPRLLINYASHRYTGVPDRFTGSGYGTEFTLTISSLQSEDFAVYFCQQDYSSPRTFGGGTKVEIK

SEQ ID NO: 11147 - protein, 122 aa, synthetic construct
  REGION 1..122: note = Description of Artificial Sequence: Synthetic polypeptide
  REGION 1..122: note = VH of XENP018509
EVQLVESGGGLVKPGGSLRLSCAASGFTFGNYWMNWVRQAPGKGLEWVGEIRLKSNNYATHYAEPVKGRFTISRDDSKSTVYLQMNSLKTEDTAVYYCTRYYGNYGGYFDVWGAGTLVTVSS

SEQ ID NO: 11148 - protein, 107 aa, synthetic construct; identical to SEQ ID NO: 10923
  REGION 1..107: note = Description of Artificial Sequence: Synthetic polypeptide
  REGION 1..107: note = VL of XENP018509

SEQ ID NO: 11149 - protein, 5 aa, synthetic construct
  REGION 1..5: note = Description of Artificial Sequence: Synthetic peptide
  REGION 1..5: note = XENP018509 vhCDR1
NYWMN

SEQ ID NO: 11150 - protein, 19 aa, synthetic construct
  REGION 1..19: note = Description of Artificial Sequence: Synthetic peptide
  REGION 1..19: note = XENP018509 vhCDR2
EIRLKSNNYATHYAEPVKG

SEQ ID NO: 11151 - protein, 11 aa, synthetic construct
  REGION 1..11: note = Description of Artificial Sequence: Synthetic peptide
  REGION 1..11: note = XENP018509 vhCDR3
YYGNYGGYFDV

SEQ ID NO: 11152 - protein, 11 aa, synthetic construct
  REGION 1..11: note = Description of Artificial Sequence: Synthetic peptide
  REGION 1..11: note = XENP018509 vlCDR1
RASQSVSNDVA

SEQ ID NO: 11153 - protein, 7 aa, synthetic construct
  REGION 1..7: note = Description of Artificial Sequence: Synthetic peptide
  REGION 1..7: note = XENP018509 vlCDR2
YASHRYT

SEQ ID NO: 11154 - protein, 9 aa, synthetic construct
  REGION 1..9: note = Description of Artificial Sequence: Synthetic peptide
  REGION 1..9: note = XENP018509 vlCDR3
QQDYSSPRT

SEQ ID NO: 11155 - protein, 249 aa, synthetic construct
  REGION 1..249: note = Description of Artificial Sequence: Synthetic polypeptide
  REGION 1..249: note = XENP018510 1G6_H1.14_L1_scFv(GKPGS)4
EVQLVESGGGLVKPGGSLRLSCAASGFTFVNYWMNWVRQAPGKGLEWVGEIRLKSNNYATHYAEPVKGRFTISRDDSKSTVYLQMNSLKTEDTAVYYCTRYYGNYGGYFDVWGAGTLVTVSSGKPGSGKPGSGKPGSGKPGSSIVMTQSPATLSVSPGERATLSCRASQSVSNDVAWYQQKPGQSPRLLINYASHRYTGVPDRFTGSGYGTEFTLTISSLQSEDFAVYFCQQDYSSPRTFGGGTKVEIK

SEQ ID NO: 11156 - protein, 122 aa, synthetic construct
  REGION 1..122: note = Description of Artificial Sequence: Synthetic polypeptide
  REGION 1..122: note = VH of XENP018510
EVQLVESGGGLVKPGGSLRLSCAASGFTFVNYWMNWVRQAPGKGLEWVGEIRLKSNNYATHYAEPVKGRFTISRDDSKSTVYLQMNSLKTEDTAVYYCTRYYGNYGGYFDVWGAGTLVTVSS

SEQ ID NO: 11157 - protein, 107 aa, synthetic construct; identical to SEQ ID NO: 10923
  REGION 1..107: note = Description of Artificial Sequence: Synthetic polypeptide
  REGION 1..107: note = VL of XENP018510

SEQ ID NO: 11158 - protein, 5 aa, synthetic construct
  REGION 1..5: note = Description of Artificial Sequence: Synthetic peptide
  REGION 1..5: note = XENP018510 vhCDR1
NYWMN

SEQ ID NO: 11159 - protein, 19 aa, synthetic construct
  REGION 1..19: note = Description of Artificial Sequence: Synthetic peptide
  REGION 1..19: note = XENP018510 vhCDR2
EIRLKSNNYATHYAEPVKG

SEQ ID NO: 11160 - protein, 11 aa, synthetic construct
  REGION 1..11: note = Description of Artificial Sequence: Synthetic peptide
  REGION 1..11: note = XENP018510 vhCDR3
YYGNYGGYFDV

SEQ ID NO: 11161 - protein, 11 aa, synthetic construct
  REGION 1..11: note = Description of Artificial Sequence: Synthetic peptide
  REGION 1..11: note = XENP018510 vlCDR1
RASQSVSNDVA

SEQ ID NO: 11162 - protein, 7 aa, synthetic construct
  REGION 1..7: note = Description of Artificial Sequence: Synthetic peptide
  REGION 1..7: note = XENP018510 vlCDR2
YASHRYT

SEQ ID NO: 11163 - protein, 9 aa, synthetic construct
  REGION 1..9: note = Description of Artificial Sequence: Synthetic peptide
  REGION 1..9: note = XENP018510 vlCDR3
QQDYSSPRT

SEQ ID NO: 11164 - protein, 249 aa, synthetic construct
  REGION 1..249: note = Description of Artificial Sequence: Synthetic polypeptide
  REGION 1..249: note = XENP018511 1G6_H1.15_L1_scFv(GKPGS)4
EVQLVESGGGLVKPGGSLRLSCAASGFTFHNYWMNWVRQAPGKGLEWVGEIRLKSNNYATHYAEPVKGRFTISRDDSKSTVYLQMNSLKTEDTAVYYCTRYYGNYGGYFDVWGAGTLVTVSSGKPGSGKPGSGKPGSGKPGSSIVMTQSPATLSVSPGERATLSCRASQSVSNDVAWYQQKPGQSPRLLINYASHRYTGVPDRFTGSGYGTEFTLTISSLQSEDFAVYFCQQDYSSPRTFGGGTKVEIK

SEQ ID NO: 11165 - protein, 122 aa, synthetic construct
  REGION 1..122: note = Description of Artificial Sequence: Synthetic polypeptide
  REGION 1..122: note = VH of XENP018511
EVQLVESGGGLVKPGGSLRLSCAASGFTFHNYWMNWVRQAPGKGLEWVGEIRLKSNNYATHYAEPVKGRFTISRDDSKSTVYLQMNSLKTEDTAVYYCTRYYGNYGGYFDVWGAGTLVTVSS

SEQ ID NO: 11166 - protein, 107 aa, synthetic construct; identical to SEQ ID NO: 10923
  REGION 1..107: note = Description of Artificial Sequence: Synthetic polypeptide
  REGION 1..107: note = VL of XENP018511

SEQ ID NO: 11167 - protein, 5 aa, synthetic construct
  REGION 1..5: note = Description of Artificial Sequence: Synthetic peptide
  REGION 1..5: note = XENP018511 vhCDR1
NYWMN

SEQ ID NO: 11168 - protein, 19 aa, synthetic construct
  REGION 1..19: note = Description of Artificial Sequence: Synthetic peptide
  REGION 1..19: note = XENP018511 vhCDR2
EIRLKSNNYATHYAEPVKG

SEQ ID NO: 11169 - protein, 11 aa, synthetic construct
  REGION 1..11: note = Description of Artificial Sequence: Synthetic peptide
  REGION 1..11: note = XENP018511 vhCDR3
YYGNYGGYFDV

SEQ ID NO: 11170 - protein, 11 aa, synthetic construct
  REGION 1..11: note = Description of Artificial Sequence: Synthetic peptide
  REGION 1..11: note = XENP018511 vlCDR1
RASQSVSNDVA

SEQ ID NO: 11171 - protein, 7 aa, synthetic construct
  REGION 1..7: note = Description of Artificial Sequence: Synthetic peptide
  REGION 1..7: note = XENP018511 vlCDR2
YASHRYT

SEQ ID NO: 11172 - protein, 9 aa, synthetic construct
  REGION 1..9: note = Description of Artificial Sequence: Synthetic peptide
  REGION 1..9: note = XENP018511 vlCDR3
QQDYSSPRT

SEQ ID NO: 11173 - protein, 249 aa, synthetic construct
  REGION 1..249: note = Description of Artificial Sequence: Synthetic polypeptide
  REGION 1..249: note = XENP018512 1G6_H1.16_L1_scFv(GKPGS)4
EVQLVESGGGLVKPGGSLRLSCAASGFTFDNYWMNWVRQAPGKGLEWVGEIRLKSNNYATHYAEPVKGRFTISRDDSKSTVYLQMNSLKTEDTAVYYCTRYYGNYGGYFDVWGAGTLVTVSSGKPGSGKPGSGKPGSGKPGSSIVMTQSPATLSVSPGERATLSCRASQSVSNDVAWYQQKPGQSPRLLINYASHRYTGVPDRFTGSGYGTEFTLTISSLQSEDFAVYFCQQDYSSPRTFGGGTKVEIK

SEQ ID NO: 11174 - protein, 122 aa, synthetic construct
  REGION 1..122: note = Description of Artificial Sequence: Synthetic polypeptide
  REGION 1..122: note = VH of XENP018512
EVQLVESGGGLVKPGGSLRLSCAASGFTFDNYWMNWVRQAPGKGLEWVGEIRLKSNNYATHYAEPVKGRFTISRDDSKSTVYLQMNSLKTEDTAVYYCTRYYGNYGGYFDVWGAGTLVTVSS

SEQ ID NO: 11175 - protein, 107 aa, synthetic construct; identical to SEQ ID NO: 10923
  REGION 1..107: note = Description of Artificial Sequence: Synthetic polypeptide
  REGION 1..107: note = VL of XENP018512

SEQ ID NO: 11176 - protein, 5 aa, synthetic construct
  REGION 1..5: note = Description of Artificial Sequence: Synthetic peptide
  REGION 1..5: note = XENP018512 vhCDR1
NYWMN

SEQ ID NO: 11177 - protein, 19 aa, synthetic construct
  REGION 1..19: note = Description of Artificial Sequence: Synthetic peptide
  REGION 1..19: note = XENP018512 vhCDR2
EIRLKSNNYATHYAEPVKG

SEQ ID NO: 11178 - protein, 11 aa, synthetic construct
  REGION 1..11: note = Description of Artificial Sequence: Synthetic peptide
  REGION 1..11: note = XENP018512 vhCDR3
YYGNYGGYFDV

SEQ ID NO: 11179 - protein, 11 aa, synthetic construct
  REGION 1..11: note = Description of Artificial Sequence: Synthetic peptide
  REGION 1..11: note = XENP018512 vlCDR1
RASQSVSNDVA

SEQ ID NO: 11180 - protein, 7 aa, synthetic construct
  REGION 1..7: note = Description of Artificial Sequence: Synthetic peptide
  REGION 1..7: note = XENP018512 vlCDR2
YASHRYT

SEQ ID NO: 11181 - protein, 9 aa, synthetic construct
  REGION 1..9: note = Description of Artificial Sequence: Synthetic peptide
  REGION 1..9: note = XENP018512 vlCDR3
QQDYSSPRT

SEQ ID NO: 11182 - protein, 249 aa, synthetic construct
  REGION 1..249: note = Description of Artificial Sequence: Synthetic polypeptide
  REGION 1..249: note = XENP018513 1G6_H1.17_L1_scFv(GKPGS)4
EVQLVESGGGLVKPGGSLRLSCAASGFTFKNYWMNWVRQAPGKGLEWVGEIRLKSNNYATHYAEPVKGRFTISRDDSKSTVYLQMNSLKTEDTAVYYCTRYYGNYGGYFDVWGAGTLVTVSSGKPGSGKPGSGKPGSGKPGSSIVMTQSPATLSVSPGERATLSCRASQSVSNDVAWYQQKPGQSPRLLINYASHRYTGVPDRFTGSGYGTEFTLTISSLQSEDFAVYFCQQDYSSPRTFGGGTKVEIK

SEQ ID NO: 11183 - protein, 122 aa, synthetic construct
  REGION 1..122: note = Description of Artificial Sequence: Synthetic polypeptide
  REGION 1..122: note = VH of XENP018513
EVQLVESGGGLVKPGGSLRLSCAASGFTFKNYWMNWVRQAPGKGLEWVGEIRLKSNNYATHYAEPVKGRFTISRDDSKSTVYLQMNSLKTEDTAVYYCTRYYGNYGGYFDVWGAGTLVTVSS

SEQ ID NO: 11184 - protein, 107 aa, synthetic construct; identical to SEQ ID NO: 10923
  REGION 1..107: note = Description of Artificial Sequence: Synthetic polypeptide
  REGION 1..107: note = VL of XENP018513

SEQ ID NO: 11185 - protein, 5 aa, synthetic construct
  REGION 1..5: note = Description of Artificial Sequence: Synthetic peptide
  REGION 1..5: note = XENP018513 vhCDR1
NYWMN

SEQ ID NO: 11186 - protein, 19 aa, synthetic construct
  REGION 1..19: note = Description of Artificial Sequence: Synthetic peptide
  REGION 1..19: note = XENP018513 vhCDR2
EIRLKSNNYATHYAEPVKG

SEQ ID NO: 11187 - protein, 11 aa, synthetic construct
  REGION 1..11: note = Description of Artificial Sequence: Synthetic peptide
  REGION 1..11: note = XENP018513 vhCDR3
YYGNYGGYFDV

SEQ ID NO: 11188 - protein, 11 aa, synthetic construct
  REGION 1..11: note = Description of Artificial Sequence: Synthetic peptide
  REGION 1..11: note = XENP018513 vlCDR1
RASQSVSNDVA

SEQ ID NO: 11189 - protein, 7 aa, synthetic construct
  REGION 1..7: note = Description of Artificial Sequence: Synthetic peptide
  REGION 1..7: note = XENP018513 vlCDR2
YASHRYT

SEQ ID NO: 11190 - protein, 9 aa, synthetic construct
  REGION 1..9: note = Description of Artificial Sequence: Synthetic peptide
  REGION 1..9: note = XENP018513 vlCDR3
QQDYSSPRT

SEQ ID NO: 11191 - protein, 249 aa, synthetic construct
  REGION 1..249: note = Description of Artificial Sequence: Synthetic polypeptide
  REGION 1..249: note = XENP018514 1G6_H1.18_L1_scFv(GKPGS)4
EVQLVESGGGLVKPGGSLRLSCAASGFTFYNYWMNWVRQAPGKGLEWVGEIRLKSNNYATHYAEPVKGRFTISRDDSKSTVYLQMNSLKTEDTAVYYCTRYYGNYGGYFDVWGAGTLVTVSSGKPGSGKPGSGKPGSGKPGSSIVMTQSPATLSVSPGERATLSCRASQSVSNDVAWYQQKPGQSPRLLINYASHRYTGVPDRFTGSGYGTEFTLTISSLQSEDFAVYFCQQDYSSPRTFGGGTKVEIK

SEQ ID NO: 11192 - protein, 122 aa, synthetic construct
  REGION 1..122: note = Description of Artificial Sequence: Synthetic polypeptide
  REGION 1..122: note = VH of XENP018514
EVQLVESGGGLVKPGGSLRLSCAASGFTFYNYWMNWVRQAPGKGLEWVGEIRLKSNNYATHYAEPVKGRFTISRDDSKSTVYLQMNSLKTEDTAVYYCTRYYGNYGGYFDVWGAGTLVTVSS

SEQ ID NO: 11193 - protein, 107 aa, synthetic construct; identical to SEQ ID NO: 10923
  REGION 1..107: note = Description of Artificial Sequence: Synthetic polypeptide
  REGION 1..107: note = VL of XENP018514

SEQ ID NO: 11194 - protein, 5 aa, synthetic construct
  REGION 1..5: note = Description of Artificial Sequence: Synthetic peptide
  REGION 1..5: note = XENP018514 vhCDR1
NYWMN

SEQ ID NO: 11195 - protein, 19 aa, synthetic construct
  REGION 1..19: note = Description of Artificial Sequence: Synthetic peptide
  REGION 1..19: note = XENP018514 vhCDR2
EIRLKSNNYATHYAEPVKG

SEQ ID NO: 11196 - protein, 11 aa, synthetic construct
  REGION 1..11: note = Description of Artificial Sequence: Synthetic peptide
  REGION 1..11: note = XENP018514 vhCDR3
YYGNYGGYFDV

SEQ ID NO: 11197 - protein, 11 aa, synthetic construct
  REGION 1..11: note = Description of Artificial Sequence: Synthetic peptide
  REGION 1..11: note = XENP018514 vlCDR1
RASQSVSNDVA

SEQ ID NO: 11198 - protein, 7 aa, synthetic construct
  REGION 1..7: note = Description of Artificial Sequence: Synthetic peptide
  REGION 1..7: note = XENP018514 vlCDR2
YASHRYT

SEQ ID NO: 11199 - protein, 9 aa, synthetic construct
  REGION 1..9: note = Description of Artificial Sequence: Synthetic peptide
  REGION 1..9: note = XENP018514 vlCDR3
QQDYSSPRT

SEQ ID NO: 11200 - protein, 249 aa, synthetic construct
  REGION 1..249: note = Description of Artificial Sequence: Synthetic polypeptide
  REGION 1..249: note = XENP018515 1G6_H1.19_L1_scFv(GKPGS)4
EVQLVESGGGLVKPGGSLRLSCAASGFTFSDYWMNWVRQAPGKGLEWVGEIRLKSNNYATHYAEPVKGRFTISRDDSKSTVYLQMNSLKTEDTAVYYCTRYYGNYGGYFDVWGAGTLVTVSSGKPGSGKPGSGKPGSGKPGSSIVMTQSPATLSVSPGERATLSCRASQSVSNDVAWYQQKPGQSPRLLINYASHRYTGVPDRFTGSGYGTEFTLTISSLQSEDFAVYFCQQDYSSPRTFGGGTKVEIK

SEQ ID NO: 11201 - protein, 122 aa, synthetic construct
  REGION 1..122: note = Description of Artificial Sequence: Synthetic polypeptide
  REGION 1..122: note = VH of XENP018515
EVQLVESGGGLVKPGGSLRLSCAASGFTFSDYWMNWVRQAPGKGLEWVGEIRLKSNNYATHYAEPVKGRFTISRDDSKSTVYLQMNSLKTEDTAVYYCTRYYGNYGGYFDVWGAGTLVTVSS

SEQ ID NO: 11202 - protein, 107 aa, synthetic construct; identical to SEQ ID NO: 10923
  REGION 1..107: note = Description of Artificial Sequence: Synthetic polypeptide
  REGION 1..107: note = VL of XENP018515

SEQ ID NO: 11203 - protein, 5 aa, synthetic construct
  REGION 1..5: note = Description of Artificial Sequence: Synthetic peptide
  REGION 1..5: note = XENP018515 vhCDR1
DYWMN

SEQ ID NO: 11204 - protein, 19 aa, synthetic construct
  REGION 1..19: note = Description of Artificial Sequence: Synthetic peptide
  REGION 1..19: note = XENP018515 vhCDR2
EIRLKSNNYATHYAEPVKG

SEQ ID NO: 11205 - protein, 11 aa, synthetic construct
  REGION 1..11: note = Description of Artificial Sequence: Synthetic peptide
  REGION 1..11: note = XENP018515 vhCDR3
YYGNYGGYFDV

SEQ ID NO: 11206 - protein, 11 aa, synthetic construct
  REGION 1..11: note = Description of Artificial Sequence: Synthetic peptide
  REGION 1..11: note = XENP018515 vlCDR1
RASQSVSNDVA

SEQ ID NO: 11207 - protein, 7 aa, synthetic construct
  REGION 1..7: note = Description of Artificial Sequence: Synthetic peptide
  REGION 1..7: note = XENP018515 vlCDR2
YASHRYT

SEQ ID NO: 11208 - protein, 9 aa, synthetic construct
  REGION 1..9: note = Description of Artificial Sequence: Synthetic peptide
  REGION 1..9: note = XENP018515 vlCDR3
QQDYSSPRT

SEQ ID NO: 11209 - protein, 249 aa, synthetic construct
  REGION 1..249: note = Description of Artificial Sequence: Synthetic polypeptide
  REGION 1..249: note = XENP018516 1G6_H1.20_L1_scFv(GKPGS)4
EVQLVESGGGLVKPGGSLRLSCAASGFTFSHYWMNWVRQAPGKGLEWVGEIRLKSNNYATHYAEPVKGRFTISRDDSKSTVYLQMNSLKTEDTAVYYCTRYYGNYGGYFDVWGAGTLVTVSSGKPGSGKPGSGKPGSGKPGSSIVMTQSPATLSVSPGERATLSCRASQSVSNDVAWYQQKPGQSPRLLINYASHRYTGVPDRFTGSGYGTEFTLTISSLQSEDFAVYFCQQDYSSPRTFGGGTKVEIK

SEQ ID NO: 11210 - protein, 122 aa, synthetic construct
  REGION 1..122: note = Description of Artificial Sequence: Synthetic polypeptide
  REGION 1..122: note = VH of XENP018516
EVQLVESGGGLVKPGGSLRLSCAASGFTFSHYWMNWVRQAPGKGLEWVGEIRLKSNNYATHYAEPVKGRFTISRDDSKSTVYLQMNSLKTEDTAVYYCTRYYGNYGGYFDVWGAGTLVTVSS

SEQ ID NO: 11211 - protein, 107 aa, synthetic construct; identical to SEQ ID NO: 10923
  REGION 1..107: note = Description of Artificial Sequence: Synthetic polypeptide
  REGION 1..107: note = VL of XENP018516

SEQ ID NO: 11212 - protein, 5 aa, synthetic construct
  REGION 1..5: note = Description of Artificial Sequence: Synthetic peptide
  REGION 1..5: note = XENP018516 vhCDR1
HYWMN

SEQ ID NO: 11213 - protein, 19 aa, synthetic construct
  REGION 1..19: note = Description of Artificial Sequence: Synthetic peptide
  REGION 1..19: note = XENP018516 vhCDR2
EIRLKSNNYATHYAEPVKG

SEQ ID NO: 11214 - protein, 11 aa, synthetic construct
  REGION 1..11: note = Description of Artificial Sequence: Synthetic peptide
  REGION 1..11: note = XENP018516 vhCDR3
YYGNYGGYFDV

SEQ ID NO: 11215 - protein, 11 aa, synthetic construct
  REGION 1..11: note = Description of Artificial Sequence: Synthetic peptide
  REGION 1..11: note = XENP018516 vlCDR1
RASQSVSNDVA

SEQ ID NO: 11216 - protein, 7 aa, synthetic construct
  REGION 1..7: note = Description of Artificial Sequence: Synthetic peptide
  REGION 1..7: note = XENP018516 vlCDR2
YASHRYT

SEQ ID NO: 11217 - protein, 9 aa, synthetic construct
  REGION 1..9: note = Description of Artificial Sequence: Synthetic peptide
  REGION 1..9: note = XENP018516 vlCDR3
QQDYSSPRT

SEQ ID NO: 11218 - protein, 249 aa, synthetic construct
  REGION 1..249: note = Description of Artificial Sequence: Synthetic polypeptide
  REGION 1..249: note = XENP018517 1G6_H1.21_L1_scFv(GKPGS)4
EVQLVESGGGLVKPGGSLRLSCAASGFTFSEYWMNWVRQAPGKGLEWVGEIRLKSNNYATHYAEPVKGRFTISRDDSKSTVYLQMNSLKTEDTAVYYCTRYYGNYGGYFDVWGAGTLVTVSSGKPGSGKPGSGKPGSGKPGSSIVMTQSPATLSVSPGERATLSCRASQSVSNDVAWYQQKPGQSPRLLINYASHRYTGVPDRFTGSGYGTEFTLTISSLQSEDFAVYFCQQDYSSPRTFGGGTKVEIK

SEQ ID NO: 11219 - protein, 122 aa, synthetic construct
  REGION 1..122: note = Description of Artificial Sequence: Synthetic polypeptide
  REGION 1..122: note = VH of XENP018517
EVQLVESGGGLVKPGGSLRLSCAASGFTFSEYWMNWVRQAPGKGLEWVGEIRLKSNNYATHYAEPVKGRFTISRDDSKSTVYLQMNSLKTEDTAVYYCTRYYGNYGGYFDVWGAGTLVTVSS

SEQ ID NO: 11220 - protein, 107 aa, synthetic construct; identical to SEQ ID NO: 10923
  REGION 1..107: note = Description of Artificial Sequence: Synthetic polypeptide
  REGION 1..107: note = VL of XENP018517

SEQ ID NO: 11221 - protein, 5 aa, synthetic construct
  REGION 1..5: note = Description of Artificial Sequence: Synthetic peptide
  REGION 1..5: note = XENP018517 vhCDR1
EYWMN

SEQ ID NO: 11222 - protein, 19 aa, synthetic construct
  REGION 1..19: note = Description of Artificial Sequence: Synthetic peptide
  REGION 1..19: note = XENP018517 vhCDR2
EIRLKSNNYATHYAEPVKG

SEQ ID NO: 11223 - protein, 11 aa, synthetic construct
  REGION 1..11: note = Description of Artificial Sequence: Synthetic peptide
  REGION 1..11: note = XENP018517 vhCDR3
YYGNYGGYFDV

SEQ ID NO: 11224 - protein, 11 aa, synthetic construct
  REGION 1..11: note = Description of Artificial Sequence: Synthetic peptide
  REGION 1..11: note = XENP018517 vlCDR1
RASQSVSNDVA

SEQ ID NO: 11225 - protein, 7 aa, synthetic construct
  REGION 1..7: note = Description of Artificial Sequence: Synthetic peptide
  REGION 1..7: note = XENP018517 vlCDR2
YASHRYT

SEQ ID NO: 11226 - protein, 9 aa, synthetic construct
  REGION 1..9: note = Description of Artificial Sequence: Synthetic peptide
  REGION 1..9: note = XENP018517 vlCDR3
QQDYSSPRT

SEQ ID NO: 11227 - protein, 249 aa, synthetic construct
  REGION 1..249: note = Description of Artificial Sequence: Synthetic polypeptide
  REGION 1..249: note = XENP018518 1G6_H1.22_L1_scFv(GKPGS)4
EVQLVESGGGLVKPGGSLRLSCAASGFTFSSYWMNWVRQAPGKGLEWVGEIRLKSNNYATHYAEPVKGRFTISRDDSKSTVYLQMNSLKTEDTAVYYCTRYYGNYGGYFDVWGAGTLVTVSSGKPGSGKPGSGKPGSGKPGSSIVMTQSPATLSVSPGERATLSCRASQSVSNDVAWYQQKPGQSPRLLINYASHRYTGVPDRFTGSGYGTEFTLTISSLQSEDFAVYFCQQDYSSPRTFGGGTKVEIK

SEQ ID NO: 11228 - protein, 122 aa, synthetic construct
  REGION 1..122: note = Description of Artificial Sequence: Synthetic polypeptide
  REGION 1..122: note = VH of XENP018518
EVQLVESGGGLVKPGGSLRLSCAASGFTFSSYWMNWVRQAPGKGLEWVGEIRLKSNNYATHYAEPVKGRFTISRDDSKSTVYLQMNSLKTEDTAVYYCTRYYGNYGGYFDVWGAGTLVTVSS

SEQ ID NO: 11229 - protein, 107 aa, synthetic construct; identical to SEQ ID NO: 10923
  REGION 1..107: note = Description of Artificial Sequence: Synthetic polypeptide
  REGION 1..107: note = VL of XENP018518

SEQ ID NO: 11230 - protein, 5 aa, synthetic construct
  REGION 1..5: note = Description of Artificial Sequence: Synthetic peptide
  REGION 1..5: note = XENP018518 vhCDR1
SYWMN

SEQ ID NO: 11231 - protein, 19 aa, synthetic construct
  REGION 1..19: note = Description of Artificial Sequence: Synthetic peptide
  REGION 1..19: note = XENP018518 vhCDR2
EIRLKSNNYATHYAEPVKG

SEQ ID NO: 11232 - protein, 11 aa, synthetic construct
  REGION 1..11: note = Description of Artificial Sequence: Synthetic peptide
  REGION 1..11: note = XENP018518 vhCDR3
YYGNYGGYFDV

SEQ ID NO: 11233 - protein, 11 aa, synthetic construct
  REGION 1..11: note = Description of Artificial Sequence: Synthetic peptide
  REGION 1..11: note = XENP018518 vlCDR1
RASQSVSNDVA

SEQ ID NO: 11234 - protein, 7 aa, synthetic construct
  REGION 1..7: note = Description of Artificial Sequence: Synthetic peptide
  REGION 1..7: note = XENP018518 vlCDR2
YASHRYT

SEQ ID NO: 11235 - protein, 9 aa, synthetic construct
  REGION 1..9: note = Description of Artificial Sequence: Synthetic peptide
  REGION 1..9: note = XENP018518 vlCDR3
QQDYSSPRT

SEQ ID NO: 11236 - protein, 249 aa, synthetic construct
  REGION 1..249: note = Description of Artificial Sequence: Synthetic polypeptide
  REGION 1..249: note = XENP018519 1G6_H1.23_L1_scFv(GKPGS)4
EVQLVESGGGLVKPGGSLRLSCAASGFTFSRYWMNWVRQAPGKGLEWVGEIRLKSNNYATHYAEPVKGRFTISRDDSKSTVYLQMNSLKTEDTAVYYCTRYYGNYGGYFDVWGAGTLVTVSSGKPGSGKPGSGKPGSGKPGSSIVMTQSPATLSVSPGERATLSCRASQSVSNDVAWYQQKPGQSPRLLINYASHRYTGVPDRFTGSGYGTEFTLTISSLQSEDFAVYFCQQDYSSPRTFGGGTKVEIK

SEQ ID NO: 11237 - protein, 122 aa, synthetic construct
  REGION 1..122: note = Description of Artificial Sequence: Synthetic polypeptide
  REGION 1..122: note = VH of XENP018519
EVQLVESGGGLVKPGGSLRLSCAASGFTFSRYWMNWVRQAPGKGLEWVGEIRLKSNNYATHYAEPVKGRFTISRDDSKSTVYLQMNSLKTEDTAVYYCTRYYGNYGGYFDVWGAGTLVTVSS

SEQ ID NO: 11238 - protein, 107 aa, synthetic construct; identical to SEQ ID NO: 10923
  REGION 1..107: note = Description of Artificial Sequence: Synthetic polypeptide
  REGION 1..107: note = VL of XENP018519

SEQ ID NO: 11239 - protein, 5 aa, synthetic construct
  REGION 1..5: note = Description of Artificial Sequence: Synthetic peptide
  REGION 1..5: note = XENP018519 vhCDR1
RYWMN

SEQ ID NO: 11240 - protein, 19 aa, synthetic construct
  REGION 1..19: note = Description of Artificial Sequence: Synthetic peptide
  REGION 1..19: note = XENP018519 vhCDR2
EIRLKSNNYATHYAEPVKG

SEQ ID NO: 11241 - protein, 11 aa, synthetic construct
  REGION 1..11: note = Description of Artificial Sequence: Synthetic peptide
  REGION 1..11: note = XENP018519 vhCDR3
YYGNYGGYFDV

SEQ ID NO: 11242 - protein, 11 aa, synthetic construct
  REGION 1..11: note = Description of Artificial Sequence: Synthetic peptide
  REGION 1..11: note = XENP018519 vlCDR1
RASQSVSNDVA

SEQ ID NO: 11243 - protein, 7 aa, synthetic construct
  REGION 1..7: note = Description of Artificial Sequence: Synthetic peptide
  REGION 1..7: note = XENP018519 vlCDR2
YASHRYT

SEQ ID NO: 11244 - protein, 9 aa, synthetic construct
  REGION 1..9: note = Description of Artificial Sequence: Synthetic peptide
  REGION 1..9: note = XENP018519 vlCDR3
QQDYSSPRT

SEQ ID NO: 11245 - protein, 249 aa, synthetic construct
  REGION 1..249: note = Description of Artificial Sequence: Synthetic polypeptide
  REGION 1..249: note = XENP018520 1G6_H1.24_L1_scFv(GKPGS)4
EVQLVESGGGLVKPGGSLRLSCAASGFTFSLYWMNWVRQAPGKGLEWVGEIRLKSNNYATHYAEPVKGRFTISRDDSKSTVYLQMNSLKTEDTAVYYCTRYYGNYGGYFDVWGAGTLVTVSSGKPGSGKPGSGKPGSGKPGSSIVMTQSPATLSVSPGERATLSCRASQSVSNDVAWYQQKPGQSPRLLINYASHRYTGVPDRFTGSGYGTEFTLTISSLQSEDFAVYFCQQDYSSPRTFGGGTKVEIK

SEQ ID NO: 11246 - protein, 122 aa, synthetic construct
  REGION 1..122: note = Description of Artificial Sequence: Synthetic polypeptide
  REGION 1..122: note = VH of XENP018520
EVQLVESGGGLVKPGGSLRLSCAASGFTFSLYWMNWVRQAPGKGLEWVGEIRLKSNNYATHYAEPVKGRFTISRDDSKSTVYLQMNSLKTEDTAVYYCTRYYGNYGGYFDVWGAGTLVTVSS

SEQ ID NO: 11247 - protein, 107 aa, synthetic construct; identical to SEQ ID NO: 10923
  REGION 1..107: note = Description of Artificial Sequence: Synthetic polypeptide
  REGION 1..107: note = VL of XENP018520

SEQ ID NO: 11248 - protein, 5 aa, synthetic construct
  REGION 1..5: note = Description of Artificial Sequence: Synthetic peptide
  REGION 1..5: note = XENP018520 vhCDR1
LYWMN

SEQ ID NO: 11249 - protein, 19 aa, synthetic construct
  REGION 1..19: note = Description of Artificial Sequence: Synthetic peptide
  REGION 1..19: note = XENP018520 vhCDR2
EIRLKSNNYATHYAEPVKG

SEQ ID NO: 11250 - protein, 11 aa, synthetic construct
  REGION 1..11: note = Description of Artificial Sequence: Synthetic peptide
  REGION 1..11: note = XENP018520 vhCDR3
YYGNYGGYFDV

SEQ ID NO: 11251 - protein, 11 aa, synthetic construct
  REGION 1..11: note = Description of Artificial Sequence: Synthetic peptide
  REGION 1..11: note = XENP018520 vlCDR1
RASQSVSNDVA

SEQ ID NO: 11252 - protein, 7 aa, synthetic construct
  REGION 1..7: note = Description of Artificial Sequence: Synthetic peptide
  REGION 1..7: note = XENP018520 vlCDR2
YASHRYT

SEQ ID NO: 11253 - protein, 9 aa, synthetic construct
  REGION 1..9: note = Description of Artificial Sequence: Synthetic peptide
  REGION 1..9: note = XENP018520 vlCDR3
QQDYSSPRT

SEQ ID NO: 11254 - protein, 249 aa, synthetic construct
  REGION 1..249: note = Description of Artificial Sequence: Synthetic polypeptide
  REGION 1..249: note = XENP018521 1G6_H1.25_L1_scFv(GKPGS)4
EVQLVESGGGLVKPGGSLRLSCAASGFTFSTYWMNWVRQAPGKGLEWVGEIRLKSNNYATHYAEPVKGRFTISRDDSKSTVYLQMNSLKTEDTAVYYCTRYYGNYGGYFDVWGAGTLVTVSSGKPGSGKPGSGKPGSGKPGSSIVMTQSPATLSVSPGERATLSCRASQSVSNDVAWYQQKPGQSPRLLINYASHRYTGVPDRFTGSGYGTEFTLTISSLQSEDFAVYFCQQDYSSPRTFGGGTKVEIK

SEQ ID NO: 11255 - protein, 122 aa, synthetic construct
  REGION 1..122: note = Description of Artificial Sequence: Synthetic polypeptide
  REGION 1..122: note = VH of XENP018521
EVQLVESGGGLVKPGGSLRLSCAASGFTFSTYWMNWVRQAPGKGLEWVGEIRLKSNNYATHYAEPVKGRFTISRDDSKSTVYLQMNSLKTEDTAVYYCTRYYGNYGGYFDVWGAGTLVTVSS

SEQ ID NO: 11256 - protein, 107 aa, synthetic construct; identical to SEQ ID NO: 10923
  REGION 1..107: note = Description of Artificial Sequence: Synthetic polypeptide
  REGION 1..107: note = VL of XENP018521

SEQ ID NO: 11257 - protein, 5 aa, synthetic construct
  REGION 1..5: note = Description of Artificial Sequence: Synthetic peptide
  REGION 1..5: note = XENP018521 vhCDR1
TYWMN

SEQ ID NO: 11258 - protein, 19 aa, synthetic construct
  REGION 1..19: note = Description of Artificial Sequence: Synthetic peptide
  REGION 1..19: note = XENP018521 vhCDR2
EIRLKSNNYATHYAEPVKG

SEQ ID NO: 11259 - protein, 11 aa, synthetic construct
  REGION 1..11: note = Description of Artificial Sequence: Synthetic peptide
  REGION 1..11: note = XENP018521 vhCDR3
YYGNYGGYFDV

SEQ ID NO: 11260 - protein, 11 aa, synthetic construct
  REGION 1..11: note = Description of Artificial Sequence: Synthetic peptide
  REGION 1..11: note = XENP018521 vlCDR1
RASQSVSNDVA

SEQ ID NO: 11261 - protein, 7 aa, synthetic construct
  REGION 1..7: note = Description of Artificial Sequence: Synthetic peptide
  REGION 1..7: note = XENP018521 vlCDR2
YASHRYT

SEQ ID NO: 11262 - protein, 9 aa, synthetic construct
  REGION 1..9: note = Description of Artificial Sequence: Synthetic peptide
  REGION 1..9: note = XENP018521 vlCDR3
QQDYSSPRT

SEQ ID NO: 11263 - protein, 249 aa, synthetic construct
  REGION 1..249: note = Description of Artificial Sequence: Synthetic polypeptide
  REGION 1..249: note = XENP018522 1G6_H1.26_L1_scFv(GKPGS)4
EVQLVESGGGLVKPGGSLRLSCAASGFTFSGYWMNWVRQAPGKGLEWVGEIRLKSNNYATHYAEPVKGRFTISRDDSKSTVYLQMNSLKTEDTAVYYCTRYYGNYGGYFDVWGAGTLVTVSSGKPGSGKPGSGKPGSGKPGSSIVMTQSPATLSVSPGERATLSCRASQSVSNDVAWYQQKPGQSPRLLINYASHRYTGVPDRFTGSGYGTEFTLTISSLQSEDFAVYFCQQDYSSPRTFGGGTKVEIK

SEQ ID NO: 11264 - protein, 122 aa, synthetic construct
  REGION 1..122: note = Description of Artificial Sequence: Synthetic polypeptide
  REGION 1..122: note = VH of XENP018522
EVQLVESGGGLVKPGGSLRLSCAASGFTFSGYWMNWVRQAPGKGLEWVGEIRLKSNNYATHYAEPVKGRFTISRDDSKSTVYLQMNSLKTEDTAVYYCTRYYGNYGGYFDVWGAGTLVTVSS

SEQ ID NO: 11265 - protein, 107 aa, synthetic construct; identical to SEQ ID NO: 10923
  REGION 1..107: note = Description of Artificial Sequence: Synthetic polypeptide
  REGION 1..107: note = VL of XENP018522

SEQ ID NO: 11266 - protein, 5 aa, synthetic construct
  REGION 1..5: note = Description of Artificial Sequence: Synthetic peptide
  REGION 1..5: note = XENP018522 vhCDR1
GYWMN

SEQ ID NO: 11267 - protein, 19 aa, synthetic construct
  REGION 1..19: note = Description of Artificial Sequence: Synthetic peptide
  REGION 1..19: note = XENP018522 vhCDR2
EIRLKSNNYATHYAEPVKG

SEQ ID NO: 11268 - protein, 11 aa, synthetic construct
  REGION 1..11: note = Description of Artificial Sequence: Synthetic peptide
  REGION 1..11: note = XENP018522 vhCDR3
YYGNYGGYFDV

SEQ ID NO: 11269 - protein, 11 aa, synthetic construct
  REGION 1..11: note = Description of Artificial Sequence: Synthetic peptide
  REGION 1..11: note = XENP018522 vlCDR1
RASQSVSNDVA

SEQ ID NO: 11270 - protein, 7 aa, synthetic construct
  REGION 1..7: note = Description of Artificial Sequence: Synthetic peptide
  REGION 1..7: note = XENP018522 vlCDR2
YASHRYT

SEQ ID NO: 11271 - protein, 9 aa, synthetic construct
  REGION 1..9: note = Description of Artificial Sequence: Synthetic peptide
  REGION 1..9: note = XENP018522 vlCDR3
QQDYSSPRT

SEQ ID NO: 11272 - protein, 249 aa, synthetic construct
  REGION 1..249: note = Description of Artificial Sequence: Synthetic polypeptide
  REGION 1..249: note = XENP018523 1G6_H1.27_L1_scFv(GKPGS)4
EVQLVESGGGLVKPGGSLRLSCAASGFTFSYYWMNWVRQAPGKGLEWVGEIRLKSNNYATHYAEPVKGRFTISRDDSKSTVYLQMNSLKTEDTAVYYCTRYYGNYGGYFDVWGAGTLVTVSSGKPGSGKPGSGKPGSGKPGSSIVMTQSPATLSVSPGERATLSCRASQSVSNDVAWYQQKPGQSPRLLINYASHRYTGVPDRFTGSGYGTEFTLTISSLQSEDFAVYFCQQDYSSPRTFGGGTKVEIK

SEQ ID NO: 11273 - protein, 122 aa, synthetic construct
  REGION 1..122: note = Description of Artificial Sequence: Synthetic polypeptide
  REGION 1..122: note = VH of XENP018523
EVQLVESGGGLVKPGGSLRLSCAASGFTFSYYWMNWVRQAPGKGLEWVGEIRLKSNNYATHYAEPVKGRFTISRDDSKSTVYLQMNSLKTEDTAVYYCTRYYGNYGGYFDVWGAGTLVTVSS

SEQ ID NO: 11274 - protein, 107 aa, synthetic construct; identical to SEQ ID NO: 10923
  REGION 1..107: note = Description of Artificial Sequence: Synthetic polypeptide
  REGION 1..107: note = VL of XENP018523

SEQ ID NO: 11275 - protein, 5 aa, synthetic construct
  REGION 1..5: note = Description of Artificial Sequence: Synthetic peptide
  REGION 1..5: note = XENP018523 vhCDR1
YYWMN

SEQ ID NO: 11276 - protein, 19 aa, synthetic construct
  REGION 1..19: note = Description of Artificial Sequence: Synthetic peptide
  REGION 1..19: note = XENP018523 vhCDR2
EIRLKSNNYATHYAEPVKG

SEQ ID NO: 11277 - protein, 11 aa, synthetic construct
  REGION 1..11: note = Description of Artificial Sequence: Synthetic peptide
  REGION 1..11: note = XENP018523 vhCDR3
YYGNYGGYFDV

SEQ ID NO: 11278 - protein, 11 aa, synthetic construct
  REGION 1..11: note = Description of Artificial Sequence: Synthetic peptide
  REGION 1..11: note = XENP018523 vlCDR1
RASQSVSNDVA

SEQ ID NO: 11279 - protein, 7 aa, synthetic construct
  REGION 1..7: note = Description of Artificial Sequence: Synthetic peptide
  REGION 1..7: note = XENP018523 vlCDR2
YASHRYT

SEQ ID NO: 11280 - protein, 9 aa, synthetic construct
  REGION 1..9: note = Description of Artificial Sequence: Synthetic peptide
  REGION 1..9: note = XENP018523 vlCDR3
QQDYSSPRT

SEQ ID NO: 11281 - protein, 249 aa, synthetic construct
  REGION 1..249: note = Description of Artificial Sequence: Synthetic polypeptide
  REGION 1..249: note = XENP018524 1G6_H1.28_L1_scFv(GKPGS)4
EVQLVESGGGLVKPGGSLRLSCAASGFTFSNFWMNWVRQAPGKGLEWVGEIRLKSNNYATHYAEPVKGRFTISRDDSKSTVYLQMNSLKTEDTAVYYCTRYYGNYGGYFDVWGAGTLVTVSSGKPGSGKPGSGKPGSGKPGSSIVMTQSPATLSVSPGERATLSCRASQSVSNDVAWYQQKPGQSPRLLINYASHRYTGVPDRFTGSGYGTEFTLTISSLQSEDFAVYFCQQDYSSPRTFGGGTKVEIK

SEQ ID NO: 11282 - protein, 122 aa, synthetic construct
  REGION 1..122: note = Description of Artificial Sequence: Synthetic polypeptide
  REGION 1..122: note = VH of XENP018524
EVQLVESGGGLVKPGGSLRLSCAASGFTFSNFWMNWVRQAPGKGLEWVGEIRLKSNNYATHYAEPVKGRFTISRDDSKSTVYLQMNSLKTEDTAVYYCTRYYGNYGGYFDVWGAGTLVTVSS

SEQ ID NO: 11283 - protein, 107 aa, synthetic construct; identical to SEQ ID NO: 10923
  REGION 1..107: note = Description of Artificial Sequence: Synthetic polypeptide
  REGION 1..107: note = VL of XENP018524

SEQ ID NO: 11284 - protein, 5 aa, synthetic construct
  REGION 1..5: note = Description of Artificial Sequence: Synthetic peptide
  REGION 1..5: note = XENP018524 vhCDR1
NFWMN

SEQ ID NO: 11285 - protein, 19 aa, synthetic construct
  REGION 1..19: note = Description of Artificial Sequence: Synthetic peptide
  REGION 1..19: note = XENP018524 vhCDR2
EIRLKSNNYATHYAEPVKG

SEQ ID NO: 11286 - protein, 11 aa, synthetic construct
  REGION 1..11: note = Description of Artificial Sequence: Synthetic peptide
  REGION 1..11: note = XENP018524 vhCDR3
YYGNYGGYFDV

SEQ ID NO: 11287 - protein, 11 aa, synthetic construct
  REGION 1..11: note = Description of Artificial Sequence: Synthetic peptide
  REGION 1..11: note = XENP018524 vlCDR1
RASQSVSNDVA

SEQ ID NO: 11288 - protein, 7 aa, synthetic construct
  REGION 1..7: note = Description of Artificial Sequence: Synthetic peptide
  REGION 1..7: note = XENP018524 vlCDR2
YASHRYT

SEQ ID NO: 11289 - protein, 9 aa, synthetic construct
  REGION 1..9: note = Description of Artificial Sequence: Synthetic peptide
  REGION 1..9: note = XENP018524 vlCDR3
QQDYSSPRT

SEQ ID NO: 11290 - protein, 249 aa, synthetic construct
  REGION 1..249: note = Description of Artificial Sequence: Synthetic polypeptide
  REGION 1..249: note = XENP018525 1G6_H1.29_L1_scFv(GKPGS)4
EVQLVESGGGLVKPGGSLRLSCAASGFTFSNHWMNWVRQAPGKGLEWVGEIRLKSNNYATHYAEPVKGRFTISRDDSKSTVYLQMNSLKTEDTAVYYCTRYYGNYGGYFDVWGAGTLVTVSSGKPGSGKPGSGKPGSGKPGSSIVMTQSPATLSVSPGERATLSCRASQSVSNDVAWYQQKPGQSPRLLINYASHRYTGVPDRFTGSGYGTEFTLTISSLQSEDFAVYFCQQDYSSPRTFGGGTKVEIK

SEQ ID NO: 11291 - protein, 122 aa, synthetic construct
  REGION 1..122: note = Description of Artificial Sequence: Synthetic polypeptide
  REGION 1..122: note = VH of XENP018525
EVQLVESGGGLVKPGGSLRLSCAASGFTFSNHWMNWVRQAPGKGLEWVGEIRLKSNNYATHYAEPVKGRFTISRDDSKSTVYLQMNSLKTEDTAVYYCTRYYGNYGGYFDVWGAGTLVTVSS

SEQ ID NO: 11292 - protein, 107 aa, synthetic construct; identical to SEQ ID NO: 10923
  REGION 1..107: note = Description of Artificial Sequence: Synthetic polypeptide
  REGION 1..107: note = VL of XENP018525

SEQ ID NO: 11293 - protein, 5 aa, synthetic construct
  REGION 1..5: note = Description of Artificial Sequence: Synthetic peptide
  REGION 1..5: note = XENP018525 vhCDR1
NHWMN

SEQ ID NO: 11294 - protein, 19 aa, synthetic construct
  REGION 1..19: note = Description of Artificial Sequence: Synthetic peptide
  REGION 1..19: note = XENP018525 vhCDR2
EIRLKSNNYATHYAEPVKG

SEQ ID NO: 11295 - protein, 11 aa, synthetic construct
  REGION 1..11: note = Description of Artificial Sequence: Synthetic peptide
  REGION 1..11: note = XENP018525 vhCDR3
YYGNYGGYFDV

SEQ ID NO: 11296 - protein, 11 aa, synthetic construct
  REGION 1..11: note = Description of Artificial Sequence: Synthetic peptide
  REGION 1..11: note = XENP018525 vlCDR1
RASQSVSNDVA

SEQ ID NO: 11297 - protein, 7 aa, synthetic construct
  REGION 1..7: note = Description of Artificial Sequence: Synthetic peptide
  REGION 1..7: note = XENP018525 vlCDR2
YASHRYT

SEQ ID NO: 11298 - protein, 9 aa, synthetic construct
  REGION 1..9: note = Description of Artificial Sequence: Synthetic peptide
  REGION 1..9: note = XENP018525 vlCDR3
QQDYSSPRT

SEQ ID NO: 11299 - protein, 249 aa, synthetic construct
  REGION 1..249: note = Description of Artificial Sequence: Synthetic polypeptide
  REGION 1..249: note = XENP018526 1G6_H1.30_L1_scFv(GKPGS)4
EVQLVESGGGLVKPGGSLRLSCAASGFTFSNLWMNWVRQAPGKGLEWVGEIRLKSNNYATHYAEPVKGRFTISRDDSKSTVYLQMNSLKTEDTAVYYCTRYYGNYGGYFDVWGAGTLVTVSSGKPGSGKPGSGKPGSGKPGSSIVMTQSPATLSVSPGERATLSCRASQSVSNDVAWYQQKPGQSPRLLINYASHRYTGVPDRFTGSGYGTEFTLTISSLQSEDFAVYFCQQDYSSPRTFGGGTKVEIK

SEQ ID NO: 11300 - protein, 122 aa, synthetic construct
  REGION 1..122: note = Description of Artificial Sequence: Synthetic polypeptide
  REGION 1..122: note = VH of XENP018526
EVQLVESGGGLVKPGGSLRLSCAASGFTFSNLWMNWVRQAPGKGLEWVGEIRLKSNNYATHYAEPVKGRFTISRDDSKSTVYLQMNSLKTEDTAVYYCTRYYGNYGGYFDVWGAGTLVTVSS

SEQ ID NO: 11301 - protein, 107 aa, synthetic construct; identical to SEQ ID NO: 10923
  REGION 1..107: note = Description of Artificial Sequence: Synthetic polypeptide
  REGION 1..107: note = VL of XENP018526

SEQ ID NO: 11302 - protein, 5 aa, synthetic construct
  REGION 1..5: note = Description of Artificial Sequence: Synthetic peptide
  REGION 1..5: note = XENP018526 vhCDR1
NLWMN

SEQ ID NO: 11303 - protein, 19 aa, synthetic construct
  REGION 1..19: note = Description of Artificial Sequence: Synthetic peptide
  REGION 1..19: note = XENP018526 vhCDR2
EIRLKSNNYATHYAEPVKG

SEQ ID NO: 11304 - protein, 11 aa, synthetic construct
  REGION 1..11: note = Description of Artificial Sequence: Synthetic peptide
  REGION 1..11: note = XENP018526 vhCDR3
YYGNYGGYFDV

SEQ ID NO: 11305 - protein, 11 aa, synthetic construct
  REGION 1..11: note = Description of Artificial Sequence: Synthetic peptide
  REGION 1..11: note = XENP018526 vlCDR1
RASQSVSNDVA

SEQ ID NO: 11306 - protein, 7 aa, synthetic construct
  REGION 1..7: note = Description of Artificial Sequence: Synthetic peptide
  REGION 1..7: note = XENP018526 vlCDR2
YASHRYT

SEQ ID NO: 11307 - protein, 9 aa, synthetic construct
  REGION 1..9: note = Description of Artificial Sequence: Synthetic peptide
  REGION 1..9: note = XENP018526 vlCDR3
QQDYSSPRT

SEQ ID NO: 11308 - protein, 249 aa, synthetic construct
  REGION 1..249: note = Description of Artificial Sequence: Synthetic polypeptide
  REGION 1..249: note = XENP018527 1G6_H1.31_L1_scFv(GKPGS)4
EVQLVESGGGLVKPGGSLRLSCAASGFTFSNWWMNWVRQAPGKGLEWVGEIRLKSNNYATHYAEPVKGRFTISRDDSKSTVYLQMNSLKTEDTAVYYCTRYYGNYGGYFDVWGAGTLVTVSSGKPGSGKPGSGKPGSGKPGSSIVMTQSPATLSVSPGERATLSCRASQSVSNDVAWYQQKPGQSPRLLINYASHRYTGVPDRFTGSGYGTEFTLTISSLQSEDFAVYFCQQDYSSPRTFGGGTKVEIK

SEQ ID NO: 11309 - protein, 122 aa, synthetic construct
  REGION 1..122: note = Description of Artificial Sequence: Synthetic polypeptide
  REGION 1..122: note = VH of XENP018527
EVQLVESGGGLVKPGGSLRLSCAASGFTFSNWWMNWVRQAPGKGLEWVGEIRLKSNNYATHYAEPVKGRFTISRDDSKSTVYLQMNSLKTEDTAVYYCTRYYGNYGGYFDVWGAGTLVTVSS

SEQ ID NO: 11310 - protein, 107 aa, synthetic construct; identical to SEQ ID NO: 10923
  REGION 1..107: note = Description of Artificial Sequence: Synthetic polypeptide
  REGION 1..107: note = VL of XENP018527

SEQ ID NO: 11311 - protein, 5 aa, synthetic construct
  REGION 1..5: note = Description of Artificial Sequence: Synthetic peptide
  REGION 1..5: note = XENP018527 vhCDR1
NWWMN

SEQ ID NO: 11312 - protein, 19 aa, synthetic construct
  REGION 1..19: note = Description of Artificial Sequence: Synthetic peptide
  REGION 1..19: note = XENP018527 vhCDR2
EIRLKSNNYATHYAEPVKG

SEQ ID NO: 11313 - protein, 11 aa, synthetic construct
  REGION 1..11: note = Description of Artificial Sequence: Synthetic peptide
  REGION 1..11: note = XENP018527 vhCDR3
YYGNYGGYFDV

SEQ ID NO: 11314 - protein, 11 aa, synthetic construct
  REGION 1..11: note = Description of Artificial Sequence: Synthetic peptide
  REGION 1..11: note = XENP018527 vlCDR1
RASQSVSNDVA

SEQ ID NO: 11315 - protein, 7 aa, synthetic construct
  REGION 1..7: note = Description of Artificial Sequence: Synthetic peptide
  REGION 1..7: note = XENP018527 vlCDR2
YASHRYT

SEQ ID NO: 11316 - protein, 9 aa, synthetic construct
  REGION 1..9: note = Description of Artificial Sequence: Synthetic peptide
  REGION 1..9: note = XENP018527 vlCDR3
QQDYSSPRT

SEQ ID NO: 11317 - protein, 249 aa, synthetic construct
  REGION 1..249: note = Description of Artificial Sequence: Synthetic polypeptide
  REGION 1..249: note = XENP018528 1G6_H1.32_L1_scFv(GKPGS)4
EVQLVESGGGLVKPGGSLRLSCAASGFTFSNVWMNWVRQAPGKGLEWVGEIRLKSNNYATHYAEPVKGRFTISRDDSKSTVYLQMNSLKTEDTAVYYCTRYYGNYGGYFDVWGAGTLVTVSSGKPGSGKPGSGKPGSGKPGSSIVMTQSPATLSVSPGERATLSCRASQSVSNDVAWYQQKPGQSPRLLINYASHRYTGVPDRFTGSGYGTEFTLTISSLQSEDFAVYFCQQDYSSPRTFGGGTKVEIK

SEQ ID NO: 11318 - protein, 122 aa, synthetic construct
  REGION 1..122: note = Description of Artificial Sequence: Synthetic polypeptide
  REGION 1..122: note = VH of XENP018528
EVQLVESGGGLVKPGGSLRLSCAASGFTFSNVWMNWVRQAPGKGLEWVGEIRLKSNNYATHYAEPVKGRFTISRDDSKSTVYLQMNSLKTEDTAVYYCTRYYGNYGGYFDVWGAGTLVTVSS

SEQ ID NO: 11319 - protein, 107 aa, synthetic construct; identical to SEQ ID NO: 10923
  REGION 1..107: note = Description of Artificial Sequence: Synthetic polypeptide
  REGION 1..107: note = VL of XENP018528

SEQ ID NO: 11320 - protein, 5 aa, synthetic construct
  REGION 1..5: note = Description of Artificial Sequence: Synthetic peptide
  REGION 1..5: note = XENP018528 vhCDR1
NVWMN

SEQ ID NO: 11321 - protein, 19 aa, synthetic construct
  REGION 1..19: note = Description of Artificial Sequence: Synthetic peptide
  REGION 1..19: note = XENP018528 vhCDR2
EIRLKSNNYATHYAEPVKG

SEQ ID NO: 11322 - protein, 11 aa, synthetic construct
  REGION 1..11: note = Description of Artificial Sequence: Synthetic peptide
  REGION 1..11: note = XENP018528 vhCDR3
YYGNYGGYFDV

SEQ ID NO: 11323 - protein, 11 aa, synthetic construct
  REGION 1..11: note = Description of Artificial Sequence: Synthetic peptide
  REGION 1..11: note = XENP018528 vlCDR1
RASQSVSNDVA

SEQ ID NO: 11324 - protein, 7 aa, synthetic construct
  REGION 1..7: note = Description of Artificial Sequence: Synthetic peptide
  REGION 1..7: note = XENP018528 vlCDR2
YASHRYT

SEQ ID NO: 11325 - protein, 9 aa, synthetic construct
  REGION 1..9: note = Description of Artificial Sequence: Synthetic peptide
  REGION 1..9: note = XENP018528 vlCDR3
QQDYSSPRT

SEQ ID NO: 11326 - protein, 249 aa, synthetic construct
  REGION 1..249: note = Description of Artificial Sequence: Synthetic polypeptide
  REGION 1..249: note = XENP018529 1G6_H1.33_L1_scFv(GKPGS)4
EVQLVESGGGLVKPGGSLRLSCAASGFTFSNAWMNWVRQAPGKGLEWVGEIRLKSNNYATHYAEPVKGRFTISRDDSKSTVYLQMNSLKTEDTAVYYCTRYYGNYGGYFDVWGAGTLVTVSSGKPGSGKPGSGKPGSGKPGSSIVMTQSPATLSVSPGERATLSCRASQSVSNDVAWYQQKPGQSPRLLINYASHRYTGVPDRFTGSGYGTEFTLTISSLQSEDFAVYFCQQDYSSPRTFGGGTKVEIK

SEQ ID NO: 11327 - protein, 122 aa, synthetic construct
  REGION 1..122: note = Description of Artificial Sequence: Synthetic polypeptide
  REGION 1..122: note = VH of XENP018529
EVQLVESGGGLVKPGGSLRLSCAASGFTFSNAWMNWVRQAPGKGLEWVGEIRLKSNNYATHYAEPVKGRFTISRDDSKSTVYLQMNSLKTEDTAVYYCTRYYGNYGGYFDVWGAGTLVTVSS

SEQ ID NO: 11328 - protein, 107 aa, synthetic construct; identical to SEQ ID NO: 10923
  REGION 1..107: note = Description of Artificial Sequence: Synthetic polypeptide
  REGION 1..107: note = VL of XENP018529

SEQ ID NO: 11329 - protein, 5 aa, synthetic construct
  REGION 1..5: note = Description of Artificial Sequence: Synthetic peptide
  REGION 1..5: note = XENP018529 vhCDR1
NAWMN

SEQ ID NO: 11330 - protein, 19 aa, synthetic construct
  REGION 1..19: note = Description of Artificial Sequence: Synthetic peptide
  REGION 1..19: note = XENP018529 vhCDR2
EIRLKSNNYATHYAEPVKG

SEQ ID NO: 11331 - protein, 11 aa, synthetic construct
  REGION 1..11: note = Description of Artificial Sequence: Synthetic peptide
  REGION 1..11: note = XENP018529 vhCDR3
YYGNYGGYFDV

SEQ ID NO: 11332 - protein, 11 aa, synthetic construct
  REGION 1..11: note = Description of Artificial Sequence: Synthetic peptide
  REGION 1..11: note = XENP018529 vlCDR1
RASQSVSNDVA

SEQ ID NO: 11333 - protein, 7 aa, synthetic construct
  REGION 1..7: note = Description of Artificial Sequence: Synthetic peptide
  REGION 1..7: note = XENP018529 vlCDR2
YASHRYT

SEQ ID NO: 11334 - protein, 9 aa, synthetic construct
  REGION 1..9: note = Description of Artificial Sequence: Synthetic peptide
  REGION 1..9: note = XENP018529 vlCDR3
QQDYSSPRT

SEQ ID NO: 11335 - protein, 249 aa, synthetic construct
  REGION 1..249: note = Description of Artificial Sequence: Synthetic polypeptide
  REGION 1..249: note = XENP018530 1G6_H1.34_L1_scFv(GKPGS)4
EVQLVESGGGLVKPGGSLRLSCAASGFTFSNQWMNWVRQAPGKGLEWVGEIRLKSNNYATHYAEPVKGRFTISRDDSKSTVYLQMNSLKTEDTAVYYCTRYYGNYGGYFDVWGAGTLVTVSSGKPGSGKPGSGKPGSGKPGSSIVMTQSPATLSVSPGERATLSCRASQSVSNDVAWYQQKPGQSPRLLINYASHRYTGVPDRFTGSGYGTEFTLTISSLQSEDFAVYFCQQDYSSPRTFGGGTKVEIK

SEQ ID NO: 11336 - protein, 122 aa, synthetic construct
  REGION 1..122: note = Description of Artificial Sequence: Synthetic polypeptide
  REGION 1..122: note = VH of XENP018530
EVQLVESGGGLVKPGGSLRLSCAASGFTFSNQWMNWVRQAPGKGLEWVGEIRLKSNNYATHYAEPVKGRFTISRDDSKSTVYLQMNSLKTEDTAVYYCTRYYGNYGGYFDVWGAGTLVTVSS

SEQ ID NO: 11337 - protein, 107 aa, synthetic construct; identical to SEQ ID NO: 10923
  REGION 1..107: note = Description of Artificial Sequence: Synthetic polypeptide
  REGION 1..107: note = VL of XENP018530

SEQ ID NO: 11338 - protein, 5 aa, synthetic construct
  REGION 1..5: note = Description of Artificial Sequence: Synthetic peptide
  REGION 1..5: note = XENP018530 vhCDR1
NQWMN

SEQ ID NO: 11339 - protein, 19 aa, synthetic construct
  REGION 1..19: note = Description of Artificial Sequence: Synthetic peptide
  REGION 1..19: note = XENP018530 vhCDR2
EIRLKSNNYATHYAEPVKG

SEQ ID NO: 11340 - protein, 11 aa, synthetic construct
  REGION 1..11: note = Description of Artificial Sequence: Synthetic peptide
  REGION 1..11: note = XENP018530 vhCDR3
YYGNYGGYFDV

SEQ ID NO: 11341 - protein, 11 aa, synthetic construct
  REGION 1..11: note = Description of Artificial Sequence: Synthetic peptide
  REGION 1..11: note = XENP018530 vlCDR1
RASQSVSNDVA

SEQ ID NO: 11342 - protein, 7 aa, synthetic construct
  REGION 1..7: note = Description of Artificial Sequence: Synthetic peptide
  REGION 1..7: note = XENP018530 vlCDR2
YASHRYT

SEQ ID NO: 11343 - protein, 9 aa, synthetic construct
  REGION 1..9: note = Description of Artificial Sequence: Synthetic peptide
  REGION 1..9: note = XENP018530 vlCDR3
QQDYSSPRT

SEQ ID NO: 11344 - protein, 249 aa, synthetic construct
  REGION 1..249: note = Description of Artificial Sequence: Synthetic polypeptide
  REGION 1..249: note = XENP018531 1G6_H1.35_L1_scFv(GKPGS)4
EVQLVESGGGLVKPGGSLRLSCAASGFTFSNDWMNWVRQAPGKGLEWVGEIRLKSNNYATHYAEPVKGRFTISRDDSKSTVYLQMNSLKTEDTAVYYCTRYYGNYGGYFDVWGAGTLVTVSSGKPGSGKPGSGKPGSGKPGSSIVMTQSPATLSVSPGERATLSCRASQSVSNDVAWYQQKPGQSPRLLINYASHRYTGVPDRFTGSGYGTEFTLTISSLQSEDFAVYFCQQDYSSPRTFGGGTKVEIK

SEQ ID NO: 11345 - protein, 122 aa, synthetic construct
  REGION 1..122: note = Description of Artificial Sequence: Synthetic polypeptide
  REGION 1..122: note = VH of XENP018531
EVQLVESGGGLVKPGGSLRLSCAASGFTFSNDWMNWVRQAPGKGLEWVGEIRLKSNNYATHYAEPVKGRFTISRDDSKSTVYLQMNSLKTEDTAVYYCTRYYGNYGGYFDVWGAGTLVTVSS

SEQ ID NO: 11346 - protein, 107 aa, synthetic construct; identical to SEQ ID NO: 10923
  REGION 1..107: note = Description of Artificial Sequence: Synthetic polypeptide
  REGION 1..107: note = VL of XENP018531

SEQ ID NO: 11347 - protein, 5 aa, synthetic construct
  REGION 1..5: note = Description of Artificial Sequence: Synthetic peptide
  REGION 1..5: note = XENP018531 vhCDR1
NDWMN

SEQ ID NO: 11348 - protein, 19 aa, synthetic construct
  REGION 1..19: note = Description of Artificial Sequence: Synthetic peptide
  REGION 1..19: note = XENP018531 vhCDR2
EIRLKSNNYATHYAEPVKG

SEQ ID NO: 11349 - protein, 11 aa, synthetic construct
  REGION 1..11: note = Description of Artificial Sequence: Synthetic peptide
  REGION 1..11: note = XENP018531 vhCDR3
YYGNYGGYFDV

SEQ ID NO: 11350 - protein, 11 aa, synthetic construct
  REGION 1..11: note = Description of Artificial Sequence: Synthetic peptide
  REGION 1..11: note = XENP018531 vlCDR1
RASQSVSNDVA

SEQ ID NO: 11351 - protein, 7 aa, synthetic construct
  REGION 1..7: note = Description of Artificial Sequence: Synthetic peptide
  REGION 1..7: note = XENP018531 vlCDR2
YASHRYT

SEQ ID NO: 11352 - protein, 9 aa, synthetic construct
  REGION 1..9: note = Description of Artificial Sequence: Synthetic peptide
  REGION 1..9: note = XENP018531 vlCDR3
QQDYSSPRT

SEQ ID NO: 11353 - protein, 249 aa, synthetic construct
  REGION 1..249: note = Description of Artificial Sequence: Synthetic polypeptide
  REGION 1..249: note = XENP018532 1G6_H1.36_L1_scFv(GKPGS)4
EVQLVESGGGLVKPGGSLRLSCAASGFTFSNKWMNWVRQAPGKGLEWVGEIRLKSNNYATHYAEPVKGRFTISRDDSKSTVYLQMNSLKTEDTAVYYCTRYYGNYGGYFDVWGAGTLVTVSSGKPGSGKPGSGKPGSGKPGSSIVMTQSPATLSVSPGERATLSCRASQSVSNDVAWYQQKPGQSPRLLINYASHRYTGVPDRFTGSGYGTEFTLTISSLQSEDFAVYFCQQDYSSPRTFGGGTKVEIK

SEQ ID NO: 11354 - protein, 122 aa, synthetic construct
  REGION 1..122: note = Description of Artificial Sequence: Synthetic polypeptide
  REGION 1..122: note = VH of XENP018532
EVQLVESGGGLVKPGGSLRLSCAASGFTFSNKWMNWVRQAPGKGLEWVGEIRLKSNNYATHYAEPVKGRFTISRDDSKSTVYLQMNSLKTEDTAVYYCTRYYGNYGGYFDVWGAGTLVTVSS

SEQ ID NO: 11355 - protein, 107 aa, synthetic construct; identical to SEQ ID NO: 10923
  REGION 1..107: note = Description of Artificial Sequence: Synthetic polypeptide
  REGION 1..107: note = VL of XENP018532

SEQ ID NO: 11356 - protein, 5 aa, synthetic construct
  REGION 1..5: note = Description of Artificial Sequence: Synthetic peptide
  REGION 1..5: note = XENP018532 vhCDR1
NKWMN

SEQ ID NO: 11357 - protein, 19 aa, synthetic construct
  REGION 1..19: note = Description of Artificial Sequence: Synthetic peptide
  REGION 1..19: note = XENP018532 vhCDR2
EIRLKSNNYATHYAEPVKG

SEQ ID NO: 11358 - protein, 11 aa, synthetic construct
  REGION 1..11: note = Description of Artificial Sequence: Synthetic peptide
  REGION 1..11: note = XENP018532 vhCDR3
YYGNYGGYFDV

SEQ ID NO: 11359 - protein, 11 aa, synthetic construct
  REGION 1..11: note = Description of Artificial Sequence: Synthetic peptide
  REGION 1..11: note = XENP018532 vlCDR1
RASQSVSNDVA

SEQ ID NO: 11360 - protein, 7 aa, synthetic construct
  REGION 1..7: note = Description of Artificial Sequence: Synthetic peptide
  REGION 1..7: note = XENP018532 vlCDR2
YASHRYT

SEQ ID NO: 11361 - protein, 9 aa, synthetic construct
  REGION 1..9: note = Description of Artificial Sequence: Synthetic peptide
  REGION 1..9: note = XENP018532 vlCDR3
QQDYSSPRT

SEQ ID NO: 11362 - protein, 249 aa, synthetic construct
  REGION 1..249: note = Description of Artificial Sequence: Synthetic polypeptide
  REGION 1..249: note = XENP018533 1G6_H1.37_L1_scFv(GKPGS)4
EVQLVESGGGLVKPGGSLRLSCAASGFTFSNYGMNWVRQAPGKGLEWVGEIRLKSNNYATHYAEPVKGRFTISRDDSKSTVYLQMNSLKTEDTAVYYCTRYYGNYGGYFDVWGAGTLVTVSSGKPGSGKPGSGKPGSGKPGSSIVMTQSPATLSVSPGERATLSCRASQSVSNDVAWYQQKPGQSPRLLINYASHRYTGVPDRFTGSGYGTEFTLTISSLQSEDFAVYFCQQDYSSPRTFGGGTKVEIK

SEQ ID NO: 11363 - protein, 122 aa, synthetic construct
  REGION 1..122: note = Description of Artificial Sequence: Synthetic polypeptide
  REGION 1..122: note = VH of XENP018533
EVQLVESGGGLVKPGGSLRLSCAASGFTFSNYGMNWVRQAPGKGLEWVGEIRLKSNNYATHYAEPVKGRFTISRDDSKSTVYLQMNSLKTEDTAVYYCTRYYGNYGGYFDVWGAGTLVTVSS

SEQ ID NO: 11364 - protein, 107 aa, synthetic construct; identical to SEQ ID NO: 10923
  REGION 1..107: note = Description of Artificial Sequence: Synthetic polypeptide
  REGION 1..107: note = VL of XENP018533

SEQ ID NO: 11365 - protein, 5 aa, synthetic construct
  REGION 1..5: note = Description of Artificial Sequence: Synthetic peptide
  REGION 1..5: note = XENP018533 vhCDR1
NYGMN

SEQ ID NO: 11366 - protein, 19 aa, synthetic construct
  REGION 1..19: note = Description of Artificial Sequence: Synthetic peptide
  REGION 1..19: note = XENP018533 vhCDR2
EIRLKSNNYATHYAEPVKG

SEQ ID NO: 11367 - protein, 11 aa, synthetic construct
  REGION 1..11: note = Description of Artificial Sequence: Synthetic peptide
  REGION 1..11: note = XENP018533 vhCDR3
YYGNYGGYFDV

SEQ ID NO: 11368 - protein, 11 aa, synthetic construct
  REGION 1..11: note = Description of Artificial Sequence: Synthetic peptide
  REGION 1..11: note = XENP018533 vlCDR1
RASQSVSNDVA

SEQ ID NO: 11369 - protein, 7 aa, synthetic construct
  REGION 1..7: note = Description of Artificial Sequence: Synthetic peptide
  REGION 1..7: note = XENP018533 vlCDR2
YASHRYT

SEQ ID NO: 11370 - protein, 9 aa, synthetic construct
  REGION 1..9: note = Description of Artificial Sequence: Synthetic peptide
  REGION 1..9: note = XENP018533 vlCDR3
QQDYSSPRT

SEQ ID NO: 11371 - protein, 249 aa, synthetic construct
  REGION 1..249: note = Description of Artificial Sequence: Synthetic polypeptide
  REGION 1..249: note = XENP018534 1G6_H1.38_L1_scFv(GKPGS)4
EVQLVESGGGLVKPGGSLRLSCAASGFTFSNYAMNWVRQAPGKGLEWVGEIRLKSNNYATHYAEPVKGRFTISRDDSKSTVYLQMNSLKTEDTAVYYCTRYYGNYGGYFDVWGAGTLVTVSSGKPGSGKPGSGKPGSGKPGSSIVMTQSPATLSVSPGERATLSCRASQSVSNDVAWYQQKPGQSPRLLINYASHRYTGVPDRFTGSGYGTEFTLTISSLQSEDFAVYFCQQDYSSPRTFGGGTKVEIK

SEQ ID NO: 11372 - protein, 122 aa, synthetic construct
  REGION 1..122: note = Description of Artificial Sequence: Synthetic polypeptide
  REGION 1..122: note = VH of XENP018534
EVQLVESGGGLVKPGGSLRLSCAASGFTFSNYAMNWVRQAPGKGLEWVGEIRLKSNNYATHYAEPVKGRFTISRDDSKSTVYLQMNSLKTEDTAVYYCTRYYGNYGGYFDVWGAGTLVTVSS

SEQ ID NO: 11373 - protein, 107 aa, synthetic construct; identical to SEQ ID NO: 10923
  REGION 1..107: note = Description of Artificial Sequence: Synthetic polypeptide
  REGION 1..107: note = VL of XENP018534

SEQ ID NO: 11374 - protein, 5 aa, synthetic construct
  REGION 1..5: note = Description of Artificial Sequence: Synthetic peptide
  REGION 1..5: note = XENP018534 vhCDR1
NYAMN

SEQ ID NO: 11375 - protein, 19 aa, synthetic construct
  REGION 1..19: note = Description of Artificial Sequence: Synthetic peptide
  REGION 1..19: note = XENP018534 vhCDR2
EIRLKSNNYATHYAEPVKG

SEQ ID NO: 11376 - protein, 11 aa, synthetic construct
  REGION 1..11: note = Description of Artificial Sequence: Synthetic peptide
  REGION 1..11: note = XENP018534 vhCDR3
YYGNYGGYFDV

SEQ ID NO: 11377 - protein, 11 aa, synthetic construct
  REGION 1..11: note = Description of Artificial Sequence: Synthetic peptide
  REGION 1..11: note = XENP018534 vlCDR1
RASQSVSNDVA

SEQ ID NO: 11378 - protein, 7 aa, synthetic construct
  REGION 1..7: note = Description of Artificial Sequence: Synthetic peptide
  REGION 1..7: note = XENP018534 vlCDR2
YASHRYT

SEQ ID NO: 11379 - protein, 9 aa, synthetic construct
  REGION 1..9: note = Description of Artificial Sequence: Synthetic peptide
  REGION 1..9: note = XENP018534 vlCDR3
QQDYSSPRT

SEQ ID NO: 11380 - protein, 249 aa, synthetic construct
  REGION 1..249: note = Description of Artificial Sequence: Synthetic polypeptide
  REGION 1..249: note = XENP018535 1G6_H1.39_L1_scFv(GKPGS)4
EVQLVESGGGLVKPGGSLRLSCAASGFTFSNYYMNWVRQAPGKGLEWVGEIRLKSNNYATHYAEPVKGRFTISRDDSKSTVYLQMNSLKTEDTAVYYCTRYYGNYGGYFDVWGAGTLVTVSSGKPGSGKPGSGKPGSGKPGSSIVMTQSPATLSVSPGERATLSCRASQSVSNDVAWYQQKPGQSPRLLINYASHRYTGVPDRFTGSGYGTEFTLTISSLQSEDFAVYFCQQDYSSPRTFGGGTKVEIK

SEQ ID NO: 11381 - protein, 122 aa, synthetic construct
  REGION 1..122: note = Description of Artificial Sequence: Synthetic polypeptide
  REGION 1..122: note = VH of XENP018535
EVQLVESGGGLVKPGGSLRLSCAASGFTFSNYYMNWVRQAPGKGLEWVGEIRLKSNNYATHYAEPVKGRFTISRDDSKSTVYLQMNSLKTEDTAVYYCTRYYGNYGGYFDVWGAGTLVTVSS

SEQ ID NO: 11382 - protein, 107 aa, synthetic construct; identical to SEQ ID NO: 10923
  REGION 1..107: note = Description of Artificial Sequence: Synthetic polypeptide
  REGION 1..107: note = VL of XENP018535

SEQ ID NO: 11383 - protein, 5 aa, synthetic construct
  REGION 1..5: note = Description of Artificial Sequence: Synthetic peptide
  REGION 1..5: note = XENP018535 vhCDR1
NYYMN

SEQ ID NO: 11384 - protein, 19 aa, synthetic construct
  REGION 1..19: note = Description of Artificial Sequence: Synthetic peptide
  REGION 1..19: note = XENP018535 vhCDR2
EIRLKSNNYATHYAEPVKG

SEQ ID NO: 11385 - protein, 11 aa, synthetic construct
  REGION 1..11: note = Description of Artificial Sequence: Synthetic peptide
  REGION 1..11: note = XENP018535 vhCDR3
YYGNYGGYFDV

SEQ ID NO: 11386 - protein, 11 aa, synthetic construct
  REGION 1..11: note = Description of Artificial Sequence: Synthetic peptide
  REGION 1..11: note = XENP018535 vlCDR1
RASQSVSNDVA

SEQ ID NO: 11387 - protein, 7 aa, synthetic construct
  REGION 1..7: note = Description of Artificial Sequence: Synthetic peptide
  REGION 1..7: note = XENP018535 vlCDR2
YASHRYT

SEQ ID NO: 11388 - protein, 9 aa, synthetic construct
  REGION 1..9: note = Description of Artificial Sequence: Synthetic peptide
  REGION 1..9: note = XENP018535 vlCDR3
QQDYSSPRT

SEQ ID NO: 11389 - protein, 249 aa, synthetic construct
  REGION 1..249: note = Description of Artificial Sequence: Synthetic polypeptide
  REGION 1..249: note = XENP018536 1G6_H1.40_L1_scFv(GKPGS)4
EVQLVESGGGLVKPGGSLRLSCAASGFTFSNYDMNWVRQAPGKGLEWVGEIRLKSNNYATHYAEPVKGRFTISRDDSKSTVYLQMNSLKTEDTAVYYCTRYYGNYGGYFDVWGAGTLVTVSSGKPGSGKPGSGKPGSGKPGSSIVMTQSPATLSVSPGERATLSCRASQSVSNDVAWYQQKPGQSPRLLINYASHRYTGVPDRFTGSGYGTEFTLTISSLQSEDFAVYFCQQDYSSPRTFGGGTKVEIK

SEQ ID NO: 11390 - protein, 122 aa, synthetic construct
  REGION 1..122: note = Description of Artificial Sequence: Synthetic polypeptide
  REGION 1..122: note = VH of XENP018536
EVQLVESGGGLVKPGGSLRLSCAASGFTFSNYDMNWVRQAPGKGLEWVGEIRLKSNNYATHYAEPVKGRFTISRDDSKSTVYLQMNSLKTEDTAVYYCTRYYGNYGGYFDVWGAGTLVTVSS

SEQ ID NO: 11391 - protein, 107 aa, synthetic construct; identical to SEQ ID NO: 10923
  REGION 1..107: note = Description of Artificial Sequence: Synthetic polypeptide
  REGION 1..107: note = VL of XENP018536

SEQ ID NO: 11392 - protein, 5 aa, synthetic construct
  REGION 1..5: note = Description of Artificial Sequence: Synthetic peptide
  REGION 1..5: note = XENP018536 vhCDR1
NYDMN

SEQ ID NO: 11393 - protein, 19 aa, synthetic construct
  REGION 1..19: note = Description of Artificial Sequence: Synthetic peptide
  REGION 1..19: note = XENP018536 vhCDR2
EIRLKSNNYATHYAEPVKG

SEQ ID NO: 11394 - protein, 11 aa, synthetic construct
  REGION 1..11: note = Description of Artificial Sequence: Synthetic peptide
  REGION 1..11: note = XENP018536 vhCDR3
YYGNYGGYFDV

SEQ ID NO: 11395 - protein, 11 aa, synthetic construct
  REGION 1..11: note = Description of Artificial Sequence: Synthetic peptide
  REGION 1..11: note = XENP018536 vlCDR1
RASQSVSNDVA

SEQ ID NO: 11396 - protein, 7 aa, synthetic construct
  REGION 1..7: note = Description of Artificial Sequence: Synthetic peptide
  REGION 1..7: note = XENP018536 vlCDR2
YASHRYT

SEQ ID NO: 11397 - protein, 9 aa, synthetic construct
  REGION 1..9: note = Description of Artificial Sequence: Synthetic peptide
  REGION 1..9: note = XENP018536 vlCDR3
QQDYSSPRT

SEQ ID NO: 11398 - protein, 249 aa, synthetic construct
  REGION 1..249: note = Description of Artificial Sequence: Synthetic polypeptide
  REGION 1..249: note = XENP018537 1G6_H1.41_L1_scFv(GKPGS)4
EVQLVESGGGLVKPGGSLRLSCAASGFTFSNYWMSWVRQAPGKGLEWVGEIRLKSNNYATHYAEPVKGRFTISRDDSKSTVYLQMNSLKTEDTAVYYCTRYYGNYGGYFDVWGAGTLVTVSSGKPGSGKPGSGKPGSGKPGSSIVMTQSPATLSVSPGERATLSCRASQSVSNDVAWYQQKPGQSPRLLINYASHRYTGVPDRFTGSGYGTEFTLTISSLQSEDFAVYFCQQDYSSPRTFGGGTKVEIK

SEQ ID NO: 11399 - protein, 122 aa, synthetic construct
  REGION 1..122: note = Description of Artificial Sequence: Synthetic polypeptide
  REGION 1..122: note = VH of XENP018537
EVQLVESGGGLVKPGGSLRLSCAASGFTFSNYWMSWVRQAPGKGLEWVGEIRLKSNNYATHYAEPVKGRFTISRDDSKSTVYLQMNSLKTEDTAVYYCTRYYGNYGGYFDVWGAGTLVTVSS

SEQ ID NO: 11400 - protein, 107 aa, synthetic construct; identical to SEQ ID NO: 10923
  REGION 1..107: note = Description of Artificial Sequence: Synthetic polypeptide
  REGION 1..107: note = VL of XENP018537

SEQ ID NO: 11401 - protein, 5 aa, synthetic construct
  REGION 1..5: note = Description of Artificial Sequence: Synthetic peptide
  REGION 1..5: note = XENP018537 vhCDR1
NYWMS

SEQ ID NO: 11402 - protein, 19 aa, synthetic construct
  REGION 1..19: note = Description of Artificial Sequence: Synthetic peptide
  REGION 1..19: note = XENP018537 vhCDR2
EIRLKSNNYATHYAEPVKG

SEQ ID NO: 11403 - protein, 11 aa, synthetic construct
  REGION 1..11: note = Description of Artificial Sequence: Synthetic peptide
  REGION 1..11: note = XENP018537 vhCDR3
YYGNYGGYFDV

SEQ ID NO: 11404 - protein, 11 aa, synthetic construct
  REGION 1..11: note = Description of Artificial Sequence: Synthetic peptide
  REGION 1..11: note = XENP018537 vlCDR1
RASQSVSNDVA

SEQ ID NO: 11405 - protein, 7 aa, synthetic construct
  REGION 1..7: note = Description of Artificial Sequence: Synthetic peptide
  REGION 1..7: note = XENP018537 vlCDR2
YASHRYT

SEQ ID NO: 11406 - protein, 9 aa, synthetic construct
  REGION 1..9: note = Description of Artificial Sequence: Synthetic peptide
  REGION 1..9: note = XENP018537 vlCDR3
QQDYSSPRT

SEQ ID NO: 11407 - protein, 249 aa, synthetic construct
  REGION 1..249: note = Description of Artificial Sequence: Synthetic polypeptide
  REGION 1..249: note = XENP018538 1G6_H1.42_L1_scFv(GKPGS)4
EVQLVESGGGLVKPGGSLRLSCAASGFTFSNYWMHWVRQAPGKGLEWVGEIRLKSNNYATHYAEPVKGRFTISRDDSKSTVYLQMNSLKTEDTAVYYCTRYYGNYGGYFDVWGAGTLVTVSSGKPGSGKPGSGKPGSGKPGSSIVMTQSPATLSVSPGERATLSCRASQSVSNDVAWYQQKPGQSPRLLINYASHRYTGVPDRFTGSGYGTEFTLTISSLQSEDFAVYFCQQDYSSPRTFGGGTKVEIK

SEQ ID NO: 11408 - protein, 122 aa, synthetic construct
  REGION 1..122: note = Description of Artificial Sequence: Synthetic polypeptide
  REGION 1..122: note = VH of XENP018538
EVQLVESGGGLVKPGGSLRLSCAASGFTFSNYWMHWVRQAPGKGLEWVGEIRLKSNNYATHYAEPVKGRFTISRDDSKSTVYLQMNSLKTEDTAVYYCTRYYGNYGGYFDVWGAGTLVTVSS

SEQ ID NO: 11409 - protein, 107 aa, synthetic construct; identical to SEQ ID NO: 10923
  REGION 1..107: note = Description of Artificial Sequence: Synthetic polypeptide
  REGION 1..107: note = VL of XENP018538

SEQ ID NO: 11410 - protein, 5 aa, synthetic construct
  REGION 1..5: note = Description of Artificial Sequence: Synthetic peptide
  REGION 1..5: note = XENP018538 vhCDR1
NYWMH

SEQ ID NO: 11411 - protein, 19 aa, synthetic construct
  REGION 1..19: note = Description of Artificial Sequence: Synthetic peptide
  REGION 1..19: note = XENP018538 vhCDR2
EIRLKSNNYATHYAEPVKG

SEQ ID NO: 11412 - protein, 11 aa, synthetic construct
  REGION 1..11: note = Description of Artificial Sequence: Synthetic peptide
  REGION 1..11: note = XENP018538 vhCDR3
YYGNYGGYFDV

SEQ ID NO: 11413 - protein, 11 aa, synthetic construct
  REGION 1..11: note = Description of Artificial Sequence: Synthetic peptide
  REGION 1..11: note = XENP018538 vlCDR1
RASQSVSNDVA

SEQ ID NO: 11414 - protein, 7 aa, synthetic construct
  REGION 1..7: note = Description of Artificial Sequence: Synthetic peptide
  REGION 1..7: note = XENP018538 vlCDR2
YASHRYT

SEQ ID NO: 11415 - protein, 9 aa, synthetic construct
  REGION 1..9: note = Description of Artificial Sequence: Synthetic peptide
  REGION 1..9: note = XENP018538 vlCDR3
QQDYSSPRT

SEQ ID NO: 11416 - protein, 249 aa, synthetic construct
  REGION 1..249: note = Description of Artificial Sequence: Synthetic polypeptide
  REGION 1..249: note = XENP018539 1G6_H1.43_L1_scFv(GKPGS)4
EVQLVESGGGLVKPGGSLRLSCAASGFTFSNYWMDWVRQAPGKGLEWVGEIRLKSNNYATHYAEPVKGRFTISRDDSKSTVYLQMNSLKTEDTAVYYCTRYYGNYGGYFDVWGAGTLVTVSSGKPGSGKPGSGKPGSGKPGSSIVMTQSPATLSVSPGERATLSCRASQSVSNDVAWYQQKPGQSPRLLINYASHRYTGVPDRFTGSGYGTEFTLTISSLQSEDFAVYFCQQDYSSPRTFGGGTKVEIK

SEQ ID NO: 11417 - protein, 122 aa, synthetic construct
  REGION 1..122: note = Description of Artificial Sequence: Synthetic polypeptide
  REGION 1..122: note = VH of XENP018539
EVQLVESGGGLVKPGGSLRLSCAASGFTFSNYWMDWVRQAPGKGLEWVGEIRLKSNNYATHYAEPVKGRFTISRDDSKSTVYLQMNSLKTEDTAVYYCTRYYGNYGGYFDVWGAGTLVTVSS

SEQ ID NO: 11418 - protein, 107 aa, synthetic construct; identical to SEQ ID NO: 10923
  REGION 1..107: note = Description of Artificial Sequence: Synthetic polypeptide
  REGION 1..107: note = VL of XENP018539

SEQ ID NO: 11419 - protein, 5 aa, synthetic construct
  REGION 1..5: note = Description of Artificial Sequence: Synthetic peptide
  REGION 1..5: note = XENP018539 vhCDR1
NYWMD

SEQ ID NO: 11420 - protein, 19 aa, synthetic construct
  REGION 1..19: note = Description of Artificial Sequence: Synthetic peptide
  REGION 1..19: note = XENP018539 vhCDR2
EIRLKSNNYATHYAEPVKG

SEQ ID NO: 11421 - protein, 11 aa, synthetic construct
  REGION 1..11: note = Description of Artificial Sequence: Synthetic peptide
  REGION 1..11: note = XENP018539 vhCDR3
YYGNYGGYFDV

SEQ ID NO: 11422 - protein, 11 aa, synthetic construct
  REGION 1..11: note = Description of Artificial Sequence: Synthetic peptide
  REGION 1..11: note = XENP018539 vlCDR1
RASQSVSNDVA

SEQ ID NO: 11423 - protein, 7 aa, synthetic construct
  REGION 1..7: note = Description of Artificial Sequence: Synthetic peptide
  REGION 1..7: note = XENP018539 vlCDR2
YASHRYT

SEQ ID NO: 11424 - protein, 9 aa, synthetic construct
  REGION 1..9: note = Description of Artificial Sequence: Synthetic peptide
  REGION 1..9: note = XENP018539 vlCDR3
QQDYSSPRT

SEQ ID NO: 11425 - protein, 249 aa, synthetic construct
  REGION 1..249: note = Description of Artificial Sequence: Synthetic polypeptide
  REGION 1..249: note = XENP018540 1G6_H1.44_L1_scFv(GKPGS)4
EVQLVESGGGLVKPGGSLRLSCAASGFTFSNYWMGWVRQAPGKGLEWVGEIRLKSNNYATHYAEPVKGRFTISRDDSKSTVYLQMNSLKTEDTAVYYCTRYYGNYGGYFDVWGAGTLVTVSSGKPGSGKPGSGKPGSGKPGSSIVMTQSPATLSVSPGERATLSCRASQSVSNDVAWYQQKPGQSPRLLINYASHRYTGVPDRFTGSGYGTEFTLTISSLQSEDFAVYFCQQDYSSPRTFGGGTKVEIK

SEQ ID NO: 11426 - protein, 122 aa, synthetic construct
  REGION 1..122: note = Description of Artificial Sequence: Synthetic polypeptide
  REGION 1..122: note = VH of XENP018540
EVQLVESGGGLVKPGGSLRLSCAASGFTFSNYWMGWVRQAPGKGLEWVGEIRLKSNNYATHYAEPVKGRFTISRDDSKSTVYLQMNSLKTEDTAVYYCTRYYGNYGGYFDVWGAGTLVTVSS

SEQ ID NO: 11427 - protein, 107 aa, synthetic construct; identical to SEQ ID NO: 10923
  REGION 1..107: note = Description of Artificial Sequence: Synthetic polypeptide
  REGION 1..107: note = VL of XENP018540

SEQ ID NO: 11428 - protein, 5 aa, synthetic construct
  REGION 1..5: note = Description of Artificial Sequence: Synthetic peptide
  REGION 1..5: note = XENP018540 vhCDR1
NYWMG

SEQ ID NO: 11429 - protein, 19 aa, synthetic construct
  REGION 1..19: note = Description of Artificial Sequence: Synthetic peptide
  REGION 1..19: note = XENP018540 vhCDR2
EIRLKSNNYATHYAEPVKG

SEQ ID NO: 11430 - protein, 11 aa, synthetic construct
  REGION 1..11: note = Description of Artificial Sequence: Synthetic peptide
  REGION 1..11: note = XENP018540 vhCDR3
YYGNYGGYFDV

SEQ ID NO: 11431 - protein, 11 aa, synthetic construct
  REGION 1..11: note = Description of Artificial Sequence: Synthetic peptide
  REGION 1..11: note = XENP018540 vlCDR1
RASQSVSNDVA

SEQ ID NO: 11432 - protein, 7 aa, synthetic construct
  REGION 1..7: note = Description of Artificial Sequence: Synthetic peptide
  REGION 1..7: note = XENP018540 vlCDR2
YASHRYT

SEQ ID NO: 11433 - protein, 9 aa, synthetic construct
  REGION 1..9: note = Description of Artificial Sequence: Synthetic peptide
  REGION 1..9: note = XENP018540 vlCDR3
QQDYSSPRT

SEQ ID NO: 11434 - protein, 249 aa, synthetic construct
  REGION 1..249: note = Description of Artificial Sequence: Synthetic polypeptide
  REGION 1..249: note = XENP018541 1G6_H1.45_L1_scFv(GKPGS)4
EVQLVESGGGLVKPGGSLRLSCAASGFTFSNYWMNWARQAPGKGLEWVGEIRLKSNNYATHYAEPVKGRFTISRDDSKSTVYLQMNSLKTEDTAVYYCTRYYGNYGGYFDVWGAGTLVTVSSGKPGSGKPGSGKPGSGKPGSSIVMTQSPATLSVSPGERATLSCRASQSVSNDVAWYQQKPGQSPRLLINYASHRYTGVPDRFTGSGYGTEFTLTISSLQSEDFAVYFCQQDYSSPRTFGGGTKVEIK

SEQ ID NO: 11435 - protein, 122 aa, synthetic construct
  REGION 1..122: note = Description of Artificial Sequence: Synthetic polypeptide
  REGION 1..122: note = VH of XENP018541
EVQLVESGGGLVKPGGSLRLSCAASGFTFSNYWMNWARQAPGKGLEWVGEIRLKSNNYATHYAEPVKGRFTISRDDSKSTVYLQMNSLKTEDTAVYYCTRYYGNYGGYFDVWGAGTLVTVSS

SEQ ID NO: 11436 - protein, 107 aa, synthetic construct; identical to SEQ ID NO: 10923
  REGION 1..107: note = Description of Artificial Sequence: Synthetic polypeptide
  REGION 1..107: note = VL of XENP018541

SEQ ID NO: 11437 - protein, 5 aa, synthetic construct
  REGION 1..5: note = Description of Artificial Sequence: Synthetic peptide
  REGION 1..5: note = XENP018541 vhCDR1
NYWMN

SEQ ID NO: 11438 - protein, 19 aa, synthetic construct
  REGION 1..19: note = Description of Artificial Sequence: Synthetic peptide
  REGION 1..19: note = XENP018541 vhCDR2
EIRLKSNNYATHYAEPVKG

SEQ ID NO: 11439 - protein, 11 aa, synthetic construct
  REGION 1..11: note = Description of Artificial Sequence: Synthetic peptide
  REGION 1..11: note = XENP018541 vhCDR3
YYGNYGGYFDV

SEQ ID NO: 11440 - protein, 11 aa, synthetic construct
  REGION 1..11: note = Description of Artificial Sequence: Synthetic peptide
  REGION 1..11: note = XENP018541 vlCDR1
RASQSVSNDVA

SEQ ID NO: 11441 - protein, 7 aa, synthetic construct
  REGION 1..7: note = Description of Artificial Sequence: Synthetic peptide
  REGION 1..7: note = XENP018541 vlCDR2
YASHRYT

SEQ ID NO: 11442 - protein, 9 aa, synthetic construct
  REGION 1..9: note = Description of Artificial Sequence: Synthetic peptide
  REGION 1..9: note = XENP018541 vlCDR3
QQDYSSPRT

SEQ ID NO: 11443 - protein, 249 aa, synthetic construct
  REGION 1..249: note = Description of Artificial Sequence: Synthetic polypeptide
  REGION 1..249: note = XENP018542 1G6_H1.46_L1_scFv(GKPGS)4
EVQLVESGGGLVKPGGSLRLSCAASGFTFSNYWMNWIRQAPGKGLEWVGEIRLKSNNYATHYAEPVKGRFTISRDDSKSTVYLQMNSLKTEDTAVYYCTRYYGNYGGYFDVWGAGTLVTVSSGKPGSGKPGSGKPGSGKPGSSIVMTQSPATLSVSPGERATLSCRASQSVSNDVAWYQQKPGQSPRLLINYASHRYTGVPDRFTGSGYGTEFTLTISSLQSEDFAVYFCQQDYSSPRTFGGGTKVEIK

SEQ ID NO: 11444 - protein, 122 aa, synthetic construct
  REGION 1..122: note = Description of Artificial Sequence: Synthetic polypeptide
  REGION 1..122: note = VH of XENP018542
EVQLVESGGGLVKPGGSLRLSCAASGFTFSNYWMNWIRQAPGKGLEWVGEIRLKSNNYATHYAEPVKGRFTISRDDSKSTVYLQMNSLKTEDTAVYYCTRYYGNYGGYFDVWGAGTLVTVSS

SEQ ID NO: 11445 - protein, 107 aa, synthetic construct; identical to SEQ ID NO: 10923
  REGION 1..107: note = Description of Artificial Sequence: Synthetic polypeptide
  REGION 1..107: note = VL of XENP018542

SEQ ID NO: 11446 - protein, 5 aa, synthetic construct
  REGION 1..5: note = Description of Artificial Sequence: Synthetic peptide
  REGION 1..5: note = XENP018542 vhCDR1
NYWMN

SEQ ID NO: 11447 - protein, 19 aa, synthetic construct
  REGION 1..19: note = Description of Artificial Sequence: Synthetic peptide
  REGION 1..19: note = XENP018542 vhCDR2
EIRLKSNNYATHYAEPVKG

SEQ ID NO: 11448 - protein, 11 aa, synthetic construct
  REGION 1..11: note = Description of Artificial Sequence: Synthetic peptide
  REGION 1..11: note = XENP018542 vhCDR3
YYGNYGGYFDV

SEQ ID NO: 11449 - protein, 11 aa, synthetic construct
  REGION 1..11: note = Description of Artificial Sequence: Synthetic peptide
  REGION 1..11: note = XENP018542 vlCDR1
RASQSVSNDVA

SEQ ID NO: 11450 - protein, 7 aa, synthetic construct
  REGION 1..7: note = Description of Artificial Sequence: Synthetic peptide
  REGION 1..7: note = XENP018542 vlCDR2
YASHRYT

SEQ ID NO: 11451 - protein, 9 aa, synthetic construct
  REGION 1..9: note = Description of Artificial Sequence: Synthetic peptide
  REGION 1..9: note = XENP018542 vlCDR3
QQDYSSPRT

SEQ ID NO: 11452 - protein, 249 aa, synthetic construct
  REGION 1..249: note = Description of Artificial Sequence: Synthetic polypeptide
  REGION 1..249: note = XENP018543 1G6_H1.47_L1_scFv(GKPGS)4
EVQLVESGGGLVKPGGSLRLSCAASGFTFSNYWMNWFRQAPGKGLEWVGEIRLKSNNYATHYAEPVKGRFTISRDDSKSTVYLQMNSLKTEDTAVYYCTRYYGNYGGYFDVWGAGTLVTVSSGKPGSGKPGSGKPGSGKPGSSIVMTQSPATLSVSPGERATLSCRASQSVSNDVAWYQQKPGQSPRLLINYASHRYTGVPDRFTGSGYGTEFTLTISSLQSEDFAVYFCQQDYSSPRTFGGGTKVEIK

SEQ ID NO: 11453 - protein, 122 aa, synthetic construct
  REGION 1..122: note = Description of Artificial Sequence: Synthetic polypeptide
  REGION 1..122: note = VH of XENP018543
EVQLVESGGGLVKPGGSLRLSCAASGFTFSNYWMNWFRQAPGKGLEWVGEIRLKSNNYATHYAEPVKGRFTISRDDSKSTVYLQMNSLKTEDTAVYYCTRYYGNYGGYFDVWGAGTLVTVSS

SEQ ID NO: 11454 - protein, 107 aa, synthetic construct; identical to SEQ ID NO: 10923
  REGION 1..107: note = Description of Artificial Sequence: Synthetic polypeptide
  REGION 1..107: note = VL of XENP018543

SEQ ID NO: 11455 - protein, 5 aa, synthetic construct
  REGION 1..5: note = Description of Artificial Sequence: Synthetic peptide
  REGION 1..5: note = XENP018543 vhCDR1
NYWMN

SEQ ID NO: 11456 - protein, 19 aa, synthetic construct
  REGION 1..19: note = Description of Artificial Sequence: Synthetic peptide
  REGION 1..19: note = XENP018543 vhCDR2
EIRLKSNNYATHYAEPVKG

SEQ ID NO: 11457 - protein, 11 aa, synthetic construct
  REGION 1..11: note = Description of Artificial Sequence: Synthetic peptide
  REGION 1..11: note = XENP018543 vhCDR3
YYGNYGGYFDV

SEQ ID NO: 11458 - protein, 11 aa, synthetic construct
  REGION 1..11: note = Description of Artificial Sequence: Synthetic peptide
  REGION 1..11: note = XENP018543 vlCDR1
RASQSVSNDVA

SEQ ID NO: 11459 - protein, 7 aa, synthetic construct
  REGION 1..7: note = Description of Artificial Sequence: Synthetic peptide
  REGION 1..7: note = XENP018543 vlCDR2
YASHRYT

SEQ ID NO: 11460 - protein, 9 aa, synthetic construct
  REGION 1..9: note = Description of Artificial Sequence: Synthetic peptide
  REGION 1..9: note = XENP018543 vlCDR3
QQDYSSPRT

SEQ ID NO: 11461 - protein, 249 aa, synthetic construct
  REGION 1..249: note = Description of Artificial Sequence: Synthetic polypeptide
  REGION 1..249: note = XENP018544 1G6_H1.48_L1_scFv(GKPGS)4
EVQLVESGGGLVKPGGSLRLSCAASGFTFSNYWMNWVRKAPGKGLEWVGEIRLKSNNYATHYAEPVKGRFTISRDDSKSTVYLQMNSLKTEDTAVYYCTRYYGNYGGYFDVWGAGTLVTVSSGKPGSGKPGSGKPGSGKPGSSIVMTQSPATLSVSPGERATLSCRASQSVSNDVAWYQQKPGQSPRLLINYASHRYTGVPDRFTGSGYGTEFTLTISSLQSEDFAVYFCQQDYSSPRTFGGGTKVEIK

SEQ ID NO: 11462 - protein, 122 aa, synthetic construct
  REGION 1..122: note = Description of Artificial Sequence: Synthetic polypeptide
  REGION 1..122: note = VH of XENP018544
EVQLVESGGGLVKPGGSLRLSCAASGFTFSNYWMNWVRKAPGKGLEWVGEIRLKSNNYATHYAEPVKGRFTISRDDSKSTVYLQMNSLKTEDTAVYYCTRYYGNYGGYFDVWGAGTLVTVSS

SEQ ID NO: 11463 - protein, 107 aa, synthetic construct; identical to SEQ ID NO: 10923
  REGION 1..107: note = Description of Artificial Sequence: Synthetic polypeptide
  REGION 1..107: note = VL of XENP018544

SEQ ID NO: 11464 - protein, 11 aa, synthetic construct
  REGION 1..11: note = Description of Artificial Sequence: Synthetic peptide
  REGION 1..11: note = XENP018544 vlCDR1
RASQSVSNDVA

SEQ ID NO: 11465 - protein, 7 aa, synthetic construct
  REGION 1..7: note = Description of Artificial Sequence: Synthetic peptide
  REGION 1..7: note = XENP018544 vlCDR2
YASHRYT

SEQ ID NO: 11466 - protein, 9 aa, synthetic construct
  REGION 1..9: note = Description of Artificial Sequence: Synthetic peptide
  REGION 1..9: note = XENP018544 vlCDR3
QQDYSSPRT

SEQ ID NO: 11467 - protein, 249 aa, synthetic construct
  REGION 1..249: note = Description of Artificial Sequence: Synthetic polypeptide
  REGION 1..249: note = XENP018545 1G6_H1.49_L1_scFv(GKPGS)4
EVQLVESGGGLVKPGGSLRLSCAASGFTFSNYWMNWVRQSPGKGLEWVGEIRLKSNNYATHYAEPVKGRFTISRDDSKSTVYLQMNSLKTEDTAVYYCTRYYGNYGGYFDVWGAGTLVTVSSGKPGSGKPGSGKPGSGKPGSSIVMTQSPATLSVSPGERATLSCRASQSVSNDVAWYQQKPGQSPRLLINYASHRYTGVPDRFTGSGYGTEFTLTISSLQSEDFAVYFCQQDYSSPRTFGGGTKVEIK

SEQ ID NO: 11468 - protein, 122 aa, synthetic construct
  REGION 1..122: note = Description of Artificial Sequence: Synthetic polypeptide
  REGION 1..122: note = VH of XENP018545
EVQLVESGGGLVKPGGSLRLSCAASGFTFSNYWMNWVRQSPGKGLEWVGEIRLKSNNYATHYAEPVKGRFTISRDDSKSTVYLQMNSLKTEDTAVYYCTRYYGNYGGYFDVWGAGTLVTVSS

SEQ ID NO: 11469 - protein, 107 aa, synthetic construct; identical to SEQ ID NO: 10923
  REGION 1..107: note = Description of Artificial Sequence: Synthetic polypeptide
  REGION 1..107: note = VL of XENP018545

SEQ ID NO: 11470 - protein, 5 aa, synthetic construct
  REGION 1..5: note = Description of Artificial Sequence: Synthetic peptide
  REGION 1..5: note = XENP018545 vhCDR1
NYWMN

SEQ ID NO: 11471 - protein, 19 aa, synthetic construct
  REGION 1..19: note = Description of Artificial Sequence: Synthetic peptide
  REGION 1..19: note = XENP018545 vhCDR2
EIRLKSNNYATHYAEPVKG

SEQ ID NO: 11472 - protein, 11 aa, synthetic construct
  REGION 1..11: note = Description of Artificial Sequence: Synthetic peptide
  REGION 1..11: note = XENP018545 vhCDR3
YYGNYGGYFDV

SEQ ID NO: 11473 - protein, 11 aa, synthetic construct
  REGION 1..11: note = Description of Artificial Sequence: Synthetic peptide
  REGION 1..11: note = XENP018545 vlCDR1
RASQSVSNDVA

SEQ ID NO: 11474 - protein, 7 aa, synthetic construct
  REGION 1..7: note = Description of Artificial Sequence: Synthetic peptide
  REGION 1..7: note = XENP018545 vlCDR2
YASHRYT

SEQ ID NO: 11475 - protein, 9 aa, synthetic construct
  REGION 1..9: note = Description of Artificial Sequence: Synthetic peptide
  REGION 1..9: note = XENP018545 vlCDR3
QQDYSSPRT

SEQ ID NO: 11476 - protein, 249 aa, synthetic construct
  REGION 1..249: note = Description of Artificial Sequence: Synthetic polypeptide
  REGION 1..249: note = XENP018546 1G6_H1.50_L1_scFv(GKPGS)4
EVQLVESGGGLVKPGGSLRLSCAASGFTFSNYWMNWVRQAPEKGLEWVGEIRLKSNNYATHYAEPVKGRFTISRDDSKSTVYLQMNSLKTEDTAVYYCTRYYGNYGGYFDVWGAGTLVTVSSGKPGSGKPGSGKPGSGKPGSSIVMTQSPATLSVSPGERATLSCRASQSVSNDVAWYQQKPGQSPRLLINYASHRYTGVPDRFTGSGYGTEFTLTISSLQSEDFAVYFCQQDYSSPRTFGGGTKVEIK

SEQ ID NO: 11477 - protein, 122 aa, synthetic construct
  REGION 1..122: note = Description of Artificial Sequence: Synthetic polypeptide
  REGION 1..122: note = VH of XENP018546
EVQLVESGGGLVKPGGSLRLSCAASGFTFSNYWMNWVRQAPEKGLEWVGEIRLKSNNYATHYAEPVKGRFTISRDDSKSTVYLQMNSLKTEDTAVYYCTRYYGNYGGYFDVWGAGTLVTVSS

SEQ ID NO: 11478 - protein, 107 aa, synthetic construct; identical to SEQ ID NO: 10923
  REGION 1..107: note = Description of Artificial Sequence: Synthetic polypeptide
  REGION 1..107: note = VL of XENP018546

SEQ ID NO: 11479 - protein, 5 aa, synthetic construct
  REGION 1..5: note = Description of Artificial Sequence: Synthetic peptide
  REGION 1..5: note = XENP018546 vhCDR1
NYWMN

SEQ ID NO: 11480 - protein, 19 aa, synthetic construct
  REGION 1..19: note = Description of Artificial Sequence: Synthetic peptide
  REGION 1..19: note = XENP018546 vhCDR2
EIRLKSNNYATHYAEPVKG

SEQ ID NO: 11481 - protein, 11 aa, synthetic construct
  REGION 1..11: note = Description of Artificial Sequence: Synthetic peptide
  REGION 1..11: note = XENP018546 vhCDR3
YYGNYGGYFDV

SEQ ID NO: 11482 - protein, 11 aa, synthetic construct
  REGION 1..11: note = Description of Artificial Sequence: Synthetic peptide
  REGION 1..11: note = XENP018546 vlCDR1
RASQSVSNDVA

SEQ ID NO: 11483 - protein, 7 aa, synthetic construct
  REGION 1..7: note = Description of Artificial Sequence: Synthetic peptide
  REGION 1..7: note = XENP018546 vlCDR2
YASHRYT

SEQ ID NO: 11484 - protein, 9 aa, synthetic construct
  REGION 1..9: note = Description of Artificial Sequence: Synthetic peptide
  REGION 1..9: note = XENP018546 vlCDR3
QQDYSSPRT

SEQ ID NO: 11485 - protein, 249 aa, synthetic construct
  REGION 1..249: note = Description of Artificial Sequence: Synthetic polypeptide
  REGION 1..249: note = XENP018547 1G6_H1.51_L1_scFv(GKPGS)4
EVQLVESGGGLVKPGGSLRLSCAASGFTFSNYWMNWVRQAPGKGLEYVGEIRLKSNNYATHYAEPVKGRFTISRDDSKSTVYLQMNSLKTEDTAVYYCTRYYGNYGGYFDVWGAGTLVTVSSGKPGSGKPGSGKPGSGKPGSSIVMTQSPATLSVSPGERATLSCRASQSVSNDVAWYQQKPGQSPRLLINYASHRYTGVPDRFTGSGYGTEFTLTISSLQSEDFAVYFCQQDYSSPRTFGGGTKVEIK

SEQ ID NO: 11486 - protein, 122 aa, synthetic construct
  REGION 1..122: note = Description of Artificial Sequence: Synthetic polypeptide
  REGION 1..122: note = VH of XENP018547
EVQLVESGGGLVKPGGSLRLSCAASGFTFSNYWMNWVRQAPGKGLEYVGEIRLKSNNYATHYAEPVKGRFTISRDDSKSTVYLQMNSLKTEDTAVYYCTRYYGNYGGYFDVWGAGTLVTVSS

SEQ ID NO: 11487 - protein, 107 aa, synthetic construct; identical to SEQ ID NO: 10923
  REGION 1..107: note = Description of Artificial Sequence: Synthetic polypeptide
  REGION 1..107: note = VL of XENP018547

SEQ ID NO: 11488 - protein, 5 aa, synthetic construct
  REGION 1..5: note = Description of Artificial Sequence: Synthetic peptide
  REGION 1..5: note = XENP018547 vhCDR1
NYWMN

SEQ ID NO: 11489 - protein, 19 aa, synthetic construct
  REGION 1..19: note = Description of Artificial Sequence: Synthetic peptide
  REGION 1..19: note = XENP018547 vhCDR2
EIRLKSNNYATHYAEPVKG

SEQ ID NO: 11490 - protein, 11 aa, synthetic construct
  REGION 1..11: note = Description of Artificial Sequence: Synthetic peptide
  REGION 1..11: note = XENP018547 vhCDR3
YYGNYGGYFDV

SEQ ID NO: 11491 - protein, 11 aa, synthetic construct
  REGION 1..11: note = Description of Artificial Sequence: Synthetic peptide
  REGION 1..11: note = XENP018547 vlCDR1
RASQSVSNDVA

SEQ ID NO: 11492 - protein, 7 aa, synthetic construct
  REGION 1..7: note = Description of Artificial Sequence: Synthetic peptide
  REGION 1..7: note = XENP018547 vlCDR2
YASHRYT

SEQ ID NO: 11493 - protein, 9 aa, synthetic construct
  REGION 1..9: note = Description of Artificial Sequence: Synthetic peptide
  REGION 1..9: note = XENP018547 vlCDR3
QQDYSSPRT

SEQ ID NO: 11494 - protein, 249 aa, synthetic construct
  REGION 1..249: note = Description of Artificial Sequence: Synthetic polypeptide
  REGION 1..249: note = XENP018548 1G6_H1.52_L1_scFv(GKPGS)4
EVQLVESGGGLVKPGGSLRLSCAASGFTFSNYWMNWVRQAPGKGLEWVAEIRLKSNNYATHYAEPVKGRFTISRDDSKSTVYLQMNSLKTEDTAVYYCTRYYGNYGGYFDVWGAGTLVTVSSGKPGSGKPGSGKPGSGKPGSSIVMTQSPATLSVSPGERATLSCRASQSVSNDVAWYQQKPGQSPRLLINYASHRYTGVPDRFTGSGYGTEFTLTISSLQSEDFAVYFCQQDYSSPRTFGGGTKVEIK

SEQ ID NO: 11495 - protein, 122 aa, synthetic construct
  REGION 1..122: note = Description of Artificial Sequence: Synthetic polypeptide
  REGION 1..122: note = VH of XENP018548
EVQLVESGGGLVKPGGSLRLSCAASGFTFSNYWMNWVRQAPGKGLEWVAEIRLKSNNYATHYAEPVKGRFTISRDDSKSTVYLQMNSLKTEDTAVYYCTRYYGNYGGYFDVWGAGTLVTVSS

SEQ ID NO: 11496 - protein, 107 aa, synthetic construct; identical to SEQ ID NO: 10923
  REGION 1..107: note = Description of Artificial Sequence: Synthetic polypeptide
  REGION 1..107: note = VL of XENP018548

SEQ ID NO: 11497 - protein, 5 aa, synthetic construct
  REGION 1..5: note = Description of Artificial Sequence: Synthetic peptide
  REGION 1..5: note = XENP018548 vhCDR1
NYWMN

SEQ ID NO: 11498 - protein, 19 aa, synthetic construct
  REGION 1..19: note = Description of Artificial Sequence: Synthetic peptide
  REGION 1..19: note = XENP018548 vhCDR2
EIRLKSNNYATHYAEPVKG

SEQ ID NO: 11499 - protein, 11 aa, synthetic construct
  REGION 1..11: note = Description of Artificial Sequence: Synthetic peptide
  REGION 1..11: note = XENP018548 vhCDR3
YYGNYGGYFDV

SEQ ID NO: 11500 - protein, 11 aa, synthetic construct
  REGION 1..11: note = Description of Artificial Sequence: Synthetic peptide
  REGION 1..11: note = XENP018548 vlCDR1
RASQSVSNDVA

SEQ ID NO: 11501 - protein, 7 aa, synthetic construct
  REGION 1..7: note = Description of Artificial Sequence: Synthetic peptide
  REGION 1..7: note = XENP018548 vlCDR2
YASHRYT

SEQ ID NO: 11502 - protein, 9 aa, synthetic construct
  REGION 1..9: note = Description of Artificial Sequence: Synthetic peptide
  REGION 1..9: note = XENP018548 vlCDR3
QQDYSSPRT

SEQ ID NO: 11503 - protein, 249 aa, synthetic construct
  REGION 1..249: note = Description of Artificial Sequence: Synthetic polypeptide
  REGION 1..249: note = XENP018549 1G6_H1.53_L1_scFv(GKPGS)4
EVQLVESGGGLVKPGGSLRLSCAASGFTFSNYWMNWVRQAPGKGLEWVSEIRLKSNNYATHYAEPVKGRFTISRDDSKSTVYLQMNSLKTEDTAVYYCTRYYGNYGGYFDVWGAGTLVTVSSGKPGSGKPGSGKPGSGKPGSSIVMTQSPATLSVSPGERATLSCRASQSVSNDVAWYQQKPGQSPRLLINYASHRYTGVPDRFTGSGYGTEFTLTISSLQSEDFAVYFCQQDYSSPRTFGGGTKVEIK

SEQ ID NO: 11504 - protein, 122 aa, synthetic construct
  REGION 1..122: note = Description of Artificial Sequence: Synthetic polypeptide
  REGION 1..122: note = VH of XENP018549
EVQLVESGGGLVKPGGSLRLSCAASGFTFSNYWMNWVRQAPGKGLEWVSEIRLKSNNYATHYAEPVKGRFTISRDDSKSTVYLQMNSLKTEDTAVYYCTRYYGNYGGYFDVWGAGTLVTVSS

SEQ ID NO: 11505 - protein, 107 aa, synthetic construct; identical to SEQ ID NO: 10923
  REGION 1..107: note = Description of Artificial Sequence: Synthetic polypeptide
  REGION 1..107: note = VL of XENP018549

SEQ ID NO: 11506 - protein, 5 aa, synthetic construct
  REGION 1..5: note = Description of Artificial Sequence: Synthetic peptide
  REGION 1..5: note = XENP018549 vhCDR1
NYWMN

SEQ ID NO: 11507 - protein, 19 aa, synthetic construct
  REGION 1..19: note = Description of Artificial Sequence: Synthetic peptide
  REGION 1..19: note = XENP018549 vhCDR2
EIRLKSNNYATHYAEPVKG

SEQ ID NO: 11508 - protein, 11 aa, synthetic construct
  REGION 1..11: note = Description of Artificial Sequence: Synthetic peptide
  REGION 1..11: note = XENP018549 vhCDR3
YYGNYGGYFDV

SEQ ID NO: 11509 - protein, 11 aa, synthetic construct
  REGION 1..11: note = Description of Artificial Sequence: Synthetic peptide
  REGION 1..11: note = XENP018549 vlCDR1
RASQSVSNDVA

SEQ ID NO: 11510 - protein, 7 aa, synthetic construct
  REGION 1..7: note = Description of Artificial Sequence: Synthetic peptide
  REGION 1..7: note = XENP018549 vlCDR2
YASHRYT

SEQ ID NO: 11511 - protein, 9 aa, synthetic construct
  REGION 1..9: note = Description of Artificial Sequence: Synthetic peptide
  REGION 1..9: note = XENP018549 vlCDR3
QQDYSSPRT

SEQ ID NO: 11512 - protein, 249 aa, synthetic construct
  REGION 1..249: note = Description of Artificial Sequence: Synthetic polypeptide
  REGION 1..249: note = XENP018550 1G6_H1.54_L1_scFv(GKPGS)4
EVQLVESGGGLVKPGGSLRLSCAASGFTFSNYWMNWVRQAPGKGLEWVGQIRLKSNNYATHYAEPVKGRFTISRDDSKSTVYLQMNSLKTEDTAVYYCTRYYGNYGGYFDVWGAGTLVTVSSGKPGSGKPGSGKPGSGKPGSSIVMTQSPATLSVSPGERATLSCRASQSVSNDVAWYQQKPGQSPRLLINYASHRYTGVPDRFTGSGYGTEFTLTISSLQSEDFAVYFCQQDYSSPRTFGGGTKVEIK

SEQ ID NO: 11513 - protein, 122 aa, synthetic construct
  REGION 1..122: note = Description of Artificial Sequence: Synthetic polypeptide
  REGION 1..122: note = VH of XENP018550
EVQLVESGGGLVKPGGSLRLSCAASGFTFSNYWMNWVRQAPGKGLEWVGQIRLKSNNYATHYAEPVKGRFTISRDDSKSTVYLQMNSLKTEDTAVYYCTRYYGNYGGYFDVWGAGTLVTVSS

SEQ ID NO: 11514 - protein, 107 aa, synthetic construct; identical to SEQ ID NO: 10923
  REGION 1..107: note = Description of Artificial Sequence: Synthetic polypeptide
  REGION 1..107: note = VL of XENP018550

SEQ ID NO: 11515 - protein, 5 aa, synthetic construct
  REGION 1..5: note = Description of Artificial Sequence: Synthetic peptide
  REGION 1..5: note = XENP018550 vhCDR1
NYWMN

SEQ ID NO: 11516 - protein, 19 aa, synthetic construct
  REGION 1..19: note = Description of Artificial Sequence: Synthetic peptide
  REGION 1..19: note = XENP018550 vhCDR2
QIRLKSNNYATHYAEPVKG

SEQ ID NO: 11517 - protein, 11 aa, synthetic construct
  REGION 1..11: note = Description of Artificial Sequence: Synthetic peptide
  REGION 1..11: note = XENP018550 vhCDR3
YYGNYGGYFDV

SEQ ID NO: 11518 - protein, 11 aa, synthetic construct
  REGION 1..11: note = Description of Artificial Sequence: Synthetic peptide
  REGION 1..11: note = XENP018550 vlCDR1
RASQSVSNDVA

SEQ ID NO: 11519 - protein, 7 aa, synthetic construct
  REGION 1..7: note = Description of Artificial Sequence: Synthetic peptide
  REGION 1..7: note = XENP018550 vlCDR2
YASHRYT

SEQ ID NO: 11520 - protein, 9 aa, synthetic construct
  REGION 1..9: note = Description of Artificial Sequence: Synthetic peptide
  REGION 1..9: note = XENP018550 vlCDR3
QQDYSSPRT

SEQ ID NO: 11521 - protein, 249 aa, synthetic construct
  REGION 1..249: note = Description of Artificial Sequence: Synthetic polypeptide
  REGION 1..249: note = XENP018551 1G6_H1.55_L1_scFv(GKPGS)4
EVQLVESGGGLVKPGGSLRLSCAASGFTFSNYWMNWVRQAPGKGLEWVGDIRLKSNNYATHYAEPVKGRFTISRDDSKSTVYLQMNSLKTEDTAVYYCTRYYGNYGGYFDVWGAGTLVTVSSGKPGSGKPGSGKPGSGKPGSSIVMTQSPATLSVSPGERATLSCRASQSVSNDVAWYQQKPGQSPRLLINYASHRYTGVPDRFTGSGYGTEFTLTISSLQSEDFAVYFCQQDYSSPRTFGGGTKVEIK

SEQ ID NO: 11522 - protein, 122 aa, synthetic construct
  REGION 1..122: note = Description of Artificial Sequence: Synthetic polypeptide
  REGION 1..122: note = VH of XENP018551
EVQLVESGGGLVKPGGSLRLSCAASGFTFSNYWMNWVRQAPGKGLEWVGDIRLKSNNYATHYAEPVKGRFTISRDDSKSTVYLQMNSLKTEDTAVYYCTRYYGNYGGYFDVWGAGTLVTVSS

SEQ ID NO: 11523 - protein, 107 aa, synthetic construct; identical to SEQ ID NO: 10923
  REGION 1..107: note = Description of Artificial Sequence: Synthetic polypeptide
  REGION 1..107: note = VL of XENP018551

SEQ ID NO: 11524 - protein, 5 aa, synthetic construct
  REGION 1..5: note = Description of Artificial Sequence: Synthetic peptide
  REGION 1..5: note = XENP018551 vhCDR1
NYWMN

SEQ ID NO: 11525 - protein, 19 aa, synthetic construct
  REGION 1..19: note = Description of Artificial Sequence: Synthetic peptide
  REGION 1..19: note = XENP018551 vhCDR2
DIRLKSNNYATHYAEPVKG

SEQ ID NO: 11526 - protein, 11 aa, synthetic construct
  REGION 1..11: note = Description of Artificial Sequence: Synthetic peptide
  REGION 1..11: note = XENP018551 vhCDR3
YYGNYGGYFDV

SEQ ID NO: 11527 - protein, 11 aa, synthetic construct
  REGION 1..11: note = Description of Artificial Sequence: Synthetic peptide
  REGION 1..11: note = XENP018551 vlCDR1
RASQSVSNDVA

SEQ ID NO: 11528 - protein, 7 aa, synthetic construct
  REGION 1..7: note = Description of Artificial Sequence: Synthetic peptide
  REGION 1..7: note = XENP018551 vlCDR2
YASHRYT

SEQ ID NO: 11529 - protein, 9 aa, synthetic construct
  REGION 1..9: note = Description of Artificial Sequence: Synthetic peptide
  REGION 1..9: note = XENP018551 vlCDR3
QQDYSSPRT

SEQ ID NO: 11530 - protein, 249 aa, synthetic construct
  REGION 1..249: note = Description of Artificial Sequence: Synthetic polypeptide
  REGION 1..249: note = XENP018552 1G6_H1.56_L1_scFv(GKPGS)4
EVQLVESGGGLVKPGGSLRLSCAASGFTFSNYWMNWVRQAPGKGLEWVGKIRLKSNNYATHYAEPVKGRFTISRDDSKSTVYLQMNSLKTEDTAVYYCTRYYGNYGGYFDVWGAGTLVTVSSGKPGSGKPGSGKPGSGKPGSSIVMTQSPATLSVSPGERATLSCRASQSVSNDVAWYQQKPGQSPRLLINYASHRYTGVPDRFTGSGYGTEFTLTISSLQSEDFAVYFCQQDYSSPRTFGGGTKVEIK

SEQ ID NO: 11531 - protein, 122 aa, synthetic construct
  REGION 1..122: note = Description of Artificial Sequence: Synthetic polypeptide
  REGION 1..122: note = VH of XENP018552
EVQLVESGGGLVKPGGSLRLSCAASGFTFSNYWMNWVRQAPGKGLEWVGKIRLKSNNYATHYAEPVKGRFTISRDDSKSTVYLQMNSLKTEDTAVYYCTRYYGNYGGYFDVWGAGTLVTVSS

SEQ ID NO: 11532 - protein, 107 aa, synthetic construct; identical to SEQ ID NO: 10923
  REGION 1..107: note = Description of Artificial Sequence: Synthetic polypeptide
  REGION 1..107: note = VL of XENP018552

SEQ ID NO: 11533 - protein, 5 aa, synthetic construct
  REGION 1..5: note = Description of Artificial Sequence: Synthetic peptide
  REGION 1..5: note = XENP018552 vhCDR1
NYWMN

SEQ ID NO: 11534 - protein, 19 aa, synthetic construct
  REGION 1..19: note = Description of Artificial Sequence: Synthetic peptide
  REGION 1..19: note = XENP018552 vhCDR2
KIRLKSNNYATHYAEPVKG

SEQ ID NO: 11535 - protein, 11 aa, synthetic construct
  REGION 1..11: note = Description of Artificial Sequence: Synthetic peptide
  REGION 1..11: note = XENP018552 vhCDR3
YYGNYGGYFDV

SEQ ID NO: 11536 - protein, 11 aa, synthetic construct
  REGION 1..11: note = Description of Artificial Sequence: Synthetic peptide
  REGION 1..11: note = XENP018552 vlCDR1
RASQSVSNDVA

SEQ ID NO: 11537 - protein, 7 aa, synthetic construct
  REGION 1..7: note = Description of Artificial Sequence: Synthetic peptide
  REGION 1..7: note = XENP018552 vlCDR2
YASHRYT

SEQ ID NO: 11538 - protein, 9 aa, synthetic construct
  REGION 1..9: note = Description of Artificial Sequence: Synthetic peptide
  REGION 1..9: note = XENP018552 vlCDR3
QQDYSSPRT

SEQ ID NO: 11539 - protein, 249 aa, synthetic construct
  REGION 1..249: note = Description of Artificial Sequence: Synthetic polypeptide
  REGION 1..249: note = XENP018553 1G6_H1.57_L1_scFv(GKPGS)4
EVQLVESGGGLVKPGGSLRLSCAASGFTFSNYWMNWVRQAPGKGLEWVGSIRLKSNNYATHYAEPVKGRFTISRDDSKSTVYLQMNSLKTEDTAVYYCTRYYGNYGGYFDVWGAGTLVTVSSGKPGSGKPGSGKPGSGKPGSSIVMTQSPATLSVSPGERATLSCRASQSVSNDVAWYQQKPGQSPRLLINYASHRYTGVPDRFTGSGYGTEFTLTISSLQSEDFAVYFCQQDYSSPRTFGGGTKVEIK

SEQ ID NO: 11540 - protein, 122 aa, synthetic construct
  REGION 1..122: note = Description of Artificial Sequence: Synthetic polypeptide
  REGION 1..122: note = VH of XENP018553
EVQLVESGGGLVKPGGSLRLSCAASGFTFSNYWMNWVRQAPGKGLEWVGSIRLKSNNYATHYAEPVKGRFTISRDDSKSTVYLQMNSLKTEDTAVYYCTRYYGNYGGYFDVWGAGTLVTVSS

SEQ ID NO: 11541 - protein, 107 aa, synthetic construct; identical to SEQ ID NO: 10923
  REGION 1..107: note = Description of Artificial Sequence: Synthetic polypeptide
  REGION 1..107: note = VL of XENP018553

SEQ ID NO: 11542 - protein, 5 aa, synthetic construct
  REGION 1..5: note = Description of Artificial Sequence: Synthetic peptide
  REGION 1..5: note = XENP018553 vhCDR1
NYWMN

SEQ ID NO: 11543 - protein, 19 aa, synthetic construct
  REGION 1..19: note = Description of Artificial Sequence: Synthetic peptide
  REGION 1..19: note = XENP018553 vhCDR2
SIRLKSNNYATHYAEPVKG

SEQ ID NO: 11544 - protein, 11 aa, synthetic construct
  REGION 1..11: note = Description of Artificial Sequence: Synthetic peptide
  REGION 1..11: note = XENP018553 vhCDR3
YYGNYGGYFDV

SEQ ID NO: 11545 - protein, 11 aa, synthetic construct
  REGION 1..11: note = Description of Artificial Sequence: Synthetic peptide
  REGION 1..11: note = XENP018553 vlCDR1
RASQSVSNDVA

SEQ ID NO: 11546 - protein, 7 aa, synthetic construct
  REGION 1..7: note = Description of Artificial Sequence: Synthetic peptide
  REGION 1..7: note = XENP018553 vlCDR2
YASHRYT

SEQ ID NO: 11547 - protein, 9 aa, synthetic construct
  REGION 1..9: note = Description of Artificial Sequence: Synthetic peptide
  REGION 1..9: note = XENP018553 vlCDR3
QQDYSSPRT

SEQ ID NO: 11548 - protein, 249 aa, synthetic construct
  REGION 1..249: note = Description of Artificial Sequence: Synthetic polypeptide
  REGION 1..249: note = XENP018554 1G6_H1.58_L1_scFv(GKPGS)4
EVQLVESGGGLVKPGGSLRLSCAASGFTFSNYWMNWVRQAPGKGLEWVGHIRLKSNNYATHYAEPVKGRFTISRDDSKSTVYLQMNSLKTEDTAVYYCTRYYGNYGGYFDVWGAGTLVTVSSGKPGSGKPGSGKPGSGKPGSSIVMTQSPATLSVSPGERATLSCRASQSVSNDVAWYQQKPGQSPRLLINYASHRYTGVPDRFTGSGYGTEFTLTISSLQSEDFAVYFCQQDYSSPRTFGGGTKVEIK

SEQ ID NO: 11549 - protein, 122 aa, synthetic construct
  REGION 1..122: note = Description of Artificial Sequence: Synthetic polypeptide
  REGION 1..122: note = VH of XENP018554
EVQLVESGGGLVKPGGSLRLSCAASGFTFSNYWMNWVRQAPGKGLEWVGHIRLKSNNYATHYAEPVKGRFTISRDDSKSTVYLQMNSLKTEDTAVYYCTRYYGNYGGYFDVWGAGTLVTVSS

SEQ ID NO: 11550 - protein, 107 aa, synthetic construct; identical to SEQ ID NO: 10923
  REGION 1..107: note = Description of Artificial Sequence: Synthetic polypeptide
  REGION 1..107: note = VL of XENP018554

SEQ ID NO: 11551 - protein, 5 aa, synthetic construct
  REGION 1..5: note = Description of Artificial Sequence: Synthetic peptide
  REGION 1..5: note = XENP018554 vhCDR1
NYWMN

SEQ ID NO: 11552 - protein, 19 aa, synthetic construct
  REGION 1..19: note = Description of Artificial Sequence: Synthetic peptide
  REGION 1..19: note = XENP018554 vhCDR2
HIRLKSNNYATHYAEPVKG

SEQ ID NO: 11553 - protein, 11 aa, synthetic construct
  REGION 1..11: note = Description of Artificial Sequence: Synthetic peptide
  REGION 1..11: note = XENP018554 vhCDR3
YYGNYGGYFDV

SEQ ID NO: 11554 - protein, 11 aa, synthetic construct
  REGION 1..11: note = Description of Artificial Sequence: Synthetic peptide
  REGION 1..11: note = XENP018554 vlCDR1
RASQSVSNDVA

SEQ ID NO: 11555 - protein, 7 aa, synthetic construct
  REGION 1..7: note = Description of Artificial Sequence: Synthetic peptide
  REGION 1..7: note = XENP018554 vlCDR2
YASHRYT

SEQ ID NO: 11556 - protein, 9 aa, synthetic construct
  REGION 1..9: note = Description of Artificial Sequence: Synthetic peptide
  REGION 1..9: note = XENP018554 vlCDR3
QQDYSSPRT

SEQ ID NO: 11557 - protein, 249 aa, synthetic construct
  REGION 1..249: note = Description of Artificial Sequence: Synthetic polypeptide
  REGION 1..249: note = XENP018555 1G6_H1.59_L1_scFv(GKPGS)4
EVQLVESGGGLVKPGGSLRLSCAASGFTFSNYWMNWVRQAPGKGLEWVGAIRLKSNNYATHYAEPVKGRFTISRDDSKSTVYLQMNSLKTEDTAVYYCTRYYGNYGGYFDVWGAGTLVTVSSGKPGSGKPGSGKPGSGKPGSSIVMTQSPATLSVSPGERATLSCRASQSVSNDVAWYQQKPGQSPRLLINYASHRYTGVPDRFTGSGYGTEFTLTISSLQSEDFAVYFCQQDYSSPRTFGGGTKVEIK

SEQ ID NO: 11558 - protein, 122 aa, synthetic construct
  REGION 1..122: note = Description of Artificial Sequence: Synthetic polypeptide
  REGION 1..122: note = VH of XENP018555
EVQLVESGGGLVKPGGSLRLSCAASGFTFSNYWMNWVRQAPGKGLEWVGAIRLKSNNYATHYAEPVKGRFTISRDDSKSTVYLQMNSLKTEDTAVYYCTRYYGNYGGYFDVWGAGTLVTVSS

SEQ ID NO: 11559 - protein, 107 aa, synthetic construct; identical to SEQ ID NO: 10923
  REGION 1..107: note = Description of Artificial Sequence: Synthetic polypeptide
  REGION 1..107: note = VL of XENP018555

SEQ ID NO: 11560 - protein, 5 aa, synthetic construct
  REGION 1..5: note = Description of Artificial Sequence: Synthetic peptide
  REGION 1..5: note = XENP018555 vhCDR1
NYWMN

SEQ ID NO: 11561 - protein, 19 aa, synthetic construct
  REGION 1..19: note = Description of Artificial Sequence: Synthetic peptide
  REGION 1..19: note = XENP018555 vhCDR2
AIRLKSNNYATHYAEPVKG

SEQ ID NO: 11562 - protein, 11 aa, synthetic construct
  REGION 1..11: note = Description of Artificial Sequence: Synthetic peptide
  REGION 1..11: note = XENP018555 vhCDR3
YYGNYGGYFDV

SEQ ID NO: 11563 - protein, 11 aa, synthetic construct
  REGION 1..11: note = Description of Artificial Sequence: Synthetic peptide
  REGION 1..11: note = XENP018555 vlCDR1
RASQSVSNDVA

SEQ ID NO: 11564 - protein, 7 aa, synthetic construct
  REGION 1..7: note = Description of Artificial Sequence: Synthetic peptide
  REGION 1..7: note = XENP018555 vlCDR2
YASHRYT

SEQ ID NO: 11565 - protein, 9 aa, synthetic construct
  REGION 1..9: note = Description of Artificial Sequence: Synthetic peptide
  REGION 1..9: note = XENP018555 vlCDR3
QQDYSSPRT

SEQ ID NO: 11566 - protein, 249 aa, synthetic construct
  REGION 1..249: note = Description of Artificial Sequence: Synthetic polypeptide
  REGION 1..249: note = XENP018556 1G6_H1.60_L1_scFv(GKPGS)4
EVQLVESGGGLVKPGGSLRLSCAASGFTFSNYWMNWVRQAPGKGLEWVGGIRLKSNNYATHYAEPVKGRFTISRDDSKSTVYLQMNSLKTEDTAVYYCTRYYGNYGGYFDVWGAGTLVTVSSGKPGSGKPGSGKPGSGKPGSSIVMTQSPATLSVSPGERATLSCRASQSVSNDVAWYQQKPGQSPRLLINYASHRYTGVPDRFTGSGYGTEFTLTISSLQSEDFAVYFCQQDYSSPRTFGGGTKVEIK

SEQ ID NO: 11567 - protein, 122 aa, synthetic construct
  REGION 1..122: note = Description of Artificial Sequence: Synthetic polypeptide
  REGION 1..122: note = VH of XENP018556
EVQLVESGGGLVKPGGSLRLSCAASGFTFSNYWMNWVRQAPGKGLEWVGGIRLKSNNYATHYAEPVKGRFTISRDDSKSTVYLQMNSLKTEDTAVYYCTRYYGNYGGYFDVWGAGTLVTVSS

SEQ ID NO: 11568 - protein, 107 aa, synthetic construct; identical to SEQ ID NO: 10923
  REGION 1..107: note = Description of Artificial Sequence: Synthetic polypeptide
  REGION 1..107: note = VL of XENP018556

SEQ ID NO: 11569 - protein, 5 aa, synthetic construct
  REGION 1..5: note = Description of Artificial Sequence: Synthetic peptide
  REGION 1..5: note = XENP018556 vhCDR1
NYWMN

SEQ ID NO: 11570 - protein, 19 aa, synthetic construct
  REGION 1..19: note = Description of Artificial Sequence: Synthetic peptide
  REGION 1..19: note = XENP018556 vhCDR2
GIRLKSNNYATHYAEPVKG

SEQ ID NO: 11571 - protein, 11 aa, synthetic construct
  REGION 1..11: note = Description of Artificial Sequence: Synthetic peptide
  REGION 1..11: note = XENP018556 vhCDR3
YYGNYGGYFDV

SEQ ID NO: 11572 - protein, 11 aa, synthetic construct
  REGION 1..11: note = Description of Artificial Sequence: Synthetic peptide
  REGION 1..11: note = XENP018556 vlCDR1
RASQSVSNDVA

SEQ ID NO: 11573 - protein, 7 aa, synthetic construct
  REGION 1..7: note = Description of Artificial Sequence: Synthetic peptide
  REGION 1..7: note = XENP018556 vlCDR2
YASHRYT

SEQ ID NO: 11574 - protein, 9 aa, synthetic construct
  REGION 1..9: note = Description of Artificial Sequence: Synthetic peptide
  REGION 1..9: note = XENP018556 vlCDR3
QQDYSSPRT

SEQ ID NO: 11575 - protein, 249 aa, synthetic construct
  REGION 1..249: note = Description of Artificial Sequence: Synthetic polypeptide
  REGION 1..249: note = XENP018557 1G6_H1.61_L1_scFv(GKPGS)4
EVQLVESGGGLVKPGGSLRLSCAASGFTFSNYWMNWVRQAPGKGLEWVGYIRLKSNNYATHYAEPVKGRFTISRDDSKSTVYLQMNSLKTEDTAVYYCTRYYGNYGGYFDVWGAGTLVTVSSGKPGSGKPGSGKPGSGKPGSSIVMTQSPATLSVSPGERATLSCRASQSVSNDVAWYQQKPGQSPRLLINYASHRYTGVPDRFTGSGYGTEFTLTISSLQSEDFAVYFCQQDYSSPRTFGGGTKVEIK

SEQ ID NO: 11576 - protein, 122 aa, synthetic construct
  REGION 1..122: note = Description of Artificial Sequence: Synthetic polypeptide
  REGION 1..122: note = VH of XENP018557
EVQLVESGGGLVKPGGSLRLSCAASGFTFSNYWMNWVRQAPGKGLEWVGYIRLKSNNYATHYAEPVKGRFTISRDDSKSTVYLQMNSLKTEDTAVYYCTRYYGNYGGYFDVWGAGTLVTVSS

SEQ ID NO: 11577 - protein, 107 aa, synthetic construct; identical to SEQ ID NO: 10923
  REGION 1..107: note = Description of Artificial Sequence: Synthetic polypeptide
  REGION 1..107: note = VL of XENP018557

SEQ ID NO: 11578 - protein, 5 aa, synthetic construct
  REGION 1..5: note = Description of Artificial Sequence: Synthetic peptide
  REGION 1..5: note = XENP018557 vhCDR1
NYWMN

SEQ ID NO: 11579 - protein, 19 aa, synthetic construct
  REGION 1..19: note = Description of Artificial Sequence: Synthetic peptide
  REGION 1..19: note = XENP018557 vhCDR2
YIRLKSNNYATHYAEPVKG

SEQ ID NO: 11580 - protein, 11 aa, synthetic construct
  REGION 1..11: note = Description of Artificial Sequence: Synthetic peptide
  REGION 1..11: note = XENP018557 vhCDR3
YYGNYGGYFDV

SEQ ID NO: 11581 - protein, 11 aa, synthetic construct
  REGION 1..11: note = Description of Artificial Sequence: Synthetic peptide
  REGION 1..11: note = XENP018557 vlCDR1
RASQSVSNDVA

SEQ ID NO: 11582 - protein, 7 aa, synthetic construct
  REGION 1..7: note = Description of Artificial Sequence: Synthetic peptide
  REGION 1..7: note = XENP018557 vlCDR2
YASHRYT

SEQ ID NO: 11583 - protein, 9 aa, synthetic construct
  REGION 1..9: note = Description of Artificial Sequence: Synthetic peptide
  REGION 1..9: note = XENP018557 vlCDR3
QQDYSSPRT

SEQ ID NO: 11584 - protein, 249 aa, synthetic construct
  REGION 1..249: note = Description of Artificial Sequence: Synthetic polypeptide
  REGION 1..249: note = XENP018558 1G6_H1.62_L1_scFv(GKPGS)4
EVQLVESGGGLVKPGGSLRLSCAASGFTFSNYWMNWVRQAPGKGLEWVGIIRLKSNNYATHYAEPVKGRFTISRDDSKSTVYLQMNSLKTEDTAVYYCTRYYGNYGGYFDVWGAGTLVTVSSGKPGSGKPGSGKPGSGKPGSSIVMTQSPATLSVSPGERATLSCRASQSVSNDVAWYQQKPGQSPRLLINYASHRYTGVPDRFTGSGYGTEFTLTISSLQSEDFAVYFCQQDYSSPRTFGGGTKVEIK

SEQ ID NO: 11585 - protein, 122 aa, synthetic construct
  REGION 1..122: note = Description of Artificial Sequence: Synthetic polypeptide
  REGION 1..122: note = VH of XENP018558
EVQLVESGGGLVKPGGSLRLSCAASGFTFSNYWMNWVRQAPGKGLEWVGIIRLKSNNYATHYAEPVKGRFTISRDDSKSTVYLQMNSLKTEDTAVYYCTRYYGNYGGYFDVWGAGTLVTVSS

SEQ ID NO: 11586 - protein, 107 aa, synthetic construct; identical to SEQ ID NO: 10923
  REGION 1..107: note = Description of Artificial Sequence: Synthetic polypeptide
  REGION 1..107: note = VL of XENP018558

SEQ ID NO: 11587 - protein, 5 aa, synthetic construct
  REGION 1..5: note = Description of Artificial Sequence: Synthetic peptide
  REGION 1..5: note = XENP018558 vhCDR1
NYWMN

SEQ ID NO: 11588 - protein, 19 aa, synthetic construct
  REGION 1..19: note = Description of Artificial Sequence: Synthetic peptide
  REGION 1..19: note = XENP018558 vhCDR2
IIRLKSNNYATHYAEPVKG

SEQ ID NO: 11589 - protein, 11 aa, synthetic construct
  REGION 1..11: note = Description of Artificial Sequence: Synthetic peptide
  REGION 1..11: note = XENP018558 vhCDR3
YYGNYGGYFDV

SEQ ID NO: 11590 - protein, 11 aa, synthetic construct
  REGION 1..11: note = Description of Artificial Sequence: Synthetic peptide
  REGION 1..11: note = XENP018558 vlCDR1
RASQSVSNDVA

SEQ ID NO: 11591 - protein, 7 aa, synthetic construct
  REGION 1..7: note = Description of Artificial Sequence: Synthetic peptide
  REGION 1..7: note = XENP018558 vlCDR2
YASHRYT

SEQ ID NO: 11592 - protein, 9 aa, synthetic construct
  REGION 1..9: note = Description of Artificial Sequence: Synthetic peptide
  REGION 1..9: note = XENP018558 vlCDR3
QQDYSSPRT

SEQ ID NO: 11593 - protein, 249 aa, synthetic construct
  REGION 1..249: note = Description of Artificial Sequence: Synthetic polypeptide
  REGION 1..249: note = XENP018559 1G6_H1.63_L1_scFv(GKPGS)4
EVQLVESGGGLVKPGGSLRLSCAASGFTFSNYWMNWVRQAPGKGLEWVGEVRLKSNNYATHYAEPVKGRFTISRDDSKSTVYLQMNSLKTEDTAVYYCTRYYGNYGGYFDVWGAGTLVTVSSGKPGSGKPGSGKPGSGKPGSSIVMTQSPATLSVSPGERATLSCRASQSVSNDVAWYQQKPGQSPRLLINYASHRYTGVPDRFTGSGYGTEFTLTISSLQSEDFAVYFCQQDYSSPRTFGGGTKVEIK

SEQ ID NO: 11594 - protein, 122 aa, synthetic construct
  REGION 1..122: note = Description of Artificial Sequence: Synthetic polypeptide
  REGION 1..122: note = VH of XENP018559
EVQLVESGGGLVKPGGSLRLSCAASGFTFSNYWMNWVRQAPGKGLEWVGEVRLKSNNYATHYAEPVKGRFTISRDDSKSTVYLQMNSLKTEDTAVYYCTRYYGNYGGYFDVWGAGTLVTVSS

SEQ ID NO: 11595 - protein, 107 aa, synthetic construct; identical to SEQ ID NO: 10923
  REGION 1..107: note = Description of Artificial Sequence: Synthetic polypeptide
  REGION 1..107: note = VL of XENP018559

SEQ ID NO: 11596 - protein, 5 aa, synthetic construct
  REGION 1..5: note = Description of Artificial Sequence: Synthetic peptide
  REGION 1..5: note = XENP018559 vhCDR1
NYWMN

SEQ ID NO: 11597 - protein, 19 aa, synthetic construct
  REGION 1..19: note = Description of Artificial Sequence: Synthetic peptide
  REGION 1..19: note = XENP018559 vhCDR2
EVRLKSNNYATHYAEPVKG

SEQ ID NO: 11598 - protein, 11 aa, synthetic construct
  REGION 1..11: note = Description of Artificial Sequence: Synthetic peptide
  REGION 1..11: note = XENP018559 vhCDR3
YYGNYGGYFDV

SEQ ID NO: 11599 - protein, 11 aa, synthetic construct
  REGION 1..11: note = Description of Artificial Sequence: Synthetic peptide
  REGION 1..11: note = XENP018559 vlCDR1
RASQSVSNDVA

SEQ ID NO: 11600 - protein, 7 aa, synthetic construct
  REGION 1..7: note = Description of Artificial Sequence: Synthetic peptide
  REGION 1..7: note = XENP018559 vlCDR2
YASHRYT

SEQ ID NO: 11601 - protein, 9 aa, synthetic construct
  REGION 1..9: note = Description of Artificial Sequence: Synthetic peptide
  REGION 1..9: note = XENP018559 vlCDR3
QQDYSSPRT

SEQ ID NO: 11602 - protein, 249 aa, synthetic construct
  REGION 1..249: note = Description of Artificial Sequence: Synthetic polypeptide
  REGION 1..249: note = XENP018560 1G6_H1.64_L1_scFv(GKPGS)4
EVQLVESGGGLVKPGGSLRLSCAASGFTFSNYWMNWVRQAPGKGLEWVGEITLKSNNYATHYAEPVKGRFTISRDDSKSTVYLQMNSLKTEDTAVYYCTRYYGNYGGYFDVWGAGTLVTVSSGKPGSGKPGSGKPGSGKPGSSIVMTQSPATLSVSPGERATLSCRASQSVSNDVAWYQQKPGQSPRLLINYASHRYTGVPDRFTGSGYGTEFTLTISSLQSEDFAVYFCQQDYSSPRTFGGGTKVEIK

SEQ ID NO: 11603 - protein, 122 aa, synthetic construct
  REGION 1..122: note = Description of Artificial Sequence: Synthetic polypeptide
  REGION 1..122: note = VH of XENP018560
EVQLVESGGGLVKPGGSLRLSCAASGFTFSNYWMNWVRQAPGKGLEWVGEITLKSNNYATHYAEPVKGRFTISRDDSKSTVYLQMNSLKTEDTAVYYCTRYYGNYGGYFDVWGAGTLVTVSS

SEQ ID NO: 11604 - protein, 107 aa, synthetic construct; identical to SEQ ID NO: 10923
  REGION 1..107: note = Description of Artificial Sequence: Synthetic polypeptide
  REGION 1..107: note = VL of XENP018560

SEQ ID NO: 11605 - protein, 5 aa, synthetic construct
  REGION 1..5: note = Description of Artificial Sequence: Synthetic peptide
  REGION 1..5: note = XENP018560 vhCDR1
NYWMN

SEQ ID NO: 11606 - protein, 19 aa, synthetic construct
  REGION 1..19: note = Description of Artificial Sequence: Synthetic peptide
  REGION 1..19: note = XENP018560 vhCDR2
EITLKSNNYATHYAEPVKG

SEQ ID NO: 11607 - protein, 11 aa, synthetic construct
  REGION 1..11: note = Description of Artificial Sequence: Synthetic peptide
  REGION 1..11: note = XENP018560 vhCDR3
YYGNYGGYFDV

SEQ ID NO: 11608 - protein, 11 aa, synthetic construct
  REGION 1..11: note = Description of Artificial Sequence: Synthetic peptide
  REGION 1..11: note = XENP018560 vlCDR1
RASQSVSNDVA

SEQ ID NO: 11609 - protein, 7 aa, synthetic construct
  REGION 1..7: note = Description of Artificial Sequence: Synthetic peptide
  REGION 1..7: note = XENP018560 vlCDR2
YASHRYT

SEQ ID NO: 11610 - protein, 9 aa, synthetic construct
  REGION 1..9: note = Description of Artificial Sequence: Synthetic peptide
  REGION 1..9: note = XENP018560 vlCDR3
QQDYSSPRT

SEQ ID NO: 11611 - protein, 249 aa, synthetic construct
  REGION 1..249: note = Description of Artificial Sequence: Synthetic polypeptide
  REGION 1..249: note = XENP018561 1G6_H1.65_L1_scFv(GKPGS)4
EVQLVESGGGLVKPGGSLRLSCAASGFTFSNYWMNWVRQAPGKGLEWVGEIKLKSNNYATHYAEPVKGRFTISRDDSKSTVYLQMNSLKTEDTAVYYCTRYYGNYGGYFDVWGAGTLVTVSSGKPGSGKPGSGKPGSGKPGSSIVMTQSPATLSVSPGERATLSCRASQSVSNDVAWYQQKPGQSPRLLINYASHRYTGVPDRFTGSGYGTEFTLTISSLQSEDFAVYFCQQDYSSPRTFGGGTKVEIK

SEQ ID NO: 11612 - protein, 122 aa, synthetic construct
  REGION 1..122: note = Description of Artificial Sequence: Synthetic polypeptide
  REGION 1..122: note = VH of XENP018561
EVQLVESGGGLVKPGGSLRLSCAASGFTFSNYWMNWVRQAPGKGLEWVGEIKLKSNNYATHYAEPVKGRFTISRDDSKSTVYLQMNSLKTEDTAVYYCTRYYGNYGGYFDVWGAGTLVTVSS

SEQ ID NO: 11613 - protein, 107 aa, synthetic construct; identical to SEQ ID NO: 10923
  REGION 1..107: note = Description of Artificial Sequence: Synthetic polypeptide
  REGION 1..107: note = VL of XENP018561

SEQ ID NO: 11614 - protein, 5 aa, synthetic construct
  REGION 1..5: note = Description of Artificial Sequence: Synthetic peptide
  REGION 1..5: note = XENP018561 vhCDR1
NYWMN

SEQ ID NO: 11615 - protein, 19 aa, synthetic construct
  REGION 1..19: note = Description of Artificial Sequence: Synthetic peptide
  REGION 1..19: note = XENP018561 vhCDR2
EIKLKSNNYATHYAEPVKG

SEQ ID NO: 11616 - protein, 11 aa, synthetic construct
  REGION 1..11: note = Description of Artificial Sequence: Synthetic peptide
  REGION 1..11: note = XENP018561 vhCDR3
YYGNYGGYFDV

SEQ ID NO: 11617 - protein, 11 aa, synthetic construct
  REGION 1..11: note = Description of Artificial Sequence: Synthetic peptide
  REGION 1..11: note = XENP018561 vlCDR1
RASQSVSNDVA

SEQ ID NO: 11618 - protein, 7 aa, synthetic construct
  REGION 1..7: note = Description of Artificial Sequence: Synthetic peptide
  REGION 1..7: note = XENP018561 vlCDR2
YASHRYT

SEQ ID NO: 11619 - protein, 9 aa, synthetic construct
  REGION 1..9: note = Description of Artificial Sequence: Synthetic peptide
  REGION 1..9: note = XENP018561 vlCDR3
QQDYSSPRT

SEQ ID NO: 11620 - protein, 249 aa, synthetic construct
  REGION 1..249: note = Description of Artificial Sequence: Synthetic polypeptide
  REGION 1..249: note = XENP018562 1G6_H1.66_L1_scFv(GKPGS)4
EVQLVESGGGLVKPGGSLRLSCAASGFTFSNYWMNWVRQAPGKGLEWVGEIELKSNNYATHYAEPVKGRFTISRDDSKSTVYLQMNSLKTEDTAVYYCTRYYGNYGGYFDVWGAGTLVTVSSGKPGSGKPGSGKPGSGKPGSSIVMTQSPATLSVSPGERATLSCRASQSVSNDVAWYQQKPGQSPRLLINYASHRYTGVPDRFTGSGYGTEFTLTISSLQSEDFAVYFCQQDYSSPRTFGGGTKVEIK

SEQ ID NO: 11621 - protein, 122 aa, synthetic construct
  REGION 1..122: note = Description of Artificial Sequence: Synthetic polypeptide
  REGION 1..122: note = VH of XENP018562
EVQLVESGGGLVKPGGSLRLSCAASGFTFSNYWMNWVRQAPGKGLEWVGEIELKSNNYATHYAEPVKGRFTISRDDSKSTVYLQMNSLKTEDTAVYYCTRYYGNYGGYFDVWGAGTLVTVSS

SEQ ID NO: 11622 - protein, 107 aa, synthetic construct; identical to SEQ ID NO: 10923
  REGION 1..107: note = Description of Artificial Sequence: Synthetic polypeptide
  REGION 1..107: note = VL of XENP018562

SEQ ID NO: 11623 - protein, 5 aa, synthetic construct
  REGION 1..5: note = Description of Artificial Sequence: Synthetic peptide
  REGION 1..5: note = XENP018562 vhCDR1
NYWMN

SEQ ID NO: 11624 - protein, 19 aa, synthetic construct
  REGION 1..19: note = Description of Artificial Sequence: Synthetic peptide
  REGION 1..19: note = XENP018562 vhCDR2
EIELKSNNYATHYAEPVKG

SEQ ID NO: 11625 - protein, 11 aa, synthetic construct
  REGION 1..11: note = Description of Artificial Sequence: Synthetic peptide
  REGION 1..11: note = XENP018562 vhCDR3
YYGNYGGYFDV

SEQ ID NO: 11626 - protein, 11 aa, synthetic construct
  REGION 1..11: note = Description of Artificial Sequence: Synthetic peptide
  REGION 1..11: note = XENP018562 vlCDR1
RASQSVSNDVA

SEQ ID NO: 11627 - protein, 7 aa, synthetic construct
  REGION 1..7: note = Description of Artificial Sequence: Synthetic peptide
  REGION 1..7: note = XENP018562 vlCDR2
YASHRYT

SEQ ID NO: 11628 - protein, 9 aa, synthetic construct
  REGION 1..9: note = Description of Artificial Sequence: Synthetic peptide
  REGION 1..9: note = XENP018562 vlCDR3
QQDYSSPRT

SEQ ID NO: 11629 - protein, 249 aa, synthetic construct
  REGION 1..249: note = Description of Artificial Sequence: Synthetic polypeptide
  REGION 1..249: note = XENP018563 1G6_H1.67_L1_scFv(GKPGS)4
EVQLVESGGGLVKPGGSLRLSCAASGFTFSNYWMNWVRQAPGKGLEWVGEIDLKSNNYATHYAEPVKGRFTISRDDSKSTVYLQMNSLKTEDTAVYYCTRYYGNYGGYFDVWGAGTLVTVSSGKPGSGKPGSGKPGSGKPGSSIVMTQSPATLSVSPGERATLSCRASQSVSNDVAWYQQKPGQSPRLLINYASHRYTGVPDRFTGSGYGTEFTLTISSLQSEDFAVYFCQQDYSSPRTFGGGTKVEIK

SEQ ID NO: 11630 - protein, 122 aa, synthetic construct
  REGION 1..122: note = Description of Artificial Sequence: Synthetic polypeptide
  REGION 1..122: note = VH of XENP018563
EVQLVESGGGLVKPGGSLRLSCAASGFTFSNYWMNWVRQAPGKGLEWVGEIDLKSNNYATHYAEPVKGRFTISRDDSKSTVYLQMNSLKTEDTAVYYCTRYYGNYGGYFDVWGAGTLVTVSS

SEQ ID NO: 11631 - protein, 107 aa, synthetic construct; identical to SEQ ID NO: 10923
  REGION 1..107: note = Description of Artificial Sequence: Synthetic polypeptide
  REGION 1..107: note = VL of XENP018563

SEQ ID NO: 11632 - protein, 5 aa, synthetic construct
  REGION 1..5: note = Description of Artificial Sequence: Synthetic peptide
  REGION 1..5: note = XENP018563 vhCDR1
NYWMN

SEQ ID NO: 11633 - protein, 19 aa, synthetic construct
  REGION 1..19: note = Description of Artificial Sequence: Synthetic peptide
  REGION 1..19: note = XENP018563 vhCDR2
EIDLKSNNYATHYAEPVKG

SEQ ID NO: 11634 - protein, 11 aa, synthetic construct
  REGION 1..11: note = Description of Artificial Sequence: Synthetic peptide
  REGION 1..11: note = XENP018563 vhCDR3
YYGNYGGYFDV

SEQ ID NO: 11635 - protein, 11 aa, synthetic construct
  REGION 1..11: note = Description of Artificial Sequence: Synthetic peptide
  REGION 1..11: note = XENP018563 vlCDR1
RASQSVSNDVA

SEQ ID NO: 11636 - protein, 7 aa, synthetic construct
  REGION 1..7: note = Description of Artificial Sequence: Synthetic peptide
  REGION 1..7: note = XENP018563 vlCDR2
YASHRYT

SEQ ID NO: 11637 - protein, 9 aa, synthetic construct
  REGION 1..9: note = Description of Artificial Sequence: Synthetic peptide
  REGION 1..9: note = XENP018563 vlCDR3
QQDYSSPRT

SEQ ID NO: 11638 - protein, 249 aa, synthetic construct
  REGION 1..249: note = Description of Artificial Sequence: Synthetic polypeptide
  REGION 1..249: note = XENP018564 1G6_H1.68_L1_scFv(GKPGS)4
EVQLVESGGGLVKPGGSLRLSCAASGFTFSNYWMNWVRQAPGKGLEWVGEIHLKSNNYATHYAEPVKGRFTISRDDSKSTVYLQMNSLKTEDTAVYYCTRYYGNYGGYFDVWGAGTLVTVSSGKPGSGKPGSGKPGSGKPGSSIVMTQSPATLSVSPGERATLSCRASQSVSNDVAWYQQKPGQSPRLLINYASHRYTGVPDRFTGSGYGTEFTLTISSLQSEDFAVYFCQQDYSSPRTFGGGTKVEIK

SEQ ID NO: 11639 - protein, 122 aa, synthetic construct
  REGION 1..122: note = Description of Artificial Sequence: Synthetic polypeptide
  REGION 1..122: note = VH of XENP018564
EVQLVESGGGLVKPGGSLRLSCAASGFTFSNYWMNWVRQAPGKGLEWVGEIHLKSNNYATHYAEPVKGRFTISRDDSKSTVYLQMNSLKTEDTAVYYCTRYYGNYGGYFDVWGAGTLVTVSS

SEQ ID NO: 11640 - protein, 107 aa, synthetic construct; identical to SEQ ID NO: 10923
  REGION 1..107: note = Description of Artificial Sequence: Synthetic polypeptide
  REGION 1..107: note = VL of XENP018564

SEQ ID NO: 11641 - protein, 5 aa, synthetic construct
  REGION 1..5: note = Description of Artificial Sequence: Synthetic peptide
  REGION 1..5: note = XENP018564 vhCDR1
NYWMN

SEQ ID NO: 11642 - protein, 19 aa, synthetic construct
  REGION 1..19: note = Description of Artificial Sequence: Synthetic peptide
  REGION 1..19: note = XENP018564 vhCDR2
EIHLKSNNYATHYAEPVKG

SEQ ID NO: 11643 - protein, 11 aa, synthetic construct
  REGION 1..11: note = Description of Artificial Sequence: Synthetic peptide
  REGION 1..11: note = XENP018564 vhCDR3
YYGNYGGYFDV

SEQ ID NO: 11644 - protein, 11 aa, synthetic construct
  REGION 1..11: note = Description of Artificial Sequence: Synthetic peptide
  REGION 1..11: note = XENP018564 vlCDR1
RASQSVSNDVA

SEQ ID NO: 11645 - protein, 7 aa, synthetic construct
  REGION 1..7: note = Description of Artificial Sequence: Synthetic peptide
  REGION 1..7: note = XENP018564 vlCDR2
YASHRYT

SEQ ID NO: 11646 - protein, 9 aa, synthetic construct
  REGION 1..9: note = Description of Artificial Sequence: Synthetic peptide
  REGION 1..9: note = XENP018564 vlCDR3
QQDYSSPRT

SEQ ID NO: 11647 - protein, 249 aa, synthetic construct
  REGION 1..249: note = Description of Artificial Sequence: Synthetic polypeptide
  REGION 1..249: note = XENP018565 1G6_H1.69_L1_scFv(GKPGS)4
EVQLVESGGGLVKPGGSLRLSCAASGFTFSNYWMNWVRQAPGKGLEWVGEISLKSNNYATHYAEPVKGRFTISRDDSKSTVYLQMNSLKTEDTAVYYCTRYYGNYGGYFDVWGAGTLVTVSSGKPGSGKPGSGKPGSGKPGSSIVMTQSPATLSVSPGERATLSCRASQSVSNDVAWYQQKPGQSPRLLINYASHRYTGVPDRFTGSGYGTEFTLTISSLQSEDFAVYFCQQDYSSPRTFGGGTKVEIK

SEQ ID NO: 11648 - protein, 122 aa, synthetic construct
  REGION 1..122: note = Description of Artificial Sequence: Synthetic polypeptide
  REGION 1..122: note = VH of XENP018565
EVQLVESGGGLVKPGGSLRLSCAASGFTFSNYWMNWVRQAPGKGLEWVGEISLKSNNYATHYAEPVKGRFTISRDDSKSTVYLQMNSLKTEDTAVYYCTRYYGNYGGYFDVWGAGTLVTVSS

SEQ ID NO: 11649 - protein, 107 aa, synthetic construct; identical to SEQ ID NO: 10923
  REGION 1..107: note = Description of Artificial Sequence: Synthetic polypeptide
  REGION 1..107: note = VL of XENP018565

SEQ ID NO: 11650 - protein, 5 aa, synthetic construct
  REGION 1..5: note = Description of Artificial Sequence: Synthetic peptide
  REGION 1..5: note = XENP018565 vhCDR1
NYWMN

SEQ ID NO: 11651 - protein, 19 aa, synthetic construct
  REGION 1..19: note = Description of Artificial Sequence: Synthetic peptide
  REGION 1..19: note = XENP018565 vhCDR2
EISLKSNNYATHYAEPVKG

SEQ ID NO: 11652 - protein, 11 aa, synthetic construct
  REGION 1..11: note = Description of Artificial Sequence: Synthetic peptide
  REGION 1..11: note = XENP018565 vhCDR3
YYGNYGGYFDV

SEQ ID NO: 11653 - protein, 11 aa, synthetic construct
  REGION 1..11: note = Description of Artificial Sequence: Synthetic peptide
  REGION 1..11: note = XENP018565 vlCDR1
RASQSVSNDVA

SEQ ID NO: 11654 - protein, 7 aa, synthetic construct
  REGION 1..7: note = Description of Artificial Sequence: Synthetic peptide
  REGION 1..7: note = XENP018565 vlCDR2
YASHRYT

SEQ ID NO: 11655 - protein, 9 aa, synthetic construct
  REGION 1..9: note = Description of Artificial Sequence: Synthetic peptide
  REGION 1..9: note = XENP018565 vlCDR3
QQDYSSPRT

SEQ ID NO: 11656 - protein, 249 aa, synthetic construct
  REGION 1..249: note = Description of Artificial Sequence: Synthetic polypeptide
  REGION 1..249: note = XENP018566 1G6_H1.70_L1_scFv(GKPGS)4
EVQLVESGGGLVKPGGSLRLSCAASGFTFSNYWMNWVRQAPGKGLEWVGEIGLKSNNYATHYAEPVKGRFTISRDDSKSTVYLQMNSLKTEDTAVYYCTRYYGNYGGYFDVWGAGTLVTVSSGKPGSGKPGSGKPGSGKPGSSIVMTQSPATLSVSPGERATLSCRASQSVSNDVAWYQQKPGQSPRLLINYASHRYTGVPDRFTGSGYGTEFTLTISSLQSEDFAVYFCQQDYSSPRTFGGGTKVEIK

SEQ ID NO: 11657 - protein, 122 aa, synthetic construct
  REGION 1..122: note = Description of Artificial Sequence: Synthetic polypeptide
  REGION 1..122: note = VH of XENP018566
EVQLVESGGGLVKPGGSLRLSCAASGFTFSNYWMNWVRQAPGKGLEWVGEIGLKSNNYATHYAEPVKGRFTISRDDSKSTVYLQMNSLKTEDTAVYYCTRYYGNYGGYFDVWGAGTLVTVSS

SEQ ID NO: 11658 - protein, 107 aa, synthetic construct; identical to SEQ ID NO: 10923
  REGION 1..107: note = Description of Artificial Sequence: Synthetic polypeptide
  REGION 1..107: note = VL of XENP018566

SEQ ID NO: 11659 - protein, 5 aa, synthetic construct
  REGION 1..5: note = Description of Artificial Sequence: Synthetic peptide
  REGION 1..5: note = XENP018566 vhCDR1
NYWMN

SEQ ID NO: 11660 - protein, 19 aa, synthetic construct
  REGION 1..19: note = Description of Artificial Sequence: Synthetic peptide
  REGION 1..19: note = XENP018566 vhCDR2
EIGLKSNNYATHYAEPVKG

SEQ ID NO: 11661 - protein, 11 aa, synthetic construct
  REGION 1..11: note = Description of Artificial Sequence: Synthetic peptide
  REGION 1..11: note = XENP018566 vhCDR3
YYGNYGGYFDV

SEQ ID NO: 11662 - protein, 11 aa, synthetic construct
  REGION 1..11: note = Description of Artificial Sequence: Synthetic peptide
  REGION 1..11: note = XENP018566 vlCDR1
RASQSVSNDVA

SEQ ID NO: 11663 - protein, 7 aa, synthetic construct
  REGION 1..7: note = Description of Artificial Sequence: Synthetic peptide
  REGION 1..7: note = XENP018566 vlCDR2
YASHRYT

SEQ ID NO: 11664 - protein, 9 aa, synthetic construct
  REGION 1..9: note = Description of Artificial Sequence: Synthetic peptide
  REGION 1..9: note = XENP018566 vlCDR3
QQDYSSPRT

SEQ ID NO: 11665 - protein, 249 aa, synthetic construct
  REGION 1..249: note = Description of Artificial Sequence: Synthetic polypeptide
  REGION 1..249: note = XENP018567 1G6_H1.71_L1_scFv(GKPGS)4
EVQLVESGGGLVKPGGSLRLSCAASGFTFSNYWMNWVRQAPGKGLEWVGEIYLKSNNYATHYAEPVKGRFTISRDDSKSTVYLQMNSLKTEDTAVYYCTRYYGNYGGYFDVWGAGTLVTVSSGKPGSGKPGSGKPGSGKPGSSIVMTQSPATLSVSPGERATLSCRASQSVSNDVAWYQQKPGQSPRLLINYASHRYTGVPDRFTGSGYGTEFTLTISSLQSEDFAVYFCQQDYSSPRTFGGGTKVEIK

SEQ ID NO: 11666 - protein, 122 aa, synthetic construct
  REGION 1..122: note = Description of Artificial Sequence: Synthetic polypeptide
  REGION 1..122: note = VH of XENP018567
EVQLVESGGGLVKPGGSLRLSCAASGFTFSNYWMNWVRQAPGKGLEWVGEIYLKSNNYATHYAEPVKGRFTISRDDSKSTVYLQMNSLKTEDTAVYYCTRYYGNYGGYFDVWGAGTLVTVSS

SEQ ID NO: 11667 - protein, 107 aa, synthetic construct; identical to SEQ ID NO: 10923
  REGION 1..107: note = Description of Artificial Sequence: Synthetic polypeptide
  REGION 1..107: note = VL of XENP018567

SEQ ID NO: 11668 - protein, 5 aa, synthetic construct
  REGION 1..5: note = Description of Artificial Sequence: Synthetic peptide
  REGION 1..5: note = XENP018567 vhCDR1
NYWMN

SEQ ID NO: 11669 - protein, 19 aa, synthetic construct
  REGION 1..19: note = Description of Artificial Sequence: Synthetic peptide
  REGION 1..19: note = XENP018567 vhCDR2
EIYLKSNNYATHYAEPVKG

SEQ ID NO: 11670 - protein, 11 aa, synthetic construct
  REGION 1..11: note = Description of Artificial Sequence: Synthetic peptide
  REGION 1..11: note = XENP018567 vhCDR3
YYGNYGGYFDV

SEQ ID NO: 11671 - protein, 11 aa, synthetic construct
  REGION 1..11: note = Description of Artificial Sequence: Synthetic peptide
  REGION 1..11: note = XENP018567 vlCDR1
RASQSVSNDVA

SEQ ID NO: 11672 - protein, 7 aa, synthetic construct
  REGION 1..7: note = Description of Artificial Sequence: Synthetic peptide
  REGION 1..7: note = XENP018567 vlCDR2
YASHRYT

SEQ ID NO: 11673 - protein, 9 aa, synthetic construct
  REGION 1..9: note = Description of Artificial Sequence: Synthetic peptide
  REGION 1..9: note = XENP018567 vlCDR3
QQDYSSPRT

SEQ ID NO: 11674 - protein, 249 aa, synthetic construct
  REGION 1..249: note = Description of Artificial Sequence: Synthetic polypeptide
  REGION 1..249: note = XENP018568 1G6_H1.72_L1_scFv(GKPGS)4
EVQLVESGGGLVKPGGSLRLSCAASGFTFSNYWMNWVRQAPGKGLEWVGEIILKSNNYATHYAEPVKGRFTISRDDSKSTVYLQMNSLKTEDTAVYYCTRYYGNYGGYFDVWGAGTLVTVSSGKPGSGKPGSGKPGSGKPGSSIVMTQSPATLSVSPGERATLSCRASQSVSNDVAWYQQKPGQSPRLLINYASHRYTGVPDRFTGSGYGTEFTLTISSLQSEDFAVYFCQQDYSSPRTFGGGTKVEIK

SEQ ID NO: 11675 - protein, 122 aa, synthetic construct
  REGION 1..122: note = Description of Artificial Sequence: Synthetic polypeptide
  REGION 1..122: note = VH of XENP018568
EVQLVESGGGLVKPGGSLRLSCAASGFTFSNYWMNWVRQAPGKGLEWVGEIILKSNNYATHYAEPVKGRFTISRDDSKSTVYLQMNSLKTEDTAVYYCTRYYGNYGGYFDVWGAGTLVTVSS

SEQ ID NO: 11676 - protein, 107 aa, synthetic construct; identical to SEQ ID NO: 10923
  REGION 1..107: note = Description of Artificial Sequence: Synthetic polypeptide
  REGION 1..107: note = VL of XENP018568

SEQ ID NO: 11677 - protein, 5 aa, synthetic construct
  REGION 1..5: note = Description of Artificial Sequence: Synthetic peptide
  REGION 1..5: note = XENP018568 vhCDR1
NYWMN

SEQ ID NO: 11678 - protein, 19 aa, synthetic construct
  REGION 1..19: note = Description of Artificial Sequence: Synthetic peptide
  REGION 1..19: note = XENP018568 vhCDR2
EIILKSNNYATHYAEPVKG

SEQ ID NO: 11679 - protein, 11 aa, synthetic construct
  REGION 1..11: note = Description of Artificial Sequence: Synthetic peptide
  REGION 1..11: note = XENP018568 vhCDR3
YYGNYGGYFDV

SEQ ID NO: 11680 - protein, 11 aa, synthetic construct
  REGION 1..11: note = Description of Artificial Sequence: Synthetic peptide
  REGION 1..11: note = XENP018568 vlCDR1
RASQSVSNDVA

SEQ ID NO: 11681 - protein, 7 aa, synthetic construct
  REGION 1..7: note = Description of Artificial Sequence: Synthetic peptide
  REGION 1..7: note = XENP018568 vlCDR2
YASHRYT

SEQ ID NO: 11682 - protein, 9 aa, synthetic construct
  REGION 1..9: note = Description of Artificial Sequence: Synthetic peptide
  REGION 1..9: note = XENP018568 vlCDR3
QQDYSSPRT

SEQ ID NO: 11683 - protein, 249 aa, synthetic construct
  REGION 1..249: note = Description of Artificial Sequence: Synthetic polypeptide
  REGION 1..249: note = XENP018569 1G6_H1.73_L1_scFv(GKPGS)4
EVQLVESGGGLVKPGGSLRLSCAASGFTFSNYWMNWVRQAPGKGLEWVGEIWLKSNNYATHYAEPVKGRFTISRDDSKSTVYLQMNSLKTEDTAVYYCTRYYGNYGGYFDVWGAGTLVTVSSGKPGSGKPGSGKPGSGKPGSSIVMTQSPATLSVSPGERATLSCRASQSVSNDVAWYQQKPGQSPRLLINYASHRYTGVPDRFTGSGYGTEFTLTISSLQSEDFAVYFCQQDYSSPRTFGGGTKVEIK

SEQ ID NO: 11684 - protein, 122 aa, synthetic construct
  REGION 1..122: note = Description of Artificial Sequence: Synthetic polypeptide
  REGION 1..122: note = VH of XENP018569
EVQLVESGGGLVKPGGSLRLSCAASGFTFSNYWMNWVRQAPGKGLEWVGEIWLKSNNYATHYAEPVKGRFTISRDDSKSTVYLQMNSLKTEDTAVYYCTRYYGNYGGYFDVWGAGTLVTVSS

SEQ ID NO: 11685 - protein, 107 aa, synthetic construct; identical to SEQ ID NO: 10923
  REGION 1..107: note = Description of Artificial Sequence: Synthetic polypeptide
  REGION 1..107: note = VL of XENP018569

SEQ ID NO: 11686 - protein, 5 aa, synthetic construct
  REGION 1..5: note = Description of Artificial Sequence: Synthetic peptide
  REGION 1..5: note = XENP018569 vhCDR1
NYWMN

SEQ ID NO: 11687 - protein, 19 aa, synthetic construct
  REGION 1..19: note = Description of Artificial Sequence: Synthetic peptide
  REGION 1..19: note = XENP018569 vhCDR2
EIWLKSNNYATHYAEPVKG

SEQ ID NO: 11688 - protein, 11 aa, synthetic construct
  REGION 1..11: note = Description of Artificial Sequence: Synthetic peptide
  REGION 1..11: note = XENP018569 vhCDR3
YYGNYGGYFDV

SEQ ID NO: 11689 - protein, 11 aa, synthetic construct
  REGION 1..11: note = Description of Artificial Sequence: Synthetic peptide
  REGION 1..11: note = XENP018569 vlCDR1
RASQSVSNDVA

SEQ ID NO: 11690 - protein, 7 aa, synthetic construct
  REGION 1..7: note = Description of Artificial Sequence: Synthetic peptide
  REGION 1..7: note = XENP018569 vlCDR2
YASHRYT

SEQ ID NO: 11691 - protein, 9 aa, synthetic construct
  REGION 1..9: note = Description of Artificial Sequence: Synthetic peptide
  REGION 1..9: note = XENP018569 vlCDR3
QQDYSSPRT

SEQ ID NO: 11692 - protein, 249 aa, synthetic construct
  REGION 1..249: note = Description of Artificial Sequence: Synthetic polypeptide
  REGION 1..249: note = XENP018570 1G6_H1.74_L1_scFv(GKPGS)4
EVQLVESGGGLVKPGGSLRLSCAASGFTFSNYWMNWVRQAPGKGLEWVGEIRIKSNNYATHYAEPVKGRFTISRDDSKSTVYLQMNSLKTEDTAVYYCTRYYGNYGGYFDVWGAGTLVTVSSGKPGSGKPGSGKPGSGKPGSSIVMTQSPATLSVSPGERATLSCRASQSVSNDVAWYQQKPGQSPRLLINYASHRYTGVPDRFTGSGYGTEFTLTISSLQSEDFAVYFCQQDYSSPRTFGGGTKVEIK

SEQ ID NO: 11693 - protein, 122 aa, synthetic construct
  REGION 1..122: note = Description of Artificial Sequence: Synthetic polypeptide
  REGION 1..122: note = VH of XENP018570
EVQLVESGGGLVKPGGSLRLSCAASGFTFSNYWMNWVRQAPGKGLEWVGEIRIKSNNYATHYAEPVKGRFTISRDDSKSTVYLQMNSLKTEDTAVYYCTRYYGNYGGYFDVWGAGTLVTVSS

SEQ ID NO: 11694 - protein, 107 aa, synthetic construct; identical to SEQ ID NO: 10923
  REGION 1..107: note = Description of Artificial Sequence: Synthetic polypeptide
  REGION 1..107: note = VL of XENP018570

SEQ ID NO: 11695 - protein, 5 aa, synthetic construct
  REGION 1..5: note = Description of Artificial Sequence: Synthetic peptide
  REGION 1..5: note = XENP018570 vhCDR1
NYWMN

SEQ ID NO: 11696 - protein, 19 aa, synthetic construct
  REGION 1..19: note = Description of Artificial Sequence: Synthetic peptide
  REGION 1..19: note = XENP018570 vhCDR2
EIRIKSNNYATHYAEPVKG

SEQ ID NO: 11697 - protein, 11 aa, synthetic construct
  REGION 1..11: note = Description of Artificial Sequence: Synthetic peptide
  REGION 1..11: note = XENP018570 vhCDR3
YYGNYGGYFDV

SEQ ID NO: 11698 - protein, 11 aa, synthetic construct
  REGION 1..11: note = Description of Artificial Sequence: Synthetic peptide
  REGION 1..11: note = XENP018570 vlCDR1
RASQSVSNDVA

SEQ ID NO: 11699 - protein, 7 aa, synthetic construct
  REGION 1..7: note = Description of Artificial Sequence: Synthetic peptide
  REGION 1..7: note = XENP018570 vlCDR2
YASHRYT

SEQ ID NO: 11700 - protein, 9 aa, synthetic construct
  REGION 1..9: note = Description of Artificial Sequence: Synthetic peptide
  REGION 1..9: note = XENP018570 vlCDR3
QQDYSSPRT

SEQ ID NO: 11701 - protein, 249 aa, synthetic construct
  REGION 1..249: note = Description of Artificial Sequence: Synthetic polypeptide
  REGION 1..249: note = XENP018571 1G6_H1.75_L1_scFv(GKPGS)4
EVQLVESGGGLVKPGGSLRLSCAASGFTFSNYWMNWVRQAPGKGLEWVGEIRFKSNNYATHYAEPVKGRFTISRDDSKSTVYLQMNSLKTEDTAVYYCTRYYGNYGGYFDVWGAGTLVTVSSGKPGSGKPGSGKPGSGKPGSSIVMTQSPATLSVSPGERATLSCRASQSVSNDVAWYQQKPGQSPRLLINYASHRYTGVPDRFTGSGYGTEFTLTISSLQSEDFAVYFCQQDYSSPRTFGGGTKVEIK

SEQ ID NO: 11702 - protein, 122 aa, synthetic construct
  REGION 1..122: note = Description of Artificial Sequence: Synthetic polypeptide
  REGION 1..122: note = VH of XENP018571
EVQLVESGGGLVKPGGSLRLSCAASGFTFSNYWMNWVRQAPGKGLEWVGEIRFKSNNYATHYAEPVKGRFTISRDDSKSTVYLQMNSLKTEDTAVYYCTRYYGNYGGYFDVWGAGTLVTVSS

SEQ ID NO: 11703 - protein, 107 aa, synthetic construct; identical to SEQ ID NO: 10923
  REGION 1..107: note = Description of Artificial Sequence: Synthetic polypeptide
  REGION 1..107: note = VL of XENP018571

SEQ ID NO: 11704 - protein, 5 aa, synthetic construct
  REGION 1..5: note = Description of Artificial Sequence: Synthetic peptide
  REGION 1..5: note = XENP018571 vhCDR1
NYWMN

SEQ ID NO: 11705 - protein, 19 aa, synthetic construct
  REGION 1..19: note = Description of Artificial Sequence: Synthetic peptide
  REGION 1..19: note = XENP018571 vhCDR2
EIRFKSNNYATHYAEPVKG

SEQ ID NO: 11706 - protein, 11 aa, synthetic construct
  REGION 1..11: note = Description of Artificial Sequence: Synthetic peptide
  REGION 1..11: note = XENP018571 vhCDR3
YYGNYGGYFDV

SEQ ID NO: 11707 - protein, 11 aa, synthetic construct
  REGION 1..11: note = Description of Artificial Sequence: Synthetic peptide
  REGION 1..11: note = XENP018571 vlCDR1
RASQSVSNDVA

SEQ ID NO: 11708 - protein, 7 aa, synthetic construct
  REGION 1..7: note = Description of Artificial Sequence: Synthetic peptide
  REGION 1..7: note = XENP018571 vlCDR2
YASHRYT

SEQ ID NO: 11709 - protein, 9 aa, synthetic construct
  REGION 1..9: note = Description of Artificial Sequence: Synthetic peptide
  REGION 1..9: note = XENP018571 vlCDR3
QQDYSSPRT

SEQ ID NO: 11710 - protein, 249 aa, synthetic construct
  REGION 1..249: note = Description of Artificial Sequence: Synthetic polypeptide
  REGION 1..249: note = XENP018572 1G6_H1.76_L1_scFv(GKPGS)4
EVQLVESGGGLVKPGGSLRLSCAASGFTFSNYWMNWVRQAPGKGLEWVGEIRVKSNNYATHYAEPVKGRFTISRDDSKSTVYLQMNSLKTEDTAVYYCTRYYGNYGGYFDVWGAGTLVTVSSGKPGSGKPGSGKPGSGKPGSSIVMTQSPATLSVSPGERATLSCRASQSVSNDVAWYQQKPGQSPRLLINYASHRYTGVPDRFTGSGYGTEFTLTISSLQSEDFAVYFCQQDYSSPRTFGGGTKVEIK

SEQ ID NO: 11711 - protein, 122 aa, synthetic construct
  REGION 1..122: note = Description of Artificial Sequence: Synthetic polypeptide
  REGION 1..122: note = VH of XENP018572
EVQLVESGGGLVKPGGSLRLSCAASGFTFSNYWMNWVRQAPGKGLEWVGEIRVKSNNYATHYAEPVKGRFTISRDDSKSTVYLQMNSLKTEDTAVYYCTRYYGNYGGYFDVWGAGTLVTVSS

SEQ ID NO: 11712 - protein, 107 aa, synthetic construct; identical to SEQ ID NO: 10923
  REGION 1..107: note = Description of Artificial Sequence: Synthetic polypeptide
  REGION 1..107: note = VL of XENP018572

SEQ ID NO: 11713 - protein, 5 aa, synthetic construct
  REGION 1..5: note = Description of Artificial Sequence: Synthetic peptide
  REGION 1..5: note = XENP018572 vhCDR1
NYWMN

SEQ ID NO: 11714 - protein, 19 aa, synthetic construct
  REGION 1..19: note = Description of Artificial Sequence: Synthetic peptide
  REGION 1..19: note = XENP018572 vhCDR2
EIRVKSNNYATHYAEPVKG

SEQ ID NO: 11715 - protein, 11 aa, synthetic construct
  REGION 1..11: note = Description of Artificial Sequence: Synthetic peptide
  REGION 1..11: note = XENP018572 vhCDR3
YYGNYGGYFDV

SEQ ID NO: 11716 - protein, 11 aa, synthetic construct
  REGION 1..11: note = Description of Artificial Sequence: Synthetic peptide
  REGION 1..11: note = XENP018572 vlCDR1
RASQSVSNDVA

SEQ ID NO: 11717 - protein, 7 aa, synthetic construct
  REGION 1..7: note = Description of Artificial Sequence: Synthetic peptide
  REGION 1..7: note = XENP018572 vlCDR2
YASHRYT

SEQ ID NO: 11718 - protein, 9 aa, synthetic construct
  REGION 1..9: note = Description of Artificial Sequence: Synthetic peptide
  REGION 1..9: note = XENP018572 vlCDR3
QQDYSSPRT

SEQ ID NO: 11719 - protein, 249 aa, synthetic construct
  REGION 1..249: note = Description of Artificial Sequence: Synthetic polypeptide
  REGION 1..249: note = XENP018573 1G6_H1.77_L1_scFv(GKPGS)4
EVQLVESGGGLVKPGGSLRLSCAASGFTFSNYWMNWVRQAPGKGLEWVGEIRYKSNNYATHYAEPVKGRFTISRDDSKSTVYLQMNSLKTEDTAVYYCTRYYGNYGGYFDVWGAGTLVTVSSGKPGSGKPGSGKPGSGKPGSSIVMTQSPATLSVSPGERATLSCRASQSVSNDVAWYQQKPGQSPRLLINYASHRYTGVPDRFTGSGYGTEFTLTISSLQSEDFAVYFCQQDYSSPRTFGGGTKVEIK

SEQ ID NO: 11720 - protein, 122 aa, synthetic construct
  REGION 1..122: note = Description of Artificial Sequence: Synthetic polypeptide
  REGION 1..122: note = VH of XENP018573
EVQLVESGGGLVKPGGSLRLSCAASGFTFSNYWMNWVRQAPGKGLEWVGEIRYKSNNYATHYAEPVKGRFTISRDDSKSTVYLQMNSLKTEDTAVYYCTRYYGNYGGYFDVWGAGTLVTVSS

SEQ ID NO: 11721 - protein, 107 aa, synthetic construct; identical to SEQ ID NO: 10923
  REGION 1..107: note = Description of Artificial Sequence: Synthetic polypeptide
  REGION 1..107: note = VL of XENP018573

SEQ ID NO: 11722 - protein, 5 aa, synthetic construct
  REGION 1..5: note = Description of Artificial Sequence: Synthetic peptide
  REGION 1..5: note = XENP018573 vhCDR1
NYWMN

SEQ ID NO: 11723 - protein, 19 aa, synthetic construct
  REGION 1..19: note = Description of Artificial Sequence: Synthetic peptide
  REGION 1..19: note = XENP018573 vhCDR2
EIRYKSNNYATHYAEPVKG

SEQ ID NO: 11724 - protein, 11 aa, synthetic construct
  REGION 1..11: note = Description of Artificial Sequence: Synthetic peptide
  REGION 1..11: note = XENP018573 vhCDR3
YYGNYGGYFDV

SEQ ID NO: 11725 - protein, 11 aa, synthetic construct
  REGION 1..11: note = Description of Artificial Sequence: Synthetic peptide
  REGION 1..11: note = XENP018573 vlCDR1
RASQSVSNDVA

SEQ ID NO: 11726 - protein, 7 aa, synthetic construct
  REGION 1..7: note = Description of Artificial Sequence: Synthetic peptide
  REGION 1..7: note = XENP018573 vlCDR2
YASHRYT

SEQ ID NO: 11727 - protein, 9 aa, synthetic construct
  REGION 1..9: note = Description of Artificial Sequence: Synthetic peptide
  REGION 1..9: note = XENP018573 vlCDR3
QQDYSSPRT

SEQ ID NO: 11728 - protein, 249 aa, synthetic construct
  REGION 1..249: note = Description of Artificial Sequence: Synthetic polypeptide
  REGION 1..249: note = XENP018574 1G6_H1.78_L1_scFv(GKPGS)4
EVQLVESGGGLVKPGGSLRLSCAASGFTFSNYWMNWVRQAPGKGLEWVGEIRWKSNNYATHYAEPVKGRFTISRDDSKSTVYLQMNSLKTEDTAVYYCTRYYGNYGGYFDVWGAGTLVTVSSGKPGSGKPGSGKPGSGKPGSSIVMTQSPATLSVSPGERATLSCRASQSVSNDVAWYQQKPGQSPRLLINYASHRYTGVPDRFTGSGYGTEFTLTISSLQSEDFAVYFCQQDYSSPRTFGGGTKVEIK

SEQ ID NO: 11729 - protein, 122 aa, synthetic construct
  REGION 1..122: note = Description of Artificial Sequence: Synthetic polypeptide
  REGION 1..122: note = VH of XENP018574
EVQLVESGGGLVKPGGSLRLSCAASGFTFSNYWMNWVRQAPGKGLEWVGEIRWKSNNYATHYAEPVKGRFTISRDDSKSTVYLQMNSLKTEDTAVYYCTRYYGNYGGYFDVWGAGTLVTVSS

SEQ ID NO: 11730 - protein, 107 aa, synthetic construct; identical to SEQ ID NO: 10923
  REGION 1..107: note = Description of Artificial Sequence: Synthetic polypeptide
  REGION 1..107: note = VL of XENP018574

SEQ ID NO: 11731 - protein, 5 aa, synthetic construct
  REGION 1..5: note = Description of Artificial Sequence: Synthetic peptide
  REGION 1..5: note = XENP018574 vhCDR1
NYWMN

SEQ ID NO: 11732 - protein, 19 aa, synthetic construct
  REGION 1..19: note = Description of Artificial Sequence: Synthetic peptide
  REGION 1..19: note = XENP018574 vhCDR2
EIRWKSNNYATHYAEPVKG

SEQ ID NO: 11733 - protein, 11 aa, synthetic construct
  REGION 1..11: note = Description of Artificial Sequence: Synthetic peptide
  REGION 1..11: note = XENP018574 vhCDR3
YYGNYGGYFDV

SEQ ID NO: 11734 - protein, 11 aa, synthetic construct
  REGION 1..11: note = Description of Artificial Sequence: Synthetic peptide
  REGION 1..11: note = XENP018574 vlCDR1
RASQSVSNDVA

SEQ ID NO: 11735 - protein, 7 aa, synthetic construct
  REGION 1..7: note = Description of Artificial Sequence: Synthetic peptide
  REGION 1..7: note = XENP018574 vlCDR2
YASHRYT

SEQ ID NO: 11736 - protein, 9 aa, synthetic construct
  REGION 1..9: note = Description of Artificial Sequence: Synthetic peptide
  REGION 1..9: note = XENP018574 vlCDR3
QQDYSSPRT

SEQ ID NO: 11737 - protein, 249 aa, synthetic construct
  REGION 1..249: note = Description of Artificial Sequence: Synthetic polypeptide
  REGION 1..249: note = XENP018575 1G6_H1.79_L1_scFv(GKPGS)4
EVQLVESGGGLVKPGGSLRLSCAASGFTFSNYWMNWVRQAPGKGLEWVGEIRDKSNNYATHYAEPVKGRFTISRDDSKSTVYLQMNSLKTEDTAVYYCTRYYGNYGGYFDVWGAGTLVTVSSGKPGSGKPGSGKPGSGKPGSSIVMTQSPATLSVSPGERATLSCRASQSVSNDVAWYQQKPGQSPRLLINYASHRYTGVPDRFTGSGYGTEFTLTISSLQSEDFAVYFCQQDYSSPRTFGGGTKVEIK

SEQ ID NO: 11738 - protein, 122 aa, synthetic construct
  REGION 1..122: note = Description of Artificial Sequence: Synthetic polypeptide
  REGION 1..122: note = VH of XENP018575
EVQLVESGGGLVKPGGSLRLSCAASGFTFSNYWMNWVRQAPGKGLEWVGEIRDKSNNYATHYAEPVKGRFTISRDDSKSTVYLQMNSLKTEDTAVYYCTRYYGNYGGYFDVWGAGTLVTVSS

SEQ ID NO: 11739 - protein, 107 aa, synthetic construct; identical to SEQ ID NO: 10923
  REGION 1..107: note = Description of Artificial Sequence: Synthetic polypeptide
  REGION 1..107: note = VL of XENP018575

SEQ ID NO: 11740 - protein, 5 aa, synthetic construct
  REGION 1..5: note = Description of Artificial Sequence: Synthetic peptide
  REGION 1..5: note = XENP018575 vhCDR1
NYWMN

SEQ ID NO: 11741 - protein, 19 aa, synthetic construct
  REGION 1..19: note = Description of Artificial Sequence: Synthetic peptide
  REGION 1..19: note = XENP018575 vhCDR2
EIRDKSNNYATHYAEPVKG

SEQ ID NO: 11742 - protein, 11 aa, synthetic construct
  REGION 1..11: note = Description of Artificial Sequence: Synthetic peptide
  REGION 1..11: note = XENP018575 vhCDR3
YYGNYGGYFDV

SEQ ID NO: 11743 - protein, 11 aa, synthetic construct
  REGION 1..11: note = Description of Artificial Sequence: Synthetic peptide
  REGION 1..11: note = XENP018575 vlCDR1
RASQSVSNDVA

SEQ ID NO: 11744 - protein, 7 aa, synthetic construct
  REGION 1..7: note = Description of Artificial Sequence: Synthetic peptide
  REGION 1..7: note = XENP018575 vlCDR2
YASHRYT

SEQ ID NO: 11745 - protein, 9 aa, synthetic construct
  REGION 1..9: note = Description of Artificial Sequence: Synthetic peptide
  REGION 1..9: note = XENP018575 vlCDR3
QQDYSSPRT

SEQ ID NO: 11746 - protein, 249 aa, synthetic construct
  REGION 1..249: note = Description of Artificial Sequence: Synthetic polypeptide
  REGION 1..249: note = XENP018576 1G6_H1.80_L1_scFv(GKPGS)4
EVQLVESGGGLVKPGGSLRLSCAASGFTFSNYWMNWVRQAPGKGLEWVGEIRAKSNNYATHYAEPVKGRFTISRDDSKSTVYLQMNSLKTEDTAVYYCTRYYGNYGGYFDVWGAGTLVTVSSGKPGSGKPGSGKPGSGKPGSSIVMTQSPATLSVSPGERATLSCRASQSVSNDVAWYQQKPGQSPRLLINYASHRYTGVPDRFTGSGYGTEFTLTISSLQSEDFAVYFCQQDYSSPRTFGGGTKVEIK

SEQ ID NO: 11747 - protein, 122 aa, synthetic construct
  REGION 1..122: note = Description of Artificial Sequence: Synthetic polypeptide
  REGION 1..122: note = VH of XENP018576
EVQLVESGGGLVKPGGSLRLSCAASGFTFSNYWMNWVRQAPGKGLEWVGEIRAKSNNYATHYAEPVKGRFTISRDDSKSTVYLQMNSLKTEDTAVYYCTRYYGNYGGYFDVWGAGTLVTVSS

SEQ ID NO: 11748 - protein, 107 aa, synthetic construct; identical to SEQ ID NO: 10923
  REGION 1..107: note = Description of Artificial Sequence: Synthetic polypeptide
  REGION 1..107: note = VL of XENP018576

SEQ ID NO: 11749 - protein, 5 aa, synthetic construct
  REGION 1..5: note = Description of Artificial Sequence: Synthetic peptide
  REGION 1..5: note = XENP018576 vhCDR1
NYWMN

SEQ ID NO: 11750 - protein, 19 aa, synthetic construct
  REGION 1..19: note = Description of Artificial Sequence: Synthetic peptide
  REGION 1..19: note = XENP018576 vhCDR2
EIRAKSNNYATHYAEPVKG

SEQ ID NO: 11751 - protein, 11 aa, synthetic construct
  REGION 1..11: note = Description of Artificial Sequence: Synthetic peptide
  REGION 1..11: note = XENP018576 vhCDR3
YYGNYGGYFDV

SEQ ID NO: 11752 - protein, 11 aa, synthetic construct
  REGION 1..11: note = Description of Artificial Sequence: Synthetic peptide
  REGION 1..11: note = XENP018576 vlCDR1
RASQSVSNDVA

SEQ ID NO: 11753 - protein, 7 aa, synthetic construct
  REGION 1..7: note = Description of Artificial Sequence: Synthetic peptide
  REGION 1..7: note = XENP018576 vlCDR2
YASHRYT

SEQ ID NO: 11754 - protein, 9 aa, synthetic construct
  REGION 1..9: note = Description of Artificial Sequence: Synthetic peptide
  REGION 1..9: note = XENP018576 vlCDR3
QQDYSSPRT

SEQ ID NO: 11755 - protein, 249 aa, synthetic construct
  REGION 1..249: note = Description of Artificial Sequence: Synthetic polypeptide
  REGION 1..249: note = XENP018577 1G6_H1.81_L1_scFv(GKPGS)4
EVQLVESGGGLVKPGGSLRLSCAASGFTFSNYWMNWVRQAPGKGLEWVGEIRQKSNNYATHYAEPVKGRFTISRDDSKSTVYLQMNSLKTEDTAVYYCTRYYGNYGGYFDVWGAGTLVTVSSGKPGSGKPGSGKPGSGKPGSSIVMTQSPATLSVSPGERATLSCRASQSVSNDVAWYQQKPGQSPRLLINYASHRYTGVPDRFTGSGYGTEFTLTISSLQSEDFAVYFCQQDYSSPRTFGGGTKVEIK

SEQ ID NO: 11756 - protein, 122 aa, synthetic construct
  REGION 1..122: note = Description of Artificial Sequence: Synthetic polypeptide
  REGION 1..122: note = VH of XENP018577
EVQLVESGGGLVKPGGSLRLSCAASGFTFSNYWMNWVRQAPGKGLEWVGEIRQKSNNYATHYAEPVKGRFTISRDDSKSTVYLQMNSLKTEDTAVYYCTRYYGNYGGYFDVWGAGTLVTVSS

SEQ ID NO: 11757 - protein, 107 aa, synthetic construct; identical to SEQ ID NO: 10923
  REGION 1..107: note = Description of Artificial Sequence: Synthetic polypeptide
  REGION 1..107: note = VL of XENP018577

SEQ ID NO: 11758 - protein, 5 aa, synthetic construct
  REGION 1..5: note = Description of Artificial Sequence: Synthetic peptide
  REGION 1..5: note = XENP018577 vhCDR1
NYWMN

SEQ ID NO: 11759 - protein, 19 aa, synthetic construct
  REGION 1..19: note = Description of Artificial Sequence: Synthetic peptide
  REGION 1..19: note = XENP018577 vhCDR2
EIRQKSNNYATHYAEPVKG

SEQ ID NO: 11760 - protein, 11 aa, synthetic construct
  REGION 1..11: note = Description of Artificial Sequence: Synthetic peptide
  REGION 1..11: note = XENP018577 vhCDR3
YYGNYGGYFDV

SEQ ID NO: 11761 - protein, 11 aa, synthetic construct
  REGION 1..11: note = Description of Artificial Sequence: Synthetic peptide
  REGION 1..11: note = XENP018577 vlCDR1
RASQSVSNDVA

SEQ ID NO: 11762 - protein, 7 aa, synthetic construct
  REGION 1..7: note = Description of Artificial Sequence: Synthetic peptide
  REGION 1..7: note = XENP018577 vlCDR2
YASHRYT

SEQ ID NO: 11763 - protein, 9 aa, synthetic construct
  REGION 1..9: note = Description of Artificial Sequence: Synthetic peptide
  REGION 1..9: note = XENP018577 vlCDR3
QQDYSSPRT

SEQ ID NO: 11764 - protein, 249 aa, synthetic construct
  REGION 1..249: note = Description of Artificial Sequence: Synthetic polypeptide
  REGION 1..249: note = XENP018578 1G6_H1.82_L1_scFv(GKPGS)4
EVQLVESGGGLVKPGGSLRLSCAASGFTFSNYWMNWVRQAPGKGLEWVGEIRKKSNNYATHYAEPVKGRFTISRDDSKSTVYLQMNSLKTEDTAVYYCTRYYGNYGGYFDVWGAGTLVTVSSGKPGSGKPGSGKPGSGKPGSSIVMTQSPATLSVSPGERATLSCRASQSVSNDVAWYQQKPGQSPRLLINYASHRYTGVPDRFTGSGYGTEFTLTISSLQSEDFAVYFCQQDYSSPRTFGGGTKVEIK

SEQ ID NO: 11765 - protein, 122 aa, synthetic construct
  REGION 1..122: note = Description of Artificial Sequence: Synthetic polypeptide
  REGION 1..122: note = VH of XENP018578
EVQLVESGGGLVKPGGSLRLSCAASGFTFSNYWMNWVRQAPGKGLEWVGEIRKKSNNYATHYAEPVKGRFTISRDDSKSTVYLQMNSLKTEDTAVYYCTRYYGNYGGYFDVWGAGTLVTVSS

SEQ ID NO: 11766 - protein, 107 aa, synthetic construct; identical to SEQ ID NO: 10923
  REGION 1..107: note = Description of Artificial Sequence: Synthetic polypeptide
  REGION 1..107: note = VL of XENP018578

SEQ ID NO: 11767 - protein, 5 aa, synthetic construct
  REGION 1..5: note = Description of Artificial Sequence: Synthetic peptide
  REGION 1..5: note = XENP018578 vhCDR1
NYWMN

SEQ ID NO: 11768 - protein, 19 aa, synthetic construct
  REGION 1..19: note = Description of Artificial Sequence: Synthetic peptide
  REGION 1..19: note = XENP018578 vhCDR2
EIRKKSNNYATHYAEPVKG

SEQ ID NO: 11769 - protein, 11 aa, synthetic construct
  REGION 1..11: note = Description of Artificial Sequence: Synthetic peptide
  REGION 1..11: note = XENP018578 vhCDR3
YYGNYGGYFDV

SEQ ID NO: 11770 - protein, 11 aa, synthetic construct
  REGION 1..11: note = Description of Artificial Sequence: Synthetic peptide
  REGION 1..11: note = XENP018578 vlCDR1
RASQSVSNDVA

SEQ ID NO: 11771 - protein, 7 aa, synthetic construct
  REGION 1..7: note = Description of Artificial Sequence: Synthetic peptide
  REGION 1..7: note = XENP018578 vlCDR2
YASHRYT

SEQ ID NO: 11772 - protein, 9 aa, synthetic construct
  REGION 1..9: note = Description of Artificial Sequence: Synthetic peptide
  REGION 1..9: note = XENP018578 vlCDR3
QQDYSSPRT

SEQ ID NO: 11773 - protein, 249 aa, synthetic construct
  REGION 1..249: note = Description of Artificial Sequence: Synthetic polypeptide
  REGION 1..249: note = XENP018579 1G6_H1.83_L1_scFv(GKPGS)4
EVQLVESGGGLVKPGGSLRLSCAASGFTFSNYWMNWVRQAPGKGLEWVGEIRLRSNNYATHYAEPVKGRFTISRDDSKSTVYLQMNSLKTEDTAVYYCTRYYGNYGGYFDVWGAGTLVTVSSGKPGSGKPGSGKPGSGKPGSSIVMTQSPATLSVSPGERATLSCRASQSVSNDVAWYQQKPGQSPRLLINYASHRYTGVPDRFTGSGYGTEFTLTISSLQSEDFAVYFCQQDYSSPRTFGGGTKVEIK

SEQ ID NO: 11774 - protein, 122 aa, synthetic construct
  REGION 1..122: note = Description of Artificial Sequence: Synthetic polypeptide
  REGION 1..122: note = VH of XENP018579
EVQLVESGGGLVKPGGSLRLSCAASGFTFSNYWMNWVRQAPGKGLEWVGEIRLRSNNYATHYAEPVKGRFTISRDDSKSTVYLQMNSLKTEDTAVYYCTRYYGNYGGYFDVWGAGTLVTVSS

SEQ ID NO: 11775 - protein, 107 aa, synthetic construct; identical to SEQ ID NO: 10923
  REGION 1..107: note = Description of Artificial Sequence: Synthetic polypeptide
  REGION 1..107: note = VL of XENP018579

SEQ ID NO: 11776 - protein, 5 aa, synthetic construct
  REGION 1..5: note = Description of Artificial Sequence: Synthetic peptide
  REGION 1..5: note = XENP018579 vhCDR1
NYWMN

SEQ ID NO: 11777 - protein, 19 aa, synthetic construct
  REGION 1..19: note = Description of Artificial Sequence: Synthetic peptide
  REGION 1..19: note = XENP018579 vhCDR2
EIRLRSNNYATHYAEPVKG

SEQ ID NO: 11778 - protein, 11 aa, synthetic construct
  REGION 1..11: note = Description of Artificial Sequence: Synthetic peptide
  REGION 1..11: note = XENP018579 vhCDR3
YYGNYGGYFDV

SEQ ID NO: 11779 - protein, 11 aa, synthetic construct
  REGION 1..11: note = Description of Artificial Sequence: Synthetic peptide
  REGION 1..11: note = XENP018579 vlCDR1
RASQSVSNDVA

SEQ ID NO: 11780 - protein, 7 aa, synthetic construct
  REGION 1..7: note = Description of Artificial Sequence: Synthetic peptide
  REGION 1..7: note = XENP018579 vlCDR2
YASHRYT

SEQ ID NO: 11781 - protein, 9 aa, synthetic construct
  REGION 1..9: note = Description of Artificial Sequence: Synthetic peptide
  REGION 1..9: note = XENP018579 vlCDR3
QQDYSSPRT

SEQ ID NO: 11782 - protein, 249 aa, synthetic construct
  REGION 1..249: note = Description of Artificial Sequence: Synthetic polypeptide
  REGION 1..249: note = XENP018580 1G6_H1.84_L1_scFv(GKPGS)4
EVQLVESGGGLVKPGGSLRLSCAASGFTFSNYWMNWVRQAPGKGLEWVGEIRLESNNYATHYAEPVKGRFTISRDDSKSTVYLQMNSLKTEDTAVYYCTRYYGNYGGYFDVWGAGTLVTVSSGKPGSGKPGSGKPGSGKPGSSIVMTQSPATLSVSPGERATLSCRASQSVSNDVAWYQQKPGQSPRLLINYASHRYTGVPDRFTGSGYGTEFTLTISSLQSEDFAVYFCQQDYSSPRTFGGGTKVEIK

SEQ ID NO: 11783 - protein, 122 aa, synthetic construct
  REGION 1..122: note = Description of Artificial Sequence: Synthetic polypeptide
  REGION 1..122: note = VH of XENP018580
EVQLVESGGGLVKPGGSLRLSCAASGFTFSNYWMNWVRQAPGKGLEWVGEIRLESNNYATHYAEPVKGRFTISRDDSKSTVYLQMNSLKTEDTAVYYCTRYYGNYGGYFDVWGAGTLVTVSS

SEQ ID NO: 11784 - protein, 107 aa, synthetic construct; identical to SEQ ID NO: 10923
  REGION 1..107: note = Description of Artificial Sequence: Synthetic polypeptide
  REGION 1..107: note = VL of XENP018580

SEQ ID NO: 11785 - protein, 5 aa, synthetic construct
  REGION 1..5: note = Description of Artificial Sequence: Synthetic peptide
  REGION 1..5: note = XENP018580 vhCDR1
NYWMN

SEQ ID NO: 11786 - protein, 19 aa, synthetic construct
  REGION 1..19: note = Description of Artificial Sequence: Synthetic peptide
  REGION 1..19: note = XENP018580 vhCDR2
EIRLESNNYATHYAEPVKG

SEQ ID NO: 11787 - protein, 11 aa, synthetic construct
  REGION 1..11: note = Description of Artificial Sequence: Synthetic peptide
  REGION 1..11: note = XENP018580 vhCDR3
YYGNYGGYFDV

SEQ ID NO: 11788 - protein, 11 aa, synthetic construct
  REGION 1..11: note = Description of Artificial Sequence: Synthetic peptide
  REGION 1..11: note = XENP018580 vlCDR1
RASQSVSNDVA

SEQ ID NO: 11789 - protein, 7 aa, synthetic construct
  REGION 1..7: note = Description of Artificial Sequence: Synthetic peptide
  REGION 1..7: note = XENP018580 vlCDR2
YASHRYT

SEQ ID NO: 11790 - protein, 9 aa, synthetic construct
  REGION 1..9: note = Description of Artificial Sequence: Synthetic peptide
  REGION 1..9: note = XENP018580 vlCDR3
QQDYSSPRT

SEQ ID NO: 11791 - protein, 249 aa, synthetic construct
  REGION 1..249: note = Description of Artificial Sequence: Synthetic polypeptide
  REGION 1..249: note = XENP018581 1G6_H1.85_L1_scFv(GKPGS)4
EVQLVESGGGLVKPGGSLRLSCAASGFTFSNYWMNWVRQAPGKGLEWVGEIRLHSNNYATHYAEPVKGRFTISRDDSKSTVYLQMNSLKTEDTAVYYCTRYYGNYGGYFDVWGAGTLVTVSSGKPGSGKPGSGKPGSGKPGSSIVMTQSPATLSVSPGERATLSCRASQSVSNDVAWYQQKPGQSPRLLINYASHRYTGVPDRFTGSGYGTEFTLTISSLQSEDFAVYFCQQDYSSPRTFGGGTKVEIK

SEQ ID NO: 11792 - protein, 122 aa, synthetic construct
  REGION 1..122: note = Description of Artificial Sequence: Synthetic polypeptide
  REGION 1..122: note = VH of XENP018581
EVQLVESGGGLVKPGGSLRLSCAASGFTFSNYWMNWVRQAPGKGLEWVGEIRLHSNNYATHYAEPVKGRFTISRDDSKSTVYLQMNSLKTEDTAVYYCTRYYGNYGGYFDVWGAGTLVTVSS

SEQ ID NO: 11793 - protein, 107 aa, synthetic construct; identical to SEQ ID NO: 10923
  REGION 1..107: note = Description of Artificial Sequence: Synthetic polypeptide
  REGION 1..107: note = VL of XENP018581

SEQ ID NO: 11794 - protein, 5 aa, synthetic construct
  REGION 1..5: note = Description of Artificial Sequence: Synthetic peptide
  REGION 1..5: note = XENP018581 vhCDR1
NYWMN

SEQ ID NO: 11795 - protein, 19 aa, synthetic construct
  REGION 1..19: note = Description of Artificial Sequence: Synthetic peptide
  REGION 1..19: note = XENP018581 vhCDR2
EIRLHSNNYATHYAEPVKG

SEQ ID NO: 11796 - protein, 11 aa, synthetic construct
  REGION 1..11: note = Description of Artificial Sequence: Synthetic peptide
  REGION 1..11: note = XENP018581 vhCDR3
YYGNYGGYFDV

SEQ ID NO: 11797 - protein, 11 aa, synthetic construct
  REGION 1..11: note = Description of Artificial Sequence: Synthetic peptide
  REGION 1..11: note = XENP018581 vlCDR1
RASQSVSNDVA

SEQ ID NO: 11798 - protein, 7 aa, synthetic construct
  REGION 1..7: note = Description of Artificial Sequence: Synthetic peptide
  REGION 1..7: note = XENP018581 vlCDR2
YASHRYT

SEQ ID NO: 11799 - protein, 9 aa, synthetic construct
  REGION 1..9: note = Description of Artificial Sequence: Synthetic peptide
  REGION 1..9: note = XENP018581 vlCDR3
QQDYSSPRT

SEQ ID NO: 11800 - protein, 249 aa, synthetic construct
  REGION 1..249: note = Description of Artificial Sequence: Synthetic polypeptide
  REGION 1..249: note = XENP018582 1G6_H1.86_L1_scFv(GKPGS)4
EVQLVESGGGLVKPGGSLRLSCAASGFTFSNYWMNWVRQAPGKGLEWVGEIRLSSNNYATHYAEPVKGRFTISRDDSKSTVYLQMNSLKTEDTAVYYCTRYYGNYGGYFDVWGAGTLVTVSSGKPGSGKPGSGKPGSGKPGSSIVMTQSPATLSVSPGERATLSCRASQSVSNDVAWYQQKPGQSPRLLINYASHRYTGVPDRFTGSGYGTEFTLTISSLQSEDFAVYFCQQDYSSPRTFGGGTKVEIK

SEQ ID NO: 11801 - protein, 122 aa, synthetic construct
  REGION 1..122: note = Description of Artificial Sequence: Synthetic polypeptide
  REGION 1..122: note = VH of XENP018582
EVQLVESGGGLVKPGGSLRLSCAASGFTFSNYWMNWVRQAPGKGLEWVGEIRLSSNNYATHYAEPVKGRFTISRDDSKSTVYLQMNSLKTEDTAVYYCTRYYGNYGGYFDVWGAGTLVTVSS

SEQ ID NO: 11802 - protein, 107 aa, synthetic construct; identical to SEQ ID NO: 10923
  REGION 1..107: note = Description of Artificial Sequence: Synthetic polypeptide
  REGION 1..107: note = VL of XENP018582

SEQ ID NO: 11803 - protein, 5 aa, synthetic construct
  REGION 1..5: note = Description of Artificial Sequence: Synthetic peptide
  REGION 1..5: note = XENP018582 vhCDR1
NYWMN

SEQ ID NO: 11804 - protein, 19 aa, synthetic construct
  REGION 1..19: note = Description of Artificial Sequence: Synthetic peptide
  REGION 1..19: note = XENP018582 vhCDR2
EIRLSSNNYATHYAEPVKG

SEQ ID NO: 11805 - protein, 11 aa, synthetic construct
  REGION 1..11: note = Description of Artificial Sequence: Synthetic peptide
  REGION 1..11: note = XENP018582 vhCDR3
YYGNYGGYFDV

SEQ ID NO: 11806 - protein, 11 aa, synthetic construct
  REGION 1..11: note = Description of Artificial Sequence: Synthetic peptide
  REGION 1..11: note = XENP018582 vlCDR1
RASQSVSNDVA

SEQ ID NO: 11807 - protein, 7 aa, synthetic construct
  REGION 1..7: note = Description of Artificial Sequence: Synthetic peptide
  REGION 1..7: note = XENP018582 vlCDR2
YASHRYT

SEQ ID NO: 11808 - protein, 9 aa, synthetic construct
  REGION 1..9: note = Description of Artificial Sequence: Synthetic peptide
  REGION 1..9: note = XENP018582 vlCDR3
QQDYSSPRT

SEQ ID NO: 11809 - protein, 249 aa, synthetic construct
  REGION 1..249: note = Description of Artificial Sequence: Synthetic polypeptide
  REGION 1..249: note = XENP018583 1G6_H1.87_L1_scFv(GKPGS)4
EVQLVESGGGLVKPGGSLRLSCAASGFTFSNYWMNWVRQAPGKGLEWVGEIRLDSNNYATHYAEPVKGRFTISRDDSKSTVYLQMNSLKTEDTAVYYCTRYYGNYGGYFDVWGAGTLVTVSSGKPGSGKPGSGKPGSGKPGSSIVMTQSPATLSVSPGERATLSCRASQSVSNDVAWYQQKPGQSPRLLINYASHRYTGVPDRFTGSGYGTEFTLTISSLQSEDFAVYFCQQDYSSPRTFGGGTKVEIK

SEQ ID NO: 11810 - protein, 122 aa, synthetic construct
  REGION 1..122: note = Description of Artificial Sequence: Synthetic polypeptide
  REGION 1..122: note = VH of XENP018583
EVQLVESGGGLVKPGGSLRLSCAASGFTFSNYWMNWVRQAPGKGLEWVGEIRLDSNNYATHYAEPVKGRFTISRDDSKSTVYLQMNSLKTEDTAVYYCTRYYGNYGGYFDVWGAGTLVTVSS

SEQ ID NO: 11811 - protein, 107 aa, synthetic construct; identical to SEQ ID NO: 10923
  REGION 1..107: note = Description of Artificial Sequence: Synthetic polypeptide
  REGION 1..107: note = VL of XENP018583

SEQ ID NO: 11812 - protein, 5 aa, synthetic construct
  REGION 1..5: note = Description of Artificial Sequence: Synthetic peptide
  REGION 1..5: note = XENP018583 vhCDR1
NYWMN

SEQ ID NO: 11813 - protein, 19 aa, synthetic construct
  REGION 1..19: note = Description of Artificial Sequence: Synthetic peptide
  REGION 1..19: note = XENP018583 vhCDR2
EIRLDSNNYATHYAEPVKG

SEQ ID NO: 11814 - protein, 11 aa, synthetic construct
  REGION 1..11: note = Description of Artificial Sequence: Synthetic peptide
  REGION 1..11: note = XENP018583 vhCDR3
YYGNYGGYFDV

SEQ ID NO: 11815 - protein, 11 aa, synthetic construct
  REGION 1..11: note = Description of Artificial Sequence: Synthetic peptide
  REGION 1..11: note = XENP018583 vlCDR1
RASQSVSNDVA

SEQ ID NO: 11816 - protein, 7 aa, synthetic construct
  REGION 1..7: note = Description of Artificial Sequence: Synthetic peptide
  REGION 1..7: note = XENP018583 vlCDR2
YASHRYT

SEQ ID NO: 11817 - protein, 9 aa, synthetic construct
  REGION 1..9: note = Description of Artificial Sequence: Synthetic peptide
  REGION 1..9: note = XENP018583 vlCDR3
QQDYSSPRT

SEQ ID NO: 11818 - protein, 249 aa, synthetic construct
  REGION 1..249: note = Description of Artificial Sequence: Synthetic polypeptide
  REGION 1..249: note = XENP018584 1G6_H1.88_L1_scFv(GKPGS)4
EVQLVESGGGLVKPGGSLRLSCAASGFTFSNYWMNWVRQAPGKGLEWVGEIRLASNNYATHYAEPVKGRFTISRDDSKSTVYLQMNSLKTEDTAVYYCTRYYGNYGGYFDVWGAGTLVTVSSGKPGSGKPGSGKPGSGKPGSSIVMTQSPATLSVSPGERATLSCRASQSVSNDVAWYQQKPGQSPRLLINYASHRYTGVPDRFTGSGYGTEFTLTISSLQSEDFAVYFCQQDYSSPRTFGGGTKVEIK

SEQ ID NO: 11819 - protein, 122 aa, synthetic construct
  REGION 1..122: note = Description of Artificial Sequence: Synthetic polypeptide
  REGION 1..122: note = VH of XENP018584
EVQLVESGGGLVKPGGSLRLSCAASGFTFSNYWMNWVRQAPGKGLEWVGEIRLASNNYATHYAEPVKGRFTISRDDSKSTVYLQMNSLKTEDTAVYYCTRYYGNYGGYFDVWGAGTLVTVSS

SEQ ID NO: 11820 - protein, 107 aa, synthetic construct; identical to SEQ ID NO: 10923
  REGION 1..107: note = Description of Artificial Sequence: Synthetic polypeptide
  REGION 1..107: note = VL of XENP018584

SEQ ID NO: 11821 - protein, 5 aa, synthetic construct
  REGION 1..5: note = Description of Artificial Sequence: Synthetic peptide
  REGION 1..5: note = XENP018584 vhCDR1
NYWMN

SEQ ID NO: 11822 - protein, 19 aa, synthetic construct
  REGION 1..19: note = Description of Artificial Sequence: Synthetic peptide
  REGION 1..19: note = XENP018584 vhCDR2
EIRLASNNYATHYAEPVKG

SEQ ID NO: 11823 - protein, 11 aa, synthetic construct
  REGION 1..11: note = Description of Artificial Sequence: Synthetic peptide
  REGION 1..11: note = XENP018584 vhCDR3
YYGNYGGYFDV

SEQ ID NO: 11824 - protein, 11 aa, synthetic construct
  REGION 1..11: note = Description of Artificial Sequence: Synthetic peptide
  REGION 1..11: note = XENP018584 vlCDR1
RASQSVSNDVA

SEQ ID NO: 11825 - protein, 7 aa, synthetic construct
  REGION 1..7: note = Description of Artificial Sequence: Synthetic peptide
  REGION 1..7: note = XENP018584 vlCDR2
YASHRYT

SEQ ID NO: 11826 - protein, 9 aa, synthetic construct
  REGION 1..9: note = Description of Artificial Sequence: Synthetic peptide
  REGION 1..9: note = XENP018584 vlCDR3
QQDYSSPRT

SEQ ID NO: 11827 - protein, 249 aa, synthetic construct
  REGION 1..249: note = Description of Artificial Sequence: Synthetic polypeptide
  REGION 1..249: note = XENP018585 1G6_H1.89_L1_scFv(GKPGS)4
EVQLVESGGGLVKPGGSLRLSCAASGFTFSNYWMNWVRQAPGKGLEWVGEIRLGSNNYATHYAEPVKGRFTISRDDSKSTVYLQMNSLKTEDTAVYYCTRYYGNYGGYFDVWGAGTLVTVSSGKPGSGKPGSGKPGSGKPGSSIVMTQSPATLSVSPGERATLSCRASQSVSNDVAWYQQKPGQSPRLLINYASHRYTGVPDRFTGSGYGTEFTLTISSLQSEDFAVYFCQQDYSSPRTFGGGTKVEIK

SEQ ID NO: 11828 - protein, 122 aa, synthetic construct
  REGION 1..122: note = Description of Artificial Sequence: Synthetic polypeptide
  REGION 1..122: note = VH of XENP018585
EVQLVESGGGLVKPGGSLRLSCAASGFTFSNYWMNWVRQAPGKGLEWVGEIRLGSNNYATHYAEPVKGRFTISRDDSKSTVYLQMNSLKTEDTAVYYCTRYYGNYGGYFDVWGAGTLVTVSS

SEQ ID NO: 11829 - protein, 107 aa, synthetic construct; identical to SEQ ID NO: 10923
  REGION 1..107: note = Description of Artificial Sequence: Synthetic polypeptide
  REGION 1..107: note = VL of XENP018585

SEQ ID NO: 11830 - protein, 5 aa, synthetic construct
  REGION 1..5: note = Description of Artificial Sequence: Synthetic peptide
  REGION 1..5: note = XENP018585 vhCDR1
NYWMN

SEQ ID NO: 11831 - protein, 19 aa, synthetic construct
  REGION 1..19: note = Description of Artificial Sequence: Synthetic peptide
  REGION 1..19: note = XENP018585 vhCDR2
EIRLGSNNYATHYAEPVKG

SEQ ID NO: 11832 - protein, 11 aa, synthetic construct
  REGION 1..11: note = Description of Artificial Sequence: Synthetic peptide
  REGION 1..11: note = XENP018585 vhCDR3
YYGNYGGYFDV

SEQ ID NO: 11833 - protein, 11 aa, synthetic construct
  REGION 1..11: note = Description of Artificial Sequence: Synthetic peptide
  REGION 1..11: note = XENP018585 vlCDR1
RASQSVSNDVA

SEQ ID NO: 11834 - protein, 7 aa, synthetic construct
  REGION 1..7: note = Description of Artificial Sequence: Synthetic peptide
  REGION 1..7: note = XENP018585 vlCDR2
YASHRYT

SEQ ID NO: 11835 - protein, 9 aa, synthetic construct
  REGION 1..9: note = Description of Artificial Sequence: Synthetic peptide
  REGION 1..9: note = XENP018585 vlCDR3
QQDYSSPRT

SEQ ID NO: 11836 - protein, 249 aa, synthetic construct
  REGION 1..249: note = Description of Artificial Sequence: Synthetic polypeptide
  REGION 1..249: note = XENP018586 1G6_H1.90_L1_scFv(GKPGS)4
EVQLVESGGGLVKPGGSLRLSCAASGFTFSNYWMNWVRQAPGKGLEWVGEIRLYSNNYATHYAEPVKGRFTISRDDSKSTVYLQMNSLKTEDTAVYYCTRYYGNYGGYFDVWGAGTLVTVSSGKPGSGKPGSGKPGSGKPGSSIVMTQSPATLSVSPGERATLSCRASQSVSNDVAWYQQKPGQSPRLLINYASHRYTGVPDRFTGSGYGTEFTLTISSLQSEDFAVYFCQQDYSSPRTFGGGTKVEIK

SEQ ID NO: 11837 - protein, 122 aa, synthetic construct
  REGION 1..122: note = Description of Artificial Sequence: Synthetic polypeptide
  REGION 1..122: note = VH of XENP018586
EVQLVESGGGLVKPGGSLRLSCAASGFTFSNYWMNWVRQAPGKGLEWVGEIRLYSNNYATHYAEPVKGRFTISRDDSKSTVYLQMNSLKTEDTAVYYCTRYYGNYGGYFDVWGAGTLVTVSS

SEQ ID NO: 11838 - protein, 107 aa, synthetic construct; identical to SEQ ID NO: 10923
  REGION 1..107: note = Description of Artificial Sequence: Synthetic polypeptide
  REGION 1..107: note = VL of XENP018586

SEQ ID NO: 11839 - protein, 5 aa, synthetic construct
  REGION 1..5: note = Description of Artificial Sequence: Synthetic peptide
  REGION 1..5: note = XENP018586 vhCDR1
NYWMN

SEQ ID NO: 11840 - protein, 19 aa, synthetic construct
  REGION 1..19: note = Description of Artificial Sequence: Synthetic peptide
  REGION 1..19: note = XENP018586 vhCDR2
EIRLYSNNYATHYAEPVKG

SEQ ID NO: 11841 - protein, 11 aa, synthetic construct
  REGION 1..11: note = Description of Artificial Sequence: Synthetic peptide
  REGION 1..11: note = XENP018586 vhCDR3
YYGNYGGYFDV

SEQ ID NO: 11842 - protein, 11 aa, synthetic construct
  REGION 1..11: note = Description of Artificial Sequence: Synthetic peptide
  REGION 1..11: note = XENP018586 vlCDR1
RASQSVSNDVA

SEQ ID NO: 11843 - protein, 7 aa, synthetic construct
  REGION 1..7: note = Description of Artificial Sequence: Synthetic peptide
  REGION 1..7: note = XENP018586 vlCDR2
YASHRYT

SEQ ID NO: 11844 - protein, 9 aa, synthetic construct
  REGION 1..9: note = Description of Artificial Sequence: Synthetic peptide
  REGION 1..9: note = XENP018586 vlCDR3
QQDYSSPRT

SEQ ID NO: 11845 - protein, 249 aa, synthetic construct
  REGION 1..249: note = Description of Artificial Sequence: Synthetic polypeptide
  REGION 1..249: note = XENP018587 1G6_H1.91_L1_scFv(GKPGS)4
EVQLVESGGGLVKPGGSLRLSCAASGFTFSNYWMNWVRQAPGKGLEWVGEIRLISNNYATHYAEPVKGRFTISRDDSKSTVYLQMNSLKTEDTAVYYCTRYYGNYGGYFDVWGAGTLVTVSSGKPGSGKPGSGKPGSGKPGSSIVMTQSPATLSVSPGERATLSCRASQSVSNDVAWYQQKPGQSPRLLINYASHRYTGVPDRFTGSGYGTEFTLTISSLQSEDFAVYFCQQDYSSPRTFGGGTKVEIK

SEQ ID NO: 11846 - protein, 122 aa, synthetic construct
  REGION 1..122: note = Description of Artificial Sequence: Synthetic polypeptide
  REGION 1..122: note = VH of XENP018587
EVQLVESGGGLVKPGGSLRLSCAASGFTFSNYWMNWVRQAPGKGLEWVGEIRLISNNYATHYAEPVKGRFTISRDDSKSTVYLQMNSLKTEDTAVYYCTRYYGNYGGYFDVWGAGTLVTVSS

SEQ ID NO: 11847 - protein, 107 aa, synthetic construct; identical to SEQ ID NO: 10923
  REGION 1..107: note = Description of Artificial Sequence: Synthetic polypeptide
  REGION 1..107: note = VL of XENP018587

SEQ ID NO: 11848 - protein, 5 aa, synthetic construct
  REGION 1..5: note = Description of Artificial Sequence: Synthetic peptide
  REGION 1..5: note = XENP018587 vhCDR1
NYWMN

SEQ ID NO: 11849 - protein, 19 aa, synthetic construct
  REGION 1..19: note = Description of Artificial Sequence: Synthetic peptide
  REGION 1..19: note = XENP018587 vhCDR2
EIRLISNNYATHYAEPVKG

SEQ ID NO: 11850 - protein, 11 aa, synthetic construct
  REGION 1..11: note = Description of Artificial Sequence: Synthetic peptide
  REGION 1..11: note = XENP018587 vhCDR3
YYGNYGGYFDV

SEQ ID NO: 11851 - protein, 11 aa, synthetic construct
  REGION 1..11: note = Description of Artificial Sequence: Synthetic peptide
  REGION 1..11: note = XENP018587 vlCDR1
RASQSVSNDVA

SEQ ID NO: 11852 - protein, 7 aa, synthetic construct
  REGION 1..7: note = Description of Artificial Sequence: Synthetic peptide
  REGION 1..7: note = XENP018587 vlCDR2
YASHRYT

SEQ ID NO: 11853 - protein, 9 aa, synthetic construct
  REGION 1..9: note = Description of Artificial Sequence: Synthetic peptide
  REGION 1..9: note = XENP018587 vlCDR3
QQDYSSPRT

SEQ ID NO: 11854 - protein, 249 aa, synthetic construct
  REGION 1..249: note = Description of Artificial Sequence: Synthetic polypeptide
  REGION 1..249: note = XENP018588 1G6_H1.92_L1_scFv(GKPGS)4
EVQLVESGGGLVKPGGSLRLSCAASGFTFSNYWMNWVRQAPGKGLEWVGEIRLKTNNYATHYAEPVKGRFTISRDDSKSTVYLQMNSLKTEDTAVYYCTRYYGNYGGYFDVWGAGTLVTVSSGKPGSGKPGSGKPGSGKPGSSIVMTQSPATLSVSPGERATLSCRASQSVSNDVAWYQQKPGQSPRLLINYASHRYTGVPDRFTGSGYGTEFTLTISSLQSEDFAVYFCQQDYSSPRTFGGGTKVEIK

SEQ ID NO: 11855 - protein, 122 aa, synthetic construct
  REGION 1..122: note = Description of Artificial Sequence: Synthetic polypeptide
  REGION 1..122: note = VH of XENP018588
EVQLVESGGGLVKPGGSLRLSCAASGFTFSNYWMNWVRQAPGKGLEWVGEIRLKTNNYATHYAEPVKGRFTISRDDSKSTVYLQMNSLKTEDTAVYYCTRYYGNYGGYFDVWGAGTLVTVSS

SEQ ID NO: 11856 - protein, 107 aa, synthetic construct; identical to SEQ ID NO: 10923
  REGION 1..107: note = Description of Artificial Sequence: Synthetic polypeptide
  REGION 1..107: note = VL of XENP018588

SEQ ID NO: 11857 - protein, 5 aa, synthetic construct
  REGION 1..5: note = Description of Artificial Sequence: Synthetic peptide
  REGION 1..5: note = XENP018588 vhCDR1
NYWMN

SEQ ID NO: 11858 - protein, 19 aa, synthetic construct
  REGION 1..19: note = Description of Artificial Sequence: Synthetic peptide
  REGION 1..19: note = XENP018588 vhCDR2
EIRLKTNNYATHYAEPVKG

SEQ ID NO: 11859 - protein, 11 aa, synthetic construct
  REGION 1..11: note = Description of Artificial Sequence: Synthetic peptide
  REGION 1..11: note = XENP018588 vhCDR3
YYGNYGGYFDV

SEQ ID NO: 11860 - protein, 11 aa, synthetic construct
  REGION 1..11: note = Description of Artificial Sequence: Synthetic peptide
  REGION 1..11: note = XENP018588 vlCDR1
RASQSVSNDVA

SEQ ID NO: 11861 - protein, 7 aa, synthetic construct
  REGION 1..7: note = Description of Artificial Sequence: Synthetic peptide
  REGION 1..7: note = XENP018588 vlCDR2
YASHRYT

SEQ ID NO: 11862 - protein, 9 aa, synthetic construct
  REGION 1..9: note = Description of Artificial Sequence: Synthetic peptide
  REGION 1..9: note = XENP018588 vlCDR3
QQDYSSPRT

SEQ ID NO: 11863 - protein, 249 aa, synthetic construct
  REGION 1..249: note = Description of Artificial Sequence: Synthetic polypeptide
  REGION 1..249: note = XENP018589 1G6_H1.93_L1_scFv(GKPGS)4
EVQLVESGGGLVKPGGSLRLSCAASGFTFSNYWMNWVRQAPGKGLEWVGEIRLKANNYATHYAEPVKGRFTISRDDSKSTVYLQMNSLKTEDTAVYYCTRYYGNYGGYFDVWGAGTLVTVSSGKPGSGKPGSGKPGSGKPGSSIVMTQSPATLSVSPGERATLSCRASQSVSNDVAWYQQKPGQSPRLLINYASHRYTGVPDRFTGSGYGTEFTLTISSLQSEDFAVYFCQQDYSSPRTFGGGTKVEIK

SEQ ID NO: 11864 - protein, 122 aa, synthetic construct
  REGION 1..122: note = Description of Artificial Sequence: Synthetic polypeptide
  REGION 1..122: note = VH of XENP018589
EVQLVESGGGLVKPGGSLRLSCAASGFTFSNYWMNWVRQAPGKGLEWVGEIRLKANNYATHYAEPVKGRFTISRDDSKSTVYLQMNSLKTEDTAVYYCTRYYGNYGGYFDVWGAGTLVTVSS

SEQ ID NO: 11865 - protein, 107 aa, synthetic construct; identical to SEQ ID NO: 10923
  REGION 1..107: note = Description of Artificial Sequence: Synthetic polypeptide
  REGION 1..107: note = VL of XENP018589

SEQ ID NO: 11866 - protein, 5 aa, synthetic construct
  REGION 1..5: note = Description of Artificial Sequence: Synthetic peptide
  REGION 1..5: note = XENP018589 vhCDR1
NYWMN

SEQ ID NO: 11867 - protein, 19 aa, synthetic construct
  REGION 1..19: note = Description of Artificial Sequence: Synthetic peptide
  REGION 1..19: note = XENP018589 vhCDR2
EIRLKANNYATHYAEPVKG

SEQ ID NO: 11868 - protein, 11 aa, synthetic construct
  REGION 1..11: note = Description of Artificial Sequence: Synthetic peptide
  REGION 1..11: note = XENP018589 vhCDR3
YYGNYGGYFDV

SEQ ID NO: 11869 - protein, 11 aa, synthetic construct
  REGION 1..11: note = Description of Artificial Sequence: Synthetic peptide
  REGION 1..11: note = XENP018589 vlCDR1
RASQSVSNDVA

SEQ ID NO: 11870 - protein, 7 aa, synthetic construct
  REGION 1..7: note = Description of Artificial Sequence: Synthetic peptide
  REGION 1..7: note = XENP018589 vlCDR2
YASHRYT

SEQ ID NO: 11871 - protein, 9 aa, synthetic construct
  REGION 1..9: note = Description of Artificial Sequence: Synthetic peptide
  REGION 1..9: note = XENP018589 vlCDR3
QQDYSSPRT

SEQ ID NO: 11872 - protein, 249 aa, synthetic construct
  REGION 1..249: note = Description of Artificial Sequence: Synthetic polypeptide
  REGION 1..249: note = XENP018590 1G6_H1.94_L1_scFv(GKPGS)4
EVQLVESGGGLVKPGGSLRLSCAASGFTFSNYWMNWVRQAPGKGLEWVGEIRLKQNNYATHYAEPVKGRFTISRDDSKSTVYLQMNSLKTEDTAVYYCTRYYGNYGGYFDVWGAGTLVTVSSGKPGSGKPGSGKPGSGKPGSSIVMTQSPATLSVSPGERATLSCRASQSVSNDVAWYQQKPGQSPRLLINYASHRYTGVPDRFTGSGYGTEFTLTISSLQSEDFAVYFCQQDYSSPRTFGGGTKVEIK

SEQ ID NO: 11873 - protein, 122 aa, synthetic construct
  REGION 1..122: note = Description of Artificial Sequence: Synthetic polypeptide
  REGION 1..122: note = VH of XENP018590
EVQLVESGGGLVKPGGSLRLSCAASGFTFSNYWMNWVRQAPGKGLEWVGEIRLKQNNYATHYAEPVKGRFTISRDDSKSTVYLQMNSLKTEDTAVYYCTRYYGNYGGYFDVWGAGTLVTVSS

SEQ ID NO: 11874 - protein, 107 aa, synthetic construct; identical to SEQ ID NO: 10923
  REGION 1..107: note = Description of Artificial Sequence: Synthetic polypeptide
  REGION 1..107: note = VL of XENP018590

SEQ ID NO: 11875 - protein, 5 aa, synthetic construct
  REGION 1..5: note = Description of Artificial Sequence: Synthetic peptide
  REGION 1..5: note = XENP018590 vhCDR1
NYWMN

SEQ ID NO: 11876 - protein, 19 aa, synthetic construct
  REGION 1..19: note = Description of Artificial Sequence: Synthetic peptide
  REGION 1..19: note = XENP018590 vhCDR2
EIRLKQNNYATHYAEPVKG

SEQ ID NO: 11877 - protein, 11 aa, synthetic construct
  REGION 1..11: note = Description of Artificial Sequence: Synthetic peptide
  REGION 1..11: note = XENP018590 vhCDR3
YYGNYGGYFDV

SEQ ID NO: 11878 - protein, 11 aa, synthetic construct
  REGION 1..11: note = Description of Artificial Sequence: Synthetic peptide
  REGION 1..11: note = XENP018590 vlCDR1
RASQSVSNDVA

SEQ ID NO: 11879 - protein, 7 aa, synthetic construct
  REGION 1..7: note = Description of Artificial Sequence: Synthetic peptide
  REGION 1..7: note = XENP018590 vlCDR2
YASHRYT

SEQ ID NO: 11880 - protein, 9 aa, synthetic construct
  REGION 1..9: note = Description of Artificial Sequence: Synthetic peptide
  REGION 1..9: note = XENP018590 vlCDR3
QQDYSSPRT

SEQ ID NO: 11881 - protein, 249 aa, synthetic construct
  REGION 1..249: note = Description of Artificial Sequence: Synthetic polypeptide
  REGION 1..249: note = XENP018591 1G6_H1.95_L1_scFv(GKPGS)4
EVQLVESGGGLVKPGGSLRLSCAASGFTFSNYWMNWVRQAPGKGLEWVGEIRLKGNNYATHYAEPVKGRFTISRDDSKSTVYLQMNSLKTEDTAVYYCTRYYGNYGGYFDVWGAGTLVTVSSGKPGSGKPGSGKPGSGKPGSSIVMTQSPATLSVSPGERATLSCRASQSVSNDVAWYQQKPGQSPRLLINYASHRYTGVPDRFTGSGYGTEFTLTISSLQSEDFAVYFCQQDYSSPRTFGGGTKVEIK

SEQ ID NO: 11882 - protein, 122 aa, synthetic construct
  REGION 1..122: note = Description of Artificial Sequence: Synthetic polypeptide
  REGION 1..122: note = VH of XENP018591
EVQLVESGGGLVKPGGSLRLSCAASGFTFSNYWMNWVRQAPGKGLEWVGEIRLKGNNYATHYAEPVKGRFTISRDDSKSTVYLQMNSLKTEDTAVYYCTRYYGNYGGYFDVWGAGTLVTVSS

SEQ ID NO: 11883 - protein, 107 aa, synthetic construct; identical to SEQ ID NO: 10923
  REGION 1..107: note = Description of Artificial Sequence: Synthetic polypeptide
  REGION 1..107: note = VL of XENP018591

SEQ ID NO: 11884 - protein, 5 aa, synthetic construct
  REGION 1..5: note = Description of Artificial Sequence: Synthetic peptide
  REGION 1..5: note = XENP018591 vhCDR1
NYWMN

SEQ ID NO: 11885 - protein, 19 aa, synthetic construct
  REGION 1..19: note = Description of Artificial Sequence: Synthetic peptide
  REGION 1..19: note = XENP018591 vhCDR2
EIRLKGNNYATHYAEPVKG

SEQ ID NO: 11886 - protein, 11 aa, synthetic construct
  REGION 1..11: note = Description of Artificial Sequence: Synthetic peptide
  REGION 1..11: note = XENP018591 vhCDR3
YYGNYGGYFDV

SEQ ID NO: 11887 - protein, 11 aa, synthetic construct
  REGION 1..11: note = Description of Artificial Sequence: Synthetic peptide
  REGION 1..11: note = XENP018591 vlCDR1
RASQSVSNDVA

SEQ ID NO: 11888 - protein, 7 aa, synthetic construct
  REGION 1..7: note = Description of Artificial Sequence: Synthetic peptide
  REGION 1..7: note = XENP018591 vlCDR2
YASHRYT

SEQ ID NO: 11889 - protein, 9 aa, synthetic construct
  REGION 1..9: note = Description of Artificial Sequence: Synthetic peptide
  REGION 1..9: note = XENP018591 vlCDR3
QQDYSSPRT

SEQ ID NO: 11890 - protein, 249 aa, synthetic construct
  REGION 1..249: note = Description of Artificial Sequence: Synthetic polypeptide
  REGION 1..249: note = XENP018592 1G6_H1.96_L1_scFv(GKPGS)4
EVQLVESGGGLVKPGGSLRLSCAASGFTFSNYWMNWVRQAPGKGLEWVGEIRLKVNNYATHYAEPVKGRFTISRDDSKSTVYLQMNSLKTEDTAVYYCTRYYGNYGGYFDVWGAGTLVTVSSGKPGSGKPGSGKPGSGKPGSSIVMTQSPATLSVSPGERATLSCRASQSVSNDVAWYQQKPGQSPRLLINYASHRYTGVPDRFTGSGYGTEFTLTISSLQSEDFAVYFCQQDYSSPRTFGGGTKVEIK

SEQ ID NO: 11891 - protein, 122 aa, synthetic construct
  REGION 1..122: note = Description of Artificial Sequence: Synthetic polypeptide
  REGION 1..122: note = VH of XENP018592
EVQLVESGGGLVKPGGSLRLSCAASGFTFSNYWMNWVRQAPGKGLEWVGEIRLKVNNYATHYAEPVKGRFTISRDDSKSTVYLQMNSLKTEDTAVYYCTRYYGNYGGYFDVWGAGTLVTVSS

SEQ ID NO: 11892 - protein, 107 aa, synthetic construct; identical to SEQ ID NO: 10923
  REGION 1..107: note = Description of Artificial Sequence: Synthetic polypeptide
  REGION 1..107: note = VL of XENP018592

SEQ ID NO: 11893 - protein, 5 aa, synthetic construct
  REGION 1..5: note = Description of Artificial Sequence: Synthetic peptide
  REGION 1..5: note = XENP018592 vhCDR1
NYWMN

SEQ ID NO: 11894 - protein, 19 aa, synthetic construct
  REGION 1..19: note = Description of Artificial Sequence: Synthetic peptide
  REGION 1..19: note = XENP018592 vhCDR2
EIRLKVNNYATHYAEPVKG

SEQ ID NO: 11895 - protein, 11 aa, synthetic construct
  REGION 1..11: note = Description of Artificial Sequence: Synthetic peptide
  REGION 1..11: note = XENP018592 vhCDR3
YYGNYGGYFDV

SEQ ID NO: 11896 - protein, 11 aa, synthetic construct
  REGION 1..11: note = Description of Artificial Sequence: Synthetic peptide
  REGION 1..11: note = XENP018592 vlCDR1
RASQSVSNDVA

SEQ ID NO: 11897 - protein, 7 aa, synthetic construct
  REGION 1..7: note = Description of Artificial Sequence: Synthetic peptide
  REGION 1..7: note = XENP018592 vlCDR2
YASHRYT

SEQ ID NO: 11898 - protein, 9 aa, synthetic construct
  REGION 1..9: note = Description of Artificial Sequence: Synthetic peptide
  REGION 1..9: note = XENP018592 vlCDR3
QQDYSSPRT

SEQ ID NO: 11899 - protein, 249 aa, synthetic construct
  REGION 1..249: note = Description of Artificial Sequence: Synthetic polypeptide
  REGION 1..249: note = XENP018593 1G6_H1.97_L1_scFv(GKPGS)4
EVQLVESGGGLVKPGGSLRLSCAASGFTFSNYWMNWVRQAPGKGLEWVGEIRLKHNNYATHYAEPVKGRFTISRDDSKSTVYLQMNSLKTEDTAVYYCTRYYGNYGGYFDVWGAGTLVTVSSGKPGSGKPGSGKPGSGKPGSSIVMTQSPATLSVSPGERATLSCRASQSVSNDVAWYQQKPGQSPRLLINYASHRYTGVPDRFTGSGYGTEFTLTISSLQSEDFAVYFCQQDYSSPRTFGGGTKVEIK

SEQ ID NO: 11900 - protein, 122 aa, synthetic construct
  REGION 1..122: note = Description of Artificial Sequence: Synthetic polypeptide
  REGION 1..122: note = VH of XENP018593
EVQLVESGGGLVKPGGSLRLSCAASGFTFSNYWMNWVRQAPGKGLEWVGEIRLKHNNYATHYAEPVKGRFTISRDDSKSTVYLQMNSLKTEDTAVYYCTRYYGNYGGYFDVWGAGTLVTVSS

SEQ ID NO: 11901 - protein, 107 aa, synthetic construct; identical to SEQ ID NO: 10923
  REGION 1..107: note = Description of Artificial Sequence: Synthetic polypeptide
  REGION 1..107: note = VL of XENP018593

SEQ ID NO: 11902 - protein, 5 aa, synthetic construct
  REGION 1..5: note = Description of Artificial Sequence: Synthetic peptide
  REGION 1..5: note = XENP018593 vhCDR1
NYWMN

SEQ ID NO: 11903 - protein, 19 aa, synthetic construct
  REGION 1..19: note = Description of Artificial Sequence: Synthetic peptide
  REGION 1..19: note = XENP018593 vhCDR2
EIRLKHNNYATHYAEPVKG

SEQ ID NO: 11904 - protein, 11 aa, synthetic construct
  REGION 1..11: note = Description of Artificial Sequence: Synthetic peptide
  REGION 1..11: note = XENP018593 vhCDR3
YYGNYGGYFDV

SEQ ID NO: 11905 - protein, 11 aa, synthetic construct
  REGION 1..11: note = Description of Artificial Sequence: Synthetic peptide
  REGION 1..11: note = XENP018593 vlCDR1
RASQSVSNDVA

SEQ ID NO: 11906 - protein, 7 aa, synthetic construct
  REGION 1..7: note = Description of Artificial Sequence: Synthetic peptide
  REGION 1..7: note = XENP018593 vlCDR2
YASHRYT

SEQ ID NO: 11907 - protein, 9 aa, synthetic construct
  REGION 1..9: note = Description of Artificial Sequence: Synthetic peptide
  REGION 1..9: note = XENP018593 vlCDR3
QQDYSSPRT

SEQ ID NO: 11908 - protein, 249 aa, synthetic construct
  REGION 1..249: note = Description of Artificial Sequence: Synthetic polypeptide
  REGION 1..249: note = XENP018594 1G6_H1.98_L1_scFv(GKPGS)4
EVQLVESGGGLVKPGGSLRLSCAASGFTFSNYWMNWVRQAPGKGLEWVGEIRLKDNNYATHYAEPVKGRFTISRDDSKSTVYLQMNSLKTEDTAVYYCTRYYGNYGGYFDVWGAGTLVTVSSGKPGSGKPGSGKPGSGKPGSSIVMTQSPATLSVSPGERATLSCRASQSVSNDVAWYQQKPGQSPRLLINYASHRYTGVPDRFTGSGYGTEFTLTISSLQSEDFAVYFCQQDYSSPRTFGGGTKVEIK

SEQ ID NO: 11909 - protein, 122 aa, synthetic construct
  REGION 1..122: note = Description of Artificial Sequence: Synthetic polypeptide
  REGION 1..122: note = VH of XENP018594
EVQLVESGGGLVKPGGSLRLSCAASGFTFSNYWMNWVRQAPGKGLEWVGEIRLKDNNYATHYAEPVKGRFTISRDDSKSTVYLQMNSLKTEDTAVYYCTRYYGNYGGYFDVWGAGTLVTVSS

SEQ ID NO: 11910 - protein, 107 aa, synthetic construct; identical to SEQ ID NO: 10923
  REGION 1..107: note = Description of Artificial Sequence: Synthetic polypeptide
  REGION 1..107: note = VL of XENP018594

SEQ ID NO: 11911 - protein, 5 aa, synthetic construct
  REGION 1..5: note = Description of Artificial Sequence: Synthetic peptide
  REGION 1..5: note = XENP018594 vhCDR1
NYWMN

SEQ ID NO: 11912 - protein, 19 aa, synthetic construct
  REGION 1..19: note = Description of Artificial Sequence: Synthetic peptide
  REGION 1..19: note = XENP018594 vhCDR2
EIRLKDNNYATHYAEPVKG

SEQ ID NO: 11913 - protein, 11 aa, synthetic construct
  REGION 1..11: note = Description of Artificial Sequence: Synthetic peptide
  REGION 1..11: note = XENP018594 vhCDR3
YYGNYGGYFDV

SEQ ID NO: 11914 - protein, 11 aa, synthetic construct
  REGION 1..11: note = Description of Artificial Sequence: Synthetic peptide
  REGION 1..11: note = XENP018594 vlCDR1
RASQSVSNDVA

SEQ ID NO: 11915 - protein, 7 aa, synthetic construct
  REGION 1..7: note = Description of Artificial Sequence: Synthetic peptide
  REGION 1..7: note = XENP018594 vlCDR2
YASHRYT

SEQ ID NO: 11916 - protein, 9 aa, synthetic construct
  REGION 1..9: note = Description of Artificial Sequence: Synthetic peptide
  REGION 1..9: note = XENP018594 vlCDR3
QQDYSSPRT

SEQ ID NO: 11917 - protein, 249 aa, synthetic construct
  REGION 1..249: note = Description of Artificial Sequence: Synthetic polypeptide
  REGION 1..249: note = XENP018595 1G6_H1.99_L1_scFv(GKPGS)4
EVQLVESGGGLVKPGGSLRLSCAASGFTFSNYWMNWVRQAPGKGLEWVGEIRLKKNNYATHYAEPVKGRFTISRDDSKSTVYLQMNSLKTEDTAVYYCTRYYGNYGGYFDVWGAGTLVTVSSGKPGSGKPGSGKPGSGKPGSSIVMTQSPATLSVSPGERATLSCRASQSVSNDVAWYQQKPGQSPRLLINYASHRYTGVPDRFTGSGYGTEFTLTISSLQSEDFAVYFCQQDYSSPRTFGGGTKVEIK

SEQ ID NO: 11918 - protein, 122 aa, synthetic construct
  REGION 1..122: note = Description of Artificial Sequence: Synthetic polypeptide
  REGION 1..122: note = VH of XENP018595
EVQLVESGGGLVKPGGSLRLSCAASGFTFSNYWMNWVRQAPGKGLEWVGEIRLKKNNYATHYAEPVKGRFTISRDDSKSTVYLQMNSLKTEDTAVYYCTRYYGNYGGYFDVWGAGTLVTVSS

SEQ ID NO: 11919 - protein, 107 aa, synthetic construct; identical to SEQ ID NO: 10923
  REGION 1..107: note = Description of Artificial Sequence: Synthetic polypeptide
  REGION 1..107: note = VL of XENP018595

SEQ ID NO: 11920 - protein, 5 aa, synthetic construct
  REGION 1..5: note = Description of Artificial Sequence: Synthetic peptide
  REGION 1..5: note = XENP018595 vhCDR1
NYWMN

SEQ ID NO: 11921 - protein, 19 aa, synthetic construct
  REGION 1..19: note = Description of Artificial Sequence: Synthetic peptide
  REGION 1..19: note = XENP018595 vhCDR2
EIRLKKNNYATHYAEPVKG

SEQ ID NO: 11922 - protein, 11 aa, synthetic construct
  REGION 1..11: note = Description of Artificial Sequence: Synthetic peptide
  REGION 1..11: note = XENP018595 vhCDR3
YYGNYGGYFDV

SEQ ID NO: 11923 - protein, 11 aa, synthetic construct
  REGION 1..11: note = Description of Artificial Sequence: Synthetic peptide
  REGION 1..11: note = XENP018595 vlCDR1
RASQSVSNDVA

SEQ ID NO: 11924 - protein, 7 aa, synthetic construct
  REGION 1..7: note = Description of Artificial Sequence: Synthetic peptide
  REGION 1..7: note = XENP018595 vlCDR2
YASHRYT

SEQ ID NO: 11925 - protein, 9 aa, synthetic construct
  REGION 1..9: note = Description of Artificial Sequence: Synthetic peptide
  REGION 1..9: note = XENP018595 vlCDR3
QQDYSSPRT

SEQ ID NO: 11926 - protein, 249 aa, synthetic construct
  REGION 1..249: note = Description of Artificial Sequence: Synthetic polypeptide
  REGION 1..249: note = XENP018596 1G6_H1.100_L1_scFv(GKPGS)4
EVQLVESGGGLVKPGGSLRLSCAASGFTFSNYWMNWVRQAPGKGLEWVGEIRLKYNNYATHYAEPVKGRFTISRDDSKSTVYLQMNSLKTEDTAVYYCTRYYGNYGGYFDVWGAGTLVTVSSGKPGSGKPGSGKPGSGKPGSSIVMTQSPATLSVSPGERATLSCRASQSVSNDVAWYQQKPGQSPRLLINYASHRYTGVPDRFTGSGYGTEFTLTISSLQSEDFAVYFCQQDYSSPRTFGGGTKVEIK

SEQ ID NO: 11927 - protein, 122 aa, synthetic construct
  REGION 1..122: note = Description of Artificial Sequence: Synthetic polypeptide
  REGION 1..122: note = VH of XENP018596
EVQLVESGGGLVKPGGSLRLSCAASGFTFSNYWMNWVRQAPGKGLEWVGEIRLKYNNYATHYAEPVKGRFTISRDDSKSTVYLQMNSLKTEDTAVYYCTRYYGNYGGYFDVWGAGTLVTVSS

SEQ ID NO: 11928 - protein, 107 aa, synthetic construct; identical to SEQ ID NO: 10923
  REGION 1..107: note = Description of Artificial Sequence: Synthetic polypeptide
  REGION 1..107: note = VL of XENP018596

SEQ ID NO: 11929 - protein, 5 aa, synthetic construct
  REGION 1..5: note = Description of Artificial Sequence: Synthetic peptide
  REGION 1..5: note = XENP018596 vhCDR1
NYWMN

SEQ ID NO: 11930 - protein, 19 aa, synthetic construct
  REGION 1..19: note = Description of Artificial Sequence: Synthetic peptide
  REGION 1..19: note = XENP018596 vhCDR2
EIRLKYNNYATHYAEPVKG

SEQ ID NO: 11931 - protein, 11 aa, synthetic construct
  REGION 1..11: note = Description of Artificial Sequence: Synthetic peptide
  REGION 1..11: note = XENP018596 vhCDR3
YYGNYGGYFDV

SEQ ID NO: 11932 - protein, 11 aa, synthetic construct
  REGION 1..11: note = Description of Artificial Sequence: Synthetic peptide
  REGION 1..11: note = XENP018596 vlCDR1
RASQSVSNDVA

SEQ ID NO: 11933 - protein, 7 aa, synthetic construct
  REGION 1..7: note = Description of Artificial Sequence: Synthetic peptide
  REGION 1..7: note = XENP018596 vlCDR2
YASHRYT

SEQ ID NO: 11934 - protein, 9 aa, synthetic construct
  REGION 1..9: note = Description of Artificial Sequence: Synthetic peptide
  REGION 1..9: note = XENP018596 vlCDR3
QQDYSSPRT

SEQ ID NO: 11935 - protein, 249 aa, synthetic construct
  REGION 1..249: note = Description of Artificial Sequence: Synthetic polypeptide
  REGION 1..249: note = XENP018601 1G6_H1.101_L1_scFv(GKPGS)4
EVQLVESGGGLVKPGGSLRLSCAASGFTFSNYWMNWVRQAPGKGLEWVGEIRLKSDNYATHYAEPVKGRFTISRDDSKSTVYLQMNSLKTEDTAVYYCTRYYGNYGGYFDVWGAGTLVTVSSGKPGSGKPGSGKPGSGKPGSSIVMTQSPATLSVSPGERATLSCRASQSVSNDVAWYQQKPGQSPRLLINYASHRYTGVPDRFTGSGYGTEFTLTISSLQSEDFAVYFCQQDYSSPRTFGGGTKVEIK

SEQ ID NO: 11936 - protein, 122 aa, synthetic construct
  REGION 1..122: note = Description of Artificial Sequence: Synthetic polypeptide
  REGION 1..122: note = VH of XENP018601
EVQLVESGGGLVKPGGSLRLSCAASGFTFSNYWMNWVRQAPGKGLEWVGEIRLKSDNYATHYAEPVKGRFTISRDDSKSTVYLQMNSLKTEDTAVYYCTRYYGNYGGYFDVWGAGTLVTVSS

SEQ ID NO: 11937 - protein, 107 aa, synthetic construct; identical to SEQ ID NO: 10923
  REGION 1..107: note = Description of Artificial Sequence: Synthetic polypeptide
  REGION 1..107: note = VL of XENP018601

SEQ ID NO: 11938 - protein, 5 aa, synthetic construct
  REGION 1..5: note = Description of Artificial Sequence: Synthetic peptide
  REGION 1..5: note = XENP018601 vhCDR1
NYWMN

SEQ ID NO: 11939 - protein, 19 aa, synthetic construct
  REGION 1..19: note = Description of Artificial Sequence: Synthetic peptide
  REGION 1..19: note = XENP018601 vhCDR2
EIRLKSDNYATHYAEPVKG

SEQ ID NO: 11940 - protein, 11 aa, synthetic construct
  REGION 1..11: note = Description of Artificial Sequence: Synthetic peptide
  REGION 1..11: note = XENP018601 vhCDR3
YYGNYGGYFDV

SEQ ID NO: 11941 - protein, 11 aa, synthetic construct
  REGION 1..11: note = Description of Artificial Sequence: Synthetic peptide
  REGION 1..11: note = XENP018601 vlCDR1
RASQSVSNDVA

SEQ ID NO: 11942 - protein, 7 aa, synthetic construct
  REGION 1..7: note = Description of Artificial Sequence: Synthetic peptide
  REGION 1..7: note = XENP018601 vlCDR2
YASHRYT

SEQ ID NO: 11943 - protein, 9 aa, synthetic construct
  REGION 1..9: note = Description of Artificial Sequence: Synthetic peptide
  REGION 1..9: note = XENP018601 vlCDR3
QQDYSSPRT

SEQ ID NO: 11944 - protein, 249 aa, synthetic construct
  REGION 1..249: note = Description of Artificial Sequence: Synthetic polypeptide
  REGION 1..249: note = XENP018602 1G6_H1.102_L1_scFv(GKPGS)4
EVQLVESGGGLVKPGGSLRLSCAASGFTFSNYWMNWVRQAPGKGLEWVGEIRLKSHNYATHYAEPVKGRFTISRDDSKSTVYLQMNSLKTEDTAVYYCTRYYGNYGGYFDVWGAGTLVTVSSGKPGSGKPGSGKPGSGKPGSSIVMTQSPATLSVSPGERATLSCRASQSVSNDVAWYQQKPGQSPRLLINYASHRYTGVPDRFTGSGYGTEFTLTISSLQSEDFAVYFCQQDYSSPRTFGGGTKVEIK

SEQ ID NO: 11945 - protein, 122 aa, synthetic construct
  REGION 1..122: note = Description of Artificial Sequence: Synthetic polypeptide
  REGION 1..122: note = VH of XENP018602
EVQLVESGGGLVKPGGSLRLSCAASGFTFSNYWMNWVRQAPGKGLEWVGEIRLKSHNYATHYAEPVKGRFTISRDDSKSTVYLQMNSLKTEDTAVYYCTRYYGNYGGYFDVWGAGTLVTVSS

SEQ ID NO: 11946 - protein, 107 aa, synthetic construct; identical to SEQ ID NO: 10923
  REGION 1..107: note = Description of Artificial Sequence: Synthetic polypeptide
  REGION 1..107: note = VL of XENP018602

SEQ ID NO: 11947 - protein, 5 aa, synthetic construct
  REGION 1..5: note = Description of Artificial Sequence: Synthetic peptide
  REGION 1..5: note = XENP018602 vhCDR1
NYWMN

SEQ ID NO: 11948 - protein, 19 aa, synthetic construct
  REGION 1..19: note = Description of Artificial Sequence: Synthetic peptide
  REGION 1..19: note = XENP018602 vhCDR2
EIRLKSHNYATHYAEPVKG

SEQ ID NO: 11949 - protein, 11 aa, synthetic construct
  REGION 1..11: note = Description of Artificial Sequence: Synthetic peptide
  REGION 1..11: note = XENP018602 vhCDR3
YYGNYGGYFDV

SEQ ID NO: 11950 - protein, 11 aa, synthetic construct
  REGION 1..11: note = Description of Artificial Sequence: Synthetic peptide
  REGION 1..11: note = XENP018602 vlCDR1
RASQSVSNDVA

SEQ ID NO: 11951 - protein, 7 aa, synthetic construct
  REGION 1..7: note = Description of Artificial Sequence: Synthetic peptide
  REGION 1..7: note = XENP018602 vlCDR2
YASHRYT

SEQ ID NO: 11952 - protein, 9 aa, synthetic construct
  REGION 1..9: note = Description of Artificial Sequence: Synthetic peptide
  REGION 1..9: note = XENP018602 vlCDR3
QQDYSSPRT

SEQ ID NO: 11953 - protein, 249 aa, synthetic construct
  REGION 1..249: note = Description of Artificial Sequence: Synthetic polypeptide
  REGION 1..249: note = XENP018603 1G6_H1.103_L1_scFv(GKPGS)4
EVQLVESGGGLVKPGGSLRLSCAASGFTFSNYWMNWVRQAPGKGLEWVGEIRLKSENYATHYAEPVKGRFTISRDDSKSTVYLQMNSLKTEDTAVYYCTRYYGNYGGYFDVWGAGTLVTVSSGKPGSGKPGSGKPGSGKPGSSIVMTQSPATLSVSPGERATLSCRASQSVSNDVAWYQQKPGQSPRLLINYASHRYTGVPDRFTGSGYGTEFTLTISSLQSEDFAVYFCQQDYSSPRTFGGGTKVEIK

SEQ ID NO: 11954 - protein, 122 aa, synthetic construct
  REGION 1..122: note = Description of Artificial Sequence: Synthetic polypeptide
  REGION 1..122: note = VH of XENP018603
EVQLVESGGGLVKPGGSLRLSCAASGFTFSNYWMNWVRQAPGKGLEWVGEIRLKSENYATHYAEPVKGRFTISRDDSKSTVYLQMNSLKTEDTAVYYCTRYYGNYGGYFDVWGAGTLVTVSS

SEQ ID NO: 11955 - protein, 107 aa, synthetic construct; identical to SEQ ID NO: 10923
  REGION 1..107: note = Description of Artificial Sequence: Synthetic polypeptide
  REGION 1..107: note = VL of XENP018603

SEQ ID NO: 11956 - protein, 5 aa, synthetic construct
  REGION 1..5: note = Description of Artificial Sequence: Synthetic peptide
  REGION 1..5: note = XENP018603 vhCDR1
NYWMN

SEQ ID NO: 11957 - protein, 19 aa, synthetic construct
  REGION 1..19: note = Description of Artificial Sequence: Synthetic peptide
  REGION 1..19: note = XENP018603 vhCDR2
EIRLKSENYATHYAEPVKG

SEQ ID NO: 11958 - protein, 11 aa, synthetic construct
  REGION 1..11: note = Description of Artificial Sequence: Synthetic peptide
  REGION 1..11: note = XENP018603 vhCDR3
YYGNYGGYFDV

SEQ ID NO: 11959 - protein, 11 aa, synthetic construct
  REGION 1..11: note = Description of Artificial Sequence: Synthetic peptide
  REGION 1..11: note = XENP018603 vlCDR1
RASQSVSNDVA

SEQ ID NO: 11960 - protein, 7 aa, synthetic construct
  REGION 1..7: note = Description of Artificial Sequence: Synthetic peptide
  REGION 1..7: note = XENP018603 vlCDR2
YASHRYT

SEQ ID NO: 11961 - protein, 9 aa, synthetic construct
  REGION 1..9: note = Description of Artificial Sequence: Synthetic peptide
  REGION 1..9: note = XENP018603 vlCDR3
QQDYSSPRT

SEQ ID NO: 11962 - protein, 249 aa, synthetic construct
  REGION 1..249: note = Description of Artificial Sequence: Synthetic polypeptide
  REGION 1..249: note = XENP018604 1G6_H1.104_L1_scFv(GKPGS)4
EVQLVESGGGLVKPGGSLRLSCAASGFTFSNYWMNWVRQAPGKGLEWVGEIRLKSSNYATHYAEPVKGRFTISRDDSKSTVYLQMNSLKTEDTAVYYCTRYYGNYGGYFDVWGAGTLVTVSSGKPGSGKPGSGKPGSGKPGSSIVMTQSPATLSVSPGERATLSCRASQSVSNDVAWYQQKPGQSPRLLINYASHRYTGVPDRFTGSGYGTEFTLTISSLQSEDFAVYFCQQDYSSPRTFGGGTKVEIK

SEQ ID NO: 11963 - protein, 122 aa, synthetic construct
  REGION 1..122: note = Description of Artificial Sequence: Synthetic polypeptide
  REGION 1..122: note = VH of XENP018604
EVQLVESGGGLVKPGGSLRLSCAASGFTFSNYWMNWVRQAPGKGLEWVGEIRLKSSNYATHYAEPVKGRFTISRDDSKSTVYLQMNSLKTEDTAVYYCTRYYGNYGGYFDVWGAGTLVTVSS

SEQ ID NO: 11964 - protein, 107 aa, synthetic construct; identical to SEQ ID NO: 10923
  REGION 1..107: note = Description of Artificial Sequence: Synthetic polypeptide
  REGION 1..107: note = VL of XENP018604

SEQ ID NO: 11965 - protein, 5 aa, synthetic construct
  REGION 1..5: note = Description of Artificial Sequence: Synthetic peptide
  REGION 1..5: note = XENP018604 vhCDR1
NYWMN

SEQ ID NO: 11966 - protein, 19 aa, synthetic construct
  REGION 1..19: note = Description of Artificial Sequence: Synthetic peptide
  REGION 1..19: note = XENP018604 vhCDR2
EIRLKSSNYATHYAEPVKG

SEQ ID NO: 11967 - protein, 11 aa, synthetic construct
  REGION 1..11: note = Description of Artificial Sequence: Synthetic peptide
  REGION 1..11: note = XENP018604 vhCDR3
YYGNYGGYFDV

SEQ ID NO: 11968 - protein, 11 aa, synthetic construct
  REGION 1..11: note = Description of Artificial Sequence: Synthetic peptide
  REGION 1..11: note = XENP018604 vlCDR1
RASQSVSNDVA

SEQ ID NO: 11969 - protein, 7 aa, synthetic construct
  REGION 1..7: note = Description of Artificial Sequence: Synthetic peptide
  REGION 1..7: note = XENP018604 vlCDR2
YASHRYT

SEQ ID NO: 11970 - protein, 9 aa, synthetic construct
  REGION 1..9: note = Description of Artificial Sequence: Synthetic peptide
  REGION 1..9: note = XENP018604 vlCDR3
QQDYSSPRT

SEQ ID NO: 11971 - protein, 249 aa, synthetic construct
  REGION 1..249: note = Description of Artificial Sequence: Synthetic polypeptide
  REGION 1..249: note = XENP018605 1G6_H1.105_L1_scFv(GKPGS)4
EVQLVESGGGLVKPGGSLRLSCAASGFTFSNYWMNWVRQAPGKGLEWVGEIRLKSRNYATHYAEPVKGRFTISRDDSKSTVYLQMNSLKTEDTAVYYCTRYYGNYGGYFDVWGAGTLVTVSSGKPGSGKPGSGKPGSGKPGSSIVMTQSPATLSVSPGERATLSCRASQSVSNDVAWYQQKPGQSPRLLINYASHRYTGVPDRFTGSGYGTEFTLTISSLQSEDFAVYFCQQDYSSPRTFGGGTKVEIK

SEQ ID NO: 11972 - protein, 122 aa, synthetic construct
  REGION 1..122: note = Description of Artificial Sequence: Synthetic polypeptide
  REGION 1..122: note = VH of XENP018605
EVQLVESGGGLVKPGGSLRLSCAASGFTFSNYWMNWVRQAPGKGLEWVGEIRLKSRNYATHYAEPVKGRFTISRDDSKSTVYLQMNSLKTEDTAVYYCTRYYGNYGGYFDVWGAGTLVTVSS

SEQ ID NO: 11973 - protein, 107 aa, synthetic construct; identical to SEQ ID NO: 10923
  REGION 1..107: note = Description of Artificial Sequence: Synthetic polypeptide
  REGION 1..107: note = VL of XENP018605

SEQ ID NO: 11974 - protein, 5 aa, synthetic construct
  REGION 1..5: note = Description of Artificial Sequence: Synthetic peptide
  REGION 1..5: note = XENP018605 vhCDR1
NYWMN

SEQ ID NO: 11975 - protein, 19 aa, synthetic construct
  REGION 1..19: note = Description of Artificial Sequence: Synthetic peptide
  REGION 1..19: note = XENP018605 vhCDR2
EIRLKSRNYATHYAEPVKG

SEQ ID NO: 11976 - protein, 11 aa, synthetic construct
  REGION 1..11: note = Description of Artificial Sequence: Synthetic peptide
  REGION 1..11: note = XENP018605 vhCDR3
YYGNYGGYFDV

SEQ ID NO: 11977 - protein, 11 aa, synthetic construct
  REGION 1..11: note = Description of Artificial Sequence: Synthetic peptide
  REGION 1..11: note = XENP018605 vlCDR1
RASQSVSNDVA

SEQ ID NO: 11978 - protein, 7 aa, synthetic construct
  REGION 1..7: note = Description of Artificial Sequence: Synthetic peptide
  REGION 1..7: note = XENP018605 vlCDR2
YASHRYT

SEQ ID NO: 11979 - protein, 9 aa, synthetic construct
  REGION 1..9: note = Description of Artificial Sequence: Synthetic peptide
  REGION 1..9: note = XENP018605 vlCDR3
QQDYSSPRT

SEQ ID NO: 11980 - protein, 249 aa, synthetic construct
  REGION 1..249: note = Description of Artificial Sequence: Synthetic polypeptide
  REGION 1..249: note = XENP018606 1G6_H1.106_L1_scFv(GKPGS)4
EVQLVESGGGLVKPGGSLRLSCAASGFTFSNYWMNWVRQAPGKGLEWVGEIRLKSLNYATHYAEPVKGRFTISRDDSKSTVYLQMNSLKTEDTAVYYCTRYYGNYGGYFDVWGAGTLVTVSSGKPGSGKPGSGKPGSGKPGSSIVMTQSPATLSVSPGERATLSCRASQSVSNDVAWYQQKPGQSPRLLINYASHRYTGVPDRFTGSGYGTEFTLTISSLQSEDFAVYFCQQDYSSPRTFGGGTKVEIK

SEQ ID NO: 11981 - protein, 122 aa, synthetic construct
  REGION 1..122: note = Description of Artificial Sequence: Synthetic polypeptide
  REGION 1..122: note = VH of XENP018606
EVQLVESGGGLVKPGGSLRLSCAASGFTFSNYWMNWVRQAPGKGLEWVGEIRLKSLNYATHYAEPVKGRFTISRDDSKSTVYLQMNSLKTEDTAVYYCTRYYGNYGGYFDVWGAGTLVTVSS

SEQ ID NO: 11982 - protein, 107 aa, synthetic construct; identical to SEQ ID NO: 10923
  REGION 1..107: note = Description of Artificial Sequence: Synthetic polypeptide
  REGION 1..107: note = VL of XENP018606

SEQ ID NO: 11983 - protein, 5 aa, synthetic construct
  REGION 1..5: note = Description of Artificial Sequence: Synthetic peptide
  REGION 1..5: note = XENP018606 vhCDR1
NYWMN

SEQ ID NO: 11984 - protein, 19 aa, synthetic construct
  REGION 1..19: note = Description of Artificial Sequence: Synthetic peptide
  REGION 1..19: note = XENP018606 vhCDR2
EIRLKSLNYATHYAEPVKG

SEQ ID NO: 11985 - protein, 11 aa, synthetic construct
  REGION 1..11: note = Description of Artificial Sequence: Synthetic peptide
  REGION 1..11: note = XENP018606 vhCDR3
YYGNYGGYFDV

SEQ ID NO: 11986 - protein, 11 aa, synthetic construct
  REGION 1..11: note = Description of Artificial Sequence: Synthetic peptide
  REGION 1..11: note = XENP018606 vlCDR1
RASQSVSNDVA

SEQ ID NO: 11987 - protein, 7 aa, synthetic construct
  REGION 1..7: note = Description of Artificial Sequence: Synthetic peptide
  REGION 1..7: note = XENP018606 vlCDR2
YASHRYT

SEQ ID NO: 11988 - protein, 9 aa, synthetic construct
  REGION 1..9: note = Description of Artificial Sequence: Synthetic peptide
  REGION 1..9: note = XENP018606 vlCDR3
QQDYSSPRT

SEQ ID NO: 11989 - protein, 249 aa, synthetic construct
  REGION 1..249: note = Description of Artificial Sequence: Synthetic polypeptide
  REGION 1..249: note = XENP018607 1G6_H1.107_L1_scFv(GKPGS)4
EVQLVESGGGLVKPGGSLRLSCAASGFTFSNYWMNWVRQAPGKGLEWVGEIRLKSTNYATHYAEPVKGRFTISRDDSKSTVYLQMNSLKTEDTAVYYCTRYYGNYGGYFDVWGAGTLVTVSSGKPGSGKPGSGKPGSGKPGSSIVMTQSPATLSVSPGERATLSCRASQSVSNDVAWYQQKPGQSPRLLINYASHRYTGVPDRFTGSGYGTEFTLTISSLQSEDFAVYFCQQDYSSPRTFGGGTKVEIK

SEQ ID NO: 11990 - protein, 122 aa, synthetic construct
  REGION 1..122: note = Description of Artificial Sequence: Synthetic polypeptide
  REGION 1..122: note = VH of XENP018607
EVQLVESGGGLVKPGGSLRLSCAASGFTFSNYWMNWVRQAPGKGLEWVGEIRLKSTNYATHYAEPVKGRFTISRDDSKSTVYLQMNSLKTEDTAVYYCTRYYGNYGGYFDVWGAGTLVTVSS

SEQ ID NO: 11991 - protein, 107 aa, synthetic construct; identical to SEQ ID NO: 10923
  REGION 1..107: note = Description of Artificial Sequence: Synthetic polypeptide
  REGION 1..107: note = VL of XENP018607

SEQ ID NO: 11992 - protein, 5 aa, synthetic construct
  REGION 1..5: note = Description of Artificial Sequence: Synthetic peptide
  REGION 1..5: note = XENP018607 vhCDR1
NYWMN

SEQ ID NO: 11993 - protein, 19 aa, synthetic construct
  REGION 1..19: note = Description of Artificial Sequence: Synthetic peptide
  REGION 1..19: note = XENP018607 vhCDR2
EIRLKSTNYATHYAEPVKG

SEQ ID NO: 11994 - protein, 11 aa, synthetic construct
  REGION 1..11: note = Description of Artificial Sequence: Synthetic peptide
  REGION 1..11: note = XENP018607 vhCDR3
YYGNYGGYFDV

SEQ ID NO: 11995 - protein, 11 aa, synthetic construct
  REGION 1..11: note = Description of Artificial Sequence: Synthetic peptide
  REGION 1..11: note = XENP018607 vlCDR1
RASQSVSNDVA

SEQ ID NO: 11996 - protein, 7 aa, synthetic construct
  REGION 1..7: note = Description of Artificial Sequence: Synthetic peptide
  REGION 1..7: note = XENP018607 vlCDR2
YASHRYT

SEQ ID NO: 11997 - protein, 9 aa, synthetic construct
  REGION 1..9: note = Description of Artificial Sequence: Synthetic peptide
  REGION 1..9: note = XENP018607 vlCDR3
QQDYSSPRT

SEQ ID NO: 11998 - protein, 249 aa, synthetic construct
  REGION 1..249: note = Description of Artificial Sequence: Synthetic polypeptide
  REGION 1..249: note = XENP018608 1G6_H1.108_L1_scFv(GKPGS)4
EVQLVESGGGLVKPGGSLRLSCAASGFTFSNYWMNWVRQAPGKGLEWVGEIRLKSGNYATHYAEPVKGRFTISRDDSKSTVYLQMNSLKTEDTAVYYCTRYYGNYGGYFDVWGAGTLVTVSSGKPGSGKPGSGKPGSGKPGSSIVMTQSPATLSVSPGERATLSCRASQSVSNDVAWYQQKPGQSPRLLINYASHRYTGVPDRFTGSGYGTEFTLTISSLQSEDFAVYFCQQDYSSPRTFGGGTKVEIK

SEQ ID NO: 11999 - protein, 122 aa, synthetic construct
  REGION 1..122: note = Description of Artificial Sequence: Synthetic polypeptide
  REGION 1..122: note = VH of XENP018608
EVQLVESGGGLVKPGGSLRLSCAASGFTFSNYWMNWVRQAPGKGLEWVGEIRLKSGNYATHYAEPVKGRFTISRDDSKSTVYLQMNSLKTEDTAVYYCTRYYGNYGGYFDVWGAGTLVTVSS

SEQ ID NO: 12000 - protein, 107 aa, synthetic construct; identical to SEQ ID NO: 10923
  REGION 1..107: note = Description of Artificial Sequence: Synthetic polypeptide
  REGION 1..107: note = VL of XENP018608

SEQ ID NO: 12001 - protein, 5 aa, synthetic construct
  REGION 1..5: note = Description of Artificial Sequence: Synthetic peptide
  REGION 1..5: note = XENP018608 vhCDR1
NYWMN

SEQ ID NO: 12002 - protein, 19 aa, synthetic construct
  REGION 1..19: note = Description of Artificial Sequence: Synthetic peptide
  REGION 1..19: note = XENP018608 vhCDR2
EIRLKSGNYATHYAEPVKG

SEQ ID NO: 12003 - protein, 11 aa, synthetic construct
  REGION 1..11: note = Description of Artificial Sequence: Synthetic peptide
  REGION 1..11: note = XENP018608 vhCDR3
YYGNYGGYFDV

SEQ ID NO: 12004 - protein, 11 aa, synthetic construct
  REGION 1..11: note = Description of Artificial Sequence: Synthetic peptide
  REGION 1..11: note = XENP018608 vlCDR1
RASQSVSNDVA

SEQ ID NO: 12005 - protein, 7 aa, synthetic construct
  REGION 1..7: note = Description of Artificial Sequence: Synthetic peptide
  REGION 1..7: note = XENP018608 vlCDR2
YASHRYT

SEQ ID NO: 12006 - protein, 9 aa, synthetic construct
  REGION 1..9: note = Description of Artificial Sequence: Synthetic peptide
  REGION 1..9: note = XENP018608 vlCDR3
QQDYSSPRT

SEQ ID NO: 12007 - protein, 249 aa, synthetic construct
  REGION 1..249: note = Description of Artificial Sequence: Synthetic polypeptide
  REGION 1..249: note = XENP018609 1G6_H1.109_L1_scFv(GKPGS)4
EVQLVESGGGLVKPGGSLRLSCAASGFTFSNYWMNWVRQAPGKGLEWVGEIRLKSYNYATHYAEPVKGRFTISRDDSKSTVYLQMNSLKTEDTAVYYCTRYYGNYGGYFDVWGAGTLVTVSSGKPGSGKPGSGKPGSGKPGSSIVMTQSPATLSVSPGERATLSCRASQSVSNDVAWYQQKPGQSPRLLINYASHRYTGVPDRFTGSGYGTEFTLTISSLQSEDFAVYFCQQDYSSPRTFGGGTKVEIK

SEQ ID NO: 12008 - protein, 122 aa, synthetic construct
  REGION 1..122: note = Description of Artificial Sequence: Synthetic polypeptide
  REGION 1..122: note = VH of XENP018609
EVQLVESGGGLVKPGGSLRLSCAASGFTFSNYWMNWVRQAPGKGLEWVGEIRLKSYNYATHYAEPVKGRFTISRDDSKSTVYLQMNSLKTEDTAVYYCTRYYGNYGGYFDVWGAGTLVTVSS

SEQ ID NO: 12009 - protein, 107 aa, synthetic construct; identical to SEQ ID NO: 10923
  REGION 1..107: note = Description of Artificial Sequence: Synthetic polypeptide
  REGION 1..107: note = VL of XENP018609

SEQ ID NO: 12010 - protein, 5 aa, synthetic construct
  REGION 1..5: note = Description of Artificial Sequence: Synthetic peptide
  REGION 1..5: note = XENP018609 vhCDR1
NYWMN

SEQ ID NO: 12011 - protein, 19 aa, synthetic construct
  REGION 1..19: note = Description of Artificial Sequence: Synthetic peptide
  REGION 1..19: note = XENP018609 vhCDR2
EIRLKSYNYATHYAEPVKG

SEQ ID NO: 12012 - protein, 11 aa, synthetic construct
  REGION 1..11: note = Description of Artificial Sequence: Synthetic peptide
  REGION 1..11: note = XENP018609 vhCDR3
YYGNYGGYFDV

SEQ ID NO: 12013 - protein, 11 aa, synthetic construct
  REGION 1..11: note = Description of Artificial Sequence: Synthetic peptide
  REGION 1..11: note = XENP018609 vlCDR1
RASQSVSNDVA

SEQ ID NO: 12014 - protein, 7 aa, synthetic construct
  REGION 1..7: note = Description of Artificial Sequence: Synthetic peptide
  REGION 1..7: note = XENP018609 vlCDR2
YASHRYT

SEQ ID NO: 12015 - protein, 9 aa, synthetic construct
  REGION 1..9: note = Description of Artificial Sequence: Synthetic peptide
  REGION 1..9: note = XENP018609 vlCDR3
QQDYSSPRT

SEQ ID NO: 12016 - protein, 249 aa, synthetic construct
  REGION 1..249: note = Description of Artificial Sequence: Synthetic polypeptide
  REGION 1..249: note = XENP018610 1G6_H1.110_L1_scFv(GKPGS)4
EVQLVESGGGLVKPGGSLRLSCAASGFTFSNYWMNWVRQAPGKGLEWVGEIRLKSNDYATHYAEPVKGRFTISRDDSKSTVYLQMNSLKTEDTAVYYCTRYYGNYGGYFDVWGAGTLVTVSSGKPGSGKPGSGKPGSGKPGSSIVMTQSPATLSVSPGERATLSCRASQSVSNDVAWYQQKPGQSPRLLINYASHRYTGVPDRFTGSGYGTEFTLTISSLQSEDFAVYFCQQDYSSPRTFGGGTKVEIK

SEQ ID NO: 12017 - protein, 122 aa, synthetic construct
  REGION 1..122: note = Description of Artificial Sequence: Synthetic polypeptide
  REGION 1..122: note = VH of XENP018610
EVQLVESGGGLVKPGGSLRLSCAASGFTFSNYWMNWVRQAPGKGLEWVGEIRLKSNDYATHYAEPVKGRFTISRDDSKSTVYLQMNSLKTEDTAVYYCTRYYGNYGGYFDVWGAGTLVTVSS

SEQ ID NO: 12018 - protein, 107 aa, synthetic construct; identical to SEQ ID NO: 10923
  REGION 1..107: note = Description of Artificial Sequence: Synthetic polypeptide
  REGION 1..107: note = VL of XENP018610

SEQ ID NO: 12019 - protein, 5 aa, synthetic construct
  REGION 1..5: note = Description of Artificial Sequence: Synthetic peptide
  REGION 1..5: note = XENP018610 vhCDR1
NYWMN

SEQ ID NO: 12020 - protein, 19 aa, synthetic construct
  REGION 1..19: note = Description of Artificial Sequence: Synthetic peptide
  REGION 1..19: note = XENP018610 vhCDR2
EIRLKSNDYATHYAEPVKG

SEQ ID NO: 12021 - protein, 11 aa, synthetic construct
  REGION 1..11: note = Description of Artificial Sequence: Synthetic peptide
  REGION 1..11: note = XENP018610 vhCDR3
YYGNYGGYFDV

SEQ ID NO: 12022 - protein, 11 aa, synthetic construct
  REGION 1..11: note = Description of Artificial Sequence: Synthetic peptide
  REGION 1..11: note = XENP018610 vlCDR1
RASQSVSNDVA

SEQ ID NO: 12023 - protein, 7 aa, synthetic construct
  REGION 1..7: note = Description of Artificial Sequence: Synthetic peptide
  REGION 1..7: note = XENP018610 vlCDR2
YASHRYT

SEQ ID NO: 12024 - protein, 9 aa, synthetic construct
  REGION 1..9: note = Description of Artificial Sequence: Synthetic peptide
  REGION 1..9: note = XENP018610 vlCDR3
QQDYSSPRT

SEQ ID NO: 12025 - protein, 249 aa, synthetic construct
  REGION 1..249: note = Description of Artificial Sequence: Synthetic polypeptide
  REGION 1..249: note = XENP018611 1G6_H1.111_L1_scFv(GKPGS)4
EVQLVESGGGLVKPGGSLRLSCAASGFTFSNYWMNWVRQAPGKGLEWVGEIRLKSNHYATHYAEPVKGRFTISRDDSKSTVYLQMNSLKTEDTAVYYCTRYYGNYGGYFDVWGAGTLVTVSSGKPGSGKPGSGKPGSGKPGSSIVMTQSPATLSVSPGERATLSCRASQSVSNDVAWYQQKPGQSPRLLINYASHRYTGVPDRFTGSGYGTEFTLTISSLQSEDFAVYFCQQDYSSPRTFGGGTKVEIK

SEQ ID NO: 12026 - protein, 122 aa, synthetic construct
  REGION 1..122: note = Description of Artificial Sequence: Synthetic polypeptide
  REGION 1..122: note = VH of XENP018611
EVQLVESGGGLVKPGGSLRLSCAASGFTFSNYWMNWVRQAPGKGLEWVGEIRLKSNHYATHYAEPVKGRFTISRDDSKSTVYLQMNSLKTEDTAVYYCTRYYGNYGGYFDVWGAGTLVTVSS

SEQ ID NO: 12027 - protein, 107 aa, synthetic construct; identical to SEQ ID NO: 10923
  REGION 1..107: note = Description of Artificial Sequence: Synthetic polypeptide
  REGION 1..107: note = VL of XENP018611

SEQ ID NO: 12028 - protein, 5 aa, synthetic construct
  REGION 1..5: note = Description of Artificial Sequence: Synthetic peptide
  REGION 1..5: note = XENP018611 vhCDR1
NYWMN

SEQ ID NO: 12029 - protein, 19 aa, synthetic construct
  REGION 1..19: note = Description of Artificial Sequence: Synthetic peptide
  REGION 1..19: note = XENP018611 vhCDR2
EIRLKSNHYATHYAEPVKG

SEQ ID NO: 12030 - protein, 11 aa, synthetic construct
  REGION 1..11: note = Description of Artificial Sequence: Synthetic peptide
  REGION 1..11: note = XENP018611 vhCDR3
YYGNYGGYFDV

SEQ ID NO: 12031 - protein, 11 aa, synthetic construct
  REGION 1..11: note = Description of Artificial Sequence: Synthetic peptide
  REGION 1..11: note = XENP018611 vlCDR1
RASQSVSNDVA

SEQ ID NO: 12032 - protein, 7 aa, synthetic construct
  REGION 1..7: note = Description of Artificial Sequence: Synthetic peptide
  REGION 1..7: note = XENP018611 vlCDR2
YASHRYT

SEQ ID NO: 12033 - protein, 9 aa, synthetic construct
  REGION 1..9: note = Description of Artificial Sequence: Synthetic peptide
  REGION 1..9: note = XENP018611 vlCDR3
QQDYSSPRT

SEQ ID NO: 12034 - protein, 249 aa, synthetic construct
  REGION 1..249: note = Description of Artificial Sequence: Synthetic polypeptide
  REGION 1..249: note = XENP018612 1G6_H1.112_L1_scFv(GKPGS)4
EVQLVESGGGLVKPGGSLRLSCAASGFTFSNYWMNWVRQAPGKGLEWVGEIRLKSNEYATHYAEPVKGRFTISRDDSKSTVYLQMNSLKTEDTAVYYCTRYYGNYGGYFDVWGAGTLVTVSSGKPGSGKPGSGKPGSGKPGSSIVMTQSPATLSVSPGERATLSCRASQSVSNDVAWYQQKPGQSPRLLINYASHRYTGVPDRFTGSGYGTEFTLTISSLQSEDFAVYFCQQDYSSPRTFGGGTKVEIK

SEQ ID NO: 12035 - protein, 122 aa, synthetic construct
  REGION 1..122: note = Description of Artificial Sequence: Synthetic polypeptide
  REGION 1..122: note = VH of XENP018612
EVQLVESGGGLVKPGGSLRLSCAASGFTFSNYWMNWVRQAPGKGLEWVGEIRLKSNEYATHYAEPVKGRFTISRDDSKSTVYLQMNSLKTEDTAVYYCTRYYGNYGGYFDVWGAGTLVTVSS

SEQ ID NO: 12036 - protein, 107 aa, synthetic construct; identical to SEQ ID NO: 10923
  REGION 1..107: note = Description of Artificial Sequence: Synthetic polypeptide
  REGION 1..107: note = VL of XENP018612

SEQ ID NO: 12037 - protein, 5 aa, synthetic construct
  REGION 1..5: note = Description of Artificial Sequence: Synthetic peptide
  REGION 1..5: note = XENP018612 vhCDR1
NYWMN

SEQ ID NO: 12038 - protein, 19 aa, synthetic construct
  REGION 1..19: note = Description of Artificial Sequence: Synthetic peptide
  REGION 1..19: note = XENP018612 vhCDR2
EIRLKSNEYATHYAEPVKG

SEQ ID NO: 12039 - protein, 11 aa, synthetic construct
  REGION 1..11: note = Description of Artificial Sequence: Synthetic peptide
  REGION 1..11: note = XENP018612 vhCDR3
YYGNYGGYFDV

SEQ ID NO: 12040 - protein, 11 aa, synthetic construct
  REGION 1..11: note = Description of Artificial Sequence: Synthetic peptide
  REGION 1..11: note = XENP018612 vlCDR1
RASQSVSNDVA

SEQ ID NO: 12041 - protein, 7 aa, synthetic construct
  REGION 1..7: note = Description of Artificial Sequence: Synthetic peptide
  REGION 1..7: note = XENP018612 vlCDR2
YASHRYT

SEQ ID NO: 12042 - protein, 9 aa, synthetic construct
  REGION 1..9: note = Description of Artificial Sequence: Synthetic peptide
  REGION 1..9: note = XENP018612 vlCDR3
QQDYSSPRT

SEQ ID NO: 12043 - protein, 249 aa, synthetic construct
  REGION 1..249: note = Description of Artificial Sequence: Synthetic polypeptide
  REGION 1..249: note = XENP018613 1G6_H1.113_L1_scFv(GKPGS)4
EVQLVESGGGLVKPGGSLRLSCAASGFTFSNYWMNWVRQAPGKGLEWVGEIRLKSNSYATHYAEPVKGRFTISRDDSKSTVYLQMNSLKTEDTAVYYCTRYYGNYGGYFDVWGAGTLVTVSSGKPGSGKPGSGKPGSGKPGSSIVMTQSPATLSVSPGERATLSCRASQSVSNDVAWYQQKPGQSPRLLINYASHRYTGVPDRFTGSGYGTEFTLTISSLQSEDFAVYFCQQDYSSPRTFGGGTKVEIK

SEQ ID NO: 12044 - protein, 122 aa, synthetic construct
  REGION 1..122: note = Description of Artificial Sequence: Synthetic polypeptide
  REGION 1..122: note = VH of XENP018613
EVQLVESGGGLVKPGGSLRLSCAASGFTFSNYWMNWVRQAPGKGLEWVGEIRLKSNSYATHYAEPVKGRFTISRDDSKSTVYLQMNSLKTEDTAVYYCTRYYGNYGGYFDVWGAGTLVTVSS

SEQ ID NO: 12045 - protein, 107 aa, synthetic construct; identical to SEQ ID NO: 10923
  REGION 1..107: note = Description of Artificial Sequence: Synthetic polypeptide
  REGION 1..107: note = VL of XENP018613

SEQ ID NO: 12046 - protein, 5 aa, synthetic construct
  REGION 1..5: note = Description of Artificial Sequence: Synthetic peptide
  REGION 1..5: note = XENP018613 vhCDR1
NYWMN

SEQ ID NO: 12047 - protein, 19 aa, synthetic construct
  REGION 1..19: note = Description of Artificial Sequence: Synthetic peptide
  REGION 1..19: note = XENP018613 vhCDR2
EIRLKSNSYATHYAEPVKG

SEQ ID NO: 12048 - protein, 11 aa, synthetic construct
  REGION 1..11: note = Description of Artificial Sequence: Synthetic peptide
  REGION 1..11: note = XENP018613 vhCDR3
YYGNYGGYFDV

SEQ ID NO: 12049 - protein, 11 aa, synthetic construct
  REGION 1..11: note = Description of Artificial Sequence: Synthetic peptide
  REGION 1..11: note = XENP018613 vlCDR1
RASQSVSNDVA

SEQ ID NO: 12050 - protein, 7 aa, synthetic construct
  REGION 1..7: note = Description of Artificial Sequence: Synthetic peptide
  REGION 1..7: note = XENP018613 vlCDR2
YASHRYT

SEQ ID NO: 12051 - protein, 9 aa, synthetic construct
  REGION 1..9: note = Description of Artificial Sequence: Synthetic peptide
  REGION 1..9: note = XENP018613 vlCDR3
QQDYSSPRT

SEQ ID NO: 12052 - protein, 249 aa, synthetic construct
  REGION 1..249: note = Description of Artificial Sequence: Synthetic polypeptide
  REGION 1..249: note = XENP018614 1G6_H1.114_L1_scFv(GKPGS)4
EVQLVESGGGLVKPGGSLRLSCAASGFTFSNYWMNWVRQAPGKGLEWVGEIRLKSNRYATHYAEPVKGRFTISRDDSKSTVYLQMNSLKTEDTAVYYCTRYYGNYGGYFDVWGAGTLVTVSSGKPGSGKPGSGKPGSGKPGSSIVMTQSPATLSVSPGERATLSCRASQSVSNDVAWYQQKPGQSPRLLINYASHRYTGVPDRFTGSGYGTEFTLTISSLQSEDFAVYFCQQDYSSPRTFGGGTKVEIK

SEQ ID NO: 12053 - protein, 122 aa, synthetic construct
  REGION 1..122: note = Description of Artificial Sequence: Synthetic polypeptide
  REGION 1..122: note = VH of XENP018614
EVQLVESGGGLVKPGGSLRLSCAASGFTFSNYWMNWVRQAPGKGLEWVGEIRLKSNRYATHYAEPVKGRFTISRDDSKSTVYLQMNSLKTEDTAVYYCTRYYGNYGGYFDVWGAGTLVTVSS

SEQ ID NO: 12054 - protein, 107 aa, synthetic construct; identical to SEQ ID NO: 10923
  REGION 1..107: note = Description of Artificial Sequence: Synthetic polypeptide
  REGION 1..107: note = VL of XENP018614

SEQ ID NO: 12055 - protein, 5 aa, synthetic construct
  REGION 1..5: note = Description of Artificial Sequence: Synthetic peptide
  REGION 1..5: note = XENP018614 vhCDR1
NYWMN

SEQ ID NO: 12056 - protein, 19 aa, synthetic construct
  REGION 1..19: note = Description of Artificial Sequence: Synthetic peptide
  REGION 1..19: note = XENP018614 vhCDR2
EIRLKSNRYATHYAEPVKG

SEQ ID NO: 12057 - protein, 11 aa, synthetic construct
  REGION 1..11: note = Description of Artificial Sequence: Synthetic peptide
  REGION 1..11: note = XENP018614 vhCDR3
YYGNYGGYFDV

SEQ ID NO: 12058 - protein, 11 aa, synthetic construct
  REGION 1..11: note = Description of Artificial Sequence: Synthetic peptide
  REGION 1..11: note = XENP018614 vlCDR1
RASQSVSNDVA

SEQ ID NO: 12059 - protein, 7 aa, synthetic construct
  REGION 1..7: note = Description of Artificial Sequence: Synthetic peptide
  REGION 1..7: note = XENP018614 vlCDR2
YASHRYT

SEQ ID NO: 12060 - protein, 9 aa, synthetic construct
  REGION 1..9: note = Description of Artificial Sequence: Synthetic peptide
  REGION 1..9: note = XENP018614 vlCDR3
QQDYSSPRT

SEQ ID NO: 12061 - protein, 249 aa, synthetic construct
  REGION 1..249: note = Description of Artificial Sequence: Synthetic polypeptide
  REGION 1..249: note = XENP018615 1G6_H1.115_L1_scFv(GKPGS)4
EVQLVESGGGLVKPGGSLRLSCAASGFTFSNYWMNWVRQAPGKGLEWVGEIRLKSNLYATHYAEPVKGRFTISRDDSKSTVYLQMNSLKTEDTAVYYCTRYYGNYGGYFDVWGAGTLVTVSSGKPGSGKPGSGKPGSGKPGSSIVMTQSPATLSVSPGERATLSCRASQSVSNDVAWYQQKPGQSPRLLINYASHRYTGVPDRFTGSGYGTEFTLTISSLQSEDFAVYFCQQDYSSPRTFGGGTKVEIK

SEQ ID NO: 12062 - protein, 122 aa, synthetic construct
  REGION 1..122: note = Description of Artificial Sequence: Synthetic polypeptide
  REGION 1..122: note = VH of XENP018615
EVQLVESGGGLVKPGGSLRLSCAASGFTFSNYWMNWVRQAPGKGLEWVGEIRLKSNLYATHYAEPVKGRFTISRDDSKSTVYLQMNSLKTEDTAVYYCTRYYGNYGGYFDVWGAGTLVTVSS

SEQ ID NO: 12063 - protein, 107 aa, synthetic construct; identical to SEQ ID NO: 10923
  REGION 1..107: note = Description of Artificial Sequence: Synthetic polypeptide
  REGION 1..107: note = VL of XENP018615

SEQ ID NO: 12064 - protein, 5 aa, synthetic construct
  REGION 1..5: note = Description of Artificial Sequence: Synthetic peptide
  REGION 1..5: note = XENP018615 vhCDR1
NYWMN

SEQ ID NO: 12065 - protein, 19 aa, synthetic construct
  REGION 1..19: note = Description of Artificial Sequence: Synthetic peptide
  REGION 1..19: note = XENP018615 vhCDR2
EIRLKSNLYATHYAEPVKG

SEQ ID NO: 12066 - protein, 11 aa, synthetic construct
  REGION 1..11: note = Description of Artificial Sequence: Synthetic peptide
  REGION 1..11: note = XENP018615 vhCDR3
YYGNYGGYFDV

SEQ ID NO: 12067 - protein, 11 aa, synthetic construct
  REGION 1..11: note = Description of Artificial Sequence: Synthetic peptide
  REGION 1..11: note = XENP018615 vlCDR1
RASQSVSNDVA

SEQ ID NO: 12068 - protein, 7 aa, synthetic construct
  REGION 1..7: note = Description of Artificial Sequence: Synthetic peptide
  REGION 1..7: note = XENP018615 vlCDR2
YASHRYT

SEQ ID NO: 12069 - protein, 9 aa, synthetic construct
  REGION 1..9: note = Description of Artificial Sequence: Synthetic peptide
  REGION 1..9: note = XENP018615 vlCDR3
QQDYSSPRT

SEQ ID NO: 12070 - protein, 249 aa, synthetic construct
  REGION 1..249: note = Description of Artificial Sequence: Synthetic polypeptide
  REGION 1..249: note = XENP018616 1G6_H1.116_L1_scFv(GKPGS)4
EVQLVESGGGLVKPGGSLRLSCAASGFTFSNYWMNWVRQAPGKGLEWVGEIRLKSNTYATHYAEPVKGRFTISRDDSKSTVYLQMNSLKTEDTAVYYCTRYYGNYGGYFDVWGAGTLVTVSSGKPGSGKPGSGKPGSGKPGSSIVMTQSPATLSVSPGERATLSCRASQSVSNDVAWYQQKPGQSPRLLINYASHRYTGVPDRFTGSGYGTEFTLTISSLQSEDFAVYFCQQDYSSPRTFGGGTKVEIK

SEQ ID NO: 12071 - protein, 122 aa, synthetic construct
  REGION 1..122: note = Description of Artificial Sequence: Synthetic polypeptide
  REGION 1..122: note = VH of XENP018616
EVQLVESGGGLVKPGGSLRLSCAASGFTFSNYWMNWVRQAPGKGLEWVGEIRLKSNTYATHYAEPVKGRFTISRDDSKSTVYLQMNSLKTEDTAVYYCTRYYGNYGGYFDVWGAGTLVTVSS

SEQ ID NO: 12072 - protein, 107 aa, synthetic construct; identical to SEQ ID NO: 10923
  REGION 1..107: note = Description of Artificial Sequence: Synthetic polypeptide
  REGION 1..107: note = VL of XENP018616

SEQ ID NO: 12073 - protein, 5 aa, synthetic construct
  REGION 1..5: note = Description of Artificial Sequence: Synthetic peptide
  REGION 1..5: note = XENP018616 vhCDR1
NYWMN

SEQ ID NO: 12074 - protein, 19 aa, synthetic construct
  REGION 1..19: note = Description of Artificial Sequence: Synthetic peptide
  REGION 1..19: note = XENP018616 vhCDR2
EIRLKSNTYATHYAEPVKG

SEQ ID NO: 12075 - protein, 11 aa, synthetic construct
  REGION 1..11: note = Description of Artificial Sequence: Synthetic peptide
  REGION 1..11: note = XENP018616 vhCDR3
YYGNYGGYFDV

SEQ ID NO: 12076 - protein, 11 aa, synthetic construct
  REGION 1..11: note = Description of Artificial Sequence: Synthetic peptide
  REGION 1..11: note = XENP018616 vlCDR1
RASQSVSNDVA

SEQ ID NO: 12077 - protein, 7 aa, synthetic construct
  REGION 1..7: note = Description of Artificial Sequence: Synthetic peptide
  REGION 1..7: note = XENP018616 vlCDR2
YASHRYT

SEQ ID NO: 12078 - protein, 9 aa, synthetic construct
  REGION 1..9: note = Description of Artificial Sequence: Synthetic peptide
  REGION 1..9: note = XENP018616 vlCDR3
QQDYSSPRT

SEQ ID NO: 12079 - protein, 249 aa, synthetic construct
  REGION 1..249: note = Description of Artificial Sequence: Synthetic polypeptide
  REGION 1..249: note = XENP018617 1G6_H1.117_L1_scFv(GKPGS)4
EVQLVESGGGLVKPGGSLRLSCAASGFTFSNYWMNWVRQAPGKGLEWVGEIRLKSNGYATHYAEPVKGRFTISRDDSKSTVYLQMNSLKTEDTAVYYCTRYYGNYGGYFDVWGAGTLVTVSSGKPGSGKPGSGKPGSGKPGSSIVMTQSPATLSVSPGERATLSCRASQSVSNDVAWYQQKPGQSPRLLINYASHRYTGVPDRFTGSGYGTEFTLTISSLQSEDFAVYFCQQDYSSPRTFGGGTKVEIK

SEQ ID NO: 12080 - protein, 122 aa, synthetic construct
  REGION 1..122: note = Description of Artificial Sequence: Synthetic polypeptide
  REGION 1..122: note = VH of XENP018617
EVQLVESGGGLVKPGGSLRLSCAASGFTFSNYWMNWVRQAPGKGLEWVGEIRLKSNGYATHYAEPVKGRFTISRDDSKSTVYLQMNSLKTEDTAVYYCTRYYGNYGGYFDVWGAGTLVTVSS

SEQ ID NO: 12081 - protein, 107 aa, synthetic construct; identical to SEQ ID NO: 10923
  REGION 1..107: note = Description of Artificial Sequence: Synthetic polypeptide
  REGION 1..107: note = VL of XENP018617

SEQ ID NO: 12082 - protein, 5 aa, synthetic construct
  REGION 1..5: note = Description of Artificial Sequence: Synthetic peptide
  REGION 1..5: note = XENP018617 vhCDR1
NYWMN

SEQ ID NO: 12083 - protein, 19 aa, synthetic construct
  REGION 1..19: note = Description of Artificial Sequence: Synthetic peptide
  REGION 1..19: note = XENP018617 vhCDR2
EIRLKSNGYATHYAEPVKG

SEQ ID NO: 12084 - protein, 11 aa, synthetic construct
  REGION 1..11: note = Description of Artificial Sequence: Synthetic peptide
  REGION 1..11: note = XENP018617 vhCDR3
YYGNYGGYFDV

SEQ ID NO: 12085 - protein, 11 aa, synthetic construct
  REGION 1..11: note = Description of Artificial Sequence: Synthetic peptide
  REGION 1..11: note = XENP018617 vlCDR1
RASQSVSNDVA

SEQ ID NO: 12086 - protein, 7 aa, synthetic construct
  REGION 1..7: note = Description of Artificial Sequence: Synthetic peptide
  REGION 1..7: note = XENP018617 vlCDR2
YASHRYT

SEQ ID NO: 12087 - protein, 9 aa, synthetic construct
  REGION 1..9: note = Description of Artificial Sequence: Synthetic peptide
  REGION 1..9: note = XENP018617 vlCDR3
QQDYSSPRT

SEQ ID NO: 12088 - protein, 249 aa, synthetic construct
  REGION 1..249: note = Description of Artificial Sequence: Synthetic polypeptide
  REGION 1..249: note = XENP018618 1G6_H1.118_L1_scFv(GKPGS)4
EVQLVESGGGLVKPGGSLRLSCAASGFTFSNYWMNWVRQAPGKGLEWVGEIRLKSNYYATHYAEPVKGRFTISRDDSKSTVYLQMNSLKTEDTAVYYCTRYYGNYGGYFDVWGAGTLVTVSSGKPGSGKPGSGKPGSGKPGSSIVMTQSPATLSVSPGERATLSCRASQSVSNDVAWYQQKPGQSPRLLINYASHRYTGVPDRFTGSGYGTEFTLTISSLQSEDFAVYFCQQDYSSPRTFGGGTKVEIK

SEQ ID NO: 12089 - protein, 122 aa, synthetic construct
  REGION 1..122: note = Description of Artificial Sequence: Synthetic polypeptide
  REGION 1..122: note = VH of XENP018618
EVQLVESGGGLVKPGGSLRLSCAASGFTFSNYWMNWVRQAPGKGLEWVGEIRLKSNYYATHYAEPVKGRFTISRDDSKSTVYLQMNSLKTEDTAVYYCTRYYGNYGGYFDVWGAGTLVTVSS

SEQ ID NO: 12090 - protein, 107 aa, synthetic construct; identical to SEQ ID NO: 10923
  REGION 1..107: note = Description of Artificial Sequence: Synthetic polypeptide
  REGION 1..107: note = VL of XENP018618

SEQ ID NO: 12091 - protein, 5 aa, synthetic construct
  REGION 1..5: note = Description of Artificial Sequence: Synthetic peptide
  REGION 1..5: note = XENP018618 vhCDR1
NYWMN

SEQ ID NO: 12092 - protein, 19 aa, synthetic construct
  REGION 1..19: note = Description of Artificial Sequence: Synthetic peptide
  REGION 1..19: note = XENP018618 vhCDR2
EIRLKSNYYATHYAEPVKG

SEQ ID NO: 12093 - protein, 11 aa, synthetic construct
  REGION 1..11: note = Description of Artificial Sequence: Synthetic peptide
  REGION 1..11: note = XENP018618 vhCDR3
YYGNYGGYFDV

SEQ ID NO: 12094 - protein, 11 aa, synthetic construct
  REGION 1..11: note = Description of Artificial Sequence: Synthetic peptide
  REGION 1..11: note = XENP018618 vlCDR1
RASQSVSNDVA

SEQ ID NO: 12095 - protein, 7 aa, synthetic construct
  REGION 1..7: note = Description of Artificial Sequence: Synthetic peptide
  REGION 1..7: note = XENP018618 vlCDR2
YASHRYT

SEQ ID NO: 12096 - protein, 9 aa, synthetic construct
  REGION 1..9: note = Description of Artificial Sequence: Synthetic peptide
  REGION 1..9: note = XENP018618 vlCDR3
QQDYSSPRT

SEQ ID NO: 12097 - protein, 249 aa, synthetic construct
  REGION 1..249: note = Description of Artificial Sequence: Synthetic polypeptide
  REGION 1..249: note = XENP018619 1G6_H1.119_L1_scFv(GKPGS)4
EVQLVESGGGLVKPGGSLRLSCAASGFTFSNYWMNWVRQAPGKGLEWVGEIRLKSNNFATHYAEPVKGRFTISRDDSKSTVYLQMNSLKTEDTAVYYCTRYYGNYGGYFDVWGAGTLVTVSSGKPGSGKPGSGKPGSGKPGSSIVMTQSPATLSVSPGERATLSCRASQSVSNDVAWYQQKPGQSPRLLINYASHRYTGVPDRFTGSGYGTEFTLTISSLQSEDFAVYFCQQDYSSPRTFGGGTKVEIK

SEQ ID NO: 12098 - protein, 122 aa, synthetic construct
  REGION 1..122: note = Description of Artificial Sequence: Synthetic polypeptide
  REGION 1..122: note = VH of XENP018619
EVQLVESGGGLVKPGGSLRLSCAASGFTFSNYWMNWVRQAPGKGLEWVGEIRLKSNNFATHYAEPVKGRFTISRDDSKSTVYLQMNSLKTEDTAVYYCTRYYGNYGGYFDVWGAGTLVTVSS

SEQ ID NO: 12099 - protein, 107 aa, synthetic construct; identical to SEQ ID NO: 10923
  REGION 1..107: note = Description of Artificial Sequence: Synthetic polypeptide
  REGION 1..107: note = VL of XENP018619

SEQ ID NO: 12100 - protein, 5 aa, synthetic construct
  REGION 1..5: note = Description of Artificial Sequence: Synthetic peptide
  REGION 1..5: note = XENP018619 vhCDR1
NYWMN

SEQ ID NO: 12101 - protein, 19 aa, synthetic construct
  REGION 1..19: note = Description of Artificial Sequence: Synthetic peptide
  REGION 1..19: note = XENP018619 vhCDR2
EIRLKSNNFATHYAEPVKG

SEQ ID NO: 12102 - protein, 11 aa, synthetic construct
  REGION 1..11: note = Description of Artificial Sequence: Synthetic peptide
  REGION 1..11: note = XENP018619 vhCDR3
YYGNYGGYFDV

SEQ ID NO: 12103 - protein, 11 aa, synthetic construct
  REGION 1..11: note = Description of Artificial Sequence: Synthetic peptide
  REGION 1..11: note = XENP018619 vlCDR1
RASQSVSNDVA

SEQ ID NO: 12104 - protein, 7 aa, synthetic construct
  REGION 1..7: note = Description of Artificial Sequence: Synthetic peptide
  REGION 1..7: note = XENP018619 vlCDR2
YASHRYT

SEQ ID NO: 12105 - protein, 9 aa, synthetic construct
  REGION 1..9: note = Description of Artificial Sequence: Synthetic peptide
  REGION 1..9: note = XENP018619 vlCDR3
QQDYSSPRT

SEQ ID NO: 12106 - protein, 249 aa, synthetic construct
  REGION 1..249: note = Description of Artificial Sequence: Synthetic polypeptide
  REGION 1..249: note = XENP018620 1G6_H1.120_L1_scFv(GKPGS)4
EVQLVESGGGLVKPGGSLRLSCAASGFTFSNYWMNWVRQAPGKGLEWVGEIRLKSNNHATHYAEPVKGRFTISRDDSKSTVYLQMNSLKTEDTAVYYCTRYYGNYGGYFDVWGAGTLVTVSSGKPGSGKPGSGKPGSGKPGSSIVMTQSPATLSVSPGERATLSCRASQSVSNDVAWYQQKPGQSPRLLINYASHRYTGVPDRFTGSGYGTEFTLTISSLQSEDFAVYFCQQDYSSPRTFGGGTKVEIK

SEQ ID NO: 12107 - protein, 122 aa, synthetic construct
  REGION 1..122: note = Description of Artificial Sequence: Synthetic polypeptide
  REGION 1..122: note = VH of XENP018620
EVQLVESGGGLVKPGGSLRLSCAASGFTFSNYWMNWVRQAPGKGLEWVGEIRLKSNNHATHYAEPVKGRFTISRDDSKSTVYLQMNSLKTEDTAVYYCTRYYGNYGGYFDVWGAGTLVTVSS

SEQ ID NO: 12108 - protein, 107 aa, synthetic construct; identical to SEQ ID NO: 10923
  REGION 1..107: note = Description of Artificial Sequence: Synthetic polypeptide
  REGION 1..107: note = VL of XENP018620

SEQ ID NO: 12109 - protein, 5 aa, synthetic construct
  REGION 1..5: note = Description of Artificial Sequence: Synthetic peptide
  REGION 1..5: note = XENP018620 vhCDR1
NYWMN

SEQ ID NO: 12110 - protein, 19 aa, synthetic construct
  REGION 1..19: note = Description of Artificial Sequence: Synthetic peptide
  REGION 1..19: note = XENP018620 vhCDR2
EIRLKSNNHATHYAEPVKG

SEQ ID NO: 12111 - protein, 11 aa, synthetic construct
  REGION 1..11: note = Description of Artificial Sequence: Synthetic peptide
  REGION 1..11: note = XENP018620 vhCDR3
YYGNYGGYFDV

SEQ ID NO: 12112 - protein, 11 aa, synthetic construct
  REGION 1..11: note = Description of Artificial Sequence: Synthetic peptide
  REGION 1..11: note = XENP018620 vlCDR1
RASQSVSNDVA

SEQ ID NO: 12113 - protein, 7 aa, synthetic construct
  REGION 1..7: note = Description of Artificial Sequence: Synthetic peptide
  REGION 1..7: note = XENP018620 vlCDR2
YASHRYT

SEQ ID NO: 12114 - protein, 9 aa, synthetic construct
  REGION 1..9: note = Description of Artificial Sequence: Synthetic peptide
  REGION 1..9: note = XENP018620 vlCDR3
QQDYSSPRT

SEQ ID NO: 12115 - protein, 249 aa, synthetic construct
  REGION 1..249: note = Description of Artificial Sequence: Synthetic polypeptide
  REGION 1..249: note = XENP018621 1G6_H1.121_L1_scFv(GKPGS)4
EVQLVESGGGLVKPGGSLRLSCAASGFTFSNYWMNWVRQAPGKGLEWVGEIRLKSNNLATHYAEPVKGRFTISRDDSKSTVYLQMNSLKTEDTAVYYCTRYYGNYGGYFDVWGAGTLVTVSSGKPGSGKPGSGKPGSGKPGSSIVMTQSPATLSVSPGERATLSCRASQSVSNDVAWYQQKPGQSPRLLINYASHRYTGVPDRFTGSGYGTEFTLTISSLQSEDFAVYFCQQDYSSPRTFGGGTKVEIK

SEQ ID NO: 12116 - protein, 122 aa, synthetic construct
  REGION 1..122: note = Description of Artificial Sequence: Synthetic polypeptide
  REGION 1..122: note = VH of XENP018621
EVQLVESGGGLVKPGGSLRLSCAASGFTFSNYWMNWVRQAPGKGLEWVGEIRLKSNNLATHYAEPVKGRFTISRDDSKSTVYLQMNSLKTEDTAVYYCTRYYGNYGGYFDVWGAGTLVTVSS

SEQ ID NO: 12117 - protein, 107 aa, synthetic construct; identical to SEQ ID NO: 10923
  REGION 1..107: note = Description of Artificial Sequence: Synthetic polypeptide
  REGION 1..107: note = VL of XENP018621

SEQ ID NO: 12118 - protein, 5 aa, synthetic construct
  REGION 1..5: note = Description of Artificial Sequence: Synthetic peptide
  REGION 1..5: note = XENP018621 vhCDR1
NYWMN

SEQ ID NO: 12119 - protein, 19 aa, synthetic construct
  REGION 1..19: note = Description of Artificial Sequence: Synthetic peptide
  REGION 1..19: note = XENP018621 vhCDR2
EIRLKSNNLATHYAEPVKG

SEQ ID NO: 12120 - protein, 11 aa, synthetic construct
  REGION 1..11: note = Description of Artificial Sequence: Synthetic peptide
  REGION 1..11: note = XENP018621 vhCDR3
YYGNYGGYFDV

SEQ ID NO: 12121 - protein, 11 aa, synthetic construct
  REGION 1..11: note = Description of Artificial Sequence: Synthetic peptide
  REGION 1..11: note = XENP018621 vlCDR1
RASQSVSNDVA

SEQ ID NO: 12122 - protein, 7 aa, synthetic construct
  REGION 1..7: note = Description of Artificial Sequence: Synthetic peptide
  REGION 1..7: note = XENP018621 vlCDR2
YASHRYT

SEQ ID NO: 12123 - protein, 9 aa, synthetic construct
  REGION 1..9: note = Description of Artificial Sequence: Synthetic peptide
  REGION 1..9: note = XENP018621 vlCDR3
QQDYSSPRT

SEQ ID NO: 12124 - protein, 249 aa, synthetic construct
  REGION 1..249: note = Description of Artificial Sequence: Synthetic polypeptide
  REGION 1..249: note = XENP018622 1G6_H1.122_L1_scFv(GKPGS)4
EVQLVESGGGLVKPGGSLRLSCAASGFTFSNYWMNWVRQAPGKGLEWVGEIRLKSNNWATHYAEPVKGRFTISRDDSKSTVYLQMNSLKTEDTAVYYCTRYYGNYGGYFDVWGAGTLVTVSSGKPGSGKPGSGKPGSGKPGSSIVMTQSPATLSVSPGERATLSCRASQSVSNDVAWYQQKPGQSPRLLINYASHRYTGVPDRFTGSGYGTEFTLTISSLQSEDFAVYFCQQDYSSPRTFGGGTKVEIK

SEQ ID NO: 12125 - protein, 122 aa, synthetic construct
  REGION 1..122: note = Description of Artificial Sequence: Synthetic polypeptide
  REGION 1..122: note = VH of XENP018622
EVQLVESGGGLVKPGGSLRLSCAASGFTFSNYWMNWVRQAPGKGLEWVGEIRLKSNNWATHYAEPVKGRFTISRDDSKSTVYLQMNSLKTEDTAVYYCTRYYGNYGGYFDVWGAGTLVTVSS

SEQ ID NO: 12126 - protein, 107 aa, synthetic construct; identical to SEQ ID NO: 10923
  REGION 1..107: note = Description of Artificial Sequence: Synthetic polypeptide
  REGION 1..107: note = VL of XENP018622

SEQ ID NO: 12127 - protein, 5 aa, synthetic construct
  REGION 1..5: note = Description of Artificial Sequence: Synthetic peptide
  REGION 1..5: note = XENP018622 vhCDR1
NYWMN

SEQ ID NO: 12128 - protein, 19 aa, synthetic construct
  REGION 1..19: note = Description of Artificial Sequence: Synthetic peptide
  REGION 1..19: note = XENP018622 vhCDR2
EIRLKSNNWATHYAEPVKG

SEQ ID NO: 12129 - protein, 11 aa, synthetic construct
  REGION 1..11: note = Description of Artificial Sequence: Synthetic peptide
  REGION 1..11: note = XENP018622 vhCDR3
YYGNYGGYFDV

SEQ ID NO: 12130 - protein, 11 aa, synthetic construct
  REGION 1..11: note = Description of Artificial Sequence: Synthetic peptide
  REGION 1..11: note = XENP018622 vlCDR1
RASQSVSNDVA

SEQ ID NO: 12131 - protein, 7 aa, synthetic construct
  REGION 1..7: note = Description of Artificial Sequence: Synthetic peptide
  REGION 1..7: note = XENP018622 vlCDR2
YASHRYT

SEQ ID NO: 12132 - protein, 9 aa, synthetic construct
  REGION 1..9: note = Description of Artificial Sequence: Synthetic peptide
  REGION 1..9: note = XENP018622 vlCDR3
QQDYSSPRT

SEQ ID NO: 12133 - protein, 249 aa, synthetic construct
  REGION 1..249: note = Description of Artificial Sequence: Synthetic polypeptide
  REGION 1..249: note = XENP018623 1G6_H1.123_L1_scFv(GKPGS)4
EVQLVESGGGLVKPGGSLRLSCAASGFTFSNYWMNWVRQAPGKGLEWVGEIRLKSNNVATHYAEPVKGRFTISRDDSKSTVYLQMNSLKTEDTAVYYCTRYYGNYGGYFDVWGAGTLVTVSSGKPGSGKPGSGKPGSGKPGSSIVMTQSPATLSVSPGERATLSCRASQSVSNDVAWYQQKPGQSPRLLINYASHRYTGVPDRFTGSGYGTEFTLTISSLQSEDFAVYFCQQDYSSPRTFGGGTKVEIK

SEQ ID NO: 12134 - protein, 122 aa, synthetic construct
  REGION 1..122: note = Description of Artificial Sequence: Synthetic polypeptide
  REGION 1..122: note = VH of XENP018623
EVQLVESGGGLVKPGGSLRLSCAASGFTFSNYWMNWVRQAPGKGLEWVGEIRLKSNNVATHYAEPVKGRFTISRDDSKSTVYLQMNSLKTEDTAVYYCTRYYGNYGGYFDVWGAGTLVTVSS

SEQ ID NO: 12135 - protein, 107 aa, synthetic construct; identical to SEQ ID NO: 10923
  REGION 1..107: note = Description of Artificial Sequence: Synthetic polypeptide
  REGION 1..107: note = VL of XENP018623

SEQ ID NO: 12136 - protein, 5 aa, synthetic construct
  REGION 1..5: note = Description of Artificial Sequence: Synthetic peptide
  REGION 1..5: note = XENP018623 vhCDR1
NYWMN

SEQ ID NO: 12137 - protein, 19 aa, synthetic construct
  REGION 1..19: note = Description of Artificial Sequence: Synthetic peptide
  REGION 1..19: note = XENP018623 vhCDR2
EIRLKSNNVATHYAEPVKG

SEQ ID NO: 12138 - protein, 11 aa, synthetic construct
  REGION 1..11: note = Description of Artificial Sequence: Synthetic peptide
  REGION 1..11: note = XENP018623 vhCDR3
YYGNYGGYFDV

SEQ ID NO: 12139 - protein, 11 aa, synthetic construct
  REGION 1..11: note = Description of Artificial Sequence: Synthetic peptide
  REGION 1..11: note = XENP018623 vlCDR1
RASQSVSNDVA

SEQ ID NO: 12140 - protein, 7 aa, synthetic construct
  REGION 1..7: note = Description of Artificial Sequence: Synthetic peptide
  REGION 1..7: note = XENP018623 vlCDR2
YASHRYT

SEQ ID NO: 12141 - protein, 9 aa, synthetic construct
  REGION 1..9: note = Description of Artificial Sequence: Synthetic peptide
  REGION 1..9: note = XENP018623 vlCDR3
QQDYSSPRT

SEQ ID NO: 12142 - protein, 249 aa, synthetic construct
  REGION 1..249: note = Description of Artificial Sequence: Synthetic polypeptide
  REGION 1..249: note = XENP018624 1G6_H1.124_L1_scFv(GKPGS)4
EVQLVESGGGLVKPGGSLRLSCAASGFTFSNYWMNWVRQAPGKGLEWVGEIRLKSNNAATHYAEPVKGRFTISRDDSKSTVYLQMNSLKTEDTAVYYCTRYYGNYGGYFDVWGAGTLVTVSSGKPGSGKPGSGKPGSGKPGSSIVMTQSPATLSVSPGERATLSCRASQSVSNDVAWYQQKPGQSPRLLINYASHRYTGVPDRFTGSGYGTEFTLTISSLQSEDFAVYFCQQDYSSPRTFGGGTKVEIK

SEQ ID NO: 12143 - protein, 122 aa, synthetic construct
  REGION 1..122: note = Description of Artificial Sequence: Synthetic polypeptide
  REGION 1..122: note = VH of XENP018624
EVQLVESGGGLVKPGGSLRLSCAASGFTFSNYWMNWVRQAPGKGLEWVGEIRLKSNNAATHYAEPVKGRFTISRDDSKSTVYLQMNSLKTEDTAVYYCTRYYGNYGGYFDVWGAGTLVTVSS

SEQ ID NO: 12144 - protein, 107 aa, synthetic construct; identical to SEQ ID NO: 10923
  REGION 1..107: note = Description of Artificial Sequence: Synthetic polypeptide
  REGION 1..107: note = VL of XENP018624

SEQ ID NO: 12145 - protein, 5 aa, synthetic construct
  REGION 1..5: note = Description of Artificial Sequence: Synthetic peptide
  REGION 1..5: note = XENP018624 vhCDR1
NYWMN

SEQ ID NO: 12146 - protein, 19 aa, synthetic construct
  REGION 1..19: note = Description of Artificial Sequence: Synthetic peptide
  REGION 1..19: note = XENP018624 vhCDR2
EIRLKSNNAATHYAEPVKG

SEQ ID NO: 12147 - protein, 11 aa, synthetic construct
  REGION 1..11: note = Description of Artificial Sequence: Synthetic peptide
  REGION 1..11: note = XENP018624 vhCDR3
YYGNYGGYFDV

SEQ ID NO: 12148 - protein, 11 aa, synthetic construct
  REGION 1..11: note = Description of Artificial Sequence: Synthetic peptide
  REGION 1..11: note = XENP018624 vlCDR1
RASQSVSNDVA

SEQ ID NO: 12149 - protein, 7 aa, synthetic construct
  REGION 1..7: note = Description of Artificial Sequence: Synthetic peptide
  REGION 1..7: note = XENP018624 vlCDR2
YASHRYT

SEQ ID NO: 12150 - protein, 9 aa, synthetic construct
  REGION 1..9: note = Description of Artificial Sequence: Synthetic peptide
  REGION 1..9: note = XENP018624 vlCDR3
QQDYSSPRT

SEQ ID NO: 12151 - protein, 249 aa, synthetic construct
  REGION 1..249: note = Description of Artificial Sequence: Synthetic polypeptide
  REGION 1..249: note = XENP018625 1G6_H1.125_L1_scFv(GKPGS)4
EVQLVESGGGLVKPGGSLRLSCAASGFTFSNYWMNWVRQAPGKGLEWVGEIRLKSNNQATHYAEPVKGRFTISRDDSKSTVYLQMNSLKTEDTAVYYCTRYYGNYGGYFDVWGAGTLVTVSSGKPGSGKPGSGKPGSGKPGSSIVMTQSPATLSVSPGERATLSCRASQSVSNDVAWYQQKPGQSPRLLINYASHRYTGVPDRFTGSGYGTEFTLTISSLQSEDFAVYFCQQDYSSPRTFGGGTKVEIK

SEQ ID NO: 12152 - protein, 122 aa, synthetic construct
  REGION 1..122: note = Description of Artificial Sequence: Synthetic polypeptide
  REGION 1..122: note = VH of XENP018625
EVQLVESGGGLVKPGGSLRLSCAASGFTFSNYWMNWVRQAPGKGLEWVGEIRLKSNNQATHYAEPVKGRFTISRDDSKSTVYLQMNSLKTEDTAVYYCTRYYGNYGGYFDVWGAGTLVTVSS

SEQ ID NO: 12153 - protein, 107 aa, synthetic construct; identical to SEQ ID NO: 10923
  REGION 1..107: note = Description of Artificial Sequence: Synthetic polypeptide
  REGION 1..107: note = VL of XENP018625

SEQ ID NO: 12154 - protein, 5 aa, synthetic construct
  REGION 1..5: note = Description of Artificial Sequence: Synthetic peptide
  REGION 1..5: note = XENP018625 vhCDR1
NYWMN

SEQ ID NO: 12155 - protein, 19 aa, synthetic construct
  REGION 1..19: note = Description of Artificial Sequence: Synthetic peptide
  REGION 1..19: note = XENP018625 vhCDR2
EIRLKSNNQATHYAEPVKG

SEQ ID NO: 12156 - protein, 11 aa, synthetic construct
  REGION 1..11: note = Description of Artificial Sequence: Synthetic peptide
  REGION 1..11: note = XENP018625 vhCDR3
YYGNYGGYFDV

SEQ ID NO: 12157 - protein, 11 aa, synthetic construct
  REGION 1..11: note = Description of Artificial Sequence: Synthetic peptide
  REGION 1..11: note = XENP018625 vlCDR1
RASQSVSNDVA

SEQ ID NO: 12158 - protein, 7 aa, synthetic construct
  REGION 1..7: note = Description of Artificial Sequence: Synthetic peptide
  REGION 1..7: note = XENP018625 vlCDR2
YASHRYT

SEQ ID NO: 12159 - protein, 9 aa, synthetic construct
  REGION 1..9: note = Description of Artificial Sequence: Synthetic peptide
  REGION 1..9: note = XENP018625 vlCDR3
QQDYSSPRT

SEQ ID NO: 12160 - protein, 249 aa, synthetic construct
  REGION 1..249: note = Description of Artificial Sequence: Synthetic polypeptide
  REGION 1..249: note = XENP018626 1G6_H1.126_L1_scFv(GKPGS)4
EVQLVESGGGLVKPGGSLRLSCAASGFTFSNYWMNWVRQAPGKGLEWVGEIRLKSNNDATHYAEPVKGRFTISRDDSKSTVYLQMNSLKTEDTAVYYCTRYYGNYGGYFDVWGAGTLVTVSSGKPGSGKPGSGKPGSGKPGSSIVMTQSPATLSVSPGERATLSCRASQSVSNDVAWYQQKPGQSPRLLINYASHRYTGVPDRFTGSGYGTEFTLTISSLQSEDFAVYFCQQDYSSPRTFGGGTKVEIK

SEQ ID NO: 12161 - protein, 122 aa, synthetic construct
  REGION 1..122: note = Description of Artificial Sequence: Synthetic polypeptide
  REGION 1..122: note = VH of XENP018626
EVQLVESGGGLVKPGGSLRLSCAASGFTFSNYWMNWVRQAPGKGLEWVGEIRLKSNNDATHYAEPVKGRFTISRDDSKSTVYLQMNSLKTEDTAVYYCTRYYGNYGGYFDVWGAGTLVTVSS

SEQ ID NO: 12162 - protein, 107 aa, synthetic construct; identical to SEQ ID NO: 10923
  REGION 1..107: note = Description of Artificial Sequence: Synthetic polypeptide
  REGION 1..107: note = VL of XENP018626

SEQ ID NO: 12163 - protein, 5 aa, synthetic construct
  REGION 1..5: note = Description of Artificial Sequence: Synthetic peptide
  REGION 1..5: note = XENP018626 vhCDR1
NYWMN

SEQ ID NO: 12164 - protein, 19 aa, synthetic construct
  REGION 1..19: note = Description of Artificial Sequence: Synthetic peptide
  REGION 1..19: note = XENP018626 vhCDR2
EIRLKSNNDATHYAEPVKG

SEQ ID NO: 12165 - protein, 11 aa, synthetic construct
  REGION 1..11: note = Description of Artificial Sequence: Synthetic peptide
  REGION 1..11: note = XENP018626 vhCDR3
YYGNYGGYFDV

SEQ ID NO: 12166 - protein, 11 aa, synthetic construct
  REGION 1..11: note = Description of Artificial Sequence: Synthetic peptide
  REGION 1..11: note = XENP018626 vlCDR1
RASQSVSNDVA

SEQ ID NO: 12167 - protein, 7 aa, synthetic construct
  REGION 1..7: note = Description of Artificial Sequence: Synthetic peptide
  REGION 1..7: note = XENP018626 vlCDR2
YASHRYT

SEQ ID NO: 12168 - protein, 9 aa, synthetic construct
  REGION 1..9: note = Description of Artificial Sequence: Synthetic peptide
  REGION 1..9: note = XENP018626 vlCDR3
QQDYSSPRT

SEQ ID NO: 12169 - protein, 249 aa, synthetic construct
  REGION 1..249: note = Description of Artificial Sequence: Synthetic polypeptide
  REGION 1..249: note = XENP018627 1G6_H1.127_L1_scFv(GKPGS)4
EVQLVESGGGLVKPGGSLRLSCAASGFTFSNYWMNWVRQAPGKGLEWVGEIRLKSNNKATHYAEPVKGRFTISRDDSKSTVYLQMNSLKTEDTAVYYCTRYYGNYGGYFDVWGAGTLVTVSSGKPGSGKPGSGKPGSGKPGSSIVMTQSPATLSVSPGERATLSCRASQSVSNDVAWYQQKPGQSPRLLINYASHRYTGVPDRFTGSGYGTEFTLTISSLQSEDFAVYFCQQDYSSPRTFGGGTKVEIK

SEQ ID NO: 12170 - protein, 122 aa, synthetic construct
  REGION 1..122: note = Description of Artificial Sequence: Synthetic polypeptide
  REGION 1..122: note = VH of XENP018627
EVQLVESGGGLVKPGGSLRLSCAASGFTFSNYWMNWVRQAPGKGLEWVGEIRLKSNNKATHYAEPVKGRFTISRDDSKSTVYLQMNSLKTEDTAVYYCTRYYGNYGGYFDVWGAGTLVTVSS

SEQ ID NO: 12171 - protein, 107 aa, synthetic construct; identical to SEQ ID NO: 10923
  REGION 1..107: note = Description of Artificial Sequence: Synthetic polypeptide
  REGION 1..107: note = VL of XENP018627

SEQ ID NO: 12172 - protein, 5 aa, synthetic construct
  REGION 1..5: note = Description of Artificial Sequence: Synthetic peptide
  REGION 1..5: note = XENP018627 vhCDR1
NYWMN

SEQ ID NO: 12173 - protein, 19 aa, synthetic construct
  REGION 1..19: note = Description of Artificial Sequence: Synthetic peptide
  REGION 1..19: note = XENP018627 vhCDR2
EIRLKSNNKATHYAEPVKG

SEQ ID NO: 12174 - protein, 11 aa, synthetic construct
  REGION 1..11: note = Description of Artificial Sequence: Synthetic peptide
  REGION 1..11: note = XENP018627 vhCDR3
YYGNYGGYFDV

SEQ ID NO: 12175 - protein, 11 aa, synthetic construct
  REGION 1..11: note = Description of Artificial Sequence: Synthetic peptide
  REGION 1..11: note = XENP018627 vlCDR1
RASQSVSNDVA

SEQ ID NO: 12176 - protein, 7 aa, synthetic construct
  REGION 1..7: note = Description of Artificial Sequence: Synthetic peptide
  REGION 1..7: note = XENP018627 vlCDR2
YASHRYT

SEQ ID NO: 12177 - protein, 9 aa, synthetic construct
  REGION 1..9: note = Description of Artificial Sequence: Synthetic peptide
  REGION 1..9: note = XENP018627 vlCDR3
QQDYSSPRT

SEQ ID NO: 12178 - protein, 249 aa, synthetic construct
  REGION 1..249: note = Description of Artificial Sequence: Synthetic polypeptide
  REGION 1..249: note = XENP018628 1G6_H1.128_L1_scFv(GKPGS)4
EVQLVESGGGLVKPGGSLRLSCAASGFTFSNYWMNWVRQAPGKGLEWVGEIRLKSNNYGTHYAEPVKGRFTISRDDSKSTVYLQMNSLKTEDTAVYYCTRYYGNYGGYFDVWGAGTLVTVSSGKPGSGKPGSGKPGSGKPGSSIVMTQSPATLSVSPGERATLSCRASQSVSNDVAWYQQKPGQSPRLLINYASHRYTGVPDRFTGSGYGTEFTLTISSLQSEDFAVYFCQQDYSSPRTFGGGTKVEIK

SEQ ID NO: 12179 - protein, 122 aa, synthetic construct
  REGION 1..122: note = Description of Artificial Sequence: Synthetic polypeptide
  REGION 1..122: note = VH of XENP018628
EVQLVESGGGLVKPGGSLRLSCAASGFTFSNYWMNWVRQAPGKGLEWVGEIRLKSNNYGTHYAEPVKGRFTISRDDSKSTVYLQMNSLKTEDTAVYYCTRYYGNYGGYFDVWGAGTLVTVSS

SEQ ID NO: 12180 - protein, 107 aa, synthetic construct; identical to SEQ ID NO: 10923
  REGION 1..107: note = Description of Artificial Sequence: Synthetic polypeptide
  REGION 1..107: note = VL of XENP018628

SEQ ID NO: 12181 - protein, 5 aa, synthetic construct
  REGION 1..5: note = Description of Artificial Sequence: Synthetic peptide
  REGION 1..5: note = XENP018628 vhCDR1
NYWMN

SEQ ID NO: 12182 - protein, 19 aa, synthetic construct
  REGION 1..19: note = Description of Artificial Sequence: Synthetic peptide
  REGION 1..19: note = XENP018628 vhCDR2
EIRLKSNNYGTHYAEPVKG

SEQ ID NO: 12183 - protein, 11 aa, synthetic construct
  REGION 1..11: note = Description of Artificial Sequence: Synthetic peptide
  REGION 1..11: note = XENP018628 vhCDR3
YYGNYGGYFDV

SEQ ID NO: 12184 - protein, 11 aa, synthetic construct
  REGION 1..11: note = Description of Artificial Sequence: Synthetic peptide
  REGION 1..11: note = XENP018628 vlCDR1
RASQSVSNDVA

SEQ ID NO: 12185 - protein, 7 aa, synthetic construct
  REGION 1..7: note = Description of Artificial Sequence: Synthetic peptide
  REGION 1..7: note = XENP018628 vlCDR2
YASHRYT

SEQ ID NO: 12186 - protein, 9 aa, synthetic construct
  REGION 1..9: note = Description of Artificial Sequence: Synthetic peptide
  REGION 1..9: note = XENP018628 vlCDR3
QQDYSSPRT

SEQ ID NO: 12187 - protein, 249 aa, synthetic construct
  REGION 1..249: note = Description of Artificial Sequence: Synthetic polypeptide
  REGION 1..249: note = XENP018629 1G6_H1.129_L1_scFv(GKPGS)4
EVQLVESGGGLVKPGGSLRLSCAASGFTFSNYWMNWVRQAPGKGLEWVGEIRLKSNNYHTHYAEPVKGRFTISRDDSKSTVYLQMNSLKTEDTAVYYCTRYYGNYGGYFDVWGAGTLVTVSSGKPGSGKPGSGKPGSGKPGSSIVMTQSPATLSVSPGERATLSCRASQSVSNDVAWYQQKPGQSPRLLINYASHRYTGVPDRFTGSGYGTEFTLTISSLQSEDFAVYFCQQDYSSPRTFGGGTKVEIK

SEQ ID NO: 12188 - protein, 122 aa, synthetic construct
  REGION 1..122: note = Description of Artificial Sequence: Synthetic polypeptide
  REGION 1..122: note = VH of XENP018629
EVQLVESGGGLVKPGGSLRLSCAASGFTFSNYWMNWVRQAPGKGLEWVGEIRLKSNNYHTHYAEPVKGRFTISRDDSKSTVYLQMNSLKTEDTAVYYCTRYYGNYGGYFDVWGAGTLVTVSS

SEQ ID NO: 12189 - protein, 107 aa, synthetic construct; identical to SEQ ID NO: 10923
  REGION 1..107: note = Description of Artificial Sequence: Synthetic polypeptide
  REGION 1..107: note = VL of XENP018629

SEQ ID NO: 12190 - protein, 5 aa, synthetic construct
  REGION 1..5: note = Description of Artificial Sequence: Synthetic peptide
  REGION 1..5: note = XENP018629 vhCDR1
NYWMN

SEQ ID NO: 12191 - protein, 19 aa, synthetic construct
  REGION 1..19: note = Description of Artificial Sequence: Synthetic peptide
  REGION 1..19: note = XENP018629 vhCDR2
EIRLKSNNYHTHYAEPVKG

SEQ ID NO: 12192 - protein, 11 aa, synthetic construct
  REGION 1..11: note = Description of Artificial Sequence: Synthetic peptide
  REGION 1..11: note = XENP018629 vhCDR3
YYGNYGGYFDV

SEQ ID NO: 12193 - protein, 11 aa, synthetic construct
  REGION 1..11: note = Description of Artificial Sequence: Synthetic peptide
  REGION 1..11: note = XENP018629 vlCDR1
RASQSVSNDVA

SEQ ID NO: 12194 - protein, 7 aa, synthetic construct
  REGION 1..7: note = Description of Artificial Sequence: Synthetic peptide
  REGION 1..7: note = XENP018629 vlCDR2
YASHRYT

SEQ ID NO: 12195 - protein, 9 aa, synthetic construct
  REGION 1..9: note = Description of Artificial Sequence: Synthetic peptide
  REGION 1..9: note = XENP018629 vlCDR3
QQDYSSPRT

SEQ ID NO: 12196 - protein, 249 aa, synthetic construct
  REGION 1..249: note = Description of Artificial Sequence: Synthetic polypeptide
  REGION 1..249: note = XENP018630 1G6_H1.130_L1_scFv(GKPGS)4
EVQLVESGGGLVKPGGSLRLSCAASGFTFSNYWMNWVRQAPGKGLEWVGEIRLKSNNYQTHYAEPVKGRFTISRDDSKSTVYLQMNSLKTEDTAVYYCTRYYGNYGGYFDVWGAGTLVTVSSGKPGSGKPGSGKPGSGKPGSSIVMTQSPATLSVSPGERATLSCRASQSVSNDVAWYQQKPGQSPRLLINYASHRYTGVPDRFTGSGYGTEFTLTISSLQSEDFAVYFCQQDYSSPRTFGGGTKVEIK

SEQ ID NO: 12197 - protein, 122 aa, synthetic construct
  REGION 1..122: note = Description of Artificial Sequence: Synthetic polypeptide
  REGION 1..122: note = VH of XENP018630
EVQLVESGGGLVKPGGSLRLSCAASGFTFSNYWMNWVRQAPGKGLEWVGEIRLKSNNYQTHYAEPVKGRFTISRDDSKSTVYLQMNSLKTEDTAVYYCTRYYGNYGGYFDVWGAGTLVTVSS

SEQ ID NO: 12198 - protein, 107 aa, synthetic construct; identical to SEQ ID NO: 10923
  REGION 1..107: note = Description of Artificial Sequence: Synthetic polypeptide
  REGION 1..107: note = VL of XENP018630

SEQ ID NO: 12199 - protein, 5 aa, synthetic construct
  REGION 1..5: note = Description of Artificial Sequence: Synthetic peptide
  REGION 1..5: note = XENP018630 vhCDR1
NYWMN

SEQ ID NO: 12200 - protein, 19 aa, synthetic construct
  REGION 1..19: note = Description of Artificial Sequence: Synthetic peptide
  REGION 1..19: note = XENP018630 vhCDR2
EIRLKSNNYQTHYAEPVKG

SEQ ID NO: 12201 - protein, 11 aa, synthetic construct
  REGION 1..11: note = Description of Artificial Sequence: Synthetic peptide
  REGION 1..11: note = XENP018630 vhCDR3
YYGNYGGYFDV

SEQ ID NO: 12202 - protein, 11 aa, synthetic construct
  REGION 1..11: note = Description of Artificial Sequence: Synthetic peptide
  REGION 1..11: note = XENP018630 vlCDR1
RASQSVSNDVA

SEQ ID NO: 12203 - protein, 7 aa, synthetic construct
  REGION 1..7: note = Description of Artificial Sequence: Synthetic peptide
  REGION 1..7: note = XENP018630 vlCDR2
YASHRYT

SEQ ID NO: 12204 - protein, 9 aa, synthetic construct
  REGION 1..9: note = Description of Artificial Sequence: Synthetic peptide
  REGION 1..9: note = XENP018630 vlCDR3
QQDYSSPRT

SEQ ID NO: 12205 - protein, 249 aa, synthetic construct
  REGION 1..249: note = Description of Artificial Sequence: Synthetic polypeptide
  REGION 1..249: note = XENP018631 1G6_H1.131_L1_scFv(GKPGS)4
EVQLVESGGGLVKPGGSLRLSCAASGFTFSNYWMNWVRQAPGKGLEWVGEIRLKSNNYDTHYAEPVKGRFTISRDDSKSTVYLQMNSLKTEDTAVYYCTRYYGNYGGYFDVWGAGTLVTVSSGKPGSGKPGSGKPGSGKPGSSIVMTQSPATLSVSPGERATLSCRASQSVSNDVAWYQQKPGQSPRLLINYASHRYTGVPDRFTGSGYGTEFTLTISSLQSEDFAVYFCQQDYSSPRTFGGGTKVEIK

SEQ ID NO: 12206 - protein, 122 aa, synthetic construct
  REGION 1..122: note = Description of Artificial Sequence: Synthetic polypeptide
  REGION 1..122: note = VH of XENP018631
EVQLVESGGGLVKPGGSLRLSCAASGFTFSNYWMNWVRQAPGKGLEWVGEIRLKSNNYDTHYAEPVKGRFTISRDDSKSTVYLQMNSLKTEDTAVYYCTRYYGNYGGYFDVWGAGTLVTVSS

SEQ ID NO: 12207 - protein, 107 aa, synthetic construct; identical to SEQ ID NO: 10923
  REGION 1..107: note = Description of Artificial Sequence: Synthetic polypeptide
  REGION 1..107: note = VL of XENP018631

SEQ ID NO: 12208 - protein, 5 aa, synthetic construct
  REGION 1..5: note = Description of Artificial Sequence: Synthetic peptide
  REGION 1..5: note = XENP018631 vhCDR1
NYWMN

SEQ ID NO: 12209 - protein, 19 aa, synthetic construct
  REGION 1..19: note = Description of Artificial Sequence: Synthetic peptide
  REGION 1..19: note = XENP018631 vhCDR2
EIRLKSNNYDTHYAEPVKG

SEQ ID NO: 12210 - protein, 11 aa, synthetic construct
  REGION 1..11: note = Description of Artificial Sequence: Synthetic peptide
  REGION 1..11: note = XENP018631 vhCDR3
YYGNYGGYFDV

SEQ ID NO: 12211 - protein, 11 aa, synthetic construct
  REGION 1..11: note = Description of Artificial Sequence: Synthetic peptide
  REGION 1..11: note = XENP018631 vlCDR1
RASQSVSNDVA

SEQ ID NO: 12212 - protein, 7 aa, synthetic construct
  REGION 1..7: note = Description of Artificial Sequence: Synthetic peptide
  REGION 1..7: note = XENP018631 vlCDR2
YASHRYT

SEQ ID NO: 12213 - protein, 9 aa, synthetic construct
  REGION 1..9: note = Description of Artificial Sequence: Synthetic peptide
  REGION 1..9: note = XENP018631 vlCDR3
QQDYSSPRT

SEQ ID NO: 12214 - protein, 249 aa, synthetic construct
  REGION 1..249: note = Description of Artificial Sequence: Synthetic polypeptide
  REGION 1..249: note = XENP018632 1G6_H1.132_L1_scFv(GKPGS)4
EVQLVESGGGLVKPGGSLRLSCAASGFTFSNYWMNWVRQAPGKGLEWVGEIRLKSNNYLTHYAEPVKGRFTISRDDSKSTVYLQMNSLKTEDTAVYYCTRYYGNYGGYFDVWGAGTLVTVSSGKPGSGKPGSGKPGSGKPGSSIVMTQSPATLSVSPGERATLSCRASQSVSNDVAWYQQKPGQSPRLLINYASHRYTGVPDRFTGSGYGTEFTLTISSLQSEDFAVYFCQQDYSSPRTFGGGTKVEIK

SEQ ID NO: 12215 - protein, 122 aa, synthetic construct
  REGION 1..122: note = Description of Artificial Sequence: Synthetic polypeptide
  REGION 1..122: note = VH of XENP018632
EVQLVESGGGLVKPGGSLRLSCAASGFTFSNYWMNWVRQAPGKGLEWVGEIRLKSNNYLTHYAEPVKGRFTISRDDSKSTVYLQMNSLKTEDTAVYYCTRYYGNYGGYFDVWGAGTLVTVSS

SEQ ID NO: 12216 - protein, 107 aa, synthetic construct; identical to SEQ ID NO: 10923
  REGION 1..107: note = Description of Artificial Sequence: Synthetic polypeptide
  REGION 1..107: note = VL of XENP018632

SEQ ID NO: 12217 - protein, 5 aa, synthetic construct
  REGION 1..5: note = Description of Artificial Sequence: Synthetic peptide
  REGION 1..5: note = XENP018632 vhCDR1
NYWMN

SEQ ID NO: 12218 - protein, 19 aa, synthetic construct
  REGION 1..19: note = Description of Artificial Sequence: Synthetic peptide
  REGION 1..19: note = XENP018632 vhCDR2
EIRLKSNNYLTHYAEPVKG

SEQ ID NO: 12219 - protein, 11 aa, synthetic construct
  REGION 1..11: note = Description of Artificial Sequence: Synthetic peptide
  REGION 1..11: note = XENP018632 vhCDR3
YYGNYGGYFDV

SEQ ID NO: 12220 - protein, 11 aa, synthetic construct
  REGION 1..11: note = Description of Artificial Sequence: Synthetic peptide
  REGION 1..11: note = XENP018632 vlCDR1
RASQSVSNDVA

SEQ ID NO: 12221 - protein, 7 aa, synthetic construct
  REGION 1..7: note = Description of Artificial Sequence: Synthetic peptide
  REGION 1..7: note = XENP018632 vlCDR2
YASHRYT

SEQ ID NO: 12222 - protein, 9 aa, synthetic construct
  REGION 1..9: note = Description of Artificial Sequence: Synthetic peptide
  REGION 1..9: note = XENP018632 vlCDR3
QQDYSSPRT

SEQ ID NO: 12223 - protein, 249 aa, synthetic construct
  REGION 1..249: note = Description of Artificial Sequence: Synthetic polypeptide
  REGION 1..249: note = XENP018633 1G6_H1.133_L1_scFv(GKPGS)4
EVQLVESGGGLVKPGGSLRLSCAASGFTFSNYWMNWVRQAPGKGLEWVGEIRLKSNNYKTHYAEPVKGRFTISRDDSKSTVYLQMNSLKTEDTAVYYCTRYYGNYGGYFDVWGAGTLVTVSSGKPGSGKPGSGKPGSGKPGSSIVMTQSPATLSVSPGERATLSCRASQSVSNDVAWYQQKPGQSPRLLINYASHRYTGVPDRFTGSGYGTEFTLTISSLQSEDFAVYFCQQDYSSPRTFGGGTKVEIK

SEQ ID NO: 12224 - protein, 122 aa, synthetic construct
  REGION 1..122: note = Description of Artificial Sequence: Synthetic polypeptide
  REGION 1..122: note = VH of XENP018633
EVQLVESGGGLVKPGGSLRLSCAASGFTFSNYWMNWVRQAPGKGLEWVGEIRLKSNNYKTHYAEPVKGRFTISRDDSKSTVYLQMNSLKTEDTAVYYCTRYYGNYGGYFDVWGAGTLVTVSS

SEQ ID NO: 12225 - protein, 107 aa, synthetic construct; identical to SEQ ID NO: 10923
  REGION 1..107: note = Description of Artificial Sequence: Synthetic polypeptide
  REGION 1..107: note = VL of XENP018633

SEQ ID NO: 12226 - protein, 5 aa, synthetic construct
  REGION 1..5: note = Description of Artificial Sequence: Synthetic peptide
  REGION 1..5: note = XENP018633 vhCDR1
NYWMN

SEQ ID NO: 12227 - protein, 19 aa, synthetic construct
  REGION 1..19: note = Description of Artificial Sequence: Synthetic peptide
  REGION 1..19: note = XENP018633 vhCDR2
EIRLKSNNYKTHYAEPVKG

SEQ ID NO: 12228 - protein, 11 aa, synthetic construct
  REGION 1..11: note = Description of Artificial Sequence: Synthetic peptide
  REGION 1..11: note = XENP018633 vhCDR3
YYGNYGGYFDV

SEQ ID NO: 12229 - protein, 11 aa, synthetic construct
  REGION 1..11: note = Description of Artificial Sequence: Synthetic peptide
  REGION 1..11: note = XENP018633 vlCDR1
RASQSVSNDVA

SEQ ID NO: 12230 - protein, 7 aa, synthetic construct
  REGION 1..7: note = Description of Artificial Sequence: Synthetic peptide
  REGION 1..7: note = XENP018633 vlCDR2
YASHRYT

SEQ ID NO: 12231 - protein, 9 aa, synthetic construct
  REGION 1..9: note = Description of Artificial Sequence: Synthetic peptide
  REGION 1..9: note = XENP018633 vlCDR3
QQDYSSPRT

SEQ ID NO: 12232 - protein, 249 aa, synthetic construct
  REGION 1..249: note = Description of Artificial Sequence: Synthetic polypeptide
  REGION 1..249: note = XENP018634 1G6_H1.134_L1_scFv(GKPGS)4
EVQLVESGGGLVKPGGSLRLSCAASGFTFSNYWMNWVRQAPGKGLEWVGEIRLKSNNYYTHYAEPVKGRFTISRDDSKSTVYLQMNSLKTEDTAVYYCTRYYGNYGGYFDVWGAGTLVTVSSGKPGSGKPGSGKPGSGKPGSSIVMTQSPATLSVSPGERATLSCRASQSVSNDVAWYQQKPGQSPRLLINYASHRYTGVPDRFTGSGYGTEFTLTISSLQSEDFAVYFCQQDYSSPRTFGGGTKVEIK

SEQ ID NO: 12233 - protein, 122 aa, synthetic construct
  REGION 1..122: note = Description of Artificial Sequence: Synthetic polypeptide
  REGION 1..122: note = VH of XENP018634
EVQLVESGGGLVKPGGSLRLSCAASGFTFSNYWMNWVRQAPGKGLEWVGEIRLKSNNYYTHYAEPVKGRFTISRDDSKSTVYLQMNSLKTEDTAVYYCTRYYGNYGGYFDVWGAGTLVTVSS

SEQ ID NO: 12234 - protein, 107 aa, synthetic construct; identical to SEQ ID NO: 10923
  REGION 1..107: note = Description of Artificial Sequence: Synthetic polypeptide
  REGION 1..107: note = VL of XENP018634

SEQ ID NO: 12235 - protein, 5 aa, synthetic construct
  REGION 1..5: note = Description of Artificial Sequence: Synthetic peptide
  REGION 1..5: note = XENP018634 vhCDR1
NYWMN

SEQ ID NO: 12236 - protein, 19 aa, synthetic construct
  REGION 1..19: note = Description of Artificial Sequence: Synthetic peptide
  REGION 1..19: note = XENP018634 vhCDR2
EIRLKSNNYYTHYAEPVKG

SEQ ID NO: 12237 - protein, 11 aa, synthetic construct
  REGION 1..11: note = Description of Artificial Sequence: Synthetic peptide
  REGION 1..11: note = XENP018634 vhCDR3
YYGNYGGYFDV

SEQ ID NO: 12238 - protein, 11 aa, synthetic construct
  REGION 1..11: note = Description of Artificial Sequence: Synthetic peptide
  REGION 1..11: note = XENP018634 vlCDR1
RASQSVSNDVA

SEQ ID NO: 12239 - protein, 7 aa, synthetic construct
  REGION 1..7: note = Description of Artificial Sequence: Synthetic peptide
  REGION 1..7: note = XENP018634 vlCDR2
YASHRYT

SEQ ID NO: 12240 - protein, 9 aa, synthetic construct
  REGION 1..9: note = Description of Artificial Sequence: Synthetic peptide
  REGION 1..9: note = XENP018634 vlCDR3
QQDYSSPRT

SEQ ID NO: 12241 - protein, 249 aa, synthetic construct
  REGION 1..249: note = Description of Artificial Sequence: Synthetic polypeptide
  REGION 1..249: note = XENP018635 1G6_H1.135_L1_scFv(GKPGS)4
EVQLVESGGGLVKPGGSLRLSCAASGFTFSNYWMNWVRQAPGKGLEWVGEIRLKSNNYAKHYAEPVKGRFTISRDDSKSTVYLQMNSLKTEDTAVYYCTRYYGNYGGYFDVWGAGTLVTVSSGKPGSGKPGSGKPGSGKPGSSIVMTQSPATLSVSPGERATLSCRASQSVSNDVAWYQQKPGQSPRLLINYASHRYTGVPDRFTGSGYGTEFTLTISSLQSEDFAVYFCQQDYSSPRTFGGGTKVEIK

SEQ ID NO: 12242 - protein, 122 aa, synthetic construct
  REGION 1..122: note = Description of Artificial Sequence: Synthetic polypeptide
  REGION 1..122: note = VH of XENP018635
EVQLVESGGGLVKPGGSLRLSCAASGFTFSNYWMNWVRQAPGKGLEWVGEIRLKSNNYAKHYAEPVKGRFTISRDDSKSTVYLQMNSLKTEDTAVYYCTRYYGNYGGYFDVWGAGTLVTVSS

SEQ ID NO: 12243 - protein, 107 aa, synthetic construct; identical to SEQ ID NO: 10923
  REGION 1..107: note = Description of Artificial Sequence: Synthetic polypeptide
  REGION 1..107: note = VL of XENP018635

SEQ ID NO: 12244 - protein, 5 aa, synthetic construct
  REGION 1..5: note = Description of Artificial Sequence: Synthetic peptide
  REGION 1..5: note = XENP018635 vhCDR1
NYWMN

SEQ ID NO: 12245 - protein, 19 aa, synthetic construct
  REGION 1..19: note = Description of Artificial Sequence: Synthetic peptide
  REGION 1..19: note = XENP018635 vhCDR2
EIRLKSNNYAKHYAEPVKG

SEQ ID NO: 12246 - protein, 11 aa, synthetic construct
  REGION 1..11: note = Description of Artificial Sequence: Synthetic peptide
  REGION 1..11: note = XENP018635 vhCDR3
YYGNYGGYFDV

SEQ ID NO: 12247 - protein, 11 aa, synthetic construct
  REGION 1..11: note = Description of Artificial Sequence: Synthetic peptide
  REGION 1..11: note = XENP018635 vlCDR1
RASQSVSNDVA

SEQ ID NO: 12248 - protein, 7 aa, synthetic construct
  REGION 1..7: note = Description of Artificial Sequence: Synthetic peptide
  REGION 1..7: note = XENP018635 vlCDR2
YASHRYT

SEQ ID NO: 12249 - protein, 9 aa, synthetic construct
  REGION 1..9: note = Description of Artificial Sequence: Synthetic peptide
  REGION 1..9: note = XENP018635 vlCDR3
QQDYSSPRT

SEQ ID NO: 12250 - protein, 249 aa, synthetic construct
  REGION 1..249: note = Description of Artificial Sequence: Synthetic polypeptide
  REGION 1..249: note = XENP018636 1G6_H1.136_L1_scFv(GKPGS)4
EVQLVESGGGLVKPGGSLRLSCAASGFTFSNYWMNWVRQAPGKGLEWVGEIRLKSNNYAIHYAEPVKGRFTISRDDSKSTVYLQMNSLKTEDTAVYYCTRYYGNYGGYFDVWGAGTLVTVSSGKPGSGKPGSGKPGSGKPGSSIVMTQSPATLSVSPGERATLSCRASQSVSNDVAWYQQKPGQSPRLLINYASHRYTGVPDRFTGSGYGTEFTLTISSLQSEDFAVYFCQQDYSSPRTFGGGTKVEIK

SEQ ID NO: 12251 - protein, 122 aa, synthetic construct
  REGION 1..122: note = Description of Artificial Sequence: Synthetic polypeptide
  REGION 1..122: note = VH of XENP018636
EVQLVESGGGLVKPGGSLRLSCAASGFTFSNYWMNWVRQAPGKGLEWVGEIRLKSNNYAIHYAEPVKGRFTISRDDSKSTVYLQMNSLKTEDTAVYYCTRYYGNYGGYFDVWGAGTLVTVSS

SEQ ID NO: 12252 - protein, 107 aa, synthetic construct; identical to SEQ ID NO: 10923
  REGION 1..107: note = Description of Artificial Sequence: Synthetic polypeptide
  REGION 1..107: note = VL of XENP018636

SEQ ID NO: 12253 - protein, 5 aa, synthetic construct
  REGION 1..5: note = Description of Artificial Sequence: Synthetic peptide
  REGION 1..5: note = XENP018636 vhCDR1
NYWMN

SEQ ID NO: 12254 - protein, 19 aa, synthetic construct
  REGION 1..19: note = Description of Artificial Sequence: Synthetic peptide
  REGION 1..19: note = XENP018636 vhCDR2
EIRLKSNNYAIHYAEPVKG

SEQ ID NO: 12255 - protein, 11 aa, synthetic construct
  REGION 1..11: note = Description of Artificial Sequence: Synthetic peptide
  REGION 1..11: note = XENP018636 vhCDR3
YYGNYGGYFDV

SEQ ID NO: 12256 - protein, 11 aa, synthetic construct
  REGION 1..11: note = Description of Artificial Sequence: Synthetic peptide
  REGION 1..11: note = XENP018636 vlCDR1
RASQSVSNDVA

SEQ ID NO: 12257 - protein, 7 aa, synthetic construct
  REGION 1..7: note = Description of Artificial Sequence: Synthetic peptide
  REGION 1..7: note = XENP018636 vlCDR2
YASHRYT

SEQ ID NO: 12258 - protein, 9 aa, synthetic construct
  REGION 1..9: note = Description of Artificial Sequence: Synthetic peptide
  REGION 1..9: note = XENP018636 vlCDR3
QQDYSSPRT

SEQ ID NO: 12259 - protein, 249 aa, synthetic construct
  REGION 1..249: note = Description of Artificial Sequence: Synthetic polypeptide
  REGION 1..249: note = XENP018637 1G6_H1.137_L1_scFv(GKPGS)4
EVQLVESGGGLVKPGGSLRLSCAASGFTFSNYWMNWVRQAPGKGLEWVGEIRLKSNNYATYYAEPVKGRFTISRDDSKSTVYLQMNSLKTEDTAVYYCTRYYGNYGGYFDVWGAGTLVTVSSGKPGSGKPGSGKPGSGKPGSSIVMTQSPATLSVSPGERATLSCRASQSVSNDVAWYQQKPGQSPRLLINYASHRYTGVPDRFTGSGYGTEFTLTISSLQSEDFAVYFCQQDYSSPRTFGGGTKVEIK

SEQ ID NO: 12260 - protein, 122 aa, synthetic construct
  REGION 1..122: note = Description of Artificial Sequence: Synthetic polypeptide
  REGION 1..122: note = VH of XENP018637
EVQLVESGGGLVKPGGSLRLSCAASGFTFSNYWMNWVRQAPGKGLEWVGEIRLKSNNYATYYAEPVKGRFTISRDDSKSTVYLQMNSLKTEDTAVYYCTRYYGNYGGYFDVWGAGTLVTVSS

SEQ ID NO: 12261 - protein, 107 aa, synthetic construct; identical to SEQ ID NO: 10923
  REGION 1..107: note = Description of Artificial Sequence: Synthetic polypeptide
  REGION 1..107: note = VL of XENP018637

SEQ ID NO: 12262 - protein, 5 aa, synthetic construct
  REGION 1..5: note = Description of Artificial Sequence: Synthetic peptide
  REGION 1..5: note = XENP018637 vhCDR1
NYWMN

SEQ ID NO: 12263 - protein, 19 aa, synthetic construct
  REGION 1..19: note = Description of Artificial Sequence: Synthetic peptide
  REGION 1..19: note = XENP018637 vhCDR2
EIRLKSNNYATYYAEPVKG

SEQ ID NO: 12264 - protein, 11 aa, synthetic construct
  REGION 1..11: note = Description of Artificial Sequence: Synthetic peptide
  REGION 1..11: note = XENP018637 vhCDR3
YYGNYGGYFDV

SEQ ID NO: 12265 - protein, 11 aa, synthetic construct
  REGION 1..11: note = Description of Artificial Sequence: Synthetic peptide
  REGION 1..11: note = XENP018637 vlCDR1
RASQSVSNDVA

SEQ ID NO: 12266 - protein, 7 aa, synthetic construct
  REGION 1..7: note = Description of Artificial Sequence: Synthetic peptide
  REGION 1..7: note = XENP018637 vlCDR2
YASHRYT

SEQ ID NO: 12267 - protein, 9 aa, synthetic construct
  REGION 1..9: note = Description of Artificial Sequence: Synthetic peptide
  REGION 1..9: note = XENP018637 vlCDR3
QQDYSSPRT

SEQ ID NO: 12268 - protein, 249 aa, synthetic construct
  REGION 1..249: note = Description of Artificial Sequence: Synthetic polypeptide
  REGION 1..249: note = XENP018638 1G6_H1.138_L1_scFv(GKPGS)4
EVQLVESGGGLVKPGGSLRLSCAASGFTFSNYWMNWVRQAPGKGLEWVGEIRLKSNNYATQYAEPVKGRFTISRDDSKSTVYLQMNSLKTEDTAVYYCTRYYGNYGGYFDVWGAGTLVTVSSGKPGSGKPGSGKPGSGKPGSSIVMTQSPATLSVSPGERATLSCRASQSVSNDVAWYQQKPGQSPRLLINYASHRYTGVPDRFTGSGYGTEFTLTISSLQSEDFAVYFCQQDYSSPRTFGGGTKVEIK

SEQ ID NO: 12269 - protein, 122 aa, synthetic construct
  REGION 1..122: note = Description of Artificial Sequence: Synthetic polypeptide
  REGION 1..122: note = VH of XENP018638
EVQLVESGGGLVKPGGSLRLSCAASGFTFSNYWMNWVRQAPGKGLEWVGEIRLKSNNYATQYAEPVKGRFTISRDDSKSTVYLQMNSLKTEDTAVYYCTRYYGNYGGYFDVWGAGTLVTVSS

SEQ ID NO: 12270 - protein, 107 aa, synthetic construct; identical to SEQ ID NO: 10923
  REGION 1..107: note = Description of Artificial Sequence: Synthetic polypeptide
  REGION 1..107: note = VL of XENP018638

SEQ ID NO: 12271 - protein, 5 aa, synthetic construct
  REGION 1..5: note = Description of Artificial Sequence: Synthetic peptide
  REGION 1..5: note = XENP018638 vhCDR1
NYWMN

SEQ ID NO: 12272 - protein, 19 aa, synthetic construct
  REGION 1..19: note = Description of Artificial Sequence: Synthetic peptide
  REGION 1..19: note = XENP018638 vhCDR2
EIRLKSNNYATQYAEPVKG

SEQ ID NO: 12273 - protein, 11 aa, synthetic construct
  REGION 1..11: note = Description of Artificial Sequence: Synthetic peptide
  REGION 1..11: note = XENP018638 vhCDR3
YYGNYGGYFDV

SEQ ID NO: 12274 - protein, 11 aa, synthetic construct
  REGION 1..11: note = Description of Artificial Sequence: Synthetic peptide
  REGION 1..11: note = XENP018638 vlCDR1
RASQSVSNDVA

SEQ ID NO: 12275 - protein, 7 aa, synthetic construct
  REGION 1..7: note = Description of Artificial Sequence: Synthetic peptide
  REGION 1..7: note = XENP018638 vlCDR2
YASHRYT

SEQ ID NO: 12276 - protein, 9 aa, synthetic construct
  REGION 1..9: note = Description of Artificial Sequence: Synthetic peptide
  REGION 1..9: note = XENP018638 vlCDR3
QQDYSSPRT

SEQ ID NO: 12277 - protein, 249 aa, synthetic construct
  REGION 1..249: note = Description of Artificial Sequence: Synthetic polypeptide
  REGION 1..249: note = XENP018639 1G6_H1.139_L1_scFv(GKPGS)4
EVQLVESGGGLVKPGGSLRLSCAASGFTFSNYWMNWVRQAPGKGLEWVGEIRLKSNNYATDYAEPVKGRFTISRDDSKSTVYLQMNSLKTEDTAVYYCTRYYGNYGGYFDVWGAGTLVTVSSGKPGSGKPGSGKPGSGKPGSSIVMTQSPATLSVSPGERATLSCRASQSVSNDVAWYQQKPGQSPRLLINYASHRYTGVPDRFTGSGYGTEFTLTISSLQSEDFAVYFCQQDYSSPRTFGGGTKVEIK

SEQ ID NO: 12278 - protein, 122 aa, synthetic construct
  REGION 1..122: note = Description of Artificial Sequence: Synthetic polypeptide
  REGION 1..122: note = VH of XENP018639
EVQLVESGGGLVKPGGSLRLSCAASGFTFSNYWMNWVRQAPGKGLEWVGEIRLKSNNYATDYAEPVKGRFTISRDDSKSTVYLQMNSLKTEDTAVYYCTRYYGNYGGYFDVWGAGTLVTVSS

SEQ ID NO: 12279 - protein, 107 aa, synthetic construct; identical to SEQ ID NO: 10923
  REGION 1..107: note = Description of Artificial Sequence: Synthetic polypeptide
  REGION 1..107: note = VL of XENP018639

SEQ ID NO: 12280 - protein, 5 aa, synthetic construct
  REGION 1..5: note = Description of Artificial Sequence: Synthetic peptide
  REGION 1..5: note = XENP018639 vhCDR1
NYWMN

SEQ ID NO: 12281 - protein, 19 aa, synthetic construct
  REGION 1..19: note = Description of Artificial Sequence: Synthetic peptide
  REGION 1..19: note = XENP018639 vhCDR2
EIRLKSNNYATDYAEPVKG

SEQ ID NO: 12282 - protein, 11 aa, synthetic construct
  REGION 1..11: note = Description of Artificial Sequence: Synthetic peptide
  REGION 1..11: note = XENP018639 vhCDR3
YYGNYGGYFDV

SEQ ID NO: 12283 - protein, 11 aa, synthetic construct
  REGION 1..11: note = Description of Artificial Sequence: Synthetic peptide
  REGION 1..11: note = XENP018639 vlCDR1
RASQSVSNDVA

SEQ ID NO: 12284 - protein, 7 aa, synthetic construct
  REGION 1..7: note = Description of Artificial Sequence: Synthetic peptide
  REGION 1..7: note = XENP018639 vlCDR2
YASHRYT

SEQ ID NO: 12285 - protein, 9 aa, synthetic construct
  REGION 1..9: note = Description of Artificial Sequence: Synthetic peptide
  REGION 1..9: note = XENP018639 vlCDR3
QQDYSSPRT

SEQ ID NO: 12286 - protein, 249 aa, synthetic construct
  REGION 1..249: note = Description of Artificial Sequence: Synthetic polypeptide
  REGION 1..249: note = XENP018640 1G6_H1.140_L1_scFv(GKPGS)4
EVQLVESGGGLVKPGGSLRLSCAASGFTFSNYWMNWVRQAPGKGLEWVGEIRLKSNNYATFYAEPVKGRFTISRDDSKSTVYLQMNSLKTEDTAVYYCTRYYGNYGGYFDVWGAGTLVTVSSGKPGSGKPGSGKPGSGKPGSSIVMTQSPATLSVSPGERATLSCRASQSVSNDVAWYQQKPGQSPRLLINYASHRYTGVPDRFTGSGYGTEFTLTISSLQSEDFAVYFCQQDYSSPRTFGGGTKVEIK

SEQ ID NO: 12287 - protein, 122 aa, synthetic construct
  REGION 1..122: note = Description of Artificial Sequence: Synthetic polypeptide
  REGION 1..122: note = VH of XENP018640
EVQLVESGGGLVKPGGSLRLSCAASGFTFSNYWMNWVRQAPGKGLEWVGEIRLKSNNYATFYAEPVKGRFTISRDDSKSTVYLQMNSLKTEDTAVYYCTRYYGNYGGYFDVWGAGTLVTVSS

SEQ ID NO: 12288 - protein, 107 aa, synthetic construct; identical to SEQ ID NO: 10923
  REGION 1..107: note = Description of Artificial Sequence: Synthetic polypeptide
  REGION 1..107: note = VL of XENP018640

SEQ ID NO: 12289 - protein, 5 aa, synthetic construct
  REGION 1..5: note = Description of Artificial Sequence: Synthetic peptide
  REGION 1..5: note = XENP018640 vhCDR1
NYWMN

SEQ ID NO: 12290 - protein, 19 aa, synthetic construct
  REGION 1..19: note = Description of Artificial Sequence: Synthetic peptide
  REGION 1..19: note = XENP018640 vhCDR2
EIRLKSNNYATFYAEPVKG

SEQ ID NO: 12291 - protein, 11 aa, synthetic construct
  REGION 1..11: note = Description of Artificial Sequence: Synthetic peptide
  REGION 1..11: note = XENP018640 vhCDR3
YYGNYGGYFDV

SEQ ID NO: 12292 - protein, 11 aa, synthetic construct
  REGION 1..11: note = Description of Artificial Sequence: Synthetic peptide
  REGION 1..11: note = XENP018640 vlCDR1
RASQSVSNDVA

SEQ ID NO: 12293 - protein, 7 aa, synthetic construct
  REGION 1..7: note = Description of Artificial Sequence: Synthetic peptide
  REGION 1..7: note = XENP018640 vlCDR2
YASHRYT

SEQ ID NO: 12294 - protein, 9 aa, synthetic construct
  REGION 1..9: note = Description of Artificial Sequence: Synthetic peptide
  REGION 1..9: note = XENP018640 vlCDR3
QQDYSSPRT

SEQ ID NO: 12295 - protein, 249 aa, synthetic construct
  REGION 1..249: note = Description of Artificial Sequence: Synthetic polypeptide
  REGION 1..249: note = XENP018641 1G6_H1.141_L1_scFv(GKPGS)4
EVQLVESGGGLVKPGGSLRLSCAASGFTFSNYWMNWVRQAPGKGLEWVGEIRLKSNNYATAYAEPVKGRFTISRDDSKSTVYLQMNSLKTEDTAVYYCTRYYGNYGGYFDVWGAGTLVTVSSGKPGSGKPGSGKPGSGKPGSSIVMTQSPATLSVSPGERATLSCRASQSVSNDVAWYQQKPGQSPRLLINYASHRYTGVPDRFTGSGYGTEFTLTISSLQSEDFAVYFCQQDYSSPRTFGGGTKVEIK

SEQ ID NO: 12296 - protein, 122 aa, synthetic construct
  REGION 1..122: note = Description of Artificial Sequence: Synthetic polypeptide
  REGION 1..122: note = VH of XENP018641
EVQLVESGGGLVKPGGSLRLSCAASGFTFSNYWMNWVRQAPGKGLEWVGEIRLKSNNYATAYAEPVKGRFTISRDDSKSTVYLQMNSLKTEDTAVYYCTRYYGNYGGYFDVWGAGTLVTVSS

SEQ ID NO: 12297 - protein, 107 aa, synthetic construct; identical to SEQ ID NO: 10923
  REGION 1..107: note = Description of Artificial Sequence: Synthetic polypeptide
  REGION 1..107: note = VL of XENP018641

SEQ ID NO: 12298 - protein, 5 aa, synthetic construct
  REGION 1..5: note = Description of Artificial Sequence: Synthetic peptide
  REGION 1..5: note = XENP018641 vhCDR1
NYWMN

SEQ ID NO: 12299 - protein, 19 aa, synthetic construct
  REGION 1..19: note = Description of Artificial Sequence: Synthetic peptide
  REGION 1..19: note = XENP018641 vhCDR2
EIRLKSNNYATAYAEPVKG

SEQ ID NO: 12300 - protein, 11 aa, synthetic construct
  REGION 1..11: note = Description of Artificial Sequence: Synthetic peptide
  REGION 1..11: note = XENP018641 vhCDR3
YYGNYGGYFDV

SEQ ID NO: 12301 - protein, 11 aa, synthetic construct
  REGION 1..11: note = Description of Artificial Sequence: Synthetic peptide
  REGION 1..11: note = XENP018641 vlCDR1
RASQSVSNDVA

SEQ ID NO: 12302 - protein, 7 aa, synthetic construct
  REGION 1..7: note = Description of Artificial Sequence: Synthetic peptide
  REGION 1..7: note = XENP018641 vlCDR2
YASHRYT

SEQ ID NO: 12303 - protein, 9 aa, synthetic construct
  REGION 1..9: note = Description of Artificial Sequence: Synthetic peptide
  REGION 1..9: note = XENP018641 vlCDR3
QQDYSSPRT

SEQ ID NO: 12304 - protein, 249 aa, synthetic construct
  REGION 1..249: note = Description of Artificial Sequence: Synthetic polypeptide
  REGION 1..249: note = XENP018642 1G6_H1.142_L1_scFv(GKPGS)4
EVQLVESGGGLVKPGGSLRLSCAASGFTFSNYWMNWVRQAPGKGLEWVGEIRLKSNNYATTYAEPVKGRFTISRDDSKSTVYLQMNSLKTEDTAVYYCTRYYGNYGGYFDVWGAGTLVTVSSGKPGSGKPGSGKPGSGKPGSSIVMTQSPATLSVSPGERATLSCRASQSVSNDVAWYQQKPGQSPRLLINYASHRYTGVPDRFTGSGYGTEFTLTISSLQSEDFAVYFCQQDYSSPRTFGGGTKVEIK

SEQ ID NO: 12305 - protein, 122 aa, synthetic construct
  REGION 1..122: note = Description of Artificial Sequence: Synthetic polypeptide
  REGION 1..122: note = VH of XENP018642
EVQLVESGGGLVKPGGSLRLSCAASGFTFSNYWMNWVRQAPGKGLEWVGEIRLKSNNYATTYAEPVKGRFTISRDDSKSTVYLQMNSLKTEDTAVYYCTRYYGNYGGYFDVWGAGTLVTVSS

SEQ ID NO: 12306 - protein, 107 aa, synthetic construct; identical to SEQ ID NO: 10923
  REGION 1..107: note = Description of Artificial Sequence: Synthetic polypeptide
  REGION 1..107: note = VL of XENP018642

SEQ ID NO: 12307 - protein, 5 aa, synthetic construct
  REGION 1..5: note = Description of Artificial Sequence: Synthetic peptide
  REGION 1..5: note = XENP018642 vhCDR1
NYWMN

SEQ ID NO: 12308 - protein, 19 aa, synthetic construct
  REGION 1..19: note = Description of Artificial Sequence: Synthetic peptide
  REGION 1..19: note = XENP018642 vhCDR2
EIRLKSNNYATTYAEPVKG

SEQ ID NO: 12309 - protein, 11 aa, synthetic construct
  REGION 1..11: note = Description of Artificial Sequence: Synthetic peptide
  REGION 1..11: note = XENP018642 vhCDR3
YYGNYGGYFDV

SEQ ID NO: 12310 - protein, 11 aa, synthetic construct
  REGION 1..11: note = Description of Artificial Sequence: Synthetic peptide
  REGION 1..11: note = XENP018642 vlCDR1
RASQSVSNDVA

SEQ ID NO: 12311 - protein, 7 aa, synthetic construct
  REGION 1..7: note = Description of Artificial Sequence: Synthetic peptide
  REGION 1..7: note = XENP018642 vlCDR2
YASHRYT

SEQ ID NO: 12312 - protein, 9 aa, synthetic construct
  REGION 1..9: note = Description of Artificial Sequence: Synthetic peptide
  REGION 1..9: note = XENP018642 vlCDR3
QQDYSSPRT

SEQ ID NO: 12313 - protein, 249 aa, synthetic construct
  REGION 1..249: note = Description of Artificial Sequence: Synthetic polypeptide
  REGION 1..249: note = XENP018643 1G6_H1.143_L1_scFv(GKPGS)4
EVQLVESGGGLVKPGGSLRLSCAASGFTFSNYWMNWVRQAPGKGLEWVGEIRLKSNNYATKYAEPVKGRFTISRDDSKSTVYLQMNSLKTEDTAVYYCTRYYGNYGGYFDVWGAGTLVTVSSGKPGSGKPGSGKPGSGKPGSSIVMTQSPATLSVSPGERATLSCRASQSVSNDVAWYQQKPGQSPRLLINYASHRYTGVPDRFTGSGYGTEFTLTISSLQSEDFAVYFCQQDYSSPRTFGGGTKVEIK

SEQ ID NO: 12314 - protein, 122 aa, synthetic construct
  REGION 1..122: note = Description of Artificial Sequence: Synthetic polypeptide
  REGION 1..122: note = VH of XENP018643
EVQLVESGGGLVKPGGSLRLSCAASGFTFSNYWMNWVRQAPGKGLEWVGEIRLKSNNYATKYAEPVKGRFTISRDDSKSTVYLQMNSLKTEDTAVYYCTRYYGNYGGYFDVWGAGTLVTVSS

SEQ ID NO: 12315 - protein, 107 aa, synthetic construct; identical to SEQ ID NO: 10923
  REGION 1..107: note = Description of Artificial Sequence: Synthetic polypeptide
  REGION 1..107: note = VL of XENP018643

SEQ ID NO: 12316 - protein, 5 aa, synthetic construct
  REGION 1..5: note = Description of Artificial Sequence: Synthetic peptide
  REGION 1..5: note = XENP018643 vhCDR1
NYWMN

SEQ ID NO: 12317 - protein, 19 aa, synthetic construct
  REGION 1..19: note = Description of Artificial Sequence: Synthetic peptide
  REGION 1..19: note = XENP018643 vhCDR2
EIRLKSNNYATKYAEPVKG

SEQ ID NO: 12318 - protein, 11 aa, synthetic construct
  REGION 1..11: note = Description of Artificial Sequence: Synthetic peptide
  REGION 1..11: note = XENP018643 vhCDR3
YYGNYGGYFDV

SEQ ID NO: 12319 - protein, 11 aa, synthetic construct
  REGION 1..11: note = Description of Artificial Sequence: Synthetic peptide
  REGION 1..11: note = XENP018643 vlCDR1
RASQSVSNDVA

SEQ ID NO: 12320 - protein, 7 aa, synthetic construct
  REGION 1..7: note = Description of Artificial Sequence: Synthetic peptide
  REGION 1..7: note = XENP018643 vlCDR2
YASHRYT

SEQ ID NO: 12321 - protein, 9 aa, synthetic construct
  REGION 1..9: note = Description of Artificial Sequence: Synthetic peptide
  REGION 1..9: note = XENP018643 vlCDR3
QQDYSSPRT

SEQ ID NO: 12322 - protein, 249 aa, synthetic construct
  REGION 1..249: note = Description of Artificial Sequence: Synthetic polypeptide
  REGION 1..249: note = XENP018644 1G6_H1.144_L1_scFv(GKPGS)4
EVQLVESGGGLVKPGGSLRLSCAASGFTFSNYWMNWVRQAPGKGLEWVGEIRLKSNNYATGYAEPVKGRFTISRDDSKSTVYLQMNSLKTEDTAVYYCTRYYGNYGGYFDVWGAGTLVTVSSGKPGSGKPGSGKPGSGKPGSSIVMTQSPATLSVSPGERATLSCRASQSVSNDVAWYQQKPGQSPRLLINYASHRYTGVPDRFTGSGYGTEFTLTISSLQSEDFAVYFCQQDYSSPRTFGGGTKVEIK

SEQ ID NO: 12323 - protein, 122 aa, synthetic construct
  REGION 1..122: note = Description of Artificial Sequence: Synthetic polypeptide
  REGION 1..122: note = VH of XENP018644
EVQLVESGGGLVKPGGSLRLSCAASGFTFSNYWMNWVRQAPGKGLEWVGEIRLKSNNYATGYAEPVKGRFTISRDDSKSTVYLQMNSLKTEDTAVYYCTRYYGNYGGYFDVWGAGTLVTVSS

SEQ ID NO: 12324 - protein, 107 aa, synthetic construct; identical to SEQ ID NO: 10923
  REGION 1..107: note = Description of Artificial Sequence: Synthetic polypeptide
  REGION 1..107: note = VL of XENP018644

SEQ ID NO: 12325 - protein, 5 aa, synthetic construct
  REGION 1..5: note = Description of Artificial Sequence: Synthetic peptide
  REGION 1..5: note = XENP018644 vhCDR1
NYWMN

SEQ ID NO: 12326 - protein, 19 aa, synthetic construct
  REGION 1..19: note = Description of Artificial Sequence: Synthetic peptide
  REGION 1..19: note = XENP018644 vhCDR2
EIRLKSNNYATGYAEPVKG

SEQ ID NO: 12327 - protein, 11 aa, synthetic construct
  REGION 1..11: note = Description of Artificial Sequence: Synthetic peptide
  REGION 1..11: note = XENP018644 vhCDR3
YYGNYGGYFDV

SEQ ID NO: 12328 - protein, 11 aa, synthetic construct
  REGION 1..11: note = Description of Artificial Sequence: Synthetic peptide
  REGION 1..11: note = XENP018644 vlCDR1
RASQSVSNDVA

SEQ ID NO: 12329 - protein, 7 aa, synthetic construct
  REGION 1..7: note = Description of Artificial Sequence: Synthetic peptide
  REGION 1..7: note = XENP018644 vlCDR2
YASHRYT

SEQ ID NO: 12330 - protein, 9 aa, synthetic construct
  REGION 1..9: note = Description of Artificial Sequence: Synthetic peptide
  REGION 1..9: note = XENP018644 vlCDR3
QQDYSSPRT

SEQ ID NO: 12331 - protein, 249 aa, synthetic construct
  REGION 1..249: note = Description of Artificial Sequence: Synthetic polypeptide
  REGION 1..249: note = XENP018645 1G6_H1.145_L1_scFv(GKPGS)4
EVQLVESGGGLVKPGGSLRLSCAASGFTFSNYWMNWVRQAPGKGLEWVGEIRLKSNNYATLYAEPVKGRFTISRDDSKSTVYLQMNSLKTEDTAVYYCTRYYGNYGGYFDVWGAGTLVTVSSGKPGSGKPGSGKPGSGKPGSSIVMTQSPATLSVSPGERATLSCRASQSVSNDVAWYQQKPGQSPRLLINYASHRYTGVPDRFTGSGYGTEFTLTISSLQSEDFAVYFCQQDYSSPRTFGGGTKVEIK

SEQ ID NO: 12332 - protein, 122 aa, synthetic construct
  REGION 1..122: note = Description of Artificial Sequence: Synthetic polypeptide
  REGION 1..122: note = VH of XENP018645
EVQLVESGGGLVKPGGSLRLSCAASGFTFSNYWMNWVRQAPGKGLEWVGEIRLKSNNYATLYAEPVKGRFTISRDDSKSTVYLQMNSLKTEDTAVYYCTRYYGNYGGYFDVWGAGTLVTVSS

SEQ ID NO: 12333 - protein, 107 aa, synthetic construct; identical to SEQ ID NO: 10923
  REGION 1..107: note = Description of Artificial Sequence: Synthetic polypeptide
  REGION 1..107: note = VL of XENP018645

SEQ ID NO: 12334 - protein, 5 aa, synthetic construct
  REGION 1..5: note = Description of Artificial Sequence: Synthetic peptide
  REGION 1..5: note = XENP018645 vhCDR1
NYWMN

SEQ ID NO: 12335 - protein, 19 aa, synthetic construct
  REGION 1..19: note = Description of Artificial Sequence: Synthetic peptide
  REGION 1..19: note = XENP018645 vhCDR2
EIRLKSNNYATLYAEPVKG

SEQ ID NO: 12336 - protein, 11 aa, synthetic construct
  REGION 1..11: note = Description of Artificial Sequence: Synthetic peptide
  REGION 1..11: note = XENP018645 vhCDR3
YYGNYGGYFDV

SEQ ID NO: 12337 - protein, 11 aa, synthetic construct
  REGION 1..11: note = Description of Artificial Sequence: Synthetic peptide
  REGION 1..11: note = XENP018645 vlCDR1
RASQSVSNDVA

SEQ ID NO: 12338 - protein, 7 aa, synthetic construct
  REGION 1..7: note = Description of Artificial Sequence: Synthetic peptide
  REGION 1..7: note = XENP018645 vlCDR2
YASHRYT

SEQ ID NO: 12339 - protein, 9 aa, synthetic construct
  REGION 1..9: note = Description of Artificial Sequence: Synthetic peptide
  REGION 1..9: note = XENP018645 vlCDR3
QQDYSSPRT

SEQ ID NO: 12340 - protein, 249 aa, synthetic construct
  REGION 1..249: note = Description of Artificial Sequence: Synthetic polypeptide
  REGION 1..249: note = XENP018646 1G6_H1.146_L1_scFv(GKPGS)4
EVQLVESGGGLVKPGGSLRLSCAASGFTFSNYWMNWVRQAPGKGLEWVGEIRLKSNNYATHYPEPVKGRFTISRDDSKSTVYLQMNSLKTEDTAVYYCTRYYGNYGGYFDVWGAGTLVTVSSGKPGSGKPGSGKPGSGKPGSSIVMTQSPATLSVSPGERATLSCRASQSVSNDVAWYQQKPGQSPRLLINYASHRYTGVPDRFTGSGYGTEFTLTISSLQSEDFAVYFCQQDYSSPRTFGGGTKVEIK

SEQ ID NO: 12341 - protein, 122 aa, synthetic construct
  REGION 1..122: note = Description of Artificial Sequence: Synthetic polypeptide
  REGION 1..122: note = VH of XENP018646
EVQLVESGGGLVKPGGSLRLSCAASGFTFSNYWMNWVRQAPGKGLEWVGEIRLKSNNYATHYPEPVKGRFTISRDDSKSTVYLQMNSLKTEDTAVYYCTRYYGNYGGYFDVWGAGTLVTVSS

SEQ ID NO: 12342 - protein, 107 aa, synthetic construct; identical to SEQ ID NO: 10923
  REGION 1..107: note = Description of Artificial Sequence: Synthetic polypeptide
  REGION 1..107: note = VL of XENP018646

SEQ ID NO: 12343 - protein, 5 aa, synthetic construct
  REGION 1..5: note = Description of Artificial Sequence: Synthetic peptide
  REGION 1..5: note = XENP018646 vhCDR1
NYWMN

SEQ ID NO: 12344 - protein, 19 aa, synthetic construct
  REGION 1..19: note = Description of Artificial Sequence: Synthetic peptide
  REGION 1..19: note = XENP018646 vhCDR2
EIRLKSNNYATHYPEPVKG

SEQ ID NO: 12345 - protein, 11 aa, synthetic construct
  REGION 1..11: note = Description of Artificial Sequence: Synthetic peptide
  REGION 1..11: note = XENP018646 vhCDR3
YYGNYGGYFDV

SEQ ID NO: 12346 - protein, 11 aa, synthetic construct
  REGION 1..11: note = Description of Artificial Sequence: Synthetic peptide
  REGION 1..11: note = XENP018646 vlCDR1
RASQSVSNDVA

SEQ ID NO: 12347 - protein, 7 aa, synthetic construct
  REGION 1..7: note = Description of Artificial Sequence: Synthetic peptide
  REGION 1..7: note = XENP018646 vlCDR2
YASHRYT

SEQ ID NO: 12348 - protein, 9 aa, synthetic construct
  REGION 1..9: note = Description of Artificial Sequence: Synthetic peptide
  REGION 1..9: note = XENP018646 vlCDR3
QQDYSSPRT

SEQ ID NO: 12349 - protein, 249 aa, synthetic construct
  REGION 1..249: note = Description of Artificial Sequence: Synthetic polypeptide
  REGION 1..249: note = XENP018647 1G6_H1.147_L1_scFv(GKPGS)4
EVQLVESGGGLVKPGGSLRLSCAASGFTFSNYWMNWVRQAPGKGLEWVGEIRLKSNNYATHYVEPVKGRFTISRDDSKSTVYLQMNSLKTEDTAVYYCTRYYGNYGGYFDVWGAGTLVTVSSGKPGSGKPGSGKPGSGKPGSSIVMTQSPATLSVSPGERATLSCRASQSVSNDVAWYQQKPGQSPRLLINYASHRYTGVPDRFTGSGYGTEFTLTISSLQSEDFAVYFCQQDYSSPRTFGGGTKVEIK

SEQ ID NO: 12350 - protein, 122 aa, synthetic construct
  REGION 1..122: note = Description of Artificial Sequence: Synthetic polypeptide
  REGION 1..122: note = VH of XENP018647
EVQLVESGGGLVKPGGSLRLSCAASGFTFSNYWMNWVRQAPGKGLEWVGEIRLKSNNYATHYVEPVKGRFTISRDDSKSTVYLQMNSLKTEDTAVYYCTRYYGNYGGYFDVWGAGTLVTVSS

SEQ ID NO: 12351 - protein, 107 aa, synthetic construct; identical to SEQ ID NO: 10923
  REGION 1..107: note = Description of Artificial Sequence: Synthetic polypeptide
  REGION 1..107: note = VL of XENP018647

SEQ ID NO: 12352 - protein, 5 aa, synthetic construct
  REGION 1..5: note = Description of Artificial Sequence: Synthetic peptide
  REGION 1..5: note = XENP018647 vhCDR1
NYWMN

SEQ ID NO: 12353 - protein, 19 aa, synthetic construct
  REGION 1..19: note = Description of Artificial Sequence: Synthetic peptide
  REGION 1..19: note = XENP018647 vhCDR2
EIRLKSNNYATHYVEPVKG

SEQ ID NO: 12354 - protein, 11 aa, synthetic construct
  REGION 1..11: note = Description of Artificial Sequence: Synthetic peptide
  REGION 1..11: note = XENP018647 vhCDR3
YYGNYGGYFDV

SEQ ID NO: 12355 - protein, 11 aa, synthetic construct
  REGION 1..11: note = Description of Artificial Sequence: Synthetic peptide
  REGION 1..11: note = XENP018647 vlCDR1
RASQSVSNDVA

SEQ ID NO: 12356 - protein, 7 aa, synthetic construct
  REGION 1..7: note = Description of Artificial Sequence: Synthetic peptide
  REGION 1..7: note = XENP018647 vlCDR2
YASHRYT

SEQ ID NO: 12357 - protein, 9 aa, synthetic construct
  REGION 1..9: note = Description of Artificial Sequence: Synthetic peptide
  REGION 1..9: note = XENP018647 vlCDR3
QQDYSSPRT

SEQ ID NO: 12358 - protein, 249 aa, synthetic construct
  REGION 1..249: note = Description of Artificial Sequence: Synthetic polypeptide
  REGION 1..249: note = XENP018648 1G6_H1.148_L1_scFv(GKPGS)4
EVQLVESGGGLVKPGGSLRLSCAASGFTFSNYWMNWVRQAPGKGLEWVGEIRLKSNNYATHYADPVKGRFTISRDDSKSTVYLQMNSLKTEDTAVYYCTRYYGNYGGYFDVWGAGTLVTVSSGKPGSGKPGSGKPGSGKPGSSIVMTQSPATLSVSPGERATLSCRASQSVSNDVAWYQQKPGQSPRLLINYASHRYTGVPDRFTGSGYGTEFTLTISSLQSEDFAVYFCQQDYSSPRTFGGGTKVEIK

SEQ ID NO: 12359 - protein, 122 aa, synthetic construct
  REGION 1..122: note = Description of Artificial Sequence: Synthetic polypeptide
  REGION 1..122: note = VH of XENP018648
EVQLVESGGGLVKPGGSLRLSCAASGFTFSNYWMNWVRQAPGKGLEWVGEIRLKSNNYATHYADPVKGRFTISRDDSKSTVYLQMNSLKTEDTAVYYCTRYYGNYGGYFDVWGAGTLVTVSS

SEQ ID NO: 12360 - protein, 107 aa, synthetic construct; identical to SEQ ID NO: 10923
  REGION 1..107: note = Description of Artificial Sequence: Synthetic polypeptide
  REGION 1..107: note = VL of XENP018648

SEQ ID NO: 12361 - protein, 5 aa, synthetic construct
  REGION 1..5: note = Description of Artificial Sequence: Synthetic peptide
  REGION 1..5: note = XENP018648 vhCDR1
NYWMN

SEQ ID NO: 12362 - protein, 19 aa, synthetic construct
  REGION 1..19: note = Description of Artificial Sequence: Synthetic peptide
  REGION 1..19: note = XENP018648 vhCDR2
EIRLKSNNYATHYADPVKG

SEQ ID NO: 12363 - protein, 11 aa, synthetic construct
  REGION 1..11: note = Description of Artificial Sequence: Synthetic peptide
  REGION 1..11: note = XENP018648 vhCDR3
YYGNYGGYFDV

SEQ ID NO: 12364 - protein, 11 aa, synthetic construct
  REGION 1..11: note = Description of Artificial Sequence: Synthetic peptide
  REGION 1..11: note = XENP018648 vlCDR1
RASQSVSNDVA

SEQ ID NO: 12365 - protein, 7 aa, synthetic construct
  REGION 1..7: note = Description of Artificial Sequence: Synthetic peptide
  REGION 1..7: note = XENP018648 vlCDR2
YASHRYT

SEQ ID NO: 12366 - protein, 9 aa, synthetic construct
  REGION 1..9: note = Description of Artificial Sequence: Synthetic peptide
  REGION 1..9: note = XENP018648 vlCDR3
QQDYSSPRT

SEQ ID NO: 12367 - protein, 249 aa, synthetic construct
  REGION 1..249: note = Description of Artificial Sequence: Synthetic polypeptide
  REGION 1..249: note = XENP018649 1G6_H1.149_L1_scFv(GKPGS)4
EVQLVESGGGLVKPGGSLRLSCAASGFTFSNYWMNWVRQAPGKGLEWVGEIRLKSNNYATHYAGPVKGRFTISRDDSKSTVYLQMNSLKTEDTAVYYCTRYYGNYGGYFDVWGAGTLVTVSSGKPGSGKPGSGKPGSGKPGSSIVMTQSPATLSVSPGERATLSCRASQSVSNDVAWYQQKPGQSPRLLINYASHRYTGVPDRFTGSGYGTEFTLTISSLQSEDFAVYFCQQDYSSPRTFGGGTKVEIK

SEQ ID NO: 12368 - protein, 122 aa, synthetic construct
  REGION 1..122: note = Description of Artificial Sequence: Synthetic polypeptide
  REGION 1..122: note = VH of XENP018649
EVQLVESGGGLVKPGGSLRLSCAASGFTFSNYWMNWVRQAPGKGLEWVGEIRLKSNNYATHYAGPVKGRFTISRDDSKSTVYLQMNSLKTEDTAVYYCTRYYGNYGGYFDVWGAGTLVTVSS

SEQ ID NO: 12369 - protein, 107 aa, synthetic construct; identical to SEQ ID NO: 10923
  REGION 1..107: note = Description of Artificial Sequence: Synthetic polypeptide
  REGION 1..107: note = VL of XENP018649

SEQ ID NO: 12370 - protein, 5 aa, synthetic construct
  REGION 1..5: note = Description of Artificial Sequence: Synthetic peptide
  REGION 1..5: note = XENP018649 vhCDR1
NYWMN

SEQ ID NO: 12371 - protein, 19 aa, synthetic construct
  REGION 1..19: note = Description of Artificial Sequence: Synthetic peptide
  REGION 1..19: note = XENP018649 vhCDR2
EIRLKSNNYATHYAGPVKG

SEQ ID NO: 12372 - protein, 11 aa, synthetic construct
  REGION 1..11: note = Description of Artificial Sequence: Synthetic peptide
  REGION 1..11: note = XENP018649 vhCDR3
YYGNYGGYFDV

SEQ ID NO: 12373 - protein, 11 aa, synthetic construct
  REGION 1..11: note = Description of Artificial Sequence: Synthetic peptide
  REGION 1..11: note = XENP018649 vlCDR1
RASQSVSNDVA

SEQ ID NO: 12374 - protein, 7 aa, synthetic construct
  REGION 1..7: note = Description of Artificial Sequence: Synthetic peptide
  REGION 1..7: note = XENP018649 vlCDR2
YASHRYT

SEQ ID NO: 12375 - protein, 9 aa, synthetic construct
  REGION 1..9: note = Description of Artificial Sequence: Synthetic peptide
  REGION 1..9: note = XENP018649 vlCDR3
QQDYSSPRT

SEQ ID NO: 12376 - protein, 249 aa, synthetic construct
  REGION 1..249: note = Description of Artificial Sequence: Synthetic polypeptide
  REGION 1..249: note = XENP018650 1G6_H1.150_L1_scFv(GKPGS)4
EVQLVESGGGLVKPGGSLRLSCAASGFTFSNYWMNWVRQAPGKGLEWVGEIRLKSNNYATHYAAPVKGRFTISRDDSKSTVYLQMNSLKTEDTAVYYCTRYYGNYGGYFDVWGAGTLVTVSSGKPGSGKPGSGKPGSGKPGSSIVMTQSPATLSVSPGERATLSCRASQSVSNDVAWYQQKPGQSPRLLINYASHRYTGVPDRFTGSGYGTEFTLTISSLQSEDFAVYFCQQDYSSPRTFGGGTKVEIK

SEQ ID NO: 12377 - protein, 122 aa, synthetic construct
  REGION 1..122: note = Description of Artificial Sequence: Synthetic polypeptide
  REGION 1..122: note = VH of XENP018650
EVQLVESGGGLVKPGGSLRLSCAASGFTFSNYWMNWVRQAPGKGLEWVGEIRLKSNNYATHYAAPVKGRFTISRDDSKSTVYLQMNSLKTEDTAVYYCTRYYGNYGGYFDVWGAGTLVTVSS

SEQ ID NO: 12378 - protein, 107 aa, synthetic construct; identical to SEQ ID NO: 10923
  REGION 1..107: note = Description of Artificial Sequence: Synthetic polypeptide
  REGION 1..107: note = VL of XENP018650

SEQ ID NO: 12379 - protein, 5 aa, synthetic construct
  REGION 1..5: note = Description of Artificial Sequence: Synthetic peptide
  REGION 1..5: note = XENP018650 vhCDR1
NYWMN

SEQ ID NO: 12380 - protein, 19 aa, synthetic construct
  REGION 1..19: note = Description of Artificial Sequence: Synthetic peptide
  REGION 1..19: note = XENP018650 vhCDR2
EIRLKSNNYATHYAAPVKG

SEQ ID NO: 12381 - protein, 11 aa, synthetic construct
  REGION 1..11: note = Description of Artificial Sequence: Synthetic peptide
  REGION 1..11: note = XENP018650 vhCDR3
YYGNYGGYFDV

SEQ ID NO: 12382 - protein, 11 aa, synthetic construct
  REGION 1..11: note = Description of Artificial Sequence: Synthetic peptide
  REGION 1..11: note = XENP018650 vlCDR1
RASQSVSNDVA

SEQ ID NO: 12383 - protein, 7 aa, synthetic construct
  REGION 1..7: note = Description of Artificial Sequence: Synthetic peptide
  REGION 1..7: note = XENP018650 vlCDR2
YASHRYT

SEQ ID NO: 12384 - protein, 9 aa, synthetic construct
  REGION 1..9: note = Description of Artificial Sequence: Synthetic peptide
  REGION 1..9: note = XENP018650 vlCDR3
QQDYSSPRT

SEQ ID NO: 12385 - protein, 249 aa, synthetic construct
  REGION 1..249: note = Description of Artificial Sequence: Synthetic polypeptide
  REGION 1..249: note = XENP018651 1G6_H1.151_L1_scFv(GKPGS)4
EVQLVESGGGLVKPGGSLRLSCAASGFTFSNYWMNWVRQAPGKGLEWVGEIRLKSNNYATHYAESVKGRFTISRDDSKSTVYLQMNSLKTEDTAVYYCTRYYGNYGGYFDVWGAGTLVTVSSGKPGSGKPGSGKPGSGKPGSSIVMTQSPATLSVSPGERATLSCRASQSVSNDVAWYQQKPGQSPRLLINYASHRYTGVPDRFTGSGYGTEFTLTISSLQSEDFAVYFCQQDYSSPRTFGGGTKVEIK

SEQ ID NO: 12386 - protein, 122 aa, synthetic construct
  REGION 1..122: note = Description of Artificial Sequence: Synthetic polypeptide
  REGION 1..122: note = VH of XENP018651
EVQLVESGGGLVKPGGSLRLSCAASGFTFSNYWMNWVRQAPGKGLEWVGEIRLKSNNYATHYAESVKGRFTISRDDSKSTVYLQMNSLKTEDTAVYYCTRYYGNYGGYFDVWGAGTLVTVSS

SEQ ID NO: 12387 - protein, 107 aa, synthetic construct; identical to SEQ ID NO: 10923
  REGION 1..107: note = Description of Artificial Sequence: Synthetic polypeptide
  REGION 1..107: note = VL of XENP018651

SEQ ID NO: 12388 - protein, 5 aa, synthetic construct
  REGION 1..5: note = Description of Artificial Sequence: Synthetic peptide
  REGION 1..5: note = XENP018651 vhCDR1
NYWMN

SEQ ID NO: 12389 - protein, 19 aa, synthetic construct
  REGION 1..19: note = Description of Artificial Sequence: Synthetic peptide
  REGION 1..19: note = XENP018651 vhCDR2
EIRLKSNNYATHYAESVKG

SEQ ID NO: 12390 - protein, 11 aa, synthetic construct
  REGION 1..11: note = Description of Artificial Sequence: Synthetic peptide
  REGION 1..11: note = XENP018651 vhCDR3
YYGNYGGYFDV

SEQ ID NO: 12391 - protein, 11 aa, synthetic construct
  REGION 1..11: note = Description of Artificial Sequence: Synthetic peptide
  REGION 1..11: note = XENP018651 vlCDR1
RASQSVSNDVA

SEQ ID NO: 12392 - protein, 7 aa, synthetic construct
  REGION 1..7: note = Description of Artificial Sequence: Synthetic peptide
  REGION 1..7: note = XENP018651 vlCDR2
YASHRYT

SEQ ID NO: 12393 - protein, 9 aa, synthetic construct
  REGION 1..9: note = Description of Artificial Sequence: Synthetic peptide
  REGION 1..9: note = XENP018651 vlCDR3
QQDYSSPRT

SEQ ID NO: 12394 - protein, 249 aa, synthetic construct
  REGION 1..249: note = Description of Artificial Sequence: Synthetic polypeptide
  REGION 1..249: note = XENP018652 1G6_H1.152_L1_scFv(GKPGS)4
EVQLVESGGGLVKPGGSLRLSCAASGFTFSNYWMNWVRQAPGKGLEWVGEIRLKSNNYATHYAEPVKGRFTISRDNSKSTVYLQMNSLKTEDTAVYYCTRYYGNYGGYFDVWGAGTLVTVSSGKPGSGKPGSGKPGSGKPGSSIVMTQSPATLSVSPGERATLSCRASQSVSNDVAWYQQKPGQSPRLLINYASHRYTGVPDRFTGSGYGTEFTLTISSLQSEDFAVYFCQQDYSSPRTFGGGTKVEIK

SEQ ID NO: 12395 - protein, 122 aa, synthetic construct
  REGION 1..122: note = Description of Artificial Sequence: Synthetic polypeptide
  REGION 1..122: note = VH of XENP018652
EVQLVESGGGLVKPGGSLRLSCAASGFTFSNYWMNWVRQAPGKGLEWVGEIRLKSNNYATHYAEPVKGRFTISRDNSKSTVYLQMNSLKTEDTAVYYCTRYYGNYGGYFDVWGAGTLVTVSS

SEQ ID NO: 12396 - protein, 107 aa, synthetic construct; identical to SEQ ID NO: 10923
  REGION 1..107: note = Description of Artificial Sequence: Synthetic polypeptide
  REGION 1..107: note = VL of XENP018652

SEQ ID NO: 12397 - protein, 5 aa, synthetic construct
  REGION 1..5: note = Description of Artificial Sequence: Synthetic peptide
  REGION 1..5: note = XENP018652 vhCDR1
NYWMN

SEQ ID NO: 12398 - protein, 19 aa, synthetic construct
  REGION 1..19: note = Description of Artificial Sequence: Synthetic peptide
  REGION 1..19: note = XENP018652 vhCDR2
EIRLKSNNYATHYAEPVKG

SEQ ID NO: 12399 - protein, 11 aa, synthetic construct
  REGION 1..11: note = Description of Artificial Sequence: Synthetic peptide
  REGION 1..11: note = XENP018652 vhCDR3
YYGNYGGYFDV

SEQ ID NO: 12400 - protein, 11 aa, synthetic construct
  REGION 1..11: note = Description of Artificial Sequence: Synthetic peptide
  REGION 1..11: note = XENP018652 vlCDR1
RASQSVSNDVA

SEQ ID NO: 12401 - protein, 7 aa, synthetic construct
  REGION 1..7: note = Description of Artificial Sequence: Synthetic peptide
  REGION 1..7: note = XENP018652 vlCDR2
YASHRYT

SEQ ID NO: 12402 - protein, 9 aa, synthetic construct
  REGION 1..9: note = Description of Artificial Sequence: Synthetic peptide
  REGION 1..9: note = XENP018652 vlCDR3
QQDYSSPRT

SEQ ID NO: 12403 - protein, 249 aa, synthetic construct
  REGION 1..249: note = Description of Artificial Sequence: Synthetic polypeptide
  REGION 1..249: note = XENP018653 1G6_H1.153_L1_scFv(GKPGS)4
EVQLVESGGGLVKPGGSLRLSCAASGFTFSNYWMNWVRQAPGKGLEWVGEIRLKSNNYATHYAEPVKGRFTISRDDSKNTVYLQMNSLKTEDTAVYYCTRYYGNYGGYFDVWGAGTLVTVSSGKPGSGKPGSGKPGSGKPGSSIVMTQSPATLSVSPGERATLSCRASQSVSNDVAWYQQKPGQSPRLLINYASHRYTGVPDRFTGSGYGTEFTLTISSLQSEDFAVYFCQQDYSSPRTFGGGTKVEIK

SEQ ID NO: 12404 - protein, 122 aa, synthetic construct
  REGION 1..122: note = Description of Artificial Sequence: Synthetic polypeptide
  REGION 1..122: note = VH of XENP018653
EVQLVESGGGLVKPGGSLRLSCAASGFTFSNYWMNWVRQAPGKGLEWVGEIRLKSNNYATHYAEPVKGRFTISRDDSKNTVYLQMNSLKTEDTAVYYCTRYYGNYGGYFDVWGAGTLVTVSS

SEQ ID NO: 12405 - protein, 107 aa, synthetic construct; identical to SEQ ID NO: 10923
  REGION 1..107: note = Description of Artificial Sequence: Synthetic polypeptide
  REGION 1..107: note = VL of XENP018653

SEQ ID NO: 12406 - protein, 5 aa, synthetic construct
  REGION 1..5: note = Description of Artificial Sequence: Synthetic peptide
  REGION 1..5: note = XENP018653 vhCDR1
NYWMN

SEQ ID NO: 12407 - protein, 19 aa, synthetic construct
  REGION 1..19: note = Description of Artificial Sequence: Synthetic peptide
  REGION 1..19: note = XENP018653 vhCDR2
EIRLKSNNYATHYAEPVKG

SEQ ID NO: 12408 - protein, 11 aa, synthetic construct
  REGION 1..11: note = Description of Artificial Sequence: Synthetic peptide
  REGION 1..11: note = XENP018653 vhCDR3
YYGNYGGYFDV

SEQ ID NO: 12409 - protein, 11 aa, synthetic construct
  REGION 1..11: note = Description of Artificial Sequence: Synthetic peptide
  REGION 1..11: note = XENP018653 vlCDR1
RASQSVSNDVA

SEQ ID NO: 12410 - protein, 7 aa, synthetic construct
  REGION 1..7: note = Description of Artificial Sequence: Synthetic peptide
  REGION 1..7: note = XENP018653 vlCDR2
YASHRYT

SEQ ID NO: 12411 - protein, 9 aa, synthetic construct
  REGION 1..9: note = Description of Artificial Sequence: Synthetic peptide
  REGION 1..9: note = XENP018653 vlCDR3
QQDYSSPRT

SEQ ID NO: 12412 - protein, 249 aa, synthetic construct
  REGION 1..249: note = Description of Artificial Sequence: Synthetic polypeptide
  REGION 1..249: note = XENP018654 1G6_H1.154_L1_scFv(GKPGS)4
EVQLVESGGGLVKPGGSLRLSCAASGFTFSNYWMNWVRQAPGKGLEWVGEIRLKSNNYATHYAEPVKGRFTISRDDSKSSVYLQMNSLKTEDTAVYYCTRYYGNYGGYFDVWGAGTLVTVSSGKPGSGKPGSGKPGSGKPGSSIVMTQSPATLSVSPGERATLSCRASQSVSNDVAWYQQKPGQSPRLLINYASHRYTGVPDRFTGSGYGTEFTLTISSLQSEDFAVYFCQQDYSSPRTFGGGTKVEIK

SEQ ID NO: 12413 - protein, 122 aa, synthetic construct
  REGION 1..122: note = Description of Artificial Sequence: Synthetic polypeptide
  REGION 1..122: note = VH of XENP018654
EVQLVESGGGLVKPGGSLRLSCAASGFTFSNYWMNWVRQAPGKGLEWVGEIRLKSNNYATHYAEPVKGRFTISRDDSKSSVYLQMNSLKTEDTAVYYCTRYYGNYGGYFDVWGAGTLVTVSS

SEQ ID NO: 12414 - protein, 107 aa, synthetic construct; identical to SEQ ID NO: 10923
  REGION 1..107: note = Description of Artificial Sequence: Synthetic polypeptide
  REGION 1..107: note = VL of XENP018654

SEQ ID NO: 12415 - protein, 5 aa, synthetic construct
  REGION 1..5: note = Description of Artificial Sequence: Synthetic peptide
  REGION 1..5: note = XENP018654 vhCDR1
NYWMN

SEQ ID NO: 12416 - protein, 19 aa, synthetic construct
  REGION 1..19: note = Description of Artificial Sequence: Synthetic peptide
  REGION 1..19: note = XENP018654 vhCDR2
EIRLKSNNYATHYAEPVKG

SEQ ID NO: 12417 - protein, 11 aa, synthetic construct
  REGION 1..11: note = Description of Artificial Sequence: Synthetic peptide
  REGION 1..11: note = XENP018654 vhCDR3
YYGNYGGYFDV

SEQ ID NO: 12418 - protein, 11 aa, synthetic construct
  REGION 1..11: note = Description of Artificial Sequence: Synthetic peptide
  REGION 1..11: note = XENP018654 vlCDR1
RASQSVSNDVA

SEQ ID NO: 12419 - protein, 7 aa, synthetic construct
  REGION 1..7: note = Description of Artificial Sequence: Synthetic peptide
  REGION 1..7: note = XENP018654 vlCDR2
YASHRYT

SEQ ID NO: 12420 - protein, 9 aa, synthetic construct
  REGION 1..9: note = Description of Artificial Sequence: Synthetic peptide
  REGION 1..9: note = XENP018654 vlCDR3
QQDYSSPRT

SEQ ID NO: 12421 - protein, 249 aa, synthetic construct
  REGION 1..249: note = Description of Artificial Sequence: Synthetic polypeptide
  REGION 1..249: note = XENP018655 1G6_H1.155_L1_scFv(GKPGS)4
EVQLVESGGGLVKPGGSLRLSCAASGFTFSNYWMNWVRQAPGKGLEWVGEIRLKSNNYATHYAEPVKGRFTISRDDSKSTLYLQMNSLKTEDTAVYYCTRYYGNYGGYFDVWGAGTLVTVSSGKPGSGKPGSGKPGSGKPGSSIVMTQSPATLSVSPGERATLSCRASQSVSNDVAWYQQKPGQSPRLLINYASHRYTGVPDRFTGSGYGTEFTLTISSLQSEDFAVYFCQQDYSSPRTFGGGTKVEIK

SEQ ID NO: 12422 - protein, 122 aa, synthetic construct
  REGION 1..122: note = Description of Artificial Sequence: Synthetic polypeptide
  REGION 1..122: note = VH of XENP018655
EVQLVESGGGLVKPGGSLRLSCAASGFTFSNYWMNWVRQAPGKGLEWVGEIRLKSNNYATHYAEPVKGRFTISRDDSKSTLYLQMNSLKTEDTAVYYCTRYYGNYGGYFDVWGAGTLVTVSS

SEQ ID NO: 12423 - protein, 107 aa, synthetic construct; identical to SEQ ID NO: 10923
  REGION 1..107: note = Description of Artificial Sequence: Synthetic polypeptide
  REGION 1..107: note = VL of XENP018655

SEQ ID NO: 12424 - protein, 5 aa, synthetic construct
  REGION 1..5: note = Description of Artificial Sequence: Synthetic peptide
  REGION 1..5: note = XENP018655 vhCDR1
NYWMN

SEQ ID NO: 12425 - protein, 19 aa, synthetic construct
  REGION 1..19: note = Description of Artificial Sequence: Synthetic peptide
  REGION 1..19: note = XENP018655 vhCDR2
EIRLKSNNYATHYAEPVKG

SEQ ID NO: 12426 - protein, 11 aa, synthetic construct
  REGION 1..11: note = Description of Artificial Sequence: Synthetic peptide
  REGION 1..11: note = XENP018655 vhCDR3
YYGNYGGYFDV

SEQ ID NO: 12427 - protein, 11 aa, synthetic construct
  REGION 1..11: note = Description of Artificial Sequence: Synthetic peptide
  REGION 1..11: note = XENP018655 vlCDR1
RASQSVSNDVA

SEQ ID NO: 12428 - protein, 7 aa, synthetic construct
  REGION 1..7: note = Description of Artificial Sequence: Synthetic peptide
  REGION 1..7: note = XENP018655 vlCDR2
YASHRYT

SEQ ID NO: 12429 - protein, 9 aa, synthetic construct
  REGION 1..9: note = Description of Artificial Sequence: Synthetic peptide
  REGION 1..9: note = XENP018655 vlCDR3
QQDYSSPRT

SEQ ID NO: 12430 - protein, 249 aa, synthetic construct
  REGION 1..249: note = Description of Artificial Sequence: Synthetic polypeptide
  REGION 1..249: note = XENP018656 1G6_H1.156_L1_scFv(GKPGS)4
EVQLVESGGGLVKPGGSLRLSCAASGFTFSNYWMNWVRQAPGKGLEWVGEIRLKSNNYATHYAEPVKGRFTISRDDSKSTAYLQMNSLKTEDTAVYYCTRYYGNYGGYFDVWGAGTLVTVSSGKPGSGKPGSGKPGSGKPGSSIVMTQSPATLSVSPGERATLSCRASQSVSNDVAWYQQKPGQSPRLLINYASHRYTGVPDRFTGSGYGTEFTLTISSLQSEDFAVYFCQQDYSSPRTFGGGTKVEIK

SEQ ID NO: 12431 - protein, 122 aa, synthetic construct
  REGION 1..122: note = Description of Artificial Sequence: Synthetic polypeptide
  REGION 1..122: note = VH of XENP018656
EVQLVESGGGLVKPGGSLRLSCAASGFTFSNYWMNWVRQAPGKGLEWVGEIRLKSNNYATHYAEPVKGRFTISRDDSKSTAYLQMNSLKTEDTAVYYCTRYYGNYGGYFDVWGAGTLVTVSS

SEQ ID NO: 12432 - protein, 107 aa, synthetic construct; identical to SEQ ID NO: 10923
  REGION 1..107: note = Description of Artificial Sequence: Synthetic polypeptide
  REGION 1..107: note = VL of XENP018656

SEQ ID NO: 12433 - protein, 5 aa, synthetic construct
  REGION 1..5: note = Description of Artificial Sequence: Synthetic peptide
  REGION 1..5: note = XENP018656 vhCDR1
NYWMN

SEQ ID NO: 12434 - protein, 19 aa, synthetic construct
  REGION 1..19: note = Description of Artificial Sequence: Synthetic peptide
  REGION 1..19: note = XENP018656 vhCDR2
EIRLKSNNYATHYAEPVKG

SEQ ID NO: 12435 - protein, 11 aa, synthetic construct
  REGION 1..11: note = Description of Artificial Sequence: Synthetic peptide
  REGION 1..11: note = XENP018656 vhCDR3
YYGNYGGYFDV

SEQ ID NO: 12436 - protein, 11 aa, synthetic construct
  REGION 1..11: note = Description of Artificial Sequence: Synthetic peptide
  REGION 1..11: note = XENP018656 vlCDR1
RASQSVSNDVA

SEQ ID NO: 12437 - protein, 7 aa, synthetic construct
  REGION 1..7: note = Description of Artificial Sequence: Synthetic peptide
  REGION 1..7: note = XENP018656 vlCDR2
YASHRYT

SEQ ID NO: 12438 - protein, 9 aa, synthetic construct
  REGION 1..9: note = Description of Artificial Sequence: Synthetic peptide
  REGION 1..9: note = XENP018656 vlCDR3
QQDYSSPRT

SEQ ID NO: 12439 - protein, 249 aa, synthetic construct
  REGION 1..249: note = Description of Artificial Sequence: Synthetic polypeptide
  REGION 1..249: note = XENP018657 1G6_H1.157_L1_scFv(GKPGS)4
EVQLVESGGGLVKPGGSLRLSCAASGFTFSNYWMNWVRQAPGKGLEWVGEIRLKSNNYATHYAEPVKGRFTISRDDSKSTVYLQMNNLKTEDTAVYYCTRYYGNYGGYFDVWGAGTLVTVSSGKPGSGKPGSGKPGSGKPGSSIVMTQSPATLSVSPGERATLSCRASQSVSNDVAWYQQKPGQSPRLLINYASHRYTGVPDRFTGSGYGTEFTLTISSLQSEDFAVYFCQQDYSSPRTFGGGTKVEIK

SEQ ID NO: 12440 - protein, 122 aa, synthetic construct
  REGION 1..122: note = Description of Artificial Sequence: Synthetic polypeptide
  REGION 1..122: note = VH of XENP018657
EVQLVESGGGLVKPGGSLRLSCAASGFTFSNYWMNWVRQAPGKGLEWVGEIRLKSNNYATHYAEPVKGRFTISRDDSKSTVYLQMNNLKTEDTAVYYCTRYYGNYGGYFDVWGAGTLVTVSS

SEQ ID NO: 12441 - protein, 107 aa, synthetic construct; identical to SEQ ID NO: 10923
  REGION 1..107: note = Description of Artificial Sequence: Synthetic polypeptide
  REGION 1..107: note = VL of XENP018657

SEQ ID NO: 12442 - protein, 5 aa, synthetic construct
  REGION 1..5: note = Description of Artificial Sequence: Synthetic peptide
  REGION 1..5: note = XENP018657 vhCDR1
NYWMN

SEQ ID NO: 12443 - protein, 19 aa, synthetic construct
  REGION 1..19: note = Description of Artificial Sequence: Synthetic peptide
  REGION 1..19: note = XENP018657 vhCDR2
EIRLKSNNYATHYAEPVKG

SEQ ID NO: 12444 - protein, 11 aa, synthetic construct
  REGION 1..11: note = Description of Artificial Sequence: Synthetic peptide
  REGION 1..11: note = XENP018657 vhCDR3
YYGNYGGYFDV

SEQ ID NO: 12445 - protein, 11 aa, synthetic construct
  REGION 1..11: note = Description of Artificial Sequence: Synthetic peptide
  REGION 1..11: note = XENP018657 vlCDR1
RASQSVSNDVA

SEQ ID NO: 12446 - protein, 7 aa, synthetic construct
  REGION 1..7: note = Description of Artificial Sequence: Synthetic peptide
  REGION 1..7: note = XENP018657 vlCDR2
YASHRYT

SEQ ID NO: 12447 - protein, 9 aa, synthetic construct
  REGION 1..9: note = Description of Artificial Sequence: Synthetic peptide
  REGION 1..9: note = XENP018657 vlCDR3
QQDYSSPRT

SEQ ID NO: 12448 - protein, 249 aa, synthetic construct
  REGION 1..249: note = Description of Artificial Sequence: Synthetic polypeptide
  REGION 1..249: note = XENP018658 1G6_H1.158_L1_scFv(GKPGS)4
EVQLVESGGGLVKPGGSLRLSCAASGFTFSNYWMNWVRQAPGKGLEWVGEIRLKSNNYATHYAEPVKGRFTISRDDSKSTVYLQMNSLRTEDTAVYYCTRYYGNYGGYFDVWGAGTLVTVSSGKPGSGKPGSGKPGSGKPGSSIVMTQSPATLSVSPGERATLSCRASQSVSNDVAWYQQKPGQSPRLLINYASHRYTGVPDRFTGSGYGTEFTLTISSLQSEDFAVYFCQQDYSSPRTFGGGTKVEIK

SEQ ID NO: 12449 - protein, 122 aa, synthetic construct
  REGION 1..122: note = Description of Artificial Sequence: Synthetic polypeptide
  REGION 1..122: note = VH of XENP018658
EVQLVESGGGLVKPGGSLRLSCAASGFTFSNYWMNWVRQAPGKGLEWVGEIRLKSNNYATHYAEPVKGRFTISRDDSKSTVYLQMNSLRTEDTAVYYCTRYYGNYGGYFDVWGAGTLVTVSS

SEQ ID NO: 12450 - protein, 107 aa, synthetic construct; identical to SEQ ID NO: 10923
  REGION 1..107: note = Description of Artificial Sequence: Synthetic polypeptide
  REGION 1..107: note = VL of XENP018658

SEQ ID NO: 12451 - protein, 5 aa, synthetic construct
  REGION 1..5: note = Description of Artificial Sequence: Synthetic peptide
  REGION 1..5: note = XENP018658 vhCDR1
NYWMN

SEQ ID NO: 12452 - protein, 19 aa, synthetic construct
  REGION 1..19: note = Description of Artificial Sequence: Synthetic peptide
  REGION 1..19: note = XENP018658 vhCDR2
EIRLKSNNYATHYAEPVKG

SEQ ID NO: 12453 - protein, 11 aa, synthetic construct
  REGION 1..11: note = Description of Artificial Sequence: Synthetic peptide
  REGION 1..11: note = XENP018658 vhCDR3
YYGNYGGYFDV

SEQ ID NO: 12454 - protein, 11 aa, synthetic construct
  REGION 1..11: note = Description of Artificial Sequence: Synthetic peptide
  REGION 1..11: note = XENP018658 vlCDR1
RASQSVSNDVA

SEQ ID NO: 12455 - protein, 7 aa, synthetic construct
  REGION 1..7: note = Description of Artificial Sequence: Synthetic peptide
  REGION 1..7: note = XENP018658 vlCDR2
YASHRYT

SEQ ID NO: 12456 - protein, 9 aa, synthetic construct
  REGION 1..9: note = Description of Artificial Sequence: Synthetic peptide
  REGION 1..9: note = XENP018658 vlCDR3
QQDYSSPRT

SEQ ID NO: 12457 - protein, 249 aa, synthetic construct
  REGION 1..249: note = Description of Artificial Sequence: Synthetic polypeptide
  REGION 1..249: note = XENP018659 1G6_H1.159_L1_scFv(GKPGS)4
EVQLVESGGGLVKPGGSLRLSCAASGFTFSNYWMNWVRQAPGKGLEWVGEIRLKSNNYATHYAEPVKGRFTISRDDSKSTVYLQMNSLKAEDTAVYYCTRYYGNYGGYFDVWGAGTLVTVSSGKPGSGKPGSGKPGSGKPGSSIVMTQSPATLSVSPGERATLSCRASQSVSNDVAWYQQKPGQSPRLLINYASHRYTGVPDRFTGSGYGTEFTLTISSLQSEDFAVYFCQQDYSSPRTFGGGTKVEIK

SEQ ID NO: 12458 - protein, 122 aa, synthetic construct
  REGION 1..122: note = Description of Artificial Sequence: Synthetic polypeptide
  REGION 1..122: note = VH of XENP018659
EVQLVESGGGLVKPGGSLRLSCAASGFTFSNYWMNWVRQAPGKGLEWVGEIRLKSNNYATHYAEPVKGRFTISRDDSKSTVYLQMNSLKAEDTAVYYCTRYYGNYGGYFDVWGAGTLVTVSS

SEQ ID NO: 12459 - protein, 107 aa, synthetic construct; identical to SEQ ID NO: 10923
  REGION 1..107: note = Description of Artificial Sequence: Synthetic polypeptide
  REGION 1..107: note = VL of XENP018659

SEQ ID NO: 12460 - protein, 5 aa, synthetic construct
  REGION 1..5: note = Description of Artificial Sequence: Synthetic peptide
  REGION 1..5: note = XENP018659 vhCDR1
NYWMN

SEQ ID NO: 12461 - protein, 19 aa, synthetic construct
  REGION 1..19: note = Description of Artificial Sequence: Synthetic peptide
  REGION 1..19: note = XENP018659 vhCDR2
EIRLKSNNYATHYAEPVKG

SEQ ID NO: 12462 - protein, 11 aa, synthetic construct
  REGION 1..11: note = Description of Artificial Sequence: Synthetic peptide
  REGION 1..11: note = XENP018659 vhCDR3
YYGNYGGYFDV

SEQ ID NO: 12463 - protein, 11 aa, synthetic construct
  REGION 1..11: note = Description of Artificial Sequence: Synthetic peptide
  REGION 1..11: note = XENP018659 vlCDR1
RASQSVSNDVA

SEQ ID NO: 12464 - protein, 7 aa, synthetic construct
  REGION 1..7: note = Description of Artificial Sequence: Synthetic peptide
  REGION 1..7: note = XENP018659 vlCDR2
YASHRYT

SEQ ID NO: 12465 - protein, 9 aa, synthetic construct
  REGION 1..9: note = Description of Artificial Sequence: Synthetic peptide
  REGION 1..9: note = XENP018659 vlCDR3
QQDYSSPRT

SEQ ID NO: 12466 - protein, 249 aa, synthetic construct
  REGION 1..249: note = Description of Artificial Sequence: Synthetic polypeptide
  REGION 1..249: note = XENP018660 1G6_H1.160_L1_scFv(GKPGS)4
EVQLVESGGGLVKPGGSLRLSCAASGFTFSNYWMNWVRQAPGKGLEWVGEIRLKSNNYATHYAEPVKGRFTISRDDSKSTVYLQMNSLKTEDTGVYYCTRYYGNYGGYFDVWGAGTLVTVSSGKPGSGKPGSGKPGSGKPGSSIVMTQSPATLSVSPGERATLSCRASQSVSNDVAWYQQKPGQSPRLLINYASHRYTGVPDRFTGSGYGTEFTLTISSLQSEDFAVYFCQQDYSSPRTFGGGTKVEIK

SEQ ID NO: 12467 - protein, 122 aa, synthetic construct
  REGION 1..122: note = Description of Artificial Sequence: Synthetic polypeptide
  REGION 1..122: note = VH of XENP018660
EVQLVESGGGLVKPGGSLRLSCAASGFTFSNYWMNWVRQAPGKGLEWVGEIRLKSNNYATHYAEPVKGRFTISRDDSKSTVYLQMNSLKTEDTGVYYCTRYYGNYGGYFDVWGAGTLVTVSS

SEQ ID NO: 12468 - protein, 107 aa, synthetic construct; identical to SEQ ID NO: 10923
  REGION 1..107: note = Description of Artificial Sequence: Synthetic polypeptide
  REGION 1..107: note = VL of XENP018660

SEQ ID NO: 12469 - protein, 5 aa, synthetic construct
  REGION 1..5: note = Description of Artificial Sequence: Synthetic peptide
  REGION 1..5: note = XENP018660 vhCDR1
NYWMN

SEQ ID NO: 12470 - protein, 19 aa, synthetic construct
  REGION 1..19: note = Description of Artificial Sequence: Synthetic peptide
  REGION 1..19: note = XENP018660 vhCDR2
EIRLKSNNYATHYAEPVKG

SEQ ID NO: 12471 - protein, 11 aa, synthetic construct
  REGION 1..11: note = Description of Artificial Sequence: Synthetic peptide
  REGION 1..11: note = XENP018660 vhCDR3
YYGNYGGYFDV

SEQ ID NO: 12472 - protein, 11 aa, synthetic construct
  REGION 1..11: note = Description of Artificial Sequence: Synthetic peptide
  REGION 1..11: note = XENP018660 vlCDR1
RASQSVSNDVA

SEQ ID NO: 12473 - protein, 7 aa, synthetic construct
  REGION 1..7: note = Description of Artificial Sequence: Synthetic peptide
  REGION 1..7: note = XENP018660 vlCDR2
YASHRYT

SEQ ID NO: 12474 - protein, 9 aa, synthetic construct
  REGION 1..9: note = Description of Artificial Sequence: Synthetic peptide
  REGION 1..9: note = XENP018660 vlCDR3
QQDYSSPRT

SEQ ID NO: 12475 - protein, 249 aa, synthetic construct
  REGION 1..249: note = Description of Artificial Sequence: Synthetic polypeptide
  REGION 1..249: note = XENP018661 1G6_H1.161_L1_scFv(GKPGS)4
EVQLVESGGGLVKPGGSLRLSCAASGFTFSNYWMNWVRQAPGKGLEWVGEIRLKSNNYATHYAEPVKGRFTISRDDSKSTVYLQMNSLKTEDTAIYYCTRYYGNYGGYFDVWGAGTLVTVSSGKPGSGKPGSGKPGSGKPGSSIVMTQSPATLSVSPGERATLSCRASQSVSNDVAWYQQKPGQSPRLLINYASHRYTGVPDRFTGSGYGTEFTLTISSLQSEDFAVYFCQQDYSSPRTFGGGTKVEIK

SEQ ID NO: 12476 - protein, 122 aa, synthetic construct
  REGION 1..122: note = Description of Artificial Sequence: Synthetic polypeptide
  REGION 1..122: note = VH of XENP018661
EVQLVESGGGLVKPGGSLRLSCAASGFTFSNYWMNWVRQAPGKGLEWVGEIRLKSNNYATHYAEPVKGRFTISRDDSKSTVYLQMNSLKTEDTAIYYCTRYYGNYGGYFDVWGAGTLVTVSS

SEQ ID NO: 12477 - protein, 107 aa, synthetic construct; identical to SEQ ID NO: 10923
  REGION 1..107: note = Description of Artificial Sequence: Synthetic polypeptide
  REGION 1..107: note = VL of XENP018661

SEQ ID NO: 12478 - protein, 5 aa, synthetic construct
  REGION 1..5: note = Description of Artificial Sequence: Synthetic peptide
  REGION 1..5: note = XENP018661 vhCDR1
NYWMN

SEQ ID NO: 12479 - protein, 19 aa, synthetic construct
  REGION 1..19: note = Description of Artificial Sequence: Synthetic peptide
  REGION 1..19: note = XENP018661 vhCDR2
EIRLKSNNYATHYAEPVKG

SEQ ID NO: 12480 - protein, 11 aa, synthetic construct
  REGION 1..11: note = Description of Artificial Sequence: Synthetic peptide
  REGION 1..11: note = XENP018661 vhCDR3
YYGNYGGYFDV

SEQ ID NO: 12481 - protein, 11 aa, synthetic construct
  REGION 1..11: note = Description of Artificial Sequence: Synthetic peptide
  REGION 1..11: note = XENP018661 vlCDR1
RASQSVSNDVA

SEQ ID NO: 12482 - protein, 7 aa, synthetic construct
  REGION 1..7: note = Description of Artificial Sequence: Synthetic peptide
  REGION 1..7: note = XENP018661 vlCDR2
YASHRYT

SEQ ID NO: 12483 - protein, 9 aa, synthetic construct
  REGION 1..9: note = Description of Artificial Sequence: Synthetic peptide
  REGION 1..9: note = XENP018661 vlCDR3
QQDYSSPRT

SEQ ID NO: 12484 - protein, 249 aa, synthetic construct
  REGION 1..249: note = Description of Artificial Sequence: Synthetic polypeptide
  REGION 1..249: note = XENP018662 1G6_H1.162_L1_scFv(GKPGS)4
EVQLVESGGGLVKPGGSLRLSCAASGFTFSNYWMNWVRQAPGKGLEWVGEIRLKSNNYATHYAEPVKGRFTISRDDSKSTVYLQMNSLKTEDTAVYHCTRYYGNYGGYFDVWGAGTLVTVSSGKPGSGKPGSGKPGSGKPGSSIVMTQSPATLSVSPGERATLSCRASQSVSNDVAWYQQKPGQSPRLLINYASHRYTGVPDRFTGSGYGTEFTLTISSLQSEDFAVYFCQQDYSSPRTFGGGTKVEIK

SEQ ID NO: 12485 - protein, 122 aa, synthetic construct
  REGION 1..122: note = Description of Artificial Sequence: Synthetic polypeptide
  REGION 1..122: note = VH of XENP018662
EVQLVESGGGLVKPGGSLRLSCAASGFTFSNYWMNWVRQAPGKGLEWVGEIRLKSNNYATHYAEPVKGRFTISRDDSKSTVYLQMNSLKTEDTAVYHCTRYYGNYGGYFDVWGAGTLVTVSS

SEQ ID NO: 12486 - protein, 107 aa, synthetic construct; identical to SEQ ID NO: 10923
  REGION 1..107: note = Description of Artificial Sequence: Synthetic polypeptide
  REGION 1..107: note = VL of XENP018662

SEQ ID NO: 12487 - protein, 5 aa, synthetic construct
  REGION 1..5: note = Description of Artificial Sequence: Synthetic peptide
  REGION 1..5: note = XENP018662 vhCDR1
NYWMN

SEQ ID NO: 12488 - protein, 19 aa, synthetic construct
  REGION 1..19: note = Description of Artificial Sequence: Synthetic peptide
  REGION 1..19: note = XENP018662 vhCDR2
EIRLKSNNYATHYAEPVKG

SEQ ID NO: 12489 - protein, 11 aa, synthetic construct
  REGION 1..11: note = Description of Artificial Sequence: Synthetic peptide
  REGION 1..11: note = XENP018662 vhCDR3
YYGNYGGYFDV

SEQ ID NO: 12490 - protein, 11 aa, synthetic construct
  REGION 1..11: note = Description of Artificial Sequence: Synthetic peptide
  REGION 1..11: note = XENP018662 vlCDR1
RASQSVSNDVA

SEQ ID NO: 12491 - protein, 7 aa, synthetic construct
  REGION 1..7: note = Description of Artificial Sequence: Synthetic peptide
  REGION 1..7: note = XENP018662 vlCDR2
YASHRYT

SEQ ID NO: 12492 - protein, 9 aa, synthetic construct
  REGION 1..9: note = Description of Artificial Sequence: Synthetic peptide
  REGION 1..9: note = XENP018662 vlCDR3
QQDYSSPRT

SEQ ID NO: 12493 - protein, 249 aa, synthetic construct
  REGION 1..249: note = Description of Artificial Sequence: Synthetic polypeptide
  REGION 1..249: note = XENP018663 1G6_H1.163_L1_scFv(GKPGS)4
EVQLVESGGGLVKPGGSLRLSCAASGFTFSNYWMNWVRQAPGKGLEWVGEIRLKSNNYATHYAEPVKGRFTISRDDSKSTVYLQMNSLKTEDTAVYYCARYYGNYGGYFDVWGAGTLVTVSSGKPGSGKPGSGKPGSGKPGSSIVMTQSPATLSVSPGERATLSCRASQSVSNDVAWYQQKPGQSPRLLINYASHRYTGVPDRFTGSGYGTEFTLTISSLQSEDFAVYFCQQDYSSPRTFGGGTKVEIK

SEQ ID NO: 12494 - protein, 122 aa, synthetic construct
  REGION 1..122: note = Description of Artificial Sequence: Synthetic polypeptide
  REGION 1..122: note = VH of XENP018663
EVQLVESGGGLVKPGGSLRLSCAASGFTFSNYWMNWVRQAPGKGLEWVGEIRLKSNNYATHYAEPVKGRFTISRDDSKSTVYLQMNSLKTEDTAVYYCARYYGNYGGYFDVWGAGTLVTVSS

SEQ ID NO: 12495 - protein, 107 aa, synthetic construct; identical to SEQ ID NO: 10923
  REGION 1..107: note = Description of Artificial Sequence: Synthetic polypeptide
  REGION 1..107: note = VL of XENP018663

SEQ ID NO: 12496 - protein, 5 aa, synthetic construct
  REGION 1..5: note = Description of Artificial Sequence: Synthetic peptide
  REGION 1..5: note = XENP018663 vhCDR1
NYWMN

SEQ ID NO: 12497 - protein, 19 aa, synthetic construct
  REGION 1..19: note = Description of Artificial Sequence: Synthetic peptide
  REGION 1..19: note = XENP018663 vhCDR2
EIRLKSNNYATHYAEPVKG

SEQ ID NO: 12498 - protein, 11 aa, synthetic construct
  REGION 1..11: note = Description of Artificial Sequence: Synthetic peptide
  REGION 1..11: note = XENP018663 vhCDR3
YYGNYGGYFDV

SEQ ID NO: 12499 - protein, 11 aa, synthetic construct
  REGION 1..11: note = Description of Artificial Sequence: Synthetic peptide
  REGION 1..11: note = XENP018663 vlCDR1
RASQSVSNDVA

SEQ ID NO: 12500 - protein, 7 aa, synthetic construct
  REGION 1..7: note = Description of Artificial Sequence: Synthetic peptide
  REGION 1..7: note = XENP018663 vlCDR2
YASHRYT

SEQ ID NO: 12501 - protein, 9 aa, synthetic construct
  REGION 1..9: note = Description of Artificial Sequence: Synthetic peptide
  REGION 1..9: note = XENP018663 vlCDR3
QQDYSSPRT

SEQ ID NO: 12502 - protein, 249 aa, synthetic construct
  REGION 1..249: note = Description of Artificial Sequence: Synthetic polypeptide
  REGION 1..249: note = XENP018664 1G6_H1.164_L1_scFv(GKPGS)4
EVQLVESGGGLVKPGGSLRLSCAASGFTFSNYWMNWVRQAPGKGLEWVGEIRLKSNNYATHYAEPVKGRFTISRDDSKSTVYLQMNSLKTEDTAVYYCVRYYGNYGGYFDVWGAGTLVTVSSGKPGSGKPGSGKPGSGKPGSSIVMTQSPATLSVSPGERATLSCRASQSVSNDVAWYQQKPGQSPRLLINYASHRYTGVPDRFTGSGYGTEFTLTISSLQSEDFAVYFCQQDYSSPRTFGGGTKVEIK

SEQ ID NO: 12503 - protein, 122 aa, synthetic construct
  REGION 1..122: note = Description of Artificial Sequence: Synthetic polypeptide
  REGION 1..122: note = VH of XENP018664
EVQLVESGGGLVKPGGSLRLSCAASGFTFSNYWMNWVRQAPGKGLEWVGEIRLKSNNYATHYAEPVKGRFTISRDDSKSTVYLQMNSLKTEDTAVYYCVRYYGNYGGYFDVWGAGTLVTVSS

SEQ ID NO: 12504 - protein, 107 aa, synthetic construct; identical to SEQ ID NO: 10923
  REGION 1..107: note = Description of Artificial Sequence: Synthetic polypeptide
  REGION 1..107: note = VL of XENP018664

SEQ ID NO: 12505 - protein, 5 aa, synthetic construct
  REGION 1..5: note = Description of Artificial Sequence: Synthetic peptide
  REGION 1..5: note = XENP018664 vhCDR1
NYWMN

SEQ ID NO: 12506 - protein, 19 aa, synthetic construct
  REGION 1..19: note = Description of Artificial Sequence: Synthetic peptide
  REGION 1..19: note = XENP018664 vhCDR2
EIRLKSNNYATHYAEPVKG

SEQ ID NO: 12507 - protein, 11 aa, synthetic construct
  REGION 1..11: note = Description of Artificial Sequence: Synthetic peptide
  REGION 1..11: note = XENP018664 vhCDR3
YYGNYGGYFDV

SEQ ID NO: 12508 - protein, 11 aa, synthetic construct
  REGION 1..11: note = Description of Artificial Sequence: Synthetic peptide
  REGION 1..11: note = XENP018664 vlCDR1
RASQSVSNDVA

SEQ ID NO: 12509 - protein, 7 aa, synthetic construct
  REGION 1..7: note = Description of Artificial Sequence: Synthetic peptide
  REGION 1..7: note = XENP018664 vlCDR2
YASHRYT

SEQ ID NO: 12510 - protein, 9 aa, synthetic construct
  REGION 1..9: note = Description of Artificial Sequence: Synthetic peptide
  REGION 1..9: note = XENP018664 vlCDR3
QQDYSSPRT

SEQ ID NO: 12511 - protein, 249 aa, synthetic construct
  REGION 1..249: note = Description of Artificial Sequence: Synthetic polypeptide
  REGION 1..249: note = XENP018665 1G6_H1.165_L1_scFv(GKPGS)4
EVQLVESGGGLVKPGGSLRLSCAASGFTFSNYWMNWVRQAPGKGLEWVGEIRLKSNNYATHYAEPVKGRFTISRDDSKSTVYLQMNSLKTEDTAVYYCTTYYGNYGGYFDVWGAGTLVTVSSGKPGSGKPGSGKPGSGKPGSSIVMTQSPATLSVSPGERATLSCRASQSVSNDVAWYQQKPGQSPRLLINYASHRYTGVPDRFTGSGYGTEFTLTISSLQSEDFAVYFCQQDYSSPRTFGGGTKVEIK

SEQ ID NO: 12512 - protein, 122 aa, synthetic construct
  REGION 1..122: note = Description of Artificial Sequence: Synthetic polypeptide
  REGION 1..122: note = VH of XENP018665
EVQLVESGGGLVKPGGSLRLSCAASGFTFSNYWMNWVRQAPGKGLEWVGEIRLKSNNYATHYAEPVKGRFTISRDDSKSTVYLQMNSLKTEDTAVYYCTTYYGNYGGYFDVWGAGTLVTVSS

SEQ ID NO: 12513 - protein, 107 aa, synthetic construct; identical to SEQ ID NO: 10923
  REGION 1..107: note = Description of Artificial Sequence: Synthetic polypeptide
  REGION 1..107: note = VL of XENP018665

SEQ ID NO: 12514 - protein, 5 aa, synthetic construct
  REGION 1..5: note = Description of Artificial Sequence: Synthetic peptide
  REGION 1..5: note = XENP018665 vhCDR1
NYWMN

SEQ ID NO: 12515 - protein, 19 aa, synthetic construct
  REGION 1..19: note = Description of Artificial Sequence: Synthetic peptide
  REGION 1..19: note = XENP018665 vhCDR2
EIRLKSNNYATHYAEPVKG

SEQ ID NO: 12516 - protein, 11 aa, synthetic construct
  REGION 1..11: note = Description of Artificial Sequence: Synthetic peptide
  REGION 1..11: note = XENP018665 vhCDR3
YYGNYGGYFDV

SEQ ID NO: 12517 - protein, 11 aa, synthetic construct
  REGION 1..11: note = Description of Artificial Sequence: Synthetic peptide
  REGION 1..11: note = XENP018665 vlCDR1
RASQSVSNDVA

SEQ ID NO: 12518 - protein, 7 aa, synthetic construct
  REGION 1..7: note = Description of Artificial Sequence: Synthetic peptide
  REGION 1..7: note = XENP018665 vlCDR2
YASHRYT

SEQ ID NO: 12519 - protein, 9 aa, synthetic construct
  REGION 1..9: note = Description of Artificial Sequence: Synthetic peptide
  REGION 1..9: note = XENP018665 vlCDR3
QQDYSSPRT

SEQ ID NO: 12520 - protein, 249 aa, synthetic construct
  REGION 1..249: note = Description of Artificial Sequence: Synthetic polypeptide
  REGION 1..249: note = XENP018666 1G6_H1.166_L1_scFv(GKPGS)4
EVQLVESGGGLVKPGGSLRLSCAASGFTFSNYWMNWVRQAPGKGLEWVGEIRLKSNNYATHYAEPVKGRFTISRDDSKSTVYLQMNSLKTEDTAVYYCTKYYGNYGGYFDVWGAGTLVTVSSGKPGSGKPGSGKPGSGKPGSSIVMTQSPATLSVSPGERATLSCRASQSVSNDVAWYQQKPGQSPRLLINYASHRYTGVPDRFTGSGYGTEFTLTISSLQSEDFAVYFCQQDYSSPRTFGGGTKVEIK

SEQ ID NO: 12521 - protein, 122 aa, synthetic construct
  REGION 1..122: note = Description of Artificial Sequence: Synthetic polypeptide
  REGION 1..122: note = VH of XENP018666
EVQLVESGGGLVKPGGSLRLSCAASGFTFSNYWMNWVRQAPGKGLEWVGEIRLKSNNYATHYAEPVKGRFTISRDDSKSTVYLQMNSLKTEDTAVYYCTKYYGNYGGYFDVWGAGTLVTVSS

SEQ ID NO: 12522 - protein, 107 aa, synthetic construct; identical to SEQ ID NO: 10923
  REGION 1..107: note = Description of Artificial Sequence: Synthetic polypeptide
  REGION 1..107: note = VL of XENP018666

SEQ ID NO: 12523 - protein, 5 aa, synthetic construct
  REGION 1..5: note = Description of Artificial Sequence: Synthetic peptide
  REGION 1..5: note = XENP018666 vhCDR1
NYWMN

SEQ ID NO: 12524 - protein, 19 aa, synthetic construct
  REGION 1..19: note = Description of Artificial Sequence: Synthetic peptide
  REGION 1..19: note = XENP018666 vhCDR2
EIRLKSNNYATHYAEPVKG

SEQ ID NO: 12525 - protein, 11 aa, synthetic construct
  REGION 1..11: note = Description of Artificial Sequence: Synthetic peptide
  REGION 1..11: note = XENP018666 vhCDR3
YYGNYGGYFDV

SEQ ID NO: 12526 - protein, 11 aa, synthetic construct
  REGION 1..11: note = Description of Artificial Sequence: Synthetic peptide
  REGION 1..11: note = XENP018666 vlCDR1
RASQSVSNDVA

SEQ ID NO: 12527 - protein, 7 aa, synthetic construct
  REGION 1..7: note = Description of Artificial Sequence: Synthetic peptide
  REGION 1..7: note = XENP018666 vlCDR2
YASHRYT

SEQ ID NO: 12528 - protein, 9 aa, synthetic construct
  REGION 1..9: note = Description of Artificial Sequence: Synthetic peptide
  REGION 1..9: note = XENP018666 vlCDR3
QQDYSSPRT

SEQ ID NO: 12529 - protein, 249 aa, synthetic construct
  REGION 1..249: note = Description of Artificial Sequence: Synthetic polypeptide
  REGION 1..249: note = XENP018667 1G6_H1.167_L1_scFv(GKPGS)4
EVQLVESGGGLVKPGGSLRLSCAASGFTFSNYWMNWVRQAPGKGLEWVGEIRLKSNNYATHYAEPVKGRFTISRDDSKSTVYLQMNSLKTEDTAVYYCTRFYGNYGGYFDVWGAGTLVTVSSGKPGSGKPGSGKPGSGKPGSSIVMTQSPATLSVSPGERATLSCRASQSVSNDVAWYQQKPGQSPRLLINYASHRYTGVPDRFTGSGYGTEFTLTISSLQSEDFAVYFCQQDYSSPRTFGGGTKVEIK

SEQ ID NO: 12530 - protein, 122 aa, synthetic construct
  REGION 1..122: note = Description of Artificial Sequence: Synthetic polypeptide
  REGION 1..122: note = VH of XENP018667
EVQLVESGGGLVKPGGSLRLSCAASGFTFSNYWMNWVRQAPGKGLEWVGEIRLKSNNYATHYAEPVKGRFTISRDDSKSTVYLQMNSLKTEDTAVYYCTRFYGNYGGYFDVWGAGTLVTVSS

SEQ ID NO: 12531 - protein, 107 aa, synthetic construct; identical to SEQ ID NO: 10923
  REGION 1..107: note = Description of Artificial Sequence: Synthetic polypeptide
  REGION 1..107: note = VL of XENP018667

SEQ ID NO: 12532 - protein, 5 aa, synthetic construct
  REGION 1..5: note = Description of Artificial Sequence: Synthetic peptide
  REGION 1..5: note = XENP018667 vhCDR1
NYWMN

SEQ ID NO: 12533 - protein, 19 aa, synthetic construct
  REGION 1..19: note = Description of Artificial Sequence: Synthetic peptide
  REGION 1..19: note = XENP018667 vhCDR2
EIRLKSNNYATHYAEPVKG

SEQ ID NO: 12534 - protein, 11 aa, synthetic construct
  REGION 1..11: note = Description of Artificial Sequence: Synthetic peptide
  REGION 1..11: note = XENP018667 vhCDR3
FYGNYGGYFDV

SEQ ID NO: 12535 - protein, 11 aa, synthetic construct
  REGION 1..11: note = Description of Artificial Sequence: Synthetic peptide
  REGION 1..11: note = XENP018667 vlCDR1
RASQSVSNDVA

SEQ ID NO: 12536 - protein, 7 aa, synthetic construct
  REGION 1..7: note = Description of Artificial Sequence: Synthetic peptide
  REGION 1..7: note = XENP018667 vlCDR2
YASHRYT

SEQ ID NO: 12537 - protein, 9 aa, synthetic construct
  REGION 1..9: note = Description of Artificial Sequence: Synthetic peptide
  REGION 1..9: note = XENP018667 vlCDR3
QQDYSSPRT

SEQ ID NO: 12538 - protein, 249 aa, synthetic construct
  REGION 1..249: note = Description of Artificial Sequence: Synthetic polypeptide
  REGION 1..249: note = XENP018668 1G6_H1.168_L1_scFv(GKPGS)4
EVQLVESGGGLVKPGGSLRLSCAASGFTFSNYWMNWVRQAPGKGLEWVGEIRLKSNNYATHYAEPVKGRFTISRDDSKSTVYLQMNSLKTEDTAVYYCTRHYGNYGGYFDVWGAGTLVTVSSGKPGSGKPGSGKPGSGKPGSSIVMTQSPATLSVSPGERATLSCRASQSVSNDVAWYQQKPGQSPRLLINYASHRYTGVPDRFTGSGYGTEFTLTISSLQSEDFAVYFCQQDYSSPRTFGGGTKVEIK

SEQ ID NO: 12539 - protein, 122 aa, synthetic construct
  REGION 1..122: note = Description of Artificial Sequence: Synthetic polypeptide
  REGION 1..122: note = VH of XENP018668
EVQLVESGGGLVKPGGSLRLSCAASGFTFSNYWMNWVRQAPGKGLEWVGEIRLKSNNYATHYAEPVKGRFTISRDDSKSTVYLQMNSLKTEDTAVYYCTRHYGNYGGYFDVWGAGTLVTVSS

SEQ ID NO: 12540 - protein, 107 aa, synthetic construct; identical to SEQ ID NO: 10923
  REGION 1..107: note = Description of Artificial Sequence: Synthetic polypeptide
  REGION 1..107: note = VL of XENP018668

SEQ ID NO: 12541 - protein, 5 aa, synthetic construct
  REGION 1..5: note = Description of Artificial Sequence: Synthetic peptide
  REGION 1..5: note = XENP018668 vhCDR1
NYWMN

SEQ ID NO: 12542 - protein, 19 aa, synthetic construct
  REGION 1..19: note = Description of Artificial Sequence: Synthetic peptide
  REGION 1..19: note = XENP018668 vhCDR2
EIRLKSNNYATHYAEPVKG

SEQ ID NO: 12543 - protein, 11 aa, synthetic construct
  REGION 1..11: note = Description of Artificial Sequence: Synthetic peptide
  REGION 1..11: note = XENP018668 vhCDR3
HYGNYGGYFDV

SEQ ID NO: 12544 - protein, 11 aa, synthetic construct
  REGION 1..11: note = Description of Artificial Sequence: Synthetic peptide
  REGION 1..11: note = XENP018668 vlCDR1
RASQSVSNDVA

SEQ ID NO: 12545 - protein, 7 aa, synthetic construct
  REGION 1..7: note = Description of Artificial Sequence: Synthetic peptide
  REGION 1..7: note = XENP018668 vlCDR2
YASHRYT

SEQ ID NO: 12546 - protein, 9 aa, synthetic construct
  REGION 1..9: note = Description of Artificial Sequence: Synthetic peptide
  REGION 1..9: note = XENP018668 vlCDR3
QQDYSSPRT

SEQ ID NO: 12547 - protein, 249 aa, synthetic construct
  REGION 1..249: note = Description of Artificial Sequence: Synthetic polypeptide
  REGION 1..249: note = XENP018669 1G6_H1.169_L1_scFv(GKPGS)4
EVQLVESGGGLVKPGGSLRLSCAASGFTFSNYWMNWVRQAPGKGLEWVGEIRLKSNNYATHYAEPVKGRFTISRDDSKSTVYLQMNSLKTEDTAVYYCTRLYGNYGGYFDVWGAGTLVTVSSGKPGSGKPGSGKPGSGKPGSSIVMTQSPATLSVSPGERATLSCRASQSVSNDVAWYQQKPGQSPRLLINYASHRYTGVPDRFTGSGYGTEFTLTISSLQSEDFAVYFCQQDYSSPRTFGGGTKVEIK

SEQ ID NO: 12548 - protein, 122 aa, synthetic construct
  REGION 1..122: note = Description of Artificial Sequence: Synthetic polypeptide
  REGION 1..122: note = VH of XENP018669
EVQLVESGGGLVKPGGSLRLSCAASGFTFSNYWMNWVRQAPGKGLEWVGEIRLKSNNYATHYAEPVKGRFTISRDDSKSTVYLQMNSLKTEDTAVYYCTRLYGNYGGYFDVWGAGTLVTVSS

SEQ ID NO: 12549 - protein, 107 aa, synthetic construct; identical to SEQ ID NO: 10923
  REGION 1..107: note = Description of Artificial Sequence: Synthetic polypeptide
  REGION 1..107: note = VL of XENP018669

SEQ ID NO: 12550 - protein, 5 aa, synthetic construct
  REGION 1..5: note = Description of Artificial Sequence: Synthetic peptide
  REGION 1..5: note = XENP018669 vhCDR1
NYWMN

SEQ ID NO: 12551 - protein, 19 aa, synthetic construct
  REGION 1..19: note = Description of Artificial Sequence: Synthetic peptide
  REGION 1..19: note = XENP018669 vhCDR2
EIRLKSNNYATHYAEPVKG

SEQ ID NO: 12552 - protein, 11 aa, synthetic construct
  REGION 1..11: note = Description of Artificial Sequence: Synthetic peptide
  REGION 1..11: note = XENP018669 vhCDR3
LYGNYGGYFDV

SEQ ID NO: 12553 - protein, 11 aa, synthetic construct
  REGION 1..11: note = Description of Artificial Sequence: Synthetic peptide
  REGION 1..11: note = XENP018669 vlCDR1
RASQSVSNDVA

SEQ ID NO: 12554 - protein, 7 aa, synthetic construct
  REGION 1..7: note = Description of Artificial Sequence: Synthetic peptide
  REGION 1..7: note = XENP018669 vlCDR2
YASHRYT

SEQ ID NO: 12555 - protein, 9 aa, synthetic construct
  REGION 1..9: note = Description of Artificial Sequence: Synthetic peptide
  REGION 1..9: note = XENP018669 vlCDR3
QQDYSSPRT

SEQ ID NO: 12556 - protein, 249 aa, synthetic construct
  REGION 1..249: note = Description of Artificial Sequence: Synthetic polypeptide
  REGION 1..249: note = XENP018670 1G6_H1.170_L1_scFv(GKPGS)4
EVQLVESGGGLVKPGGSLRLSCAASGFTFSNYWMNWVRQAPGKGLEWVGEIRLKSNNYATHYAEPVKGRFTISRDDSKSTVYLQMNSLKTEDTAVYYCTRWYGNYGGYFDVWGAGTLVTVSSGKPGSGKPGSGKPGSGKPGSSIVMTQSPATLSVSPGERATLSCRASQSVSNDVAWYQQKPGQSPRLLINYASHRYTGVPDRFTGSGYGTEFTLTISSLQSEDFAVYFCQQDYSSPRTFGGGTKVEIK

SEQ ID NO: 12557 - protein, 122 aa, synthetic construct
  REGION 1..122: note = Description of Artificial Sequence: Synthetic polypeptide
  REGION 1..122: note = VH of XENP018670
EVQLVESGGGLVKPGGSLRLSCAASGFTFSNYWMNWVRQAPGKGLEWVGEIRLKSNNYATHYAEPVKGRFTISRDDSKSTVYLQMNSLKTEDTAVYYCTRWYGNYGGYFDVWGAGTLVTVSS

SEQ ID NO: 12558 - protein, 107 aa, synthetic construct; identical to SEQ ID NO: 10923
  REGION 1..107: note = Description of Artificial Sequence: Synthetic polypeptide
  REGION 1..107: note = VL of XENP018670

SEQ ID NO: 12559 - protein, 5 aa, synthetic construct
  REGION 1..5: note = Description of Artificial Sequence: Synthetic peptide
  REGION 1..5: note = XENP018670 vhCDR1
NYWMN

SEQ ID NO: 12560 - protein, 19 aa, synthetic construct
  REGION 1..19: note = Description of Artificial Sequence: Synthetic peptide
  REGION 1..19: note = XENP018670 vhCDR2
EIRLKSNNYATHYAEPVKG

SEQ ID NO: 12561 - protein, 11 aa, synthetic construct
  REGION 1..11: note = Description of Artificial Sequence: Synthetic peptide
  REGION 1..11: note = XENP018670 vhCDR3
WYGNYGGYFDV

SEQ ID NO: 12562 - protein, 11 aa, synthetic construct
  REGION 1..11: note = Description of Artificial Sequence: Synthetic peptide
  REGION 1..11: note = XENP018670 vlCDR1
RASQSVSNDVA

SEQ ID NO: 12563 - protein, 7 aa, synthetic construct
  REGION 1..7: note = Description of Artificial Sequence: Synthetic peptide
  REGION 1..7: note = XENP018670 vlCDR2
YASHRYT

SEQ ID NO: 12564 - protein, 9 aa, synthetic construct
  REGION 1..9: note = Description of Artificial Sequence: Synthetic peptide
  REGION 1..9: note = XENP018670 vlCDR3
QQDYSSPRT

SEQ ID NO: 12565 - protein, 249 aa, synthetic construct
  REGION 1..249: note = Description of Artificial Sequence: Synthetic polypeptide
  REGION 1..249: note = XENP018671 1G6_H1.171_L1_scFv(GKPGS)4
EVQLVESGGGLVKPGGSLRLSCAASGFTFSNYWMNWVRQAPGKGLEWVGEIRLKSNNYATHYAEPVKGRFTISRDDSKSTVYLQMNSLKTEDTAVYYCTRVYGNYGGYFDVWGAGTLVTVSSGKPGSGKPGSGKPGSGKPGSSIVMTQSPATLSVSPGERATLSCRASQSVSNDVAWYQQKPGQSPRLLINYASHRYTGVPDRFTGSGYGTEFTLTISSLQSEDFAVYFCQQDYSSPRTFGGGTKVEIK

SEQ ID NO: 12566 - protein, 122 aa, synthetic construct
  REGION 1..122: note = Description of Artificial Sequence: Synthetic polypeptide
  REGION 1..122: note = VH of XENP018671
EVQLVESGGGLVKPGGSLRLSCAASGFTFSNYWMNWVRQAPGKGLEWVGEIRLKSNNYATHYAEPVKGRFTISRDDSKSTVYLQMNSLKTEDTAVYYCTRVYGNYGGYFDVWGAGTLVTVSS

SEQ ID NO: 12567 - protein, 107 aa, synthetic construct; identical to SEQ ID NO: 10923
  REGION 1..107: note = Description of Artificial Sequence: Synthetic polypeptide
  REGION 1..107: note = VL of XENP018671

SEQ ID NO: 12568 - protein, 5 aa, synthetic construct
  REGION 1..5: note = Description of Artificial Sequence: Synthetic peptide
  REGION 1..5: note = XENP018671 vhCDR1
NYWMN

SEQ ID NO: 12569 - protein, 19 aa, synthetic construct
  REGION 1..19: note = Description of Artificial Sequence: Synthetic peptide
  REGION 1..19: note = XENP018671 vhCDR2
EIRLKSNNYATHYAEPVKG

SEQ ID NO: 12570 - protein, 11 aa, synthetic construct
  REGION 1..11: note = Description of Artificial Sequence: Synthetic peptide
  REGION 1..11: note = XENP018671 vhCDR3
VYGNYGGYFDV

SEQ ID NO: 12571 - protein, 11 aa, synthetic construct
  REGION 1..11: note = Description of Artificial Sequence: Synthetic peptide
  REGION 1..11: note = XENP018671 vlCDR1
RASQSVSNDVA

SEQ ID NO: 12572 - protein, 7 aa, synthetic construct
  REGION 1..7: note = Description of Artificial Sequence: Synthetic peptide
  REGION 1..7: note = XENP018671 vlCDR2
YASHRYT

SEQ ID NO: 12573 - protein, 9 aa, synthetic construct
  REGION 1..9: note = Description of Artificial Sequence: Synthetic peptide
  REGION 1..9: note = XENP018671 vlCDR3
QQDYSSPRT

SEQ ID NO: 12574 - protein, 249 aa, synthetic construct
  REGION 1..249: note = Description of Artificial Sequence: Synthetic polypeptide
  REGION 1..249: note = XENP018672 1G6_H1.172_L1_scFv(GKPGS)4
EVQLVESGGGLVKPGGSLRLSCAASGFTFSNYWMNWVRQAPGKGLEWVGEIRLKSNNYATHYAEPVKGRFTISRDDSKSTVYLQMNSLKTEDTAVYYCTRAYGNYGGYFDVWGAGTLVTVSSGKPGSGKPGSGKPGSGKPGSSIVMTQSPATLSVSPGERATLSCRASQSVSNDVAWYQQKPGQSPRLLINYASHRYTGVPDRFTGSGYGTEFTLTISSLQSEDFAVYFCQQDYSSPRTFGGGTKVEIK

SEQ ID NO: 12575 - protein, 122 aa, synthetic construct
  REGION 1..122: note = Description of Artificial Sequence: Synthetic polypeptide
  REGION 1..122: note = VH of XENP018672
EVQLVESGGGLVKPGGSLRLSCAASGFTFSNYWMNWVRQAPGKGLEWVGEIRLKSNNYATHYAEPVKGRFTISRDDSKSTVYLQMNSLKTEDTAVYYCTRAYGNYGGYFDVWGAGTLVTVSS

SEQ ID NO: 12576 - protein, 107 aa, synthetic construct; identical to SEQ ID NO: 10923
  REGION 1..107: note = Description of Artificial Sequence: Synthetic polypeptide
  REGION 1..107: note = VL of XENP018672

SEQ ID NO: 12577 - protein, 5 aa, synthetic construct
  REGION 1..5: note = Description of Artificial Sequence: Synthetic peptide
  REGION 1..5: note = XENP018672 vhCDR1
NYWMN

SEQ ID NO: 12578 - protein, 19 aa, synthetic construct
  REGION 1..19: note = Description of Artificial Sequence: Synthetic peptide
  REGION 1..19: note = XENP018672 vhCDR2
EIRLKSNNYATHYAEPVKG

SEQ ID NO: 12579 - protein, 11 aa, synthetic construct
  REGION 1..11: note = Description of Artificial Sequence: Synthetic peptide
  REGION 1..11: note = XENP018672 vhCDR3
AYGNYGGYFDV

SEQ ID NO: 12580 - protein, 11 aa, synthetic construct
  REGION 1..11: note = Description of Artificial Sequence: Synthetic peptide
  REGION 1..11: note = XENP018672 vlCDR1
RASQSVSNDVA

SEQ ID NO: 12581 - protein, 7 aa, synthetic construct
  REGION 1..7: note = Description of Artificial Sequence: Synthetic peptide
  REGION 1..7: note = XENP018672 vlCDR2
YASHRYT

SEQ ID NO: 12582 - protein, 9 aa, synthetic construct
  REGION 1..9: note = Description of Artificial Sequence: Synthetic peptide
  REGION 1..9: note = XENP018672 vlCDR3
QQDYSSPRT

SEQ ID NO: 12583 - protein, 249 aa, synthetic construct
  REGION 1..249: note = Description of Artificial Sequence: Synthetic polypeptide
  REGION 1..249: note = XENP018673 1G6_H1.173_L1_scFv(GKPGS)4
EVQLVESGGGLVKPGGSLRLSCAASGFTFSNYWMNWVRQAPGKGLEWVGEIRLKSNNYATHYAEPVKGRFTISRDDSKSTVYLQMNSLKTEDTAVYYCTRQYGNYGGYFDVWGAGTLVTVSSGKPGSGKPGSGKPGSGKPGSSIVMTQSPATLSVSPGERATLSCRASQSVSNDVAWYQQKPGQSPRLLINYASHRYTGVPDRFTGSGYGTEFTLTISSLQSEDFAVYFCQQDYSSPRTFGGGTKVEIK

SEQ ID NO: 12584 - protein, 122 aa, synthetic construct
  REGION 1..122: note = Description of Artificial Sequence: Synthetic polypeptide
  REGION 1..122: note = VH of XENP018673
EVQLVESGGGLVKPGGSLRLSCAASGFTFSNYWMNWVRQAPGKGLEWVGEIRLKSNNYATHYAEPVKGRFTISRDDSKSTVYLQMNSLKTEDTAVYYCTRQYGNYGGYFDVWGAGTLVTVSS

SEQ ID NO: 12585 - protein, 107 aa, synthetic construct; identical to SEQ ID NO: 10923
  REGION 1..107: note = Description of Artificial Sequence: Synthetic polypeptide
  REGION 1..107: note = VL of XENP018673

SEQ ID NO: 12586 - protein, 5 aa, synthetic construct
  REGION 1..5: note = Description of Artificial Sequence: Synthetic peptide
  REGION 1..5: note = XENP018673 vhCDR1
NYWMN

SEQ ID NO: 12587 - protein, 19 aa, synthetic construct
  REGION 1..19: note = Description of Artificial Sequence: Synthetic peptide
  REGION 1..19: note = XENP018673 vhCDR2
EIRLKSNNYATHYAEPVKG

SEQ ID NO: 12588 - protein, 11 aa, synthetic construct
  REGION 1..11: note = Description of Artificial Sequence: Synthetic peptide
  REGION 1..11: note = XENP018673 vhCDR3
QYGNYGGYFDV

SEQ ID NO: 12589 - protein, 11 aa, synthetic construct
  REGION 1..11: note = Description of Artificial Sequence: Synthetic peptide
  REGION 1..11: note = XENP018673 vlCDR1
RASQSVSNDVA

SEQ ID NO: 12590 - protein, 7 aa, synthetic construct
  REGION 1..7: note = Description of Artificial Sequence: Synthetic peptide
  REGION 1..7: note = XENP018673 vlCDR2
YASHRYT

SEQ ID NO: 12591 - protein, 9 aa, synthetic construct
  REGION 1..9: note = Description of Artificial Sequence: Synthetic peptide
  REGION 1..9: note = XENP018673 vlCDR3
QQDYSSPRT

SEQ ID NO: 12592 - protein, 249 aa, synthetic construct
  REGION 1..249: note = Description of Artificial Sequence: Synthetic polypeptide
  REGION 1..249: note = XENP018674 1G6_H1.174_L1_scFv(GKPGS)4
EVQLVESGGGLVKPGGSLRLSCAASGFTFSNYWMNWVRQAPGKGLEWVGEIRLKSNNYATHYAEPVKGRFTISRDDSKSTVYLQMNSLKTEDTAVYYCTRDYGNYGGYFDVWGAGTLVTVSSGKPGSGKPGSGKPGSGKPGSSIVMTQSPATLSVSPGERATLSCRASQSVSNDVAWYQQKPGQSPRLLINYASHRYTGVPDRFTGSGYGTEFTLTISSLQSEDFAVYFCQQDYSSPRTFGGGTKVEIK

SEQ ID NO: 12593 - protein, 122 aa, synthetic construct
  REGION 1..122: note = Description of Artificial Sequence: Synthetic polypeptide
  REGION 1..122: note = VH of XENP018674
EVQLVESGGGLVKPGGSLRLSCAASGFTFSNYWMNWVRQAPGKGLEWVGEIRLKSNNYATHYAEPVKGRFTISRDDSKSTVYLQMNSLKTEDTAVYYCTRDYGNYGGYFDVWGAGTLVTVSS

SEQ ID NO: 12594 - protein, 107 aa, synthetic construct; identical to SEQ ID NO: 10923
  REGION 1..107: note = Description of Artificial Sequence: Synthetic polypeptide
  REGION 1..107: note = VL of XENP018674

SEQ ID NO: 12595 - protein, 5 aa, synthetic construct
  REGION 1..5: note = Description of Artificial Sequence: Synthetic peptide
  REGION 1..5: note = XENP018674 vhCDR1
NYWMN

SEQ ID NO: 12596 - protein, 19 aa, synthetic construct
  REGION 1..19: note = Description of Artificial Sequence: Synthetic peptide
  REGION 1..19: note = XENP018674 vhCDR2
EIRLKSNNYATHYAEPVKG

SEQ ID NO: 12597 - protein, 11 aa, synthetic construct
  REGION 1..11: note = Description of Artificial Sequence: Synthetic peptide
  REGION 1..11: note = XENP018674 vhCDR3
DYGNYGGYFDV

SEQ ID NO: 12598 - protein, 11 aa, synthetic construct
  REGION 1..11: note = Description of Artificial Sequence: Synthetic peptide
  REGION 1..11: note = XENP018674 vlCDR1
RASQSVSNDVA

SEQ ID NO: 12599 - protein, 7 aa, synthetic construct
  REGION 1..7: note = Description of Artificial Sequence: Synthetic peptide
  REGION 1..7: note = XENP018674 vlCDR2
YASHRYT

SEQ ID NO: 12600 - protein, 9 aa, synthetic construct
  REGION 1..9: note = Description of Artificial Sequence: Synthetic peptide
  REGION 1..9: note = XENP018674 vlCDR3
QQDYSSPRT

SEQ ID NO: 12601 - protein, 249 aa, synthetic construct
  REGION 1..249: note = Description of Artificial Sequence: Synthetic polypeptide
  REGION 1..249: note = XENP018675 1G6_H1.175_L1_scFv(GKPGS)4
EVQLVESGGGLVKPGGSLRLSCAASGFTFSNYWMNWVRQAPGKGLEWVGEIRLKSNNYATHYAEPVKGRFTISRDDSKSTVYLQMNSLKTEDTAVYYCTRKYGNYGGYFDVWGAGTLVTVSSGKPGSGKPGSGKPGSGKPGSSIVMTQSPATLSVSPGERATLSCRASQSVSNDVAWYQQKPGQSPRLLINYASHRYTGVPDRFTGSGYGTEFTLTISSLQSEDFAVYFCQQDYSSPRTFGGGTKVEIK

SEQ ID NO: 12602 - protein, 122 aa, synthetic construct
  REGION 1..122: note = Description of Artificial Sequence: Synthetic polypeptide
  REGION 1..122: note = VH of XENP018675
EVQLVESGGGLVKPGGSLRLSCAASGFTFSNYWMNWVRQAPGKGLEWVGEIRLKSNNYATHYAEPVKGRFTISRDDSKSTVYLQMNSLKTEDTAVYYCTRKYGNYGGYFDVWGAGTLVTVSS

SEQ ID NO: 12603 - protein, 107 aa, synthetic construct; identical to SEQ ID NO: 10923
  REGION 1..107: note = Description of Artificial Sequence: Synthetic polypeptide
  REGION 1..107: note = VL of XENP018675

SEQ ID NO: 12604 - protein, 5 aa, synthetic construct
  REGION 1..5: note = Description of Artificial Sequence: Synthetic peptide
  REGION 1..5: note = XENP018675 vhCDR1
NYWMN

SEQ ID NO: 12605 - protein, 19 aa, synthetic construct
  REGION 1..19: note = Description of Artificial Sequence: Synthetic peptide
  REGION 1..19: note = XENP018675 vhCDR2
EIRLKSNNYATHYAEPVKG

SEQ ID NO: 12606 - protein, 11 aa, synthetic construct
  REGION 1..11: note = Description of Artificial Sequence: Synthetic peptide
  REGION 1..11: note = XENP018675 vhCDR3
KYGNYGGYFDV

SEQ ID NO: 12607 - protein, 11 aa, synthetic construct
  REGION 1..11: note = Description of Artificial Sequence: Synthetic peptide
  REGION 1..11: note = XENP018675 vlCDR1
RASQSVSNDVA

SEQ ID NO: 12608 - protein, 7 aa, synthetic construct
  REGION 1..7: note = Description of Artificial Sequence: Synthetic peptide
  REGION 1..7: note = XENP018675 vlCDR2
YASHRYT

SEQ ID NO: 12609 - protein, 9 aa, synthetic construct
  REGION 1..9: note = Description of Artificial Sequence: Synthetic peptide
  REGION 1..9: note = XENP018675 vlCDR3
QQDYSSPRT

SEQ ID NO: 12610 - protein, 249 aa, synthetic construct
  REGION 1..249: note = Description of Artificial Sequence: Synthetic polypeptide
  REGION 1..249: note = XENP018676 1G6_H1.176_L1_scFv(GKPGS)4
EVQLVESGGGLVKPGGSLRLSCAASGFTFSNYWMNWVRQAPGKGLEWVGEIRLKSNNYATHYAEPVKGRFTISRDDSKSTVYLQMNSLKTEDTAVYYCTRYFGNYGGYFDVWGAGTLVTVSSGKPGSGKPGSGKPGSGKPGSSIVMTQSPATLSVSPGERATLSCRASQSVSNDVAWYQQKPGQSPRLLINYASHRYTGVPDRFTGSGYGTEFTLTISSLQSEDFAVYFCQQDYSSPRTFGGGTKVEIK

SEQ ID NO: 12611 - protein, 122 aa, synthetic construct
  REGION 1..122: note = Description of Artificial Sequence: Synthetic polypeptide
  REGION 1..122: note = VH of XENP018676
EVQLVESGGGLVKPGGSLRLSCAASGFTFSNYWMNWVRQAPGKGLEWVGEIRLKSNNYATHYAEPVKGRFTISRDDSKSTVYLQMNSLKTEDTAVYYCTRYFGNYGGYFDVWGAGTLVTVSS

SEQ ID NO: 12612 - protein, 107 aa, synthetic construct; identical to SEQ ID NO: 10923
  REGION 1..107: note = Description of Artificial Sequence: Synthetic polypeptide
  REGION 1..107: note = VL of XENP018676

SEQ ID NO: 12613 - protein, 5 aa, synthetic construct
  REGION 1..5: note = Description of Artificial Sequence: Synthetic peptide
  REGION 1..5: note = XENP018676 vhCDR1
NYWMN

SEQ ID NO: 12614 - protein, 19 aa, synthetic construct
  REGION 1..19: note = Description of Artificial Sequence: Synthetic peptide
  REGION 1..19: note = XENP018676 vhCDR2
EIRLKSNNYATHYAEPVKG

SEQ ID NO: 12615 - protein, 11 aa, synthetic construct
  REGION 1..11: note = Description of Artificial Sequence: Synthetic peptide
  REGION 1..11: note = XENP018676 vhCDR3
YFGNYGGYFDV

SEQ ID NO: 12616 - protein, 11 aa, synthetic construct
  REGION 1..11: note = Description of Artificial Sequence: Synthetic peptide
  REGION 1..11: note = XENP018676 vlCDR1
RASQSVSNDVA

SEQ ID NO: 12617 - protein, 7 aa, synthetic construct
  REGION 1..7: note = Description of Artificial Sequence: Synthetic peptide
  REGION 1..7: note = XENP018676 vlCDR2
YASHRYT

SEQ ID NO: 12618 - protein, 9 aa, synthetic construct
  REGION 1..9: note = Description of Artificial Sequence: Synthetic peptide
  REGION 1..9: note = XENP018676 vlCDR3
QQDYSSPRT

SEQ ID NO: 12619 - protein, 249 aa, synthetic construct
  REGION 1..249: note = Description of Artificial Sequence: Synthetic polypeptide
  REGION 1..249: note = XENP018677 1G6_H1.177_L1_scFv(GKPGS)4
EVQLVESGGGLVKPGGSLRLSCAASGFTFSNYWMNWVRQAPGKGLEWVGEIRLKSNNYATHYAEPVKGRFTISRDDSKSTVYLQMNSLKTEDTAVYYCTRYHGNYGGYFDVWGAGTLVTVSSGKPGSGKPGSGKPGSGKPGSSIVMTQSPATLSVSPGERATLSCRASQSVSNDVAWYQQKPGQSPRLLINYASHRYTGVPDRFTGSGYGTEFTLTISSLQSEDFAVYFCQQDYSSPRTFGGGTKVEIK

SEQ ID NO: 12620 - protein, 122 aa, synthetic construct
  REGION 1..122: note = Description of Artificial Sequence: Synthetic polypeptide
  REGION 1..122: note = VH of XENP018677
EVQLVESGGGLVKPGGSLRLSCAASGFTFSNYWMNWVRQAPGKGLEWVGEIRLKSNNYATHYAEPVKGRFTISRDDSKSTVYLQMNSLKTEDTAVYYCTRYHGNYGGYFDVWGAGTLVTVSS

SEQ ID NO: 12621 - protein, 107 aa, synthetic construct; identical to SEQ ID NO: 10923
  REGION 1..107: note = Description of Artificial Sequence: Synthetic polypeptide
  REGION 1..107: note = VL of XENP018677

SEQ ID NO: 12622 - protein, 5 aa, synthetic construct
  REGION 1..5: note = Description of Artificial Sequence: Synthetic peptide
  REGION 1..5: note = XENP018677 vhCDR1
NYWMN

SEQ ID NO: 12623 - protein, 19 aa, synthetic construct
  REGION 1..19: note = Description of Artificial Sequence: Synthetic peptide
  REGION 1..19: note = XENP018677 vhCDR2
EIRLKSNNYATHYAEPVKG

SEQ ID NO: 12624 - protein, 11 aa, synthetic construct
  REGION 1..11: note = Description of Artificial Sequence: Synthetic peptide
  REGION 1..11: note = XENP018677 vhCDR3
YHGNYGGYFDV

SEQ ID NO: 12625 - protein, 11 aa, synthetic construct
  REGION 1..11: note = Description of Artificial Sequence: Synthetic peptide
  REGION 1..11: note = XENP018677 vlCDR1
RASQSVSNDVA

SEQ ID NO: 12626 - protein, 7 aa, synthetic construct
  REGION 1..7: note = Description of Artificial Sequence: Synthetic peptide
  REGION 1..7: note = XENP018677 vlCDR2
YASHRYT

SEQ ID NO: 12627 - protein, 9 aa, synthetic construct
  REGION 1..9: note = Description of Artificial Sequence: Synthetic peptide
  REGION 1..9: note = XENP018677 vlCDR3
QQDYSSPRT

SEQ ID NO: 12628 - protein, 249 aa, synthetic construct
  REGION 1..249: note = Description of Artificial Sequence: Synthetic polypeptide
  REGION 1..249: note = XENP018678 1G6_H1.178_L1_scFv(GKPGS)4
EVQLVESGGGLVKPGGSLRLSCAASGFTFSNYWMNWVRQAPGKGLEWVGEIRLKSNNYATHYAEPVKGRFTISRDDSKSTVYLQMNSLKTEDTAVYYCTRYLGNYGGYFDVWGAGTLVTVSSGKPGSGKPGSGKPGSGKPGSSIVMTQSPATLSVSPGERATLSCRASQSVSNDVAWYQQKPGQSPRLLINYASHRYTGVPDRFTGSGYGTEFTLTISSLQSEDFAVYFCQQDYSSPRTFGGGTKVEIK

SEQ ID NO: 12629 - protein, 122 aa, synthetic construct
  REGION 1..122: note = Description of Artificial Sequence: Synthetic polypeptide
  REGION 1..122: note = VH of XENP018678
EVQLVESGGGLVKPGGSLRLSCAASGFTFSNYWMNWVRQAPGKGLEWVGEIRLKSNNYATHYAEPVKGRFTISRDDSKSTVYLQMNSLKTEDTAVYYCTRYLGNYGGYFDVWGAGTLVTVSS

SEQ ID NO: 12630 - protein, 107 aa, synthetic construct; identical to SEQ ID NO: 10923
  REGION 1..107: note = Description of Artificial Sequence: Synthetic polypeptide
  REGION 1..107: note = VL of XENP018678

SEQ ID NO: 12631 - protein, 5 aa, synthetic construct
  REGION 1..5: note = Description of Artificial Sequence: Synthetic peptide
  REGION 1..5: note = XENP018678 vhCDR1
NYWMN

SEQ ID NO: 12632 - protein, 19 aa, synthetic construct
  REGION 1..19: note = Description of Artificial Sequence: Synthetic peptide
  REGION 1..19: note = XENP018678 vhCDR2
EIRLKSNNYATHYAEPVKG

SEQ ID NO: 12633 - protein, 11 aa, synthetic construct
  REGION 1..11: note = Description of Artificial Sequence: Synthetic peptide
  REGION 1..11: note = XENP018678 vhCDR3
YLGNYGGYFDV

SEQ ID NO: 12634 - protein, 11 aa, synthetic construct
  REGION 1..11: note = Description of Artificial Sequence: Synthetic peptide
  REGION 1..11: note = XENP018678 vlCDR1
RASQSVSNDVA

SEQ ID NO: 12635 - protein, 7 aa, synthetic construct
  REGION 1..7: note = Description of Artificial Sequence: Synthetic peptide
  REGION 1..7: note = XENP018678 vlCDR2
YASHRYT

SEQ ID NO: 12636 - protein, 9 aa, synthetic construct
  REGION 1..9: note = Description of Artificial Sequence: Synthetic peptide
  REGION 1..9: note = XENP018678 vlCDR3
QQDYSSPRT

SEQ ID NO: 12637 - protein, 249 aa, synthetic construct
  REGION 1..249: note = Description of Artificial Sequence: Synthetic polypeptide
  REGION 1..249: note = XENP018679 1G6_H1.179_L1_scFv(GKPGS)4
EVQLVESGGGLVKPGGSLRLSCAASGFTFSNYWMNWVRQAPGKGLEWVGEIRLKSNNYATHYAEPVKGRFTISRDDSKSTVYLQMNSLKTEDTAVYYCTRYWGNYGGYFDVWGAGTLVTVSSGKPGSGKPGSGKPGSGKPGSSIVMTQSPATLSVSPGERATLSCRASQSVSNDVAWYQQKPGQSPRLLINYASHRYTGVPDRFTGSGYGTEFTLTISSLQSEDFAVYFCQQDYSSPRTFGGGTKVEIK

SEQ ID NO: 12638 - protein, 122 aa, synthetic construct
  REGION 1..122: note = Description of Artificial Sequence: Synthetic polypeptide
  REGION 1..122: note = VH of XENP018679
EVQLVESGGGLVKPGGSLRLSCAASGFTFSNYWMNWVRQAPGKGLEWVGEIRLKSNNYATHYAEPVKGRFTISRDDSKSTVYLQMNSLKTEDTAVYYCTRYWGNYGGYFDVWGAGTLVTVSS

SEQ ID NO: 12639 - protein, 107 aa, synthetic construct; identical to SEQ ID NO: 10923
  REGION 1..107: note = Description of Artificial Sequence: Synthetic polypeptide
  REGION 1..107: note = VL of XENP018679

SEQ ID NO: 12640 - protein, 5 aa, synthetic construct
  REGION 1..5: note = Description of Artificial Sequence: Synthetic peptide
  REGION 1..5: note = XENP018679 vhCDR1
NYWMN

SEQ ID NO: 12641 - protein, 19 aa, synthetic construct
  REGION 1..19: note = Description of Artificial Sequence: Synthetic peptide
  REGION 1..19: note = XENP018679 vhCDR2
EIRLKSNNYATHYAEPVKG

SEQ ID NO: 12642 - protein, 11 aa, synthetic construct
  REGION 1..11: note = Description of Artificial Sequence: Synthetic peptide
  REGION 1..11: note = XENP018679 vhCDR3
YWGNYGGYFDV

SEQ ID NO: 12643 - protein, 11 aa, synthetic construct
  REGION 1..11: note = Description of Artificial Sequence: Synthetic peptide
  REGION 1..11: note = XENP018679 vlCDR1
RASQSVSNDVA

SEQ ID NO: 12644 - protein, 7 aa, synthetic construct
  REGION 1..7: note = Description of Artificial Sequence: Synthetic peptide
  REGION 1..7: note = XENP018679 vlCDR2
YASHRYT

SEQ ID NO: 12645 - protein, 9 aa, synthetic construct
  REGION 1..9: note = Description of Artificial Sequence: Synthetic peptide
  REGION 1..9: note = XENP018679 vlCDR3
QQDYSSPRT

SEQ ID NO: 12646 - protein, 249 aa, synthetic construct
  REGION 1..249: note = Description of Artificial Sequence: Synthetic polypeptide
  REGION 1..249: note = XENP018680 1G6_H1.180_L1_scFv(GKPGS)4
EVQLVESGGGLVKPGGSLRLSCAASGFTFSNYWMNWVRQAPGKGLEWVGEIRLKSNNYATHYAEPVKGRFTISRDDSKSTVYLQMNSLKTEDTAVYYCTRYVGNYGGYFDVWGAGTLVTVSSGKPGSGKPGSGKPGSGKPGSSIVMTQSPATLSVSPGERATLSCRASQSVSNDVAWYQQKPGQSPRLLINYASHRYTGVPDRFTGSGYGTEFTLTISSLQSEDFAVYFCQQDYSSPRTFGGGTKVEIK

SEQ ID NO: 12647 - protein, 122 aa, synthetic construct
  REGION 1..122: note = Description of Artificial Sequence: Synthetic polypeptide
  REGION 1..122: note = VH of XENP018680
EVQLVESGGGLVKPGGSLRLSCAASGFTFSNYWMNWVRQAPGKGLEWVGEIRLKSNNYATHYAEPVKGRFTISRDDSKSTVYLQMNSLKTEDTAVYYCTRYVGNYGGYFDVWGAGTLVTVSS

SEQ ID NO: 12648 - protein, 107 aa, synthetic construct; identical to SEQ ID NO: 10923
  REGION 1..107: note = Description of Artificial Sequence: Synthetic polypeptide
  REGION 1..107: note = VL of XENP018680

SEQ ID NO: 12649 - protein, 5 aa, synthetic construct
  REGION 1..5: note = Description of Artificial Sequence: Synthetic peptide
  REGION 1..5: note = XENP018680 vhCDR1
NYWMN

SEQ ID NO: 12650 - protein, 19 aa, synthetic construct
  REGION 1..19: note = Description of Artificial Sequence: Synthetic peptide
  REGION 1..19: note = XENP018680 vhCDR2
EIRLKSNNYATHYAEPVKG

SEQ ID NO: 12651 - protein, 11 aa, synthetic construct
  REGION 1..11: note = Description of Artificial Sequence: Synthetic peptide
  REGION 1..11: note = XENP018680 vhCDR3
YVGNYGGYFDV

SEQ ID NO: 12652 - protein, 11 aa, synthetic construct
  REGION 1..11: note = Description of Artificial Sequence: Synthetic peptide
  REGION 1..11: note = XENP018680 vlCDR1
RASQSVSNDVA

SEQ ID NO: 12653 - protein, 7 aa, synthetic construct
  REGION 1..7: note = Description of Artificial Sequence: Synthetic peptide
  REGION 1..7: note = XENP018680 vlCDR2
YASHRYT

SEQ ID NO: 12654 - protein, 9 aa, synthetic construct
  REGION 1..9: note = Description of Artificial Sequence: Synthetic peptide
  REGION 1..9: note = XENP018680 vlCDR3
QQDYSSPRT

SEQ ID NO: 12655 - protein, 249 aa, synthetic construct
  REGION 1..249: note = Description of Artificial Sequence: Synthetic polypeptide
  REGION 1..249: note = XENP018681 1G6_H1.181_L1_scFv(GKPGS)4
EVQLVESGGGLVKPGGSLRLSCAASGFTFSNYWMNWVRQAPGKGLEWVGEIRLKSNNYATHYAEPVKGRFTISRDDSKSTVYLQMNSLKTEDTAVYYCTRYAGNYGGYFDVWGAGTLVTVSSGKPGSGKPGSGKPGSGKPGSSIVMTQSPATLSVSPGERATLSCRASQSVSNDVAWYQQKPGQSPRLLINYASHRYTGVPDRFTGSGYGTEFTLTISSLQSEDFAVYFCQQDYSSPRTFGGGTKVEIK

SEQ ID NO: 12656 - protein, 122 aa, synthetic construct
  REGION 1..122: note = Description of Artificial Sequence: Synthetic polypeptide
  REGION 1..122: note = VH of XENP018681
EVQLVESGGGLVKPGGSLRLSCAASGFTFSNYWMNWVRQAPGKGLEWVGEIRLKSNNYATHYAEPVKGRFTISRDDSKSTVYLQMNSLKTEDTAVYYCTRYAGNYGGYFDVWGAGTLVTVSS

SEQ ID NO: 12657 - protein, 107 aa, synthetic construct; identical to SEQ ID NO: 10923
  REGION 1..107: note = Description of Artificial Sequence: Synthetic polypeptide
  REGION 1..107: note = VL of XENP018681

SEQ ID NO: 12658 - protein, 5 aa, synthetic construct
  REGION 1..5: note = Description of Artificial Sequence: Synthetic peptide
  REGION 1..5: note = XENP018681 vhCDR1
NYWMN

SEQ ID NO: 12659 - protein, 19 aa, synthetic construct
  REGION 1..19: note = Description of Artificial Sequence: Synthetic peptide
  REGION 1..19: note = XENP018681 vhCDR2
EIRLKSNNYATHYAEPVKG

SEQ ID NO: 12660 - protein, 11 aa, synthetic construct
  REGION 1..11: note = Description of Artificial Sequence: Synthetic peptide
  REGION 1..11: note = XENP018681 vhCDR3
YAGNYGGYFDV

SEQ ID NO: 12661 - protein, 11 aa, synthetic construct
  REGION 1..11: note = Description of Artificial Sequence: Synthetic peptide
  REGION 1..11: note = XENP018681 vlCDR1
RASQSVSNDVA

SEQ ID NO: 12662 - protein, 7 aa, synthetic construct
  REGION 1..7: note = Description of Artificial Sequence: Synthetic peptide
  REGION 1..7: note = XENP018681 vlCDR2
YASHRYT

SEQ ID NO: 12663 - protein, 9 aa, synthetic construct
  REGION 1..9: note = Description of Artificial Sequence: Synthetic peptide
  REGION 1..9: note = XENP018681 vlCDR3
QQDYSSPRT

SEQ ID NO: 12664 - protein, 249 aa, synthetic construct
  REGION 1..249: note = Description of Artificial Sequence: Synthetic polypeptide
  REGION 1..249: note = XENP018682 1G6_H1.182_L1_scFv(GKPGS)4
EVQLVESGGGLVKPGGSLRLSCAASGFTFSNYWMNWVRQAPGKGLEWVGEIRLKSNNYATHYAEPVKGRFTISRDDSKSTVYLQMNSLKTEDTAVYYCTRYQGNYGGYFDVWGAGTLVTVSSGKPGSGKPGSGKPGSGKPGSSIVMTQSPATLSVSPGERATLSCRASQSVSNDVAWYQQKPGQSPRLLINYASHRYTGVPDRFTGSGYGTEFTLTISSLQSEDFAVYFCQQDYSSPRTFGGGTKVEIK

SEQ ID NO: 12665 - protein, 122 aa, synthetic construct
  REGION 1..122: note = Description of Artificial Sequence: Synthetic polypeptide
  REGION 1..122: note = VH of XENP018682
EVQLVESGGGLVKPGGSLRLSCAASGFTFSNYWMNWVRQAPGKGLEWVGEIRLKSNNYATHYAEPVKGRFTISRDDSKSTVYLQMNSLKTEDTAVYYCTRYQGNYGGYFDVWGAGTLVTVSS

SEQ ID NO: 12666 - protein, 107 aa, synthetic construct; identical to SEQ ID NO: 10923
  REGION 1..107: note = Description of Artificial Sequence: Synthetic polypeptide
  REGION 1..107: note = VL of XENP018682

SEQ ID NO: 12667 - protein, 5 aa, synthetic construct
  REGION 1..5: note = Description of Artificial Sequence: Synthetic peptide
  REGION 1..5: note = XENP018682 vhCDR1
NYWMN

SEQ ID NO: 12668 - protein, 19 aa, synthetic construct
  REGION 1..19: note = Description of Artificial Sequence: Synthetic peptide
  REGION 1..19: note = XENP018682 vhCDR2
EIRLKSNNYATHYAEPVKG

SEQ ID NO: 12669 - protein, 11 aa, synthetic construct
  REGION 1..11: note = Description of Artificial Sequence: Synthetic peptide
  REGION 1..11: note = XENP018682 vhCDR3
YQGNYGGYFDV

SEQ ID NO: 12670 - protein, 11 aa, synthetic construct
  REGION 1..11: note = Description of Artificial Sequence: Synthetic peptide
  REGION 1..11: note = XENP018682 vlCDR1
RASQSVSNDVA

SEQ ID NO: 12671 - protein, 7 aa, synthetic construct
  REGION 1..7: note = Description of Artificial Sequence: Synthetic peptide
  REGION 1..7: note = XENP018682 vlCDR2
YASHRYT

SEQ ID NO: 12672 - protein, 9 aa, synthetic construct
  REGION 1..9: note = Description of Artificial Sequence: Synthetic peptide
  REGION 1..9: note = XENP018682 vlCDR3
QQDYSSPRT

SEQ ID NO: 12673 - protein, 249 aa, synthetic construct
  REGION 1..249: note = Description of Artificial Sequence: Synthetic polypeptide
  REGION 1..249: note = XENP018683 1G6_H1.183_L1_scFv(GKPGS)4
EVQLVESGGGLVKPGGSLRLSCAASGFTFSNYWMNWVRQAPGKGLEWVGEIRLKSNNYATHYAEPVKGRFTISRDDSKSTVYLQMNSLKTEDTAVYYCTRYDGNYGGYFDVWGAGTLVTVSSGKPGSGKPGSGKPGSGKPGSSIVMTQSPATLSVSPGERATLSCRASQSVSNDVAWYQQKPGQSPRLLINYASHRYTGVPDRFTGSGYGTEFTLTISSLQSEDFAVYFCQQDYSSPRTFGGGTKVEIK

SEQ ID NO: 12674 - protein, 122 aa, synthetic construct
  REGION 1..122: note = Description of Artificial Sequence: Synthetic polypeptide
  REGION 1..122: note = VH of XENP018683
EVQLVESGGGLVKPGGSLRLSCAASGFTFSNYWMNWVRQAPGKGLEWVGEIRLKSNNYATHYAEPVKGRFTISRDDSKSTVYLQMNSLKTEDTAVYYCTRYDGNYGGYFDVWGAGTLVTVSS

SEQ ID NO: 12675 - protein, 107 aa, synthetic construct; identical to SEQ ID NO: 10923
  REGION 1..107: note = Description of Artificial Sequence: Synthetic polypeptide
  REGION 1..107: note = VL of XENP018683

SEQ ID NO: 12676 - protein, 5 aa, synthetic construct
  REGION 1..5: note = Description of Artificial Sequence: Synthetic peptide
  REGION 1..5: note = XENP018683 vhCDR1
NYWMN

SEQ ID NO: 12677 - protein, 19 aa, synthetic construct
  REGION 1..19: note = Description of Artificial Sequence: Synthetic peptide
  REGION 1..19: note = XENP018683 vhCDR2
EIRLKSNNYATHYAEPVKG

SEQ ID NO: 12678 - protein, 11 aa, synthetic construct
  REGION 1..11: note = Description of Artificial Sequence: Synthetic peptide
  REGION 1..11: note = XENP018683 vhCDR3
YDGNYGGYFDV

SEQ ID NO: 12679 - protein, 11 aa, synthetic construct
  REGION 1..11: note = Description of Artificial Sequence: Synthetic peptide
  REGION 1..11: note = XENP018683 vlCDR1
RASQSVSNDVA

SEQ ID NO: 12680 - protein, 7 aa, synthetic construct
  REGION 1..7: note = Description of Artificial Sequence: Synthetic peptide
  REGION 1..7: note = XENP018683 vlCDR2
YASHRYT

SEQ ID NO: 12681 - protein, 9 aa, synthetic construct
  REGION 1..9: note = Description of Artificial Sequence: Synthetic peptide
  REGION 1..9: note = XENP018683 vlCDR3
QQDYSSPRT

SEQ ID NO: 12682 - protein, 249 aa, synthetic construct
  REGION 1..249: note = Description of Artificial Sequence: Synthetic polypeptide
  REGION 1..249: note = XENP018684 1G6_H1.184_L1_scFv(GKPGS)4
EVQLVESGGGLVKPGGSLRLSCAASGFTFSNYWMNWVRQAPGKGLEWVGEIRLKSNNYATHYAEPVKGRFTISRDDSKSTVYLQMNSLKTEDTAVYYCTRYKGNYGGYFDVWGAGTLVTVSSGKPGSGKPGSGKPGSGKPGSSIVMTQSPATLSVSPGERATLSCRASQSVSNDVAWYQQKPGQSPRLLINYASHRYTGVPDRFTGSGYGTEFTLTISSLQSEDFAVYFCQQDYSSPRTFGGGTKVEIK

SEQ ID NO: 12683 - protein, 122 aa, synthetic construct
  REGION 1..122: note = Description of Artificial Sequence: Synthetic polypeptide
  REGION 1..122: note = VH of XENP018684
EVQLVESGGGLVKPGGSLRLSCAASGFTFSNYWMNWVRQAPGKGLEWVGEIRLKSNNYATHYAEPVKGRFTISRDDSKSTVYLQMNSLKTEDTAVYYCTRYKGNYGGYFDVWGAGTLVTVSS

SEQ ID NO: 12684 - protein, 107 aa, synthetic construct; identical to SEQ ID NO: 10923
  REGION 1..107: note = Description of Artificial Sequence: Synthetic polypeptide
  REGION 1..107: note = VL of XENP018684

SEQ ID NO: 12685 - protein, 5 aa, synthetic construct
  REGION 1..5: note = Description of Artificial Sequence: Synthetic peptide
  REGION 1..5: note = XENP018684 vhCDR1
NYWMN

SEQ ID NO: 12686 - protein, 19 aa, synthetic construct
  REGION 1..19: note = Description of Artificial Sequence: Synthetic peptide
  REGION 1..19: note = XENP018684 vhCDR2
EIRLKSNNYATHYAEPVKG

SEQ ID NO: 12687 - protein, 11 aa, synthetic construct
  REGION 1..11: note = Description of Artificial Sequence: Synthetic peptide
  REGION 1..11: note = XENP018684 vhCDR3
YKGNYGGYFDV

SEQ ID NO: 12688 - protein, 11 aa, synthetic construct
  REGION 1..11: note = Description of Artificial Sequence: Synthetic peptide
  REGION 1..11: note = XENP018684 vlCDR1
RASQSVSNDVA

SEQ ID NO: 12689 - protein, 7 aa, synthetic construct
  REGION 1..7: note = Description of Artificial Sequence: Synthetic peptide
  REGION 1..7: note = XENP018684 vlCDR2
YASHRYT

SEQ ID NO: 12690 - protein, 9 aa, synthetic construct
  REGION 1..9: note = Description of Artificial Sequence: Synthetic peptide
  REGION 1..9: note = XENP018684 vlCDR3
QQDYSSPRT

SEQ ID NO: 12691 - protein, 249 aa, synthetic construct
  REGION 1..249: note = Description of Artificial Sequence: Synthetic polypeptide
  REGION 1..249: note = XENP018685 1G6_H1.185_L1_scFv(GKPGS)4
EVQLVESGGGLVKPGGSLRLSCAASGFTFSNYWMNWVRQAPGKGLEWVGEIRLKSNNYATHYAEPVKGRFTISRDDSKSTVYLQMNSLKTEDTAVYYCTRYYANYGGYFDVWGAGTLVTVSSGKPGSGKPGSGKPGSGKPGSSIVMTQSPATLSVSPGERATLSCRASQSVSNDVAWYQQKPGQSPRLLINYASHRYTGVPDRFTGSGYGTEFTLTISSLQSEDFAVYFCQQDYSSPRTFGGGTKVEIK

SEQ ID NO: 12692 - protein, 122 aa, synthetic construct
  REGION 1..122: note = Description of Artificial Sequence: Synthetic polypeptide
  REGION 1..122: note = VH of XENP018685
EVQLVESGGGLVKPGGSLRLSCAASGFTFSNYWMNWVRQAPGKGLEWVGEIRLKSNNYATHYAEPVKGRFTISRDDSKSTVYLQMNSLKTEDTAVYYCTRYYANYGGYFDVWGAGTLVTVSS

SEQ ID NO: 12693 - protein, 107 aa, synthetic construct; identical to SEQ ID NO: 10923
  REGION 1..107: note = Description of Artificial Sequence: Synthetic polypeptide
  REGION 1..107: note = VL of XENP018685

SEQ ID NO: 12694 - protein, 5 aa, synthetic construct
  REGION 1..5: note = Description of Artificial Sequence: Synthetic peptide
  REGION 1..5: note = XENP018685 vhCDR1
NYWMN

SEQ ID NO: 12695 - protein, 19 aa, synthetic construct
  REGION 1..19: note = Description of Artificial Sequence: Synthetic peptide
  REGION 1..19: note = XENP018685 vhCDR2
EIRLKSNNYATHYAEPVKG

SEQ ID NO: 12696 - protein, 11 aa, synthetic construct
  REGION 1..11: note = Description of Artificial Sequence: Synthetic peptide
  REGION 1..11: note = XENP018685 vhCDR3
YYANYGGYFDV

SEQ ID NO: 12697 - protein, 11 aa, synthetic construct
  REGION 1..11: note = Description of Artificial Sequence: Synthetic peptide
  REGION 1..11: note = XENP018685 vlCDR1
RASQSVSNDVA

SEQ ID NO: 12698 - protein, 7 aa, synthetic construct
  REGION 1..7: note = Description of Artificial Sequence: Synthetic peptide
  REGION 1..7: note = XENP018685 vlCDR2
YASHRYT

SEQ ID NO: 12699 - protein, 9 aa, synthetic construct
  REGION 1..9: note = Description of Artificial Sequence: Synthetic peptide
  REGION 1..9: note = XENP018685 vlCDR3
QQDYSSPRT

SEQ ID NO: 12700 - protein, 249 aa, synthetic construct
  REGION 1..249: note = Description of Artificial Sequence: Synthetic polypeptide
  REGION 1..249: note = XENP018686 1G6_H1.186_L1_scFv(GKPGS)4
EVQLVESGGGLVKPGGSLRLSCAASGFTFSNYWMNWVRQAPGKGLEWVGEIRLKSNNYATHYAEPVKGRFTISRDDSKSTVYLQMNSLKTEDTAVYYCTRYYSNYGGYFDVWGAGTLVTVSSGKPGSGKPGSGKPGSGKPGSSIVMTQSPATLSVSPGERATLSCRASQSVSNDVAWYQQKPGQSPRLLINYASHRYTGVPDRFTGSGYGTEFTLTISSLQSEDFAVYFCQQDYSSPRTFGGGTKVEIK

SEQ ID NO: 12701 - protein, 122 aa, synthetic construct
  REGION 1..122: note = Description of Artificial Sequence: Synthetic polypeptide
  REGION 1..122: note = VH of XENP018686
EVQLVESGGGLVKPGGSLRLSCAASGFTFSNYWMNWVRQAPGKGLEWVGEIRLKSNNYATHYAEPVKGRFTISRDDSKSTVYLQMNSLKTEDTAVYYCTRYYSNYGGYFDVWGAGTLVTVSS

SEQ ID NO: 12702 - protein, 107 aa, synthetic construct; identical to SEQ ID NO: 10923
  REGION 1..107: note = Description of Artificial Sequence: Synthetic polypeptide
  REGION 1..107: note = VL of XENP018686

SEQ ID NO: 12703 - protein, 5 aa, synthetic construct
  REGION 1..5: note = Description of Artificial Sequence: Synthetic peptide
  REGION 1..5: note = XENP018686 vhCDR1
NYWMN

SEQ ID NO: 12704 - protein, 19 aa, synthetic construct
  REGION 1..19: note = Description of Artificial Sequence: Synthetic peptide
  REGION 1..19: note = XENP018686 vhCDR2
EIRLKSNNYATHYAEPVKG

SEQ ID NO: 12705 - protein, 11 aa, synthetic construct
  REGION 1..11: note = Description of Artificial Sequence: Synthetic peptide
  REGION 1..11: note = XENP018686 vhCDR3
YYSNYGGYFDV

SEQ ID NO: 12706 - protein, 11 aa, synthetic construct
  REGION 1..11: note = Description of Artificial Sequence: Synthetic peptide
  REGION 1..11: note = XENP018686 vlCDR1
RASQSVSNDVA

SEQ ID NO: 12707 - protein, 7 aa, synthetic construct
  REGION 1..7: note = Description of Artificial Sequence: Synthetic peptide
  REGION 1..7: note = XENP018686 vlCDR2
YASHRYT

SEQ ID NO: 12708 - protein, 9 aa, synthetic construct
  REGION 1..9: note = Description of Artificial Sequence: Synthetic peptide
  REGION 1..9: note = XENP018686 vlCDR3
QQDYSSPRT

SEQ ID NO: 12709 - protein, 249 aa, synthetic construct
  REGION 1..249: note = Description of Artificial Sequence: Synthetic polypeptide
  REGION 1..249: note = XENP018687 1G6_H1.187_L1_scFv(GKPGS)4
EVQLVESGGGLVKPGGSLRLSCAASGFTFSNYWMNWVRQAPGKGLEWVGEIRLKSNNYATHYAEPVKGRFTISRDDSKSTVYLQMNSLKTEDTAVYYCTRYYTNYGGYFDVWGAGTLVTVSSGKPGSGKPGSGKPGSGKPGSSIVMTQSPATLSVSPGERATLSCRASQSVSNDVAWYQQKPGQSPRLLINYASHRYTGVPDRFTGSGYGTEFTLTISSLQSEDFAVYFCQQDYSSPRTFGGGTKVEIK

SEQ ID NO: 12710 - protein, 122 aa, synthetic construct
  REGION 1..122: note = Description of Artificial Sequence: Synthetic polypeptide
  REGION 1..122: note = VH of XENP018687
EVQLVESGGGLVKPGGSLRLSCAASGFTFSNYWMNWVRQAPGKGLEWVGEIRLKSNNYATHYAEPVKGRFTISRDDSKSTVYLQMNSLKTEDTAVYYCTRYYTNYGGYFDVWGAGTLVTVSS

SEQ ID NO: 12711 - protein, 107 aa, synthetic construct; identical to SEQ ID NO: 10923
  REGION 1..107: note = Description of Artificial Sequence: Synthetic polypeptide
  REGION 1..107: note = VL of XENP018687

SEQ ID NO: 12712 - protein, 5 aa, synthetic construct
  REGION 1..5: note = Description of Artificial Sequence: Synthetic peptide
  REGION 1..5: note = XENP018687 vhCDR1
NYWMN

SEQ ID NO: 12713 - protein, 19 aa, synthetic construct
  REGION 1..19: note = Description of Artificial Sequence: Synthetic peptide
  REGION 1..19: note = XENP018687 vhCDR2
EIRLKSNNYATHYAEPVKG

SEQ ID NO: 12714 - protein, 11 aa, synthetic construct
  REGION 1..11: note = Description of Artificial Sequence: Synthetic peptide
  REGION 1..11: note = XENP018687 vhCDR3
YYTNYGGYFDV

SEQ ID NO: 12715 - protein, 11 aa, synthetic construct
  REGION 1..11: note = Description of Artificial Sequence: Synthetic peptide
  REGION 1..11: note = XENP018687 vlCDR1
RASQSVSNDVA

SEQ ID NO: 12716 - protein, 7 aa, synthetic construct
  REGION 1..7: note = Description of Artificial Sequence: Synthetic peptide
  REGION 1..7: note = XENP018687 vlCDR2
YASHRYT

SEQ ID NO: 12717 - protein, 9 aa, synthetic construct
  REGION 1..9: note = Description of Artificial Sequence: Synthetic peptide
  REGION 1..9: note = XENP018687 vlCDR3
QQDYSSPRT

SEQ ID NO: 12718 - protein, 249 aa, synthetic construct
  REGION 1..249: note = Description of Artificial Sequence: Synthetic polypeptide
  REGION 1..249: note = XENP018688 1G6_H1.188_L1_scFv(GKPGS)4
EVQLVESGGGLVKPGGSLRLSCAASGFTFSNYWMNWVRQAPGKGLEWVGEIRLKSNNYATHYAEPVKGRFTISRDDSKSTVYLQMNSLKTEDTAVYYCTRYYQNYGGYFDVWGAGTLVTVSSGKPGSGKPGSGKPGSGKPGSSIVMTQSPATLSVSPGERATLSCRASQSVSNDVAWYQQKPGQSPRLLINYASHRYTGVPDRFTGSGYGTEFTLTISSLQSEDFAVYFCQQDYSSPRTFGGGTKVEIK

SEQ ID NO: 12719 - protein, 122 aa, synthetic construct
  REGION 1..122: note = Description of Artificial Sequence: Synthetic polypeptide
  REGION 1..122: note = VH of XENP018688
EVQLVESGGGLVKPGGSLRLSCAASGFTFSNYWMNWVRQAPGKGLEWVGEIRLKSNNYATHYAEPVKGRFTISRDDSKSTVYLQMNSLKTEDTAVYYCTRYYQNYGGYFDVWGAGTLVTVSS

SEQ ID NO: 12720 - protein, 107 aa, synthetic construct; identical to SEQ ID NO: 10923
  REGION 1..107: note = Description of Artificial Sequence: Synthetic polypeptide
  REGION 1..107: note = VL of XENP018688

SEQ ID NO: 12721 - protein, 5 aa, synthetic construct
  REGION 1..5: note = Description of Artificial Sequence: Synthetic peptide
  REGION 1..5: note = XENP018688 vhCDR1
NYWMN

SEQ ID NO: 12722 - protein, 19 aa, synthetic construct
  REGION 1..19: note = Description of Artificial Sequence: Synthetic peptide
  REGION 1..19: note = XENP018688 vhCDR2
EIRLKSNNYATHYAEPVKG

SEQ ID NO: 12723 - protein, 11 aa, synthetic construct
  REGION 1..11: note = Description of Artificial Sequence: Synthetic peptide
  REGION 1..11: note = XENP018688 vhCDR3
YYQNYGGYFDV

SEQ ID NO: 12724 - protein, 11 aa, synthetic construct
  REGION 1..11: note = Description of Artificial Sequence: Synthetic peptide
  REGION 1..11: note = XENP018688 vlCDR1
RASQSVSNDVA

SEQ ID NO: 12725 - protein, 7 aa, synthetic construct
  REGION 1..7: note = Description of Artificial Sequence: Synthetic peptide
  REGION 1..7: note = XENP018688 vlCDR2
YASHRYT

SEQ ID NO: 12726 - protein, 9 aa, synthetic construct
  REGION 1..9: note = Description of Artificial Sequence: Synthetic peptide
  REGION 1..9: note = XENP018688 vlCDR3
QQDYSSPRT

SEQ ID NO: 12727 - protein, 249 aa, synthetic construct
  REGION 1..249: note = Description of Artificial Sequence: Synthetic polypeptide
  REGION 1..249: note = XENP018689 1G6_H1.189_L1_scFv(GKPGS)4
EVQLVESGGGLVKPGGSLRLSCAASGFTFSNYWMNWVRQAPGKGLEWVGEIRLKSNNYATHYAEPVKGRFTISRDDSKSTVYLQMNSLKTEDTAVYYCTRYYHNYGGYFDVWGAGTLVTVSSGKPGSGKPGSGKPGSGKPGSSIVMTQSPATLSVSPGERATLSCRASQSVSNDVAWYQQKPGQSPRLLINYASHRYTGVPDRFTGSGYGTEFTLTISSLQSEDFAVYFCQQDYSSPRTFGGGTKVEIK

SEQ ID NO: 12728 - protein, 122 aa, synthetic construct
  REGION 1..122: note = Description of Artificial Sequence: Synthetic polypeptide
  REGION 1..122: note = VH of XENP018689
EVQLVESGGGLVKPGGSLRLSCAASGFTFSNYWMNWVRQAPGKGLEWVGEIRLKSNNYATHYAEPVKGRFTISRDDSKSTVYLQMNSLKTEDTAVYYCTRYYHNYGGYFDVWGAGTLVTVSS

SEQ ID NO: 12729 - protein, 107 aa, synthetic construct; identical to SEQ ID NO: 10923
  REGION 1..107: note = Description of Artificial Sequence: Synthetic polypeptide
  REGION 1..107: note = VL of XENP018689

SEQ ID NO: 12730 - protein, 5 aa, synthetic construct
  REGION 1..5: note = Description of Artificial Sequence: Synthetic peptide
  REGION 1..5: note = XENP018689 vhCDR1
NYWMN

SEQ ID NO: 12731 - protein, 19 aa, synthetic construct
  REGION 1..19: note = Description of Artificial Sequence: Synthetic peptide
  REGION 1..19: note = XENP018689 vhCDR2
EIRLKSNNYATHYAEPVKG

SEQ ID NO: 12732 - protein, 11 aa, synthetic construct
  REGION 1..11: note = Description of Artificial Sequence: Synthetic peptide
  REGION 1..11: note = XENP018689 vhCDR3
YYHNYGGYFDV

SEQ ID NO: 12733 - protein, 11 aa, synthetic construct
  REGION 1..11: note = Description of Artificial Sequence: Synthetic peptide
  REGION 1..11: note = XENP018689 vlCDR1
RASQSVSNDVA

SEQ ID NO: 12734 - protein, 7 aa, synthetic construct
  REGION 1..7: note = Description of Artificial Sequence: Synthetic peptide
  REGION 1..7: note = XENP018689 vlCDR2
YASHRYT

SEQ ID NO: 12735 - protein, 9 aa, synthetic construct
  REGION 1..9: note = Description of Artificial Sequence: Synthetic peptide
  REGION 1..9: note = XENP018689 vlCDR3
QQDYSSPRT

SEQ ID NO: 12736 - protein, 249 aa, synthetic construct
  REGION 1..249: note = Description of Artificial Sequence: Synthetic polypeptide
  REGION 1..249: note = XENP018690 1G6_H1.190_L1_scFv(GKPGS)4
EVQLVESGGGLVKPGGSLRLSCAASGFTFSNYWMNWVRQAPGKGLEWVGEIRLKSNNYATHYAEPVKGRFTISRDDSKSTVYLQMNSLKTEDTAVYYCTRYYDNYGGYFDVWGAGTLVTVSSGKPGSGKPGSGKPGSGKPGSSIVMTQSPATLSVSPGERATLSCRASQSVSNDVAWYQQKPGQSPRLLINYASHRYTGVPDRFTGSGYGTEFTLTISSLQSEDFAVYFCQQDYSSPRTFGGGTKVEIK

SEQ ID NO: 12737 - protein, 122 aa, synthetic construct
  REGION 1..122: note = Description of Artificial Sequence: Synthetic polypeptide
  REGION 1..122: note = VH of XENP018690
EVQLVESGGGLVKPGGSLRLSCAASGFTFSNYWMNWVRQAPGKGLEWVGEIRLKSNNYATHYAEPVKGRFTISRDDSKSTVYLQMNSLKTEDTAVYYCTRYYDNYGGYFDVWGAGTLVTVSS

SEQ ID NO: 12738 - protein, 107 aa, synthetic construct; identical to SEQ ID NO: 10923
  REGION 1..107: note = Description of Artificial Sequence: Synthetic polypeptide
  REGION 1..107: note = VL of XENP018690

SEQ ID NO: 12739 - protein, 5 aa, synthetic construct
  REGION 1..5: note = Description of Artificial Sequence: Synthetic peptide
  REGION 1..5: note = XENP018690 vhCDR1
NYWMN

SEQ ID NO: 12740 - protein, 19 aa, synthetic construct
  REGION 1..19: note = Description of Artificial Sequence: Synthetic peptide
  REGION 1..19: note = XENP018690 vhCDR2
EIRLKSNNYATHYAEPVKG

SEQ ID NO: 12741 - protein, 11 aa, synthetic construct
  REGION 1..11: note = Description of Artificial Sequence: Synthetic peptide
  REGION 1..11: note = XENP018690 vhCDR3
YYDNYGGYFDV

SEQ ID NO: 12742 - protein, 11 aa, synthetic construct
  REGION 1..11: note = Description of Artificial Sequence: Synthetic peptide
  REGION 1..11: note = XENP018690 vlCDR1
RASQSVSNDVA

SEQ ID NO: 12743 - protein, 7 aa, synthetic construct
  REGION 1..7: note = Description of Artificial Sequence: Synthetic peptide
  REGION 1..7: note = XENP018690 vlCDR2
YASHRYT

SEQ ID NO: 12744 - protein, 9 aa, synthetic construct
  REGION 1..9: note = Description of Artificial Sequence: Synthetic peptide
  REGION 1..9: note = XENP018690 vlCDR3
QQDYSSPRT

SEQ ID NO: 12745 - protein, 249 aa, synthetic construct
  REGION 1..249: note = Description of Artificial Sequence: Synthetic polypeptide
  REGION 1..249: note = XENP018691 1G6_H1.191_L1_scFv(GKPGS)4
EVQLVESGGGLVKPGGSLRLSCAASGFTFSNYWMNWVRQAPGKGLEWVGEIRLKSNNYATHYAEPVKGRFTISRDDSKSTVYLQMNSLKTEDTAVYYCTRYYKNYGGYFDVWGAGTLVTVSSGKPGSGKPGSGKPGSGKPGSSIVMTQSPATLSVSPGERATLSCRASQSVSNDVAWYQQKPGQSPRLLINYASHRYTGVPDRFTGSGYGTEFTLTISSLQSEDFAVYFCQQDYSSPRTFGGGTKVEIK

SEQ ID NO: 12746 - protein, 122 aa, synthetic construct
  REGION 1..122: note = Description of Artificial Sequence: Synthetic polypeptide
  REGION 1..122: note = VH of XENP018691
EVQLVESGGGLVKPGGSLRLSCAASGFTFSNYWMNWVRQAPGKGLEWVGEIRLKSNNYATHYAEPVKGRFTISRDDSKSTVYLQMNSLKTEDTAVYYCTRYYKNYGGYFDVWGAGTLVTVSS

SEQ ID NO: 12747 - protein, 107 aa, synthetic construct; identical to SEQ ID NO: 10923
  REGION 1..107: note = Description of Artificial Sequence: Synthetic polypeptide
  REGION 1..107: note = VL of XENP018691

SEQ ID NO: 12748 - protein, 5 aa, synthetic construct
  REGION 1..5: note = Description of Artificial Sequence: Synthetic peptide
  REGION 1..5: note = XENP018691 vhCDR1
NYWMN

SEQ ID NO: 12749 - protein, 19 aa, synthetic construct
  REGION 1..19: note = Description of Artificial Sequence: Synthetic peptide
  REGION 1..19: note = XENP018691 vhCDR2
EIRLKSNNYATHYAEPVKG

SEQ ID NO: 12750 - protein, 11 aa, synthetic construct
  REGION 1..11: note = Description of Artificial Sequence: Synthetic peptide
  REGION 1..11: note = XENP018691 vhCDR3
YYKNYGGYFDV

SEQ ID NO: 12751 - protein, 11 aa, synthetic construct
  REGION 1..11: note = Description of Artificial Sequence: Synthetic peptide
  REGION 1..11: note = XENP018691 vlCDR1
RASQSVSNDVA

SEQ ID NO: 12752 - protein, 7 aa, synthetic construct
  REGION 1..7: note = Description of Artificial Sequence: Synthetic peptide
  REGION 1..7: note = XENP018691 vlCDR2
YASHRYT

SEQ ID NO: 12753 - protein, 9 aa, synthetic construct
  REGION 1..9: note = Description of Artificial Sequence: Synthetic peptide
  REGION 1..9: note = XENP018691 vlCDR3
QQDYSSPRT

SEQ ID NO: 12754 - protein, 249 aa, synthetic construct
  REGION 1..249: note = Description of Artificial Sequence: Synthetic polypeptide
  REGION 1..249: note = XENP018692 1G6_H1.192_L1_scFv(GKPGS)4
EVQLVESGGGLVKPGGSLRLSCAASGFTFSNYWMNWVRQAPGKGLEWVGEIRLKSNNYATHYAEPVKGRFTISRDDSKSTVYLQMNSLKTEDTAVYYCTRYYLNYGGYFDVWGAGTLVTVSSGKPGSGKPGSGKPGSGKPGSSIVMTQSPATLSVSPGERATLSCRASQSVSNDVAWYQQKPGQSPRLLINYASHRYTGVPDRFTGSGYGTEFTLTISSLQSEDFAVYFCQQDYSSPRTFGGGTKVEIK

SEQ ID NO: 12755 - protein, 122 aa, synthetic construct
  REGION 1..122: note = Description of Artificial Sequence: Synthetic polypeptide
  REGION 1..122: note = VH of XENP018692
EVQLVESGGGLVKPGGSLRLSCAASGFTFSNYWMNWVRQAPGKGLEWVGEIRLKSNNYATHYAEPVKGRFTISRDDSKSTVYLQMNSLKTEDTAVYYCTRYYLNYGGYFDVWGAGTLVTVSS

SEQ ID NO: 12756 - protein, 107 aa, synthetic construct; identical to SEQ ID NO: 10923
  REGION 1..107: note = Description of Artificial Sequence: Synthetic polypeptide
  REGION 1..107: note = VL of XENP018692

SEQ ID NO: 12757 - protein, 5 aa, synthetic construct
  REGION 1..5: note = Description of Artificial Sequence: Synthetic peptide
  REGION 1..5: note = XENP018692 vhCDR1
NYWMN

SEQ ID NO: 12758 - protein, 19 aa, synthetic construct
  REGION 1..19: note = Description of Artificial Sequence: Synthetic peptide
  REGION 1..19: note = XENP018692 vhCDR2
EIRLKSNNYATHYAEPVKG

SEQ ID NO: 12759 - protein, 11 aa, synthetic construct
  REGION 1..11: note = Description of Artificial Sequence: Synthetic peptide
  REGION 1..11: note = XENP018692 vhCDR3
YYLNYGGYFDV

SEQ ID NO: 12760 - protein, 11 aa, synthetic construct
  REGION 1..11: note = Description of Artificial Sequence: Synthetic peptide
  REGION 1..11: note = XENP018692 vlCDR1
RASQSVSNDVA

SEQ ID NO: 12761 - protein, 7 aa, synthetic construct
  REGION 1..7: note = Description of Artificial Sequence: Synthetic peptide
  REGION 1..7: note = XENP018692 vlCDR2
YASHRYT

SEQ ID NO: 12762 - protein, 9 aa, synthetic construct
  REGION 1..9: note = Description of Artificial Sequence: Synthetic peptide
  REGION 1..9: note = XENP018692 vlCDR3
QQDYSSPRT

SEQ ID NO: 12763 - protein, 249 aa, synthetic construct
  REGION 1..249: note = Description of Artificial Sequence: Synthetic polypeptide
  REGION 1..249: note = XENP018693 1G6_H1.193_L1_scFv(GKPGS)4
EVQLVESGGGLVKPGGSLRLSCAASGFTFSNYWMNWVRQAPGKGLEWVGEIRLKSNNYATHYAEPVKGRFTISRDDSKSTVYLQMNSLKTEDTAVYYCTRYYFNYGGYFDVWGAGTLVTVSSGKPGSGKPGSGKPGSGKPGSSIVMTQSPATLSVSPGERATLSCRASQSVSNDVAWYQQKPGQSPRLLINYASHRYTGVPDRFTGSGYGTEFTLTISSLQSEDFAVYFCQQDYSSPRTFGGGTKVEIK

SEQ ID NO: 12764 - protein, 122 aa, synthetic construct
  REGION 1..122: note = Description of Artificial Sequence: Synthetic polypeptide
  REGION 1..122: note = VH of XENP018693
EVQLVESGGGLVKPGGSLRLSCAASGFTFSNYWMNWVRQAPGKGLEWVGEIRLKSNNYATHYAEPVKGRFTISRDDSKSTVYLQMNSLKTEDTAVYYCTRYYFNYGGYFDVWGAGTLVTVSS

SEQ ID NO: 12765 - protein, 107 aa, synthetic construct; identical to SEQ ID NO: 10923
  REGION 1..107: note = Description of Artificial Sequence: Synthetic polypeptide
  REGION 1..107: note = VL of XENP018693

SEQ ID NO: 12766 - protein, 5 aa, synthetic construct
  REGION 1..5: note = Description of Artificial Sequence: Synthetic peptide
  REGION 1..5: note = XENP018693 vhCDR1
NYWMN

SEQ ID NO: 12767 - protein, 19 aa, synthetic construct
  REGION 1..19: note = Description of Artificial Sequence: Synthetic peptide
  REGION 1..19: note = XENP018693 vhCDR2
EIRLKSNNYATHYAEPVKG

SEQ ID NO: 12768 - protein, 11 aa, synthetic construct
  REGION 1..11: note = Description of Artificial Sequence: Synthetic peptide
  REGION 1..11: note = XENP018693 vhCDR3
YYFNYGGYFDV

SEQ ID NO: 12769 - protein, 11 aa, synthetic construct
  REGION 1..11: note = Description of Artificial Sequence: Synthetic peptide
  REGION 1..11: note = XENP018693 vlCDR1
RASQSVSNDVA

SEQ ID NO: 12770 - protein, 7 aa, synthetic construct
  REGION 1..7: note = Description of Artificial Sequence: Synthetic peptide
  REGION 1..7: note = XENP018693 vlCDR2
YASHRYT

SEQ ID NO: 12771 - protein, 9 aa, synthetic construct
  REGION 1..9: note = Description of Artificial Sequence: Synthetic peptide
  REGION 1..9: note = XENP018693 vlCDR3
QQDYSSPRT

SEQ ID NO: 12772 - protein, 249 aa, synthetic construct
  REGION 1..249: note = Description of Artificial Sequence: Synthetic polypeptide
  REGION 1..249: note = XENP018694 1G6_H1.194_L1_scFv(GKPGS)4
EVQLVESGGGLVKPGGSLRLSCAASGFTFSNYWMNWVRQAPGKGLEWVGEIRLKSNNYATHYAEPVKGRFTISRDDSKSTVYLQMNSLKTEDTAVYYCTRYYGDYGGYFDVWGAGTLVTVSSGKPGSGKPGSGKPGSGKPGSSIVMTQSPATLSVSPGERATLSCRASQSVSNDVAWYQQKPGQSPRLLINYASHRYTGVPDRFTGSGYGTEFTLTISSLQSEDFAVYFCQQDYSSPRTFGGGTKVEIK

SEQ ID NO: 12773 - protein, 122 aa, synthetic construct
  REGION 1..122: note = Description of Artificial Sequence: Synthetic polypeptide
  REGION 1..122: note = VH of XENP018694
EVQLVESGGGLVKPGGSLRLSCAASGFTFSNYWMNWVRQAPGKGLEWVGEIRLKSNNYATHYAEPVKGRFTISRDDSKSTVYLQMNSLKTEDTAVYYCTRYYGDYGGYFDVWGAGTLVTVSS

SEQ ID NO: 12774 - protein, 107 aa, synthetic construct; identical to SEQ ID NO: 10923
  REGION 1..107: note = Description of Artificial Sequence: Synthetic polypeptide
  REGION 1..107: note = VL of XENP018694

SEQ ID NO: 12775 - protein, 5 aa, synthetic construct
  REGION 1..5: note = Description of Artificial Sequence: Synthetic peptide
  REGION 1..5: note = XENP018694 vhCDR1
NYWMN

SEQ ID NO: 12776 - protein, 19 aa, synthetic construct
  REGION 1..19: note = Description of Artificial Sequence: Synthetic peptide
  REGION 1..19: note = XENP018694 vhCDR2
EIRLKSNNYATHYAEPVKG

SEQ ID NO: 12777 - protein, 11 aa, synthetic construct
  REGION 1..11: note = Description of Artificial Sequence: Synthetic peptide
  REGION 1..11: note = XENP018694 vhCDR3
YYGDYGGYFDV

SEQ ID NO: 12778 - protein, 11 aa, synthetic construct
  REGION 1..11: note = Description of Artificial Sequence: Synthetic peptide
  REGION 1..11: note = XENP018694 vlCDR1
RASQSVSNDVA

SEQ ID NO: 12779 - protein, 7 aa, synthetic construct
  REGION 1..7: note = Description of Artificial Sequence: Synthetic peptide
  REGION 1..7: note = XENP018694 vlCDR2
YASHRYT

SEQ ID NO: 12780 - protein, 9 aa, synthetic construct
  REGION 1..9: note = Description of Artificial Sequence: Synthetic peptide
  REGION 1..9: note = XENP018694 vlCDR3
QQDYSSPRT

SEQ ID NO: 12781 - protein, 249 aa, synthetic construct
  REGION 1..249: note = Description of Artificial Sequence: Synthetic polypeptide
  REGION 1..249: note = XENP018695 1G6_H1.195_L1_scFv(GKPGS)4
EVQLVESGGGLVKPGGSLRLSCAASGFTFSNYWMNWVRQAPGKGLEWVGEIRLKSNNYATHYAEPVKGRFTISRDDSKSTVYLQMNSLKTEDTAVYYCTRYYGHYGGYFDVWGAGTLVTVSSGKPGSGKPGSGKPGSGKPGSSIVMTQSPATLSVSPGERATLSCRASQSVSNDVAWYQQKPGQSPRLLINYASHRYTGVPDRFTGSGYGTEFTLTISSLQSEDFAVYFCQQDYSSPRTFGGGTKVEIK

SEQ ID NO: 12782 - protein, 122 aa, synthetic construct
  REGION 1..122: note = Description of Artificial Sequence: Synthetic polypeptide
  REGION 1..122: note = VH of XENP018695
EVQLVESGGGLVKPGGSLRLSCAASGFTFSNYWMNWVRQAPGKGLEWVGEIRLKSNNYATHYAEPVKGRFTISRDDSKSTVYLQMNSLKTEDTAVYYCTRYYGHYGGYFDVWGAGTLVTVSS

SEQ ID NO: 12783 - protein, 107 aa, synthetic construct; identical to SEQ ID NO: 10923
  REGION 1..107: note = Description of Artificial Sequence: Synthetic polypeptide
  REGION 1..107: note = VL of XENP018695

SEQ ID NO: 12784 - protein, 5 aa, synthetic construct
  REGION 1..5: note = Description of Artificial Sequence: Synthetic peptide
  REGION 1..5: note = XENP018695 vhCDR1
NYWMN

SEQ ID NO: 12785 - protein, 19 aa, synthetic construct
  REGION 1..19: note = Description of Artificial Sequence: Synthetic peptide
  REGION 1..19: note = XENP018695 vhCDR2
EIRLKSNNYATHYAEPVKG

SEQ ID NO: 12786 - protein, 11 aa, synthetic construct
  REGION 1..11: note = Description of Artificial Sequence: Synthetic peptide
  REGION 1..11: note = XENP018695 vhCDR3
YYGHYGGYFDV

SEQ ID NO: 12787 - protein, 11 aa, synthetic construct
  REGION 1..11: note = Description of Artificial Sequence: Synthetic peptide
  REGION 1..11: note = XENP018695 vlCDR1
RASQSVSNDVA

SEQ ID NO: 12788 - protein, 7 aa, synthetic construct
  REGION 1..7: note = Description of Artificial Sequence: Synthetic peptide
  REGION 1..7: note = XENP018695 vlCDR2
YASHRYT

SEQ ID NO: 12789 - protein, 9 aa, synthetic construct
  REGION 1..9: note = Description of Artificial Sequence: Synthetic peptide
  REGION 1..9: note = XENP018695 vlCDR3
QQDYSSPRT

SEQ ID NO: 12790 - protein, 249 aa, synthetic construct
  REGION 1..249: note = Description of Artificial Sequence: Synthetic polypeptide
  REGION 1..249: note = XENP018696 1G6_H1.196_L1_scFv(GKPGS)4
EVQLVESGGGLVKPGGSLRLSCAASGFTFSNYWMNWVRQAPGKGLEWVGEIRLKSNNYATHYAEPVKGRFTISRDDSKSTVYLQMNSLKTEDTAVYYCTRYYGEYGGYFDVWGAGTLVTVSSGKPGSGKPGSGKPGSGKPGSSIVMTQSPATLSVSPGERATLSCRASQSVSNDVAWYQQKPGQSPRLLINYASHRYTGVPDRFTGSGYGTEFTLTISSLQSEDFAVYFCQQDYSSPRTFGGGTKVEIK

SEQ ID NO: 12791 - protein, 122 aa, synthetic construct
  REGION 1..122: note = Description of Artificial Sequence: Synthetic polypeptide
  REGION 1..122: note = VH of XENP018696
EVQLVESGGGLVKPGGSLRLSCAASGFTFSNYWMNWVRQAPGKGLEWVGEIRLKSNNYATHYAEPVKGRFTISRDDSKSTVYLQMNSLKTEDTAVYYCTRYYGEYGGYFDVWGAGTLVTVSS

SEQ ID NO: 12792 - protein, 107 aa, synthetic construct; identical to SEQ ID NO: 10923
  REGION 1..107: note = Description of Artificial Sequence: Synthetic polypeptide
  REGION 1..107: note = VL of XENP018696

SEQ ID NO: 12793 - protein, 5 aa, synthetic construct
  REGION 1..5: note = Description of Artificial Sequence: Synthetic peptide
  REGION 1..5: note = XENP018696 vhCDR1
NYWMN

SEQ ID NO: 12794 - protein, 19 aa, synthetic construct
  REGION 1..19: note = Description of Artificial Sequence: Synthetic peptide
  REGION 1..19: note = XENP018696 vhCDR2
EIRLKSNNYATHYAEPVKG

SEQ ID NO: 12795 - protein, 11 aa, synthetic construct
  REGION 1..11: note = Description of Artificial Sequence: Synthetic peptide
  REGION 1..11: note = XENP018696 vhCDR3
YYGEYGGYFDV

SEQ ID NO: 12796 - protein, 11 aa, synthetic construct
  REGION 1..11: note = Description of Artificial Sequence: Synthetic peptide
  REGION 1..11: note = XENP018696 vlCDR1
RASQSVSNDVA

SEQ ID NO: 12797 - protein, 7 aa, synthetic construct
  REGION 1..7: note = Description of Artificial Sequence: Synthetic peptide
  REGION 1..7: note = XENP018696 vlCDR2
YASHRYT

SEQ ID NO: 12798 - protein, 9 aa, synthetic construct
  REGION 1..9: note = Description of Artificial Sequence: Synthetic peptide
  REGION 1..9: note = XENP018696 vlCDR3
QQDYSSPRT

SEQ ID NO: 12799 - protein, 249 aa, synthetic construct
  REGION 1..249: note = Description of Artificial Sequence: Synthetic polypeptide
  REGION 1..249: note = XENP018701 1G6_H1.197_L1_scFv(GKPGS)4
EVQLVESGGGLVKPGGSLRLSCAASGFTFSNYWMNWVRQAPGKGLEWVGEIRLKSNNYATHYAEPVKGRFTISRDDSKSTVYLQMNSLKTEDTAVYYCTRYYGSYGGYFDVWGAGTLVTVSSGKPGSGKPGSGKPGSGKPGSSIVMTQSPATLSVSPGERATLSCRASQSVSNDVAWYQQKPGQSPRLLINYASHRYTGVPDRFTGSGYGTEFTLTISSLQSEDFAVYFCQQDYSSPRTFGGGTKVEIK

SEQ ID NO: 12800 - protein, 122 aa, synthetic construct
  REGION 1..122: note = Description of Artificial Sequence: Synthetic polypeptide
  REGION 1..122: note = VH of XENP018701
EVQLVESGGGLVKPGGSLRLSCAASGFTFSNYWMNWVRQAPGKGLEWVGEIRLKSNNYATHYAEPVKGRFTISRDDSKSTVYLQMNSLKTEDTAVYYCTRYYGSYGGYFDVWGAGTLVTVSS

SEQ ID NO: 12801 - protein, 107 aa, synthetic construct; identical to SEQ ID NO: 10923
  REGION 1..107: note = Description of Artificial Sequence: Synthetic polypeptide
  REGION 1..107: note = VL of XENP018701

SEQ ID NO: 12802 - protein, 5 aa, synthetic construct
  REGION 1..5: note = Description of Artificial Sequence: Synthetic peptide
  REGION 1..5: note = XENP018701 vhCDR1
NYWMN

SEQ ID NO: 12803 - protein, 19 aa, synthetic construct
  REGION 1..19: note = Description of Artificial Sequence: Synthetic peptide
  REGION 1..19: note = XENP018701 vhCDR2
EIRLKSNNYATHYAEPVKG

SEQ ID NO: 12804 - protein, 11 aa, synthetic construct
  REGION 1..11: note = Description of Artificial Sequence: Synthetic peptide
  REGION 1..11: note = XENP018701 vhCDR3
YYGSYGGYFDV

SEQ ID NO: 12805 - protein, 11 aa, synthetic construct
  REGION 1..11: note = Description of Artificial Sequence: Synthetic peptide
  REGION 1..11: note = XENP018701 vlCDR1
RASQSVSNDVA

SEQ ID NO: 12806 - protein, 7 aa, synthetic construct
  REGION 1..7: note = Description of Artificial Sequence: Synthetic peptide
  REGION 1..7: note = XENP018701 vlCDR2
YASHRYT

SEQ ID NO: 12807 - protein, 9 aa, synthetic construct
  REGION 1..9: note = Description of Artificial Sequence: Synthetic peptide
  REGION 1..9: note = XENP018701 vlCDR3
QQDYSSPRT

SEQ ID NO: 12808 - protein, 249 aa, synthetic construct
  REGION 1..249: note = Description of Artificial Sequence: Synthetic polypeptide
  REGION 1..249: note = XENP018702 1G6_H1.198_L1_scFv(GKPGS)4
EVQLVESGGGLVKPGGSLRLSCAASGFTFSNYWMNWVRQAPGKGLEWVGEIRLKSNNYATHYAEPVKGRFTISRDDSKSTVYLQMNSLKTEDTAVYYCTRYYGRYGGYFDVWGAGTLVTVSSGKPGSGKPGSGKPGSGKPGSSIVMTQSPATLSVSPGERATLSCRASQSVSNDVAWYQQKPGQSPRLLINYASHRYTGVPDRFTGSGYGTEFTLTISSLQSEDFAVYFCQQDYSSPRTFGGGTKVEIK

SEQ ID NO: 12809 - protein, 122 aa, synthetic construct
  REGION 1..122: note = Description of Artificial Sequence: Synthetic polypeptide
  REGION 1..122: note = VH of XENP018702
EVQLVESGGGLVKPGGSLRLSCAASGFTFSNYWMNWVRQAPGKGLEWVGEIRLKSNNYATHYAEPVKGRFTISRDDSKSTVYLQMNSLKTEDTAVYYCTRYYGRYGGYFDVWGAGTLVTVSS

SEQ ID NO: 12810 - protein, 107 aa, synthetic construct; identical to SEQ ID NO: 10923
  REGION 1..107: note = Description of Artificial Sequence: Synthetic polypeptide
  REGION 1..107: note = VL of XENP018702

SEQ ID NO: 12811 - protein, 5 aa, synthetic construct
  REGION 1..5: note = Description of Artificial Sequence: Synthetic peptide
  REGION 1..5: note = XENP018702 vhCDR1
NYWMN

SEQ ID NO: 12812 - protein, 19 aa, synthetic construct
  REGION 1..19: note = Description of Artificial Sequence: Synthetic peptide
  REGION 1..19: note = XENP018702 vhCDR2
EIRLKSNNYATHYAEPVKG

SEQ ID NO: 12813 - protein, 11 aa, synthetic construct
  REGION 1..11: note = Description of Artificial Sequence: Synthetic peptide
  REGION 1..11: note = XENP018702 vhCDR3
YYGRYGGYFDV

SEQ ID NO: 12814 - protein, 11 aa, synthetic construct
  REGION 1..11: note = Description of Artificial Sequence: Synthetic peptide
  REGION 1..11: note = XENP018702 vlCDR1
RASQSVSNDVA

SEQ ID NO: 12815 - protein, 7 aa, synthetic construct
  REGION 1..7: note = Description of Artificial Sequence: Synthetic peptide
  REGION 1..7: note = XENP018702 vlCDR2
YASHRYT

SEQ ID NO: 12816 - protein, 9 aa, synthetic construct
  REGION 1..9: note = Description of Artificial Sequence: Synthetic peptide
  REGION 1..9: note = XENP018702 vlCDR3
QQDYSSPRT

SEQ ID NO: 12817 - protein, 249 aa, synthetic construct
  REGION 1..249: note = Description of Artificial Sequence: Synthetic polypeptide
  REGION 1..249: note = XENP018703 1G6_H1.199_L1_scFv(GKPGS)4
EVQLVESGGGLVKPGGSLRLSCAASGFTFSNYWMNWVRQAPGKGLEWVGEIRLKSNNYATHYAEPVKGRFTISRDDSKSTVYLQMNSLKTEDTAVYYCTRYYGLYGGYFDVWGAGTLVTVSSGKPGSGKPGSGKPGSGKPGSSIVMTQSPATLSVSPGERATLSCRASQSVSNDVAWYQQKPGQSPRLLINYASHRYTGVPDRFTGSGYGTEFTLTISSLQSEDFAVYFCQQDYSSPRTFGGGTKVEIK

SEQ ID NO: 12818 - protein, 122 aa, synthetic construct
  REGION 1..122: note = Description of Artificial Sequence: Synthetic polypeptide
  REGION 1..122: note = VH of XENP018703
EVQLVESGGGLVKPGGSLRLSCAASGFTFSNYWMNWVRQAPGKGLEWVGEIRLKSNNYATHYAEPVKGRFTISRDDSKSTVYLQMNSLKTEDTAVYYCTRYYGLYGGYFDVWGAGTLVTVSS

SEQ ID NO: 12819 - protein, 107 aa, synthetic construct; identical to SEQ ID NO: 10923
  REGION 1..107: note = Description of Artificial Sequence: Synthetic polypeptide
  REGION 1..107: note = VL of XENP018703

SEQ ID NO: 12820 - protein, 5 aa, synthetic construct
  REGION 1..5: note = Description of Artificial Sequence: Synthetic peptide
  REGION 1..5: note = XENP018703 vhCDR1
NYWMN

SEQ ID NO: 12821 - protein, 19 aa, synthetic construct
  REGION 1..19: note = Description of Artificial Sequence: Synthetic peptide
  REGION 1..19: note = XENP018703 vhCDR2
EIRLKSNNYATHYAEPVKG

SEQ ID NO: 12822 - protein, 11 aa, synthetic construct
  REGION 1..11: note = Description of Artificial Sequence: Synthetic peptide
  REGION 1..11: note = XENP018703 vhCDR3
YYGLYGGYFDV

SEQ ID NO: 12823 - protein, 11 aa, synthetic construct
  REGION 1..11: note = Description of Artificial Sequence: Synthetic peptide
  REGION 1..11: note = XENP018703 vlCDR1
RASQSVSNDVA

SEQ ID NO: 12824 - protein, 7 aa, synthetic construct
  REGION 1..7: note = Description of Artificial Sequence: Synthetic peptide
  REGION 1..7: note = XENP018703 vlCDR2
YASHRYT

SEQ ID NO: 12825 - protein, 9 aa, synthetic construct
  REGION 1..9: note = Description of Artificial Sequence: Synthetic peptide
  REGION 1..9: note = XENP018703 vlCDR3
QQDYSSPRT

SEQ ID NO: 12826 - protein, 249 aa, synthetic construct
  REGION 1..249: note = Description of Artificial Sequence: Synthetic polypeptide
  REGION 1..249: note = XENP018704 1G6_H1.200_L1_scFv(GKPGS)4
EVQLVESGGGLVKPGGSLRLSCAASGFTFSNYWMNWVRQAPGKGLEWVGEIRLKSNNYATHYAEPVKGRFTISRDDSKSTVYLQMNSLKTEDTAVYYCTRYYGTYGGYFDVWGAGTLVTVSSGKPGSGKPGSGKPGSGKPGSSIVMTQSPATLSVSPGERATLSCRASQSVSNDVAWYQQKPGQSPRLLINYASHRYTGVPDRFTGSGYGTEFTLTISSLQSEDFAVYFCQQDYSSPRTFGGGTKVEIK

SEQ ID NO: 12827 - protein, 122 aa, synthetic construct
  REGION 1..122: note = Description of Artificial Sequence: Synthetic polypeptide
  REGION 1..122: note = VH of XENP018704
EVQLVESGGGLVKPGGSLRLSCAASGFTFSNYWMNWVRQAPGKGLEWVGEIRLKSNNYATHYAEPVKGRFTISRDDSKSTVYLQMNSLKTEDTAVYYCTRYYGTYGGYFDVWGAGTLVTVSS

SEQ ID NO: 12828 - protein, 107 aa, synthetic construct; identical to SEQ ID NO: 10923
  REGION 1..107: note = Description of Artificial Sequence: Synthetic polypeptide
  REGION 1..107: note = VL of XENP018704

SEQ ID NO: 12829 - protein, 5 aa, synthetic construct
  REGION 1..5: note = Description of Artificial Sequence: Synthetic peptide
  REGION 1..5: note = XENP018704 vhCDR1
NYWMN

SEQ ID NO: 12830 - protein, 19 aa, synthetic construct
  REGION 1..19: note = Description of Artificial Sequence: Synthetic peptide
  REGION 1..19: note = XENP018704 vhCDR2
EIRLKSNNYATHYAEPVKG

SEQ ID NO: 12831 - protein, 11 aa, synthetic construct
  REGION 1..11: note = Description of Artificial Sequence: Synthetic peptide
  REGION 1..11: note = XENP018704 vhCDR3
YYGTYGGYFDV

SEQ ID NO: 12832 - protein, 11 aa, synthetic construct
  REGION 1..11: note = Description of Artificial Sequence: Synthetic peptide
  REGION 1..11: note = XENP018704 vlCDR1
RASQSVSNDVA

SEQ ID NO: 12833 - protein, 7 aa, synthetic construct
  REGION 1..7: note = Description of Artificial Sequence: Synthetic peptide
  REGION 1..7: note = XENP018704 vlCDR2
YASHRYT

SEQ ID NO: 12834 - protein, 9 aa, synthetic construct
  REGION 1..9: note = Description of Artificial Sequence: Synthetic peptide
  REGION 1..9: note = XENP018704 vlCDR3
QQDYSSPRT

SEQ ID NO: 12835 - protein, 249 aa, synthetic construct
  REGION 1..249: note = Description of Artificial Sequence: Synthetic polypeptide
  REGION 1..249: note = XENP018705 1G6_H1.201_L1_scFv(GKPGS)4
EVQLVESGGGLVKPGGSLRLSCAASGFTFSNYWMNWVRQAPGKGLEWVGEIRLKSNNYATHYAEPVKGRFTISRDDSKSTVYLQMNSLKTEDTAVYYCTRYYGGYGGYFDVWGAGTLVTVSSGKPGSGKPGSGKPGSGKPGSSIVMTQSPATLSVSPGERATLSCRASQSVSNDVAWYQQKPGQSPRLLINYASHRYTGVPDRFTGSGYGTEFTLTISSLQSEDFAVYFCQQDYSSPRTFGGGTKVEIK

SEQ ID NO: 12836 - protein, 122 aa, synthetic construct
  REGION 1..122: note = Description of Artificial Sequence: Synthetic polypeptide
  REGION 1..122: note = VH of XENP018705
EVQLVESGGGLVKPGGSLRLSCAASGFTFSNYWMNWVRQAPGKGLEWVGEIRLKSNNYATHYAEPVKGRFTISRDDSKSTVYLQMNSLKTEDTAVYYCTRYYGGYGGYFDVWGAGTLVTVSS

SEQ ID NO: 12837 - protein, 107 aa, synthetic construct; identical to SEQ ID NO: 10923
  REGION 1..107: note = Description of Artificial Sequence: Synthetic polypeptide
  REGION 1..107: note = VL of XENP018705

SEQ ID NO: 12838 - protein, 5 aa, synthetic construct
  REGION 1..5: note = Description of Artificial Sequence: Synthetic peptide
  REGION 1..5: note = XENP018705 vhCDR1
NYWMN

SEQ ID NO: 12839 - protein, 19 aa, synthetic construct
  REGION 1..19: note = Description of Artificial Sequence: Synthetic peptide
  REGION 1..19: note = XENP018705 vhCDR2
EIRLKSNNYATHYAEPVKG

SEQ ID NO: 12840 - protein, 11 aa, synthetic construct
  REGION 1..11: note = Description of Artificial Sequence: Synthetic peptide
  REGION 1..11: note = XENP018705 vhCDR3
YYGGYGGYFDV

SEQ ID NO: 12841 - protein, 11 aa, synthetic construct
  REGION 1..11: note = Description of Artificial Sequence: Synthetic peptide
  REGION 1..11: note = XENP018705 vlCDR1
RASQSVSNDVA

SEQ ID NO: 12842 - protein, 7 aa, synthetic construct
  REGION 1..7: note = Description of Artificial Sequence: Synthetic peptide
  REGION 1..7: note = XENP018705 vlCDR2
YASHRYT

SEQ ID NO: 12843 - protein, 9 aa, synthetic construct
  REGION 1..9: note = Description of Artificial Sequence: Synthetic peptide
  REGION 1..9: note = XENP018705 vlCDR3
QQDYSSPRT

SEQ ID NO: 12844 - protein, 249 aa, synthetic construct
  REGION 1..249: note = Description of Artificial Sequence: Synthetic polypeptide
  REGION 1..249: note = XENP018706 1G6_H1.202_L1_scFv(GKPGS)4
EVQLVESGGGLVKPGGSLRLSCAASGFTFSNYWMNWVRQAPGKGLEWVGEIRLKSNNYATHYAEPVKGRFTISRDDSKSTVYLQMNSLKTEDTAVYYCTRYYGFYGGYFDVWGAGTLVTVSSGKPGSGKPGSGKPGSGKPGSSIVMTQSPATLSVSPGERATLSCRASQSVSNDVAWYQQKPGQSPRLLINYASHRYTGVPDRFTGSGYGTEFTLTISSLQSEDFAVYFCQQDYSSPRTFGGGTKVEIK

SEQ ID NO: 12845 - protein, 122 aa, synthetic construct
  REGION 1..122: note = Description of Artificial Sequence: Synthetic polypeptide
  REGION 1..122: note = VH of XENP018706
EVQLVESGGGLVKPGGSLRLSCAASGFTFSNYWMNWVRQAPGKGLEWVGEIRLKSNNYATHYAEPVKGRFTISRDDSKSTVYLQMNSLKTEDTAVYYCTRYYGFYGGYFDVWGAGTLVTVSS

SEQ ID NO: 12846 - protein, 107 aa, synthetic construct; identical to SEQ ID NO: 10923
  REGION 1..107: note = Description of Artificial Sequence: Synthetic polypeptide
  REGION 1..107: note = VL of XENP018706

SEQ ID NO: 12847 - protein, 5 aa, synthetic construct
  REGION 1..5: note = Description of Artificial Sequence: Synthetic peptide
  REGION 1..5: note = XENP018706 vhCDR1
NYWMN

SEQ ID NO: 12848 - protein, 19 aa, synthetic construct
  REGION 1..19: note = Description of Artificial Sequence: Synthetic peptide
  REGION 1..19: note = XENP018706 vhCDR2
EIRLKSNNYATHYAEPVKG

SEQ ID NO: 12849 - protein, 11 aa, synthetic construct
  REGION 1..11: note = Description of Artificial Sequence: Synthetic peptide
  REGION 1..11: note = XENP018706 vhCDR3
YYGFYGGYFDV

SEQ ID NO: 12850 - protein, 11 aa, synthetic construct
  REGION 1..11: note = Description of Artificial Sequence: Synthetic peptide
  REGION 1..11: note = XENP018706 vlCDR1
RASQSVSNDVA

SEQ ID NO: 12851 - protein, 7 aa, synthetic construct
  REGION 1..7: note = Description of Artificial Sequence: Synthetic peptide
  REGION 1..7: note = XENP018706 vlCDR2
YASHRYT

SEQ ID NO: 12852 - protein, 9 aa, synthetic construct
  REGION 1..9: note = Description of Artificial Sequence: Synthetic peptide
  REGION 1..9: note = XENP018706 vlCDR3
QQDYSSPRT

SEQ ID NO: 12853 - protein, 249 aa, synthetic construct
  REGION 1..249: note = Description of Artificial Sequence: Synthetic polypeptide
  REGION 1..249: note = XENP018707 1G6_H1.203_L1_scFv(GKPGS)4
EVQLVESGGGLVKPGGSLRLSCAASGFTFSNYWMNWVRQAPGKGLEWVGEIRLKSNNYATHYAEPVKGRFTISRDDSKSTVYLQMNSLKTEDTAVYYCTRYYGNFGGYFDVWGAGTLVTVSSGKPGSGKPGSGKPGSGKPGSSIVMTQSPATLSVSPGERATLSCRASQSVSNDVAWYQQKPGQSPRLLINYASHRYTGVPDRFTGSGYGTEFTLTISSLQSEDFAVYFCQQDYSSPRTFGGGTKVEIK

SEQ ID NO: 12854 - protein, 122 aa, synthetic construct
  REGION 1..122: note = Description of Artificial Sequence: Synthetic polypeptide
  REGION 1..122: note = VH of XENP018707
EVQLVESGGGLVKPGGSLRLSCAASGFTFSNYWMNWVRQAPGKGLEWVGEIRLKSNNYATHYAEPVKGRFTISRDDSKSTVYLQMNSLKTEDTAVYYCTRYYGNFGGYFDVWGAGTLVTVSS

SEQ ID NO: 12855 - protein, 107 aa, synthetic construct; identical to SEQ ID NO: 10923
  REGION 1..107: note = Description of Artificial Sequence: Synthetic polypeptide
  REGION 1..107: note = VL of XENP018707

SEQ ID NO: 12856 - protein, 5 aa, synthetic construct
  REGION 1..5: note = Description of Artificial Sequence: Synthetic peptide
  REGION 1..5: note = XENP018707 vhCDR1
NYWMN

SEQ ID NO: 12857 - protein, 19 aa, synthetic construct
  REGION 1..19: note = Description of Artificial Sequence: Synthetic peptide
  REGION 1..19: note = XENP018707 vhCDR2
EIRLKSNNYATHYAEPVKG

SEQ ID NO: 12858 - protein, 11 aa, synthetic construct
  REGION 1..11: note = Description of Artificial Sequence: Synthetic peptide
  REGION 1..11: note = XENP018707 vhCDR3
YYGNFGGYFDV

SEQ ID NO: 12859 - protein, 11 aa, synthetic construct
  REGION 1..11: note = Description of Artificial Sequence: Synthetic peptide
  REGION 1..11: note = XENP018707 vlCDR1
RASQSVSNDVA

SEQ ID NO: 12860 - protein, 7 aa, synthetic construct
  REGION 1..7: note = Description of Artificial Sequence: Synthetic peptide
  REGION 1..7: note = XENP018707 vlCDR2
YASHRYT

SEQ ID NO: 12861 - protein, 9 aa, synthetic construct
  REGION 1..9: note = Description of Artificial Sequence: Synthetic peptide
  REGION 1..9: note = XENP018707 vlCDR3
QQDYSSPRT

SEQ ID NO: 12862 - protein, 249 aa, synthetic construct
  REGION 1..249: note = Description of Artificial Sequence: Synthetic polypeptide
  REGION 1..249: note = XENP018708 1G6_H1.204_L1_scFv(GKPGS)4
EVQLVESGGGLVKPGGSLRLSCAASGFTFSNYWMNWVRQAPGKGLEWVGEIRLKSNNYATHYAEPVKGRFTISRDDSKSTVYLQMNSLKTEDTAVYYCTRYYGNHGGYFDVWGAGTLVTVSSGKPGSGKPGSGKPGSGKPGSSIVMTQSPATLSVSPGERATLSCRASQSVSNDVAWYQQKPGQSPRLLINYASHRYTGVPDRFTGSGYGTEFTLTISSLQSEDFAVYFCQQDYSSPRTFGGGTKVEIK

SEQ ID NO: 12863 - protein, 122 aa, synthetic construct
  REGION 1..122: note = Description of Artificial Sequence: Synthetic polypeptide
  REGION 1..122: note = VH of XENP018708
EVQLVESGGGLVKPGGSLRLSCAASGFTFSNYWMNWVRQAPGKGLEWVGEIRLKSNNYATHYAEPVKGRFTISRDDSKSTVYLQMNSLKTEDTAVYYCTRYYGNHGGYFDVWGAGTLVTVSS

SEQ ID NO: 12864 - protein, 107 aa, synthetic construct; identical to SEQ ID NO: 10923
  REGION 1..107: note = Description of Artificial Sequence: Synthetic polypeptide
  REGION 1..107: note = VL of XENP018708

SEQ ID NO: 12865 - protein, 5 aa, synthetic construct
  REGION 1..5: note = Description of Artificial Sequence: Synthetic peptide
  REGION 1..5: note = XENP018708 vhCDR1
NYWMN

SEQ ID NO: 12866 - protein, 19 aa, synthetic construct
  REGION 1..19: note = Description of Artificial Sequence: Synthetic peptide
  REGION 1..19: note = XENP018708 vhCDR2
EIRLKSNNYATHYAEPVKG

SEQ ID NO: 12867 - protein, 11 aa, synthetic construct
  REGION 1..11: note = Description of Artificial Sequence: Synthetic peptide
  REGION 1..11: note = XENP018708 vhCDR3
YYGNHGGYFDV

SEQ ID NO: 12868 - protein, 11 aa, synthetic construct
  REGION 1..11: note = Description of Artificial Sequence: Synthetic peptide
  REGION 1..11: note = XENP018708 vlCDR1
RASQSVSNDVA

SEQ ID NO: 12869 - protein, 7 aa, synthetic construct
  REGION 1..7: note = Description of Artificial Sequence: Synthetic peptide
  REGION 1..7: note = XENP018708 vlCDR2
YASHRYT

SEQ ID NO: 12870 - protein, 9 aa, synthetic construct
  REGION 1..9: note = Description of Artificial Sequence: Synthetic peptide
  REGION 1..9: note = XENP018708 vlCDR3
QQDYSSPRT

SEQ ID NO: 12871 - protein, 249 aa, synthetic construct
  REGION 1..249: note = Description of Artificial Sequence: Synthetic polypeptide
  REGION 1..249: note = XENP018709 1G6_H1.205_L1_scFv(GKPGS)4
EVQLVESGGGLVKPGGSLRLSCAASGFTFSNYWMNWVRQAPGKGLEWVGEIRLKSNNYATHYAEPVKGRFTISRDDSKSTVYLQMNSLKTEDTAVYYCTRYYGNLGGYFDVWGAGTLVTVSSGKPGSGKPGSGKPGSGKPGSSIVMTQSPATLSVSPGERATLSCRASQSVSNDVAWYQQKPGQSPRLLINYASHRYTGVPDRFTGSGYGTEFTLTISSLQSEDFAVYFCQQDYSSPRTFGGGTKVEIK

SEQ ID NO: 12872 - protein, 122 aa, synthetic construct
  REGION 1..122: note = Description of Artificial Sequence: Synthetic polypeptide
  REGION 1..122: note = VH of XENP018709
EVQLVESGGGLVKPGGSLRLSCAASGFTFSNYWMNWVRQAPGKGLEWVGEIRLKSNNYATHYAEPVKGRFTISRDDSKSTVYLQMNSLKTEDTAVYYCTRYYGNLGGYFDVWGAGTLVTVSS

SEQ ID NO: 12873 - protein, 107 aa, synthetic construct; identical to SEQ ID NO: 10923
  REGION 1..107: note = Description of Artificial Sequence: Synthetic polypeptide
  REGION 1..107: note = VL of XENP018709

SEQ ID NO: 12874 - protein, 5 aa, synthetic construct
  REGION 1..5: note = Description of Artificial Sequence: Synthetic peptide
  REGION 1..5: note = XENP018709 vhCDR1
NYWMN

SEQ ID NO: 12875 - protein, 19 aa, synthetic construct
  REGION 1..19: note = Description of Artificial Sequence: Synthetic peptide
  REGION 1..19: note = XENP018709 vhCDR2
EIRLKSNNYATHYAEPVKG

SEQ ID NO: 12876 - protein, 11 aa, synthetic construct
  REGION 1..11: note = Description of Artificial Sequence: Synthetic peptide
  REGION 1..11: note = XENP018709 vhCDR3
YYGNLGGYFDV

SEQ ID NO: 12877 - protein, 11 aa, synthetic construct
  REGION 1..11: note = Description of Artificial Sequence: Synthetic peptide
  REGION 1..11: note = XENP018709 vlCDR1
RASQSVSNDVA

SEQ ID NO: 12878 - protein, 7 aa, synthetic construct
  REGION 1..7: note = Description of Artificial Sequence: Synthetic peptide
  REGION 1..7: note = XENP018709 vlCDR2
YASHRYT

SEQ ID NO: 12879 - protein, 9 aa, synthetic construct
  REGION 1..9: note = Description of Artificial Sequence: Synthetic peptide
  REGION 1..9: note = XENP018709 vlCDR3
QQDYSSPRT

SEQ ID NO: 12880 - protein, 249 aa, synthetic construct
  REGION 1..249: note = Description of Artificial Sequence: Synthetic polypeptide
  REGION 1..249: note = XENP018710 1G6_H1.206_L1_scFv(GKPGS)4
EVQLVESGGGLVKPGGSLRLSCAASGFTFSNYWMNWVRQAPGKGLEWVGEIRLKSNNYATHYAEPVKGRFTISRDDSKSTVYLQMNSLKTEDTAVYYCTRYYGNWGGYFDVWGAGTLVTVSSGKPGSGKPGSGKPGSGKPGSSIVMTQSPATLSVSPGERATLSCRASQSVSNDVAWYQQKPGQSPRLLINYASHRYTGVPDRFTGSGYGTEFTLTISSLQSEDFAVYFCQQDYSSPRTFGGGTKVEIK

SEQ ID NO: 12881 - protein, 122 aa, synthetic construct
  REGION 1..122: note = Description of Artificial Sequence: Synthetic polypeptide
  REGION 1..122: note = VH of XENP018710
EVQLVESGGGLVKPGGSLRLSCAASGFTFSNYWMNWVRQAPGKGLEWVGEIRLKSNNYATHYAEPVKGRFTISRDDSKSTVYLQMNSLKTEDTAVYYCTRYYGNWGGYFDVWGAGTLVTVSS

SEQ ID NO: 12882 - protein, 107 aa, synthetic construct; identical to SEQ ID NO: 10923
  REGION 1..107: note = Description of Artificial Sequence: Synthetic polypeptide
  REGION 1..107: note = VL of XENP018710

SEQ ID NO: 12883 - protein, 5 aa, synthetic construct
  REGION 1..5: note = Description of Artificial Sequence: Synthetic peptide
  REGION 1..5: note = XENP018710 vhCDR1
NYWMN

SEQ ID NO: 12884 - protein, 19 aa, synthetic construct
  REGION 1..19: note = Description of Artificial Sequence: Synthetic peptide
  REGION 1..19: note = XENP018710 vhCDR2
EIRLKSNNYATHYAEPVKG

SEQ ID NO: 12885 - protein, 11 aa, synthetic construct
  REGION 1..11: note = Description of Artificial Sequence: Synthetic peptide
  REGION 1..11: note = XENP018710 vhCDR3
YYGNWGGYFDV

SEQ ID NO: 12886 - protein, 11 aa, synthetic construct
  REGION 1..11: note = Description of Artificial Sequence: Synthetic peptide
  REGION 1..11: note = XENP018710 vlCDR1
RASQSVSNDVA

SEQ ID NO: 12887 - protein, 7 aa, synthetic construct
  REGION 1..7: note = Description of Artificial Sequence: Synthetic peptide
  REGION 1..7: note = XENP018710 vlCDR2
YASHRYT

SEQ ID NO: 12888 - protein, 9 aa, synthetic construct
  REGION 1..9: note = Description of Artificial Sequence: Synthetic peptide
  REGION 1..9: note = XENP018710 vlCDR3
QQDYSSPRT

SEQ ID NO: 12889 - protein, 249 aa, synthetic construct
  REGION 1..249: note = Description of Artificial Sequence: Synthetic polypeptide
  REGION 1..249: note = XENP018711 1G6_H1.207_L1_scFv(GKPGS)4
EVQLVESGGGLVKPGGSLRLSCAASGFTFSNYWMNWVRQAPGKGLEWVGEIRLKSNNYATHYAEPVKGRFTISRDDSKSTVYLQMNSLKTEDTAVYYCTRYYGNVGGYFDVWGAGTLVTVSSGKPGSGKPGSGKPGSGKPGSSIVMTQSPATLSVSPGERATLSCRASQSVSNDVAWYQQKPGQSPRLLINYASHRYTGVPDRFTGSGYGTEFTLTISSLQSEDFAVYFCQQDYSSPRTFGGGTKVEIK

SEQ ID NO: 12890 - protein, 122 aa, synthetic construct
  REGION 1..122: note = Description of Artificial Sequence: Synthetic polypeptide
  REGION 1..122: note = VH of XENP018711
EVQLVESGGGLVKPGGSLRLSCAASGFTFSNYWMNWVRQAPGKGLEWVGEIRLKSNNYATHYAEPVKGRFTISRDDSKSTVYLQMNSLKTEDTAVYYCTRYYGNVGGYFDVWGAGTLVTVSS

SEQ ID NO: 12891 - protein, 107 aa, synthetic construct; identical to SEQ ID NO: 10923
  REGION 1..107: note = Description of Artificial Sequence: Synthetic polypeptide
  REGION 1..107: note = VL of XENP018711

SEQ ID NO: 12892 - protein, 5 aa, synthetic construct
  REGION 1..5: note = Description of Artificial Sequence: Synthetic peptide
  REGION 1..5: note = XENP018711 vhCDR1
NYWMN

SEQ ID NO: 12893 - protein, 19 aa, synthetic construct
  REGION 1..19: note = Description of Artificial Sequence: Synthetic peptide
  REGION 1..19: note = XENP018711 vhCDR2
EIRLKSNNYATHYAEPVKG

SEQ ID NO: 12894 - protein, 11 aa, synthetic construct
  REGION 1..11: note = Description of Artificial Sequence: Synthetic peptide
  REGION 1..11: note = XENP018711 vhCDR3
YYGNVGGYFDV

SEQ ID NO: 12895 - protein, 11 aa, synthetic construct
  REGION 1..11: note = Description of Artificial Sequence: Synthetic peptide
  REGION 1..11: note = XENP018711 vlCDR1
RASQSVSNDVA

SEQ ID NO: 12896 - protein, 7 aa, synthetic construct
  REGION 1..7: note = Description of Artificial Sequence: Synthetic peptide
  REGION 1..7: note = XENP018711 vlCDR2
YASHRYT

SEQ ID NO: 12897 - protein, 9 aa, synthetic construct
  REGION 1..9: note = Description of Artificial Sequence: Synthetic peptide
  REGION 1..9: note = XENP018711 vlCDR3
QQDYSSPRT

SEQ ID NO: 12898 - protein, 249 aa, synthetic construct
  REGION 1..249: note = Description of Artificial Sequence: Synthetic polypeptide
  REGION 1..249: note = XENP018712 1G6_H1.208_L1_scFv(GKPGS)4
EVQLVESGGGLVKPGGSLRLSCAASGFTFSNYWMNWVRQAPGKGLEWVGEIRLKSNNYATHYAEPVKGRFTISRDDSKSTVYLQMNSLKTEDTAVYYCTRYYGNAGGYFDVWGAGTLVTVSSGKPGSGKPGSGKPGSGKPGSSIVMTQSPATLSVSPGERATLSCRASQSVSNDVAWYQQKPGQSPRLLINYASHRYTGVPDRFTGSGYGTEFTLTISSLQSEDFAVYFCQQDYSSPRTFGGGTKVEIK

SEQ ID NO: 12899 - protein, 122 aa, synthetic construct
  REGION 1..122: note = Description of Artificial Sequence: Synthetic polypeptide
  REGION 1..122: note = VH of XENP018712
EVQLVESGGGLVKPGGSLRLSCAASGFTFSNYWMNWVRQAPGKGLEWVGEIRLKSNNYATHYAEPVKGRFTISRDDSKSTVYLQMNSLKTEDTAVYYCTRYYGNAGGYFDVWGAGTLVTVSS

SEQ ID NO: 12900 - protein, 107 aa, synthetic construct; identical to SEQ ID NO: 10923
  REGION 1..107: note = Description of Artificial Sequence: Synthetic polypeptide
  REGION 1..107: note = VL of XENP018712

SEQ ID NO: 12901 - protein, 5 aa, synthetic construct
  REGION 1..5: note = Description of Artificial Sequence: Synthetic peptide
  REGION 1..5: note = XENP018712 vhCDR1
NYWMN

SEQ ID NO: 12902 - protein, 19 aa, synthetic construct
  REGION 1..19: note = Description of Artificial Sequence: Synthetic peptide
  REGION 1..19: note = XENP018712 vhCDR2
EIRLKSNNYATHYAEPVKG

SEQ ID NO: 12903 - protein, 11 aa, synthetic construct
  REGION 1..11: note = Description of Artificial Sequence: Synthetic peptide
  REGION 1..11: note = XENP018712 vhCDR3
YYGNAGGYFDV

SEQ ID NO: 12904 - protein, 11 aa, synthetic construct
  REGION 1..11: note = Description of Artificial Sequence: Synthetic peptide
  REGION 1..11: note = XENP018712 vlCDR1
RASQSVSNDVA

SEQ ID NO: 12905 - protein, 7 aa, synthetic construct
  REGION 1..7: note = Description of Artificial Sequence: Synthetic peptide
  REGION 1..7: note = XENP018712 vlCDR2
YASHRYT

SEQ ID NO: 12906 - protein, 9 aa, synthetic construct
  REGION 1..9: note = Description of Artificial Sequence: Synthetic peptide
  REGION 1..9: note = XENP018712 vlCDR3
QQDYSSPRT

SEQ ID NO: 12907 - protein, 249 aa, synthetic construct
  REGION 1..249: note = Description of Artificial Sequence: Synthetic polypeptide
  REGION 1..249: note = XENP018713 1G6_H1.209_L1_scFv(GKPGS)4
EVQLVESGGGLVKPGGSLRLSCAASGFTFSNYWMNWVRQAPGKGLEWVGEIRLKSNNYATHYAEPVKGRFTISRDDSKSTVYLQMNSLKTEDTAVYYCTRYYGNQGGYFDVWGAGTLVTVSSGKPGSGKPGSGKPGSGKPGSSIVMTQSPATLSVSPGERATLSCRASQSVSNDVAWYQQKPGQSPRLLINYASHRYTGVPDRFTGSGYGTEFTLTISSLQSEDFAVYFCQQDYSSPRTFGGGTKVEIK

SEQ ID NO: 12908 - protein, 122 aa, synthetic construct
  REGION 1..122: note = Description of Artificial Sequence: Synthetic polypeptide
  REGION 1..122: note = VH of XENP018713
EVQLVESGGGLVKPGGSLRLSCAASGFTFSNYWMNWVRQAPGKGLEWVGEIRLKSNNYATHYAEPVKGRFTISRDDSKSTVYLQMNSLKTEDTAVYYCTRYYGNQGGYFDVWGAGTLVTVSS

SEQ ID NO: 12909 - protein, 107 aa, synthetic construct; identical to SEQ ID NO: 10923
  REGION 1..107: note = Description of Artificial Sequence: Synthetic polypeptide
  REGION 1..107: note = VL of XENP018713

SEQ ID NO: 12910 - protein, 5 aa, synthetic construct
  REGION 1..5: note = Description of Artificial Sequence: Synthetic peptide
  REGION 1..5: note = XENP018713 vhCDR1
NYWMN

SEQ ID NO: 12911 - protein, 19 aa, synthetic construct
  REGION 1..19: note = Description of Artificial Sequence: Synthetic peptide
  REGION 1..19: note = XENP018713 vhCDR2
EIRLKSNNYATHYAEPVKG

SEQ ID NO: 12912 - protein, 11 aa, synthetic construct
  REGION 1..11: note = Description of Artificial Sequence: Synthetic peptide
  REGION 1..11: note = XENP018713 vhCDR3
YYGNQGGYFDV

SEQ ID NO: 12913 - protein, 11 aa, synthetic construct
  REGION 1..11: note = Description of Artificial Sequence: Synthetic peptide
  REGION 1..11: note = XENP018713 vlCDR1
RASQSVSNDVA

SEQ ID NO: 12914 - protein, 7 aa, synthetic construct
  REGION 1..7: note = Description of Artificial Sequence: Synthetic peptide
  REGION 1..7: note = XENP018713 vlCDR2
YASHRYT

SEQ ID NO: 12915 - protein, 9 aa, synthetic construct
  REGION 1..9: note = Description of Artificial Sequence: Synthetic peptide
  REGION 1..9: note = XENP018713 vlCDR3
QQDYSSPRT

SEQ ID NO: 12916 - protein, 249 aa, synthetic construct
  REGION 1..249: note = Description of Artificial Sequence: Synthetic polypeptide
  REGION 1..249: note = XENP018714 1G6_H1.210_L1_scFv(GKPGS)4
EVQLVESGGGLVKPGGSLRLSCAASGFTFSNYWMNWVRQAPGKGLEWVGEIRLKSNNYATHYAEPVKGRFTISRDDSKSTVYLQMNSLKTEDTAVYYCTRYYGNEGGYFDVWGAGTLVTVSSGKPGSGKPGSGKPGSGKPGSSIVMTQSPATLSVSPGERATLSCRASQSVSNDVAWYQQKPGQSPRLLINYASHRYTGVPDRFTGSGYGTEFTLTISSLQSEDFAVYFCQQDYSSPRTFGGGTKVEIK

SEQ ID NO: 12917 - protein, 122 aa, synthetic construct
  REGION 1..122: note = Description of Artificial Sequence: Synthetic polypeptide
  REGION 1..122: note = VH of XENP018714
EVQLVESGGGLVKPGGSLRLSCAASGFTFSNYWMNWVRQAPGKGLEWVGEIRLKSNNYATHYAEPVKGRFTISRDDSKSTVYLQMNSLKTEDTAVYYCTRYYGNEGGYFDVWGAGTLVTVSS

SEQ ID NO: 12918 - protein, 107 aa, synthetic construct; identical to SEQ ID NO: 10923
  REGION 1..107: note = Description of Artificial Sequence: Synthetic polypeptide
  REGION 1..107: note = VL of XENP018714

SEQ ID NO: 12919 - protein, 5 aa, synthetic construct
  REGION 1..5: note = Description of Artificial Sequence: Synthetic peptide
  REGION 1..5: note = XENP018714 vhCDR1
NYWMN

SEQ ID NO: 12920 - protein, 19 aa, synthetic construct
  REGION 1..19: note = Description of Artificial Sequence: Synthetic peptide
  REGION 1..19: note = XENP018714 vhCDR2
EIRLKSNNYATHYAEPVKG

SEQ ID NO: 12921 - protein, 11 aa, synthetic construct
  REGION 1..11: note = Description of Artificial Sequence: Synthetic peptide
  REGION 1..11: note = XENP018714 vhCDR3
YYGNEGGYFDV

SEQ ID NO: 12922 - protein, 11 aa, synthetic construct
  REGION 1..11: note = Description of Artificial Sequence: Synthetic peptide
  REGION 1..11: note = XENP018714 vlCDR1
RASQSVSNDVA

SEQ ID NO: 12923 - protein, 7 aa, synthetic construct
  REGION 1..7: note = Description of Artificial Sequence: Synthetic peptide
  REGION 1..7: note = XENP018714 vlCDR2
YASHRYT

SEQ ID NO: 12924 - protein, 9 aa, synthetic construct
  REGION 1..9: note = Description of Artificial Sequence: Synthetic peptide
  REGION 1..9: note = XENP018714 vlCDR3
QQDYSSPRT

SEQ ID NO: 12925 - protein, 249 aa, synthetic construct
  REGION 1..249: note = Description of Artificial Sequence: Synthetic polypeptide
  REGION 1..249: note = XENP018715 1G6_H1.211_L1_scFv(GKPGS)4
EVQLVESGGGLVKPGGSLRLSCAASGFTFSNYWMNWVRQAPGKGLEWVGEIRLKSNNYATHYAEPVKGRFTISRDDSKSTVYLQMNSLKTEDTAVYYCTRYYGNKGGYFDVWGAGTLVTVSSGKPGSGKPGSGKPGSGKPGSSIVMTQSPATLSVSPGERATLSCRASQSVSNDVAWYQQKPGQSPRLLINYASHRYTGVPDRFTGSGYGTEFTLTISSLQSEDFAVYFCQQDYSSPRTFGGGTKVEIK

SEQ ID NO: 12926 - protein, 122 aa, synthetic construct
  REGION 1..122: note = Description of Artificial Sequence: Synthetic polypeptide
  REGION 1..122: note = VH of XENP018715
EVQLVESGGGLVKPGGSLRLSCAASGFTFSNYWMNWVRQAPGKGLEWVGEIRLKSNNYATHYAEPVKGRFTISRDDSKSTVYLQMNSLKTEDTAVYYCTRYYGNKGGYFDVWGAGTLVTVSS

SEQ ID NO: 12927 - protein, 107 aa, synthetic construct; identical to SEQ ID NO: 10923
  REGION 1..107: note = Description of Artificial Sequence: Synthetic polypeptide
  REGION 1..107: note = VL of XENP018715

SEQ ID NO: 12928 - protein, 5 aa, synthetic construct
  REGION 1..5: note = Description of Artificial Sequence: Synthetic peptide
  REGION 1..5: note = XENP018715 vhCDR1
NYWMN

SEQ ID NO: 12929 - protein, 19 aa, synthetic construct
  REGION 1..19: note = Description of Artificial Sequence: Synthetic peptide
  REGION 1..19: note = XENP018715 vhCDR2
EIRLKSNNYATHYAEPVKG

SEQ ID NO: 12930 - protein, 11 aa, synthetic construct
  REGION 1..11: note = Description of Artificial Sequence: Synthetic peptide
  REGION 1..11: note = XENP018715 vhCDR3
YYGNKGGYFDV

SEQ ID NO: 12931 - protein, 11 aa, synthetic construct
  REGION 1..11: note = Description of Artificial Sequence: Synthetic peptide
  REGION 1..11: note = XENP018715 vlCDR1
RASQSVSNDVA

SEQ ID NO: 12932 - protein, 7 aa, synthetic construct
  REGION 1..7: note = Description of Artificial Sequence: Synthetic peptide
  REGION 1..7: note = XENP018715 vlCDR2
YASHRYT

SEQ ID NO: 12933 - protein, 9 aa, synthetic construct
  REGION 1..9: note = Description of Artificial Sequence: Synthetic peptide
  REGION 1..9: note = XENP018715 vlCDR3
QQDYSSPRT

SEQ ID NO: 12934 - protein, 249 aa, synthetic construct
  REGION 1..249: note = Description of Artificial Sequence: Synthetic polypeptide
  REGION 1..249: note = XENP018716 1G6_H1.212_L1_scFv(GKPGS)4
EVQLVESGGGLVKPGGSLRLSCAASGFTFSNYWMNWVRQAPGKGLEWVGEIRLKSNNYATHYAEPVKGRFTISRDDSKSTVYLQMNSLKTEDTAVYYCTRYYGNYAGYFDVWGAGTLVTVSSGKPGSGKPGSGKPGSGKPGSSIVMTQSPATLSVSPGERATLSCRASQSVSNDVAWYQQKPGQSPRLLINYASHRYTGVPDRFTGSGYGTEFTLTISSLQSEDFAVYFCQQDYSSPRTFGGGTKVEIK

SEQ ID NO: 12935 - protein, 122 aa, synthetic construct
  REGION 1..122: note = Description of Artificial Sequence: Synthetic polypeptide
  REGION 1..122: note = VH of XENP018716
EVQLVESGGGLVKPGGSLRLSCAASGFTFSNYWMNWVRQAPGKGLEWVGEIRLKSNNYATHYAEPVKGRFTISRDDSKSTVYLQMNSLKTEDTAVYYCTRYYGNYAGYFDVWGAGTLVTVSS

SEQ ID NO: 12936 - protein, 107 aa, synthetic construct; identical to SEQ ID NO: 10923
  REGION 1..107: note = Description of Artificial Sequence: Synthetic polypeptide
  REGION 1..107: note = VL of XENP018716

SEQ ID NO: 12937 - protein, 5 aa, synthetic construct
  REGION 1..5: note = Description of Artificial Sequence: Synthetic peptide
  REGION 1..5: note = XENP018716 vhCDR1
NYWMN

SEQ ID NO: 12938 - protein, 19 aa, synthetic construct
  REGION 1..19: note = Description of Artificial Sequence: Synthetic peptide
  REGION 1..19: note = XENP018716 vhCDR2
EIRLKSNNYATHYAEPVKG

SEQ ID NO: 12939 - protein, 11 aa, synthetic construct
  REGION 1..11: note = Description of Artificial Sequence: Synthetic peptide
  REGION 1..11: note = XENP018716 vhCDR3
YYGNYAGYFDV

SEQ ID NO: 12940 - protein, 11 aa, synthetic construct
  REGION 1..11: note = Description of Artificial Sequence: Synthetic peptide
  REGION 1..11: note = XENP018716 vlCDR1
RASQSVSNDVA

SEQ ID NO: 12941 - protein, 7 aa, synthetic construct
  REGION 1..7: note = Description of Artificial Sequence: Synthetic peptide
  REGION 1..7: note = XENP018716 vlCDR2
YASHRYT

SEQ ID NO: 12942 - protein, 9 aa, synthetic construct
  REGION 1..9: note = Description of Artificial Sequence: Synthetic peptide
  REGION 1..9: note = XENP018716 vlCDR3
QQDYSSPRT

SEQ ID NO: 12943 - protein, 249 aa, synthetic construct
  REGION 1..249: note = Description of Artificial Sequence: Synthetic polypeptide
  REGION 1..249: note = XENP018717 1G6_H1.213_L1_scFv(GKPGS)4
EVQLVESGGGLVKPGGSLRLSCAASGFTFSNYWMNWVRQAPGKGLEWVGEIRLKSNNYATHYAEPVKGRFTISRDDSKSTVYLQMNSLKTEDTAVYYCTRYYGNYQGYFDVWGAGTLVTVSSGKPGSGKPGSGKPGSGKPGSSIVMTQSPATLSVSPGERATLSCRASQSVSNDVAWYQQKPGQSPRLLINYASHRYTGVPDRFTGSGYGTEFTLTISSLQSEDFAVYFCQQDYSSPRTFGGGTKVEIK

SEQ ID NO: 12944 - protein, 122 aa, synthetic construct
  REGION 1..122: note = Description of Artificial Sequence: Synthetic polypeptide
  REGION 1..122: note = VH of XENP018717
EVQLVESGGGLVKPGGSLRLSCAASGFTFSNYWMNWVRQAPGKGLEWVGEIRLKSNNYATHYAEPVKGRFTISRDDSKSTVYLQMNSLKTEDTAVYYCTRYYGNYQGYFDVWGAGTLVTVSS

SEQ ID NO: 12945 - protein, 107 aa, synthetic construct; identical to SEQ ID NO: 10923
  REGION 1..107: note = Description of Artificial Sequence: Synthetic polypeptide
  REGION 1..107: note = VL of XENP018717

SEQ ID NO: 12946 - protein, 5 aa, synthetic construct
  REGION 1..5: note = Description of Artificial Sequence: Synthetic peptide
  REGION 1..5: note = XENP018717 vhCDR1
NYWMN

SEQ ID NO: 12947 - protein, 19 aa, synthetic construct
  REGION 1..19: note = Description of Artificial Sequence: Synthetic peptide
  REGION 1..19: note = XENP018717 vhCDR2
EIRLKSNNYATHYAEPVKG

SEQ ID NO: 12948 - protein, 11 aa, synthetic construct
  REGION 1..11: note = Description of Artificial Sequence: Synthetic peptide
  REGION 1..11: note = XENP018717 vhCDR3
YYGNYQGYFDV

SEQ ID NO: 12949 - protein, 11 aa, synthetic construct
  REGION 1..11: note = Description of Artificial Sequence: Synthetic peptide
  REGION 1..11: note = XENP018717 vlCDR1
RASQSVSNDVA

SEQ ID NO: 12950 - protein, 7 aa, synthetic construct
  REGION 1..7: note = Description of Artificial Sequence: Synthetic peptide
  REGION 1..7: note = XENP018717 vlCDR2
YASHRYT

SEQ ID NO: 12951 - protein, 9 aa, synthetic construct
  REGION 1..9: note = Description of Artificial Sequence: Synthetic peptide
  REGION 1..9: note = XENP018717 vlCDR3
QQDYSSPRT

SEQ ID NO: 12952 - protein, 249 aa, synthetic construct
  REGION 1..249: note = Description of Artificial Sequence: Synthetic polypeptide
  REGION 1..249: note = XENP018718 1G6_H1.214_L1_scFv(GKPGS)4
EVQLVESGGGLVKPGGSLRLSCAASGFTFSNYWMNWVRQAPGKGLEWVGEIRLKSNNYATHYAEPVKGRFTISRDDSKSTVYLQMNSLKTEDTAVYYCTRYYGNYHGYFDVWGAGTLVTVSSGKPGSGKPGSGKPGSGKPGSSIVMTQSPATLSVSPGERATLSCRASQSVSNDVAWYQQKPGQSPRLLINYASHRYTGVPDRFTGSGYGTEFTLTISSLQSEDFAVYFCQQDYSSPRTFGGGTKVEIK

SEQ ID NO: 12953 - protein, 122 aa, synthetic construct
  REGION 1..122: note = Description of Artificial Sequence: Synthetic polypeptide
  REGION 1..122: note = VH of XENP018718
EVQLVESGGGLVKPGGSLRLSCAASGFTFSNYWMNWVRQAPGKGLEWVGEIRLKSNNYATHYAEPVKGRFTISRDDSKSTVYLQMNSLKTEDTAVYYCTRYYGNYHGYFDVWGAGTLVTVSS

SEQ ID NO: 12954 - protein, 107 aa, synthetic construct; identical to SEQ ID NO: 10923
  REGION 1..107: note = Description of Artificial Sequence: Synthetic polypeptide
  REGION 1..107: note = VL of XENP018718

SEQ ID NO: 12955 - protein, 5 aa, synthetic construct
  REGION 1..5: note = Description of Artificial Sequence: Synthetic peptide
  REGION 1..5: note = XENP018718 vhCDR1
NYWMN

SEQ ID NO: 12956 - protein, 19 aa, synthetic construct
  REGION 1..19: note = Description of Artificial Sequence: Synthetic peptide
  REGION 1..19: note = XENP018718 vhCDR2
EIRLKSNNYATHYAEPVKG

SEQ ID NO: 12957 - protein, 11 aa, synthetic construct
  REGION 1..11: note = Description of Artificial Sequence: Synthetic peptide
  REGION 1..11: note = XENP018718 vhCDR3
YYGNYHGYFDV

SEQ ID NO: 12958 - protein, 11 aa, synthetic construct
  REGION 1..11: note = Description of Artificial Sequence: Synthetic peptide
  REGION 1..11: note = XENP018718 vlCDR1
RASQSVSNDVA

SEQ ID NO: 12959 - protein, 7 aa, synthetic construct
  REGION 1..7: note = Description of Artificial Sequence: Synthetic peptide
  REGION 1..7: note = XENP018718 vlCDR2
YASHRYT

SEQ ID NO: 12960 - protein, 9 aa, synthetic construct
  REGION 1..9: note = Description of Artificial Sequence: Synthetic peptide
  REGION 1..9: note = XENP018718 vlCDR3
QQDYSSPRT

SEQ ID NO: 12961 - protein, 249 aa, synthetic construct
  REGION 1..249: note = Description of Artificial Sequence: Synthetic polypeptide
  REGION 1..249: note = XENP018719 1G6_H1.215_L1_scFv(GKPGS)4
EVQLVESGGGLVKPGGSLRLSCAASGFTFSNYWMNWVRQAPGKGLEWVGEIRLKSNNYATHYAEPVKGRFTISRDDSKSTVYLQMNSLKTEDTAVYYCTRYYGNYDGYFDVWGAGTLVTVSSGKPGSGKPGSGKPGSGKPGSSIVMTQSPATLSVSPGERATLSCRASQSVSNDVAWYQQKPGQSPRLLINYASHRYTGVPDRFTGSGYGTEFTLTISSLQSEDFAVYFCQQDYSSPRTFGGGTKVEIK

SEQ ID NO: 12962 - protein, 122 aa, synthetic construct
  REGION 1..122: note = Description of Artificial Sequence: Synthetic polypeptide
  REGION 1..122: note = VH of XENP018719
EVQLVESGGGLVKPGGSLRLSCAASGFTFSNYWMNWVRQAPGKGLEWVGEIRLKSNNYATHYAEPVKGRFTISRDDSKSTVYLQMNSLKTEDTAVYYCTRYYGNYDGYFDVWGAGTLVTVSS

SEQ ID NO: 12963 - protein, 107 aa, synthetic construct; identical to SEQ ID NO: 10923
  REGION 1..107: note = Description of Artificial Sequence: Synthetic polypeptide
  REGION 1..107: note = VL of XENP018719

SEQ ID NO: 12964 - protein, 5 aa, synthetic construct
  REGION 1..5: note = Description of Artificial Sequence: Synthetic peptide
  REGION 1..5: note = XENP018719 vhCDR1
NYWMN

SEQ ID NO: 12965 - protein, 19 aa, synthetic construct
  REGION 1..19: note = Description of Artificial Sequence: Synthetic peptide
  REGION 1..19: note = XENP018719 vhCDR2
EIRLKSNNYATHYAEPVKG

SEQ ID NO: 12966 - protein, 11 aa, synthetic construct
  REGION 1..11: note = Description of Artificial Sequence: Synthetic peptide
  REGION 1..11: note = XENP018719 vhCDR3
YYGNYDGYFDV

SEQ ID NO: 12967 - protein, 11 aa, synthetic construct
  REGION 1..11: note = Description of Artificial Sequence: Synthetic peptide
  REGION 1..11: note = XENP018719 vlCDR1
RASQSVSNDVA

SEQ ID NO: 12968 - protein, 7 aa, synthetic construct
  REGION 1..7: note = Description of Artificial Sequence: Synthetic peptide
  REGION 1..7: note = XENP018719 vlCDR2
YASHRYT

SEQ ID NO: 12969 - protein, 9 aa, synthetic construct
  REGION 1..9: note = Description of Artificial Sequence: Synthetic peptide
  REGION 1..9: note = XENP018719 vlCDR3
QQDYSSPRT

SEQ ID NO: 12970 - protein, 249 aa, synthetic construct
  REGION 1..249: note = Description of Artificial Sequence: Synthetic polypeptide
  REGION 1..249: note = XENP018720 1G6_H1.216_L1_scFv(GKPGS)4
EVQLVESGGGLVKPGGSLRLSCAASGFTFSNYWMNWVRQAPGKGLEWVGEIRLKSNNYATHYAEPVKGRFTISRDDSKSTVYLQMNSLKTEDTAVYYCTRYYGNYKGYFDVWGAGTLVTVSSGKPGSGKPGSGKPGSGKPGSSIVMTQSPATLSVSPGERATLSCRASQSVSNDVAWYQQKPGQSPRLLINYASHRYTGVPDRFTGSGYGTEFTLTISSLQSEDFAVYFCQQDYSSPRTFGGGTKVEIK

SEQ ID NO: 12971 - protein, 122 aa, synthetic construct
  REGION 1..122: note = Description of Artificial Sequence: Synthetic polypeptide
  REGION 1..122: note = VH of XENP018720
EVQLVESGGGLVKPGGSLRLSCAASGFTFSNYWMNWVRQAPGKGLEWVGEIRLKSNNYATHYAEPVKGRFTISRDDSKSTVYLQMNSLKTEDTAVYYCTRYYGNYKGYFDVWGAGTLVTVSS

SEQ ID NO: 12972 - protein, 107 aa, synthetic construct; identical to SEQ ID NO: 10923
  REGION 1..107: note = Description of Artificial Sequence: Synthetic polypeptide
  REGION 1..107: note = VL of XENP018720

SEQ ID NO: 12973 - protein, 5 aa, synthetic construct
  REGION 1..5: note = Description of Artificial Sequence: Synthetic peptide
  REGION 1..5: note = XENP018720 vhCDR1
NYWMN

SEQ ID NO: 12974 - protein, 19 aa, synthetic construct
  REGION 1..19: note = Description of Artificial Sequence: Synthetic peptide
  REGION 1..19: note = XENP018720 vhCDR2
EIRLKSNNYATHYAEPVKG

SEQ ID NO: 12975 - protein, 11 aa, synthetic construct
  REGION 1..11: note = Description of Artificial Sequence: Synthetic peptide
  REGION 1..11: note = XENP018720 vhCDR3
YYGNYKGYFDV

SEQ ID NO: 12976 - protein, 11 aa, synthetic construct
  REGION 1..11: note = Description of Artificial Sequence: Synthetic peptide
  REGION 1..11: note = XENP018720 vlCDR1
RASQSVSNDVA

SEQ ID NO: 12977 - protein, 7 aa, synthetic construct
  REGION 1..7: note = Description of Artificial Sequence: Synthetic peptide
  REGION 1..7: note = XENP018720 vlCDR2
YASHRYT

SEQ ID NO: 12978 - protein, 9 aa, synthetic construct
  REGION 1..9: note = Description of Artificial Sequence: Synthetic peptide
  REGION 1..9: note = XENP018720 vlCDR3
QQDYSSPRT

SEQ ID NO: 12979 - protein, 249 aa, synthetic construct
  REGION 1..249: note = Description of Artificial Sequence: Synthetic polypeptide
  REGION 1..249: note = XENP018721 1G6_H1.217_L1_scFv(GKPGS)4
EVQLVESGGGLVKPGGSLRLSCAASGFTFSNYWMNWVRQAPGKGLEWVGEIRLKSNNYATHYAEPVKGRFTISRDDSKSTVYLQMNSLKTEDTAVYYCTRYYGNYLGYFDVWGAGTLVTVSSGKPGSGKPGSGKPGSGKPGSSIVMTQSPATLSVSPGERATLSCRASQSVSNDVAWYQQKPGQSPRLLINYASHRYTGVPDRFTGSGYGTEFTLTISSLQSEDFAVYFCQQDYSSPRTFGGGTKVEIK

SEQ ID NO: 12980 - protein, 122 aa, synthetic construct
  REGION 1..122: note = Description of Artificial Sequence: Synthetic polypeptide
  REGION 1..122: note = VH of XENP018721
EVQLVESGGGLVKPGGSLRLSCAASGFTFSNYWMNWVRQAPGKGLEWVGEIRLKSNNYATHYAEPVKGRFTISRDDSKSTVYLQMNSLKTEDTAVYYCTRYYGNYLGYFDVWGAGTLVTVSS

SEQ ID NO: 12981 - protein, 107 aa, synthetic construct; identical to SEQ ID NO: 10923
  REGION 1..107: note = Description of Artificial Sequence: Synthetic polypeptide
  REGION 1..107: note = VL of XENP018721

SEQ ID NO: 12982 - protein, 5 aa, synthetic construct
  REGION 1..5: note = Description of Artificial Sequence: Synthetic peptide
  REGION 1..5: note = XENP018721 vhCDR1
NYWMN

SEQ ID NO: 12983 - protein, 19 aa, synthetic construct
  REGION 1..19: note = Description of Artificial Sequence: Synthetic peptide
  REGION 1..19: note = XENP018721 vhCDR2
EIRLKSNNYATHYAEPVKG

SEQ ID NO: 12984 - protein, 11 aa, synthetic construct
  REGION 1..11: note = Description of Artificial Sequence: Synthetic peptide
  REGION 1..11: note = XENP018721 vhCDR3
YYGNYLGYFDV

SEQ ID NO: 12985 - protein, 11 aa, synthetic construct
  REGION 1..11: note = Description of Artificial Sequence: Synthetic peptide
  REGION 1..11: note = XENP018721 vlCDR1
RASQSVSNDVA

SEQ ID NO: 12986 - protein, 7 aa, synthetic construct
  REGION 1..7: note = Description of Artificial Sequence: Synthetic peptide
  REGION 1..7: note = XENP018721 vlCDR2
YASHRYT

SEQ ID NO: 12987 - protein, 9 aa, synthetic construct
  REGION 1..9: note = Description of Artificial Sequence: Synthetic peptide
  REGION 1..9: note = XENP018721 vlCDR3
QQDYSSPRT

SEQ ID NO: 12988 - protein, 249 aa, synthetic construct
  REGION 1..249: note = Description of Artificial Sequence: Synthetic polypeptide
  REGION 1..249: note = XENP018722 1G6_H1.218_L1_scFv(GKPGS)4
EVQLVESGGGLVKPGGSLRLSCAASGFTFSNYWMNWVRQAPGKGLEWVGEIRLKSNNYATHYAEPVKGRFTISRDDSKSTVYLQMNSLKTEDTAVYYCTRYYGNYFGYFDVWGAGTLVTVSSGKPGSGKPGSGKPGSGKPGSSIVMTQSPATLSVSPGERATLSCRASQSVSNDVAWYQQKPGQSPRLLINYASHRYTGVPDRFTGSGYGTEFTLTISSLQSEDFAVYFCQQDYSSPRTFGGGTKVEIK

SEQ ID NO: 12989 - protein, 122 aa, synthetic construct
  REGION 1..122: note = Description of Artificial Sequence: Synthetic polypeptide
  REGION 1..122: note = VH of XENP018722
EVQLVESGGGLVKPGGSLRLSCAASGFTFSNYWMNWVRQAPGKGLEWVGEIRLKSNNYATHYAEPVKGRFTISRDDSKSTVYLQMNSLKTEDTAVYYCTRYYGNYFGYFDVWGAGTLVTVSS

SEQ ID NO: 12990 - protein, 107 aa, synthetic construct; identical to SEQ ID NO: 10923
  REGION 1..107: note = Description of Artificial Sequence: Synthetic polypeptide
  REGION 1..107: note = VL of XENP018722

SEQ ID NO: 12991 - protein, 5 aa, synthetic construct
  REGION 1..5: note = Description of Artificial Sequence: Synthetic peptide
  REGION 1..5: note = XENP018722 vhCDR1
NYWMN

SEQ ID NO: 12992 - protein, 19 aa, synthetic construct
  REGION 1..19: note = Description of Artificial Sequence: Synthetic peptide
  REGION 1..19: note = XENP018722 vhCDR2
EIRLKSNNYATHYAEPVKG

SEQ ID NO: 12993 - protein, 11 aa, synthetic construct
  REGION 1..11: note = Description of Artificial Sequence: Synthetic peptide
  REGION 1..11: note = XENP018722 vhCDR3
YYGNYFGYFDV

SEQ ID NO: 12994 - protein, 11 aa, synthetic construct
  REGION 1..11: note = Description of Artificial Sequence: Synthetic peptide
  REGION 1..11: note = XENP018722 vlCDR1
RASQSVSNDVA

SEQ ID NO: 12995 - protein, 7 aa, synthetic construct
  REGION 1..7: note = Description of Artificial Sequence: Synthetic peptide
  REGION 1..7: note = XENP018722 vlCDR2
YASHRYT

SEQ ID NO: 12996 - protein, 9 aa, synthetic construct
  REGION 1..9: note = Description of Artificial Sequence: Synthetic peptide
  REGION 1..9: note = XENP018722 vlCDR3
QQDYSSPRT

SEQ ID NO: 12997 - protein, 249 aa, synthetic construct
  REGION 1..249: note = Description of Artificial Sequence: Synthetic polypeptide
  REGION 1..249: note = XENP018723 1G6_H1.219_L1_scFv(GKPGS)4
EVQLVESGGGLVKPGGSLRLSCAASGFTFSNYWMNWVRQAPGKGLEWVGEIRLKSNNYATHYAEPVKGRFTISRDDSKSTVYLQMNSLKTEDTAVYYCTRYYGNYGAYFDVWGAGTLVTVSSGKPGSGKPGSGKPGSGKPGSSIVMTQSPATLSVSPGERATLSCRASQSVSNDVAWYQQKPGQSPRLLINYASHRYTGVPDRFTGSGYGTEFTLTISSLQSEDFAVYFCQQDYSSPRTFGGGTKVEIK

SEQ ID NO: 12998 - protein, 122 aa, synthetic construct
  REGION 1..122: note = Description of Artificial Sequence: Synthetic polypeptide
  REGION 1..122: note = VH of XENP018723
EVQLVESGGGLVKPGGSLRLSCAASGFTFSNYWMNWVRQAPGKGLEWVGEIRLKSNNYATHYAEPVKGRFTISRDDSKSTVYLQMNSLKTEDTAVYYCTRYYGNYGAYFDVWGAGTLVTVSS

SEQ ID NO: 12999 - protein, 107 aa, synthetic construct; identical to SEQ ID NO: 10923
  REGION 1..107: note = Description of Artificial Sequence: Synthetic polypeptide
  REGION 1..107: note = VL of XENP018723

SEQ ID NO: 13000 - protein, 5 aa, synthetic construct
  REGION 1..5: note = Description of Artificial Sequence: Synthetic peptide
  REGION 1..5: note = XENP018723 vhCDR1
NYWMN

SEQ ID NO: 13001 - protein, 19 aa, synthetic construct
  REGION 1..19: note = Description of Artificial Sequence: Synthetic peptide
  REGION 1..19: note = XENP018723 vhCDR2
EIRLKSNNYATHYAEPVKG

SEQ ID NO: 13002 - protein, 11 aa, synthetic construct
  REGION 1..11: note = Description of Artificial Sequence: Synthetic peptide
  REGION 1..11: note = XENP018723 vhCDR3
YYGNYGAYFDV

SEQ ID NO: 13003 - protein, 11 aa, synthetic construct
  REGION 1..11: note = Description of Artificial Sequence: Synthetic peptide
  REGION 1..11: note = XENP018723 vlCDR1
RASQSVSNDVA

SEQ ID NO: 13004 - protein, 7 aa, synthetic construct
  REGION 1..7: note = Description of Artificial Sequence: Synthetic peptide
  REGION 1..7: note = XENP018723 vlCDR2
YASHRYT

SEQ ID NO: 13005 - protein, 9 aa, synthetic construct
  REGION 1..9: note = Description of Artificial Sequence: Synthetic peptide
  REGION 1..9: note = XENP018723 vlCDR3
QQDYSSPRT

SEQ ID NO: 13006 - protein, 249 aa, synthetic construct
  REGION 1..249: note = Description of Artificial Sequence: Synthetic polypeptide
  REGION 1..249: note = XENP018724 1G6_H1.220_L1_scFv(GKPGS)4
EVQLVESGGGLVKPGGSLRLSCAASGFTFSNYWMNWVRQAPGKGLEWVGEIRLKSNNYATHYAEPVKGRFTISRDDSKSTVYLQMNSLKTEDTAVYYCTRYYGNYGSYFDVWGAGTLVTVSSGKPGSGKPGSGKPGSGKPGSSIVMTQSPATLSVSPGERATLSCRASQSVSNDVAWYQQKPGQSPRLLINYASHRYTGVPDRFTGSGYGTEFTLTISSLQSEDFAVYFCQQDYSSPRTFGGGTKVEIK

SEQ ID NO: 13007 - protein, 122 aa, synthetic construct
  REGION 1..122: note = Description of Artificial Sequence: Synthetic polypeptide
  REGION 1..122: note = VH of XENP018724
EVQLVESGGGLVKPGGSLRLSCAASGFTFSNYWMNWVRQAPGKGLEWVGEIRLKSNNYATHYAEPVKGRFTISRDDSKSTVYLQMNSLKTEDTAVYYCTRYYGNYGSYFDVWGAGTLVTVSS

SEQ ID NO: 13008 - protein, 107 aa, synthetic construct; identical to SEQ ID NO: 10923
  REGION 1..107: note = Description of Artificial Sequence: Synthetic polypeptide
  REGION 1..107: note = VL of XENP018724

SEQ ID NO: 13009 - protein, 5 aa, synthetic construct
  REGION 1..5: note = Description of Artificial Sequence: Synthetic peptide
  REGION 1..5: note = XENP018724 vhCDR1
NYWMN

SEQ ID NO: 13010 - protein, 19 aa, synthetic construct
  REGION 1..19: note = Description of Artificial Sequence: Synthetic peptide
  REGION 1..19: note = XENP018724 vhCDR2
EIRLKSNNYATHYAEPVKG

SEQ ID NO: 13011 - protein, 11 aa, synthetic construct
  REGION 1..11: note = Description of Artificial Sequence: Synthetic peptide
  REGION 1..11: note = XENP018724 vhCDR3
YYGNYGSYFDV

SEQ ID NO: 13012 - protein, 11 aa, synthetic construct
  REGION 1..11: note = Description of Artificial Sequence: Synthetic peptide
  REGION 1..11: note = XENP018724 vlCDR1
RASQSVSNDVA

SEQ ID NO: 13013 - protein, 7 aa, synthetic construct
  REGION 1..7: note = Description of Artificial Sequence: Synthetic peptide
  REGION 1..7: note = XENP018724 vlCDR2
YASHRYT

SEQ ID NO: 13014 - protein, 9 aa, synthetic construct
  REGION 1..9: note = Description of Artificial Sequence: Synthetic peptide
  REGION 1..9: note = XENP018724 vlCDR3
QQDYSSPRT

SEQ ID NO: 13015 - protein, 249 aa, synthetic construct
  REGION 1..249: note = Description of Artificial Sequence: Synthetic polypeptide
  REGION 1..249: note = XENP018725 1G6_H1.221_L1_scFv(GKPGS)4
EVQLVESGGGLVKPGGSLRLSCAASGFTFSNYWMNWVRQAPGKGLEWVGEIRLKSNNYATHYAEPVKGRFTISRDDSKSTVYLQMNSLKTEDTAVYYCTRYYGNYGTYFDVWGAGTLVTVSSGKPGSGKPGSGKPGSGKPGSSIVMTQSPATLSVSPGERATLSCRASQSVSNDVAWYQQKPGQSPRLLINYASHRYTGVPDRFTGSGYGTEFTLTISSLQSEDFAVYFCQQDYSSPRTFGGGTKVEIK

SEQ ID NO: 13016 - protein, 122 aa, synthetic construct
  REGION 1..122: note = Description of Artificial Sequence: Synthetic polypeptide
  REGION 1..122: note = VH of XENP018725
EVQLVESGGGLVKPGGSLRLSCAASGFTFSNYWMNWVRQAPGKGLEWVGEIRLKSNNYATHYAEPVKGRFTISRDDSKSTVYLQMNSLKTEDTAVYYCTRYYGNYGTYFDVWGAGTLVTVSS

SEQ ID NO: 13017 - protein, 107 aa, synthetic construct; identical to SEQ ID NO: 10923
  REGION 1..107: note = Description of Artificial Sequence: Synthetic polypeptide
  REGION 1..107: note = VL of XENP018725

SEQ ID NO: 13018 - protein, 5 aa, synthetic construct
  REGION 1..5: note = Description of Artificial Sequence: Synthetic peptide
  REGION 1..5: note = XENP018725 vhCDR1
NYWMN

SEQ ID NO: 13019 - protein, 19 aa, synthetic construct
  REGION 1..19: note = Description of Artificial Sequence: Synthetic peptide
  REGION 1..19: note = XENP018725 vhCDR2
EIRLKSNNYATHYAEPVKG

SEQ ID NO: 13020 - protein, 11 aa, synthetic construct
  REGION 1..11: note = Description of Artificial Sequence: Synthetic peptide
  REGION 1..11: note = XENP018725 vhCDR3
YYGNYGTYFDV

SEQ ID NO: 13021 - protein, 11 aa, synthetic construct
  REGION 1..11: note = Description of Artificial Sequence: Synthetic peptide
  REGION 1..11: note = XENP018725 vlCDR1
RASQSVSNDVA

SEQ ID NO: 13022 - protein, 7 aa, synthetic construct
  REGION 1..7: note = Description of Artificial Sequence: Synthetic peptide
  REGION 1..7: note = XENP018725 vlCDR2
YASHRYT

SEQ ID NO: 13023 - protein, 9 aa, synthetic construct
  REGION 1..9: note = Description of Artificial Sequence: Synthetic peptide
  REGION 1..9: note = XENP018725 vlCDR3
QQDYSSPRT

SEQ ID NO: 13024 - protein, 249 aa, synthetic construct
  REGION 1..249: note = Description of Artificial Sequence: Synthetic polypeptide
  REGION 1..249: note = XENP018726 1G6_H1.222_L1_scFv(GKPGS)4
EVQLVESGGGLVKPGGSLRLSCAASGFTFSNYWMNWVRQAPGKGLEWVGEIRLKSNNYATHYAEPVKGRFTISRDDSKSTVYLQMNSLKTEDTAVYYCTRYYGNYGNYFDVWGAGTLVTVSSGKPGSGKPGSGKPGSGKPGSSIVMTQSPATLSVSPGERATLSCRASQSVSNDVAWYQQKPGQSPRLLINYASHRYTGVPDRFTGSGYGTEFTLTISSLQSEDFAVYFCQQDYSSPRTFGGGTKVEIK

SEQ ID NO: 13025 - protein, 122 aa, synthetic construct
  REGION 1..122: note = Description of Artificial Sequence: Synthetic polypeptide
  REGION 1..122: note = VH of XENP018726
EVQLVESGGGLVKPGGSLRLSCAASGFTFSNYWMNWVRQAPGKGLEWVGEIRLKSNNYATHYAEPVKGRFTISRDDSKSTVYLQMNSLKTEDTAVYYCTRYYGNYGNYFDVWGAGTLVTVSS

SEQ ID NO: 13026 - protein, 107 aa, synthetic construct; identical to SEQ ID NO: 10923
  REGION 1..107: note = Description of Artificial Sequence: Synthetic polypeptide
  REGION 1..107: note = VL of XENP018726

SEQ ID NO: 13027 - protein, 5 aa, synthetic construct
  REGION 1..5: note = Description of Artificial Sequence: Synthetic peptide
  REGION 1..5: note = XENP018726 vhCDR1
NYWMN

SEQ ID NO: 13028 - protein, 19 aa, synthetic construct
  REGION 1..19: note = Description of Artificial Sequence: Synthetic peptide
  REGION 1..19: note = XENP018726 vhCDR2
EIRLKSNNYATHYAEPVKG

SEQ ID NO: 13029 - protein, 11 aa, synthetic construct
  REGION 1..11: note = Description of Artificial Sequence: Synthetic peptide
  REGION 1..11: note = XENP018726 vhCDR3
YYGNYGNYFDV

SEQ ID NO: 13030 - protein, 11 aa, synthetic construct
  REGION 1..11: note = Description of Artificial Sequence: Synthetic peptide
  REGION 1..11: note = XENP018726 vlCDR1
RASQSVSNDVA

SEQ ID NO: 13031 - protein, 7 aa, synthetic construct
  REGION 1..7: note = Description of Artificial Sequence: Synthetic peptide
  REGION 1..7: note = XENP018726 vlCDR2
YASHRYT

SEQ ID NO: 13032 - protein, 9 aa, synthetic construct
  REGION 1..9: note = Description of Artificial Sequence: Synthetic peptide
  REGION 1..9: note = XENP018726 vlCDR3
QQDYSSPRT

SEQ ID NO: 13033 - protein, 249 aa, synthetic construct
  REGION 1..249: note = Description of Artificial Sequence: Synthetic polypeptide
  REGION 1..249: note = XENP018727 1G6_H1.223_L1_scFv(GKPGS)4
EVQLVESGGGLVKPGGSLRLSCAASGFTFSNYWMNWVRQAPGKGLEWVGEIRLKSNNYATHYAEPVKGRFTISRDDSKSTVYLQMNSLKTEDTAVYYCTRYYGNYGHYFDVWGAGTLVTVSSGKPGSGKPGSGKPGSGKPGSSIVMTQSPATLSVSPGERATLSCRASQSVSNDVAWYQQKPGQSPRLLINYASHRYTGVPDRFTGSGYGTEFTLTISSLQSEDFAVYFCQQDYSSPRTFGGGTKVEIK

SEQ ID NO: 13034 - protein, 122 aa, synthetic construct
  REGION 1..122: note = Description of Artificial Sequence: Synthetic polypeptide
  REGION 1..122: note = VH of XENP018727
EVQLVESGGGLVKPGGSLRLSCAASGFTFSNYWMNWVRQAPGKGLEWVGEIRLKSNNYATHYAEPVKGRFTISRDDSKSTVYLQMNSLKTEDTAVYYCTRYYGNYGHYFDVWGAGTLVTVSS

SEQ ID NO: 13035 - protein, 107 aa, synthetic construct; identical to SEQ ID NO: 10923
  REGION 1..107: note = Description of Artificial Sequence: Synthetic polypeptide
  REGION 1..107: note = VL of XENP018727

SEQ ID NO: 13036 - protein, 5 aa, synthetic construct
  REGION 1..5: note = Description of Artificial Sequence: Synthetic peptide
  REGION 1..5: note = XENP018727 vhCDR1
NYWMN

SEQ ID NO: 13037 - protein, 19 aa, synthetic construct
  REGION 1..19: note = Description of Artificial Sequence: Synthetic peptide
  REGION 1..19: note = XENP018727 vhCDR2
EIRLKSNNYATHYAEPVKG

SEQ ID NO: 13038 - protein, 11 aa, synthetic construct
  REGION 1..11: note = Description of Artificial Sequence: Synthetic peptide
  REGION 1..11: note = XENP018727 vhCDR3
YYGNYGHYFDV

SEQ ID NO: 13039 - protein, 11 aa, synthetic construct
  REGION 1..11: note = Description of Artificial Sequence: Synthetic peptide
  REGION 1..11: note = XENP018727 vlCDR1
RASQSVSNDVA

SEQ ID NO: 13040 - protein, 7 aa, synthetic construct
  REGION 1..7: note = Description of Artificial Sequence: Synthetic peptide
  REGION 1..7: note = XENP018727 vlCDR2
YASHRYT

SEQ ID NO: 13041 - protein, 9 aa, synthetic construct
  REGION 1..9: note = Description of Artificial Sequence: Synthetic peptide
  REGION 1..9: note = XENP018727 vlCDR3
QQDYSSPRT

SEQ ID NO: 13042 - protein, 249 aa, synthetic construct
  REGION 1..249: note = Description of Artificial Sequence: Synthetic polypeptide
  REGION 1..249: note = XENP018728 1G6_H1.224_L1_scFv(GKPGS)4
EVQLVESGGGLVKPGGSLRLSCAASGFTFSNYWMNWVRQAPGKGLEWVGEIRLKSNNYATHYAEPVKGRFTISRDDSKSTVYLQMNSLKTEDTAVYYCTRYYGNYGDYFDVWGAGTLVTVSSGKPGSGKPGSGKPGSGKPGSSIVMTQSPATLSVSPGERATLSCRASQSVSNDVAWYQQKPGQSPRLLINYASHRYTGVPDRFTGSGYGTEFTLTISSLQSEDFAVYFCQQDYSSPRTFGGGTKVEIK

SEQ ID NO: 13043 - protein, 122 aa, synthetic construct
  REGION 1..122: note = Description of Artificial Sequence: Synthetic polypeptide
  REGION 1..122: note = VH of XENP018728
EVQLVESGGGLVKPGGSLRLSCAASGFTFSNYWMNWVRQAPGKGLEWVGEIRLKSNNYATHYAEPVKGRFTISRDDSKSTVYLQMNSLKTEDTAVYYCTRYYGNYGDYFDVWGAGTLVTVSS

SEQ ID NO: 13044 - protein, 107 aa, synthetic construct; identical to SEQ ID NO: 10923
  REGION 1..107: note = Description of Artificial Sequence: Synthetic polypeptide
  REGION 1..107: note = VL of XENP018728

SEQ ID NO: 13045 - protein, 5 aa, synthetic construct
  REGION 1..5: note = Description of Artificial Sequence: Synthetic peptide
  REGION 1..5: note = XENP018728 vhCDR1
NYWMN

SEQ ID NO: 13046 - protein, 19 aa, synthetic construct
  REGION 1..19: note = Description of Artificial Sequence: Synthetic peptide
  REGION 1..19: note = XENP018728 vhCDR2
EIRLKSNNYATHYAEPVKG

SEQ ID NO: 13047 - protein, 11 aa, synthetic construct
  REGION 1..11: note = Description of Artificial Sequence: Synthetic peptide
  REGION 1..11: note = XENP018728 vhCDR3
YYGNYGDYFDV

SEQ ID NO: 13048 - protein, 11 aa, synthetic construct
  REGION 1..11: note = Description of Artificial Sequence: Synthetic peptide
  REGION 1..11: note = XENP018728 vlCDR1
RASQSVSNDVA

SEQ ID NO: 13049 - protein, 7 aa, synthetic construct
  REGION 1..7: note = Description of Artificial Sequence: Synthetic peptide
  REGION 1..7: note = XENP018728 vlCDR2
YASHRYT

SEQ ID NO: 13050 - protein, 9 aa, synthetic construct
  REGION 1..9: note = Description of Artificial Sequence: Synthetic peptide
  REGION 1..9: note = XENP018728 vlCDR3
QQDYSSPRT

SEQ ID NO: 13051 - protein, 249 aa, synthetic construct
  REGION 1..249: note = Description of Artificial Sequence: Synthetic polypeptide
  REGION 1..249: note = XENP018729 1G6_H1.225_L1_scFv(GKPGS)4
EVQLVESGGGLVKPGGSLRLSCAASGFTFSNYWMNWVRQAPGKGLEWVGEIRLKSNNYATHYAEPVKGRFTISRDDSKSTVYLQMNSLKTEDTAVYYCTRYYGNYGKYFDVWGAGTLVTVSSGKPGSGKPGSGKPGSGKPGSSIVMTQSPATLSVSPGERATLSCRASQSVSNDVAWYQQKPGQSPRLLINYASHRYTGVPDRFTGSGYGTEFTLTISSLQSEDFAVYFCQQDYSSPRTFGGGTKVEIK

SEQ ID NO: 13052 - protein, 122 aa, synthetic construct
  REGION 1..122: note = Description of Artificial Sequence: Synthetic polypeptide
  REGION 1..122: note = VH of XENP018729
EVQLVESGGGLVKPGGSLRLSCAASGFTFSNYWMNWVRQAPGKGLEWVGEIRLKSNNYATHYAEPVKGRFTISRDDSKSTVYLQMNSLKTEDTAVYYCTRYYGNYGKYFDVWGAGTLVTVSS

SEQ ID NO: 13053 - protein, 107 aa, synthetic construct; identical to SEQ ID NO: 10923
  REGION 1..107: note = Description of Artificial Sequence: Synthetic polypeptide
  REGION 1..107: note = VL of XENP018729

SEQ ID NO: 13054 - protein, 5 aa, synthetic construct
  REGION 1..5: note = Description of Artificial Sequence: Synthetic peptide
  REGION 1..5: note = XENP018729 vhCDR1
NYWMN

SEQ ID NO: 13055 - protein, 19 aa, synthetic construct
  REGION 1..19: note = Description of Artificial Sequence: Synthetic peptide
  REGION 1..19: note = XENP018729 vhCDR2
EIRLKSNNYATHYAEPVKG

SEQ ID NO: 13056 - protein, 11 aa, synthetic construct
  REGION 1..11: note = Description of Artificial Sequence: Synthetic peptide
  REGION 1..11: note = XENP018729 vhCDR3
YYGNYGKYFDV

SEQ ID NO: 13057 - protein, 11 aa, synthetic construct
  REGION 1..11: note = Description of Artificial Sequence: Synthetic peptide
  REGION 1..11: note = XENP018729 vlCDR1
RASQSVSNDVA

SEQ ID NO: 13058 - protein, 7 aa, synthetic construct
  REGION 1..7: note = Description of Artificial Sequence: Synthetic peptide
  REGION 1..7: note = XENP018729 vlCDR2
YASHRYT

SEQ ID NO: 13059 - protein, 9 aa, synthetic construct
  REGION 1..9: note = Description of Artificial Sequence: Synthetic peptide
  REGION 1..9: note = XENP018729 vlCDR3
QQDYSSPRT

SEQ ID NO: 13060 - protein, 249 aa, synthetic construct
  REGION 1..249: note = Description of Artificial Sequence: Synthetic polypeptide
  REGION 1..249: note = XENP018730 1G6_H1.226_L1_scFv(GKPGS)4
EVQLVESGGGLVKPGGSLRLSCAASGFTFSNYWMNWVRQAPGKGLEWVGEIRLKSNNYATHYAEPVKGRFTISRDDSKSTVYLQMNSLKTEDTAVYYCTRYYGNYGLYFDVWGAGTLVTVSSGKPGSGKPGSGKPGSGKPGSSIVMTQSPATLSVSPGERATLSCRASQSVSNDVAWYQQKPGQSPRLLINYASHRYTGVPDRFTGSGYGTEFTLTISSLQSEDFAVYFCQQDYSSPRTFGGGTKVEIK

SEQ ID NO: 13061 - protein, 122 aa, synthetic construct
  REGION 1..122: note = Description of Artificial Sequence: Synthetic polypeptide
  REGION 1..122: note = VH of XENP018730
EVQLVESGGGLVKPGGSLRLSCAASGFTFSNYWMNWVRQAPGKGLEWVGEIRLKSNNYATHYAEPVKGRFTISRDDSKSTVYLQMNSLKTEDTAVYYCTRYYGNYGLYFDVWGAGTLVTVSS

SEQ ID NO: 13062 - protein, 107 aa, synthetic construct; identical to SEQ ID NO: 10923
  REGION 1..107: note = Description of Artificial Sequence: Synthetic polypeptide
  REGION 1..107: note = VL of XENP018730

SEQ ID NO: 13063 - protein, 5 aa, synthetic construct
  REGION 1..5: note = Description of Artificial Sequence: Synthetic peptide
  REGION 1..5: note = XENP018730 vhCDR1
NYWMN

SEQ ID NO: 13064 - protein, 19 aa, synthetic construct
  REGION 1..19: note = Description of Artificial Sequence: Synthetic peptide
  REGION 1..19: note = XENP018730 vhCDR2
EIRLKSNNYATHYAEPVKG

SEQ ID NO: 13065 - protein, 11 aa, synthetic construct
  REGION 1..11: note = Description of Artificial Sequence: Synthetic peptide
  REGION 1..11: note = XENP018730 vhCDR3
YYGNYGLYFDV

SEQ ID NO: 13066 - protein, 11 aa, synthetic construct
  REGION 1..11: note = Description of Artificial Sequence: Synthetic peptide
  REGION 1..11: note = XENP018730 vlCDR1
RASQSVSNDVA

SEQ ID NO: 13067 - protein, 7 aa, synthetic construct
  REGION 1..7: note = Description of Artificial Sequence: Synthetic peptide
  REGION 1..7: note = XENP018730 vlCDR2
YASHRYT

SEQ ID NO: 13068 - protein, 9 aa, synthetic construct
  REGION 1..9: note = Description of Artificial Sequence: Synthetic peptide
  REGION 1..9: note = XENP018730 vlCDR3
QQDYSSPRT

SEQ ID NO: 13069 - protein, 249 aa, synthetic construct
  REGION 1..249: note = Description of Artificial Sequence: Synthetic polypeptide
  REGION 1..249: note = XENP018731 1G6_H1.227_L1_scFv(GKPGS)4
EVQLVESGGGLVKPGGSLRLSCAASGFTFSNYWMNWVRQAPGKGLEWVGEIRLKSNNYATHYAEPVKGRFTISRDDSKSTVYLQMNSLKTEDTAVYYCTRYYGNYGFYFDVWGAGTLVTVSSGKPGSGKPGSGKPGSGKPGSSIVMTQSPATLSVSPGERATLSCRASQSVSNDVAWYQQKPGQSPRLLINYASHRYTGVPDRFTGSGYGTEFTLTISSLQSEDFAVYFCQQDYSSPRTFGGGTKVEIK

SEQ ID NO: 13070 - protein, 122 aa, synthetic construct
  REGION 1..122: note = Description of Artificial Sequence: Synthetic polypeptide
  REGION 1..122: note = VH of XENP018731
EVQLVESGGGLVKPGGSLRLSCAASGFTFSNYWMNWVRQAPGKGLEWVGEIRLKSNNYATHYAEPVKGRFTISRDDSKSTVYLQMNSLKTEDTAVYYCTRYYGNYGFYFDVWGAGTLVTVSS

SEQ ID NO: 13071 - protein, 107 aa, synthetic construct; identical to SEQ ID NO: 10923
  REGION 1..107: note = Description of Artificial Sequence: Synthetic polypeptide
  REGION 1..107: note = VL of XENP018731

SEQ ID NO: 13072 - protein, 5 aa, synthetic construct
  REGION 1..5: note = Description of Artificial Sequence: Synthetic peptide
  REGION 1..5: note = XENP018731 vhCDR1
NYWMN

SEQ ID NO: 13073 - protein, 19 aa, synthetic construct
  REGION 1..19: note = Description of Artificial Sequence: Synthetic peptide
  REGION 1..19: note = XENP018731 vhCDR2
EIRLKSNNYATHYAEPVKG

SEQ ID NO: 13074 - protein, 11 aa, synthetic construct
  REGION 1..11: note = Description of Artificial Sequence: Synthetic peptide
  REGION 1..11: note = XENP018731 vhCDR3
YYGNYGFYFDV

SEQ ID NO: 13075 - protein, 11 aa, synthetic construct
  REGION 1..11: note = Description of Artificial Sequence: Synthetic peptide
  REGION 1..11: note = XENP018731 vlCDR1
RASQSVSNDVA

SEQ ID NO: 13076 - protein, 7 aa, synthetic construct
  REGION 1..7: note = Description of Artificial Sequence: Synthetic peptide
  REGION 1..7: note = XENP018731 vlCDR2
YASHRYT

SEQ ID NO: 13077 - protein, 9 aa, synthetic construct
  REGION 1..9: note = Description of Artificial Sequence: Synthetic peptide
  REGION 1..9: note = XENP018731 vlCDR3
QQDYSSPRT

SEQ ID NO: 13078 - protein, 249 aa, synthetic construct
  REGION 1..249: note = Description of Artificial Sequence: Synthetic polypeptide
  REGION 1..249: note = XENP018732 1G6_H1.228_L1_scFv(GKPGS)4
EVQLVESGGGLVKPGGSLRLSCAASGFTFSNYWMNWVRQAPGKGLEWVGEIRLKSNNYATHYAEPVKGRFTISRDDSKSTVYLQMNSLKTEDTAVYYCTRYYGNYGGFFDVWGAGTLVTVSSGKPGSGKPGSGKPGSGKPGSSIVMTQSPATLSVSPGERATLSCRASQSVSNDVAWYQQKPGQSPRLLINYASHRYTGVPDRFTGSGYGTEFTLTISSLQSEDFAVYFCQQDYSSPRTFGGGTKVEIK

SEQ ID NO: 13079 - protein, 122 aa, synthetic construct
  REGION 1..122: note = Description of Artificial Sequence: Synthetic polypeptide
  REGION 1..122: note = VH of XENP018732
EVQLVESGGGLVKPGGSLRLSCAASGFTFSNYWMNWVRQAPGKGLEWVGEIRLKSNNYATHYAEPVKGRFTISRDDSKSTVYLQMNSLKTEDTAVYYCTRYYGNYGGFFDVWGAGTLVTVSS

SEQ ID NO: 13080 - protein, 107 aa, synthetic construct; identical to SEQ ID NO: 10923
  REGION 1..107: note = Description of Artificial Sequence: Synthetic polypeptide
  REGION 1..107: note = VL of XENP018732

SEQ ID NO: 13081 - protein, 5 aa, synthetic construct
  REGION 1..5: note = Description of Artificial Sequence: Synthetic peptide
  REGION 1..5: note = XENP018732 vhCDR1
NYWMN

SEQ ID NO: 13082 - protein, 19 aa, synthetic construct
  REGION 1..19: note = Description of Artificial Sequence: Synthetic peptide
  REGION 1..19: note = XENP018732 vhCDR2
EIRLKSNNYATHYAEPVKG

SEQ ID NO: 13083 - protein, 11 aa, synthetic construct
  REGION 1..11: note = Description of Artificial Sequence: Synthetic peptide
  REGION 1..11: note = XENP018732 vhCDR3
YYGNYGGFFDV

SEQ ID NO: 13084 - protein, 11 aa, synthetic construct
  REGION 1..11: note = Description of Artificial Sequence: Synthetic peptide
  REGION 1..11: note = XENP018732 vlCDR1
RASQSVSNDVA

SEQ ID NO: 13085 - protein, 7 aa, synthetic construct
  REGION 1..7: note = Description of Artificial Sequence: Synthetic peptide
  REGION 1..7: note = XENP018732 vlCDR2
YASHRYT

SEQ ID NO: 13086 - protein, 9 aa, synthetic construct
  REGION 1..9: note = Description of Artificial Sequence: Synthetic peptide
  REGION 1..9: note = XENP018732 vlCDR3
QQDYSSPRT

SEQ ID NO: 13087 - protein, 249 aa, synthetic construct
  REGION 1..249: note = Description of Artificial Sequence: Synthetic polypeptide
  REGION 1..249: note = XENP018733 1G6_H1.229_L1_scFv(GKPGS)4
EVQLVESGGGLVKPGGSLRLSCAASGFTFSNYWMNWVRQAPGKGLEWVGEIRLKSNNYATHYAEPVKGRFTISRDDSKSTVYLQMNSLKTEDTAVYYCTRYYGNYGGHFDVWGAGTLVTVSSGKPGSGKPGSGKPGSGKPGSSIVMTQSPATLSVSPGERATLSCRASQSVSNDVAWYQQKPGQSPRLLINYASHRYTGVPDRFTGSGYGTEFTLTISSLQSEDFAVYFCQQDYSSPRTFGGGTKVEIK

SEQ ID NO: 13088 - protein, 122 aa, synthetic construct
  REGION 1..122: note = Description of Artificial Sequence: Synthetic polypeptide
  REGION 1..122: note = VH of XENP018733
EVQLVESGGGLVKPGGSLRLSCAASGFTFSNYWMNWVRQAPGKGLEWVGEIRLKSNNYATHYAEPVKGRFTISRDDSKSTVYLQMNSLKTEDTAVYYCTRYYGNYGGHFDVWGAGTLVTVSS

SEQ ID NO: 13089 - protein, 107 aa, synthetic construct; identical to SEQ ID NO: 10923
  REGION 1..107: note = Description of Artificial Sequence: Synthetic polypeptide
  REGION 1..107: note = VL of XENP018733

SEQ ID NO: 13090 - protein, 5 aa, synthetic construct
  REGION 1..5: note = Description of Artificial Sequence: Synthetic peptide
  REGION 1..5: note = XENP018733 vhCDR1
NYWMN

SEQ ID NO: 13091 - protein, 19 aa, synthetic construct
  REGION 1..19: note = Description of Artificial Sequence: Synthetic peptide
  REGION 1..19: note = XENP018733 vhCDR2
EIRLKSNNYATHYAEPVKG

SEQ ID NO: 13092 - protein, 11 aa, synthetic construct
  REGION 1..11: note = Description of Artificial Sequence: Synthetic peptide
  REGION 1..11: note = XENP018733 vhCDR3
YYGNYGGHFDV

SEQ ID NO: 13093 - protein, 11 aa, synthetic construct
  REGION 1..11: note = Description of Artificial Sequence: Synthetic peptide
  REGION 1..11: note = XENP018733 vlCDR1
RASQSVSNDVA

SEQ ID NO: 13094 - protein, 7 aa, synthetic construct
  REGION 1..7: note = Description of Artificial Sequence: Synthetic peptide
  REGION 1..7: note = XENP018733 vlCDR2
YASHRYT

SEQ ID NO: 13095 - protein, 9 aa, synthetic construct
  REGION 1..9: note = Description of Artificial Sequence: Synthetic peptide
  REGION 1..9: note = XENP018733 vlCDR3
QQDYSSPRT

SEQ ID NO: 13096 - protein, 249 aa, synthetic construct
  REGION 1..249: note = Description of Artificial Sequence: Synthetic polypeptide
  REGION 1..249: note = XENP018734 1G6_H1.230_L1_scFv(GKPGS)4
EVQLVESGGGLVKPGGSLRLSCAASGFTFSNYWMNWVRQAPGKGLEWVGEIRLKSNNYATHYAEPVKGRFTISRDDSKSTVYLQMNSLKTEDTAVYYCTRYYGNYGGLFDVWGAGTLVTVSSGKPGSGKPGSGKPGSGKPGSSIVMTQSPATLSVSPGERATLSCRASQSVSNDVAWYQQKPGQSPRLLINYASHRYTGVPDRFTGSGYGTEFTLTISSLQSEDFAVYFCQQDYSSPRTFGGGTKVEIK

SEQ ID NO: 13097 - protein, 122 aa, synthetic construct
  REGION 1..122: note = Description of Artificial Sequence: Synthetic polypeptide
  REGION 1..122: note = VH of XENP018734
EVQLVESGGGLVKPGGSLRLSCAASGFTFSNYWMNWVRQAPGKGLEWVGEIRLKSNNYATHYAEPVKGRFTISRDDSKSTVYLQMNSLKTEDTAVYYCTRYYGNYGGLFDVWGAGTLVTVSS

SEQ ID NO: 13098 - protein, 107 aa, synthetic construct; identical to SEQ ID NO: 10923
  REGION 1..107: note = Description of Artificial Sequence: Synthetic polypeptide
  REGION 1..107: note = VL of XENP018734

SEQ ID NO: 13099 - protein, 5 aa, synthetic construct
  REGION 1..5: note = Description of Artificial Sequence: Synthetic peptide
  REGION 1..5: note = XENP018734 vhCDR1
NYWMN

SEQ ID NO: 13100 - protein, 19 aa, synthetic construct
  REGION 1..19: note = Description of Artificial Sequence: Synthetic peptide
  REGION 1..19: note = XENP018734 vhCDR2
EIRLKSNNYATHYAEPVKG

SEQ ID NO: 13101 - protein, 11 aa, synthetic construct
  REGION 1..11: note = Description of Artificial Sequence: Synthetic peptide
  REGION 1..11: note = XENP018734 vhCDR3
YYGNYGGLFDV

SEQ ID NO: 13102 - protein, 11 aa, synthetic construct
  REGION 1..11: note = Description of Artificial Sequence: Synthetic peptide
  REGION 1..11: note = XENP018734 vlCDR1
RASQSVSNDVA

SEQ ID NO: 13103 - protein, 7 aa, synthetic construct
  REGION 1..7: note = Description of Artificial Sequence: Synthetic peptide
  REGION 1..7: note = XENP018734 vlCDR2
YASHRYT

SEQ ID NO: 13104 - protein, 9 aa, synthetic construct
  REGION 1..9: note = Description of Artificial Sequence: Synthetic peptide
  REGION 1..9: note = XENP018734 vlCDR3
QQDYSSPRT

SEQ ID NO: 13105 - protein, 249 aa, synthetic construct
  REGION 1..249: note = Description of Artificial Sequence: Synthetic polypeptide
  REGION 1..249: note = XENP018735 1G6_H1.231_L1_scFv(GKPGS)4
EVQLVESGGGLVKPGGSLRLSCAASGFTFSNYWMNWVRQAPGKGLEWVGEIRLKSNNYATHYAEPVKGRFTISRDDSKSTVYLQMNSLKTEDTAVYYCTRYYGNYGGWFDVWGAGTLVTVSSGKPGSGKPGSGKPGSGKPGSSIVMTQSPATLSVSPGERATLSCRASQSVSNDVAWYQQKPGQSPRLLINYASHRYTGVPDRFTGSGYGTEFTLTISSLQSEDFAVYFCQQDYSSPRTFGGGTKVEIK

SEQ ID NO: 13106 - protein, 122 aa, synthetic construct
  REGION 1..122: note = Description of Artificial Sequence: Synthetic polypeptide
  REGION 1..122: note = VH of XENP018735
EVQLVESGGGLVKPGGSLRLSCAASGFTFSNYWMNWVRQAPGKGLEWVGEIRLKSNNYATHYAEPVKGRFTISRDDSKSTVYLQMNSLKTEDTAVYYCTRYYGNYGGWFDVWGAGTLVTVSS

SEQ ID NO: 13107 - protein, 107 aa, synthetic construct; identical to SEQ ID NO: 10923
  REGION 1..107: note = Description of Artificial Sequence: Synthetic polypeptide
  REGION 1..107: note = VL of XENP018735

SEQ ID NO: 13108 - protein, 5 aa, synthetic construct
  REGION 1..5: note = Description of Artificial Sequence: Synthetic peptide
  REGION 1..5: note = XENP018735 vhCDR1
NYWMN

SEQ ID NO: 13109 - protein, 19 aa, synthetic construct
  REGION 1..19: note = Description of Artificial Sequence: Synthetic peptide
  REGION 1..19: note = XENP018735 vhCDR2
EIRLKSNNYATHYAEPVKG

SEQ ID NO: 13110 - protein, 11 aa, synthetic construct
  REGION 1..11: note = Description of Artificial Sequence: Synthetic peptide
  REGION 1..11: note = XENP018735 vhCDR3
YYGNYGGWFDV

SEQ ID NO: 13111 - protein, 11 aa, synthetic construct
  REGION 1..11: note = Description of Artificial Sequence: Synthetic peptide
  REGION 1..11: note = XENP018735 vlCDR1
RASQSVSNDVA

SEQ ID NO: 13112 - protein, 7 aa, synthetic construct
  REGION 1..7: note = Description of Artificial Sequence: Synthetic peptide
  REGION 1..7: note = XENP018735 vlCDR2
YASHRYT

SEQ ID NO: 13113 - protein, 9 aa, synthetic construct
  REGION 1..9: note = Description of Artificial Sequence: Synthetic peptide
  REGION 1..9: note = XENP018735 vlCDR3
QQDYSSPRT

SEQ ID NO: 13114 - protein, 249 aa, synthetic construct
  REGION 1..249: note = Description of Artificial Sequence: Synthetic polypeptide
  REGION 1..249: note = XENP018736 1G6_H1.232_L1_scFv(GKPGS)4
EVQLVESGGGLVKPGGSLRLSCAASGFTFSNYWMNWVRQAPGKGLEWVGEIRLKSNNYATHYAEPVKGRFTISRDDSKSTVYLQMNSLKTEDTAVYYCTRYYGNYGGVFDVWGAGTLVTVSSGKPGSGKPGSGKPGSGKPGSSIVMTQSPATLSVSPGERATLSCRASQSVSNDVAWYQQKPGQSPRLLINYASHRYTGVPDRFTGSGYGTEFTLTISSLQSEDFAVYFCQQDYSSPRTFGGGTKVEIK

SEQ ID NO: 13115 - protein, 122 aa, synthetic construct
  REGION 1..122: note = Description of Artificial Sequence: Synthetic polypeptide
  REGION 1..122: note = VH of XENP018736
EVQLVESGGGLVKPGGSLRLSCAASGFTFSNYWMNWVRQAPGKGLEWVGEIRLKSNNYATHYAEPVKGRFTISRDDSKSTVYLQMNSLKTEDTAVYYCTRYYGNYGGVFDVWGAGTLVTVSS

SEQ ID NO: 13116 - protein, 107 aa, synthetic construct; identical to SEQ ID NO: 10923
  REGION 1..107: note = Description of Artificial Sequence: Synthetic polypeptide
  REGION 1..107: note = VL of XENP018736

SEQ ID NO: 13117 - protein, 5 aa, synthetic construct
  REGION 1..5: note = Description of Artificial Sequence: Synthetic peptide
  REGION 1..5: note = XENP018736 vhCDR1
NYWMN

SEQ ID NO: 13118 - protein, 19 aa, synthetic construct
  REGION 1..19: note = Description of Artificial Sequence: Synthetic peptide
  REGION 1..19: note = XENP018736 vhCDR2
EIRLKSNNYATHYAEPVKG

SEQ ID NO: 13119 - protein, 11 aa, synthetic construct
  REGION 1..11: note = Description of Artificial Sequence: Synthetic peptide
  REGION 1..11: note = XENP018736 vhCDR3
YYGNYGGVFDV

SEQ ID NO: 13120 - protein, 11 aa, synthetic construct
  REGION 1..11: note = Description of Artificial Sequence: Synthetic peptide
  REGION 1..11: note = XENP018736 vlCDR1
RASQSVSNDVA

SEQ ID NO: 13121 - protein, 7 aa, synthetic construct
  REGION 1..7: note = Description of Artificial Sequence: Synthetic peptide
  REGION 1..7: note = XENP018736 vlCDR2
YASHRYT

SEQ ID NO: 13122 - protein, 9 aa, synthetic construct
  REGION 1..9: note = Description of Artificial Sequence: Synthetic peptide
  REGION 1..9: note = XENP018736 vlCDR3
QQDYSSPRT

SEQ ID NO: 13123 - protein, 249 aa, synthetic construct
  REGION 1..249: note = Description of Artificial Sequence: Synthetic polypeptide
  REGION 1..249: note = XENP018737 1G6_H1.233_L1_scFv(GKPGS)4
EVQLVESGGGLVKPGGSLRLSCAASGFTFSNYWMNWVRQAPGKGLEWVGEIRLKSNNYATHYAEPVKGRFTISRDDSKSTVYLQMNSLKTEDTAVYYCTRYYGNYGGAFDVWGAGTLVTVSSGKPGSGKPGSGKPGSGKPGSSIVMTQSPATLSVSPGERATLSCRASQSVSNDVAWYQQKPGQSPRLLINYASHRYTGVPDRFTGSGYGTEFTLTISSLQSEDFAVYFCQQDYSSPRTFGGGTKVEIK

SEQ ID NO: 13124 - protein, 122 aa, synthetic construct
  REGION 1..122: note = Description of Artificial Sequence: Synthetic polypeptide
  REGION 1..122: note = VH of XENP018737
EVQLVESGGGLVKPGGSLRLSCAASGFTFSNYWMNWVRQAPGKGLEWVGEIRLKSNNYATHYAEPVKGRFTISRDDSKSTVYLQMNSLKTEDTAVYYCTRYYGNYGGAFDVWGAGTLVTVSS

SEQ ID NO: 13125 - protein, 107 aa, synthetic construct; identical to SEQ ID NO: 10923
  REGION 1..107: note = Description of Artificial Sequence: Synthetic polypeptide
  REGION 1..107: note = VL of XENP018737

SEQ ID NO: 13126 - protein, 5 aa, synthetic construct
  REGION 1..5: note = Description of Artificial Sequence: Synthetic peptide
  REGION 1..5: note = XENP018737 vhCDR1
NYWMN

SEQ ID NO: 13127 - protein, 19 aa, synthetic construct
  REGION 1..19: note = Description of Artificial Sequence: Synthetic peptide
  REGION 1..19: note = XENP018737 vhCDR2
EIRLKSNNYATHYAEPVKG

SEQ ID NO: 13128 - protein, 11 aa, synthetic construct
  REGION 1..11: note = Description of Artificial Sequence: Synthetic peptide
  REGION 1..11: note = XENP018737 vhCDR3
YYGNYGGAFDV

SEQ ID NO: 13129 - protein, 11 aa, synthetic construct
  REGION 1..11: note = Description of Artificial Sequence: Synthetic peptide
  REGION 1..11: note = XENP018737 vlCDR1
RASQSVSNDVA

SEQ ID NO: 13130 - protein, 7 aa, synthetic construct
  REGION 1..7: note = Description of Artificial Sequence: Synthetic peptide
  REGION 1..7: note = XENP018737 vlCDR2
YASHRYT

SEQ ID NO: 13131 - protein, 9 aa, synthetic construct
  REGION 1..9: note = Description of Artificial Sequence: Synthetic peptide
  REGION 1..9: note = XENP018737 vlCDR3
QQDYSSPRT

SEQ ID NO: 13132 - protein, 249 aa, synthetic construct
  REGION 1..249: note = Description of Artificial Sequence: Synthetic polypeptide
  REGION 1..249: note = XENP018738 1G6_H1.234_L1_scFv(GKPGS)4
EVQLVESGGGLVKPGGSLRLSCAASGFTFSNYWMNWVRQAPGKGLEWVGEIRLKSNNYATHYAEPVKGRFTISRDDSKSTVYLQMNSLKTEDTAVYYCTRYYGNYGGQFDVWGAGTLVTVSSGKPGSGKPGSGKPGSGKPGSSIVMTQSPATLSVSPGERATLSCRASQSVSNDVAWYQQKPGQSPRLLINYASHRYTGVPDRFTGSGYGTEFTLTISSLQSEDFAVYFCQQDYSSPRTFGGGTKVEIK

SEQ ID NO: 13133 - protein, 122 aa, synthetic construct
  REGION 1..122: note = Description of Artificial Sequence: Synthetic polypeptide
  REGION 1..122: note = VH of XENP018738
EVQLVESGGGLVKPGGSLRLSCAASGFTFSNYWMNWVRQAPGKGLEWVGEIRLKSNNYATHYAEPVKGRFTISRDDSKSTVYLQMNSLKTEDTAVYYCTRYYGNYGGQFDVWGAGTLVTVSS

SEQ ID NO: 13134 - protein, 107 aa, synthetic construct; identical to SEQ ID NO: 10923
  REGION 1..107: note = Description of Artificial Sequence: Synthetic polypeptide
  REGION 1..107: note = VL of XENP018738

SEQ ID NO: 13135 - protein, 5 aa, synthetic construct
  REGION 1..5: note = Description of Artificial Sequence: Synthetic peptide
  REGION 1..5: note = XENP018738 vhCDR1
NYWMN

SEQ ID NO: 13136 - protein, 19 aa, synthetic construct
  REGION 1..19: note = Description of Artificial Sequence: Synthetic peptide
  REGION 1..19: note = XENP018738 vhCDR2
EIRLKSNNYATHYAEPVKG

SEQ ID NO: 13137 - protein, 11 aa, synthetic construct
  REGION 1..11: note = Description of Artificial Sequence: Synthetic peptide
  REGION 1..11: note = XENP018738 vhCDR3
YYGNYGGQFDV

SEQ ID NO: 13138 - protein, 11 aa, synthetic construct
  REGION 1..11: note = Description of Artificial Sequence: Synthetic peptide
  REGION 1..11: note = XENP018738 vlCDR1
RASQSVSNDVA

SEQ ID NO: 13139 - protein, 7 aa, synthetic construct
  REGION 1..7: note = Description of Artificial Sequence: Synthetic peptide
  REGION 1..7: note = XENP018738 vlCDR2
YASHRYT

SEQ ID NO: 13140 - protein, 9 aa, synthetic construct
  REGION 1..9: note = Description of Artificial Sequence: Synthetic peptide
  REGION 1..9: note = XENP018738 vlCDR3
QQDYSSPRT

SEQ ID NO: 13141 - protein, 249 aa, synthetic construct
  REGION 1..249: note = Description of Artificial Sequence: Synthetic polypeptide
  REGION 1..249: note = XENP018739 1G6_H1.235_L1_scFv(GKPGS)4
EVQLVESGGGLVKPGGSLRLSCAASGFTFSNYWMNWVRQAPGKGLEWVGEIRLKSNNYATHYAEPVKGRFTISRDDSKSTVYLQMNSLKTEDTAVYYCTRYYGNYGGDFDVWGAGTLVTVSSGKPGSGKPGSGKPGSGKPGSSIVMTQSPATLSVSPGERATLSCRASQSVSNDVAWYQQKPGQSPRLLINYASHRYTGVPDRFTGSGYGTEFTLTISSLQSEDFAVYFCQQDYSSPRTFGGGTKVEIK

SEQ ID NO: 13142 - protein, 122 aa, synthetic construct
  REGION 1..122: note = Description of Artificial Sequence: Synthetic polypeptide
  REGION 1..122: note = VH of XENP018739
EVQLVESGGGLVKPGGSLRLSCAASGFTFSNYWMNWVRQAPGKGLEWVGEIRLKSNNYATHYAEPVKGRFTISRDDSKSTVYLQMNSLKTEDTAVYYCTRYYGNYGGDFDVWGAGTLVTVSS

SEQ ID NO: 13143 - protein, 107 aa, synthetic construct; identical to SEQ ID NO: 10923
  REGION 1..107: note = Description of Artificial Sequence: Synthetic polypeptide
  REGION 1..107: note = VL of XENP018739

SEQ ID NO: 13144 - protein, 5 aa, synthetic construct
  REGION 1..5: note = Description of Artificial Sequence: Synthetic peptide
  REGION 1..5: note = XENP018739 vhCDR1
NYWMN

SEQ ID NO: 13145 - protein, 19 aa, synthetic construct
  REGION 1..19: note = Description of Artificial Sequence: Synthetic peptide
  REGION 1..19: note = XENP018739 vhCDR2
EIRLKSNNYATHYAEPVKG

SEQ ID NO: 13146 - protein, 11 aa, synthetic construct
  REGION 1..11: note = Description of Artificial Sequence: Synthetic peptide
  REGION 1..11: note = XENP018739 vhCDR3
YYGNYGGDFDV

SEQ ID NO: 13147 - protein, 11 aa, synthetic construct
  REGION 1..11: note = Description of Artificial Sequence: Synthetic peptide
  REGION 1..11: note = XENP018739 vlCDR1
RASQSVSNDVA

SEQ ID NO: 13148 - protein, 7 aa, synthetic construct
  REGION 1..7: note = Description of Artificial Sequence: Synthetic peptide
  REGION 1..7: note = XENP018739 vlCDR2
YASHRYT

SEQ ID NO: 13149 - protein, 9 aa, synthetic construct
  REGION 1..9: note = Description of Artificial Sequence: Synthetic peptide
  REGION 1..9: note = XENP018739 vlCDR3
QQDYSSPRT

SEQ ID NO: 13150 - protein, 249 aa, synthetic construct
  REGION 1..249: note = Description of Artificial Sequence: Synthetic polypeptide
  REGION 1..249: note = XENP018740 1G6_H1.236_L1_scFv(GKPGS)4
EVQLVESGGGLVKPGGSLRLSCAASGFTFSNYWMNWVRQAPGKGLEWVGEIRLKSNNYATHYAEPVKGRFTISRDDSKSTVYLQMNSLKTEDTAVYYCTRYYGNYGGKFDVWGAGTLVTVSSGKPGSGKPGSGKPGSGKPGSSIVMTQSPATLSVSPGERATLSCRASQSVSNDVAWYQQKPGQSPRLLINYASHRYTGVPDRFTGSGYGTEFTLTISSLQSEDFAVYFCQQDYSSPRTFGGGTKVEIK

SEQ ID NO: 13151 - protein, 122 aa, synthetic construct
  REGION 1..122: note = Description of Artificial Sequence: Synthetic polypeptide
  REGION 1..122: note = VH of XENP018740
EVQLVESGGGLVKPGGSLRLSCAASGFTFSNYWMNWVRQAPGKGLEWVGEIRLKSNNYATHYAEPVKGRFTISRDDSKSTVYLQMNSLKTEDTAVYYCTRYYGNYGGKFDVWGAGTLVTVSS

SEQ ID NO: 13152 - protein, 107 aa, synthetic construct; identical to SEQ ID NO: 10923
  REGION 1..107: note = Description of Artificial Sequence: Synthetic polypeptide
  REGION 1..107: note = VL of XENP018740

SEQ ID NO: 13153 - protein, 5 aa, synthetic construct
  REGION 1..5: note = Description of Artificial Sequence: Synthetic peptide
  REGION 1..5: note = XENP018740 vhCDR1
NYWMN

SEQ ID NO: 13154 - protein, 19 aa, synthetic construct
  REGION 1..19: note = Description of Artificial Sequence: Synthetic peptide
  REGION 1..19: note = XENP018740 vhCDR2
EIRLKSNNYATHYAEPVKG

SEQ ID NO: 13155 - protein, 11 aa, synthetic construct
  REGION 1..11: note = Description of Artificial Sequence: Synthetic peptide
  REGION 1..11: note = XENP018740 vhCDR3
YYGNYGGKFDV

SEQ ID NO: 13156 - protein, 11 aa, synthetic construct
  REGION 1..11: note = Description of Artificial Sequence: Synthetic peptide
  REGION 1..11: note = XENP018740 vlCDR1
RASQSVSNDVA

SEQ ID NO: 13157 - protein, 7 aa, synthetic construct
  REGION 1..7: note = Description of Artificial Sequence: Synthetic peptide
  REGION 1..7: note = XENP018740 vlCDR2
YASHRYT

SEQ ID NO: 13158 - protein, 9 aa, synthetic construct
  REGION 1..9: note = Description of Artificial Sequence: Synthetic peptide
  REGION 1..9: note = XENP018740 vlCDR3
QQDYSSPRT

SEQ ID NO: 13159 - protein, 249 aa, synthetic construct
  REGION 1..249: note = Description of Artificial Sequence: Synthetic polypeptide
  REGION 1..249: note = XENP018741 1G6_H1.237_L1_scFv(GKPGS)4
EVQLVESGGGLVKPGGSLRLSCAASGFTFSNYWMNWVRQAPGKGLEWVGEIRLKSNNYATHYAEPVKGRFTISRDDSKSTVYLQMNSLKTEDTAVYYCTRYYGNYGGYFDYWGAGTLVTVSSGKPGSGKPGSGKPGSGKPGSSIVMTQSPATLSVSPGERATLSCRASQSVSNDVAWYQQKPGQSPRLLINYASHRYTGVPDRFTGSGYGTEFTLTISSLQSEDFAVYFCQQDYSSPRTFGGGTKVEIK

SEQ ID NO: 13160 - protein, 122 aa, synthetic construct
  REGION 1..122: note = Description of Artificial Sequence: Synthetic polypeptide
  REGION 1..122: note = VH of XENP018741
EVQLVESGGGLVKPGGSLRLSCAASGFTFSNYWMNWVRQAPGKGLEWVGEIRLKSNNYATHYAEPVKGRFTISRDDSKSTVYLQMNSLKTEDTAVYYCTRYYGNYGGYFDYWGAGTLVTVSS

SEQ ID NO: 13161 - protein, 107 aa, synthetic construct; identical to SEQ ID NO: 10923
  REGION 1..107: note = Description of Artificial Sequence: Synthetic polypeptide
  REGION 1..107: note = VL of XENP018741

SEQ ID NO: 13162 - protein, 5 aa, synthetic construct
  REGION 1..5: note = Description of Artificial Sequence: Synthetic peptide
  REGION 1..5: note = XENP018741 vhCDR1
NYWMN

SEQ ID NO: 13163 - protein, 19 aa, synthetic construct
  REGION 1..19: note = Description of Artificial Sequence: Synthetic peptide
  REGION 1..19: note = XENP018741 vhCDR2
EIRLKSNNYATHYAEPVKG

SEQ ID NO: 13164 - protein, 11 aa, synthetic construct
  REGION 1..11: note = Description of Artificial Sequence: Synthetic peptide
  REGION 1..11: note = XENP018741 vhCDR3
YYGNYGGYFDY

SEQ ID NO: 13165 - protein, 11 aa, synthetic construct
  REGION 1..11: note = Description of Artificial Sequence: Synthetic peptide
  REGION 1..11: note = XENP018741 vlCDR1
RASQSVSNDVA

SEQ ID NO: 13166 - protein, 7 aa, synthetic construct
  REGION 1..7: note = Description of Artificial Sequence: Synthetic peptide
  REGION 1..7: note = XENP018741 vlCDR2
YASHRYT

SEQ ID NO: 13167 - protein, 9 aa, synthetic construct
  REGION 1..9: note = Description of Artificial Sequence: Synthetic peptide
  REGION 1..9: note = XENP018741 vlCDR3
QQDYSSPRT

SEQ ID NO: 13168 - protein, 249 aa, synthetic construct
  REGION 1..249: note = Description of Artificial Sequence: Synthetic polypeptide
  REGION 1..249: note = XENP018742 1G6_H1.238_L1_scFv(GKPGS)4
EVQLVESGGGLVKPGGSLRLSCAASGFTFSNYWMNWVRQAPGKGLEWVGEIRLKSNNYATHYAEPVKGRFTISRDDSKSTVYLQMNSLKTEDTAVYYCTRYYGNYGGYFDVWGQGTLVTVSSGKPGSGKPGSGKPGSGKPGSSIVMTQSPATLSVSPGERATLSCRASQSVSNDVAWYQQKPGQSPRLLINYASHRYTGVPDRFTGSGYGTEFTLTISSLQSEDFAVYFCQQDYSSPRTFGGGTKVEIK

SEQ ID NO: 13169 - protein, 122 aa, synthetic construct
  REGION 1..122: note = Description of Artificial Sequence: Synthetic polypeptide
  REGION 1..122: note = VH of XENP018742
EVQLVESGGGLVKPGGSLRLSCAASGFTFSNYWMNWVRQAPGKGLEWVGEIRLKSNNYATHYAEPVKGRFTISRDDSKSTVYLQMNSLKTEDTAVYYCTRYYGNYGGYFDVWGQGTLVTVSS

SEQ ID NO: 13170 - protein, 107 aa, synthetic construct; identical to SEQ ID NO: 10923
  REGION 1..107: note = Description of Artificial Sequence: Synthetic polypeptide
  REGION 1..107: note = VL of XENP018742

SEQ ID NO: 13171 - protein, 5 aa, synthetic construct
  REGION 1..5: note = Description of Artificial Sequence: Synthetic peptide
  REGION 1..5: note = XENP018742 vhCDR1
NYWMN

SEQ ID NO: 13172 - protein, 19 aa, synthetic construct
  REGION 1..19: note = Description of Artificial Sequence: Synthetic peptide
  REGION 1..19: note = XENP018742 vhCDR2
EIRLKSNNYATHYAEPVKG

SEQ ID NO: 13173 - protein, 11 aa, synthetic construct
  REGION 1..11: note = Description of Artificial Sequence: Synthetic peptide
  REGION 1..11: note = XENP018742 vhCDR3
YYGNYGGYFDV

SEQ ID NO: 13174 - protein, 11 aa, synthetic construct
  REGION 1..11: note = Description of Artificial Sequence: Synthetic peptide
  REGION 1..11: note = XENP018742 vlCDR1
RASQSVSNDVA

SEQ ID NO: 13175 - protein, 7 aa, synthetic construct
  REGION 1..7: note = Description of Artificial Sequence: Synthetic peptide
  REGION 1..7: note = XENP018742 vlCDR2
YASHRYT

SEQ ID NO: 13176 - protein, 9 aa, synthetic construct
  REGION 1..9: note = Description of Artificial Sequence: Synthetic peptide
  REGION 1..9: note = XENP018742 vlCDR3
QQDYSSPRT

SEQ ID NO: 13177 - protein, 249 aa, synthetic construct
  REGION 1..249: note = Description of Artificial Sequence: Synthetic polypeptide
  REGION 1..249: note = XENP018743 1G6_H1_L1.1_scFv(GKPGS)4
EVQLVESGGGLVKPGGSLRLSCAASGFTFSNYWMNWVRQAPGKGLEWVGEIRLKSNNYATHYAEPVKGRFTISRDDSKSTVYLQMNSLKTEDTAVYYCTRYYGNYGGYFDVWGAGTLVTVSSGKPGSGKPGSGKPGSGKPGSEIVMTQSPATLSVSPGERATLSCRASQSVSNDVAWYQQKPGQSPRLLINYASHRYTGVPDRFTGSGYGTEFTLTISSLQSEDFAVYFCQQDYSSPRTFGGGTKVEIK

SEQ ID NO: 13178 - protein, 122 aa, synthetic construct; identical to SEQ ID NO: 10922
  REGION 1..122: note = Description of Artificial Sequence: Synthetic polypeptide
  REGION 1..122: note = VH of XENP018743

SEQ ID NO: 13179 - protein, 107 aa, synthetic construct
  REGION 1..107: note = Description of Artificial Sequence: Synthetic polypeptide
  REGION 1..107: note = VL of XENP018743
EIVMTQSPATLSVSPGERATLSCRASQSVSNDVAWYQQKPGQSPRLLINYASHRYTGVPDRFTGSGYGTEFTLTISSLQSEDFAVYFCQQDYSSPRTFGGGTKVEIK

SEQ ID NO: 13180 - protein, 5 aa, synthetic construct
  REGION 1..5: note = Description of Artificial Sequence: Synthetic peptide
  REGION 1..5: note = XENP018743 vhCDR1
NYWMN

SEQ ID NO: 13181 - protein, 19 aa, synthetic construct
  REGION 1..19: note = Description of Artificial Sequence: Synthetic peptide
  REGION 1..19: note = XENP018743 vhCDR2
EIRLKSNNYATHYAEPVKG

SEQ ID NO: 13182 - protein, 11 aa, synthetic construct
  REGION 1..11: note = Description of Artificial Sequence: Synthetic peptide
  REGION 1..11: note = XENP018743 vhCDR3
YYGNYGGYFDV

SEQ ID NO: 13183 - protein, 11 aa, synthetic construct
  REGION 1..11: note = Description of Artificial Sequence: Synthetic peptide
  REGION 1..11: note = XENP018743 vlCDR1
RASQSVSNDVA

SEQ ID NO: 13184 - protein, 7 aa, synthetic construct
  REGION 1..7: note = Description of Artificial Sequence: Synthetic peptide
  REGION 1..7: note = XENP018743 vlCDR2
YASHRYT

SEQ ID NO: 13185 - protein, 9 aa, synthetic construct
  REGION 1..9: note = Description of Artificial Sequence: Synthetic peptide
  REGION 1..9: note = XENP018743 vlCDR3
QQDYSSPRT

SEQ ID NO: 13186 - protein, 249 aa, synthetic construct
  REGION 1..249: note = Description of Artificial Sequence: Synthetic polypeptide
  REGION 1..249: note = XENP018744 1G6_H1_L1.2_scFv(GKPGS)4
EVQLVESGGGLVKPGGSLRLSCAASGFTFSNYWMNWVRQAPGKGLEWVGEIRLKSNNYATHYAEPVKGRFTISRDDSKSTVYLQMNSLKTEDTAVYYCTRYYGNYGGYFDVWGAGTLVTVSSGKPGSGKPGSGKPGSGKPGSDIVMTQSPATLSVSPGERATLSCRASQSVSNDVAWYQQKPGQSPRLLINYASHRYTGVPDRFTGSGYGTEFTLTISSLQSEDFAVYFCQQDYSSPRTFGGGTKVEIK

SEQ ID NO: 13187 - protein, 122 aa, synthetic construct; identical to SEQ ID NO: 10922
  REGION 1..122: note = Description of Artificial Sequence: Synthetic polypeptide
  REGION 1..122: note = VH of XENP018744

SEQ ID NO: 13188 - protein, 107 aa, synthetic construct
  REGION 1..107: note = Description of Artificial Sequence: Synthetic polypeptide
  REGION 1..107: note = VL of XENP018744
DIVMTQSPATLSVSPGERATLSCRASQSVSNDVAWYQQKPGQSPRLLINYASHRYTGVPDRFTGSGYGTEFTLTISSLQSEDFAVYFCQQDYSSPRTFGGGTKVEIK

SEQ ID NO: 13189 - protein, 5 aa, synthetic construct
  REGION 1..5: note = Description of Artificial Sequence: Synthetic peptide
  REGION 1..5: note = XENP018744 vhCDR1
NYWMN

SEQ ID NO: 13190 - protein, 19 aa, synthetic construct
  REGION 1..19: note = Description of Artificial Sequence: Synthetic peptide
  REGION 1..19: note = XENP018744 vhCDR2
EIRLKSNNYATHYAEPVKG

SEQ ID NO: 13191 - protein, 11 aa, synthetic construct
  REGION 1..11: note = Description of Artificial Sequence: Synthetic peptide
  REGION 1..11: note = XENP018744 vhCDR3
YYGNYGGYFDV

SEQ ID NO: 13192 - protein, 11 aa, synthetic construct
  REGION 1..11: note = Description of Artificial Sequence: Synthetic peptide
  REGION 1..11: note = XENP018744 vlCDR1
RASQSVSNDVA

SEQ ID NO: 13193 - protein, 7 aa, synthetic construct
  REGION 1..7: note = Description of Artificial Sequence: Synthetic peptide
  REGION 1..7: note = XENP018744 vlCDR2
YASHRYT

SEQ ID NO: 13194 - protein, 9 aa, synthetic construct
  REGION 1..9: note = Description of Artificial Sequence: Synthetic peptide
  REGION 1..9: note = XENP018744 vlCDR3
QQDYSSPRT

SEQ ID NO: 13195 - protein, 249 aa, synthetic construct
  REGION 1..249: note = Description of Artificial Sequence: Synthetic polypeptide
  REGION 1..249: note = XENP018745 1G6_H1_L1.3_scFv(GKPGS)4
EVQLVESGGGLVKPGGSLRLSCAASGFTFSNYWMNWVRQAPGKGLEWVGEIRLKSNNYATHYAEPVKGRFTISRDDSKSTVYLQMNSLKTEDTAVYYCTRYYGNYGGYFDVWGAGTLVTVSSGKPGSGKPGSGKPGSGKPGSSVVMTQSPATLSVSPGERATLSCRASQSVSNDVAWYQQKPGQSPRLLINYASHRYTGVPDRFTGSGYGTEFTLTISSLQSEDFAVYFCQQDYSSPRTFGGGTKVEIK

SEQ ID NO: 13196 - protein, 122 aa, synthetic construct; identical to SEQ ID NO: 10922
  REGION 1..122: note = Description of Artificial Sequence: Synthetic polypeptide
  REGION 1..122: note = VH of XENP018745

SEQ ID NO: 13197 - protein, 107 aa, synthetic construct
  REGION 1..107: note = Description of Artificial Sequence: Synthetic polypeptide
  REGION 1..107: note = VL of XENP018745
SVVMTQSPATLSVSPGERATLSCRASQSVSNDVAWYQQKPGQSPRLLINYASHRYTGVPDRFTGSGYGTEFTLTISSLQSEDFAVYFCQQDYSSPRTFGGGTKVEIK

SEQ ID NO: 13198 - protein, 5 aa, synthetic construct
  REGION 1..5: note = Description of Artificial Sequence: Synthetic peptide
  REGION 1..5: note = XENP018745 vhCDR1
NYWMN

SEQ ID NO: 13199 - protein, 19 aa, synthetic construct
  REGION 1..19: note = Description of Artificial Sequence: Synthetic peptide
  REGION 1..19: note = XENP018745 vhCDR2
EIRLKSNNYATHYAEPVKG

SEQ ID NO: 13200 - protein, 11 aa, synthetic construct
  REGION 1..11: note = Description of Artificial Sequence: Synthetic peptide
  REGION 1..11: note = XENP018745 vhCDR3
YYGNYGGYFDV

SEQ ID NO: 13201 - protein, 11 aa, synthetic construct
  REGION 1..11: note = Description of Artificial Sequence: Synthetic peptide
  REGION 1..11: note = XENP018745 vlCDR1
RASQSVSNDVA

SEQ ID NO: 13202 - protein, 7 aa, synthetic construct
  REGION 1..7: note = Description of Artificial Sequence: Synthetic peptide
  REGION 1..7: note = XENP018745 vlCDR2
YASHRYT

SEQ ID NO: 13203 - protein, 9 aa, synthetic construct
  REGION 1..9: note = Description of Artificial Sequence: Synthetic peptide
  REGION 1..9: note = XENP018745 vlCDR3
QQDYSSPRT

SEQ ID NO: 13204 - protein, 249 aa, synthetic construct
  REGION 1..249: note = Description of Artificial Sequence: Synthetic polypeptide
  REGION 1..249: note = XENP018746 1G6_H1_L1.4_scFv(GKPGS)4
EVQLVESGGGLVKPGGSLRLSCAASGFTFSNYWMNWVRQAPGKGLEWVGEIRLKSNNYATHYAEPVKGRFTISRDDSKSTVYLQMNSLKTEDTAVYYCTRYYGNYGGYFDVWGAGTLVTVSSGKPGSGKPGSGKPGSGKPGSSIVLTQSPATLSVSPGERATLSCRASQSVSNDVAWYQQKPGQSPRLLINYASHRYTGVPDRFTGSGYGTEFTLTISSLQSEDFAVYFCQQDYSSPRTFGGGTKVEIK

SEQ ID NO: 13205 - protein, 122 aa, synthetic construct; identical to SEQ ID NO: 10922
  REGION 1..122: note = Description of Artificial Sequence: Synthetic polypeptide
  REGION 1..122: note = VH of XENP018746

SEQ ID NO: 13206 - protein, 107 aa, synthetic construct
  REGION 1..107: note = Description of Artificial Sequence: Synthetic polypeptide
  REGION 1..107: note = VL of XENP018746
SIVLTQSPATLSVSPGERATLSCRASQSVSNDVAWYQQKPGQSPRLLINYASHRYTGVPDRFTGSGYGTEFTLTISSLQSEDFAVYFCQQDYSSPRTFGGGTKVEIK

SEQ ID NO: 13207 - protein, 5 aa, synthetic construct
  REGION 1..5: note = Description of Artificial Sequence: Synthetic peptide
  REGION 1..5: note = XENP018746 vhCDR1
NYWMN

SEQ ID NO: 13208 - protein, 19 aa, synthetic construct
  REGION 1..19: note = Description of Artificial Sequence: Synthetic peptide
  REGION 1..19: note = XENP018746 vhCDR2
EIRLKSNNYATHYAEPVKG

SEQ ID NO: 13209 - protein, 11 aa, synthetic construct
  REGION 1..11: note = Description of Artificial Sequence: Synthetic peptide
  REGION 1..11: note = XENP018746 vhCDR3
YYGNYGGYFDV

SEQ ID NO: 13210 - protein, 11 aa, synthetic construct
  REGION 1..11: note = Description of Artificial Sequence: Synthetic peptide
  REGION 1..11: note = XENP018746 vlCDR1
RASQSVSNDVA

SEQ ID NO: 13211 - protein, 7 aa, synthetic construct
  REGION 1..7: note = Description of Artificial Sequence: Synthetic peptide
  REGION 1..7: note = XENP018746 vlCDR2
YASHRYT

SEQ ID NO: 13212 - protein, 9 aa, synthetic construct
  REGION 1..9: note = Description of Artificial Sequence: Synthetic peptide
  REGION 1..9: note = XENP018746 vlCDR3
QQDYSSPRT

SEQ ID NO: 13213 - protein, 249 aa, synthetic construct
  REGION 1..249: note = Description of Artificial Sequence: Synthetic polypeptide
  REGION 1..249: note = XENP018747 1G6_H1_L1.5_scFv(GKPGS)4
EVQLVESGGGLVKPGGSLRLSCAASGFTFSNYWMNWVRQAPGKGLEWVGEIRLKSNNYATHYAEPVKGRFTISRDDSKSTVYLQMNSLKTEDTAVYYCTRYYGNYGGYFDVWGAGTLVTVSSGKPGSGKPGSGKPGSGKPGSSIVMTQTPATLSVSPGERATLSCRASQSVSNDVAWYQQKPGQSPRLLINYASHRYTGVPDRFTGSGYGTEFTLTISSLQSEDFAVYFCQQDYSSPRTFGGGTKVEIK

SEQ ID NO: 13214 - protein, 122 aa, synthetic construct; identical to SEQ ID NO: 10922
  REGION 1..122: note = Description of Artificial Sequence: Synthetic polypeptide
  REGION 1..122: note = VH of XENP018747

SEQ ID NO: 13215 - protein, 107 aa, synthetic construct
  REGION 1..107: note = Description of Artificial Sequence: Synthetic polypeptide
  REGION 1..107: note = VL of XENP018747
SIVMTQTPATLSVSPGERATLSCRASQSVSNDVAWYQQKPGQSPRLLINYASHRYTGVPDRFTGSGYGTEFTLTISSLQSEDFAVYFCQQDYSSPRTFGGGTKVEIK

SEQ ID NO: 13216 - protein, 5 aa, synthetic construct
  REGION 1..5: note = Description of Artificial Sequence: Synthetic peptide
  REGION 1..5: note = XENP018747 vhCDR1
NYWMN

SEQ ID NO: 13217 - protein, 19 aa, synthetic construct
  REGION 1..19: note = Description of Artificial Sequence: Synthetic peptide
  REGION 1..19: note = XENP018747 vhCDR2
EIRLKSNNYATHYAEPVKG

SEQ ID NO: 13218 - protein, 11 aa, synthetic construct
  REGION 1..11: note = Description of Artificial Sequence: Synthetic peptide
  REGION 1..11: note = XENP018747 vhCDR3
YYGNYGGYFDV

SEQ ID NO: 13219 - protein, 11 aa, synthetic construct
  REGION 1..11: note = Description of Artificial Sequence: Synthetic peptide
  REGION 1..11: note = XENP018747 vlCDR1
RASQSVSNDVA

SEQ ID NO: 13220 - protein, 7 aa, synthetic construct
  REGION 1..7: note = Description of Artificial Sequence: Synthetic peptide
  REGION 1..7: note = XENP018747 vlCDR2
YASHRYT

SEQ ID NO: 13221 - protein, 9 aa, synthetic construct
  REGION 1..9: note = Description of Artificial Sequence: Synthetic peptide
  REGION 1..9: note = XENP018747 vlCDR3
QQDYSSPRT

SEQ ID NO: 13222 - protein, 249 aa, synthetic construct
  REGION 1..249: note = Description of Artificial Sequence: Synthetic polypeptide
  REGION 1..249: note = XENP018748 1G6_H1_L1.6_scFv(GKPGS)4
EVQLVESGGGLVKPGGSLRLSCAASGFTFSNYWMNWVRQAPGKGLEWVGEIRLKSNNYATHYAEPVKGRFTISRDDSKSTVYLQMNSLKTEDTAVYYCTRYYGNYGGYFDVWGAGTLVTVSSGKPGSGKPGSGKPGSGKPGSSIVMTQSPKTLSVSPGERATLSCRASQSVSNDVAWYQQKPGQSPRLLINYASHRYTGVPDRFTGSGYGTEFTLTISSLQSEDFAVYFCQQDYSSPRTFGGGTKVEIK

SEQ ID NO: 13223 - protein, 122 aa, synthetic construct; identical to SEQ ID NO: 10922
  REGION 1..122: note = Description of Artificial Sequence: Synthetic polypeptide
  REGION 1..122: note = VH of XENP018748

SEQ ID NO: 13224 - protein, 107 aa, synthetic construct
  REGION 1..107: note = Description of Artificial Sequence: Synthetic polypeptide
  REGION 1..107: note = VL of XENP018748
SIVMTQSPKTLSVSPGERATLSCRASQSVSNDVAWYQQKPGQSPRLLINYASHRYTGVPDRFTGSGYGTEFTLTISSLQSEDFAVYFCQQDYSSPRTFGGGTKVEIK

SEQ ID NO: 13225 - protein, 5 aa, synthetic construct
  REGION 1..5: note = Description of Artificial Sequence: Synthetic peptide
  REGION 1..5: note = XENP018748 vhCDR1
NYWMN

SEQ ID NO: 13226 - protein, 19 aa, synthetic construct
  REGION 1..19: note = Description of Artificial Sequence: Synthetic peptide
  REGION 1..19: note = XENP018748 vhCDR2
EIRLKSNNYATHYAEPVKG

SEQ ID NO: 13227 - protein, 11 aa, synthetic construct
  REGION 1..11: note = Description of Artificial Sequence: Synthetic peptide
  REGION 1..11: note = XENP018748 vhCDR3
YYGNYGGYFDV

SEQ ID NO: 13228 - protein, 11 aa, synthetic construct
  REGION 1..11: note = Description of Artificial Sequence: Synthetic peptide
  REGION 1..11: note = XENP018748 vlCDR1
RASQSVSNDVA

SEQ ID NO: 13229 - protein, 7 aa, synthetic construct
  REGION 1..7: note = Description of Artificial Sequence: Synthetic peptide
  REGION 1..7: note = XENP018748 vlCDR2
YASHRYT

SEQ ID NO: 13230 - protein, 9 aa, synthetic construct
  REGION 1..9: note = Description of Artificial Sequence: Synthetic peptide
  REGION 1..9: note = XENP018748 vlCDR3
QQDYSSPRT

SEQ ID NO: 13231 - protein, 249 aa, synthetic construct
  REGION 1..249: note = Description of Artificial Sequence: Synthetic polypeptide
  REGION 1..249: note = XENP018749 1G6_H1_L1.7_scFv(GKPGS)4
EVQLVESGGGLVKPGGSLRLSCAASGFTFSNYWMNWVRQAPGKGLEWVGEIRLKSNNYATHYAEPVKGRFTISRDDSKSTVYLQMNSLKTEDTAVYYCTRYYGNYGGYFDVWGAGTLVTVSSGKPGSGKPGSGKPGSGKPGSSIVMTQSPASLSVSPGERATLSCRASQSVSNDVAWYQQKPGQSPRLLINYASHRYTGVPDRFTGSGYGTEFTLTISSLQSEDFAVYFCQQDYSSPRTFGGGTKVEIK

SEQ ID NO: 13232 - protein, 122 aa, synthetic construct; identical to SEQ ID NO: 10922
  REGION 1..122: note = Description of Artificial Sequence: Synthetic polypeptide
  REGION 1..122: note = VH of XENP018749

SEQ ID NO: 13233 - protein, 107 aa, synthetic construct
  REGION 1..107: note = Description of Artificial Sequence: Synthetic polypeptide
  REGION 1..107: note = VL of XENP018749
SIVMTQSPASLSVSPGERATLSCRASQSVSNDVAWYQQKPGQSPRLLINYASHRYTGVPDRFTGSGYGTEFTLTISSLQSEDFAVYFCQQDYSSPRTFGGGTKVEIK

SEQ ID NO: 13234 - protein, 5 aa, synthetic construct
  REGION 1..5: note = Description of Artificial Sequence: Synthetic peptide
  REGION 1..5: note = XENP018749 vhCDR1
NYWMN

SEQ ID NO: 13235 - protein, 19 aa, synthetic construct
  REGION 1..19: note = Description of Artificial Sequence: Synthetic peptide
  REGION 1..19: note = XENP018749 vhCDR2
EIRLKSNNYATHYAEPVKG

SEQ ID NO: 13236 - protein, 11 aa, synthetic construct
  REGION 1..11: note = Description of Artificial Sequence: Synthetic peptide
  REGION 1..11: note = XENP018749 vhCDR3
YYGNYGGYFDV

SEQ ID NO: 13237 - protein, 11 aa, synthetic construct
  REGION 1..11: note = Description of Artificial Sequence: Synthetic peptide
  REGION 1..11: note = XENP018749 vlCDR1
RASQSVSNDVA

SEQ ID NO: 13238 - protein, 7 aa, synthetic construct
  REGION 1..7: note = Description of Artificial Sequence: Synthetic peptide
  REGION 1..7: note = XENP018749 vlCDR2
YASHRYT

SEQ ID NO: 13239 - protein, 9 aa, synthetic construct
  REGION 1..9: note = Description of Artificial Sequence: Synthetic peptide
  REGION 1..9: note = XENP018749 vlCDR3
QQDYSSPRT

SEQ ID NO: 13240 - protein, 249 aa, synthetic construct
  REGION 1..249: note = Description of Artificial Sequence: Synthetic polypeptide
  REGION 1..249: note = XENP018750 1G6_H1_L1.8_scFv(GKPGS)4
EVQLVESGGGLVKPGGSLRLSCAASGFTFSNYWMNWVRQAPGKGLEWVGEIRLKSNNYATHYAEPVKGRFTISRDDSKSTVYLQMNSLKTEDTAVYYCTRYYGNYGGYFDVWGAGTLVTVSSGKPGSGKPGSGKPGSGKPGSSIVMTQSPAFLSVSPGERATLSCRASQSVSNDVAWYQQKPGQSPRLLINYASHRYTGVPDRFTGSGYGTEFTLTISSLQSEDFAVYFCQQDYSSPRTFGGGTKVEIK

SEQ ID NO: 13241 - protein, 122 aa, synthetic construct; identical to SEQ ID NO: 10922
  REGION 1..122: note = Description of Artificial Sequence: Synthetic polypeptide
  REGION 1..122: note = VH of XENP018750

SEQ ID NO: 13242 - protein, 107 aa, synthetic construct
  REGION 1..107: note = Description of Artificial Sequence: Synthetic polypeptide
  REGION 1..107: note = VL of XENP018750
SIVMTQSPAFLSVSPGERATLSCRASQSVSNDVAWYQQKPGQSPRLLINYASHRYTGVPDRFTGSGYGTEFTLTISSLQSEDFAVYFCQQDYSSPRTFGGGTKVEIK

SEQ ID NO: 13243 - protein, 5 aa, synthetic construct
  REGION 1..5: note = Description of Artificial Sequence: Synthetic peptide
  REGION 1..5: note = XENP018750 vhCDR1
NYWMN

SEQ ID NO: 13244 - protein, 19 aa, synthetic construct
  REGION 1..19: note = Description of Artificial Sequence: Synthetic peptide
  REGION 1..19: note = XENP018750 vhCDR2
EIRLKSNNYATHYAEPVKG

SEQ ID NO: 13245 - protein, 11 aa, synthetic construct
  REGION 1..11: note = Description of Artificial Sequence: Synthetic peptide
  REGION 1..11: note = XENP018750 vhCDR3
YYGNYGGYFDV

SEQ ID NO: 13246 - protein, 11 aa, synthetic construct
  REGION 1..11: note = Description of Artificial Sequence: Synthetic peptide
  REGION 1..11: note = XENP018750 vlCDR1
RASQSVSNDVA

SEQ ID NO: 13247 - protein, 7 aa, synthetic construct
  REGION 1..7: note = Description of Artificial Sequence: Synthetic peptide
  REGION 1..7: note = XENP018750 vlCDR2
YASHRYT

SEQ ID NO: 13248 - protein, 9 aa, synthetic construct
  REGION 1..9: note = Description of Artificial Sequence: Synthetic peptide
  REGION 1..9: note = XENP018750 vlCDR3
QQDYSSPRT

SEQ ID NO: 13249 - protein, 249 aa, synthetic construct
  REGION 1..249: note = Description of Artificial Sequence: Synthetic polypeptide
  REGION 1..249: note = XENP018751 1G6_H1_L1.9_scFv(GKPGS)4
EVQLVESGGGLVKPGGSLRLSCAASGFTFSNYWMNWVRQAPGKGLEWVGEIRLKSNNYATHYAEPVKGRFTISRDDSKSTVYLQMNSLKTEDTAVYYCTRYYGNYGGYFDVWGAGTLVTVSSGKPGSGKPGSGKPGSGKPGSSIVMTQSPATLLVSPGERATLSCRASQSVSNDVAWYQQKPGQSPRLLINYASHRYTGVPDRFTGSGYGTEFTLTISSLQSEDFAVYFCQQDYSSPRTFGGGTKVEIK

SEQ ID NO: 13250 - protein, 122 aa, synthetic construct; identical to SEQ ID NO: 10922
  REGION 1..122: note = Description of Artificial Sequence: Synthetic polypeptide
  REGION 1..122: note = VH of XENP018751

SEQ ID NO: 13251 - protein, 107 aa, synthetic construct
  REGION 1..107: note = Description of Artificial Sequence: Synthetic polypeptide
  REGION 1..107: note = VL of XENP018751
SIVMTQSPATLLVSPGERATLSCRASQSVSNDVAWYQQKPGQSPRLLINYASHRYTGVPDRFTGSGYGTEFTLTISSLQSEDFAVYFCQQDYSSPRTFGGGTKVEIK

SEQ ID NO: 13252 - protein, 5 aa, synthetic construct
  REGION 1..5: note = Description of Artificial Sequence: Synthetic peptide
  REGION 1..5: note = XENP018751 vhCDR1
NYWMN

SEQ ID NO: 13253 - protein, 19 aa, synthetic construct
  REGION 1..19: note = Description of Artificial Sequence: Synthetic peptide
  REGION 1..19: note = XENP018751 vhCDR2
EIRLKSNNYATHYAEPVKG

SEQ ID NO: 13254 - protein, 11 aa, synthetic construct
  REGION 1..11: note = Description of Artificial Sequence: Synthetic peptide
  REGION 1..11: note = XENP018751 vhCDR3
YYGNYGGYFDV

SEQ ID NO: 13255 - protein, 11 aa, synthetic construct
  REGION 1..11: note = Description of Artificial Sequence: Synthetic peptide
  REGION 1..11: note = XENP018751 vlCDR1
RASQSVSNDVA

SEQ ID NO: 13256 - protein, 7 aa, synthetic construct
  REGION 1..7: note = Description of Artificial Sequence: Synthetic peptide
  REGION 1..7: note = XENP018751 vlCDR2
YASHRYT

SEQ ID NO: 13257 - protein, 9 aa, synthetic construct
  REGION 1..9: note = Description of Artificial Sequence: Synthetic peptide
  REGION 1..9: note = XENP018751 vlCDR3
QQDYSSPRT

SEQ ID NO: 13258 - protein, 249 aa, synthetic construct
  REGION 1..249: note = Description of Artificial Sequence: Synthetic polypeptide
  REGION 1..249: note = XENP018752 1G6_H1_L1.10_scFv(GKPGS)4
EVQLVESGGGLVKPGGSLRLSCAASGFTFSNYWMNWVRQAPGKGLEWVGEIRLKSNNYATHYAEPVKGRFTISRDDSKSTVYLQMNSLKTEDTAVYYCTRYYGNYGGYFDVWGAGTLVTVSSGKPGSGKPGSGKPGSGKPGSSIVMTQSPATLSVSAGERATLSCRASQSVSNDVAWYQQKPGQSPRLLINYASHRYTGVPDRFTGSGYGTEFTLTISSLQSEDFAVYFCQQDYSSPRTFGGGTKVEIK

SEQ ID NO: 13259 - protein, 122 aa, synthetic construct; identical to SEQ ID NO: 10922
  REGION 1..122: note = Description of Artificial Sequence: Synthetic polypeptide
  REGION 1..122: note = VH of XENP018752

SEQ ID NO: 13260 - protein, 107 aa, synthetic construct
  REGION 1..107: note = Description of Artificial Sequence: Synthetic polypeptide
  REGION 1..107: note = VL of XENP018752
SIVMTQSPATLSVSAGERATLSCRASQSVSNDVAWYQQKPGQSPRLLINYASHRYTGVPDRFTGSGYGTEFTLTISSLQSEDFAVYFCQQDYSSPRTFGGGTKVEIK

SEQ ID NO: 13261 - protein, 5 aa, synthetic construct
  REGION 1..5: note = Description of Artificial Sequence: Synthetic peptide
  REGION 1..5: note = XENP018752 vhCDR1
NYWMN

SEQ ID NO: 13262 - protein, 19 aa, synthetic construct
  REGION 1..19: note = Description of Artificial Sequence: Synthetic peptide
  REGION 1..19: note = XENP018752 vhCDR2
EIRLKSNNYATHYAEPVKG

SEQ ID NO: 13263 - protein, 11 aa, synthetic construct
  REGION 1..11: note = Description of Artificial Sequence: Synthetic peptide
  REGION 1..11: note = XENP018752 vhCDR3
YYGNYGGYFDV

SEQ ID NO: 13264 - protein, 11 aa, synthetic construct
  REGION 1..11: note = Description of Artificial Sequence: Synthetic peptide
  REGION 1..11: note = XENP018752 vlCDR1
RASQSVSNDVA

SEQ ID NO: 13265 - protein, 7 aa, synthetic construct
  REGION 1..7: note = Description of Artificial Sequence: Synthetic peptide
  REGION 1..7: note = XENP018752 vlCDR2
YASHRYT

SEQ ID NO: 13266 - protein, 9 aa, synthetic construct
  REGION 1..9: note = Description of Artificial Sequence: Synthetic peptide
  REGION 1..9: note = XENP018752 vlCDR3
QQDYSSPRT

SEQ ID NO: 13267 - protein, 249 aa, synthetic construct
  REGION 1..249: note = Description of Artificial Sequence: Synthetic polypeptide
  REGION 1..249: note = XENP018753 1G6_H1_L1.11_scFv(GKPGS)4
EVQLVESGGGLVKPGGSLRLSCAASGFTFSNYWMNWVRQAPGKGLEWVGEIRLKSNNYATHYAEPVKGRFTISRDDSKSTVYLQMNSLKTEDTAVYYCTRYYGNYGGYFDVWGAGTLVTVSSGKPGSGKPGSGKPGSGKPGSSIVMTQSPATLSVSPGDRATLSCRASQSVSNDVAWYQQKPGQSPRLLINYASHRYTGVPDRFTGSGYGTEFTLTISSLQSEDFAVYFCQQDYSSPRTFGGGTKVEIK

SEQ ID NO: 13268 - protein, 122 aa, synthetic construct; identical to SEQ ID NO: 10922
  REGION 1..122: note = Description of Artificial Sequence: Synthetic polypeptide
  REGION 1..122: note = VH of XENP018753

SEQ ID NO: 13269 - protein, 107 aa, synthetic construct
  REGION 1..107: note = Description of Artificial Sequence: Synthetic polypeptide
  REGION 1..107: note = VL of XENP018753
SIVMTQSPATLSVSPGDRATLSCRASQSVSNDVAWYQQKPGQSPRLLINYASHRYTGVPDRFTGSGYGTEFTLTISSLQSEDFAVYFCQQDYSSPRTFGGGTKVEIK

SEQ ID NO: 13270 - protein, 5 aa, synthetic construct
  REGION 1..5: note = Description of Artificial Sequence: Synthetic peptide
  REGION 1..5: note = XENP018753 vhCDR1
NYWMN

SEQ ID NO: 13271 - protein, 19 aa, synthetic construct
  REGION 1..19: note = Description of Artificial Sequence: Synthetic peptide
  REGION 1..19: note = XENP018753 vhCDR2
EIRLKSNNYATHYAEPVKG

SEQ ID NO: 13272 - protein, 11 aa, synthetic construct
  REGION 1..11: note = Description of Artificial Sequence: Synthetic peptide
  REGION 1..11: note = XENP018753 vhCDR3
YYGNYGGYFDV

SEQ ID NO: 13273 - protein, 11 aa, synthetic construct
  REGION 1..11: note = Description of Artificial Sequence: Synthetic peptide
  REGION 1..11: note = XENP018753 vlCDR1
RASQSVSNDVA

SEQ ID NO: 13274 - protein, 7 aa, synthetic construct
  REGION 1..7: note = Description of Artificial Sequence: Synthetic peptide
  REGION 1..7: note = XENP018753 vlCDR2
YASHRYT

SEQ ID NO: 13275 - protein, 9 aa, synthetic construct
  REGION 1..9: note = Description of Artificial Sequence: Synthetic peptide
  REGION 1..9: note = XENP018753 vlCDR3
QQDYSSPRT

SEQ ID NO: 13276 - protein, 249 aa, synthetic construct
  REGION 1..249: note = Description of Artificial Sequence: Synthetic polypeptide
  REGION 1..249: note = XENP018754 1G6_H1_L1.12_scFv(GKPGS)4
EVQLVESGGGLVKPGGSLRLSCAASGFTFSNYWMNWVRQAPGKGLEWVGEIRLKSNNYATHYAEPVKGRFTISRDDSKSTVYLQMNSLKTEDTAVYYCTRYYGNYGGYFDVWGAGTLVTVSSGKPGSGKPGSGKPGSGKPGSSIVMTQSPATLSVSPGERVTLSCRASQSVSNDVAWYQQKPGQSPRLLINYASHRYTGVPDRFTGSGYGTEFTLTISSLQSEDFAVYFCQQDYSSPRTFGGGTKVEIK

SEQ ID NO: 13277 - protein, 122 aa, synthetic construct; identical to SEQ ID NO: 10922
  REGION 1..122: note = Description of Artificial Sequence: Synthetic polypeptide
  REGION 1..122: note = VH of XENP018754

SEQ ID NO: 13278 - protein, 107 aa, synthetic construct
  REGION 1..107: note = Description of Artificial Sequence: Synthetic polypeptide
  REGION 1..107: note = VL of XENP018754
SIVMTQSPATLSVSPGERVTLSCRASQSVSNDVAWYQQKPGQSPRLLINYASHRYTGVPDRFTGSGYGTEFTLTISSLQSEDFAVYFCQQDYSSPRTFGGGTKVEIK

SEQ ID NO: 13279 - protein, 5 aa, synthetic construct
  REGION 1..5: note = Description of Artificial Sequence: Synthetic peptide
  REGION 1..5: note = XENP018754 vhCDR1
NYWMN

SEQ ID NO: 13280 - protein, 19 aa, synthetic construct
  REGION 1..19: note = Description of Artificial Sequence: Synthetic peptide
  REGION 1..19: note = XENP018754 vhCDR2
EIRLKSNNYATHYAEPVKG

SEQ ID NO: 13281 - protein, 11 aa, synthetic construct
  REGION 1..11: note = Description of Artificial Sequence: Synthetic peptide
  REGION 1..11: note = XENP018754 vhCDR3
YYGNYGGYFDV

SEQ ID NO: 13282 - protein, 11 aa, synthetic construct
  REGION 1..11: note = Description of Artificial Sequence: Synthetic peptide
  REGION 1..11: note = XENP018754 vlCDR1
RASQSVSNDVA

SEQ ID NO: 13283 - protein, 7 aa, synthetic construct
  REGION 1..7: note = Description of Artificial Sequence: Synthetic peptide
  REGION 1..7: note = XENP018754 vlCDR2
YASHRYT

SEQ ID NO: 13284 - protein, 9 aa, synthetic construct
  REGION 1..9: note = Description of Artificial Sequence: Synthetic peptide
  REGION 1..9: note = XENP018754 vlCDR3
QQDYSSPRT

SEQ ID NO: 13285 - protein, 249 aa, synthetic construct
  REGION 1..249: note = Description of Artificial Sequence: Synthetic polypeptide
  REGION 1..249: note = XENP018755 1G6_H1_L1.13_scFv(GKPGS)4
EVQLVESGGGLVKPGGSLRLSCAASGFTFSNYWMNWVRQAPGKGLEWVGEIRLKSNNYATHYAEPVKGRFTISRDDSKSTVYLQMNSLKTEDTAVYYCTRYYGNYGGYFDVWGAGTLVTVSSGKPGSGKPGSGKPGSGKPGSSIVMTQSPATLSVSPGERATISCRASQSVSNDVAWYQQKPGQSPRLLINYASHRYTGVPDRFTGSGYGTEFTLTISSLQSEDFAVYFCQQDYSSPRTFGGGTKVEIK

SEQ ID NO: 13286 - protein, 122 aa, synthetic construct; identical to SEQ ID NO: 10922
  REGION 1..122: note = Description of Artificial Sequence: Synthetic polypeptide
  REGION 1..122: note = VH of XENP018755

SEQ ID NO: 13287 - protein, 107 aa, synthetic construct
  REGION 1..107: note = Description of Artificial Sequence: Synthetic polypeptide
  REGION 1..107: note = VL of XENP018755
SIVMTQSPATLSVSPGERATISCRASQSVSNDVAWYQQKPGQSPRLLINYASHRYTGVPDRFTGSGYGTEFTLTISSLQSEDFAVYFCQQDYSSPRTFGGGTKVEIK

SEQ ID NO: 13288 - protein, 5 aa, synthetic construct
  REGION 1..5: note = Description of Artificial Sequence: Synthetic peptide
  REGION 1..5: note = XENP018755 vhCDR1
NYWMN

SEQ ID NO: 13289 - protein, 19 aa, synthetic construct
  REGION 1..19: note = Description of Artificial Sequence: Synthetic peptide
  REGION 1..19: note = XENP018755 vhCDR2
EIRLKSNNYATHYAEPVKG

SEQ ID NO: 13290 - protein, 11 aa, synthetic construct
  REGION 1..11: note = Description of Artificial Sequence: Synthetic peptide
  REGION 1..11: note = XENP018755 vhCDR3
YYGNYGGYFDV

SEQ ID NO: 13291 - protein, 11 aa, synthetic construct
  REGION 1..11: note = Description of Artificial Sequence: Synthetic peptide
  REGION 1..11: note = XENP018755 vlCDR1
RASQSVSNDVA

SEQ ID NO: 13292 - protein, 7 aa, synthetic construct
  REGION 1..7: note = Description of Artificial Sequence: Synthetic peptide
  REGION 1..7: note = XENP018755 vlCDR2
YASHRYT

SEQ ID NO: 13293 - protein, 9 aa, synthetic construct
  REGION 1..9: note = Description of Artificial Sequence: Synthetic peptide
  REGION 1..9: note = XENP018755 vlCDR3
QQDYSSPRT

SEQ ID NO: 13294 - protein, 249 aa, synthetic construct
  REGION 1..249: note = Description of Artificial Sequence: Synthetic polypeptide
  REGION 1..249: note = XENP018756 1G6_H1_L1.14_scFv(GKPGS)4
EVQLVESGGGLVKPGGSLRLSCAASGFTFSNYWMNWVRQAPGKGLEWVGEIRLKSNNYATHYAEPVKGRFTISRDDSKSTVYLQMNSLKTEDTAVYYCTRYYGNYGGYFDVWGAGTLVTVSSGKPGSGKPGSGKPGSGKPGSSIVMTQSPATLSVSPGERATLTCRASQSVSNDVAWYQQKPGQSPRLLINYASHRYTGVPDRFTGSGYGTEFTLTISSLQSEDFAVYFCQQDYSSPRTFGGGTKVEIK

SEQ ID NO: 13295 - protein, 122 aa, synthetic construct; identical to SEQ ID NO: 10922
  REGION 1..122: note = Description of Artificial Sequence: Synthetic polypeptide
  REGION 1..122: note = VH of XENP018756

SEQ ID NO: 13296 - protein, 107 aa, synthetic construct
  REGION 1..107: note = Description of Artificial Sequence: Synthetic polypeptide
  REGION 1..107: note = VL of XENP018756
SIVMTQSPATLSVSPGERATLTCRASQSVSNDVAWYQQKPGQSPRLLINYASHRYTGVPDRFTGSGYGTEFTLTISSLQSEDFAVYFCQQDYSSPRTFGGGTKVEIK

SEQ ID NO: 13297 - protein, 5 aa, synthetic construct
  REGION 1..5: note = Description of Artificial Sequence: Synthetic peptide
  REGION 1..5: note = XENP018756 vhCDR1
NYWMN

SEQ ID NO: 13298 - protein, 19 aa, synthetic construct
  REGION 1..19: note = Description of Artificial Sequence: Synthetic peptide
  REGION 1..19: note = XENP018756 vhCDR2
EIRLKSNNYATHYAEPVKG

SEQ ID NO: 13299 - protein, 11 aa, synthetic construct
  REGION 1..11: note = Description of Artificial Sequence: Synthetic peptide
  REGION 1..11: note = XENP018756 vhCDR3
YYGNYGGYFDV

SEQ ID NO: 13300 - protein, 11 aa, synthetic construct
  REGION 1..11: note = Description of Artificial Sequence: Synthetic peptide
  REGION 1..11: note = XENP018756 vlCDR1
RASQSVSNDVA

SEQ ID NO: 13301 - protein, 7 aa, synthetic construct
  REGION 1..7: note = Description of Artificial Sequence: Synthetic peptide
  REGION 1..7: note = XENP018756 vlCDR2
YASHRYT

SEQ ID NO: 13302 - protein, 9 aa, synthetic construct
  REGION 1..9: note = Description of Artificial Sequence: Synthetic peptide
  REGION 1..9: note = XENP018756 vlCDR3
QQDYSSPRT

SEQ ID NO: 13303 - protein, 249 aa, synthetic construct
  REGION 1..249: note = Description of Artificial Sequence: Synthetic polypeptide
  REGION 1..249: note = XENP018757 1G6_H1_L1.15_scFv(GKPGS)4
EVQLVESGGGLVKPGGSLRLSCAASGFTFSNYWMNWVRQAPGKGLEWVGEIRLKSNNYATHYAEPVKGRFTISRDDSKSTVYLQMNSLKTEDTAVYYCTRYYGNYGGYFDVWGAGTLVTVSSGKPGSGKPGSGKPGSGKPGSSIVMTQSPATLSVSPGERATLSCKASQSVSNDVAWYQQKPGQSPRLLINYASHRYTGVPDRFTGSGYGTEFTLTISSLQSEDFAVYFCQQDYSSPRTFGGGTKVEIK

SEQ ID NO: 13304 - protein, 122 aa, synthetic construct; identical to SEQ ID NO: 10922
  REGION 1..122: note = Description of Artificial Sequence: Synthetic polypeptide
  REGION 1..122: note = VH of XENP018757

SEQ ID NO: 13305 - protein, 107 aa, synthetic construct
  REGION 1..107: note = Description of Artificial Sequence: Synthetic polypeptide
  REGION 1..107: note = VL of XENP018757
SIVMTQSPATLSVSPGERATLSCKASQSVSNDVAWYQQKPGQSPRLLINYASHRYTGVPDRFTGSGYGTEFTLTISSLQSEDFAVYFCQQDYSSPRTFGGGTKVEIK

SEQ ID NO: 13306 - protein, 5 aa, synthetic construct
  REGION 1..5: note = Description of Artificial Sequence: Synthetic peptide
  REGION 1..5: note = XENP018757 vhCDR1
NYWMN

SEQ ID NO: 13307 - protein, 19 aa, synthetic construct
  REGION 1..19: note = Description of Artificial Sequence: Synthetic peptide
  REGION 1..19: note = XENP018757 vhCDR2
EIRLKSNNYATHYAEPVKG

SEQ ID NO: 13308 - protein, 11 aa, synthetic construct
  REGION 1..11: note = Description of Artificial Sequence: Synthetic peptide
  REGION 1..11: note = XENP018757 vhCDR3
YYGNYGGYFDV

SEQ ID NO: 13309 - protein, 11 aa, synthetic construct
  REGION 1..11: note = Description of Artificial Sequence: Synthetic peptide
  REGION 1..11: note = XENP018757 vlCDR1
KASQSVSNDVA

SEQ ID NO: 13310 - protein, 7 aa, synthetic construct
  REGION 1..7: note = Description of Artificial Sequence: Synthetic peptide
  REGION 1..7: note = XENP018757 vlCDR2
YASHRYT

SEQ ID NO: 13311 - protein, 9 aa, synthetic construct
  REGION 1..9: note = Description of Artificial Sequence: Synthetic peptide
  REGION 1..9: note = XENP018757 vlCDR3
QQDYSSPRT

SEQ ID NO: 13312 - protein, 249 aa, synthetic construct
  REGION 1..249: note = Description of Artificial Sequence: Synthetic polypeptide
  REGION 1..249: note = XENP018758 1G6_H1_L1.16_scFv(GKPGS)4
EVQLVESGGGLVKPGGSLRLSCAASGFTFSNYWMNWVRQAPGKGLEWVGEIRLKSNNYATHYAEPVKGRFTISRDDSKSTVYLQMNSLKTEDTAVYYCTRYYGNYGGYFDVWGAGTLVTVSSGKPGSGKPGSGKPGSGKPGSSIVMTQSPATLSVSPGERATLSCRASQDVSNDVAWYQQKPGQSPRLLINYASHRYTGVPDRFTGSGYGTEFTLTISSLQSEDFAVYFCQQDYSSPRTFGGGTKVEIK

SEQ ID NO: 13313 - protein, 122 aa, synthetic construct; identical to SEQ ID NO: 10922
  REGION 1..122: note = Description of Artificial Sequence: Synthetic polypeptide
  REGION 1..122: note = VH of XENP018758

SEQ ID NO: 13314 - protein, 107 aa, synthetic construct
  REGION 1..107: note = Description of Artificial Sequence: Synthetic polypeptide
  REGION 1..107: note = VL of XENP018758
SIVMTQSPATLSVSPGERATLSCRASQDVSNDVAWYQQKPGQSPRLLINYASHRYTGVPDRFTGSGYGTEFTLTISSLQSEDFAVYFCQQDYSSPRTFGGGTKVEIK

SEQ ID NO: 13315 - protein, 5 aa, synthetic construct
  REGION 1..5: note = Description of Artificial Sequence: Synthetic peptide
  REGION 1..5: note = XENP018758 vhCDR1
NYWMN

SEQ ID NO: 13316 - protein, 19 aa, synthetic construct
  REGION 1..19: note = Description of Artificial Sequence: Synthetic peptide
  REGION 1..19: note = XENP018758 vhCDR2
EIRLKSNNYATHYAEPVKG

SEQ ID NO: 13317 - protein, 11 aa, synthetic construct
  REGION 1..11: note = Description of Artificial Sequence: Synthetic peptide
  REGION 1..11: note = XENP018758 vhCDR3
YYGNYGGYFDV

SEQ ID NO: 13318 - protein, 11 aa, synthetic construct
  REGION 1..11: note = Description of Artificial Sequence: Synthetic peptide
  REGION 1..11: note = XENP018758 vlCDR1
RASQDVSNDVA

SEQ ID NO: 13319 - protein, 7 aa, synthetic construct
  REGION 1..7: note = Description of Artificial Sequence: Synthetic peptide
  REGION 1..7: note = XENP018758 vlCDR2
YASHRYT

SEQ ID NO: 13320 - protein, 9 aa, synthetic construct
  REGION 1..9: note = Description of Artificial Sequence: Synthetic peptide
  REGION 1..9: note = XENP018758 vlCDR3
QQDYSSPRT

SEQ ID NO: 13321 - protein, 249 aa, synthetic construct
  REGION 1..249: note = Description of Artificial Sequence: Synthetic polypeptide
  REGION 1..249: note = XENP018759 1G6_H1_L1.17_scFv(GKPGS)4
EVQLVESGGGLVKPGGSLRLSCAASGFTFSNYWMNWVRQAPGKGLEWVGEIRLKSNNYATHYAEPVKGRFTISRDDSKSTVYLQMNSLKTEDTAVYYCTRYYGNYGGYFDVWGAGTLVTVSSGKPGSGKPGSGKPGSGKPGSSIVMTQSPATLSVSPGERATLSCRASQGVSNDVAWYQQKPGQSPRLLINYASHRYTGVPDRFTGSGYGTEFTLTISSLQSEDFAVYFCQQDYSSPRTFGGGTKVEIK

SEQ ID NO: 13322 - protein, 122 aa, synthetic construct; identical to SEQ ID NO: 10922
  REGION 1..122: note = Description of Artificial Sequence: Synthetic polypeptide
  REGION 1..122: note = VH of XENP018759

SEQ ID NO: 13323 - protein, 107 aa, synthetic construct
  REGION 1..107: note = Description of Artificial Sequence: Synthetic polypeptide
  REGION 1..107: note = VL of XENP018759
SIVMTQSPATLSVSPGERATLSCRASQGVSNDVAWYQQKPGQSPRLLINYASHRYTGVPDRFTGSGYGTEFTLTISSLQSEDFAVYFCQQDYSSPRTFGGGTKVEIK

SEQ ID NO: 13324 - protein, 5 aa, synthetic construct
  REGION 1..5: note = Description of Artificial Sequence: Synthetic peptide
  REGION 1..5: note = XENP018759 vhCDR1
NYWMN

SEQ ID NO: 13325 - protein, 19 aa, synthetic construct
  REGION 1..19: note = Description of Artificial Sequence: Synthetic peptide
  REGION 1..19: note = XENP018759 vhCDR2
EIRLKSNNYATHYAEPVKG

SEQ ID NO: 13326 - protein, 11 aa, synthetic construct
  REGION 1..11: note = Description of Artificial Sequence: Synthetic peptide
  REGION 1..11: note = XENP018759 vhCDR3
YYGNYGGYFDV

SEQ ID NO: 13327 - protein, 11 aa, synthetic construct
  REGION 1..11: note = Description of Artificial Sequence: Synthetic peptide
  REGION 1..11: note = XENP018759 vlCDR1
RASQGVSNDVA

SEQ ID NO: 13328 - protein, 7 aa, synthetic construct
  REGION 1..7: note = Description of Artificial Sequence: Synthetic peptide
  REGION 1..7: note = XENP018759 vlCDR2
YASHRYT

SEQ ID NO: 13329 - protein, 9 aa, synthetic construct
  REGION 1..9: note = Description of Artificial Sequence: Synthetic peptide
  REGION 1..9: note = XENP018759 vlCDR3
QQDYSSPRT

SEQ ID NO: 13330 - protein, 249 aa, synthetic construct
  REGION 1..249: note = Description of Artificial Sequence: Synthetic polypeptide
  REGION 1..249: note = XENP018760 1G6_H1_L1.18_scFv(GKPGS)4
EVQLVESGGGLVKPGGSLRLSCAASGFTFSNYWMNWVRQAPGKGLEWVGEIRLKSNNYATHYAEPVKGRFTISRDDSKSTVYLQMNSLKTEDTAVYYCTRYYGNYGGYFDVWGAGTLVTVSSGKPGSGKPGSGKPGSGKPGSSIVMTQSPATLSVSPGERATLSCRASQSISNDVAWYQQKPGQSPRLLINYASHRYTGVPDRFTGSGYGTEFTLTISSLQSEDFAVYFCQQDYSSPRTFGGGTKVEIK

SEQ ID NO: 13331 - protein, 122 aa, synthetic construct; identical to SEQ ID NO: 10922
  REGION 1..122: note = Description of Artificial Sequence: Synthetic polypeptide
  REGION 1..122: note = VH of XENP018760

SEQ ID NO: 13332 - protein, 107 aa, synthetic construct
  REGION 1..107: note = Description of Artificial Sequence: Synthetic polypeptide
  REGION 1..107: note = VL of XENP018760
SIVMTQSPATLSVSPGERATLSCRASQSISNDVAWYQQKPGQSPRLLINYASHRYTGVPDRFTGSGYGTEFTLTISSLQSEDFAVYFCQQDYSSPRTFGGGTKVEIK

SEQ ID NO: 13333 - protein, 5 aa, synthetic construct
  REGION 1..5: note = Description of Artificial Sequence: Synthetic peptide
  REGION 1..5: note = XENP018760 vhCDR1
NYWMN

SEQ ID NO: 13334 - protein, 19 aa, synthetic construct
  REGION 1..19: note = Description of Artificial Sequence: Synthetic peptide
  REGION 1..19: note = XENP018760 vhCDR2
EIRLKSNNYATHYAEPVKG

SEQ ID NO: 13335 - protein, 11 aa, synthetic construct
  REGION 1..11: note = Description of Artificial Sequence: Synthetic peptide
  REGION 1..11: note = XENP018760 vhCDR3
YYGNYGGYFDV

SEQ ID NO: 13336 - protein, 11 aa, synthetic construct
  REGION 1..11: note = Description of Artificial Sequence: Synthetic peptide
  REGION 1..11: note = XENP018760 vlCDR1
RASQSISNDVA

SEQ ID NO: 13337 - protein, 7 aa, synthetic construct
  REGION 1..7: note = Description of Artificial Sequence: Synthetic peptide
  REGION 1..7: note = XENP018760 vlCDR2
YASHRYT

SEQ ID NO: 13338 - protein, 9 aa, synthetic construct
  REGION 1..9: note = Description of Artificial Sequence: Synthetic peptide
  REGION 1..9: note = XENP018760 vlCDR3
QQDYSSPRT

SEQ ID NO: 13339 - protein, 249 aa, synthetic construct
  REGION 1..249: note = Description of Artificial Sequence: Synthetic polypeptide
  REGION 1..249: note = XENP018761 1G6_H1_L1.19_scFv(GKPGS)4
EVQLVESGGGLVKPGGSLRLSCAASGFTFSNYWMNWVRQAPGKGLEWVGEIRLKSNNYATHYAEPVKGRFTISRDDSKSTVYLQMNSLKTEDTAVYYCTRYYGNYGGYFDVWGAGTLVTVSSGKPGSGKPGSGKPGSGKPGSSIVMTQSPATLSVSPGERATLSCRASQSLSNDVAWYQQKPGQSPRLLINYASHRYTGVPDRFTGSGYGTEFTLTISSLQSEDFAVYFCQQDYSSPRTFGGGTKVEIK

SEQ ID NO: 13340 - protein, 122 aa, synthetic construct; identical to SEQ ID NO: 10922
  REGION 1..122: note = Description of Artificial Sequence: Synthetic polypeptide
  REGION 1..122: note = VH of XENP018761

SEQ ID NO: 13341 - protein, 107 aa, synthetic construct
  REGION 1..107: note = Description of Artificial Sequence: Synthetic polypeptide
  REGION 1..107: note = VL of XENP018761
SIVMTQSPATLSVSPGERATLSCRASQSLSNDVAWYQQKPGQSPRLLINYASHRYTGVPDRFTGSGYGTEFTLTISSLQSEDFAVYFCQQDYSSPRTFGGGTKVEIK

SEQ ID NO: 13342 - protein, 5 aa, synthetic construct
  REGION 1..5: note = Description of Artificial Sequence: Synthetic peptide
  REGION 1..5: note = XENP018761 vhCDR1
NYWMN

SEQ ID NO: 13343 - protein, 19 aa, synthetic construct
  REGION 1..19: note = Description of Artificial Sequence: Synthetic peptide
  REGION 1..19: note = XENP018761 vhCDR2
EIRLKSNNYATHYAEPVKG

SEQ ID NO: 13344 - protein, 11 aa, synthetic construct
  REGION 1..11: note = Description of Artificial Sequence: Synthetic peptide
  REGION 1..11: note = XENP018761 vhCDR3
YYGNYGGYFDV

SEQ ID NO: 13345 - protein, 11 aa, synthetic construct
  REGION 1..11: note = Description of Artificial Sequence: Synthetic peptide
  REGION 1..11: note = XENP018761 vlCDR1
RASQSLSNDVA

SEQ ID NO: 13346 - protein, 7 aa, synthetic construct
  REGION 1..7: note = Description of Artificial Sequence: Synthetic peptide
  REGION 1..7: note = XENP018761 vlCDR2
YASHRYT

SEQ ID NO: 13347 - protein, 9 aa, synthetic construct
  REGION 1..9: note = Description of Artificial Sequence: Synthetic peptide
  REGION 1..9: note = XENP018761 vlCDR3
QQDYSSPRT

SEQ ID NO: 13348 - protein, 249 aa, synthetic construct
  REGION 1..249: note = Description of Artificial Sequence: Synthetic polypeptide
  REGION 1..249: note = XENP018762 1G6_H1_L1.20_scFv(GKPGS)4
EVQLVESGGGLVKPGGSLRLSCAASGFTFSNYWMNWVRQAPGKGLEWVGEIRLKSNNYATHYAEPVKGRFTISRDDSKSTVYLQMNSLKTEDTAVYYCTRYYGNYGGYFDVWGAGTLVTVSSGKPGSGKPGSGKPGSGKPGSSIVMTQSPATLSVSPGERATLSCRASQSVTNDVAWYQQKPGQSPRLLINYASHRYTGVPDRFTGSGYGTEFTLTISSLQSEDFAVYFCQQDYSSPRTFGGGTKVEIK

SEQ ID NO: 13349 - protein, 122 aa, synthetic construct; identical to SEQ ID NO: 10922
  REGION 1..122: note = Description of Artificial Sequence: Synthetic polypeptide
  REGION 1..122: note = VH of XENP018762

SEQ ID NO: 13350 - protein, 107 aa, synthetic construct
  REGION 1..107: note = Description of Artificial Sequence: Synthetic polypeptide
  REGION 1..107: note = VL of XENP018762
SIVMTQSPATLSVSPGERATLSCRASQSVTNDVAWYQQKPGQSPRLLINYASHRYTGVPDRFTGSGYGTEFTLTISSLQSEDFAVYFCQQDYSSPRTFGGGTKVEIK

SEQ ID NO: 13351 - protein, 5 aa, synthetic construct
  REGION 1..5: note = Description of Artificial Sequence: Synthetic peptide
  REGION 1..5: note = XENP018762 vhCDR1
NYWMN

SEQ ID NO: 13352 - protein, 19 aa, synthetic construct
  REGION 1..19: note = Description of Artificial Sequence: Synthetic peptide
  REGION 1..19: note = XENP018762 vhCDR2
EIRLKSNNYATHYAEPVKG

SEQ ID NO: 13353 - protein, 11 aa, synthetic construct
  REGION 1..11: note = Description of Artificial Sequence: Synthetic peptide
  REGION 1..11: note = XENP018762 vhCDR3
YYGNYGGYFDV

SEQ ID NO: 13354 - protein, 11 aa, synthetic construct
  REGION 1..11: note = Description of Artificial Sequence: Synthetic peptide
  REGION 1..11: note = XENP018762 vlCDR1
RASQSVTNDVA

SEQ ID NO: 13355 - protein, 7 aa, synthetic construct
  REGION 1..7: note = Description of Artificial Sequence: Synthetic peptide
  REGION 1..7: note = XENP018762 vlCDR2
YASHRYT

SEQ ID NO: 13356 - protein, 9 aa, synthetic construct
  REGION 1..9: note = Description of Artificial Sequence: Synthetic peptide
  REGION 1..9: note = XENP018762 vlCDR3
QQDYSSPRT

SEQ ID NO: 13357 - protein, 249 aa, synthetic construct
  REGION 1..249: note = Description of Artificial Sequence: Synthetic polypeptide
  REGION 1..249: note = XENP018763 1G6_H1_L1.21_scFv(GKPGS)4
EVQLVESGGGLVKPGGSLRLSCAASGFTFSNYWMNWVRQAPGKGLEWVGEIRLKSNNYATHYAEPVKGRFTISRDDSKSTVYLQMNSLKTEDTAVYYCTRYYGNYGGYFDVWGAGTLVTVSSGKPGSGKPGSGKPGSGKPGSSIVMTQSPATLSVSPGERATLSCRASQSVANDVAWYQQKPGQSPRLLINYASHRYTGVPDRFTGSGYGTEFTLTISSLQSEDFAVYFCQQDYSSPRTFGGGTKVEIK

SEQ ID NO: 13358 - protein, 122 aa, synthetic construct; identical to SEQ ID NO: 10922
  REGION 1..122: note = Description of Artificial Sequence: Synthetic polypeptide
  REGION 1..122: note = VH of XENP018763

SEQ ID NO: 13359 - protein, 107 aa, synthetic construct
  REGION 1..107: note = Description of Artificial Sequence: Synthetic polypeptide
  REGION 1..107: note = VL of XENP018763
SIVMTQSPATLSVSPGERATLSCRASQSVANDVAWYQQKPGQSPRLLINYASHRYTGVPDRFTGSGYGTEFTLTISSLQSEDFAVYFCQQDYSSPRTFGGGTKVEIK

SEQ ID NO: 13360 - protein, 5 aa, synthetic construct
  REGION 1..5: note = Description of Artificial Sequence: Synthetic peptide
  REGION 1..5: note = XENP018763 vhCDR1
NYWMN

SEQ ID NO: 13361 - protein, 19 aa, synthetic construct
  REGION 1..19: note = Description of Artificial Sequence: Synthetic peptide
  REGION 1..19: note = XENP018763 vhCDR2
EIRLKSNNYATHYAEPVKG

SEQ ID NO: 13362 - protein, 11 aa, synthetic construct
  REGION 1..11: note = Description of Artificial Sequence: Synthetic peptide
  REGION 1..11: note = XENP018763 vhCDR3
YYGNYGGYFDV

SEQ ID NO: 13363 - protein, 11 aa, synthetic construct
  REGION 1..11: note = Description of Artificial Sequence: Synthetic peptide
  REGION 1..11: note = XENP018763 vlCDR1
RASQSVANDVA

SEQ ID NO: 13364 - protein, 7 aa, synthetic construct
  REGION 1..7: note = Description of Artificial Sequence: Synthetic peptide
  REGION 1..7: note = XENP018763 vlCDR2
YASHRYT

SEQ ID NO: 13365 - protein, 9 aa, synthetic construct
  REGION 1..9: note = Description of Artificial Sequence: Synthetic peptide
  REGION 1..9: note = XENP018763 vlCDR3
QQDYSSPRT

SEQ ID NO: 13366 - protein, 249 aa, synthetic construct
  REGION 1..249: note = Description of Artificial Sequence: Synthetic polypeptide
  REGION 1..249: note = XENP018764 1G6_H1_L1.22_scFv(GKPGS)4
EVQLVESGGGLVKPGGSLRLSCAASGFTFSNYWMNWVRQAPGKGLEWVGEIRLKSNNYATHYAEPVKGRFTISRDDSKSTVYLQMNSLKTEDTAVYYCTRYYGNYGGYFDVWGAGTLVTVSSGKPGSGKPGSGKPGSGKPGSSIVMTQSPATLSVSPGERATLSCRASQSVQNDVAWYQQKPGQSPRLLINYASHRYTGVPDRFTGSGYGTEFTLTISSLQSEDFAVYFCQQDYSSPRTFGGGTKVEIK

SEQ ID NO: 13367 - protein, 122 aa, synthetic construct; identical to SEQ ID NO: 10922
  REGION 1..122: note = Description of Artificial Sequence: Synthetic polypeptide
  REGION 1..122: note = VH of XENP018764

SEQ ID NO: 13368 - protein, 107 aa, synthetic construct
  REGION 1..107: note = Description of Artificial Sequence: Synthetic polypeptide
  REGION 1..107: note = VL of XENP018764
SIVMTQSPATLSVSPGERATLSCRASQSVQNDVAWYQQKPGQSPRLLINYASHRYTGVPDRFTGSGYGTEFTLTISSLQSEDFAVYFCQQDYSSPRTFGGGTKVEIK

SEQ ID NO: 13369 - protein, 5 aa, synthetic construct
  REGION 1..5: note = Description of Artificial Sequence: Synthetic peptide
  REGION 1..5: note = XENP018764 vhCDR1
NYWMN

SEQ ID NO: 13370 - protein, 19 aa, synthetic construct
  REGION 1..19: note = Description of Artificial Sequence: Synthetic peptide
  REGION 1..19: note = XENP018764 vhCDR2
EIRLKSNNYATHYAEPVKG

SEQ ID NO: 13371 - protein, 11 aa, synthetic construct
  REGION 1..11: note = Description of Artificial Sequence: Synthetic peptide
  REGION 1..11: note = XENP018764 vhCDR3
YYGNYGGYFDV

SEQ ID NO: 13372 - protein, 11 aa, synthetic construct
  REGION 1..11: note = Description of Artificial Sequence: Synthetic peptide
  REGION 1..11: note = XENP018764 vlCDR1
RASQSVQNDVA

SEQ ID NO: 13373 - protein, 7 aa, synthetic construct
  REGION 1..7: note = Description of Artificial Sequence: Synthetic peptide
  REGION 1..7: note = XENP018764 vlCDR2
YASHRYT

SEQ ID NO: 13374 - protein, 9 aa, synthetic construct
  REGION 1..9: note = Description of Artificial Sequence: Synthetic peptide
  REGION 1..9: note = XENP018764 vlCDR3
QQDYSSPRT

SEQ ID NO: 13375 - protein, 249 aa, synthetic construct
  REGION 1..249: note = Description of Artificial Sequence: Synthetic polypeptide
  REGION 1..249: note = XENP018765 1G6_H1_L1.23_scFv(GKPGS)4
EVQLVESGGGLVKPGGSLRLSCAASGFTFSNYWMNWVRQAPGKGLEWVGEIRLKSNNYATHYAEPVKGRFTISRDDSKSTVYLQMNSLKTEDTAVYYCTRYYGNYGGYFDVWGAGTLVTVSSGKPGSGKPGSGKPGSGKPGSSIVMTQSPATLSVSPGERATLSCRASQSVGNDVAWYQQKPGQSPRLLINYASHRYTGVPDRFTGSGYGTEFTLTISSLQSEDFAVYFCQQDYSSPRTFGGGTKVEIK

SEQ ID NO: 13376 - protein, 122 aa, synthetic construct; identical to SEQ ID NO: 10922
  REGION 1..122: note = Description of Artificial Sequence: Synthetic polypeptide
  REGION 1..122: note = VH of XENP018765

SEQ ID NO: 13377 - protein, 107 aa, synthetic construct
  REGION 1..107: note = Description of Artificial Sequence: Synthetic polypeptide
  REGION 1..107: note = VL of XENP018765
SIVMTQSPATLSVSPGERATLSCRASQSVGNDVAWYQQKPGQSPRLLINYASHRYTGVPDRFTGSGYGTEFTLTISSLQSEDFAVYFCQQDYSSPRTFGGGTKVEIK

SEQ ID NO: 13378 - protein, 5 aa, synthetic construct
  REGION 1..5: note = Description of Artificial Sequence: Synthetic peptide
  REGION 1..5: note = XENP018765 vhCDR1
NYWMN

SEQ ID NO: 13379 - protein, 19 aa, synthetic construct
  REGION 1..19: note = Description of Artificial Sequence: Synthetic peptide
  REGION 1..19: note = XENP018765 vhCDR2
EIRLKSNNYATHYAEPVKG

SEQ ID NO: 13380 - protein, 11 aa, synthetic construct
  REGION 1..11: note = Description of Artificial Sequence: Synthetic peptide
  REGION 1..11: note = XENP018765 vhCDR3
YYGNYGGYFDV

SEQ ID NO: 13381 - protein, 11 aa, synthetic construct
  REGION 1..11: note = Description of Artificial Sequence: Synthetic peptide
  REGION 1..11: note = XENP018765 vlCDR1
RASQSVGNDVA

SEQ ID NO: 13382 - protein, 7 aa, synthetic construct
  REGION 1..7: note = Description of Artificial Sequence: Synthetic peptide
  REGION 1..7: note = XENP018765 vlCDR2
YASHRYT

SEQ ID NO: 13383 - protein, 9 aa, synthetic construct
  REGION 1..9: note = Description of Artificial Sequence: Synthetic peptide
  REGION 1..9: note = XENP018765 vlCDR3
QQDYSSPRT

SEQ ID NO: 13384 - protein, 249 aa, synthetic construct
  REGION 1..249: note = Description of Artificial Sequence: Synthetic polypeptide
  REGION 1..249: note = XENP018766 1G6_H1_L1.24_scFv(GKPGS)4
EVQLVESGGGLVKPGGSLRLSCAASGFTFSNYWMNWVRQAPGKGLEWVGEIRLKSNNYATHYAEPVKGRFTISRDDSKSTVYLQMNSLKTEDTAVYYCTRYYGNYGGYFDVWGAGTLVTVSSGKPGSGKPGSGKPGSGKPGSSIVMTQSPATLSVSPGERATLSCRASQSVVNDVAWYQQKPGQSPRLLINYASHRYTGVPDRFTGSGYGTEFTLTISSLQSEDFAVYFCQQDYSSPRTFGGGTKVEIK

SEQ ID NO: 13385 - protein, 122 aa, synthetic construct; identical to SEQ ID NO: 10922
  REGION 1..122: note = Description of Artificial Sequence: Synthetic polypeptide
  REGION 1..122: note = VH of XENP018766

SEQ ID NO: 13386 - protein, 107 aa, synthetic construct
  REGION 1..107: note = Description of Artificial Sequence: Synthetic polypeptide
  REGION 1..107: note = VL of XENP018766
SIVMTQSPATLSVSPGERATLSCRASQSVVNDVAWYQQKPGQSPRLLINYASHRYTGVPDRFTGSGYGTEFTLTISSLQSEDFAVYFCQQDYSSPRTFGGGTKVEIK

SEQ ID NO: 13387 - protein, 5 aa, synthetic construct
  REGION 1..5: note = Description of Artificial Sequence: Synthetic peptide
  REGION 1..5: note = XENP018766 vhCDR1
NYWMN

SEQ ID NO: 13388 - protein, 19 aa, synthetic construct
  REGION 1..19: note = Description of Artificial Sequence: Synthetic peptide
  REGION 1..19: note = XENP018766 vhCDR2
EIRLKSNNYATHYAEPVKG

SEQ ID NO: 13389 - protein, 11 aa, synthetic construct
  REGION 1..11: note = Description of Artificial Sequence: Synthetic peptide
  REGION 1..11: note = XENP018766 vhCDR3
YYGNYGGYFDV

SEQ ID NO: 13390 - protein, 11 aa, synthetic construct
  REGION 1..11: note = Description of Artificial Sequence: Synthetic peptide
  REGION 1..11: note = XENP018766 vlCDR1
RASQSVVNDVA

SEQ ID NO: 13391 - protein, 7 aa, synthetic construct
  REGION 1..7: note = Description of Artificial Sequence: Synthetic peptide
  REGION 1..7: note = XENP018766 vlCDR2
YASHRYT

SEQ ID NO: 13392 - protein, 9 aa, synthetic construct
  REGION 1..9: note = Description of Artificial Sequence: Synthetic peptide
  REGION 1..9: note = XENP018766 vlCDR3
QQDYSSPRT

SEQ ID NO: 13393 - protein, 249 aa, synthetic construct
  REGION 1..249: note = Description of Artificial Sequence: Synthetic polypeptide
  REGION 1..249: note = XENP018767 1G6_H1_L1.25_scFv(GKPGS)4
EVQLVESGGGLVKPGGSLRLSCAASGFTFSNYWMNWVRQAPGKGLEWVGEIRLKSNNYATHYAEPVKGRFTISRDDSKSTVYLQMNSLKTEDTAVYYCTRYYGNYGGYFDVWGAGTLVTVSSGKPGSGKPGSGKPGSGKPGSSIVMTQSPATLSVSPGERATLSCRASQSVHNDVAWYQQKPGQSPRLLINYASHRYTGVPDRFTGSGYGTEFTLTISSLQSEDFAVYFCQQDYSSPRTFGGGTKVEIK

SEQ ID NO: 13394 - protein, 122 aa, synthetic construct; identical to SEQ ID NO: 10922
  REGION 1..122: note = Description of Artificial Sequence: Synthetic polypeptide
  REGION 1..122: note = VH of XENP018767

SEQ ID NO: 13395 - protein, 107 aa, synthetic construct
  REGION 1..107: note = Description of Artificial Sequence: Synthetic polypeptide
  REGION 1..107: note = VL of XENP018767
SIVMTQSPATLSVSPGERATLSCRASQSVHNDVAWYQQKPGQSPRLLINYASHRYTGVPDRFTGSGYGTEFTLTISSLQSEDFAVYFCQQDYSSPRTFGGGTKVEIK

SEQ ID NO: 13396 - protein, 5 aa, synthetic construct
  REGION 1..5: note = Description of Artificial Sequence: Synthetic peptide
  REGION 1..5: note = XENP018767 vhCDR1
NYWMN

SEQ ID NO: 13397 - protein, 19 aa, synthetic construct
  REGION 1..19: note = Description of Artificial Sequence: Synthetic peptide
  REGION 1..19: note = XENP018767 vhCDR2
EIRLKSNNYATHYAEPVKG

SEQ ID NO: 13398 - protein, 11 aa, synthetic construct
  REGION 1..11: note = Description of Artificial Sequence: Synthetic peptide
  REGION 1..11: note = XENP018767 vhCDR3
YYGNYGGYFDV

SEQ ID NO: 13399 - protein, 11 aa, synthetic construct
  REGION 1..11: note = Description of Artificial Sequence: Synthetic peptide
  REGION 1..11: note = XENP018767 vlCDR1
RASQSVHNDVA

SEQ ID NO: 13400 - protein, 7 aa, synthetic construct
  REGION 1..7: note = Description of Artificial Sequence: Synthetic peptide
  REGION 1..7: note = XENP018767 vlCDR2
YASHRYT

SEQ ID NO: 13401 - protein, 9 aa, synthetic construct
  REGION 1..9: note = Description of Artificial Sequence: Synthetic peptide
  REGION 1..9: note = XENP018767 vlCDR3
QQDYSSPRT

SEQ ID NO: 13402 - protein, 249 aa, synthetic construct
  REGION 1..249: note = Description of Artificial Sequence: Synthetic polypeptide
  REGION 1..249: note = XENP018768 1G6_H1_L1.26_scFv(GKPGS)4
EVQLVESGGGLVKPGGSLRLSCAASGFTFSNYWMNWVRQAPGKGLEWVGEIRLKSNNYATHYAEPVKGRFTISRDDSKSTVYLQMNSLKTEDTAVYYCTRYYGNYGGYFDVWGAGTLVTVSSGKPGSGKPGSGKPGSGKPGSSIVMTQSPATLSVSPGERATLSCRASQSVDNDVAWYQQKPGQSPRLLINYASHRYTGVPDRFTGSGYGTEFTLTISSLQSEDFAVYFCQQDYSSPRTFGGGTKVEIK

SEQ ID NO: 13403 - protein, 122 aa, synthetic construct; identical to SEQ ID NO: 10922
  REGION 1..122: note = Description of Artificial Sequence: Synthetic polypeptide
  REGION 1..122: note = VH of XENP018768

SEQ ID NO: 13404 - protein, 107 aa, synthetic construct
  REGION 1..107: note = Description of Artificial Sequence: Synthetic polypeptide
  REGION 1..107: note = VL of XENP018768
SIVMTQSPATLSVSPGERATLSCRASQSVDNDVAWYQQKPGQSPRLLINYASHRYTGVPDRFTGSGYGTEFTLTISSLQSEDFAVYFCQQDYSSPRTFGGGTKVEIK

SEQ ID NO: 13405 - protein, 5 aa, synthetic construct
  REGION 1..5: note = Description of Artificial Sequence: Synthetic peptide
  REGION 1..5: note = XENP018768 vhCDR1
NYWMN

SEQ ID NO: 13406 - protein, 19 aa, synthetic construct
  REGION 1..19: note = Description of Artificial Sequence: Synthetic peptide
  REGION 1..19: note = XENP018768 vhCDR2
EIRLKSNNYATHYAEPVKG

SEQ ID NO: 13407 - protein, 11 aa, synthetic construct
  REGION 1..11: note = Description of Artificial Sequence: Synthetic peptide
  REGION 1..11: note = XENP018768 vhCDR3
YYGNYGGYFDV

SEQ ID NO: 13408 - protein, 11 aa, synthetic construct
  REGION 1..11: note = Description of Artificial Sequence: Synthetic peptide
  REGION 1..11: note = XENP018768 vlCDR1
RASQSVDNDVA

SEQ ID NO: 13409 - protein, 7 aa, synthetic construct
  REGION 1..7: note = Description of Artificial Sequence: Synthetic peptide
  REGION 1..7: note = XENP018768 vlCDR2
YASHRYT

SEQ ID NO: 13410 - protein, 9 aa, synthetic construct
  REGION 1..9: note = Description of Artificial Sequence: Synthetic peptide
  REGION 1..9: note = XENP018768 vlCDR3
QQDYSSPRT

SEQ ID NO: 13411 - protein, 249 aa, synthetic construct
  REGION 1..249: note = Description of Artificial Sequence: Synthetic polypeptide
  REGION 1..249: note = XENP018769 1G6_H1_L1.27_scFv(GKPGS)4
EVQLVESGGGLVKPGGSLRLSCAASGFTFSNYWMNWVRQAPGKGLEWVGEIRLKSNNYATHYAEPVKGRFTISRDDSKSTVYLQMNSLKTEDTAVYYCTRYYGNYGGYFDVWGAGTLVTVSSGKPGSGKPGSGKPGSGKPGSSIVMTQSPATLSVSPGERATLSCRASQSVKNDVAWYQQKPGQSPRLLINYASHRYTGVPDRFTGSGYGTEFTLTISSLQSEDFAVYFCQQDYSSPRTFGGGTKVEIK

SEQ ID NO: 13412 - protein, 122 aa, synthetic construct; identical to SEQ ID NO: 10922
  REGION 1..122: note = Description of Artificial Sequence: Synthetic polypeptide
  REGION 1..122: note = VH of XENP018769

SEQ ID NO: 13413 - protein, 107 aa, synthetic construct
  REGION 1..107: note = Description of Artificial Sequence: Synthetic polypeptide
  REGION 1..107: note = VL of XENP018769
SIVMTQSPATLSVSPGERATLSCRASQSVKNDVAWYQQKPGQSPRLLINYASHRYTGVPDRFTGSGYGTEFTLTISSLQSEDFAVYFCQQDYSSPRTFGGGTKVEIK

SEQ ID NO: 13414 - protein, 5 aa, synthetic construct
  REGION 1..5: note = Description of Artificial Sequence: Synthetic peptide
  REGION 1..5: note = XENP018769 vhCDR1
NYWMN

SEQ ID NO: 13415 - protein, 19 aa, synthetic construct
  REGION 1..19: note = Description of Artificial Sequence: Synthetic peptide
  REGION 1..19: note = XENP018769 vhCDR2
EIRLKSNNYATHYAEPVKG

SEQ ID NO: 13416 - protein, 11 aa, synthetic construct
  REGION 1..11: note = Description of Artificial Sequence: Synthetic peptide
  REGION 1..11: note = XENP018769 vhCDR3
YYGNYGGYFDV

SEQ ID NO: 13417 - protein, 11 aa, synthetic construct
  REGION 1..11: note = Description of Artificial Sequence: Synthetic peptide
  REGION 1..11: note = XENP018769 vlCDR1
RASQSVKNDVA

SEQ ID NO: 13418 - protein, 7 aa, synthetic construct
  REGION 1..7: note = Description of Artificial Sequence: Synthetic peptide
  REGION 1..7: note = XENP018769 vlCDR2
YASHRYT

SEQ ID NO: 13419 - protein, 9 aa, synthetic construct
  REGION 1..9: note = Description of Artificial Sequence: Synthetic peptide
  REGION 1..9: note = XENP018769 vlCDR3
QQDYSSPRT

SEQ ID NO: 13420 - protein, 249 aa, synthetic construct
  REGION 1..249: note = Description of Artificial Sequence: Synthetic polypeptide
  REGION 1..249: note = XENP018770 1G6_H1_L1.28_scFv(GKPGS)4
EVQLVESGGGLVKPGGSLRLSCAASGFTFSNYWMNWVRQAPGKGLEWVGEIRLKSNNYATHYAEPVKGRFTISRDDSKSTVYLQMNSLKTEDTAVYYCTRYYGNYGGYFDVWGAGTLVTVSSGKPGSGKPGSGKPGSGKPGSSIVMTQSPATLSVSPGERATLSCRASQSVYNDVAWYQQKPGQSPRLLINYASHRYTGVPDRFTGSGYGTEFTLTISSLQSEDFAVYFCQQDYSSPRTFGGGTKVEIK

SEQ ID NO: 13421 - protein, 122 aa, synthetic construct; identical to SEQ ID NO: 10922
  REGION 1..122: note = Description of Artificial Sequence: Synthetic polypeptide
  REGION 1..122: note = VH of XENP018770

SEQ ID NO: 13422 - protein, 107 aa, synthetic construct
  REGION 1..107: note = Description of Artificial Sequence: Synthetic polypeptide
  REGION 1..107: note = VL of XENP018770
SIVMTQSPATLSVSPGERATLSCRASQSVYNDVAWYQQKPGQSPRLLINYASHRYTGVPDRFTGSGYGTEFTLTISSLQSEDFAVYFCQQDYSSPRTFGGGTKVEIK

SEQ ID NO: 13423 - protein, 5 aa, synthetic construct
  REGION 1..5: note = Description of Artificial Sequence: Synthetic peptide
  REGION 1..5: note = XENP018770 vhCDR1
NYWMN

SEQ ID NO: 13424 - protein, 19 aa, synthetic construct
  REGION 1..19: note = Description of Artificial Sequence: Synthetic peptide
  REGION 1..19: note = XENP018770 vhCDR2
EIRLKSNNYATHYAEPVKG

SEQ ID NO: 13425 - protein, 11 aa, synthetic construct
  REGION 1..11: note = Description of Artificial Sequence: Synthetic peptide
  REGION 1..11: note = XENP018770 vhCDR3
YYGNYGGYFDV

SEQ ID NO: 13426 - protein, 11 aa, synthetic construct
  REGION 1..11: note = Description of Artificial Sequence: Synthetic peptide
  REGION 1..11: note = XENP018770 vlCDR1
RASQSVYNDVA

SEQ ID NO: 13427 - protein, 7 aa, synthetic construct
  REGION 1..7: note = Description of Artificial Sequence: Synthetic peptide
  REGION 1..7: note = XENP018770 vlCDR2
YASHRYT

SEQ ID NO: 13428 - protein, 9 aa, synthetic construct
  REGION 1..9: note = Description of Artificial Sequence: Synthetic peptide
  REGION 1..9: note = XENP018770 vlCDR3
QQDYSSPRT

SEQ ID NO: 13429 - protein, 249 aa, synthetic construct
  REGION 1..249: note = Description of Artificial Sequence: Synthetic polypeptide
  REGION 1..249: note = XENP018771 1G6_H1_L1.29_scFv(GKPGS)4
EVQLVESGGGLVKPGGSLRLSCAASGFTFSNYWMNWVRQAPGKGLEWVGEIRLKSNNYATHYAEPVKGRFTISRDDSKSTVYLQMNSLKTEDTAVYYCTRYYGNYGGYFDVWGAGTLVTVSSGKPGSGKPGSGKPGSGKPGSSIVMTQSPATLSVSPGERATLSCRASQSVSDDVAWYQQKPGQSPRLLINYASHRYTGVPDRFTGSGYGTEFTLTISSLQSEDFAVYFCQQDYSSPRTFGGGTKVEIK

SEQ ID NO: 13430 - protein, 122 aa, synthetic construct; identical to SEQ ID NO: 10922
  REGION 1..122: note = Description of Artificial Sequence: Synthetic polypeptide
  REGION 1..122: note = VH of XENP018771

SEQ ID NO: 13431 - protein, 107 aa, synthetic construct
  REGION 1..107: note = Description of Artificial Sequence: Synthetic polypeptide
  REGION 1..107: note = VL of XENP018771
SIVMTQSPATLSVSPGERATLSCRASQSVSDDVAWYQQKPGQSPRLLINYASHRYTGVPDRFTGSGYGTEFTLTISSLQSEDFAVYFCQQDYSSPRTFGGGTKVEIK

SEQ ID NO: 13432 - protein, 5 aa, synthetic construct
  REGION 1..5: note = Description of Artificial Sequence: Synthetic peptide
  REGION 1..5: note = XENP018771 vhCDR1
NYWMN

SEQ ID NO: 13433 - protein, 19 aa, synthetic construct
  REGION 1..19: note = Description of Artificial Sequence: Synthetic peptide
  REGION 1..19: note = XENP018771 vhCDR2
EIRLKSNNYATHYAEPVKG

SEQ ID NO: 13434 - protein, 11 aa, synthetic construct
  REGION 1..11: note = Description of Artificial Sequence: Synthetic peptide
  REGION 1..11: note = XENP018771 vhCDR3
YYGNYGGYFDV

SEQ ID NO: 13435 - protein, 11 aa, synthetic construct
  REGION 1..11: note = Description of Artificial Sequence: Synthetic peptide
  REGION 1..11: note = XENP018771 vlCDR1
RASQSVSDDVA

SEQ ID NO: 13436 - protein, 7 aa, synthetic construct
  REGION 1..7: note = Description of Artificial Sequence: Synthetic peptide
  REGION 1..7: note = XENP018771 vlCDR2
YASHRYT

SEQ ID NO: 13437 - protein, 9 aa, synthetic construct
  REGION 1..9: note = Description of Artificial Sequence: Synthetic peptide
  REGION 1..9: note = XENP018771 vlCDR3
QQDYSSPRT

SEQ ID NO: 13438 - protein, 249 aa, synthetic construct
  REGION 1..249: note = Description of Artificial Sequence: Synthetic polypeptide
  REGION 1..249: note = XENP018772 1G6_H1_L1.30_scFv(GKPGS)4
EVQLVESGGGLVKPGGSLRLSCAASGFTFSNYWMNWVRQAPGKGLEWVGEIRLKSNNYATHYAEPVKGRFTISRDDSKSTVYLQMNSLKTEDTAVYYCTRYYGNYGGYFDVWGAGTLVTVSSGKPGSGKPGSGKPGSGKPGSSIVMTQSPATLSVSPGERATLSCRASQSVSHDVAWYQQKPGQSPRLLINYASHRYTGVPDRFTGSGYGTEFTLTISSLQSEDFAVYFCQQDYSSPRTFGGGTKVEIK

SEQ ID NO: 13439 - protein, 122 aa, synthetic construct; identical to SEQ ID NO: 10922
  REGION 1..122: note = Description of Artificial Sequence: Synthetic polypeptide
  REGION 1..122: note = VH of XENP018772

SEQ ID NO: 13440 - protein, 107 aa, synthetic construct
  REGION 1..107: note = Description of Artificial Sequence: Synthetic polypeptide
  REGION 1..107: note = VL of XENP018772
SIVMTQSPATLSVSPGERATLSCRASQSVSHDVAWYQQKPGQSPRLLINYASHRYTGVPDRFTGSGYGTEFTLTISSLQSEDFAVYFCQQDYSSPRTFGGGTKVEIK

SEQ ID NO: 13441 - protein, 5 aa, synthetic construct
  REGION 1..5: note = Description of Artificial Sequence: Synthetic peptide
  REGION 1..5: note = XENP018772 vhCDR1
NYWMN

SEQ ID NO: 13442 - protein, 19 aa, synthetic construct
  REGION 1..19: note = Description of Artificial Sequence: Synthetic peptide
  REGION 1..19: note = XENP018772 vhCDR2
EIRLKSNNYATHYAEPVKG

SEQ ID NO: 13443 - protein, 11 aa, synthetic construct
  REGION 1..11: note = Description of Artificial Sequence: Synthetic peptide
  REGION 1..11: note = XENP018772 vhCDR3
YYGNYGGYFDV

SEQ ID NO: 13444 - protein, 11 aa, synthetic construct
  REGION 1..11: note = Description of Artificial Sequence: Synthetic peptide
  REGION 1..11: note = XENP018772 vlCDR1
RASQSVSHDVA

SEQ ID NO: 13445 - protein, 7 aa, synthetic construct
  REGION 1..7: note = Description of Artificial Sequence: Synthetic peptide
  REGION 1..7: note = XENP018772 vlCDR2
YASHRYT

SEQ ID NO: 13446 - protein, 9 aa, synthetic construct
  REGION 1..9: note = Description of Artificial Sequence: Synthetic peptide
  REGION 1..9: note = XENP018772 vlCDR3
QQDYSSPRT

SEQ ID NO: 13447 - protein, 249 aa, synthetic construct
  REGION 1..249: note = Description of Artificial Sequence: Synthetic polypeptide
  REGION 1..249: note = XENP018773 1G6_H1_L1.31_scFv(GKPGS)4
EVQLVESGGGLVKPGGSLRLSCAASGFTFSNYWMNWVRQAPGKGLEWVGEIRLKSNNYATHYAEPVKGRFTISRDDSKSTVYLQMNSLKTEDTAVYYCTRYYGNYGGYFDVWGAGTLVTVSSGKPGSGKPGSGKPGSGKPGSSIVMTQSPATLSVSPGERATLSCRASQSVSEDVAWYQQKPGQSPRLLINYASHRYTGVPDRFTGSGYGTEFTLTISSLQSEDFAVYFCQQDYSSPRTFGGGTKVEIK

SEQ ID NO: 13448 - protein, 122 aa, synthetic construct; identical to SEQ ID NO: 10922
  REGION 1..122: note = Description of Artificial Sequence: Synthetic polypeptide
  REGION 1..122: note = VH of XENP018773

SEQ ID NO: 13449 - protein, 107 aa, synthetic construct
  REGION 1..107: note = Description of Artificial Sequence: Synthetic polypeptide
  REGION 1..107: note = VL of XENP018773
SIVMTQSPATLSVSPGERATLSCRASQSVSEDVAWYQQKPGQSPRLLINYASHRYTGVPDRFTGSGYGTEFTLTISSLQSEDFAVYFCQQDYSSPRTFGGGTKVEIK

SEQ ID NO: 13450 - protein, 5 aa, synthetic construct
  REGION 1..5: note = Description of Artificial Sequence: Synthetic peptide
  REGION 1..5: note = XENP018773 vhCDR1
NYWMN

SEQ ID NO: 13451 - protein, 19 aa, synthetic construct
  REGION 1..19: note = Description of Artificial Sequence: Synthetic peptide
  REGION 1..19: note = XENP018773 vhCDR2
EIRLKSNNYATHYAEPVKG

SEQ ID NO: 13452 - protein, 11 aa, synthetic construct
  REGION 1..11: note = Description of Artificial Sequence: Synthetic peptide
  REGION 1..11: note = XENP018773 vhCDR3
YYGNYGGYFDV

SEQ ID NO: 13453 - protein, 11 aa, synthetic construct
  REGION 1..11: note = Description of Artificial Sequence: Synthetic peptide
  REGION 1..11: note = XENP018773 vlCDR1
RASQSVSEDVA

SEQ ID NO: 13454 - protein, 7 aa, synthetic construct
  REGION 1..7: note = Description of Artificial Sequence: Synthetic peptide
  REGION 1..7: note = XENP018773 vlCDR2
YASHRYT

SEQ ID NO: 13455 - protein, 9 aa, synthetic construct
  REGION 1..9: note = Description of Artificial Sequence: Synthetic peptide
  REGION 1..9: note = XENP018773 vlCDR3
QQDYSSPRT

SEQ ID NO: 13456 - protein, 249 aa, synthetic construct
  REGION 1..249: note = Description of Artificial Sequence: Synthetic polypeptide
  REGION 1..249: note = XENP018774 1G6_H1_L1.32_scFv(GKPGS)4
EVQLVESGGGLVKPGGSLRLSCAASGFTFSNYWMNWVRQAPGKGLEWVGEIRLKSNNYATHYAEPVKGRFTISRDDSKSTVYLQMNSLKTEDTAVYYCTRYYGNYGGYFDVWGAGTLVTVSSGKPGSGKPGSGKPGSGKPGSSIVMTQSPATLSVSPGERATLSCRASQSVSSDVAWYQQKPGQSPRLLINYASHRYTGVPDRFTGSGYGTEFTLTISSLQSEDFAVYFCQQDYSSPRTFGGGTKVEIK

SEQ ID NO: 13457 - protein, 122 aa, synthetic construct; identical to SEQ ID NO: 10922
  REGION 1..122: note = Description of Artificial Sequence: Synthetic polypeptide
  REGION 1..122: note = VH of XENP018774

SEQ ID NO: 13458 - protein, 107 aa, synthetic construct
  REGION 1..107: note = Description of Artificial Sequence: Synthetic polypeptide
  REGION 1..107: note = VL of XENP018774
SIVMTQSPATLSVSPGERATLSCRASQSVSSDVAWYQQKPGQSPRLLINYASHRYTGVPDRFTGSGYGTEFTLTISSLQSEDFAVYFCQQDYSSPRTFGGGTKVEIK

SEQ ID NO: 13459 - protein, 5 aa, synthetic construct
  REGION 1..5: note = Description of Artificial Sequence: Synthetic peptide
  REGION 1..5: note = XENP018774 vhCDR1
NYWMN

SEQ ID NO: 13460 - protein, 19 aa, synthetic construct
  REGION 1..19: note = Description of Artificial Sequence: Synthetic peptide
  REGION 1..19: note = XENP018774 vhCDR2
EIRLKSNNYATHYAEPVKG

SEQ ID NO: 13461 - protein, 11 aa, synthetic construct
  REGION 1..11: note = Description of Artificial Sequence: Synthetic peptide
  REGION 1..11: note = XENP018774 vhCDR3
YYGNYGGYFDV

SEQ ID NO: 13462 - protein, 11 aa, synthetic construct
  REGION 1..11: note = Description of Artificial Sequence: Synthetic peptide
  REGION 1..11: note = XENP018774 vlCDR1
RASQSVSSDVA

SEQ ID NO: 13463 - protein, 7 aa, synthetic construct
  REGION 1..7: note = Description of Artificial Sequence: Synthetic peptide
  REGION 1..7: note = XENP018774 vlCDR2
YASHRYT

SEQ ID NO: 13464 - protein, 9 aa, synthetic construct
  REGION 1..9: note = Description of Artificial Sequence: Synthetic peptide
  REGION 1..9: note = XENP018774 vlCDR3
QQDYSSPRT

SEQ ID NO: 13465 - protein, 249 aa, synthetic construct
  REGION 1..249: note = Description of Artificial Sequence: Synthetic polypeptide
  REGION 1..249: note = XENP018775 1G6_H1_L1.33_scFv(GKPGS)4
EVQLVESGGGLVKPGGSLRLSCAASGFTFSNYWMNWVRQAPGKGLEWVGEIRLKSNNYATHYAEPVKGRFTISRDDSKSTVYLQMNSLKTEDTAVYYCTRYYGNYGGYFDVWGAGTLVTVSSGKPGSGKPGSGKPGSGKPGSSIVMTQSPATLSVSPGERATLSCRASQSVSRDVAWYQQKPGQSPRLLINYASHRYTGVPDRFTGSGYGTEFTLTISSLQSEDFAVYFCQQDYSSPRTFGGGTKVEIK

SEQ ID NO: 13466 - protein, 122 aa, synthetic construct; identical to SEQ ID NO: 10922
  REGION 1..122: note = Description of Artificial Sequence: Synthetic polypeptide
  REGION 1..122: note = VH of XENP018775

SEQ ID NO: 13467 - protein, 107 aa, synthetic construct
  REGION 1..107: note = Description of Artificial Sequence: Synthetic polypeptide
  REGION 1..107: note = VL of XENP018775
SIVMTQSPATLSVSPGERATLSCRASQSVSRDVAWYQQKPGQSPRLLINYASHRYTGVPDRFTGSGYGTEFTLTISSLQSEDFAVYFCQQDYSSPRTFGGGTKVEIK

SEQ ID NO: 13468 - protein, 5 aa, synthetic construct
  REGION 1..5: note = Description of Artificial Sequence: Synthetic peptide
  REGION 1..5: note = XENP018775 vhCDR1
NYWMN

SEQ ID NO: 13469 - protein, 19 aa, synthetic construct
  REGION 1..19: note = Description of Artificial Sequence: Synthetic peptide
  REGION 1..19: note = XENP018775 vhCDR2
EIRLKSNNYATHYAEPVKG

SEQ ID NO: 13470 - protein, 11 aa, synthetic construct
  REGION 1..11: note = Description of Artificial Sequence: Synthetic peptide
  REGION 1..11: note = XENP018775 vhCDR3
YYGNYGGYFDV

SEQ ID NO: 13471 - protein, 11 aa, synthetic construct
  REGION 1..11: note = Description of Artificial Sequence: Synthetic peptide
  REGION 1..11: note = XENP018775 vlCDR1
RASQSVSRDVA

SEQ ID NO: 13472 - protein, 7 aa, synthetic construct
  REGION 1..7: note = Description of Artificial Sequence: Synthetic peptide
  REGION 1..7: note = XENP018775 vlCDR2
YASHRYT

SEQ ID NO: 13473 - protein, 9 aa, synthetic construct
  REGION 1..9: note = Description of Artificial Sequence: Synthetic peptide
  REGION 1..9: note = XENP018775 vlCDR3
QQDYSSPRT

SEQ ID NO: 13474 - protein, 249 aa, synthetic construct
  REGION 1..249: note = Description of Artificial Sequence: Synthetic polypeptide
  REGION 1..249: note = XENP018776 1G6_H1_L1.34_scFv(GKPGS)4
EVQLVESGGGLVKPGGSLRLSCAASGFTFSNYWMNWVRQAPGKGLEWVGEIRLKSNNYATHYAEPVKGRFTISRDDSKSTVYLQMNSLKTEDTAVYYCTRYYGNYGGYFDVWGAGTLVTVSSGKPGSGKPGSGKPGSGKPGSSIVMTQSPATLSVSPGERATLSCRASQSVSLDVAWYQQKPGQSPRLLINYASHRYTGVPDRFTGSGYGTEFTLTISSLQSEDFAVYFCQQDYSSPRTFGGGTKVEIK

SEQ ID NO: 13475 - protein, 122 aa, synthetic construct; identical to SEQ ID NO: 10922
  REGION 1..122: note = Description of Artificial Sequence: Synthetic polypeptide
  REGION 1..122: note = VH of XENP018776

SEQ ID NO: 13476 - protein, 107 aa, synthetic construct
  REGION 1..107: note = Description of Artificial Sequence: Synthetic polypeptide
  REGION 1..107: note = VL of XENP018776
SIVMTQSPATLSVSPGERATLSCRASQSVSLDVAWYQQKPGQSPRLLINYASHRYTGVPDRFTGSGYGTEFTLTISSLQSEDFAVYFCQQDYSSPRTFGGGTKVEIK

SEQ ID NO: 13477 - protein, 5 aa, synthetic construct
  REGION 1..5: note = Description of Artificial Sequence: Synthetic peptide
  REGION 1..5: note = XENP018776 vhCDR1
NYWMN

SEQ ID NO: 13478 - protein, 19 aa, synthetic construct
  REGION 1..19: note = Description of Artificial Sequence: Synthetic peptide
  REGION 1..19: note = XENP018776 vhCDR2
EIRLKSNNYATHYAEPVKG

SEQ ID NO: 13479 - protein, 11 aa, synthetic construct
  REGION 1..11: note = Description of Artificial Sequence: Synthetic peptide
  REGION 1..11: note = XENP018776 vhCDR3
YYGNYGGYFDV

SEQ ID NO: 13480 - protein, 11 aa, synthetic construct
  REGION 1..11: note = Description of Artificial Sequence: Synthetic peptide
  REGION 1..11: note = XENP018776 vlCDR1
RASQSVSLDVA

SEQ ID NO: 13481 - protein, 7 aa, synthetic construct
  REGION 1..7: note = Description of Artificial Sequence: Synthetic peptide
  REGION 1..7: note = XENP018776 vlCDR2
YASHRYT

SEQ ID NO: 13482 - protein, 9 aa, synthetic construct
  REGION 1..9: note = Description of Artificial Sequence: Synthetic peptide
  REGION 1..9: note = XENP018776 vlCDR3
QQDYSSPRT

SEQ ID NO: 13483 - protein, 249 aa, synthetic construct
  REGION 1..249: note = Description of Artificial Sequence: Synthetic polypeptide
  REGION 1..249: note = XENP018777 1G6_H1_L1.35_scFv(GKPGS)4
EVQLVESGGGLVKPGGSLRLSCAASGFTFSNYWMNWVRQAPGKGLEWVGEIRLKSNNYATHYAEPVKGRFTISRDDSKSTVYLQMNSLKTEDTAVYYCTRYYGNYGGYFDVWGAGTLVTVSSGKPGSGKPGSGKPGSGKPGSSIVMTQSPATLSVSPGERATLSCRASQSVSTDVAWYQQKPGQSPRLLINYASHRYTGVPDRFTGSGYGTEFTLTISSLQSEDFAVYFCQQDYSSPRTFGGGTKVEIK

SEQ ID NO: 13484 - protein, 122 aa, synthetic construct; identical to SEQ ID NO: 10922
  REGION 1..122: note = Description of Artificial Sequence: Synthetic polypeptide
  REGION 1..122: note = VH of XENP018777

SEQ ID NO: 13485 - protein, 107 aa, synthetic construct
  REGION 1..107: note = Description of Artificial Sequence: Synthetic polypeptide
  REGION 1..107: note = VL of XENP018777
SIVMTQSPATLSVSPGERATLSCRASQSVSTDVAWYQQKPGQSPRLLINYASHRYTGVPDRFTGSGYGTEFTLTISSLQSEDFAVYFCQQDYSSPRTFGGGTKVEIK

SEQ ID NO: 13486 - protein, 5 aa, synthetic construct
  REGION 1..5: note = Description of Artificial Sequence: Synthetic peptide
  REGION 1..5: note = XENP018777 vhCDR1
NYWMN

SEQ ID NO: 13487 - protein, 19 aa, synthetic construct
  REGION 1..19: note = Description of Artificial Sequence: Synthetic peptide
  REGION 1..19: note = XENP018777 vhCDR2
EIRLKSNNYATHYAEPVKG

SEQ ID NO: 13488 - protein, 11 aa, synthetic construct
  REGION 1..11: note = Description of Artificial Sequence: Synthetic peptide
  REGION 1..11: note = XENP018777 vhCDR3
YYGNYGGYFDV

SEQ ID NO: 13489 - protein, 11 aa, synthetic construct
  REGION 1..11: note = Description of Artificial Sequence: Synthetic peptide
  REGION 1..11: note = XENP018777 vlCDR1
RASQSVSTDVA

SEQ ID NO: 13490 - protein, 7 aa, synthetic construct
  REGION 1..7: note = Description of Artificial Sequence: Synthetic peptide
  REGION 1..7: note = XENP018777 vlCDR2
YASHRYT

SEQ ID NO: 13491 - protein, 9 aa, synthetic construct
  REGION 1..9: note = Description of Artificial Sequence: Synthetic peptide
  REGION 1..9: note = XENP018777 vlCDR3
QQDYSSPRT

SEQ ID NO: 13492 - protein, 249 aa, synthetic construct
  REGION 1..249: note = Description of Artificial Sequence: Synthetic polypeptide
  REGION 1..249: note = XENP018778 1G6_H1_L1.36_scFv(GKPGS)4
EVQLVESGGGLVKPGGSLRLSCAASGFTFSNYWMNWVRQAPGKGLEWVGEIRLKSNNYATHYAEPVKGRFTISRDDSKSTVYLQMNSLKTEDTAVYYCTRYYGNYGGYFDVWGAGTLVTVSSGKPGSGKPGSGKPGSGKPGSSIVMTQSPATLSVSPGERATLSCRASQSVSGDVAWYQQKPGQSPRLLINYASHRYTGVPDRFTGSGYGTEFTLTISSLQSEDFAVYFCQQDYSSPRTFGGGTKVEIK

SEQ ID NO: 13493 - protein, 122 aa, synthetic construct; identical to SEQ ID NO: 10922
  REGION 1..122: note = Description of Artificial Sequence: Synthetic polypeptide
  REGION 1..122: note = VH of XENP018778

SEQ ID NO: 13494 - protein, 107 aa, synthetic construct
  REGION 1..107: note = Description of Artificial Sequence: Synthetic polypeptide
  REGION 1..107: note = VL of XENP018778
SIVMTQSPATLSVSPGERATLSCRASQSVSGDVAWYQQKPGQSPRLLINYASHRYTGVPDRFTGSGYGTEFTLTISSLQSEDFAVYFCQQDYSSPRTFGGGTKVEIK

SEQ ID NO: 13495 - protein, 5 aa, synthetic construct
  REGION 1..5: note = Description of Artificial Sequence: Synthetic peptide
  REGION 1..5: note = XENP018778 vhCDR1
NYWMN

SEQ ID NO: 13496 - protein, 19 aa, synthetic construct
  REGION 1..19: note = Description of Artificial Sequence: Synthetic peptide
  REGION 1..19: note = XENP018778 vhCDR2
EIRLKSNNYATHYAEPVKG

SEQ ID NO: 13497 - protein, 11 aa, synthetic construct
  REGION 1..11: note = Description of Artificial Sequence: Synthetic peptide
  REGION 1..11: note = XENP018778 vhCDR3
YYGNYGGYFDV

SEQ ID NO: 13498 - protein, 11 aa, synthetic construct
  REGION 1..11: note = Description of Artificial Sequence: Synthetic peptide
  REGION 1..11: note = XENP018778 vlCDR1
RASQSVSGDVA

SEQ ID NO: 13499 - protein, 7 aa, synthetic construct
  REGION 1..7: note = Description of Artificial Sequence: Synthetic peptide
  REGION 1..7: note = XENP018778 vlCDR2
YASHRYT

SEQ ID NO: 13500 - protein, 9 aa, synthetic construct
  REGION 1..9: note = Description of Artificial Sequence: Synthetic peptide
  REGION 1..9: note = XENP018778 vlCDR3
QQDYSSPRT

SEQ ID NO: 13501 - protein, 249 aa, synthetic construct
  REGION 1..249: note = Description of Artificial Sequence: Synthetic polypeptide
  REGION 1..249: note = XENP018779 1G6_H1_L1.37_scFv(GKPGS)4
EVQLVESGGGLVKPGGSLRLSCAASGFTFSNYWMNWVRQAPGKGLEWVGEIRLKSNNYATHYAEPVKGRFTISRDDSKSTVYLQMNSLKTEDTAVYYCTRYYGNYGGYFDVWGAGTLVTVSSGKPGSGKPGSGKPGSGKPGSSIVMTQSPATLSVSPGERATLSCRASQSVSYDVAWYQQKPGQSPRLLINYASHRYTGVPDRFTGSGYGTEFTLTISSLQSEDFAVYFCQQDYSSPRTFGGGTKVEIK

SEQ ID NO: 13502 - protein, 122 aa, synthetic construct; identical to SEQ ID NO: 10922
  REGION 1..122: note = Description of Artificial Sequence: Synthetic polypeptide
  REGION 1..122: note = VH of XENP018779

SEQ ID NO: 13503 - protein, 107 aa, synthetic construct
  REGION 1..107: note = Description of Artificial Sequence: Synthetic polypeptide
  REGION 1..107: note = VL of XENP018779
SIVMTQSPATLSVSPGERATLSCRASQSVSYDVAWYQQKPGQSPRLLINYASHRYTGVPDRFTGSGYGTEFTLTISSLQSEDFAVYFCQQDYSSPRTFGGGTKVEIK

SEQ ID NO: 13504 - protein, 5 aa, synthetic construct
  REGION 1..5: note = Description of Artificial Sequence: Synthetic peptide
  REGION 1..5: note = XENP018779 vhCDR1
NYWMN

SEQ ID NO: 13505 - protein, 19 aa, synthetic construct
  REGION 1..19: note = Description of Artificial Sequence: Synthetic peptide
  REGION 1..19: note = XENP018779 vhCDR2
EIRLKSNNYATHYAEPVKG

SEQ ID NO: 13506 - protein, 11 aa, synthetic construct
  REGION 1..11: note = Description of Artificial Sequence: Synthetic peptide
  REGION 1..11: note = XENP018779 vhCDR3
YYGNYGGYFDV

SEQ ID NO: 13507 - protein, 11 aa, synthetic construct
  REGION 1..11: note = Description of Artificial Sequence: Synthetic peptide
  REGION 1..11: note = XENP018779 vlCDR1
RASQSVSYDVA

SEQ ID NO: 13508 - protein, 7 aa, synthetic construct
  REGION 1..7: note = Description of Artificial Sequence: Synthetic peptide
  REGION 1..7: note = XENP018779 vlCDR2
YASHRYT

SEQ ID NO: 13509 - protein, 9 aa, synthetic construct
  REGION 1..9: note = Description of Artificial Sequence: Synthetic peptide
  REGION 1..9: note = XENP018779 vlCDR3
QQDYSSPRT

SEQ ID NO: 13510 - protein, 249 aa, synthetic construct
  REGION 1..249: note = Description of Artificial Sequence: Synthetic polypeptide
  REGION 1..249: note = XENP018780 1G6_H1_L1.38_scFv(GKPGS)4
EVQLVESGGGLVKPGGSLRLSCAASGFTFSNYWMNWVRQAPGKGLEWVGEIRLKSNNYATHYAEPVKGRFTISRDDSKSTVYLQMNSLKTEDTAVYYCTRYYGNYGGYFDVWGAGTLVTVSSGKPGSGKPGSGKPGSGKPGSSIVMTQSPATLSVSPGERATLSCRASQSVSNNVAWYQQKPGQSPRLLINYASHRYTGVPDRFTGSGYGTEFTLTISSLQSEDFAVYFCQQDYSSPRTFGGGTKVEIK

SEQ ID NO: 13511 - protein, 122 aa, synthetic construct; identical to SEQ ID NO: 10922
  REGION 1..122: note = Description of Artificial Sequence: Synthetic polypeptide
  REGION 1..122: note = VH of XENP018780

SEQ ID NO: 13512 - protein, 107 aa, synthetic construct
  REGION 1..107: note = Description of Artificial Sequence: Synthetic polypeptide
  REGION 1..107: note = VL of XENP018780
SIVMTQSPATLSVSPGERATLSCRASQSVSNNVAWYQQKPGQSPRLLINYASHRYTGVPDRFTGSGYGTEFTLTISSLQSEDFAVYFCQQDYSSPRTFGGGTKVEIK

SEQ ID NO: 13513 - protein, 5 aa, synthetic construct
  REGION 1..5: note = Description of Artificial Sequence: Synthetic peptide
  REGION 1..5: note = XENP018780 vhCDR1
NYWMN

SEQ ID NO: 13514 - protein, 19 aa, synthetic construct
  REGION 1..19: note = Description of Artificial Sequence: Synthetic peptide
  REGION 1..19: note = XENP018780 vhCDR2
EIRLKSNNYATHYAEPVKG

SEQ ID NO: 13515 - protein, 11 aa, synthetic construct
  REGION 1..11: note = Description of Artificial Sequence: Synthetic peptide
  REGION 1..11: note = XENP018780 vhCDR3
YYGNYGGYFDV

SEQ ID NO: 13516 - protein, 11 aa, synthetic construct
  REGION 1..11: note = Description of Artificial Sequence: Synthetic peptide
  REGION 1..11: note = XENP018780 vlCDR1
RASQSVSNNVA

SEQ ID NO: 13517 - protein, 7 aa, synthetic construct
  REGION 1..7: note = Description of Artificial Sequence: Synthetic peptide
  REGION 1..7: note = XENP018780 vlCDR2
YASHRYT

SEQ ID NO: 13518 - protein, 9 aa, synthetic construct
  REGION 1..9: note = Description of Artificial Sequence: Synthetic peptide
  REGION 1..9: note = XENP018780 vlCDR3
QQDYSSPRT

SEQ ID NO: 13519 - protein, 249 aa, synthetic construct
  REGION 1..249: note = Description of Artificial Sequence: Synthetic polypeptide
  REGION 1..249: note = XENP018781 1G6_H1_L1.39_scFv(GKPGS)4
EVQLVESGGGLVKPGGSLRLSCAASGFTFSNYWMNWVRQAPGKGLEWVGEIRLKSNNYATHYAEPVKGRFTISRDDSKSTVYLQMNSLKTEDTAVYYCTRYYGNYGGYFDVWGAGTLVTVSSGKPGSGKPGSGKPGSGKPGSSIVMTQSPATLSVSPGERATLSCRASQSVSNEVAWYQQKPGQSPRLLINYASHRYTGVPDRFTGSGYGTEFTLTISSLQSEDFAVYFCQQDYSSPRTFGGGTKVEIK

SEQ ID NO: 13520 - protein, 122 aa, synthetic construct; identical to SEQ ID NO: 10922
  REGION 1..122: note = Description of Artificial Sequence: Synthetic polypeptide
  REGION 1..122: note = VH of XENP018781

SEQ ID NO: 13521 - protein, 107 aa, synthetic construct
  REGION 1..107: note = Description of Artificial Sequence: Synthetic polypeptide
  REGION 1..107: note = VL of XENP018781
SIVMTQSPATLSVSPGERATLSCRASQSVSNEVAWYQQKPGQSPRLLINYASHRYTGVPDRFTGSGYGTEFTLTISSLQSEDFAVYFCQQDYSSPRTFGGGTKVEIK

SEQ ID NO: 13522 - protein, 5 aa, synthetic construct
  REGION 1..5: note = Description of Artificial Sequence: Synthetic peptide
  REGION 1..5: note = XENP018781 vhCDR1
NYWMN

SEQ ID NO: 13523 - protein, 19 aa, synthetic construct
  REGION 1..19: note = Description of Artificial Sequence: Synthetic peptide
  REGION 1..19: note = XENP018781 vhCDR2
EIRLKSNNYATHYAEPVKG

SEQ ID NO: 13524 - protein, 11 aa, synthetic construct
  REGION 1..11: note = Description of Artificial Sequence: Synthetic peptide
  REGION 1..11: note = XENP018781 vhCDR3
YYGNYGGYFDV

SEQ ID NO: 13525 - protein, 11 aa, synthetic construct
  REGION 1..11: note = Description of Artificial Sequence: Synthetic peptide
  REGION 1..11: note = XENP018781 vlCDR1
RASQSVSNEVA

SEQ ID NO: 13526 - protein, 7 aa, synthetic construct
  REGION 1..7: note = Description of Artificial Sequence: Synthetic peptide
  REGION 1..7: note = XENP018781 vlCDR2
YASHRYT

SEQ ID NO: 13527 - protein, 9 aa, synthetic construct
  REGION 1..9: note = Description of Artificial Sequence: Synthetic peptide
  REGION 1..9: note = XENP018781 vlCDR3
QQDYSSPRT

SEQ ID NO: 13528 - protein, 249 aa, synthetic construct
  REGION 1..249: note = Description of Artificial Sequence: Synthetic polypeptide
  REGION 1..249: note = XENP018782 1G6_H1_L1.40_scFv(GKPGS)4
EVQLVESGGGLVKPGGSLRLSCAASGFTFSNYWMNWVRQAPGKGLEWVGEIRLKSNNYATHYAEPVKGRFTISRDDSKSTVYLQMNSLKTEDTAVYYCTRYYGNYGGYFDVWGAGTLVTVSSGKPGSGKPGSGKPGSGKPGSSIVMTQSPATLSVSPGERATLSCRASQSVSNHVAWYQQKPGQSPRLLINYASHRYTGVPDRFTGSGYGTEFTLTISSLQSEDFAVYFCQQDYSSPRTFGGGTKVEIK

SEQ ID NO: 13529 - protein, 122 aa, synthetic construct; identical to SEQ ID NO: 10922
  REGION 1..122: note = Description of Artificial Sequence: Synthetic polypeptide
  REGION 1..122: note = VH of XENP018782

SEQ ID NO: 13530 - protein, 107 aa, synthetic construct
  REGION 1..107: note = Description of Artificial Sequence: Synthetic polypeptide
  REGION 1..107: note = VL of XENP018782
SIVMTQSPATLSVSPGERATLSCRASQSVSNHVAWYQQKPGQSPRLLINYASHRYTGVPDRFTGSGYGTEFTLTISSLQSEDFAVYFCQQDYSSPRTFGGGTKVEIK

SEQ ID NO: 13531 - protein, 5 aa, synthetic construct
  REGION 1..5: note = Description of Artificial Sequence: Synthetic peptide
  REGION 1..5: note = XENP018782 vhCDR1
NYWMN

SEQ ID NO: 13532 - protein, 19 aa, synthetic construct
  REGION 1..19: note = Description of Artificial Sequence: Synthetic peptide
  REGION 1..19: note = XENP018782 vhCDR2
EIRLKSNNYATHYAEPVKG

SEQ ID NO: 13533 - protein, 11 aa, synthetic construct
  REGION 1..11: note = Description of Artificial Sequence: Synthetic peptide
  REGION 1..11: note = XENP018782 vhCDR3
YYGNYGGYFDV

SEQ ID NO: 13534 - protein, 11 aa, synthetic construct
  REGION 1..11: note = Description of Artificial Sequence: Synthetic peptide
  REGION 1..11: note = XENP018782 vlCDR1
RASQSVSNHVA

SEQ ID NO: 13535 - protein, 7 aa, synthetic construct
  REGION 1..7: note = Description of Artificial Sequence: Synthetic peptide
  REGION 1..7: note = XENP018782 vlCDR2
YASHRYT

SEQ ID NO: 13536 - protein, 9 aa, synthetic construct
  REGION 1..9: note = Description of Artificial Sequence: Synthetic peptide
  REGION 1..9: note = XENP018782 vlCDR3
QQDYSSPRT

SEQ ID NO: 13537 - protein, 249 aa, synthetic construct
  REGION 1..249: note = Description of Artificial Sequence: Synthetic polypeptide
  REGION 1..249: note = XENP018783 1G6_H1_L1.41_scFv(GKPGS)4
EVQLVESGGGLVKPGGSLRLSCAASGFTFSNYWMNWVRQAPGKGLEWVGEIRLKSNNYATHYAEPVKGRFTISRDDSKSTVYLQMNSLKTEDTAVYYCTRYYGNYGGYFDVWGAGTLVTVSSGKPGSGKPGSGKPGSGKPGSSIVMTQSPATLSVSPGERATLSCRASQSVSNSVAWYQQKPGQSPRLLINYASHRYTGVPDRFTGSGYGTEFTLTISSLQSEDFAVYFCQQDYSSPRTFGGGTKVEIK

SEQ ID NO: 13538 - protein, 122 aa, synthetic construct; identical to SEQ ID NO: 10922
  REGION 1..122: note = Description of Artificial Sequence: Synthetic polypeptide
  REGION 1..122: note = VH of XENP018783

SEQ ID NO: 13539 - protein, 107 aa, synthetic construct
  REGION 1..107: note = Description of Artificial Sequence: Synthetic polypeptide
  REGION 1..107: note = VL of XENP018783
SIVMTQSPATLSVSPGERATLSCRASQSVSNSVAWYQQKPGQSPRLLINYASHRYTGVPDRFTGSGYGTEFTLTISSLQSEDFAVYFCQQDYSSPRTFGGGTKVEIK

SEQ ID NO: 13540 - protein, 5 aa, synthetic construct
  REGION 1..5: note = Description of Artificial Sequence: Synthetic peptide
  REGION 1..5: note = XENP018783 vhCDR1
NYWMN

SEQ ID NO: 13541 - protein, 19 aa, synthetic construct
  REGION 1..19: note = Description of Artificial Sequence: Synthetic peptide
  REGION 1..19: note = XENP018783 vhCDR2
EIRLKSNNYATHYAEPVKG

SEQ ID NO: 13542 - protein, 11 aa, synthetic construct
  REGION 1..11: note = Description of Artificial Sequence: Synthetic peptide
  REGION 1..11: note = XENP018783 vhCDR3
YYGNYGGYFDV

SEQ ID NO: 13543 - protein, 11 aa, synthetic construct
  REGION 1..11: note = Description of Artificial Sequence: Synthetic peptide
  REGION 1..11: note = XENP018783 vlCDR1
RASQSVSNSVA

SEQ ID NO: 13544 - protein, 7 aa, synthetic construct
  REGION 1..7: note = Description of Artificial Sequence: Synthetic peptide
  REGION 1..7: note = XENP018783 vlCDR2
YASHRYT

SEQ ID NO: 13545 - protein, 9 aa, synthetic construct
  REGION 1..9: note = Description of Artificial Sequence: Synthetic peptide
  REGION 1..9: note = XENP018783 vlCDR3
QQDYSSPRT

SEQ ID NO: 13546 - protein, 249 aa, synthetic construct
  REGION 1..249: note = Description of Artificial Sequence: Synthetic polypeptide
  REGION 1..249: note = XENP018784 1G6_H1_L1.42_scFv(GKPGS)4
EVQLVESGGGLVKPGGSLRLSCAASGFTFSNYWMNWVRQAPGKGLEWVGEIRLKSNNYATHYAEPVKGRFTISRDDSKSTVYLQMNSLKTEDTAVYYCTRYYGNYGGYFDVWGAGTLVTVSSGKPGSGKPGSGKPGSGKPGSSIVMTQSPATLSVSPGERATLSCRASQSVSNRVAWYQQKPGQSPRLLINYASHRYTGVPDRFTGSGYGTEFTLTISSLQSEDFAVYFCQQDYSSPRTFGGGTKVEIK

SEQ ID NO: 13547 - protein, 122 aa, synthetic construct; identical to SEQ ID NO: 10922
  REGION 1..122: note = Description of Artificial Sequence: Synthetic polypeptide
  REGION 1..122: note = VH of XENP018784

SEQ ID NO: 13548 - protein, 107 aa, synthetic construct
  REGION 1..107: note = Description of Artificial Sequence: Synthetic polypeptide
  REGION 1..107: note = VL of XENP018784
SIVMTQSPATLSVSPGERATLSCRASQSVSNRVAWYQQKPGQSPRLLINYASHRYTGVPDRFTGSGYGTEFTLTISSLQSEDFAVYFCQQDYSSPRTFGGGTKVEIK

SEQ ID NO: 13549 - protein, 5 aa, synthetic construct
  REGION 1..5: note = Description of Artificial Sequence: Synthetic peptide
  REGION 1..5: note = XENP018784 vhCDR1
NYWMN

SEQ ID NO: 13550 - protein, 19 aa, synthetic construct
  REGION 1..19: note = Description of Artificial Sequence: Synthetic peptide
  REGION 1..19: note = XENP018784 vhCDR2
EIRLKSNNYATHYAEPVKG

SEQ ID NO: 13551 - protein, 11 aa, synthetic construct
  REGION 1..11: note = Description of Artificial Sequence: Synthetic peptide
  REGION 1..11: note = XENP018784 vhCDR3
YYGNYGGYFDV

SEQ ID NO: 13552 - protein, 11 aa, synthetic construct
  REGION 1..11: note = Description of Artificial Sequence: Synthetic peptide
  REGION 1..11: note = XENP018784 vlCDR1
RASQSVSNRVA

SEQ ID NO: 13553 - protein, 7 aa, synthetic construct
  REGION 1..7: note = Description of Artificial Sequence: Synthetic peptide
  REGION 1..7: note = XENP018784 vlCDR2
YASHRYT

(The sequence listing continues in the following parts.)

1-25. (canceled)

26. A method of treating cancer in a patient comprising administering:
a) a therapeutically effective amount of a bispecific antibody comprising:
i) a first monomer comprising the amino acid sequence of SEQ ID NO:29748;
ii) a second monomer comprising the amino acid sequence of SEQ ID NO:29749; and
iii) a third monomer comprising the amino acid sequence of SEQ ID NO:29750; and
b) a therapeutic effective amount of an anti-CTLA4 antibody.
